United States Patent Application Publication US 2015/0240253 A1 - sequence listing, part 39

SEQ ID NO: 182579 - DNA, 1725 bp, Zea Mays
ttgtagatcaattccagacctcaacaatggcaagcctcatacatgaactatcattacctacaattttggtaaatgctaaattacatgattcaactcatgcacattctctgcaggtgtggaagacgatggtgagggcaaagcatccctagccatgacattgggtgcatcttggacaggtgaaggagatcatgttagcaacaccacacaagtgagttgaggtctttctgctcatgtttgttcaggggacattaggggtttacacttggagttgacaggttcatactgataattggccctttgatgtgaagtctgagatttttggagacaattgctctatctgctagatttctagtctctctctaggacagaaatgactgtcactcttactcgacattcttccccacagaaccttttttttctcaaacacggaggagggatgtgtatcattgtattaaagagaaaaagaacggttctgtacaacacaacccccttatctcactagagaaatagggcttgccataaaaacttaaaaacacatttttgaatgcaagaaactaagaaacacgttcacctgatacaaataccgcacgctggactaatcaagttagtcttagcccctggtctatacaattcctgaaactttctagctccagccaggggccataatctcgattcctctgtgaaatactgattagttttccatgagagagaggtaggtgccatcaaagacactttattcctgcgaatccacaaggtccaagcatataaaatacagcactgttaaatcccttcttgcttgtctggtcaatccttcgactagctttcctccaacaatctgtgaagctcagttcatagtgccttggtgcagctcgttccagcccaaggggaggtaatatcccatgccagaactgtcatgcaaaaacacaagtggtgagaccgattcttctccttgatcacaaagtaaacatttctcaggataaggaaagccatgtcgtactatcagatctgctgtccaacacttgtcctgaactgctctcagcacttcttttctttgtgctctgaagtctgaataatctgttatacctatttatgacaacttgggtcttttgggacaatgggagcaatttggttcacgtcgagacaatggcaattggtcaatatactacaggtgcaactaaatctgaaaatatctttggccatttatgatttaggatattcttgatctgtttttctgacacaacatgcatttgcattgcttggaatttgctacaaaactacttgtagtattgttagaaagaaagccttacggtccatccaatgcatggaacttttttctagcttactgctatgaagcttcattgcgatttcttttttcaaaagcactttggcattgcataaaacatggcattgcgctgcagggaggaaaacagcttgttggtttggtaggaaagcctgataaaaggaacgacatcagggagagcatggatctcgatggagttcggtcaggggcgaagctccgcaaatgaagcatgccatgacggtgcagcctcgcagggcccaagatatttggttaatggttgatcttgtgccagtatcatgcaaaagtgctgataaggctgcaccagtgttttgtcatgtggacctaacgtagtggtattattatacaaggttatcctaacttagtagcgtgtgtaaccagtggcagtgatggtgctatggttggac

SEQ ID NO: 182580 - DNA, 459 bp, Zea Mays
gaggtatgattccaccagaaatggaggaagggatgactacggagatactaagtaatgatgaaggtagaggggaccatggtgatccaactatgaacattcaggaggagatagaggatgatgaggcggtgattgttgggtctatcccatgttccacggtagggaagttgaatgagaaacatggggagcaacctgattgttccattggaagacaagtgaatgaaaaacatgggaagcaacctatagtatactatcggaagaggactaagaagcaggaggagcaaccacaacccgaacaagttgaagctccagtcccatatctctcttcagactcctctccagatctaactagtaatatctctccaatctctgtttctcccatccctgaacatgaagagttacctcttgcacaaagaagagaacctagaataaatgctgggaaacctccttctcgttattgtt

SEQ ID NO: 182581 - DNA, 703 bp, Zea Mays
ccacaccctgtaccccgacacctcccctctacactaggccgacgcgcgcgcctagggctctccactgcttctcccagcaagaccacgccctctccccacctgcgatgagctctcctcctgtgaagttctctccaccgcgtcaagcagcaccggctctgacaaccatgatgttgtcaccagatccagcagctcccggctccacctccaccacccgtgccctccgtcgtggtctcatcgacccatggcgtgatgcctcactcgatgtcaacgctgcccactccactttggtcgcggtccttgccattgtctaggccgtcgtggctgtcgctcgggaccggaacaggccgcagccatcgcttgggagcacaagcgcaccgcggcagattctctcgcctcgtaaatggttgaggttgagcgtcttctcggctcctctgtcgtagagccctctctagtggacctagtgccaccccctcccatagagtacgaggtcgtagtcctcaccgccctccacggtcagaacaactggtcgctcgtcttcgtcgtcctcgatctgtgtccacccacttcgcctgctggtgtgacaaggtgctcctcacccttaagcgctatgcccttgacgaccacgtccacgtctacgcaacccccctccccaactgctcccatcttggcacctgatggacagtgtggtcctctcgtggatcct

SEQ ID NO: 182582 - DNA, 712 bp, Zea Mays
tatatatatagtttaggtatttagagccctgggctttgtgtaggtagagaaagccccaaccacccacacgaccggccaaccaggtgagttaagcgtagccaaacgagactactcaaacaatcgtcagaccatttacgatctcctgcacaaacgtttatgatggttacattcccgttttatgcaaactaacacaactcagcgcaacttatggtccacggctccacgcccacgtttccgccccagtccgcacaccatggcccaccagtcgatcaaccgagtctgcatcctggccagaccccaccgcatgccccaaacctaaccactcgcccgaacatctagcaaccctaattgatttcctcgtcgctctcgccgtcgtgtgctcccacaatcgccgtctccaagcgcccccgcccctgccacaccgccgtcttcgtgcgtggcgtctcggtcccccaacatcgtcgcacggtattgcctcatccatctgtcatttctcgtcttcgtgcactcttctgtcgtcgctccacatcaacagtgtcgtcagatcccactcccgctcgccattgctcggcgatttggtgcggtggctccacggccctcgcctccacctcacacggtcctacgcctctcggcgctgctctctggccccaggcggcacgccattccctccctcgttccttgactgcaagttgccaaaagcgaccggatctgc

SEQ ID NO: 182583 - DNA, 491 bp, Zea Mays
aagacaatagcatgtcttacaaaaggatacaggtttatccattaacacaaaaagagttaatcatagtgaatatatcgattgaaaagctaccattgaatgattcaaaagatataacatatagaacacacaatcatgattaagcaagcatcattatgaaccattgataacataggcaatctcaaaagcataactactccaaggataggtagcacaacaaaccaacttaagagcaatactgatttgcaataatgtacttaagataccagggtaccgtcctttggagaacaagttgcatattttcatcaaggtcctttgcttgattcaccaataatgattcaagacctctacaacttatttaacttgagatgaacatgggattagaattgcacaatcattcaaccttgggtcaatgaatagacaataaaaaaatcaacagcttaagcatagagtttgaattaaccatcttaagctttcccatggtctccagtcca

SEQ ID NO: 182584 - DNA, 451 bp, Zea Mays
ggaacaacaggagcaggtagagtcgagcatggagcctgtgttgcacaagctcgtgtccgccttctcacttcaattcgacggtgtctattggaggtggaagcctctctagggaaatgcaacaacgatctaggatctatgttttaccaggtcacaacgaagaggagagcataagaatgagcgtgtgatgcatcataatcccaatagatgtacatgatacgtacgaggtcttagtggaaacgtcggccaaatagggatgcattgttggttaagcaaggatgtctgagcggtcatgtccgatggagaaaatacaagtatgtctgtggcaaccattggttaagaaacaaggtcatcatcttgcaaacagattgagcaacgagcaggggacccagaaacagcgcaagtcagtaaatagaaacgaaaaagtggccaaaggaacaaaccagaggtggta

SEQ ID NO: 182585 - DNA, 398 bp, Zea Mays
ctgtagtagtccgtgcgtacagtgagctgtcggcccccaaatgtaccgacgccaatggcgcaccgccttcactagactgatcaattctcgctaataggccgatagcttttggtgaagtagagccactggcctgctgaagtaagcaatggcattgtccccttggtgcagcagcatgccaaagcctatgcccgagacatcgcagtcgatgacgaagcacttgttgaagtcgggcatttgcaatagtggtgcagttatcatggcctgcttgagctgcaggaatgtcgcattcgcttcatccatccatttgaaggcgttaggggggcacccaccaagccataccccgcgatgaacttgcggtagtacccggtgagcctcagaaaccaccacatcgtccgtag

SEQ ID NO: 182586 - DNA, 353 bp, Zea Mays
cagatattgacctcattcttagcatccttaaactgtttggagatgtctctgggttacacaataatgtgcaaaagtcaaatgtgtatcctattagatgctctgaggaggtgctgctcgaagtccaaaccttgatgccatgtgaaatttcaacctttccgtgtcgttatttggggctccctttatccttatacaagttgacaaggcagcagttccaacctttcgtggataagatagctgatcaactccctaattggaaggctgacttaatgacaagggctggaagaagagtgcaagttcagcatgttcttactagcctgacggtatatttagcgatggcagtggatatcccacag

SEQ ID NO: 182587 - DNA, 405 bp, Zea Mays
gaggtaggcgtgtgccccaccgtccgctcctacaccgcgatcctgcacgggtactgtaagcagggcagggtcctcgaggcggagaggttacttgataccatgattcaagtcggatgcgcaccggatgtcatctcatacagcgtgctcatccaggggctttgtcgtgtaggggaatttggcaaggtggaaagaattttaggggagagtgaggcgaaggggtggacgccgaatgctgtcacctacaatatttacatgtctgccctgtgcagaatgggtttcttggatgaggcattccggcaagtagatgttatgcatagcagaggagtgtacatgaccattgagacagtgaatattctattcgattgcttgtgccgtggctcgatgttttcagaagcattgacattg

SEQ ID NO: 182588 - DNA, 319 bp, Zea Mays
ctctgttatatcattatatgggctggtggcccactgtctccactctcaagcccacagtagaaacaagctctactgtctgccactgtgccgccgcacagtagaaagttagaaaccctaaaacagtaaaaccctaagccatcgcctctgccccctctcacactctactccattgctgccctgcggccttgccctctgctccggtggccctgccctctgccctctgttgcgctcgcctctgctcagctccggtggccctgccctctgttgcgctcgcctctgctcagcttcgacgctcgcctctgctcactgctcagctcca

SEQ ID NO: 182589 - DNA, 396 bp, Zea Mays
aggagaagaaggtttggatggcaatgatgcacctcgaaggcattgctgcagagtggtactacgctttggagcgggattatggcatcctcactggcctcgcttcgccgatttcgtcaacatgcggttcggaccgccgttgaggacaaacggtctcgctgagctgaaggatctgtgtcgcacgagcacagtggatgactacatacatcaattttccttggcattatgtcattgtgctgatctatctatgcagcaccaaggtaatttattcacagcaggtctgtgcgagcctttacgcacggacgtggagctgcaggccccatcccatctacaaacagccatgaacctggcccgggcctacaagcggcgcgacacggaggccaccaaggcgttgcgggg

SEQ ID NO: 182590 - DNA, 361 bp, Zea Mays
atatatttgtagtttagtatgcctttgtactttgtatcagttcattttcgaaacaattacacatgtaaaacttgcgttcttctaatttacaaattacatagttatgaaacttgatgcagctaatacgttgatgacttcaatcccattctatctgtgaaataaactgctctttggtattgacccataatgtgcttactttgtctactactattaattattggcagaaattttatacttagattatagatgtgcatagtattcccctataaatctactgatgttaactgcaggttgcaggcaattgagaggagaaggcatatgcagaatgttgcgtctcagcaacagatcctatggacaaaat

SEQ ID NO: 182591 - DNA, 303 bp, Zea Mays
gcgcgaaggcgcacagcctcatcatacaaactatagttacacacgtacagcgagggcatcacaccttacattggttcaaccttcagaatgattcccatctccctatagttaaatagcattatcctaagctcctcaccctcaaaaagacttcgcaactccccctcacctacactcgccccaaccggcgaggacaacaattcctgcttgccagccctgccgacacgaagccgaccgccatccacttcactcactctacgcttcgccaccgcccttcgccgcctacgcccagcactcggaccaggc

SEQ ID NO: 182592 - DNA, 346 bp, Zea Mays
gtcaacctcaacattcctgccacttgtgtttggcccatccattagctaaactcaagaatgtgttccaccatggccacctcaagaagacagtctattgtcagccgtcgtctagcttcttcgacctctccgctcttaatcatgtttgtccgttgtagaaatccctctatggtctgaagcaagctcctcggacgtggtaccaacgctttgccacatacatacaccaccttgggtctgttgcttcgggtctctggcacgtcccacgttgcctacctgcttctctagtctctacgtagacgacataattctcaatgtatcctcgacacagctgctgcagctcttcacccta

SEQ ID NO: 182593 - DNA, 382 bp, Zea Mays
aattgagcaggagacatgtctcgggcatgctcgacgaggtgtttgattccctagagccgtgcaacggtgcaagcaacaagtgactccagcgtccagtactcagaaattggtcgttcaaaattctgaaaccatttccttcgcactttctcttttggttcaaaacattgatgtcctgattgtaaatgaccaaatgactagcatgtattgcaatgctcttatagaacaagtcctgcccagactgtttgttgtctttcccagcacggccggtgcgagcacaggggatgggcggatggcagcggtagcataccgtgtccaccagagaaaaagtactctattactcacacccgctattcaccatcagtacaaaattactacttacctg

SEQ ID NO: 182594 - DNA, 284 bp, Zea Mays
tgtgttgcgtccctcgcctagaagcaaaagcacgctatgggcgccgccttgaccactcagctggccaccgctcaacgtctcctcctcgagtgtgccactacgccacccccggtggcccccgaggctccccacgcctccaggctcgacgccgacactatcgcctctctccacgctcaggacgttggtgtcaaaatatacggtcccttgtgtccgttgtattggacccggtgtcccctcactactactgctagcgtgatcaagtgctcatcacactccgtcagttc

SEQ ID NO: 182595 - DNA, 850 bp, Zea Mays
ctcgtgggatcactaactgtaaaacattggtgcagcttcgtctcagtgacaacagtctgacaggaagtttccccactgatctctgcaatctggtaaatttgacaacagttgaactaggtcgaaacaaatttagtgggcctattcctcctcagataggcagttgcaagtctcttcaaaggctggaccttacaaataattatttcacgtcagagttgcctcgagaaattggtaatttgtcaaaactcgttgtcttcaatatctcatctaatagactaggaggaaacataccactagagattttcaattgtacagtgttgcaacgccttgatctcagccagaatagctttgaaggttcgttgccaaatgaagttggtaggctgccacagctggagctgctatcttttgctgacaataggctaactggccagataccacccattcttggtgaactatcacatttaacagcactacagattggtggcaatcagttatctggtgaaataccaaaggagctgggtctgctgtcgagcttgcagatcgccctgaatttgagttacaacaacctctctggcgatattccatcagagcttggtaaccttgcactgttggaaagtttatttcttaataacaacaagctgatgggtgaaatcccaaccacatttgctaatctgtccagtttgcttgagctcaacgtctcctacaattatctctctggtgccctcccgccaataccgctttttgataatatgtctgtgacctgttttattggaaataaaggattatgtggtggacaacttggtagatgtggatcccgaccatcctctagttctcagtcatccaaatcagtcag

SEQ ID NO: 182596 - DNA, 853 bp, Zea Mays
attgagagacctcacaacaagcaagacacctgaggcatccatagctgctgctttgtctagggatgcaaaactttttgagagaactgctccttcaacatattgtttgaagtcgccttatagaaaagatccagctgattctgaggccgtgttgtcagcagcgcgtgaaaaaattagggcctttcagaatgtgctttctgactctgaagctgaaaaggaggcagatgaagctgagagggatgatgattctgactgtgatgatgctgatgatgaccctgatggtgatgatgtgaatattgaggtggaagaagacaaggatcctcttcttgccgtcaaggcacaagacgaagtaccgagtacaactacagttattggcataaagaccaagttagatagtgtaggtaatgcattgaactcatcaagtagttttactaaatcagcaaaaggtgctcctctcccttatttaggcaggtccagtgcagcagatacttctaatgattcacctcttggaggcccatcagctaatcatgaagtaacccctggcgattctgaaaatactcaaattgatgaaagcaatcaaattgagccttgggtatgtgcactagcagaaggagactactgcgatcttagtgttgaagaacgccttaacgcactggttgctcttgttggtgttgccactgaagggaactctattcgtggtgtacttgaggtatatattatgatcctgctaaactactcttctatcttgtcattcctaattgggaaacaactgatcaagagtcttgcaggaacgtttggaattagcaaatgccttaaagaagcaaatgtgggcagaagtgcaacttgacaagaggcg

SEQ ID NO: 182597 - DNA, 364 bp, Zea Mays
aatattggtatcatattaagcgagtttgacccaagagcacttccagctattgctcctttaccaacaccaacaggcaacaaggaacattctgctgtttacatagttgaaagagaacttaagttactgaatttccaattgtcaaacacagcgaatccatcccttgggaatgctggtgttgcatctgatgcaggaaggtcaatgaacaattcaatagaacagttgatagtaaagcagaccaagaagcatatcagcactcctgctccccacgattcctattcggtcctttcagttagcagttctggaaagtaagtgctatgcatgctgtcttgtcctctacgtcatccgatcacaaatataagtccac

SEQ ID NO: 182598 - DNA, 420 bp, Zea Mays
agactatttagcgatgcacatttggatggggtcaaagagttcatgaatttggtttcacaaagatttgataagaatgaggaggtactatgtccatgtcgaaggtgtctgaatcgagttcatcaacataagggggaggtgtatgatcatttacttattcatgggatgactagcacatacactagatgggtacatcatggagaaccatttgaggctgaaattaatgaaaattatgatcatgtagatgaatatattggtatcaatgaggatgacggtatgaacgagaatgaagaagatgagcctgataatagaattcctgatatgattcgggagttgtacccaactaatgaccaaggtagagggaaatctatgtttgcagctttattagaagaaatgaagcatgaactttaccctggagcacct

SEQ ID NO: 182599 - DNA, 1294 bp, Zea Mays
tgcagaatccttggatgttgtcacaactgttaagcacagggaaccacatatgccctctgttgatgaattttcggcactaatagaccactcaagttcaggtgttgagctcgttcaatttcgtcagggtcaatcgaaaactgcatcagatatacaacctggaaaaagtacaaatccatatagtctaaaattagaatcctctcatgcacctttagtcagtagttcacacccactggagtcaacaagtttagcttcgtcttcccacgttacttctgataatgggttttcgttgcataccaaaagcagcaacagagcaactgcaaatggtcatggtagagagtgtgcacagcccttgggtatcagttctgagcgtgcacatcaagctttagcacttgagcaccttgagaatatgtggacaaagggaaagaactacaaaccagaaaatgtagaacatgtcgcaaaagtgtctgttggatctgcttctctgggctcgacttcagttcagcaatcagttccttgcagcacttcagtttgttacaatcaaagtaattctgaaagaccaacagcgtcatctcagtcaaaggaccagcatttggtaagacactcaactacacctacatatgtaacatatccaaatggcaccccgaaaagcctatctgcagaaatggcagaacatgccggtccagaagactttgcagtagagagtgagagttcatatgccactgaggacgatgaattcaacaatgtgactggacttgattctcctgttaccagagtttgggaaagcaaaagtaaaggaaatgctaccttatcacatatacatcacccactcgaatctcctggtttccatagagcaaagaagaacagaagtcatgtgggaaaactgaagatgtcaagaacttcttcaggaagaaaaaggtcaaggtcaaatgctcagaagcctcctatctggcaagaagtggagagatcctctttctctgttggtgatagtatggacatactaaatacatctgcaaatgatctaaagacgcatgagctagacgaggatcctgaggtggaaagtatggctaggatgtttagtagttcaaatacttcatctttattgttgccatcaagtgactctgcatattcttcaaattattgtggtgccaatgtgctacaagactcttatttgaagttaagatgcgaggtaatgtttgttcatttgatttactttgactctgataatttctggtggtacatatgcttatcatatttccataatcaggtggtaggagctagcattgtcaaaagcggg

SEQ ID NO: 182600 - DNA, 648 bp, Zea Mays
ttcattgaagaacttctgaaagatttctgcagtgtacacctttgctgcttgatcttccacaggcaaccccgtcaccattggtggcctcatctgagctgatcgtaaatcttcgtaagattccttttctaactttcctttaacagcttcctcatattgctctacaaacattttcaaagaggttcctgacatcaaccagccatcaaaatagtcagttacactatcacttctgtctgtgacagacattcctgcccaaaatgaatccttaacataaacaggagcccactgcatcctgacctcatatagtttggacagccattcatttctctccaaacgaaaatgttggatagtatcttgccactctctgtcaaaatcagtcatagtaacataatcataggctagtgtggtgaatgtggaaataatttcatctttgttatcaatttcttccaacttttcaggaagcacatttaagatgtgtgaaaggcaaaaacggtgacgtgcgttagggaaaacctttttgatagctatcgctacatcatgacagtagtttgtaattattgaatgtggtggtttggcattcatacatcttaaccatgtaccaaaaagccacacataagccccaagagatctaccagcaagcaggccacaacc

SEQ ID NO: 182601 - DNA, 909 bp, Zea Mays
ctgctgtggcaacaaagaggatggatttcagggcgaaggtgggattgttgaggtcactcctggctgcacatcaggggcttggtagcccagacagtggggtgaagatggcacccttggtgacaacatatgcagccgaggctctggaatgtcatcgcaggcttggccctactgatgctgatggagctgcagcgttggagatgctggaagaggtgctaccagctgtatttgcagctgcagagagcggtaacgatgaagatgtggattctggttccgtgcttgagttcttatctggctatgtgagcataatgaaggcaccgtctgagaagcagttggcgcacttgggacggatcttggatctggtgcgggtgcagatgtcatttgatccagtatatagggggcaccttgacgtgcttgacaagatagggaaggaggaggaggacctcatggcggagcaacgaaaagatttgattgtattgttccggagcatttgtcgtgtcgcaccagctgccgctcagctgttcataagagggctgattatgacagctctctcgtctgcagaagctagtgtggaggatgttgaggttgctcttaccctgttcttccggcttggagaagctgtgggtgaagaggagattcggagtggggcagggctcctaggagagcttgtgcccatgctcctttcagcgaggttcttgtgtcacacacatcgcttagttgcattggtgtatctggagacagttacccgctacatgaagtttgtacaggagcatgtgcagtatgtaccacacctgcttggtgtgttcttggataaccgtggaatacaccatcagaatgcccacgtgagccgtcgtgcaggatacttattcatgagggcagtcaagtcattgaaggcaaatctagtgccttacc

SEQ ID NO: 182602 - DNA, 1889 bp, Zea Mays
tcggatctcggcggcatccgggcggggcccgtggagcgtgacatcgagcaggtgcatgccgctaacccttctctgggtggatcgatttttcctcccccgtccctggttccactgcgtgtgcaactgagatgaggattggtagatcatcatccaccgcttacgtctcctcccgcgtggcgcggatcgatttcccctcccacgagtggattgaaagatcatcatctatcacctacgtgctctccgcccgcgtggcgcggaacttcgggcgagctcgtgctctttgtgcgccgacctgaaatggtgcttgattacggcggaattcatgggcgttgtgctgtttttcttcttcttatgtgctacaatggagctcagtctggatattccaggccgctattcccctttctctgctgaaatcccgggagctagaatggtggttgacttgttggtcgtccaaccactaattcgggtgtttagaggtcaagctgggactattatacttcccattccctgttttctggagctgaggggatcagtcatcagtgggatgctttggtgaacagcagattcattctgggagcgagggctcttagttgatagtttagttctttcacttgcacgctcgtgcgttctcttgctgtgttggccttggtgctgtgcttgttcattctgttctagctgctacatgacactgaaattgggtgagattttgatggatgtcggattgggtatcatggatttgtgaagaattgtatgaggatgattgttgtggatttgtggttttttggatcaaactcctgtatattttagagaggcatgtccgacccatgccttgcaaacggacagtttaagctgactctaccactgtagtcatatactcctatttttggcaccaaggagggcgatgcagtgtgggggtttggaatcaagcgatgattgatttgtttttttctttatgtacaatatatgtccaacattctgtttgtggcaaacttattagacagagtgaagataaggctgggtcatgatacttgaatacaaccagcatgctttagttgattacgccgacaagtgacaaaatggcattttcatttgtttcttacccaataatgcattcacatttttttttctattaagggtctgcattgatcataccagatgatgtgtaacgtaagagctgctgggcacactgatcaaaactctgtttcagttctggagtttatagtgagatgcttcataagctcccttccaagtgcatctgacaagatgctaataatacaaagcagttaaaaaacaaaggcgatacaggaaaatgtcatgcataactgaaaacatcacaatcattgatatattcttatcaaaccagcaagcttagtggctgtagttgcagtcatcactagaactcgactagtgtgatagggtttcttttggttttattctttgttgtcgataggaaatcataaaagaaatgcacacatatcagtctgatgcttactgaaaaaggttgatatgaagcatgagctgtatggcgtcagcagcaaagcaaaagtagcaaaacaatgttcaatgttccatattgtatattgaaacattagcgctggcacttgcttttgtacgtctctagtgttctgttttattattattgttgttattattatttcatcaatattataaaatgagtgattcacctctggtctgttttatatcttcaaaatgtaagtatggaagttgcatgctcctagttgcttgttttttttcatatattgatgattggatatgttgatatttgaggcttgacagcatccttttttcaggctatcactgctctcaagaaaggagcatacttactgaagtatgggcgtagaggaaagccaaagttttgtccctttagg

SEQ ID NO: 182603 - DNA, 291 bp, Zea Mays
aaaataaccaaaattctcatcttttcctaacagttatataatgcattgcattggttgtcaaccatattattgaaagaaaagacaatgctggttatgcccatgtgaaagccaccattggggaaataaatccttcatatttttagttaagtcttactacatcttctgtcttgtatagaagatagctgctctacagcaacaacagccgagtaacaatctgcaacagctcctccaacatccattactgagtcagcaacaacaaagctcaacttatcttgaaggtgagcaggaaaa

SEQ ID NO: 182604 - DNA, 503 bp, Zea Mays
tttggtacagggagttagcttggtcaccacacaagattgggagaaaattaagctcaaaaacggtctgtcaggatgactgaactccattcgccatggtacagtaagctccaaccttaagaagatcacgattcacccccctgctcgtcgccggtgacttttcgccggggttgctgacggatcgccacgattcgtgcaccgtggacagcagataagctcgcgctggtaaatatcttgcgaccggattgagttgaacctcgtggcggctaagcccgtcgtacttcctccccagctcatcggccgaacggatagcctcgccgtcgtcgagctgttgccgttgcgcgccacgtgcttaagcactagtcctcatcgtggtgactcacggtgtgcatgtccagtgctcgtcggaccagcgcggctataaatagcccatgatccgcggcaaactatgaacaccacgcacaccgtaagtcgatccgaagcaaaaattcgcgctgcctctgccc

SEQ ID NO: 182605 - DNA, 530 bp, Zea Mays
ccttttttgccttttggatgcttgtgtgttggggccttaatttagaggtacgatgtctgtcgattaacaatttgatatgattatcgccccttttggtggaacttgacatgtcttgtgtccctgaattccataaaactctcggctggttcttggcaattgacgagtgtcaaggatttagtgggaacattcgacccaactttataaattagaacatgtgtcatttcactactcactagagagggatttggtttcatgttctgttccacccattagctatttcttaggagacaggccaatcacatggtttctatttgcccgacattggatttttaatgccttaatttttagtaaatccaggctacgttatagtagtattacacgaaaaggctctgttgcactatgaatccaagatcaatgcataaaaaagatgcactgtatataaataaaaaataccaacatagcaatgtcatattgcataaacacatatccaaatggtattttgctcggttcagatacagtcagtggcgtag

SEQ ID NO: 182606 - DNA, 395 bp, Zea Mays
ctattttcgagatcacaacaatggaaaaatgcatggaccttgtctgggacttgaattggacgagccgaccaagatcagtccggatcagctttggctagccaaagccatctcatgcgcagtgcccaccccatctcttgagaaagaggtgtctcatatggcaggattttacggaaacaccaaataccaactgagatccaacacttgtgcagggtatctgacttggaaaaaaattaggacaatggtgtttgagtaacacatgtaagactttccacaattgcattcataccagggtgcacacgacaaaacacaatatttggatgaacttgacaatatcaggaatcaagatatcaccaaaaatattggagagattctaagcttccatactttcacaagga

SEQ ID NO: 182607 - DNA, 334 bp, Zea Mays
ggataggcgctagaggaggcatccactgccgctggtcgcccaaggacttgctgggggtgctgttgctgaacctctctttttgctgggctaggccacatggtgatatgactggtccaagggttgtagaaggaggtccaggcgggttccttggcaggggcgtctgatgtgtggccgctggtgttgcctctggagtcgtcgttgctgccattgtggttgttgccaccgccttgcggcctttgccgtgcccctttgcgcccaccggaggggttagggacgctggcgccagcaagaggggcaacaagagttggagggggcgtcgggcgctgctgcgagc

SEQ ID NO: 182608 - DNA, 661 bp, Zea Mays
gtggcattgccccttacaagcctcaggtgcacttgatttattctctgcagtcacattttcaggggttgcacatgcagaatgtccagctgctactttcctctcctgtgaaatcaagttacaggctcccaaaccaggctcttggatttcattgctaacacaaactctagaatcatactttgagttcgacgttagaagctctggctgtagagaatccaagtgatagttcccattctgaaatccaacaccacatccaaataccaccccgtttgctttcttcgtgtcctgtttatcagtcagtgagccaagaatcccagttacaaactcgaggtttgcatctgattcaacaagcctcggttcaatcaacctggagtcgtgatgtccctccacagcttcagaactgcccggcttcttctccgttttgggtggatcacacccagagcctgtcggtgtcagctcttctgtggcgtgccccgcctcaagaactgaggtacaatgcctggagacagctatttgagcctcatcacaacgcctaactccaaaatcacataccgcaccgagcgccaaaaccgtcgagtctatcgcactgggcaagaaactgcagcaccctttgccatatccgtatctatccaattctatcttcggtttacagcttagtttagtg

SEQ ID NO: 182609 - DNA, 403 bp, Zea Mays
tgaaaataaccggacaaatcctaatagagcacgggtgagttcgcctgtcgacatgcattgcgcctctgtttgccgagtgtcatcctatgaaggctcgaatcacatatgcatgtaaccagtagaaggcacgatgcatatcgtcgtcggcaagctcgctcatctgcatcatagtgatggcaactaatctgcatccttgcacgttgcaatgcacccggtcgagttgtctgccatctttgattgtatacttacattaacttacatgtaaattattcctatcacgtatctaatgctttggtctcgactcgaaactagctgcctctagtgttgaagatcaaactaccctgttgtgtataaaaagtttacatggagtttcagctaatatattatggatgatagttgctat

SEQ ID NO: 182610 - DNA, 491 bp, Zea Mays
gaggacaagcagtagcacgcctccatcgtctgatgaggatgagcggcgcacacttggcgggagagctgcaaggcgcgggcaaccagctgcaggcgtggcgcggggccgaagagcaccagcgcaagccccttgcaggcgcgggctcaacactggaaagaagaaacacacgtgacgtagagaaagggaaaaggaggagaggggcaagacaatctgttggttttctacaattaaattggagttattttagtttttgttaaacaaccaaatgacattttagcgtgtacaccatggttcataatggcatctggatgaaacccattcatttgatggcaatatagcaaaacccacgtttcataatgacacaattccaaatttctccctgctgggtgcttgttgccggcgcgaagggtccaacgaagacacgggtgcctccgtgcctgccatagggttggcattgtgtgctgcgatctgatattctgctttgagcacat

SEQ ID NO: 182611 - DNA, 535 bp, Zea Mays
caccagcaattgttgttccaggactatgcagcagtgggtgtgctccaaacgctcagatatcgccaagagtttaagcagaaaccatagtggtaaagcatttgataaagtgatacctggagcacagaaatcggataggaacaacatgcttggctttaatgattctcaagttccagaaagtcctgctggggcgttttcttcggagtcaccagaatacatggccacaacttcagaagccattggtgttgagcagagcaatggtccttcaaaagtgcttagatcgattcctacatggtcttcaaaaactcaccgtcttcagagcagtgtcatgccaaaaacacctagatcagctgctgctcttgcaaagagaaaaattaaggagattgggaggagagaagctaccaaattagataattacaatatagtgaggaatcccacttcagtgaaaagatctgaaactaggactctttccttcactgcagggccaagcaatggatcaaacaggttagcatctacctcaaagaagatccggaagcat

SEQ ID NO: 182612 - DNA, 446 bp, Zea Mays
gaaaaatagaagaacaatagctggaggagtaggggaggaaccgaggaactcactatggctctcgccaatgactcgtcgacaggtggtggtggcgctctttggactctggttgctgttgtgggtgtcgtgatgtgttgcgacgaacatattgggttacacatagcggaggctcataatcgatgctaccttgctggtgtgctaggaatatcaacatgatatatcgagtgttggaatgtaactatgacagcccatatggggcgcctggccattggcccatgtacactataaccctaatgtaaccctagcctatctggctatataatgaagtcacccaaccagtaataggtgtgcggtgtgtttcttcatggtattagagcaaaacacgatttttttcttccgctgccccgcacctggccgccgcgcaagtgcctttgcttctcggccgc

SEQ ID NO: 182613 - DNA, 330 bp, Zea Mays
taagactatacttagatacctcaaaggcactcaagatcttggcctgttttttccgaagaatcaggaccagactatggtgggctatgctgatgctggatatcagtcagatccccataatggtatatctcagactggctttgtatttctatgtggtggcaccgctgtatcctggagatcgtgcaaacagacattagtaacgacgtctactaaccactcagaaataatctcactatatgaagccgcacgagaatgtgcttggctacgacgaatgactaactacatccagaagtcatgtggttataacaccgcaaatacccctaccattatcta

SEQ ID NO: 182614 - DNA, 391 bp, Zea Mays
ccacacaagcttgtccttatgatggataccttgtaacagaagctgattcgaaggtatgcatattcaatgagttcttgtatgttgtgaagtaatgacactcctcttaggctcttactatcacatttgcaatctacagcctcttatggaatcaaataaaactcttgctgagactattggcaaagttgcggtctattgcctgtataataagagtggctgccaatggcatggagagctatccgcctgtaccacacatggtactacttgtgcatatgggaactctcctgttgtttgcaatcgttgtgggacacaaattgtgcatcgtcaagtacaagaacatgctcaactctgccatgtatgtccattttgtcttcagtaacttcttatggaagtc

SEQ ID NO: 182615 - DNA, 608 bp, Zea Mays
cagagtgaaaagactacagagcacctggtgaggtcacctgatattggtgggactccaggactgggacaaatggaagatgatccccctactgattgctcaagtacttcagggcaagggtcagggaccgaggaggatgtcaaagatggtggtcatgaaataggtgataattctttggcagttcctcaaaagaaagcatctttacaacaggatcctaagcatcccaagacaaagaagtctgctgcatcaaagtctggttttgacatgtacacagaacaggagcattcaccaacatctctgcgggcagaaaggcagattgaagaggtgaaaattgaagaagagagctgtcatctagaaggttttgttttggaacctaacttggaggtggtttgcgcccttgaagtgccaaagaattttaaatccaacaagctgttgaggaatgctgaaagtaaggaaaatgagcatgttggtgttggtagtcctactggaaggattgctgttgaggccgcatctgatgttgtattaaacatgagtgctgaagaagagagcagagaatttaagaagtcaaaaatcatgacaaaacaatcactgactactggttcagagaaaag

SEQ ID NO: 182616 - DNA, 314 bp, Zea Mays
ccaccgcaccggccctcaagcagggcagggcagggcagctacctccaagtctccaaccccccaaccccaacagacgggacgccgcctcgtgtccggcacgccgttccctcccgtccccgctccttcccctcgctaaaacccatcgaatcgaccgacgcacgtcctgacactcctgctcccctgtcgccaccgcgtcgcgcgcgggcagaggcctctctcgccatctcgcggccgcggcaccccacagctatcctaccacccgacctcccaccaccgccgccgccgccggcctgctcccaaccacaagtccagga

SEQ ID NO: 182617 - DNA, 379 bp, Zea Mays
ctaattatggtccccgacagccatgtaaggaaaaaaatcctgtcactgccacagaaggaaacacatcccctcgtcgctattcacacctcgcaacaatcaactcgcaggaatcccatcgcgacgacgcgcaggaccaccccgcccaatcgttcttcccatgcaccgcggatgccccgcccatatcccccacgccccaaacacaatccatgcctcgccgccatggaaggaatcaacccaattccctcgtcgccatccagcgcacagaaccaccatcggcccacatcccatcgcgagtgcatgacccccgccatctcattcttcccattctacgtgtcagccccacccatatcttgcgatgctcgagtacttcccattctac

SEQ ID NO: 182618 - DNA, 357 bp, Zea Mays
gaactttgctgttaaattcttcgctttgtccaaaatgcttggcatacccgtccacgaattttgaaaaattgtcatgaactcatcaaactgtaaccagaaattttcaaatctaaagatcttgggcttaggaatctttgacttaaaagaaatcaagcagggcacatgatctgaaatatccctgggcaacgttgtagcgagagtatcagggtaactgaccgcccattcttgcgacatgaaaaaccaatcgagtctctggagaaggggttccctttgtttattcgaccaagtaaaggagaggccatggagggggatttccaccagatctagctggctgattgcctcattaaaggccagcat

SEQ ID NO: 182619 - DNA, 272 bp, Zea Mays
tccttcattcgcatggttcacacccagttttctgctactattaaaatttttcgttcagattctggtggtgaattcctatctgataattttcaccagatattgaccatagagggtactctagctcaactttcttgtcctggtgctcatacccaaaatggtgttgctgaacgcaaaccctgtcatattattgagagtgctcgtactcttttgatctcttcttttgtaccttcacacttttggagtgaagccgtttccactgccgtgtatctcat

SEQ ID NO: 182620 - DNA, 458 bp, Zea Mays
acaaagacatagtgaatagggtaactaaaaaagacatagtgggtagggtaactaaaaacatgttttttcaatcacatagaggtctctaagcttagtatacactatacagcaaaggacatggtacctaatgcagtgtaccgccgacgggtctccttcattggccgagtcctccagatgactcttgagagcccgcagcagcgtgaaatgcacccagtcgatcaacgggttgacataggtgctccgcaacgcagccacaaatgtctccagtgagaaggggctgaggaacaactgtttgctaaacgaccttaagcaggagtaaacttgaaagacatcgagaacagggaggccgcctaaatccagaccctgcgacgatggtggcagctccggcttaggtggcggtggcagcggtttcttaggggcggcctcctccaagtccctggacaccgagcggtaccgcc

SEQ ID NO: 182621 - DNA, 363 bp, Zea Mays
agcagcgagcctcctctctcggtctttctggaagcgacgtcggactcgagactcagctccactcaccaacgaggaatctggatagggcgacaagggttttgtcccggccaagacgcaacccatcccgcggtcatcaacagcatctccgatcgcgccaggttcgttcccgttgcctcgcctcgcatgtaatttgttcgctcgttcttctactctatcgtggctccgctgatgtcgtggctccgctgacgtcgttgtcgtgcagacgtggccactgctttcgtttctagttcacatgtgctcgcccgccacacgttggtttgcgactctcaaaacttacgttcaccatcttgtctcgtatgcctg

SEQ ID NO: 182622 - DNA, 276 bp, Zea Mays
ctagccataacccaactcactaattcatccaagaagcttctctgcagccttgctaaggaaggagattcctcattaaaaaccaccttgttacgatgaagccacaaacaccatgcccctagaatgacgacactattgagcccctttctcttgtctttatgcacacttttgtccagacgtctccattccgcgaaagagggttcatcaacggtaggaatgaggtggcccaagccaaaaggggataaaatactgtaccaaaactggttaaatggggctggg

SEQ ID NO: 182623 - DNA, 643 bp, Zea Mays
ggaagtcccacctgcaacaacagtagagcaaggcaccgaaaccatatcgtcgtcgaggagaaagtcatgggaggcgtgggaggaggcgtctgaggtggctgcaaaggggaaagcggactcgtcgaatatgacatggcgagagatgatgcgacgtgtcgataggtcgaggcagcggtaacctttgtgtgaggggggatatccgaggaagacgcatgccgtggagcgaggggcgagcttatgtttggaggttgcttgcatgttggggtaatagaggcacccaaaaacacgcagatggttataggttggcggctgattatgcagatgagtgtatggaatgtcatgctgaatggaggaggatgggcgcctattatggaggtagcaggccgtcaggagtccctcggcccaatatgcggggggtagggaggcatggagaagcatggtgcgaatggaattgttgagtgtgcggatgatgcgttcggctttgccattttggggtgatgtgtagggacaggaggagcggaggtgagtgccttgagcagcgaagaatttggtggtggcagtgttgatgaattcagccccgttgtcagcttgaaaacattttatgggagagctgaattgtgttttggcgagcgcaacaagctca

SEQ ID NO: 182624 - DNA, 619 bp, Zea Mays
aatgatgtgccaagagcacgattgttgtagaacatcactttaatcttttgtcctggtttaagtttagcaagattcttacatttgtttttgccacgaccccttttctcttcagttatatcagctggaacatttatatatactttcatcaataagttgtgtcccatacaaaaaagagaaaaatgcagaacgtgtgaaattatatttgtatcataccagtttttgcagcatccatattattgttctgaatatgtgccctgcaagagttcctccgctcttcattatcaggacttgtgtaggtatccatattattattttgaatatgtgccctgcaagtgtcgctctcctcttcattatcagctctggttaaggtgtccatattattgttctgaatatgtgccctgcaagtgtccctcccctcttcattatcagctccatttaaggtaccaacttcatggttcatggctgcaagacatatggaataacacataatactcaaaagaaataaatataggcattttagtgttgtactgaaggtaggaaatactcacatttcagcttctttcgtggcctgactcgatgcgactgtctatctcctttaaacgatgcatgctttttcttc

SEQ ID NO: 182625 - DNA, 444 bp, Zea Mays
caggtatttgtaaaatcgtctctcctgtatgtgcgtctgttcctgccggtgttgtgctgatgaaggaacatcccaattttaagttcatgactagagttcagccccttcgactcgctgaatgggctgaggatgatacagtcactttcttcatgagtggaaggtatgcccactgtttgtctattttcattattgctttagctcatgttctgaacttcatcatttttggcatgactctgcagaaagtacaccttccgggactatgagaaaatggcgaacaaagtgttctctaagaaatattccagctctagttgtctcccagctaggtatgtggaggaggagttctggcgtgaaattgcttttggcaaaatggatttcgtagaatatgcttgtgacgttgatgggagtgccttctcttcatctcctcatgatcaacttgggaaaagc

SEQ ID NO: 182626 - DNA, 1676 bp, Zea Mays
cacccccgtcccccgagtctacggacgcgcacttgcacaccgcgtccgcgctgccgacgtcgctgatggagattgggcctggagtgttggtgccacagcagcagccgcgaccaccatctccggaaatggcccctccactatgtgattattcagagtccgcacagccatcgccgctgtgtcatccggatggatgcacaggcgcctcgccagacgcaccgatggacgaggtaatgacaggaacgtcaggaaaagcagctgggccgtcgccaggtgaaaactcggagttagcacagtcacagctgccgcatcttccagctgaaaacacatatgtctgttcaaatgcagcgggcaagatatcagcagtgacttcagaagaaggtactcagcctgcgatggcgtcaattgatggtgaggggccattagagattggggcgcagagatcattgcaggagctagaggagacaacaacatccttcaagatggaagctgagccttgttcgccggagatggctcctccagggtttgaagattgtaagtctcaatggttgccactgtcacatcctaatcctctggttgaatccacacacactgtggtacaagtgactactaccaatgccatgggaacgactccagatgcagcaactgggtcactgtcttcacctcgcctacttccactgttgaagagagatacagaggggcaaacacttccaagatcatgctctccaacaacagaagctgcaccatgttcaccagatatgccacctccaggctttgagaattgtaagtcatcgtggctaccactaccaactcttcaacccatagctgaaaccacgcatgtgttgcacgacgtggctcccaccaagtcaatggtagtgggacttatggaaaaggcatgctcagtgctggcattggagcggacagatgtgaagatagactcggagcagagcctattgccgccattggagagtgaaactgagagttcattgcaagggccactgccaaggtcaccttcttccatgatgaaagccattccctgttcaccagatactgcacctccagggtttgaaaatttaaagttcacacagttacagcctccctgtccacctctggtgcagactgcacatgttttgcaaaattcagccaataatgaggccatgcctgtgatatcaaaggaagctcctcagccattgcctgcattggatgcaacggatttagacattgatgccaaacctgtcctggcaccaccatcagagagtaaaccagggcaattgtcaccggaacctccccttctgctacctcatgtagcacagcatacaacgtgttcgccagggatgacacttttagggtctgagaatatcgagtcctcgcagctgctgccacgagctctggttcttcctcttgatcagacttcagacatcttggctgatgcagggaccaagaagacagtcacaatggaagaagtgtgtcatccgctgcctgtagcaggagtggcggaagaagccaataggtctgttcttctaccagtaacggaaaatggctgtgagggccaatcaccacacctagagctacagacttcttcccctgcagtgaatgctgcagctacatcactggagatagctcccggaagttttgagaattcagagtcctctcagttgatctctccttgtctagctcag

SEQ ID NO: 182627 - DNA, 1018 bp, Zea Mays
tatctctcggagaccaaaggattgttgacaagtacttcataatccgtccaaaagctgagtttgaggtatacactgatcttcaaaggatctgttttgtgtttccttaagttgccaagttactgaaaacttgctttggtttgtcattctggtaaaccaataggtgtggcttactatggtgaagcattatatactgcagtgtttagagcacactgcaaactgacggcatgcttcactcaggcatgtaatagatgttaggctattttcctcatatatgaaggagagctgttacatgcgcaacaacagatacccaaaactatgattacattagtttcctggaaataaaatgaattatctcatctagtaggcattgatgaacttcacagcatgctgtacttgtcctttggatacttggtgatgcttcgtggaaaatgcaattgttgcctttttttcacatcaaccaagctgcccgagttattggaaagagcagtgctttgaattgtaacacggggcgactaagggacagagtcaagccctgactgctctgagcttggtggaggagattcagggaagtagatttgaaagcaaatgttaatacacgggaggacagaagattgattggggggggggggggggctgtagagacatgggtacatattatcatagaagtttgtttgtgctgcaaacctgcaaaatattggtagcaaatgatgaaaactaaaacccaaatattattatgtattttctacagtattacattctttaagatgaaatgtttatgttagatttaaatctctcgcaactagcaattgtttttcatagttcaaaacttcaaataggtgaagccctcctttaatgaagagttaaattgtttcatagtagcactttgtatcacttaaaaattgcagcaacataatgagatgttctaaatgtgctgtatgtttctgaattatttcaggttggacgaacaactcttggaggattgttggccttggggtacaatgttgttgttagctttaag

SEQ ID NO: 182628 - DNA, 489 bp, Zea Mays
ggcctcaagactgccaagtatagtggcaatgcgcagcggcgtccgcgcagtccccacaagaagcaggggcaacaagacaatgccaagggtagcaaaaaccatgaagaccacaataaatgtagagattttggtcggtttgggcattgagcaaaggattgccccaaacccaagaaggcgtaggctcacctcacccatgcatacgaggaggacgatgaaccgacactactcatggcgcaagtgtgcacactctcggtcgcaccagaatgtgttcgcctcgatgagccacacacacaagtgttccttgtagcaacagaggacgatgtcaagcgtcttgaatgatggtacctcgacacaggtcttcttcatctccccctgcgcaactgcatcattagcctcggcacatcaatgacgacgagctccatatttgggggtccgcaacaatgctcctcaacaaggtgcaacacggtaacatcgcctctacattctgcg

SEQ ID NO: 182629 - DNA, 478 bp, Zea Mays
cgtccatccaccccgacccatccaatccgttccattcctacgtcggctcggacctcggagacacagggatcgtcttcgtccccggcctctcgccttcctccacccccctctcctctctctcgctggctcgtggccaacccacccacccacctccgctccgccccgcttccatcgatccattccgcgatcggccttacacgtctaacaggtacgatcgaccgctcgatccatcatagcgtttctgcatttcctattctcccggtctcgctcgtttcgattgatcgacctctttgcgtggcgtggatggatgcgtggttgcgacgcggatctcatgatgatggtttaaaatttcttctgtgcctgtgcgctcttgcagtacatgagtttctaactggtgcgagcccaagtaaagttctgtaattagtcacattcctgcacaatgtcgactgcgaaagtggtgcttgagcctgcatttcaa

SEQ ID NO: 182630 - DNA, 361 bp, Zea Mays
tagggaaagaagccaaattgctatcctaattagttgatccagttattaactctgcctagactcgggagcttacttctttcatgtgtgttcaaggttctttgtgtctcatcagaaacttcctagtttccttcatttcatggtacaacgtgtctgctggtattaatcaataccgctatttacttttgacctaaagacgacacatccacccacggtatatgtgttgacgaattgaagatggtctgtcaagagtttgctgtttcagtatttaatgtcagtcagaatcaggcttgaagtaccataggttcatactgctacagttacccacttgtcacagataaaacagtgggtccaggaaagcagt

SEQ ID NO: 182631 - DNA, 511 bp, Zea Mays
aacgagacgcagctggaggagatccttctcaagagtctgggcaccacctttgacaatgctgtgagtctgatcaccacaatgggctactctgaggcggttgcacgggctgctgttgtgcgggcagctgcgcaatacaactggagggagagccttgcagggtttggagaggcagcagttgaggttctcaagacggaaggggacatgttgccgagggagggtgcctctgttgaagacatgaggaggattgagcaggctgtgcttggtagtatggttatgtgggtaaatgaggctcagccactctgcaccacaggcgatgtaatgttttgcttgcttatgtctgacatgaacgtggcaaatgccagtgccatggactacaatacttcttccctcccatctgttgctgctcaagttattgcccaaccagacgcggggaactatgttactggttcaggttcaaatttatcagtttctattaccaacccacagactggcgttacattccgtggaaaac

SEQ ID NO: 182632 - DNA, 283 bp, Zea Mays
ggcgacgtcacggtacggctcgagcgtcaaccgaaactccggtgagaaattcttggcgacgcagtggaggcctttccctgatctggagacgattccagccaccactagcagcatggacgacggctcggtggagggtttccctgcagcggcacctctcttcccctctctctctagtttgtgatgaggccaggggttcccagggttcggagtggtgctgacgggatcctagggcgctaaataggagcacgagtggcggttgagaggtccggaaggcagttgggcc

SEQ ID NO: 182633 - DNA, 368 bp, Zea Mays
ctaaactcatgggcaacttgactcctgccagctggaacaattctgaccagaatgtgctagtaaatattgtatctctatcactgacaatggagtaaggcaacccatggagacggacaatgttatcaaagaaggcctttgctaccgatgctgctgtgtaagggtgtcccagagcaataaagtgtgcgaacttggagaaacaatcatcaaccgtgagaatcaccgacttgtcgcccacttttgggaacccctcaatgaagtacatagaaatatcactccatacttctgaaggcactgatagaggttgcaggagaccaccgggatggagatgttcagttttattgcgctggcagactgaacaacctttgatg

SEQ ID NO: 182634 - DNA, 372 bp, Zea Mays
agagagagagagagaagagagagagagagagcacacgcaagacgagcgtcgccttctccgaatcccctccttgccaaacacgagctgcctaaccaaatccgtccacgctgtctcgtcccctcggcatcgcagtctcctacccaaatcgtcctcgtttcctcctccccgaactgacccgctgttgccgacggctagtaggatgacgaagctgacctcggagctactgcggccggtggttccggcggcggcgctggacgaggcggcgctgctgcgctacctggtggccaacgtcccgggcttcccgggccccgcgcccgcgctatcgctgacccagttcgggcacggccagtccaaccccacctactgcatcca

SEQ ID NO: 182635 - DNA, 275 bp, Zea Mays
gctatttgaaaaatatcaaacaacagaacttgtatttttcctagattcatactagcataatagtagttattcctatggttggggtggttcctccttaggattttttcaatgatttttctaagttctcactatttttagtaaataaaaggtggtgcattttctttgtactaaatgagggttcaacaaaattttcctatgaactacgtcacctaagcaagttaggaaaaatatgattgccctctggtcctcattttaaatcccctttttcattttct

SEQ ID NO: 182636 - DNA, 535 bp, Zea Mays
gaaatcaaagaacaaggagcggaagctggcttatttgcttcagttgaagatgtcgagcaaacccatcccattttaactgatgaaactagtcctatatggtcaagtgaggagcaagtagacggttcttgtcctgcatcggaaagccgggagcaacctgttcctttcaaggtggttatactcggaccatggcatgatgtgccaaatagcatcctaagatcaaggcctccttcaaactactcacagtccatgcaaggatcagatctatatgttggaaatgtggatgtattggatctttctaaggagcagttggactcgaggttaaaacctgaagaacaaggagcggaggatggcttatttgcctcagtggaatatgttgagcaaacacatcccaattttactgaggagaaagtagatggttctattcctacaccagcaagttcggagcaacctgatcagttggaggtggttagaccatgggatgatgcgccgaatagtaccctaaggtcaaagcctccatcaaactactcacagccaa

SEQ ID NO: 182637 - DNA, 271 bp, Zea Mays
agacttactcgtgattgttgagttactcttaaagcacggtgtgagtctagtttgctcatttgtctggtgaaattcaagtgcattacacaatttctagaaacgtactccctccggttcttttatcaggtgtattaggatttggagaagtctttaaaagtgtactttaactgcaaatttcttcaacaataatttattatcaactactaaaaaataaacctgatttgtcgtgttacaacatcatgttgatgcaatttttgtatggtacccatgc

SEQ ID NO: 182638 - DNA, 346 bp, Zea Mays
atcaaggtaaggtatagaggtgtcaaagatgaatgtgataataatgaaaggcataacaaaggatagagttaaggcaagactcgcgaaatggcgaagtggacaaaataatcaaggtaagataggtgagggtgcaatagaatggttgaagtaagaattcattatcgagagaagttataaaggaacaatgagatcaccaaggatgggcaacataaaatgatcgctcatggaccgttaagaaacaggggtggtcaaggacatgttaactgaaatgtcttgaacagttattggggtatgaaaataagcatacataagaatataagagtatgtaagactccaaggatacgag

SEQ ID NO: 182639 - DNA, 726 bp, Zea Mays
cttttctctgatagtttatttgttgccatctctagtcttacggatgatttggatggggttatcaggcagatagatgaccaatgtatagaattttggagtgctaggatctaagtgggaggttagaacttcgttatcccttttacccatcttttcatttgactgaatggtaaatctgattgttttatgtgtaaagagcaattgaggttgtgttttcaagattgcaatggtttaggtgagattttctgtacaatgtgatgaaaattcatttaacaaataacaaatagcttgagatatgttttttggacctatcacttgaattgtcacaacaaactggaatagtttgaactgcccagcaaaaatttattatagacagaaaagtttctaaaataatgcatgtattgttaagaaggaagaatctaactgttaggtgcacattaaaatcgagcaccattgtctagaattttggagtgctgcgatgcgaatggaaagtcataattctatcatcccttttagacaacttttcatttaactaaatgataaatcaagggaatttcaaacttcacttggtctgcaaagatcatatctaaggtatgagatgctcaaccgcttataagttcattaatataatgaattgtaccttatatttacttgctaaataaaatgtgacagttatttgtccaaaacaatgaataaaggactttagatagcatgactcgtgtcacaatc

SEQ ID NO: 182640 - DNA, 452 bp, Zea Mays
cacgggaggtggcaggtcggccaggggggtggtatcgcggcggcgagctcaccgtcagggtaggggctatgaggatggggtaaagagacaatactggggttaggagtggtttggtacaaggcgtcaaagtcggtaacccaatcgataggagtgggaggggctgcgaagacatggtgtacgaggagagagccaggaggaggagcccccacaaagccaccgggaggggggctaggtccgggagtggcgagcatgttgacgatgatcatgggttgtgatgacgacaaggcttcgatcgtcatcgagataatcacgacactacgaaacacaaatggtccaatagcgtggcgaccctcctgagggtggatggaggcaggcgggtggaagagttcgagcagtcactgagaaccgggttcatgactctatcaaaggccatgaatgtgccccgaaaaagc

SEQ ID NO: 182641 - DNA, 1399 bp, Zea Mays
ctcgcagcgaccccacccgaaacgagccaaaaagaaccacaccgcacaagtgccaagtgccaacaccgccggaaaccacctcgtgctggcccatcccgacatcccgtcccgtgctcccctcccctcctctcgaccacctcctcgtcgtcttcctcgccccctccgccacctccgccccggcctctccgctcccacccccgcggaaaccctaactccctcttggcacaggaggcctatgacggagattcgccgcgcgcaaggagggagtggattcgcgactgcgcagccgctgccgtcgtcctagggcgcgtcgagcactgccaccccattgacgggcccatccccacgacatccgccatgttcgagggccacgtatgatctcttacccttcctccatgttttcccattccttcagcacctttgatcgtgaccatttttgatgcgcgatatggaggaaggccgcgtgattgcctagtggaccgatgtgttggtttagtcgtggcgttgttctgtccgggttaccaaatctctgtgcagatcatgttcgtatttggggatagtttggagggttagaattcggtgcgttgatgattgacccttggtcgtttgcgttatgatcttcccttgaggaagaattgcatgttgatttatggaggagcctctaaacgggcaagttgtggacttttggtgcttatgtatacgtttgttcacaattttatagttcgactgaattccaactattgaggaatctgtttactttggttgagcaaaatgccttatttcatttggcctacgatcatttaagtagctcatgacacattgtctgtgatggttgcatatggtgatctggcagcaatgtgaaagttcatagctgcggcatttctttctttttaaattgaaatctcctagcccctgttacctcccgacaatatgcacttgttgccctttaaatttggatattcttctttcgtgattgcatcttattctcaccagtgaatgcagttttgagcatccacactattatggtgagagctatgttttgtgccatcctactgcactgcttgggatttcattgtgtcttttcttttgcgtcattatgtaagaaacaatcatgctggtaaatagtggagtcgtgagtaattcatgaggttttacagcaactttgctcattcatggcaatagacacgtaccacttaaatggtgaatcatgttatgcactctttcgctatctataatttcatatcgaatttctattttttgttttcctttttttgactctttcatcattcatcatttgtgttaagttctgagccatgacatagttgtaacttttttctacaggtgctgtatctgctacgcaaatatttgggtgaatatgttgaagggctttctgttgaag

SEQ ID NO: 182642 - DNA, 293 bp, Zea Mays
aatgtatgttgtgtgatgattctctacttaatagattaagtgtagtgtgatgttttattagtcgagataatttaaggattaattcagaagagtgtttaaatagttagttaagttgtttcgatccatacttcgattttggtgtcccaaaattatgattctaagtaattagtctttcggtgttcgctttagtcaaagagaaatgtggaactcatatgatctattcttttcctaatgactgagctaggtccttttaaacagaaagcaagtgatgtatgagctacctccgaataggc

SEQ ID NO: 182643 - DNA, 623 bp, Zea Mays
tcgtagatggatagcttttgagtcttgatccccaacgacttactcagatatgcaataggccgaccttgctgcattaatactgctccgactcctttttcacaagcgtcggtctcaacagcaaaaggcaagtgaaaatctggtagtgccagcactggggtagtgaccatggcctgtttcaagtgttcaaacgccatttcagcctcctctgaccagtgaaaagctcccttctgaagcaaattcgtcaatggatgggctatcaccccataattctgcacaaatcgacgatagtaacccgttagaccaagaaaccccctaagatcagtgacattcctaggtctgggccaattcaccattgctgctgtcttctgtggatcagtggccacaccccggacagagataatatgtcccaagtatgttagctcctgtttgccaaacacacacttcttctgcttaaggtagaacttatgctctcgaagtgctgcaaagaccaacttcaagtgttccatgtgagtagaccaatctggactatagactagtatgtcgtcaataaacaccataacaaaccgcctcaggaatggagccaacaccatattcatggcacattggaaggtcgcaggagcgtt

SEQ ID NO: 182644 - DNA, 477 bp, Zea Mays
cgacaatgtatggctcgatcactctatcattagtaggataatgcagccttggatcctcataccgctgatgactttggttggtatgcgcataccagactctatcgtgaggacgtgactcattataaagcatgggagtatgaccaccattttgctctttaacataaacaccattttccaatctaacatcttgacctcccgcataatgctcaccagggcggcagtaatctggacaagaattagcatggtgaccgggataatcattaatcatgcttggttggtcaaaatgttgttggactggccgagtccaacgaggattcatatagataggatcagtcaccgaaccctgacccttgtggaatagtgaaccacagtgatcacatccactgttcccatccaaaaatttattgtgcttgctcaaatcaccagggaaacctgcattttgctgaattacagcaccaggtggaagccagactaaat

SEQ ID NO: 182645 - DNA, 549 bp, Zea Mays
ctgcgtccagggtggagtgggcagccgcgacataacagtggggaggagcggtcgacagaggcgcgaaagacgcagagggccaggacgaggtgcctgggatggtgggagctgcgtccaggcgatccaagctgcccacctaggctaccagcagcatctaggccactcgtgcccagatcgatgacaccgaggccgccgtcggtgcataggggcaagggctggcgactcgaggactggaggtggagaggtagacgacggtgatggcttcctagggcctgatagcggtggcaccgtggtggagttgggtccgacggtggggaatagaagggcagcgaccacggaagcctcgcgacgagtgagagaacagggaggaggggagccagaaggagtgtcggccatgggggctgggctgagggtggcgacatctaggggaggagaggggaagacctttggcttgataccaacaattcatgggatacaatattagtattacctatatggtacccctaatgtgttaccgcctctactactgtggccagttcgacaacgaca

SEQ ID NO: 182646 - DNA, 316 bp, Zea Mays
agtagggccacacccattgagttcagcatcagtagggccacacccattgggatcagcatcagcagggacacacccattgggatcagctccagtaaagagttccactggtacttcttcagcagcagtaacagaagggtcggcatcacgatccaagcacgacactcgccgaagccgtctctttttctttttcttcccctcggcaggagcagctggatgactgacttggcgaagacatttcgggcgagtaccctcaggccttcgagtatccacggttttctcaggctctgggatagttgcaacagccattgtttcagca

SEQ ID NO: 182647 - DNA, 825 bp, Zea Mays
acacgcttggattttaggtattgtctagatccatttatactttgctctgaagtctgatttgccattagaccaaaatactatactctactattccaatatatgctgaaatgtaggaacgaaagcgtaagttacaaacatctcaacctgtgagaaaaaagcatcaacactctccttttgggcatgggcgaaaacctaacagagaataaaaagacgagaaagttaaacacaatttgggaattaagaatatcaattaaacaattgcagatcttacagctggtgtccactgtcctcctgcacggactgatcccagtacagcaccttcttttagcaaaccattgaaaatggattggaagaatgaaccttccacagaaactccactagcaccatgcatctcatgaagctgttgttgcaaggagttccaaacagatggcaggtttgttggcactgttataccccttgcagcaccacgaaccatagcagtaatccgtgagacatacgctggagtgtatagctgtccgccttctagccttcctttcacctggaaggagggcagtaatgatagcagaacagcatgtaaaagtttttgtgaatgacatatatgtaaaaatattggaaataaagtattgcaacatggagatttaaagttagaaaatgtgaaactcaactaaacattctgatcctaagcaccagatttgccaatggaccatgatctaaagcaccacacataccaagagactaacacatacaacactgcctaaaaccactttatggttcttctaagagctgactcatatgaatcagctaattcataatgcttgaaatgac

SEQ ID NO: 182648 - DNA, 480 bp, Zea Mays
tgaagatcaatagtcttctgctgacaatgggatcgagtaaaagatgcatcaacaccgatgtgtttagtaagttaatgcttcaccggatcatgagcaatatgtatagcactcaagttatcacataacagaggtgtagacgtgtcacaagaggcaccaagatcagccaagagccagtgcaaccaaataatttcagcagcagtagtagcaagagcccgaagttcggcttcagcactagaacgagatatggccgcttgcttcttggatttccaggcaatgggagaagatccaaggagaatacaataacctgtagtagaacaacggtcaacaggatcacttgcccaagtggcatcagaatacatatgaagctgaagtgggctatcagacgcatagagtaaacatctggatattgtcccacgtaaatatcgaagcacacgaagcaaatgaccataatgagctgtagttggtgttgatacaaattgg

SEQ ID NO: 182649 - DNA, 533 bp, Zea Mays
atgtaaactattaaatttctactttcttcctttaggcttttcatgttctttatcacactgataacaatgtactcttgggagctccaactgggagtggcaaaacaatttcggcagaacttgcaatgctccatcttttcagtacacaaccagacatgaaggtttgtttatcaacttccaaaaaatctgaaagtttttttttggcatgatggcaatttaatgccttcccaatacctgttttaggtagtttacattgctcctctaaaggcaatagtacgagaaagaatgaatgattggagaaaacgtcttgtaattcagcttgggaagaagatggtaaagagcactccatagcttttatttctctggtacattaaaagtaaacattcatcttaactgaagtaacacttctcataattgataggttgagatgactggtgacttcactccagatttgatggccctattgtcagctgacatcatcatttctacccctgaaaaatgggatgggattagtcgaaattggcatagcagaagtt

SEQ ID NO: 182650 - DNA, 669 bp, Zea Mays
agttgctcttgtgtcactaaaggtaacagtcttccgtgttgtagcgcatcttattttgtctgatactgcatttacagctggggtgtgctcccttgttccaggttgtttcaatggggagagagaagtttgttacaaggattcaactagtgttccgcatcctcaagggcattgtgttccttgtgctcattggtttgcttgtccttttatttgttggttttgaccttgctgtctcggatgttggcgccagtatcttggcattcattcccactggctggtttattcttctggtgagccattcttgggttcttccacacgtctttctttttagctacttgctgtttgtcagtgtacttattgctcctgttaatctttgtttagattttagatgtattggcttgtttttctgattcatgtttgtggcaccttctgttgctttaggttgcgcaattatgtggaccgctgtttcggaggttgatcatagagccacttcacttgctgtgttgcccatatggtaccggtggtgcatgcagaggtccctgctgtgccaggttcagacagaggaccggtgctgcgcttcggaagatgggaccatgggactccatccaggagatggcgaggatgtacgaatacaccatggggctcctcattttcctgcccattgccgtgcta

SEQ ID NO: 182651 - DNA, 425 bp, Zea Mays
tgtaagagcccccttaatatctgaaatccatttcctgtttacaagtgcttctttcaccgcccttttgttagcaattcttcttggaattgacttgtgcaggctaggggcaatatcagcgatttgagtgccatgcagccatctatcattccagaacaaggtgtttgaaccatccccaaccatagaaacaagagccatagagaaaaaagccctagctttgtttgggacctgtatgggaagacttgcccaaggccgccccaaatctgttttctgcaaccacagccatctcatgcggagagcccaacaaagctcagggagactagagattcccaagcctcccagctgaaggggacgacacacctttccccaggcaaccaaacagtgtcctccctttgcttcctttgtgcctctccaaagaaaaccctttc

SEQ ID NO: 182652 - DNA, 405 bp, Zea Mays
ggtgtggctccgggtacagctcacgtcgcggctctgttccacctgcccttctcagatgggtcgcgacgctcaccggcagatttcactacagcagcaaagttcctatttgagcttatgagacggactcttctgccgcgtatggggtacagggaggctaccacacatatccagctctggctccttggtgccctggtctctcactccgagtttgacgtcgtggatttccttatttgtgagatcgaggacactgtattggatggtctgcgtgctcgacgccagctaccgtatgctcactacttgtgccacatttttgcgcagctgattcggcctccacagttccagggcacacttgaggcctcacgccttgtttttggatcctaccgtccagcgcctgaggatcctgtg

SEQ ID NO: 182653 - DNA, 549 bp, Zea Mays
gaagttttaagagaatgcatttttatgtactttgttgatttgaggatctttttttctttattattgttgacgtacattgagtgatatgcatgcttttcagccgaaccatgtgggcttccatggcacatttgttaccaaataataaaagggatttgcctgggcttgcactacctacatgacaagaacataattcatctagatctgaaaccggacaatatattgcttgatgatgacatggtgcccaaaatcacggacttcggtttgtcaagactcttgggtaatggaaaaagccacaccattacacaaacaagaataggaacatggtgagctaaatttgtagtcaataatgaggggtattatccccataggtcatttttaaatcaatgatatccagatgttttcttttttctggtgtcagctagccgtcagcgacattaccggtgttcatgtgcttgcaggggttacatggcacccgagtacttggatgatggagtgatcacaatgaagacagacatctatagcttgggtgtgataatcagacacatggtg

SEQ ID NO: 182654 - DNA, 469 bp, Zea Mays
ccaggaaggaaattaggaacaaattattggatagaataaaaagagaaggaattagatcctaaattttaggagtttgttagatcctaaagtttaggagtttgtttcagaaacatattagtggctagaatagaaagataaggaattagatcctaaagtttagggggagttgttgcaagccaaggctatatatatctgtaaccggcacttgagggaattgagcaataatttagtcatccagtcttcttcctcttttccctatcaagccgacgactagggggtataaccctgtcggcgaagacgaaccgagactacgagttgcggagtcgtgggccacctaccttaggaaccaacgcccttgacactttgtcattctattcctttgtatcgttaattcctttgttgagactctattgtaatatttgcttcttggacgcaatgcaggaggtccactggtagctaatgttggtta

SEQ ID NO: 182655 - DNA, 271 bp, Zea Mays
caaagtaccagcaaaagtcagttagtggtcatgtagttccaaatcatgctggtccatcaccaattcgacctccaatgggttctgatatgggtaatagtgatggacactttgaaagagatgaccctcacacttatggaaggtttgatggagcaaaggctctccagcagcaaccaaagcttactgctctcctaacttcacaaaatcccatggtaataatcttggtacagtagtgttgaatcttaatgaagcgaatagttcactcttacactgc

SEQ ID NO: 182656 - DNA, 311 bp, Zea Mays
gataggaaaatcttatcatcgcactcctcaagcgctccccgccttgctctgccgcggccatgcctcgccgccacaagtccactgcccgagatcccaatcgacgctccggcctgatctccatttttggccttcggttggagatcgacacttttcggtgacgtccctttggctacacgaccacccaatcaggtgtttgggtcttcgatttgggtctgtagcgttggagatacccccttcaaactactaccggtccggaagccgtgcctcctagccactcacgctcgccgttcgtgatccgttctcgactgttg

SEQ ID NO: 182657 - DNA, 577 bp, Zea Mays
tgtttctctcctgagtctcctccttatcagagaggagctggggaaagtgctccctccgcctccatccgtccgtcgtcgcccggcgaatcgatcgaagctagcaatcaaatcagaaagagcaagagaagcgcccgagtccctaggccggaaagctatggacagcgccgccaactggcggtcaacgcagggcaccgaccctgccgccggcggcgtcgatccaaacgcggctgcccccgccggaagcgactggcgcacccagcttcagccagaggcgcgccacaggatcgtgaataagatgtacgtcctctccatcttccttccctccttctgatgggaactgtcaagcgattccaattctttcgtttcgccatggcggatccatgtcgcttcttttacgactcgatcgattcgattcgtgtacacctgcttccctctttacttatctctttaccttatttagatagaaacaaacagtatgatgcttgctgggtagggtctgctgatccatccttgcacttcgacctaacaattcgtttacctttctctcatttgtttactcacggaccccgactcgttt

SEQ ID NO: 182658 - DNA, 460 bp, Zea Mays
atctgaactccgtgggagagtaaggagcgagaggcagagttgtcaaacttgcggccgttgtcgcactggagggcacacagtggacgacagatctgggtggagacccaggtgaagaaatgagtgagggtgtgaaaggtgtcggacttgagccgcagagaagtctagagaatgaaagaaatcatctaggatgaccagatagtacaggtaaccggagaggctgggaacaagggaggtctaaaggtcacagagaatgaggtcgaaggggtgagtagctcgggacatggaggaagagaagggtaagcgagtatgatgcccaagttgacatgcatggcaaagtgaggtggcgtcgctgcgagggtacagaatggctgaagtggacgatagacgagagaggatgtcgtgcccggggtgaccaatacgacgatggaaagtggaggcaggggcagtggaggcgagggcg

SEQ ID NO: 182659 - DNA, 512 bp, Zea Mays
ctcggcgacaacttggtctcctggtcctccaagcgtcggaatactgtctctcgctccagtgcagaagctgagtaccgcgctgtcgccaatggtgttgctgaggcttcttggctacgccagctcctccaagagctccacattccgcttcgcagcgccacaattgtctactgtgacaatgtcagcgcagtctacatgtcctccaacccggtacaacatcaacggacgaagcacatcgagatcgatcttcacttcgtctgtgagaaggtcgccatgggtaccgtgcgggttcttcatgttcccacgacatcctagttcgccgacgtcttcacgaagaggctgccttcttcggtgttcactgagtttcggtccagtctgaatgtctgtggctaagcaccgacgttcaaactgcggaggcgtgttagcgtgatgtataggcccacgggcccagggggttcggctacaaccctagggggtgcggctgctgcctccctccctggttttggtagtgttgg

SEQ ID NO: 182660 - DNA, 963 bp, Zea Mays
attttgggattggtaatacgcgtgtgatctggtttgacaatctgctgatgaattgctcttgagcacaaatctccacagaatcttgtgttgttgctggagggtccttagatggagcaaccaactcagcatgtgttgttgctggaatgtcctcctcagatggagcagccaactcagcatcaacgtctaaggcactagcctccgacggagccgcgtgtgctgctgccacatctgacagggaggaaggtaacgttccagacggagttgccaacacagcgtcaacatctgaaacaggatactcagatggagccgtgtcagcagctgccacgtctgtgggggatggaggaagcacagtgacagaattgggagctccagcttcctccaggttcaggacattcttgaatctttgacgaaagtaaactttcagctgcttcgccttcaccggtgaaacaagaaccctgtcatcagtcatctctaacagcctaggagacaaggtccccccatcagattccaaagttcttaaatctgaaactgccacctccgagctaatgttccgctgctgcatgttctcatctcttgggcccaaacgttcatgaactgagagacgtcccgaatgaccatgttctccccttctcctactcgaatgggggggggtcttcaaaaaggaggggatccctgctgcacatgaccagaaccatcaccgcccgaagtaatagcatgaagcttaggatcggatccatccctccgcggggcagacgagaatgtgatgcggattggatacatcaacgttctcctgccagaagacaccccatcaacggcaaagggaggttcgacgatccaaagctcccttgaagcaggcaccaaggacgagtctaaacaccaagcagaacaccggtaaacagccacatcctttagctccagggtgtcaggatgaacctggtgaacactagctacaggacataaacc

SEQ ID NO: 182661 - DNA, 393 bp, Zea Mays
ccgcacgtggacaaggccttcgcagccagactccggtcgggacggccgcaatcagcaacaggtgcacaacatcgccaaccagcaccccgctggcgaggcccctcgtcgccaggagtatctcccccagggccgcgggaacggaactcgtggtcgaggccggggacgtgcgcagcagccgcgcagattttactgcctgttccacggcgaagactgcgcccaccctaccagagactgcccagagacgaaggccaccagagacaggatggcacgggccaaaccagccgacaaccctagagttgtcacgcacacatatcagcaaccccctccgccatacatccacagcccctctccgcatccaccgcaccatgcataccaacaccaccaggaggtaca

SEQ ID NO: 182662 - DNA, 714 bp, Zea Mays
caaaattctaatacgctggtactggtaggctaggtacgacctaaagaagtaaacatgcttgagggctcgataaaattgccataatgttattcctacaaagaaattgccaaacttgcacaatggtctccaaatttgcacatgttaatggtctccaaatttgcacatgtggcctgccgagtgttcactccatgttaccatggagaaagagcagtttgccaatgtagctagctgacttcacaggacacggtcgtctttggtgtcaaacattatcaacaagaagatccgacaacccaactaactcatggcacaacattctgaattctgaagctattttttcatcaacagaacaatgctgttacttttacttcctttcagccatattgtacaaatatacctgaaagactgcaatgcagaactccattcaaactgcatcaccatctgatctcgccacaggatagaatgcagttcacaacaaagaccaatgctcaaacctttgggcgccaatgtttatgtctgaattcttataaaaatcaccagcatgctttagacatgtgattggacattaaaccgagaatgttgccatagtccagcacatccacatgatggttcctcaaaatctttcattatgcatactcaatcccatgagcaccatcacatgttcgtcaccgggaacgccgtttccgttccaggaacaatatcatccccgaagtgaaa

SEQ ID NO: 182663 - DNA, 359 bp, Zea Mays
ggaaagaagggagcaggaaggcaaaaacatttcaaaagctctaagtaatggtagaaacagttgttgttcgcaaagcactgctaccatgtttgataaagatgcaagcctttcatcaatatcaacggacattatggtttctcctgagattggctttcctattccctgatggtcaacaatactgataggattggaagttgcagcagaatctggcccacatgtgctatctattgagaaacataacttttcatgtgacgcttccaggaaccgtcttcgctttggattcttcctattgtaacgaaattcaacatttctgctagtgcttggcaatttatttgtggcttcaacagcagatccaacat

SEQ ID NO: 182664 - DNA, 979 bp, Zea Mays
ctgggagaccagccatccggacaggagactggagcaccggggtaggtggcggtaccgggcctgacgacgggccgatagagccagccagcgcgacaggtggccgaaacgccgcctctgatggagcagatggcacaaccggtgaggaagccaccggtgggggtggcagcgccatacgagtacctgaaaaagaagacacggacgacagtccaaaaggagctgtaaccgggttagagtgatcatcgaggaagtcgaaggtcgctggtgtgggtggattggaatcctcagaaaagggaaacgaggtttcatcaaaaaccacatgatgggagatgatggtacgattggactggcgatcaaagcataggtagcctttgtggtggggagaatagccaagaaagacacaaagggttgagcgaggagataatttatgtggagtggtggcagaaagattggggtagcatttgtagcaaaaaacacgaaggtgctcataggatgggttgtggttgaagagagcaaagtgtggtgtagaaagtgcaagtgttttggtgggtaatatgttgagaagatattgttaatggagtcgcaacccaaaagctggggggaacactagactgaatgagggtgcgaatgatattgttaatggagcggataacacgttcaaccttaccattttgagctgaagtgtaggggcaagacatacacacatgaagttgcgagcttgaaggttgtcaaatttgcgaccattgtcgcactggatgccctggatggtgacactgaactgcgtacgaacgtaggcaaagaaattggttagggtggagagggtgtcagatttgaggcgtaaaggaaatgtccataaatagtgggagcaatcatccaaaataacaaggtagtatttgtagccagacacactggtgatgggtgatgttcagagatcgcagtgaattaactaaaagttacaggtggcgcgggaggaagaggtagg

SEQ ID NO: 182665 - DNA, 655 bp, Zea Mays
gttcaaatcttattaaagctgatctgaacttgacacagtcagtgttggctagcagtttatggcaatattggcaaagggggttttgtgcttcttttcctttacctttatctgttcaaagagttcttccatcagatgcaccattctttcaggctggtgatggccggattgctgattttgataggaacagacaactactaaaatttcgaatgctggatagcaggaaggtgggtagagcacactgtattgcagttatcatcacatcacagaagtggcatacatattggagtctggttctttacactaaacttattcttgaagttttttgctctttctattcttgcataatggcatattgattatgttatattggtacttgttaacactgcactcttttcttgtggttccaatgaaaaatgctctgattttgacaatttccttctgcactggaccaagaatttacagacatttaaagtatacatttcatagtagttgtaagttggaacatgatgatatgacatttttggtttgaatgaatatatttacttcattgatatctgatctgcttgcattttgattattgctgtgtaacttcatatcgtgtagaataagattgtacagggttctgttgatattgaattcttcttggaggcagccc

SEQ ID NO: 182666 - DNA, 421 bp, Zea Mays
ctacgttcaccctttggtccgcgtccgtgcgcgcgccctctctcactcctggcgcaactggccgacgaccgccgccgccgtactcctggttctctggtgcccaggtctagcaacgtcagtcccttcgccaggtcttcgttggggccttcactggcgacgagcacccaccaggtatgggcaccccctcccttccattcctgctgctcgaaaccgagcacccgaaccctaacttaatgtatttgcgtatttgtatttcggatctcatctaagcacaactttatatatgtactaacttccatttttttcttgttgctaaagttattgggtgtacatctgtatgctcatgtcctttgctgggtccgctcctgatcctaccatattgatgttttctgaggtaatatgatttgaactccgacgaatg

SEQ ID NO: 182667 - DNA, 354 bp, Zea Mays
agcaactattgagaaatggaaatgggcaaagggtatcccggtatgcagatgatgtagttctattcctacagccaagaggtgaggaagtgtctgtggtgaaagaaatcctaataatttttggggaaacttcaggattgttaacaaacttgaacaagtgcagtatgactcctgttcaatgtgatgatccatagcttgtggagacaaggaacacttttccttgcaaggttatgactttgtcctgtaagtatttgggtttgcctctgtcagttaagaaattacctaggtcctccttcactgagcttattgataaaattgctgacaaactacctggattgaaggttgctattattaatc

SEQ ID NO: 182668 - DNA, 447 bp, Zea Mays
tgagtgagggggagacagggatagagagtgagggagagcagtagaggatcaacttccgtcaacaccggaaggagaggcgagaccgtgaggcgaaggcggctacgatggaggcagcgtacacaagggagggatgaggcgacgaggtgctagggttctgggttctgaacttatggcagagcgacgtacacgagtgataggcagggacgaggtcggacggtgggacgatgggttaacccactattagcgggccttagccggaccgacctgtttagcgtgcttaggctttcactgtgggctcgcctagcggcccaagcccggcactagcaacgagtccaagcccgacacaaacgacaggtcgggctggcacgacagtcagtgtgccgagccgactctaggcccttcctcaccgtaccgagccacgtgccacctaacgggcccatatataac

SEQ ID NO: 182669 - DNA, 493 bp, Zea Mays
atgatcttgttggagaataccagaaaaggctggaagaccttgaagagaatgttagaatggaacagtcagatgctactaggagacaggtgcagattcagcatccatttggcattgcaagaattgactcttatgtgcttattgttatcctgatatgatctttctttatgaggctctggtattcatgcacacaaattcttctattctctgaccaatagttattatttcacctctcttcaggaaattcctgctgcctttgtttcattcagatctcgatatagcgctgcaaatgcagtttacattagacagtcagacaacccaactgagtggcaaactgaggaagctcctgatcctcatgacgtttattggcctttcttttctacatccttcatggaaagatggattgccaagtttgtagtatttgtagcttcagttctcctgatacttgtctttctcctagttgtggcatttgttcaaggactcacctatctggaac

SEQ ID NO: 182670 - DNA, 578 bp, Zea Mays
ccgaaagcagccactgaagcttttaagcctcttttcttgaacattgggcatgaggattttaagaatactattataccatcatgcataaagatgctgaaaagaaatcctgaaatcgtactacagtctattggatatcttcttaagacagtccatttagacctaagcaagtattccatggagtttatgccagttgttctgcatcaagctcggcattcagatgaagagaggaggattaatgctttgagtattataggaacactaagtgagaagtcaagtgatccagatgctctaccttccatggtcaatgctatcaaagctgttttaggaggtattgcatgtatttttatttcctaatatctatcgacctatcatgttcagtggtgttatcgcttaactcatttttaatgcatgttccagtttgcaattttgtgctgtaattcatatatctcttgacaaacttggtttgggcaggctcagaaggaaaactatcacttctataccagagaattggaatgataaatgctttagagcagctatcaagatctcctccaaagcaaataggcagacttgccccctca

SEQ ID NO: 182671 - DNA, 520 bp, Zea Mays
tcagcctaaaagaaaattcaattcaacaacttggtcatcctggctgtagtttttataagtgtaatagtcaagatactgaagattcaagctcattatcgtcatctttctcaaagttgaccatgtcatcatatgttgcttgcatgaacggtggtaacataaaaagtagcgagtcttatgatgatacagatgaaataccactatatgtaaccaataaggattttgacaaggctaaaacaaaagttagaccgagtgcgatgcgcgaggtatcacttatgtccacctgcaagactttagccataggcctcttttatgacagttcctatctatgtatgtggtttatgaaaaaaatgccaattgctgaatcatgttgtatacaggttattcttgagcttccgaaggtacgttgggaagatgttggtggtcagtgcagtgtcaaggagcaactgattgaagctatccaattaccacaaaaatgcccagaagcatttgaacgtttagggatccgaccccctagaggatt

SEQ ID NO: 182672 - DNA, 471 bp, Zea Mays
caacaatgactgtagtagcacgtggaaaaccataacgatctggaggttcaatattgcctcgaccatgaagacaatgtccctgattagaaacaataggatactcatgattgttagaataagtatctgcaataggttttgcatcaagactagccgcggggatagagttggaacgacaaatatatgttttggtggcaggtggcttagaggagtaagatgaagatgttgtggaagtatgtggtgtagtaggaataagaatattaggtgtggttataggagaacattgttgaacattcgatgtggttataggataagattgtggcacagaggaaggatcaggaatgtgaggaagacataggaaggaggtggactcggtgggaaagtatgagtgggtagacgaattgtagaagggacgattttcattaaaactcacatcacgtgaaatacgaatgcgacgagaagatgggttgtaac

SEQ ID NO: 182673 - DNA, 750 bp, Zea Mays
gtgtttccagagttacaatccttcaacttaactttatctcatctgaatcctcagtggatgttaggaaattattgccagtccgtcaatagaatatttggttgccatccaaagttgcttattgatcaaaatgtgcttgcagacccagaattgggtcattattgtgcaattctctcagcaaaaagtagtttcagaaactctgttggtgaagctgtatctgcaaagttatctaagctttcatttgcagtggctgcatgtgccttgaataagtgcggactacctgtaagtttaccctgtgctggctaacttcttttcacctgtccaccctttgtatctgcatattttgtatctattattttgcattattctaattgttgaattttttcccactcattagcttgaagcactagaatgcttgtctactaactcgagcatagatggcaaggatagcataatcgcacatggtgatggagaccacaagattttttatggaatactgagccctgtctctgcttctaagaattggctgtcttcatctgtcattagtggcattgagtccaaccttaaactaactatggcttcaaaatatctatctagccttctgagaaagcactcactctgttcacaattgaacgcaccattatctgaagaaaaggtccttaatgagtacaacaatcatcaaattgaaaaactgacgtgtgatattacaacagtaatctcaatatttgataaaaggttctccctcaaatttgc

SEQ ID NO: 182674 - DNA, 343 bp, Zea Mays
cagcaactgagtttggcagaaatgatgcgaaagaaatcctattgccaagacaacaataaggtgttgtttggtttatggacggtaacataaatgacagggataatgattcatagcggtaataattattttcgtttccggcgtatcttattacggttagacttaaaacaaacacgatttaacatatccatcacgttatactcatatgaaccaaacaacagctagctatgtgtgcaccatgtacctagcaagagaatctttagggatttggaggcatcggagacaccagcatgcgcttaacatgttgccaagtctccagagtcgttgtaaagcatctcgattctcg

SEQ ID NO: 182675 - DNA, 281 bp, Zea Mays
cagccagccgtagctagcaagctcctgctgacgctccccatggcatccttccgatttggcctcgccaccaccttcctcctcctcgccgttctgtccctccactccaccatgggcgagaccgaggtcccccgagcaagctttgcccatgagcccaaagaagatcctgctgcttatcgtcgcacctacatcgtcttcgtctcgccacccgtgaatgccgacgccatgagccgaagcgcgcatcgccagtggcacgagagcttcctgcctaccaccaccgagca

SEQ ID NO: 182676 - DNA, 1306 bp, Zea Mays
gcactcaagttgtcatgcaggggtgaagcatgaactgccaggtccagcggcccagtctcagggtacaattcaagcccatcacatcccgaagcacctgtcatgaatggatctgcgtttgtaagcgtcgcagcgccccatccacatccctcagtctgctgaggacccagacgaagatgaattgatcgtcgctgaccagcgcctttacgaggatgtcgagacggggaatccggtcgatggcgttcattgtctccatctggatgcgtgccatcagccggtggggggggaggagagtcctcagcccccgacgaagcatcaaccggaaaggccgccatactaatattgtatgacaagcaccgcttctcacttgtcaccatcccaggctcagcgatgtagagcttcatgtttcggtggagtttttttgggtcaaaacaccaagccctcagcttgaaggaggagaggtctgacttcaaggctgtggcaggatggatatctgaaaccaaacaagaatcatgcaggaggtgctccgccgttgatcttgcccaggcatgagccgggatcccccaaatctgcacgtcgaccagaaatgggagagcccccgccgttgcatgcgtaaaccgcgaccaccgcttgaattgcaagttgaaacgaggccctctgaaaactttgccttcattgaaaacccttgtggcggtgtcttcgttagggaggaatagcagaaagtcctcgggcatggcttgatgaattgccaaagaatcagcatctatgccgaaacaacgtgccacttcctccacaacctcagcgccaagaacctttggtctggtgccaaccaccatgacgtacagagctcgtcggagtgccacttcctcttgggccattccaatagagagttccagaacgcaagtaggctccacagaagattcatcacttccagcttcctcctgcattaccaacggggcatcatgatccgaaggaggaggtagcggaagaagcgcctgctccacaactcccctccggcgcttagcacgtcgcctcttcctcatgctgcgcaacgccggggcagttgcaccactagaggcagccatcagggccggctgtgtggaactctcagtccctgctgccgactgtgacggggtgatccgcctccacaccgatccttttcgctggagatcctgatggccaggtccatccattccggacagccgctgccacaccggaacacgcaacccttgttggtctcgctgctgccctgccgccttcttcacagctacagtctgaaccgagcacagagctgcgcggtggccgaact

SEQ ID NO: 182677 - DNA, 553 bp, Zea Mays
ggcttatcttcttctccatcctcagttcacttgctcccagcccccttctcatcgattgaggtaatctctcaacatagtgaatccgttgctgtatatcccaattatcaatgcgagtccgcgtgaaacatgccgtttccccccgtatggtcgctgcagtctgtggtgcgatagaggagattaggagccagaattgtgtctttgttcattctgggactagaaatgcggctctgtcctgtgattcatggacctggatattgtctggtcaagtcatttggattgtgttgtgcgcaggggtcaaatacattacaagacaaacaatatggggaagaacatggctaaatctacagtgagtttgcttaaccgcagtgctaattttgcatcaaggacttcacaagatgccgtggatgggttaagcgatgaaagtgacggtgaaacctcaacaaaaaagaagagaaccccaagacgtggaagaaagaaagccaccgttgaaacatcgagagatgtaggagaagaaatcgaagtcatcactgaacaaacggccgctgaagagact

SEQ ID NO: 182678 - DNA, 335 bp, Zea Mays
cgctgtgggaggtcattctggctttccggtgacctatcgaagaatcaaagcgagttttgcgtggccaggaatgaaacaacaagttagagagtttgtcaggacctgccaaatatgccagcaagcaaagcccgagcatatcaaatacccgggactcctacttccattaccgattcctaaacagtcatggcaaacagtcagtatggactttatttcaggtctcccgccgtctcgcaatggtaactgtattctggtggtggtggacaagctgtctaagtacgcacatttcataccaatgcttcacccgttcacagctttgacagttgccaaggtataca

SEQ ID NO: 182679 - DNA, 592 bp, Zea Mays
tacgtaggatccaagaatcagaagtcaaagaaagctttaaagagaatgaaagggggcaaggcgatgggcacggatggtatcccaatagaggtatggaaatgccttggggatattgctattgtttggctaaccaagttcttcaaccatatttttcgatcaaacaggatgcccgatgagtggaggagtacattagtaccaatcttcaagaacaagggagatattcaaagttgtaccaactatcgagggattaagctcatgagccacactatgaagctatgggagagagttattgagcatcgcctgagaggaatgacgcatatcatcatgaaccaatttggatttatgtctagaaggtcaaccatggaaacaattttcttaataaggcaggtcatggagcgatataaggagcagaaggacttgcacataatttttatcgacttggaaaagacctatgataacatacctaggaatctcatgtggtgggcattggataagcataaagtctcaacaaagtatgttatgctcatcaaggacatgtataacaaggttgtgactagttgccgaacaactgatggtgatacaaacgtttccc

SEQ ID NO: 182680 - DNA, 367 bp, Zea Mays
tcgttgaactatactgcaccagaattggttcgaagtggagattctaaagttggctctgcttgtgacatgtttagctttggatgtctagcttaccatctggttgctcgtagaccacttctggactgccataacaatgttaaaatggtatgttttaaacatctgattgatggcatttacccaatatagatttgtccttttagcatcaatcaatggcctcaactgtaattttactttctcgcttcagttttgcatgtagatcatcttgtttgggttgtatccacatcctacagcacctgttctgatgttttcccctatttttgcagtacatgaatgccttgacatatttaacaagtgaagccttttctaa

SEQ ID NO: 182681 - DNA, 343 bp, Zea Mays
catccccatccccatcttccaccctcccttgctcactcatccacacaccccacgcttgcaatttgcaattcccttgtttggggtaacaagccaagcaagcaaacctcctgctggctgctgtccaacagcaacatgcaacaacccaagcaaatcaaagcttcaccatcaccatcaccgccgaggtcaggtcacctcagctttgctcagctccctagccagcagtaactgcccagtggaagtgcagagtggcctgtgagtactggcagtacaaatcacctcatctccagtcctgcccggctcgcctgccatgcagtccggctacggcggcgtgtccgagttccag

SEQ ID NO: 182682 - DNA, 1059 bp, Zea Mays
gggtaatgaaggatcctgaagcatctaatgaatgtgagtggaagtatctaggaaaaaataaacccacagatgctgagatgctgagaacatatgcgattgggttgcttgctatggcattgtgcaggtactattagtgtcctcattgatttatcatctggtgtgataatgttataattttactaccgaatacatcatgatattcatccaattcttgcacgtttcattttttcacctcagtggtgggcaattggtagaggatgtcttgactttgggggtgccagcaaagctcatgcactttctgcgcataagagtccttggtgatgcctcatcttctcaaagagatgctaatcatccacaagacaccaaatatcctcgaggcagagacgataataggggtaaatcacgtctggcccaagatggttctcggttggatggaacaagggttgggtatggaatattgaccaacccaacagcagagaaggacaatgaacctggtgttgtaatgaggcaagcatatggagaaaggtcattggatggcacttttgcctcatcagataattctgacgtccctgaggttgattggaccaatgataactcttatggcacaattgtttgtgacacaaagtcaaaatatggggaaaagacttctgtgacaagggctcttaaagatgaagagatcagcgaaaatggtgaactgttgaagagaaagctgagtcgagccccctctcgacttagagtgaagggaaaagcaggagacaacttgcctgaatgtgaaatgacacctttatcaccaacctctggattgagaatcggaggtcgggcttccagagacaggaatgtggtgagggttgatgacccaaagaaggcaactgatgtgaacaatagttctgcaggcctcgagttgtttagcgctatttccaaagaagaatatgaagatcgtttgagggattgcattattggcttgaaggatatatctgacatcgttttgaaggcagtgagagctgctgaggctgaggccagatctgcaaatgcacctgatgaagctgtgaaagcagcagg

SEQ ID NO: 182683 - DNA, 303 bp, Zea Mays
tgcgggattgtcgaaaggcgctggtcgaggaggaacttgaggctgtagtggtcggtgcggacgaggaacgcgtgcccccacaggtacggccgccagtgtcgcacggcgtgcaccagcccgatgagctcccgctcataagctgccagcgcgcggtgacggggggcgactggcctgctgaagtaggcgatcggatgatgttcttgcagtaagaccgccccaaagccatgtgtggatgcgtcacactcgacgatgaaggccttggtgaaatccggcagcgccaaaaccggagccgaggtcacggcc

SEQ ID NO: 182684 - DNA, 581 bp, Zea Mays
atgatgcactgtaaatgataatgtcataaaaaatacgagcacaaatcgccgaaggaactgtcccaacacttcattcatgagggtctggaatgttgccggggcattggagagaccaaatggcatgaccaagaattcaaaatgaccatgatgtgtccggaaggctgttttgtgcacatcatcggggtgaacacggacctgttgataacctgaatgcatatccaatttggtgtgttgataacctgaatgcatatccaatttggtgaagaatcttgcaccctgaagttcatccaacaattcatccactacatgtataggatatttatccttgagtgtcttctcattcaaggctctgtagtcgatgcaaaagcgccaagaattgtcacttttctttactaacaatactggggccgagaaagccgatgtgttgtggcggatgatgccttgttggagcatggccttacactgcgcttcaagttcatctttctggagctgtggatatctgtaaggccgtactgctactggtgctgtccctgggaggagatgaatctggtgatcacaacacctagctgggggaaggccac

SEQ ID NO: 182685 - DNA, 671 bp, Zea Mays
tgttcttacatgtcgtaatcctcttcatttatcttaagtacttgatagccatacttcacagcctgtttatcagcacacttcaggaaatactcgcgaccttcatttcccaaccctggtattcataaagatgaaagacaattttaacataataagaacaatgtaatgacaaaaaatgtattcatgtaataagtcatccaacaatcagattggtctgattgttccttgaaaatgaccaataattgtacttgtgctcatgacaaacccatacattgatgtcgtaattatattaacattcgtgaccaacagaaacataacgctctaaccaagttgagaaccgggtgcattagtaacagcgatcattctcatgtgatctgcgactaggcggtatgtcgtatcaactccatttgtatcaacagcaccaaccttacctgtgtaatccttgaaacctttaccagtacgctgcatattattaaatgtcattgaccatggaaatcaataatattacacagccagctattgtaactcgaagtggacacggaaaacttaccgagtagacttgacgaattacataagcgtatacatctaagtcatagtggctttctttcttttgaagaatggcagctaaacattcgagattaatccttgttaagacatgcttagcttggaaaggc

SEQ ID NO: 182686 - DNA, 554 bp, Zea Mays
tatctctagcagacggctgagtaattatttatctactccagagcatcactcatccgagttaaatgcctctgctgaccttttaaaccaccactttaagagatataccaaagtaactcataatccaatggccatcgtctttcagaatgtatcctgttcttggtctagcagctctgttgctgagctgaacatagttctcagagatatatctttgcagctacaaaaagggttctttattgcaattgtaggcgaggtaactattctgattgtcacattttcgtttttgtactaaggtgttcttggaaagttatgtggtgggggtacacaatttcgttaatggtttgtttggttggggaaactgaatagcatgttcatactgtttggcacattatattatatctcaatttgccagtatctgcaaagaaatacaaccatatattcagatcttttttataataatctaatctgatgctattgcaatttttcctctgaactgaggaaattttatgtcccatatcaggttggttctggtaaatcatctttattgaacacagtca

SEQ ID NO: 182687 - DNA, 404 bp, Zea Mays
tttgaatcaaatttgagcatcattcctgtgattaacaagattgatcaaccgactgctgatccagataatgtaaaggatcaattgaagaggttatttgatattgatccaagtgaagctctgcttacttctgccaagactggtagaggccttgaacaggtattgcctgctgttattgaacgcataccttccccgcccgggaaatgtgatgcacctgtacggatgttgcttttggattcctactatgatgaatacagaggagtgatttgccatgttgctgttgttgatggtgctctgcgtaaaggtgataagattgcttcggctgcaactagccgtgcatatgaagttcttgacgttggcattatgcaccctgagcttacacctactggagttctctacactggaca

SEQ ID NO: 182688 - DNA, 317 bp, Zea Mays
gttcacagcaaccccgtgaactgtgcgagcacacgcccacgacaggtaggattttgcacgagctttcctcttcggcatggcagactgataatggtgatacgctgaggcaggtcatcactctggtgttgcgacatgggtggagtcaagtgggaaagaatcacgatgttgagtcgtgtccgatggtcaagtcgcgtgtggcgtggtgtcagcggaggtgccggcattgaccacggcgaggtgcacggaattcagacggagacacgtggaaaagtctgctacagtgtagtcatggcagatactctgttgcttgctctagg

SEQ ID NO: 182689 - DNA, 449 bp, Zea Mays
ggcagatttggtgtgatgttgtttgtgggctgttggctacttcctccacaagaattttgctaaatggcgttcatggggagatcatttcgcaccagaggggtctaaggcaaggagacccactatcccctatgttgttcattttggttatggatgttctgaacttgctcattcaaaaggcttccgatgaagggttacttcagcagctatcagctgggactttgcatcacaagctttctctttacgcggatgacgcggtggtttttcttaggccggtggcttcagacatcaatttggtcctggagatccttcggctttttggggaagcctcggggctcaagaccaatgtcctgaaaagtagtgtgttccccattcgttgtaccgaagatgatttgatgcgggtccaagcttctctcccctgccccatttcagatttcccgtgtcaatatctt

SEQ ID NO: 182690 - DNA, 610 bp, Zea Mays
gcggagcctcgcgtcggggtcgccattggcactgatctggttaacggggatcatccggcagctaaaggtgaggatcatattaagagaagagtgctgtgaatttgaatgatgacttggtctcatgtaatgcagaggtagtggaaggtgctggtgacgaggacacaggggacggagggaacagtggcctggcatcgactgctgatgtgtttgctgaggagatggcaccctttgaagatgactacgatgatgagatgttggaggagcagcttgttggagatgtgattcgtgcttacagtaatggcagaaacttcgattcagatggagtggattgggaggcagaggatgagatggagttcaatgacgatgctgacaatagtgattttatggatgatgctgacgatagtgattttatggatgatgcttatgaaggtggcaattccaaaccaattcaaaatcatgctaagttggaaatacaagactgggtgaaccagaaagttgttttgagtggagggaggtgtgaggcgaggggcgagggggatctggaggaagaattggatgtgggaaaggaagcagatgaggaggacgtggaaccaaagagtgaagcggctcc

SEQ ID NO: 182691 - DNA, 423 bp, Zea Mays
tccggatcttccttggatggatggatgctccgatctccccatcagtttgatgtgaagtgatttcgtcgcagcaggggaagcatgtgttgtttggaatttaattggccgtgaaactcgtgttatcttatagctttgactacccgtagaaggccatctctacggccatctattcttacttcttaggctgtgcagttggtccagattgaggcggtaggataggcaggctgtctgaaacttttgctacttgtcatgtgagtgtcggtttcacagatcgagcctccctggcttggagtattaataaagcttagtcaaacctccctggcttggaggctgtggtaagaaccaaccactatctcgttagtgaccaattagttcatggagggactaaactctaacaaggctacaggttagttctggagatca

SEQ ID NO: 182692 - DNA, 352 bp, Zea Mays
tccattgagaggtataaagctcgtcttgtggcccgtggttttcaacagactcaaggacttgattatgatgagacttttgcacctgttgcgcatatgactactgttcgaaccttgattgcagttgcaacctcatcttcttggactatctcccagatggatgtcaagaatgcttttcttaatggcgatctacaagaagtttatatgcatcctcctctaggggttgatactccctcagggcatgtttgtcgtcttcatcgcgcactgtatgggctgaaacaagctcctcgtgcttggtttgagcgattcatctctgtcatcacagttgctggtttttcttctagtgaacatgatc

SEQ ID NO: 182693 - DNA, 830 bp, Zea Mays
atacatcgctgatgtgttgtttgccttgattgctgaagagacacatattagttccctatcaccacatgaagggcacctcctctgagccttgtgagcgttgcaagaaaactcctcattgttcagaaaattactgtctgttatccaaagaagttggttgattatcatgcacggtgtgcagcacatggtcatggcaccgattctactcatatttgcaccgagttcatataacatggatacatcaacataatatgagttgattttggcaacaaaaaggaagaccgaggtcttggttagtctcatggattgggatcaatggaacattacgcaacctagggacattgtccaaagtcaaggggaggtcaagcagggcggacattctgattctgcctaggtcacgcttcgctgcaactgcaccccatggatcaaaaggcctaagctgaggaacagtggagaggcatgaagggggaaatggcgcaggtttccgttggtgaaacatgggagagtgtcgagtttgaagaggactaccagcaatggcggacaagaccaagcaactttgggagcagcaacagctcatgcaaaattaagcatgtgacgatgaaattgtaaacacaaaaaagagaacagcatgggcaatcaattttactactgcctggtgcaagttgttggttactagcagttgatttgtggttggcagcacttggttgcttgagaagagaaagcaaggagcaaggcacaaggaaaaaggcagttgtgtgcatgaactcgactcccgtagggttacagtgggtggatcgacagttccattggctagcatatattgccaaatttat

SEQ ID NO: 182694 - DNA, 288 bp, Zea Mays
caaacatattaccaccatcctttacagctgtgacagttaaaccagcactggtgcttccgagaccagttgtgatcacagatcggttgctcaatttagcagcaaacttcaaaaattgggatttaccaatacctgaaattcagtagaacaaaatatagttgcaattttgcctttccttttctaaataacgtttttcctcattttacatgaatagttagggccaagctttttgcgtacattaacaaccggagcacccaccatatttaggcaatggttcaatttattatctca

SEQ ID NO: 182695 - DNA, 777 bp, Zea Mays
ctacttttgctagttcgcggtcggaagaagccatagccatccaggaagaagaagccatagcaaaagcagctgaggggggattagagaagaacagcagcgcatcagatagggagaattgaagctgatcttttgtatcatatatctttcctgcatgcttcatcagtccgacacttgagagaggttcgagagagaagttattaagctgcctccacactggtagcaagtgattgcatgcatgggggataggacatggcagcagccacatgcgcaggcttcttccccagacgcagggaccaaggtccaagcttcatcatcgtccgtccatggcaacatcatgtaaaccctaacacacatggatatatagctggattcggatcttgctctattttcttgcgaatatatagatatatagatggatcggaattgaaggtttgctttttttttttttgcttgcttttgactcctttcttctgatttctgaagcatatggtggattatatatactgtggcgtcaatctcttctctggttttcatcagatttttaattttccacggtggatttaatttaactgttcaacatagaatttgctcgatcggaaattttgtctttacataaacttattttttttattggtagcatttccagtatatcattttagtaactgaccaaactaaaatgatgattgataccagcctaatttataattttgcgtgtattgatttgtgcaagtgcagcagaaaggagccagctggaggcggcggatacgacgacatggc

SEQ ID NO: 182696 - DNA, 327 bp, Zea Mays
ctccacctcccggctggcacatgtctccatgatttgttccacgtcagactactcaagccgttctaggggacccttcgacgactccaccacacgtgccacccgtttaggatggccagttgttgccgactctagagaaagtattatgtgcccagttacgttgtggtgtctagcatgtgctcgtacagtggtagggccaatccaacgatgatgctacttgggagccattgcacgacttcagatcgctactcagacgctcagcttgaggatgagctattccaagaggtggggagagagattatgactggtatatcttatgtgccgaaaaat

SEQ ID NO: 182697 - DNA, 359 bp, Zea Mays
gcgcagatgcggcaggaacgccaggagatgcaccaagagcgagaggatatacaacaggagatgcgccaagagcgagaggagatacgccaggagagaagggcgcaacagcataagcaaccgcaacagcaacagcaacatcagcaagcaccactgcctccaccaccaccactagttccaccccgagataagcaccgggagttcatgagccataagccatcgacattcgctagccctcctgatccactggacgctgatgattggctagaatctgtggaaaagatgttgattattgcacaatgctctgaccgggagaaggttctatatgcttctggtcgtatgacaggtcctgctgctgattg

SEQ ID NO: 182698 - DNA, 390 bp, Zea Mays
ctctgatgatgcgacgaaggagaggcgacacgatgtcatccacatagagtaggaggtaagatttatcgtgaccaaacatggggtgttgagtgaaactacaaaggacccaacatgctttatagcactcaagtgaaccatcagccatgaacttgtgctcgaacacccacttggtagtcaccacattggagcgaggtggtcgctgaactagatcccaagagtggttaccaagaagtgtagagaactcttgcatagctagacgatggttggggtcagtgagagctacgcggtaaaacaataggatggacgatagaggagtcgagcgccaatagccggaagccggacttcgcacgtgtcgtcatggcgtgctgatttaccacatgaatgacagga

SEQ ID NO: 182699 - DNA, 800 bp, Zea Mays
gctgggaaagcagtaactttagggttgcttggcaagaaatgtgaccttttggtgaacccgaaacccatgatcgtcccatcatggactgaggccggcgtacgatatatggtggcaaaaaatctaggaaaattcataaccattggtaacttcaggtgaggctgcttcaattctatgaactcgatcgtatatatactacaaattaaaatccctgataatatgcatatatgattctcactcacgtccgtcttctgcacagcatgctcgaagatggaggcacttctcttagttttggcaaaacatgtgaaagatgtcaactaaaatgtgtgatacgggttcacaacccccagttctattggaaggttctgttcgttatcccttcgtctagcttatttcatccttagcttttaattaagctgccttctaattaatttcttcatcacgtatacgtgactaacatctaggctttgtctcatgcatccttctattagattgcaaccgaaggagaccctggttttgcatattcctacatcaatggttatatctcgtttgttgataaaaaagaaggcatccagaatattgtcgaggtacgtatatatacacagtggtcggcccataaatattgtaaaatcaaataaaattgttatactaaacggaagaaggcacaatcaagattattacacttcatgacgaactaatgtctctttgcattaattcgctcactaaatttatagcccgtatggtacacagattattattgctaacagaggtgaacggaaaaggttgagcagtacccgtgccag

SEQ ID NO: 182700 - DNA, 466 bp, Zea Mays
cagcaatgctagccgcttctgcatatgcatcttgaatgttttcggccagcctatgaaggaatatgttagatattcctcctgctgcaacaatcaagggtccagtggcaagagttagaagtgctatttgccaacaattcagaaggccaacaatgagaccaacaacaaatgtagccatattatgtatgtagttcccaacctacaaagaaactaagttgttagaagaccctaaaagtgatgagtttcactctgcagatcataattccggagaaatagatggttacttcactctttaggcttactttctcgcttatagctgactgaatgagcaatacatcactgagcacttgactaacaatatctccgttgttaccatatgtatcaaaaaaactcatgtcttgatttagcaaaacctgaacatattttgatctgatgacagcagtctgccgttccccagtgagaatccagc

SEQ ID NO: 182701 - DNA, 1001 bp, Zea Mays
gccgccgcccgcccggccatggattccccgaggggtcccgcgagcttcgcaacgcaggccaacgccctcctccgcaagaacctctgcgttcaggtacaggcaccaccgctcttcccccacttcatcttttcccgcttcccttccacttaatctatagacgtagttcagctcgtcccgcctgcgaggtgctcgtggattttcctttggcggaccttgagggggatagaagcacctgtttgatcagcaaagagctgctcgagtctcatatgtttcgatttcagaggatcttgtgcggtctctgtctctgggttgggtccaatctgtgtgcgtggtgttttaggtgaaccaaggcgggtaggtagcctttggtgtgttggcctttcttctcctgtgaatgcaaagggtacatcagcatgataaatgcccagtgggcaagcaaaaaatgctacagattattctagttaaattttcgttttcctttattctttggaatttatccagtgcattgcacgctctgcatttgataccagtttcgcaacaagtgctgctctagcctggcggttaaaagctccaaatatcaccttgaagacccaaagttcgatttcactgggagacgaattttttagtgtggttaaaaactacctttgttgtaccttatccgctctcgtgttacaatgtcattctctcccgaccttaggcattataccggcaggacgattattccttcactggccaagttttttttcttaacaagtgctgaagtgcttataatatgtttttttacatgaagcaatgccaaacagccaaagctcgttacgtctccatgggcagcgcctgatttttatattgtcctcattgcagaaacggaacctcaagacaaacatcggcatcactttcttcccaatcctgatttgcgtgcttctcatcgtgctccagaacgtcatcaacagcgagcttgacaagcccaagtacaaatgcggttgcgtctgcctcgagaccag

SEQ ID NO: 182702 - DNA, 412 bp, Zea Mays
agcttccaggtctgcctctggctcgcgctcgtgctcatcgcctggtcccagctcttcgacagcgaggtcggccgctcccgtaagaccgccaggatcctcaactacgtctccaggttcctcgcctccatgctcatcggctccgtcatctggctcgtcaagaccttcctcatgaaggtggtcgcgtccacgttccaccggaaggccttcttcgatcggatccaagagagcgtgttccatcagtacgtgctgcagacgctgtcaggcccgccgttgatggagctggcggagaatgtggggcgcgagggcagtggccttgggcgggtcagcatcagcagagccaaggaggagaaaggcgtgccagaggtgatcgatgttgttaagctcaggaggatgagtcaggagaaggtctcag

SEQ ID NO: 182703 - DNA, 288 bp, Zea Mays
tgcagcctttggtgctcctgtttctgatctattcgcctttcgcagcttggccgtagcactgcaacatctcacctttacccgaccagacattgcttatgacgtgcaatagatctgccttcatatacatgatccaccgtccacgagagcctcatctcgctgcactgaagcacattctatgctatgttcgtggcactctacatttgggtcttcatctgtgtccctcttcccaggatgagttggtcgccttactctgactgggttggatgtcctttcacacgcaaatccact

SEQ ID NO: 182704 - DNA, 566 bp, Zea Mays
ttttttttatctaattaaagtatgacttgttttcactaattttggcgaaagttgctgtacattttattttggccaacgcatattttattaaattagtttaacaaagcttgttattagaaactcgtatgcctcattttttatcattctggctcataccgattgatgaatatttgactataacctcatcaagacaaaagtacaatctagctaaggataggaatttggattctaagtaaatgagttatctacattacgaattaataagtacaagggattatgttcttaaagaacatcaaaattagtgggagcaaaatcataacaattaagtatcatagcttgtgacataagttattaatatacctctaaaaagattaagatgcccaagagaaagttaattgggctaatcataacaattaaaggctatcatttagcccattttacccctagtgtgatttctattctatgcacaatgtcttataccctaggttccaaccatattgtatcgtgtcaattctagaaatgtaaaaacatcaatgtaaattacataaaactataaaagtgaagga

SEQ ID NO: 182705 - DNA, 414 bp, Zea Mays
acaccaataacagtagcttgtgatgttagagactgcattgctcaaggaacctctgtttaccctgtaacaaaacaacattgacataagtaatcttctcatgtcaaaactgaccatagcggtagtataagcatggtacaacattaaccaaatgtgacatgaacatttgttttactggaatttaagtagctgccataaatgaaaagtgaatggaacaaaatcagctagttaaagcatatagggcaactccctaaacatttctttgtacctagttttgaaatcacatttatcagtgtttaatcatataaagcaattgtatggcgctaaatggaaagataaattaagacttgcacaagatctgactgaagtagcacatcattcctttgaagcccaaaccggtgacctacaattcctaca

SEQ ID NO: 182706 - DNA, 668 bp, Zea Mays
ccacttacaggaaacagaagtggaagatccaggagaattctgaggatatttgtgccagagcgtcgtctggaatttctcataggaggacgaggaagtcaagctcgtccccagctgctgttctgttgtcccctgctgctgagaagatggaagtagcagatgataaggatgaacctggtgttaaggagttagctgaagttaaagtgttcgccaccacagcagtaccaattattgctgagagtacaagtaagaggaaggaagtagaccacgtccctgctgagctgaaacctgctaaggtagagttttacggcagaactacaagatcacactcaacagcagctgctgcattatcgcccactgtgattggaagcaagttaagaaaggcaggagatgtgcacacaaacggagaggtgtctaaggacttggaggttcctcgaaacgatgctcctattaccaggtcactgaggaacagagttgttcatattaacaacagcgcagttgatggaactcgtgcccggaagaagcttggaaccaagaggaagcccagtagtagaccagcaactcacgggcgtcagccacctgtacctcctgtagaggataaagaacaagttgctgtgccctgtaagttctcccaacacaggcgatcaagcagaaaccgtcctcggcctgat

SEQ ID NO: 182707 - DNA, 573 bp, Zea Mays
ttgacttggggagttctggtagattacctacatctctggaatgcaatagctgatgttgttttgcaacctaattctgaggataagcatatcttttcaatcgcttctaatgggcagtattctgcatgctcggcttataagggtttcttctctggctctgttggttttgagcattacaaaatggtctggaaatcttgggcacctcctaagtgtaggttcttgctttggctggtggcccataataggtgctggactgcagacagacttgaaaaaagaggactaaatcatcctcctagatgccctctttgtgaccaagtgcctgaaaccatcaaccatcttttggtttcttgtagcttttccagagtatattggtacatcactcttcggaaattcgggctccacattcttgcccctacccaagatgacacaaactttctgcagtggtggaaacgtattgctaatattgtgtcaggcatgaccaagaagggggtaaattcacttttgattctgggagcctggatgatctggaagttcagaaacagagtggtgtttgacgggtcccccccccaatatcac

SEQ ID NO: 182708 - DNA, 696 bp, Zea Mays
gttcacatagatccgctgtggagacgccaacaccaagctctttcatttgaaagcaaacactcgtcgaaggaaaaactacatccactgcttacagtctcaaggtggctttgttttctcccagcatgagaaagagaaggtgaccgacgattacttcagtgagcacttgggcacttcgatcactagaaccatggcaattgattggcaggcattgggatatgaaacgagggacctccaacaactagaattaccattcactcttgacaaaattcggcgtaccgtcttttccatgtcgtctgaaaacgcaccgggtcctgatggctacatgagtgccttttttaaaacatgttgggacatcatcggaaacgatctgacggtcgccctcaactgtctatactaactcaactcccaaggtttcgagctgttaaactcagctaatattgtcctactcccaaagaaagttgaggctatcaagatcacagattttaggccaacaaaccttattcacagtatagccaaaatcttcgccaagttgctggccaacagactagccccacacctaaatgctatggtttccaactgtcagagtgccttcatcaagaagagaaacatccatgataatttcctttatgtgcaatccaccattagggaaatgcacaggcataagacgcctactctcttcatgaagctcgacatcca

SEQ ID NO: 182709 - DNA, 574 bp, Zea Mays
acgtgctatagtggcgtcaccctacaacgcgccattagcgccacgctcctccagccggaacagcagcaacgcgacaaccccggcagcacgacgagccacgacaacacccgaagcaccagtcaagccacgtgccccaccagggacgcgattgtcctggctcaccagaagagatggcccatcggcacgaagaagggttgtgcttcaactgtcccgagaaattctctcgagatcatctaagaaatgctccatgaatgggattttcttgctggagatggaagacggcgaatatgttggggacgacagcgtcaaaatctccctcaatgcgctctccggcatgtccaccatccagaccatgcgccttggcatgtccatgcgcgaccagtccctcgtcgctctggtggactccgggtccaccaattgcttcctggtggaacatgtcacgcctcgccttggcctatgcacagcacccacaaccggcatgacgatgggggttgccaacgacgaacgcctaccccgtacaaggatttgccaaccctctccttcaacatacaaggcgagttctgcatcgacttca

SEQ ID NO: 182710 - DNA, 617 bp, Zea Mays
aattcaataatcaacttaatttggctcacagttttgtcaatttttggcagggaccgctgccaattttttagaatctttctggtggacttgaactttgctgttaaattcttcgctttgtccaaaatgcttggcatacccgtccacgaattttgaaaaattgtcatgaactcgtcaaactgtaaccagaaattttcaaatctaaagatcttgggcttaggaatctttgacttaaaagaaatcaagcagggcacatgatctgaaatatccctgggcaacgttgtagcgagagtatcagggtaactgaccgcccactcttgcgacatgaaaaaccaatcgagtctctggagaaggggttccctttgtttattcgaccaagtaaaggagaggccatggagggggatttccaccagatctagctggctgattgcctcattaaaggccagcatcatattaatgtcccccctgcagaatttctattctcaggcctacgggttaggttaaagtccccaacaatcaaccaacgcttatcggagggcatgttgatattagaaaaccagtaggactgtatataaggataccgtcgaagaaaaccaatgcacatcgatgtaatactggag

SEQ ID NO: 182711 - DNA, 484 bp, Zea Mays
ctccgactgggtgatcgactctggtgcctcctaccacaccactcccactacaggcacgctctctcgctcccatcccccccattcctctcatccttcatcgatcgtcgtcggaaacggttccactctgcccgtcacctcagtaggtgcctcggttatccttggaccgttctacctcaacgacgttctggtagccccccacatcactcataatcttctttctcttcgtcgtttcaccactgacaactcctgttccattgagtttgacccctctggtttctctgtgaaggatctggccaccaagactcccctcgcgcgctgtgacagctcggggcccctctacacgctccggccatccacctccggcgcgtctccgcctcctgccctggtctccaccacctcctccaccacttggcatcgtcgtctcggacatcccggacctgacgtcatgaccaagattaccagtagcctagatctttcatgtagt

SEQ ID NO: 182712 - DNA, 1013 bp, Zea Mays
gtcagatccaacgggacagaaagttaggccttgctcttgtgagagcttgctggcttgcgttggataaatttgttgcctcaaatggtcacatgactatgctggagttgtgtaaggtaaaacacacagcacacatgcattgttggaatgtgtggggcttgttaatgacctgattcgattcacagtttcaggcacatggtgatcggtatttgcgtgacttaactcaatatgcaattggagttcttcacatcataacacttatgccacagccacatgtccgcaaatcaatagtgcaggggacattaagcaacaatcgtgctggcatggctgtcttattagacacggtgaaaagtctcgactatattgatcatgaggtacagcttcactttgaaaatatgaatatgaattaaataacctttgcaattccctgatgatttctaaagagttattttaaacattgtctcttattatcaatcagtgaacttcacaattctgcttattttttgagctataaacctatgtcattctgtgctcatttcacaaacccacctgtgtttggggtacattctcacaaaagtacaatttgtgagcgttctcctttcatggtcagctgggcccacatgcaagcggcatgctattggcagctgagcccgcatcagattcgatgaactgtgactgttgtgggcctgattggtcatgaatggtcataattttgtagttttgtgagaagactactcaagtaatggtaggtttgcacaaaatttggtaggcctgtgactattaacccaagatattggtaaggttgtgaaaaatctactttcactgtttttgtgaatcaggtgatctgtccagcactgaatgtcctcgtcaatcttgtatgcccacctccttctatcagcaacaaaccattgtcaagttccaatcagcaacctgcagctgcacaagcgcttgcttcagaaagcagagaaaagaactttgaaaaaactatttcagataggaatctacttacaaacctg

SEQ ID NO: 182713 - DNA, 549 bp, Zea Mays
agggtgaccactatgccctcctaacggagcaatcggcttaagtcggcgacgacttaagacggtgcaacatgctcgcgcttacttaactcagggtgaccactatgccctcctaacggagcaatcggcttaagtcggcgacgacttaagacggtgcaacatgctcgcgcttacttaactcagggtgaccactatgccctcctaacggagcaatcggcttaagtcggcgacgacttaagacggtgcaacatgctcgcgcttacttaactcagggtgaccactatgccctcctaacggagcaattggcttaagtcggcgacgacttaagacggtgcaacatgctcgcgcttacttaactcagggtgaccactatgcccttctaatggagcaatcggcttaagtcggcgacgacttaaggcggagcaacatgctcgcgcttacttaactcgggtttcccgtacaatggtgatcgctatatccagtaaacaagtttcaaaatcatcacacagcgttttactactgcaagtttacgtattacagaactttaaaaca

SEQ ID NO: 182714 - DNA, 554 bp, Zea Mays
tgctgtgccaagaacaaccccgaacctgcaagcaaatcgaagaacaagcaagaacgagtggacaagcaaacagcacacagtctttgcccgaaggatgaatctcttactcacgaaatgaggttctgaatcgagtaaaacaggtgctcaactgagtcacgagtttacaaggaagaagcagcaactttctttcaacaaaacaaaacctggggttcagggtgaggactacagtagcgtttataggtggacaagtgatttgggggtggaaaccctaaagggggcgcgcccctgaatgggctctaaaggaacacagcctacaacccaggttggatggctcgacttctcctggactattctgatttgctcgctttgaatctgacagtgaggactagctcatttgaaagtagacttcctgatctttccaacatgtccttaatcaccttctttggatctcgtatgacggagttatggtcatattggtgagtttattgctgctggtttcgggaagagttgggaacatcagtgcgttggaacttggacctcctcttaatgatgct

SEQ ID NO: 182715 - DNA, 516 bp, Zea Mays
ggaatggccggagcacgtcattcatcagtgcctggaacgtggcgggggcgttgcagagcccgaacgccatcacgaggaactcgtacaagccatcgtgtgtgcggaacgcggtcttgtgcacgtcttctggccgcatccggacctggtgatagcccgaccgtagatccagtttggtgaagaatttggcgccgtggagctcgtcgagaagctcctccacgaccgggatggggaacgcgtctttgatggtgagggcgttcagggcccggtagtcgacgcagaagcgccacgagccatcgggcttcttgaccaggagcacgggcgatgagaatggggagtcgctgcgtcgcacgatcccctggtcaatcatggcgttgcactgccgctccagctcgtccttgtgggcagccgggtagcggtacggccggacagccaccggtgacgcatcgggcttgaggaggatgcgatgatcgtgggcgcgcttggggggcaaacccatcggagctgcgaagagccccc

SEQ ID NO: 182716 - DNA, 372 bp, Zea Mays
aaacaaccaaactgtgctgattgatgggagtgaaagctttgtgttagccagccaattaacgctgaaacaagcacattaaaggccttattatcaactgaaccctcttgttacctgccgatcaatattcttagcaccgtcctgcagatcagccacattactgcagctctccttggcctcaacctctgccttcactggaggcgcagaggggtgtgccccctcgagcaggaggacggccctcctgatcccattgagcctcgcgtccctgggcacttcgttcatcacggcgaagggttctccgccctcatctctgaccctgaacccgacggcctccaagagctccatcccgccttccctgtccgccaccgcctcttt

SEQ ID NO: 182717 - DNA, 582 bp, Zea Mays
ctatttttgttattcatgcctgaagaaaatgcattttggtatgtcttcatgaaatggaccttgtatatggaagggaaaaaaatattcaatggcccttttttagtgcaaggctgtatggcttctccattttgacttgcttttgcatttcagggccttagtaggggttattgatgattattttgatggatactacactgaagaaatgattgaatctcaggtagttttgaagttgtgggtcttgatgcatgcactcttttccatggaacatttgaactatgttgctgctcaatacacaggttgaccaactcgtccttgaggaggttgtacgagaaaggttccctaaattgggtatgttttccaatgatgtcactatatttgtctttgccatgtttaattatatgttaaaaaaaatcacacatatgtttgtgactattgcttaatattttgaaggcactgtatctcaaaatatctacacctaaatgttttttctattgaaggttcttgttatggttattacttggcacttacatcaattgcaattttcttcagccaaacatatggaattcttgggagttcaagtgg

SEQ ID NO: 182718 - DNA, 312 bp, Zea Mays
acaagggacatacaagcggatatcctttggtgtaagtttttttgcggacgatgtagtgctagttgatgaaaatctggctggagtaaatatgaaacttgagttgtggcatgaggctctagagtccaaaggttttagacttagtagaactaaaaccgaagacatgagaagttttttatagaatacgcaggagagctgcgtatttatgtagtatattaagaagaaagaagacatgagaagcgacttcagcaccactacacatgaggaaggatatgctagtttggaaggtcaagtagtgcctagggatgatatctt

SEQ ID NO: 182719 - DNA, 578 bp, Zea Mays
tgctcctgtcctgcttggctgcttctctgttctctcctgtaatttgttgactgttgctcaaggcctgcggctcctgctttctctcctcccaatcttgtttctctcctcggttattcccataatccatacatattcagtttgtaatttgttgactgttggttagaactcagatgacagagggtgagggtcaatctgaaagtgcaagataaatgtatgtctcctcggttattccctattttttatctataaatgtatatattatataagttggcaaaacgcctagaaaaacgcctagcatcgcctaggcaagcctaggctggactagtccctaggctaagggtcatcgcctagattccgcctagcgcctaacaaaactttggaattgcgtattttttatattaatagaagaagcaaaaacacaaaagtcatagccaagaggccacacaagaattacaggggataacaagaggagagaaacatagacaaacataacagccccaaacacacaattacacgttgcgactagtggaggtatttctgcaattttgtggtcttgccttcattgggcactagtggag

SEQ ID NO: 182720 - DNA, 274 bp, Zea Mays
attccccaatcggcgacatttccagcaatttggtagtttcccacgcaggctgcgcgcaagcaaccatcccacccctcttccgcggcagtccactgcctcccggaaaatcccacctcgctccgatccaacccgtccccgcaaccagcgcagccgccgcgacggggtccgactcccggccgatctcccgcctccaccagcgccacggtgagtggccgcccctcccgatcggttccttcgatcgggccgcatcttccctacccttccctcactctct

SEQ ID NO: 182721 - DNA, 289 bp, Zea Mays
cttggttgtactatacaagaccactcaatgtacatacaaatcattgggattctgggaaacagtaagcagtgtagaaaggtaacaggtaatcacacagaaatgtgtctaggcttccaaactttcaaaaggaaagaagagagcagtgaaaggaatgttattcctttgtggctttgtccttcgaggaggaaggttctttttcgaaccgcacagcaaggggtatagcttcgtgtaataacttggcgccttgcattaataccctggcattctatctacttttctacaccacaag

SEQ ID NO: 182722 - DNA, 462 bp, Zea Mays
ccggagatgcttggatagaggatgcccaaggtcacagtggatgaggtcgaaggggtgagtagctcaggatatggaagaagagaagggcaagcgagtgtgacgcccaagctgacaggcatggcaaagcgaggtggcgttgccgtgggggcaagggatggccaaggtgaccgagctggagaggacgtcgtggctagggtggccaagacgacagtgccaagtggaggcagaggcagtggagacgaggacgtagggtgtggcaacatgggcagagaaaggtggggcggggaagcgaatgggatataggaggccagagccgtcgcatcgagcgaccatagctcgagtggtaatatctcgtatggtgagcccctagagatcaaacaccatagaacaatggttgtcagtggtgaagcgacaaaccaagagaagttctggatgatgttggggataacaaggatgttgttg

SEQ ID NO: 182723 - DNA, 335 bp, Zea Mays
ccggctgttgggatatccgtgggcgcctatgctgatacgtacagcagacaaaaagcatcaataacaaggatcaaagtacagggctctggtaacattattagacatgtgttcctcctctccaatagccacagcaggttcacaagttgaagcactccagctggcaaccgagtcaaaatctcttataggttgggccgcctcgactcgtggggcagattacgggcaattagcgctcggcatcaaggctgcttccaactcaggtcgtaattcttcatgataggtcgatgtatatcctttccatgcccctttgcatccaccatgcctccaagccggcaagc

SEQ ID NO: 182724 - DNA, 290 bp, Zea Mays
aagaattgtcggtggtgaaccgacagacagaaaggagattgtgagtgatgtgaggggctacgagaatgtcgttgaggtagaacggtccaggaagaaccgaggcaccgactgaggtgactagaagagtgcatccgttgccaacgacgatcgaggtagcgtgtgtggaaggaggtgggtaggagtgagataacatgcctgtagtgggagtggtgtcgtaggaggcaccgaagtcgatgacccagtcagaggatggtggatccaacaccatggtgctgtaggcagcggcgagg

SEQ ID NO: 182725 - DNA, 967 bp, Zea Mays
ttttaaatggacttttggaggctggtgccacagaaagttcaggttctcccaattgccaactaggaaatgacgtctcttcagaacaatcaacaacaattgatattctgcagaagctattccttccatcaagtggtccatggcatgtgaataacgagtttgtttctgctgctctcatgaagttgccagaaaatggtttgttctactctatattttctgttgtagaatagcttttatgcgtcattcaaagtatgctaaatttttccttaattttctcatgttctctagaacacagcaggcaattgcacaatgctaccagcgatgtgttatccaagcttcatgtggtgatgcgtacagtagataatcttcacttgaaacacaggcagttagcagcgaactatcaaaaacaaagagattcgagtgcctggaacagagctgaacagaaacgtctgaaaggtattttgtatttgttttgtggatggtatttttgagggtgctccatctttaatagtacttttgttcttaactgaaagtattttagcaatatttaaagttttgttctgtgccctagatcatcaaacaagtaaatactaatctccgttaaaatggtgaatgccttgtggcaataatattttcattatgttgtgaaactgtaaatcgattgtttcttgctgtggcactaccaacacatggtattaccaatactattctttattctattatgtgtacctagctgtcgtgtaatggtaaactaacccagtatttatgtacttctcaagaggagttgactagtgttgttgccaagttggaaggaagcaaacaaaaactggcagtactgaaagcacagggagacaataaacaagcaacaccgatcctggttcctacgctgggaaacaaaaatatgactgcagaaaaggtgagagataaacaaacagaactgcaagatcttgaagctactcacaaggagtta

SEQ ID NO: 182726 - DNA, 850 bp, Zea Mays
ctgggtccgtcttcgaagcatgaacacaaagaggggatgtcatgcccttactgtccttggagaaagcctgtcagtaacttcctcttatgcttctgtctttctgacacaattgtaagctcatcttggtattgaatcctggcaatgtacttatccagaggtttgacttgtgtttcagatatgcaatgggcggatacaatggagacaagatggtttctagcgttgagatcttcgaccctcggctcaacgcctggaggatgggagatcccatgagcgccccaagagggtacgccgctgcagttactctggatggaagcgcgtacttaatcggtggcctggagtccaatgtgcagatcctagctaccgtacgtaactgttggctcctgacaattctacatatatagatgtttgtgctctttcctgaagatgctcttctcttctgtcacaggttgaagtttacaacgcgagctccggctggtcagttctcggtttgagttcactcgggaagaggtcctttgcatctgccgtagtcatgtagttactgatcacgatgttaactactgtcgataacatcaggtttaacatagtcgctgcgttatgcaaggagtagttagggtaaggtgggtggggctagatcacccttccgatgtgtaatgtgttgagatcttcatcaggggaaattcgcatggtatgggagactacggcccgtatacctttgaaccctcgtaggaagtcttgagaacccttgcatgcattcgctgttgtatgcgtgccatgctgttgaatttagctgtactacaccagatagtgatacccgaactcacggagtttaatggaaccggatagaaagctg

SEQ ID NO: 182727 - DNA, 1100 bp, Zea Mays
tgctagtgagaatcgacaagggcctatgaacggaagatggcatgatggagaccgacagagaggtttttacgaagaggaaaagacggttgacagggcaaagaaccctagcagcttgtcgagtcaccgttggatggatgtggcgagggtctcgatgaagaagaagaggatggtacatcacctgacttagcccgagagcaagtgaggtacccgctcgtgcatgtcactgatagacaagcacaaggttggcatagcggggaggggctagactcggtgagggcattggggaggtgataaacagtgatggattagggaagccacaaacaaagttggggtcgctaggactgccatgggctgggccgtcggggaggcacaccggtcgatcgagggcgggaggacaacaggggggtcttggtgcataggggccctaggggcattggtgttgcatgcgggagcaatgtaggtcgagctacaaagaaagccaaactcagcggtggagttggtggtggtgctgtagggggatgagaaggggaagtctgtgtcgacgaaaacatgatgggagatcaagatgtgatgagtggcgaggtcaggcatcggtttcccttgtgctcagggagtacccaaggaagacacaacatgaggagcggggggaaagcttatggggagcagttgcagaaaggttagggtagcacgcacccccaaagacgcgaagatgtaggaaggcgactaatgaagtatgtggcggcgtggaggctcttaggctagtagcgagaaagaatggagtcctagaagagcaaggagcggatgttgttagttgtgcgaattagctgctcaacattgccattctgggaagaagtgtatgggcaagacatttggagctttacaccataggtggagaagagcgaccgagagttgtcgaactgaccgttgtcacactggatggccttaatgttgcaaccaaactgagtggaaacccaagcgaagaagttcaggagagtcgaaaacgtatcgaacttcaaatgcaagggaaaagtccacgaataatgagagcaatcatcaagaagtactaggtaatacttataacctgaaacactgagaatagg

SEQ ID NO: 182728 - DNA, 741 bp, Zea Mays
gtaaaaccttgacaatttctatcgatatatacaatgaaataggcaccaagcacacatacagcatcaggcttgtaagaaaatggcagaatgctgcaaacgatgcattgtttggatcaaagaatatatttgcttgatccggcctgaggtaccatgcatagcttcctggacttatctcatgctttgttctcattccaaacacaattgacccaaacgttgcaataacaaagagaatcacaaaaaggagatatattattttatccattcttcgttcaactgaactcctctttgatggtggctccattgcattttgcatcacctttgtatcatgtcccgtaaatattatggtgccatatatatacattgtattacgaagttttgaatcccttagcaggacctgttccggagacagagaatattgttgcccattgtagtatagtgttcctaagaaagaatacaatttctcattcggatcctcacaccgaatgaaagccttgaaactatggaaatggtcatcattcaagcccatagtcacctctaatgcctgtttccgcttcaagtttgtctcaccatcaagattcatcgtctccacatagcataatccatcacaagagctagacgaaaggaaaataagatcagcagggaagaactcatcctttttaactttaattatatcgccaactcgaagcttcttccattctgtctcatgaaatgattggatcccatcatacacctcaaccttcc

SEQ ID NO: 182729 - DNA, 414 bp, Zea Mays
gaataaacaagcaattctagaagtgattttcttttggggctggcgtagtatttcttttaaggtactgttggagatgctctaactgtaactgtgctgattgtcacgtccaaatgatcttcctaggcagaaccacaaacaaaaagcgctgattaaatatgcttcaggaggatagagggtcagctctagttaggtactcgcagctgcctcgcttgctcaatggcatgcaattcaggaaaaggtagaacatccttgccttccatcagcaatccattcataggttcaggctcatttccatgcccagcacggtcaccctaagcaaatttcacttgcaatggccactaggtaatttcatcaaagcttttaaaccaccactttatatatcatcatcacatatcctgatcccatttgcactgc

SEQ ID NO: 182730 - DNA, 713 bp, Zea Mays
ggcctgggtctgtaccgccaatggagaaggacctcgatgggctgaccaagaagaggctgaaaaggaaggtgctcaggaagagcaggaagaagaaggtgcttaacgagaatgagcctaagcctgacccatattggttgaggatgttctttgggtttgctccagagcaggcacgccacgtgccaaattatggacattgcgggataatcagtcctttgcttgccaatgtgtgccttaacgaattggattggtggatggaggagaaaattaaccagtacttttgcccatccaagcatgattcaatttggaaggaggtaggtgatgatgggtgccacaatcccgcttggcctgagttcgtcccatcagctgggaaggagaagacaagaaaaatggatttccttcgatttggttcccatgtcttaattgggatcagggggccgagggaggatgcagttgacataaggagacaactgatggagttttgtgagagaacatttggtttaaggccagagaattcgatggtggaaattgagcatatcacaagggggattgaattcttggatcatgtgatcacgcgcagggtcatctacccaaccttacgatatactgccagtggagggaacattgtcagcgagaagggtgtcggaacactgttgtctgtaacagcgagcctgcagaggtgcataaggcatttcaggaagcttgagcttgtaaag

SEQ ID NO: 182731 - DNA, 352 bp, Zea Mays
ctggtggcagcatcatcggtgatccagcgcaggttgccgagtgcttcttgtacttactggatctatgtctcatgggtcatcacttcatagtggactatgacctggaaactcatggctgcaactactggatatgtgacggcatcatacatgtacaacatgggcagagagaggttgaccgcgacattggattgtggaaagctgttgaagctctgcagcgtgagatgcgaatggatgtggattactaccaccaccatgaccaccaagatatgcctactcacattgtcaagtgtgccgacttcagtccacgctggacttctccaacgtaccgtgtcgttcagatccttgagagggc

SEQ ID NO: 182732 - DNA, 411 bp, Zea Mays
gtcacgatcatattccatggggaacatggtgaatgctaaagctcccattccttcagcaagaggtttggctaaattcttttgatattctatttacaagtaatctttgttttatttgttgttagttttagtctgcattcgtatgctaaccttctagcttttcttcacaggccttttatccaagcagctatccttcaatagcaccaacaacggaccaaaagtcaagcagttggctgataaaatgtctagcaagttaagacctgcagaacattccccaagagatcctagagataaggaaccaataaaaaagattgtacaatcaggatctttcaaacgcgagggttcagattccgtagatgttggatcatcaaaacaaaagcaaacatttcatttgtctcgagatgaaaaaccagg

SEQ ID NO: 182733 - DNA, 1816 bp, Zea Mays
acaacacccaatcctatgttagagttagcaccaaacggggcctaaacagtagaaatggacagcacaattgtccatttggcctttttggtgtgatttctggactcacatttgagcttttaaaacctcctcttcctccgcacctgttcacccctttcttttccgttcttctccgtaccccaatcactgctactcaacagccaactctttcgcaaccaaatatttcttctggcgttttggggtttgcaaaccgctatcaacattggagttggagcagaatgtgatctgtccaattcttctcttgtcttatttttggcgtgctttgctcttctttccccctatttcctgaggaggggttcccgtcttaatctcttgcgtttagtgtggcttcgaagagttagcagctgccatggcacataatgtgtgggaggcggacaagatgtgagtttgcattttcttctcaacctgttccctagttgatctccgtgaccggactgctttgatcagtgaacaagctgcttttttcttcccaccttcactcctcggtatgctttgtgttgtttttcatggcccttgaaatctcatccttcccgttaagcatttttcttgatggttttccttttacagttaggtttcttgatcgtttttttcccgattctgtatgaatcgcgcccttcttaattataatacctgctagcacttgtgttaagcttcagatgcttaatatttagtttattttctcttggattttctgcttttccacactgcattttttgccactcgcaaaacctatgctttccttttttttcggattctttttcgcccttttcttcatcccgcaatgttttgttttgtacttgtttgcgttctttgcttctttcggtgctgactttattactacgctacttgtttatttatctgtcttcttcctagtggaagctttcttcagggttttctttgttcatccagcagttcctaagacgttttttttgctggtccctgtctggctcttgcatgcttgaagtgacctcagtgttcctgctagcgtgactaccgctatcgttgctctaacgcttgttatgctcgttgtttgagaagcaggttggattcctacatttatgattacctgttgaagaggaacctgcagaacacggcgaaggcattccaagccgaaagcaacgtgccttcggctcctgtttgtgagtgctgtgatcagattacaaaatcatctcgtagtgctgccgttttagtttcgaacctaacatctttcggcataaatggccaaactttgattccttgaagcattagtttgatgcgaagcactgaagtattggtccatatttatgctttgactaattgcaacaagaaatcctagtccaaaccaaatttagggtaggcgtttccgtgtttgtattttgagtgacagcaaagtagagtttttgtggtaggtttgtgtgtgtgtgtgttgggggtccttctgcattatgaaaaaatgtaacataattccctgcaattgatagtattgcctcttttttacattgcaacagcgattgatgcgccaggggggtttctcttcgaatggtggtcggttttctgggacgtcttcattgcaagaacgaacgaaaaacattccgattctgccacttcttaccttgaggttcttttcttgagacagtaacttgtggttattatagaacttgcatcttgattattacttgcctcatcggggcttgcttgtgttagtgttagaactgtattagggtttagtctcgtccctctgtcacaggcgacacttggcaggttaactgatactccctcc

SEQ ID NO: 182734 - DNA, 394 bp, Zea Mays
atagaattaacccagattatgaaggaaaccaagcctaaaaacctcacaatggcacagtttattaaagggaaacccaccaaaaatacctaaacataacagcccagatagctaaccctaagcaacccacaaatacacaaaagtgtcacacaaccaatgtagcctaccgtgcgccatcgttgccgagcttaatcccaagatagtgataagcaactccgacttcccacaaaaaacctcagtcaaagcccatactaagctgccactcactcgcaacaagccacgacctcttgagaaaaagaacaatttgccatcgttgtggagctttgttgcaccctcaaaaccaaagcagctccgacttcaccactgcagatccactccaaaagaacctgagatgtgc

SEQ ID NO: 182735 - DNA, 731 bp, Zea Mays
gctcaatagactgtcataaaaatgcaggtagtactgaagaaatgtcaaagatgttaaagaatcgatgcttcttttcatatgtatcaactcatcccgttgcccaaccatctcaaagacacggctagccatcaccactgtatttacatcggccacaactccgatcaatgacatcagttccattattttctgggccttgataatgcatttaaaggtcacacatgactccaaaaccatattgaacaaggtggcattgttttttattgggtccagttttttcatctcccgcctatctgtaacttggtccaaaaagctctcgcaagtctcaatcagaacatcagtggcaaggtaggagcctacctgtgacttcaacatatgcagaaacgacatggtcagcatatcaacatcgggaagctttctactctctagtattatcctcaggactgtggaggccgggataggcatctgatctcttgcgagcgccaatgctagcctcatcagtgagccacaattgagaagatttctattaatttgataaactgagagaaccatgtcaaatgccctctgaagccacctcctactagacatgtaggacagcgacacaattatactattcagtacccgcggctcaggaagaccgtgaagcttcttgtaattgctcaaagattgcagcgcctcttcaacattcccatccttcatagcacaatttatcttcctcaacagaatttcacggg

SEQ ID NO: 182736 - DNA, 279 bp, Zea Mays
gccatggcgaggaggagcaagcataccgaccatgccgtattcgcggaccgtatttatacacacgacaccgtacattacactcgcgtgatagcaatggttatactgcaaggggaaggtaaggatggcatttaagtgcagagcggagagggtgggtgcctgggtggtctccggccatcagtgcggcggcaggaccggcagctagctagctgcgccggcgcggcacacacttcgaggccaattcaattcaactgtttcaattcatgtaactggcactctggc

SEQ ID NO: 182737 - DNA, 473 bp, Zea Mays
ggcggaatggctatacggtgatttggcatggtattggtacaacatcagcttcctgtgtagaacagtcccgggatcatgaactcttgccgctctatttacttcctttgatgatatcttttaagatccacaaaggttgccccccctcccccctcggcgacatgatcatcacatcaggctgctacccggatcaacacctataccagtaagaccttaccgctaccctcaacttttgaaggatgagattgagtgtcaatgcgaagatatgttgaagcaggccattatctgggagtgtacttcgaccttctcctccccagtgttttacttgtgaagaaatcagatggctcatgtcgcttttgcgtcgactatcgggagttaaatgccctcacaatcaaggacaaatttccgattcccgttgtcgatgagttgttggatgaactacatggagcccaattcttcaccaaactggacctccg

SEQ ID NO: 182738 - DNA, 288 bp, Zea Mays
tgtggattctccattgccaactgaggtaacaacagccatgtcgaacaaggtctgcacattggacggtacttggatggggaggccagcccaagggcgagaggtgtctgtcttctgtaaccacaaccaacgaacacgcaaagcccagccgaacagttccaagttaagaacaccaaggcctccaaactccaaaggccgctggacactttcccaagcaacggggcaattacctccattcacctgttcctgcccttccataaaacctcctcttcttttgttgattgctttgag

SEQ ID NO: 182739 - DNA, 447 bp, Zea Mays
gataatgagagagttcaaaccatctctctcaggaccagcaacgatatctgaagatctctcccaccattgaagaaagatatagtctccatactgatgggctaagctgtgaaggccaaacttccttagtatggtgtaccagaagactttagagaaaacacaggagaccagcagatgatttatggtctcaggttcttggtcgcaaagagggcatctggctgggtgattcatgcctctccttgccagtctgtccacagtccagcatttgttcatggtcaccatccacaaaaagaacttgcacttaggagggccccaaggtttccatattcttttatagtgatcgaagggtcaagacccaacaaagaggccataataggcagcacttgcagagaactggtcgttatagagaagatatgcttgtcttcaatgttggactgcagcaacacatcg

SEQ ID NO: 182740 - DNA, 1085 bp, Zea Mays
gtaacatgtttggcacaaaggggaacatgtttagggacacaatatgatgggccatcaaccaagggcatgtatgattgttctgttcaggtgcttatagactaacacgactagcctattaacatctgcaaactgtaatctattcttacatctgtacaagaaaacatgttttatgtgaactaattggaaaccttgttgcaggacacccctatggacgacgatgttgagttggataatgtggcctgcataatcgcggtggataaatatgtcaatgggagggggaaaacacaagaggactacactagaaaagaagctgctcagcgcaaagactcgagtgaaaatcaagggcagaatgatgctctagagctagacaacctccggatggagatgcaagctgacgaacgtccgttagaaccaggaaacaagagggacaggaagtggcagaaaaatgtatatggactcggatcagcttcgggacagaaggaaaccttgtccaggagagaaaatccacggtcagatagagggatggtccacagtaacgacagcaaaacaatttattacaggaagggtgggacggaagtcgataatgttgatgaccaccctttagaaaagcaagaccaccaggatacatcaagtgacggatctaaaaagagaagccgaccagtggacaacgcatctggtggcaacagaccatacttggatgagaacaagaagcgtaatctcagagaagatggaagatatgctcattatgaagactggagaagtgaaaggaatacagcagcagacacgtctggatataaggcccaatcagaagagaagcctgtatggacaaacactcgaacaggatcaagggagcattcactggacaggcaaaggatagagtgcggtgacagctatcgtggaacctataacaatagacaaagacatgaatggctgcacccgcacgctagtggtaattcctcgagaattggttgggatgacaggaggcagtggagttcatctcggtcaccatttccttcggctgaatttggtggtgaccgttcctgttctcgtgcccatccgagaggttctaaatacagaaccggcgg

SEQ ID NO: 182741 - DNA, 2308 bp, Zea Mays
gaaaagttttggctttctctgagcttgtgaattccatattgtcaaggaatagtcagagcaatttgcctgttcttggctgctcacctgatattgcaaaacctatggtagatggtggaatggtgcaatctctttctgttttgctgaaagtaattgatcttgaccacccagatgctgtaagggttgtcaacctgatattgaaggctttggatagcctcactaggactgcttacaccaccgatcaagtcctcaattcagatcgatttaccaagaacagattaccagggtcacatgaacaaacacatgaagctgatgacattgtaatccctgaacaaactacatacgattcacatcatcatactaatgacatcgaatctgcaagtcagcaagctcaagaactgtctcatgttggtggaaataataacgaaaaccttgaccaacctgctgaacaagaaatgggagttgatctagcagacaatagtacttctaatggcaatcctccaacaagagctgtgcagttcatgcgggaagaacctattgaaggtaatgtaatggctcctagtactgatattggtttggctttctcaatgcaacatcaagttgatggaatgggtgtggaagacgaggatcttggggaggaaagtgaggacgaagaagatgaggaaatagcagctgagggagctggtttgatgtccatagctgacacagatatcgaggaccaggagaacaatgcaattggtgatgattacaatgatgaccttatggatgaagaagatgacgactttcttgagaaccatgttatagaagtaagatggagggagagcttaactcgaatggattatgatcatcatctgagattttccaggggtcgtgcagactccagtggttttattgatatatcttctgagtcatttcatggtgtggggacagttgattcatttaatctgcatcgttcgtttggtcttgaacggcggcgccaaatcggaagtaggtcgcttcttgatcgaccaaggaccgatgtgaatgcctttcttcatccactgcttgtcaggccagcacagtctagggagggaactaattcagcgtggccctctggaggaacttcctcaagagattttcacatgctgtcttttgacatcccctcgtacatgttagatgctggcttttcaccagaaactgctcccccagtgtttggtgaacgtgttgtcagtactgctccaccacctttgatagatttctcacttggtatggattcccttagaattaggcggggccctggagataatttgtggaccgatgatggtcaaccacaggcaggtaatcatgcagctgctattgcccaggcagtggaggatcattttgtgtcacagttaactgtggctaataattcaaatagtgctcctcaggtgcggcctgaacagactggcaacggtgcgaatgcgcactcagagttaccagatacaggaaatgctgaacctgttacaaccgatccactttctcaacctgttggtcggcatcagctagtttgtactgttaaccaaggacctgtccctgctaatgatgtcctctgtcctacagatgtgcacgtaaatcagcaccttgttgattccatttatgatagccgcgttgtagaaccggtgcagcaaacagcagccggtgatcctaacactatacctcagagtgatgaaatgatgtgtattgctggtacacagcttggtggtcatcctgaaagagattccttgtctggtaatggaagttatggtaatattatgcaaaatgagattgaagcacctcaacaagttcacttgggtaatgatcctagggaacccccatctgatctggagtcaagttgccatgcacttgtcacttctgcaagtgctgctcctgagctgagtgatgctcatgtagattcttcagcagtcaatgctgatgttgacatgaacatcgttgatattgctgaaaatgaagttgggaactcagctcctgcttctgatggcaatgatttgtcttctaggagatatgaagatgctcttcaagagcctcagacagtgcaaactaatgctattaatgaggcctccagcgctaatgaaattgatcccacatttcttgaagcattgcctgaggatcttcgggcagaagtccttgcttctcagcagaaccgttctgccccagctgcttcctatactcccccagctgcagaagaaatagatcctgagtttttggctgctcttccaccagacatacaggctgaggttctagcccagcagcgagcacagaggattgcccactctcaaccagctggacagccagt

SEQ ID NO: 182742 - DNA, 381 bp, Zea Mays
gttcctcctcatatcatttagaatcttctttatgtttgtcagttcaccatcgaaaattcttgttccattgagtttgacccttttggtttatctatgaaggatctgggtaccaggacccttctcatctaatgtgatagctcggggccattgtacgcactcaactacccacttcctccacctgtgcgtcttcctgtcatgttttggctactaccaccatgttcaccacttgacatcgtcgtctcagacaccctaggctcgatgttatgtccaagctatctagtcgtttagatatctcttttaacaggggccattctgatagtctttgtcatgcttgtcagctaggccgccatgctcgcctcccttcctctagttccacttctt

SEQ ID NO: 182743 - DNA, 474 bp, Zea Mays
ctcttctttcctgtccaagacctactgtggcaccctctcgtccctctgctcccccggggttcgctgttccttcaacgactgtgaagacaagtttctgtcggattcctgaagctctcagccaacctggggtggggaggcagagtgggggtggctggcaggtggttgagcgccggaagcagaatcgtgttttgccttgctctcgtcgagggtccccagtggatctccgaggcaagtgttttaactgtttctctgcctcccacttcgctggtgtgtgtcatcgccccactcgttgttttcggtgtctcaagtttggtcaccaggctgcgtgctgtccttctgttgacctgaagaagaagaaggtggtgcgaggctcagtttggcaacgccttgctgggatggaggaatcgggcccttctcatgcctcttccccatcctccctgcccaggagggcggtgtggagacgcatcaaccctg

SEQ ID NO: 182744 - DNA, 392 bp, Zea Mays
tgaggatattggagaggttgacgatttaattccgctcgtgtgctgctttggacctgccaaatactcctttattccttctggaagaccagcaaataggttgatagaccatgagattcatgatagaatgaaggacatgttttggtctccagacaaatttgtgagggcaccaggagggtcttcatccaatgttgctctagctttagcagcgattggtggaagggttgcattcatgggaaaattaggtgatgatgactacggtcaaagtttgctgtatcacttaaacatcaatggagttcaaactcgagcagtttatatggacccttcagcaccaactgctgtgtctttgatgaaggtcagaaccgaaggaagtctgaagacaaactgtgttaaac

SEQ ID NO: 182745 - DNA, 320 bp, Zea Mays
aagactggtagcaacggtagcctgtatattgcatcccctaaatactaatttagagattcctccaaaagagtttttcccctaaataaattttatccgcagcggtatcctgtacggcgtatcctctatgtcctacgggcccatgcccagtcacgcaaacgagaggagccgggagctaggacttgccggatgctccctcgtcctccatatctgcgggatggagccacccccctggataatacggaacgaggtaccgggtaccactgcagacgttttttattctcagatccggtattctacaggtccaggacgacatacaggcc

SEQ ID NO: 182746 - DNA, 586 bp, Zea Mays
tttttcttctgcccactcgattttgctcctggccctcttgtttctgctgctgttaacttgatttgccatctcccgcttgtcaaccccttgatttggatggggatctcagcgtctgtcgatctgagggggcacatattggtctgggaagtgaagggaagcagcagagaggacgagatagggaaacttaagccagaggggcagatgtgtaacagcagcactgaagaacgggagaggagcggctgtgctgaggacaagagagaggagagttgtgggcactggagtgaggggatcgggactttgtatgccaggaggttagaggcacatgtgctgcgtgttggactgggctagcccacttactcctttctttttctttttccgtcttccacggctctaacctgcactttcctttggatgtaaggtgttgcctccctcacgccatagccacttaagtgtaatgctaaggctgtagttggtcgccatgcctcgccttaccaccttgataacgatgctctttttagctgcaagaatatcttcaaccatccaaccaggcaaccactagaaaatcctactactttgcctgtagtcc

SEQ ID NO: 182747 - DNA, 380 bp, Zea Mays
cccaacctctccgcctcgccgaccttgggtccagtccttgagcgagttctctgcctcacccgagctcggcctcggccatcgactacgctgcgaatcccgcagacagccactccgcccgactatagcccacgtcaagggacggctcggctaacacctcgggaagacttctacgtcaaccaagcaggggctctgatctcgatgagtgctgcagagaatctcaacgtcatcacatgccagggcgatgacacaccccgtaagcagcctttgacccataccccggcgttgttacaaccactatggcatgggcggcctccccctcgggggctcggatatacggacgaccacccggtctcggccttggctctctacgggaagtcagc

SEQ ID NO: 182748 - DNA, 312 bp, Zea Mays
acagttagtgaaatgatcttagtttgttttgttagtttaaatattttgaaaattaagagaaaatagtagtgttaagttgtataactccgcctatgttgattggaagacttccttgagtcgtttcaacatagccggtcccaagcccggtaaaggaggagggttgtgttaggtccggcaaaccaacgtaaaaaccagccaaatcttatggagatgaaaccacaaagaaaatcgttggggcgtaaccctcttagcgacgcgccatatcggaatccgggtatggtgttaaatgagcaagggtcgggccatcacccc

SEQ ID NO: 182749 - DNA, 296 bp, Zea Mays
cggagtaggctgtgatctgatcaacggcgccaggtcccaagtgtagacctgcggacagggagcccttgacatagcgcaggatgcgcttgattagcgcaagatgcggctcgcgagggtcgtgcatgaagaggcagacttgctggacagcataggccaggtccggcctggtcagagtgaggtactggagagcaccagcgaggctccggtactccgaggggttggcgactggagcgccctcggaggcagacaacttggtccgggcatccaccagagtagctgtcgggtggcattcagac

SEQ ID NO: 182750 - DNA, 569 bp, Zea Mays
gttgtgttgacaagtgaagcactcgtaggtgaagtcacggacgagtactcgatcaaagtctgtgcagccgtgcaggcgctgaagggtcttttccatcccttcgtggacaacaaaatgggtcaatgcaaccaccttgtggcacaaatcgagctacacttacacgatgtgcttgctatagagaaggaagtcatcaatggtggagtagactgggccaagaggtgcccaaggggccaatgtgctagacttccaggtgcctcgagtatcgaggcaacaagttccctgtggtctggtgggtcagatactccgagggcagggcaacaggtgttcctggagatggcgaagatgcctaggacctagtgtggatggctcagggcctgatgtagatggttcgggggctggcgcaggtgccctaggggcttgtgtaggtggtgtcttggccctggtgtgcgagttgccccgagggcttgggtaaggcaagcctccagttgttgtggttggatgcaatcgactagtgcaagtttgaccaccttggtgactagtttggcgcaaacgccctggagaggtaacag

SEQ ID NO: 182751 - DNA, 291 bp, Zea Mays
ggcgcgcgtgtcctccttcctcagcgactgaagctcgacatagtccagatcgcaggccctcgccaccacactcttggcaatgctctcgttccaagcgtgaaggggaatcccctccaggcatagccggacgtgatacctgaggtccacagggtctgcttgggtcatcggaagccaccgccgaacgcggatgtcgaggttgccgaagaggaattccctgcgctccaaagccgtctccctgtggtgctgatgggagaaggtgacaacgaagtccgctgggtgatgtcttgctac

SEQ ID NO: 182752 - DNA, 378 bp, Zea Mays
gccgagagaggaaagggattaggcagcaagaggaggcgctccgctctcggattagaggcgagcttcctatttccagcaaaggcaaggtgagtagcactggtagcagtactgatgagtgagtgatggtgcggtggagcactgcagcggcaggtttatctttctcctctcttgctcactcgcacatgcatatcccactcacaccagcagcagcgagctgaggctaggctagccatcctcatcctcaactcctacgcgcttagcttgcttgcacaaacctctctctatgtctaagagcttctcgctgcagatctaccgccgatccatccgctaccgagctatgccaatctatatatgcagctcatgcatctaacctactgc

SEQ ID NO: 182753 - DNA, 371 bp, Zea Mays
gctagcatagttacagggggagggcgaagcaaggatgagattacgtaataggattagagaacaccaacaaccaagcacctaatacttgtgcctctttcctgttgtgcctgtacgcccaagcttttgcttcagaagtgcatgaatgtaaagtggccgcaagagtggcatgatcctgacgaaagacgacaccatttctgtgtttccacaattgccagcaccagaggaggacaaaggagttgaattctgcacccggaaggcgatcagggcgactgatgtttggcaggtcctgggtgcccagatcatcagcgacagagaatccgatggagctccaaaattggcgtgcaaacgggcagtggaagatgatgtgcgaa

SEQ ID NO: 182754 - DNA, 439 bp, Zea Mays
atttcgcattgttagtatgacattgattttgtagcaactaaagacttcctcaaatcctaatgcacctactatatagtaaatattcgagtaaaatacaatttcgttccttaaacttgttgagctgtgtcatcctggtccataaacttttaaagtatgcctcttaaaggctcaattgttgttcgagtctcagttatatcctaatgggttgttgtggctggactaggcccatatgtcaattgttgtggtttgttgcactccaaccacccttctccctccctcccatgccgccacgacacaccttggtcgttgggccgccattgctgtcgcttagccaagctcgtcacacggccacctcccctaacatttgcgttaggtttgcctgaccaccctctatcctccccactagctctagtccaccacccctccactgccttacaga

SEQ ID NO: 182755 - DNA, 463 bp, Zea Mays
atcactggctatctgcaattctgcattctagaaagaataggtgatccttcaagttgaagctaaattgttcttctactgctgacaccattgtgatgcaattttccttctttatcctgtaggtggctgagttgattgaaaaagaccttatattagttgggtgcacagctatagaggacaaactgcaagaaggcgtgccaacctgcattgaaactctctctgcagctggcataaaaatttgggtgttaacgggagataagatggaaacagcaattaacattgcatatggtgaagcttccatctatcttgattagtttgtgttacttattctgctccttaaactattctctgccagttttggtttctgggtgttcttttcctgatctccctttcgtctaacatatgcagcatgcagcttggtaaacaatgacaccaaacagttcatcattagttcagagacagacac

SEQ ID NO: 182756 - DNA, 591 bp, Zea Mays
tggccacacaaccctaaccgcgactccgcgctcggcgcttcccaggcgattcggcggcggcgctcctcgacgtcggaccgtcggccgtcgctaccggctctggtgctccgtcctcgtccctccctccgtctgtgtactccggtactccctaaccctaaccctaaccctccgctcctcgacgtcggaccgtcgctaccggcttcggactccggtactccgtcctcctccctcgtccctccctccgtctatgtctgttcgcttgcttgtagctgtgcagaacacatcttgtagttgtgcggaactcatctagatttggtgtagtacctatgtagctgcctgcctagtcgatgttcgcttgctggccgtttatctgttcgcttgctggtggcttagtggctgtggttgtgctatgcatgttcgcttgctgtacgtcggtgtcagtgtgattcactgatgggtgatggttcactgtcgtggcctcctcaccgtcgcttgtttggacatctatactgataactcatcctcctcctcactcgccctcctaattcctattcccatctgactatctcccagtcctagactcctcacaag

SEQ ID NO: 182757 - DNA, 1035 bp, Zea Mays
acctttagcatgcaactttgtcttgtactcgaatgagaaaaatgcaatttacttagttttccaagcgataagagtgccaccaaggaaaacacaatatacagaaagagatcgacgatcagagaaatctttagcctaggtaacatcacattaggtctggagatgtaaagaacttgtgcatggaaagattagacggcgcgagatagtcatacgaagacataaagcaggtgactacaatggagttgaatgggagttgaaataaactgactaagattatgcagagagaaatattatgatgagtgacaccaagataaagaagactaccgactatgtgacgatagtgggtaggatcagcaagaggctcaccattaaatgaaaattgagctcaatgggagtctcaatagttcaaatatcagcaagagaagaacaatcaagaaaacactaaatgtacttttcttgagacaagtagaagccctcagacatggaggagatctcaattccaagaaaataacgaagaggaccaagattagacgtaagaaactacttgctcagacgtgccttcacaaaggcaatataccaaggatcatcattagtgataatcgtatcatcaacataagtaatagtctgcccacgagatgacgtgtgcataactgcacaaaacgagtaggatcatgaacattggaaaaaacccaacaacaatgatcacaagcaaaatactgaaaccaagcttgtggagcctgcttgcggtgaagacgacaaaccacaccctcaggtacataatacacatgtggtggctgcatatagacctcatccaactcaccattaagaaagacattcttgacatcaaactaagagatggacatggaccactcacaaacagaggccacaacaagagtgaaaaccatggtcatgtgagcaatcagagcaaacttgtcatcataatcatgaccatgctcccgttgaaaaccatgagcaacatgtcgagtcttataacgctcaagagaaccattagaatgtgtcttgaggcagccattgtcg

SEQ ID NO: 182758 - DNA, 354 bp, Zea Mays
gcccccttgttccaggaagtactcctctctccagccatcaaccacctcgctctccaaaacccaagcctatcacctccccgaccgctgcttccattgtctcgcctccgatcaccaagtcaaagactgttgcgaccccgtttgttgtagaaactatagggactttggtcattagagcccatcccacgccacgccgatcaaccacgtcctcgcctcattccaccgccgccaccctttgatccatgtccgctccaccccttctctgttgtggttgttcccatcaatgacctctcctccagcttggaaccgctgcgacgctgcctcagactatctgcaacggttacccctaaatttgtc

SEQ ID NO: 182759 - DNA, 317 bp, Zea Mays
ttatatctcacacttccgttctgttcataggggctctgcttttgctaaaatgcgtacaacatctgttagaaagttactcccggagtatgtttatcctcttaatgtcattctgctgttgtttgcttgcatctattgtacctgcactgaaaatgtccttgtagatcatggggtttcctgtgtccagttcatacacctgacggagagccttgtggtttactgaatcacatgacttctacatgccgtatgatattctcatcttgtcatttctcttgaatttaaatctgcacagtacctcatgaacacataacacagccttc

SEQ ID NO: 182760 - DNA, 345 bp, Zea Mays
gccagattgtgctggactctagttctgatatgattctgtagcattttattttattagccttgaacgcggtagtcgatacagtataggcctgtttcaaaggttcatcggaaacagttctgttcctgccaaaattggggaatttccagcaaaaacattagatatccatcctgtgagcagcccatccccgtcatgatgtctctgtctgctctcctgtcatctcatctagttatttttggtgcttcagtttattggttttttgcatcctgaagtgatgtgtttctatgttatgttcgtagttttaggttgtgttgctggtgtgcagtgtggatttgagttatacttgtt

SEQ ID NO: 182761 - DNA, 312 bp, Zea Mays
atccgtgaacaaagccttccacggtcgccgatcgttagccggaccgccgtggctataaatagcaccatgggtcacgacgaggtattcacatctccaccagtgagttcagttgaagcccaaattcatggaatcctctccacctctcccaaaattggtagtgcacggtgaaaccgtagtcctttacggccgtgtagccttaatctcacctcccaattccacccagaaccgtcgcggcaccattttcccctttttctgtcaccggcgagcacaaattcaccgtgctccatggccggaccactctagtatggctct

SEQ ID NO: 182762 - DNA, 430 bp, Zea Mays
tgaaccctggaggcttgataatggtggggagtccttaaagagagttgtaacatacacaaccgcaccatcaaaattggttaaagctgttcacgcaacagaggagcagtcttatttgaaggctgatggaaaagagtatgcagttttactgagtgtgagcactcctgatgttccatgtggtacttattttcggacagaaattcttttccgtatcatgccaggtcctgaacttgattcacagcaacagacatcacatctggtaatatcttggcgcatgaattttcttcagagtactatgataaaaagtatgatagaaaatggagcaaggcagggcttggagcaaaactatgcacagttttcggatttactatcacaaaagatcaagcctattgatgtagaaggttctgggtctgacaaggaacaggtcttggcc

SEQ ID NO: 182763 - DNA, 341 bp, Zea Mays
ccccgagatctccaaagcccgaccgcaaaatttccccaaccgggcttcttcggtcatccacctagacggcaatggaggccgccgctgccgacctcatcgccgccctctcgtccccatcctcattcgctggcctctactctcgcttcgccgcctacctacagcccttcaccccctacctgcacagctcaaaccctaacaccaagccaccgcagaagagggcgacgaagcagaacaagcagccgccgcctcccgacgcggccaccctccgcccccttgcgaagcgattcctgccgtttctcggtcgcgcgctccacctcctcccgccgctcgtccgcgcttgt

SEQ ID NO: 182764 - DNA, 291 bp, Zea Mays
gtcgatttgagctcatctgatgctagggttacagttccgtgctaaaaaacatcatttatctggggggaatggattaaaaatgagagttttatcgagggatggatatgcagagctggagtacttgcatggattggaattcgtccgccacaaaatctatagccaatggcttggaaaatttgccattagtgaacaacctgtttaacagtactctgcaataggattagatatttctgaaacaatttgtacgtttgtgcagaacatggtgtttggtgttaactgttaattaagctg

SEQ ID NO: 182765 - DNA, 308 bp, Zea Mays
aaaatttattgaattaatttcaacacttggtgatgcaagaggacattcaaaaaggataaagagaaatgaagatcgggaccttaatgtgttctgcaattttgcggagatatttggagaaaattctgtagcttctattcttgtttctcttctagatatcttgtttcttaagaaagatgtgaagcaaaggtctggaactacataactatttttgtgtagtaccctatgttctttatggctgacatgtcaccctcatgcaggtcgcgtttattacaacctcttttccagattctatcgaagctcctttctga

SEQ ID NO: 182766 - DNA, 327 bp, Zea Mays
cgccgaggccggaggcggagtagagccagaccagaatggtattggggggaggccctctaggcgccatcattggccgctacccctcctcctccgccgccgccggtgacgatgaacaaggggacccgggacccggaggaggcgtcattcgccatgaccgcaagtgccgggactggcccttcctcgtcctcttcgccgccttctgggttgccatgattgtcaactccagcttcggattcaaccagggcaacccactcaggtactctactcactcacacagtcacaatcagcttcatcgccttgctgccctgcccttctttcattttatta

SEQ ID NO: 182767 - DNA, 285 bp, Zea Mays
tgacaacttgtgttaggaaggtgacatcaaaggtgtttgtagtgaccaaagggagcagaggtgaacctcaagatacttggtggtggaccgaggacgttcaaaaggcagtaaaggagaagaaagaatgttacatgagcttgttccatgacatgagtgagctgtgagtgagacaaaggaaggggagaaggatggtctataagatggctaggattcgggaaggaagacgagggacctcaaccaagttaaatgcacgtgaataagcgtccgaacaactgatggtgatac

SEQ ID NO: 182768 - DNA, 380 bp, Zea Mays
ggcggaggcggaggaggaatcccaaaatcatcatcatcatcatcatcgtcggcggcacccagggtgtcaaactggcgaagtgctgcatcctcagcctgagtgtcaaacacaggagcataagctggcactggaatctctggagcaggacggtaagatccaaacacaaggcgagaggcctcaagggtgctctgaaagcgaggtggctggatcagctgcgcaaatatgtggcataagtagtgagcatagggtagctgccgccgagcacgaatcccatccagaacagtgtcctcaatctcacagatcagaaagtcaacaacatcaaactcagagtgggataccagggcaccaaggagccaaagctggatatgagtggtggcctc

SEQ ID NO: 182769 - DNA, 329 bp, Zea Mays
ttttgccaagattcttgcacgatagacaagcaaggatcatacaattctaagttgagaagcagcacaaggaacaaagctccgactccagatcatgaaaaggagaacagactaggctctagtgatctcaactctaaaccaaacagaactggcagtctgcgttccaaatctgatgcaaaatcgatcaagaaaaacacgcgtgtgctcagtaagcaccaaaggggaaatagaagtgaaccttgcaccttgatcacgagcaaacctgcattgtttatcttaagtggaaatagtgagcagagaaggggttatcgctcgatacttagacggctgaa

SEQ ID NO: 182770 - DNA, 577 bp, Zea Mays
gtttacttctcttcctttacttttctctatataaatgaaattataagtggctcctacatgtttgagaaaaaagatctgatctggtaagtcgtctctaaattgtgtcattaactacaaggctacttgtcgctgcacctatcctaatacaatgcatcttagctaaagatatcctatcaaatttctaagatagctttaattagtattttttcttaatacaagtaaaatgaccatttgctatgtttctaagttattatgtttgcatacaaatgaaatgaacattggttattgttagtctgaatctttcttgtctaaatgtaatgggcctaaagcccagcccatgtaacctaatatatatggaatactcaacctactcaaggtttaggggttttaccccattcaatttggtatatagctagcttattttccatccccctcccctagctgccgcttgcccctggctgccacaacgcttctcctgtcgctgtcgccgctggggctatggccggcctcccctctcctgctcctcttccctcccctcctcacccgttccctgtcactggtcagccgtggttgcctc

SEQ ID NO: 182771 - DNA, 673 bp, Zea Mays
tgggtaaaagacgtttctgttttgaagctttttggtccaaattggaaggattccaggatgtcgtccaggaggtttgggattctgtggcagctgtaaactgccctttcatgactctgaatttgagactaaaagccacagctaggaagctgcaatcttggagtgggaagcatgtgggacatgtgaggactcagttggctttggcaaaggaaattctgcatagactagaaatagcgcaggactgcagatctttgtccttggctgaaatctggttaagtaatttgctgaaaaagcattccctgtttttatcttcacttcaacggaccattgctagatcgagatcgaggatctcttggcttaaagagggggatgctaataccaaactctttcatatgcactctcgacatcgaaaaaggaggaattttgttgcacagctggtgaatggagaccagattctcactagtcatgatgataaagcagttttggtggacaatttctacgccagactaattggtgaatgtggggatagggagcagactattaatctagaggcgttgcacatgccaactttcaatcttgcacacctcgatgagcctgttacagagcttgaactttggaatacaattaagagtttacctaatgacaaggccccaggtcccgatggtttcactgggcg

SEQ ID NO: 182772 - DNA, 421 bp, Zea Mays
cacttgaccatcaacctctttcaatcttttagcacatggaaaaatacaacctctgtatgaaaaaaatgtgtggagtgccatgcttgcgtacattcctcgcgcgaggtttctccctggcgcgtgcatttttatccacacacacaccatttgcactcgtggtggaggtattccagggctggtgccatgttgatcaagatctcgtgctggtggtacaacgtctgcatgggggccaacatgttgaacgttgctcgatctaggctatcgttgcccaaggagtcaccatcagatctcacccttgtcgtagcaccactcttgcaagtggatcatgttgccattgctagaaatgtgattcttttgttaggttgtggaagaagcaagaattgaaaccttctcatactccttcaccatgttatcacggata

SEQ ID NO: 182773 - DNA, 277 bp, Zea Mays
atctaattgggtgccatagtctcattctcaccattgaaaagattgtcaaaatacctctgccacctctgtttgatgtcttgtccttttaccaagagttgatccatctcatccttaatgcatttaacttggttgaggtccctcgtcttcctttcctgaatcctagccatcttatagacatccttctccccttcctttgtacttagtcttcggtaaagaccatcataagctcgaccctttgccccacttacagttccctttgcagtcttctttgccacct

SEQ ID NO: 182774 - DNA, 391 bp, Zea Mays
gggagttcattaaaactctatctccaggcatgctcttatacagatgatcacacattatctacaaatgctatcatttgctctcacctctcagtcttagctatttttttccttctctttaaggtaacacatcaaacccaaaggttctgctaacacatattccactataccgacctgataactctccttgtggcccgcatcgttcttcacctgttataaatcaggtattctattgtcaccaaaaagcttgtttattctgtgaatctgtgttaaacgtaattcgtcaaacttgcatgtttttttgccagaattattattttttcatatgtaccatcattcctccactttatttgtttacaatattctacaagttctgacataaacaagtcagtca

SEQ ID NO: 182775 - DNA, 331 bp, Zea Mays
atcgtcttgggtggcacatttccacagcgaggtatcgagctcagcggctctgggtagtgcggggaggaggtaggggcgtgcgtccacaacgctgagtgggtggagtggatgcttgctggtgccggggtggccgttagctccaccgccggagagcaggggaggcgcaaccgtgttgggatggccgacgacgctaactaggaagaatagatgatgcgcgcccatgcatgggtaggggccgaatatgggaagtggcggcgcagccgtgcccgatgggccacgtcggcaaggagggccgcctaagttgtggggcattcatggcggggaacgaggg

SEQ ID NO: 182776 - DNA, 596 bp, Zea Mays
ttgaaatttaaaaatgcgattttaaatacagaaaataaaaggaataagtccatcctccgtatctttctggatccgctgctcgcgtggtgtttttagtttgtgtgtgtgtaagggtggtcaccagcacgtctcgtaactggcggcgtgcttctttgatccgtttgcttatgtcgcctgacgtcaatacatcagctaaggtgccctttcccggttgtggatcggggttcaggaatcaggatatattcattctttctccaaaaactatagaattcattcagtgtcggacggaccttgacaaaatggaagaagcagggcgcagaggcatcagcttatttccacacgaccgcgtattttctatttaaccagcgcagcgcagcgcaggcatggaagcacagcggccgttcatgcagatgaaagatgagagagacctgaatgaaagaacaacaggaggacaaggaaggaggacgccgtcagccctctgtttaggaagctcaaccgggccatggagtcctcttcagcccgcaccatctacgtgagcactgagccgtcagataagaacatcagaggtggcactggatctggatggtccgcgagct

SEQ ID NO: 182777 - DNA, 754 bp, Zea Mays
agagccatctgcctttcgcttatgggtctagacccacttgtcagtcaccacgttgccgcctaggggtcgaggcactagctcctaggtgtgattggcaacgagggcttggtactcttcctccataacacaatgccaatggggatcggcaagggcgctatggacagaagactgcacaagagaggctgatggtgaggcgttcgtggagaggatgaggcgatcaacagggtgaagtaccccaacagactggcaagtcaccattgaatggatgtggcgagggttgcgatgaagaatgggatggggtgacacactgctggttcggggcgagagcagggcggtgtacccacccaagcaatacgttgataggcatgcataggttgggcgtagcgatgaggaacaggcataggcgcaggagccacaagaggcatcaagccaccagccgaaccaatgtaagagaacctgcatgtggaaaaacaaacggtggctgaccataatgcgccacggagtcaggatctgtcgccgcccgaaacccaccagcgagagacgacaggtgacacgaggagccgtgaggctcctaggactgctggtgggccctggtccctcggtcaatggcctagatcctggcgtacgatcgggcttcgaggttcgcctggcgtgccacctgacctatacctgatcaggaaggtgtcgaggtgcttcgagtggttctctgcatgcacaaacacacgtaaatgtcagtccgagccgtgttcggctc

SEQ ID NO: 182778 - DNA, 433 bp, Zea Mays
ttacaatcttttacttttaaatatattgtaggacgggcatcaatgaatgtactccctttcatgtatcatatgaaagccatctgtactctccagttatacatttattaatttgggacttacgtacatattctttaatttcagcttgagtgaaggaagggctgtatatgtattttacttccccacgtctttccgaatacatgcagtgattgtcaatcctttccgtaacaaagaaatatctccgtcatttcttgaaaagcaatttggagatgcttgccaagcccttggttctgtccctgagaatctgtctttccatgtacgagtgaaatcatgagatgcaatatataatttttctcatgctgcttggcatacctaattctaattctttgattctatatttaggtggactaccaaacatcaattgatgctggaagca

SEQ ID NO: 182779 - DNA, 1467 bp, Zea Mays
tgactccctggagattcattctcagaaggcatgtttgtgttttatatttagatgctttcagttttgagttgaggtcccttgaattgttatggagtaagtataattttggctactaatcatggccaagttttagcacatttattcgaactttctttggcttaccctatgttttcagttgttattttagaagcacccctttactggaatgactctggattgttagctgtaaaccttcagtgatcttcttagcatctgacttcttatgaagtgtggacttcaggcttccatacgagatctgataataataggagtatgcagtctcctgctgatacttttattggttgcattatatgatgattcctacttttaataacatagttgtagtactttacaacaaaagattgacaaaaaaccacttgtgtctttgatggagctgtccctaatgtgatctcagtattgagttgagtggaggggtccctgctgctagctgcaggagagcttatggagaagctggctggaaaacatgttttggccctgttaggctgtgtttttgttgttcactataatgttttggtccggtttcttatggactagtgacctctactttctcttttctattgacctctactttctctcttctataatgaaatgaaactcagtgtcctgtgttctctagaaaaaagtatgtattcttaggtagtttcgcttggttagagtttatgtggcccatagctttgtctggttcttttattttgttattgttgattgctgtaggactttcaggcctacctaaatattctagttgatgctctgtaatgctaacagcactcacaaattaccaggtagataaactaaaggttttagcagattccctggcatgttcatcctccaaagcagaacagcgtattttggagcacaggttttgcttctgaagttgttttttcttggttcctgtatagaataattttgtcatggcacttacagaatctcatgtgaacaaaatatatttcatccttggatgtttgctttgattttattctttggttgaaactcttctctattgttgtatattacttgctcacaatttatttttatcatcaatgactcggttcaaaatcagttaaacttttttgtgtgtgcttaagcaacatgatgaaaaaactaatacattgtgattactctgacattgtggattactgaatttgtaatgtgccagatgctcgcaccttagtctcagaactagcacattttatttctggtttcctgtggtatctggacttttcgacacttcgtacttgcaacgaacaacttgtatttgtatatatgttactttgctgattgtacataatctcttccgtcctcacaatttttatctgctgctaactttctaaggaagtgtccttgtgtagtacaattttcttttgctgtaatatttataaacccatttattctttgaaaatctgagat

SEQ ID NO: 182780 - DNA, 411 bp, Zea Mays
ctcgatcctatctaatcttatatgatctaatctagtgtgagttacttaatgctggtacaaaggataaggccatacttctaattcacttacgcctaaattggtgacttagatcaactcggccatacccaacaacttgacctacatgataggttacataacctatcccacccgtctagaagcaaacgaccaaaccagattctgactaacctcattaaactcatagccatctactaaaccagctgctctacctacgtgttacatacagatctatcttaaccaagacaccaatacgaagaagatcaacctcatcaaggaaaggataagagtcaacgtcaaggaaggtaatcatcaaggataaaagtcaaaccagatctctagatgcatcaagatccaccatccggaatagaagtt

SEQ ID NO: 182781 - DNA, 370 bp, Zea Mays
ggaatcacgaatcggtcaaaaaattcaatcatgaagagcacaatatcacgcagggtagagggaatcacgaacttggttcctccgatctgttgtcgcacccctaatctaggaaagaaaaaacgaagctggaggtgggagaagttgcacgaggaatgggggcggcgatcatggaagtttcagtgcacaaacagttctgtaatcagtttgtgtggtgtcgaactaaaaattcagtttcagtgcacaaaatgactgtgtcgaagtgataattccatttctgtggcatcgattgtgtgtgtcagagatgcaatgtcttagtgtcgtagtgtgcatagaggaaggtggatattgtttacctgcgagagaaacttct

SEQ ID NO: 182782 - DNA, 484 bp, Zea Mays
gggagatatatcatcaataaaaagacttcattctcaaaagcactcaaattgtttactgccaacctgcatgcttacttaactcagggtgaccactataccctactaacggagcaatcgacttaagtcagcaacgacttaaggcggtgtgacatgctcacgcgtaactcagggtgaccactataccctactaacggagcaatcgacttaagtcggcggtgtgacatgctcacgcttacttaactcagggtgaccactataccctactaacggagcaatcgacttaagtcagcaacgacttaaggcggtgtgacatgctcacgcttacttaactcagggtgaccactataccctactaacggagcaatcgacttaagtcggtggcgacttaaggtggtgtgacatgctcacgcgtaactcagggtgaccactataccctactaacggagcaatcgacttaagtcggcaatgacttaaggcggtgtga

SEQ ID NO: 182783 - DNA, 343 bp, Zea Mays
gaaaaagttctgacgctgacttttctgcactcagaaatgctgtactctgtgataaaaaaataatcgacaataagataagatacgcactgaagtttcccaaccaaaagcatcttcctgtccgtctgacaaaaaatatcttggaagcagaaagtgatcaggatgaaattagaaaaatgtggttttctgaaaaccacgtgccattgtacatgttacgagaatttgagcagcatgctgaggctagctccttgcctactccaggaattccggaatgttttaccaatttatacccaaggcgagtgaaagcacctgacagagatgttttttcatatctctttcacaaggg

SEQ ID NO: 182784 - DNA, 341 bp, Zea Mays
aacgactgacggtgagagctttttctgatgcgttgctccgaatacaagggtagaactgatgaattttcattgctaaggtgaaatctgaggtcgtgtgccatgcagtggtgcggcatgtaattctcccaaaaataaatagatctacacgtcccgtaaaccattttcgttcccgttcctatatactatcacattttcgtcatgttcctgttttttctccacaaatatgtatacggtccggataagtatttttcctatccgttttcaccgcagcatgcgatacgttctctttgaagttagaggtgcgtaacacataccttaaggcctattttgggtactctagt

SEQ ID NO: 182785 - DNA, 476 bp, Zea Mays
tgtgattcagtgacatgatcaagagtagattcccaagctatgccacttgactccagatgtcttgcccaagttcgagcttgctcccattgaccgtccttttctaatgatgttaaaagagaagcatcatccatcaaatcattccagttgtacacatcagtatctttacacaaagatggttcagacagattaatcttccaatatcttcggctaaagtaagatgatgaagtgccaccatcagcaaaatccactgctgaaagaagctgcagtagacacctcttctcataaattgatgaacagtttgaaaggacagcatctgcagcttttacagctgtagtggccacccattctgctattactgacacttctttggaagagtttagttgagtatgagaggcttcatcttttattcttgctgaaaaggatgccaaacgtgcagaagcctcgggaagacgcatttgagaaaatgcctttcaagg

SEQ ID NO: 182786 - DNA, 539 bp, Zea Mays
tgctgacccgaagtgagccattttcgcaactttttcattgcctctatgtgtacccattgactgttagcttgagccgcaaaagaaacctctttgttagagtggaactgagaaaggacgattctgacatcaggaagcctccattagaggtttgcttgctggattttttgtcatcctgttgaatgttggtgtctagtcaaacatccttatctattagagatgtgggcttccaggctgttcatcctagggagcggaatacgatgctacagaagtggggccatacacagattgctgttggaacaagaatggcttcctaccatgatgaagttaaaatcagcctacctgctcttttgacaccccaacatcatcttgtgttcacatttttccatgtagatcttcaaatgaaacttgaagcaccgaaaccagtatgtgccatgttccttattagtttggattatgcttcattgtttagtttgctcatgtctgacatgttctttatttcttcaggtgatcattggatattctgtacttccactgtcgac

SEQ ID NO: 182787 - DNA, 469 bp, Zea Mays
catttttgcagtcttccttggagtaatatattatttaatgatggagaaaagttgactgatgattggtggagcttttttgacaagatatggacgcttctgtgctatttgaatggcaaaggccaaaccagattaacaccaaagggtttaaatacagctggaccatctattgggcaacgggcccgcggattagtagagtccctcaatatcccagctgcagaaatggctgctgtagttgtaacaggaggcatcagtagcgcattaggtggaaagactaacaaagttgctgacaaagctatgatgctaagaggggagagatttccaagaattatcttccatctcatcattatgtatctctgcaaagctggcttagaaaacgcatccaaatgtgttcagcaatttatatcactgctccctaatattatctctgaagatgatcagtgcaaaaatagactgcatttcttgatttggt

SEQ ID NO: 182788 - DNA, 1205 bp, Zea Mays
agcatgtatgatataaaggatgatgatatttatgcttctgtgaacacattagctccttcctctcttgagagacaactccctctgctagaactactcaaagtatggccatgtactgatttttagacgccctaattgttaacatattactgatgctcagtctgggattatgtacaccacttggatgtcgaatggaaatcatgttgctactggaacacttttcattgcaaatgttgcacactccttactgaagattccctcgttgatgtgccttgctagtgttgacaggcatttagtgtgtttgcaggatcacatagtagaggcggagctatggttaggattatgtatgaacttggaaggctatttatctgaatattgctaacaaacatagacggatacatattatctgctgtattcagagtagtaggccagagagcactagtcaccagtcaaatagtgagctgtgaggttctttccacgtatacttcacagcagcagtattagctaaacaaatgttgtttctagaacgtactgtcgatttgatatttcatgtatgcaaatcacaatatttatggtgatgttcttgtttcaaaagtttttctttatctttagcatagaaatatatgtttgtccttcagatcacctgaattaatatcttttgctttggtagataagtgcttgcttgtttgccttttctttgtggcatatgttttgtcccatgtacgattgtctgttcaaagatactgaagttttgcattaacttctgttccacctctatttgtacattatgtataatttgtggttgtgaattctgacacaggatttcatgagtgggaaagttgctttccggaatattatgaacatcatattagtgggtgttgactctattatcaatgagcgaactacccaaacatacggtatcattttggagagaactgtccttctatctcttgaaatatttattcttgtcatggagagagatcttgctcttgctgatgtttttcggccgctctaccaggttttgcacttctatctcaattgtggggttgttcctggttgaaatttcatttaactgcttatctgctttcatttgtgattatgcagccattggatgttatattggctcaaagtcatagacagattgtagcattgctagagtttgtacgatatgattatcttccccaaattcaacagtgttctatcaaaat

SEQ ID NO: 182789 - DNA, 299 bp, Zea Mays
ctcaaagccgcggtcaccaccgcgcccgtgctgggcatgccggacttcgccaagcccttcatcgtcgagtgtgacgcgtcctctcatggattcggggctgttctcatccaagacggccatccgatcgccttctacagtcggccagtggcaccacggcacagggcgctcgcggcttatgagcaggagctcattgggttggtccaggcggttcgccattggcagccatacctatgggggcgcagcttcatcgtccggacgaaccactacagcctcaagtacctgctggaccagcgcttggc

SEQ ID NO: 182790 - DNA, 320 bp, Zea Mays
gtaatggaaggtagcaaatggtatgtctcataagggctttcatgatctattaaactcatgaaaagatgtttctgaagggtaacaaatttcccactacaacatacaaagcaaatgatgttatttgccttgtagatttggaagtgcaaaatatacatgaatgtcctaatgattgtatcctatatcaaggtgagtattacgagaaattggaagcatgtgtggtatgcaaagcatcatgatataagataagacatgatgaccctagtgatgttaatgggggaacctagaagagagcgatccattgctaaggtcatgtgatactc

SEQ ID NO: 182791 - DNA, 649 bp, Zea Mays
ttttgtctttccatggtagggtgcgatgacgaggtacacacaaccctgatcaatcgcctccgatggcgatctgatgttcaccttttacctttggttcgtattcgctgagcatccgatcttcttcatctatcgaggccagcattttttgtttctttttttttcttgctcggtttgctttggatcgagggacctggggatccgccgcccttcttcgtgcggcgtcatccagtttttacccctcgaatacggcttgcaggcgcgtcctagccatctcgctctctgcataatcctctgcgagacccgggctcgtatgccacattcgtcgttgtcaaactaaacaaaaaaaataggcttttgtcgcgaagatcccagcagagaggtgcgctgatgcctccctaacaatcataatcttcgcagagaaacgctcatgatccgtggtttcgtggatgtgtgatttggatttttgttccattacatctgtttccacggcgacattttcatgattactgcagcgaactgaacgagggacctatggatggactgctctttgtccgtgttgtgccgtccaagtttgccttcggatagtaaaaccagcaatctggtcacgagatctcgcaagccttttcatgtttgtgggaatggtgtgcca

SEQ ID NO: 182792 - DNA, 437 bp, Zea Mays
gcgcgtctgggggtggtcttaaaggcgtgggcaagcacaaccgaggggtggctctaacacgtgctcggggtgtgcgcgggcgagcgctagtgcgtgctctggcgcctgggcacgacatcgagcacgaggcagcacggagagaggtcaagttcaagcgcggattggctccaaatctttgcgattatggccatgatcccattgagagatctcttcccctgacattcctttgtcgtttgtgtgtggaggcttatgggttttgctgactggagccaaagatatggagtgatgaagtttggtttgtctcactgctgaactccgagaggaaatcccagatttgacgtgtctagggcacgaatctcgatgccatcttcacacacgttgcagaggggttagtttagaacaattttgtcaatggggacttaaggatttgagctagg

SEQ ID NO: 182793 - DNA, 301 bp, Zea Mays
gcaaaagttaaggggcagcgtcagccattcattaacaaacagaccatgttaggatttaagggagaagggaagcagagtgatctgtccaaagaaagacaggtgagggagtttcgaagactaaatggattgtgctacgcatgtggtgaaaagtttgagccgggacatattactaaatgcactaaacgagggcctgcccaactcaatgttgttattactgagaatgtggagatggttttaacagatgagttgttgcaacagcttgagcaggaggatgttcaacaggggttgtgctaccaggttt

SEQ ID NO: 182794 - DNA, 377 bp, Zea Mays
cgcacctcgactcacctactcatgcgacatgtctggagcacagggcccacgatggaggggccacatcaatggatggagatgtcatctgatcatctcaacctccatggattcagcgcagggctcaggtaactcacagtcactagtcgttgggccatggcgagcagtggattccttccccacgaaaggaagcgataacatgcaagctcattcccatccctcacctactaccccctttcgtctcgcttccactgtggcaactctaggacaaaaccctaagtgttcttattccaagggggtccatgcgcaaatcatcagtagaacttgaagcaacaagtgtgctgactgccacgtcaggttagtgaacatcctaatcatgc

SEQ ID NO: 182795 - DNA, 282 bp, Zea Mays
actaccaaaataccaacttaccaaggcaatttttagtagacaacttgtcgacacagcaaattaaatagcatcactgctaataccaaattcatgtagcatccatcccactcaagacccacaaacccatatagcacccatcccttctctcccatctgcacaaggtagaaggcagccaccacctcactatatcctatcaatatctacctttttcaccctcattcctccaacataggtaataggagggagtttcggcagctaggtgatgttcaagggaagtgggaa

SEQ ID NO: 182796 - DNA, 288 bp, Zea Mays
ctccactcccaggccgtcgctgtgcaaaacatccggagtctcgttcacgtcgtcctcgacctcgccaacaacagctacacccgctggcgcgatgagttccttctcgtcactggcaaatactccctggacagccgcatcctcgacgacactcccgcgcctcacttccccgactgggcacgcatggactgcgttgtcaagtcctggatctccggctccatctccccggaccttgctgaaatggccatggaacgcggcgccactgcccgcaccacttggctgactctcgag

SEQ ID NO: 182797 - DNA, 1766 bp, Zea Mays
cctccaggtgctcgctctggacctccacctcctccgccccctccaggtgcacgaccaggagctccaccaccaccacctcctccaggttcacggacaggagctccaccaccaccgcctcctccaggagctccacctcccccacccccacctggaggtggtggaagaggacctccaccacctcctgcacctagagggcatcttggtggtcctcctccacctccaccaccaagtggacgtgcaccaggtgtgccacctccacctagagcaccaggtgtgccgccaccaccaggaaataatccatccttaggcagaggacgtggggctgtacgccctctgggatcagcttatggggctgctgcctcacgtaagtcaacattgaagccattacactgggttaaagtgacaagggcccttcaaggtagtctgtgggaagaattgcagcgcaacgatgactcacagaggtatcatatagagtataagtcgtgtacaacatgatcactgcaattaactcgtattgatttttgtttgctgttgctttcgacatacttaacagtgtgaacttctttcctgcagtgtttcagagtttgatatatcagaacttgagagcctttttcctgcagctgttccgaagtccgatgacagctcaaaatctgaacgtagaaaatcacttggatcaaaaccagaaaaagtgcacctagtaagtattgttaacaggtcactcttttgaagtatgagtatgtcaaatgcgttctattatttcctgaaccatcattttttcctgttttggtcctaaatattgtgctgtgatttggaatttcgactactgaagctttggttgttatttagatctgcagtcaaagttaataagcattaatagctaacatcaaattacatgccttgtagtttgaacatggtgaaccattactacatctctaattcagagtttttggtgactctacttatacccaaaatgtttttctcttttctaaattataaatactatggagtctatggttcatagtttcaattatttaatagtttcaccatttttctttgagatcttgtgtattctgacacttaaattgtgaatagattgagttgaggagggcgaataacacagagatcatgctaacaaaagttaagatgccactctcggatttggtggtaagaatcaggacagtgcacaagataaggtgtctcactctttaataatttctgacatgttgccaatgattgatttcttcagagtgcagctctggcgcttgatcaatctaccttggatgttgatcaagtggagaatctcataaagttctgtcctacaaaagaagaaatggaacttctcaaggtgcacaacacgagattgttgctttactggcatggtgaccttattttctaaatttcccttactctgtttttgacagaattacaccggagacaaacaaaatcttgggaaatgtgaacaggtaatgcctacattatgttaaatgcgtaactgcatatagtttttatgctctcattacatgtagggaacaacaactaatggtatgtgtatgtaagatcacatttagcattggatgcactgaagttgcatatagttttaggccaattagatatgactacatggctaggtgtgtttacgagagattattgttctcctggagcagttcttcttagaattgatgaaagtgcctagaatggagtcaaaactgcgagtattctccttcaagatccagtttggttcacaagttgctgatcttagaagaagc

SEQ ID NO: 182798 - DNA, 322 bp, Zea Mays
atcatttgctctcacctctcagtcttagctatttttttccttctctttaaggtaacacatcaaacccaaaggttctgctaacacatattccactataccgacctgataactctccttgtggcccgcatcgttcttcacctgttataaatcaggtattctattgtcaccaaaaagcttgtttattctgtgaatctgtgttaaacgtaattcgtcaaacttgcatgtttttttgccagaattattattttttcatatgtaccatcattcctccactttatttgtttacaatattctacaagttctgacataaacaagtcagtca

SEQ ID NO: 182799 - DNA, 423 bp, Zea Mays
atactgttggctcacggttcattgtttcattgagtggagctacggtctgtggatcggatcgtatcttgtgtgtcagcttgttcggactgcggtggccggtgtgcgctgtgcgcttgcggtgctcatgacgtggcctatgcaagctgcgtagcacggcctgcggagctcatggagctggcgacatcagcttgtgtggctgcagtctgcagatcttgcactagactacagattactagagggctgcacacgggcggatgagaccagcagctaggcggtttacaagctctggcgtgtagcatacagagctagcaatgggagttcacagggatactgtgctatggcctatggcatgttgtggcacacagcgtgctgcgtgcggagctcgtggcaaagcgactacgacatgcgtgcgcaggaggcccc

SEQ ID NO: 182800 - DNA, 329 bp, Zea Mays
ctactggtgagcttggccatgacgtcagctcctggatggtcgaacgacaatgcaagtggtggaggaggtggtggagtccaggacgggaggtggagacgtgccggtggaggaagaccagagtgtgtagaggggccccgagctatcacagcgggtgagaggggtcctggtggctagatccttcacagaaaaaccagaggggtcaaactcaatggaacaagagttattggtggtgaaccgatgagacgaacagaaagaagattatgagtggtgtgaggggctatgagaacgtcgttgagatagaatggcccagggagaacaaaggcacctat

SEQ ID NO: 182801 - DNA, 382 bp, Zea Mays
atggtaaattgacgaatagaaacaagatttttgataatatgtggagacacaagaacattagcaagatgaagattcctaaggaaagcgaaccctgtgcccgtaatgggcaagtgggacccatccccaacaatgatggatgaaggtgtggaggaggtgggagtttgggaatgggagagtataccagagatggaagccatgtgggatgtggcaccggagtccatgtaccaggcactcggagtagcgggaggttggagtgttacagtgctgaaagcggcaacgagttcctgctggttccagggcccaagtggtgttggcggcgcaggacccggctgaggaacctggggcggcccaagagcaccaggcccataggcgtcgaaaggag

SEQ ID NO: 182802 - DNA, 741 bp, Zea Mays
gaacttagggcttgattttaagcaagatccagtgactttttgtgggagcacattgtagcaaagttatagatggattgtagttctacaactttgctgcagatcattgggtatgttgccatgaaaatttgtgagcaaatcgagcctaaactatggctgtcaggttgactgaatgctgcagcccatggtacagtgcccaaccggatcagatcagccgccgcagaagaatcccaccgctgacgaccttcgccgtgattcacgccaccgctgttggattcgtgctctgggcgagtggataacatcgtgcggtagaagcccctcgccgacggtgagctggaggtcactccggtgacatcaccgtggctctctctccctctttgcggctgagcggattaacacgccggcgaccgccgtcttccggccatgcgcagcgtggctctcgctttccaccgcaccaccgcgccttaccctcgctctccgtggctcaccggagttactgccacgccataggacacgtattcaccgcgccaggcttcttcctcatctccggccgccaccgcgccatcgtcaattcaagcgccaccgctcgctccgcctataaattgagccaccggccagctgctctaggtcgtaccaaagccatagccaccactcccgtctccgattaacccccatagccagagaatcgctcacttcccccaattcagtttccgccaccgtgaaacgagcctcaccgtcgccagc

SEQ ID NO: 182803 - DNA, 400 bp, Zea Mays
ggttcttatgcaaaacagatggccgaaggggtatggttgtatcttggccgctggattaaaagttgatggctcagattttataaaccaaaggggtataatgcttctaatctggaccctcaatccagagatcgacggcaccaagcatcctattctctcttctattcgtggcctttaatcacaagatcaacggtccaggggtcttcttcctcccacgacaccttctctcctccatcgaactctcatgccgcctagcccagcaccggcgcgacgacacgctcaacccaaacccctgatctctccccacgtaacccgtcagtcgagtggcccaaacggtagcctaccagacacgaattgctccacccctaccacaatgtgcccaacaccagaagcatctacaagc

SEQ ID NO: 182804 - DNA, 381 bp, Zea Mays
gtgagtgtgaagtgtgaaccattcactagagtctacaggttagtcttccatgataattacgtgcacaagatccgatctcaccagcagtttcagtaggataggttagctgatgctcaaggaatccaggtgagtagaaatatcaattccggattacctttgtggtgtggttgaggttgatgtgccggctcattgataattctggaggaatgatctaaactatgagcaatgttggtgagatcagatataaggatgaaaaatgaagtctgatactgcttcagttatactgaacagtcatgtcaactctgttggtgagctgcactgggcatgcaactctggcaccagttttgcactctggcagtgtgaagatatgatgcatgtgtg

SEQ ID NO: 182805 - DNA, 423 bp, Zea Mays
gtgagagagacgatcaaggcataggtatcctttgtggttgggagaatacccaaggaagacgcatagggtagagcgaggagatagtttgtggggtgtagtgggggtgagattaggatagcacttgcagccgaaaacacgaaggtgttcgtacgaggggcgtttgccaagtaaggcgaagtggggtgtgccggaagcaagtgtctttgtgggaaggatattgagaagatatgtggcagtaccgagagcagcagcctagaaagtgggggaatgctggcttggaagagaagcgtgcagacgacattattgatggagcgaattatgcgttcagccttgctgtttggggggggggagtataagggcaagacatgcgtaaaagaactccatgggaggagaaaaaattgcgagcgttgaggttgttgactt

SEQ ID NO: 182806 - DNA, 456 bp, Zea Mays
cgctttgtactcgttttctttgacgatatattgatctacagcaagtcatgggcggaccacctccgacacctccgcgcggtcctcagtgagctacgccgccatgtcctcttcgtcaagcgctccaagtgtgcgttcggggagccttcggtcgcctaccttggacacacaatttcggcagacggtgtggctatggatgcgaccaaggtccaggccatccatgactggccggtgcctcgatcagcacgggcggtgcgcggcttcctcggcttggcagggtactaccgcaagttcatccacaattatggcaccttggcggcaccaatcaccagtctgctcaagaaggaaggtttctcctggggtacggaggccgccaaggcattcgaggacctaaagaccgccgtgactgcagcaccggtcctggccatgcccgatttcgccaaatccttcgtggtcgag

SEQ ID NO: 182807 - DNA, 458 bp, Zea Mays
gcggtcgaccactggcgttcgtatcttcagcatggggaatttatcattaaaacagatcagcaaagcctcattcaccttgatgatcagaggttgtctacgagctggcagcagaaagctttgacaaagcttcttggtttgcaatacaagattatctaccatcaagggaccaacaaccgggtggctgatgctttgtcacgccgaccggggctggaacgggatgcaccacatcttcaactgaatctagtggcaacttcaacggtggttcccagttggttacagcaagtagttcaggggtatgagcaagaccccagtactcaaaaactgttgcaggtattagccactggaacagaccagggtcagtatactctgacaaatggagtgatcagatacaagggtcgtatttggttgggcaccaatctggttttgcagcagacagtcatgaccgccttgcatgccag

SEQ ID NO: 182808 - DNA, 684 bp, Zea Mays
acactatgttgtccttacccatcactccacaagtgcatgtctcaccaacgcggctactctgtgcttcaccatgcttgcctgcctacctgcgttgcatcaccgacacaatgtcatactaccatgccacaatgatgcactaccatgttgtgcccttgccgaggcgcctcactcccatggtggtgtaggcgtacgtccacttagtgagcttgtcgcgacaagagacgaggaaggttggaagggcagagagctggggtgaggagatcatgatcatgagagcatgcgcaatgggtgagagaaaggagacaaggagtgtgtcagtattggagttgagtgcaattaccgcgggggcaggggtaacgctggtggtgctgcaaggtgtaggagcgagtcgagcaagagcaaagagggcactgaaggtaggatcatgcctagacactcatcttcgagaaagctaggcttgcacgatttggtggtgcaaatgagcatggcaatgggtgtggcaccgcgtcaacaacgcagcgtaggtaagcatgggatggtagattgatcacggtgcaacacgacgcaggtgaggtgtgcacatgcatggcaatggggtaaggacggtgtcatgcagggcgaggggtggactgggatggtatagtaatacaattttttggagctgaatgtgcaatttactagtac

SEQ ID NO: 182809 - DNA, 315 bp, Zea Mays
agaagatggaggttgacgccagtcttttttcaattttctggataaggggtagaaaagcacccaatttaggtctttggagacccaagggaagccctaagtaagtaaagggcaatgatccaatgttgcaatgaaaaatatttgcaaggatctccattttctggtccgtgacattgatggggtaaatgttggacttatggtaattcacatgaagcccagtggagtcagcaaaagagttgagcattgcctttaagaagaaaagttgtctagggcaggcttccattatgagaatagtatcatcagcgtattggatgatag

SEQ ID NO: 182810 - DNA, 425 bp, Zea Mays
tgcgcctaattctttccttgtcttcttcccctcggttgtcgtggctgatcgggtggttggggaggggcaatctcttcatgtccctccgctcaggatgcatattcgaaggtggtctcgtcaggctttcgctgctggaggtgggcagccgcttgtgcccgttggcgttgaactacgtggaattcctgcgcatctctgggggattgaggctgctgaggctgttcttggtgctttctgtttgattcatggttttttgcctggcttggtcgaggaggaagacatgtctgttctcagactgaaagtttggtgccggtcacctgagctgctgccggcggtggtggatctccttgctgaagagccgatggtctgtggagaggatgggagctgggttcctagcacgttggtgttccctgtttctgtggtggttc

SEQ ID NO: 182811 - DNA, 578 bp, Zea Mays
ggatggtcaatggggaagtctgcattggaatatttgctttgaggagcatcaagaaggtagggctagaaagagtgagggttggtttgcttcatttatagtcccagtgaattatacataatgcataatgacactggtcaactgtcagtgtgtaatgggtatgttctgttcttgtaatatagggtgaagaattgacatttgattacaattatgttcgtgtatctggtgctgctcctcaaaaatgcttctgtggtactgccaaatgtcggggttacctgggtggagacatatcaattgtcgataccatcatcacccaagatgatacagaagcagatcattttgaacaaatggttgttgacaaagactccaaggagttgctgggtccaaatgagtctgattctgatggtagccacccaaatatttcagaacctgaattttctatccaaggggaagatttacatgattgctcagctgcaaaagtagaattagatctgcttgaaggaactagaggaacctcattagaaactagtgagcctgaacatcccttggaagcatggagcccaccagaagatgaagatgtc

SEQ ID NO: 182812 - DNA, 285 bp, Zea Mays
gagcttctctcaagatatccatcttcacctctgatttctgaggcacataaaggcgacccctgaaacgaaccaaatcattctcatcaatggagaactcccggggtttaccatcgccaaccctctttcgagcttcctgcaataaacgatcctgctgctgagccgcacacactctctccatgagggaagattgaataagcatacgagtctcctcactagcggtgccgacatagcaaacagcgatccccaaacggtccagaccagcaatcaactgcaaggccacttttg

SEQ ID NO: 182813 - DNA, 429 bp, Zea Mays
gaggcgctccgccgtcgagccaagaaaaatgggcacatcgccaagcttgccattatggcaagggtaaaacttttccctacccacaaccgtgttgcattccatatcaggatgagctacaggcttcgcaggattgttgacaccttcaaggaccttgtggaagaaatgaacacctttggattcaacaagcttgagcccgaggcaacaacgacatggaaggagtggcgtgagacagattctattatcgttgatcctgaaaatattgttgccaggtctagacatgatgagaggaagaaaattgttaacttattggtcaatggtcatgttaccgatggtgatcttatggtcgttcccattgttggaatgggaggactaggcaagaccacactcgctcagctcatctacaacgaccctcaggtcaaggagcacttc

SEQ ID NO: 182814 - DNA, 290 bp, Zea Mays
aattgttcctataaaaaatgacattatggcagctgtttcaactatttgggggagagacttcaggaatttcagattccttaacacagctttcattacgctgctaccaaaacataatgatgctattgctgccaaggatttcagacccattagtttgatccacagtttcgccaagctggtgactaaggctcttgcaaataggttgaggtgtcatatggaggggctgatctctaaagcacaaagcgccttcatcaaaggtcgcttcatacaagacaattttatgcttgtccagc

SEQ ID NO: 182815 - DNA, 709 bp, Zea Mays
ttcaatttagaaaaccagattcctaaactatgtcatctggcccaagagatgggtgaaaaggagaagatatgcattcttcatgcagctgggctacaagctctttcatctatggtatttgtttctcttgttatgccatgtgctcttcttagtgcacctgtttggttcaagagtagcttgtcctgcattgtgtattcattgatgggagtaatttatagtatgatgtgatatttttaaaatgttctttctttctcatgcatcatactattcaagataaccaattcgatcccttctatcaaacaatgatcgtggactgtcccatttgggaaagagaatgtaggctctaagttccctcctagtttttttttcttcctacggtgtttgtgtttgtttggctatttgcgcctttgtctttttagtgcaatgatacacaactctcctgcgtattccaggaaaagatatgttgcctcttaggacctgcttgaaagaggaggatttttttttgtcaaacttgaactaaatcctttggatcttaacccttcttcctcttacaaaaaggtcattaatgttccaacaaaattaaacaaaagtatcgtttcatttttcactctgctacatttgtgtttctttttgtttccccagaattttgatgcctaatgttgatttgggtgcttgcagatttggtttatgggtgagcactcccatatgtctg

SEQ ID NO: 182816 - DNA, 570 bp, Zea Mays
ctctagtttggatatgacctcagggtatcatcaggtgaggatgggagcatctgaggagtttaagactgcatttaagacccaccagggccattatcagtttcgtgtgatgccatttggacttaccaacgctcctgcgaccttccaatgtgccatgaatatggtgttggctccattcctgaggcggtttgttatggtgtttattgatgacatactagtctatagtccagattggtctactcacatggaacacttgaagttggtctttgcagcacttcgagagcataagttctatcttaagcagaagaagtgtgtgtttggcaaacaggagctaacatacttgggacatattatctctgtccagggtgtggccactgatccacagaagacagcagcaatggtgaattggcccagacctaggaatgtcactgatctcagggggtttcttggtctaacgggttactatcatcgatttgtgcagaattatggggtgatagcccgtccattgacgaatttgcttcagaagggagcttttcacttgtcagaggaggctgaaatggcgtttgaacactt

SEQ ID NO: 182817 - DNA, 433 bp, Zea Mays
gtccgatcctggatccagggaccagattagatcccaacccaccaatacacccgagccgcggatcacgagatcgacggccatcatcctacacctgagttgggctgctatgatccagttgtggccgtccatttgcgaaccaacggatcagataccccaagcccaaaccggtaagagttatgcgatccggaacgtcccttcatgatccgatggtttaggttgcatcacgcgcagagatacgattcctcctaatctggcctgcccattacaagaacagcggacaagagccatcacccatactttattcctcagtcccaattctccaccgtcgatccaaggaccaacgaccactactcatgtcccccaaccaagctctcccaacgacggagcacagggcctgtacggcggcggccatggctagcaaacagcgccgatg

SEQ ID NO: 182818 - DNA, 461 bp, Zea Mays
tttgatgagtgcctttgtcatccatcatccatcaaatctagtaacgataatgctgccccaactgttgacccatctgctaatgccaagataacagaaaaaatgaagcacttacttttgaaaggagtgcgtggaattacaggggatatcagttctgaatcatgtgaggatagcaacgacatgattgatcctccccagaatgtcccgccagagaaccacactgttagtgatacttctgattctgcagattcctcagattatcctgctattgttcaaaatagaaaagaaagttcatcaaccagtagtgataatgattatatcgaggtaagcaggtccattatgtagttgcagaatggctgtatgggtatttgttcttcttccccactcaatatctttatttctttctcatttcccaggtgctatcatcagttcactgtgttcttgtaacccccaaaagaaaacta

SEQ ID NO: 182819 - DNA, 358 bp, Zea Mays
cagacacacaaatagctaacaatgggaaacgtcaaaggttggcccagtattggtcgtggttgaatgatgctaatgtttgaattgagtatgtgacccgtaagggagaatctttgctatctggtagtggcctaacgaagaccagagcatataaggctgcccgcagtggaggactgggtgctggactctatcccatatagcgtaaagaaacacctacagcgggtgactgggtgctagactctaagcgtgatcgagctgcaaatatagagttcggacgcacatgcgctaaacgaggcatgcaagcaagcagccggcggaggcagatgcatgcatgcacgcggaggtggggaggcgggcccac

SEQ ID NO: 182820 - DNA, 379 bp, Zea Mays
ctgcaacttataagagactttcccaatgcgacttgttacctggtatggcccaaagaagcgaggacccaatttcgacggagcagccgcgatgacacccactgctgttcgctgttgtaaacggagccatacccagtcgccttcttggaattcgacctctcgtcgtgactgatcctgatatgtcttcatcacaagttgtgcttgtaccaacctttccttgatttcagtcagaaattcatctcgttcctggagctgctgatctaccgctgccacctttgcgacaccaggatggtaagctaataatgttggtggctctcggccataaactacccgaaagggggaacatttgagggcggagtggtacgaagtgttgtaacaaaat

SEQ ID NO: 182821 - DNA, 417 bp, Zea Mays
gaatctaagtatacttggtggtggaccgaggatgttcaaaaggcaataaaggagaagaaagaatgttacaggagcttgttccatgacagaagcgcgatcaacatagagaggtataaggtggcaaagaagactgcaaagcgagctgtgagtgaggcaaaaggtcgagcctatgatgatctttaccgaagactaagtacaaaggaaggggagaaagatgtctataagatagctaggattcgagaaaggaagacgagggacctcaaccaagttaaatgcattaagaatgagatggatcaactcttggtgaaactgaaaggacaatacatcaaacagaggtggcagaggtattttgacaatcttttcaatggtgagaatgagactatggacatccaattggatgactcctttgatgattta

SEQ ID NO: 182822 - DNA, 481 bp, Zea Mays
taacaccaccataagattaacacctcaggcatgccatcatcctactttgacctcataccaaacacatccataatcttttagtattgacaacataataaggccgcatgattgagaaagattgaagttaagctttgcaaccattatttatccatttactgcatcaaaataatggagaaaatttggttcaatgtaccactaggggaactcaaatgtgataaatggtctatgagaaatattttggctgtgtgtttgaatgttaaattctgacagcatggaagcacacgtagtctgtagagaaatccaaaactattgtaatgtggtgatttactatgaagcctagttgccgttattcccttgttagtagtaatgcatacctcatcatactaattttcattccagacttccagttagacatgtatcatatgcatgcttgtatgagggacacatttcttggtcagttttttcagaaacatgagaggat

SEQ ID NO: 182823 - DNA, 293 bp, Zea Mays
tggctgcctggcttcggtgtttggtcctcagcctgtggaagaggaaagaatggatttggtgtcgcgttggcttttccaggagtcgctttccttcggtgatctcccaagcctattttattttgtttatgctctttttagtatattttgcctcgttctacttgtcgtctgtgtggttattttttcgctaaagattggcaagcggttcgtaaacggtttctactgtttctccctgttttgtctccataaattataggtataacaatccaaataactagctttaatctgaaacaaat

SEQ ID NO: 182824 - DNA, 573 bp, Zea Mays
ggcgaatggatctgcgcggggaccccgatcaaattcagggtcaatattgaagtcatatccaaacattcatcgatcacaagctagttctgatgattgggaacatccgtctggtacaaataagttaatttctgctggtggatctggcattcataaacgtacaaaatcaacacattcattatctcctccgatccaatggggtgggcagaggcctcagaagatatcccgttcagcaaggaagtcaaatttagtccctataatcactactgatagtgcactggtaccaggttcgctggacagtcctgtcaatgaagattgtgcaggtttaccgaggcgtgcatctgtaaatagccttcaacaaacaaaacgaggagatcatgggctctcaactggacctgaaggcaatgagcctgtagttgctgagaaaaagctaagggacaagggcaaaagggctggtgaactggatgatgggcatggctctggttttcagaagattgctatgcttgggcatccttccaaaaggaataagttgcctgctgatgaggatattggagatgctttaaggagacaagcaag

SEQ ID NO: 182825 - DNA, 548 bp, Zea Mays
ctggcagacaccccaacactaacaacaaagaaactatcccatatggctctgagcttggaggaaggaaacccccttagctcccgccaaggaccacaatagagcttcctccctagccagccgaacggccaccaccacgcttggagaggaaccattaaagacaacaccatttctatgcttccacagcatccaagcacctagagcgaccaaagagtcaaagcccttcttactcagcccatctagccgagcactattggaacaccaccagacattaaaatcctcaatatcctgtcctggaatgaagccctgcaatccaaacggcctgaacaattcgaaccagaaaagacatgcaaaggagcagcctaccagcaagtgattgatagtctcatcatgttgatcacaaagtgggcaaaaaagcgattgagtcagacctcttttagccaacctatttgctgtccaacatttgttgtgagccataagccacagaaagaaccgacatttgctaggggtccaagtcttccaaattcgatcagcctgcttgaagaacaccg

SEQ ID NO: 182826 - DNA, 468 bp, Zea Mays
ttggttaggtatgcaggaacccatttgtgccttattatttcatacagtgactgcagccaattatcgtctcttaggccatacttgtcaagaatggagccccagagcatgtcaaaaataactgcgatatcacacccattgacacatctcttgagctcctcatgtaacccaggaaaccttgtgcgggcatcagtcagtctcttcttgcatctagacaagatgcgccatctgcaaagacgatggaaacactgagaaaatacttttgcaatagcagctgctattcccttaccttcatcggtagtcaaggaaaatggtaacctactatccattgctgtcaaccacgtctcaaaaaatccactcctcgcccatcttgtcgtcgggctcggcagcctggtcgtcggccttggcagcggaggtaggttcttggggctaccgctgaggcaccgatacgtgaccagtgccgcgctctgg

SEQ ID NO: 182827 - DNA, 621 bp, Zea Mays
ccatgtcttgctgaaaatcagtatgtcatcaaaaaataccaggacaaacttccgaatataagctttgaggacgtcattcatcaaggactgaaaggtggagggtgcgtttgtcaacccaaagggcatgacgaggaactcaaattttccgcggtgtgtgcggaatgctgtcttgttgatgtcgtccggactcatgcgaacttgatgatatccgctgcggaggtcaagcttggtgaagaacctcgcatctcggagttcatccaacagttcatctactactgggacaggaaaggagtcctttaccgttttgctgttgagctcacgatagtcgatgcagaatcgccatgacccatccgctttccggaccaggagaaccggggaggagtatgccgatgagcattcccggatgatgccttgctgcagcatagcctcgcattgtttctcgatctcatccttcagcagctgcgggtaacggtatggttttaccgcaactggtgttgttcctggcagaagtgtgatgcgatggtcatggcatcgagggggtgggaggtcgcgcggttcgtcgaagatgtcggtgaaggagtcgagtagggtcgtcaggagatccctcgtgacggccagcgc

SEQ ID NO: 182828 - DNA, 334 bp, Zea Mays
gaacaggcaaacatggcagcagcattgaggttgattttgatatctaaaatctaagtcacaccaaattcgttccggctgtgttttcttcaaccaaagccatctcatgttcagggcccagccaagaatctccagattatgaattcccagccctcctaaatcaggcgatctgcacaccctttctgatctgaccagacaatgaccacttttaatatctttatgacccttctaaagaaaacctcttctaatcttatcaatggccttgataacccacttggggcattgaagagcaattagatggtagattgggatgccagttagaactgccttcaccaac

SEQ ID NO: 182829 - DNA, 788 bp, Zea Mays
cgcctgctgataaggtggaggaggtggctgaccccgccgccgtttcacctgcgtgtcagaactgcgccccgcctcagcaagaggaaaataaggtggaagttgtcgctgctattttgcctgcagcgcacagcagcgccctcccacatgccctgactgagaaggatcagcagaatgtagtcatccgggagaatggagaggcacaattgctgggcgatgcaggcaagctgtcattggatggtcagcaagggaacaatgtggtgcaggtagcagtactgggtagttcgagcaccgttggtgctagttatttgcagaacggtgacaaggggggtggattgttggtggctgaggagaagggacgtggtggcagcagtgatgtggggcaggaggttgctgttaatggggatgtctcagagattgcaaacaaaacgggcactggtgagttacagagaaaggaaaatggaactgcaggaagcagaacaaaacggtggtttgtatcctctctgaatcctccacccaagaggagggaagtctcagccgtacgtagatttccacctggctgtgggaggactgctgttaccaccacagacagcggtgttttggaggtctcacctataagcacatttgctcctggtcatgggagatctggtgttaataccacaggcagtggaaatgaggggttgccttcagaagccacccctgtcaacaataatgatgccttggtggcaagttcggttttaggagagttggcttctccaacttcagcactagaggcctccaataagaaattg

SEQ ID NO: 182830 - DNA, 1041 bp, Zea Mays
tgatgcaagtgcaaatgtttttaaaaagattttagggaaatctactggctatttgaatgatcaagagagccaaaaggcactggttttctgctgtgaattcattaagctatgtgtgcctgcaacagttatgcatgctgtgcttcagctcagtgctcgcttgacaaaaacacacgcgcttgctgctctattctttgaaagtggtgggttagcatctctcttaaatctcccaggcacttgcatctttcctggctttgagaccttagcatctgctattgtgcggcacctcattgaggatccccagaccttgcagagtgccatggaattggagatacgacagtcattaagtaaccatggcagtcgtactccaagctcatttcttacaaatatggcaccactgatatctagagatcctgtgatcttcatgaaggctgcaacttcagtctgccaattggattattcaggagggagattgaatgtagtcttgttgaaggacaaggagaaagacagagagaaacagaatgttcctgtaacagaaagtggtgtgccatgtaatgagcctgttcgggtgactgctgaggttaagacggttgatacaccaaacagatgttcacggaaccacaaaaaggttcctgctagtcttcctcaagtgattgatcagcttcttgagatcatcatgagctatccatctgcaagcaaagaacatgggtttgatggttattccctgttgactccaatggatgttgatgaaccaaatacaaagggcaaatctaaagttggtgatggccaagaactggatggtgatgctttctctgagaggtctgccttgctatcaaagtttgcatttgtccttaagttgatgagtgaaatactccttatgtatgtgcatgcagtagggataattctgagacgggatacagagatatcagtgtcacgaagttgcgctcaaggtgctggacacagtggtttactgcatcatatattctatctgctacttcctctaccttcagtcaaaattgctgatacctcagatgattggattgg

SEQ ID NO: 182831 - DNA, 337 bp, Zea Mays
gcaaacatatttatcacttcgagcaaggaaggtttgtcaattcattaatctattggcaacaacagttgatcttatttctcaaattgaagcctgcttgtgctgtaggaggaatcatcagaagaaatgcagaagagaatccgtgcggcattcagaaagatggcaacatcctttccagatatttccaaagctgaagagtgctttgaaaatttgcaccagatgaaagataataacatatttaaggatttggatgaactaataaatgagggaaccagttttgcaaaaggccgcgtgaccagagtaatactctttcagccctttctgtctataagactgcaca

SEQ ID NO: 182832 - DNA, 301 bp, Zea Mays
gtggtcaccccgagttaagtaagcgtgagcatgtcgcaccgctttaagtcgttgccaacttaagtcgattgctctgttagcagggcatagtggtcaccccgagttaagtaagagtgagcatgttgcaccgccttaagtcgttgccaacttaagtcgattgctccgttagcagggcatagtggtcaccccgagttaagtaagcgtgagcatgttgcaccgccttaagtcgttgccaacttaagtcgattgctccgttagcagggcatagtggtcaccccgagttaagtaagcgtgagcatgt

SEQ ID NO: 182833 - DNA, 370 bp, Zea Mays
ttggcgcccctgttgcatactcggcctggaacctgcctccttccaaggcctttacccattttgtgtcaaatcctcctgctggtgatggcggtttgggccttagagtgcgaccctctgccgaagaagttagtgctttggttgcttcgcttgaagaaattcctgatgatgaacgacaggttcactttgaggtgcctttggatcctagtgatgcagagataagtgccatgcttgatatgttagctgaggattcttctgatgccgctcctgctgaaacattggtggtggtactcatccctgaggctgacaaagctttggacgctcagaagtctgtcaatgttcgtccaaaacgttctcgccgagccgatcaagc

SEQ ID NO: 182834 - DNA, 560 bp, Zea Mays
cgcgacgaaggccctcctcagcacgatcaattctaccagaccgtttgaggacgcaaacattatgggcagactccaccggcggctctaccgatcgcaggccagaagcaccacctgcatcggcgccgttctttcgctttctctaaccccggcgggtgcgcttcctcgctttcacaacagcagacgaaccaccagacagcggagcaacctccatggcgtggcacgacggcaccggcgaaacactgggccccttggaaactggcctccacaccgaaacgcgccacggacgggcaggtgcagtcgcacgacgcgggcacacgtgaaagcggtgcccaggcagccgacagttaaagcaccgcacgatactccgacaggtagccgcccgatgagaggaggcgaagcagttgaagcaccttccacgcaaatccatagggggatgatggctccgaggcaccggccgctgaacgtacatagtcctcatctggagaaagttctggccggcggtcagacgacgccccttgcggcccacaaccttcacccagccgcccccagcgccatcacca

SEQ ID NO: 182835 - DNA, 333 bp, Zea Mays
aagtcattgttaatgtcgaggcaaattcgggtgcctatttcttcatatcataaataaaaaggcacctagttcctcctaggttggtcaagtttttacacatgtgtatcaggcaacaaatttgagtttcgtcctcaaatgatagtccatttggtaagtatctgtcaaattcttaagaattcagacaatacattgaaagatatgtgagctgccaatcttccagatacactggacatcagagacgtgttgttatgtaatgtggggcaagcactattcccgccaggccaagaagaacagcatgataacaacagtgatgataatggtgtggcagcgtgc

SEQ ID NO: 182836 - DNA, 282 bp, Zea Mays
gggaattaaggacatccataatcaatatgaacagtaagggggagagagggtctccctgccgaagcccacgaagatgagagatagatctcccaggaattccattcaataggacttgagagcttgcagtggacaagatctgacaaataaggttgcaccactgctggccaaaccccaagtaacgcattacttctatcagaaaaggccaagaaattgtataaaaaagccttcgagatatccagcttcagaaggatgtgtggttccttgcttgtgtgaagtgttctg

SEQ ID NO: 182837 - DNA, 419 bp, Zea Mays
caataactgagttggtggtataccaaaccctctattcagggctgagcctatcaacaggttcaacacagccctcttctaaatagtgctccactcatttaccttctaagagcactcgcactctcctagaccaactcaaataattcttgcttccttctagcttcacatcatttggaacgagttctaattttaattcagatgagataggcaaagccttggggccaatcatacctagtcccatgagttcctgaaccatactcctcatctcatttctcatctcactttttgtgattagtggatcctcttctttcttgtcaccatgaatcattgtccttttttcagcctcttcctctaacctttttgcttcagtctcctctgaactcatcatcatcactgcctgcaaacactaagacgaaccaggc

SEQ ID NO: 182838 - DNA, 534 bp, Zea Mays
accaaattgacacatgacttggaaaattatttagtcacgatgaaatttattgatctttatgattttattaaacagatgatggaggggaatatgtggcttaatgatactattggagttattcctaaaaattcttggtcaattgacccatttggttattcatctacaatggcttatttgcttaggagaatgggtttccgtaacatgttaatccagagaacacactacgaggtgaaaaaggagcttgcaatgaaaaagaatcttgaatatttgtggagacagaactgggatattgaagaaacaactgacatatttgttcacatgatgcccttctattcttatgatattccacacacatgtggaccagaaccagctatctgctgccagtttgactttgctcgaatgcgtggtttcagttatgaatcctgtccatggagagttgatcctgttgagacaaatcctgacaatgtgaaagagagagcaacaaagcttctagatcagtataggaaaaaatcaaccctgtacagaacgaataca

SEQ ID NO: 182839 - DNA, 507 bp, Zea Mays
cctctgctgctgctgctgctctcagagagagcgcgaggaggaggacggtagccgtggaggtggtcgtacaagctcccgttggccatgaattctgacagaagcaactgcatcgaggatgaccagtagtagccctgaaaagcgaccaggttggggtggctgaggttaccaagctggctcatctgatgctcgaactcatcctggcctctcaccctccctgctgtctccagtttcttcacagcaatggacaggccgttctcaaaagtggccttgtacaccgtaccaatcgacccaccaccgatgagacagtctttatcaagtagcgccttggtcccagtttcccagtcttcataccttgaaggcaagctcttgctgaaaagcaccagtttcccgatgattgcattcgagcctggagaggcagctggaggggtgctctcggacacaagaacctcttcctcttccttcccgtccccgtctgtgcccttacgtgtgtaagccttgatgtttaac

SEQ ID NO: 182840 - DNA, 339 bp, Zea Mays
ccagcgtacaataatctcagtgcccatttgttttcaaaatttatctgctttactacttttacatatgggttgggataatggagccttggaagatgtctcatctgttttcattgtattcaatcatgtgactagtgtctgataggaagatgtaagctgatgcactgctgccactgcaaaaggtagaacgacctatatgtggagaaaaaattataggactttaacagcctttgacagaacaaagtattactatgttgtcatcttttgtgcgagaccaacagtgcttagtatgctgagttttggttgttgaagtactgaaatgctcctaattgactcagttat

SEQ ID NO: 182841 - DNA, 1156 bp, Zea Mays
ctcccgctcccgctcctcctccgactctagctccctctagttacgggaggaagagagacgaggacgacggcccgaggtggcggcggagtggaagtggagccgaggaccaggggcgtggctcaaggtgggacgacgacagggaagccaagaggtcggggtgggacaggaggagccacagctttgatggaaggcgtaaatgcaacgatgacggtggcggtgatgctgaccgtagcggccgccggacacgcgactacgatgagtcgaagagaccaccgatgtcaaggtcctattcgcataacgatcgttgggcttcagctgatgccagagtagatcgaaggaggagaagtaggagcaggaccaggagctactacagtggcagcaggagagatccagatttgctagcaggcacccgtgatttggatcgcaccaaggtgccagactctggcattgttcctgctgctggtggtgatggaggcgtgcacgatgcggatgccgatggaacacgaaagcagctgaaggttcctagttcaatgttggtttcggagatgaatgacagtgctgtcgaagctgcgcctatagaagaggatcatgctcaagacatgtctgaaggtgaggacggtgagtttgcagaagagatttctgaagacgaggatggtgagtttgcagcctctgatttgaatgatgaagatggtgatgaaatggatgacacccaaagacaaccgtctcacatgcatgttcatgcatctgaatctatcgaggaacctgtccatagacagtcccagctcagcaatgctgaagagggaatggaaactggcattgcacacgtggatgcatatatggtagagccattggcagagaacaatgttttctctgaaacaaggtatgaaatggaggctccacaaaatggagctgaaactgctgttgttgatctttacagagatgcagaagagcaaccattgacagagaataatgattgctccgaagcagagaatgagatgaacaagagtgagtttgaaactggtgttggcaatcttgatagagatgaacaagagcaactattggcagagaataataatggctctgaagtaaggtatgacatggaggctccacaaagtgaggttgaaactggtgttggcagtcttaatagagatgacca

SEQ ID NO: 182842 - DNA, 1874 bp, Zea Mays
aagcaagatagcttctattgaccttggtgcccgtgttgttcgtatggcatatagccctacaactagtcatgttgtcattgctattcttgaggtatgtattagagcttcacttgttttttttcttctgaaaaagcatttccttttattgctagaaccgaagtgccttcaaagtaaggcaaatgcttatgatactgttcacagaaaatcataagagtgacgatgcttcgttcttgttagtaggaaactaggcatacttttagcacttttatctagtcatctgccatgcagagtgaataatattattctctagcagcctgaatgcatgcactgctattggctaatggctgcgagttttgcatcttttattaatagcttgttcaactgttgacccctttgttatctcttgttctgcaggatgctacaatcagatcctgtgatttcgccacggagcagacacttgtgctgcattcgcctgagaaaaaaacagatcatgtttcaatagatactgaagtccatcttgcattgacacctcttgagcctattgtattttttggtttccacaaaagaatgagtgtaacaggttactctcttagcttggcaggttaccttttgtgtttgcttgggaggcttaaagtgatcctccatttggttttgtttttacaggttgtatttccacgtgttaacctcttgttttgttctagttgtagggactgttgatggagggagaccgccaacaaaaataaagactgatcttaaaaaacccattgttaacctggcttgccatccccgcctccctgtcttggtaaacagccatatctttacttttttctgttttttgattttatgttgtcatgtttctgcctttacgcatttctgaccaagcttatgatttagtatgtagcttatgctgaaggcttgatacgcgcctacaatatccagacatatgctgtacactataccttacaacgtaagatgcgatgctgtattttatattcatatgtttttttgtgattttccacccatcggcttcttaatcgcacaatgtttcagttgctgttgacagtacaattaagctaattggagctggtgcttttgggtttcacccgaccctagagtggatatttgttggtgatagaggtggtactctcctggcatgggatgtatcaactgagaggccaagtatgattggcatgtaagtatccttatagagcgttgagagttggaaaatataactatagtgtcatgggtgtgttgcccattgtttcttttctttccagtactgcttgctactttcatctcagtgctaatgaaatattcattatctgcaaagtcaaacaccaagttcttcaaagcaccagtgaaactagaacagttccttaggatattgtccacattaggacttagttttgaatatatgctgctctgccatatgtattagacacccatctgtgttatgttgaattacatccacatctgatttagtgcatctttgcacatagtgacatgaattttaacctaaaagttctaacataatgcttgcagttccttggcatcaaatggatattgaaaaattgcaacgatgtttttttgtcttagtcaatcatctgcatgcacctttctttgttggtgtctctcaccctctaattacactgttttctgacatagccatctttctgtctattttccatctgaattttgcctttcacttttacttagtacacaggctggttcccatcctatcacatctgtatcctggcttcctacactgcggctgcttgttactatttcaaaggatggagcactccaagtgtggaagacacgagttataataaaccctaacagacaaccaatggaaactcatttctttgagcgtg

SEQ ID NO: 182843 - DNA, 485 bp, Zea Mays
cagcccaccccttcagttttttaaatcatcagcatatatggtacatggtacacaaatgctcccgcgtacaaaaaatgcagccactgaactggtacacaaatgctctcgcctacagaaaaggcagctggcagccactgaaacgcatgtcaatattcagtacacggaagctggcagtgagtagaatttaattggaaatgcagccactgaaaccatcctagaggactgttgtactggtacacaaatgcaaaagactactgaaaataatctcagcatggcgggttgggccggcgaccttggagaagatagggccgtagggcagcggcgccgcgcgagcatgcgagacgagaccgcgcactgcggttgtgtacgagggagtggcagctagtgtaattttgggaaagtaaccagggatagcacgtaattaggctctaagaaactggttttagctagggtaacctagattaccgggttttaagaaattgagg

SEQ ID NO: 182844 - DNA, 488 bp, Zea Mays
aattgattgaaaaagaccttatattagttgggtgcacagctatagaggacaaactgcaagaaggggtgccaacctgcattgaaactctctctgcagcgggcataaaaatttgggtgttaactggagataagatggaaacagcgattaacattgcatatggtgaagcttccatttatcccgattcatttgtattacttgttctggtccttaaactattctttctgtcagttttggtttcttgctgttccttccatgatctctctttcatctaacatatgcagcatgtagcttggtaaacaatgacaccaaacagttcatcattagttcagagacaggcgctattagggaggctgaagaccgggtaagctgcacatactgcactttggacaacatatataatgcttttagttggtttatttctatcgctaaaagtttctcctataaaactcaaaaactaaaataatgggatagtttaattgcaaaaagtt

SEQ ID NO: 182845 - DNA, 2202 bp, Zea Mays
ttcaggatgcactttctacccttttctctctgtacattcgtgatcttggccctgctgttgaatttggagatgcacactggcttggaagacagggtattgcattagcgctccactctaccgctgatgttttggccgctaaagatcttcctgttgtcatgacatttctcatctcacgtgccttggtaagtaatttgtttttatggatcttatcattgcagatttgcagtgccacttacatagttacatttaacttttaatgcttctcatgacgaatctacaggctgatccaaatgttgatgttcgtggtagaatgattaatgctgggatccttattattgataggcatggaaaggaaaatgttcctttgctatttcctatttttgagagctacttgaataaaagggcaagtactactttcctattaataattgtactagcattattcaatatactacgttcctattagtaactttactaatatattattattgctccttgttttttatttgctatgcaatccatatgtaacaggcatcagacgaggaaacatatgatcttgtgagggaaggtgttgttattttcactggtgctctggccaaacatctatcaaaggtgtagatggatactgaactatcttttgtttacaagatacattcacagtactaaatatagcatttgtaacaggatgatcccaaagttcatagtgtcattgagaagttgttagatgtccttaacaccccatcggaggcagttcaacgtgctgtctcagattgtttgtccccacttatggtatccaaacaggtgtgttttgttttgtatcattggattttgggtttgaatgatgactatccattttcaacccattttttaagctttcctttttctgatttatttgattaaaatgctttattctcaatataaccaggaagagggtcaaactcttgtttctagactcttggatcggatgatgaaatgtgaaaaatatggtgagcgacgtggtgcagcttttggccttgctggtgtggttaaaggatttggaatttcttccttgaaaaaatatggcattgctgcaacattgcagaaaaatttggaagacaggttgtctactttgttacctcgtccactagtgctgtatataatgactttgtaaataaaatgagtatgcattcacctgtcacaaattttcactaaattatgttctgcagcctttgtatcttttcatgttttgttgttctctaggcatttgaatacaatttatctagagtattcaatgggaatttttgattgacaaacatcatagcgctaaatttttccatttgtgtgcagaatgtctgcgaaatctcgtgaaggagctttacttgggtttgagtgcctgtgtgagaagctcggcaaactatttgagccgtaagtgaggcacctcttcacttagaactgttgctctgattccaagtggttcattatgtttgctttcttgtaggtatgtcattcaaatgcttccattcctacttgtgtctttctctgatcaagtcctagcagtgcgtgaagctgccgagtgtgctgctcgggcaatgatgtctcagctcactggtcctggtgtgaagcttgtccttccttcacttcttaaggtatcaatatatatgttctatgctatcaaattgtaacatttgttgcatccaaatgttctggagagtacaagtggccagttcatcttgttgttatacattgaaatctgacaataacttaactttccgccgaatatttaggccatctgcaccagaaaccactagtttgtttccgttaatttgaaagagcagaacatattgaggtccatctggtaaactttttttttaaaaaaagtctacacattctggattttttccacttattgtcatttgcactgttcgcacctttatgttagttgttcgaatgaagataaaataggtattcagatactttacaaaatattatgccagccacactcatttgtaaaagctacatgaaacgaatttatttggcttgtctgatacattcaaaattttccttaaagcacatatttggatgatccttaatatgattttcagggtctagaagataaagcatggcgtactaagcaaagcagcgttcaacttcttggtgccatggcatattgcgctcctcaacagctatctcagtgtcttccaaagattgttccaaagttaacag

SEQ ID NO: 182846 - DNA, 606 bp, Zea Mays
gaactcttcaccctggaagattccttaacaacatcttgctagacgaccccaatcaacagacaagaagaatctttgtcattgcaactcacagcagcaatctgttcagacataatcgaagtatccaagccaacctcctgaccttccaccggtacaacgaccatttcagcaggggcaccagaatccatatgtgatcccaccggtttagatactaaaggtcagcctccccaacagcaataccagattcgaagcgagactgatacactataaaatgagcatttggtcccactagagcaggggccataacaacatgtagcaccttgacgcccagggtagacaccttcggacaagaattcaaaaagtcaggaacaccaggcgccgccaactcctcaaccgaaacatgtgggagagcaggggcatcaactggtccagtcaatgaaaccgaagagacacgcctaggaaaaacaggtgccgccaatgcacccactgaggttgatgggcagcatgaatcatctgaaggtccatgcatcggcgccgattgaatggcccagccgctagtgcaccgaggcctgagcagatgaggcctgatggcccagcagccgtggccgc

SEQ ID NO: 182847 - DNA, 1218 bp, Zea Mays
tgaacgttcaggtcatgctgcggtgcaggtgagttactcgagactgtggaggaagggttttcctgctaccgctaattggatgccgaaaaggaagaaatccaacgagtcgcttgcttttcttcagctcgagtttctagtttatgtaaatgttcaaaggacctggattctaagtaggatcgtttttgtccttgtattatcagattgtagcatcgggatgctatcgaattttataaaatataattcttatattatgtttgtagcatgtaatatgttataaagtttgagacctataatcttgattttgactgttttagaataataccccccctccgttctgataagacgttttgttttttaaaaaaaatatgatttttgttatgcacttacatatgtgcatggtgaaagcaataaatctaaaaaataaaaatcaaaacgttttatgagttaggatgggagggagtatttcgttacaaccgaatggtttaaaaatcatttatatcaattattacgtggtatcatgagatctatgggattacaaatttaacgtaggatcatatggagtcttcacgtagtatcgaagtactattgaatttaggatacactttaggattgatatcgtttggtttggtaggattatattatggtaaaattctaggatatggatcttgacaaccttgaagaccaactggtgcttcattgcggctgtgagaaaacctgctaccgttgcataactgcgcctgactgcggctaccggtactaacgtgtccgtctatcttttaggccactcagtgaggaggagcagagagtgaatgcgcagagcgctatctcttgtaatgaatcaaagagggaggtcacagttctgcacagcctcttcaagcaagcagacaagacatttaccttcgacaaggtaaagcctctttgacctgtgtatgtgtgtttatctttctttatatgattatagaggtttagcaactgaatctatttgtatgattcatgttgcttaccaccattgttcttagatatgtggttgttgttttgtcctaggtatttggaccacaatctcagcaaaggtcgatatataaccatgccgttgcaccattagtgactgaagtccttgaaggctataactgcactgtcttcgtgtttgggcagactggaaccggaaagacatataccatggagggagagatgagacagaaggtacccataatatctgga

SEQ ID NO: 182848 - DNA, 898 bp, Zea Mays
gtcattatctccaacggagtgagtttgaaatccggacgaatcacaaggctctcagtttcttgggcagtcaggagcttcattcggagttgcaacgtaaagccatggcaaagcttatggggatgcagtttaaagtaatctacaagccgggcaaggagaagaaagtcgctgatgctctttctcgggtgggctgtgtgatggcgttgacagcagtcattgaagttcaacctcgctggattcaagaagttaccaattcttatgtgactgattctgatgcgcagtcactgttgactcggttgtgtgtccacagcccggatgagtatggctactctctttctcagggagtcatcaggaagggcaatttaatttgggttggccacaattcagctctccggacgaagttggtggcagcattgcatgacagtaccatgggtggtcactcgggggtgcacgccacttatcatcgattgaagaaattgtttgtttggaagggcatgaagaccgatgtggaagattttgtcaaacagtgtcaaatttgtcaaaaggccaaaggagagagagttcacccggctggtttattgcaaccactttcggttcctcaaggcgcctggcaggatattgcaatggatttcatcgaaaaactgcccaagtccagtggctatgatacaatcttggttgtggtggaccgcttctcgaagtacgcccattttattgctctgaaacatcctttcactgcagcacaagtggctcaggttgtgttggatcaggtggtccgcttgcatggtcttccgagatctattgtcagcgacagggataaaatctttacgagcatattttggagtcaattattcaagctgttgggcactaagctgaacctgagcacagcctatcacccccagac

SEQ ID NO: 182849 - DNA, 372 bp, Zea Mays
cccctgtcaactcgttcctttctgcatagagtctctctttacgcggatgatgttgcacttttcatcaaacctacagcggatgaccttgttctggtgggtgatatactcaggctgtttggtgaagcttccggtctccaaacaaatattcagaaaagtagtattatccctatcaggtgctcacagtcggaggtagccactgttcaagatcatctgccttgcaagctggaggaattccctttcaaatatttggggctgccgctgtccttaaaaaggctcaataaagcgcaattacagcccttcattgaccgcttggcgaactctctcccgggttggaaggctgatcttatgactaaggcaggaagagcggtccag

SEQ ID NO: 182850 - DNA, 294 bp, Zea Mays
gtgtaatggagttaattgttttaggataattattgaaatgctctgttcgtatgataaacatgtatgtgttcatgattgggaagtaaatgcatggtgattgtgagttggagactagtagtttacgattcgtatgatttggtcggtgtgcgaatatacttgtgaatctgtgggtttataaaaatgttgtagtatatgttgtgtctcggattgcggcaataataggcaagccgacgtgtatgtcgtatggcgggctatgccattcctttgattaatcaactcgttagatgactttag

SEQ ID NO: 182851 - DNA, 504 bp, Zea Mays
gagtcaaaagcctttccaatgtccaacttcaataagattctagacattttttgcccataaatagccttggctgtttgctgcaccatgacaaaattatcatgtatacttctacctttcacaaacgcactttgattcacagagaccaagtcagggaacttaggagcaagtctattagccaaaatcttggtaacaatttttgcaaaactgtgaattaggcttattggcctgaaatccttcacctcaacggcctcactcttctttggcaacaaagtaacataggctgagttgagcagatataatctagaagcatccccctgccaaactttcttcaaggctgacataaaatccattttgatgataggccaaacctttgatgggtaataaaggtgttgttgcgggctgtcccactctcaatcttgctgagttgccggtcttgtacctgaaacaaggatcaaacgagtaagaagtggtagtgcacaatatgatggattagacagtgcacaa

SEQ ID NO: 182852 - DNA, 1295 bp, Zea Mays
ggatgggatattttgaagggtaaaacaggtctgcggagaaagctaatgcagctgttctggacaagcaaatcccaaggtctacgactacaggaatattcacattaccgtagcccgacagatgaggtaccccttttgttgctgaattttcgtcttctgtggttgtgtgcataaaaaatatatgtggattgtgacagtttcttttggcagacatcctgtgaagagtacttgtgtgatcttctatgcttccatctggaccttgcacgttttgtttcaagtgttaattctggctgtttgtggaatttgaggaattcattgttgtttacccaacaagagcaaggttcagatgttaacaatgcagaaatattagacccttttgtcgagaacttgatacttgagcggttagctgttcagagtcccatgagagtgagtcctactctctctctctcatctagcacagtagcaatagtgggcagaaatgtgcactgcaggtcatgcatgtgtcctcgtcttaggggaacaagtggatctcatacttaagctccacatgtttcacacatatttgcatatatgacaatcactgccattgtgctcaaaaggaacctttcactttctagttgatgtcttgatgttcttttgaaatcactttcaactttcaaacaggtgctatttgacgtagtcccaggaataaaatttcaagatgcgatcgagcttgttggtatgcagccacttccttcaacaactgccgcttggaagaggttcataaccatctctgctgtgacattctatttgctactaatgttatattttttcttttttggtttattctttgatcctacaatatcaattagtatgtgtaatgcccctgttgcatatatatcttccatattgtctctgtgctgaatagtcaagctaccatttgtcttgctaatgttttgacgcatgttagaagatttcataatagctaatgtataaagtcaagggtattagtgcaatctcctagactagggtttccctctttgtgttactcatgcacaatcattcaattcagtccctaatatttgtgacacgtaatatattgctatacaggacaaaagaaaaggatcctttatatattgtaacttatgctggacatcatattctaatgattagtttgtttcatgtgacaggatgcatgatattgaactgatgcacatgcgatattctcttcagtcagttgcgcttgctctaggagagatggaaaagtgtacaggtgatgagaatgagtgttattatcataaagcattgtcatatctcag

SEQ ID NO: 182853 - DNA, 380 bp, Zea Mays
gctgcctgattatcatgatgtgattgagcacccaatggacttcggcaccgtcaggaagaagcttgccaggaatgcatatcgctcgtttgagcaatttgaggtcagattgataggctttggtcatatatttaggtagcgaatggataatgaaatatcatgttgtgatttgttggccatggaatagttacctttcagttcattttacttttgttgtcagcaaatttcatgtgtaacggtttcccaacgttagatttgcctaagggagtcaggtttgtcgtgcagcctgacaaatgaagtgaggtagctggacttctccattttatcatgcatttggaaccacatttcttggtcttccctttcacgacaatttcgtgcacatg

SEQ ID NO: 182854 - DNA, 387 bp, Zea Mays
ctggagtgctcacaaaggataagatatatcctaaaatttgctgtagctgttgcctggttgataattcttcctactacgtactcaagctctattcaaaatcccacaggccttgtgaagtttctcagcaattggattcaaaatttgcagaatgaatcaatttataattatgctgttgccctttacatgttaccaaacatattcagtgccctgtttttcatgtttctaccaattcgacgggccttagagcgctcaaattctcgcattattaggttccttttatggtggacacaggtaaggttttgtttacataagttcttagcagaactgtttatacataacatctcacaaatcttttttcctaatcagccaaagttatatgttgctcga

SEQ ID NO: 182855 - DNA, 280 bp, Zea Mays
gataggataaactccttggttgagcaagaaaggtctattatggtcaatgagtgtggtcttgttgatggaaatcctgtagttatcaaagcccaccctaagtttcgaatgtttttgacagtaaattcaaactatggtgaagtttcaagagccatgcgaaacagaggagtggagatctttctgatggaccaaagttggaatctgaaaggatttagcaatgtacctggggacagtgaacggaaggatgtgataagatttttaatttcttgcggaatacccagaa

SEQ ID NO: 182856 - DNA, 364 bp, Zea Mays
tcccaccccctcgacgccatgaccatcgcatcacacttctgccaggtacaacaccagttgcggtcaaaccatatcgttacccgcagctgctgaaggatgagatcgagaaacaatgcgaggctatgctgcagcaaggcatcatccgggaatgctcatcggcatactcctccccggttctcctggtccggaaatcggatggatcatggcgattctgcatcgactaccgtgagctcaacagcaaaacggtaaaggactcctttcctatcccagtagtagatgaactgttggatgaactccgaggtgcgaggttcttcaccaagcttgacctccgcagcggatatcatcaagttcgcatgagtccgga

SEQ ID NO: 182857 - DNA, 399 bp, Zea Mays
ctgctgagttttctaaataattttcacaaatgggttcaaacaaacgttggtttcttacctggacagaatccctattatgtaccaaaaacagatccccatgatttactccacataaaggcaaatgcaatttcgttagagcagacagcgcggccagaatgaactaaatttgcatatggtaggtgagagtcatagagaattagggaactcatacccgttaatggaggggtgactttcaacctgggcgtctgataccatgtagagaattagggaacatctcacaccccattaagggaggggtgactttcatatagtcaagatacaatttggagtacaactaaagtacatacacatctctaggctatacagattaatagtaggtcatagtatgcttgaaattcc

SEQ ID NO: 182858 - DNA, 361 bp, Zea Mays
ctactaactagcccacccctcgaactggactcagttctttaagatgtttggccccggcaaaacaccaaagatggtgttctttagcaaaattgtgcagaggccttctgcatgttgggctgaacaacggcattcctatgctttcaaagagaccaagctcctagaatgatggccgagataactccttgctggaccagttttgagaggtgttcaatgctctccttcaatcagcaaaagaggattcagcttgacttggctcttgaggcaaagcccaagtttgaaagaattttaaaccagaattctctagtgaaaacacaagtggtaataatatgctggacattctcctcttcttggtcacaaacac

SEQ ID NO: 182859 - DNA, 522 bp, Zea Mays
ctatctatattattatagcctaacttagtttgcttctacaaaacaaaagaaactatataattccaattaatttttgtcactataaagtacaacgttaatcacaataatttagtgcaagggttgttaagcctagagctttcgagctatttctaggccaataacatccgtccgtcagttttaatcgtgaaactttatgtaatttataaatagtgttaagggtcaaatatacttctggcagtaatactgatttgatccgtaagttggttgtttgtttttcaatggtcaaacaaaaaattagacatacagaaaagcaagccactttatctccagaggaagtagaattatgatcacaaccaggttctgcacaagtctatgtagattcaccaagaaatagagacccgaaccaagtaaaatagtaacaaaccagataatcagacaatcaaacatgtatatcaatatgattagtaaaaaaacattaggtttggattcagccaaattaagtctgaccaaattcatagaaaa

SEQ ID NO: 182860 - DNA, 1892 bp, Zea Mays
cgacgacatcaacgagtacttctggcgccgtgacgtgttcgaccgcctcggctggcccatggagcagtcacgccagttcttccgcaccccgccggaccgcagccgcgtacgcaagacgggcttcgtcgaggtccgctcgttctggaacatttataggagcttcgacaggctgtgggtcatgctgcttctctacctgcaagctgcagcaatcgtggcgtgggagggcgccaagtggccgtgggatgatctgctctcttcccgtggctcagagtccaaggacacacaggtgcgcgtgctcaccgttttcatcacctgggctgcgctccggttcctccagtctctgctggacatcggcacacagttccgccgcgcatttagggatggccgaatgcttgctgtgcgcatggtgctcaaggccgttgttgcagccgcttgggttgttgcgttcgctgtcctatacatgagggtctggaaccagaggacagacaatgggcagtggtcgtcagcagctgattcacggatgaggagcttcctctatgcagctgcagcgtttgttatccctgaggtccttgccatcgtgctcttcattgtgccttgggtgcgaaacgcattggagaagacaaattggaagatctgttacgccctgacctggtggttccagagccgcagctttgttggccgaggactacgtgagggcacatttgacaatgtcaagtactccatcttttgggtgcttttgctcgccgtgaagtttgccttcagctattttctccaaatcaggccacttgtaaaacccacaaaagagatatacaatctgaatggaatccagtacacttggcatgagttctttggccaaagcaatcgttttgcggtgtttgtgctctggttaccagtggtgttgatctacctcatggatatccagatttggtatgctatattttcttctctgtcgggtgcatttgtggggctttttgcacatttgggagagatcagggacatgaaacagctgcgacttaggttccagttctttgcaagtgccatgtcattcaacatcatgccagaggagcagcaggtgaatgagagcttcttgcccagccgttttcgcaatttctggcagcgattacagctaaggtatggtttcagcagatcctttcggaagattgagtcaaatcaggtggaggcacggcggtttgcacttgtttggaatgagataataagcaagttccgggaggaagacattgttagtgatcgtgaggttgagcttcttgagctgccacctgagctgtggaatgtgcgtgtaatccgttggccttgtttcttgctctgtaatgagctgtcacttgcacttggtcaggcaaaagaagttacaggatctgatcgtaggctatggaggaagatatgtaagaatgattatcgtcgttgtgcagtgattgaggtctatgatagtgcaaaacacatgctgcttgagatcataaaggaggggactgaggagcatggtattgttacacaactgttcagcgattttgatggatccatgaagatggagaagttcactgtggagtataagatgactgagctgcacaatatccatacaaggcttgtagctctattggtcctcatcctcaaacccaccaaagatgttaccaagatagttaatgctttgcagactctctatgatgttgttgttcgtgatttccaagctgagaagaggagcatggaacaactgagaagtgaaggtcttgcacagtcaaggcccaccaggcttctctttgtggatgcagttgtgcttcctgaagaggacaatgctaccttctataagcaagtgaggcgcatgcacaccatcctgacctccagagactctatgattaatgtcccacagaaccttgaagctc

SEQ ID NO: 182861 - DNA, 500 bp, Zea Mays
aagaagtgtaggcgagtcacaagaaacgcctagatcagccaagagccaacaaatccagataatctcagcagtagtagtagccagtgctcgaagttctacttcagtactagatctagatacagcagcttgcttcttggatttccaagcaacaggagatgatccaagaagaatacagtaaccagtgatggagcgacgatctgtaggatcactgacccaggtagcatcagagtaatcatgaagctgaagtggggaatttgagtcataaaataaacattgtgtttttgtccccccataaatatctaagcacacgaagtaagtgcccataatgaactgatgtaggagcagagacaaactgactcaagatctgaaccacatgagcaatatctggcctggtgacagtaaggtaaactaagctaccaacaagatgtctatatcgagatggatcctccaaaggtgtcccatcagtcggacgaagagataagtgaagatccataggcgtg

SEQ ID NO: 182862 - DNA, 282 bp, Zea Mays
ttttcgtgtaacttttttagattctgttattccgtggtatctgccttggatagcttgtcttatttgggtgttttttgtctgatgatgcaaatcttttagctagaggttcattgttaacttgtgtctttaggcatgtttggttgagctgtggcttttgaaaaagcacgtgtgagctgttggtcatgaaaacgctggagtctggcatgtgaaaaagtcaaaactgtttggttgaacaggtgtagcttctggagaaactattgagaggaccccacatgtcattca

SEQ ID NO: 182863 - DNA, 416 bp, Zea Mays
actagctcagtagtacgccttctactccaaccccgccgtcatcactcagtatcaggcattgattgcctctcaggcgccaccacaattcctgcagaccagccccctgtagggggcaccccacatactcccctcggtgctcctggacagccacccattcccgtttgggatcaacagaccctgagtctgccttcagcatcatgtccttgtcctagccacaaaacaatgactggtacttcgacacaagtgcaacctcccacatgacttccaatgttggtactctctcttgcactttggcttcttccattacaacaccttcctccattatcgttggtgactgctcgttacttctcgtcactgataccggctccactaatttgttcaggtctttacatcttaaccatgtccttgtatcccct

SEQ ID NO: 182864 - DNA, 852 bp, Zea Mays
agtggtggtacgaatcatgcgctcgactcgaccattctgtggggagttgtgagggcattgacatccgcagctgcacgtcgtgggagagaaagaaagtgcgagacatggagttatcaaactcacgtccattatcgcaccgaacagcccggatgatgtgaccaaactgagtcgacacccacacaaagaggtgagaaatactggtgaaggtgtcagacttgcggcggaggggaaaggtccacatgtagtgagaaaaatcatccaggatgaccaaatagtactggtaaacggagatgcttggaatatggggtgtccaaatgtcacagtggatgaggtcaaagggatgagtagctcgggacatggaagaagagaagggtaagctagtatgacacccaagctgacaggcatggcaaagcaaggtggcggtgtcgcgggggcaagggatggttgaagtgccgagagtcgagggaggacgtcgtggccagggtggccaagacgacgatgccaagtggaggcagaggcagtggaggccatggcatacggtgtgacaatatgggcggaggaaggtgggtggggacgcgaatgggatatagggggggcagagctatcacatcgagcaaccacaacatgagtggtaagatcccgtatggtgagcccctagatattgaactccatagaacagtggttgtcagtgaagcgacggactaagagaaggttctggatgatgttgggggtaacaaggatgttggtgaggtacaaaggaccaggaaggaccgtgtcacctactaaggtgacatgcatggtcgacccattaccgataatgatggagaaagggaaggtggggctatggggacg

SEQ ID NO: 182865 - DNA, 521 bp, Zea Mays
gtcatttgctagtgcttccaagtctcttgttcctaggaacaagcttaagggaaaggatggtagtgcttccaagtctcttgttcgtatgaacaagataaaggaaaaggacaccactcgaaaagatatactagcaagaaaagtgacctctaatgaatcgatcaatgatgagacaatggatgataatgagacacgaggaagagaacctattgatagtacttccaagtggcttgttcctgtgaacaagctagatgctactccaaatgatataccagtagggaaagtggtatcttgtgactcgagcaatgatgaggcaatggatgacaatgatggcattatcttggaagatgatgacaactctagggcgctagttgtgtatggacaaaaacaagaaatgtgtctcacggttcttccggttgttccttccgggtcacaccacaagcaatctcgggaccatgatatagatgctcgaagcaaagttaggaagttgctccagttattccaggcgacataccgaaagctta

SEQ ID NO: 182866 - DNA, 727 bp, Zea Mays
tcggcttattcggtttctacgagagaagtttctatctccgagtgatctgatcgaaagtgtaaaagagggacgatggatgaagagtactcttggctacaggcgtcctgctgattgtatcatctacgattcagattgggaagtggcatcatgtatcagtaaccaaccattccttgatgtatcattctacggtgcagccatcctcgaatataaagtcgagctggaattacttggtgtcattgtggggttcaaagacaattaccaacttgttattgacaacttcaagtttagttcttgtgatattacctctcaagctactgttttaatcctcaagtgcatccgttatgtggcttcatgtgatgattttataaggaagctcaaagatttgaaatggttgaagacaattgtgggatttcatgctcctaacatgtcttttcttgtggatcctgaatgggagtgccttcttaaggtctttaatggagttcctattattgactatggattttatggtagtgtgatcagttcatacaaagaagaattgaggaagactgggttgatcacaaggttcgaagaggcatcaaaagctataacagaaattttcaagcagagggtgttgaattcatcgcttaaaaaagctgatgtcctggctctactaggatcgtatcgtcaactggcaatgcacagtccacttccagttgagctgttcaattctatgcgtactgaaaagtgg

SEQ ID NO: 182867 - DNA, 404 bp, Zea Mays
gaaaattgtggacaagcgataatgaattggaactgatacactacaacttttctgcatctaataggttactttcagatgtgtccttgccgattttgagagagctcgttccacattacctgcaggaaagtggaaaggtttgcttcttgattttgtgtttctcggtgccaccttagttgcagaaatttcatttatggaattatatctgtggtaagattcttctctaattttcagtttttatacaggagagaatggactatctggaagatgggaaaactgttttcaggttacgtttaaggctctgctcttcattgttcccaattaatgaaaggataagggacttttttgttgagtatgatcgccatactctacatacaagtcccccatggggttctgagcttcttgag

SEQ ID NO: 182868 - DNA, 271 bp, Zea Mays
gcatgaaggctgatgtagtgtgctttattaagcaatgtgcagtgtgtcagcaggctaaggtagagaggattcacaccccagctcttcttcatcccttgccaatccctcaaggtgcatgtcaagatctaacaatggattttattgaaggattacccaaataagaagggtataactctattctagttgtggtggacagaatttctaagtatgcacattttttccactcaaacatccctttactgcaaccaaagtggctcaagtgtttttggac

SEQ ID NO: 182869 - DNA, 458 bp, Zea Mays
ctgttttgtattttacatttgataaaacatcaccaatataaagagacgaaagggcagataaaggaaaagaccttgcacttgacagctaggaaagatggtttcatggaagttcctcgttcattcacaagttcctcccctagtggcctcagtgggctgttatggcattgctcttccttttctatttattttgtcacatttgtgcaactatagatctgttgatatgtagttatagtgtataaacacttatcacgtttgatctacattgagacatcctaggtgctaatagatggcttaacgcctagctcctttttgaacctttctagcaaccaaaggaactatcctacaaatgctataagtgaagccccatcagcagtagtaagtaaagcatgttggcaatatataagaacaaggttttaaagtagacaagtcaacttggtcaaagttagagaagctttatg

SEQ ID NO: 182870 - DNA, 462 bp, Zea Mays
aatgaccaaataatatttataaccagatacactaacgattggagatgtccataggtcacaatgtacaagatcaaacttattagacgcacgagaggtagacacatgaaagggtaagcgaacatggtgccctaactgacaagcatggcataaatatgaggaatcctccaagtgaagggggatgctagacgggagcttcgatagagcttcatgaccaggatgaccgagagggcgatgccacaagggtgaggtggacttggcgaccaaggactgagctagagagaggtgcaaggggtacagagccttggagctattgcacctgacgatcacgttctgagtttgcagatccttcacagaacaaccagcagggtcgaactcaacagagcaattgttgccgatagtaggggcacgggcacagatgtggaggatcctggtgtggactcaactgcagcgatccgagacgac

SEQ ID NO: 182871 - DNA, 600 bp, Zea Mays
caggaggcatgtggtggtgtggggggcctcaactcagtaacaagaaagatgggaggcttggaacaggagggtgcggaagaggttggtgatggtgcaaatcatgcgctcgactttgccgttctgaggggaggtgtagggacaggacatccgtagctgcaccccgcgtgagggaaagaaggcacgagacgtggagttattgaactcccgttcgttgtcacactgaacaacccttatggtgcaactgaactgagtcaacacccaagcgaagaagtgaggaagggtggagaaggtgtcagacttacgacaaaggggaaaagtccagaggtagtgtgagaagtcatccatgatcactagatagtactagttaccagaaaggctcggtattggagaggtccaaaggtcacagtggacaagatctaaggggcgagcggtataggacatggaagaggtaaaaggtaagctagtgtggcgaccaagctgaaaagcatggcatggcagcatggccgcgggggtagggaattgacgaggtggaggagagtctaaagaggatgtcgtggccgaggtgataagacaacgacgctaggtggaggtagaggcagt

SEQ ID NO: 182872 - DNA, 302 bp, Zea Mays
cttcttggtaccggatagacagtgtggtcctttcttggatcctcaacaccctcatcgttcatcaggcgtgacttgccattgaggagcaattccttggcagccgcaagatccaagccctccaccttgacactgccttccgggtcttcgtctagggtgatctctccatcactaagtactatcgccagacgaagggcatggcgaactccatgacctcaacgagccggtcctggatcgtactctcgtcctcaacctccttcgtggactcaacccttgccacgaccacctaaagacttggattacgt

SEQ ID NO: 182873 - DNA, 392 bp, Zea Mays
ccggactccaaactaaggtgactagtacgccttatgactggagcacgctttagcgctcagcgacgccttagggatgccttaacaactatgctttgcaacatataaaaatggtccaccagcagcagccagtacaatgtgaggatttaaaagcaaaagcatattcatttcaatttagtaattcctgttatgttatctttaataaaaatcatcccgaaaggatcttggtgacaagcacggttagattgtgtgttatactaatgcaatgggctttggcccagcccatgtacagttcactatatatatacaggtgcctgctctaattagggtcagggtttccctcaaacctccctatcaagcacgagtagagatgtcaatggggaattctccatcgg

SEQ ID NO: 182874 - DNA, 556 bp, Zea Mays
gaaaaattcaactggcataccccacatccttgaacatagtgttctctgcggatcaagaaaatatcctttaaaagaaccgtttgtggagctcctaaagggtagtttgcatacattcctgaatgcgttcacatatcccgatcggacatgttatccggttgcatcaacaaacactaaggtaagacctaatggccacaaatgtgcttgcatcatttgttcagaaactctttgtttaacattatcattgtatacttggttgctttccaggatttctacaacttggtagatgtatatcttgatgccgtctttttccctaaatgtgttgacgacttccaaacatttcaacaagaaggttggcactatgagcttgacaaccctgaagaagagataacatacaaaggtttgtttgctcaatctaaataaatatagtaagcaaaatttacatgtgacattacttgtcattcaaaatgcaatcctttaacaattttaggtgtcgtcttcaatgagatgaaaggagtttactctcaacctgataacataatgggacgtgtatcccaac

SEQ ID NO: 182875 - DNA, 494 bp, Zea Mays
ggggctgcttgtttcggttcatttaatcctcttcttgcttatacaatatctcttatagtagtggcctactacaaaataggggtccgtgatgtacatgccgaagtgaataagtactgctcattcattgttggcatgggtataattactgtactagccaacttcttgcagcacttctactttggtataatgggagagaaaatgaccgagcgtgtcagaaggatgatgttttctggtatgaccgtcttttcctttatgttacttttgtagtcccatatttgatggtgcaacctcagctcttataaactatctagtttaacatccataaataaagcacatattcatgagtattgaacacaagaaacaatgctgctaagttctattgtgtatagattatagtaaaccattgttgaaatatcagagttctcaaattctgtttattgtattccagcaattctgcgcaatgaagttggttggtttgacgacgaagaaaatag

SEQ ID NO: 182876 - DNA, 434 bp, Zea Mays
atctttatccatttggtgaaattgaatctacgtttcagggcaagtaacatcagtacacacctgaaatgaaaaggttttcttgggcgggttcttcttggcggggattgctcctccttcctcggctccttcctcagcttctccaaagtccactgctgcacacgattgacgcttgagagagaagaagaacataaatcagaacggttgaggacaagtagcatcagtacacaccaatcatgtgtaggtagactcgtaggggagaagatgagtcgcaggtggtgaatgggatggggcaggttcctgggcgtgtatttagagggggtcaagcatgagcgcgcagatatgttgtagggcagtcgcggatccggtggaggcgggtgcgggcatggttgtttacatgcggcagacacaaatttagacatgcgcatgcggcggcg

SEQ ID NO: 182877 - DNA, 1376 bp, Zea Mays
gtggaatagcagaactccatgcagcgggtattgtttgtatgagcataaagccgtcaaacattcttttggatgcacatggacatgcattcgtttcggattacggtctttcagcaattctgaagaaccttactagtaggagagtacctgatgactccagtgctggcattgatgctacactgcttagccccaattatacagctcctgaggcatggggaccactgaagaagtcactgaatatgttttgggatagtgcaaacggtatatcaccagagtcagatgcatggagttttggttgcacgcttgtggaaatgtgtactggtgctgttccgtaagtagcatgatattcaatttgttgtccttaatgttttgtgaatggtgttgttatatgctcattgaaatgcagatgggctggactgagtgcagaggaaatatgtaagtctgttgtaaaagaaaagaagccaccgcctcaatattcaagagtagtaggtgtaggacttcctggggagctgtggaagatgattggtgaatgcttgcaattccgagcttcaagaagaccatccttccaggacatgctgaaaacttttcttcggcatcttctggacataccacggagcccacctgctagtcccgaaatgtaatttcatctaattttgtattactttatgttaaagcataatacatggaagcttaaagctttggagaacttttacctgaaggtgtagaatcaaatactgaattatctttcagctaaccattcctgaagattcctttacctggaggtgtagcagcacatgttgagatatcttcgagctaaccattcttgaaactatttgcatattgtttccccgactgatttttgacctagttacttgcttatgcagtgattttgcaaatgaaaacttgcccaatggcatgcaacctccaacaacctccatcttagagatggttcatgataatccaaatgccttgcatcatcttgtatgcgaaggagatgctgctggtgttaggtttgtctctggcaactcttgtatggttgcatgtatatcatataatatttcgcactaaaccttttgcaaataccagggatctacttgcaaaagctgcatcagagagaaacgatagtttaatccgttctctcttagaagcacaaaatacagatgggctcactgccctacatttagcatgccgccgaggctcggcagagcttgtggaagctattgttgcttaccaagagaatgtagatatattagataaggatgaagaccctcctatagtatttgctttggctgctggctctccacgatgtgttcgtgcacttgtaggcaggtctgctagtataaattctaggcttagagaaggcctgggtcctactcttg

SEQ ID NO: 182878 - DNA, 287 bp, Zea Mays
gtggtaccaccacccggtatactaagaagactcaatgaacgcccttgattctctgggtgctgagctcttacccctgaatctgcatgtctcccattgtgttcatgaccaccaggtatacgtgaataatgaagaacttggacttcattatctttttcaatatagaaaatctctcacggccttgtttggcttgacatttagttgaactgttttgttgtcatctgctttagggaatctgattgcaccatatccatttttgttaggccattgagatcaagttctactacctc

SEQ ID NO: 182879 - DNA, 278 bp, Zea Mays
ggaacacgcttctgccattgcttggctccccccacccgaatcttttctgcttgttgaatctgaaatttgtgctgggttgagcagcgtccgtccttgcgcttagcgaattcgcggtgtttacgctccgatgcctcacgtaaggctatctctcaggcttcccaaaagctcgggtaggttgaatcgtggagagttccacagcgtcctagccgccgccgtggcctgacctcgccataaccttccattccatggaggtctccaccatcagcttctcgtccccg

SEQ ID NO: 182880 - DNA, 379 bp, Zea Mays
gaaggcgaaaaccacagattccccgaagacagagaagaatatcaccctagagctaaagaagaaaggcagtgagtttgacccaatggctgttgcctattggaagcctggtgaacccgtgccattcctgtttctggctcgcgcacttgatctcatctccaacgagagtggccgtattgttattacagaaatcctatcaaatgtgtttcgtacagtgatggcaacaacaccggatgatctccttgcaactgtatacctctcagccaaccggattgcgccacctcatgaggggattgagcttgggattggggatgcatcagtcatccgtgcacttgcagaggcatatggacgcaaagaggagcatgttaagaaggacctcaag

SEQ ID NO: 182881 - DNA, 339 bp, Zea Mays
ggatcgtagtcttggagttctgcatgctacagtcgttggatcagtatgtgaacagagtaaaattttggagtctataaatgaacaaacaaagttgtactttttagccagaaatgaggtaccattcttgaaatgttatacttttattattactatccctactaggacactaaaatagctgcaacatgcaattgcttccagtcagaaaaccaattggaaagaagaattgcaagagccaaagatatgtatgtctccggggtccaatgcatgaaggagctcgctaataccatgagacagcagtctatcatagattccgagcagatgaggcagaacatatctact

SEQ ID NO: 182882 - DNA, 408 bp, Zea Mays
ttgggacaggactgaacttgtccacattctttttccttcgatgatgtaggaaaagcccaatgcaaatgacaagaagaatgacagatagaagaattccaatgatcattcccacatttgactttgagttatgtgaacctgtaggatttgaagatgaggacccatcattggagccaccccctccactatcaccacctgattccccaaaccggttgcctgcagtcatcaactttatattcggctgcttaaactcaggcacttgtccagtaaggcgattatttgagacatcaagatatttgagggtttccagtgtcgtcaaagcatctggtatcaccccggtgagttgattgttagacagatccaaccgttgaagcctattcaggcttgcaaaagccggtgaaataattcccg

SEQ ID NO: 182883 - DNA, 407 bp, Zea Mays
caccctgcagtcccgctcatggctctatggcagttcgcctgtttcaatccgacgctcagaccgtctgtctgactggtgtggtgatgctcgtgagtccagactcccagagcccgtcaggtttactgcacctgttccagtgttcgtagtcccagttgttcctggcgagtggcgactatcagcttcagagcttccccaaatcagccactagaaaggtcagcatccacattcactgtccgagcatctcttattttgtttagtcaggtgttcatgtcactgagatggaggatgtaatcagttttcatgtcactgacaatcccttattttatttaggaattggcagcaccatggatgatttaaaattgtgttgtttcttctataatgaacctgtgtgaaatatctactatttg

SEQ ID NO: 182884 - DNA, 463 bp, Zea Mays
ccaacattaaacctagccattctaatggagataaaacctaaaagaaattcgttaggacgtaaccctcttatcgacgtaccgtatcagaacccaagtatggtgttaatgggtaaggatcgatcgacactcccttggtgacacgtcgtgtcacgatctgggtatggtgtcaagtgagcaaggatcaagccgctacttagtggcgcactacattgacgcccaggtgtagtgaaaaaatgtgcaagggccttcacatcatcaacgggtgtgaatggtaaggaagctagtcgaaccaacaaggattcgtctagatagttggaatggagggtcgcttacaggtaagttaatagagtttgttgagacgacaactaggagacgtgtaaaaatcttatgtgtccaaaagactaaatagaaaggtcagaaggccaagaaggtggacaagacaggattcaagcctccgtacacg

SEQ ID NO: 182885 - DNA, 357 bp, Zea Mays
tgcttaaaggtgcttgtgtgccacctggattattttctctacatacttctaaagtaatccatacaacatttacacatctttgcttgtagagacctacaaagatcgctcatactatggtggcccatcagacgagtgcccacattgtggcgccgttttctggtttcaggaacgggtcaaaagtctgtctgctgtttcgcagcgcaggcttgtgtacaatctttgttgcagaggaggtaagattgttttggagccttacaaatgtccaccggcacccttatgtgacctactgcgattcgatggtgatagtcgtgcaagaaggttccttaggcaaatccgctcatacaattcccttttcgc

SEQ ID NO: 182886 - DNA, 509 bp, Zea Mays
gaggcaggtgtcagcagatgtatgttaatgtgcttctcaagttctatttttaacacattcatgagctaccacatttgtttatgtagttgctgccatcttcattctttagtgaaatcacatataactaattagatagcgttgtagtaccggagagcccatgatagctatgtgtcgaatgttatgcagcaatatgttttgtagcaatatgtttctgtcatgtgatttaggactacagtcatagactcatagttaacatctttgtcctgttgttcagtttaaacatatcctatacgatctcgaaagatgatgagtagtttggcttgctgttgacaccaattcagagtaccatatagtgtttggcttgctgttgacaccaattcggagtaccaaatagcatttgacttgctgatcacatcaatcaaaatatattgtttgggttcctgttcgcattagttcagactgtttaaaagctcaagggacagacgacacagtttttgttgttctgcttt

SEQ ID NO: 182887 - DNA, 390 bp, Zea Mays
taaatgtgtcagtctagatcattagcgtgctaagtcacgtataaccaatgacatggcttgttgagttgaacaatgcacatgacatacaactagttgcaatacaggtacctcaatatactagaggtagctaaacctcttgtcacaggttcacatccagttgcccactagttttgtccttgaactacgcagaagagctgcgtgtcatttcattaagacagatgaagaagcacaaaagactgaacagaggcccagcccgattacaagagagcaaagacaagtactgtgtttgaagcccttactgagatgagatggatctctgatatagagagagtagttacagtggctgccttgactgaatacctcggcctatggaacctcctttcagattct

SEQ ID NO: 182888 - DNA, 383 bp, Zea Mays
caagcttgcattttctctctctctctctttccccggtggtgcggtgcggtgcgggtgctggactgctggcctctgcgtccgcatccggcgggcaagtgcgaaagctgccaactctttccctgctcggttttcccttctccaggccagccacaccacttcttcgccaagctcgcatccatttccaaactcttacctccatcccccacctgccctcctttatctcccaaatcggtcttcttgcgctggtggaattcctcgtcggcggtatagattcagatttgctgttgctcttgtgctgctctgctccccggatttctactactgcgagcttctttctagctgtgaggcactgagatggatccgctgctgaatgtgtgtacaat

SEQ ID NO: 182889 - DNA, 569 bp, Zea Mays
gactcactaattttcatccaagttaattagtgcactaaaattaccacattcagttaacaaacgcattcaccacaatcatcaaatccggcatatacttatatctaagcgcttttcacccactagtccgcattttagtttagacaccacatgagcactacagatttttacccgcgaccataaccatacacatttagactacaacatcccaaacgggtgcgagaacactagtttctagtttaaccccatgattattcccttaatcgatttaactacttaatcggcatcgaccgactgaaccttcatctcgacggtccgagcaccacaattcgagaacgtctacctagacatctagcatcacatgcagagcctactacttcacgttgcaaatcatacagatccacaaggtgacaataataacacacaagcaatcgacctttctctacgaccttcagttaggtcaccaaccgacgacatgatgactacgaaggcatgtcaccatttcatcacactcattcatcgcctatatgcgcactaattcttttcttgcgacacatgcactcacaatcaat

SEQ ID NO: 182890 - DNA, 311 bp, Zea Mays
ggcggatccagaaacagatgaagtgtatgcacaaatgactcttttgccagttacttcagtacgtatctcagtgctgctcctggtttgccataatgttttccttcatttcagtatttgtaacacaagtttttggacatcaaactgaccgttaacggtgatcagtatggaaaggaggcgctgcaactatcggaactagcgctgaaacaaccaaggcctcaaacagagttcttctgtaagacactaactgcaagtgacacaagcactcatggaggcttctccgtgcctcgtcgagcagctgagaagatatttcc

SEQ ID NO: 182891 - DNA, 438 bp, Zea Mays
aaggtaagggctcaaggctgacccttaatgttgtcttgttctagtcaggatatcatctatgttctcgtcacttgtcacaacattgttgtacatgtccttaatgagtccaacgcacttcgttggaactttaagtttatccaaatcctaccacataacattcattgatattttgtcataattcttctttaagtcgatgaaaaccacatataggtccttctccttatattgctccatcaattgtcttaataagaaaatggtttccatggttgaccaacatgaaaccgaattggttaatagtgatcctcgttattccttttagccgatgctcgataaccctccctcatagctacatagtgtggctcatcaacttaattctccgataattggtacaactttgaatatatctcttattcttgttgatcggtaccaatatacttc

SEQ ID NO: 182892 - DNA, 356 bp, Zea Mays
aatgtctattcaacccctcctagatcataaatttagaatgttctaactgaaactgaagaccaaggttatgactcggtggcatatgggtttaacagcatgatctcacatcaatatgccataaccatttcaataaagtagtggatcctagtggacctaatctctggactccacaactcgctacaactgaattcaatttacatgatgatcaggggctcatccaggcctatcccatagtttactccagaaggcgccgtcgcaccagaagctcaccgccaaccgcaagatgttcaccaggttcccatgatgctgcagctgttcaaatgatcttgaaggccaccaaacgcattgatgcgcta

SEQ ID NO: 182893 - DNA, 418 bp, Zea Mays
tgaaatgttgacgccggccaaatcccttgagagagactcaatgttgtcatcattctcagctgcatcttttgcacacaaagtgccccatggggcacgattgcagttgctctgtctttgcctcttgcgacgagaagggcgacgacgggagccttgatcctcgggaggggcaggcaggaggagtgccatgtcgtactcgattccgagagacatgaactcaagactcccaaacctggtcgtcgtcccaggcctgggtgggtggtgagaacctaccatctagagtgctgacgagaactagggatgttgcacgtgactagcccctacctggcgcgccaactgtcggtgtttggaccgtgggtccttaaccaacgagtaatgggccgcgtggccagctctagatggtgtgcaagatgacacaagc

SEQ ID NO: 182894 - DNA, 309 bp, Zea Mays
accagtccgctcttgcgttggtcaagaaccccgtgttgcatgaacggagcaagcacatccgggtgaggtaccacttcatccgtgactgcttggcagaaaggatcatcaaaacatgctacatcaacaccaaggatcagcttgcggacctgctcaccaaaccccttgggaggatcaagttccttgagttgtgctccaggtccgggatggcccaattgtccaacaagacgacacataagacttagagggagaattgttggaataagtctcgtggtctgtgggaaggacaacaacatctgctgttggtccttg

SEQ ID NO: 182895 - DNA, 489 bp, Zea Mays
gcctgagtgtggtgtgatttggaggctgagatctcatgtgatgtcctcctggagaaaggaatgcatggactcggaatccacaagtgccaccagagatgcagagctgatgcacaccttcagccacatcgtgacaccaacatcaattccaacgagggcatgtaagatacccaaattagcagccgcaatatcttcttcctcatcgtcgtctagtgctaataagaacacccctgtggatgcgcatttgtgctcgggtgtgaacttctcgttgcagtgatataattcaccactagctcgtttggctgcaagctcctctgctgacatccgtttaaactgtggatggttggtctaggccgactttgctagtactgtttgtgtgccgaacttgaatgttgatatcgttggcttggtgttggcctttgtggctttgtccatcttgttgggtccgcgtcccggcgttcataggctcgtgtcaaactcatggttgtctgt

SEQ ID NO: 182896 - DNA, 425 bp, Zea Mays
atcggatcagacccgaacggtccagattaggtacgtgcacttaagtgatcagtctgcaacgcgagcccttggatcgggatcctacggcttagattagttcctaacgcgcagcgcacttctacccttggatccaaatcgagcggtccacacgtgcgatcgatctgggccgtgagttcgaaaatcagcggctgctgatcgtcttcttcctctagctgaccgagcgacggaaacaggcacgcccacggcggcacgcacgccggagcaaggtgatcgacccgcctgaccacccacaaccccgactaccaggttctatacacggcaggaggtaatagtggaccagaggggaggccttttaccttgattcgtcgtggtgacgacccgtaccgcagcgcagggtagcacggacaccgacaggaactccggtg

SEQ ID NO: 182897 - DNA, 293 bp, Zea Mays
cttcggcttcatgcacctttggctcattcagatctaccgaagctttttcaaggagagcggtgatcttcctttggccttcattagctttctggacctgaaaaaccatctaaatattgatttcatcattttggaccttcgactagagacctccccaacaacaaccaaatagaaacaattgctggtttacaaatgccattaaaccctggttagagaagtgcaaatataattctaatgcagtcttagacatacttcacgcgagtgtgaaatgtaacgttatatacttgtatactgac

SEQ ID NO: 182898 - DNA, 374 bp, Zea Mays
ggaaatggagatcaaattgttggagcgccaacagcaactgaaatctgaactagtatgtgccaatactgtaatatcaaccttccctatattttttacttgctgccgtgcggtttggatccaatcatcttagataccttttcatttctcattatgatttcccccccttttttgaagagttcatcatggctagggtctttcattggcactgtaattggaaatatcaagttatccattggcaatattcatatcagatacgaagacgtagagaggtaattcagttctgctcagtgcatttatcctttaggatgcatattgttaaggagtataagagcaccatgacttgtttcctgtagcaatcctggccacccttttgc

SEQ ID NO: 182899 - DNA, 319 bp, Zea Mays
gttcagatagaagtgtgactaaacttcaaggctacaagttgaattttgtttgtgatcaagttggtcaaaaatactctgcctttgtccttttaattgatgctagtatagcaaaagaagctgctactttagatattgatctatatttgcatgacaagatggtaaaagcttcagtttccccttgtggacctcttgagttggatgcttggcaggtttggtcaagtacattgttcacctactctgttttagctaatatttttttcttacctgaaagatttcttttggttctctcttagatggaacaaacaaaactatttcaagc

SEQ ID NO: 182900 - DNA, 346 bp, Zea Mays
cgaacaagaacacatttatccgagtcgccaagaccacgaacattccacgacattacaacaaggttcttaccacaactagccatgaccacacaaacataacaccaagggacaaggattagcaagccacccagaagagtctagcctaagcagcagaagacagaaaacaggctcacagagccgaccaacaacagagagacgaacaacacaacaggacgagcagatagcggcgacagacacaaacgcacggacgccgacctccaaagtgcgcttggaacaaaggctgaagatcttcatcccatggccggcggcaccactcccacggcgtcagccgcagagcaacccaggc

SEQ ID NO: 182901 - DNA, 289 bp, Zea Mays
gcagcttgtggcagcaagccggtaggtctggaagaagagctaaacaatcactagccatttatgttgcctttgagggtcctttagatcagtatttcatgaagttcccacataaactatttggcaggtcgattgagcattgccaagttgattcacataatctaaaggtttatagatatgtgtttattttattaactaattggcaagtataaataccttgagaacctaacccttctcttttatctcaaaaattgaaatttattacaggttttagaacagcaccttccttgtg

SEQ ID NO: 182902 - DNA, 723 bp, Zea Mays
ggtgtgtaccgatttagggtgtcgtctgccttgaacttgtggcagaagatccacttgccattgacgacgtgtcgatgatggtgccagggggacatgacaccaagtactaggtgtggtttgtcagcagggcctcatattcttccatagcacgacgccaatggggatcggggatcagcgtgcacgctactgaccgaggatgggacaaatgagggaggcgtgtagtggtggcggttgcgagcactaggcggccgatgggacggagaacattgtcggatcggcaagtgacaatcgggtggacgtggtgagggttgcgatggatggcgaccggattatgcaccgacggctcgtcatgagactgggtcgggacacggggtggctcattggaagaggggaccgatgaaccaggctgcacacgtcgctggtagatacgagcaggatcgacaaaggtggtcgaagaggtggggtcgaaggcgatggggccgcgcttggcgtggaagagggcgtcaggaccgagggtagggaaagagaggggacgtcgacaggaccagcatcaaggaggaaatcaaggtcggtaggtggggtggagctaggaaggggaaacaccctcgtcgaacaccacgtgatgtgagatgatgacatggtgggtggtgagattgaggcactggtaccccttgtgatcggtggagtacccgaggaaaagacaatgagtggagcacgacacta

SEQ ID NO: 182903 - DNA, 363 bp, Zea Mays
ttgcatattccatatacggaaggcttcatctctagtgacaacttatatcaagtttagaaaattgtgtttggagcagaataaaccatataatacgacatattcatccactagaacagaataggaaagccacacatcggacaggagtcaaaaagttttattatgtctttggcagatgttctgtttattcatgatatgtctaaatgtcttctgtcaagtctggatactagagcaaagcatgtccaggaagctccaatttctgcgttccttagccgatgtgaactgtttgacttggctcagctcaccactgacccattctgagtgaaatcttgtttggcacttgtcttacatttgcaccagatcgat

SEQ ID NO: 182904 - DNA, 1330 bp, Zea Mays
cgcgcgagcccgaggccccgagcgtcaggcaaggccgcacaccgccgccgcttcccctcatcatccgtctcctccccatccctttcccctcatccgcattcggtaggctgtggcgccagtgtccgcttcaggactggattggtcgtgggaagcaagaaccgcccgcccgcgcattagaaccctagcccccgccaatctaacagcgcaaagaatccggaaaacccccggcttttcggtctcccgagcccgggagatccatccttcgctgcgtcggagatggtgagtgcgttcttgacaccccccctctggtattcttccctccacggagatttgtttggctagcggtttcttggttcgtttcctgttcttgacttccaatgcctgatcgattctttcgttgttttccgggggcgcagtcgtccgacatccgtaaatggttcatgaagccgcaggacaagagcgcggcggcatctggagccgccgggaagccctcggggtcggcggctgagaagaagcccgtgctcagcattccggagaagaagtcggcgccccccgcattggtaggattctgctctgtgttcgtaattgttgccttgttagccgtagatttggttttgacctactagttactagttagattagattattgacaaggcttttgagtttcctcagcattgcatcgatggtatctatggcattatgtaacaaatgagcaccaccttgtttggtttgtttggtcaaagctaacagcagttcttctctattttttcattattgttctacaatgtttggtgctgcccaagttctgacattattaatgccacatcttgagtcaatcaggcgtcctgtgaccatgatacttccgctagaaggaagacaagcaaatattttgggtcaaaagcagaaaaggactcagatgtccaaatggcagacgcctctggggggaagagtgcggctaaaagaaaacttcagaaatgcaacgatgaagtcaaggaggacagcaagccttttccagcaaagaaaatgtttgatgatgaagaagatgacgattttgtggcacctgcaaagaagaaaactccagtgaagccaccaccttcaaaaaagcttaaagttgaatctaatgttgaagcccctgcaaagactactggtgttgatgatgctgaggatgaggacaggatggatgaagatgccaagaccccctctaaaggagctggaaggggaaggggaagaggaggaagaggaggagcaggagctgcccctgggggcagaggtagaggaggtgggagaggttttatgaattttggtgagaggaaagatcctcctcacaaag

SEQ ID NO: 182905 - DNA, 547 bp, Zea Mays
ggcttaagtccattcattttaaccagaggcattttttttatctttttacttgaagttctctctcctatgttaaaaattttattttaattaatacaacgtggtacccagaatcaactagtggaatataaaaatcatcgcttgctgatgtcatagagagacagatttctgttatccgccgctaccatatagctagctagctagctgtatattaggtctagctaggcggttgggtgctctcagcaattacttactagtcagacgaacttctttttagtatattaattgttgaaaggtttttattatgtactaattcctttcttattagttgtctgtgatattcttggtaattcacggacctgaacacccggtatagtagttgactgcgccacttcctatcatgcatttgtttgtctattctccctgcttttcttttgccttccttaacttgcttgctagctagctagctttctgatgttaacttcattgacaactcaaaccccgctttgggtacgtaggggtgcagtggtattttcttcgcccacttgtg

SEQ ID NO: 182906 - DNA, 316 bp, Zea Mays
gaatagcaaaatacttaaattggtgatgtgcatgcctaccattcttaggaaaatcattggggtactgtggtgttggtctaatttatagaaatacccttttctctgtttagggagagtagggatacttttctttcaaaaccccccttttgtccacttagggggaactgggatattgtttatgggcaactgggatactttttattcatctgtgtggaatttccaggtgttcattgagggatagtttttattcacctgtgtggaatccgatctgttcattgtttgaaacttaacttactagatgcaatcagcttttgct

SEQ ID NO: 182907 - DNA, 799 bp, Zea Mays
gtggaggtaatggaatattcacaattccaccacaaagagtagacaatggagatctcctttgtactttagggggaaggggaggaggaggtgggatttctttagtaacttcaagaagagaagctggcagtgctgattgtccaccctcaagaggttgagacaaaatttcactcattctacgaggaggtggtggtggcaatggaactatattaacctccgttgaatgtgaaggtgaaactattacaatatcctctgaaaaggtaggttggatttctatatcaatagggaaagaaggttgatacaagcatggagatgtgggtgcaatatgatgtaaagttggtggaggaggtataacatgtcttgtaggtgaaagtagagtcgaaggacaaaatgcttcattttctctaggtggaggaggtggaggaggtggagatggcttaatatgttttccaggaagagatagatgattagggtgtggagctggaggtggaggtagagcaacaaatgattctctaggaaaaggtggaggggaagtagaaggttgattttcataaagttctcttagagaaggtggatttgaagataaacacaaagaaggtacaagtgttgcatgacaaggtggtggtcgtggtggaggaggaggtggagatggaggtttcatatgttctctaggctggggcaaattttgtggcaatgatgggattggaaggcctccatgttctttatcatcggttttagaggccaagagtccattggttgtctcactttgtgatatctccaccttgaatggcctcaaatgaat

SEQ ID NO: 182908 - DNA, 358 bp, Zea Mays
actgtaggcactctcaagaccctcgttctagctctataacgacatttgccacgaggtccagacacagtgagttgggcgatccttggcggatacacgatgtcctcatcctccacgacaactagatcttcctagacacatcctctagcttgttgttcacttctttggagatcgcacaagacaagtgtccataaaaacgctcaagtgcctccaagtggacttttatattgctcgaggccgcaaggtggtctgttattttgtgaaagccttttcacatgctagaggaacaaaatagaaactcttcacctgtcgggactgctctagccattgctggtgatgttgaaggtttggaagggtgact

SEQ ID NO: 182909 - DNA, 293 bp, Zea Mays
gttcatacttgtcatggacgtgctaggatggttaatttcaaaagctgatctagaaaatctgctgcatccattggcttgtagacctttgcaacacagagtgtccttgtatgctgatgatgtgatcatgtttttgcatccaaaagaatctgatattcaactggttctcaaaattttagagatttttggagaagcttctggactgaaaaccaacatccaaaaaagcagtgtgtacccaattagatgtggggaagaggaagtggcgacccttcaggagtgtctcccctgtgagatct

SEQ ID NO: 182910 - DNA, 345 bp, Zea Mays
cgagactagaagtaatggggaagaaagctaagaatgcaacctatatatctggaaatgaacctggaaggatatcaagagaagtttctaaagttgaaaagcgaagaactgtgaagagcacactttgtaatgagagaagttcacggagccattgcgtggtttgttgcattcagccaccagcactgtcagcattcatttttaaaaaatcaagctttttcacactatgctttgcatctatagattatcctggatgtcccagctgtgggaggaaggttgatgcttgtggacatggctggatctgaaaacatagaagcagcaggtcaaacgggatttgaagccaagatgcag

SEQ ID NO: 182911 - DNA, 368 bp, Zea Mays
gcctagccatgtttgtcagcttgggcgccacactcgcttacccttcccctcttcaatgtcccgaactactcgtcccttttgatctcgtccattgtgacctttgaacatctctgataccaagcatctccagttactagtactatctggtcatcttgaatgacttctctcactacatgtggacctttcccctccgtcgtaagtcgaacaccttcactaccctctcatttcttcgcttgggtgtttactcaattcggctgcattatctagggtgttcagtgtgacaataggcgagagttcgataactccacgtctcgtgccttccttccctcgtgtggcgtatagctacagatgtcgtgtccttacacctc

SEQ ID NO: 182912 - DNA, 567 bp, Zea Mays
tcgacctgggccgatttcacctgctcggcccagcttcacctcgcgcgcgcggcccgtgctctcacctccgtgcgcacccgacaagcggggcccgccgtcagcctctccagtttcttcgcgtggctcgctcgtgcgttgctgcgtcgtggtcccaccggtcagggtcttcttccccaacgctcccgcagcgatcggacgggctgaaccaaccgcggcatgcgcggggtttctggttgaccggacttcgcattgataagggggtggggcgactcctaaaccgcatgcacctccttccccctctcgccctgctaaatcgctcgccgccaggaagttttactccaccaccgagagcgcttcgccaccacaattcacaccgccgccgtgcgttcgccttgcctacgggtgcgttccaagcttggggattggcccgggggggttccgtcgtcgacgcgaaagctgtgcgtggcactatcgggtcgagaaccggccggaattgctggacggagctggggcgccaccgcgaatcggcgcttcaccgtgggcagtcgtctctgcgccattatcgac

SEQ ID NO: 182913 - DNA, 275 bp, Zea Mays
agttcaatcagatcgaagtcagctgatagtcaagagtctgaatgcctttgaaaacgaaaactttattaatgatggagtccctgattacagagtacaatgttgcttcgagagcttttgaggccttgctaagggtaaaactttctaagatgctctatgttccatgagttccccacttccgtgccatccatttgagtaagctggtatgatcctggccgagtgacctctgatataatgaatggcccttcccatagtggtgacaacttgtgccgtccttc

SEQ ID NO: 182914 - DNA, 467 bp, Zea Mays
aaactgcgtaattccttcacagtcctgggagaagaccactgagaaacagcctgaatcttgcttgggtctgtagctactccggccgctgaaatgacatgaccgagataggataactgaggcctggcaaatgaacatttattcaacttaatttgccattgatactgtatgagtagttcgaagactgctcgaacatgctgaatatggtcttcaaagctcgaactgtagattaaaatatcatcaaagaaaactagcacacaacgacgaagtaatggtgctaatgttgcattcatggcgcgttgaaaagtggctggtgccccggtcaaaccaaaagccataactctaaattcatagtgacccgagtgtgtttggaatgctgtcttatgacaatctgccggtaacagccgaatctggtgatatcccgctgtcaagtccagactagtaaaccaggaagcttgccccaattcatc

SEQ ID NO: 182915 - DNA, 1360 bp, Zea Mays
ctggcttctgatcagcattgttttgccctgttagaattgttctttgggaagagaatggtcggccctttggctgcttgaagtccatggtttgctttaatgaagcttgtctttgggcaggatgctgataaccatctgaggctggctcttctgtattcattttctttgaccagccctgggtacccaactcagtgtcaccattgggttcagtgtgttggtcactaggatctacagaattgcttcgttctgatcccatcatttcaggttgtctctgatctctgattgcttgctgattttgtttttctgcagccttttcaccaataccacgagaagcttccttcacagtacgtgtaacaatcggtgctggaaaggacgactgcctcctgggcgttgtcgtcttcatagtaccagcttgtttcgcatcctctacaccgatgaagacggtttgcctagctcgttttttgccaagcatggcctctttgtgttcatttaacttgggtctctttgcgggattgctcgcaaacctaaacgcataattggcttccactcctttaacatcctttgacctgttgcaaggatctagatcatcaccaggctgatttcctttacattcagaaatttgcatgttctctgatcctgtagaagaaccatgaaccagatctttagacgcatcaaccatttcagcatcactacattcagcagcagtatcatctttagtcacaccaccagatttaatgagatggggctcgctctcttgggattctttcttcaaatgagtgcttgccgtaccagtgatctcatctttgttgctactccctgcattttcagaaatgctatctgcatcaaagcattctccttcttctctttcaacggcttgtgacacctgattgcaagtttcagccttaggagaagcactatcagtggttcgattgtttaccatggccgttgattgtatactagaattctgattatcttccaccttcatcggctcctttgtattgtttgaatctttgttgttcttcacaaagggctgaaagccagatccaatggatgcatgcttgaaggcattattatcgttcaatatcccctgtgactgtgatcctccccctggctgaaacaatgatggggcatacgtcattggaacagggagggatttctgaggttgtgacacaacaacagcagcttgtgacgcgacaacagcagcttcttgtgacacaacaacagcagattcatttggtacgacagcagcagcttcttcttcaacttctgctgggagtttgttaaggtcaaataacatcctttctcgagaacccatgtcatgtgtagatgcatatagcttgaatctttcaagtagtagaaccag

SEQ ID NO: 182916 - DNA, 685 bp, Zea Mays
cagggggcgccgcggcggagcttggccggagctggcccaaccacgtcctggcgtgctaatcctaaatttaactggcgcatcatgtaacctagagggtagccaatgctgtgggagagtcattaccagagctagaagaaatggcgaagctgcccacgcgcacacccagatccgcgggggggagaatcagttccggcgagcaattcgcgcgccacgacgacaatgtagtgctccgattcgccaggtacgcatacgatgacgtagtccgaagcttttgaaccaagccctgggccccaatgacgacgacggcgcgagatggttgtggcggcggcgtgatgcgatagcagagaggatgcgagcacgggaggaaaacgcgagcgcagggaagaagaaaaagcggggcggagtagctgtgagggaggtttaaatggtcggataggtgcggtcatggtaggatatgcgcggtcgccatgccgaagttaccggcggactttgagccgagcgcgccgtggaagtagtcgaggggaggaaaggttagagctgacggcgtccggatccggagttgcaggggcgaccggcgaataaccacagcggaaaccgcgtacggcgcgggagttggctagcagcagcgaacggatctccaaccaatacgcccgagctccacggatccctcttccttcgcatacgg

SEQ ID NO: 182917 - DNA, 501 bp, Zea Mays
gtggaaggtgtgttataagaatgagaacatcagatgtggatgtagaagatgacggttcagatgcaggaatggaaggaagacacatgaaagaagtagattatgtgaaataatatgaggagtgagtagactgattatgaaagaaggggcgattttcattgaaactcacatctctagaaattcgaatacgacgagtagatggatcataacaacgataacctttgtgttcagaaccgtatccaagaaatacacactctacagaatgagcagtcaatttagtccgctcacgtggtggtaacaagacataacatatacatccaaacacacgaagatgatcataccgtggaggagtcacaaaaagaacttcacccggtgatttgccagaaagtttagatgatggttgtctattaatgagatacacggtagtggaaacagcttcactccaaaagtgtgagggaacaaaagaagatatcaaaagagtacgagcacgctcaataatatgac

SEQ ID NO: 182918 - DNA, 367 bp, Zea Mays
gagcttcagtagcaaggaacgagggacatcggggcagtggttagattggcttgcctgggagggatcggagccggacctgcattttgcgtggtaagtgggaaccgtctccgttgtccgtgtgaatgcgcgcgggatcgcggtgatctgcgcttcgcactcgagctttgcggtgaaattgtagtgggtttttagtattgctgaagtctagctctggagcacgaacatcaggttatctagattccttcgtctgggtgtttatttgagccagcatctagctattccctcgagatcgcctgatattagcccgacaaaacttatgcgtgggctccatgcgaccctagcttagcagagctgcatctggttcgct

SEQ ID NO: 182919 - DNA, 472 bp, Zea Mays
ccttggcgcgccagcacagcgatgctctggcctggtggcatatacatctttggaaggtggtgttcttgccccatgggctcgtgactgtgtgttataccacatttgcaaatagaacagcttgcaaatgtggtccgtacctcggatcgttatctcaggtgcaaggtggtgtcagagcatgtggccccccatgaagccaaccaaggaacaagaacccattgtgacggcacggcacggcacggcaccaacgcaaacgacgcccatgaaatctttgagcatgtggtcgtccattccatggtacagtcacgcgcacatactttggcagcaggtcgccagctggtgggcccgccaatgacgcagcagcaccgtacctgtgcctgcgtgtggttcagtgatctccctccctcccgggctgctgagcgaggtggaccgttcggaatggtcctgtgtcctgctgcgacggtggtgtccgtcg

SEQ ID NO: 182920 - DNA, 567 bp, Zea Mays
ccttgttatagagagtagcatcatgtcaaggttagtacttcggttatttcatggattacagatcatagtgaactgaatgaatggtaaagtcaaatctaaccaatttttacagattttatacatcttttcttcgttgtctacatttggttcttgtggatcccaaaggaccactttcagggcatgtaagtataaaataaaactttagtcctctcatttaaacaaattttctacatgtttttttttctgattgtaacaatgtccataaaacttcaaggttgcagggtttgtagcaaatctgcagatatttttcgtatatgggctgaggtcatcttcacctcctacactagctccaaaagaaactagaacagattcaaaacccagagcttcacgtggacgatatagaccacctcatttgaggaacaaggagagaagagagaatgattcactggaaggtcaaaattcagatagtgagtattcttggtatgatatgagctcatcagactcagacctgagtgatagtgatggttatgcaaaaagtggagaccgcttccggagttcgaaggctag

SEQ ID NO: 182921 - DNA, 599 bp, Zea Mays
ggaatttcccaccggggtctcggcgccgccgggtagcaccttgtcgtggccagagttctcggccacaccgaacgcttggtaagaacctccaacgaattcgcctctttccctgctacgctttgggccgaccgtggccgtttttgggttcgggtgcgcgatatgggagtccccggcgggaccgccgccgtgcgaggtgggcgcggccgtattcatccgccgtggggaagaagaactccgtggtccgttggatccggcgctgacgatcgagattagaggatagggtaacctttgctcaagtaaaccgtgtccgtaggattcatggtgggcgggttagattagatcggggtaggatcgaccttcgtccgttgattctggatcggacgatcggggcggattatctgttttataacgcgataatctaatcttgcgcgtcggtttgtgatcggacggtcagcgtccgcccgtaccccttcggctggacggtttagctattaggcccctctgttctatagtaatcaacccgcggtccgtagagttgttttctgtgtctcaggaaaacttaccccgagacccctgcgttttccagataatgaggcccg

SEQ ID NO: 182922 - DNA, 271 bp, Zea Mays
ccgaggttgttgtagcaagtttgaagaccatataatagtgaacacattttctcaagcaagttttgtttggtgctacaccaaatttggagtaaactgttctcaaactctctctgtcaggcgaatggtgtgttaaacacagtttcagtaacagaagaagttcagattttagtgaatgtcgatgttattgtttgatctttggagctccttaactctctatttgttacgttttgatcaaagatacctgtgtagaagtaataaagctatgattaag

SEQ ID NO: 182923 - DNA, 1044 bp, Zea Mays
cgaaaactccatatataccagtttatgcttctttgcctgtaagttcccagcaaacttcttagtccttgatttggtgtctgatgtgataatcgggtggtgtcaagttatctattttttatctatgactgtcaatatataaaatggttgcatactgagtttgtactgtctggtcagagttaaacttttttactggatttgctagtgtctttgaccgctatattaagttgtatcggcatatagccaatatcagacatgttacatttagtttgtgcgcttttaaaataaatcttgagaactgaacaggcaaggattgtttgtcacatctgttctcaaaatttccatatttgcgacctattccaagccctttcttttactgtttactgcagatgggtattattaatagtcactgtcaattagtggacccagagagtgtacgcgctgagctaaggcaactgaagtctctgaacgtggacggggttgttgttgactgttggtgggggattgtagaagcctggactcctcggaaatatgaatggtctggttacagggacctttttggtataattaaagagttcaagctgaaagttcaggttagtacgcattttaatatgcatagtactcattttgaagtttacatggaaatataagtcgtcgaactgcagttctggatacaaggcatataccagtttgtatgaagtaaaggaactagattttctgagtttatatgattattttctattaaaggtattgtgtaatgttgtaaaatatttaatatcattttttaaaaatggtaaaatttcatgtttctccttttcaccaggcctgcttacattgtctaattagtgtttttgacaaacatctattaaggttgtattgtcatttcatgggtctggagagactggatctggtgatgtgttaatctctctcccaaagtggatcatggaaattgcaaaagagaaccaggatatattttttacagaccgcgaaggtagaagaaacacagaatgcctttcctgggggattgacaaagaacgagtccttcgt

SEQ ID NO: 182924 - DNA, 316 bp, Zea Mays
gcgatccaatttctccatttctgggaaaaacctagagctctcagaacctctaacagatatgcccagttgatggaatcaaaagcttttgatatgtcaagcttgacaaaaagggctggctgattattcttatgaagttcctgaataactttttggacgtagagaaagttatcatgaattgaacgtttttgaatgaacgcgttttgagcagtggagacgatctcattcattcttagcgcaagcctgtttgctaaaatcttggtcaatattttcatgaagctattgatgagactgatcggtctaaacatgtcaatcctgt

SEQ ID NO: 182925 - DNA, 506 bp, Zea Mays
cctctggcaacaacaacagcggcatcattggccctgcaccatcctccaactacaactactacaacccttggacgggaccatctacatgaggcctggccaacgtccaccttcggctcctcgtctgcctgttgcatcgcctccaccaccacatgccctcgtcgtcggggctcctggccagtgggcagttcctgctgcggcatatgggtcgccccctgcctacaccgacccttcttcgcctgcacctgtctgggatcaacacaccctcgccgccaacttccaaacagtcactcttcagcagccactccaacaagaatggcattttgatattggtgcctccagtcacatgacatctgatgctggtataatatctcatccctctccttcccagcatcttcctacccatattatcgttggtaatggtcatctcattcatgtcacctccactggcatcacccatcttccctataatctttcccttcacaatgttttggtttccccatccctcg

SEQ ID NO: 182926 - DNA, 790 bp, Zea Mays
gatttagtcacagtcgcatcagttagatcatttgtttcatttttaacctcaagggcagtttcacttgtctctttgttaactgacaagttttcttgcttgatatgagagtccatctcactgggaacaccaggaatcacattatgccttgatgtagtcacattttcatcaatgtcataacttatttttatgggcttttgaggagcccgaatgtcagcctttgcatctacctctcgtttcagatatgttgtcctattattgtgctcaagctgctcaggctgtgcttcctgcaatagaaagcctgggtttacatgatgattggagactacagagatatcattttctgggccactgagtgatggaagatgcatctttaaacgttttggaacagatggttgatcctcgaacgcttcagctgacattggatcaacatccattctatcaccttctatcccgttcatgattctctgaggcacattttgttgagcaagttttctagactcaagagttttttgcttagatgcctgttcagttgattggcgcaaaaacttccttacaacgctgcacacaggacattgctcatcgacacaagttttataatggtgagacattgcttttgacttagtgcaactcctgtacgaacaatctttcctttgacaattctgaaaatggttcaaaagctcctgcacctgaacacaaccattgaacttacaacttccaacagggtatgtgcatgtttttgcatgaaacagcaacagcaaccactttatctgacggaggtaatgaatatttc

SEQ ID NO: 182927 - DNA, 792 bp, Zea Mays
gttgggtgtatattatatagaggagttaggtgggctaagctcattacaatatgggtaattaggtaaatacaagagaaccctattgttctgaggggaagtgtaggggcacgagactcgcaactgaacaccacgggagagaaaggagcgagaggcggagttgtcaaactcgcgacgttatcgctttggagggcacaaactagaggaactgggtagagacccaagcgaagaagtgggtgagggtgtgaaaggtgtcgggcttgagctacagaggaaaaatctagagaaaacgagagaaatcatgaaaacgagagaaatcatccaggatgaccagatagtattggtaaccggagatgcttggaacaaggggtgtccaaaggtcacagtggatgaggtcgaaggggagcttgggacatagaagagaagggtaagcgagtatgacgcccgagctgatagagatgacaaagcgaggtggagttaccgtatgggcaaggaatggccgatagtcgagagaggacgtcgtggtcgaggtggccaagacaacggtgccaagtggaggtaggggtagtggaggcaagggcgtagggttggacaaaatgggcagaggaaggtggggtagggaagcgaatagggtataggggactggaactgtcgtagcgagcaaccacaacacgagtggtatgatcccgtatggtgagtccccaaggatcgaactccatagagcaacagttgttagtggtgaagtgacagatcgagaggaggttctggatgatgttgggggcaacaaggatgttg

SEQ ID NO: 182928 - DNA, 2897 bp, Zea Mays
gcaagattttgtttcaaaccatatcatcccctacatggaacaaaagatccgtgtcctcaatcagcaggtacacagttgagagtttggtatatcattatgttcatcttatcatttcccaacaagattcagtaccgttttaggtagccacaacaagaaagggttttagaaatcagatcaagaacttgtggtggagaaaaagagatgatgtcccagaagctccaaatgggccaatgcaagtgattattctagattttgctgcttttcactgtatatatctgtaatttctaatattctgtaactttattttctccatcaggtatacattcacctccatagaatcacagatcagagtacttggtgatttcgccttcatgttacgggactacgagcttgccttgtcaaactacagactactcgctactgattataagcttgataaggcttggaagcgatttgctggtgtacaggtacaagaatttttttgactcgttttgctgaactttctctgtggatatacatattaatagtctgtttagcgtttttaattgtgttgtaaaagcaaaattatgattgctattctgaaggaatatcccggtatgtatgccaaacatgttggtcttgtttacactaaaagcaatgggcagttccattaccaacccagctttcctacaaatatggcgtttggcctagaaaacatcagatgatacatgtccactatgttgcagggtttctggattgtttttacttgagtctggaatcaccttaatgtgtttcacatattaacttcatgttgataattgatatacatatattctcttttgcaggagatgagtggactttgctatttcattttggatcagtcgaggaaggacgcggagtattgcatggaaaatgccttcagtacatatttggtatttatttagaaattcacatcttggtttcctggcacatgcaaataattatttcctttatattgcttattacttaatcttttggatattgttctgtggtcttgtgctgttaccccatgcttcttatacagaacaataaggagcccaaaacccattttgcatggaacatctttttcgtgtttatcagttcttaacttcttattgaatgctcaattcaagtcttatttaagcaacaatcataacaaacagctacaattctgggccacatcgccacatattcatttcattctagtttcttgttacaacctctgggccatgttgccacatattcatttgggaagggaaagggatgacattttagactggctacaagttctgggccacattgccacatattcatttcattctagtttctggtttctttcggaaacgtgtcctgagtcaagaaaagtcagaatgtacagggtccaccctgatttaaaactaccctcttcaatatcaaatggtttattatgcacattctgatactagctgtacaaatctgaatatcctgaggtatggtgcgtttagaagaatgcacaaataagtgaaatatgtgcccatgacaagatactacacttatgatatgtagatagtagactctttagttttcttgattgaacttcttgtagccttctttcattcaaagtgtaattcaccttttcatatatgcagagaattggatcttctggccagagaaatgctactagatgtggcctttggtgggctgaaatgcttaaaacaagaggacagtatagggaagcatctaatgtgtatttccgtgtttctaatgaggtagatttcctgtttgtcgtggaaaatttttagctgattagatgtattattgattgattgagcatctctgctactcaggaaccttctttgcattctgctgtactgcttgagcaagccgcttgttgctatctattatgcaatccacccatgcttcggaaatacggatttcacctaatcttagctgggaatagctacttcgtgtctgatcaggttcataataattcttttactgttcttgtaatccctttcaaagttcattgaatcattgaatcttttctaaatcgttttttcattctttaactgcagaaacaacatgctgttcgggtgtacagaaatgctttgttcgtttacaaacaaaacccttggagttacatcaacaatcatgtacactttaatattggaaggtagttagtattttttagctcctgtccaggttttatcttgtgtctgtctttatgctgtacttgactctgggtgtactgataggtggtatggagttctcgggatacttgacgtagccatcaagcacttgcttgaggtcattgcttgtagccatcagtcgctgactacacaaaacatgttcctcaatgattttttccattatgttcaggttaatgaccaactataacacgtcagcttaataccttattgaacctaacttttggtgcatttctaattttgtgatatgttttgtgtgtatagagcatggggaagaaatttgatgtgtacaagctccaacttcctgtttttaacatgtcatctctcaaagttctacatgaggatcatcgcacttatgcatcacatgcagatgtaaggcctaacaactgtaccaggactttttctaattcatctatcattgcatttctgcgagcaatcaaacattgaacctccctatattattatagaatgttgtcttttgggtacttgagctacccttcctgtacccccttaaagaaaaaggcataatatatggctaattccacatctatttgataatgaaatgaaacactattactgtcttttacctgatctcttttcctgcagctaatttgttattatgctattgatgcccttgtcagcatgtgtcggttgtcttatgttacaggttggcgttagtgaaagcacgtggcaggagctggaggaagaattgat

SEQ ID NO: 182929 - DNA, 505 bp, Zea Mays
gcagcacagagatggaagatacatttgcagatcaaccacaaggggagccaggaagccagcagccatatgatccagctaaagatcctaaaagaaaggcaaaatcgaaggatccagcatggaactattgttattggccggatttgaacaaaaaagatgtgaagtgcatactttgtggcaaaatcgttcatgcaggtgttagaaggttgaagcagcaccttgttggtggtcatggtgatgttgctaagtgcccgaaaacaacatcggcaattagcaaagagatgagtgattatttgaagaagaatgctagacagaagcctattgacttggatgatgataaagatgatgaagttgaagtacttggagaaggggaaagtagagcatcccattcagttgttcacccagttccggaacagcccaaaagagaaggctctcagctgaagcaagccaaaacaatcaacacgcgtcgaagtcttctaagtcaattgcatccatgtttcgcaaagca

SEQ ID NO: 182930 - DNA, 367 bp, Zea Mays
agcacttgagggtggtgtggtatgaagtgttgtaacaaaattcatcccatggtaaccactgtagccaagttcttggacgatgccctgctaggcagcgaagatacatgataataactcgattgaccacttctgactgtccatcagattgaggatgaaaggcggaactcatatgcagcttgacccctgctaagcgaaacagctcggtccaaaacgcactagtgaaaaccgtgtctcgatcactgacaatggagcaagccaagccatgcagccggacaatgccatcaaagaaagccttggctactgaggctgttgtgtatggatgtcccaatggaagaaaatgcgccatcttggagaaccggtccaccat

SEQ ID NO: 182931 - DNA, 854 bp, Zea Mays
tgggctttggtatcagctgaagctgtccaaccagatgttgtttcatttattgctgcaggcttgaaagagaaagacactttaaggaaggggcatctgaaatttttacgagttatatgcaaaaactctgagtctttaacaaaggtaagggagtaacttccagttttgtatacataatgaaccatcatcctgttcactacatttttttaataaaactagactctggggaaaggtgccccaatggcatttattttaagaagagactgtaattctgggtctagacaaggtcctgaaggctgcctgcccaggcggtgtccgttaggaccctttttctcctcttaatataatgtcacacagccctcctgtggttcagaaaaaaggggaacaccaccagggctcaaaccctggtgggggcatctaatttgacggacctaccacctagtagtgcgtctgcttttattatcattattatgcttttctttgcttaaggaagagtggttcaatggctgaaaaaatgcaggcactaaaggctcatattaactattaataaaactgatctgctccaggttgcttctttattggatcatttgattcagttgtcaaaaactggcttcagcaaggcaacacagcggttggatggaatctatgcactctttgcagtatcaaggcttgctgctgttgatacaaaagcaggttttctacaatttcttcttgcatccaagttcttttttgtatacttgccagcatattttgccttaaatgtggtttgatgaatatgcagatggtgccattctgaaggagaaactgtggacattgattgctcaaaatgaaccctcattgatctctttacagttggt

SEQ ID NO: 182932 - DNA, 380 bp, Zea Mays
gcaggttaccatttgcgggtagcatgctgcttattactgcctgctgctcagttagttgtcggtattagccatccttcatggatttcattaccgttctttgtatttagctgcattggccttgtggattggtccttaacaagtaactttcttggccttttccggtaagctccttgattagcatactaattatactttttagtgttattgtttaattttatttcaatgttttgtgaagatggtggaggttacttgagatatactcggtgttcagtattcttctgctttatctctaccagttacctatgaaatttccctatattgcgttagcatttgctgacttcattggtcttttcaaaatttcctcgaaatcagaatggcct

SEQ ID NO: 182933 - DNA, 482 bp, Zea Mays
caaatttgtagatggtatattgctctacaaatttgttgcagaatgtggatcacgttaccacaggaatttgggagaaaataaagctccaatgtgctctgtcagtcgctctgaataggtgattgccatggtacagtgtctacactgagtcagttttagtaactctcaccgccgacgatcccccgccgagattcgcgtcaccggcgttcagattcgtgctcagctagacggataacgtcgcggggtaagggaatcctcaccgccggtgagctggacgccactctaacggcctcccgtgcctccccctctaccctacggctggagcagataagctcgccggtgaatcatcgtgtctcggtcctccgccgcgtgtccgagtctttccaccgcatcgccatgactccctatagcagtcccatcgtcgccggtgaccttgccacggcggtggacacgaattcactgcgccagtgttttcttctacctcc

SEQ ID NO: 182934 - DNA, 282 bp, Zea Mays
catcggagctccgaggagaatctgcttgggggaagaagcgctaagctatgattggacccgggcgtggggattgctgcttgattcgccgccttggcggcaggtcgtcgtgtcgcgcagccccagcccagccagaacgattcatcagacttccagtgcacagcggcaaacccggagggccttctgcagttgcccttccaagtggccgtgtcgtagtcgtagcttccatttgtttttcctcctcttggttctggaaccccggccctgtatttttacaagctgtac

SEQ ID NO: 182935 - DNA, 322 bp, Zea Mays
aaaaaaaatagtcgtcttcttcctcgtgaaggacggtctaggtgagattgtcctcttgtcgagatcctcacgtcccggtcctcaccaccggtggcgacggggtgtgacagttggtaccagagacggtgtatcctcggcgtggggggcgacggacggccaccagctcttctctgcgctagctatcggggtggcgacgacgattgttggcgcgtcgacggcggatccagcggtccggcgtggtgacctcattgatccggcgcgacctacctccttcagctaacggtggcgctccagcggcccttggctcgagttccgttttgtt

SEQ ID NO: 182936 - DNA, 300 bp, Zea Mays
cttcctgtcacccccatgttgactgctgcccgccaggccgccagagagggaggattaggaaaggggggaaagagagacggacggcttctcgggagtgggtaagactcacatgatgcaattacctccatctttccctcttctccttttgcgggcatactcttctcctccgcctggctagatccttctttcctcgtcccggattagctcccaatctcgccaatggtccaggttgctggccgtggaacatttcttcagttgggcccactctctggtaaggcaaggcaaccagcccacagcaca

SEQ ID NO: 182937 - DNA, 368 bp, Zea Mays
gtccaaccaatattaaaatataaaccaagtaatagtaaaatacagagaccataaacaaactaagtgcaaaccatagtaaaattttagagatagtacaatttatccaaacattaataaatgtctagagacagaaaaaatttggccaaaccataaatcctgaaccctaaacactgaaagccaaacccttactcgaaactctaaaccccaaaccccaaaccctatgtatcgaagaataactcatatggctttttaccattatggtctccactaaagaaccaagattgtgatttatgtccaaacactaaacacttaatcgtaaccctcaaccctaaacactaaacaccataccccaaacacttaaccctaaa

SEQ ID NO: 182938 - DNA, 441 bp, Zea Mays
aagcttgccatccttgcataaggcatatatgataccattgtatccttgggagttcatactaaagcccttggctaacatctgatccagcattgctcttgcgtcatcccacatgccattcctgcaaaatgaatgcagcaaggtagagtaggtcacgatatttggtgcacaacccttctcctccatctcatcaagcatccgcactgctgaaccaaatctcccaagcttgcaaaggccatgcatcaaaatactgtatgtgtgcacatcaggcgggcatccttttgaacccatcatctcatacaactctgttgccctggccagcttcccctccgtcagacatccacggatcaccgtgttaagcatcaccacgttcacctccggcaacctcccgagcatggcgcacgcctcgtccgcctgccttgttcggcacagcccttgcaggag

SEQ ID NO: 182939 - DNA, 772 bp, Zea Mays
acatggagaacaacagaaatcaattgatggacctgacctgcacaactgtcatgaaggggaaattactggattttcagcttccttcaaaaaacgatactatggcggtgagtaccataacaaaaatatgtcatcttctgtttcccttaacaacctttcagtctttctcataaggattgcaaacttaggaaactgttaacaaaaagtttgataagtattttttttggataatttgttgcctaagaagaaatttaagcagcctttttgtttcttcagaattggtcaggaacagccgaaatcatgctgttcagaggcgtactcctcttataccagttatagctcctgcagacaggagtaccattgatgagcccacaccaggaattgaaaacgtcatcaattttaattctaccaagagaaaatatgaagcggccaatcatggctgtgctgttgctccaacaaataagtactcttcggacagagtttctggattcgctgaaacatgcaaggctgatcaaggccatagttacttggataccatggaaattggggacatagcgatgtgtcaacaacattttaagaaaacacgaattcagcaaactgtggaggaaagtcagactggtatagttgagcatgagacaacgatggcatctaaagaagggaataagctagtctcttctgtaaacaacaatcagatacttatcgacagtatttctgaaggtatttttagcaattggttcattcttttcacttctattgtcaacatactatttctgaa

SEQ ID NO: 182940 - DNA, 865 bp, Zea Mays
accagggagctgtcaactttgcattgatgatgtcacaaatggagggaggttgtccagtagactacaacactatcactgatctcttccttcaggtatcttttgtattattagcatataaattcttttctgtagtagtatataaaattctttgttgtctgggaactctccatgcagttcttttagtcttcactatgtaatttggttttttgctttggcttacattcttcaacagagaaatatgatacgggaggctacagcttttctgctggatgttctgaagccaaacttgccggatcatgcttttcttcaaaccaaggttagtatttgattgttcatttcaatatgaacatttgccttagacctgcatgctgcttaactactcaatgtcttctgcttggattgtcttgtaggttttggagatcaacttagtgacttacccaaatgttgcagatgccattcttgcgaatggtatgttcagtcattatgaccgtcctcgtattgctcagctctgtgaaaaggctggattatacttgcgtgccctccaggtcggtaacctttgcattgttttggctgatctcttctctttaatctctgtgttaaaccaatatcgtattttctgatgcagcattattcagagttgcctgatatcaagcgtgtcattgtaaatactcatgccattgagccccaggtttgtggtgttcagttatgttcttgaaatgtatctgttgttttcttgtttattaacaacttccttgcacaggcacttgttgagttctttggcaccctttcaagggagtgggcactagagtgcatgaaggaccttctactggtaaatctgaggggaaatcttcagattgttgtgcag

SEQ ID NO: 182941 - DNA, 1076 bp, Zea Mays
gggatatcacatgtatactaagcgaatatgaattataatatttaattcggcttaatcatattaacagacaataatcacatgccgagtaaaattactacttagtcccgattagtgtgttgttcgaataaccgttgcttaaatatatatttacttagcgcgagctattctaggtgagatgaatcattagcgtgcgtaaaacgcacgacgacacgtgtgaacagcacgcacaacgcgcgcgaacagcacgcgacgatgagcccaacacgcacgaacaacacgcagacaacacctacgacacacgagaattactaataatcatcgcgtttatactaaataaatattacttcacaaaacatttgaggtggcattaatcatgttaatcggtattttcaaagcgccaattaaaattgtaggataggcttaactagatttctattttaataattatcaactaactaaataattaacgaaagcatgtgtcgcgacaaaataatgctactaacacgcaggatagatgaacgggttcgggggtagacgggcgtcgtctacggatagacgaacgcgaacagcaagccgtcacgcgagaatcgccaaatagatgtaatgtttatactaaacaagtattaattcaaaatcatctacgttaacattattaacgcgtcggcaatgttatcccgaagctaacgcaatttgaacaggtcgaaattgatttataacgtgaaagatttcgcttatttaacgaactaggagcttatacgtaatgaaccatatgcttcgtggactagcaattagtttttgcatgacttaggagaatagtaaattaattctagaataaaagcaggatcttttctttaaaaggcagctgagcgatgtgtcgcaaatttattggctggaaggctggccacgtggagggctacaaagagcacaaccacaacaactcctgagaggatctagtgtggagcggtttctagatattttcctgcatgcaccaaggaacgtggatgtatggcatcattggcatgcatggagcccacaaggttgtttctaaatattgcgtgacggattgctttttcttc

SEQ ID NO: 182942 - DNA, 289 bp, Zea Mays
ttgatgtgcaacccgagtgtactgccgctcgaggaggccagtaagtgccaacaacatgaatagccaaagcagggaaatagggctggcgggggcacatgggtaacttggtcctggagcattggagaaggagcataccacaaggaaaccaacacggtcagtcaaaaccaaatctagataatcatcatgctacttctatgttttatgtctgtttttgtctgctatcaagtgttcatgcaagtgttatcaagtgttcatccatgttaagaggggttgaatacgactcaaatat

SEQ ID NO: 182943 - DNA, 691 bp, Zea Mays
gggatgtgataagtggttttcttatgacctcttccacccagatcctgctcaatggggtgcttggacggttcatttcacatagaaggggcttgcggcaaggtgaccccttatctccgctgctttttataattgttatggatgtcctcactttgctgtttatcaaggctgaggagcatgggttgctgcagcccatttcttctaattcatttcagcaccagatctcgctctatgcagacgacgtggctctcttcctaaaaccagagcctagggacttaaacactgctgtgaggattttggatctgtttggggatgcttcagggttgagaactaatatggcaaagagcagtattgtacccatccgttgcacacatgctgatttgaatttggtccagcagctccttccctgcagatttgagacttttccaattaaatacttgggtctccctctctccctgaagaagttatctaaacctcagcttcagcctcttattgacaaggtggctgatctcttaccggcttggaaagctgacctgatgacccgtgctggcagagctacccaggtgcaatttgtgctcactactactgttatttatcaaatgatggctctggatttgcctaagtgggctattaaagcaattgataaaatccgtcgtgggttcttgtggcgagggcgtaaagaggctaatggtgg

SEQ ID NO: 182944 - DNA, 1295 bp, Zea Mays
tggacatcatgaaggtctgaagtaagtcacccatcctgttatgtgtgcttaaagcttgccatcttatgagcagattatcatgttaaaatcatacacaaaaacatttgctcaaagttactgtttactttatgtcctgtgcctacccttttcaatttgcctgtttctcttttttccatatttacctcttgagatctatatatacggaacaacttttatctgtatcaatatattttgttatagttctgccaacttggcgattgaaggtcaatatggaatatacttcctctaggttctaaatgataatatatctattgcaattggtatttagttttggttctagtaaggtactatattggtgggagtggcatgctgatcagattaacaacttggtcaaattttgtgcttttcatgctatctattctgtagaagtaccttaattgatgttttatgcgattttcaggaaaaatagtgactctggaatttcttcatgggactggaatttaagtggtcaacactcgacctatcatgcattgttccctcgggcatggactgtttatgatggtatgccattgtagatctatggtaacatgcttaaatttgcaacctacgcaaggaatttgttgtattttttaagttcttaccaaagagactgttgttttttaatagggcactgtaatgctaatgcaataaggtggcagtgtgttgatagcacagtgatttcgacccctttaagattttcttaatttgttgcaggtgaacctgatccagaccttaaaatctcatgtcgtcaaatatcacctttcattcctcatgattacaaggatagcagtcttccaacatctgtatttgtgtatactgtaagtggctaatggaattccgtttatgctgagttgaaaattcttgcaggtctacattttgtactttcctgtttcctattccctagcaagacattttgaaaagcctactatgcatatttatgcaagatatttcctttaaaatggagttcacatatggccattcaattaggtgctgaaatatcatctttgtgtaaactctatttcaatattttgtaactagtggaatatgaaatcattgtcgccttacatgaaatttggaaatgccaattgttgacgaataataaatgaatagttcaatgacggtgtatctgccaattgagttttgctatttattgtagatgattttgatattaaaatacccttttgctccaataagttacctaacagcctttctatttggtggttcattgcagctagtaaacactgggagagatcgtg

SEQ ID NO: 182945 - DNA, 402 bp, Zea Mays
tcgatcggcctctcacaaaggcactctgattagatgccaccaactcctgtagatagggtcccaatctattagcaagcattttggtgaccaacttagcaaaactatgaattaagctaattggtctaaaatctcttgcagacaaggcatcaactttcttagggagaagagttaaataagctgaattcagcatccccaacttgtgagaatttccttgatggagtgaattaatggctgccaacaaatctgatttaataatatgccaacaacatttgtagaattttccagtaaacccatcaggaccaggagccttatcagatgggagagcaccaatagtgtcgcgaacctccttctcagagaaaggtgcctccagggaactcaaatcaatagcgtctctgtggcaag

SEQ ID NO: 182946 - DNA, 542 bp, Zea Mays
catcccccaacctccaccccgcccccgcgaatccatcctatttccgccgatgccgccttcctcgaaccttcgtcgcccgctgcacctccccgccgcgccccctacaaagccagccagcagctaaaaacctcctcattctcatccacttcctcccgcgcaaccgctcttccccaacttcgccgccgccatgggctcctcctacgacccctacccgtccccggccgccgacgacctcttcctctacctctccgacctcggccccgcctcgccctccgcgtacctcgacctcccgcccaccccgcagcctcagccgtacccgcagtcccagcagcagcagcaggggagcaaaggccccacgcaggacatgttgctcccctacatctccagcatgctcatggaggacgacatcgacgacaccttcttctacgactacccggacaaccccgcgctcctccaggcgcagcagtccttccttgacatcctctccgacgacgcctcgtccccgaccaccaccactggcaccaccaacagcagcgccagcg

SEQ ID NO: 182947 - DNA, 355 bp, Zea Mays
aagactatcacaataaattacaaacttatacagaccttcaaaaactaccacaaggtcttataattcaaacggatacacctgatgtgttcttttcttctttacaacttgcttgttgacagaaaccccaagcatgtcattaatatcaataaaatatgcctgacagcacaagtaatggtgtggttggatgggagggagcaagcatcgagcttgatgaaacgaactcatatagcacacatatgctgcaaatccatagagcatgagaagtaaacaaacttgtaaatatgaaggactatcatcacagaacttgcatatccaaccgcctattaatgaaaatcacttaagaaggcattaaaac

SEQ ID NO: 182948 - DNA, 710 bp, Zea Mays
ttcctgtgtttgggctagaaagtttgccaacatgaattgtctgaactctgcttacatcactctcattccaaaattggaaggggccgacaaggtcaaggattttagacctatcagccttattcatagttttgcaaagctggtgtctaagcttatggctaatagattggctggtcagttgcagcatcttgtctcgcctaatcaatctgctttcatcaagaaaaggtttattcaagataattttatgctggtacaacatactgctcgttttttgcagcagcaaaaacagccccgtatcatgatcaaactggacatttctaaggcttttgatagtgtttcctgggcatttttaattgaagttctcattaggctgggttttggacagatttggtgcaacgtcgtttgcggcttgttgtcttcttcctcaactcagattttgcttaacggatgcccgggagaagtcatatatcatcggcggggtctgcgtcaaggggacccattgtctcctatgctctttgtcttggttatggatgtccttaatattatggtgcagcgtgcctctgcggaaggggttctccagcccctttcttggagattccttcaccaccggatttctttatacgcggatgatgtggttgttttccttcggccggatgtggttgatattgaggcatttaagggaattctacatctttttggtgaagcctctgggc

SEQ ID NO: 182949 - DNA, 499 bp, Zea Mays
gttgtattgagataataagttataagtgttgcgtgatatgagactcgatcgatgtagttaatattgaattggcctgtagagaggtggtgacatgctgaagtagtcatcgcttcctctacggttaagtcggagtcctgcgtgatgatgttatttatgggggtgaatgcgtattgaaatattttatgttgtgcaatatgattaggaagatgaaggatagatatgttgtttcggaaatgttagccaatagattcggacaggcgtgatagaggttgagtcacttatgttataaaattgatgctcgacatgttaggtctcctaaaatgtggtgttttaggtgacttgtgtgttatcccattttaagttgagaaaatgtttaagagaagctaattaatttgctcccacccatgttttgagtcgcaatgactaaaatgggttgaatgaacttgagatgtattacaatagctgtgtgtcgtgccggtcatccaaaaatggcgaaagg

SEQ ID NO: 182950 - DNA, 361 bp, Zea Mays
cgacgagatcgggcgggaaaagcgctgggtcggagaagaaagcgcggaggcggagggcgtgcgcggagcggccgtcctcctggagctcctgcaatagctctagcgccgtgaggtgataccgctcctccagcaagaagttcaccacgcagttgcacaacgaagcccaccgctcgtccgctgcaccaacgcccactgccgccatcctccttggtatcgggcgggcctacctctatcgcggtgaagctcgccgggcgtcgttgtgtggcatgtggccgcggcggaaggcacagatctcacgcgtgtgactcgaggccggtgaaagaaggggaaggagacgatggcctggaaagtacagactaga

SEQ ID NO: 182951 - DNA, 409 bp, Zea Mays
tcctgaactttctgaactagatggctgtgaattgtaactagtagctgaaactgagcctgtattttgtgcttgtgatcctgaaagtatagcttgagttcttgaatttttaggggtcacaggtgattgtggtagtggtgacactgagggtacttcaccacccccagaactctcaccctcctcacctgtaccagaaggatacaacatagcctgactgggaacagtgaactgaaactgaaaatttgagttttctgggccaacttcagtcaactgagctttgttattactgtcccagttccatgcctcatcttcttcaaacttcacatccctactgatgcacaatttttcagtaattggatcaaccattctgtagccttttgtccctggttcatagcccaataggaccatttta

SEQ ID NO: 182952 - DNA, 395 bp, Zea Mays
ttaaaaaatcattccagcaaaaattgtataaccacataagagcaacatgtcgaaacttgctcttttgttacccacatcaagtgcagcgcatcaatgcaacaccatcacgggtcacactaagccacgcagcacttgtgcgacatgaataagagcatggtgaaggtgaacgagtccaagcaaccctggaccctaaactcacaaaatgggcaaagcagcccgaaccccacagaccccaacagtcccaaactctctaacccacttacccacgccaccgccgctgaggcaccgaccgcgccatcccccatgggatgggatgccccttgtggccttgtcgcagtacgatccaacaaacaggatgaaaaaacaaggagcgcgttaggtttcgcggatctcac

SEQ ID NO: 182953 - DNA, 490 bp, Zea Mays
atggttctgtcagtcctgaaaggagtaggaagcatcttatttcatgcagaagatgtgaagtctctgttttttgatcttctggaccgtcgtgatcagtaccagaatcgacataattgcaagcagatcctatccacccatgaaatgcataccttgtgcttgcttttggaggtaaacacatcatgatttgtatatatgtccgcggatgatattatatgtcaagtcaagtagaatagccattatgcatatttactgccggtgtgtatttttataggttttattctcaacgccagatcatgtgaatattggttttaacatgtttgaacctttgatgaaagctttaaaggtgagaaaaatcttctgtttagtatgtatattaaaattatcttcaggactcaactaactgtatagaacttcaggttgatgcttcgtctccaggtgattctgttgttgtgatgccatgtcttactgtcctgcagaatcttcaaccagg

SEQ ID NO: 182954 - DNA, 594 bp, Zea Mays
tgcgaagaagtgaggtagggtggggaaggtgtcagacttacggcgaatgcgaaaagtccacaagtagtgagagatgtcatccaggatgaccagatagtactggtaaccagaaatgctcggtatcagggatgtccaaagatcacaatgaatgagatcaaaggggcgagttgtacgggacatggaagaggggaaagaaaacgagtgtggcgcccaagctgacaagcatagcaaggcgaggcagagttgatggtcgaggtgctcgagagtctagagaggacgtcgtggccagggtggccaagacgacgatgcctagtggaggcaaaggcagcaacggtgagggcatagggtggccaagacgacgatgcctagtggaggcaaaggcagcaacggtgagggcatagtggaggcagaggcagcaacggagaggcaacaacacaggatgagggagatggggcagggaagcaaataggatatagggggccaaagttgtcgcatcgggcgaccacagcacaagtggtacgatcccataaggtgagcccctagggaccaaactccatgaaacagtggttgtcagtggtgaagcgacaaaccgag

SEQ ID NO: 182955 - DNA, 451 bp, Zea Mays
cttgtttcgcatgtcgtgtccctacacgtccccgcagaatggtaaagcggagcggattattcgtaccactaacgatgtcatccgctctcttctgttttaggcgagcatgccccctccatattgggccgaggcgttgcacactgcgaccctcctccttaacatcttaccaaccaagacgctcgatttctcgaccctacactctgccctgcttggtagtgcgccgtcctacgatcatctccgcgttttttgttgtaagtgttatcccaatctctcggccaccgctccccacaaacttgcacctcgttctgccctttgcatcttccttggctactctactcaccataagggatattgatgccttgatcctaccaccaatagaatcatcatctctcgtcacgttgtcttcgacgagtccaccttccctttcgccgagcaaccctcgccgcccacg

SEQ ID NO: 182956 - DNA, 575 bp, Zea Mays
tatgtggctaaatactctaaccctgaattctccctgtagtaaatctgggagaccactgatgaagaaaatatctgagcgcaaaagtaatgcacggcctaggcatacaagtagcagtgtgcagtcagactctcctggtatagcgtctcttggtatcaatcagagtgctttatgcaacttgaaacagttccttttgaaccatacccttgaacttgtgctgttcacttttcagtgcaatctgaagatgatcatgaggaacttcttgcttcagcaaatgctgccctaagtattgactttactttcacattctgtttatcttccttcattggaaaattattgaatatttgaatgttatttttcttgttgcaggatctgcttgtgcaagcacgttctggcggcaggttgaacctttcttcgcatttttgactgcagaagacatcacatatcttagtcaacaggtaatgtgggtgattttctattgcgccaacagatgtattttactcttcactacattaattaattgttccttggtcaatactttgttggttagatacatttaccagatgattcctcttcaa

SEQ ID NO: 182957 - DNA, 917 bp, Zea Mays
gtcttaagttacttttacctcatcgacttgaattaccaatgtgtgatctaccttttctagcttgaactatttaaattagctagcatggcacaattgaactgtagaagatgaaacttgtttttttccttgaatgcgcaggagaactgtgcatcattatattaagaagagagtacaatccaaagtggacaattacaacagcaagggcctccttatggtggccaaaagtgaaaatacaagaacttatctataggagaaaacctctaaactaccctactagcaggggcttacaaccccggaataaggactgcaagaagggggagagccctagctcctgccaaactccatagttccttctcaagatcagccttccggattgcagcttccaggttgggggaatgcctgtcaaacatgcattcatttctatgcttccagagtccatgctccaagaatgatgagttcagccccttccttgcaatgacattaacctgactatttgcccacctccactaaaccataaagctcgagtcatgaggttggggtgccaaattatgaagatcaatatgtcctagcagccggaaccaaaactctagcaaaaacacagctagttaatagatggtcaatagtttcctcctgttgatcacacaaggtcaccgttgacaccgttctgggtgctctgaacccccttgtgcagccgatctgctgtccaacaccatccatgagcagttaaccacatgaagaatttacatctagccggtgcccaagtgttccaaattcttttcagcaggctcaaactgagctgacccaatgaagaaacactcatacaccagttttttcctaatattttccattggcagcgtgtcttaagaccttcttatcctcaacatccatctgtaaatcaaattcttgaagaaggtccc

SEQ ID NO: 182958 - DNA, 596 bp, Zea Mays
ctcaattctatttacacaaattgcagaaaattatccaatgtgtttgtgagagcaggctaaagtaggctcacattctgtgtcatgtgattttcttattgtagctcaccttgaatgattatttagtaggtcagtggtgatgggcattgtaatgttgactacgagaaatactagcagtctgcgtgttagaatgattttgcatgctactatttgtaagctgatttgaattaagttattgttggcaggatactatgtcaatgtaagtcttgcaaggaaaggatgatgagtctgaatgagtgggagaagcatactggctcaaggaaaaagaattggaagatgagtattagacaaaagagtactggggaactactcattaatttggtaagccctgtagttcttcatcaaccttttatttatcaatcaaacaccaagaccaactgacacatgatctcttaaacttatctgcagctggatgatattccttgtgggacatcgaagtattctaacccaggcattaagaaagaagagctgctacaattgcaaggtacatttctcgttgtgtttgtccttgtgtagctgggaattgcaacataacttta

SEQ ID NO: 182959 - DNA, 477 bp, Zea Mays
cgctccctgatgctacagggactcgtgtcgtgcagccggctccaccagcagctaccccggttgcccccagggcgatcaccgtcgaccgtttctgtggccaagtgtactctcgccgtcgacctcctaccgcaacgtctccttcacttgcagcccaggcgtctgatgctgctgggccatcagcccggcgcctcctgatggtccaagagctactccaactatccctgtcggtgctgttgttgtcccccctgtggtcaaccaccaccgtatgaccactcagggcaagcgtggccttcggttcccagctctgtttgaagcttcagcactgtctccaattcctcgcagctatcgcgctgctctggtcaatccccactggcgcgctgctatggaacaggagtatgcagctctggttggaaacaacacctgggatctcgttcctcggccacctcactccaatgttgtgacaggcaagtggatatt

SEQ ID NO: 182960 - DNA, 521 bp, Zea Mays
gcagagggtcgagagttagtaagaatattgcttgctgctggtgctgatcctacagcacaagatgatccacactgtagaactgcattacatactgcagcaatgatcaatgacgtggagcttgttaaggtaaatcccatctggtggcttgattctttcctccatatttctgtgttgtttctgctcaccatatcatagtagtatgacttgattttgccttctgttacctttttattggcagattatactggaagcaggagtcgatgttaatataagaaatgctcaaaatacaaccccactccatgttgcacttaatagaggtgcaaactcgtgtgttggcttgcttttagcatctggtgcaaattgcaacatacaggtttgatgtgttactgtttttcttcatgttattttcgtagataacactgggtaaatttggaagccaagtccaataaaatgctcttgtggaagccaatactaggaattaggaaatataaagtagtgatgcttagtgggagactgggagc

SEQ ID NO: 182961 - DNA, 331 bp, Zea Mays
tgcatgaggatcttcgtcgttatgcagccgagactggtcatcctctccctcctaggtcccctccacctccagcccctaccttccccgcagaccttaatgagtggcaccaacaggagtttggtgtgccattcattaccccggaggatgaggtcgaggactatgatgaccctttctacacctcggaccctcctcatcctcctcctccctactcgggtcagggacccactcccggtgaccctaggtcgtccggctctggtcactatcctcctcctccctacccgggttcgggacccattcctggtgacccgcggccttccggctctggttacca

SEQ ID NO: 182962 - DNA, 824 bp, Zea Mays
gttgtttcctccgccagtcctcaaccccttcttttgccatggtggctacaatcacgacacacagcggcgcaagcgcgctcactgccgtgtatggtgcaagtggagtcaaggcaaggataccagagacaaggaagtagaaattggccaccctcctgaactgctcgaagagggacttgggcaggaaggtggccagattgtactttgtcgtcgacacctcattcagcaggtaactgaatccctcctcttcaagcctatcaggctcattgacgtacacgactctggagaaccccactgtcccaatccgtaagtggtcatcactagagcccccgtgacaacgcatgaaagtcaacaatgtgctgagcttaagtttctccagcctcttcgtcggcgccattcctccagactcaagtgaatcactgcaccaaagctactcccagatgccccaagaagtcgacaaggccaaaacctcacgggttttttttggaactccccgccgtagcagccaattcgctccaaccttgtccaaatcaatcttactgcagaacgcaattggcaattccctctgaagaagagcagctgagattcgagcagcaagaatctccaagaatgcagctcgcaataattcagctcctctcccaaccaacaagtagcccccaactacctaaaaaaagcaaataaactgcacagggagagggactgaaccgagagccaccccaggccctcagcagagaaatcagctcctcccaggatcgagaagacgtcaacactcaacagcgcggcgcctctgaaatcccggcgtgccgccgcggccctgcgctccggaa

SEQ ID NO: 182963 - DNA, 271 bp, Zea Mays
gcaggtggatcagttcacatacaacaatgggataattaaacacaagaatcgagtgtggctaggtgccaactgtgaggtccagactagggtcatgacaacgttacatgacagtgcaacaggtggtcactcgggttttcagtgacctaccaacgcatcaaagcaatattcagttggcctggtatgaaaaaacacattgaggagtttgtgcaatcttgccttgtctttcagccagcgaaactagagaggagtggatatccagggctgctatttc

SEQ ID NO: 182964 - DNA, 272 bp, Zea Mays
cgagtggagagagtagttgacttgcgagttagacaggtagactactcggggtcggggcagccaaggccaggtgggtcccccgaactcactcacggtcacggcaaccgccgccgcgacgccatcaacggcatcatcccatttccacttggatcccaacttcccaagccacctctgcttctcctccgtctcgtcgtcggccatgacacccgccggtggcgccaaccactccccggcgccgcgtagcctggtattcgccttctacctcaccggcc

SEQ ID NO: 182965 - DNA, 490 bp, Zea Mays
cagcttgacaaacagtcctccatcttcacagttgtaggacctcacgctttttcctatgttgaatagatcaatagaacatcctagcctgcccagttcagaaatgtcgggatcaacttcttgcagttattgtttattttaatatatttttcttcaaatcaacagctttgaatcatctgctggagttcagaagtccgtagcagattacttcagagaggcataccatctggaaatgcactatgattttctcccatgcctccaagttggcagtgatcagaggccgaattacctccctatggaggtttgctaactatgaactggccttagcttatgcttcaggactcttttgtcttctatagtctgctcttgtttcttaatttccatttggatttcaggtttgcaagatagtagctggacagcaataccggaagaagttggaaggccaacaggtctctaaactaatggactccacctgccagcgcccatctctccg

SEQ ID NO: 182966 - DNA, 727 bp, Zea Mays
gaaagttttacctgaccggtggagcttccttggtcatcctggcgcaccttgcgccagctgacagaatcagctccacctctggtcgatccccatatccactgagatcccttccccagtcccaagccttgctgcgatcaccactgcgcagtcctaggcgcccacgacatatcaatttggtatcagattcctccgacgcatcgaccaacatgtccgacgtcgatcacgatcctgcgaagacctcctccgactcagccaagttggatcagatattggcgcagctctccaccatcaactcacgcctcgacctgcatggacagcgggtcacgcttttggagaagcgcccaatcgacgagcagctgtcggaatcttcagaaaccggcccacgtactgcagcgcctgtcggggtcatgcatagcacaggatctgctcatcgtgaccgcgtcgacgatggtggctatcgaagacccaatgtctcttttccccactacgatggtgagtctgaccccctgtcgtggatcaataaatgtgagacttacttcaggggtatgaggactccacccgatgagaaggtgtggcaggcatcactccatttggacggtgtggcagcagaatggttctacgctctagagcgggacacgagcggcgtcctcacttggtcccgcttcgttgagttcacccatatgcggtttggaccacctctacggaccaacggtatggctgatctcaa

SEQ ID NO: 182967 - DNA, 500 bp, Zea Mays
acgcagaacggcaaggaggctgctgcgtcaggtgatttcgtgctcgtttcagatggtgctgtgctgaaggatgatgacaagcagggggaggaggttggcaatgacgctgcgtctgagcctttaatgatgcatgttgccggtgtcgatgacctgggcaccgtggatgttttggaggggatgcttgatcgtgaggttgctgaattgcttcctattcccagtgctacagaaggagatggtgctggtgctgaaattcacagcagtgagtccgatgcagaagctagtacaaccaatgttgatgctagtcctgattatgctgccacacgagatgtcacatctgatgtcgcgcgagttcatggtaaagttgatgacccagactccattgcagacgatggtcatgataaggtagatgaggaagctgatggtgaccatgaagcttctgatgaccttaaattcatgccgatctcttcaagtgaggatgctgtggaacttgcaaaagaatt

SEQ ID NO: 182968 - DNA, 443 bp, Zea Mays
ctgctttatagcaatgcctctgaatcctctgatcactgtcccttaacactcaaattcagggaggattgtaggggaaagcgcagatttcacttcgaggtttctggcctaaaattcctggatttttggatgtggtagctgcctcttggaaccaaccaatttaggcctcctgtcctatggagaggttgtcgctaaagcttaaaagtctggctaaaaatttgcagtcttgggggcataaggaagtgggtaatttaaggaaccagttggagcttgctcgggaagtgatgcataggctggaaacggcttaggacagcagagttttgtcgggagaagagctttggttgttaagaaaagtgcagcagcactgcctagttcttgcttctctagaaagaactattgcacgtttgagatccagaatccaatacttgaaagaacgagatgctaat

SEQ ID NO: 182969 - DNA, 505 bp, Zea Mays
gttttttattatatgtggcagtagctaaggaggcgatagttaccatctcatagattttgtattttttatggtatatgatagtggcgatgtatctagttactgtatgtagttataaccctggtggtcacgtcacatagatgtggctttagagtttagactttgaaagttttctggtggaaacaattgtagatgaaataactttgaagcgaataacatgttaaccatctcttgaattaggtttacataatccagtgtgcagtatacttgttgcatgtctgggagatgttacactgggatgctatgcttgctagatgtgtgcatttggtttttggttttgttgtgcagtattgaattttgattttttgctattggaatggttgctacattttgtaaatgtggttcctattttggtagctagtatcttaattgttcagcccccatttgcaaaggttccttggcaatattgtttaaatatagttaggaagctaactgcatttgcagtgaa

SEQ ID NO: 182970 - DNA, 471 bp, Zea Mays
cttcccctcaacgcatctactattcacctgtgtactgttcacccgaagcactgttcaccggcggtactgttcgtcagcgaacagtaccgtgccctgccagcagccctaaagtctgggacgacggtgcccaagcgctggggtcctggtcctagacttcaaacatacaactcgtactaccatcgtaaccctaatcctaccaatctggtatcggatatgtcaggccttccgtccaccaccatccagccaccgacctccttcgccacgctcccgatctccacaacttcggtgcccagacccgccacatcctcatccacggcacctccacttcccctcatgctcgagtccttggtagcagtcgtccatgagctcacgcgatccgtggcaaccatgcaggcaacattagcaaccgcccttcttcccccgtagcagtagccactgcgcggacatcttatggcatgtcgcataccagtg

SEQ ID NO: 182971 - DNA, 1497 bp, Zea Mays
ttgaaacttcgatttatgctttcgaaatggctgtacaacaatggcactctgcagaagtttattttaagctttgtgttctcattgcttaattttaaactgacatttatccttgtgaaaggttatttttaaaattgtagaggatcatccaagggatgttaacgcccaaatggaaaattttagcattgtctatggtgacgagtctgtgcctcgcttgtatgagaactctcgaatatcttcggatcaacttcctggccaatcaggtatagtagcaacatggtgatttactgttatttcctctgctcggaaccttacaaacagctgttttctcttcatgtctcaatcgctgtacaggtattgtgaagcgggctgtggcgcttggacgttaccttcagaacccgttggcaatgattgcaacactgtgtggacctgggaaagagatactttcttggaaactgcatgctctggaacagtttctaactcctgatgagaagtatgaaattgttgagcaagtaatggttgatgcaacaaatcagataggttttgatgtcaatcttgctgctagccatgagtggcatttttctactctacaatttattgctggtttgggtccgcgtaaagcttcagctttgcagaaagatctggtaagagagggatccatttttagtcgcaaagagcttgtaaaacctctaggcaggaaagtattcatgaatgcttctggatttttacgtgttcggcggagtggtgcagctgcagccagcgctcaactcattgatctgcttgaggatacaaggatccatcctgaatcatatgtattggcaaaaaatttagctaaggatgtctatgttgaggatgcacaacatgaaataaatgaaatggacgatgaggagcaagagatggctattgagcatgttagagaaaggccaagcatgcttcgaagtcttaaaattgtggaatatataaagagcattacagaagaataccgtaaactggaaactctgcgtgatataaagtttgagctgctgtgcggtttttctgactggaggattccctataccgagccaagcccagacgaggaattctggttgctttctggtgaaactgatgataccatatctgagggaaggattgttcaagttactgttcgcaatatacaagataacaaaataatttgcacctttgattcgggtttgaaagccatagttatggcagacaactattctgatgagggttttgatccagaatcatcacagttacgtgaaggcgatgtattaactggcaaaattcgaaacgtgaataaaaatagattcatggtttacctaacatgcaaggctagcgagatgaggagaaggccattctctagaggtgagcaggatccttactatcatgaacaagacatgacctcacaaactgtagaagataaggctcggaaacaaaaggaacttgcaaagaagcatttcaagccccgaatgattgttcatccccactttcagaacctga

SEQ ID NO: 182972 - DNA, 440 bp, Zea Mays
caaaaggtgggataccattggctaatggagatgtgcaactaccaaaaccacctccatgggcctatcctttgtggagcagacacgaaacacaaaactatgaaacagacagaatgctgaagtctacttctcaggttattgaccaagcaatggctcaactctgggagactaaagtaaaatttgtaaatgttagtttctctattgagaaacttggtcgctcaaggagcattgtactttctgaaacgggtcgtaggctgcgacatgatgctacggattctcatgatccacctggagattcgcaaacagttgctgatcagcctattgaatgggtgaaggttacgttgtctgcagttccaggagttaacatggaagatgtagatgataatgaaccaacacgaaagaaggaccatcgccgtgttcctagtacaattgccattgaggaa

SEQ ID NO: 182973 - DNA, 315 bp, Zea Mays
tcgctgaatattgtcatcgctataagaagcttgtcgaggaccttcgcgaccttggcgagcctgtctctaacaggaccctcgtcctcaacattgtccaaggcctcaatgagcgcttcctcacgcttggtctgcatattcatcgcacataccctctagcctctgtggcttcctacttctacactccatgtgtccacttcgtccttgtggcaccagcgtcttgggcacccccgatcacatcgccttatctcacctagcacagtcttgtgttatttcctgtactaaaagtgctaccactcctttgtgccatgcttgtca

SEQ ID NO: 182974 - DNA, 554 bp, Zea Mays
cgcaggttctgaggttggagcctgcgcacgcaaccgctactaacaatactatttttgtggcggcttcgacagtggctgctgatgatgattcgtttggctctgtgtctaagtgttttgagtctgatgattctgggagttcgattgcgtggacggaggagtcttcggatgaggacttggattattttgcagcgttagatgtggctgcagcggagccttcgccgcgcgtagagggttccgaggggctcccgggtgcgagtactgggtataggcagcgaagggcgttggtgaaacggagagtgagtgaattgtcgcgaagtggtgggcatcatcgtagtgagatggagagtggtcgtcttcacgtggatgggactggtaaacgagaattgttgtcctcgccgattggggcgagtgtaggtgaacgggagctgcgaaatctttttgagggtgaggaattgaggataatgctattcaactacagggagatgggtatcatcccgaaggttgagccaatgtaatatatgatgccctcgctgtgtgtatgtaaccgtaatttg

SEQ ID NO: 182975 - DNA, 635 bp, Zea Mays
ctcttacatgtttaaactcaattataagactttcaactttgttcaataaatcaatgttttgtttcgcagctttattttgcaatgactagaaggacagcagcataattaatacatcaggattttaattaaacagcaccaaataaaaattgcattgttcattaacaaacatctatcatccagcgtctaaagttgaaccggagaatgagcatatgtaagaaattaacatgcccagttcacatgaggtcacgcagaggatcacgtgagtcgtgagatgttatttgtctttttttctccttccaaaaaatggtatttatgcattcttccgagtttgaatcgacacatccacgaggatggtaacagaagatacgcaggcaacggtataatgttctaactgaagcacaacatctagggacgagttgaactgggcatgttaatttctgtcgtatactcattctctatttcaactctatacgttaaatgatagatgacagataatgaaaaatgcaatccttatttggtattgtttaattagaatattataatgtcttaattatgttattgtccttttagtcttttcaaaatgaagctgtgaaacgaaacgtcgatttattaaaaaagttgaaagtcttaaaatt

SEQ ID NO: 182976 - DNA, 330 bp, Zea Mays
cttgatagtaacctcatccaaaactcgataatcgatgcacatcctcttcgtgccatccttcttctccacaaataacactggggttgcccaaggcaaggtactcggtctgatgtagcctttctctaacaactcatcaatctgcttcttgagttccaccaactctggtccggacactcgataggctctcttggaaataggggcggtgcctagaataagctctatggcaaattcaaccttcctttcaggtggcatacctggtaactcctcaggaaacacatctgggaaatctgatactaaactgatagcctctgatggtttaatctcctcaat

SEQ ID NO: 182977 - DNA, 288 bp, Zea Mays
gccgccttcaatgccgatggagccatcctcgccccaactcaccgtcgacgctaccatggctatgtcgtactctcctccctcgcccacgcctccctctctctgtcaatcgcccgcgaaaccctaggatcttcttgcctcgcgtgcagctgcgctagacctcctccctcgctcatcccccgcgcgcagccgccatgccatcgaccccggcttccgcagtccgcaacgccctcctatgcggcaggcattcacgtgggggacgagtcctctgcgccgaagcatgcctccgtc

SEQ ID NO: 182978 - DNA, 502 bp, Zea Mays
cctgtgcatccgtttcaacgccaactcctccaccagtcagttcaatttctacagcctatggtcatgtagtgtttttgtatccttactgtttgatgctctgtttagggtttagggtaatgctcaatttagttaactcttagtcctttaaatctgttgcaggctaactcattcggagtaggtttagaaattgattgggattcaattcagctagaccctagatgggaggaggaagactacaagaagttgttaacgtggaagtggtgtatgatacactgggcctgacaaatgaggtgatgggtggaaccaattgtgatggttggcaaaacgattatggtgatgcaggggcagctatagaatgcaaggacattgacgatgacattgtaatgtttgatatgaaaaatccagttatgaggcttggtaacatatatatatagtagcatgaaggagtttaggctcgcaatgatccaatatgcaattaacaaggaatttgagctaggcattg

SEQ ID NO: 182979 - DNA, 404 bp, Zea Mays
ctggaatagctcatcattctcctattggtgaccaagacaccaagtatcaggaaatcaacaagttaatacacaataagctgcataaaataatcatatggaagtaattccaataaaaaatctagcattatttgttcagaaataacggcaaaaggaatacatcagcatcaccactccaaaactaaatctggcgcattgcttctcccttcctgttagtttctgcagctcattctcaagtttttgtgcaagcatttgtacctcttgtgcaaggtttccatttctctctcgttctgtagttgtagaacagagctagaacttgtagagtcagtctggagcagtagcaaccatgaggaagaagtgatagcgacagtgagccatggccatcgactttcgaggcctggccgaac

SEQ ID NO: 182980 - DNA, 361 bp, Zea Mays
gaaaatgaggcagcactttcattgatgagggataattatgagaaacggttactggagcagcaagcagcacaaaagaagcaatctatgaagttccaggagcaggaagtttctctttcaggtcagttggcttcagcaacaaagactttgacatcactgagtgaagaattcagaaaggagaagaaattagctgaggaacttagggatgaaatacagagattagagagtagtatcacacaagctggcattgataatgatgtgcttgaaactaaattggaagaaaagcttggtgagattaattttttgcaggaaaaggtaagtttactcaaccaagaaattgatgataaggagaagcacatcaggg

SEQ ID NO: 182981 - DNA, 837 bp, Zea Mays
aatctttgacttagtcagccccctccttttttggaataagggtaacaagagctgaatttaacttgctaaagtggccaaatttcctgtcccaaatagctgcaagcacctgcatcacactttccttaatagtaggccagcaagccttgtaaaatcttcctatgaacccatcaggtccaggagctttgtcagacgatagctctttaatggcttcaaagacttctttttctgtaattggcaagtccaaatcctccaggttatgagagggcagccccaagtagttaagatcaatagtgacagttctatccattcttgttcccagcaggcttctatagaaatcatccaccagcatggctttgtcagcatgatcagtaaacacattatctccagaaaccagctttgccacaaagttcttttttctatatctagcgtgcatatggaatagcttggtgttaacatctccctctctgagccaactgattcttgatctagatcgtgcaatggtgcgcttaaaggaggcaagggctaaggagtgctttttcagtccacatctcagccaatcctccaaaggggacaaaagtcttaaatcttgggctatttcaagcctgtgaagaatctctcttgctaaagctaactgtgaggccacatgcccaatcttttttccactccatttctgcaaagatctagcagtgacttttaatctcctgtcaaagtttagaactaggcagactccatcatcgatagacaaccatgcttcactgacagcttcctggaatccatccaactttggccaaaagggttcaaaatggaaccacctcttgccaaagcagttgctctgca

SEQ ID NO: 182982 - DNA, 351 bp, Zea Mays
atggcccacttccccaacactaccttcggatccatgaatagcacttctttcttctgaaactcaagtctacagtttggatatcaacactgcagctagcagaaaagggggagggacataacaattgcatttgtacaagcaccaactgatttttcttggagcaatcagataacacagcataaccaaattaagaaaatagagttatagatcaaccccaatctaccaagagtcagatgtgaactagaaaaaggactccattaagcaaatgtaatttgctacctccagcccaaaaaggatagaattgtgtttggagtgaatcaaagttccttaagtttgactaagtttatagaaaat

SEQ ID NO: 182983 - DNA, 289 bp, Zea Mays
gttctgactcgattccttgtgtttaatgttaggtaccctaatgacagttttgatcgctattggcagccatttccagacgacaagcatgctgtcagtagcacccaaaatgttacatcagccgacttctggaatcttccccctcctgatgtgtttaacacagctttcatagcagaacaagatgcaccgcttgtgttacaatggcctccagtgcctctccaaaatgatagctattatgtcgccctctactttgctgatacattgcctgataattcaaggacctttgacgtgt

SEQ ID NO: 182984 - DNA, 1388 bp, Zea Mays
caaaaagctcctaaaaaagaagttcaaaatcaattcgggcatatctggaaatatggaaagacaacactgtgggcaggacatctctcttgaagtgtgtggccctacaatagttgagatttggccaaattccagcagttcagtcaacactaaagattttttccttaccccatggaatgtccttaggtgctatcttgagagcactttacaggtattgtgatagtgtagcataatacaaacaaagatatagaagtatgatactgcaaccaattgaatgggggctggagttgcattttgcattattaccacagtccacagccacaggcagtagtgatttccttatgcatgaattctgactacattatgttggcaggttgctatgatgcacgaattgattggcaatggtgctgaagctgaagttctcttacagacaggaaaagagatatcaaatttccatggtttatcagttttctgtattgtatttacatcatttctaggtatatataattctaattcaatggtttatcagtttttttgcattgtttttcatcattactaggtatacataattcttcaattgtgtttttgttcacctgtcatttctgtctcacattccttggtttttgttcaggtcaactatattgtaagcggcagctatgggatgaagcggagagtgagcttaattatgcccgagatcttgtgaaaaatgatgcaacaatttcatgtaagctctgcagtctgactttggggatatctgttgacatgcaagttggtgatctgtcttggagtctgtttgaaaaaaaaattcataaacagattacagctggtttgtctaacactttaggcatgtaccaatctgcaatagacaaattgaatagcactaacttggaatattgtaacgggtcctttgatagacatacaactggttatcttgtgtgcagcaaagactgtataccgagcaagtatgaagcttgtaatttgggggcagaacccctaacttcaaatgatggattgttatctccatgtagtgtttgcatggtaatacaagttcgaaggaaaaactcagggaatgctgaagctggtccacctttagatgcaaaagcaaggaggtcatcaagaaattcatcacgtttagctaagggacagaatgtagagactcttgcaaagactagaactcgctctagtaaacgaaatgcatgtatgaaaagtgagaaggttttaactgagctaaatagtaaaaataacgtaactgggagtaaggaattggctgcagatgcttctgtttgtggtgaagcagagtgttttcctgatggcattgatcacagcaaagacgacctatgcaatatgtttggttgctggagctgccttttcattaaatccctcaattcggg

SEQ ID NO: 182985 - DNA, 976 bp, Zea Mays
ttcagcacagcaggttactattggctgctcgtccacttaagcaggttgaggtatccatttggttcgacacagtgaagaactgaagatacgcattgtgcttgcttgtcttgcggggctcacaaacatcctgctggtgtgctgtgctgggaaggtcacataatccacttggctatatgccggggtgggaatgtgaatcggggcttcattagtgcaggcagcaggcttgttaacttggtaattagtcaatgaaacccatactctttaatgacttcttttggccactgttagcctgtgtttgatataatgtagctgttcatttgtgcttccttccaaaagttccatattttgttctttattggagcatcaattttagatggcaatgtatacctgaacatcttcaaactgtctacacaatatgtctgcattgtttttgtgcttatgccagtagaattaacaattaacaagtagtatctgttcattactttagttcatgttttgtgccccatgaaattggtaatggaattgcaaattggagttagacatcatgctttgaaatgcacaaactgccacaataaagccgtgacatccagctgagtgaaactgtcttttcatgcatatactctcagtaatcatcactaaatttatctggaggagtttattgttctattgtaagctgccaatttctttgtttcttctgtcaatcaatgaatattgcacgcttgtcttttttccacatttaggttgatatttcagaacctttttctgtgatttattttattatacagttgagggtttgattcactagtctcttgcacagttttgcaacaagcatgggggcaaaagttgaaggggaaagctatatgcctggatattatgccacaggggatctcaacgtggaagcaagtggtaggtggtctccatactatgaggagatgacatcaaatggccagttatgcaatggcttcgcaacaaaacc

SEQ ID NO: 182986 - DNA, 286 bp, Zea Mays
tgacaataaaagatgtaacgaggaattgcagtttgccatcaactcatgtatactctggcagattgactgacaagataccactgggaaagattgaacgttctgttcaggtgcttccttgttccatcatgtaaacttaaaatttatgcttatcattattttgtttgacattttgtgatgccattttaggctgtagaagcagctttaaaaaagctggaaaatggaggtagtgtcaatgatgctaaagcagtatgtgaacctgaagttttaaggcagcttgcaaggtggc

SEQ ID NO: 182987 - DNA, 300 bp, Zea Mays
caactttttaactttccgtgaggcagtcattgagtttttgaagatggatgatgtcgacacactgcttcaaaatgatctaaatagaggaacagctgacatttcagcacatcatagtactaccgcagtcttaaccggtcccattggtggattctcagggaaactcaatttaagcatcccatggaataagggttgcttgagctttgagaaaattgatgcagatgtatcagttgattcattagaattacgtttacaattcagcagcatccggtggatcatgaatgtatgggattctctccaaag

SEQ ID NO: 182988 - DNA, 494 bp, Zea Mays
tagcgggcagacgtcggcgtgtgctgtccatgccaagaggcagatacaggtagcggacgggcgtttgcgtgtgcaaaggagcagacgttgcggattggacgacgtcgacaacgaagcagaagagcagtggacggcgccagcagcgtggatcggtcgtgcacgacgtgggcgacgcagggtcaggcaagcagcctcctcttgcgcggatggtccgacggaacacaacctcccttgcgccacggacccagctctagcagcctgagttggctgacacaactctccttgcaccggcaactgccttggagtggcggcggcttgggctctggactggcggttgggcggtaggatggggcataggggatgagcgaacaacaaagcagcctgagccgacggcctggagtgccggcggtcgggcgggaggatatggtacgggggaggagcacgagcacctgagcgagagtgagggcagggctgaatgcctgaatagaaactgg

SEQ ID NO: 182989 - DNA, 503 bp, Zea Mays
ttttagccaccattgtaaactgcctgctgcttggttttgctacttgcaaatagcattcttatgaactggctgtttccacccgttcacttaatatgtgcattatttctagcttttaatgttgataggatatgataggtgacacattgatgttgtgcggtgacagattagagacgtgaaagaaatagaatgagcagggtacttaggtacttgcctacctgttccattgcgcgtagaatgagaaatagttcctatagtgttagcgtccacataaccaccattctgaaggaaacagacacatcaactgattgctgctatttttaggctgccatttgcattcaattttagtcaacattatgaactggcagcaaaacaaagctgctattgtcaggttgctattttgaagcaattttagccaccattgtaaactgcctgctgcttggttttgctacttgcaaatagcattcttatgaaccggctatttccacccgttcactcaatatgtg

SEQ ID NO: 182990 - DNA, 337 bp, Zea Mays
ggacggttggcaatattaagagaggaatgaccaatatgcgtaattcacaaacctgatccattgccgacatggacttgttcattgctgtggtagcattcacggacgttaagacggtctagatcgctggtgatgtggtcggtggcgtcggtgttggtgtactagttggtatcaaccttcgaggatgtggtggcgatgtgtgtggaaggaggttcctcgaagtaggtgtcgtccatgtggtaccagcagcgtatggccatgtgatcttccttgccgcaaatctggcagatggggcgcgaagtagagctagacggacgacggtcgttgggacgtgaaagag

SEQ ID NO: 182991 - DNA, 1243 bp, Zea Mays
ccgaggtctcatcattcgcgccaaaatcagttaactggaagttcctctcccaccactggaaactccttgacaatgttggcaaagacgaaagaggtaaagcttgttctcaggtggaaccaaactctgcgctctgggcagttaatcgtgtatcactcttgcaaaccatttcaaatgtctccatggagctgccagtggaacctgctgcagaattggcacacagcttgctcacaaggatcgaggattttgatatgaaccttagtgaggtaatcagtttgttgatccaaaacattgagtagtacactaatttgtttttgctacagttaaattctgagttagcttggcatcatgttttaatctgccaatttaaaacaaaattaattctaatacactttatacagtgtgccctaatcctattgcccaatctgccgaaacctggcaatatgtactgttctgaagttatttttttggataaattataatttaccataccaagtaaatctatgccagcatttcaaaactataaaatgaaaactttaggttcactgtacttgcctgtattataacaatcagcaatattttctggaagggaggtccagtagcttagggcatgtttccagcttgctaatatttagcaactaagaattaagaagagtggatccaaacaggcaaaccctaaaaggtgtgatagctactaactagtaaaagctagtaaggctttggttgctagcaagtgctaagaagtagcatgttaaaattagcacatccaaacaaggccagctgaaacctcactgtaatcacaatatattgttttaaggcctgcttgttacctgtttggaatttaattacaagaatataaaaatatcagaaacttttctgtttagatcattggcttcttcccctccccataggccatagttctgcaataatgttcatcatgcattcatcttatgttgtttttcctttatatagtcttctgtgtgttgttggtttagctatctacaatttttccaaaattgctcttaacagaagtaattcatgtccatatcttgagcataattttcatgcatgcatgaacaggttgatgcacatgtaaaatcactgaaaactttgtgtaaaaggaaagcaaaaacagctaaggaaggtgatgcactgatcctgaagtgggcgcagcaacttatccgtagtgcttttgacatccttgaccagtacataaaagaggcatcagaatcagccaggggtcaca

SEQ ID NO: 182992 - DNA, 1176 bp, Zea Mays
aacaaagatgttgcaactatcgaatctccaccgccatcaatttccattctggagttccacataaggagcatctttacagacattctcaaagcaccgaacacctagaaaaaatcaagttaaatgtacttgtaaagcagatacaatgtagatgaataattgaatatcacaagaaaccaacagggaaaataccttgattgttgagtcactcataagaagctcctcagccatcagttcaaactccgagtatggataacgagtgagaccaaaagttagaatagcaccagaaagaaggctaagttgcccttcgacctgaaaattataaataagaagtcccatacttcaaattttagaaagaaaacatgatcaaccctaatataagaagcaactccacaataggcttatttctcattatagaaaagcaccatgcatgacttatgcaacttatatgtgacattgatttatggagatgtaaagagcttcagttacaacagagtacaaaaaataaatagaacatcaagactccagtatgtgcagccatatagtcatcagatttgaaatgtaaaatagttgaggtttcttttttgttcgacattatatgagaacatcacatctacactttcgtactttgcattgtgaacaccacatgcacttccgtaattcaccattgagacattgccacattgattcgtacagcctatgtttacaaccaaaatgcatatatgtattcataaaggatatataatttgacgatagactgaagagcaggaaagcataagactatagacctcaacaagaaaatgtcagaaaaccaattaaatgttacaaaagacatcatggttggtacttggtagagtgttaatcaagatagcattacaaagccacatacctgaacgcgactccagagcaaggggacagcaactttggcacgatttcttacaaaaacatttgtccacagtggttgatttggaaactccaaaagaagagtgtctgtttgtgtactcagattgttgttactgacaataagactttttggtactgcttcataaagagttccagcagctcctgcattatctggacagcctgaactccttccccctgaaaaaaatgacagacattaatttcaaacaaaataaaacaataaggtcatctcatcttaacaataactttagacgtgtg

SEQ ID NO: 182993 - DNA, 389 bp, Zea Mays
agaacttgttgtaagtgattaatgtggtctgtccaggttttgctatagatcagtatatcgtcaaaaaagaccagcacacatttcctgagaagaggagcaagagttgagttcattgcactctgaaaagttgctggtgctcctgaaagaccaaaaggcatcaccctaaactcaaaatggccgtgatgagtttgaaatgcagtcttgtgttgatcttttggactcatgcgaatttggtgaaaacctgcccttaaatcaagggtagagaaccacgcagccccatgtaactcatcaaggaattcatcaataacagggactggatatttggttttgagagtcaaagcatttaaatgtctgtagtcaacacaaaagcgatatgtatgatctttctt

SEQ ID NO: 182994 - DNA, 527 bp, Zea Mays
aaaaaaaaaaaaaaagagtgggcgaccgccgccgccgcccaacgccaggtgcccgggccgctttcgccagcaacgagcacccaccaggtacgcccgccgttttttctccccttactactgtgcgaaaccgagcatccaaattccaaaccctaacggctagttgtaatcggatctgatctatctacaagcatcttctgccgactaacttcgattttgcaaagattattgcgcctgctgggtacgagatggggatagaggattaccatgtcatcgacctcgtcggggagggctccttcggcaaggtttacaagggcaggcgcaagtacactcggcaggtcagcgtctccccatcttctgtcctgggcccgctggatttgggcccatctgatgattagatgaactccctttgtgtggtttcgacttcatagagtttgttttctcctgttttgcttctgtttcagacggtcgccatgaagttcattcttaagcacgggaagaccgataaggatatccacaaccttaggcag

SEQ ID NO: 182995 - DNA, 411 bp, Zea Mays
cggcagcgacagcgatgacggggaggagtcctcggaggaggtgaccgcctacctggaacttgtagcttttctctcaccaggaattctttgccctccctccatctcctaaattggatgcgaggcctggtacttgcagctcgagacggtgcaagcggacttcgccttcttcgaccccaagccgagcgacttccatggcgccaggctgctgctcaagacgtacctcgactctaagccctgggacctcaccggcttcgctgatctcatcctcgcgcagaccactgtaggcacggttgtcaagttggccgatgacgaggaggaggaaggggaagggaacggtgttcagaaggccaattctagtactaacaatgacgacgatgatctgtttggtctcattagcgtgctcaatttggg

SEQ ID NO: 182996 - DNA, 300 bp, Zea Mays
cgactgcgccgccgtaaatcacctgctcgcggccagaggattccaggtccgtcctcgcccacgttgttcgtgtttcagcacccacatatgcttgtgatcgttacctgcccagaccttggagcttgacttcacctaattaaccggaacaccttgatctgagttctgtatccgcggtcaccgtggtcaggcacatcctggcccaaattagtccgattagagcatgttctagggtaaccttgggtcggttatgccttccccgtagctagacatggcgaccatcgccggtcatggccagcccgt

SEQ ID NO: 182997 - DNA, 707 bp, Zea Mays
ggaaattaaaagcgagcccctttgcgcccgggagggaacatggaaggttcttgtcttcttgccagctacaccgtgtaaagcatctcgaggcgggagggagcctcaggtgtggtgtggtgtagtgtggtgcggtcagtgggtgtggccaagagatggatgcagataaacagttcctggtggttggagggctgctgctgctaccgccaccacctttaatggacgcaggctcgacgggccgggcaaggtagtatatggcaacgagagggaggaaggaagcatgcaacgcaaaatgagcactctgattgagcagagcaggagctgtgagcagtcgtatcacgtctcgaggacacggttagttagagcatagctgtcaaatcttcaaccttttgtcatattattatagtatctctatgcaactgctataattttctaatattcagtattgatataatagtatttaaaaaatgatggtacattttgtacagatttaggataccccttcaccaatgtacagagcacaacacttttgtaaccgcacaaggagtgtactgctgttcaaaagaacattttcagcagttctccgttcctacaccaaatatatataaaaaactatatccatgaggatggtgaggctatggaaggtggtagactggctactaccctaggcaggctgcaataatgcgatagtttgtttggttgtctaaaat

SEQ ID NO: 182998 - DNA, 343 bp, Zea Mays
acgacaagtatggggacctagaggtcgacatagacctcatcatggtgtaccactcaatggagcaaggcgtcgggcctgtcgacgccgacaccactacgggctcattagagcccctgatgactctagcctctacaacaagcaccgatgcttccaaggtgggcacatcaatgatgtcgctcacgtcttcgacccctcctcccacgattccatcaacgacaccgactcctcctgcatctcgagtacaggcatcaacttcactgccctagccggagttcgtctcatcgcctccaaacgagaggaatactaggatgccactgacgacgacgttgtgacgaggtaacac

SEQ ID NO: 182999 - DNA, 513 bp, Zea Mays
gtgctggtagccttatcttgtctttctgtttagggggaatacccttccaaatggtgacatctatgttggcaactttgctggtttagttcctcatggatttggaaagtatatgtggacagatggaactctttattatggcgagtgggatacaagcaagatgagtggtagaggagcaattcagtggccttcaggtgcttcatatgatggagatctttgtggaggtttcattgacggaacaggcagtttcaaaggagttgatggatctgtatataaaggttcttggaggatgaatagaaagcatggaatgggcacaatggtttacgccaacgatgatacttacgaaggtttatggaatgagggcttgccagatggatttggtaaatatacatgggttgatggcaacatctacattggactttggaaatctggtaaaatgaatggcagaggagtgatgcaatggacaaatggcgatactcttgactgtaattggcttaatggactggctcatggaaa

SEQ ID NO: 183000 - DNA, 311 bp, Zea Mays
gtggtttgtttacaggaaactaaaatgcaggatatttctcgttttttggttattctgatgcttggaccagattttgccaactttgtctttcgcccatctattggtgctagtggtggcattttggttgcttggaaagatcatataaattggtctggtgtttctagagtggatgatcattcagtgtcaattctttttcatcctgttgatgatgttgagtggtggctgacttgtgtgtatggtccccagtccaaccatgacaaaattgccttccttcaagaattgagagatattcgtgcttcctgttctggccc

SEQ ID NO: 183001 - DNA, 1279 bp, Zea Mays
tcagagatctcgcccttccgcgtggtcccaagctctacagatggtggatagccagagattttgcccttccatcccgcccttcccaccatccttgccccaagccagagattcgcggccatccgcgataatcaatcagcacaaatcgacggccctggttttctgttccttcaatcaccttcctaagtcgacgccaacctaccatcgacggcgaggatggaggtccttaaatatgtccaaagcgaggctgccacaccaatccccatcctccactaacgaaccaatatcttacaggtactctgcatgtgtgtgaagccgtctccgcctccaccaccctcggtatggacaatcgattcctcttcatctccctctcgttgcgtcgtctcctgttgcgatgtggatcgtcgatgcgaatggaatgcggtgtgtggtgtaattctggtggtttttgtgacctacgagtcatctccttaattccaatctggtatttattagtatgggtgaattgtcatggatttgtgatactccactgttctggggaatgcatatgtttttcagattgttaatataactctgcttcctgtgagaatacaggatatgtttttcatgtcatggcccatgggctctgaaaacttatgttagactttgccccggtttctaattgcaggcagtgagtggtatgagtggttgctttcaaattgcctgatgcacaatccctgcatgaggggcctccttttgtcagtgcaaacagttttctgttttatcaatattttccatttttaactgccacgtactgttgtttacatatagagtcaatatgtttagttgtatgtgtcctgtattgagccaattagcatttcttgatttatttattgtggcagcatgtggatgagccaactgctttctactgtttaagacatgtctgtacctatcactctgcatgtgtttccatgcatttcagttgggatttggtccagccaatgtgctatcttcgaacattctacatacccattcttgtggtagccacattaataaattgataatttgtgcgttttgaggtatctgatcttttatcacaacagagcaatgcttcacacacaactttggtgctgatcaaaatgcatattcaccacaatctacagactctgatattgttcttgatgattaagtagtttgggaatctgcaacattttccaaaccatcattgttggagctgatatttttccttttcatttctcgtagcctggcttagaaaacggaaaattgtaattattgactgctt

SEQ ID NO: 183002 - DNA, 393 bp, Zea Mays
ttgagttctgatgaagacttgctttctaaatctactgtatggcaaatcaatataaaggctatttaatatcttctttattttgattgggacctggctcatctctaatttttggtttattgtttttttgggtatagattaaggatctgaaaggcctttctattgatcatttgattcctgggatgatggttaatgcacgtgtccattcatttcttgaaaatggactcatgttatcatttcttacttatttcagtggaacagtaagctatttttcacagactagacttatttttttggctttacaggagtgcctgtatttcatttcagtgtgttccttctattgtcaggttgatatttttaatttgttgaattccttcccctctggtaattggaaag

SEQ ID NO: 183003 - DNA, 760 bp, Zea Mays
aacattgattattaatggccaaccaaatgaagaacttgcagtttgcagggtcccaagttttccagatcctcctccaagctaggaatttgatggagccaatgaacatcatattgtatgcagattttctgctatactgacctgaagatgaaaacttccaagaaaaatgatctgggacattaggatgtagaactataccctcaacaagctcccaaactttgaggaattctatgaaaacctgaactgttagagcgcccttgacatcaaccacccagcctctgttggataatgcctggctcactgtacgcttcttaattactctctttgggattgctaggatcagatttggagcaaggtcagccacactctttccttgcaaccaattgtctgtccagaatttggaagaaataacattcccaatatttacagttacggccatttggaagaatgcttgggcttgcttaggattattaacaagaagaccaaaccatagttttgagggatcagttttcataaaccataaccagcggatacacaatgcccaactcatcctttccagataatgtactccaagactgccaaacatgtaaggtctttgcaccttggcccatgagactaaacaatttcctcccttggcctgttcttgccctttccaaaggaatccccttctccttttatgaacagccttaaagaaccatttgggcagattcaagacgagcatttggtgaatgggtgttgctgacattacagatttgacaacaac

SEQ ID NO: 183004 - DNA, 499 bp, Zea Mays
gtgcactgcagtcggtcttagagtgcctcatttctatactatgaaagccgattcaaaacgacgataaaggcgctatccatgccggttcaaattcttgaagccgctcgatcgtgaaccaatggcctatgttcatcatggtctcggtaatgtgtgaaatacgactcttgctcccttcgcctctagagacttctagcagacactggccacctcttctcgctccttccggctcacccctcttccttggtggcgaagtccctgtgcgtggacgtggcgacgaaagtgctgagggcatcagcgtcggagccggtagccgtcaccggatccggtgtcgctgtggatctagggttccgcaggtgggtcggtggcggtggagaagaccgcaacatgcgctttcctggaggacaccttcggccggatcttgaatgtcagcgaagatgaagaaggcttagacgatgtagcttgtctatggacgtatcactctcgaagctcgacggatttg

SEQ ID NO: 183005 - DNA, 544 bp, Zea Mays
caggttgaatctgctattgcagcaaagattatgagcaatgtaaaaccatctgaggtgaggggtgctgccttgaattttatctgagtgtatcaatagtgagcacagatgaaacctatgcacgtcatgtctctttttgtttctttttctttcttgatccttgtcaagaattccccaagtcttacatatactgtttcaatgctccagaaatttgcgagaaccttagcattgttaccttctgtccgagtgtccgaggacagttggtcactgatgattcggaggatactgattgtggtaaacaatcttttgaatgatgctttcattgggcttgaagaaggtatactatagcagtttgctcctaatattgtttcagttctaccatttcaggttaatttttacccattctactgttacagaaaagaaaggccatgatattatgctgctgctagttccacctggaactgatcctctaccaacattgggagatgaagtaatgcctggaggcaatgtgcatatcatgaagaaatttcgtgtctttactgttcct

SEQ ID NO: 183006 - DNA, 372 bp, Zea Mays
tgctactggaggacatccaaaactaccaccagcagagcgccagcgctgccaccgccactgccactccagcgccgaccttggcgctcccagcgtgcgtgtcgaatgccttctcgatccttgaagctgtcgccaacctcaactcctcgtcgcccgacaacaagagcttcgagctggagaggtcggtcaacgacaaggaatccttcgtcaacgggaggtacggcggcaatggtgcgagcaccaccctcgtggtggagtcggaggtcggcgtgaaggacgacctcatggagccgagcatgcacaagtacgtctccgtgcgtgacatccgtggggagaggagggagaccgagccgcaggagtctgcggggagcaaca

SEQ ID NO: 183007 - DNA, 658 bp, Zea Mays
ctctttatctcttcttatcttctaaacaaacaacccagctaggacttatcctttgtggcgcctggcatactgccggcccacaaaggtgtctacaacatttcccccctcgccgacgaagagctcgtcctcgagtgtcatggccggatatctaagcttgaagtcttccagttgctcccaagaagtatccatctctgctcggcctatccacttgatcagaacttcccacaccccccgattcagccttgcacggaggactttttctggtgtagggatgactctgccgttgaggagctcagacaacggtataacttgggttggagcctcccctatgaatttcttgagtagagaaacgtggaacacatcatgtattctggccctgggaggaagctgcaacttgtaggagacagtgcccaccctcgatagcacttgatatggcccaaagaactttgggccaagtttgttgggtgtagcagaagtgacactaactgctgtgcgctgctgtaagcgcagccatacccaatcaccctcatggaactccacttcccgtcgatgcctgtcctggtagcttttcattgtcacctgtgactgaatcaatcggtcaggaatatccgccaagaattcgtcgcgtgcctgtagttgtttgtcaacagcagccacc

SEQ ID NO: 183008 - DNA, 284 bp, Zea Mays
tgatgaaatgccaaagaggaatgttgtgtcgtggacagctatggtctctggctacgctcagaatgggcaggtgaaccttgcccggaagctgttcgaggtgatgcctgagcgaaatgaggtgtcgtggactgcaatgctatttgggtatatacaggctggccgcatagaggatgctgaggagctgtttaatgcaatgccagatcacccattggctgcctgcaatgggatgattgttgggtttgggcagcaggggatggtggatgctgccaagtcagtctttgaca

SEQ ID NO: 183009 - DNA, 562 bp, Zea Mays
tgatcctattccagttgaccgatgatggctcctgttctccggcaaggcaaccacaacatgagctcctcaagtgaaggtcccccgccccaagtttccctcttttctctcctgttttctggtctgctcttcatctgaatgagttaagtggtgctgagtgccgactgccgatggtctgtaactctgtatgagttaagtggtgccaaaaagtggttgttttgcccttcctttgatctgtacagagatccatggtagccgccgtggtgctgataacgttgaggtgatctttcctgagtctcatgtggttggtggagcccctgcatcctctgttgctgacagcaccgagcctgcgtcgacatcgttggccgctgcagattcttcggcacttgctgagaaggccattgcagcgctgtctcctgagcttcgtgcacaagcaactgatccgaagagcaggcaaggtcacaggaccctggatggaagtttgggaggtggccagacactgtcacactgcaaaggactttgttcagtgtattttctgtttgaagattcttccttctggaattaa

SEQ ID NO: 183010 - DNA, 443 bp, Zea Mays
atttatggtgtggtcgctatcgtgtactagagagaacgaggaccataacatcttggctggaaacttgatagcgcagaagacacagagcatccgagaaagaccaaaagtggagcaccatttgcatggagaaggtctgaagctatccacgaagttacttttgagtgggagcttgtcccttgtgtgggcattccctttcatggggctccaacaaggattaggggaaagcttgcatgctttttgatacctcggtaaaatactgatgcttcattggatgtgaaaggatcacgatgcccaagagagggtgaattgggcttgtctaaaattctaacaaaagattaaaccctaaacatgagcccaacttcacccaaactactagaaacaagtaaaagctatggaatagagaacaaccctaagtcattattgcaaatacgaactaagcaaat

SEQ ID NO: 183011 - DNA, 384 bp, Zea Mays
gtaatgttttctgttatctattctcatgtcctctttccagagttcccagattacatatataaaatgtgttcctgcgtacaagggctattacttggaccactgtgggcctgtcacgcgggaattgggcttgatcaaccttttgggcctcgtctcctgctcgactgtgctttgatttccttcggctcccatccatggctgtgtttggtgctcttggtggctgacatcttccccccctttagcaccagcttgtccccaagctggggctgatggaaagcgttgcttcaagggctccaagtcttcccaggtggcaagagacagcggcagtgatgaccatctgatcaatccttgggatattgcccggagaccgcgggtgacgacgcgtcg

SEQ ID NO: 183012 - DNA, 537 bp, Zea Mays
ctaaactacttgctctaaagtttgtggaaacatggattttgtgttgcacacctcaagccaacagtgaccaagtacagccaactgagggtaccattttccagtttaaagttaacaagtgaatgggcaatatttttttgaaagagaatgactttcacattgacaagtacaccttacatacaggaaaaaactggagatttgatacttcacgatcatctcaatttcatcctagccttgatcctgctattttggaagctgatgcacatcgagctctcctcctcctcctggatattctgcgaacagcttatgcccatcgagggtccttcctagttggcaccatcaactcgtaagaatttctaccaactttatcgtatatgttgagcagaagtgatttgttacactcactatcctgccatttcatcctctctttgaactagctttctctgtgtatgaagatgaacctgaatttatttaatgaatggcatcagttcctagctatctacatgtttatcttgacttataaatatgctaacattatgg

SEQ ID NO: 183013 - DNA, 423 bp, Zea Mays
ccattcggacaaagtgaattgcttggatttcgtcacacatgatggtcagcaatatttgattagtggatctcaagactgtactgccaaggtatcgatgttgtctgtgtgtatagacacattatagttccgcgcataacaattgctactgatccatgctatatttttgtcaaatgaggcatgggccttgaaggaaaaggaatgcgtccagacaatggatgttttcatgtcgccagttgtttctgtcatttcccttccggacactccatatataactacaggttcagcagatggcactattcatttgtggagttctgctaatttcaggtgactaaaaccatagtatgaaattctgtgagatactagcaaactattttaaatatacatcagtgcctattttatgtatatataacttatttctcattt

SEQ ID NO: 183014 - DNA, 296 bp, Zea Mays
ccgaaatttgacgcttttctgtttaattctagtgcctgtctgcatccattagggcatcctagctgctccatgctcgtgatctcgtccgtttgcttgattgaatccattgttttccaaagttcattgctactgcgaaatacgtttatatgattaccacaatttgtgtttttgccttttcgggttgcacagagggtactgccatcattgttgttttagcgccatttggaacaagtgattcactggtactagtacagtatgtgcttttcatgtgtgtttggtttgtaccatcagatgga

SEQ ID NO: 183015 - DNA, 1013 bp, Zea Mays
gtctcctacatccttgcgggactagatgaagaatacaaccctgtggtctctgcccttgttgcacagaaggattctgtctcagttggggaggcatactcgcaactcctcaattttgagagcaggatggctttgctgtatggaggatcccagccatcggctaatgttgctgcccgtcgtggtcgtggtagttctggcccgcgtggccggggtcgcaatggccggtttaatcctggtcgcagcagcaacagcaatgcgccaggaaggcgtggtggtccaggagggcacagatctgatggtaacacaataacctgtcaggtttgtgacagaactgggcattctgctcgcaagtgctggtaccgatatgatgaagacaactattccaactcaaattccaagagtgcagcagcagcaatgcacagctatggtgttgatacaaattggtataccgatacagctgcaacggatcatcttacgtctcagctggacaaactgaccactcatgagaagtacaaggggacagatcagattcacactgcaagtggtgcaggtatgaacatctgcaacgttggtcatgctgttattgatacccctactaaacccttgcatctcaataatatcttgcatgtcccaacagcacaaaaaaatcttgtttctgttcatcgtttctcatctgataatcatgcctcacttgaatactttccaaatcattttttgattaaggatctggacacgaggaaggttcttcttcaaggtagatgcagagatggtctttatccccttccatcagacagttcttggaggggggcttttggcgccatcaagtcatctccatctctatggcacaatcgtttgggtcatccatcattgcagatcattcgaaaattagctaataataatcagatcatatgttctagtgagtcaagtagtctgtctgtgacgcttgtcaacaaggcaagagtcaccaattaccttatccagtgtcaacaagtgtctctaccaagcctttacaactc

SEQ ID NO: 183016 - DNA, 348 bp, Zea Mays
gtcttccttgtcatcaaataaggcaaatttgaggcgatggaagtgaggaactcctgcagttgaaggatgggggtgacactgatatatggttggggaggtggtggataatatggaatgggtgaaggtgaatgtggcatgggtagatgatggattgggaactgggtgctgatggctggtggcatgatggaggtgtaggcagcgacaaatgatgaggagatgggtggtgggatgggcacatcggttggcatcgaggtggggggtatgcctccataccctggcaagccataggagcagcttgccggaagggacgatgtcgatgatgcaggcggagtctccactgctgcaatg

SEQ ID NO: 183017 - DNA, 445 bp, Zea Mays
gaacatgtgatggtgacagtagcaactttccatttaaaataggactacatcaggaatcaacaattcaacattggacacttatttatctgctttaatgatggatgagatcacaagggacatacaaggggatattccttgtgtatgctctttgctgatgatatggtgttagttgatgatgagagtaggtaaggggttaataggaagctagagttgtggaagcacacgttggagttgaaaggtttgacttagtaggaccaaaatcgagtacatgatggacgatttcagcgcgactagacatgaggatggagatgttaccttcgatgggcaattggtggccaaggagtctcggtaattaaggtcgatgggacaaaaggatggtggcgttggtgaagatgttagccgtagaatttcagcctgttggttgaaatgacgtcatgcttctggc

SEQ ID NO: 183018 - DNA, 292 bp, Zea Mays
agcagattttcaaaattccatactccaaggcacaagtatctattgctgtaaaccgtataggagatacactcattctaaacacagggtatgtagctggttgcataatcatcatcatgctgagtatagttaatacacatgaatgtttaatcgtgtattcgtgttgtaggcctgatgttgatgaaggtgaaaagatattcagaagacaaggtaaccagcctaaaggatctgatccatcaatatttctgaacttcgcaatgcactctgtgcgagcagaagcttgtgattgtccccc

SEQ ID NO: 183019 - DNA, 469 bp, Zea Mays
accctcatcatcgtcatcaactggatcgtgaaaatacaatccaagtaaaagacagggaattcagggctgagaaaatatataaccttaacaaagatttttaacaattaccattggaaatgaaccttgggatcgactggctttgctccaacccacttccttgttcgaccatgtttgcactcccatttgttgccacgattgcactttggcgtgtattcctatattgtactgatgaaaacacacgtttagtcggactacattttatcgtcgtcgtgcaagatccatttaaaactggttagtataattaccagtgttgttgatctctatagttgaaccgggctgtgtcgaatcatccatttttccgacgtcactgatagtatcctcagtcaaagtagccacgttacgtgcaatgtttgcttcaaatttcttgttttgacgggctaagatagcttgtctttcaccatgcaaaaca

SEQ ID NO: 183020 - DNA, 415 bp, Zea Mays
aggtgtgcataagatgattgaataacaaaggaatcactctgcataggcagtaaaccaggggtgggtgacatatttggtccagcttattagaaagaaatagtttcaatactctattgactgaagataggggaacatatatataggctacgataggcagtggggtcactgactagagcaccatcgcttgaggacaccttcgcctgagtgtccattggagtagcacacggcttaagaagtccaccataccagcatactcaagtatgtccagagtatactgtcgagaacaaaacatgggggcggtgcgcaactgtaatgccaccccagaaaaggtgaagttggcccagatccttcataacaaactattgatgcaatgttgaaatagtgtgccacaagagggacaactagaggctatgag

SEQ ID NO: 183021 - DNA, 374 bp, Zea Mays
cttgtgcaagcatgcaatcagtccatccaaaccatccaatctgaatccaacgttgtctgctgtttttgcgtttaaaccctcccaccacacctcttgtatctcgtcaatcaggctctgagtatttgcgaaacaccccccaccgtcctgggacatttcaacctgggcccttaaatcgaatcagagcctgtacacgttgttttagcgactccagacgatagtcgcttttcagaaaaaatcacgtgaaagctagcaagggtgaaaatggattgcaatattcaacgacaatatccacatcaatggaacagtactccattttttaattcgattactcattatccaggaacatgacacaatatatagaatcacagatatac

SEQ ID NO: 183022 - DNA, 675 bp, Zea Mays
cttcccgagtcgtcctctccattttcccctcccgattcgccccgtcttcccaagccctacgccagcgacaaaaccctaaccggtgggatggcgacgcagccgccctctaccgccactgccgcggttgacctctatgagacggcctcgcagccggacgcccccgccgccggcgacgcctacacttttctcgagttcaacacgcagggggacgacttcgactaccccgacttcccggagctctctcaaccacctccccgatccacgccgctgacgtcctccatccccggcgccggcacgtcgtcctcgtcgtggcctgccccaccgcctccgccgtccgacgcggcctccccggaacccgatctcacgtctcaagacgtccacaccccgccggcctcctcctcctcgccgtcgccgcgttccgcctccaaggcgcgtccgtcggctgcggcggatgggctcgcctccggggttgtcgcacttaacttcgaggatcctgtaggaaccggcgccgtggaggacgggtacgactacagcaagggagacttcgtggaacacgcatgccggtactgcgggatccacaaccctgcgtgcgtggcgaggtgcaacgtaccctcctgccgcaagtggttctgtaactcgcgggggaacacttcaggctcccacattgtcaaccac

SEQ ID NO: 183023 - DNA, 541 bp, Zea Mays
cctcgctcaagcaggatgtcaatgattagagagagagttgtcggagagtgaaaaggtgcacacccctcctcgcccttcgtgttcagcaagcttgagagccctaaaaaagttatcaaagccaacaggacattattgtcgtgaaacatagctcatcaggtgacactaatcagatcactatatatggtacacataagttactaaaattcaaaaaacaatagtagtgtcaataacaataaagttatttaatgagtctaaatatcattacctgattcctgacctaagttgctttgagtctggtagtaatctatagtctcatggtattacactgaaatttacccatctgcccagttacactgaaatttacattgacgagtttccaatagcaataaacatgtaagctgaagcttctgagttctgacatcatcctcaatctacaattacaccctgaaaatgtgaaacgttagtaaagggacctcatactcgactttaatgtactaaaaggcaccatcaccagacagggtaaaagtgaattccattaact

SEQ ID NO: 183024 - DNA, 283 bp, Zea Mays
cccgacgaggtgcggcggcgccaccagttagccacggtgaggcatcgccggagtggtctgggtccgcgattcccggccccaaccttcgatccaacagaggcaaaacgtaactgatgtaagggcggaactaggtacaggcatctcaccgatgatggtgcacggtggtgatcggcccgtggtgaagcgcggatccgcgaccacgcctgtctccggcgagcaattcccgagttcctcgtggctctcagctcgacttgaaggctcctgcagcttcactgattcccgg

SEQ ID NO: 183025 - DNA, 302 bp, Zea Mays
ttgactgtagagcgtagaagaagcagaatgccgtagagcatatgattctgctgctgaggtttacatgtcatctttcagccacatcaaattagctgaagaagtaagttaaaaggtcaattatgcaacacatcctcattcattgcaaattgttaaccttgtaaatttaggatgctttaagggatgaatatgaagctgctttaaggaaggcacttgatgcatacaatactactgctgttggaactggcacttcacgtgcccattatgagaaagttcttaacaatttctgcagaaaggcgtttcag

SEQ ID NO: 183026 - DNA, 319 bp, Zea Mays
gcacgtctccagtgaggctgatgcgtacaacagaaatcagcagggcgaaggacgtagagtcttggtgagatactcagcacagtcatcggtgaggctgtagtgggcagcagcagcatcacacatgcgagcagggcagagacgagtagaggagagcgcagagcgcgatagagcgagcaacagggataagaaaagacaggctcgcgggtagcttatatagccggaggagagggaggggattggccgtattcgtattcaacgtggttgaagctgattgaagtcgcttaatttctcttggaaggaacggacgtcttcaaagcca

SEQ ID NO: 183027 - DNA, 341 bp, Zea Mays
tagatatcttgtttggtggtttctcttaattccctggttgaattcaggaaagggggacaatgtcagtactcaggagttaagttatactaataatttgcagtttggcacttattttctttagaataatgaaatgtttagaaacttacccttcagaatatccccttgttggatcctttgattatgattattccttggatcaagattatagtcgtgtggatattgattacactcactttgtgatccaatattttttgttagcaagtaaataagtcaccaccatcagctctttgctatcactattcacttgtttgtgctactttctccggtttgcatatttgtac

SEQ ID NO: 183028 - DNA, 538 bp, Zea Mays
caatctcactcacgtggcctacattctcttctctctccccataacccgtcttgtttctttccatttataattcttgtacaaactactggtaacagccgggggacgtatgttccttccatgtcagacaccgacacgtggggcaccctgcatacgagcacgaacgctgaaccatcccagaaaaatcgtcggtgcctgtaacaaccgcgtaacaaccgggcatgagccgacagatggcgttacaggtttataaaacccgattcccatgtgccttccgccataaccaggcttgggagctagcgcaaccttgcatggatgattacgctgaagcacagcgacgagtaggagagagagaatagagccgctgcgaccacgcctcgcgttcaccatctcccagcctctcgatcgctggggaattgggcgagatcaccaagtcgtgcagatcgtgcgtgtggtcagcagagcaaggaagttggcgggggagacgaattgcttgccggtgcttggccgaatcctcaccgggaatcctcgggcggcactg

SEQ ID NO: 183029 - DNA, 752 bp, Zea Mays
gccgactggtccttgggtttgctacaacccctggactggttcgtggcctcctcaacagcaacagtgggtgcctactccgcctcctccacagcaggcccacaccgcctttgcgccaccgcagttctccgccgcaggtgctccttcaggcggctggaatacagccaacttgattgctgcccttaatcaaatggcggtgcaggactccccttcatgggttatggacagcagagcgacatcccacatgtcctccaacgacggtatactcctttcccgttgtcattccccatcgtgctccattacggtcggtaacgggcagtccatcccttcatctggctgtggcacatctctcttacctatagctgatcgttattttcatcttaataatgttcttgtcattcctcagcttgctcgtaatttgttatctgttcgacagcttactcgcgacaataactgttccattgagtttgacgcttctggtttttctgttgaggatctccaaaccaaaacggtcctccttcggtgcaatagcaacggggatctctacaccattccacatcgtctgctgcctcactgccatgttgctgtcgttgctccagagttgtggcatgctcgcctcggtcatccagcaccagccgccgttcaaaccctaaataagctttcagctatacagtgtaataaagcagctcgccgcatttgccatgcctgccagctaggaaaacacgctaggctgccttttactagttctgtttcta

SEQ ID NO: 183030 - DNA, 344 bp, Zea Mays
ccatgtcacctaatgtggtgacaggcagagtcaacccattaccgacagttatggaggaagggaaggtggggctaagaggatgaggtatagagacaactctggggtcgggagtggtgtggaacgaggcgctggagtcgacaattcagtggtgggaggagggggcgacgatgatatgggaaaggatgagagagccatcgggggcacccccacagagccacctagggaatgctggggccgaaagtagtgagcatgctgacggtaatcatgggtgggagagaagacaaggccccgatcgtcatgcagacaaccgtggcgctggggaacacaaacggtccgatagcgtg

SEQ ID NO: 183031 - DNA, 883 bp, Zea Mays
gacaaactcgcatattcccacatgctacgcgatactgaggtgactttgatacaacaacaaatttagcttcttcgtattttacggaatacataactgtgtgatattgctgctaagacagagattggaacctattctccctttatacatgttaaaaaaaagcttccatcatctgactgtttatatcagcttgatcacaggatcatgaactctgcacgtcaacatgacaaggacagactgccctcgccaccctaagtatgtccttatgcaacaagcagccctaaaaaggagtatacaaattaaaaagataatggacaatgtttttcattcatttttttatgcatacacatacaaacacaaatttgaactccaacttaaaattcatactgatattgtaaaacatgtgcaggatcaggactagccaacttcgcatactctaatctgattctatataatctggtgaccatggcagttatattatatcgtaagttgcaccgaggtatattgttctatacatcttaacaccaatatagtatacataatattcatgatagctgctcttcaacatcactcaaattcacatagaacacaaacaaacaaaaatgcaaaaactactttattctcccttgtaaatatcatacaacaacaccatttacagtattgattaaacattataaacacaattgatgtttccttgtcttcacaggcttgcaaaggtcgtccacgttgctagaacgagtttgcttttgtgtatagaggaccaaactgataaaggccatccaatttcgtatatgtttctaccacccatatcagtaagctctatcttatgtttaatggagactatgtgtcttatcgtgtaagtttgctctacaactaaactgtaacg

SEQ ID NO: 183032 - DNA, 367 bp, Zea Mays
tcgggcaccagcctggacgcggccctcgctgcgcgggacatggccagaaccattgttttcggccggtagaagcgtgctctggttgatgctgtgtcggctgccgcaacttgccgagaacgttgagccgatgaaagtgagtcctttgtgctgagctgaccgtgaaggggagcggagagagatagtgcgatgaggcaaatgggggaggagagaggatatataggttgcgggccttgcggggagggagaggcggagagcgaaaggcaagaagacctgtgcgtgtgcggcgtgtggcggatgccgaatggcattgttttctgctttgcagactgggtcgcggagtttgaacattgaccgttgaacgctggag

SEQ ID NO: 183033 - DNA, 706 bp, Zea Mays
cagaaagatgcatcaaaaaaggatattgatgaggagattgctgattctcagatattgaaaaaccttgggaagtacttattgttgaatgacagccctgacttccgctttagggttgccttgtcgttggtcctgttagttggtgcaaaggtaaaggcataaatctactccctccaatttgaaaagtccctttggatttttgtagaagatccattacctgtgctacattgttgtttccccctttcctttatgaaaaggacttacttgccctacgctaatgtaaattgacaagttcgatgcaatctgtttgttggatgcgaatctttagactgttcttcaccagattccacacttcatcttgtttcatagtaaacaaggctacaactagccatctactgtcactgttaaacaagagggtgaacagtgtccctactaataggatagaagatagataaaacaggctgaactaaaaagatggaagttattgcatgcctgctcagctttcttacttggccctttgcatttgctatgaacaccaggttataaatgttcaagtgcctttcttgtttaagctagctatcgactggcttgcagcccttggtggtgctgaagcttccctggcatcattcactgaaactaatgccaccctattggctctatttgcaagcccagcagctgttctgataggatatggaatcgcacgatcagg

SEQ ID NO: 183034 - DNA, 486 bp, Zea Mays
ccgacctgtcacctctgattagtgatgcaaagggcacttcgcccaagccagcggctgttcatgatgggtgccacacatacgcgtggagctgagacacaactacctgcctcggtaacacgcagcttattgtgcagcacatgtgcgcggcattgagacacaactgcccacctcgataacggacagcttactatgcggtcattcgagcatgcacgaccagtctaaagctgcacatgccttgcgctagcaatgcatgcctcagccacccgcattaaatgtaggcaggcaagcacgctaccagccgaaggttggtgccacgcgcccacgggccatgtggcaacactagacctctacctgagcggagagcgaggaccaagagcgcatgttggcttgaagagttgggcatccccttgccgagggtctagatagtacatgtggaggtccacgacccacctacgggggtatgtactcatggtagcagcccctgag

SEQ ID NO: 183035 - DNA, 441 bp, Zea Mays
gccaatcaggcatacatggaaggtacataagtagaaggctatcacctatacaaggaagctattcctgggtgctatacatagcaactagcctgtctacaggatcactctaattgatcctgatttacatatcctaatacccgcccgcagtcgcagcgggagactcacggacgcacagactggtcctgaaatcagtgaagagctggacgggtagacccttggtcatcatatccgcgaactggtaggcggagggaacatgaagaactcgaaactgccctagggcgaccttctcacggacgaagtggatgtcaatctcgatgtgcttcgtgcgacgatgatggactgggttggcggtcatatagacaacactcacattgtcgcagttgactaccgtggcaagcggaatcgagatgtgcagctcctggagcagctgacacagccagc

SEQ ID NO: 183036 - DNA, 334 bp, Zea Mays
gattatttgactcttcgggaagcaaggcttcctttcttttgggggtgggggatacaggaattagtattgaaataatcgtccggctgatattggtgttgcttgagttgctttagtcatttattgcagaaatatgaattattactattatgatggaagtgctgttagtttcttcaagttcaactgagtgatggaagggcaggcctggtgcagcagtgctgagagctgtctcactctgagtcatcaggtcgtaggttcaaatcagtctctgcgtttgcgggggaaagagttgcctcgatttctctcttttccacaccctactcatgtaggagtctct

SEQ ID NO: 183037 - DNA, 447 bp, Zea Mays
gcaaggaacacgggcgcgcccctaccgacgcgttgcccgtactgaccttccttcaggtaccacctgatgcgcccaactggaactggagcccggccttgacagttcgcgacaccgcattcttctttggcccgccgcccagcttccgcccaaacgcaaacttctccaccaccgcgctgccgtcctccatcccccgagagcctagggtgcacgtctgctctaatgtggaggcaaagggaattgtgatttggattcgaaatcggaatgcagcggaggaatgtttttatagcggcgggacggggatggtgtgggggaccgatccgcgggacgtgagcttgacgccgttggatttgaggggaaggggacgaccaggatttgttttcgagagcacgatccgttggatcgggcagtgaggaacgagagcttttatagctgtatttgggagatccc

SEQ ID NO: 183038 - DNA, 760 bp, Zea Mays
cgcctccgccgctggcggcgatgccgagctacttcgacccggagtcgtccggccgtcgggaggagtaccgccgctacaggtcgggtgttctcttcctccatttgcgttcccaaatgctgcgctgctgagtaggtgatgcgggtgtggcggtgtagttttgattcgggatggttgaggttcaaatgtgttgtgggtgggagggagtggggttttggggattggttgatttgcgatggtctctggcctcgtccagatgtgctctgggtttgcgcgtgccaattcgagcctccatgggttcattggttataagatgtgtcagttcatcgataccccaggcatatgctgcactagtgtcctgtcaccttagtcactgctgttgctaattatgtgtttcgctttgcaatttacaggaagaggttgtcttcttcaaatgtctctcctctgctgggaagatcactctccaagacctctggaccaaggctgttatatgatggagaaagcatcccaagacagcctaatgccggtttactccttgaagacataaagcaggaagctgccgattattccaacgtagaaagcttggatggattgagactgttcggttcgccgaaaaggacatctctcgatggcggttctgcatcaggcgcagcttacagttcgggcaggcaagcagtgaggcagacgctgaagccagtcaaactggaggacgatatgtatgtgccacatgaaggagaaacgccttctacaatgtttgcaactc

SEQ ID NO: 183039 - DNA, 1597 bp, Zea Mays
cttccagtccccagaaatcaaaacctccaccaccacagagctccgagaccctcaccctcctccccgtctgctcgctgcgtggatctaccggcaggatgctctctccatcgcgcgcgccgcccggggagcgcctgtgaagaaggaacggaaggtgagagaactgccggtgttcttcctccgagttcgtgcgtgcggtgtggtttccgtgggcggttctcgattttttgcttgacttgaatccgcgcggtttttccttgctcttgcgcgtcgctcccccttaccagattcgtcgctggaactggaagattggcgtctgcagactggatctctctctcttcgggcggagctgggattcctcgtgcttctctcgctgcctgtgaccgctagatctccgctgcttttcgtgcttgcttgttttgttcttggctacggccaaagattctcgatcccttgcatctgctttctgcagatttggtacggattacggcccccccgttctcgaactccttcctctacgtgctcccatggctcctcgtccttacagaaatccccgattaggccagtgatgaagcgacgggaaaatcgtttcttttttcttgatttctcgccaaatcttagttattaagctccctttcctcttttcttcttttgctatttatttccccatcaagaaagcactaccatacaagctaccctccagtgcttggcaactgttcatgtctccttcactgctcttcccttactgcaaatcctttgcgagagctgcatgatccgtgtaggcttccccttaatctgctcaaagactcgctcgctcgtccaccttgccccgggatgatatttcatgtgctctgtgctacttcgagagcagccccctccgcgtgtctcctctcctctctggcatccatacctcacttgctgcatctatcagcataaaatcatgccattggattcccaaagaacagctggtttggttggacatgaaataatatgtgccttgctttctctctgcaggtgcctgatgagatagtggacggacaaggaagtgaagtttcttgttctatccacctgttgaacttaccaacttggtatgctggagtgcaagaataagagcaggcccaatcgcttcacagctattgggttctcggtgccgactgtagcagccgcagatctggagggagcagcgaaggcgttcatcagatgttatccagtgagcacccttcaggcccctcatgttcctccaagtctggtggcccgggtgtgagcgctgatccggcgacgtccgcggcggagcagccagcgtgccaggatcccagagatctgatccaatcgtatcccaagttctccataaggtgaaagatatatgtgtatatcctctttgattcaatacctttggagagagattatttttcggtgtttaagttcttgatgctggatctctgtctttctgatgcgtcgattaattattggctgctgctttgagggatcggattgggtatgaatggttgctttcagggttaatccgtgttattgtccgggggtgtttaattagtttaattttctgctgattaatataaaggtggcctttttttccacccca

SEQ ID NO: 183040 - DNA, 777 bp, Zea Mays
cgtcaattgactactgacatttcctgttctacggagtttgaccctttcggtttgttcatgaaggatcttgccacttggagtcttctcgcacggtgtgacagctttggcccctatacacccttcaccttcctgggtccactacatctttggcagcctcacatgttttgaccactacaacttcgtccactacttggcatcgttgtcttggccatccggatcctgatgttatgtccaagttgtctagtagttctgtcatctcttgtagttgaggcccccatgagtctatgccatgcctgtcagctgggttgtcatattaggctcgcttttcctcattcaggttgtgcgcccttttgatctcattcaccgtgatttatggatatctcttgttctgagtgtctcaggctataaatattaccttgtgattcttgatgatggctctcattacatgtggatttttctgttgcgcttgaagtccgatatgtccccccatgctttctcatttctttgcctgggtgtccactcagttcggtagcacctgccaagccattcagtgtgataactggacagactttgacaacttttctcgtgccatcttcctcaatcgtggcgtccatattcagatgtcatgcccctacacttctccctagaacagcaaggctgagcgcatgattcgcactaccaacaacatcatacgcttcctgctcttacaagtctcgattcatgttcggttctaggctaaggctctctacattgccaactacctgcttaatcgtctgc

SEQ ID NO: 183041 - DNA, 588 bp, Zea Mays
gcttctctgatttcaggacaccaggggactgataacgaagtgcctatccaacacctgaacatacacgagacgtagtagcagccttggctgttccgcctgtgtctgttgatgccattctgtttccagaccacctggagactgaggaagaagtgcccattcaacacctgaacacccaagtggaactatcctcacaaaatgagtcaacaaaggatgctttcttcagcaagatcagtacaagaccaactggactgctgcctgttccaaagaccaataagctggccaccagtaagcagtctaaaaactcaccatcttgccccactatgactgcgccaaggaagagacgacgagttgctggaataggagttattcaatatgcatgacatgagcagtagggccaccagaaaggccatgaaagcacttcggattatctcggattcggagggggttagtcaagaggctttggagtattatgtgaatctgcttaaacaccctctgtctcaatgccatgtggatgctctctctgccctgtttggctggaatactccagcagacttagtgcccagtagagctccttcccctcccccctat

SEQ ID NO: 183042 - DNA, 540 bp, Zea Mays
atgttgcaatgggttgtgttgcttcatctggaactgctgaaccacctttgtcttcagctttctgtttaactgcttctttggtttcatcatgtaatctaagggattgcattgcactgaggtcaaatatatattacctgaacctgtttctgtatttgatgtatggctatagatatttgatatttcacactcatgcattatgtcctttaactgaatttttcagggataacactaacatgatattctggcgagttgataatgcttttggttcctttttacctggagatcctgcaagcatgagtgtggatgggaatgcttatgatcttcgacatatgctgttcgacagtgcagactcatcttccaagactgtctctagaaggcaagatagtagaaatgatttctctcaactagagagatcagaattgacctcaggtcggctatttgatgctgtggcaagctttaaactaatttggtcaaatagtgggacctcttcaccaaaaaagctctcaatatggcgtccaatgttgtctgaaggaatgtttt

SEQ ID NO: 183043 - DNA, 329 bp, Zea Mays
gggctccaacaggtgtggcaccacctaattgtaggtcgctgaagctccatcccgcatagccttgctcgttccacctaggcagcctcgacgctgcaatgtgtagtaagcaattaagcatggggcaagagggaggaggtcgagttgagcgggacgagagatggccgagcgcagacgatcgagttgtgagcggaggcggggggttaccgccaaagtccgaggctctgagtgtaggcggtcattctgtgcggagctgagggtgaagacagaagaaggggcgtgggtggggtaggacgaccgagggcgaagggaggggcacgattgtttgggtg

SEQ ID NO: 183044 - DNA, 357 bp, Zea Mays
gttttgaatagttgtttgctattttttgtactactaaaattattatgaaatcaaagtagcgttaatttggtgaactagtgacactcggttctcatcctacatcacattgttaaaatattgcatgttccctgccaatggtttcatccaactgcatcatcaaatgctcatatgagagcatatatgctattgctattgaggacaaccactaaatgactgtatgcttagcaagcaaacattgccaatactgctttgatccttaagttccaattcaagatagacatctatgccaattaatctgacacacattgtacttaaacttattggtcttgttgttttgctgtaattgttttgtttcac

SEQ ID NO: 183045 - DNA, 377 bp, Zea Mays
gtcaaatcctcactcggcctcgttggtctcgacaaggtatgtgtaccttccgctctgatctatttagtgcttagatatcttgtcggccgcctttggtgatcagaactttttatttgtttatcaaccgctgcatggtctcatgatctgtattagtagaaggtagaacactatagtggtatttattgtcctctaagtttaacttacattgtgctgaagatggtgtggattagaaaacatttagctgggttttatctcgccacaactatgtattacttttacattgcttttgaaaaagaaggcaatcgattctttcgtttctggacaaatggcttagatggtttgcttcctgagttcaaagcacatactatggctaaatc

SEQ ID NO: 183046 - DNA, 491 bp, Zea Mays
accccaatcagcaaaatgaaataagaagaaagtatttactatgggggccttatcaacctcgcacttatgattttcctttcaggattattgcgggtaagaggcgtcgattcaatccagattggtttggccagtatgctaattggctggaatatagtgagaaggaggataaagcatactgcttgtgttgttacttgtttagggataaaaatattgacacccatcatggccatgaggcatttgtggtacaaggctggaattattggaagaacagtgatagattagcacttcatgtaggtgatcgcaccagttttcacaacaaggctctcaaggattgtgaggatcttttgaaagaagatcagtcaatcactgctgctatgaaaaaacaaagtcagcttgagaagaatgagcactctattcggttaaatgctgccattgatgtttgtagatttttgttacaccaggggcaagcttttcgaggccatgatgaatcc

SEQ ID NO: 183047 - DNA, 273 bp, Zea Mays
tcaaattctccagaagtttttgaaaatgtgcatataatttcttatataaattaaagcataactaaaccatgcagagaaggctgagcttgcacgcaattctgagttggtacgtccactgggttcagaagctgagaacgacctcaaatccttttttagaaaccccaagtgtgttattttgataaaaggataagtatgacctgtgacctgctactacagattctagccacaaaatattgcaactatctatgcatggactggcacaatgaactttct

SEQ ID NO: 183048 - DNA, 368 bp, Zea Mays
cggtgctgtcacatatgaggagggggcgccgagttgctgagtccttcacagtaagaccagaagagtcaaactcgacagaacaagaattatcaacggtaaaacgacgaatagaaagaagattgtggaccaaagaaggagcgacaagaacatcgggaatgcgaaaagagccgggagggccggcggcacccacagatgtgacaggaagacacgagccatttgccaccatgatggacgaagggagagaggaaggagggcgaacagaggtgagtataccagggtcgggagtggtgtggtaggtagcaccggtgtccgtgatccactcgggacccatcagtagagtcagagtgggagtctggaaggcagccagg

SEQ ID NO: 183049 - DNA, 1339 bp, Zea Mays
gcattgcaagcttacgaagaaggctaccggtattatcttgatgtcttcctgtccaaaagtcagaagattttaagtaaacttgcatgctgtgatcttaagtaaatggccatgaacaatacataggacacgacattggaggctttattcactaacatttctattaggcatttgagaacccatttgttatagattcttttattggaaagaagtacagtagacgccaaaagaaacagataagtcattaggaggaaggttggttctattatttaggagatgcagctttaggcgccaggataaggtgcagtttgttaggagatgttagtgctataatttaggagatggagttgttagtttgttagggaggcgctatgatataaggtgccttagattgtattaggaaatcatcgaaagaagatctcccaacagtgggcgatcaccttcggccatcctggcctcccagggtgatcacagctctgctcctccatatttgttgtgttccctcctcaactcctctctccttggcgcactccaagaaggagaaggcagcccccccccccccccccaacaccatttcttgtattaatgaaaactatacttttttaaagtttgcgatttagaaatgagaaattgtgaagtgctaatatcttgattgagctgcatctttagttttggattgcacccctatcttctagggaaacactttatatatcaagggattgagcttgtcctaaacatccagcatctttgatacttttagttttaacatcagctcaactgtattgcagagtttatttgtttaatcccatattgccgttttagtttttgtgtcacattattgtgttgggtctgcgcccgaccgcccgtgccacctatctttctaataattaactgctcttgtccttaacagcatgatgcttccatctttagtttctgatgctcacatcatatcatatgcaggattgctgtggaagcagacctacctaatgtgcaactttctgccctcgagaacatgcattacagtcatatggtcagatttgataatatcgaagaagccaagtaagttactaagacagattttgcacaaaagagttttattttatgcaaactaaaaggatttccttttcaggaaaatgcaggaaaaaatagacaatctgaagcaaacactgaatcaatgtgaagcaagggatactgttagtgactactgctcagaaactgacactgaaggtggttgcacatctgataacacgcttgatgctcagaatgaccatggacaggctgcaaataactacgaggaacctgatgatgatgttacgcttgcttcactcgttcagaggagtgg

SEQ ID NO: 183050 - DNA, 417 bp, Zea Mays
ctacattccggcgctgaagaactctatcctaagtctgggacagcttgatgaaggagggtccaaggttgtgattgaccatggcgtgcttcgcatttgggacaagaaccgtcgtctgctcgctaaggtacatagagggaagaacaggttatatattctgcatcttgaggctgcacaacctatctgtcttacggcgcgcaaggatgttgaggcgtggcagtggcatgagcgtttcggccatctgcacttcgacgccattcggcgactcagcaaggaagagatggcgcgcgggatgccggtggtcgaccatgttgagcaggtgtgtgacacctgcgttaccaccaagcagaggcggcgttcatttccagttgcagcagcataccgtgcccagaatcagcttgagctggtgcacggtgactt

SEQ ID NO: 183051 - DNA, 1030 bp, Zea Mays
gttacacacagtatatcccactttcaattactgatcttgattcatggctgaagacaccttccatttatgtttttgattgctcagctgctggaattattgtgaaagcctttctagaggtatgatacatgtttcaaatgaacatttgtttctcttgtgcttgaagttgaaggtcatatgattttgttcttggactgtgtagtattcatagtgacttgtttatttcagcgcctagactggagttctacctcctcggcatcttcgcagaaggatttcattcttcttgctgcctgtgaagcacatcagacgcttccccagagtgcagaatttcctgctgatgtgtttacggcttgcctcacaacgcccatcaaaatggctttgcactggttctttctccccccttcttttttgtgtgtgtactgttccttctctccttttcttagcatgttgtgcttacactagtacatgcctataaaccatgcaggttttgtaagcgaacatcactccatggtcctctggatcgttctcttattgaccaaattcctggaaggcaaaatgaccgtaaaacacttcttggagagctcaattggatttttactgctataacagatactatcgcatggaatgttcttccacgtggtacattgtttatgagagaaataatgtttttggggaacaagaaaactagagaagattattaaatttcaaaataaatgttagcctatatttggtttatgatacatgtttcactgtgcagatctgttccaaaggcttttcaggcaggaccttcttgttgccggtctcttccgtaacttcttgcttgctgagagaatcatgcgatctgcaaactgttctccagtttcttatccgttgttacccccaacacatcaacaccatatgtggtaactaacctgactcgtccttctttttgcttcaactactttttgtacattttgtaacttgctaaatcccagggatgcatgggacatggctgctgagatttgcctttccaagcttcctcagttaattgctg

SEQ ID NO: 183052 - DNA, 640 bp, Zea Mays
cccattcaggacccagggccctcgctgccaaggtaatccgtcaaggattttactagcccgcgataatctgtactgcgaatcgagtcacgaggtcttgtgaagcatgccagaagttttccccccgctcaagcaacccttcgcagtacaccaagctgatccccacacatggccacttcaacgctggggtctggatattgtcggaccactacctacggctcaagggaaccacaaattcaccttcgttgccgtcgagtatttcaccaagtggatcgaggccagagcagtatccacaataacgtcgaagaccgcccaaaagttcttctggcaaaacattgtctgccaattcggagtcccgtccgaactcacagtcgacaacggcaaacagtttgacagccaggacttcagggacttcagtttctccatcggcaccaagcccgtcttcgcctcggtataccacccgcaatccaacggtgtcgtcgagcgcgccaacggcaagattttcactgccatcaagaaaagatttctcgacaacaagaagagcaaatgggtcgaccaactacctgaagtggtatgggccctaaacacgacagaatgtcgggcaaccggattcacaccttttcgtctactatatggatccgag

SEQ ID NO: 183053 - DNA, 595 bp, Zea Mays
ccccacctcccctcccctcccccctacagattttcactttccaattcctatttatctcttcttttgttctttaatttggttcgtacgtacaagacttctcggatcactcgtcttctttgattgcatcatcgagacctgcattttcccttccaaattcgtcactcactctggttggccgccttctgtcttctgatccaatccggttgaaatcctccgtctccttccagcaagatctggcacataaggagaatcggcaagaaccattctgcaaatgaggccggatacgcggcttgaatcggcggtgttccagctcaccccgacccgcaccaggtgagctgccggatctgctcgagtaactcccggcgatgtttctttgtttcctctggtaatttggccagtcaattatatatatatgtgtcatcttttgtggctctggtgtgtggcgtgttgccaaaaatggagcgagctctggaagctcgggcatggcatttccccatgaaacggcaaagctttcggctttcgccttaacctcgtatgcgttgccaagcctggcttggttaacactgcagtgctagtctgctagatctgatgtcct

SEQ ID NO: 183054 - DNA, 374 bp, Zea Mays
tcctcgcgctgaagtcatactgtgactggaagcaatgcggtggcaccgggccgtggaagtacggggggaatcttaagccatcagtgtccggcaagtccttcgggaggaagaactctgagccgttccagaggagccaatcgatcaatgaaggtgaagtgccctatgaggaagctgggttcaatggctacgctcattttgattccagcgacatggttagcttcatactctaacttcctagttgcatcgatttctctttcttgttgcaatctagttgatttattgatcttttatatgtgttccaagcagtcaacatggcgcccccttaaaatgttggtcagtgcagttttgtccgacaaaaggccagatgaagttcc

SEQ ID NO: 183055 - DNA, 279 bp, Zea Mays
gctgcgtccgaccctcacagcaaatgtaatacccctcttttcctaagcaaataggccagttgtgtgtgtgtttttgttctctcaacaagcatggctgcctagtttgcttttgtcacatggaatgaagtatatcaagaacgtgcctccttttggagactactacttgatcatcacatgaggtctcacgtagatgcatgatggtgaaaggcccaacaccaactgtgacgacgactttgcaactgttgatgatgactatgactaccctgaaggcgatggctg

SEQ ID NO: 183056 - DNA, 997 bp, Zea Mays
ctgcctctctgtcagtaagtcctggactgttgtatccccttcatcagcttacactggggctgccgcaaacaccgggtcatatccatataataccttgaagggtgagcatccaatataagtgtgataggatgtattgtaccagaactctgctaatgggagccacttcttccacttagcaggacaatcatgaatggcacatctcaagtacatctctaaacattgattaactctctctgattgaccatcagattgaggatgataggcagtggttagagccaactttgtatccaatgactgaaataaagatttccaaaagtggctagtaaaaattttatccctgtctgagatcagggacttaggagttccatgaagttttaccacgttgtacaaaaacacttgtgccacagttgctgctgaaaatgggtgtttcaaagaaaaaaatgtgcatacttagaatatctatctaccaccaccaaaattgtatcacacccttccgacttaggaagaccttcaataaaatccatagtcaaatcttgccatgcaccctgggtaacaggtaggggttggagcaatcctggatagagaactctttcagacttagcatgttggcacactgcacactgctgcacaaacagtttgacatcagacttcaatcctttccaccaaaatagcctcttcaccctctgataggttgccagacaacctgagtgacctcctactatgttgtcatgtaaatgcagcaatcatcttagttctaagggctgaattctgagcatcccaaatctgagaaccttttctgatcacaccctgctgcacagaaaacccttgttcattggggctatgaagcaccaattcagccaataacctttgggcctcctcatcagtcacataggagttaagcacttcctgtacccataaaggtttcacttctgtcaaggtttgtaatgtcataagatgaaccactcttgataatgcatcagcagcaatgttctccttc

SEQ ID NO: 183057 - DNA, 295 bp, Zea Mays
ccagcctccacttcccctctgcgtcgtctcctccgcatcaccagccatgccgctgacgcgtccaggacccctccctcgcatctccatcacaccctgccatgtggcctagcctccacttcccctctgcgccgctgtttcctctgcataaccagccatgctgccgacttgcctaggacggagcccgcccgaccaaccatgctaggtgccacgccgtcccctccgcgtcgtcctctccgcggtgtggccggccgtctcggagccctcgcgtcccctagcccatgcacctgtctcgtat

SEQ ID NO: 183058 - DNA, 281 bp, Zea Mays
gggcatggtagaagcgaagtagtatttatgttattcaactttgttggtgtagagaaatcgaaatgggaacaccttcaaggaaagcttcaatatcactgttctaaatcggagttgtctaaagattccacaaaatgtactggtcgaagagccctttcttcaatggatctcttctccaaggtatcttcctgccttacatatgcagttttaattgatctttccacatggctatcataattgcattccaaggatttaaacaaacagcggcattaacattactctgc

SEQ ID NO: 183059 - DNA, 271 bp, Zea Mays
gaccaacaagaactttgtagtggtgggagggagacgaacctgttgtggcggcggcgaggaaggcgatctccgattggcggcagtgaacatgaaatctcaactctgcgatggaaagacgtatcgatggatagattgcaggggcaatgtggtcagctgagaagacgaagggaaaggagtaggagataattgaaataattttaaaaaatattagactgctattaagaatgacaatatcacttctaaatactattagtgagacgatggagttcag

SEQ ID NO: 183060 - DNA, 291 bp, Zea Mays
attggatcacccagatcactgtccgctttgtgatcaagatgatgagtccattaatcatttgttagtctcctgtgtgttctctagacagttctggtttcaacttctaaagaatggaggactgcagatgttgtgcccaacggttgatgataattgttttgaggattggtggtggatctgctctaccaaggtggctaatcatctgaaaaagggcttcaattcgctggtgatcatgggtgcttggtctatttggaaacacaggaacaagtgtgtatttgatggctgtaatcttaa

SEQ ID NO: 183061 - DNA, 322 bp, Zea Mays
tttcggccttgtgccgcgtgtcttggcatctccaccgcatcgccgtgatctattatagctctccgttgatcgccggagtgaatgccacggtaataggacaccaatcctatgcaccagtgagctccccctcctccgaccgccgcgtgtcttcaccaaattcaccagccaccgctcttccctcctataaattgagtgtgtcgtcggctccgcaaggtagtcaagcaacccatacaccaacttgtgccttgaattgtcccctagagaacttcaacttgggattacccccaaatcggtcaagaacaccgtagagccaagctcgtcg

SEQ ID NO: 183062 - DNA, 277 bp, Zea Mays
agaacccggaaccatgctgcccagcagtgacaacctccgccagtccggtcataaggtcccccaccaaaggattgtccaagcaaggcctagccggcgagataacaacatgtgaagaccagccctcctgacaactgaactccaaatcctctgccagatccaacgctaacactggagggtgaccaggcgcctccagctctgcaaccgaaacttccgggagagccagggcatcaactgatcccaaatctggagggtgaccaggcgcctcccgctcctcaac

SEQ ID NO: 183063 - DNA, 473 bp, Zea Mays
gtcctgtcaagcctatctcgcgctgtggttatccgatgtaacaggagcgctcctaatttttgtcatgcatgtcagttgggtaaacatactatgctgccttttgctagtttttctaatcgaacatctacgccatttgagctagttcattgtgatctttagacatctcctattgctagcgtttcaggtttcaaatagtatcttgtcattcttgatgattttacccattacatttggaccttcccacttcggttgaaatctaacacattcactactttgccctccttcgcttatgttacaactcagttcagtcgtcccatcaaaggcgttaagtgtgacaatgggtgcgaattcgacaatgcctccatatgttcgcgctcatgcctccatatggtccttcctcctctgtcagcattcggtctattaataacgtcattcgctcccttctgtttcaggcctctaatcctctattcccg

SEQ ID NO: 183064 - DNA, 347 bp, Zea Mays
gtttggactggcatgacttactatgtcatcggttttgatccaagcatcgaaaggttcttccgccattacctactgcttgtactgataagccagatggcatctggtcttttccggcttcttgctgcagtaggaagagagatggttgttgcagacacgtttggctcatttgctcagattgtcctgctgattcttggtggattcttgatagcaagaagtatgtaatgtattcattcagtcattgtttagtgtccagtgtttgggactcagttctctttctgcagataacatcaagaaatcatggatttggggttactggtcctcccctctgatgtatgcccagaatgcca

SEQ ID NO: 183065 - DNA, 331 bp, Zea Mays
tatgtaatagcttgtatgatgaggctgtgcgccttcgcacattcggctatgctcataaaggcgttgcacacttggtctagtgtgtttatcatgttggtccggcgcgcctgtagtcggtctttgcgcggacagtttggtgtagggtttagtacggatagtcttttgaggaagacttcgattcttcgcacttgttgtgcttagtccggctgcacccttaggcgacttttgcacggatagtctttttaaggaagacttcgatttttcgcacttgttgtgctagtccggctgcacccttaggcgacttttgcacggatagtctttttgaggaaga

SEQ ID NO: 183066 - DNA, 1200 bp, Zea Mays
agagattgtgctgagttcctggctgacgcgaccagacagcgtctgcaaacaaaaaaaaaaccagaaacatttttgggaggatgtgatgcaggacaaaggatttctctccccgccgtccctgtctcccagacaactacctccacgctccccacggtcctctcctaatcccaattaatgctacgcaggcaaagatcgttttttttgttcttgtgcaccggttctctgattgcggagtcctgctctctctgcggtcggttttcgttgatccctcctgcattggtccgctccggctcagatccgattctctaggtttgtatccttttgtttagttccttttccgatccttcctttatcaagttttctggcggtgacggtgagggggaagtgggttggcaatacgacgaagacgcggccgcctgtcgccgtgggttcatccgtatgaggtgcacaataatttggatcgagctgctcaatgggctgctcgagcttgcttaggtttccttttagtggctaatttggatcgaagattgattcttggcggaaactcccagatttacggaagctcgtctattctttctagttcctgatttcccagtagcccccttcaatatctgttcccagtatcccccttcaaatctttgatgggtgcttcattcatgtgctttacgagttcaattctgctgccccttcaagatttgctcttgagtcctcatctttatctcttttactatattttacatatatttggtgtttgcaggaaaagaaagaccagagtatcaggtggaacaacagaattctaggtactgccgggccgctcaacaagggaagagcaagagctccagtctctgtcccactgaggggttgtgaatcatgatcctctaataaccataccctggaaggctggaacaaatttcgttccaaaagggacataatcagagaaggccagttaagggggcagtgagaagggatggcgatggagttggccaagcaattgctcgtcgctgttctcagaagctatgcaccacctctctgggctacaatcattgccagtgtttttgttatcatctccgtctcactgtccctgtacttgctactcaatcatctgtcagcctacaaaaacccagaggttgtgaattgctatcagtgttgcttacttttaaagtcaatgtggtaaattgtttgaaccgcgtctcacttggc

SEQ ID NO: 183067 - DNA, 608 bp, Zea Mays
ctcacccctacagcgccgagtctgtggcacaagcgttcttcaaagagattgttcgcctccatgggatgcctcaatccatggtgtcggacagggattccgtgttcacttcaacattctggcgggagttgatgaggctctcaggggccaaactacatatgacgtcagccttccacccacagtcggacggccaaacagaggctgccaacaaaatcatcgtcatgtaccttcggtgcttcacaggggaccggcccaagcagtggctgcgttggctgccatgggcggagtacatctacaacacggcgtaccaatcatcgctccgggacacccccttcaaggtagtgtatggaagggaccccccatctatccggtcctatgaaccaggagagacgcgggtggctgcggtggccaagaccatggctgctcgggaggaacttctcgctgacgtccgcacgcggctggaacaagctcaagccatccagaaaaggttctatgacaagctgcaccggccggtctcctatgccgtgggcgactgggtgcttctacgcctccgacagcgcgctgcctcttcactaccgcagcggtccacgggcaagctcaaaccacggttc

SEQ ID NO: 183068 - DNA, 419 bp, Zea Mays
ccccgccagaagccttatggaggatatacgactttgagcttagtcagaactctccacctgtgatgcagctgcagctccatcttccaaacatgcacatggtggcgtttcatgatcggcaaatggtccagcgagttgtaaaccgtccaggtgctgataggtcaatgctcacagcatattttgaggcaaataggctacacgaagaggctccgggcatcctatattgtgacttccctgagtggttcacttggcagagtggtaagggcaaagtatggcaacggaggaaacgagatacgggtggacaagtcggtagaatagtctctactcatccagccgagggggagcgctactatcttcgtgttctcctaaaccacgtggctggcgccatctcctatgtggatctaaggacagtagatggtgtc

SEQ ID NO: 183069 - DNA, 487 bp, Zea Mays
ctagaatctagctttgacgaatttttacaacttactgtcacttcagatgtcagctgattcaaattatgctgggttagtgtgatgcccgtggccgacgtcgcgtcgccgtcgacgtgaggatcaccagtgattctcagagatacagaagacgcaaggtttgccacggtttgtggagttctgtttctcttcttcgttagctccctggtctctcacacagaattatttaagcagtcgcttacatgggcctcacgcccttacacatcatccggcccacacggcccaacaccttacagaatgttgaaaattcaaaaaccaatcgatgtcgcctcctgtcgctggaccggccatgacatcttccccgccgccatgaattgattgtccccaatcaagagcctctggaaaccgagtcttcaacacatcaatatcttcacaagtagtagcatcatctggtagctctgaccaggccacctgaacttgtaccacaggc

SEQ ID NO: 183070 - DNA, 514 bp, Zea Mays
tcattctacgattgatagggtaatcctgtactcctgtctccactctactcaatgcttgtagttcttttgccctgaggaagagtttgggacatgcatgacattacgatttccatcttcaaattgtgatacttttgacacacataatctggtgttcttaagtgtccttttaattttgatgccttcctttatccagtgactatagtctataacatatacccatcctatatcatatacccatcctataagagtttgggacatgcatgacattcacgagtctcgactacaagctcgagcagattgtcagtgttaaaagacagatttcaatagcgtcgcagattctccgtttgctttctcatgtcttttagttggaaaaaacaaaaattgttagtagtctccgatcttacagtacagggggcttcattcgctcatcattgggcaatccccggtttgcctattagtgctccatgctccatttgttgattagcatgtgccaaaatgaaatgctacaggagag

SEQ ID NO: 183071 - DNA, 645 bp, Zea Mays
cagaggctaatggttaccatcacagcccccatggtgtggaccagagtcaggttgtggatgctgataagcatataaaccatcattccacagacgacaatgctccctccagcgcttcaggccacagacatggtggtatcagccgtcatgcatccacatcttctgttgatgaccgctccatcaagtctggtgacgattctgatggggccgagagtaccaatggcagaagcagtaacacggagatctcgtttctagaaaatgataccgtctggataccacctcaagcggcagataaggaggatgaggcccagagttttgctacaagcattgcttatgacgacgacgatgacgattatagtgatgggataaagtggggccagtcaagtttcccatcccctggtaagcagcatgacgccggcactagcaatcatagggaggtacgagaaaaagcgatgctagaagctatgaatggccagctgaagatacttgtcagtcggtttctcgcatctgttggcattccgtcttcgaacgaggaggctagcgatagctggcttgacattgtcacctccctgtcatgggaagcagcgctacttatcaaacctgatggtagcatgggaaaggaaatggaccctggctcttacatcaaag

SEQ ID NO: 183072 - DNA, 1049 bp, Zea Mays
ctcgaaagtgctccaaatgtaacaaatcccgaaactgctccagcagtcctgtctcaggatggcaatagtgatgattgccgaatatgtgggatggatggaactttggtatgctgtgatggctgcccgtgggcatatcattcaagatgtattggtcaaaacaaagctttccttcctcagggtgactggttctgtccagaatgtatggttaacaagcttggcccaacttcctcaagaattgagcgtggtgcaagaggagctcaaatgtttggcattgatatgtgtgggagactattcttaggaacttgcaactatttgctggtgtaagttcttgcaaattaatcatgtaatacattgggtttattaatttactaatgtttgtttcctttgtatttgttccatctaatactgcaggatcgaaacagcttcagatgcagagtcttatgcaagatattacaatcagtatgatgttgccaaggtcctccaaagccttgctgtctcagatgcatatgtggacatatgcaagcaaataaaggactactggaaacatttacttggtataattcataacgagagatcaacaacaggtaaagaagttggtgcgaaagtagcacttcctcaaacaaacgcgcagcagaaatttgtggctaatcagagcgcaatgtgctcagtcgaatgcctggaggaacaaaaatgcaagtcaagcttaggtgttgtcactgagaaaaatgctgaagttttcaagcaaactgtgtcagctcagaacaacatacataatgcacacagaaatggagcttttggaccatctgtggtatcctcagtttctcatcagaatggatccattgtaacaggtgggtctaacatagcacaggcgcagccagctcagagtattttccatccagacccatccaccgtttctgtgacgtcaggatcattttgtccatcttctctaggtaaacaccaccttcagatgtttccggaaagatctggaaacatgagtggtgtcaaggcagcaaaattgtcttcttttaaaccacaagcttacatgaacc

SEQ ID NO: 183073 - DNA, 673 bp, Zea Mays
tgcaaacgtttaaggcagagcatgaagtgtgatttaattagcagactaaaagtggtactgctacatgggactaaacacttgtgacctagttttgttttggcccatcagatatgtgtaggtttgattggtgtttgttttgtgttattaatgcagggtgatatcctagagaaagccaagatattgcaatatgtaagagtgaatgatgtaaggacaactcgatatgtatacaatgatatgtttttcttcaaaagatctcaaacttgacttactggtatttataatcgtgacagtggtttgaaaatgaaaagcagaggcttgggcatcttcgtgaccgtgcaagtgaaactgggcgcagaaaggaatatcctattgactatactatggtgtggtgatgcctttattatcacttatattgtttctcatcgactactatgccgctgaattgctatttcttgattttatatcattatttgctcgttcccaaaaattggatcattatttaacttaggcaattgccattttcttgccatagctcaggaattgcggatgttcatgataatcaagtacacctttatttttcttatagaactatatgctactacttgtagtgcatgattcattattttgtgatccttgactgtatcatacacttagagaatatgtagaaaagctg

SEQ ID NO: 183074 - DNA, 440 bp, Zea Mays
aaaatattttttaagatcagtaaacagaaaccaatttgatgcttcatttagttttatggttacttccttttcagagaattagcttttgcgttatttgattccatttcaaggaggcttggttatgcttcaagaagcaaggtgactggacacttttgtagtgtatagtctgtacagtttttttgttgttccttttcatagtgtgtcaaatgtgccaactgaatccgagatttttttatgtttattgtaaaagagaatgaattgttttgacatattacagtttacatattttgatacctctttggtatgcagtatctggaccaagtgatgggcccgattctttttcgatgggttgcttgtgagatgaatctaatttcacttgttgaggtaacatttagttctaatgtttctggatgtgtttctgatatcatcatagattctcc

SEQ ID NO: 183075 - DNA, 444 bp, Zea Mays
aggaaatggagagacttgagcgtgagagaagaaaagaagaggagagattactgcgtgagaggcagagagaagaagagaggttccaaagagagcaaagacgtgaaaatgagcgcatggagaagtttttgcagaagcaatctagacgagtttgtttctgggttcctagaatgttaattgtaaatgtagtgtagtaaataccttatttatgctgcctacacttgtgcaggaagagaaacaaagacaaaaggagcaactccgaaaagagaaagaggcagcaaggcaaaaggctgccaatgaaagggctgctgcacgtagaattgcacgggactatatggaactggtggaagatgagcgtttggaattaatggaattagctgcacaaaacaaagggttgccctcaatgctgtatcttgacagcgacacattacagcagcttgattcttt

SEQ ID NO: 183076 - DNA, 409 bp, Zea Mays
gaaatgaggtcctgtacactccagtccaagcgaaatctcagagatgggggcaagttgagtgcccagctcaatttctatctgcagaagacagttctcattatcaatctatatcgaagaatcacatgtatagtgcctctgtttccgagagaatgcatgaccccacagtgctgaagtctggcagatctttgcaacagcctaatgatgaccagaggaaagatcttaacagcatagaagaaaccttgctcactgaagaagtaaagcagcttcgttcacaggtaactttatgagtttatgtcattgataagcaaatagtttgatcccctttccagaactaaacgagatgatactgttagacatgcgaccaggccagaactgagatttcggtggcctagagcgaacataaaaattg

SEQ ID NO: 183077 - DNA, 879 bp, Zea Mays
cggcgcccgtggagaaagttctggaggaagaggggagtggctccgaaggctccaaggagttccttcccactgggagcttggaagcagaggtagaagagaagggtgattcggaagcggttgctgatgcgaccaagcaaactgcaggtgggaatgtgggtgcggaactgggagaggataaacaggcagaagtgggaggtgaagagaatgctgaggctataaagctggtggaggcaagtcctctggatgctctagctgcggaggattccagtgggcatgagcaaggtaatgatgccaatttggcggaaactgaccaagttgggaatcagattgaggctgtctatgaggaaaatgaggatgaccaaactggaggtgataatcatgttcaatcaggtcagggtatggatcttattgcgattgctttagaggaaagttctgatgatgaacatgaatttgaaagatctgacagtatcttgcaagaacaagtggaatctgggagcttaattgataaagtgattgaagatagggtagagcagctggaggccagcaggaaggctgagaacacagagaagaagctgaaggtgtcaatgaaaccgttggagtgggcagaggagcttgagaagaggcaggcctcgtctggtcaacattgggaggaaggagcagctgcgcagcccatgcaactagagggaatcggaaagggcccaccagctatcggttacatgcaaattgagatggacaatccagtaacccgtgtcatgtcctcaccgtcatttaggtcagaccatggctctccccaggtgctggctgttcataggagctatatagcaatgggcacatctaaaggtgctgtcatcgtcattccaagcaaatactccattcatc

SEQ ID NO: 183078 - DNA, 313 bp, Zea Mays
ctcgatctcacgctccgccgcctcatcctgctctgcggcgacctctgccaggtcacctacgattccttcaactccgacacccactccaagtactgtggcagctgccgctactccaggtccacgctcttcgcccgcacgctgttcccggccgccgccgacatcttcccggcggcgtacctctacgcaacctcccagtcgtcgttcccgggcggtatcatggtgttctcgctctcccgcgaggcgtggaacaaggagtccaactggatcggctacgtctccgtgtccacagacgccgccgcggccgccacgggcc

SEQ ID NO: 183079 - DNA, 315 bp, Zea Mays
taggaagggaagcctgaaagagcagagcgcatgacatcgttcgttgtgcgaatcatgcgctcagccctgccgttctgaggagacgtgtaggggcacaacacacagaggtggaagccgcgagagaggaaaaagtcacgggacgcattgttatagaacttgcgcccgttgtcacactggacactccggatggtgcgatcgaactgagtggatacccaagcgaagaagtgagacagggtgggataagtgtccgacttctgacgtaaaggaaaagtccacaaatagtgcgagaagtcatcgagaatgagtaaatagtac

SEQ ID NO: 183080 - DNA, 381 bp, Zea Mays
ggatcaaaagtatcccgcgcacacgactacccgttcatcttcaaatctacggtcgtgaggaactctagccgattcagtactcagatctaattgtagcccttcacagctaacccaacgacatggattgtcccagccgaagcggtatgctccaaccaatctaggccgcccatcactagatccacaaccccacgttcttcttcccctccatcaccctgccatccggagcacggttaggcgtgcccctgaactcgcagccatgcccccggagccccatacggaaggatacacgtagcggaggtaaaaagtaacctattgagtgagttctcaccgcaaatcaccaagcgactagctcagtccacggtagaccgtggcgtcgcggtg

SEQ ID NO: 183081 - DNA, 858 bp, Zea Mays
ccggaggaggagccatgaccggaaccgcccccggaatggtgggagggagggcgctgatgtgaagagcgcccaacgggagcagtgggtgtaggtgacttggagctgccgttctcgccaggtggtgtagtaacaacagcgagggctgctgcaggagcagcattggtcatggtgagttcctcgagagtaagatcatcgcggacctgcaaaaaagtggggagaggagaggtgcgacggaggtgaaggccgagcgcttgaaagcattcgttgaggccgcgaatgatgttgaggacaagggtcttgtcggagaccggctcgccaagatcgcgaagatcttcggcaagctttttgtagcggcggcaataatcagcagcggagaggtcgccctgagtgaaggagcggaaagcttggtcggcgtatagggtgcgcgtcgtgcggttcccaagaaattgggactcgatggcgagccacaggacgcgagcagatgcaccacgctcggagattgtatcagcgaggttgtcggtgatggagccgttgagccaagacagaacaacgacgttcatgcgagtccagtcgggcgagtggtggacaacatcggaaagcacgtggcagtccagagagaatttggtgagggttaggaggaaggactcacaccaccgagagtagaaggtagagttgacgtcgaggaggagtgggacgagggcccggatgttctgcacggcgacggcttgagcgtgcagattgagaagagcaaccgcttcgtgttggagaagagcaaccgcttcgtgttggagaagagcggcagaaagctgggcgacggagtcagcaccagtgccgtcggaggtgatgtcattgatgggg

SEQ ID NO: 183082 - DNA, 521 bp, Zea Mays
aggaagacgaacatggcggcctaactggcacgcatgacaaagatgctcatcatgtgatctagtacatggaatagtggcacgacgagcaagctgcatcagggcatcgcgtccggggtgaccaaggcgacgatgccaggtagtagaagacgtggtggcagcaaaaacaggagctgtgttaggcgacgaagacgaagaggaggtggcgtgcggaagccgaagcgtgtacagggggccggtgctgtcacatctgaggagggggcgccgagttgccgagtccttcactgtaagaccagaagagtcaaactcaacagaacaagaattatcagctgtaaaacggcgaatagaaagaagattgtggaccaaagaaggagcgacaagaacatcgggaatacgaaaagagccaggagtgccggcggcacccacagatgtgacaggaagacacgaaccattcgccaccatgatggacgaaggaagagaggaagaaggggggcgaacagaggtgagtataccagagtcgggag

SEQ ID NO: 183083 - DNA, 421 bp, Zea Mays
gccgggcagtgatgagcagaagaaacgatgtttgtcatacaacatttccatgacagtgtcatcggtgccctttcagatgaccaatagcactgaaactctatccccttcctctgacgatggtcagtttgatgaaggaaatgacagtgatccagctgactcccagcagcgccgccttccacctcagccacctagggaatctgttcacctttggataggcgcccagtttgtgtctggaaggagtagggcgctgtgctcggttgaggaagctgaaaggatgggcttaggcgcctcttcgggacttaatgcacaacattcaatgcggccccttgaagattgcccgacctggggagatgagatgggaatgcagctggtctgtggcgcctcgggtccttccaggcagatatgtggcgccttgggtcct

SEQ ID NO: 183084 - DNA, 361 bp, Zea Mays
gttgggggctactaggaaccatacaacaccaagatgtgggcccatgtcaaggagatttagagatatgctatagaacaatgacttagcggataagtctaaaggacaacacattgaatgcttgatgggcgacattccaggcctgacaaggcatgaaaaggcactgcataacctatagaacacttgagggatccaaggagcctcgacggtcctataaccccggtaatacacgcacgcagtgtcgggaggtacaatgaggcagtgggagtagcgctgccaacctatcatgtgcggacaatgtggctacaacacaaaggttcatggggtaagttttaatgcctaccttagagactggtatggcggg

SEQ ID NO: 183085 - DNA, 299 bp, Zea Mays
caaaatatataacctcaagggccatcctatgcttctcagttatgttcccagtgaagatctttactttcaattcagattgtgcgctattctcagagtgatatctccgtaacaaaggacttactgcttgcaagacaagtgcctcttccatcaaattatcaccatatgaaaacggagtaccaacaatagcaatcaaaaaatctttgggactcaagcccaaactgatcctcacatcttcatggtaactaaatgcttctgagggggggcctggaatcacgaaatagttaccagaatcaaatgca

SEQ ID NO: 183086 - DNA, 365 bp, Zea Mays
agaccttggcgtgggctgtccctcccagtgcagcgtcaggttagacagttttttgacttgtcggtttttaccattttagggaatggggctactactctcttctggtcggatagatggattcatgggaatactatccatgacattgcccctgaggtagtgggtatggttggccgcaaggcgtattcttccagaacggtggcacaggctctggataattggctttgggtcagtgacattcgtggtcctctttccttgagagagttgcagcaatatctgttgttatgggatactttgggggaagttaggctttctcatgatgctgacaaacatgtttggatgcactcttcttctgggatgttctcctc

SEQ ID NO: 183087 - DNA, 786 bp, Zea Mays
aggggtttcatgaatattgttcttgttcactaccttgaaatcaaggtatgttttgatttcacacgatgaatttgtatctctattttctttgaaagttttgttaagtgccagttgaaaagctcatattcattcaccatcaatgccaacattgctggcatctacatctacctgtacatttatgatagccacatgatctcccgatggaaaaaggcgataacaattgacggggaaaagtgtctgttccagttgtgactaatagtctagaccagtgcatgaatatttgcaaactgaaagctcactgctcactgttgtggtaccctgttctccagatcacttgctaactacaaaataaattatttctggcagtgaaagacattctgttaagagtgcaagaatgatctgaatttagcttttactctgatccaagcctttttaaggatattttatttctatatctgactgccttctttttgcagggtgccaaacaaagtttcaatcatgctaaagaagctgaagagactgcaggattatctaatgccgatagtcctgcatgctcaaactctttcgctagtcagagccaggtagcctcccgatctatggatgctgaaagcccaattagtggacagatttcggaatatgaagatgctgaaacaggtcttgctgtttctctatcttcgttctgcatcatctgtactaagtatacattaaacactgcacgataaacaatatatgtttagtgtctaatgcataatttgctgcaacagataattctcgagcaagctccag

SEQ ID NO: 183088 - DNA, 4953 bp, Zea Mays
ccccgccggcctcctcctcctcgccgtcgccgcggtctgcctccaaggcgcgctcgttggctgcggcagatgggctcgcctccggggtagccgcactcagcttcgaggatcctgttggagccggcgccggagaggacgggtacgactacggcaagggagacttcgtggaacacgcctgccggtactgtgggatccacaatcctgcatgcgtggcgaggtgcaacgtgccctcctgccgcaagtggttctgtaactcgcgggggaacacctctggctcccacattgtcaaccacctggtttgtttacttatcttttttcatggcatagctcatttagaatttaagactactcagatgttaatttgttgagaattgcttaaaaactgattaatcagagttctgtcatacaagtctgttgataattgttttttagaaactgaacgagtgagattttgtcgtacaaatttgttgataattgcttaggaacgaacttagtgggctctgtttcacaatagtctgctttgaatcaattctaggccttttagttgttaaaagaagacatcatgctttattggggtgcactttatggctctataagtaaactattgctcagatgttgtagcaagtagcagcatgtctttcgtattatatgcgggggtggctaaggaggtgatcggtaccatcttaaaattggtaaattgatgccatgagtcggttagttagtttttgtatttttcatggtatgccatagtgtcggtgtatctagttgctgtaatttgttagccatgctgcattgatgtggctttagacttggaaggttttctggtggaaataagtatagaactatagataaaataactctgaggagaatgtcatgttaattatctcttgaattaggttgagaataagcaaatttgtagtatactgttgtatctgtgggagacattgcaatgggaatgcgacgattgctagatgtgcgtatttggttttgttgtgcagtagcagtattaacttttgattttttgtgctaatggaatggttgatacattttgtgaaagtggttcctattgttcagacccatttgcaaagggtccttggacatattgtttaaatagttggttaggaagctagctgtatttgcagtgaagacatttcgttcctatttggtatctagggtcttaattgttaagtcccatttgcaaggtgtcacttatactgtctaaatagtttgctatcagtttaatttaattttcagtgaagaccatctcaaaccgtatgagtaggagtgtagaacacaacattatgacagcaacatggatataacttttgttaaaaaaaattgtcaacacatctgtttctacaacttattatattgcaaccctgattccttattgagaggctctgtggtgtttcataagcagctttgctatcctttaggcaactcgcagcatgcaagcacaccattgtccttggacagtggacacacttttgatgttttggcattgtgttgtggtggttgtccaagcaaaccaaggactggtacaagtacatcctgaaaaatgcttagtacaaaagctgaggcatgggtccatttagaagtgaaatgaaggatggagagagtctggtgggagaacagtgatgatatcctatcaagtttatctagttctagaaagactatgattcttctcaccgaaaagaacatatatatgtaaaccaagcttcagtggtttggcaatgcgtcaaaatttctagcttgatctacgatgtcaaatgtcaatgctctaacagtgaacgtttggcctagttgattataagcatatacttgctacctacagtcacccataagctttgtatacaaataaatgcattgagtgtaggctagatcactcattctgaatcatatgcttattgtgttattgtgtaagaatccacctacctttacccatttaaatgaaacaaattcagtatacatggtcataaccatatgtttatcatttgcaggttagggcaaagcataaggaagtgtgccttcacaaggatagccctttgggagaaacaatccttgaatgctacaactgtggctgtcggaatgtatttcttcttgggtttatctcagcaaaattggagaatgttgtcgttcttttatgcagagagccgtgtttaagtgttaatgcactgaaggatatgaattgggatctcagccagtggtgccctcttattgatgacaggtgtttcttgtcatggcttgtaaaggcaagggtctcatgatgatttcttaggttgttctgtcatgcatttgtgcatagctaggaactttctgatggttggacaatttactttcttcaggtaccttcagagcaggagcagctaagagctcggcaaattagtgcacagcaaattaacaaagtggaagagctttggaagacaaatcctgatgcatctcttgaagatcttgaaaagcctggcgtagatgatgaacctcagccagttgttttgaagtatgaagatgcttaccaggttaaaactttctaaagttctgtattctgttacttgagtttacttttttgttggtgctttacttcctactctcaaatatcaaagcccatatttttaccttgcatctaagacctaactagcatatcctgcccccctttttttgccagtaccaaaatgtttttgcgccactgataaaacttgaggctgattatgacaaggtactgtgttctgattaagagatcatgttttttatcttttccatcacaaaactgagttgtgttactgttttatatgttgttgtagatgacgaaagagtcacagagcaaggataatgtaactgtccggtgggatattgggttgaacaagaagcgtgtagcttactttgtctttccaaaggtctgttcaagaagtgaaatatatgggattagtgaattaataccataattgtatagttatctgttgttgatgatgttcggtattgcttcgtgatactctattgtctaacacgggaaacaattatgtattttaggaagacaatgagttgaggcttgtgcctggagatgagctacgcttgagatatcctggtgatagctcacatcccacatggcaatctgtgggacatgtggtaattagaaacctgctgataatcttaattgggccagttttatctttgtggctatgctaaggacatttgttctttcagattaagctcactgcacaagaggaggtggcacttgagcttcgtgcaagtcaggtataaccgtataaggcagtatgatttttctcatgttcctttttagcatccactcagcctattttaacaatttccttgaatttcagggggtgcctactgagctaaacgttggattcagtgttgatttcgtttggaagagtaccagttttgataggatgcaaggagcaatgaaaacttttgctgtggacgagacaagtgtcagtgggtgagtataatatgtgatactgtgcatagggttacgacatatcgttgtcattataatcgaacaaggctctttgatagaaaacaactccatcaaatcctaaaccacttcatatattattagtcggcgagatatttgattgtttctgttacacacactgtttcattggttaactatgtgcatactgaagaatattcttataataagatccattctatctcattctttataattttgttcttctgaagtgtttgtcatagttgtatcactattaacaaagttttactgtctgttctttcacacagatacatataccaccaccttttgggacatgaagttgagcatcaaataatacgtaacaccctaccaagacgctttggtgcacctggacttccagaactaaatgcttcccaggtacattatctctctctctctctctgtctctctctacactcacacatgtgtgtgtattctttgttctatatttcctcttttttttgcttttcatgtcttctaacatggtgcattcatgcctttgattaacatggttgtcttctgttctgggacaatctgtgtatattatatattttaaattttgggtgcagctttgcaaatttgctgctgttatggcctgtgtatgttgttattgattgtttgatctgatgttgtcttctgtattatttattgtgtattcaggttttagcagttaaaagtgtcctgcagaagccagttagtttgattcaaggtccacctggcactggaaaaactgtcacatctggtgcaattgtgtatcacatggccaaacaaggtcaaggacaggtatgggattattagaagtatgttgttcacttgtttgacatggtttagggagaattgtctgacctctaattttgtcaaatttgtaggttcttgtatgtgccccaagtaatgttgctgttgatcagctggcagagaagataagctcaaccggtctcaaggtatcgttgaaatcttatttaaatttctgcagttctccaacttgctttatatttagagttatatgccaaagctgtttggaggattaactgaacattttatgtatggttgaatgcagtactcaactgtgaacctgtcaccagtacttcagtagtatatgataatgatattcaactaagaatttatgaataatcatagcatgatgataaatgaaaaaaatccccattccacctgatgtgcccagtttttcagtatccaacttctgttggtgctgttatcctgatattcattcggtatttagtgttttctgttatttattttttattatgtgctacaggttgttaggctgtgtgcaaaatctagagaagctgtttcgtctcctgttgagcatctcacacttcattatcaggtacatcctattgttgcttttgtggaaattaatcttgctatgaatgtcactgatgcttatgttaactcttgcaggttaggcaccttgatacctctgaaaagagtgaatttcacaagtt

SEQ ID NO: 183089 - DNA, 312 bp, Zea Mays
tttccttatgctcatttcttccaagtcaagcctagcattaatagtgtcctttgtcttcccaataatgccaagaaatgtaccaataatggactcataaatattcttttcaatgtgcatcacatcaaggttatggcgtagcttcaaatttgaccaataaggaaaatcccacaatgatgatcttcgtttccaacattgaccatctacttctcgctttctctttttactttgagggtgttgtcccggcctaacatccttgaccctctccaactgctgcatcaactcttctgtactaaattcctctggtttttcaag

SEQ ID NO: 183090 - DNA, 342 bp, Zea Mays
agggctatgggatatagatagtggattttcacaggaacatatagaggcataaagactgatgcttactgccacaatcagtctcacagtttcatatacaagagtgacctccactccgatccagcttcttggtcaagtaaactgccgaggaggaagaaaagcgagtgccaagaaaatggaggacagtaaaatggaaggtgattggtagtcccctgagaattgcagggttagagttcatatttgttgcaactcatgtgaataaaagtcttgccattttaaatttttgttgccaatttagcttgtaacagaaggacagacagacatggctcaatggtagaagccttt

SEQ ID NO: 183091 - DNA, 470 bp, Zea Mays
cttggtatgaagtacttggagcgtgctgaattaaacaatttcacatttcagagtgacatactgaaaccttttgtcattttaatgaggaatacccacaactcaaaaatccgaggtttaattgttgattgcattgttcaggtatgtccttgtgcatgaactttgacacatatatgaatctatgaaatgtaatgatctggtgtttcttaccaaatgatgctacatgtaaaaactttgctggatgtacatgtagttgatcaagtcaaaagttggtagcataaagtcagggtggcgttgcgtattcatgatatttactgcagcagctgatgatgaggatgaatcaattgttgagagtgcttttgaaaatgtagaacaaggtaaataaggaatttatacagccggcttgtaaagtgccttacacagcttatatcctacatatgttgaaattttatttgctgattttgtgaactaaa

SEQ ID NO: 183092 - DNA, 336 bp, Zea Mays
gattattcttgctttaaccacaccgaactaaaggctattggaagggtgctttcttccttcctccatttgcgccaggctcctctttcttggtgtttcctcatgaaaccttgctttcttgttgaagaatgcagttcctgttttcttccgcgagagtgcgaggtagaaggattcggtaagatttggtagcgtagcaaggggggaaagctggaggcctcgtccgctggttcttggcttgtagaaaaacctggcctttctctgagagcctttgccctgtatttgcaattgatacccctctttgaataagtatttcccccttttcaagccaatatgttccgc

SEQ ID NO: 183093 - DNA, 803 bp, Zea Mays
ctctagagccttctttgtcgtgtacctcccggagctctcgataaaggggtctactggagctctatttgtcgattgtcagagagaacacttggcaaaggctccgtcaccgtcacttagcgccatgacggtgacttttctttgcccaacacaggtgacactcgacaaagtctttaccgagtgtccgataaaaagtactcggcaaggaatccgttgcgaatgtacaattcatcgggacctctttatcgagagtcacactcggcaaagactttgtcgaaagttttctggactttgccgagtgtatgaagcacttggcaaaacaactgtttccggtagtgcattaagaaaataatcgtgcacatctctttagtttctgatgcacttgtttcactaacttttctgtcctgatgacgtagctcatcaaattagatgattttatgctagctagcgaagataaaaatccaacgggaagaacaactgctttgacttgttttaagagagaagaacagttatttggacactcaagttgaagtagcactgctgtctactgctaagtcccagtaataatacaagcataggatttgccccaaagggcagccagattcttcacattcaaaatcagtacagaaatactttatttaacgtcaggaccagtatatgagaccggacatgtgcgcaagactatacatagcccatatatagctagcatgtagactagtttttccctgttcctccgtccaaaaaaatatcatttctgaaggagtaatatatatataatttaagtatttttagaaaattatatttaa

SEQ ID NO: 183094 - DNA, 648 bp, Zea Mays
gtggaatcatgctaccgtaaaggccttgtccgtgttctgactgccacttcaactttagctgctggtgttaacttgcctgctagacgggttatattcaggcagcccaagataggtcgtgattttattgatgggactcgctatagacagatggctggtcgtgctggtcgaactggaatagacacaaaaggagaaagtgtaagctacaatatctttgttccactttattctattagagaatggttctgacatttcactagttctgttttaattgtgtttttaactttagcctaccccaactgcttgggagaaaagggctttgttgttgttgtctaataatctgacatttgaaatgcatgcagatacttgtatgcaggcctgaagaggtcaagagagttacaggtattattagaagcaattgccctcccttggagtcctgcctctcagaagataaaaatggaatgactcatgcaattatggaggttgttgctggtgggattgttcaaactgcaaatgatattcatcgttatgtgcggtgtacgctgcttaattccacaagaccttttgatgatgtcgtgaagtcagctcaagactcccttcgttggttatgccataaaagctttcttgagtggaaccatgagaccaagatat

SEQ ID NO: 183095 - DNA, 688 bp, Zea Mays
ctgaaggtaaactttctgaaaagtctgtttctgatgagtcacgacaggtatacatctacagatgttcagtatctaacattctatagagtgaggtagataccacaagtttatattttcttatttttcaggaaacttcaaaggtagaccgaaatgtcaattgcctaggccaagaaggtactagcccaagtagtactccaacaactgccattagcaatggtggtgctccgattgacaatgtcaagtctccagatgaaccagattcttcaaaacagaagcaagaactgacttctggtgacgaacagacaccagattcttctaaacagaagcaagaactgacttctggtgatgagcagacaccaaattcttctaaacagaagccagaactgacttttcttgacaagcagaccaaaagttctgagcaattggtatcttgtgatgtagaagtacaagaaccagtgactgttggaactgaaaagctatctgatatcaattcaaagaaagatcacaagcttggttcttccaccggatctgagatgactgaacaacccaaggttgttaaagacaatgagagtctagtagcatctgagttatccccagagacaaatgatggtgataaaaagcagctaacagagtctggcaatataactgctgacgaatcatcaaaaccaatcgatactaaacctgcttc

SEQ ID NO: 183096 - DNA, 828 bp, Zea Mays
atttgtagaagtggcaatatacctgaagtagtacatgccacaaatatatgtggctgacaactgatatgcaattgtttcctttgtagtactcctgacccagacaatgtgttgatagtgaagacaccggaaggtgttttctctaccaaattttttctccaaaatggtgagaaacagacagctgcaagactcgtcaggaaggaaaatcaccaggagaaagtgcttcctcctataatttctgactgtctagtcgcaaagtgcctgacctatgaaatgtcgaaatacaaggtagttttcttgcatctgcttattgtttttaattgtcttcattcctattttttttagaaagggtagtacttactgccatggatgaattttgaattccttttaaacatttgcttttactaattatttattaggacatcagttgcatattgcattctttggttattcaacttggcttgtttactggttcaagaataaacttagtgacatttgattatgttaattgctttatttggaacaactggttctctagcatctgtatcagatattttacatgcatcacacatgctttcttatcattgagcactgatgcaattactgctactttctagttatcttgtgatcgacttgtttcagtttaataccatttattgtgtcctatggatctttgtcttggtctcatttttggttcctgctgttaagtcttcagggctattgtactaaatactaactagtaagttatctccatttttttagaaacaaccaggagaggctattgcccaccggattatgggacctcgtcaccactctcaggattttattgat

SEQ ID NO: 183097 - DNA, 1044 bp, Zea Mays
aatcttgcacatttgggccggagcattagtggcaacaatttaatgagccagccgagccatcaattggatccttctccacactcctttagagactcacctgtctgtcaagccaatacagaagttaaagccaaagattctgttggagcaactctcaatgaatcttcctctcagtttttccttgctccatacacacaacaattggtggtcgagccatcgacaactccgtccccaagtttaagtcagcagaggaccatgaaacaatctaggaagcaaccccctgcagatgaattgacaacaaaccaagaacatgtgagtagaagtgaagtttccagtagctcaaatttgaaaaccatgcttccgaaccatctagataagaagcacaatgatgcggacaagggtattggaactggatctcccttgaaacatcttcacattcgaaggcaggtaaaagattgggctggaaatggtattgacttgattccacataccaactatgatgtttctactccagtggaagcgtccttatattctgaaaaggttatcatgcatccagaaaatgcaggagggacatctgggctgcaggaacatgccggtcaaattctaggcatgccccatgccttctcagatcctttactaaagaatcttaatgacttgcctgcatcgaatttgtcattacctgctggttcttacataacccaatcattttcccagaaaatatgccatactaatgagttggagagaacaataagtaggactgggccagcttttgaatgtgtcaaaccccctgacattgcccgtgcagatgaatcaaattatcttgtttctaatcatattgaccaaaggtacaatcaaggaattattggcccagccagttcacagccaccagtatattaccaagatgaaagtttgtcaagtaatgtgacacaaaaatgccatgatggttatcatgtagttcaacagcaggataagttttttcatcaggataaaagcgcaggtccaattattgctccctggaacaattttgttcaaacagggttaatttac

SEQ ID NO: 183098 - DNA, 902 bp, Zea Mays
caggttgctcctgcttatgcaacaccgcatcagccgcctcaagtaaccacttatgtgcagcagcagcctcaagtcacccattatgtacaacaccagcatcctcagtctgctgcttatgtgcagcaggtgccgcagtcgtacatagagccacagcaggtacaatacatcaacacccaacaatttggtgggcatggggtgccgcaatctgtcaattacgtgcctgtgcatatgaaccaattcatgcccagcattcctgtgacgggttctttggccaccactgctgctcaaggcagtacgttcaggcctgcttccgcaggtgcagaaccagttctggagaccacacagttcacaaggccagtgcaagctcaggttgatcatagttaccgggtggtgcaaactccgctatcacagcttcctcctttgtcttctgtgcatcagcaggcaaatgatgcgcagaggcagaggtttggtgttcaacaagcgatgataagtgcagtaagcatgccagtggtgaccagttcaggcacaattcctgtggtggttagctcggccactgttccatcattgagatatgatgattgcacaatgtgccaaaaagcattgccacatgctcattcagataatattatccgggagcagggaaattctcgtgcaacaggcaaccttgaggcagctccaatgttttatagcccccatcaagacagtggatccaacaaatctagtctaggtgcaagttcaggaactcctacaaactatgtggcggaaccaagagctgggaacacagcagtgatgacacaatttaattcgactcttcctgccagaaaacctgcagttcaggcaactgcatctccggatacaggtgtgccggttcaacccaccgtgattcctttaccagtgtccag

SEQ ID NO: 183099 - DNA, 398 bp, Zea Mays
caaaccgatttctgatttggataagcgccccgctggaccggtgtcgcctgctgaagatgataaaccctgcatcttgagatggagtcagcagatgaccagagctgaggatgatcttcagaaggcagtggtgattactgttatcagcgatcgtgagaaagtaccggttgaagagattgctgagttaattgctcctaggctggagctggaagaggggacactgataattcggcattattcccagtcaagtttcattctctttctacctggctgtgacatggtggagatgctggtgggcaattggccttttctcagggcagccacgttcacaatcacctgcaggaaatggtcccggtttctgaactccaggggtgctgtgttacctgtcttgttggacttcg

SEQ ID NO: 183100 - DNA, 422 bp, Zea Mays
cctgctccacggtgccctcgcaatgctcccaagcctgcatgcgcttagcctctccaacaacaagctcactgacacgttccccaatgtgtcggcgctcgctcaagatgctctacctgtcgcaaaaccgactgtctgacaccatccctgagggcaagttcggacccatgtgcggccgctcaagatgctctaactgtcgtgatatcgattgtccgacaccatccccgagggcacgttcggacccaagcgcggcctccgcaagctacacctctccaacaagttctccagccccatcccaaggtacatcacctaaacacgactgctcgagttgtcgctcgccaacaaccgctttgagggctcgatgctggacttctcccagccagagctcaggttcatcaatgtctccaacaacctcctctcagaac

SEQ ID NO: 183101 - DNA, 444 bp, Zea Mays
ttgataatcactggaaccaattgtgaggatatcaagctattcaagcaagagatggtggctattttcaagatgacagacctggggttactgcggtactttctaggcattgaagtaaggcaaagcaaggagggaatatctcttagccgaggatcttatgcagcacaaattctagagaggaatggtatgaaagaatgcaacccgtgtcagactcccatggagacacggttgaagctgagcaaaatgagcactgaacccctggtggatgccactgtataccggagcatagtagaaagtttaaggtacttggtcaacactcgacctgaccttgctttttgcagtgggttatgccagccggtttctagaagaaccacacaaagatcacatgatggttgtaaagcacatcctgaggtatgtgaaaaggaccaagaattggggtctgtggtt

SEQ ID NO: 183102 - DNA, 666 bp, Zea Mays
acaagattcgcgagggggagaaaaggaaaggagagtaggagacaacacgaggcgccgaatcgaaacagggaaagccaaggcccctcccccgcgtacgcgtcactgtgcggcgcctcccccttcctcgctccgctttctgctctgttcgtgtgtgagtcgttgacgaaaccccaagtccatgtgggaggttttgacttgatccaaccaagaacgcgcatttcagccgtaaaatactcgtaccggtttccaggtccggtcgcgtcttgctctcttccgtccctcatttgccttcccgtccctgctattcgcgtgtgggcctttgcttacccattcttgcttccgctgtctttgctgcgtgtaaatctgatccagtacttgtgtgtccgcgtcactggggattctttactttaagttggatttggcaatgtcaatggaaggagcgatatctgatctgaattggtgacatttcttgctgctgctttggtcctggggtgggcggattggagagcgaccactgtcttgccggttgcttttggggtagctactgttcttgtgaatttctgatgcggagtttcgctcaggatagggaaaggagtgatctatagatttctaggcttctgtagggaaagaagtgatctttgatagatttctacgcttctgttggcg

SEQ ID NO: 183103 - DNA, 334 bp, Zea Mays
gtctttgaggatgttcctagggcttagacaaacatatttgctaactgtccaactagtctaagtcccaattcttgaactttttccattctccaacttgtaattcttattttgctcaaactagctccaaaagaacgattctttaaatttgagctatccaaccagtcttgatgtatcaaaaaggttcctatgggtgtatgtaacttatccaaggtgtgaaactaagtgatctttatgttttccaagatttacccctctatggttggttttgagctatttctgtcctagaactgagttgagtggacttatgcacccgtgaattaaaaactaggcaaac

SEQ ID NO: 183104 - DNA, 1912 bp, Zea Mays
cttcgccgtctcctacttcctcacgcgtgagcacgtccccctctgtccctctctgcttccgtgcctcatttgcgaccgaattggttttgccacccccacccacacatacaacacaaatgttccgcagcatcgcccagacgagggatacgattggttcgttagcgactacaaccttgccatttcgtgtctatctgatggacacagcataggtgcgagaaaatttgtgtagcttgcttctgtaaatgctgggattgcgatgtgatttgatggctcatgcgttacaaactagagaccttttgttgaccgggaagctagcgcttgtagtcacaccatctgatagctcctgaatctattctgtagtgacctgtaatgcctgttacgtggcatttttttgaaagttggctactgcttttctgcctgcattctatttagttaatactactactgctgctgcttttcggttacagttactaagaaggcttgctggatttgcttgagatcctgaaaatccgaagtttaggatccttaatttcattttagaaacttctgcatgcattgtttatgaaactgctggagatgggaagtgttaatctagggtttccttagactctctttgtgagatttcattgtggctagagtgcttctggatggtccgatgcaaacgatagatgttttggtggttattaaaacgtgccgagtatgaagcagaggtattggcattagcgattggataaacttgaaaagatagtgatgttcattctactctgaggtgaggtacagtttgtatgtaaatttccaagccataatcacccaggtgccacattttgaaattttcccggactcgggggttgaagatgagtttgtgtcacacatttctatgttatttacctatagtgtgaggtctagggaattgctcttcaagctacagaatgtgttatgaatgcatgcaaaagttttatgttacgatgcttcagagaattttagcttagctttagtaaccactcaaacgatgtggtggatatgtggggcatctatctagttgttgttggcaagttgtggtttcgaattaatggttgaaccaaaaaaaaaaaactccacctacaaggggtaagacagcccctgggtattgtattaagaaaataagaagactttctcacacatgaggagcactactcagagcacctaaccaattcagctagagtcccttttgcaactaatggttgaacacaaatgcaaatagcagctagtttgtgtccttctgaatcatatagtgagtcttctctgtcttttactcaacttggctcagagttcagtcatgacactgcaatgatgtcttgagccttcatgatatcaacaaatgaaggcaaagatgatccagtgagagacgtgaagtggattttgcttgtctattgtttacgtattaatgagttagcttgcagaaaaataattgcctatagtcccaccacttgtgaaccatttttgaagtaattggctagttgtcagtggaaaagtagcttcagataaattaacattttaacttcactatttggtcatgtgtaattttattaattattatattttaaattaagcatgcatatatttttctctagcctgatctttttacttgtcaaaatagccttctttccttcctttttttctgtttcactttctgctctgtgaacgtgttggcaacctttgaacacttagtaattattgatctttcaacccttattattgatttatttttgtgcgcagaggtttctttatgtttgtattattgtatacgcagtatatttcttcttaaatatatagtccagtcgcttgtgtccatgctaagatccatatcattttgtttcaaatagatacaagtaaatcaatgtggacaaatgtgcccatgtcaatccttatactt

SEQ ID NO: 183105 - DNA, 587 bp, Zea Mays
gcagtcaacaacaagcaccctcgcatggacgacccccactccagaaggcaacattcacacatgcaattccgaagacctttcccgcgatgacataccatctgggttcacaccaacgggaccccacctagtccaagaggacacagacaacttacaagatggcgaagacctaggaatctcgttagaggactagttgaaactgcacaaccttcacatcaagaacaaccatctctagaagcagaagcaagtcctcacagccaaaaggcagcaaaccaacatgcaagccagaatcaggcagctaatcttagaagaagaaaaagccagtgcacttgaacaggagattgcagaaatgcagtacgaagtcccccctcgtcagcaaccaattgaagcagccttcaatccaaataacctttgtttccagaggccaacatcgatgcaaatcgcgttccaagggctcaattaccttaatgagcgcaaccccctctccactcaactctaggccacaccatggtcacttaattacagagcaggcacttatcccaagtacaacggcaggacaggccccactcagtacatcatgagttatcatg

SEQ ID NO: 183106 - DNA, 629 bp, Zea Mays
tggggctatggaattactgactatgtagccccagtttttagaaatatactcgaggagaattttatgtccctctccagcgcaacccttactattgatgatgtaaatgcagatcgtgtcaggtggtggtcccatagaatgaagctcaacaattaccttgctaacacattgaagtaagattacctatgcatatcaaagttgaaatttggtggtgtggacacaagataatgtttgttttcctgatatcattttcattctttcaaacagagacattgaagattcttggtttggaccctggaaatgccttctgttgggccatcaattatctgatgaacacattgagactgcctcatcaatgattatcactggtctggatacagaattcgaatttgaagtcaatccaatgctcatcaaggctatccttggtggtgctgtgtcagtggatgaagtacaagaatgttttctccaactcattttgtataaaggttactttggaaggggaggatgctgtgggaaagatagacttaaagctttctcttcctgccaaatggatgatggatctatggagacactcaaacgtataataacggatgcatcatatgagttgcctcagccagctgatagagatccag

SEQ ID NO: 183107 - DNA, 378 bp, Zea Mays
tgctacaagaacatgcggagggggagtcacaagaaaagagctggaggcgagggctgacacggagtttggagtcaaaagggcccatggtgaggaagagctggactagagacggaaatggaatgcgggcaaaagaatctggaaaggttggaaattcaagagatgagggtacaggaagaagaaacgcatgtaagaaaatgaagaaacccccggatggtgagtatgctggcaagctgagagttgagctggacatgtgctccaagagaggagatgtgatgggggcgatcactctgtatgattccgcagtcgaggaggggatcaagttggggcagcatcactacaatgtgctcctttatctgtgttcttcagcttctcttggtt

SEQ ID NO: 183108 - DNA, 434 bp, Zea Mays
agtaattatgtcatgtcctagacctgaatagtggagccattaccaataataatgcgagaagaatcatataagctttgaggatgagcaatatagttgggtagtatacctggatcacctgacatatgggcactagcactggtatccatgaactagtcagtctgctattcttggggaagatatgcagcctagagcacgtgtaggaggctcgtggtgctgaaggaaggagccacaacaggcgcgaactgagtgttaggctggatcagcttggcaatatgcgcttggttgtcttgagggcaaactctgaggacaccaagaccaatcgtgctagtccatggtgcatgctaggcagatcttgaggccaaccatgaagcaatccatggtggcaattgctagagtccacgaccatcgttgttgtagtgcatgctgcccttgca

SEQ ID NO: 183109 - DNA, 353 bp, Zea Mays
gttagtgtcaggattcagaaaggaatttgtcatactgtgttttataattttattgctacatcagtcttgctttaattgttattgtaatgattacacgtaagcttttgctattaataaccttttaggtttctggttatcctgtcttacctagaaatgaatccttttatctgagcaatgccatcaatatcaaatcgtctaatcgttcctagtcgccatggcaccaatcagtctgacttatcatgattagttgtgattaatcaccactgatcgtgactaattgtagtgcatagctgatcgctatggcaccgatcagcctaattaatcgcgatcattgcatctgagtttcaaggttt

SEQ ID NO: 183110 - DNA, 349 bp, Zea Mays
ttctcccaggacaggcttctgcttttaaccacttcaagaaatgccttgaatgatgaccgtgggtgcatcctctgaccatcatccttatcctcagggtgatgttttgcgccaccccatttgatctctttagctgtgtgtgacctaaaccaaaacaagtaatcacttggtgttatataagccaccgccattccacacacagcatcccctaatgcaacagcaccaaggtagcctgcatcagcaaggctatctgtgctgagccctgttgagtccccatgacacaccgtcaaccactcgataatatccttaatctgagactcggtgggagtgacacccaatgggtagtacttcc

SEQ ID NO: 183111 - DNA, 499 bp, Zea Mays
caaatttagacctccaggccagcagtataccaccactagcaccaacagaatgaagagccacgaaattgttgtcaaaatcaggacctaataacgagagaacaaggcgatgactgcagctttgcatcttggtctcttgtaaacaaattatgtctgcacggaccgactctactagacttcttacagaatcttgtctcgcaacggaatttaagccgcggacattccagaacagaattgttgaagggtccattagtaaacacttagaggacaacacacatccaccacattagcagaccaaggtggccgctccacccaagtaatctgggactgcccaaccaaaaagtgctgcaagggcttgaatctgtgaataggaaagagggtggcagaaaagcttggcataagtctccagatcctcacagttgagctgagtcgcgtctgaagtattatgaattgccttcatcaccaccatcttggccctggggatctgcggaatgtgctcagc

SEQ ID NO: 183112 - DNA, 279 bp, Zea Mays
aatcgacagcgcctccatccgtttccgggtacgtacgcgctgaccttactatctcgaaggaagaaaaatgttgccatatatttgtccttgccttggcgccaaatatcatctcggatgccggttgccggtccggggccggtttttgaaggatttggcgcctaaggaggtggtgtttttcgcggacgacgagatcctggtgctcggattctccaaggacctggtgctcggtgagggcgtgctcagtatgaagttcaacggcacgctcaacgaccagatgag

SEQ ID NO: 183113 - DNA, 366 bp, Zea Mays
cagagggtatcaatgtacgcggatgatgtggtgctcttcgtgcagccggtggcgagtgagttaaccttgacaaaagagttgctgcgggttttcggagaagcttcggggcttgtcaccaacattagcaaatgctccataacaccaattcggtgttcggatcaggtggtggaggaagtacaaggagccttgaactgcaatgtggtgaattttccatgcaaataccttggcttgcttctatctcacaaaaggttgacagcggctaacttgctacctttgattgataagatcgctgacaaactcccaggatgtaaagctgccttgatgcatccgggaagaaatatcttggtgaaagcagtccttacagcc

SEQ ID NO: 183114 - DNA, 329 bp, Zea Mays
gaacggcgcagagcgcatcttgaacccccgacactctctctcctcacctcctaccggtctaacctcggcggcgcgcagcaggcatcgcggcagcgccatcaccggtgtgcagcagaccgagccccaggtgtcccaaggtgtgattcgaacggctcttacgcgtggatgaaaagaatgtgatcctagggaagacaatctcaccagaaatcgtgcagtgcagggctttggcgacatcacacggcggacgttggtgaaggagcctgaccatgcgtgtagcagccctggcgacggactccaagtccggcgagctaccctcgcccaaccgcggc

SEQ ID NO: 183115 - DNA, 419 bp, Zea Mays
ctcggaggaggcttcttgatgacaaaccaacgattgggacatgcagataagatgatcgagaagtgacgtggtaaggcgtctcctcagtagcacatgcctgtccagaccacacatccaaagaggtagatgtcggtatagttgatgtcagtgttggagtagatatgtgcggggttgatgaatgttgggcgactcaaccccgatagattgggcaaatgatataagcaacaacaggtgagaaccaatgttaatggagggcgacagggtaggtcatcaagaggtgtcttttggttacacatgcaacatggcccacatgtgggctcaccatgcggattagacaaatctcgtcgacgcgggagggagcggtagtgtagactgtagagacgacatggatcggcggtggggcaggttggcgactgtgg

SEQ ID NO: 183116 - DNA, 390 bp, Zea Mays
tccccgtctccatcactctgcgttcggggtttcagtcgtgatgggtctgtgaggacacgacgaagctccgatgggcattagtgggcctggtggagcaccggggaagcggtgattgctcaccgtcgtcaaatctgctgcgggggatctcctggatgcgtcgtcctcggtaagaatacctctgccgagatctcaataccctcctctatgtgtagtagcaatcgggattcgggttggagcacgaaagcactgggcgccgctcgggggagtggggctcggccttatgcgccctggccgccaccacggtgtagcgtgtgtggaagcctggtgaagaagactagcgccgccgtggttgtccagctggttgggaagaaatccctttggccgttggat

SEQ ID NO: 183117 - DNA, 487 bp, Zea Mays
attgtggtaatctttcaccgctagctatcataaatatagctggcatgttagcaggctgggcggatttcaatatgaatgactgggagtacgtaagcaagtgttgtacatcaacagcaaatcttactaccgaggaggcgacggagagatttctgaaccttatgtacaacaagcttccagccaaattgaagacgtgcctgctctatctcagtatgtatccagagggctgtgtcatcggaaaggatgatttggtgagacaatgggcagctgaaggtattttcagtcaagtggtggaaccaaaaggtagagaacatgaagtgggttttatttattttgatgagctcctgaaaagaggattgatccagcctgtagatacagactacaatgatcaagtgttgtcatgtatagttcatcaagtggtactggaatttattacaaagaaatcaatgcaggaaaacttcatcactgtcgtggattatcgtgaaacagg

SEQ ID NO: 183118 - DNA, 326 bp, Zea Mays
ctccaaataaccaacgacaccgagggtcaccgcgtagtcatcatcatgaccgaggactggcgggcaccaataaccctgttcctgcagggatactaccagccaagcgatatcaacgaggccaagcgcctcaaacaccgaagccgggacttcgcactcattgagggacagctttacaagaagggggtcagtcaacccatgcttaaatgcgtcaccgagaccgaaggcgtccagatcctgcgcgatgtccacagcggaacttgcggctctcacgcagggcccagggccctagctgccaaagtgattcgttaaggcttttactggtctgc

SEQ ID NO: 183119 - DNA, 309 bp, Zea Mays
tggaatgtggccggggcattgcagaggccgaacgccatcaccaggaactcgtacaggccatcatgagtacggaacgcggtcttgtgcacatcctcagcccgcatccgcacttgatggtaatcggaccgtaagtcaagcttggtgaagaagcgcgcgtcgtggagctcgtcgagtagctcgtcgaccaccagaatggggaaggcgtccttgacggtgagcgcattcagggcgcggtaatccacgcaaaagcgccacaacccgtctggtttcttgacgaggaggaccggcgaggaaaacggtgagtcgctg

SEQ ID NO: 183120 - DNA, 395 bp, Zea Mays
catgaatctgcctctggcggcggcgggggtttcgggtcctctttctggactccagcggtggagcagtcagaggagctccggcagccatcgcctctgatgcagcaacaacagcaacaacattcaaggcggaagccatcggtcagctcggtgccagacagtgttaccagggaggatccttccaccaagtacgagctgctccatgagcttggtgcgactcttgctctggaattattatttcattagttctttatatgtctttttgtataatgcctgaaattttgagctattttgcgcaatgcaaattcaattggaaatgcagggaaaggttcatatggtgcagtgtacaaagcaagggatctcagaacgcaggagcttgtggctgtcaagatcatctc

SEQ ID NO: 183121 - DNA, 308 bp, Zea Mays
cagctaaatcgaagtaggtttgtttactgttcctctgtgtcacatgcaatttgcagagatgccctcgatcttctatctcttccccacgaataccactaaccacggcgcacacgcagatcatccctaacgtggtccgtaccggccatggccggcgatgactgctcgggataactaacggggaggcttcaccgatctaagatggcctcggaacacgcatcaatttgacacgaacgcactgagaacgccctgtccacatgcacggcgaaaaccgtgaccacgggcacgcgttcccgcttaatcagggccgg

SEQ ID NO: 183122 - DNA, 910 bp, Zea Mays
atctgtgttgcttaaaggtaccctcaataaggtatcctcattggaacccagcattataaatgacatcattgagcagtggacatctgtccaagctgaaactgagcgcatgagcccacaagggaaatatttctgctatctaaaaggtacactcctgaggcctttccatgcgaagggaatcaatgcactgtaccttttcacttgatgagttctcacttaccttcaattctttcttaccaggcttcaactgctcgaaaagtgaagatgaccttaaacagtttcatttggccttattaccagaatacttgcagcgagattatgttattttagagaattcccaatcatgcagtgcagtatctccaaatgccatggtgccattagcacagcattttgcggttgctcacttatgttgtatgccacgccttcttacactggttcagaagctttgccagtctcccgctttggaaatggttgaagatgtaaacattggcttgaggttgtctttcgcccaaaggattttgaaattagtctgtggtctcactattgagtttcctcctgatgcctctgatgccatgatgttatcctcagtagcgagatgtgctgatagtcttccagccttgtttagactgaggttcaatttctctaatcatgacagagtcttttctgtagatggtgttggcactatcttgctgcagatactggaagaatttttacaggtagtgcaaaatattagtgtttgcaacagtgatatctgttgtacagttaaagcatgcattctttcatccatgctggaaatcttcagtcctaatatatggagatatgaaaaatcgggtgcttgcttggtgcctcctttatcttattctcctcacgttgttcaatttgtgctgcaactttttaaagacaccaaacgatg

SEQ ID NO: 183123 - DNA, 542 bp, Zea Mays
atatcttagccgaaggtcatcttgagtgaatgttacaggcatatgaaccacttagatctgatataggacccctgaacacctatatgttggaccctcctttgaagttcttgtttttatctcttattgagtggcccgaagcttgatcttctcattattgggaatatgtgctttgctggtggaactaagttgttgacgtctgagctttgggctcttcccttctactgagctggctatgttctcgtatgtggcgtttttgtggaggttgattatataacattggatcatattgtgatgggtctggtagttgggggttgtaagcttcccactgttgtgactgatgttgcacaattgggcttgaggacgaagaatgtgagttctgcccttgatgctggatgtatgacacatcatagttagtcgagcattaagatgatgtatggcacacattcttcggctggccttcctgcttcacggttgccaattccttatgcttttggatggtgatgctacaatattttgttgtatgctctttattctccccgcaa

SEQ ID NO: 183124 - DNA, 470 bp, Zea Mays
gtcccacatggttaaccaaactcatcacatcctccatattgccatcaaaggaaaacaatggtgtcccatctttctctctgccgtgaggtcctctcaaggcaaccatcatgtttgatttccaccgaatggcatccggcaatacagtgctgtcccttataaactttactatttgctcttccaagtcccagcgtttactcttgttaaaacctatcaacaatgatgttattgtaaccaaatcaacactgaagccttgctgctccatctccttcaccaactctacagcctctgcaacttggtccccaatcccctccttgcagaactccctcaccatgatactataagcaattccatccaacagttgccctttcctccttagctcgtaaaaaagccgacatgctgcttctgccctcccattattaaacagcccatctatcacagtgttgtgtgtgcttgctgagcattggattcca

SEQ ID NO: 183125 - DNA, 672 bp, Zea Mays
cgaccgccgcgcgtccccactaaaattcccggccaccgtcgtcgatccctataaattgaagcccccgccagccccgcaaggtcatcacacacccagccaccaaaaatcactagcaatcgttcgtcagagagcttgaattttagttttcccccaaactggtctccgccgccgcgaagaacacctcgccgcggccaacgcaaatcaggtccaatcctgtcattgttagtgttgttcgtacattctcatatgtccgcaatgctcactgacccacttaattgaattatatcgccaccaatcaccgggaacaccttcacccatccgcaacattctcggttcacgcggacagagcttaataggtcgccattcgtgcaattatgttggggaaaatcctctctgggtctcgaatttggtttaatccaaagctgggcactagtccttgccccaatcggccgacatagacagctcgccggagctcggccgtgctccacgccgtcggggaccgtgaaacgtaaaggaatagaactcgagggactttcttgcaaagtgtcagtgactctgttaaacagtgagagaacccgttcgcagatagtgaaaaccccgaggcctttcctgtaaagttgccagcgcgggcgcgttttgccctggacctgggccgtctgggccagaaccggc

SEQ ID NO: 183126 - DNA, 348 bp, Zea Mays
ggacctgcaacccaattccaacatcctttgcctgacagcaggcaatcgccacgtgctgcaacagatgcacatggcggatgagtcacagacacaggccaaggccaggaagaaagatgagtcacagacacaaaccaagaagaaagatcactcacaggcctggggaaaaagcaaggtaacaaatgaaccttccatgcagggcaagggcaacgatgtccaggaccagcagcaaccggaggcacatgtcgggagcacatccacggcagcagcagataagacaccttcccagaaggacgaagacccaacccaagttacggaacagctaacaaataaggtataattcatcaacac

SEQ ID NO: 183127 - DNA, 319 bp, Zea Mays
acacagaatcaaaatttgcagaactctgcaaagcttacatcaaatgctcaccaatatgagtttccagcaaaggaatgtcaacaagtagaccactgggatagacaaccacatgatgatcaatcagtagatcagcgggacctgaataaattttctggtgaatactttcctggttctgacaatcatcagagcatattagtttcgttgtccagtacgtgtatcccaaaaggcttggtatgcgagcgctcccatcttttccgcatcaagttttatggtagctttgataagccacttggtagatacctccgggacgacttatttg

SEQ ID NO: 183128 - DNA, 537 bp, Zea Mays
tagggaagatgttatgaaatccttagtcctcaaatacttaccagagacaatgaaagacactcggtagagaatggcctcttcacgctcagcccctagccctagaccatcatctcccaaccccagccccgtcacttccctccttggcgtcaacgtccaccacctcaacccctcgccggacctcactccaaacccggcgaacacctccacgaacccccctcttcctgcatcagggcccacagcaaacatcgttttggcttcctagtcttggcgggctaagttccagagatggagtgacgacagtcctaccccctcgttttctggaggctcatgtgtcgtgccttactcttataaaggtgtgctctccaatgatgggagagtagcctcttctccgttgtgtgttgctgcttcttctcagttgaggggtgcccaccagttgcaagcggtgaagaagatagtctgtgtgcgcccggtgctgcaaagttaggcgccagcgcttcctacccgttctgaagacaggtggcgggaagtggtgcgtag

SEQ ID NO: 183129 - DNA, 1335 bp, Zea Mays
tggcgcctacatcagcaaaggggtctcactcccctggcgattcagtggctaccttttgccattcagtcagtcaactccctcaggggcttcgttgaacttcgtttcacgagctgcctgctattcatgtgtacgtaggtgtaccccgaacgaaataaagtggtccttcctcttcattctaacaacggcctagcctaataagggggcacatactgcactgcccacttgtatcgttatattgcgtgtgccttctcattcattttcatttatcatatgaattccctgcagtttatcttactcacatgacatgtatgtatctccttgtttctgtgcctcatcgattcgctccattcttttccataggtccctgcagtgtcagacaggctcttcctttccatagtttcagtcgacagcggaaggacaattgcaaagtccagcaaagtagcttctcggagtgggatatgccagtggcctgacacaatcttggaacccatatggttctccaaggacgaagtctccaaagaattcgaagattgccagtacaagattattgtttccttggtctgtactggaatgcatacctcacctgttcttcttggatgttcgcttcctgcttcaatcttgataccattgttgggtctgtcactaacaactgccctcgtgtaatgttctgttccagggatcgacaaaatctggcattcttggggagatttttctaaatctgtctaattttctgaatatagtcgatccaaccgcaatctctttgccactgaagagatgcaacgccggaacagttttacaggtgtgtttcggttatttatcacacgtcttcgttttcatgggccatttgggcatagcttacatgatttggtagcgaatgaaaaaaaatgctggtattgcattcccatcataggtgccaactgttacataagtacctatttcaagcttgtgcttttgagagcatacctgatggtgtccttactactgcttatgttgatggtcatatttttcccctcacgtgcagcttaaggtccaatgtcttggcacaaagtctaagctgaggtaactagactgaaccctcagtatttcattcttgccaggttctgttcagtcttctcttccctcaaatcctgaattttgacaattctcccatttctatgtagtggtgtcagatcactgagggacatggctccccgtctcgatgaccgtagtccaacgccaaccaatgatgagatggacaataagtcagattgctctgatggtatgttcaacaggagtgttcgttcttcatccgaaaatcatctggttggaacttatcaagatgaatctggaaacagg

SEQ ID NO: 183130 - DNA, 338 bp, Zea Mays
gagcaggaatgacgaatgtaggtttgggtgataggtggtttggaagagtaagatgacgtggagatggaaggtggtgttatgggaataagaacatcaggtgtggatgtggaagatgatagttcagatgaaaaatcaggaatggaaggaagacacatgaaagaagtggattctgtgggataatatgaggagtgagtggacttgttgtgaaaaagggcgattttcattgaaactcacatctctagaaattcgaatacgacgagtagctggatcataacaacgacagcctttgtgttcaggactgtatccaagaaagacacacttgacagattgagcagtca

SEQ ID NO: 183131 - DNA, 374 bp, Zea Mays
ctgtagctgtaacctcaaatggcctgtggtctgtggaagtgtggagtggcaccttcagatgcagcctgtagtttagggatgaaaaaggcggatgcagtatggccaggatcaactgctaagcgaaaagattatatccagccgtagccttatcatagggaagataaactgcttaagctcggctgtaactggagcaggttaatcatggttgacggtacggtggtctcagatgatcctcaagttaagtatttgttggggacgagcagagtgcttcagtgcttgggtttgtctacgaaccatggaacaacccacttgtatctttagcgtcacagcacaatcacaagcgctgttgtggcccttcgagggcaacaggaggt

SEQ ID NO: 183132 - DNA, 531 bp, Zea Mays
cacagacagcattcattctttcttctccgtcagttccctccactgccttcttggagctgaagctctgcacccttctcctctccccacaattggatcacgccctatctgtccgtccatccggcctcaagattccacggcgctgcgcaaggtgaggctgtccctgctcttttttctcaccttctgttgtcaccttccacaaatctgttatggccgtcgtcggtccagtccacccatggtggaaagtgatagcaaatcccgcagagaatatgaatatggcgccatttctcctcttgccgctacgtacgtacgtaacatccaagattcattagattttgcatgcgctactagtacactactagatacagtacttcgacgtcatctgatggaagcatgagcaagaacttgatgcaagcgttgctcttctttctcctgctgctaattaaattcttcccttctcatactagcgtgcctcacgcaatgaatgccatgcaggaccttccatccattgccatgtcgtcaaaccagaacgag

SEQ ID NO: 183133 - DNA, 578 bp, Zea Mays
cctcttagcccagctaggacataagagaaacttgcagacattacacccccaaaaccacatgtgccctgaacacgaccaaagattaactcctggagctttatgactccagccaaacaccacagtggcacagcctcatctcttctttgaaggagtgctaggctgtctgtaggaagggagaaactccatcaataacacaatggttcctgtagttccacagtatccaagtgccaaatagatagttctgttacatccttttcttttggcctttccaatctttttacttgcttttctcactagtctgcaaagcacttgtcatggcgagtgaggcactgacacagtatgctccagctctagaagaaggctaaacagattgagacagaactgacgagcaaagacaatttgtgaggatgtgctgcactgtctcctcttggtcacataataacaagccatagaaagaccttgcatcggaaggcgcccatgattgccttgctgtgaagtaaacaagtgggaccagtaagtgaagggaagccttgctgtaaagtgaaccaagtctgccataatatcaggtttaattactg

SEQ ID NO: 183134 - DNA, 487 bp, Zea Mays
gctgaacggcggagcagtagctccggcgagcttgtaccggccaagatacgcaatgaccagtgctcagaagtggttgacacaatgacacctaattcgacctctaataatcatttcccctcaatcaattccaaggttctagcccctaatctctctgcctacggtggtcgtgcgatcaacgaacaactcgacacgttcccggtgatcctatgagttctagctcaattggccgggtcgagaagcatcacaagcacacaaggatgctaaaacaaggtcaagaaaggcatgatcggacttgtggattgctgaccgcgatgagctcacacacgcggtgttctggaccgatttgggggaaatcccaaattggagctctctggtgaataatccgagacacgagtaggtgcgttggatgcttgaatacatagcggagccgatagcacgctgagtttatagggttcgagggtggtggcccgtgaattggagatggcgc

SEQ ID NO: 183135 - DNA, 495 bp, Zea Mays
ccttgattgtagctctcacaacgggacagccagccaacatgatcctctttgccgtcgaatgttggaaagggaaggttgtggtggtgctggttgggagggttttggtgcggtgggtaagcggtaggtatggtggggttcggaaaagcctaggattggtgatggggagtgtgggaagggtatctgatggatgggtatgggcatggtagatgtgggtggcagcaaggctgaggttggcggtggaaggttggttgaggtggatcggagtggagcggctgtggtgatgatcggcggtgatggtatgggtggcgcggcggggtttgataagggaggtatcccgccataacctggcatgccatatgggatggaagtaggactggtggacgctaggggtggtggtggtgttggcggcctactgatcatttgagtgatggcggtggtgagatcggcaagggccttcgtcatggtgtcgatcttttgctctagcgctgtgttggc

SEQ ID NO: 183136 - DNA, 490 bp, Zea Mays
gctgctctgcatgcccaagcgctcgccatcctcaacgtgtgcgccctggtgccgaccacgctcgatctcgccacaccatccttctccaagtggcgtcggctcctcctagctcttggcaattacgctctcgccgaccatgttttgtgcgatgccacatttcctaccattccccactgggttcgcatggatctccacatcctttcgtggatttacggctccatcacccccaagctcttcgagatcgtcaccaccgtcgaaccgtccgctcgcggcgcttggctctctctcgaggagcagttcgtcggcaaccgcgagactcgggtccttcacgtcgacaccaagttccgcaccttgacacaaggtacgatctccgtcacggactattgccgtcgaatgaagacgctcgcggacacccttgtcgagccgatttcagaccgcctcctcatcatcaacgttctccgtgacctcagcggccgcttcgcccacctcc

SEQ ID NO: 183137 - DNA, 1139 bp, Zea Mays
taaaatgacaataaataaaagtaaacttaaaaggtgtgcatgtacaaactaacgtgactatgtgagtatacaataaatcatcaacaactagatatggtagtgtcgggatctctaaatagtgtacatatttttcctaataatgataaactaactagttgtgcttcataacatatggatgttggtttagactaagattattattttgtaaaacaagtcacttatatattggtatcatgagctaactaaaaacaaaatagtcttcttttccattgatgcggtgggcctgacctgttctagtgctaatgttttatacatatttgcttgcaacttgacatatatggagtggttaataatggaaaacgaagatggaatcatgtacagaggagatcgatcgaatcgatggtgggtatatatcacaccttgttgtgcgagtgatagtcgtagagtagcgtcggcgtcaccgcctaaggactgagccctagggctaagggtgccgacgtgtcatcgaaaaccatcatcgcaagccccaggcctagcaataaggtcgtgccacacggtggggactactacgaggaggaagatgacgatagcgacttcaggtcccaactgctattggaaaacaactatacaatgttctcgtcaccgacgctactctacgactatcactcgcacaacagggtgtgatatatacccaccattgattcgatcgatctcctttatacatgattttatctttgtcttccattattaatcactcaatatatgccaagttgaaagcaaatatgtatagaacattagatttaggactggtcaggcctgtcgcatcaacgaaaaagaagatcgttttgtttcttagttagcttatggcacaactatataggtgatttattttatagaataacaatcctagtttaagtcatcatgcgtatgttataagcattagaagttagtttattattattagaaaaaacatgtacactagttgtagatcatgtcactaccatatctgattcttaatgaactactgtatactcatgcagtcatgtttgtttgtatatgcacaccttttaatttttaattctatctattttgtcctttcatcactcacataagctaattttttatgttgttgttccctg

SEQ ID NO: 183138 - DNA, 302 bp, Zea Mays
gcgcctcatcgaccttggagcgcggtcttaagggtcaggaggctggtctagattgttctgctcccatggaagtgggtgaaggtccttcagctttagaggtggctgttacagaaagcttgaccctcaaggatggcgctagcgcttacccagcccccgagggtgttgccgggatgacccggctcggatgggtagcgcgagatatgacccagcccccgagggtgtacgagtcggttctccctctcacacttccatggacgttcacgtagggtcttctcctccgcattctggttgcatggcagcag

SEQ ID NO: 183139 - DNA, 624 bp, Zea Mays
actcagtttatattatcttcatgctttcacactaaaatgcatcacttatgttttgagcccttgatttggggtggtgtgttcagagtagaattggtactattttaggtttagtgtgcctgtgccatattgcttcaattccagagacgacaaacaaccacgtgaccggggcccatatttccctaataaataacaatcttgggaagagaagacatactctttctcccgctgaccaaacactaaagtattgatgatgttcttgaatgaagcatagcattctctgatagcaaaggaaaagtatggatctgattttatcctcttcgtcagatcacggtcttttccgccactgtctgctgccatatccagtgctattgggatctacaatccagcagataaacaataaactgctgaatccacaaatatagtaagtagaaaaaatacagaaagagcaagatgagcaaccttgctagcaagtaagaaaggtggccattgaaatatatcgagctcacggtctttacagtatggaaccagtagcagatccatctccctattgtctatgaggtcttcttcacggaaacttgtaataatgacattccacatttgagcaaaccttgcagctcttttctc

SEQ ID NO: 183140 - DNA, 360 bp, Zea Mays
gatttttagcatgaaggaatcttgccgtctgctggacaagcataaaattgtcttgtatgaagcgacctttgatgaaggcgctttgagctttagagaccagcccctccatatggcacctcaacctatttgcaagaaccttagtcaccaacttggcgaaactgtggatcaaactaatgggtctgcaatccttggcagcaatagcatcgttatgttttggcagcagcgtaatgaaggctgtgttaagaaatctgaaattcctgaaatctctcccccaaatagttgaaacagctgccagaatgtcatcttttataataggccaacaacatttataaaaatgcccggtgaatccatctgggccag

SEQ ID NO: 183141 - DNA, 499 bp, Zea Mays
aacagctgaaaatcgccccctatctttaaatcttaatgagattggtatgcagcagcatgatttggccagcctagacaacccattcacagaagaggaattatgggcagcagttaaagacttacctccttgacaaagcacccggcccggatggtttcacaggtcggttttacaattatgttggagcattataaaaaatgatttggtggaggcttttgctgcctgtgctaggggacatattttcaaattcaggcttctcaacacagccttcatcacccttatccccaaaaaaattgatgccatgcaagtgaaagactatagaccaatcagcctaatacataactttgccaagcttgtgggaaaagtcttggcaaacagattggcacccttactgccctccattgtctccacaaatcagagtgcctttgttaggggcagaaacatccatgacaacttcatctttgttcaacagatggtgaaggccttacataagaaaaaagaa

SEQ ID NO: 183142 - DNA, 311 bp, Zea Mays
aggcgctccaactttccccttcccggcaaccaccctgtgccttcctcgctgcctcgattccgcttctgtgctcggctagggagagcggcagagtatcaggcgggtgacctctatctcgccggggcggggcggggcggtgacgctcgcaatccctcgcttgctgctgcattttcgaatactgagatggccatggagatgtccccgcggcagtcgcctccgcggacgccgcgtagggcggcgaagccgcgactgttcatcaaggagatggtcctccgcaacttcaagtcctacgcaggggagcagcgcatcgg

SEQ ID NO: 183143 - DNA, 749 bp, Zea Mays
tctcacagcaaaaatgatttatgctgcgatggctttggacctccctaattggaccaccaaagctattgacaagataagaagaggtttcctttggaaaggaagaaaacaagccaatggtggtcactgtttagtggtgtggggtaaggttactaggcctaaagttctgggcgggcttgggatcactgatctttggcttttgagcgtggcgcttcgagctaggtggccttggctccagagaaccgatcactctaagccttggtcggtcctccctgttcaggcctgtggtgcgatggaagccttgatcaatgttgcagttgtgtctcaattgggtgatggacatgatatcctcttttggaaggatcggtggctgaatggtagatgcatcggtgaggtggcacctgaggttcttgagcatgtacctacgtgtgtcgcttccaaaaggctggtaaaagatgctctaacaaatctgaattgggtggctgatataaggggtgcgctttcagtcagggcgcttgcacaggttttggatctctgtgacttgttggagggcttagttcttcaacctgggattcctgataagcatttttggaagttcagcgcgtcgggggattactcctctagttctgcctaccaggttcttctccttggagctgttgagtttgggccggctgaacggatttggaagacctgggcgccagggaaatgcaaattttttatgtggctggttgtgcatgatagatgttggacag

SEQ ID NO: 183144 - DNA, 294 bp, Zea Mays
tgaattgacatatctctcacattgacttcaaaactgcgagccacctcttccagaacatccgatccatgaacctcaggcctcgtctccacaatggtaacgaacaaggcccgacgtaacttgatttcttctcgcgccagctcatcatagaaagccaatacccgagactcaactaggggtggacgactatccccaagctcgaccagccgaggcataggaagaatagcatcaacaccatcagctgagccgggggaaacaatcctagacgcgccaactcctgtcttgcctccttttgat

SEQ ID NO: 183145 - DNA, 537 bp, Zea Mays
attgcttgggcgtcgatgacacgagatttcacccctttcggcgaggtgcacaccactttgcaatcgcgctttcttttttgcttccttatcgtcgtttgagctgattgtcgggttctccttttgcagtgtattttcgcgtggtcaagggctagggcggaggcgcagctgtccgccctggagcagctctgtgtgggagccgcccattctgaagtaaagctgtgtgagcttgccgagctccgctccaggaccgaacgacttgagagtgaggcggtccaactacgctcctctgagggtgagggtgccaaggtcgaagccgatcacctccgggaagaggagacccaacttcaggggagcctttgtgaggtgagtctccgggttagggaggccgagtcgtcccttggtgaggccaatgtccacctagagagggaggatgcggagctttcgtgagagtgcgacgctactagaggtaggtcttttccatactcttatgccttctgttgttggttgcttttgccttccctcctcctcagagctccg

SEQ ID NO: 183146 - DNA, 541 bp, Zea Mays
ggcggcgatcgacggcctggaaacctagatccgagcaccttctgcaaagcaaggcgcataaacttcacaacttttgtcgccccacctcgtagcgcctgcccgcaccaaatgcctcgcagtccagtcgatattgtaccccgcgtcgcggagcgaggaaaaagaaggcgaatcgatgtgtggccggatctccgtggcgaagaataccagcaccgatgaccgaaccgggaggaggaaaggaacactgacacaaacaataacttgaacaccacgaacaccgccgcgacggatgggtgggtaaaaggcgacgaagaagaagagggcaaggatagggatgtggaggagagattggggaagccgcaagccaggaacagcaacgggaagggcaactgctcgaactgggacgattattacccacgcgctgcggcgctggggattgggtttggatcgctgctgccattgtgtgcagctaataaaaaccaaaccccgccttcccttttcgctcaggctttgtatttcttttgttttcttccgtggcagagtg

SEQ ID NO: 183147 - DNA, 391 bp, Zea Mays
ggattcgtaatgggcaggtagggaaaaatagaattttagtgaagatttactgtcttctatttggtgctatccgtacctgagcatggtgtttcgtctgcttttacaaggggttctaaaaagggttttcagatatatgtcaatatgaaaatcaagtatcctaaagatgccattataatttgtgatacctggtggttgcaattatccgatcagaaaattcggtccacgccattatctatgtttgcacgtacaggactcgcctgagaagaaaaaatgcccttattgacttgccacgccgccgtcacgaccaccgttgtcgctggacacgccctgctccagtgccgcgaccgccgcctcgcataccagatacatgcccaggcttgtcgttgtggcc

SEQ ID NO: 183148 - DNA, 278 bp, Zea Mays
acagcggaatcgctacaaagtatatttaacaccatcatcggcaatttgctcgagataatacaccagcctaaacttgtgttaaacagcctaatggtacacttgacaacgatgataaaatgacagaaaaacgaattaatcacattggaaaaagaacagattcaagaccacagtctgcctcagtggtagtgacaatttgtggatcgtcatggaacaattccgataatacgtgcattttttatgcatcatcggcagccaacgaacatgacaagaagcaagac

SEQ ID NO: 183149 - DNA, 2255 bp, Zea Mays
taataccatgctgtaaatgtgaaaattgtgttccatggttcatacttgatttgcagggatcttaataaaactaaaccccttaatataatgatacacagaaaaaaataatatgaagctctcccctgtcttcgaaaagaaaaaaaaactaaccccattttttaatttggtaataggtcttgtggtggaaaaggatgtaaacgacattaccatctttcgtgtatggatccttccttggacgtgtccctaggaatatggctttgcataatgtgtatgaaaaagaggattcagtttggtgtatattcagtcagcgagggaattgaatctttatgggatgtcaaggaaggtaattatatcttataaagcgtatgccagtttttctttgattgttatcattcatttattaattctatcgcctctccattttaggagtggtgaacagcaagcaatatttcgttaagtataaaaatcttgctcatgtacataaccagtgggtttcagaaagtgatatagttgatagcaccccgcaaggttctgatcttatctccaaagttagcaagaagattcataaagaaaaggtgattactcgtgtgatgaattccattgcttatctttttcacaggattttaggctctgcaaaagtatgcatgctgatggattcttttctgattttgatttcttagacaataaggtggaagcaggaatgggctgaaccacaccgtctgttgaagagaagattgcttatgcctcaaaaagaagccgaagttttttttaattcactaggtgataaatttgtatactgtaatgtcgagtggctagtgaaatggaaggatctgggctatgaacatgctacatgggaactcgagtcctcatcctttttatgtactcctgaggccgaggagcttaaaaggagctatgaggaccgctttaaaactgcaagaaaagcatctgatccttcaaaagtagacaaggtatgctatagaaaacatttatttgtattaactggcacactgcaacttcatttgagaagaaagtgattataatctgtgcattttcatcatctagggtatatgctcatccctttgctagtccacaacaatcaacaagctctattagttccaagcaagtttgtatttttctgcaattgtctgtcagtctgtcacattgctttgctaagctgccacacaaataatgagctctattagttccaaacagtccttagattgcttaaagagttcacatttcacaattttcagtgatgctaaactatctatgtgctatacaggctaagggggggatatttcagcaactcgagagactgccagatggttgccctcctggtttagacgatgaccatttgagatcacttaaccagcttcgtgagttctggcacaattcttgtggtgctattttcatcgatgatcaggtagaatagaactatctaaatatttagccatcatgcatgaaaaaggtatatggatttgttttattggcaccttccacttaagttcttggattctgtagatttagttgtgcttccagtttttgcttgtctttttatcagttgaggtctatggttactgtcatgacaactctgctggcgcccttgtattttggcagattttaatcgactatggctgaagctttgattattacatcagtgtattttacatgtttaactaattaacttatctattgtacaggagcgagtaattaagaccattctttttgtggcatccatactgcctcacatctgtcaaccactcctcattgtgtctactactactactctctccttgtgggagactaaattcaatcgcttggcagcatccatcaatgttgttgtgtacaatggagagaaagatgtacgcaaatcaatacaagatctggagttttatcaggatggttctgtgatgttgcaagttctcttgtcccaccctgatgccatcttagaggtactattattctcttggactcagcttgtctaagtttatccaataaaagagcaccattgcttgctttagatgcattttgcattactgttatgaaaccatgaagtttacttatcaagtaatatgtacccttttgcttcctgtttgtttccataattacacaggacatcgaagtgattgaacgaattaactgggaagcagttatagtcgatgattgccaaaactctagagtttcaaaatggcttgaacaacttaggagacttcctaccaattttaggatggttctattgagttcctcactaaagg

SEQ ID NO: 183150 - DNA, 287 bp, Zea Mays
atccgggcgagggaggcgtgccggagaagcgacggaggcagcacgagtcctctcgctcccactggctgcaacaaccagagcgcgagagggcggggagaagaaaaggcgaggaggatgctatgctagctactaccgccgccgccactcattgcccatttgccgccactcattccccatttgcttccactcgccaccttctgctccgctgtgctctgtctgctactctgctctgcgctgcccagtcccagcgacgtgagggtttggtggagtgggggtgaagggaagcg

SEQ ID NO: 183151 - DNA, 493 bp, Zea Mays
tggtggataatatgcaagacaaataacactacctgttgtgcggccttgaactgcgcctttatatcttctctatgagccacaacctatttccaaaaacaaagaaataaaaaaattatacagattttataccaaatatgaattgaccactaagaaatagagtgcactatatattcctatactttttcaggatctaagggtctgtaaaaagcagtgcaatgaatgtttatacccttgcaacttggttattagtgttgatccaaagtggatactaataagtaaacttactagctaagcaaagcacacaaggatacctaacaaccaatgttcaattaagcgcagataatcgcccgcctaatcgcgattaggcaatgtctggagatgtatctatagtgtgctgtgcatgattctcctagtatgtggaagtgttggttgcctttggcagaattctggtataacatgacttaccacattctttgggtggtttgtggatacg

SEQ ID NO: 183152 - DNA, 440 bp, Zea Mays
gtgtatcgatctccatgcgcaagcgcaacgccgtataaagattgagcaatgctcagcagcatcggccggcactaaccacatatcaaataatgcagcaggcgcgcgatcgatatgattctcctctacttttgcatgcatgcacgcacatttggtcaagtacgcacatacgtagtagtaggtgcacgcttttggtgccgtcgcccatccatgcatgcactgcacacgcaccaatgtctccccttctttaatttatacgtatacatactattaactatatctctagctttgagctaaacaaaattcagtttacaacgaattttgtaggattaagatctgccctatttggaaagcaaaaaaactgaaccaaaatgcagattcttcgcatggacctttttacaacaaagagtattgactgtcgataaccttcagaagaggggatg

SEQ ID NO: 183153 - DNA, 421 bp, Zea Mays
cagcttgacagaaacatggtttttctctagtcacttctttgtatatcctacatcgttgaggaggttctcaggaaatctaaaccacaactctagtaacaaccaatcaacaaaagggtacattgacaaccacaaagacaacaaaatttgcacagcattgttaaggacaacattagcccacggccatagagaacctaagtacaaaagagcactgtctggtcaaaatccagttgaacagcatttttacggtttcagtgcatgccttatcactttgcacagtaagtaccattaagttagcattagtaccacaataacaatggtgtgtggtaacccatctagatgtgacatggactgcatgctgagtgcctgactgtaccacatagtaatattcaataacacatgttctgtcaataacttggtccaa

SEQ ID NO: 183154 - DNA, 317 bp, Zea Mays
cgcatttgttgagccaaggcaaaggatcggtttctccgttgtacttaggaaagcttggtttgggtttgagtgggccgccgaaatcccagtggctggtatggcccccgcccccatgaccaccacctctaatgccaccgcctccaccgccgtttcctgagttgtctgtctctgtgccatccaccaggactgggattgaggattcagcgtccatgggctgcttctctaggcgagcaaagcgcttgtcatgtgtatcaacgcggtggttgatggttgtcacctgagcgaggagacagtacagcttgtcgtggacagataaa

SEQ ID NO: 183155 - DNA, 280 bp, Zea Mays
agttcatatgcaagacatcagatatggtaatcttaaattaaggcatgtatctcatgaattcgtttcgccttttaagatattattttcatcttgggttgggataatcaattagtctttgctatttcatccctacttccacaaggatatctgtcccaaaagaatgcttagtttcctagtataagggctgtctgatacttcatctattagcttgacaagctgttagattatttatatccataattgtcatgagcctcctctataaggtctataaggaggctta

SEQ ID NO: 183156 - DNA, 825 bp, Zea Mays
ggagcaactggaatctattgagcaatctttgaatgagtctggcttagaagctctctcatcctttctgaaaaccaaaaaggttagttttttttatgtgaatttgctcttcactgcctaacatagacaagtacaataagtttggagatattaatttgtgctaccaacacgtatttgctatttctatgttttggcaactcaactccatagaataggtataacctcatctttgctgatgtacttaaaatctgttagtattcatgccttgctaggttcgatgctatgtttagttggataatgttattggccctggtgtacaccctgcaacccaaattcaagtcccttttaacttgaatttgggagcctatacttagtatctgattaagttcattctagtgtgagtttttttttaataagtaaacagctgttaccacttatctttaaccagtttactgagcgatgaacctgatgctcaccagtgtaatggccattttatacgtgtatatgtgattctattgattatttcagaatttagaccaactggaagatgcaaaagatttggatgaaaatggcggcgttcacgttttgctgaagaccttgctgtcattatcttatctaagatcaattctaatgaagggtctggaaagtggccttagaaatgatgctccagatagtgctattgcaatgcgacaaaaggttattttgtcaaaacacaattgagaaagtatgtgttgaaattggatgcatgtatttcaattaaattcattgtcgaggttttgcagtggcgtctttgtgaaattgggcttgaggattattcgtttgtattgt

SEQ ID NO: 183157 - DNA, 388 bp, Zea Mays
tggcgaggctgctgctgctgctcataccgtctccgtctccgtgccaagtcggcctcccgtctccgtgccaggcccaggccgcgcaagctcgctcggggctccgtcctttaaccgacccgtgcttcgatccgggagctgaaaagtggtggtgtagatggcacgcgacggcggctggctcctcctccacctcggcacgcgccgcgaggacgaaggtccagggcagggaagcaaagcaacagagtcgagcgtgggcgtgtcggtggcgacccggtctgttcgcggaggggtagcagatgacaggtggggctctgtcggacttcgacttaagtgtgagtgtagcgcggaggagaagtggagaacgcgtcgcgaggaagcccaatgtgcacgg

SEQ ID NO: 183158 - DNA, 351 bp, Zea Mays
cttgccattttagatgattactcccattttctgtggacattccctttgcgcctcaaatccgacaccttgtccaccctcactactttctttgcctatgtccgcacccagttcggaatcaccattcagggtattcagtgcgacaacggccgtgagttcgacaacctacgtgcccgcacatttttctcctcgcacggcattcaccttcgtatgtcatgcccctacacctccgcctagaatggcaaagccgaacgcattatacgatccataaacaatgtcgttcattcccttcttttccacgctagtgttccccccgccttttgggtcgcagctctaggcactgccaccttgcgc

SEQ ID NO: 183159 - DNA, 1755 bp, Zea Mays
ctggaacattctcctgagtttgatggtaactcgttgtgctctgtatctagacaggttgaagaattgttgaatcaagaacaaactaattcgctggatgatgtagcaaccgcattcttattttcaatcatatgtgcacctccaaaagatgttatcagtgcctttccagatcttcttgatttggtgaaagcacattttccatctcatgttgctttcttgtcatcggttctttttctacaacatgattatctggctaaagttgctagttgttggccagatatattcttcagcagcatcagactgttcaaggatgatatcaatgctgaccatgcaaacacagttgaggacgaatgccagaacctctctgtttcaacagaatcagctccgctaagtacatttttaagtgtcagtcccttctgtgcgcttttaccttcagtattgagccttgcatgttcttcgccagatgaaatcatggaagcacataaggatgcacttctaagactccttgaagttaaattgtctgactgcacattcagtgagcttaccttgtatctgagagtcatcttgttctggactcatcacctactgtcatcatatactattaaggattcaaattcagatgatcttgagcaagtatgtcatttgtgctttggtcttcttgatagagtatttgagcgtattcaagttttgactgctgacccttcacagtcaaattctgaatacccgtactatcccgctcaacatatccaagacattgttgattctgttcttcggcatcctgttattaccctgtctttgtcatgctctttatccaattgccaaaatttagcagatgggagtttggaacatctggaagaagctttggctatttttgcgacggaaaatctgcaccttatagaccgtttcgttctaaaccttttgggtaaattgtatgaccttttgctaatgtttggtagctatggtggtaactactctacagataatgggccatcccatgagtcactgtttgctgctccaaatcttctgctggagaacataatattgttgttcaaggagaagtttgagctctgcgtggacaaactaaattttgaattgcttttgccaaatttctacatggttcgcacactgtcaaagttcttttctcctttcaaactcctggagcttgcaaattggatgttctcaaaattggatggtcacaacttcagttcacctgcttttgtttctgctgttttgatgtgcctatacattattgatgtcaccatggaaatgctgtgcttttatctgcaaaaaactgatcagagatcacaatcctatctatttcggcacttggagattcacaattctgatatcaatgccattcagcaagcctatcacatcattcttcattttgctactaaatggaatgttgagtttgctgatcattgcttgctgaagatgctgtgccatattcattacacagaaagatgcgcaggatggaacactgactatattgcattccatatggtattatctacaatggccatcaatactcccattgacattcttcatcactgcattttccccacatctaaggttaaagcaaaagcaatcctgttgcttttggaagcaagtcctatgcatctgaacctttttagccagatattcttggaaattttaaataaagacacttatgttttgcaagtcaaggattctgattccaacaatttgtgggctcaagaagatggtgctatacttctgttgcctgccgctttatcatgc

SEQ ID NO: 183160 - DNA, 422 bp, Zea Mays
gggaagactgtaaaggaaaaggtttgtgtgcacacaagccgagatattcgtgctatagctcggcagttggtcagtgtgtggattgaagtttttcgtagagaaaaggatagcaacggcggactcaaattgctgcgtcgaatgccatcaattgaatcgagtaagaccaagagtaaggatctgcaatcaggaaagcctaccttacgtgtgccaaatggaactttggacaacaataaagtagtgtcccagcgccagcgtacaagattcgcaagtagtcaatcaccaccaaagataaacaagaagtatgataacaaggaaatgaaattggaaactgtgacagctgctatgtctgatggcaagttgctttcccaaaagcaacaacatggtattgaatctaaggtggaggaatgtggcattcctatgtc

SEQ ID NO: 183161 - DNA, 301 bp, Zea Mays
cttcaccaccccgagcggtatgccgccagcccatccctttgaccatcgcatacacctccaaccagggacgacacaagtggttgtgcgaccataccggtactcgtagctgcagaaggacgagctcgagcgctaggtggtagaaatgctagagcaaggcatcattcgccctagcacgtatgttttctccgcacccgttctccttgtcaagaaacacgacggctcctagcacttctgcatcgactaccgagctctcaatgaccgcacggtgaaggacaagttcccgatccctgtcgttgatgag

SEQ ID NO: 183162 - DNA, 323 bp, Zea Mays
gaattattgtgagacactaatcccatgttcatctcaagtaaaataaggtgtataggtccttaatcattattggtgaatcaagtaaaaggactctgatgagaatctacagctagctctccaaaggacggtaccccgtgtattttaagtacataattgcaatttagtattgctcttaagttggcttgttgtgctacctgtctttggagtagttatgctttatgattgcctgtgttaaatgaatcataattatgtttgcttaatcatgactgatgctatataggatatatcttttgaatcattcatgggtagctatttcatttgtt

SEQ ID NO: 183163 - DNA, 312 bp, Zea Mays
gaagacaagaagaaaggaagcatcactaaaattgatctttgggacgagtctcataagaagaggaatgggaactatgtcaatcaaaatgtgcaaacacttatggtattcactggttcctgtactacactttaattagtttttattcaaattgtcaatcattttctctgttaattttatgaaatttgaagggtaaggccttcgatgaattagagaacaggagaaaggacaaggggacactttctactagtgattatgatgatgtgtttgagaatgtcataagaaaagacttgaacattcgtgggtactatgatg

SEQ ID NO: 183164 - DNA, 1040 bp, Zea Mays
tctttgacaatatacgtggtgatttgaatccctctctttcgcaggtttgttcgatttgtcagtacaccagaggtcctggagcgggtcacaaccatagagtctgagatattgcagatcgaggatggcattgccgtccagggcagtgacagtcttgggttgagatctgtaagcagacatctatgcctgataacttttgactaacatactaatatcagaaagatgagatgttcatatttgtgctttgttaggtggaatactataatgggaaattggtggactgcatggaaggtgaaatgctgacgagcatttctttatttcaccacgagtcatagaacaaacagcatatgtgccatctgtggagtctttgttttatcacctaagtaatgagcaatgtttatttgttaccaaaaaagaactttccgtatcttcatggaccatgatacttggcaaattgctatgcaatatttactttagcatttaatcattataaagtttggtgtaaatgtaaaatcaggcaatgctgttggatcttttacaggcagatagtttgttttcaacatactgggctgcacaaggaaatcccaatgtatatgcatggagtgacctttcctagttatatggattcttaaattaattgttttagttttagctttagctagctcattggaagttatgcattctgagatggagctagctatcacgtcgtgcattttaggaagagatcactctcatagtctcatctactttaaaaaagctacatttttcttgaaggatgaatctgaggtgcaacttgttttggcgacagttcttgtattcttctgccctgttgctgaatgtccctgacccatctacttacaggtagtaaggcaagttacaatcctgatgcagatagggcacttgttccatacaaggtgaatttgtacagataaacctgcctcttctttctgcaaaagagtaatggtatatgtgcttatcatgttctgagattccatattcttggcaggctggtacacaaccaattccaccattgcagaatcatg

SEQ ID NO: 183165 - DNA, 977 bp, Zea Mays
gttctacaatccaaagctctttagaagaaggaatagcagaggggtccaaacaccacgcggagcagcggaaaacggccacatccttcaggttcagagtatcagggtggacttggtgaatccacgcaaaagggtttagcaaatgatccacggtgcatgtctcccaagcatgtataggaattccctggagctcaatattgatcaacaccgggagtaaggcgcccctggactccatgagacgagaccatttcttacaaaccacagaaaaagacccagctctgagagtagcccatctgccagccaactcctcaaccttgtcacgacatgggaggacaagaatataatttgccgctgaaaccctccgcaacaccagagaaatagcttccatttccatccttggggcaagcagctcagcaatctccgaaacccggaccgaagaccgatcgctgatcacagtcaccattaccgcgtattgaagatcatcctctgctctcgtcatttggtggctccatcccaggatacacggaggaacgtggtgcaccggggttaccaaagcagcggtggccgccatgcagactggacgatccgaggaagaagggggtggggcaccagaaggtttcgctctggaacgtcgcttcctagcctgctttctcttggggcggacgccaaccggcaggggagcactggagatgcaaccagcagcctcattcccactggcctgcgaaggactatccccagacgcgtccacctcggaggaaggcggatgagtgatacgcctccacatctgcccagaagacttggtcgacggcaaccgcttcagctccggacgaaaggccggtggggtgattctcctccaaaccgaagctcatgcctcaggtcgaggaataccgcccccacagcaagcactggccgagacgtccgaagacgggctgatcctcctccaggccgagccctgagactcaggtcgagaaggatcaccg

SEQ ID NO: 183166 - DNA, 884 bp, Zea Mays
gcaacttcttttaggccttcaacacgagcagcaacttaagtctcaacaattggcaaatgctctgcggcaacattcaggccaggaagaagaaaggcacttaagtggggtctggccaatggatgctgctgcccagtttatccgctcaggaaccagtccaaatcagatacacagtcgtttcgatctccttgagaaccttcagagatcgtcatcgtttgatcatcatgaacatctagaccgcagcttatccttacacgaacagttgcatatgggaggtcaaggtattcgctccctagagcggactggttctttgcctggtggtggtcctggaccaaacccagatgtcataaatgccctaacacgtcatcatggacttagtcagttggaaacacatggtgatgtataccctttagttcaaatgcctatgcttccttcaggtgttcatccccagcaacttaggcatcaggatcagcttcctggttctcacataggaaggcttgaaaggcactggtcggatgccaatggacagttacaaaacagtctaatggaatcttcacacatcaaccagttgcagattgaagcggagaaggagaggaggaatgtggaaatgaacctttctgttgacaatccacatgcatggggagcccttatgaataaagataggaatacagagcaagatttgactgatatgattcataaaaaacttgtccttcaatcacagcagtcccggggttttcctgatgtttctgttccggcatcatttcgacgtaaagatcactttgtgcaacctgttgtggagagccctctgagatcagtggacatgtcgtttgaggagtctctttctgaaaggtcactttatgcaaaatcagggcagttggcacaagaag

SEQ ID NO: 183167 - DNA, 636 bp, Zea Mays
agcagttgtgtgttgagcttcactagcagctgcaagatctggcgcccttgtcactagttcaccaaatggttcttcatcttcattagcagctgcactatctgatgcccttgtgactagttcaccaattggttctttatcttctttagcagctgcaatatcacgcatcggttcttcattaccagctgcagtatctggtacactcggttgtgatgtcgcagttcgcaactccttcggtatccaatttttcgtcttattcttccgtggcttcctcttcctacagagatcgagacaatggtacataaatagaatataatagatacaacatattaatttgacaaccgatgcagtaatggtacacacctttttttggtaccatttcaagggcacttgtaacttgttttgcgaatgcccagttgcccacaatttgggcaagtatactgtcttttcagctttgttgtgccttgttcattagctacgaccttagcttttttcccacatcctccttctagacagcttttgattctatttttcctttgtcgcccaactcctcttttagccattggtgcacaaacttcagatgaaaaatcaacagttagccaaaaagaacgatcctcaattggtggcacccttctcaag

SEQ ID NO: 183168 - DNA, 422 bp, Zea Mays
ctcgctgtctctcgactctctactcactactgcccaattgagcccctccgcttccgcccttccgcccttccgccaccaccaccacacctcgtccagcggcggtcggcaaaccctagaaccttagacccatccgccatactgcggttactgggcgcgggctagggccgggcctccgtaatcgcagcttgcggcgatgccgcttttcatctccgacgaggagctccgtctcctcggcggcgacacggctgccgttgccgagcgggctgatgctgccatccgtgagctccggcggcaggtggataccgtacgcgccgaggcggatgccgctgcgatcgctgccgagcagacctgcgccctcctcgagcaacggtacgcctccctctccgcggagttcgatcgctccaaggccgaggctgccgagc

SEQ ID NO: 183169 - DNA, 725 bp, Zea Mays
gaaatccaatagtgggagtccacctatatttgtattcaaatgatgtaacgaaggtcccttgcccacaaggtttcagtgatgcacccaaggaaggtgcactttgccatgcaatatctggtgctgatgggaagttcacatttagatcactaccttgtggtaagttgataatttattgaactaataaaatgtcacctcagtgcaatggaattgttatgtcaaatttcttcttcatgaaagttgttcaggatttcgtgatgacaattgagtaattaacacatgtacattggatgtcttaaagtgcatcaatacatgaagtatcatttcgatctataacttgttcatctaaatacctctgttcatctagctgtatctggtgctgatgagcagaggtattttaaataccaaatgcaggacaagctattttaaacaaactaattaccaaccaaatattttctataccacaaaaccgattcgttgtattcatgcagcaccagtgttaaacattttaattgtttggtcctgttcattgggaatcctgttctgctctttctgagtctctaactccctatgtgacattatttgtttactgttttctgttatatgcaggtagctatgagttgttgccatactacaagggagagaacaccgtatttgatatttcaccatcttcactttctgtttctgttgagcatagtcatttgacgattccccaaaaattccaggta

SEQ ID NO: 183170 - DNA, 326 bp, Zea Mays
aaaacatacccgcgaaggggtaccgcaacatatgggccactggatcgaacgcggacggctcagattttatttaacgcgatctaatctacttcgttgaactctagatggatggtctggatcttagcttcaatgtgacgactagagatctgatctctaccgtccatcatgtgaccatcggcacacgggcacatagccatccgcgtggggatcaatggtccagacccacctcgcccaatctcaaccgttcatcatcaatcgagcggtctccagcccatcttcaacctcgcgctcctaccgcactccctctcactcgcctatgccgggac

SEQ ID NO: 183171 - DNA, 659 bp, Zea Mays
gttttttggtccttacaaagttttggagcgcattggtgctgtggcctatcggtaggagttgccaccttcggctcatgtacatcctgtttttcacatttcacaactcaaaccttttactgctaactactctccggtgttttctactattccggcccaagttgatctcagtaagcaagtggtggtgcctgtggaggtgttggacatgaggctggtgaaaaagggcaactgagctattcctctggttctgatccaatggagttcacttccaagcgatgcggcgacgtgggaggattatcatgtcattcggcgaggtttccacaggcccatgcttggggataagcaagttctgcaggggggcagatgtcaggcttggtgaggacactggtgctgcagacactgaagagggggcgaatgcagagtctgaagaagcaatggaagtggagacagcgacggtgtcggacgaggaataggtgtccaggagagggggtgtgggccatgtgggccatgagtgcatggacggcaaatgtgggccggtccagttcacggagataagtattgtaatctgaactctaccggatgcaatgaaaataatgtgaacaaattccaccaaatacgctgttgctcatcgttgttggcggcggccgcgcactcacgtcccg

SEQ ID NO: 183172 - DNA, 353 bp, Zea Mays
tttagattcaccgtttttaactggactgtccatacagttttatgtggatacagtgaagaaaatggcccacttccattttgtatctgggtcccctctgcgaacgctatgccttctcatcgctggacaacctgcagatgtttttaatgtagagaacaatgtcaacagtgactatggtgcatcccatcaacctgtggaggtacttgcaaatttaatgggcctttcagttgttaaatgtttcaatattttaaacatcaagtactgattatataattcaaattcaaagttataaaaacctttttctgtcattgctgatctcctgcatgattaatgattgcataatgtcttgtttactg

SEQ ID NO: 183173 - DNA, 321 bp, Zea Mays
gatctctggataccgattcggggcattaaatcgtgaccgtagcgatcagatcggtgggctcgggtgcaagtttgacgtggaagaatctgagccgtggatcttggatccaccggctgttagcgcgtaccgattcggtttattaaagaatttgatcctggtcgtccatctgcaatcgtgcggttcagaatcaatcttaccgcttcagtcaggcaattttctaaaagagaccctggggtttgacaaaactaacccgccgtccacattcattattcactgagtcttagagaacttcggtttaggcccctgacttttccagtattt

SEQ ID NO: 183174 - DNA, 331 bp, Zea Mays
tggttcggatagttcgggtttgggtaatgggtatcgggttttttgcccactcctaacttgcaggacacgtgtccaagacatggggatgcacatgcggtgcagtactcatggcagtttggtggttcagcctcaaaaccacctagctctacagacaacaggttttcaactgggtttgacctcaaaacctggcggtggcaatttcagtggaaactggaggcggtacatggcgtgatcacagaaagtgcgtcaaggagaagcaactctgtgtgaagggcgtggtcatcagatgaaaactctaggagttggtccatttcgtcccggtggagtggat

SEQ ID NO: 183175 - DNA, 476 bp, Zea Mays
gaggaggacttggggggtagtggtggaggacaacgggatggagagtggatagaggtcgcctgagctattgcacctggcgatcacgctccgtgtcctgagatccttcacagaaaaaccagcggggtcaaattcaacagagcaattattatcaattgtgaattgacgaacagagacaaggtttttgataatagatggtgagacaagcacattattaaggtggatcagacccatatgtgtggatcccgtggagacaacgggcaaggaggtcccatcgccgacaataattgaagaaggagtggaagaggaagggggatggcaataagttaggataccggaggtggaagccatatgagcggtggcgccggagtccatgtaccattcaccggctggcggggtgagtgtcatggtgttgaaagcacctgctaaagcatgttggtcccatgggccaaaaggaccaggagccgcctgctgctggg

SEQ ID NO: 183176 - DNA, 319 bp, Zea Mays
ggactatggaaggagcgacaaggatgttgttcaacacaaatttagtggagttgatgtcaaggatcgatgagccgcgggtcgtgacaggaatacttgcaccattgcctaccatgatcgaagaagcagcagctgggagatgagaatgaaggataccttcagaggagtgcatatgtgtagaggcaccagtgtccatcacccaggcgtcaccttgcagcgacatttgctgcagcgccgccatgaggcccgccgtgtcgaagtagtggggaccggcagactgctggtcgctgatcgcagtgtgggcctgcggggaggacccgag

SEQ ID NO: 183177 - DNA, 1339 bp, Zea Mays
cgcccagtgaaaccatcgggacctggggccttgtcattaggtaaactcttaattgtattccaaagttcaagctctgtaacaggctcatcgaggtgtgcaagattgaaagttggcatgtgcaacgcctccagattaatagtctgctccctatccccacattcaccaattagtctggcgtataaattgtccaccaaaactgctttatcatcatgactagtgagaatctggtctccattcaccagctgtgcaacaaaattcctcctttttcgatgtcgagagtgcatatgaaagagtttggtattagcatccccctctttaagccaagagatcctcgatctcgatctagcaatggtccgttgaagtgaagataaaaacagggaatgctttttcagcaaattacttaaccagatttcagccaaggacaaagatctgcagtcctgcgctatttctagtctatgcagaatttcctttgccaaagccaactgagtcctcacatgtcccacatgcttcccactccaagattgcagcttcctagctgtggcttttagtctcaaattcagagtcatgaaagggcagtttacagctgtcacagaatcccaaacctcctggacgacatcctggaatccttccaatttggaccaaaaagcttcaaaacagaaacgtcttttacccatcttattatctctaatgccaagcagcagggggcaatggtcggagccttcagaggcagcactttgaagaaggacatttggaaatatgtcttcccactccactgaacagaggaccctgtcaagcttgacaagaacaggactgtcttgctgatttgaccacgtgtatttacgcccaaaaagtggaacctcattgagactcaagtcctcaaccaactttctaaatctccccatcatagctctgttaatatttgaattatttttatctgaagccctgtagatgagattgaagtcaccagcaatcaaccagggtccagtgcaagcagccctgacgtctctcagttcttgaagaaacaacatcttatcactgttactttgaggaccataaacacaagttaaccaccagcagcgattatgcgcattgcagaattggattgaaatgctgtatctgtcaatcctagacaacccagtcactcccagatgtcgcttccaagcaaccagcacaccaccactagcaccacaagatggtagaaaggagaactggcagaaatccgaacccaaggctgcaagaatggttcttgtagaaatgacagtcattttagtttcctggagacagaccacatcagctttagaggacagaactagattccggactgagttttgacgatcag

SEQ ID NO: 183178 - DNA, 326 bp, Zea Mays
ccagattgaggagcactcaatcagtcaaacactaaagttttgggtgcccccaagatgggtgttgtggcatccaatagggatattgtgcttgtaccgtaggtgttccccacatttggttaggttatacggtgggtatacttgtggatacaagggtgcataactaggtggaggtgcccatgatgctggtgtcatcgattgtggatttgggactagatgaacaacatccctggccgatttaattggccttacctcatgaaacaaaccattttccttcgcctgcctctctaaggctggagaatgagatcactttgctagacggtcacatg

SEQ ID NO: 183179 - DNA, 284 bp, Zea Mays
aaaggagtcatccaattggatgtccatagtctcattctcaccattgaaaagattatcaaaatacctctaccacctctgtttgatgtattgtcctttcaccaagagttgatccatctcatccttaacgcatttaacttggttgaggtccctcatcttcctttcctgaatcctagctatcttataaacatctttctccccttcctttgtacttagtcttcggtaaagatcatcataggctcgaccctttgcctcactcacaactcgctttgcagtcttctttgcca

SEQ ID NO: 183180 - DNA, 414 bp, Zea Mays
tctgactcattttaattattttttcttatttatcattttcttttccatcacctctgaccaaaaaaatccaattgtctgtataaaaatttgaataaacttctatgaactaggtagaaattagctcaatctgggaactacatttgtacacacctctccctccaagatatttgacaacaaatttgatcttaggcaccacctttcaactcatccatgtacgtgaataaatccagaaatttatagaaagagggtgtgaatcagaatcctacctccccatcctagcctccatttcctttgccccgatgaacagctcccaatatcgtcatcttcaaaactgcctcctcgtgagttgcttgcctagcagatctcctgcaattgtgattgactctgattctttacttaccactatcacttgac

SEQ ID NO: 183181 - DNA, 641 bp, Zea Mays
gtctgctccctgatcccctgcggccgaccggtgggacccatcgtgcaggctcacactccaccgcggtcgcactcactggcttgcgggccctccctgtcaggcgcctacctccctcttccttcgctgcgcaaatcggacgagctcggcatggcgcgattcgcggattccgttggggtgggccacgtccgggctagatcgagcgggtctccgtgcgggcttctcgggatccctggcagctctctctactccccttcggactctcttcagtgtataaaataccaccgtgttgccgccgccatgacacatctcaatcgctcgccgctcgtcttttctcctccgcggcgcgcaattgctatccccctgggcctcggcggggagttcgcatggggaatctccgggactccgctgctcgaggtcgacctggtgatgggcgaatcgcttttcggtgtttcctccatccgcagatccgggtgcgtcgtggatggagcacatcaactctcgtatgccggtaagaagtcgtccaacgagttctatttcacctcctccacgtgtagagtagagcggagcaaggtttggggtccttgggcaccggattgcggactgcgaccatggcgccaccgcatacgctggagcaccgccgc

SEQ ID NO: 183182 - DNA, 468 bp, Zea Mays
tctgattgctactagacacaatgcaatttattggacaaggaaactgtttcaaaggctaaagaaagacgcattaaaaatacacaagatactatttttttaccaacctcaccaagacgacgataagccccatagataccaccaattaatgtcgagaacagtgcataccaaatttgggtgtccatgaaatatacctgtattttaactaattaaacttgtactaagaaaaagttttccttatgagaaacaagatggatcaagacatactagaattattggagcccacagtgatataacaacaccaatattgttagttcctgcaaattaaacctaaataagaagccaaaaaagttatcaaaatgtaaaatatggatttcatgacaaataccatgagggaaaaattcgtgccactggaaagtcctgataggttccctcattatatctatggttggctgtaccagaggtttgatc

SEQ ID NO: 183183 - DNA, 280 bp, Zea Mays
aaagagagtccgtcaacgtcttcatctgacgacaatactcggtgatagaaaggtcccctgaacaagttggtggaaggcagcctccaagtatagcttccaggcccagtagttgtcgcagaagtgagtgtcgagcgcgacccagacccgttgggcagtgttgtccagctcaccggtaatatcttgcagctcagcggtgatggtgccgaagatccaggtgagcaccacctggtccatccaaaacaaggactcagacgactcagtggtgacatagaggatgtgg

SEQ ID NO: 183184 - DNA, 1338 bp, Zea Mays
tgcagtcttgcaaagtttggcggctggggtctctgatcattgtccgctcctgcttggtttgaatgtggccaacaagggtaaacgcagattccattttgagagcttctggttgaaggttcctggtttgtttgatgcagttaagcaaagttgggaggctccggtgcaatctaactgtgccgttgagcgtatgttcatgaagctgcagcggctcagcaggtgcctgcaaaagtggggccagaggaaagttgggagcatcaaatcacaattagaaattgctaaagagcttctccatcgctgggaaattgaaagagatgaaagggctcttgctgatgatgaggagtggctgagacagaagttgaagcttcattgtcttggtttggcctcgctggtgagaaccattgcccgactgcgttctcggattttgtatattcaggaaggtgatgccaacacctccttttttcatcagcaggctagatacagaaaaaagaagaacttcattcctaagctgcacgttggtgatcaggtggtcacctcacaagaagataaacagaaggctgtttctgatttctatgagaacattttgggtaaggctgaggagaggagctacactcttgacttggatgagttggccatccacaatcatgatttatctgctttagatgctccgtttcttgaggaggaggtgtgggctgtggtaaaagatttgcctccggataaggccccggggccggatggtttcacaggtcgattttataaatcctgttggaatattattaaaggtgatgtgttgaggtctttggatgtcatccagcgtggccatgttttcaaattccgcctgcttaacacggcttatatctccttactgcctaagaagatggatgctgttgaggttaaggatttccggcctataagtttgattcatagttttgccaaattggtagctaagctcatggctactcggctggcccctttgcttccctctctggtttctgtgaaccagagtgcctttgtgagggggaggaggattcatgataactttatgcttgtccaacaaattgtgaagttgctgcataagaagaaagaaccacatatccttcttaagttggacatctccaaggcttttgactctgtttcttggtcgttccttttggaggttttaaggaaaatgggatttggtcagcgttggcgggatctcctttgtttattactgtctacttcttccactcagattttagtcaatggagagcctggggacatcattattcatcgtcgcggtctcaggcagggagatcctctttctccaatgctctttatcctagtcatggatactctgaattc

SEQ ID NO: 183185 - DNA, 1141 bp, Zea Mays
gctggggctgtcgcagagccttgctaggtgttgctgttggatggatgtccagggcctgggatctcctttcatatgctcgcgctaagctcagcgcttgattaaggtctcgtggcgccataagctccacatcgatcttgattcgatccggtagtcctgcagtgaatagttgcacctgctgctcctgggagagaggtgctgtttgggctagcagatcccaaaatctttcctgataatcatccactgtcgtgcgaaagggtaatcgtgccagttcacccaatggattgctgcgaagtggcggtccaaacctttgctggcacagctgtttgaaatgagaccatgataatggtggtgcatcacgctggagctgtccataccaggttcgggcgacccctgtcatgtgatatgaggccagccagaccttctcttatatcgtgcgttggccgtcgaagaactggtcacaccggtttaaccactggatggggtcctcgccatcaaacgtggcaaattctagtcggtggaaacggggaacgccgaccatggatggtgggaatgggttgctaggcatgtgctgtggaatgtttggcatttgtggcagaggtgatggcgagtgcggcaagggcagtaggtggattggcaggggtgtggtggtggttgtgtatgcggcggcggaggtgtggatgggctgcgggggtaaggatccctcagggactagtgtggttggcggcaggccgccgtaccctggcatgccgtaggggcagccagatggaggtgtatcagctgaggttcctggatttttttccatggccgtgacgcgagatgagatggaggacatatgggagttgaactcccccagctggcgctgcatgtcagcgagcatcgtggtgatcgactccaacgatggcgacaccgtggcggaggccaaactatcgccggtgttggaccctggcatctccgataccaggttggtatgatctctactccttaggttgtatgagtggtaggggtagagcgcaggctggaagaacgggggcgagaggacgccgtgctgtcgcacggttgggcacaatgagaggcaaggaaataatctcttctttagattaatttctcgctgaccatcctggttacagagataggacttata

SEQ ID NO: 183186 - DNA, 321 bp, Zea Mays
gttacacatacatattgaaatacttgcaactacaagtagatcagatgctggactttgttgtagctaggatagataatttgattggtgcaagtatttgagttgtttgtccatgaagaaagcatgaacttcataatcgctctattggctggccgtaacccataagcgttggatcggtggcctggtgggtgcagaaacatactgatttactgtatctgcattacctcagagtagtaatgggaatccccattttgatattcgtattcagttttcagctgaatgttgatgttctggtctcccgttcttttgagaactaagattttt

SEQ ID NO: 183187 - DNA, 338 bp, Zea Mays
acctgcacaagctgtgggttcacatccacaacttttgagccctgtatggacatttccttagacatggatgcaggagataacagttcttttggtgttgcaaacacaaagtcgcatgtgcgcaatggagagcgaggcttggctggcgtgaattccaaggtattaactctaatgaggtgtttggagaggtttacaaggtctgagagacttgatgccgagcagaagttcttctgtgaacactgcaacgagaggcaagagtccctgaagcaaatgtccattcgcaggcttccattagtttcctgctttcacataaagagatttgagcattcgtcagtcaaaaa

SEQ ID NO: 183188 - DNA, 279 bp, Zea Mays
gtcggctccctgcgtgggacgccagttggcggcgccgtccatggctttccgccgtagagactcgggcgcctcttttgctctttctgatctggttgctgacttcgatcgatctgcggggcgacaatggagggagcgctggcttcgttcaatcactccccagctcctcgctgaagacgacgaaatcgattgtagcaggggcgaaggagcgaccaagaaggagctagcgacgagcggacgacgacgaaatcgattggagcgagcaaggctcacgcggcacgc

SEQ ID NO: 183189 - DNA, 1303 bp, Zea Mays
caccgctcgcgcgcgtcgagcagcttctcgtcgtagttgagcctacgcttggcgcctaccgccggttccgctgccgggtgtcctcccttcgtgccgctgacaccagagggtaggatccccgcgctttcgaccagcagatcccgccgcgacccaggtaatcgatacacctgttctgtgggagtcaagtgcttcctggggtttgtccgtgacttcttgaattcggcttcattaatcctagtcggccacacggatccgtactactgaaaaccagaacttcgattaggtttttctgtgcccgcttatctgccgcttgctttctcaaagtaatgtatcatggtacactgagcgcctccttgagaaaagaagcaacaagttcaattcttcacttgtatttcatcctggaagatatgtttaaaatgcacatgaatcaaaacatcgctattattcccacaccgagtttatttcaagtttgcttgtggcagaggaaagcctggaatcctccagttactagttttgccattcagtccgctcactaggggcgtgattagttctggtttctactttctaggtagccaggctgacatgtggcagccagggtctctgcatgtaggagcaccttctttggttcatgtttccatccataccatctcatcgcatagcttgattggttggtctctccctactcgccttgtgcaggcgccaagagagcagcagacatgtgacgtgcactgcgtgagctaggctccccagaaacaaaatcccatttcatttcttggcctaatttgcacccacaaatccttgcccatgtggacgtccgtcgaaccaaacatctacctcctgcatgctgcatccaaccagcctgttctgactgcatgcatgaaaccaatcacaccttagatatctagtcatttccataggggcagtaccttctgtttgcacatgaaatcctatatttctacaactatttatgaagctgaactgctgaactactgatgtttgggttgttattaaacattgcatttaaccattggagatgtttgttatcactttaaaattattaatggaaaaagtacaaattactcccctcacctatggacaatgttcacaacttcacatagccccccacagtgtttttagttcattttacacctccattcgtttgagttgatttaatttacccctttacagaatttgtctttttccttgtgtaatagacacacatggagtgtctcaaagaaatcagttagtagcctaattcttgaacttgttgtccctttgtaggaaggagacacttatggggaag

SEQ ID NO: 183190 - DNA, 1368 bp, Zea Mays
ctcatcctgagcctgtccgccaagcatgagctgctgaataatttcacattgcacagtccaggagtccccagcaaaaccctcagcctccgaaaaaacaataaattgggggacttcctccagcgaagtgactcgaacacggagcagggttctagagatattactttggtcctcctcccataaaatcaatctcccaaacgacccaatggcggcctgcaaatactctgaagaacgataatccaagggaaaccccaaaagcataagccaacactcatggttgaagagaagggcacggtgattccaagcatcattgtgacggaccgcagtgaaagtagcgtctagatattgctgggggccgagcagaaccaagttatctcgctccagcacactacggaattgcaccatcacttgtcccaaatgtgagcgctgaatggcacggacaccaaccctatgatgctcaacaagatactccctgaccacatccctaaccgcagggaacaagacctcgtgctccggtaaaggatgaatattgataatcgcccagtcctcgtgaaatggcggcaaacgctgcgaaactgacctgaccataatcccacgatgttgtaccaccgcggcgctgaatcctggtgggaggaacggctccgggtctacgcgccggtacgccattgacagattctcagacgatcgccggagagccaagggcgaagaagcgggttggggttttgttgaagtgacacccaacgcgagctccaaggacgtttctggcgcctgttcggatttttttaataaaaccgccctggcgaactcaccgaaggaggcaaaggaagggggagtcccacccgtcagggaccgggaggaagggcggaaccaggaaccgaagtccaagagacgaggtgacccttccaaagggcaattactttcgaaggaagggaacgaggagagagggaaaccaaattctgattttttgcgtttgcagaacaattccaaatgtccactggctttacaaaaaaggcataggaaagctgaggaaaccgagcctaacaattccagccttccaattccaagcccaggcctgaaaggcccattacgcagaatgggccgccactgcaacctacgagaccaaggtcgcccaacagttgaatttgaaattggctttgaatttgaaaaggagcaatcatcacagccccgacatccgtgtccaatcctgcacccgttaagcctgggaaaacccaccggaggagcaatcccacgatgaagatcacgcgacgaggcccccgaggtcgaagaggtggcaggaaacctcgggccccgagctccagagggggaacccaatatattgaaaacagaagtcctcagagcaatcaattttcc

SEQ ID NO: 183191 - DNA, 586 bp, Zea Mays
cttgagcaatattgtcctcagcttccgttatatcatctgaactagctagcgcagactctgctggttgtgactgcaagatgttcctatcagacgtatcttcctttcctgtgtgaatagattcccctgtttcggtgtcacctgattgatgtattttagtaggcgaagaagatgcactaccatcaggtaagtctcgaacagactctctaagctgattcggctctgcttcatcactaggatcagaatgtttgctaacttgatggtgctggttttcttccactgttgaaggatgtcctgcagattgtgatgtttctgatgcttcagcatcacccaccttagatgcaggtgcctcagtagagctatcaagcttttcttctgctactgaaggatgtgttggagtttgtggtgttatggattgctcagaaacatctgccttagaaacaggtgacccattggaaatactatgaacttcttccgattttgaaggcagttttggagatgttgttcctgatacttccgaaggatctacctcagatatatgtttcttagttggtgtgctattaattccttcctctgctgacagattctt

SEQ ID NO: 183192 - DNA, 1196 bp, Zea Mays
ccgggcgtggcaagggcaggggcggcggcggcagaggcggcgacaggaggaagaaggaagagaaaggtacgggcgttgttctgcgcaccacctacgcaacctactacctcctcagtctccacctcctttctcgttgtatgcacgcacgtacgtacgtgcatggtgaagactgaagaacccttgttgttctgcttgacaccatggatggatggacggacacgacagacactgtgttgccgatcgcagtagcacttgcatgattgtagttttggctgcttttaattagcatgtgaatggaaaggggaaaaaagaaaagaagaaggttcttcgtttctttatacacgctgccttcctccctagctactaccgatcactgcaagcagcggatttcgtccgtctctgatgaaggatcctgtctctttccccttggagcgagcctggctggcgttgttgccacccaatccatggttattactactccttgtccttggccgctccttcacgagcgccccccgttcattcccgtgttcagaattcagttaggaggtagatgcagaagggtagcagtattaagcagctagtactactaccggcagtctggttgggtcatgcggtttgcaagggcggagtgaattgcgctgccgtacctggtttcagggactgggagaagctgtacgtttcgctcacctatagaacactggttgatagttgatactgagaactttggtttgcttcttgtcctttgcatgcagtggtgcccagcgtggtggacgtcacggtcgtcaccccctacgaatcccaggtgacactcaaggtatgtgttgtgttgtgcgccatcaccgtatcatcagttgcattccttcctaatccttcttctcccacacttgattgagcgcgttaacgctagctgattgatcagagagacgagtgactgtgctgtgctgctgcgcactgattgattgtgcaggggatatcgacggaccgtgtgctggacgtgcggaggctgctggggtcgaacgtggaaacgtgccacctgacaaactattcactctcccatgtggtaataatgctcgcctctcgcactctcgttccctcaactgcctacagtactagcagcaggcacggctaattctctggctgcgcggtatggtcgtgttgcaattgcattgcaggcgcgcgggcaccggctggaggac

SEQ ID NO: 183193 - DNA, 371 bp, Zea Mays
tctttgccattaaaaacaaaggagatgatatgtatgttgcagagctaagtagctactttaatgatgtgcttgaaagaatggaaccggatgatgctattcggtctaagattgatgaatttgcaatgcattctgaggaacaatgtagccctatcttctcaagcaaattggcacttgcaaacattgaaacaaaaagccctcgtaagtctatgtgcttttgttaatttcagcatgctacatgtttcaatgtccctaatatgtatgtgtcatgtgacatgttattatcgttgattggtggcgttcgtatggtggtcgtgccttcgaattgcaaaggtttgcaaagcgtgtggctagtctatgtgcttcatcaccca

SEQ ID NO: 183194 - DNA, 327 bp, Zea Mays
atcctagactatacaaggcagctagccaatctaggggattacaatcaatcgcaatcaggctctgattgatcctgatatatacatatcctaatacccgcccgcagtctgagcgggagaatcacagacgcaaagactggtccgaaaataagtgaagagctgtacgggcatacccttggtcatgatgtcggcgaactggtgcgtagacggaacatgaagaacacggaactgccccagagctaccttctcacggacgaagtggatgtcgatttcgatgtgcttcgtgcggcggtgatggactgggttggctgccatgtacacaacgctcac

SEQ ID NO: 183195 - DNA, 926 bp, Zea Mays
tgagaagcctgtacagtttactaaagtgacacaaattgacagaaaaggccttgaggaaatattcttctggtatccagtgccacctcccggttacgcttctcttggatgtatcgtaacaaaaacagatgaaatgccaagcaaggattccatttgctgccctaaactgagtctagtgagccaagcgaatatgtcagaggatcctatctccatgtcttctagctcaaaaggtccttgctgctggagcatctggaaagttgaaaatcaggtaggccatgatgcttagacaatttctagtaaatattatttcacctcaccgcactgactgaatataatgataaaaatattctgtgttatagggctgtactttcctggccagaccagatgtcaagaagccctcagctcaactggcataccgtattgctgaccatgcgaagccgaaggcacgtgaaaacattactgctgagctgaagctgggttgtttgtcggttggcattcttgacagctcttgtggaatggtgtgtaggcttgctaaattatgtatctctttttaaaatctaaaagttttaacattgttttttctctcgtaaacacagtatttatagaattattacaaatcaaccaatattaccttttttcaggtcacaccactttttgacacaacaatcgctaatataaatcttgcaacacatggaagatttgagacattgaatgctgtattgatctgttcaattgctgcatccacattcaatagacacttggaggcatgggaaccctttgttgagccatttgatggaatattcaagtgagccctgtttagtcatttgtatctgtttgtcaatgagtactgttctcttctagaatttttgttctgcaaccttatcattattctgccatcattgaaggtttgaaacatatgataccagtga

SEQ ID NO: 183196 - DNA, 527 bp, Zea Mays
aaagtagacttgacgacgaacgatagcagaccttataggagacagaatgggagaaaacttgtacatgcatttttctctatatgctggatcaataaaaacaggagactttcctttgctgcaccagcaaacagggggaggagctcgagcagctggaattgcgaatgtaaatgattcaacaaaataaagcattttctgaaagcgttccacagatggaagaacaagatctgcaaggcgtgatgaatagtccatgtggcacaatggattgttcctcttattaagaatatttgatacaggatgctttacagtcaaaacatgtctcatgtttgtgccatagacaggtctcttttggcatctaactctattccaccatgcaacagaagctgccctttctctggattcctttattctctcctcctgtagggctttctgaatatcttcaaaaatgtttgtcaaattacttccctgatgatccttattagagcaaaaaatatccaggtcacagtccctggaggtgatacttgaaggaa

SEQ ID NO: 183197 - DNA, 735 bp, Zea Mays
gtgggctagtgaggggtcgctgcgtgtggaagaggctgtctcagacgaaaggctgctcgtctgagcaggagaggaaggaacagttagagctcttgctgtcgactgagtgtggggagaggcgcgggaaggagatgagcaagagatgtttactctgcaggatagtttggttctgataccaattgtagggtactgaagagggataaagccggagagtttggttctgacgccacggggcaattttcgtttatttctcacacactactcaagtgctatacccttagaagggttggagacacatatttatagcactaggggctgcactacactgcactacgcactacactacacactgcagcacacagatgttgtcctttagatactaaagtgcagtcaaaagactgctgtgctgctactgctgtcctgcgcagttaaaagactgctgtgctgtaactgctgctgtcctgcagcagtcaaaaggttgttgctgctgctgcgcagtcaaaggactgctgtgctgcaactgctgctatcctgcagcagtcaaaaggttgctgctgttgctgtcctgcagcagtcaagactgcaactgctgctgaccacatgacttattctatcagttattagttgtcctgctaccttttacaaaacgtaggtcacttgtggatttgcaactctgatcatgtgtactacactaataaacaagtaccggccttaggagttagaaggcaataataa

SEQ ID NO: 183198 - DNA, 588 bp, Zea Mays
cttagatgtaggagctgtgactgctgtcacagttgtccactatccatttagggtttctatttcagatttcctggaaatgctattagtggtaaggactaaggagttccctgtcggttcctctgtttgtgttgtggtgccagccaatcatttcaagaacactcagacttttttgtggttgtcgcttcctagaggatttacttttctctagtgggatgtgatgatagcatggacaatgtttggacacttgaagcttgggagaaagtaaggatgcaacgatagcatggacaatgtttggacacttgaagcttggtagaaagtaagacaagttgctgtattaagctgagacttttagtgtttcaatgcaggaggcaaacagaaattggtttaagtggattgatttgtgttttgtactagttaggacttaggaactggatttggaaaggatggtggcggtaggtttagatagtttgttgggacaaaaaagctgtggtactcttagctaccaggtttgaaaagagtggagcctttagactgggatatgatgtttgaactcctgctcttctatattcagtctcatgtccgctagtc

SEQ ID NO: 183199 - DNA, 284 bp, Zea Mays
gatttaatgatagttcttttgccttatccttagcagccttagcagtctctgcattagcaagaatgttgtcacgagggaacggaacattaggtaattcagaactgcttggaatattttcgagccgtgcaaccatgagctccaattcttctttaatttgaatttggaagcgtagcacgacaagttttccttcaagcaaatccactgtgctgctatcaacaggatttttggacaaatcagcagcgatgcctgcgcttttggcctgaagcactgcatctctgagatat

SEQ ID NO: 183200 - DNA, 277 bp, Zea Mays
cttgagtggacataaacaccatctaggtatgccttgaatagaggggattataggaaacctggtatcacaaaaggtcattagctagcccgatacatcttcatccactagttgtactctaataccctctagtgtgaatacaatgcccacaatatcatagaaacgtcatttgaggtttaaaaggtgacctattgttttgaattctttatattttaactttttagcaactgtatggtggaaaaaagttgtcttacaaccttaacctatgtttggacagttc

SEQ ID NO: 183201 - DNA, 436 bp, Zea Mays
acctaccatgtaagcttctgaaaggaatatgttataccgggacagatgaaggagctgttaacttggtcaaagttgattttgacaggtatatacgtgtttctttaccatctttcaaataattaatcttacacagtttaagattgacaacaacaatgaaaacaccaaagccttttagtcccaagcaagttggtaggctaccagtcatttcaaaaacatgagtgaccaacaaaaagggaaaagaaagagaaataaactgttgcagcactgaatattttgatattgttcacaactattaaccttatgtactgtaattcttgcagcatggaatatattattgatttgatgggagctccaggcaccttaatcccttcagacatttctgggagtcagtttcaggactccaacaatagccaattgagcagtgatgccattgaag

SEQ ID NO: 183202 - DNA, 319 bp, Zea Mays
ggcgtagtaccacgtctgggccgtgcccctcaagtggtatgaggccagccatgtgcggtcggaagcgagcgtgcgttggccccgaaaaaactgctcacattgattgagccaattgacggggtcagcagcgccgtcgtatgttgcgaactccagtttgtagaatcgtggaggcaggggatcggatgccgcgggtgccgtcggagctgctcaattttaaatctgtagggacttttaaatctgtgcccttagttcagcaccactgctcaattttgtccctctcttatactaaaaacgcttcatccattattactagaggggt

SEQ ID NO: 183203 - DNA, 1302 bp, Zea Mays
gaactacagtgctgttgagggtagtgactttgtcatctcaagggttgctttccgtgacaacacttctaaatactacataaatgagcgtggaagcaattttactgaagtaactaaactgctgaagggcaaaggagttgaccttgataataaccgttttctcatcctccaggttttgtgtgttcttcacatatacacatggataagacaaacaattaaagtgtaatttgtaggttcttgagatttggttccatcacttgcatctccacttatctctcatagcttctttgtttgagcctgcatgaatttattgtgcagtttcaattatgttttctacttttacaattgcataacttctgaagtgggcactatacagggtgaggttgagcaaatctccctaatgaaaccaaaggctcaaggtccacatgatgaaggttttctagagtatcttgaagacataatagggacaaaccagtatgttgaaaaaattgaagaagcgtacaagcagtgagtttctgacataatttttaatgcatgctgttataactagtgctttgtatatatttagcaacgatttagtttcttaccttgttatggatctgttagactcgaattgctcaatgaaaagagaacagcatcagtgcagatgctaaaattagctgagaaagaaagagacagtttagaggtgatcatctaattgtttatgatttcactatttgaccatttaacagttaagcactattaatggagttatttttctgtagagtgcaaaaaatgaggctgaaacatacatgctgaaggaacttttgcttctgaaatggcaagaaaaggcaacgaagctggcttctgatgatgctatctcacgtgttaatcagtgtcaggagaatgtggcagacctggaaaagaatcttgccgctgaaaggttatttgttacagatggacagtgtcccccctcccatttacatgttttctgagtaagcatattcactattatacagggagaagatacaccagaattcacaaactctgaaggaaatggaggctatttacagtaaacatgtcaaaaggcaagaggtattgtttcaacttaccatatctgtaacctaatcaatcattgaattgaagtcatttatttcctatatttgaaggttagaaaactcgttattttctatcacaaggttattgcgaatgggccttttacagtcaactaatagcgccctacttttatttgcttcttttatgtctttaggaccttgaaaataacatgaagagctgcaaagaccagtttaaagagtttgagaggaa

SEQ ID NO: 183204 - DNA, 507 bp, Zea Mays
gaacatcagaaaaccaaactcgttatgaaggacagaaatacaggtcctgctcatatgagaagttgtaggccaacaaagcaaattgattgtacttgctcaagtgcttccttggattcatctacaaagactaaggaagtaaatgatgcagaaccaagatgttctaaatctgtaaaaacttttgagaatgtcatggccaagaaaagaaaacgacctattctatcatatgatgaagatgccaaggccatgcagatggaagtgaggatgcgcaggagacacagggaaagtggtgtgatgaagctgcgaagatccacagaaaattctgatgaagcgatgtgtccaggaaattcaaataatcaacttaccaatgatcatacgaaggcaaggaagcagagaagggccaacaaagacaataaaacaccaccagtgaacgctagtgttccatgcacacagattgatgctgcacgattagcatcagatcagcaaagctttatttgcacgcgacccatt

SEQ ID NO: 183205 - DNA, 327 bp, Zea Mays
catgtcttcactcctctctcttctctctgttcagcccagtgagctcacctccaccccttatgtgcccaaatcaatttcctgtcaattctagtgaatccaagtggtggaatgtgttcccatgtgtctcttaaatatccttgcaggttcctagctccttcgggagggttttcccatctcaaatagccatttccccgaaaccctaaaactccgtcccacgtgttcggtgaaatgcccaaaccagccaaaaatgctccaattgaacccaaatttttcaggcactttcacaacacctccagtaacatattcgccaaatttcacgcccatccg

SEQ ID NO: 183206 - DNA, 358 bp, Zea Mays
gcctggatcgtgcccctcggccacacgtgcaacgacagcatcggccctgtattccagggagagcaggtaggtaacccatcacaacctctgcatgatctgtgtatatatgaaatgcaaagcctagtatggttatcttctccttcactttatctgatggtcagtcgtgttcgttggcagttcaaagtaaccatgtgagagttgtgcaggtgtatctggtggcagaggacaaggtcataaaggtcacaccacggaacgtgcacacggccaagccagcatcggaggttttcttcagccacaatgcgacgtcttcagggaggtccgaggagatcattggcctggccgtcagtggcagctactc

SEQ ID NO: 183207 - DNA, 290 bp, Zea Mays
ctgcgatctccaggacctgctcaatctgtgtattcagagggtcgcagtctccgctctcgatagccgctacctggacaaggagcttccggctgacatatacaacaagatcaaggagatccgccgccaaccagagaacgccattattctggaccctgagcatgacaagagggtcaggaacatcctcaaggccttggattccgacgacgtcgatctcgtcggcttgctgttgaaggaatcgacggtgaccttggacgatgcattcgcgatacactatgctgcagcctactgtg

SEQ ID NO: 183208 - DNA, 761 bp, Zea Mays
aaaaaccatgtgcaagtccttcttctgctccttatatcgctccatgacctgccttattaagaaaattgcttccatggttgaccttccaggcatgaatccaaattggttcatggtgatatgcgtcattcctctcaggcgatgctcaataactctctcacatagcttcatagtgtggctcatgagcttaatccctcgatagttggtacaactttgaatatctcccttgttcttgaagattggtactaatgtactcctccactcatcggccatcctgtttgatcgaaaaatatggttgaacaacttggttagccaaacgatagcaatatccccaaggcatttccacacctctattgggataccattcgggcccatcgccttgccccctttcatcctctttaaagcttctttgacctctgatccttggatccggcatacaaagcatctatttaaatcattgaaggagtcatccaattagatgtccatagtctcattctcaccattgaaaagattgtcaaaatacctctgccttaaaagaggaatcatccaattggatgtcctctgtttgatgtcttgtcctttcaccaagagtcgatccatctcatccttaatgcatttaacttggttaaggtccctcgtcttcctttcccgaatcctagctatcttatagacgtcttcctccccttcctttgtacttagtcttcggtaaagatcatcataggcttgaccctttgtctcactcacagctcgctttgctctcttct

SEQ ID NO: 183209 - DNA, 603 bp, Zea Mays
ccatgttggtggtggttcaaatcatgcgctcggcccgaccgttctaagtggtgtcaggacacgacatccacagttgcatgtcgtgtgagagaaagaaggtacgagacatggagttatcaaactcatgtccgctatcccactgaacactccggatggtgcgaccgaaatgagtcgacactaacgcgaagaagtgagatatactgaggaaggtgtcagacttacggtggaggggaaaggtcgacaggtagtgagagaagtcatccagtatgatcaaatagtacttgtaaccagaaatgatcggtatcaaggatgtccaaaggtcacaatggacaaggtcgaagggaggagcggctcaggacatggaagaagagaagggtaagcaagtgtgacgcccaagctgacaagcatggcaaagcgaggcatcgttgtcgtaggggtaggtgatgcccgaggtgcccaagagtctagagaggttagctagggtggccaagacgacggtgccaagtggaggcagcagtagcagcagtgacgagggcatggggtgtggcaacacaggatgagggagatgaggtggggaagcgaataggataatatatggggctg

SEQ ID NO: 183210 - DNA, 292 bp, Zea Mays
cgatgttctgcttggtgtttagacccgtccttggtgcctgcttcaagggagctttggatcgtcgaacctccctttgccgttgatgggatgtcttctggcaggagaacgctgatgtatccaatccgcatcacattctcgtctgccccacggagggatggatccgatcctaagcttcatgctattacttcgggcggggatggttctggtcacgtgcagcagggatcccctcctttttcaagacctccccattcgagtgggagaaggggagaacatggtcattcgggacgtctct

SEQ ID NO: 183211 - DNA, 316 bp, Zea Mays
accgaagtaattgcagcagctgcagctggtgttgcagctgagggtttgtctcctgaagaagcaaaaattcaagcagagaatgctgctcatctctcagtagcactagcagagaatgcaatagttattctgatgcttgtggaagatcatctgagatcacaagctcaacatttttgcacatcccttacaggtgatagcatcacatcgtccacatcaatgacttcattggctgccagtcggtcaaattctttgagcacagctggtaaagaacccatggctgctggggtctcaagacgggcatctttgtccagtgatgctg

SEQ ID NO: 183212 - DNA, 307 bp, Zea Mays
aacagttatataaagcggaaggttatgtgaaaccaaagcaagaaaggcaaagcttcaacggcttcagacaaggatggtgaaggatcccgagaagaagaaaagacatgaacaatacattaggattgtaaaatgacataattgtatctccccgataacgaagggctattgtgtaataataggggcaatgtagtgattttatacgaaggagtgtattggcctatatctataaatagatgaataataccactgatatagggatcaaccattggtaaccctacgtctgtagcaccttctcctcattgcctct

SEQ ID NO: 183213 - DNA, 3431 bp, Zea Mays
cacaggatgacgccttcaaagcagagctctgtgacttgtatgccaggtgtgcttctcggtgctcttgttttttccccagctggcacatgtgcttgtgtgcattaagttttcttaaattcttaaggtgtcacctcacctcacgctttagtcgcttataagcgtaaggtggtagtaaatctcaatcgccccgcttcgtcctaccaacttgataaccatgggcataactagtgttgtgctactcactactcactacctgttgccccctgcatactacactagttggaggcacgaaggtttctgcaaacaattgcaggaaaaaggaataaccataatcctctagatgtaatcatactattgactatatattaagaagcaattggtctctgtttttttaatctatattaagggacccaggcaagcaaataaattattgctattaggcgcagtcagccggccactcagtttatttggtgttttgggtttgtatatttggtgagcaaaatttcagttttctgaatagaaaacccagagtttttgcctcaaaccagaacatacactttgttgttcggtgtcttcttgtgtttactgaagaaacggcatggtaaccagggacagatcgcaaggggtaggaacagtggctagtttggcggacttcatcaccacggctggcagcttgccgagccacgatgaccgaggtagtcctgccgaactccagggagacttcattcctcgatgatctcctaatacaaactagggtctgcctttatagtatgaggcagccacaaaaataggaactgaataacttattttggaagtaaactaatgcatatctccctagaataaaactttccaactaactcgatttctagccacgttgttggtcactttcctgttttccgcctgctgccccttgattactttcctgtcttgcgcctgctacttcttgggctggatcctggcgccgacgcttttgatattggcagcccacaaaagcgtcagtaacagcttgtcattgtcagtgcactacaatgttatcaagtcatctagttgatcttagtcgccatgggaccaaccaggtgactagttggtcctagtcgtcctatatatatcaggactaaactaatataccaaatatgtactgatgtactatatgtctggagtataaatcaagcaggaagataactctagggtggtggctgcatgtaggcctgcaaattgggttaaacaatacgggccttagtgaattatgctatcccagttgcagcctatgtcctaagctgtttggcaattccattatgtttctggtcatccacctcttagtcagatgactaatcggatgacaagaaaactacttgacctaaatgagtcgtagcccctagtcaagtccaggatactgattgggatgactaatcggatgggttgataacactggtgcactagctgaggctagcataccagtgagtggtggttgtcaagtcatgcgctcgtcacggccacctgcatgtccatgtgccatcatgcccatgttgtggcagctagctttcttgtttgcctgggtcagttaggggaaggagcggggagggataagtggatagtaacacaatgtggggtcagctggtccggttagggaacaaactgttgttctctgtacagggcaattcacatgcctagtgagctacctactaacgaaccatcaatccaacatattcctcataaattgccttctgtggccagagctaatatgcacaacacaagcaaataccaagcttgtttggtggtgttggttgtggaatttgtatttgtgcatttgggtggtgtctccaacttttaatgacagcctttcagtttcgtggatggatgtcaacaatcttgcctgggtacaactgaactcatgtatacaatactcatgtagtcatgtattagcatctagatcagatgggcagttatttggtcatccttttcctgaccatgcttttatgcaggtatctttactcagtacttcctccaggagatgaagatctcaaaggtacagaggttcaggcaattataaaatttaaaagtgctcttgggcttgatgatgtagatgctgctaacatgcacatggaggtattgcctcccgatctatctcctatgctcttattgttttcgtctttgtttcccacattctctatgttttatgccaataaggtacattttcctctttgattgttgtactagattggtagacgcatatacagagagaggttggaaacgagtgatcgtgatgctgacatggaacaaagacgggcaagtgtctatgctttgatatatgaatgagatgtttggaacttcctgttggcccatgttataaccatgtcgaattttttgcaggcatttcagaagttaatttatgtgtccaatcttgtctttggagatgcatctgtattcctacttccttggaaacgtctgtttggggtgactgattctcaggtaattaattataaaaatgcttgttaattttttgcatgccttctctcagttttatgctttgatctcacagagttatttgttctgtattttgaagttcagttcgttttttctggcaacgttgctctttgcatagttgttatgctgcttttgatgcagttgatatttcgaagagtttggacaaatgttcatcaagtgttaatgccactactcacagtccaaataagaatgtctttctttacttaccatggtattaagtatcatttgacattatgtttctagattgacattgctatgagggaaaatgccaagaatttatactcggtgcagctcaagtctattggaagaggtaatgctagaacacagttttgtttaggtgttagttcaattataaagtcatagtgtcatattattcataagttttgctttatcaagtaaatcatatagtgtgctgtaaagacagcaatatcaattttgttgttgttatatttattgtttgatatatctcttattgcatctcaagaacattctgaaatcacaaaatgctctcggtttaggtcttgacataggcacactcattgaagtaaggagagcacaacttgcatataaactttctgatgaggtaactcttttctcaactctgttgctgcttatttgttttttcttcatttgggatgaaatctacatcagtacttatagaacaatgtcattttatatccatgctatgatgcatatacactagctgagagtttagacaaaaataaaaggtcaattatcattggtgcttggaaaagataatagagtcaatgtaagcatgtttttgtttttaagtgacattctaaatttcttgcagattgctgctgagatgttccgtgagcacgcgaagcagctagttcaagaaaacatttcatcagcattagacatcttgaagtcacgtattccgtatggaacctacttaccctttg

SEQ ID NO: 183214 - DNA, 626 bp, Zea Mays
tttaacaactcagtctaaataattgttcatctccaacatgttctattctcaaccaagaaagtatttccgatcaagctattattgtaaaaaaaaactcactggacccatgctgggggtctcacctgtgtgggtggcttggagggggtcctcggtgtggaccagacacagtatgcatacatcgccagctttgaggcatctgtcggcactggctgtgggcagggtcggcctggactagatctgcaacatcctgagggtgagctccatcacttggggaggggcgcggatgttgactggcctggggacaagcagcgcgaccagcgcagacaggctggggatgggcgggcatgatcagcccagacaggctggggacagggcaaacgggcggtgtggggttatgacggcaacgagcagtgtggggtcttgtgaacagggagtcacatgggggcattttggtcaaatgtacaaatgctctaatttttagggctcacatggggatgcattttggcgtacactgacagaaagcaaaggaagtggcaaataaggaatataagttaaactggatgatggataaggaaccaaaaagaaatcagtggcaaatagagcactgagttatgtacatatggcgg

SEQ ID NO: 183215 - DNA, 530 bp, Zea Mays
cttgattaagcataaattacaataaaagctcattattactcggcgccttgacccaagcagcaccacgaagatggcccgctttgcaacggcttggctcctcgattcacgccggccacgatagtgcgtacagtgtaaacgggaacaaacagcagggaaggggaggcagcagtggggaagatgaggcggcggtgtgaagtgaaggaaagggtaaggatggaatgttgtacggtgcggacaggagagatgggctgagtggcgtcaaagtgcatggacaaataaaatgggctaaaacgcctaagtcacgaggacggagggagtacatggtagttgtcacaccataaacaaacacacagttgttgtggtattacaagactacaaatcctttggtgtacaatcatgatacgctgaagtatctaatagcacgaggtatgcaaacctcactaacgttaaagctaaaactagagcaagcatggtttaactagctagcataagtacttcacaaaacaactatattaatcaccacgtgaatc

SEQ ID NO: 183216 - DNA, 306 bp, Zea Mays
tcccgctgtggttctttggaggatgccagtctggtgtttgatgaaataacacggaagggaattgatgatgttatctcatggaattcaattgttgctgcccatgttaagggtagtaatccgcggactgcattagagctgttttcagagatgtcaatgattgttcacgaaaaagctacaaatgaaaggtcagatatcattagcattgtcaacattcttcctgcatgtgcttctctaaaggcattgcctcaaattaaggaaatccacagctatgccattcggaatggcacatttgcagatgcttttgtg

SEQ ID NO: 183217 - DNA, 549 bp, Zea Mays
atcattaccctcggccttttagtgacacaaccttgcaagggaaggactcatacccgatttacaaatgtcgtgatgatgggcgtaaggaaaaggttcgaggttgtgaattggacaatagatgggttgtcccttacaacccttacctccttcgtctcttcaactgtcacatcaatgttgaggcgtgcgggagcatcaaggttgttaaataccttctcaagtacatatacaaaggccatgatcgtgcatctgttgttatgagagatgcgagcaaggcagatgatgatgtagatgagatcaagcagtacatagatgcaaggtggatgactcctctagaagcgttatggaggatatatggctttgagcttagtcagaactctccacctgtgatgcaattgcatctccatcttccaaagatgcacatggtggcgtttcatgaacgacaaatggtcgagcaagtcgtcaaccgtccaggtgctgataggtcaatgctcacggcatattttgaagcgaatagactacatgagggggctcgtggcatcctatatcgtg

SEQ ID NO: 183218 - DNA, 329 bp, Zea Mays
ggcgcctagggctgcgtgccgagcagggaaccggccaggaaatgggtttggtctgctgataccatgtagaattgcagctagaatagtattgattgatgtcacggatgatacgcttagtgtgatcgttctgcaaggaggtgtagggatggaagacatgcgaagaagatgaatgtcgtgggtgaggaagaatgtgcgagagctcgcattatcgaactcaaatgaactcattctgcattgcagtgatgatatgctgcaggagagcaacagaagatgcagtgagcacaatatcattcacatagagcaacgtgtagcactatgacggaacacaa

SEQ ID NO: 183219 - DNA, 275 bp, Zea Mays
caagtagacttactaatttttatccatgtcattccgtgcactagaattaccatacacgtttatcaaatgcattcaccacaatactcagacccggcatatatgtgtttatcgattgcgcccttcacaaactaacttgcattcttacttagacatcacatgaacactacaaatttttacccgcgaccataaccatgcacatttagaccataacaagcaaatcatcgtgattacgagcttaaccaaaccatctaacaattcggctaactagagcaacg

SEQ ID NO: 183220 - DNA, 333 bp, Zea Mays
atcagaggtctagtgggcaacaacagaatcgtcagggaagcacagtgaacacaccggccaagaataacaatgcaactaccctagttcaacccaatggctatttcaagtgtggtgaactcggccactatgccaactactgccccaggcgtaacccacagacaccctagaagaacaacagctagagaactgaccagaactcacctgctcgtggatctacacagaacaagactccgcagaaccagagtagaggaagagtcaaccatgtgacagcagaatcagttcttgaggatgtcggtgtggtgtatggtatgtttcttattaactccatacatg

SEQ ID NO: 183221 - DNA, 447 bp, Zea Mays
tgtccttagtcctcgtcgccttgatcatttcatcgatgattttggcattggcaaaacttcaggaaacgagctcaagaaattcaccaacattgcacagaacttaattgttggttccgtccttgtttcaacggtcacgtttgcagcagttttcactcttcctggcggctacatatcggaggggcatccacacgccggtgcaccaattctgtcacacaggtacaccttcaaggcgttcgtgatggcaaacaccctcgcatttgtcggctccaccttgtccaccatctggctcacctatgctgggtcggaacacgtccacccactgcttcgtgcaatctacatgttcctctccgtaatttcgatggagcaggcaacaagaagtatggttataggattcgcattgggtgcgtatgtcgttctgagcccagtcagcgagcggattgccattgt

SEQ ID NO: 183222 - DNA, 916 bp, Zea Mays
acaagtcgacttgcaaattttattcaagttatttagtgcactaaaactactacaaccaatcaacgacacattctccccaataagcacccaaccatttgcgttttaatttagacatcacatgagcactaatacttttcatccgcgaccgtaaccatacgcattcagaatacaacaagcaatttaccgcgactacgagcttaactaaagtcatctaacgagttgattaatcaaaggaatggcatagcccgccatacgacatacacgtcggcttgcctattattatcgcagtccgagacaccacacctatttatatcacaatcacttacgccatcgactcctacttaacatgagttgattaattgcagtattggacttagcgaaccattttagacatcacaactcaaaaacatgggttggagcagattaatcagcttttcctaatcatcgctcaacttaaaattgttactacacaggtcacttaaaatggcacatttttgggatctaacatagaggcaattacacatggcgtaaaactccataagactatatttgctactgaaggacctgaagcacttatgtgcatatcttaacggattgttcttcaattttaacaaggatcgacttatgaacgctactcgccttcaataattattgggctgcgataacgctcgtataagacctctaatcgatcaacaagacatttatttatccaaaggggcatggaatgtgataattgacaaagcaaagcatcacattgccataccacaaaaatcatggcaacaccgagatactacccacgaatcgtttgaaaattaaacttacttctcgcctgccactacatcacccttaaacacacaaccatcacgagcatccttcacacgattatataatagcgacctaagcgtcatgtcacaat

SEQ ID NO: 183223 - DNA, 324 bp, Zea Mays
atcgatcagggttgtcggatctaaaaccgacccacaagattagatcactcttttcatcgaaccggtatcggatatggaccgctagatcatgatccggcggtcaacaatagcgcatgacccaaaccttccagaaccgctcgatttaatatgtacggttaggatttaaatagctgaaggggtattcattgtcatatcaggagcgtccgtaggcgatctaacggctgatcacctcttcacaccacaatcccacatcagggatccaacggtccctggacttcttcccctccttgctccaagccgcgacggcgcgcacaccatacacgg

SEQ ID NO: 183224 - DNA, 1974 bp, Zea Mays
gagtatttgagcaagacgtttcatccgaaatctgcttacaggtatatgatataacatccaacttattttaaccatactgcttatgataaactaggcatgtttagaactgaaaataaagcttggtcctggaatgtggtgtgtgttctcatggtaaaagtttttgttgtgttgagtccattcattatgcttccagcaaagaagcaaatgaataaacgggtacttaaaagataatttgctaaaccttgtttgttgaggagaatgacactcccatggaaccacaatcattagcaactggatgtagatcagactatcagagaactatactgtacttagatgtcagtcaggtattccttctcaggctactttgcatggtatcaagtacaacaacacaactatctgacatggttcatagtatattagaaaactaaaaagaaccatgaataatgcctcaatgtagaagcatatcttagtccatgctactatgatctgtattgcccatttgttatggttaggaatgaactctatctacctttgcctctcctttcatgtaaatcatttgtatgaaacaacatattattaccagtaaaagatggtttcagaattaggaacgatttggtgtgccttgcttctccattccatgttccattataatgctattcagtctctaggttatctgcttcaggttttcattcactgaaatgaaatatgcaagtcacttttattatgtggatactatgtaaatactatgtaaaaatacaatggtttgaaatacacaatgggtattggaaagataccagttatctcaggtgtgatattatgttgggaaacatgagcctgactgatggtttttcaacacatatcatcccatagttattaaataatgtagttcaaattcatctggtttaacatcttccttgaaaatagtttgatttgcatagcatgtagaaaataattaaggcacatggtttgtggagccatttatgcagattgaagtcacttggtattattgtccatatttaaagctgaccgaaatttcaaggaaatgcaagcacacataagtttgcttcttgacaacattatgtttgtactatggcccccatcagtggatcaaatcacatcttaaaaaaacatgctcccaagtaaacttttattctagttaatttcatgtgtatacttttattctagttaatttcctgtgatctttggtgctactagaagactcatgcatcgggccctttgccctttgtactttaggagctgggcaatcttctctgatcatccacattgctgcttctaacctttcatatatctatgttgacatggcatggcttgcatgttgcagttcccagcattataccagcaagggccaaagaatcttttctttgattggtaccggatccttggatggatggggaatggcctctactcctctctggccatattcttcctcaatctctgcatattctatgatcaggcaatccgtgttggggggcagactgcagacattgctgcggtgggaactaccatgttcacctgcatcatctgggctgtcaacatgcagattgccctaacaatgagccatttcacatggattcaacatctctttgtatggggcagcataacaacttggtatctcttcatcctcgcctatgggatgacattgaggtctggcgacaactaccagatcctattagaagtccttgggccagctcccatatactgggcagcgacgcttctggtgactgctgcctgcaacatcccctacctgatacacatatcctaccagagatcgtgcaatccacttgatcaccatgtgattcaagagatcaagtacctaaagaaagatgttgaagaccagacgatgtggaagagggagcggtcgaaggccaggcagaagacaaagattggtttcactgcgagggttgatgcaaagatcaagcagatcagggggaaattgcataagaaaggcccatc

SEQ ID NO: 183225 - DNA, 471 bp, Zea Mays
ttgtgattcagtgaatatattagttcaccaagtgctcttaccaatttatgtttattgtgattcagtgaatattagttcgccaactgcttgtatcatgtattcggaattttggattgttaaggtttaggtgtcatgctatctatttatttagatgtcatcctatctagtttattatcatactgcctactccctccgtaacttggttccaagtcataagatggacgggccttttttgatatatatgtagacatactccctcgtcccaaagtagtaagcattcatgttttatcccaaaatacttaccttcttgacctttctcttttttcctaagcacctctatctcactccttttcacattggtaaccgtgctcaactaaaaaacgtcctcaattttgggactgagtgcataaatgatacaaatgtatctagaaaagttgaaacctcttatagtttggaatagaagggagtatt

SEQ ID NO: 183226 - DNA, 403 bp, Zea Mays
aaagaaacatattagtctggcataatatttatgggacaaacactgtattatcacatatttatatctaaacagattgccagtgtatagtagcaaaagatggctgccacatatttacatctaagtaggttgttcataactacatagtagcatagtatatatctaagcagattgatcatcagtgtattgtagcaaatgatggttgccgcatatttacatctaagtagtttgttcatgactacatagtgagaaaagatagttcaaagttgctgatatattatttattggatggagcgatcctggagtcttggtaacattgtagtcattgaaattgcagcttgaatcaagctccttgcgtctacaatagggaacagagaataaaagttaaatatttataaaattaaat

SEQ ID NO: 183227 - DNA, 495 bp, Zea Mays
cggtgatcatgttggtgtcaggaggacactgcaccaagtcccaggtgtggttggccagcagggccgcatactccttcatagcatggtgctagtggggatcggttagcgtggtacagacggaggagggtacagacgagggagccgtagtagtggtgatcatgagcaccagctggtcaacatgttggataacactgacggattggcttgtgaccatcgggtggacgtggcgggggtcatgatggatggtgacatgatggtgaaccgacggctctcacgagattgggttggggcacgaggtgacgcgtcagaggaggggaccggtggactgcgcgggcgggatcatcgcagcgaactgaaggtggctagggcgatggggccactcatggagcaggtagagacgacggggccacgcacggtgcagaagaggtcgccgagactgaggtttggggaagaggagggatgtcgactgtattggcataaaggagggatgatgat

SEQ ID NO: 183228 - DNA, 453 bp, Zea Mays
cccctcgtcggcgaccacccctcctctccggcgatctgctctccggcgatctcgtcccagtgctcctctgccctcgctcggtgagcagcctcttatccctctgtcttctctctctctccatttctccgggcagtgagttcctttttccacccattttgtgcccaattcaatttcctgtcaattccagtgaaaccaagtggtcatatgtgttcctctgtgtacctttagtatccttgcaggttcctagctccttcgggagggttttcccacctcaaatagccatttccccaaaaccctaaaactccgccctccacgtgttcggtgaaatgcccaaaccagccaaaaatgctccaattgaacccaaatttttcaggcaccttcacaacatctccagtaacatattcgccaaatttcacgcccatccgatattccaggctttaatttcacccaatt

SEQ ID NO: 183229 - DNA, 736 bp, Zea Mays
cctggtccctatcagtttattttacatcactgccgattccagtacatttatctgtttaactgtagacacttagtccaggaatggagttaccgcctactttgttgacacactttagtccagtttatgattattctaaatacctgccgtactgtgatagtaaaaaaacttgaatacacataagagctgtgtatcatatctgaaagcaggaaggatttggtataatgcattgatctattgcattgatcctctcaagcactatatatagggtctgtttggttgtatgactaaggtatcacatattgccatatatttttttgtcacacttgcctaagattaggcgctctaattctacaccacatcttggcaaagcctaacaattgtggctacaaaccaaacacactcctaagccggtcaaatctatctaaccttaggcgtggcaaactgtgacaggttaggcagcgaagagcgaaccaaacatccccatagagtacagagacttgggagacaagacacctcccccgacacatatggtagaactaggttacaacatcctacctaccaaatatactcttaacagtattgttaaagtagaactataatatacatcatcctaccttcctttcttaatataatgatgcacatctcccctccgcattcgagaaaaaaagtagaactataataggcaatttgataattttgtttggatatggtgctaactgctaagggaactcaaaga

SEQ ID NO: 183230 - DNA, 486 bp, Zea Mays
gtcgcgcagcgtatagactactgtcgtccgacggcccacgagcaatgcaagctacgaacccaagggatctcccaaataaagttgtgaaagctctcgttactcaccgcccgatccaacggatcgtgctctcgaaaacaaatcttggtcgtccccttcccctcaaatccaacggcgtcaagctcacgtcccgcagatcggctcctcgcaccatccccgccccgccgctataaaaacactcatctgttgcatttcgattccgaacccaaatcatcattccctttgccttcacatcagagtagacgcgcaccctaggctctcgggagatggaggacagtagcgcggtggtggagaagttggcgtttgggcgaaagctaggcggcgagccaaagaagaaggcggtgtcgcggtctgtcaaggctgagctccagtttctagttgggcgcatcaggcggtaccttaaggaaggtcagtacgcgcagcgcgtcg

SEQ ID NO: 183231 - DNA, 353 bp, Zea Mays
tgtttgtgtaaactaaaaatttggccatgtcctcatctaggagccatgacccaaatcgatgttaattccctgaaatttttcccagttttcaaaagtggatgagtctgaatttccatcgttagtttaggaccaagcttatctaaataggtgtttaggtaatcttctcgtagaaaataaatgcacctaaatttaagacaaggatctcgagtacgtatttttgtcgtttaatatgtgactcttcagtggtcatgttttcctcctaagcttcgacttgttcggttggtgcaaactggtatccctattccagtttgcctctgcttgaggatcacattgtcggtttctcaatctaacct

SEQ ID NO: 183232 - DNA, 656 bp, Zea Mays
tgtagatgtacttggtccatggtagccaacgcaacactgtcgaggacggtcgccagtgaggcagcgcagctatatgatgatgacacggttggcctcctccgattggccatcggactgagggtggaacaatgaggtcatgtggagttggtacccatcagtcacatgagctcgtgccaaaacagcaaggtgaagatcggatcgcagtcagacacgatggactggggcacgctgtggagccacacaatgtcggtgaagaaggcttgtgtgatggactcaatggagtacaggtgcaccaggggaatgaagtgacaatacttgatgaatcgatccaccaccgtcaagaggatggacttgctgtggaggcgtggtagtgcttccacgaagtcgagcgcgatgtccgtccagacgccctggggtacaggtagaggaaggagaagacccgccaggtggaagtgctctgatttgtacctctcgactcttcgccacctcgaccatctcttgcccccgcgacaacgttacttctctttgtcatgcttgtcagcttgggcgtcacacacgcttacccttttcctcttccctgttccgcgctacttgccacttcgaccttatccactgtgacctctagacatcccccattcctagcatctctggtatgc

SEQ ID NO: 183233 - DNA, 397 bp, Zea Mays
gtatttgacaaatttcttcatggttcaactttggaggaatgctattctgctgttgcctctgttgctaaccggtggttggacctactggatgtaagcgatctgtataatgaactatattcttatattcttattctctaaatcctcaacaagccaaccaacttatgttattgatcaatacatataaaaatatttttctgttacagaatcaaggaattgatattgctgacagtgaattgcttgatttcatatcggagtcgagcacaatgagtaaatctttagttgactacggagagcagaagtcttgtgctgtaactacagcaaaaagacttgccgaatttcttggagattcgatggttaaagacaaaggactacattgccaatatattgttgctcggga

SEQ ID NO: 183234 - DNA, 476 bp, Zea Mays
cactggcttgtgttgcttgtcatagcggtgtttctgcactgcctgtgcctactcgaggcgatagcgcacatctgcgaggaagccctcacgctcctccatgtcgcgtgcgaccgcatcaacccttgtcttcccaggctcatacgagcggatggagggtgggtcacgaccgtacaccacccggaacggtgtctcccggagcgaggattggtatgccgtgttgtacacatattcggcccatgggagccagcgaagccattgtcgaggacggtcgccggtgaagcagcggaggtacataatgatgacgtggttggtcgcttctgtctgcccgtctgactggggatggaaggcggatgacatgtgcagcttagtgcccatgagtcgaatgagctcacgccagaacgccgaggtgaacaccgggttgtggtcggacaccatggactatggcaatgccatggaggcgcacaatgttggtgaag

SEQ ID NO: 183235 - DNA, 342 bp, Zea Mays
gcccggcgcgaggcaatagagcttggaaccgattggagaattcctcgacggtccccgtgcgacggcactcggcgagctcgaacaagggggcggaccgcagtggtggcccgaaccgtagattcagcatctccttgaaacgctcccatgttggcgtgccatgctcatcctcctggagttgcatgtaccacagttgtgccacgtcctccaggttataggaggccatccacacccgttcttcggccatgatgcgttgttgacggaaatatgattcgcatttgttgatgaagagcatcggatcggacttgccatcaaagcgggggaaatccaatttctggaatcgtg

SEQ ID NO: 183236 - DNA, 455 bp, Zea Mays
ccccaacctgctccgccccgtccgcgtggacgtcgtccctcgtcgtccttgcctcgccgattccctgctccatcccaccgggcgtccctggggtccgcacccaagacgcctccccgttgtcctcacttcctctctccaacgcctgttgcctatctcactccacggcatggatctggaattgtgaatccctcactgaggccccgaatccaacaaccaatgctgccttcttctcccccctcccctctgcacgacattgcctccccagccggcggctgaggtgcagcgccaagtggccaagtggtgccgccaatcccccatgtgatcacatccctactcggcaacaacctcctttctcacaccactgacaccgcacatcatccacatccacgcctccgtgccagtagcagcaccgtcggctcccgctgccagatccaggtatccagccacgcccacta

SEQ ID NO: 183237 - DNA, 444 bp, Zea Mays
agttaccactggaacagatgaatgcattcaacagtcagatacttcagagtttaagtggaacctatcaggtttcagaaaaacaaaatactatcagatacctggagatgttaagcatgaattcagatgctgcgaacaaaataactaatggaccaattatgctgctactaataaaaatgcttcgactgtcaaaaacttcagtcttgcgtgtccaaattgcctcacttatggggttgctgatacgatattccactgctcttgatgtggagctggcaagttcaggaatttttaatgcactatcagatgggttaagggataaacatgataaactcaggcgattctgtatggcaacactaggagagttattattctatatttctacccagtctgatcaagataccaaggaaataaatacccaagaataccctttgaaggataacaggtctg

SEQ ID NO: 183238 - DNA, 924 bp, Zea Mays
cctgctaaaggagctggttgtccccaaacagcagcttccgaaaattgttgcttcaagtcgatggcatcctcccaggtggccagcacgtcaggcatgaatgaccatcgcaccaaaacctgctcacatgatttggttcctcgcaagaccgtgcgtcgctgcaaaatggtttcaggcacactaagcatatacttgtcagtaggtaaagatggagaaacaaccattccatctcccaacgccttcttcaattgcgaaacatgaaaaaccgggtgaacctttaaataagatggcagctgcaatttataggccacagcaccgatccgttgtataacctaaaagggaccaaaaaattgaatgccagcttttgatttgcccgagtagcaacagtgcattgcacataaggctgcaacttgagaaacacccaatctccaacttcaaactggcgttccgaacgacctttatcagattgacacttcatgcgtaacttggctcgctctaaatgcaaacgaatcacatcggacatcaactgccactcatgcaaccaggaagccagatcagccgaactgataacagcatcagaatcaataccaaaatgccttggacgacacccatatagagcctcaaaaggcgaacgtccaatcgctgaatgaggagacgagttgtaccagaactgtgcaacagacagccagagactccattggtttgggcacgcatcaacaaagcagcgcaaaaaggtttccaaacactgattgatgcgttccgtttggccgtccgtttgaggatgataagcggaactcatacgaagctggacatcggccaaacggaacaactccctcctcaagttacttaggaacacacggtcacggtcagacacaatcgactgaggcaggccgtgatgtttgtagacttggtcatgaaaaagcttcg

SEQ ID NO: 183239 - DNA, 484 bp, Zea Mays
caaaatcaatctctgaaaagtcaatctagttaccgaggattcatttcatcttgctgtcatgattatggcatatgctaattattgattggatagcagcttaaaaagtcaatataattactgttccatgtgtcagtaagtttcaaaatgatatatcttccatatgttgagcataatctagacaatatatttgcaatcacatattgtgatactgtggtttcatttcaaaaaaatatttaactgagcattcaacataagagaagagcatccatgatctgcacctttggtataatcacttctaagttataaaatctgttgcatatgggagagggagtcgtctgggttgtaaaaatgacaatatgcatggaaatcaagtgggttggggtatgcgcatgcatttgagaatataaacgtttgagaaaactagttttttataaattacggtactttcttgggactttgttggatgtcaggtttttgccatttt

SEQ ID NO: 183240 - DNA, 410 bp, Zea Mays
tccagaaaagtcacaaaaaaagaggataacaagtaaaggaagtttttagcaaaatagggatagtatagtgacaagaaatattctatccctcccccgggttgcatatgtaagtcagtccagcctttacaaattttctctaagcacaagtcattgtatagctaagaatttcaagctaattaacccctttcttcatagtttaccctgattgaatggtactcatgttctaataaataaatgtgatcttcctgatcactttgtttaagtagttggaaggtaggatcgctgcttacaagttaagagagttagttgggacaacgactaggaggcgtgtaaatatcttatgtgtctaaagaaactaaattgaagggtcataaggcgaaggaggtggacaatatcggtttcaaattttg

SEQ ID NO: 183241 - DNA, 562 bp, Zea Mays
gaccatcccaaatggattgaggccatcagatgcaagacccaatcgaatgttacgaggattagaagcaaaatctttgtatatgttatctacatgcttccatgccctagagtcagcagggtgcctcattttgttatcttggactaagccctccttgtgccaacgcatatattcagatgtggtcggattcatatacaacctttgcaaccgaggaataactgggaaatatcttaggattttacgtggggcacgcttgttggttgcctcctcgtgatgcctagaaaccattggttgccatctagattcaccacatgttggacatgtatccatggctgcatattctttccgaaacaacaaacaatcattgacacatgcatgtatcttttggtagtcaaggccaagatcatgaatgaccttttgtactttatccaatgtgtctggaacacagtggccttctgggagaacaagccaaaacaactgaagtacggccgctaatgcacttttactaagaccaaacatgcatttaatctgaaagagccttactataaaagataccttagtgacc

SEQ ID NO: 183242 - DNA, 789 bp, Zea Mays
gcagaagcagccacaacctttacagcactcaaggaggcaccgtctacaacaccggttttgcaccttccggagttcaccaaatcattcatcgtggattgtgacacatccggtttagggtttggggcagtgctacatcaagacaatggcccaattgccttcttcagtagaccgttcgccacacgacacttgaagctcgctgcttatgaacgtgagctcatcggtctggtgcaggcagtacgtcattggaggtcgtacttatggggccgtcgttttctggttcgaacagaccatttcgccctcaagttcatgctggaccaacacctctcaactgttccgcaacaccactggattagtaaactgttcgggtttgatttttccgttgaatatcgacccagacgttttaacacagtggcggatgctctctcccgcagggacgctgaagcaatggagtccctagccatatctgtaccatcgttccagctatatgatgaaatacgcagtgatggcagcagcagaccggaatggaaacaactacatgaacaaatcctcaatggcacccaatcggcgccatgacacatccaagagggcctaatactacatgggtccagggtatttgtaccacctacatcacccacaataattcatattctacagctagcacatggcgcgagacatgggggttccaaaagacattacacaggcttcgcgcagacttctacattccaaatgacagaactctggttcgtgactttgtcaaatcatgtacagtctgcgagaaaaacaaaactg

SEQ ID NO: 183243 - DNA, 318 bp, Zea Mays
ttcagattttgatatcctctccatccttggggctggtttcagtaacttcgtatttaaaccagctcagggatccaggggggagtgctgattgcttggcgtgatggatctttctcctcggttgcgtctattataaaaaattattcggtctcagttcaattccaggatgagtatggtgctgcttggtggttcacaggagtgtatgggcctcatcaggacagtctcaagctttctttcctgtaggaattacgggagattagagatgtttgtgttggaccatggctattatgtggcgattttaatttgatcttcaagctcgag

SEQ ID NO: 183244 - DNA, 317 bp, Zea Mays
tcaatctgttgagtgtgtttttcttggatacagccctgaacataaaggctatcggtgttatgattcatcttctcgtcgcatgcgtatttctcgagatgtgagctttaatgaaacccgacccttcttttacaactcttccactcattcttcttttaattccacagagtctacctccttcatgagccttcctcccatttctgaaatttcatcagtattaccacctactgtttctaccccagatgttcttattcccatcacaccaccttccacttccacaccatctcagtcttattcttccaaaccacctgttactcaga

SEQ ID NO: 183245 - DNA, 358 bp, Zea Mays
cgtctagggattgcagcaaactggcatggcacaagttcctcaatgcatttaccatgaatccatcggtccttccagaataatgttgaggcaccagtaccaatctcagtgacaatagccgtatgaaagaaggcttaacattctcaggaatttgtaaagggagagaggaccaaggttttgcaagctctgtttttgacatttcaatatcattcttaatgaagaggacaataataatagtactagttcatttgtatggagtgtacttgcatgcttaggataaaaaatgttgcatgcgatgtagttttaaattgtttataacacacattataaaatatatcaattctttgatctgattattgtc

SEQ ID NO: 183246 - DNA, 401 bp, Zea Mays
gtatagtggtcaccctgagtcgagtcagcgtgagcatgttgcaccatcttaagtcactgtcgacttaagtcgattgctctgttagtagggtatagtggtcaccctaagtcgagtaagcatgcagattgataataaatagtttgagtgcctttgagaatgaaatcttcttattgatgatgtattttctgattacagaatacaatgttgccccgatagcttttgaaatctagctaggggtagaacttcccgagatgctctatattccatgaattccctatttccgtgccatccatttgagtgagccgatatgatcctggccgagtgacttctgctactatgaatggcccttcccacagtggcgacaatttgtgccgtccttcccccgttagaattcggcgaag

SEQ ID NO: 183247 - DNA, 367 bp, Zea Mays
catgcaattctacttttagagatgttttctgtgttgccacatttatttggatctgatttgaacatgataacacaaaaagcctttcctgttgtggaaatataaaaaaacttgcccggggagggtaagaccaccttcgcgttatcttcttaatagaaggccacgacaatggttccgacttagaaaatcctgaaacatgtccttccatcactaacaggccgggtcaagctgcccactttgcaaaggcccatctaggcccgagggtggcgcacagctaaaccgtaacccgagagcgggcaaggaacatcgagaggattttttggtgtagggtcaggagtcgaacccgtgacctggtgaaagggaccacacc

SEQ ID NO: 183248 - DNA, 428 bp, Zea Mays
gctacattgagttgtcagcagaatacaagtcagcaggacattttgctggaaactatacttctgaagaccagctattggaattcctcaagacaaatttgcaggcttcggatgtgccattcatactcccaccagatgccagattctctactgtgtcatcatctctaactgtggacaatgtattcttgctgctggaatggataaagaatttgaggtcacgtggtgtaagattaccagacctgttcttgacttgtgtcaaggaagggaattggctcaagacgtcggctgggtacaagtcgcctaatatatcatttctgtccagctccaattgggggagtcttctgcaaacagcaccttcctgtgttgatataccaatggttgatcaagagtactaccaaaacaggctacatatgtacaaagaggaactcaag

SEQ ID NO: 183249 - DNA, 397 bp, Zea Mays
ccccgttctgctttgatgaccacttgacaaactgaagggcagtgtcagtgcaccactgcacgtttgtcgagtatgtcttagttactggactccagcaaatcaatcacttggttcactacttctcaagtctcacgagagacaagcaacccaaattcagcggaaatcacttgataaatgactcttaatttttactcaacagttaaattaccattccgacagtttcagaagagagaggatgtgatagtgaagggcccaaaacagagggtgccgttagtatttgaacctaataagaaaattaaataacagaaatgccaaccagaagataacctaggctggccagggccatacagcacattagaagtcagaaggaacagaggacttgggattcccctgccac

SEQ ID NO: 183250 - DNA, 1460 bp, Zea Mays
gaaagaagtacaacaaaacaagccatttgaactcccaggtagtgtctttaactcactctacatgttgtttgtcactgactctagtaccatgtttattgattggcacaatgtgatcttggaccattattccatggagtgcatacctattatttatcaggcctcttagactacgctttatatatatataatgtctggactgatgtggcttttgtttcatgaatgaagtgtgctatgcactacacctctttttaactccatgtgtcataaatggtttgtaagaacagatgtcaagcttagattatgttacctttgtaacttgtttctctgtgaaggtatgatcgaggaacataatcagatgttaggctagcttggattgtgttagctttcacagacatggtttagtttttgcttgatattcttcaccagaccaatgttcttaaatggagatgctagggtaaaggcaacttgtttatcttaaccatagagcccattgtttaatttctgctaagtcctttgtttcgtagaagataacagtaattatggcattttactgaaaaacatttttaagttctggagggaaagcctttagaaattaatttttgtgaacctgtgttggttctccatgggttagtttatgtttgatattagttttacagatgccatgtttttgctggatgtcgagatcatttttactttattaggtataaaacatttctccattgcatatgataacattttgttctgtggttgacttttaaaaaggttttccctcttatttttgcacctttgacttattgatatgggatacacacaggttcaagcagacccgcatgacgatattaatgaggaaacctccgaggaggagaggaatgcatggaatccttctgaaagcaccagcaattgtggttccaggactatgcagcagtgggtatgctccaaacgatcagatatcaacaagaaattaagcaaaaaccatagtggtaaaacatttgacaaagtggcacctggagcacagaaatcggataggagcagcatgtttggctttaatgattctcaagttccagaaagtcctgttggggtgttttcttctgagtcattatacatggccacaacttcagaagccactggtgttgagcagagtaatggtccttcaaaagtgcttagatcgattcctacatggtcttcaaaaactcatcttcagagcagtgtcataccaaaagtacctagatcagctgctgctcttgcaaagagaaaaattaaggagattgggaggagagaagctaccaaactagataattatgatgtagtgaggaatcccacttcagtgaaaagatttgaagctaggactctttccttctccactgcagggccaagcaatggaccaaacaggtcagcatctacatcaaagaagatccggaagcaccgatctccgttgaggactggcaagcgtgcattttcac

SEQ ID NO: 183251 - DNA, 321 bp, Zea Mays
cgagaatgacaacctatctgtcgacggacatggtggatggccgcactgacctggaattgatgcgccaaacaattcgtttttttagaaagttcatatggtaaactattggagggggtaaattaaggttggtgcttattttgttaacttgtctctggtttagcaagtaaattatacatcagagtcctggagattctctaattactaaaaactactggagaggaagataaaaatagaaccctctatttattttgttcatcgatcacttggcataatcatgcattgacttcccaaatgatttttaaggagggtcttggagacgtt

SEQ ID NO: 183252 - DNA, 1263 bp, Zea Mays
gtgaaagtggagtgaagttagatgtggacgatagacaagcctcagtagactgtagtctggaaagcccgtgtatttctaacggtatggactctaggagtgacacatgtcttgaagttcctgtcagcatatacagtgttcaaggttctaattcatgcactcctgttaaaagaactgttagaagggtaaggaggagttcattctcaaagaaaggagctatgagaaattctactgtttcaaagttgctagatctccatgtgaattctgctgagcagtctgaggatactgagaactacaactcagagactcatgagcaccttcagaaagtagggtatttttctcactctacatcaccactgtttgctgcatcagggtgttttagctcaacaaatccttctaagctgttgagagtgccaagaagagaaggatcttccttctcttgtactccggtctccactagctcctattacaggtacaaagggaggaatcctagtactgtaggttcatgggatggaacaactgctgcttcacttgatgacgatgggctgaaccaaccagaactgttgacaaatcagaggtgtggtattccttgttattggtcaaagaggagtaaacacaagggatctgaaaggagttgttctccttcactttctgatacacttagaagaaaaggcaccagtctattgtgtgggagtcaaactatgcatgggagaaagaaatcatcaggctccaataaatatggatatcttaaaaaatcttcccaaggtgtaccactgttgggtgatagtagtcattttgcttattcgtcatttgattcagctagtgatgaagtttcaaccatctttggagaattagatctggaagctttgagccgtttggatggcagaaggtggtcaagctgtaaaagccaggatgggattgcactgtctgtgagtggagctgatcatgtagtttcagatcacagaagcttgagccaaaaatatcgaccaaggtcatttctagaaattgttggtcaaaactttgttgtacagtcacttagtaatgctatcgcaagggaaagaatagctccagcatatctgttccatgggccccgcgggacagggaaaacatcttctgcaagaatactttcagcagctttaagttgtactgctactggagagaccaagccctgtggagtttgtactgagtgcagtgactttttcactggaaatggaactaatctaattgaggttgatgctaccaacagaaaaggtataaacagagtac

SEQ ID NO: 183253 - DNA, 383 bp, Zea Mays
gctaatactcccctccaccacttgtattattgccaacctgttctcattgctacccttagtgagcttcttgttggaggggatgtgaaagaaaccgccatttttatggcaaaaccagctgggatagcatgcaccttaggagcgttaaacaccggacatttcagcttgatatggtgtcagtaccacatacttcgcagaataactccgctgtacactcgctcatcacgtggcctttcccgtaacacctatggcagtaccccttgctattcagcttgccctcctccttggtaccttccttctccttgttcacagtaatcttcttctcttcctttgctgacgctgaaggaaggagtggtccagcatttgcactcgcctgcttgtgatcg

SEQ ID NO: 183254 - DNA, 479 bp, Zea Mays
agcagcaaaagaagaacaagtggggcgacagggacagggaggaggggaaggcagaggaaatggaagcctctttcttgaggaaagatggcggtgatcaagccagtgcggcgacaatgtccggcgagcacaggaacaagggccttgactgggatttgaacgactggaggtgggacgccaacctgttcctggccacgccggcggccatcgtgccgtccgagtgcagcagcaggaagctgagtcgagctcagggggagatcgacttcggcgtcgtcgttgacaagaggcggaggctctcgccagaggaggacggcagcgccggttgcagcaattctggggtagcagatggagacaacaatcatgtggtgcctgctcagagagggcggagcagcgaggaggagacacccaggaaaggtgccagttcgagcaccactccgtcctgccaggttgacggctgccatgccgatctcagcggtgccagg

SEQ ID NO: 183255 - DNA, 395 bp, Zea Mays
cggaagagcaacggggaggagaaagatcctctccctcctcctctgtactcttctttcccgtcccctccacgtctcgtctcctccctcgctgcggtgcgggatacgggctagattcagtcagcgctcatgatccggaggatcgagggcaacaaccagcgcggagcggcacaagcctcacgtgtccgggatctcttctccgcccagtaggcttccttgccttcgggcggtttccaggtgagggagggcgactcgccttcgtctgattgctttctctctttcttctttcgtgcgatgttgatagtaccacctcgccctcggtgccgcgcccgtcgccacgatctggtctgcagatgctcatcttgactcctgtgcgtccagtgaaaccctcacgtgac

SEQ ID NO: 183256 - DNA, 424 bp, Zea Mays
cgccgcgcacaggagcgcgcagggcgcgcagatctgggagatcagcaggagcttatggaaagcagtggctagaaaggaaaatagaagtatggaaagtagagggaaggaaaggagagattgatgagtgattgattagtagaagaatggaaagtagagggaaggaaaggagtgattgattagtgattgattagtgattgattagtgttaccatgtttaggcttgcctaaaataacagcaggccaatggctatatatgcggcacagggagacaggaataaaggcagcaaacaagttatctcttctccacctctctctctaccaactaagcctacggctgtggggaataaccacgccggagaagacgacgaaccgcggctacgaccttcgtagccgagggccccctgctctagacgcccaggcccttg

SEQ ID NO: 183257 - DNA, 617 bp, Zea Mays
ccgagcgccgggagcggtgctcaactcattcccaccaccgtgttctaacatttggtattcagagccttcgatcccgagctggagttcccgaagcacgagtacttcaccaggttgcaagccaaggcaggggatatggcgcctacgcgaatcgaagacccgatgatgcaactcatggtcaaaatcgatgaaggtaacaaggagatgcagaagaggatggaccagttgcagaccacgatgactggtatggaggtcaccatgaaaggagtagtaagcgatcaaatcggatttcagaagtggaaaccagagatggaaacgagggtgaaggatctaacggagacattgaaggatgtccagatgaaggtagatcaagtcgctctgaatataccagtgattcagtctgctggtggggttcagatcgagaaggggatgcctgcttccgctcatctggaagcatcggcgtcagggacggcgcccggaccaaatcgccatcactttgctgatatacaccggaggccgggtgttacggagaatctccgcacacccgctccggtcgaaggtacgcaacaacctgctggatactttccgtctttcattgattgggggtctgtaggaagaaa

SEQ ID NO: 183258 - DNA, 469 bp, Zea Mays
atcattatgattgtgtcggcttggaggtagaggtactccattatcctatgtgtgaatctatctacttagtctctagtttcaatctgctagtacctctattgttgcaacttgcaagcttccaataagtagcctggtaacatgacagtttttgcttccatttgctttagttatatggttgttagtttttgatgaatattcttgctcaagtctcaatccatatcatattggtagtgagaacttatgataaatgttccttctcttttttgagtatgatgaagagcatgtgcattatatcattcctgtgtttcttcagttatttctgcacaagttctttctatttacacttgctttaggaaagatatttcagttgcattctgcttttgtaggccattccagaaggaagctggtattgtccatcctgcagatgcggtatttgtaacttgagtgattatgatcctgatatcagcca

SEQ ID NO: 183259 - DNA, 329 bp, Zea Mays
gtgattaatagtttcaggttcttgatcacacaatggacaactgctaggatgattgagccccctttttgctaatctgtcagcagtccagcacctgttatgggccaccagccagaggaagaaacgacattttgatggagcccaagttttccaaaccctcttatagtgtccaaatgcacaggatcccaggaagagacccttgtaagctgccttcgctgaatattttccatctcgggctatactaaagatgtgtctgtcttcaatgagagggtgcagctcaaaaccagagagacagtcccagagcttaaagtaatctgccagaactccaacag

SEQ ID NO: 183260 - DNA, 297 bp, Zea Mays
ggacacactacgtggcttctaatcaggaccgcacgatacggatccgatggcgccgattagaagagatgtagggttacactaggatctcatctgcaccgcacataagcgatccaacagccacgatctacattgcccactcccaatcttggccacacacccaagatcccatggcccacgataagccataccacgatcggccctgatccctccatcggtcgatcgacggtaaagatcaccgcaaccagaagcggtaccccagaccaatctccaccgtagatcgaggagtcaatggtcccg

SEQ ID NO: 183261 - DNA, 509 bp, Zea Mays
gaagaccgtgaggatgatacagcaggtgtcttctcagtggattcatcgtcggtggctgccttgacggagggacctaggggtcgtttctgggtccttcaagctgagggagaatctgacgatgactccaatattgagcgggatgttgtcggtgcggagaggcagatgaattcggtctctcccatggccaacaataatcacagcagggatgtaggtactgcgttctcgagcacgggctcgcattctccgggagtgctatcgttggaggtgatgcacaacggtgagatgcgggggtcgtcgtgcggcagatcggtgagtcgccaaaatatgcttgaggaggaagcaggttgccgtccatctcgtgcttcggttagcttgaatgggagtcgtcgggcgagagcatggcctaccatggcttgccctctgaccactccttctcccaccgacccgaggaggaagacaaacagtgtggggggtccacatgtcagcggactaaagtaccccgaagaaga

SEQ ID NO: 183262 - DNA, 457 bp, Zea Mays
cggcaatcctgattttggccagctcagcaatttggtatggaacaagcaggagctcatcaagcagaaccaggtcatttctaaagtctaccagaggcaggtgaatagatagtctaaaatcagcaagaaaaacagtcgtgcaacaaggaaaagagtggtaatgcagctttagccaccgcaattgaggagaagcgaaagaatcaacgctagaaacaagggcctcaaggtctccgtcgacctcggttcttcatctcaatcctctgaggtaccttcccagcatgattgctctcttatgctgggaaatcctcatacctccaatattttccctggacctgtcaaatttccatccttacaaaatctcttagattgtgatggaatctacccggaaattgctgcttccaccttgcagaaggtggctgttgatagatgcggtgtgccccctgtggaggcggccgtggag

SEQ ID NO: 183263 - DNA, 375 bp, Zea Mays
tgatgtgtggtgttttacttgagtggacataaacacaatctaggtatcccttgaatagaggggattattggaaaccaggtatcacaaaaggtcattagctagcccaggtatcacaaaaggtcattagctagcccagtggaaaaaggtgccttacaaccttaacatatgtttggatagttctctctctcaatttggctaaattttccatagtctttattttattttgagaaatgatgtggcaaattgatgtgtggtgttttacttgagtggacataaacaccatctaggtatgccttaaatagagggtagtataggaaacctggtatcacaaaaggtcattagctagcccaataacgtcttcatccactagttaaa

SEQ ID NO: 183264 - DNA, 273 bp, Zea Mays
aatacttgattagtcccttcagtctgtccatcagtctgaggatggtaggccaaactaaaattcaacttcgtatccctattctcatgaaaacttttccaaaatctagaggtaaactgtgatcctaaatccaaaatgaccttcttcggtacaccagtgttgagacacaatccgagccatatataactctgtcaattgagataccttataagtagtcttgaccggaatgaagtgggctactttagtcagtctatccataatcacccatatagcatt

SEQ ID NO: 183265 - DNA, 300 bp, Zea Mays
agcagttcagaacaaggggacaaattggacctcacagccagcagggcaggtatgagcattgacaacattggtcatgctgttattgatacccatgttaaaaccttgtatctcaacaatgtcttgtccccatgctcatcaacaaaatggccctgctttcacatagtagaggttagcctatctttgcttgcgcgtgcttcaatgccactaaaattttgggatgaagcatttgctgctgcataccttataaattgtacagtcatcaagttgcttgattatttattttcttttgagaaattatct

SEQ ID NO: 183266 - DNA, 512 bp, Zea Mays
ctgacttcgaagaggatactgccatagaggaagttgatgaggagccagaaccagttatctctctacatgctctgacaggcatcagattagaggacaccatgcagattcaagtaaaaatgaaagacaaattgctcactgcattactggatacaggctccacacacaattttgtcaacctcaacactgccttgtcattgcaattggaagtctgctcaagccgaggtaaggtagttgtatcaaatggcgacaagatcgactgtcatggccttgccaacaatctcagactatgcgtgggcccagatattttcaccatggatgcttatgctattccactagattcctttgacatcatcttaggggttcagttcctgcgcactcttggtcccatcctatgggacttagccaacatgagcacggcgttctggaagaatggttaccaagttttgtggaaagggttgaattctactcgtagcatgatgcacaggccactttcagcatgtgtttcaacatca

SEQ ID NO: 183267 - DNA, 369 bp, Zea Mays
cgataattaaagtgtcgcgcagtcatccttacgacacaaacgcgattacaaatcgaagccaactcgcaataagcacaacatacaacgtgcaatcacaaataaacaacaaacgaagggctcaacggcaccatcgcacaataatatgaatcacggttgttaccctcacaactctgttacaaatcgaagccaactcgcaataagcacaacatacaacgtgcaatcacaaataaacaacaaacgaagggctcaacggcaccatcacgcaataatatgaatcacggttgttaccctcacaactctattgcgaagaggaggagggcagcgctttcactcactatcgcaacaagagcagtgagggcaacaaaaatg

SEQ ID NO: 183268 - DNA, 633 bp, Zea Mays
ctcacaacgaaattggtgaccaacctgctgcactgctgacagaaccgatgctctacattattgatgcagaccactgttgtcctggtatgcgcttcacacaccttgtgcctcttatggtagtccctggcaccactaagatcagcttggcagccgtcaacctggcaagaaggagtggtgctcgaattggcacctttcctgggtctcgtctcctcagtgttccgccctctctgaacacacaccacgtgactgttgtctccatctgctaccgcagaattgctgcacccaccgctgccgtcctcctctggtgagagccgccgcctcttgtcaacgacgacgccgaaatcgatctccccctgacctcggctcagctccctgctgatggactcggatggcgcggcggccgctggtgtggccaggaacaggttggcgtcccacctccagtcgttcaaatcccagtcgaggctcctgttcttgttcccaccggacattctcgccgcaccggcttggtcaccgatctctttccacaggaaaccggcttccatttcctcggccttctctttcgagggaaattgaccctgctgttggcacgtatgacgagcatccaaagatcgctggattcaattacatccccga

SEQ ID NO: 183269 - DNA, 1145 bp, Zea Mays
tgaagatccagctccaccctactcacccctggctcgtcaccgccgacgccaacgaccgcgtctccgtctgggactgggagcaccgccaggtaccgcttgctaatttgatctcgcaatacagaggcggcttccaggctttgtttgtggctccatttagtctcacggtgctttgtaacccgttaggtgatctatgagctgaaggcaggtggcgttgatgagcgtcgcttggttggagcgaagcttgagaaacttgctgagggagatggtatgtggtgcagtacatctttcgttattattggtggtttgggcatgtcatgtggttgttgtgcatagtggtaatgctattcacactgttgaattgtgacatatgattgttcatttgttaaaattggcctttatttactagttggcacgagttgaatttatctgagtgctgaaatgtcatttctttgtccttgtaaagctatgctacgttgcttgatttcttgtagagatatgattgcgttcaatttgtacatcttagcgtattaagtatgggtttgatatcaccactaagtttatgttttaaacatctttcacagaacatacttatctgcaacatgcttaacaccctatcctaaatgtaaatcttgacccttgttgaagctagctgtactgttatttttgtcattcctggcttcacatttttgctgtccccttcacttccaatatccatgagatttatcgttatgtttattatcttttttaagccagaccagtggaagtaatatgcgcttctcgttctacccatttgcaaccttttgtgcagattcaaaaggaaagcccaccgaggctattcgagggggaaggtatcgatttgagtttttggccccttaattatgatgatcatatgcttagcaccttcacctgactccctatgggcctactgttcttccccaagtgtaaagcaggtttccttttatgatgatgatgttcgcttttggcaacattggcgtaattgctctgctgctgctgaggccccaactgcagtcagtcagcagtcttccacgttcattgcacctgcaccttcgacacgaggaaggcactttgttgtcatttgttgtgagaacaaagtcatatttttggacttggtgactatgcggggc

SEQ ID NO: 183270 - DNA, 297 bp, Zea Mays
gcgtcctcaataagtgatacacgctgcgaaggtccagtttggcgaaaaactgcgaaccttgcagttcatccaccatcagaattgagtacttagcatcagtctttgcggtcagctccctgtagtcgacacagaacctacaggagccgtcagccttcttgaccaagagaacactgatgtgcactcccttatgatgccttgttgtaacatcacatcgcattgatgttcaatctcgtccttcaatatctagggatatcgatatggtcgtactgctataggggctgaaccgggcagcaacct

SEQ ID NO: 183271 - DNA, 420 bp, Zea Mays
aaacttcaagaatcagatgaaggaccagttcaggatgagcgatcttggattactgagtttctatctgggaatagaagttcaccaggcctagggaactataagtctgagccaagctgcatttgcatcacagattgttgagaaagctgggctggtggggtgtaacccatgtgctacacccatggagcctaggcttaagctgagctgaaatagcacagaaccactggtagatgaaactgcctataggagtcttgtggggagtctgaggtatttcgtaaacacaaggccagatcttggtttttgagttggatatgtgagtcgcttccttgaaaggcctactgaggaacaactgttggcagtgaaacggatcatcagatatgtagcaggaacactacaccatgggtgtcagtatggaagggagag

SEQ ID NO: 183272 - DNA, 1041 bp, Zea Mays
gatctggacactgtttgtgctctgttatcatcttcaagctgtagagtattggcttcgctctcagagtcagataaactcgtagaatccttgcttatggacttgtattcatcctactcccgtggtattccttttttatcttactccacaggattagtttatcatgcaatgtccctaaagtcctgtaattttcaaaaaaagttctgtaatttatatttatggttatatctttgttatcatcctacactcctggtaagtacccaaaattgttgccttgttggtacactatatttattgaataattcagtcatgcactactcttctgatttgatattactggatttagatgtaagcatgggttatcctgattgattaaagagagtacctattacaaatctactgtacttgtttctccacaccatgcagaagggtctagtttatgttgttttgttgcttacattttctgttgtttctgattgtttcgtcattttgtgcagactctttgttgcataccggagctgcttgggtccgtattggagagttacgcttccggttattgttgagctcatacagtccagatcctacatttaagtctagatacaagcattcacatattttggaaaaaattacacttgtgaagcttgaggaaaaggtaaaacatctcttgttaccttggtgcatgtcttgaaatctgtattccgaattgtcagtttcatatacttaatgagatgcaaggaagaacatttttttcttgaatacgcatgcaaacaagaacatagatttacagtggcttgcatcatcaattgagctatgttttttcgataaccagttgagctatgcggcatgtatcatcaaattgatattcatctttttaagaaagaaagccaactcttgcgaagaaaagggaaaagactgtcaaatttatagcagctgtgtttttacaggttcgtcatgattgtgaggaattagctggttctaactcccctgaagatagccatgacaacgagttattgcaattgctggaaattaaagagaaagacaccc

SEQ ID NO: 183273 - DNA, 339 bp, Zea Mays
cttaccttgtaggcatatatctatagccgtctgtcttaccttgtataggtgacagccttcctagtttagccttaccttgtataggtgacagccttcctagtttaggagattgtatccttgtacaccaggccacttggctatatatatgagaagtcacccacctgattgggtgtgcggtgctttcccctaaaccaactctctacatggtatcggaggaccaggatcaattcgatccaggccttccttccgctgccctctgcttcctctcctctcctccatgtctgagccgaccttaggcgccagcgccgaccttgacgccatccagcagctcatggtgcc

SEQ ID NO: 183274 - DNA, 780 bp, Zea Mays
gacaccatcctccttcacgaggctgctgcgatcgtcaacctccactcccaggccgtcactgtgcaaaacatccggagtctcgttcacgtcgtcctcgacctcgccaacaacaactacacccgctggcgtaatgtgttccttctcgtcactggcaaatactccctggacagccacatcctcgacgacactcccgcgcctcacttccccgactgggcacgcatggactgcattgtcaagtcctggatctccggctccatctccccggaccttgctgaaatggccatggaacgcggcgccactgcccgcaccacttggctgactctcgagaatcagttcctcgggaatcgggaaactcgcgccctccacctcgacgctcagttccggcacttcgtccaaggtgatctacctgtctccgattactgtcgccgtttcaaaaccatggcagatgccctcggtgatcttggtgaaccagtcaccgaccggacgttggtcctcaatgttctgcgcggcctcagcgaccggttctccgacatcgaccgtcatcttcgcctcggtcgcccctttccgacgttccacgacgtccgggccactctcctgttggaggaactcacgatggcccatcgtgcgtcttctccatccgccgccctgcttacctccaccaaacctccacaaggcgggacttcgatggcctccaacaaggttcctgctgcttccaacaaggcgccttcggctccacgctccggccaccccaaccgtcgcagcaagaggggtggccaaggc

SEQ ID NO: 183275 - DNA, 340 bp, Zea Mays
gcaagggtaaagaataagatggtaaatctgttggagcgtattgagcaggttacaagtggagtaagtgaagtactcagtctacccaggaacatcggaagcagcaatcgcaacgccatgacaagctcaataccctacgggagaatcaccgggcgggacttcgaagcccaacagctggtaactgctctgataagttctcaggtcgagaacccagtttctgttgtctctattgtttgttggtgtaggtggcataggtaagactgctctagcacagcatgtgtacagcaacgctagaataacagagagctttgatgtgaggatgtggatttgtgttacttctctc

SEQ ID NO: 183276 - DNA, 400 bp, Zea Mays
cagaatttgaaattggcggggctgttgttcaaagaattggagatggacaggaagaattgtcctccatcgccatcgccaagatcgaccgagaagtctggaagagaattgagatctggggaggccaatgtcagcacaaataccaatagcaacctcatcgcaaaaggtgacaaggagaaaggagtcaatgtgcaagtcattctaagatgcaggtggagagggctcagtagttaaagcttaaaagttctgtctaattttgtttttgttatcacaatgtgtgatttgatacattcaggccgttgagtgatgaagaaacaaagtcgaatactcctgtggttatttcgtgcaatgaccgtcgccgggaagttgccgccactcaaattattgccaataagcagattga

SEQ ID NO: 183277 - DNA, 326 bp, Zea Mays
gtcccagcggtgggtggcctaccctcaccaagaccaactacgtcgagtgggccgcggtgatgagggtacggctccaggttcgccacatgtgggaaacagttcggtatggcgacgtcgactaccacgaggctcgacgggcgctggatgccctcattgctgcagtcccgcccgagatgcagttttcgcttttgcagaagtggactgccaaggaggcctgggacgccatcgctgcgacccgcatcggcagcgaccgtgcccgcaagaccacactgcaggcacttcgcaaggagtgggagaacctggccttcaagccagttgaggatgtt

SEQ ID NO: 183278 - DNA, 321 bp, Zea Mays
gaagaatcacatgtcgggtcctgatatccttaacagaaaaaccaaaggcaccaaactgtgtggaacaaaggttgtcacgtgtaaattggcggacagaaagaagattgtgaatgtgggatggaacaactaggacattgtttagatgaaatgtggaagaatttgtgtggagtgcagatgagccatggtgggtgatagggagggaggcaccattatcaactatgatggacggatgtggccatctccagcggggcatgtaaagggtcgtgtaaagtactgtattgcactgtatattgcactatttgcagattggagtttgaaata

SEQ ID NO: 183279 - DNA, 292 bp, Zea Mays
gtctttacagtaaagtagagtcctgaaggaaaggttgacaggtacaaagcaagactggtggcgaagggatatagtcagacatatgggattgactatgatgagacctttgcacctgtggcaaaaatggtcatcatgaggactttaatctcatgtgtggccaattctggttggccgcttcattagctggatgtgaagaatgtatttcttcatggtgtaggaagaggtctatgtggaaattccacttgggtttgcaaatgagcagactgctgggaaagtgtgcaaacttaagaag

SEQ ID NO: 183280 - DNA, 356 bp, Zea Mays
ctcaaaccaaaggttcagttgaaatgcactttctgccaactcaaactgatgcttccagcatttagagatttgatccctatgaaaacaatccaccatgcatctacttctctgaatgtacatttgcccagcaactacaggagtatgtgcacattttagactcattgccatcgccagcatgatttttgatagtttagcatacatgtatttgaaattttgttttaatgggggtggccatggagacttcaagagacagatgtaatactggcaatctctaatataggtcgattcatcaaatccaaaagcaactatagactgatggcaatatagggatggccatgaccttggccgaagctcac

SEQ ID NO: 183281 - DNA, 458 bp, Zea Mays
tgaaaatgccacaaacttattaagacgaatgactgctggggaggctgtgggagacttcacctacaaaggagggatcataatgtacaaggaccgggtgtggctgggtgcaaaccaatctatgcaacataaagtgatggctgcattacatgacagcgcagtgggtggtcactcgggatttccagttacatacagacgcataaaggctcatttcagctggccaggaatgaaacaagcagtgatgacctttgtccaaacctgcctaatctgccagcaggccaaagcggaaagaggtcgctatcctggtttattgatgccattacctataccagagcaggcatggcaggtagtaagtctggattttatatctggtttacctatttcccatcactacaattgtatcatggtagtggttgataaattttcaaaatatgcccattttctagctttggcccatccat

SEQ ID NO: 183282 - DNA, 383 bp, Zea Mays
ccgagttacggtgagtcgtgtcggtgttttagatgtaatcagccgagtgattaatggcgacatcggcgttttagaggtaacagccgagtgactgatggtggcatcaatgttttagaggtaacaaccgagttagaacgggccatgtcggccgttttggaaataacggccgagcgatgacatggcacgccagcgtttttagaaataaccgctgggtgatgactggacgctttttggaaacggtatctggcctgaaaaaatcccatatgtactgcatcgttgcgcgcctccgctttccgtgccctaattcttgcttttctgcatccaagctttccttgcgctcgtgcgatactgcttccgttctgctcgccagcaaaattgagatg

SEQ ID NO: 183283 - DNA, 410 bp, Zea Mays
agcgcctgttggggtcgcccctgacgaaggccaactccagaggaagaaagagacgagggtccgccgaaaagttggccatgagcggaagcgacggagggaggggagagacattgtaaaggatagtacaaggactcgatgtccccaggcgaagcaagaaggaagaaggtggggttttctccgcaacaatgagtgaagagttgccagcgtcggaaacgagaaggtcatatgaaccggcataatccatgggcccagagcggggagagcaaaaaactgacggagaactctcagagtgggtagccaaactgtcaccagcgtcagagtaccaaaaggcttggtgaagtgcaggcttggtgtcgtggtgagggttgtctcaccgagtcatcaagacacgggttcgaagcagccttttc

SEQ ID NO: 183284 - DNA, 299 bp, Zea Mays
gcaaggccagcgacgctgccctcaccgaggaaaatcttaaggcgaaggagcagtccttggaccggcgggagacggacctcgccaggcgagagacggatctcggtttcagggaagaaatgcttacccagcgaggcgagttgctggccgagcacgagctcgaggcagaggagaaagagaggaagctggaggagcagatccgccagttcaatgcagtgtaggcggcatcgggtccccaggcgatgcaggccaccaggaaagcccttgaagatctccaagcagagcaccacgctagggtccag

SEQ ID NO: 183285 - DNA, 803 bp, Zea Mays
ctgaacggaaacaccgtcatattattgagagtgctcgtactattttgatatcttcttttgttccttcacacttttggagttaagtcgtttccactgctgtgtatctcattaatagacaaccatcatctaaactttctggcaaatccccgggtgaagatctttttgggatcccccacgatatgatcatctccgtgcgtttggatgtatctgttatgtcttgttaccaccacgtgagcggaccaaattgactgctcaatctgtagaatgtgtattccttggatacagtccagaacacaaaggctatcgttgttatgatccttcgactcgtcgtattcgaatttctagagatgtgagtttcaatgaaaatcgccccttattttacaaccagcctactcactcctcatattatcccccacagaatctacttctttcatgtgtcttccttccattcctgcatctacaccatcatcttctacatccacatctaatgttctcattccaataacaccaccttccacctccacgtcatcctcttcttactcttccaaaccacctgtcatccaaacctacattcgtcgttcccgctctatttctacggctggtcccgatactaatcctgtacctgattcttgtactaaccataatgagtctaatgatgtttttaatcagtgatatcgtcttcgtgaccgtggtaccattgaacctccagatcgctatggttttccacgggctggtgtggcaattgttgaacccactacatatcaggaagcttctgggattcttgagtggcagctagctatgat

SEQ ID NO: 183286 - DNA, 2000 bp, Zea Mays
ccaccgatgaggttcctccaccagtagctccaccacaagctgcagttggaaatcccactccaattcttcctgggacacctgcattgctaccttatgttcaggctcctgctccatctgtcgttctcaagcctaatccaccagtcgtggtgtcacctccacctgcgaataatcaaccaagtaggccggttgggtctggtatattttctgattgatagaagtgattaaggttcttgattttcatgaaacttttctttttttaaaaaaatctcaattcacttgtgaaaaatttctgcagtccctccttatccaccccctgcatcgccccctccggcaaatggcattccaccatacccaccttcaggaaggtttcctgctattcctcctgccacttcaggtaaaattcccctctctgaaagtacatcaaatcactcaggcaacatatatctcttgtcatttcccatttcttgaacagcagtcccacctccagccacatcacctgttattgcacaagcaccacagcgacgagcagatcctccaagtagagattataagaacggtgaggataaaatcacccagtttcatacatctgattgtgttttaatcccttttgtacttaatattggatgaatatttaggaaacgcagtgccgccagcaaatacttaccctcctacaaatctcaagaagcatcatgttccacatgcatcccctccaaagggatccactggtcaaactgtcccaggtcacaaatcaccagttacaggtaatctcagctattaaacttaggctgtgtccatttgaacattacaatgtagaattgtagattgacaaccaaaactacttgtttcaggatctgcgcctgcaacaagtcctttgccccagaacacaaacatgccttcaatcccgaagaatgcttcatcagtgccacatgcccatccctcaccaccaagtatagctccagaattggcacccactggtagatctcatgctcagggatggaaatccagtaatcccaataacaaaacaaatagattacatgccccatcttatccaccgcctcgtgctcaaggtttgacaatgaacttctatcggcagcctaaatattgtcacttctcaacattgatctaaaagactttgcattacagggcccgaggtctcacgaaccccaagacagactgggactaaaaactatactcaccatgcgcctccaccattccctcaaggtaatctacgctaacatgcgggtttaaagattgcattcatttcacttactaacaactttcacattgttcttttctgtccaggacaccctagctttcctgtacactccccatccccttcaccagcctcatcgaggggtcctgcgaacgcgaagaaaagtactttcagtgccttgtctctttgcttcacttattgttgtcttttcctcttgtcaatagaaatttacagaactgctggattccacaggaaatcatatttctcctactcttccttcaatccctcccctaccagagccaaaagcaccgtcagcgcatcctatttggacattacctccaccaccacctaattcaggtaaagttttctgtactttttaagataatggaagcataggtacagttttctgtagatgtcctcatttggttgtcaatccaaaacttacatgttcgatctggtaataactgtatggcgtatgatatttgtgcttgcttatatgtttaacctgccaaatgcagattgcaattccttatcatgcccagagcctctaacagatccacctgcgggagcaccatgtgcatgtgtgctaccaatcagagttggaattcgtctaagcgttgacctttactcattttttccattggtctctgattttgctgaagaggtagcttcaggggtaaacatggcacagaggcaggtccgtgtaatgggtgcgaacgttgcaggtgatcaacctgacaaaacaatggttcttgttgatctagttccagtgcaagtgaagttcgac

SEQ ID NO: 183287 - DNA, 432 bp, Zea Mays
gcagaccgtctccctggttggaaagctgacttgttatctcgggaaggtagaagaatcctagtgcaatctgttttgacctctatgttggtgtatttgctaatggctgttgagtttccaccgtgggcaatcgaagaggttgacaagatcatgaggaggttttgtggagaggaaggaaacatttcagcggtgtccattgtaggcttgcttggccaaagtcctgccgaccttgggagtttggtggtctgggcattactgatcttcaaaggatgagctgagtgcttcgtatgagatagctttggcttcaaaatacagagcctaataaaccttgggcttcacttccaattcagatccccaaggtggtgcggtccttctctgttgctgtttacagcgaggttggaaatggagctcatactcttttttggacagataaat

SEQ ID NO: 183288 - DNA, 520 bp, Zea Mays
cttcaatgctgcgctgggagctcctggaccaagggaggtcgacctgaattggggagccttatgtctcccacgttttgagttgacacatttggaagcccctttcgctgaggaagaacttcttgaggcaattaggaatttacctccaaacaaggcaccgggcccggatgggttcacgggtgccttctacaagtcatgctggtccatcatcaaggcagatgtaatggcggtcatgaattctttgcacaatcaacgatttctaaatttcgacctcctgaatagggccaacattgtgctactcccaaagcatgatggcgctgagaatttatccagcttcaggcccatcagcctcatccacagtgtcgcaaagctattcatgaagctgctttctatgaggcttgcgcccaccatgagggatatcatctccaaatgtcagactgcgttcatcaaaggccgaagcattcacgacaactttcttttcgtccgcaacatggccaggagatatcaccgcaatggaactccc

SEQ ID NO: 183289 - DNA, 319 bp, Zea Mays
aagcattcggcgataactcgggcgagaaggtgatcaagactctggatatataggactgcaagcagcgacaaaggagataagtgaagtagatagtgatcacaacttgtaaagggataactctttgatcgggtatataaggccgagggggtcccctacaaaatcatctcatcccacatcatctcaccccatcctcatcgacagcagctgagccatcacaaagctcatgtgtaatccccatactctagaaatcaatacctaaccacaaaatgaagtagggtgttacgcaattaaaagcagcccgaacctatataaatctacg

SEQ ID NO: 183290 - DNA, 526 bp, Zea Mays
gatcccctccgacggctcaccgcgccatgccgcggcaaagccctcgccggagcgacccaattcgcccacccatgagttgattcgccaaatcagtgggtgcaaaatgaaattaggaagatagtgaacacagaagtgggagttttaccgaggattaggtcaccgggaggcctgcccacggcgcacggcggaggtcttcactacggcgacgaattgagcttgcgcaggacaccggcgggggaaaattgacggcggccgaagctttgccgcgccaagcaggtacccaggctctagcgcagaggactaatcgcggtgtggatgagggcaatcacgacggcggttctttcactcggcaacaatggcgggtggaaatttggagaaacaggggcagccgaaggaaccaacgagttaccaggatgtggggaagtcgtccgcttttgtagccagcgcgagacggagtcaagccacggggaaatcgggtgacccaacggcagctccgaggtgttcggcgtggaccgcaaatcccgtg

SEQ ID NO: 183291 - DNA, 655 bp, Zea Mays
ctttgtttgagccttctctttctttctcaaattttgcttcacattgtcttgcctcttatcatttgcttgagccttcttctcaagattgttgggacaccttgaggcaaagtgacccatatcatcacacatgtagcacttgatttgagccaaatcatccttcttcttttgatttgtgatcatcatgtcatattgattatatattgaatgccttcttctttctcttcttgttttccccacatcaccattatattcatggttaatcttgatttgcttttggggattcttcttttgctcaactcgtgactttggttgaggcttcacttgtggattcactagtttcttggttgggcacattgaggtgaggtgaccccaagtgtggcacttgaagcactggtcatgctttagcctccattcttccttcttcaacttgagcttccttttattggggcatgcctttgcaagatgacccatctcatggcatttatagcacatgaagtgaaatatcttatttccttttaatttgaattgcccgcctttgatattgctcttgttgaaaccaaggccactcttgtcatcatatcttctttgatttttcattataagatcatgagtgacttctgatttatgccacctctcaaacatgttgcttaaattc

SEQ ID NO: 183292 - DNA, 460 bp, Zea Mays
tatgacacagcagacaccagacagcaaacaagacaacacacaaaagtatgacagtcattacagcagtataactattgcttagatacacttaaaataagtggggacatatgactgaaaccattacgattagcattgctataaaaattacctgtactggcaatcaaaaaaaatgaccagtactgcatctttggtttgactagagcagtgcagcactgtagagttcaaaatgtgaattgctatgcgatacgctaagattgcagcaataaacaaatacatcagaaaggtgatggctaaaaaagacactgatgctgaaaagcatatatatcatacttgtatgctgtagaacagcgaaagaataaggtgttgcgcctcaattgtgtctccgtccccagacaaatttaggagaccttggccccgaactccaagattagcattagagtgtatcacagatgattcctga

SEQ ID NO: 183293 - DNA, 1360 bp, Zea Mays
gtcagcccgtctttatcgattaaggtcactttaccactagttaaagacgagcgccgcgtgcagacggagtggtagaaaaagctggatgtccatcgccttgcttccaggttttctccaaccatgtccaccaacacactgatctagtactaggactagtactagatcgatcctgcctgcctgcctgcttgtaacagcaacagcagcagaagtggcgcactgtgctttgcggtggcggaggctgcgagagaggaggaacttgcaagccgacttccatggctgccgccttctccgccgctatcctcttccacctgctgctgctcctcttctcgccgtccgctgcgcagcctggtgagccgtcgctctcctgactccttccgagtcccaatccccattctcatgtccaaagattcgttttttttaatttcccctggttgttttgtttagggcggcaccgccctttctctacctagtttacgcatgcatactcatatagtcagtgtcatggggagaatgttccggcttctccagcagatttgcgagattgcaagaggaggaatgtgcatatccacactgaccccctgtttgattttgctcctttgcattccataaatgttagtgctagtaaatctaacctaacggagtaagcaagcaactactctgaattggctatctcccatcacgaagaatgggtttcacaaaattgccatcagactcctcggtcacaattataaccacaaggagtcaacgattacaatggcaaatagctaattatatccatttgtggaatgtgtgtgttgtactacatctaaacctcaccatctttaatttgcccccttcccatcctgctcctgcaggtttcattagcttggactgcgggggagctcgtgatcacacggatgccattgggatccagtggacctctgatgccagcttcgtctctggcggccaggccgcgcagctgctggtccagaatggcctgcagcagacccagcagcagctgaccaccgtgcgctacttccccgcggacaacaggaagcactgctacaccatgaacgtcaggaacaggacgcgctaccttgtcagggccactttcctctacggcaacttcgataacagcaacgtctacccgaagttcgatatctccctcggagcgtctccctggtccaccatcgtcgtcgacgacgccaccacccccgtcgttgaggaagccatcatcttggctgctgctcccacgctcagtgtatgtctctccaatgccagcacgggacagcccttcatctctactctggagcttcgacagtttaacggttcgctctactacaccactgacgagacacgcttctttcttggactgtctgcg

SEQ ID NO: 183294 - DNA, 590 bp, Zea Mays
ccccgtcccaatcccatggtttagggcggcaaccacgcgtccacgcccggctctcgccgagcacaacacaaccacgtgagccatgcgtcagtcagactaaattgagacgtacgctacgggctcatatacgttggatcaaacgaaggacaataccgtcagttcctcgcaacgcagtaaggcataggatgagaggggcgcgagctagctagaaccttccgcgatagcagtaatgagggagaaggcgagaaaggagcggtttccgcacctcgctcatgtggagtcggggacacggccacacgggtagcgcgcgcaccaatccgcaggaactcgagtgaaaaccacgcgaccaacgtacttacgtacggtagacgcgcaagagccgcgtcgaggaaaccctcggcgggagcctctggatggacggcggcgagctgctcggcggctacctccgcgcgtgggaggtgatcatcgcggtcgaggcgaagcggtgttggggacgacgagagggttttgtgttgggacttggcaggcagggaggagagagagagagagatgtggggtactgctgtgggacgttgggactgggagggagg

SEQ ID NO: 183295 - DNA, 647 bp, Zea Mays
gaattgagtagttgggagaaaatagggataagagatagattgggccggtcagcaaaaggttagagaaataataggagaagatagatttgggttagttgagaaaagttagggataagcagcagtagccgcaggtcccccaggcctatttattgtaatcggatgtgaaggaaaagcaggcaagaagtttaatctaatccccctctactcctctagtctttcccctgctatcaccatagatcgtcggcctctaccggcgatcgcccttgcctgcgcagccaagggcctacacctagtcctccaccattacctccctatcgccggggtcgtaacaccttagtatctagagaccaggttcaccagccacccaccacaaccatgtcatccgcagagaacaccgtccccgtcgcttgcgcactcgaagccatcaaccagaagctagcagccctggacaccatataggcgtccatccaacgcttggagctacagcagcaagagcaccaagccgccatcgcaagattggatcttcaccaacaggagatcatccacacgctaacggcaacctatggggagccgacgacaacaacatcagaccgaacgatcgtccacccaggctccatcacctggactttccccggtatgacggcaag

SEQ ID NO: 183296 - DNA, 370 bp, Zea Mays
tttggtgggttacagtaatccacaagatttagttgagaaacaaagagcccctggggaatcttctgcagagttgattagtgccttgaaagaaatcgatttcccagaaattactgcaaagtttccatgcataaaagttggtgatgcatcacctgttgaactgtatgaggattctactaacatgaagtttaaagaagctgcactttctgaaaagctcacaaatttcatccaaggctcagctcgaaatttggagtcagcttatgaattccataatgactgtcatccattgaatcaaacacccacaactgcaggtgatctttcaatcagtgaagagatccctctcattgaaccaatagttgatacgaagtccccc

SEQ ID NO: 183297 - DNA, 378 bp, Zea Mays
tctgctttcatctagctatccggatggaatatgttatgtagagaccatgaaccttgatggtgaaacaaatttgaaaattaaacaagctctcgaggtgacattggatttacaggaggacacaaagttcagagaagtcagacaaacaataaaatgtgaagacccaaatgcgaacctctactcctttgtcggttcaatggaatggagaggccagcagtatcccctgtcacccctacagcttcttctccgggactcaaaactacggaacacagactacatatatggggctgtcatcttcacaggtcatgatacaaaagtgatgcaaaatgcaacagatccaccatctaaaagaagtaagattgagaagaaaatggatcaaat

SEQ ID NO: 183298 - DNA, 1783 bp, Zea Mays
gagcagaggtggtgggacccggagtggcgagccgagcgcctccggcagatgcatggggaggtgaggacacactcccgtgcctcggcgtggtgatgaggattggttttttcgttgttaggccatagggcatgtacccgtaccctagaacggttttctaaatacaaaagacaagtacaatcctatttaatatgtagtctcctgtgggttttctagtaggctaattgaagaaaaatacaagatacgagttcttgttaagagaccgtctttacatggctcttcatacacattgtctcttaactgcatttatagtatagaggctcagagttttatcatgcgatcttttaaatgtctcttgtacttagaaaaccaaaccaccatcctagttctgtacatgcctgagattgtatggtacaactctgagcctctataaatacagaaaattgtgaagagacgcctcttcgtgaagagcccgtcttttgatatttttcacccctagagatttcttaagagatatatcaattaatggggttgtacatgcccttatgttgcccccttgctgatggaattcatgggtcgcgatgccacgatatgcttttatattaaatttataatatgctttgaactctgcatttcagattttaccagcagcttgattaatatcgatcaagattcctagatagtattacctcaatggtcgatttggctttggtttttctagatgagctttttaccccgatttctgtgcctccttaatattttttgatgttttaatggccaagttaatgtctacagtcctgtagttttcccatgctttattgtcctatttccacagttccaaactctgattgctgcttgcttttgctgcactggtggaactgctagttggatccattatgaaacacaatttggtttcatctcttctcatacaatctatatagcttagtttgatgtcaaggatatcagttgtcgtactgtttttctctctgctcacattgataaactttgtctgttgtgctgtgcggttagcttgagattcatggtgtcagtaaatttgctccacttgttgtacacatcaaataagctcttgctcgctttgtagtagttacttacaatgttttgcatgctcacaatcttcaggtggaaaaggtcgatgagaatgaatggtggaacaagattgggcaattaagagaagggtcccagcaggagctagtagtcaagcggaattttggacgggatggacaaaatatacttgcaaacatggctcagagacaaggaatttacttgtatggatcaatcatgactgttcttcacttcacatgtctatgatcattcttcactggcaagaatagatgcaatatcgctttgatctattaaagtttggttgttctatctatttttttcaccatttgatacctactgttttgcctatgaaccatactcttcaaagctgacaaattctactttacctggtttgcatttttaacgtggggaagatagtaatgcatacaacaaagggaagacacttgttttcagcaaggtacccttacctgattatcgagcagatctggacgacaggcatggatcaacacaaaaggaggtactgtgtgtctgattgatagtttgtaataacatcattatatgggtcctcttcttgatcaatgcttatatttttactggggcagattaagatgtctaatcagacagaggcgcgagtcgaagaccttttgtccaggtcaaagtggaacaacaattctgcaagcacatcaactgtctcaacgagaca

SEQ ID NO: 183299 - DNA, 333 bp, Zea Mays
atcggatcctggatgactgagacgacgatgccaggtggtggacggagtggtggcagccaatgcatgcatggataacatggcggtggaggaagtaggtagccaaagtgtgtacagtggccccgggctgtcatagtcggtcagaagggtcctggtagccagatctttcacaaacaaactaaaggggtcaaacttcatggaacaagaattgttggtggtgaaccgacgaatagaaagaagattctagatgatgtggggagcaacaataatgtttttgaggtggaacagtcctggaagaaccgagtcacctactggggtaaccaggagggtggaacc

SEQ ID NO: 183300 - DNA, 545 bp, Zea Mays
tgttttcgtctgagattctttctgcctcctgcgttcttggtccccggccagcagtcggcaatatcgctctgtcgatcctcctgatacttcgtcttccattggttttttaatcccatgtgagcagcagcagtaagaagaggatctgattcgatcggaggagacctagtgacgccgccaaatcgaatcgaatttcttggcaacagcaacagtaacaaaaactagattctggattcgtcccattttttgcactagggaaataaaatgaggctggtggtacgcgtcatcgaggcgcggggcctcccgcccacggacgcagacgggacgcgggacccctacgccaaggcgcagctcgggaagcagcgggccaagaccaaggtgatgcgcaagacgctctgccccgcctgggacgaggagttcgccttccgggtcggggacctcagggacaacctcctcgtctccgtgttccacgaggaccgctacttcgccgccgacgtcctcggccaggtcaagttgcccctcaccgccgtgctcgacgccgacaaccg

SEQ ID NO: 183301 - DNA, 932 bp, Zea Mays
tcaagaagagtgcagagctcaattgggacatgattcggtttgtccttgctcttgctcaaatccaagcatggcagcatctgatactcaatcacaatgccatgtttctgagcataatactccacaagacactttgtttgtccggattcagcatccacaaaggtcatctggctggcaggtaagggtgtcaagccttgcactgtgtacttctgattagtcctccgatgaatcacagttacacgtcggcctttaagctcatcaaccagattttccatttgcctcttgttcagagttgttcgataatcaaggtaccccactattttgtgaacaaggtccatcaccggtccagctttgtaaaatggcataactgaataatcaacacacaggttcaacccttgttgagtgtatttaagtgtctgctgggttcctttcatagctacaacaccctgcccaatgtctatactgctgcttggtgagtaaaatcctctaccaaggataaccttgcgccatctggaggcctcacgcacaacaacatcaagaccctgcaagacctctctaggtacaggtaaatctgagagttgacttaatggcagctgcttcttcaaatctactgatacaatgtaggcctttgatcgaactctcacacgaaataaacctgctggcagttcagcagaagtgaagagatttcttccaccatcataagcaacacatgaggaaagacgccgtaaactgctttccctgaagagctcatccttgacagaaagaaattctgccttcgagagttctttgcctgaagccttagaggaagcttcatcaagcttgatgtttatgtcatagtgaaaaatagttgacaccttttggtagttgacaataaagtgattcaccaagagtttgacctttgcttgagataatgcgccaccacagtcaggtctctg

SEQ ID NO: 183302 - DNA, 303 bp, Zea Mays
gcagtggcttgctccaccgataaacacagcaacaaggccatggtgcatgtcagcttctaccgcaacagtaagcccgcgccgatgatctcctcgccctacttgaccttggtatggtcagggcttattgatggatgttgggagcatctaaagctttattgcagtttaagtccccatatgtgccatagttgtgaggtgaggtgaatggttttaatggcacgacggaattcagtggatttttgtgtttccactgcttttgctaacagtcgattcgaggtttgtagggcgttgatcttgaactaattc

SEQ ID NO: 183303 - DNA, 372 bp, Zea Mays
ctcctccacgagcgcgacgtctttttgggggacgtttgcgactggcttctccaagtgtaggcatacgccaaacgccagtgtgacaatcaccatcgcaacaaggagtttgcgtgggtgactgggtctggttgcaccttcttcactattaggcggcaaccctggtacatcgccccaacatcaagttgggtcctcggtacgctggcctgttctaggtactcgaacgggttgggtcagtggcctactgcctagagctacctgagggcgctcgtctacacgatgttttccatgttggtctcctcaatccattccatggtgcaccaccggaaggacccccgcccttgccactaatggaacaaggacgacttcttccag

SEQ ID NO: 183304 - DNA, 329 bp, Zea Mays
ataacctttcaggaccagatgttaaaatgcattcaagtagtccagtagtcgtcctttcttcagagcaaagccaggcatggaccaggaccacacatgcagatgggcatccagcctgcaatcagctccccaacgtgcagccacacgctgtcagttccagttcgtctttctacatagacatagtactagcaacctttttttgtaggacccagacgaacgatagatggaccagcctatgcacgcaggttcttcctcctctctcctccaaagtgattccagctccatgcgtgatcatacaatagcatgcattgtccatgttgtaaacaatggac

SEQ ID NO: 183305 - DNA, 462 bp, Zea Mays
gtcattgcttgagaaggcaaagaagagtgtagatgagataaaaaagactcatgagttggcttggactgaatttgattgcacacttatgtctgatggttggacaaataggaggggtcgacacttgatcaatttccttgtcaatagtgcaactggcacatttttcttggagtctgccaatgcctcaagtgagacagcagatgctcagatgttagctgcactattggagaaaagaattgatgtcattggtagagacaaggtagtgcagattgttacagataatggggctaacttcaaggctgctagaagacttttagaaagaaaaatccctcacttgttttggactccatgtgctgctcactgtttggacctcatgcttgaggacattgggaaaattggagagttcaagaaatgcatttcctatgctcgccaagtgacaaccttcatatataggcatggcaagct

SEQ ID NO: 183306 - DNA, 309 bp, Zea Mays
atttgaggataaaccgtggaaataccctggtgctgatatttcagacttttttaactttggccttgatgaagagaagtggaaagatttttgcaagcagctggtgagtccatttcttacatttagtactgcatatagtttgtttactttatatgcctaataaattaaacgataattcttttattgccaggaccaacttcgactagaatccacaatgcaatctagaatacgggtgtatgaaagtggccgctcagaacaggtttattataatccaatattcccattatggacaacagtatcctactctacctg

SEQ ID NO: 183307 - DNA, 355 bp, Zea Mays
agaagatataaaaagaaactgccaacgatatacaactattatcattattattccctatactggaatgagccgctatatactggaatgagctgctatgtactggaatacaagcactgataataaactgtacgcagcaactatgtactggaatgggttgctttttaaacaagtttagggaggagggttggtagcagcaaaataggctgaggctttgttctgcaactgcaatggacaacaaatcaataaccgggtatgcaaaaaaatggggatgaaaggatacgaggtgtctcaacttttggtaagtttgatacatgcatgtattgtctccattttgcatttgtacggctggtcctca

SEQ ID NO: 183308 - DNA, 299 bp, Zea Mays
aaagaattgagcacattcttctcagttgtgttttttctagagaagtttggtatatgccgctatcaatggtaggactgcagcaaggcttcacggaaaggtattccaaaattggtagaaactggcagaggtacaagtgccacccatacaaaggaaaggatttaacaccctggtttcacttgtggcttggatgatgtggaaacatcggaatgcatgtgtctttgataaggctccaccaagcattgccaagatcatccaggaagtcagagatgaggcttctctttggtgtttggctggagcag

SEQ ID NO: 183309 - DNA, 434 bp, Zea Mays
cgagcttagagatgcgatgccgaaggaaaactgattatctcgatatccccctcaaagacagcattaaaggatggcacttggagtggtttattgttgagaatcacggaaattctctccccccatggtcagggagacagccggatgttcgcactccgagctggaccgaatcccccacagaccaggatgtggctgaggcaggagttctgctggctgaagttggattgttgaaggagaggggtctgactgcagaagctgtggttgctgactttgtcttcaagaacattcagccattgaaggacagggcatacccggcctacctgtaccgaggcctagctgactccacccgggtcaccagtagaagaattcctgctgtggatttggtgagccggcttgaaatgatacttaggggcaaggtgtcaaatgttggtgcccct

SEQ ID NO: 183310 - DNA, 359 bp, Zea Mays
acttcgaaaagtcgctcagaaggaaatcaccaggatctctcattgcatctcttagtgccttgaaacgtagaaccttcggttctttgacttgtgtaacgataccaccttttgtgtaaacaccatagctacttgtgtcctcctcgacgctaaatgaaaacggcctagcattttttaccttccttggttttccatcattcagttctgtcatgccttggacctcagagaaaacaacaagatcaccgtcctgaaactcaagcctctcatcatcaacacaggatacaattgcaggagtgtcgttgctgatggatgcaattataccagtatgtggatcttcaccatcaacgtcaaggacagtaaac

SEQ ID NO: 183311 - DNA, 407 bp, Zea Mays
gtggtgccatccttattcctgctcatattgcgacgtgcttttaagcgttactgctgatggttgtgatgcattcccctccaagattgcgctacatgttgcaacatcgtccacggagacccccatgctgcatgatgtaacgcagcccaagaagaggcctgccatgtgctttgtgattgtgcgccccacccctgcgcgtggtccagatgcagatgggtggtatacggtggttagtcgttgtgaacttaggggggcagtctcgacacccacaacgtcccagaaggttgatcctagaggatcttcaaggatgatgtttcaactatttgtccaccaagcattgtgcggcgcggtgtcatcttcctactcgatgcttccatttgccatggactaggtcatcgggcaatcggttg

SEQ ID NO: 183312 - DNA, 444 bp, Zea Mays
ccgacgcgccgaagatgtatccgaggaaaagacgtcggatatgacgatagctttggatcaggaagctgaggtgttagcggccgcatcaaaggaggagaaggttcagcaagacgaaaagaaaggtgcgatgatttcatttgccggatcgacttgcttctactatccggttgtttgcggacgagtttctgatgctgatttcgttatgtagctgctgtttcagatgtgaaatgtgatgacccaaaggaggaggacaaggtgcagcaagaggaaccaaaaggttagaggatttcagttacctgattgctttggttccgctgttcgatttcgagggggcagcgttttgatgctggttttgttatcacgtagatgttgcctcagatgtgaaaattgatgacccagagcaggaggaagttgccaataaagatgaggaatcggaggagggcg

SEQ ID NO: 183313 - DNA, 321 bp, Zea Mays
gcttgctaaacagtagacattcttgacaggcttggtccccgaaataaggtctatggcaaactccacatctctatctggtggattacccagtaacttgtctggaaacacatctatatagtcttggactagtggcacctcttcgggtgactcgacctttatgtgatttactatggcttctaacagacttggtcaaacacagctctgaactgtctggccctgatgattggttactatcattgtcctctcaacacatgctatgtttcctcggtgtttggtcaaccaattcgtgcccaagatgacatcaatctcttgggaggtaag

SEQ ID NO: 183314 - DNA, 434 bp, Zea Mays
gtcagagccgcttgcgcacgcgatcgggttgatgtcagactggttgggaacgtggagaacgttgatggagcagttggcgaagaagagcaggtaacggacggtgtagtccgacaggttgagccacaaggtcggcgatggcgagacggtgacgttgtggtcgacccgcgggcagctcgcgtcgtcgaggacgtccgggtcggcgaggtagatggtggaggtgggatagtcgatgtccgtcacgttgtaggagtagcctgtgttgctgctgttgccgccgagctgtatggtggggtactcgtcgtccacgcagtcgatggccagcccagggtacccgcagtaggaggaggagttgcccaggacgtccgccgtgtcgtcggaaaggtagaacgggtaggtgatattcacttcgccgcatctgtatggttgcagcttgc

SEQ ID NO: 183315 - DNA, 644 bp, Zea Mays
ctcgtctccacaggctctgctggccggaccccctggtcagtggaccggacaatggggtgttcccccagcctcctatgggccacctcccggctacgtcggcccacccgctcccacttcggtctgggatcagcagaccctggctgccaacttccagactgttgctcttcaacaacctgttagcatgagtggcacttcgacactggtgtcaccagccacatgacctctgacgccggtatcatctctcaaacccatccttctcgtcatattccttcacatattgttgtcggtaatggtcatctcattcatgtcacttccactggcaccactcaccttccacataatctatcccttaataatgtccttgtctcaccgtccctcattaaggatttgatttcttttcatcaattcaccaccgataacaattgttctattgaatttgacctgcttggttgctctgtgaaggatcttcctacttggcgcgagatcctcagatgtgatagctctgggcccctatacccccttcggctcccggctaccacccttcatgcatcaacaacacctactacgtccctgtggcaccagcgtcttgggcaccctggtcatgttgtcttatcacatctagcccagtcgtcagtcatttcctg

SEQ ID NO: 183316 - DNA, 416 bp, Zea Mays
ccaccaccttcagctcgcactttgccaatgcgcccctcaccatcaccaacgtctatgccccatccaaccaccaggactccccaaccttccttgatgaactctcagacctcctccccagcatctctggtccttggcttctgatcggtgactttaatatgttgcgcggtgctgctgacaaaaaccagggtcacctggataaccacctgtgcaccatgttcaacagcaccatcgactcccttgccgttgccgaactccagctacaggactgcctcttcacctggtccaacatgcgttctgttcccacactcgctcgtctggatcgagcctttgtgaacaactcccacacctcctcattcccctccacctccctcaccaccctgcccaggcaaacatccgaccataaaccactgctggtc

SEQ ID NO: 183317 - DNA, 1247 bp, Zea Mays
tgtaaatctgagggagtgaatgtcactgttcctcagttaaaacatgtaattgatgtttgtctaggtgacattaggagggtggtgatgtttttgcagttttggtaccaagggcatcaattcacaggtttgatgctttaccatgaaattttatccatattttttatagttccccaaaccccattcatgttggagcctcctgcactgggtctgccccctttttatgttgtattggctcattgttcacttctagacctttcagcatgtaaaacttactatgatggtacatgatgaagtggaagatgctggttgtttatgggtattgtgctcaataatagccccccccccatctagaatgtaagatgttttagctttatcctaagtcaaacttagcttctttatttttggccaggtttgccgaaaactgcaccaacatctgcaacattaaattagtttaataaaatccaccatgaaatgtcttgatagggctatttgctattatagaagtttaactttggacaaaactaaaacaccttacattttggaatggagtagattgatggggtttgtcgcagagcatcaccctgcaacagttttgagaattatatcatgattcatgtgtgacatgtgcattagtcaccttataaatctaagctaggcctaggaggttcttaatttactagggcttgttttttttggctaaaatgaatttcatatatagaaagttttatctgcatgttgcagatacttcccttcattctttcagtaaatgatgtggggttagtctgttagatctgtcagaatgaactgttggcaccccacactaacagttgtgcactcttgtgcttccagaagagctattgtagttattttccatgtactgcttaactagttggtagttgaccatgaaatattttttcttttccgtttttgtttcatttgcaatgccgtgctgttttaactctagaagtgctgaactgctgatcatgttgctgttctactttcagagaggccaaaggaatgtttgtgtggtcctttctcacttgatttagatgcagtacattctacagtgccaaaaatgttgccatgggagttcccttgtaagttatctgaaacattatgcatggaggtagacaaaactatccttttggctgaagaaaagaaaaaacagatggaaatatcagatcttgaaggcctgcagttacatgtaacagcacctttgatcaagggaagaacttctaaaacaagaa

SEQ ID NO: 183318 - DNA, 382 bp, Zea Mays
tgggactgttgtagcaacaacgagtatgctcaaggcgaagaaactccctggttggttttggggagaggtggtaaaaatagctgtgtatgttttgaacaggtgcccaaccaagagtgtagatgtgatgactccatttgaggcgtggcacgacaagaagccggcagtgcaccacctcaagacgttcggctgcatcgtctacgtccgcaacgccgtacctcatctgaagaagctggaggatcaaggaaggaagatgatcttcatcggctatgaagaaggcacgaaggcgtaccacgcctacgaccccatcaccgagcgcgtccatgtttcaagggacgccatcttcgatgagcaggcccagtgggtctgcgaaacccacggcgac

SEQ ID NO: 183319 - DNA, 353 bp, Zea Mays
ctcgtcgtcaagtacgccttctacttcctcgtcgtcggagcggcaatctgggcatcctcgtgggcaggtacgctatccctcctcctcctgccgccccagcttgtgtgcgtcgcgaattggcggtcaatttggattggatgacaaatcacgtcggtcagccaatcgccgtggctacaaacgagatgttcaaatcgttcgccccgctcgcagagatctcttgctggatgtggaccggcgagcggcagtcgacgcggatgcggatccggtacctggacgcggcgctgcggcaggacgtgtccttcttcgacaccgacgtgcgggcctcggacgtgatctacgccatcaacgcggac

SEQ ID NO: 183320 - DNA, 776 bp, Zea Mays
gaatgccatagtgtaattctgtgctaaccaatcatcatttgctggttatatgccattgtgtttaaggttgcaaggtcattcattgtaggtacagttaccatcaatcaaaccttatttgatcagtcactatacaccatgaatgtaataacagaatgtgtatatagatgtcattcttttatacatcatggctcatgccaatctgggccaacgcagggtttgctagatacattttccttttatttgctgtgctgactatcacacttgctacatgcagttatttgttgtttagtgaatggcctagttatgacattgaactcacaaggttctgttgtttggaaggtaatttttctgatgcaccttgtttttatagccagaggtaatgtgtatgcatagttgagtaagaaagaaagagctattgatgcttagaatctacactagtccatatataacattgtttcaatgagagcaaaaatgcacatttttcactctgatgttgtacatttgacccagtttttcttgtgtggttcattctccacatatttattagtgtctgtccaaaatccataacttgctatttaaaatgcaggcaactgttggtggtcctatttttgctggtgcatgtttgtcacccaccctccctcatcaggtacttgctcgtgtttgactacattgataacttgatgtgctccctgtttggaggaaactaagcaaatcttcctcactatatcattggcaggtgcttataccttcccgtgatggcaacttgtactcttttg

SEQ ID NO: 183321 - DNA, 430 bp, Zea Mays
aaaaggcctgtcgtagtggcacagctgatgaagggcagccaccgcaagcggcccgcagccaggaaaacaagaactggggacaaggcttcgagtagcacccgccagggaacgccgaatgacagcaatatcacgggtgaggtagatattggagatcttatcgacttccttcgggaggagtacggatgtcgaggaacgtcgacaaggagctatcaggcgcggcaaatgacggtgatgagcggattctcatgtatgaacttattctgctagcgtcgtgtcgtgtataggcagagtcattgaaaaaaatgcaaacgtgaaggcggctcaagacggcttcgccaaaatgcccactgagccatgtaactcgtcaaaatacccatgtcaacatgaaaacattgatgtaatgctcatacctctttatatattatgtttt

SEQ ID NO: 183322 - DNA, 2274 bp, Zea Mays
tggcctcgccatttacgctacaccttgagatttttattcactccatccaatctggccctgcgtttctagattttgcgagggaagacgccaattaggagcctgagggtgcgacggcctagggtttgtagctactggtgtcgtcgcggcctgtggaggcggtaggggacagcgacatctgcagccatggacgacagcgagctccatgaagaggagaacccaaccaatagtgccgtaggtgagcttgacgatgcccaggacttcatcacaaccagttatgcttttggtttggtgttggtgcaagtgccgatgtcgggccgattagggttgtcaaatagctgggctctgatgtgttgggtgtgctatgttagctagtgtatttgctgggctttgtgcacggatctgtggtgcctgtttacaaatgggatttgataagccgatggcatgctgtttggtgctatataggattaaatgttctttttttatgtgtggaaaattttagttgctggagctacaggtagcacccatgtaagatgaggtggttagcatgctgatctgctatgggcttgtaattgtgaagttgcaacctttagagtcaggctttgagaaccataaaactgcaaaatggttttgagtatgaagatgatcctctgcagggttaatggttccatgatggtcttctgtattttatgtgacgtgttgaaattaatttgatgaaatgttggttgaaactagcattgcgattctccgatgctgcattttaataatactgaaaacatgtaaccctctgtttgggaatgcattatgtcatcattaaccctcagattcttagttatcttaacaatttcctgaggtcactccaaaactggactcatttgaagctaagtgcaattgattgattgaaactagcaatgagtttgtttgaataaccccatcttacttattagttattactgttgtcatccttacagatgacgatgacgacgaggattatgaggagcctggtggaggaaatcacttattggggtttatgttcggcaatgtagatgattctggtgatttagatgctgactatcttgatgaggtagacacttctttatctgtttttgttgacatgcaaatgtcctgttttttgttgtttttattattttatttcatgtgtctgtctctaggagatgacattcattttattcgtttcaccttttcaattgtgtggatgtctgatatctgtatctgtttttgatcttagtgcattctcaattggtcatgattttatacagatttaacttctttgttggttctctttttcttaacattttgatccttagacttgtgttttagggtgctcggttgctttataggaaccatcatcactataagaaccatattcctctgattaaattaatttaatttgagttctggaaatgatgagatagggaaattcaatgcgacgaaaccaaatttctcagtccatgcattgtaattttctcgtaatttggatgttttttgaataatagttagtagaactcactaaattttagccagaataaaggttagttgctaaaccttagggtactttggttttattgtttttccattgtctgcaggaaacaaagtcattgtttattgtttagttatgtttataatgcaatttggatgttgcatttatttatacttttattttgcttaactcaggatgcaaaggaacacctttttgcactggcagataagcttggtccatctctcaaagacattgacgtaagttatcttatgcgtatagttaatcttacttatctatttcattaccaaacaagttaatactatgttgtttgctaattagctaatgaagtcttctccagcaccaactgatccttccgaacaaggttagtgacatattactgtttccatataagctgcacctacagttttgagagttattcatcaagccaactttgccattgcttaggaagaccttattcttctttttcgtgtcaaactatgcacataattgataacacatctttttgttgttatgtagactatgatgagaaggcagaagatgctgttgattatgaagatattgatgaagaatatgatggacctgaagttgaggcaactacagaggaagacaatgtgttgtcaaaaaaggattacttctcttcatctacagtgtatgcatcagtcaacagtacagtttcagtgtttgacgatgaaaactacgatgaggaagaagaaccacccaatgataatgagcctcctggtgatagtgctgcccaa

SEQ ID NO: 183323 - DNA, 753 bp, Zea Mays
agggctgtcatacggggaaggaggaggatatcggtgaggagagaaggggatttatgtcccagcgaggtgacaggggcgaggggcacgccaggagacccggccggtccagcagcttcggcggccaccgcggaggcggagtcggcggcgcgggcaagggcggcgcgggatcctcaggccagcctcctctttctaccaaccgcaggtaaattactgacctcgttgattctgatcgtcctctgcttctgcgccgcacgattggtttgatctcgccagggatgatagggttttgatgagacttttggatctcgattgcagctttaggaagcccggcaatggccacggcgggcagcagagggtggtgaaccagcccgacacaaccggtttccaacctgcccccgcgcctgccccccaccaaactcctgcgcgaccgccacctgcacctcagaatgcggctgtgcatgttcccatatccgcaccatggccgcaacctcaaggtgagtgagtgaggtgtcctgttcttctgctatcttgtattgcctctggaatggtgcaaatacgaaccgatgtgttcctttgattgcatgtgtttttctttgactcaccaggtccacaagtgtcatcttcatcagctgccagcgacaggccggctaatccgccattacctaaagctactcatgctgctccaagggctccaccaaaaagctctaacccaccccttcctcagggaggatcgaaaggtttgccacaattttc

SEQ ID NO: 183324 - DNA, 879 bp, Zea Mays
tggcacgacgacaaaaaaaaatcagtaccactacacgccaaaggatgctatgcagcacgacgccaaagaatcagtaccacttataccaaaggatgctttttacaccaaaggacgcttttgaaggaaaatgcaactcaagtccaagagggcgaggatgacgtagataagttagttgtgacccaccgctattaaaaaaatgtgtacacacagagagctcggatacgaaataaatggatgacagatacttacaatggccgacagcgacaaaatcagtatcactacattaaagagggtgaggatagtatagctaaattagtcgtgaccgaccgccattgaaaatgtggaagcacaaaaccctaatagtgagagcagatagacatatgtatttgggaaatataactgaacagacgaccaatacttgcattgggaagttaccaagtgcgagcagataaacagacctccgatgggtaaaagacatatgtatttgcaaaccttaatagtgaggacactcaagtgcaagcagatagacgaagatctgatggggaaaagacatgtatatgtatttgtgaaccctaatagcgaggacactcggatgtatgatgctctgattggggaaaatacatttgtacctatgccaaacgttgataaaatgacgaagcaatcggagaaactgtggagatcttgacagtcgtcggcgacggcagcgattctactgtgaagctgctatgacgctgtggcggatataaccggtgtagcgccaggagtagtggatgggatgggggaaacagtgaagttgcgagcggcgtcgactccgggcagaagatgatgacactgtgaatagaaaaaagccgctggcttctttccttcggtgtggtcgct

SEQ ID NO: 183325 - DNA, 1265 bp, Zea Mays
cccggtgatggttgtcataccaacgcttggcatgctcttgtgcttgaagaaggcggtcccgcacctctgccaggaaattgtctcggtcttgtagcaggtcttccacggtttgggattgcgccgtgccctgttggtatggtaccagtgccggaggctcacgtccgtataccaatttgaatggtgtagtctgcagcgctgagtggaaggatgtattatagcaatattccgcccatggaagccagtccagacaggaacgaggtcgatctcctgtgatgcatcgcaagtacatagcaattgtgcgattgacgacttccgattgaccatctgtttgggggtggcacgcagtgcttaaccggagtttgctgccagtcagcttgaataagtccttccatagatggctagtgaagactgggtcccgatcactcacaatagatgagggaatgccatgaagacgaacaatttccgcaaagaagatcctggcaacagaagctgcggtgtaggggtgactgagtgcaatgaaatgggcgtatttggagaatcgatccactactgtcaggatcacagattttccatgaactcgtggcaatccttcaacaaagtccattgagatatctgcccacacctgtgagggaatgtccaatggctgtaagaggcctgctgggtgcagatgctctgttttgttgcgttgacatgttgtacaagacttaacaaactctcgaactcgagctttgtcccgtgggatatagaaatcagcccttagtctggtaagtgttttctgaatcccttcatggcctgcattatggactgtttgcagcagtgccgtctaacaatctgatgatgttggcacgtaaatgcgtcggccatggagaatgagaccgtcctgcacacgccatggaggagataatgtcccctctcgaatctgggtgcacatggtctggcagtctgggtccctagcagtgtcccttcggaggtcatcatagagggtaaaagttggccccgatagagttgcagagaaaagggtgtccgcattgcgacgggagagtgcatctgctactgtgttgaggcgacctggctggtactagacagagaaatcaaacccaaggattttactaatccactggtgctgcgggattgtggagagtcgcttgtcgaggaggaacttgagactatagtggtctgtccgtatgatgaagcggcgtccccacaaatatggccgccagtgtcgtactgcttgtacgagaccaataagctctctttcatatgct

SEQ ID NO: 183326 - DNA, 299 bp, Zea Mays
gctagctatcgatgttgttcggggattagtagtgttctatttcatcctcttaatgtgttcgcatcagatagatatatgttcatatgatttaaggatatcctgtcagcagcttacacatttgtctatctccatgcttcctttctttagttggagactggattattttttgttgggataaacttagtacattatcagagcatcttaactctggatatgggtgcctttaagggatatccaataaacaaaatttaaacacatttggtttgtcgtataggtacaaagccagcacatgcttgggc

SEQ ID NO: 183327 - DNA, 272 bp, Zea Mays
cttgctgctcaattggaacaagggtaccgccaagctcgagaagttgtaagagccaataatggcataaagattcttttgcagcttcttggttctcggatggttacacatcctgtggctatagattctattcgagcccttgcctgccgtgttcttcttggcctggctagagacgatacaattgcacatatactgacaaagctccaggtattgcatactatagaacattacttatctcgcgtccagtgttataaaccatagtggcagcttacaac

SEQ ID NO: 183328 - DNA, 319 bp, Zea Mays
aaggacttgtaaggacaatggagacaagacgttcgctgactgttctattccacaagagaaatcaaacgctgagattaatgcagaactcgatctttcagatgcttcagctgatgaagcagacaatggtggatctaactccaaaggttttgaacccttgcatgccttctattttcttcgataccatttttcaacataatgtaaaataatcccattatgtgttgtcgtctctgattcttttactcccttttggcatcttactgttgagtagcttgcaaaccaccgtcatggactcttgttaggtcaaacttgtttctgcatc

SEQ ID NO: 183329 - DNA, 662 bp, Zea Mays
ctctctcggaggcggagacctaccgcctccgctggacgctcaatgcctccgccggcaccgtcgagatcggccttgaggctgccgtgggctccgagtactacatggcattcgggtgggcggaccccaaggccaactcacccgcaatgatccacgccgatgtggttgtcgccggcttcacagaggaaggtactccatttgccgaggactactacataagtgactacactgagtgcaagcttgggaaggaggactctccagtgtctggggtttgcccagataaggtctatgagggcgggagcaacgattcaatcctggtgtatgggcaccgccaggatggagtgtcctttgtcaggtatgcgaggaagcttgatgctgaggatgccaagtatgatgtgccagtgggtgccacggaggagatggtggtgctttgggccattggtaggttgcggccaccagacacaatgcgcccacactacctcccacagaaccatggggggccaagggacacgacctttgggtttgcccggttgaatttgtcggagacggtggacaattgccttggaccgttggatgcggataataaggaggatcaggagaggatcattgcagatcgcaagacaccacttgtggtgacatctgctccagccgtgcgctacccgaac

SEQ ID NO: 183330 - DNA, 358 bp, Zea Mays
agagagcccctcacttgttcaggaggttcgttatgtcatgttatcttgtgcaattgtactgtggactatttataatgtttagtagatattacttattctatttttatgtcagactatcgttttctttaatcattagatatattcttgctttactgcttgtggcttctgtttctgtcttaaaaatcgaattgcccattgcaggtttgcaagttacttgcatgcatattcttgctatcaactacagattcctcaattcaactgcctttgggttctcataaagaatctctttctttgaatcactgggccacatacttccatcaagtttctgtgggaactaatctcaattgtcattactttg

SEQ ID NO: 183331 - DNA, 515 bp, Zea Mays
gcaggacatgcggaggtggacgccgcgagagaggaagaagtcacgggacacattgttatagaactcacgcccgttgtcacactggatgcttcggatggtgcgactaaactgagtggagacccaagcgaagaagtgagacagggtgggaaaagtgtcagacttctgacggagaggaaaagtccacagataacgcgagaagtcatcaagaataagtaaataatacttatagccataaatgctaattacaggggatgtccatacatcacagtgtatcagataaaaaatgcctgctgctccagaagaggagatggggaatgggagcctaacatggcgacctaactgacaagcatgacagaggtgctcaaaagatcccctacaaccggaaacagaggtgttgctggagagtttggacatcacatcacgaccggggtgaccgagacgacgatgccaagtcatagaagaggcggcgacagcaagaacacgcggggcagaggtcggtgtagcggaagcaggca

SEQ ID NO: 183332 - DNA, 788 bp, Zea Mays
gagcgtttcaaggagatgctgaatctacggttcgggccaccactgcggtccgcccccttgttcgagctcgccgagtgccgtcgcacggggaccgtcgaggaattctccaatcggttccaagctctattgcctcgcgccgggcacctcagcgacgaacagagggtccaactctacacgggtggcctgcttccgcctctcagtcatcaagtgcgggtacacaatccagcgtctctggcagcggccatgagtctggcacgccagctggagctcgtcgagttggaccggctgagccaggcgtcttccaaggcggcaccgcgtgctatactgccaataccatcacaacgtccggcgccgttcccagcgatcacgttgcccacgcccccggggccccctgcgaagccactcgcgctccctgcgccacctgtttcgggagtgggcagccaagtaaaacgcctgtccacggaggagcaggccgaacgtcgtcgacttgggctctgttacaactgtgatcagccttatacacgaggccacaaccgggtttgccgccggatattttatatcggtggcgtggagtttgctgaggaggaaacgacggacgaggcccccgtgttctctttacacgcggtcgtcggtgcaccggctagcagcaccatccagctgtgtgtacgggtgggcgctgcggacttcatcgcactcgtagacacgggatccacgcacaacttcattggagaagaggccgcacggcgcgcaggcctacccatcgagccgtacccgcgtctcacggccac

SEQ ID NO: 183333 - DNA, 2996 bp, Zea Mays
cgccgctagcgtcgccgcgctcgctgcttctagggctgcgccttctcgcgcctccggtgccttccctgctccccacgatcccctgcctccacaagcttccttcacctgctcactccaaccgctgccgccatggcggagaagctcagggatctaagccagccggtagacgtgacgctcctcgatgctactgtcgctgccttctacggcaccggatctaaagaggaggtaatctcttccaccggaccatccgcggattacctgcccccgaccgactttagggtttacttcggttgctcgagcttcgagtctatccgagctcggcttgctaaatgcgaatggtacctgttttgctaaactaggatactttagtgtttagggttttttcttctgttggcgatatggtttggcgtgccatatgttagtccgtctctgaggcgccgccgccgccttatccttctccgttcacacttaccctatctagaccttcggaatgactaaatgttaaagcaaacgtgaatagtcggggtttcccccactccgagctgactggtcctttctcgtcaccagaggcctaacattgctagtttttgtgtatttgttttctagcctcgtggttttggcattgaacacagataactatatctgctgcctttcgttccagaggagcgccgctgatcagatactacgtgacctacaaaacaacccagacatgtggctacaagttgtacacattctgcagaattcccagaacctcaacaccaagttctttgcattgcaagtaagtttgtccactctgctgcctgttgttatacatggggggggggggtagcttgtgctcaaaagggaggatggatgctatgtttatgccctggtttgattggtttaaaatactacatgcaattttcaccccagtcttgaacttaaaaggcttgcttgtacagtcaatatcatatctacagactcacataattaccttagaatgcatggctgaccaaggtcaactcctgtttccattacttccataatatgattgcaagtttgcaactatgtccagccgcaaatggaactgcataatcaaggctatctgtatcatgataactttctctgtttatcactacaaggtgcaatttctttatcttcaagattagttataactgtaccccatgaaataaggctaagcaattgtcgcatacagagccttttaaggttctactttattttttttcaatctaaggttctactctctacttctctagcataggaacgtgaggcaaaaatcatatcaatgatgtaaatggaagatagtttctgagtgggctaactgctgcacgtgcggttcgagtgttttaatatttagcatgcgatgattttgtaccaacattcatgcagatacttgaaagtgttatcaagtacaggtggaatgcattgcccgtcgatcaacgtgatggcataaagaattacatatctgatgttattgtgcaggcaaggattagtatatgtcattttattaacatttgattacacttatcaattaataaaatctgatccatttaattgtttttgtgctactgccctttttgtactgttgacagctttccagcaatgaagttacctttcggcaggagaggctttatgtcaataaactcaatattattttggtgcaggtaagctgtgcatttagcttttcttttttcttcaccttggcagctagtttaccagatcatttttaaccttgcactgaaaaatttgatgttcttgttcccaacattgatatgatgctgtgtgtcttgatttatttatttctcatggtgcttccttgcaacgtaataggtactgaaacatgagtggcctgccagatggtcatccttcatacctgatcttgttgcagctgcaaagagtagtgaaactctatgtgaaaattgcatggctatattgaaggcaagttattttctatgtattttcaattttgacattttcgtcggcatctttaatttacatactggattggttatgagtatccaatttgataacatgcagcttctaagcgaagaaatttttgacttctcaagaggtgaaatgacacaacaaaagatcaaagaactgaagtcgtcacttaacaggtgggtttgttgtcaacttctatattttcttggctacgttggaggttctgttttatagtttattcagtaatctatgttttaacaaaaaagttacttctgttttagctgatatcttattgtcttcgttcagtgagttccggctcattcacgagctatgtttatatgtcctatctgcaacgcaaaggccagagctcatccgtgctacattggcgacactccatgctttcttatcatggatccctgttggattcatctttgagtcaccgttggtatgttgatgattgaactttgtgagtgactgataccaactgtgcctacgaaaatgctggcccttaccttttccttttttatttagctggagacattactgaagttcttccctatggctgcttatcggaatcttacacttcaatgcctaacagaggtaaggacacctaggctttctgtgtctaatttagccatattttgtaatttcaacgacaaatgtggaaacaatttcttttgtacagtatttgggagctccgtgttgtgtgtgtgtgtgtatatatatatatattacactaacctgacacttacgtttgggaccaactggagaaattctgtgttcaattctctcttatatttctagctaccttgcaggttgcagcacttcagtttggtgatttttataatgtgcagtatgtgaagacatatacatttttcattattcagttgcaggtaattttgaagacatttactatttttcttctgtgcaagtaaactatttttttccagatatttaatgattgaagtttttgttccttttgcatataggctattcttcctcctgaaaaaatcccggacgtatatgctaatggttccactgaagagcaggta

SEQ ID NO: 183334 - DNA, 424 bp, Zea Mays
acgcacaataccccgcacatcctgatactcggcaacatcaaatgagattaacttttttaactgtaaattgtgaggatagggatacaaatgtcatatatgaactaaagtttaaaaaaacaagaaagtgtttatacaaaatgccatatatgaactatagttagttgcccgtgcgttgcgacggcacccagccatatttgatggtaccggttagggtaggggtcagatcatatcagcatggttaggggttacatgtgggtcctgtagtaccctcccacaaaaaataaatttaatatcaaagtgggcccatattggtactacacttgattttaactaaaagacccaaaaagtataagttgaaaaggaatttacctctttttatagctagttgtacacccgcgtcagcacctcgtgtgggaagtccagc

SEQ ID NO: 183335 - DNA, 347 bp, Zea Mays
ccgcccgccgcgttgttcgatctaattgagtgccaccgacgaagctgcctataaattgagcccgtaactagcttcgcaacatcattgcgcacccccacacctagtattcctcccagccgatcaccagcaagctccaattccgtattccccccaaatcagtcgaagaacaccgtgaaaccaagttcaccatggccagcctgttctggtaaaactctgcccaattcaaaccttgtttaagtgctctcgtatgcctgtgatgcccatcgacccacttaattgcacggagtagcctttggtcgccgggaacacgactgtcttgccgtaatactctcggtcaccgtggcccg

SEQ ID NO: 183336 - DNA, 432 bp, Zea Mays
agaatggtaacctaggctgctagctttgactggaggtgttttcttcatagcttgctgtcaggtggttgatagggtgcatggattgattcggccttgcttcatgaaggaagggggatttgcattagctaacattcctgtatactgtcgcattgactgcgtttgtctgtttgcaattagatgaagaacccactgaatctgttatgtcactgtagttgcattcctaaattgtttggtgtttcatgcatgctaccaattccacttgttggttcatggcatctcttcatgaatagttacatatcaagtaaaagattccaggtctcgatatacaaatccccttaaaatcctctatgcatctgcacatgtctcatagtatgcagttgcagggttggcttgattctgtgaactgcggctattttgttacattttaacttt

SEQ ID NO: 183337 - DNA, 468 bp, Zea Mays
aaaaattcaactttgtgctgcattttttgggtagtgtgcagacttcatgttataaaaattcaccgtttgagccttagctcccaaactggccagcctggtcttcgggtcaagtccacaggcggccgtacagcatcgacaaccattattgctatatactattattgtccgtactgcactatcgatcgaacacacgcacccacagacgcatcactcatgttacggatagccggcagcaatcaaagtgttcgtctggctacagtaaattcttgcgtgatttgtgtatagggccttcaccatcatttgctgatcgatccagaactggttgataggagtcagaagaaatgtaacaagtcttgtatagttctctcttggtagtccaaagaaaaggagaaatcaatacaaaggttaagtctggtacatcacagtatcatactatcacagaccgagcatcctgaagtccaaattatc

SEQ ID NO: 183338 - DNA, 345 bp, Zea Mays
ggcttccgacgaggtggacgaggcgtgaggctgacggtggcgctggtagtccgcaaggaaccggatttggacgcgctctccctcgtcgctaggtaagagacccaggtaaggaacatataagtggttgttctgattttggatattagccaatttccccctccaatctgttactgatttatatgcccttctagggatcagcagatcccacacctattacatgatttgtccttctagaatagaatccgctttctatcttctgaaccggcactgccttcttcaatatcggccaccggtcggtccacctcttcaataatcgtccttcacttcagttgtgagttgtgacat

SEQ ID NO: 183339 - DNA, 1120 bp, Zea Mays
ctctccctccctcccgctgccgcccccacctccagcagacgcgacgcgagcgcagtccaccctctacgactacacacactctctttctctctctgttctcctttcatctccactcgtccgctttgtcggaaccgttgctggtggctccggggttctgcgactgcgcatagggaatggcgatggcggcggcggttttggaggaggcgctgcgatggggtggaggaagcgttggggacgacaacgtggccgcgcgcagggcagaggaggccggtgagttgggttcttgggcacctgctgtgcgcggatcgcgctgaatcagggggtgcggcggattctttagtgtctgttgttgtaaggcgttcttggttttatgtgaacgctttgagaagaaaggttgggcacggatagtctcgtctttgtgttgcggtggatcggtttgacactgaagtttgattcactgaggatggtttcgaattttcaaatttgtcggtcaatttgggtgtcatgatcctcgtgggatgtagtgattcaacagctgaacaacctgtctggtagtttactgtttcaatctgaggtcctgttgagcttactcgcgtagacttaatgtgatccatgctttgtgcatctcggtgggcacaggttttatgttttcttatttacccttttgtatatattagtttgcattaaaacgtgtattcatggccacaatataatgctgtgcaaattgagcagctgtgcaaattatagtgtagtgattgctttcccccttttttggtgaaatgctgctgtgactaactattgatggtaagctaacatcaagcataccaaatcaggaatttgacagctccttttagttggatttcgaccccaccaagaaaattaagtctggccttattattacctgataacctatatgtttcaagggcatctctgtttgtaattattacaacatgtcagaggaaggtgcacttatttcccttgttggttaatgcagcgataagaaggcatgaagcagccagttggttgcgaaaaacggttgggatagtgtgtgcaaaggacctgccggaagagccctctgaggaggaattccagcttggtctgagaaatggcattgtcctct

SEQ ID NO: 183340 - DNA, 884 bp, Zea Mays
aaggaatggcgtgcagggacctgctcgcctggtcggccatgatcggtgcctacgccatcaggggcctgtacgaggaggtcgtcgcgctcgcggtggccatggtcagggaaggggtcatcccggacaggttcctgatcacccggattctacaggcctgtgcgtacacagaggacctggagctcgggacggcgatgcattccctggcgatccggagaggtttcatggcggagggagcgagggacgtgcccgtggggaactcggtgctggccatgtacgtcaagtgcggagagttgggccgtgcgcgcgccgcgttcgacatgatggggcagcgggacctgtgcacgtggaactcgatgatcttcgggtgctgccgctccaacgaatgggaagaggcacggaggctgctcgacgatatgaggcgccaaggtacagagcctgggcttgtcacatggaacacgctggtttcgagctacgcgaggtctggggaacttgatgtggccatggagatgctggagcagatggaggagtccggtgttgctccggacgtcgtcacctggactagccttgtgtctggttttgtccacggtgataggggtggcgaagcactttggtgtttcgcgcgcatgcgccttgctggagtcgaaccaaacggcatgacaattgcgagtgccatctcagcttgtgctagtttgcggttgctgagtcagggcatggagctccattgccacgcaattaaggttgggagtgtgaacaatgtgctctcggggaactccttggttgacatgtatgcaaaatgtggagaaatcattgcagctaagagagtatttgatgaaatacccgagaaggatatcttctcctggaactcgatggttgcagggtatgca

SEQ ID NO: 183341 - DNA, 708 bp, Zea Mays
atcgatgtaaaaacgccactcaaagtctggcatctatagcaaaggtggcaacatgagcacctgcttgagggtcttgaaggcgtcgtcggtccagcggaacgcctcctgcttgaggagagcggtgagaggcgcggccaccgtaccatatcccgcgatgaatttgcggtagtacccgatcaatccgaggaacccgcgtagagctcgaagtgattttggcgatggccatgcctccacagcctcaatcttggcggggtccatggccacgccgttcgacgagatgacgtgaccaaggtaggcgaccgtgtgagtgccgaagagacagttagaacacttgagcgccaacttgtgtgtccacagtaactggaacaccttcttaacgtgttggagatggtcggcccatgaacgattgtagatgaggatgcgtcaaagaagaccagcatgaacttgcggatgtacgacttcaacacctcattcatgagagcctggaaggtagaaggtgtgttcatcaacccgaacagcatcaccaggaactcatagtgccctcgatgagtgcggaaggttgtcttggcgatgtcgtcggggtgcatttgcacttggtaatggagttgtcgaggctagttggttacgccatctcttgttggaacttcgatgcccccttcacaggagtattcttgtctattgtgacaacatcagcgccgtctatttatc

SEQ ID NO: 183342 - DNA, 349 bp, Zea Mays
ccgcaccgcgccgcgccgttcagagagggagaggaggggacgcgaggaggaagaagaagcaggcaaacagcagcagaaggcagaagccccgtcccatccccggcagccccctccatccaagtgatttcaagtagccaccgagaagcggagaaggtgaccgcacctcacgcaatttgcccctgcccgtcgattccatcgcctcccgccgtcccttccctcctctagggttgtcttgtgggtgcccgtgcttcccaccctaggggcaggtccagggccgggccttctcttcgccccgcctccgctgctcttttctttgctgctagggttaggttagggttcgacgctgtgg

SEQ ID NO: 183343 - DNA, 470 bp, Zea Mays
tagagagaaataggtgggtcccctacatgatcattactcatatggggaccagaacatgagtgaggtagctacagacaagttggagcagatccatgactgaaacaaaaacacacacacaacctagaggcttagcttgctgatgaaggaagcacgagattaagctctcgtaacctcttagccctggccaaaccccaaagactaagatcatccttgatggcacctagaattgtgttaatagaaggagaaactcctttcaaaacatagtcatttcgatgcttccagatagaccaagcagcaagaatgttgagggaatttactccttttttatgcggcttccttactcttttcattattctgcaccaccagtcagcaaagctgcattcgttttgctgaggcactgaatctgtgagctgcagcaggtttagcaagatgaaccatacttgtcttgccgccagacaagatgttagaag

SEQ ID NO: 183344 - DNA, 642 bp, Zea Mays
cctgcttgtacttcttttggcgacgtccatcagcggtctcgatgacgaactccgtggagaagatgttagtgagtttggcgccgtatccgttcctcccgccggttgtcttcttctcgttgtcgttgtagttgctactggtgaggaggtggccgaaaatcatctctggcacgtagacgccctcctcctggtggacctcgacgggtatcccgtcgccgttgttgtatacggagatggagcagccgtcgacgtcgatctcgacgcggagcgcgtccatcttgggatcccgctgcttgttgtcggcggcgttgacgaggatctcgtcgaagatcttgtagagtccagggacgtaggtgacggagcggttcaccatggcgccgtcctcgtagacccagagcgtctgggtatgcttctccaccgagccaatgtaggtgtcagggcgcagcaggatgtgctccagctgcgtcttcttctggtacatttcctcgatggtcttgcccccgccgccggcggcggcgttgtggccggagctggagtgtaagggacccgtcatggcggcgatgcgctgcacacggaggtcgtgtgcctgcgcagctgcggtagggttgaggggtgcgtgaggcgttggggtcttggggattgggg

SEQ ID NO: 183345 - DNA, 280 bp, Zea Mays
ccagtgcctaaacttgcttgtcatagtgttgcatcgtggtgtcatccccgtgcaccaaaccttgatattctaacttgtgtcaaggactcacatatttggtatgtatttctgtgtctccagagacattagttggagatttttctctaatgatgctaatcatagcttattgactgttcaacgctctattattacagggccatagagcacccaacttattctgctttaacaagaccgctctgcgagctgtcatcactagttcccccacaggtccttgcactgc

SEQ ID NO: 183346 - DNA, 366 bp, Zea Mays
gagtttctatggaaagatgttgaggtaacaatcaagacgataagtttgcatgcactttgcctgtttctgcaaactaagtttattatgttaaattcttataagctggatggaagctttattattctagctgacaacgtcatgggttcaaccaagaatagcaaaaatggtgaacagatactgcactatggttccaggttgtaactcactcttaaacacatggttgctataaatatttatccagtaagtgtggaactctaatgccatgtttgttgaaaggtgtgggagatgcagactgcaaagtgttaaaattgttaatgaagggatcaattggacttctcccaataatgtctattggaagcatgatgt

SEQ ID NO: 183347 - DNA, 1148 bp, Zea Mays
ttaagaaccatgcttcagcttatgcttgaagcagtttggatacaagttcccataaacgatgtacaccacagaacagcattcgagagcaagatgaaggaaaaaggatgttatttaaactgcagatgttccatgttggttgagtcatcaataacatgagtcagtcgaacaaccaagctgaatcacaatgtgtttaaatttggagtgtgtttggacagttttgattgtgcaagcagcagccaattatcagatagcaaattatttttttactctctacagcagctgtgccggaagcaccaaactgaacttggttgcacaggatgacaggaagcttcaccctaggcccaaaacagcattctacgaccaaaacaagcctctgcagttcaaactgtctcccaagttaaccaatatatgccacaatctgggtccattgagctaaaaccaaaacgagtgctgacgttgtcgacagcatgatcaatctgagtaaacaacagtcataaacttcgatgtccttgccaataccaactagccagcatatgaaacatggtcagtcccccaaaacagatgcaagcatgtcaatctcacacacattcaacatggcactcactgcggcgaccagattagcaaccctattcatctgatatctacaaacagagaaaaggtgtgatttcaacgtatggccatctgcatcatgtggaatttgtggaaggaacaaaaccacagaattttttacaagaaattatccacacccacccaggtagcaggcctaactaatgaagatctggagcaatacagagggctcaaatacatatgcagagttagcgcaccactcaatgtccctttgggctatcagaccgtgtaattacctccgagaccgagaagcattcttgtatagaaaacttcctttcctacttttaattgaaaggcacagctcctgtcattgcgttcaaaatacttacaaacaacgacagatacagtacagatagattgtacgaaccctaggtaaagacaatgccgcaggaactttgggtgatagttccggaaagggagagattcttcctagatcgaagaggcagccgaccgcgacctaaatctgaggagcgcattgaatctgataaagttctctaagggttagaggcttctgcaatcgc

SEQ ID NO: 183348 - DNA, 681 bp, Zea Mays
taccgtgcaaaggaatggaacaacttagaatttgcatctccttccttgagccaagaaattcttgatctaaggcgggcaatggtacgcttggtagaggccaaagccagagcgagcttcttcaatttacttaacaaccacctttccaacacagacagaatacgaccatcctgcgcaatctcaagttgatggatcaaatctctagcaagatgcagttgagtctcaatgtgccccaccttcttgctgctccatccttgaagggctttggctgtccctttaagttttaaatcaaaagtggagaaagggcagtggccaacaggaaccgaattccaggcgttgtgcaccacttcgtggaacccttcaattttcgtccagaaggattcaaaatggaagcgccttttaacacctttgcaaactttgagacccaataataaaggacagtgatcagaatcttcagaagccgcactttgtaacactgcaccaggaaacaactcctcccaatcaatagagcacaggactctatcaagtttgacaagagtaggctgattctgctgattagaccaagtaaacttgcgcccatggagtggaatttctttaagagcgagatcatctaccaattttttgaatcgacccatcagggtggcctacagcaggcatgtcccaggtgtgcaggaaaggagagga

SEQ ID NO: 183349 - DNA, 369 bp, Zea Mays
ccagcaccaccgcccctgctccccatcgcaggcggcctcccacgttccaccccaaacttgtctccccacgctgagcctttcctccctccgggtcgttctagggcacagtgatggcgggactccagcccatccaatccatcctcgccagtggatggagggagcctggctcttgcggctagggcttcagcaatcgcttcctacaaggaggcccttctctcggaattgccaaaggagatctcattgactcaacgctccagttcgaccaaagatcctatgaggattctgctcagaaaggggccccaggctagggtctcgtccaaggccaggcctgacaaggagggctggcagcaggatgtaggcaagaaagag

SEQ ID NO: 183350 - DNA, 332 bp, Zea Mays
cagatatctaaatcatggagagcagtccttgaacaaggcggaggtcaatgtatctaagaatgggcgggataagttgactgtgaagcagaaagagaagtgcaagaaaaatgaacagccaaaagaagataaggacaacacagcaaagactcaaaaggttagtttgagtacatatggtgacttcgtgattagtaactttttgtatgcatcactgatgtcatgtatctatcccagccttatttacaagattttatctgttggtctttttatgtaatctgttgtccttcactcattctgctaccattgttttcagggtcatgtagcaccaaaaccac

SEQ ID NO: 183351 - DNA, 307 bp, Zea Mays
gaaatatctgtcagtaatgatgagaggaggaataggacagatgccgatatctcggaggacgagccgaggcacaccaggatgcggtcgctgaggaagaaagccctgcatgcatcgtcaaggctgacacactcgctgaagaagagagggaagagaaaagtggactgcagagtgccaagaatagctatagaggatgtcagggatgctgaagaagagcaggctgtgagctcgtttcgggaggttttgtttgctaggggcttgttaccaatcaagcatgatggttaccatatgatgcttaggttggaacctg

SEQ ID NO: 183352 - DNA, 587 bp, Zea Mays
gatattggttccatgtatcacttaactcttagttgatcttgaaatctgtgtatgacctgtttaaatgttgtcttttggagcatatctgaatctgatgcatctgccctgactcctgagcttgtgaaatactcctttttttcatgtcacattagctttgtcataagtaaaacataactatctttcaagggcgaagcctggataatttattgccagggtcagtactaactcacaggttggaaaaaataataccatgcataatatcaataatctataaaataaaagcaacatattacgccaaaataatctttcacaatagtaattgcgtatcttctatatttttcctctacggttacgatcctccatcttatgtaagagaacaaggacctctagtcaaatactttcaccttatgtcatcttgtagatcagagcctatatgagctgatattatcctctgtcagctggatcatatggaagttcatcgaaatttacctcatgtcgtgagactcgtgaagaacaatgaataggacgattggtatttgatctattgacgtcccttgttgaagtgcatctttctagattatcattat

SEQ ID NO: 183353 - DNA, 646 bp, Zea Mays
gtgcagtccggggacgggagggagaccaatcggagctgatggaggcagcggcggcgctgccgccggagagggatacgtcagcggactggggagatggcgtggtaccgctaggtttccgggtgaaggcatcctctcgcgagtcgccgtcacagaaggcggggaacgtgctggaggccgacctgcgctcccactgggccaccgccaccaacaccaaggaatggatcctccttgagctccaggttcccgtttccatatgcttctagagcttattcttctccctcttctcccattgtagttggggatcgaattcgaattgagtagtcactccccagctgcttgcaggaaccgtgcctcctctcccacatccgcatctacaacaaatccgtcctcgagtgggagctcactgccggactgcgatacaagcccgatgcattcgtcaagttgcgcccccgctgcgaggcccccaagcgcgacgtcgtctaccccgccaaccacaccccttgccgctaccttcgcatttcctgcctgcgcggcaaccccatcgccatcttcttcatccaactctttggcatccccgtgcctggcctcgaacctgagctccagccactgctcagctatttactcccgcaaatcacatcctccaaac

SEQ ID NO: 183354 - DNA, 543 bp, Zea Mays
atccatataccgcagtgaccgtggctcgggcatttttcgaagggattgtgtgccttcatggtattccgtgctcaattgtaagtgatagagatacaatgtttactagtgccttctggtccgagctttttcaccttgctggggtcaagttgttacttagtttcgcgtttcacccccagaccgatggacaatcggaagtggttaacagaattattgtgatgtacttacgctgcttggcaggtgatcggccaaaaacttggttacaatggcttccataggctgaattttgttacaatacgtcatacctgactgcggtcaagtgcactccattcaggattgtatatggccgggaccctccaacaatgctttcttatacacctgggacagccagagtagctgtcgtcgatcagcaacttcaggatcgagatgttttcttggcagacatcaaacaaaggctaatctaagctcaggtaacaatgaagcaggcgcaggacagtggcctcgagatgtgcagtatgctgtcggcgattgggtttggctgcgtct

SEQ ID NO: 183355 - DNA, 424 bp, Zea Mays
gatctgtactggaaattggaggaaacaggacgagaagtgtctcagttgaggttggagcagatgggaagagagttgggcgaaacatcgacctctactcaagaacatggtggagatgttcgaaggaatcaacaacagtctcgtggtgatcaggatcgtggtcgtgggaaccaacaacgaggcatgagaggtgatcctcgtcagtctgctgattcaggtaatcaagcaatacccaaactaccctttccaaaattcttggagggcgatcctgttgtatggttggactagtgcagagagtatttcacaatctaccgtgtgcctgagtctatctgggtttctgtggcctctgaatttggaaggcataacacctcagtggtgaaagagttacaaattgagaaacggaattggaggttggcaggagtttgag

SEQ ID NO: 183356 - DNA, 628 bp, Zea Mays
cgtcgttgacggctcgggcaaaggtggagcggagattctgtatgttccttttttcccctcgtacttgccatgatgctgtaaactttggttgcatagcctggaaatggcccatggcttaggctgtgttctgttgcttgcctaccgctgtatggtgggcgcattgatgagattttgatttgcataaatagtcaaacatggtgatgaagtttctcattcttgttctagattttgctctcatatgaccgctaagttggcacattgttttgcttaaaaattcaaaagatagtcctgcgcattggttccttagttgagcattgagaatgcaaggactgccaaaattgtacatttgttttggctccgttgggaaggtgaatgcaatcacctcttcatgtttatactaaacaggatccagggaaccacagctgttgagcttgcatctggcctacattggtatttgaaatactggtgtggcgcacatatctcctgggacaagactgggggtgcccagctggcttcgattccttctcctggatctctgccacgggtgcagggcaagggagtcaagattgagcgtcctgttccgtggaattactatcagaatgtcgtcacttctagttgtgagtccttt

SEQ ID NO: 183357 - DNA, 313 bp, Zea Mays
cagccggctgtcttaccctgtatagatgacagccttcctagtttagccttaccttgtataggtgacaaccttcctagtttaggagattgtatccttgtacaccaggccacttggctatatatatgagaagtcacgcacctgattgagtgtgcggtgctttcccctaaaccaactctctacatggtataagaggaccaggatcaattcgatcccggccttccttccgctgctctctgcttcctctcacgccgccggcacccctcctctcctccatgtctgagcagaccttaggcgccagcgccaaccttggcgc

SEQ ID NO: 183358 - DNA, 408 bp, Zea Mays
gaaaaacttggagactctacatctagagagcgtatcgtgggctaaccttccacctattgggcagttctatcacttaagagagctaaggctgagtaaaattgttggcatatcacagattggacctggcttcttcgatagcacgacagaaaaaagtgtctcacacttgaaggcagttgagtttaatgatatgccagagcttgtcgagtgggttgggggagctaactggaatctgttctcaggaattgaaagaatcaagtgtactaattgtcctaggctgacagggttgctggtttcagattggtctatttcttctatataagacagcactgtatggttccctaatcttcatgacctttacatttatgaatgcccgaagttgtgccttccacccttgcctcacacttcaaa

SEQ ID NO: 183359 - DNA, 681 bp, Zea Mays
cgggggcacaggaggcggagggcgagcggtgggctcggtggtggggaccgtgctgaggcctctggtgggacgccccaggcggccctggaggttgatcgcgtccttcccggtgtcgcttcccggccttcgcgcttctttaggcgcacccagaggatcactcaagctgaagacgatctccggcgtgccctgctcgtctctgttgtgggtcgggaggtctctggctacgccgcggaagtctctgatgcgctcatctcgagatatgatcttgaggcggatgcgctcgatcttcgtcgtgttgcgccgagcacctttgttgccctccttcccaacgtcgagctggctgatcgggtgttcaatggtggtcagtccctctacgcacctcccctcctgcacatcagaagatggtctcgtcatttcatggcctctggtggtagcgctttgccgcgactgctggacgtcgagcttcttggtctcccgattcatctctgggagatccgtacggcggagcagcttctggatgaacactgtataatcctcgatttgcatgatgacactaaggatggtggggacctgtccgtgttcaagttacgggtctggtgtgctgatccagggggtcttccgtcgattattgacctgcatgtggaggagtcgtcggtgctggagggggatgtgccttcgtcc

SEQ ID NO: 183360 - DNA, 389 bp, Zea Mays
cgctgatcagatgcggtgtgtggggccttgctcagcggcggggctgggaggtccgagcggaatagatgtcgatggcatggcggttgctccgcacaatccatttccggcatctgaggtaaacgagcgagggctttcatctcaccacctgtactgcactgatttttctttcggtctaactgattgattcaatcaatttcagcccaggtgtcaggcgagcatccaagattgtagaccaaggctttaccaataatgccccagagctgagtaccaacaaagggagtttgctgaggtgtagcagcatccgcttcggggagaagcggaactcaatttttgcttgcgctccagacaatttggagcagaaatctggacaaacgttcgaagctgatgcc

SEQ ID NO: 183361 - DNA, 1000 bp, Zea Mays
gtcgaagcgcggaagtgtcgcgactcgcgacggcgtgttgccaaaaaaggaaaaaacaccgcacggtcgaagcgcgcagcgtcacgagcgcgtgctgccaaaaaagggaaaaacctaccgctctcctaccacgaatagttcgcatgcgagaactgcgctcacgccgtacccggaagagcagggacacctcctctctacgggatttgggcgttgacgtcggcggaccggcgcggcgggggtgtcccgtccgccatgccacacttgctctccgccacgccatgcatctagccgtccaccgctccacgtgtcgggtgaggtagggttttgctcataggtactcccttcagccatgggatctgtcgcgcgccaaaaatctgtggcgggtcgtactttcatttcggaccgccccctctcatagcgcctgtgcaggtctccgccacgtgatgctgcccatcggccggggcgcgcggtggacgcccctcgccatccctctgccgcagtagtgcgttgtactttggccgctgtgtacccatgtcgtcctctagctgctgccccacggataagcccttggaccgtgggtttcctcttccctccctcctagctctacaacctacctaccagggtggttgattttccctcctggaaaccatccactcgcccccttcaagcgcaaggtattgtaccgttctttctcaactctgatttgtgcaccaaacgcttgctactacacttgtagatctgcttatcaagtgctacctatgcaccgttgtagtgttgctccgctgcggccctggcgatggcgcaggcatgcaaggcttgtgttgctcttcccgtgtgcaacgtttaaaggtaggctgcttgctgtgttgtggatctcatgtgcgctttgtggtgtgcgttctcttctttgtccatgcaagtttaaaaaaactgtaaatatggttttatgttcgcctgctattggttttgcctgattctcagttgtcctagcagtgtgcca

SEQ ID NO: 183362 - DNA, 516 bp, Zea Mays
gtgcccttatgtcattaatgagttagtatctttttttttctcgaaaaaacgcaggaggactgcgttttagatatatattaagaagagagagacaaaggtctaagagaccaaaaaaacaacaacaacgcactccctatggaggccagtaacactcgtacatgaaaggatccataaaaacacccacacacactccttacaacaacctatgcagggggcagccaagaaggagagccctttggctccagcaatttcccagcctcttctttcctcatctgcatgctccataatcaaaggaaggctgggagaccctccataaaaaatgactctattacgatgcttccaaatcatccacgaccctaaaatgatgagggagtcaagaccttccctgaccagaccatttactgtctctgaaaccatctcccaccaatccataaaggaaactgcatctggctgtggggctaaactatgcagcccgaactttcttagtaggttgtaccagaaaatccttgagaagac

SEQ ID NO: 183363 - DNA, 380 bp, Zea Mays
ggcgattctgtgtggactaccgggagctcaatgggaagactgtgaaggatcgttaccccataccagtagtggacgagttgctagatgagctccaaggttccagattcttcaccaagctagaccttcggagtgggtaccaccaagtgagaatgcaccccgaagatgttgacaaaacagcgttccgaacacaccgaggccactttgagttcctcgtcatgccattcggtctcaccaatgccccgtcaacattccagagcttgatgaatgatatcctcaacccattcatacgcaagtttgtgctggtattttttgatgacatcctaatttatagcaagacgtgggcggctcaccttcaacaggtcaaacaagtgttccaaaca

SEQ ID NO: 183364 - DNA, 313 bp, Zea Mays
gcttcgtcatcatctttaatcgccaccctcagccttccgaggccgaagcgagaccagattgggtgctggataatttccttagtgtcctccctctcaatcaagttattcttcacataaaaccattcctccatctaggtcccgggccaacttatccgaaacgttggaatagggtaacttgcattgggacgggcaataaatctataacaaccgaagttgttgtgatattgttctttcccggtagccttcgtctcatacaataattcgtgcatattgcagaagcactttgcgcttggttctagcccttggctcctta

SEQ ID NO: 183365 - DNA, 1127 bp, Zea Mays
gataatgcgacgggtggacatgccaaggcagcgatatcccttgtgggaggagggatagcctaagaagacacagggtgctgatcgtggggcgagtttgtggggagaggtggcggtgagattcggatagcaaaggcatcctaaaatgcgaagtgaggagtagtccgggaggcgtttgtggaggagttggtgaggtatctggttttggatggaggaggaaggacgcctattcaggagaaaaatggcagtagcgagggcctcagcccagtaggatggtggcatgaacgcatggaggagcatggtgcggatggtgttgtttgttgtgcgaagcatgcgttcagctttgccattttgtggtgaggtgtagggacacgagaggcgcagcgagatgccacagctagcgaggtatgaggtggtggcagtgttaacaaactcagtcccattatcggcttgaaatgatttgggtgtggtggcaaactgtgtctgagcataagcgatgaaatcgactatgtggcggtgtacttcagatttgtgtcgcagcgggaaggaccaacagtaatgtgaaaaatcatcaagtaggacaagataatatttaaatcctgaagtgctcagtacaggtgacgtccacacatcacagtgaactaaatcaaaaggagcagtggtcacagatgtagaatgactaaatggtagccgcacgtgcttgccaagctgacatgcatggcaaagggtggggggctcttattacatgaaatgaccgacatgctttgtagggtggcgaggctggaggatccggggtgaccgaggcggtggtgccaaagcgtggcggtaacggcgaggctgcagtggtgcaccgatggtgaagggaaggtgtataggtcgctgtcactattgcagcgaagaatcacgcgccccgtctggtggtccttgatagaaaaaccaaaggcgtcaaattcaataaaacaattattgtcatgagtgaattgacgaactgaaagaaggttgcggacaagggttggtgcaatcaagacatcagtaaggcgaaaggtggaagtgggagtggacagagtggagttgccacgacatgtgattgggatggtacagctgttgccaacagtaatgccagaagcagg

SEQ ID NO: 183366 - DNA, 1592 bp, Zea Mays
gatacctttcatgaggtgaaaaggaagcgtgacaagaaaaaggaggtatggtgatctttccacctatccctgttctttcctctttcattgtatattcatcactagtccagatttttgcgcaagtcattggagctaataatgttattcagaatgaattaccttatgattgatgctaggtttaataatgacaattggtcttcattctttggtattgcatatgtattattcttataatatccagtatctatatcattttgtttattgtgactgcatccagttatttcgaggtcaggtcacttacatgggcttactttggtattttatgtattatgaattttcagtatttggttgggccactttcacataatttgatatattcctttttctttccttatctataatggagaagggaatactgctggcctgatttggaacatgttgctatacttctggcaactacttttgcccaacagtttgagaaataagcagtacacatcaaagtcaaatgtacctgtttgaatggtgggtgctgtattcaaagtataatgtgtttggagggtgaatcgctaaagtattactgaaaacaacactcaggtttaaatagtattacatgttacataaccttatgtttaattttttttgtagaaaatatattctgaagcatctaaatcatgcacatcagcacattgcattaatttcctcagagttgagttttacaacactgattgtagttattctgattactcatttgaaaaattggtagacagtctgaaacaataagttaggtaatgttgagaacatgtggatggaggtcctgggctgtactgatttacagtaggcttaagcatgaatttcacagcagtctcctaaacaaccgctaaggtgcatattgccttatttctgtttgcatcaagtaacacataaacacggatgatgtaatgttgccttctttggctcagtaatgtttcagtttggtatacaaaattttcagtgagaacattgactatattgtggttaaaagctacttttatttcttaaattgattgcaactcaatttacctttatccacaggttagtaaagagccatcagattctcggtggagacctgccgtgcaggggcaaggtggaaagaattgtcggaattgtgcttcacgcagtttgtccagctctaatggtattttttacagcattttgtcaacataagattttgctgggtgctatttaaaagacaattgggggtttgcatttacatagactacatgctaccgtgttacactatgaagattatcattaagtggccatgcgtacatattttgatgttgaaaattctgatcacaagttagagctggtcttggcacaaacttcttgagaaaacaagctttcgaaagtttttattacctgaccaatcatgttaatttttaacataaagtaaactcgatacacactttaaccctcttaaatggttacacaaaaccaatgcattactttttttatctcattgaagattctgctggacgaagtgctatttctggaaaggagaatggaataagtttgatcatgggaaaaggtagtggttctactccgataaccaa

SEQ ID NO: 183367 - DNA, 441 bp, Zea Mays
atactctacgccgtgtgagtttgtggagttgtattgcctgctctcttggttacagtgagttccagaggtcgaagatgactatgtctactgatgtctgtctttcgttttcgtaggggctccccctccgccttattcccgtccgaggagttacaagcacgacccgatgaacgtcctgagtctacctgcctccatgagagtcgtgccgacttgcctggaggtcaacaagtctttagggaatccgcacgtaccctgcatgcacggaattcggcctaggtatcttcacgctcacgcaaccgccttcctcgcctgcttctggttacaaccgactgatgtcccctggaggttgcgcccgcggcccatcggggatctctctggcggtccacagaacatatgagtcttggtgacctgggggatatctatcccccacatgcgccctgtcca

SEQ ID NO: 183368 - DNA, 448 bp, Zea Mays
tctagacccacttgccagtcaccacattgtcatcagggaacgaggcacaagtcccaagtgtggttggcaaggagggtatgatactcttcctccgtagtgtgacgccaaagaggatcgatgagggaaaggtaaatggaagacaacacgaaagatattggtgaagagaatgtcgcaaaaagaacaaagcagtcgatcgggcgaagaacaccaatggcatgtcgagtcaccatggggtgaacatggcgggtctcggtgaagaagaggagggtggtacaccatcggcttagacagagagcgaggcggggcacacccgtgcacatagttgatatgcatgcacaagatcagcataccgtggagaagtcatggccgacgagagaatcgagcaggtgaccgtattgagggcaaggttggaggagtcacggtcgaaggcagtgtcgccgaggtagcg

SEQ ID NO: 183369 - DNA, 346 bp, Zea Mays
aacatcatggggtgcggcagcgacttcatggggtgttcgaccgcttccgacgcgcaaagcgaacgacgtgtgcgcccaccacctacgatgacctgtggtcaagatccagtccaagctcgcttcttcgtcttcctatccatagagcatgtgaggcggatcatgtccaaggtggtggcggagctggcccgtcactctgcacgaggagtccgtcgtggccaccgccgggcagaacagctctcgacatggcggctccgacctatcagttcgacggcaatgtaaaatatcatgatgctacttttttagtctgttctaagtttttttacggttggtatacatacataggctg

SEQ ID NO: 183370 - DNA, 1670 bp, Zea Mays
cgatttactatgaccgcgtgttgccagttttgcttgattttgaccctggcttggagactgcaaagggggcacattcagcaagcctgcggtatgctgtaagagcagcttttttggggtttctacggagtccccaccaggcaatgattgaggttagctcatctacaggttacacatgtagattatggttcagttgtcattaataaattatctgatttaatttacatacttcatgcctcgatacagctcaaagattcttaaactgttgctataattgaattttgcttgcgaggaagtataacttggctagcatgttaatgtgttcttacaccaggttatgatcaattaacggatggtagtacaaatatgattgttgatagtaaatatgccttgatgcatgaagctcatatgtaaattgaggactcgattcagccctagtatatatgtattataatttagaaatctatgtggattttgtcaaaactttaaagatgattttttaagcagatctttacaaccaaggatgttgctccttgtcatggggtggcagccaagggcatgaggcccatagggataggctcagggttaggattagtggataaagattagataagattgagttacttacttgggattagattagataagattgagttagttacttggggggcaagtcttcctatctatataaggatgagttgtacctccttaagggggaatcaatcaatgaagaagaattagtcccatatctctctaatagtctagtcccccccccccccccaagccgactccgcctggctatcattcccttatgaactaggaaccataacactcctcaatcttaatatggattcgtgcggtaaaaaagtgatactaacgaagtcggagttatgataagaaagatggaatcatgcactcactataggatttgaatgtatgacattaggtttttgtagactactagactcattctaccaaactcaaaccaagatttttgtggcaacggtatctggtctgagctgtcaagtttcctttcagggagccactcctgtgaagacaatccctactcccctctcttttcttctcgatctggttgcttgtttgtgtttgttgttgtaacttaataaaggactaatttttggagacatcttgttttcttttgagaaattgtacatcaattctgcattgcttttcctaaatgtgtgtaggatttacatattcatatttgttttttgatgtatattgcttgtcaagctaaccagacttccttctcttgacagtctaaagacatattggtaaggcggctgcgtgttctcagccctggtgaggcaatggaacaaaatattaggcaggcagagaagatgtctagaaatatagagcgtgcttctcgtgctagcaaggtattatttgcatgcttatacagttttgcccaacggattgcacatgtatacctttgaaaaatatgcttcctcaataagtatatatattttttctctcgaagaattgtagttcttttcttatgctacaggatgagtctacatcatgggagatgccttatggagatataaatcggaagaaacctgctgttcgatcaagtgatacttttactacgtctgatggcatagctaagagagcaagatttgacatgtctgccacttcaaacctgccagttc

SEQ ID NO: 183371 - DNA, 592 bp, Zea Mays
atcagttctacactaagctcattggtcagtctagggacagagagaacaattgatctggaggcccttggtctagtaaggcacaatctttctgaccttaactctcctatatctgagcaggagatgtgggaaaccatcagtcgtctacgttctgataaggccccaggaccggatggcttcacatggaggttctataaggtttgctagaatattatcaaggatgatgtgttggctgcagtatcagcagtatggagtaggaattttgtaaaccttaatagacttagcacagcctatatcacgatgattccaaaggagggagctgatcaggttaaagatttcagaccaatcagcttagtgcacagtttcgcaaaattgatcacaaaggtccttgctaataggttggaaaaaagattgaatgacatggtctcccaaaccaaagtgcatttttttaaaaggaaggttcattcaggacaattttatgctagtgcaacagacatcaaggttgcttcaccagcaaaaggtggctcggttccttctcaaactagatataactaaggcttttgattgtgtcatggcctttcttgcttgaaataaa

SEQ ID NO: 183372 - DNA, 1109 bp, Zea Mays
aagaggatttctcggaatgttgtctttattgagattcgtcctttctatcctagtccgtctacatgtctgatctttggttgatcctctgtcttccctttcctgtctatgaacgactctgctacagcattgtgtctgtctcccacctaccactattgtgccttctcctcaatgtgccctcgtctgttgcgcctcctcctatgcccctctatgacttattcatagacttttgttctgattcctgactacattgtcaaacctcctgcgacaaaggtctatacacgaagacgtccttttgactactccatcggcttcctctggtgtgtcctcttctcttgatgtttcagcctctctgttgattcatcttcttcggctaggccatattcttctggtgatagctctcctaatttcattactcattgtggtcttcgtactcgtcaacctgtagatttctatggtttcggcctcattacatggcaaggttttaccggatctgttctttctgagccaacttcctatcgtgatgttattcttcatcctgaatggcaactttcaactaagctatctgttctacctactaagctatttatcttaacaatgtgccctaagcccagatggtgaaaaccaggacaggaggaggaattgatcaacctgcacgcatacgtcaaggaagatcatggaacagttcggaatcacaaatgaatcctccacctgctgggttggaagcgttcctcgtcgcttagacccagttgttgcagaatatggcgaacattatggccaacatgcaggctcagctcaacaacaatcagcagcaccaacaacagcaacctcccatggacaagcacagagagtacatgagtcataagcctccaactttttccaactccccagatgcattgcaggctgatgactagttgaaagctatggaaaagatgcttaatatcgcacaatacattgatcgggataaagtcttttatgcatcaggtcgcctctctggcctcgctgctgattcgtgggatgcctattgtgcagcacagacaccatcacttgggccgaattctcaacaaacttcataaattaccacattcctattggcctaatgaagatcaagg

SEQ ID NO: 183373 - DNA, 827 bp, Zea Mays
gttccggaattttcctggtggaattgggaacggccggcctagggatctcgcgaggccgcaccagaattgatcctttccgtgcaaattttgccgctccagtccatgtttaggtgtttgggggtgatctctgacctaataaagcgttagctcggcctgtttattcttcatacagtttatcatttgcgtgtagatttgggcatatgtgcctcaggaagcaatgaaggtccatttcgtgaattcgttgctgtgtaaattgctaatcccacgttaagtgtactcatgattcgttgcctgaggtccaggcgaaagacctggcgcttagttcttagtgcaaatgttgagtggataaggtgattttaattaagaaaaggtgtatcctttggcaacaagattggcttcagactcgttgattttggaccaaactgtggctaagggaatcctttgccaaggcccatccatgtgctagcgctagcgatctgtactgaacaagggaggaccaagagcaaaagtatacggctaaagaagctagctttgttctttgcttgcgctggtaacttagcatttctcaaaagggtggaatcattggctcaagtgcggaatcatttgattcctttgattataaagtcatatgttgttgttttcccttctaatctgacagatctgagatgaggcatgaggtgctccatgtgagagttttccctagacctcttacctggctcttgcttgtgactttatttaattgggaatgtagatcacatctaacatgctccattgatatgattatttaatgcctttggttgatccacctgcttctttctttttctgcc

SEQ ID NO: 183374 - DNA, 281 bp, Zea Mays
tagacatttatccagatctatccgtgtcacagatgctaatcttctggacttagttaatgatattgtatctgcctcactagttctagctataggtgctgtttggttcagacgttgttaagggaatggtaatgggatctcttaccggcggtaatggttactagttataattggattggatagtagtacctagtattactagaaagaactcaaccaaacagaaatatcggtatccattaccccatgtaatccatttacgttacatttcggcgaaccaaacacca

SEQ ID NO: 183375 - DNA, 500 bp, Zea Mays
cttttctatagcacatatctacagaaaatacaattttgttcatcaaacatacagcactagcaaatcactgcgtgcagtccaaaacagcaattactaaatttcagcttctatataattcaagaattgccatgttttagagacttgagttattctaacactttaccatttgttagagttaaattaatcaatgaggactaacaggtcgactttacaaatttttatacaagttatcacgtgcgttagaactaccatacacaattaatcaacgcattcaccacaatcgtcaattccggtatatatgcatatcaaagcgcttttcacccactagttcgcattttagctttgacatcacatgagcactaatactttttattcgcgaccataaccatacatatttagactacaacaagcaaatcatcgtgaccacgagcttaactaaagtcatttaacaagttggttaaccagtataaaacttagcaagtattttagacttcgcaact

SEQ ID NO: 183376 - DNA, 1171 bp, Zea Mays
atgtgggacaaatcattggacagcctactgcagcacctattacagcagacaaaaccaatatgaagcccctttccaggaatattgtccgctttgaaattgtccatttagtttacaatccattggtggaccattaccttgctgttgctggatatgaggattgccaagtgttaacattaaatagtcgtggtgaagtaactgatcgccttgccatagaacttgctctgcaaggaccatatattcgtcgtttggaatgggttcagggttctcaggtacaactcatggtagtaacaaacctgtttgtgaagatatatgatctctcacaggataatattagccccatgcattattttaccgtagctgatgatgtgatagttgatgcaaccctcgtcccctcctcaatggggaaattggtgctacttgttctttctgaaagcggtgttttatataggctgaatgttacattggagggtgatattggtgccaagatattgactgaaacagtcttggtcgaagatgtcatatccatgcatagagggttatcattgtacttctcatcaacctacaggcttctttttgtatctcaccaagatggtacaaccttcatgggacgtttgaatgctgattcttcatcaataacggaattgtcatatataaatgaggatcatgatggtaaatctaagccagctggactctactgttggagagagctagtagctggcagtggtatccttacttgcctatcgaaatctaaatcaaatgctcctcttgtggcgttgttgagtcctcatcaattggttgcacaaaacatgaggcacaatactggtgcaaattcctcagtggttggtgttgctgcctataagcctttatccaaagataaaacacattgtcttcttttgtatgatgatggaagccttcatatttactctcatacacctagtggaggtgacggttcgatgaaccttacagcagagcaaacaaagaagctgggcagcagcatactcagcagtagagcttacactggcacaaaaccagaatttccacttgatttctttgagaagacaacttgccttacatgcgatgttaagttcaatagtgaaacaacaaagagtggcgattctgaaagcattaagcaaagattgacatcagatgatgggtatttagagagtttgac

SEQ ID NO: 183377 - DNA, 309 bp, Zea Mays
ctcttagggctttagcatgctctttgtgccatgggattcttcgttttaacttaaaacatagaacacatgatttttctagattgtatagaaatagcaaagtttcataaaagatgtgatgcgatgtgtttgttgtgtgcatattagtcttagtttcttccagttgcttttgcaagcttaaatttttatcctgtgtttcttcattcgcttgctggataactgaaatttggttctgttgctattccaagtcactctgaagattcttgatttgagcctcagattcttgtaactaagtcagtgcttagattgtgg

SEQ ID NO: 183378 - DNA, 369 bp, Zea Mays
cgcttcccaacgacgagtactcgacccctcctgcgtccctcaccgccctctacgcagctgcgctacaggacgccgcacccacgacccatgatgttgccgctcatcgcgccaagctcctggccccacacttcccgtacctgagtgcaggtcatggcactcccaccctgcccgggctcgcgaggggttcgacatcccacctcccgtctacaaccactcatcagtgctcaccacctctcaacgtccacgtactcttgacgtcatcgatgtcctcctcgccacctgtgcttgggagcaggaacgtgtggtcgtcgatgccctcgagcgccagcttgtcgatacccctcatccgcttgctagtatcccgggcga

SEQ ID NO: 183379 - DNA, 828 bp, Zea Mays
cgaaacacagccaaaaagccaccccgtgcaaaacacatagagctcccagtcccaacccggtcaccctccctctcctgctcctcgcatcgccggtgtcctcgacggctcgcgccgtcgcgctctcgcaaaaccctagctctgcttccctccgtcgtctcgcccgttcgattgaatcgcgccgcagaagctgttgcctctcatctctctccccgccctcctccggaaaccctagcccactccgcgaggccgcgatggcggagaggaagctggatcgaccctcggcgctcggcaaaggtgagacgcccgacctaggcgccctggcccgcgggagatccgatctgcctccgacgcctccgccctattggccttggggtagatctgtgattgattggtgggtgtccccgatttgacgtctggttgttgcgtcgcacaggtgggctgtcgcttgggatcgaggaggacagggttgccgccgccatggggttcgtcgaccactcgaaaggtgtggatttcttcacccgaaatcacttgacttttattccttcctggttcatcttgaactgcctgcttagcagttgatgaatttctataacggacgccattgcctacggttcggtcgggtatcccagttcgcgctgcgtgggtgcatgtgttcctgtgcggttgctctcctcgttctctgtctgcgtgcgtaggagcgcgagcttgtgcgtcagtagtggatcggccatgttttgctgagcgttgaccctgtgctatgcagatcagcaccacctggataacagcattcccctctctcctcagtggctctacgccaaacctgctgat

SEQ ID NO: 183380 - DNA, 308 bp, Zea Mays
aacttattcacataaccaacaaagccattaaaccccaataaactggcagtttctttgcacaccaattaaactggcagttttcttgcacacctctggatgactcaggctttatctatgtttttcataatcataactactggatgtctaggaatgctttccttggagtaaatgtaaaaaacaaattgctagtacttcaaatacacaactaaaccactgtgatgcatcaatgctactttgtggtagaattattctgaattccaatgtttatacttctaaatgggcttgattggatagctgcacatgtacgg

SEQ ID NO: 183381 - DNA, 786 bp, Zea Mays
ttaatcgccttggacttgctcaaggcatcgggctggtaaggtgccatcagtgaatccttctattttgagcttattttgaatccttttagcactaaagttcccattgcaggttgcggcttctcatttagatacagtgttggagaaactgaagaacatactagatagtgcagagcaaagtgctttccagaggtacttatataatcttttggcagaagacatctatttgtcatcttaccgccagtcctgtcttgcagcattgcagcaatataacctaaaccaaaacttggttgtgttgcttcacatgtacactcctttgaccaattttgtgccaaaatggaatcctgtacttcattcttaacttcaatgtaccaattagtttcccttcttttcagttattggtttggcatattttgtgaaacttcattccatatcccatcttgtatttggaaaaacagaaatggagactggatcattcaaaagtgaatatcaagcaaccactacttagctggcgtatttcatttatgtaggccgtctatcctgttatttcagtattaataagtttatggcatccaattctgcaggttcctctcatttttctcattcggcccaaaagtggaagatgttgatgacacatatgcagcattggcgttgatgtatggttatgccgcaagatatgctccatcaactgttattgaagccagaattaatgcacttgtggtatgatatcccatttacaaactaacttttgtttcttacatgaacaattccgatgaataataatatgtg

SEQ ID NO: 183382 - DNA, 923 bp, Zea Mays
atgacggggtgagacagcctggctgaagaacgcgatggggtggcccccctggaccatcaccgcgccgaaaccgtgggacgatgcgtcgcactcaacgacgaatggcttggagaagtccggcatggtgaggacgggggccgaggtgatcgcgtccttgagggcgacaaacgcctccgcggctcctgcgctccaagagaatccatccttcttcaacaaggccgtcaatggcgctgccacggtaccgtagtggtggacgaacttccggtaatagcccatcagtccgaggaaaccccgtaccgcccgtgcggatcgcggcgtgggccagtcccggatggcctggactttggccggatccatggcgacgcccgcctcggagatgacgtggccaaggtagccgaccttcgtcgcgccgaacgcacacttggtgcgttttaggaacagctggtggcgttggagctcctcgaggacggcgcgtaggtgtcgaaggtgttctccccagctcttactgtagatcaaaatgtcgtcaaagaacacaagaacaaaccaacgaagaaacggtcgcagcacgtcattcatcaaagcctggaacgtcgctggggcgttgcacagcccgaacggcatcaccaggaactcgtagaggtcgtcgtgggtgcggaaggccgtcatgtggacgtcccccgggcgcatccggacctggtggtaggtcgagcttggtgaagaacttcgcgccgtggagttcgtccagcaactcgtccaccaccggaatcggaaacgcatccttgacggtgagcgcgttcagcgccctgtagtcgacgcagaaccgccaggagccgtccggcttcttgacgagaagtactggtgaggagaacgccgagtcgctgcgtcggacaatgccttgctcgatcatggcggcgcactgccgc

SEQ ID NO: 183383 - DNA, 427 bp, Zea Mays
ccgagactgagatcgtcaatcgtagaacgtagaagcgcagatcgcagaaggtagaagcagaatagccatgcagatcgcagaatggcagctaggaacaccttaacagaacgacagatgggaacatgtactatgctaacgattctgttctgattaggcccaattgaccaacttatgcactctaactttctttatttgtaagaacaagcgagtagtctagtggtaacactgattcaaagcaaggtgcaagtctctggttcgaagctccgcgggagcaatttttttgccaaataaatcttagcacatgcgtcgccgggccgcgagtcgccaggcgggggttgtgtcccactttaccaaaaaaatgcgacccatgtaggccaaggatctcacgccgtcaagtgttgtacacgtggggcgttttttactaaaa

SEQ ID NO: 183384 - DNA, 479 bp, Zea Mays
cccgtctgcctttttttatataaaaggcagtatgaatggcatcgatagctttgtcaaaagtctctcattcctaatcacaaaaactttcatgtcgttaacctgattgatagctgaatactgttgactgtgggggagatggagaaagcttacaggggaagtaaaaggtaggtagcccgaggctgtgtgacgtttcctttagaaacctccattgctggctccccatcctcttcctgcttcatggtttcacctgctgccttctccttcctcgattgccgcagctgctatgggaataccatctttctacaaatgggtcgtcagcaagtacccaagcatcatctcccctgtgaaggacgaaccagaggagtgccctgatggcatcatctacgacaacctctacctcgacatgaattgcatcatccattgctgcttccacccacaggaccagctaacgcatgcagacatagatgtatccacacacc

SEQ ID NO: 183385 - DNA, 635 bp, Zea Mays
ttaattttttgtctttcagaaagtgaaattgttcgaatgtttcatcctccaattcgtaagagtgaggaagcaatagcaaccattgcgccaagatacacacattctgtgcgtgtcttggatgagaggttcattaggatcctgaagatattcaagtggggccctgatgctgagaaggcgctggaggttctcatgcttagagttgatcactggttggtacgagaggttatgaaaactgacgttggggtcaatgtgaagatgcagttcttcagatgggctgcaaagcggaggaattatgagcatgacacatccacttacatggcattgatacattgtttggaagtagtggagcagtatggtgagatgtggaagatgatccaagaaatggtacggaatcccatttgtgttgttaccccaacagaactttcagatgtagttcgaatgctggggaatgctaagatggtcagacaggcaattacaatcttctaccagatcaaaacgcggaagtgtcagccaattgcacaggcatataacagcatgataataatgttgatgcatgagggccaatatgagaaagtccatcaactatacaatgagatgagcactgagggtcattgcttcccagacactgtgacata

SEQ ID NO: 183386 - DNA, 1118 bp, Zea Mays
ccaccgcccaccaccccgccgccaacgctgacgccgcctcctccggctgcacccgtcacgccaggtgcttggacttcgggaatctgcaggtacgtctctgaacttgggcagacatgggctctgttgcagtttatttctcattccatctcgttcgaaagccaattggtcgcagtttctatgtcgtgcaagatcctatacactactgtatctgtaacgccatgcctcgtttcccgttatcttgaaccaggttcagtagagtagacaagtgtttgagcaaggactggatagaggaatgcgctgcttgttcctagagtagcacccgcaagatccaagtcttcccgcgatggaaagcggcgccatggtactcggtgttgttcgtcccgaggagtcccctgaccgcaacggcggtgggccacgggacgatttgggcccatcgcagatgcaggtcgatggtcccgttgttctcaaccaatccgctgagctcgtctcggatgattcgatggccgtcgatgacgtcccagttcaacaaccatcaggccagccggtggaggcaacacaacagtctcctgcgacgctgattgatactatcatggaggtgcagaagcagctgaagcggaagagggcttctaatagcccagtgattgatgccgccgataaggacgctcttgttgctgggtgccggcaggagctcgaggggctcttccagtattacaaggaggtttctgaccgcaagatgcagcttgacggcgggaacctgtccttcaacgggatggttggctgtttgcttgaggagagcagtctcgggctgactaggttggtggacgaaatatatcaacagctgaagggattggagggtgtgtctgtggcttcagtccgcagctctgtgctgctcgctggccagaggatgatgtacgggaattcttcactggacgctgatgtgttagaagatgaatcggagtcggctctttggtgctgggaggtaagttgggtggtcacaaatcgtgttcttttgattatattcttctgtaattttattaaaaaacggaaccttttaaatgcatacgcagataagagatctgcgattgttgcctgtgaaagtacgcagcattctgagtaca

SEQ ID NO: 183387 - DNA, 457 bp, Zea Mays
gggaattcaagccaaaaactcttgaagtggaaccatcgcttccccatgcagacctctctgactttgagggttaagggacaatgatatgaagatgtggtagcattactatgaagagaagcatccaaaaataaatcctcccaactgcttgtgcggaatacatggtccaacttaacaagagtgggatcattcctctgattggaccaagtatatctccttcccttcaatggaacttccttcagattcaaggaattaacaagtccacggaagctacccagcatagccctgtttatattgggatcgttcttgtcttcctccctataaatcagattaaaatcaccaccaatgatccacagtccctcacattcatctctgatctctcttaattcttgaaggaaagatggcttaagattgtcctgatgaaccaccagcaatcaccattcccttcctggaattgaac

SEQ ID NO: 183388 - DNA, 529 bp, Zea Mays
tacgatggctgaaagagactatgctttagaaatgtggagattgcttgatccagattcaagattaattaattctgttcaacttcatgataggatggtgtgcgtaaaatctggtatgtaatttgtcattttattaacaaagtacaaaagagcatagcgtaatttgtcattgtaaatgttgtgatactcagaagctaacaaactgtgaaaaatactactcaaatttcgtttttagtttcattctactgaaattaatgccaaatttaccttttgtaggtttaaagaagtccttgctaaatgtcttccatgatggttcttgtcatcctggtatggcattagtaattgatgatcgtctgaaagtttgggatgagaaggatcaattacgagttcatgtggttcctgcatttactccatattatgctccacaggcagaggtgatgttcatagcctgtataccaatataaggatatcatgttgtcactaacaggacccatcatttccacattctaggcaaattgttctatcccggttc

SEQ ID NO: 183389 - DNA, 512 bp, Zea Mays
aactgaatcaaatgcttttgtgatatctaacttgagaagaaggctagccttttttttgttgatgaagaagcctcgaggtttgctgcaccagcataaaattgtcttgtatgaaacgacccttaatgaaagcactttgattaggtgagaccatgtcataaagtcttctagcaagcctatttgcaaggattttggtgatgagttttgcgacactgtgtacaagactaatgggcctaaaatccttaacctggtaagctccctccttttttggaatcaaggatatataagctgtgttaagcctgccaaaattgttgaacttcctgctccaaacaggcgacacaactgccatgaggtcctccttaattatttgccaacaaactctataaaaccttcttgtaaaaccatctggcccaggacccttatcaagtggtaagccattgatggtctcccacacctctttctcagaaaagggtgcatcaagctcagacaggtcatgagaaggtaaaccaagcgca

SEQ ID NO: 183390 - DNA, 380 bp, Zea Mays
caacgctactgcccgcaccgcctggcttgcaattgagtctcagttcctcgggaaccgcgagactcgggcgctcttcctcgacgcggaattccgcaattttcgtcaaggcgatctctccatctccgactactgccgcaagttcaaagggatggctgacgctctcggcgaccttggcgaacccgttcatgaccgcaccctcgtcctcaacgtcatccgcggtctgaacgagcgcttcgccaacatcggtcttcaccttcggcgcggacgacctctttctaccttcctcgaggtacggaacgatttgctgcttgaggaactcacctttacacatcattcctccctgccggccaccgctctactcgcctccagccccgccagac

SEQ ID NO: 183391 - DNA, 292 bp, Zea Mays
ccaagcccccgcccactggttcgcttcctggcaccggcaataccactgacggcctgtacgggcaccacgacgaaaactacctccgggatcagggatttgggtcagtcacgacctttctccctaccccggtcaagggtacactccaaattccttaccctccttcccatccttgttgccatggctagttgtttgatgattgcctcttcctccattgatgcgctgaccacgggtcgcactctctaggtaaattgccacaactggcattttccttgttcgatgggggaaaccctcg

SEQ ID NO: 183392 - DNA, 429 bp, Zea Mays
atacaagttcagagaagaaaactgtataaacaaaagaagcaaacatgttgctaagttcttactgaccgaatctaagccatatgtactttgtcgaatgaaaatctcctcgaagggtagtggcgccaggaaggggacaatgttaggtgacctctcgctcgtcaaccatcgaggatgggtcgcattgttgcgacgagcgagatcggccagcatcgcaacgacgatgagcagggtgagggcgtcgggaaggggttgggcttgagcagcgttgtgtgtcgggaaggaggcggtggcgagcgacatcggagcaaactggatcgaatggcatcagatagcataaggttgaacaaatagatgcgaggattggaccaagaaggaatggagggtgacagaagtcggaaggattggaccgatgtcgacgagaagaccagg

SEQ ID NO: 183393 - DNA, 343 bp, Zea Mays
gtccaccatggaagaagaagaggagaaagtgggtttgattaccttagaacgagacttgacagaaatggagagcgcttccgtgcatagatggcaaggtgatgctccggtgaggtgaggacgacttcgtgcatggcgggaagagatcgacgcaggtgggggctacctaggcgagggcaactctgagcattgcgtgtgtgggcattagcggtctgggcgatgggcggtggaggtggtttctgcgcatggaagggggcaattggggggttgaactggccgagatgtgaggcgggcactgctcttcctggcggcatgggcacaggaagttggagaagatgctcctggc

SEQ ID NO: 183394 - DNA, 349 bp, Zea Mays
gatgaactagacatcggtagtctagaactctcaccacaatcaaacgaaaaaaggggatctaggagatcatggtgctcagttgagatctgagcttctaatcttcttcacctttgtgttcatcaatccatcatacacaagaacatagggtattacatatagcgtgacccgaacctctacaaactgcatgtgttctagtaaccaggctacacttagcatcaacatacatctaacctacgcccctacctctacccacaaactttttcctcttcttttggtatgtgcggtacgccggtgtcatatcgtgacaacaataagcaacaataacttgaagctgagcactaactgcttg

SEQ ID NO: 183395 - DNA, 629 bp, Zea Mays
gtcgcagccaaatcatcagaagtcattccccacccggcttcagacggagtctgcgagactaccacgtccacagccggagaggatgaaaggtgtggggggcaggtgccaccacggtcccgatgcgatgcttcggactttgagcccaaacggtcgaagattgatctccttctccgaggttccccaccgtcttccctgccttcgttatcatcaccgccatgaggaggagagcgggaacgatgacgcctcctctgtcttgaaaaaccaccatctactccggaatcttgagaagggatcaaccgatcactcctcaacgtcgagaaactaataaaaatctgatacacaaggccaagccttccatcttcagtgttaactcccgtaggttccacaatccaaaggtctctggaagcagggatggttgccgggtcaaagcaccatccagaacaacgaaagacgtcaagattccggagctccagggtatcaggatggacttcatgcacccaaacacactgattcagtagctgctgaactgttgataactcccatgcatgtaaaggaataccagtcagttgcacttccacagggatcggcaggctcactccagacgaacccaaaaacttggaccatttctt

SEQ ID NO: 183396 - DNA, 366 bp, Zea Mays
cggcaatgtactctgcctcgcaattggacaggtccacaagctgtcgcttgaacgattgctagctgattaagcatttgccgagaaagaacggagtctcgttcgtgctcttgcttgtatcgatgtcgccggcatggttgttgtcactatagtcgatgaagtgtgcagcaccacgacaccttgggtagtgcaagccatagtcagaggtactcgcgacgtagattatgatccttttgatggtttgtcggtgctctgtcgtcagttgctacatgaactgacttccataaactatggcaaatgctaagtccggacgcatgtggatgaggtagcgaaggctggccacaatgtgctgccattgcattgcgccca

SEQ ID NO: 183397 - DNA, 469 bp, Zea Mays
ctcgagtcaaagtatcaataatcttaataggatattccgtataagccaaatcaccctgaacactgagctcttccattggtaactgtttctcagggacacggagacacttcttaagttgtgacgcatgaaacacattatgcacatcagatagattaacaggtagctcgagttgataggccatctctccaattcgcctaaaaaaactatgaatggtccaataaagtgagggaacaatttgttcttgactttgaatctcctcattccacgaagtggtgaaaccttgaggtacacatgatcaccttcctcaaactccagtggtcttcttttattatcagcgtagctcttttgcctggtctgagctaccctcaagttcttcctgattatatagacttgttcttctgccacttgaacaagttcaggtccaaagaattatcttcctctagtcttatcccaatatagaggagtcctg

SEQ ID NO: 183398 - DNA, 417 bp, Zea Mays
catccatcatggtggcgaatggctcgtgtcttcctgtcacatctgtgggtgccgccggctctcccggctcttttcgcattcccgatgttcttgtcgccccttctttggtccacaatcttctttctatttgtcggtttactgctgataattcttgttctgttgagtttgactcttctggtcttactgtgaaggactcggcaactcggcgccccctcctccgatgtgacagcacgggccccctctacacccttcggcttccgcacgccacatcttcttcgtcttcgtcacctgacacatctgctgtttttgccgccaccacatctactactacctggcatcgtcgccttggacaccccggacgtgatgcctttcttcagcttactcgtagtgccactatcccatgtactcgatctcctg

SEQ ID NO: 183399 - DNA, 374 bp, Zea Mays
cggacgcctgcgagggcgtgcagggagaagacgggagtctccgcctccgtggtgtcgtcaccgtcgtcgatgtccactccatggacgtagaagagtcgcttgcaggtgcggttgtgcccccgcgtatatttctcgtcgcagttgaagcacaggcctaaccaacgacgctcctcctgctccaggcgcgataggcgcttcactggctagccctccgtggcccgcagtgtagccgcccggtctcctgggcccacagggagggcgagacgcggtgctggagtcggcaggaggccgcaatgtgtcggtttggtagccgccggcgtagacagctccatctgctcgatctgtcgcgccagactcatggcggctgcgagcaa

SEQ ID NO: 183400 - DNA, 459 bp, Zea Mays
cttgaatgctaaggtcttccattggtagttgctcctcaggtaccctgaggcacttctttagctgggacacatggaatacatcatgtacatctgataggtgatcgggtaacttcagttgatatgcaacttctccaactcgctttaagatcaaaaaaggtccaatgaagcgaggagacaactttcctttaactttaaatctcctcataccccagagtggtgacaccttcaaatagacatgatcaccctccctaaactcccgtagtcttctcctattatcagcatagctcttttgcctggattgtgcaattctcaaattttgtcttatcattcgaacttgttcttccgcctcttgaataagctcaggcccaaagaactgtctttctccagtctgatcccaatacaggggagtcctgcatttcctgccatacaaagcctcaaatggtgacatcttcaaactgg

SEQ ID NO: 183401 - DNA, 484 bp, Zea Mays
caaagagccttggtcgcaacaggaggaactaagattgatccgtgcgcagcaagtttatggaaacaaatggtgtaaaatggtcaaacatttcccagggaggtaggattgaatggagacacctgtaagaaattaacaattgttcgagaaaacaaaacctctttatgttgtttattgttactgttgattttaattattcccttaatgagaattcagtatgcatcttcctgcttcaaacctcctatgagtggcactaaaactgttgaccccatttacaatcaggacaaatgatgcactcaaagaacattggagaagtcctatgaaaagaaaactggattcatatttggcctcaggattgctcgaacatgttccagacctgcaagatgatgtatcatttccacagacacagaacaatcaatcagatattccaaaggactgcaaagctgcatctgatagaaatagattttcatcacgtttatcaacagac

SEQ ID NO: 183402 - DNA, 289 bp, Zea Mays
ggagatgatgcggtgcaggaggtcgtgggaggaggccttggagacgatgtcgtcgacgtagaggaggtacgctttgtttagaccgcgacggaaaacgaacatggaggtgttcgccttagcctcgacgaagccctatgagagcaagaaggtggcaaagcgactgtaccaagcggggtgtctacttgaggccgtagaggttgagcttgcagatcatgtcgggatgcgccgggtccacaaagccaaccgaatgagtgcaatacaccgtcttcgtcagaatgccatggaggaa

SEQ ID NO: 183403 - DNA, 515 bp, Zea Mays
cagatggtgccattctgaaggagaaactgtggacattgattgctcaaaatgagccctcattaatctctttacagttggtaattctgttgttctgaattttccactaagaatactttgttatcccacaaaatgacacgaaagtgcatgtatggatgtacttcagcatctcagcacctttttatttattatttagatcctgatgagctacttatggaatatgcatttatgtaaactgtgtttggagaaataattcttagtggttaaaagaattctaaagggtgtagtgtaatcattcgtattaaatcttatgacttttaagatctttgatgatacctcgaaactaaatctctttgtattaatgcttttgtaacactgttttctcctgacagcttctcaaactagcagatgacgattgcttagccatgctggatcttcttcaatcactgcttgtagatcattactttaggtctagctctagcatatgaattgggttttgtgtgtcagaccagtacctt

SEQ ID NO: 183404 - DNA, 418 bp, Zea Mays
cacattgtcacaatggagcgacatcgtctcattcttcaacacttgaagctccttcaagagacccttcaaccatatcatttcacacactacaagagccattgctctatgttcagcctctgcagtggaccgagataccacagcttgcttcttgcttctccatgaaaccagattacctcccacaaatacacaatatccagaagtggatctccgatcatccctactgcttgcccagtccgcatcacaatacccttccaaattcatatgttgatttggtctaaaccacaatcccttgccaggggttccctttaggtatctcaggatttgataaactatcttcatatgcccagttctaggatcatgcatatacctactcaccacacttactgcataagcaatgtccggtcttgtatggcaaaga

SEQ ID NO: 183405 - DNA, 426 bp, Zea Mays
gttcatatcaggtgtgtaacattttaatgtggactgtagtctacttttgtttttttttctcgaaacacgcaggtgaactgtgccccatatataatatattaagaagatttaggaaaaggtctaaagaagaccagaaacaaaacagcttctttacggaggccagtagcaagcatacagaaaagaatccatcaaatataaacaaaggaacaccttagaaatcagttaatggggcagcgagagagcaaaggccttttgcctcagttgtttccccaacgacttctcatcagcagatgccaagattgacgatagacatggagtccttccattgaagacacatttatttcgatgattccatattgtccaagcgcctaggatgataagggaatcaagaccttctttagtaaggccagaaatcacatctgaaac

SEQ ID NO: 183406 - DNA, 885 bp, Zea Mays
tcaaaggatatcaattgtatgattgatctagacaccacttagtgaataccatttgaaggaataatattgcttggacatttctctatagatattgatgtcacttgaaggttttgatattcatttgcattgttatcttcttcataagtcatcctcatgagcagctcaatatgtgactcaaccaaatagatttgcttaagcctccaagttcgggttgaaccctctttaagcttcttcacacgcattaagcggttatcttatcgaggttgttcttgtagcttgttgcaatccaaaataaattaagtacatgggttcactttgctcatgtacaaactcatatgctaccactagtttcaatcaacaaaaataaccaatagtggtagaacatgaatttaaatctttcatttaatatgcatgatactattaagtatgtactatatgcactaaccgcatactagtagggatgatatgatcatgcacatcacaatgatacctttgctatgttggagtagagaatagtcaatattctttcgatttagttctccaatagcaatgtgaagtccaattgaatagcttggtgaagaccaattatcaataagaaatccattcttcatcagtatgaagttgagaacccatttaagatcaagtgcacaattgaacgttgtagttcacatgcatttgttcctccaataccacttgtatgtgagagaattatgaatttgcatgaaatataggaatatcacttgtaaggatgataccacttgttgagatattggtccagaaaattcctttgtttatgcaagactgctactcacggacggtccgcagtgggagctcggacggtccgtgtcctgatctctcggactgtccgtggcctaggaccggacg

SEQ ID NO: 183407 - DNA, 642 bp, Zea Mays
gtgtctaattggtggtgcgcataggactggctggatttcaatcgtgataatactgatatacggagactcattgctgatccagtgagcctattcgcgccaacttgattacagcctttctcacacaagtatggcgccctctgctgccgtcccgggtggctctgaggttgaggggtcaccacgcatggccaagttcctctgcagctttggaggcagtatccttccccgaccactcgatggctgtcttaggtatgttggcggcgagacaaggattgtcatgttgccgcgtgacatatcatatgccgacctggctgcacggatgagagagctctataaggatgctgatatcatcaaataccagcaacctgatgaggatttagatgcgctggtctcggttgtgaacgacgacgatgtggtgaacatgatggaggagtatgacaaggtcattgcgacaggggaggcgttcactcggctcaggatcttcttattttctcagcatttggatgatgatgctgcatcagtggatgtgcattacaatgtagacgagcgggaaacagagagaaggtatgtagatgcgcttaacagccttggtgatgttaagtcaccttcctcccctgtgtctgtggagcagctttttggcattgg

SEQ ID NO: 183408 - DNA, 576 bp, Zea Mays
tatattatagcagaaggaaaaagggccaaaaaggacctcggatacaagacgctccttacggaggccagaaacatgcatacacaaaacagtccatagggacactaaaaacaactctctgaagatctgccctaataaatagagagtggtgcagccagataggttaaacccttggcaccagcaagttaccatttctccctctcctcatgtgcaaactgcagaagtgtgagattaggtggtacaccatcaaacaccactctatttcgatgcttccagatcaagtgatcaaccacgctcctaaagaaaggagagaatccagacctttcttcctcaaaccagaaacctgagctgaagctccctcccaccaaaccataaaatgggtatcaccttgctgaggggctagactgtgcaggccaaactttcttaagatgttgtaccagaagactctagagaaaacacaggacaccagcaggtgattgattgtttcagattcttggtcacagagagggcatctggctgggtgattcatgcctcttttagcaagtcggtctgcagtccagcatttgttctgagctacta

SEQ ID NO: 183409 - DNA, 308 bp, Zea Mays
cgggtcccacatttcactccggaggtcccccggcgcgcggtggaggccggggatccgaggcgcctcccgttcctctctctctacctccccttggacgttggtgtgtttcccgcgcgacgccgcacagaggcggtgggaagggccaggcaagcaatcggagcgtagggcagtgggccccaccggtggtggccggcgggcgaggacggaacggagctgggaagacgcaggtggtggtggttgctagcactagtatatttgtggtggggaggagggaggttcggttggaggtggagcaaccgaaagacgaa

SEQ ID NO: 183410 - DNA, 360 bp, Zea Mays
gtattagtaagcatccagatattaaatgacagacagcgccaagcaattgcacggaggggattttccagtattcttgatatgagactggacgcactcggcagcagatcacatttagcttggctgatggaaaagctcgaccacaatgacatgacaattcgagccggcccagggaaggagctgaaaattacaaaggatacggtgcacctaattttggggttaccgaatgctggtggaggaactgcattgggcatcgatgaagctgttgctgccaacaatttaagagctgaacttggtctatcgaaagaagattttggggttacagctcttcaagatcgtctgaggaaatggtctgacgatgat

SEQ ID NO: 183411 - DNA, 448 bp, Zea Mays
tgaagcaggagaccatgactaagtgtcccacggaggtagcgcaggatacgcttgactgccgagaggtgaacatcttgaggatcatgcatacgaagacacacttgctaaacagcataggagatgtcaggccaggtgaaagtcaaatactgcagagcactaaccaagcaacgatacaagcggggtcgctgatagtggtaccggtcatggcagagaccatagcatgagtgtcgacaggagtactgcacggcttgcaatcagacataccaacacactcaaaaatatcgagagcatattgttgttgtgaaaggaagagtcccactgaatgctgctgaacagccacacccaagaaatgatggagggtaccaagatccttcatagaaaatgccttttgaagtgcagtgaaaatgcgacatagaaggtcctggttagaagcattgagaacaatgtc

SEQ ID NO: 183412 - DNA, 540 bp, Zea Mays
attggatcactgaaggtaaacactagatgggcatacagaagttattgctaagcaattgtgcattcctttggcatcccaatattctttttggtgatgctgttattaatttactatacagtgtaattgatgaaatctgcaaggttgcaagagcgcacttgagttcatagatttatctttttcattccacagttggtacgctggattcagttgactgtcatgttagatttctgcatttgaggtttattgcaatgtggaataatgagtcttcacaatagttttactggtaccctatacagagcaaataaataatttgtttagtaacagtttgtagttcgtctatgcctacagagagctgttatggatgttgtcaatagtataatggaaggtggcctacgcgttggtgttcttcttcaaggaaaagatatccaagacgacaacaagacactttgtcaggctgggatatgccacgataaaaagctaaataacatagacttcacgctggagtgcgagcgtgagcgcgagcctccctctggagtcatt

SEQ ID NO: 183413 - DNA, 1270 bp, Zea Mays
cttatcagataaagtggcaggcgtgctgtgtcgatgagaatgggtcctattttagtctcctgcccctgaacgatggttccatattttctgtccagaagtcctaactctaactgaatggccgctgcggttatgggaatggaagatggaacatactcttcttgctcgcagtgtctgttcctgagttcatttttatgcacacagaaggcttgtgtgtctatgatccgcctatatggtctgggtttgacatgttcactctattacttgtgttgtggcagtaaattacagaggcctggtgctgaggcttgtaggcagcatgaactgatgaatgagcagatgttgctgctgatcttcaccttgctgctattctgaacagaatcagcactagcagataacatagatcgtttgatgaattgacacaggtgtagctccaccttttcctattctgaatttgactttctaatggctttagttgagttttagttgagtttcaacttgtgtagaagcagtacaggttccagttcccctgtaacttgtagtttagagaaaaatagtatagtgctactcctacacggctagtacaaggcaatggctctgagcttctggatacaattttggatagtactatttatcatactttaactcgaattcgagtagaaatacatatattgtcgaatactaatgcaaaatggatatcgtaaatttgaatccaaattcagatgtctaaattttgaagataacatgttttttattgatagtttcgtagtctaataaaatcatcatagatgaaggaatttaaaacatagctatacaacaccgtgtataaagacaactaaaatattttaataattaaatatataaaatagaagaaaattatagataatataaattgagtactaaattcaaataaattttagaagtatataaataaaacaaaatactaatttagctgctttatccatctgtccctgccgtggatctgtttgtttagtgtttgcatgcgtgcacaactgcttgctgattccaaattaatcacatcaccaactccctatcggcatgtagtgcctccctccctttgtttgtttgggatcgaattgggcactgatacacaccactgatgcttgatatgcagtgctcccttcgtttgcattgccgcctatataggtcccatagttaacttcgtgtgctccctttcattctcctatggcagaaccggtttaccaccttccgtttgctagaaacggggaccaatttatcaatgttattatacaaa

SEQ ID NO: 183414 - DNA, 426 bp, Zea Mays
gacgtctctttttctttttcggctcgtcagcagaaggatcaagttgattggctcgggaagggcgccttgggcgagtactgacaggcttctgaatatccaaggttatatcagtttctgggggaagtgccaccaccaacgtcccagcaggagcagcatcagaagagtcctcagccagcaaatcaagcatagcacttatttatgcgtcactaggatccagaggcacctcaaaatggacctgccgttcatcatcaggaattcccccgagtgaagcaaccaagacgctaatttcttcagcagagggtcgcactctaaggcccaaactgccatcagtgacaggtgggttcgacacaaaaagagtgaaggccttgggaggaggcaggttctaggctgaatatgccactggggcaccaacatttgataccttgc

SEQ ID NO: 183415 - DNA, 333 bp, Zea Mays
gggaagtcaattgatggcttgacgaaggatcaccaaccggaacaacccgcaatgcatcagtgggaaccaattcagtgtcatcagcagaagccagaactctgtcatcaggtgcgctggcctctaaagcgactccttgacccaaggcttgggctatcgccatgcaaccagaatgtggaggagaagaccctacgtgaacatccatggaagtgtgggagggagaacccactcggacaccctcgggggctaggtcacagctcgcgctacccatccaagccgaatcatctccggcaacaccctcgggggttgggtaagcgccagcaccatccttgaggg

SEQ ID NO: 183416 - DNA, 544 bp, Zea Mays
gagtcccctcatccgtctgtagctggaggtaccacgactgggccacgccctcgaggtggtaagaagccatccaaaccttctcctcctccatgattcactgctgatgaaagtaggactcgcaacggttgacgaagagcatggggtccgacttgccgtcaaaacgcgggaagtcgatcttttggaaccttggtggccgatcgatgtggtgctggccgtcgtggccgccgctgccggatggcgaggaggaaggccccttgtccttcttcaacgactcgacgtcattttggagggcagcgaccatgctcgtgagcttctcgatcatcgcagccagatcgtcgttggttttggtgctcataatggaggaggccgacgacggtgagggtggagggctgggtggtggttgggtgacgtcgagggactgatcggaggtgtgggatcgagaggacgaagatcgcctgactcgtgataccaggttgtcaagggcctgagcgtttagagcagggggccctcggctacgaaggtcgtagccgcggttcgtcgtctt

SEQ ID NO: 183417 - DNA, 428 bp, Zea Mays
gtccttaccggccatgatgccaaggctgatctggtcaatgaatcccacatggatccggaaaaaataattgtttggaatgttagaggtcttaattctctagctcgacagaattctgtttgtgagctccttaattgttatggagcggatataatctgtcttcaagaaactaagatggcacaaccttctccgcgtgctctcctctctatgttggggtctgattttaccggttcattggccctgccttctaatggttcgaggggtggaatccttattgcttggagacgacacttggggataactggagctaccaggacagacatccatagtatttctgtgcagttttgttcagtggagggacaccagtggtggcttacttgtgtgtatggacctcaatctaatgaagccaagattgaatttctgcaagagct

SEQ ID NO: 183418 - DNA, 362 bp, Zea Mays
aatttggtgtggtgttttgtttattctcgttggaatgttagcataaataatgctattaggtgttgtgcttgtatcggtagaatcagctctaggcccctgttccaccgcatgtattcacatacttgcctcatcttgtattgcaatttgcactgaacacttagaggtgtcttgctaactttattgaatacgcagttatttctctctttctacatttcccaaatggttagcgtgatcatagatcgcacaccctgtcttctgttccacagttccccatctcaatgaaccattgtcccaagtcttccatctggctccaattagacagcgccaaagctggtgcctcaatccatgaagccacttttccc

SEQ ID NO: 183419 - DNA, 615 bp, Zea Mays
atttctaccaaggggtttatgtggggtgagaatagaagtaacacaacttttaatttgttgtcaccttcaacttcatttctttacgaggatggcaatttaggtattaatactacaactagtgcatctgaaaaaccagacattgttgagctccttgacaagagtttcagcaaatatggtataagtgactcagagaaaaatcagatacttgcaatttctgatcttatggctggaatcactgatcagagccattcctctccctacaaaaatcttgacgaagcaggaagaaggtaagggaactttgaaatatttacttatgaaaattcattggtattgcattacttgaatctagagactagttaagtgtttgaatgagttttgtactatcatatgtggttaaagtcacactaattgatattttatatcaaggttctgggttgctgtgcagttcgaacaattccatgctcttagaagatctgcagattcatccagtaatgaagggtgccgtgttgattctgcttccatagcctgggccttccaatctgattgtcaggatgatctacttaattctgtgcttcctgcagagccaacctggccagagatgcgaaagcttggtat

SEQ ID NO: 183420 - DNA, 334 bp, Zea Mays
attgtcgttggtgccatttgggcccgcggggtcatttctgttgcctgttgttgtggccgacgattcgagttcatcgtctttgcactgcacgatcttttgtctgcttctttgctctgattttgaatctaacttcttcccagatctcgtatggctgcctgtgtctgcgacttcatgtgatcatttcgaatggcctcccccatcgacagtgcgatggatagtgtgagcatctttggacttcgatgaccagacgctgacgcactgacagagtcacagttcattgcgcactggactctcccagatctgctctgattcctcatcagtctcagggcttcag

SEQ ID NO: 183421 - DNA, 839 bp, Zea Mays
tcaatgaaaaatatgacagataaattctgaatggatgtgtatgcatctcaatatcacatgtacctatacatgttttactgaaggtataacattccaccatataaatgttcgtgtatggcagtgcaccccgtcattgtggattacgttgatctgaattttcagttgcagttttccttattgttgacattgttctatacttgtacgagttccccgaaacttctcttgcagccaactttcttattatacaatcccaaatgccttttgtttaattttagcattttatgtaaagcggtcttttcaaggcctgaagtttagcaataaatcacggtattttttataaaatttaatggcttgtgcatgtatgcttcactatttgacaatagaatgggaattgggaaccatgtttttactgtaataacttaaggaaaatgaccttatcttcccgctctagtggcactggctggttcgtgtgtctggttatctggtgtatgttgattacttggtattaatgtgtgtagacagtagtggtgaggactgatggtgtatatttgggtacccctactgaatggacatgttgctctcatacgtgttcaaaggaaaaaaaaaaactcaagaaacatgaattgcaagaacagtataatgcagcacgtattgctttatggttttgatttaacaaaagcaaataatggagcatccccacatggtctttttatggatgtgttccctgccaataaaatgttgttgaaatcataagttcatacaaagataatatagtaatactcttcaaatatttaagaagatatagtatattcagttgttatacaaatatgttaactacg

SEQ ID NO: 183422 - DNA, 754 bp, Zea Mays
ctttcctgttggttctttggaatctcgtcttgctcacttcatctgccaacagtgtgaagcatcattgcaatttctcttgttgttgtgccagcaaaagctgtttcgagatcggattttaagaaataaggtctcacctatctttagaggcatataatttttacgcgattgaggaggaaattaatacttggtgtgatttccttttcttttccgtttgatgataaaaatagaagctaccatattgactctgatttcccgcactgtagttcacattgttcatcttccttctagtattttctgtgtttggaactcaattcaatctataatagaagtcatcattgttgactatgaccccccctggtagttcacatggttcatcttacctctagtcttctctgtgcttgcaacttgattaaattgaataccgtgtcaaaccttatgtactggcgggtgaagttacattttttttgttttttcttaccatgaaagttacgtttttgttgaaatatgtagttggccaaatgtgtaatggctactgcacagttgttaaatacaatgcccttggaagattgtatgttaacgaatttctcgcttaatgcaggaactctctagaaatggaggcatactgtcactttctcacactatactgaagttagctgtccctgaatgtttgaagcaatcaaccgatcttgttgcttctatttccaggctcaaggcaaagatactttctattgtaagttaactgcagataatttac

SEQ ID NO: 183423 - DNA, 502 bp, Zea Mays
ctttcacagaaactcggccacgactccgccgcggggagctccggcgagcccatgctggattggccacggcggccgacatagtctatggcgacggcatcagcacacccatgaaccgaagcaaactcagtcacgtgctcaacccaaccgcgaagattctagacctaggttaccgacgacggttgcagaagggctggaccgacgatcctactctcgtgaccaccgcgaggtagagcttgaacgaagggcgtgggaagcttcaacaacttatgagggtctcggtgctcgcgttaagtcgatcggggacaacgtaggttaattggtccacgcggaagctgtccacgacgccaaattgagacgtcgcaaccccgttctatgcaacatgcaacagtagagctagaaattccaactgggtgagcttcactaacctttggagagcacggaacgagaaccacatgagcatgcaacggtctggaacgctttggccacggcgaggtggtggttt

SEQ ID NO: 183424 - DNA, 316 bp, Zea Mays
cacaggaacaaacaacagcagacgtacagcggtgcaggcgcgcgcattgccctaacgggagagatctgcgcttcagggaatgaggtcaggaggcagtggggtggaccttgggggcctcgtcgatggcagaggagagctcggagaggaggtcgaagcagagcagcgcgtcgggggtcttctgcctggccgatgccactacggactccagctgggccaccagcgcgccgaaccgcgacagcggtatgggatccccgccaccgacgcccttcgccatgggagggtaggggcctagagggtgggagagggaatgcgtcac

SEQ ID NO: 183425 - DNA, 2576 bp, Zea Mays
ggaattatttattgccaccgcatcgagatttatatagtacggggaaattgattgctcattcccctctgcttcctccatccactgatccaccccatgctgcgatattttcctccactcgccgccggggcagcatttgctcgcgatttataacctcccctcgccttcgcctctcctttctgcttgtctttttccccagtggggaggttagcacccggcacaagcaaagcgccgggttcttgtcgcagtttctgcgcgctcgctcgctttttgcccgtaagatctgatacaaagaggagagggagagccaagagaggagaggttctcgtgtggaattcttcggcgatgaggtccgacgcccgtctggattcggtggtcttccagctcacccccacccggaccaggtgagagcatcctatagatctgctcatgaagcggctttaattcggcggattgatcgttctttgggttttggtttcttgaatggtagaaaagttggtctttgtgacggtttatgtgccgttcattttgatgcttggtacttggaagcttccatttgaagaccactctgtctactgcactgtcctaagatggttttgtccatgtcacgatcggaatttggcccaaaaaacgatttcttctttgttggtattgttttgttgggattggttgtctgccgttagctgtaaaattatagtagcagatccggcgattcttgcatagtagtaactactagacagatttgttatgttataaattaaattaaaaaaagtaaaactattagacggagtaaactactgttttgttcaaggtctctgacggaagttctgttttcgcttttcaggttcgatttggttctgatagcgaatggccggaaggagaagtttgcatctggtttgctgaaaccgttcgtcgctcacttgaaggccgcccaggatcagattgccaagggagggtactcgatcacacttgaaccaagctcagggttcgatgtgccatggtttacgagaggcaccgtggagaggttggcgtctaagatttctatactactgtagtacagttgcttctgccattgcctatttccctgttgggtcattttctcgtgacaactcttcgcagatttgtgcgtttcgtgagtactccggaggtccttgagcgagtcagaacactggagtctgagatcctgcagctcgaggatgccattgctatccagagcaacgatagtcttggattaaaatctgtaagcgcagaagatttgtagcttatggatatttgttgtgtgtttctgtagaaataatgacatattcttgcttcaccatttaaaaggtcgaagaccatggaagaaagttgactgaaagcaatggaggtagtatgacaccgcaccaacctgattgctttctgtgagcatgttgcatagaatagtgcatgcctttgaggattgtctaaatctcaaacattatttcgttggcctaccaaaaagaaaagcaaggtgcaatccactatgattattttagaatctactcatcatggagtttgatgcaacatcacatcaagggccattattaagttggcacttatcattttaattcccaaaatgttagaatctaaccatcatggagtttgatgcgacatccactatgatttgtggacaagctttactatcgtctaatgttatgaagcaagtatgttgaatttgcagtgtgatcaaaataacttagatatatagctatattatttttgaagtcctgaatatttagtaatatcttatttccaactggagaattctggatggtattatgttctgcattcaggggaggactggaatggatcgagctgtttcttccttttatttgccttacctgtcacagcctgccatatctttttatttatttctgcaacatgcctgacactgtccatcaactaataggtggacgtgcaaattatgatcctgattcagccacagcaattgttgtctacaaggtatgatcatttagacaagccaaattttgtttgtgtaagtgtattgtggtacaacactgcagtctgattgagatatttgatcaatgacagcctggatcaaatccaacgccacaaattcagaatgaaacagcagcacatgaggagaattcaaagtacttgcacatctcagtttttcttgtagaatattatttgttaagtcttcacattgtttgtggctaataaagctgcataaactcatactaacctaggaaatcaggtggcattgtaaataaaaagaaataggcacccacttttgactccaataggatttgtacctggatggtgggggtgtctgcccacagcacccaccaactgaactaggctcggttcattaattaagctgtttaaggtcatactctacaaaatgaataatgaattaaagacatctaatggagaaatatatgcaaacatcattattcattcactgttctattgtctcggtttccattacgagcagcatatatactctgagatcatgtatctttctacagtagaaaactattaacagaactgcattataaattgcagagttcaattgctcagagtgcttgaaacccgca

SEQ ID NO: 183426 - DNA, 320 bp, Zea Mays
tgaatgtcgaagaattggcattctgcatcattgaagagagactactcatgcaccatgtttttagggcactcctaggccatcaaggatgcttgttagcaagtgtgtggaagttaatcactaggagacgaagttgttagcaaggagggactctatgaggttcgatagtatcacatatgaagttgagggttaggcatgtcaatcaaagtagatgatgttgccatccatggatcatccttaggtggttatacttttgtatggagtaagtgatgaaatgtagctctaacacctcttgcaccacttgtctgtcaatatgagtggtg

SEQ ID NO: 183427 - DNA, 573 bp, Zea Mays
atcaccatgaacctctctgtactaaataggagtaattcatctgcatgttttctatgcttgtggaataccaaaaggtcatgtaaatccaatcatcttctccaatagatgacattgctatctattggggaaatatcagcggtacacaaaggctcatgccatgtagaacatgtttctttaggcctttgtggttgggtacaactaggacttgctggttctctgtttactatagcatgaaaattctagacaatgcccttgcagcaagttattacattgatagtctttgtttgatttcaaaggcaggccatagtgttagcatgtgtttggtttggggaagaggagtgacgggacggacctaaccctaccgtttgggacaggttcaacctgcttcatgttcagtttggaaattgggttgatcccatgattttgtttgttggaggtatcaatctatgggtttggaggttgggttctctactcttttctttctcctctgtacatgtagctgcgtactcagactcccccaccgccacttgccatccagcctgttacttccgagcaactcacgggccgccccag

SEQ ID NO: 183428 - DNA, 507 bp, Zea Mays
gattcctccaacccagctgctcgtacgaagcgggctccctcagggtctggaggccctgcctcctctgatgagccacctcctcagcctccacatcacccatcctcctctcgcgccaccgctgcctcacgtccgatggaccgcagcgggagaggaagtggtccgggccagggacggggtagaggccggggactttccattgtctggccaagggccttcttggtgtcttcgccatgtgctgcacccgggcggtcgaggagtctgtgcgccgtcgcaggaccgatcggctgcatgaggattttctttgttatgcagccgagactggtcatcctctccctcccgggtcccctccatctccagcccctaccttccccgcagaccttaatgagtggcaccaacaggagtttggtgtgccattcattaccccggaggatgaggtcgaggactatgatgaccctttctacacctcagatcctcctcatccctactcgggtcagggacccactcccg

SEQ ID NO: 183429 - DNA, 308 bp, Zea Mays
aggatcagaggacaatggtcggagactccagaggcactgctatagagaaaacaatccgggaaagcctcctcccaacatgcagtgcaaaaaacatggtccagcttaacaagggtgggaactatcctctgattggaccaggtaaatcttctaccattcaaatgtatctctttcagatccaaggagccaataagacctctgaaatggcctaaaagagacctgttaatattagaattattcttgtcttctgacttgtaaatttgattaaaatcaccagccaccatccatggccccacacatgtattcctgat

SEQ ID NO: 183430 - DNA, 420 bp, Zea Mays
gtcgtgttgaagacataactgtcagtggcatagttaggggaagtataattcatattcatagagcaaggactgtgactattgcaaaggatggcacaattagtgcctcagagttaggtgattctttgttatgatttaatagttaatatttaataaaggtgctaaaatatgctatcttagtgacatgactatttaaccatgtaatttgtattctttgataggttgcaaggaaggcatcggaaaaggaaagtttctcaagtatggagctggtggtggtgctgggcatggaggccgaggtggcacagggatttacaatggaatgagaagtgaaggaggcctagaatatggcaatgctgatcttccatgtgagctaggaagtggtagtggcggttctgctttgtcagcagataacactgccggtgg

SEQ ID NO: 183431 - DNA, 308 bp, Zea Mays
ccctccccgccgcccgccatgcccgccggggggtctggttcccatcggcatacgcctgctgggaacatcgtcggcgatccgtcagcggctaccatggatgctccttccttgtcggccaccatgcccgccagcaggcctagtccccaccagcatacatctgctgggaatgttaccggcgatctgccaacggctgccgcagccccatcagcgtcggcgccaagcccaccatcggtggcggccgagggggttccagctgcatctgcccccactgtgcaggatgacgctggtgctgaggtggtgccatcggg

SEQ ID NO: 183432 - DNA, 498 bp, Zea Mays
gacttaccagaatttgctattcctattcaggtgcttcagacccgaggcgttaccaaagggagtcgctttgtgcaacaagtcctcgtggagtggtcaggcttaccccgtgacttggctacatgggaggaccttgaagctctacgccaatgctttccttttgttcctgcttggggtcaagtaggcttaaagggggagggaatgttacaaccactctaccaccggcggtcaatccacagaagccgccccttcgtcgcgagcctagaagaagactgtgtcgtgcgaacgtccgactggcgggcccggagtggaagtgacctgtgcgtgtctgtcgcgtggggctgcgtccccgtggtgtgtgcctctggctgtcactaataagtagtgaactctgccttggacgaggtatgaaaaatctgaagaatagaaaactctaaagagagctccctgttctctcctatctctgtctcctacctccatatcccatactctaacacctcg

SEQ ID NO: 183433 - DNA, 689 bp, Zea Mays
aagccaatggtggtcactgtttagtggcgtggggcaaggtcactaggcctaaagttctgggcggccttgggatcactgatctttggcttttgagcgtggcgcttcgagctaggtggccttggctccagagaaccgatcactctaagccttggtcggttctccctgttcaggcatgtggtgcggtggaagccttgatcaatgttgcagttgtgtctcaattgggtgatggacaggatatcctcttttggaaggatcggtggctgaatggtagaagaatcagtgaggtggcacctgaggttcttgagcatgtacctaagtgtgttgtttccaaaaggctggtaaaagatgctttaacaaatctgaattgggtggctgatataaggggtgcgctttcagttagggcgcttgcacaggttttggatctctgtgacttgctggagggcttagttcttcaacctgggattcctgataagcattcttggaagttcagcgcgtcgggggattactcctctagttctgcctaccaggttcttctccttggagctgttgaatttaggccggctgaacggatttggaagacctgggcaccaaggaaatgcaaattttttatgtggctggttgtgcatgatagatgttggacagctgacaggttggcaaaaaggggaatggatcatcccgtctgctgtccg

SEQ ID NO: 183434 - DNA, 271 bp, Zea Mays
attcaggataacagggtggggaaaatatgtaacctgaataaagattcttaacaattaccattggaaatgacccttggcttcgactgggtatgatccaccccacttccttgttcggtcatacttgcattctcatttgttgccacgatagcaccatgacattgattcctacattgtactgatggaaacacacgtttagtcggactacacgccaacaagggtcatgctgcatccatttaagataggatagtaatcattattttcaagtcatccg

SEQ ID NO: 183435 - DNA, 372 bp, Zea Mays
gtcctgatgcgtagttagtttgagatatgttgcttcatgcatcacatggattaagctttgttgtgagcagccaggtgtttatgtgttctagctcggaactgaactgatccctaagctttgttttgcctaaaaggggagttctggctgtagtattgtctatcgatttggtaggacatcagaaatgcacttttatgaggaaccaacgcttatggtttacaaggccagactataaatcaatgctacagactggtattttaaccgtaaagaaaccaggttaagttcgtcttagcaggaatgtagtattgtaagcaaaagttgtcatttcaaatgtggatttttatgatagcataagataagagaatatttaagtat

SEQ ID NO: 183436 - DNA, 307 bp, Zea Mays
cggcgtccaacgcggcgctcgtcgtgtcttcagttgggtcgcgaggagccacgctgtttgagagcagcgcctgccctgttctgcgcttttatggtggcatccggcggcgatttcgggatggaaatggcggggatgacggggaggagcttgtctggccgtgcgagcacgagtggcaccgcaagttctgctacgtgatgttcacctctggttctaccggaaaaccgaagggtgtttgcggcactgagaaaggtaagccgtgctcttgttggggcctggttgcttgagataggcagagtgtataatctcg

SEQ ID NO: 183437 - DNA, 679 bp, Zea Mays
ggatggtgttcaagtcctacgaggaggtgctcaacttctacaagcgctatgccctgcgcacgggcttcggcgtctgcgtcaagaagtcctccttcaccaaggccggcctctgccgccgcctcgtcctcgtctgcaacaagtggggcaacggcaaggaggacgcctgctaccaggccaggcccacggccaagaccaactgccaggccaccgtcgtcgccagactcctgggggacgacttgctgcacctcacggatgtgaacctggagcacaaccacgcgctcaacccatccgccgcacgcttcctcaggtgctacaagacgctgcctagcgggttgagcaaagatctcgtggtgagggctgccagaggggaatgctcggtggcgggtgacatcgatgtcccgatatttgatgaatgggggcggcttaagaccgggcaagctgatgtcctggccatcaacgctttcttcacccagatgcaggcaaagcttccaaactccttctatgtcatggacttctatgtggagggccatctgaggagtgttctctgggctgattccagatccagggcagcgtatcagtatttcagcgacgctgtttggattgatacggcatgcttaaggaacaagtatcatgtcccgcttgtttcgtttctgggtgtcaatcatcatggtcagcttgt

SEQ ID NO: 183438 - DNA, 817 bp, Zea Mays
ccttcccagcccgctgctgactgcaccgattcacccacagttggccttcaggcaaccctagcgtcgccgatccgccgctccggcgagatgccggtgggccacatcgccgtctctcccgccgccgtctatggagaacagggatagcttcactcgccccccagcgccctcctacgcccacggaacccaaaccgctaagggcgtcgcggtccctaccggcggggacacggccgccaccaacctgacgtcgtcgtcagggttgtcctcgtctctcacgctctcccctccccacttcctgcaacagattcatgcagctgtcaagcggcagaggcctttcggtgagtggattcggctatggattcctacccttctctgatgttgtttccgtctagggttctagtttatgtttggcgcttatcctcggcgaatctaattatgttgatgcattttaccttctgtatatttctgatttactgggtagcgtataaaaaaatgtgatggttgcacctgatttcgtggttttgtcactgtcgttgagtttctaggaacttcagttatctgtgatgttgtctcgagttggtatactgtattggtatccaaatgaattatgtcagatatgatttagatcagcttctaactgaccttgctccaggtccaatgcagtctaaacttccaagagcaacacgggtcctggtttccggaggtgagcgtgcaaataaaattggtgccaacccttctgtttcgaaagaccaggaacgaattgttacgcagcctcagagaggcatgttgggaccctctatgctgccaaatgtgacgcctg

SEQ ID NO: 183439 - DNA, 539 bp, Zea Mays
cgcgcccgccccggcctcaacccttcgcgcttctcttcatgctcaggcggcggctctcaccagcatccgggcaaccgtcaccgacgtccttgcgccggactctactcagtacctccggtggcgtgatcaggtcttgcagaccctccaccggtacgccctcgccgaccatgtcctctcagcagtctctgacccatcagaggattggcttctgatggacgaggtggtgctctcctggattcatggcaccctcacggccgaacttcaggacatcgttcgcgtaccggacgacactgctcaccggatctgaggtgccctagaggctcagttcctcggccaccgccagactcgtattctgtacctcgagaccgcctttcatcagcttgctcagggcgatctctctgtggacgagtactgccgtcagatgaagacgatggcagacactcttcgcaccctcggggcccccatcaccgacgagtgcctcgtgctcaacctcctccgcggcttgagccctcgcttcgatcgtgtgacgcccatcctca

SEQ ID NO: 183440 - DNA, 287 bp, Zea Mays
catagatctaatcctagcctttgctcagaagatcaagggttcacgacgctctgcccgaacacaacgccgacgacgacggcaaccccacctcagcggcggcgccattgccaggatctaccagcactcgactccacgcctaaacctcgatccgaaccgggatacacatagcaagggcaatggtatactactgaaacccgtactcaccagcggtgacgccgcagaagcctcctaccacggagttccctgtcacgcgatggagtttgaatgaccgcgaggacccccggttg

SEQ ID NO: 183441 - DNA, 691 bp, Zea Mays
cttgataattggagtaatgaactcaaccaagaaagatggaactttaagaagtgatggccagaatgagtgaatgaaattgatcagcaaccctttgatgtgggaaccatcgtgatcctgaagtttgtttgtcaaagcatgagcagacaaaacttgagtttgattggttgatatagaattggagctatatgccaaacctgatctgtcattatcatgagatggccgtatctcaaacctttggtgctatcatactgctttccatgctgcaaaccaaggatttgctttatgttctgaatttcagcgttgtccattatctgcttgtggtttgcctctctgacattcaatagttttcccctgagaggaaatacaccatagtaatctctccctacaacagctatgcccgacatctgcagaggggggagtgagtgtctcatgatttcagttcgatatttgaggtatacactgttatatagaaactatgcattactcacagcaagagcttttgcagagtcaccctcagtcagaatcaaggtgcacttgtgagagtccttcccaccagcttcatttgcatcctcaagcttagggatgccagaaattcttgacttcttgcttccatcagtcttctttaattctttgctaagtttgaaatcagcccaagagaggacattatcgattacactagatttctcaactg

SEQ ID NO: 183442 - DNA, 380 bp, Zea Mays
caccgacgccgaccttttcacggacgaaatggaggttgatctctacgtgcttcgtgcgttgatgttgaataggtttggtggagaggtagatggtgttgatgttgtcgcggtagacaaaggtgcatcaggacaacgcacagtgcagtttctggagaagctgacgcaaccaggaagcttcaacaatgccattattgacggcgcggtaatccgcctagtgctcaagcatgagacaacattttgacgcttggaggaccaggagacaaggttgccactgagaaacatagcatagcccaagctggattggcttgtatccggataactcacccagtcagcatcagtgtagaagacgatcccggaggtggagaggcgaagaagcacat

SEQ ID NO: 183443 - DNA, 336 bp, Zea Mays
agatgacagcaggagggtggatacgatgcagatggggagcaacctggatgggagcttgctgcggagatcatcatcatggtgggcatcgagaggaaacaatgcattctggtggccagcgagggaggacgacgacgaggaggcgctgagatgggcggccatagagaagctacccacctacgaccgcatgaggaaaggcatcctgacagcagtgggtgacggcatacaggaggtggacatccaagggctcaacatgcaggaaaggaaatgcctcatccagcgcctcatccgcatccccgaggaggacaacgagaggttccttctgaagctgtgtgaacg

SEQ ID NO: 183444 - DNA, 311 bp, Zea Mays
tcggaggaggaagaagagtactggcgcaatggattcgtggcttctaccgtggcggtcattccggcgatcaacggagagtcactaaggcttatggcgatgcggtggagatactcaggcacgtggcacaaggccggaaggcggctctcgtcggtgaacttatctgccacagccacagagcacgaggggtacggcggtgagtcactggagttatccccaggtgcatggcttttacttggcggccttatcgggtcatcggcgacgtgaatcacaacggcggtggcacgaatcacgacgaagatcggtcgtcggcg

SEQ ID NO: 183445 - DNA, 349 bp, Zea Mays
aaacaattagtttgttactttgttataaaaaacactgatgtgcccatgttgaagccttatcactgagtaacacaataatttgaacttgctttattcatgttcggatggtaaaaaagaagccccatcacatcatatcacttctagattgagtgtacacatttgaaggtgaataaactgttctgaattctctcattgaaatgctagttctgcatgatgtatataaatactttgactcctgcgtacttatctggcatccagtggatcagtgatagtatcaaattgatgctgctctagctcatgaaatctccaaactgttggttactttatgttaatttgggcaggaatactg

SEQ ID NO: 183446 - DNA, 1569 bp, Zea Mays
agaacatctcttgctgaattggaacagaactactctgtgaaagttggcagaattactgagcagcaaatagctcttgaagaagctgctgcaagaggtagagaacatctatcatgggaagaagcagaggagctagcttcacaggaggaaatctgtagggctcaattggaacaattacatgaaacatggagacagaaagatatgcgtattttgtcacttatgaaagtagaagacaatatcatgaattcgctgctttcttctaaacagtatgtttcatctttggtggaccatgatcaggaaagtgagtttcattatggacaaattaaggccctcctttcaatcttcgcaaagccctttgctgacctggaatcgctggaccatatgctatcatcatctggcatgtttcctcacatagacaatcccatttccaatattaaagatgctttgtctttgggctcttcattgtctgacgtggtgtggcctttagctggcatattgaaggatcatgctttttttgtttgggaactcaatcttcttgattcggttcttgttttatgcatgcgtgagatttcatcttctcttgagcatggcattaatgccaatcaactttacatgactcttaaaaagaagcttgcgatctatgtggaaaaacaagttttccggtatgttacagaaaggattgctcctgcgctcaccctaaagttagatgaagaaattagcgctttgctgcagctgagtcaaggaataagagcatcagatcagcctaaaagagattctgctgccgttggaagggttgcattaatgcttgaggagtattgtaatgcttatgaaacagctagagctgccgggactgcagtttcgctaatgaaaaggcaattaaatgagctcactgaggctctgcgcaaaattattttggaaatagttcaggttgaatggctacatgatatttcatcgtctcatgcacagaaggtgaaggttttgtcacaaaatattcttagtgatgataagttcatctctttgatgttaaatctgagcagaagcaatttgttagataagatccaatcttctgtctcattaataacaaggtcaattgaagtcctgcaagcttgtgaaagcatttctgtttcggccgaaggacaacttgagagagcaatgggatgggcctgtgctgggccaaatacttccagtgcaggtggttcaacggcaaagggttcaggaatcccccctgaatttcatggtcatctattaaaaagaaggaaattgcttcgggtggttcaaaaagaggcatctgatcttgttaaagtttgcacctctgttttggagtttgaagcatccagagatggactttacttcgttcctgaggataaagcttccgaacaatcttcggacaaaggcagggcctggcatcaaactttcttgaatctcctggcacgtctagatgcggcatttcattcttttacatgtacgttgactattcatcctttcatatttccattaaagttaatactcaatgctgtccatgtgcacatgggtgtatccaaatttctgcggagaatgttgtgccccactcaa

SEQ ID NO: 183447 - DNA, 307 bp, Zea Mays
ttcaccaaatttcccgtttcgagcgatcgtttccgagccgagtgccctaatttcattttcttcgcctaaattcaaaccaagcacacacttcactcatattcacccatataaacctattcgtgaagtatcggctcaattccacgtcatttcgtgcctcaattcgaattccaaacctcctatggcactttttatcgttcaaacgtcgttttcacgtcgtttgacctctcgatcgccttatctctcgttttctgtgccataattatctgtgtatgtatttattcacatttcatatacttatgactatgtg

SEQ ID NO: 183448 - DNA, 1334 bp, Zea Mays
ggaaatggagatcaaattgttggagcgccaacagcaactgaaatctgaactagtatgtgccaatactgtaatatcaaccttccctatattttttacttgctgccgtgcggtttggatccaatcatcttagataccttttcatttctcattatgatttcccccccttttttgaagagttcatcatggctagggtctttcattggcactgtaattggaaatatcaagttatccattggcaatattcatatcagatacgaagacgtagagaggtaattcagttctgctcagtgcatttatcctttaggatgcatattgttaaggagtataagagcaccatgacttgtttcctgtagcaatcctggccacccttttgcagcaggtctggtactttcaaagctttcagcagttacagtggatgaccttggcaaggagacttttgccacaggtggtgatttggaccgagtgaaaaaggtacattattcctacattttatttccatggttagtttgataactcatggctgatgtcaacttctggagtccagttatgttttttgtgatcttgtagaaagcaaagcgagcacacgaggaaatgcctattcttctggcatttccttgataaatctatcttccatctccaagaaatggtgattgctcattgtctacttagtcgaatattagatttgaaagtaaaaaataacaatagctcattttttattttctaattttggcgatcaattaatttgatttaaagttttcaggacctagtaatgaattcttttcgcttcacacatcaagcatttttcacatttggtgtgcttatttgttttagtttgaccttttttacttttgatcaatttgcgtgacttctttaacttggcattttgcagtctgttgaacttgagagtctggcggtgtattttgactctgatagcagttcttggattgtggataaaccctgggaggatttacttccatcagagtggagtcaggtgcctcccaattttgtttgtgcgcaaataaataccctgggtttgagagaataaattggcatggagacaattacctttgtcaatttctgtttgaaaaaacatgtggtagagtgtgaatagacgcagtgctgtaatgaggttttgttgggatcttttattcttctgttgcttgcatccagcaacctaacaaatatttattggtttgtaaactacattttcaggtttttgagtttcaggagcaggatggttccagatctgcttcgaaaaagcatgcctacattttacagcctgtatctggcaaagcaaaatatacaaagatacaacttactgaggcaaagaaaac

SEQ ID NO: 183449 - DNA, 1208 bp, Zea Mays
gctaccctcagggaggatgaggaaaaagcttctgaggtgcaaccggaaggagatggtgctgttttggtgcatgaagaaagtaatgcaccggaacaacccaaccaggaagcttcaaatgttgttgctagtgaggtcttgggaggtcactcttctgacttgcatgaaattgaggtgatattggagggagatggattgaagattggatcccatcagtctgatgttgttttagaggttggagctgccaccccttttctaaaatctgagattcaaacaagtcagctctgtatttatgctgctgatggaatcagtgcagtaagcagcagttgggtatatactaccgacaaaatcaacgcgctaagcattttggaaagtagtgatgttgccttcttttatccgttattggtattaactcttaagtagcgtgaaagaattacatacatctctaaggaatacgctctttgttcaaacctgcaaatgttatactgcttctggtgctacgtaccttaatggacgaagtatccgtcatgcacttgtttatcagttgcttcttatgtccgctagctttttatgacatcctagtagggtaacacctcggaatgttatgtctgatatatttatagaagtcttggttcttttctgttattatctgttaatgcgtattggagacttgaagcgatgttgcaattttttgtacagcgttgcattcttactgagacgcgctcactaaataaggcagtggaaagcatccccatgttggaaactggagagcaagctactggtggttcaaagtatttcactatccgttgcatattatttatgccattagctatatagattctgtttgatgttgctaagcatggatttggtatgtcagctgattctgtagtcacttctgtattgcagccagaaacctctactagaattgccaaatagcgcttgctctactgctcatcatgaagaggtaataatcaaatgaggcttccatgattttcatgcagcatatgcgtttttcatgttttatttagtgtgatataagtaaccatgtgcttgcagttaatgtttcttttatcctcctccaggccagcaagtcggtggaagatggtaattctattgggattcaaggtgcatgcacttcaaggaatactgaagctatccaatgtgatgaaacatggtatgatgacaacatttgtgttgtttgcagaagtagg

SEQ ID NO: 183450 - DNA, 358 bp, Zea Mays
gtttgaccttgatgagacattggttgtcgccaatacatcacggtctttcgaggacagaattgatgcacttcaaagaaagctgagcaatgagactgatccacagcgtagaaatggtatgctatcagagatcaagaggtaccaagatgataaatccatcttaaagcaatatatagaaggtgatcaggtctatgatgacggtaaagtgtataaagcacaacctgagattgttccaccattgtctgataaccagcaaacaatgacacgcccagttataagattacaagaaaaagacattatcctgacaagaataaatcctctggtatgtgctaaattgcttgaacttgctttgggcctgtcc

SEQ ID NO: 183451 - DNA, 1080 bp, Zea Mays
gcctctgttggcattggaccgggtctgcaagccggtggacgctctccttcctcagcccgtgattcgaaggagtagaaggaaggctcctctgcctcgctctctgcctcgccgcagccgacgtgttgctggtgctgcgccttgttctccagggccggtgctctctgctgctcagaaaagggtgatgcgtcatcttggctttgatgataaggagatttcctctcctaatgctcaagataaatattgtaagctgttcaagccttcgccctctggttctcatgtgtgtgccatggctgccatctttggctgggaatttggagatggagagcaggtgaggcctgcggaggtccttacaactctgtaagatttgtttttgtcagattggtcgttctacttcttgtgtcctcatgaatccttcggctattcttttttggaacgtgcgtggccttaataagattgatcgccgtaatgctgtcagggatgtcatcctctccagtaatgctgatattgtttgtttgcaagagacgaaggtcgctattttgacccagcaggtgctcctttcagtttttgggactgtttatgataattacgtggctctacctgctgttggcactagaggtggagttctggttgcttggaaggggggttcttgtcaggccatcgcttcaagggttgataatttctctgtttctgttcttttcgctgagcctgaaggtcgtaattggtggttttctggtgtctatggtcctcaaggcgatgatgaaaaagtgttgttcctgcaggagcttagaaatattagggctctttgcaatgggccctggctagtggcaggtgattttaacttgatttaccaagccgctgacaagaataatgccaatctggatagggctatgatggggagattccggcgttttttggatgataatgatctattggagcttccgttgttgggtcggaaatttacttggtccaatgaaaggcgttctcctactcttgtgaggttggaccgtgccttttgctgtgatggctggaatgacatttttcctgatgctgtcttgcaaagtttggcggctggggtctctg

SEQ ID NO: 183452 - DNA, 482 bp, Zea Mays
catgacccctggactgtggacactattttaactaagactagggtgctctgtgcaaaattccgggcctgttttataattcctttacacgcatcaggacggcgggttgatttgataaaaggacaggggctcttttgaaagatgaccaggccaaaggggtacgcgctaatctatgccatccgatcaagtgtgggtggcccagattagatccccatataagtgaatcggtgcgcgacacagaccgttggatcaaaaggctacggtcacgacttaaaacactagcgatggaatctcatacgcccgatccaaatccaacggcatagccacgatggaacgaaagggtaaactaagatctaatgctagccacccatcttgaaatcgacggccacagacctgtcttctacctaacgctgccgactgtggcagaacaaacgtggaacgcggcggcgcccaaattccccaccggcgggcaccaccggtagccg

SEQ ID NO: 183453 - DNA, 472 bp, Zea Mays
ggaagcaatgaacgaaaatacaatgctacctgtcgatatttcttcacataaatgtgcattccgcaagatatggcaagggaaatgctcccactctgctgctagcaaggttgctccattctaatcatggattagggaactccatcctgttatattttatctatatatatgcttatcttcaccttccttgtctttttcaggtttttttggcaactgatattgatgggatgccgataattagttttttactgcatgagcaaaaaatattgcttgctgtaaggattcaagttgatgatgctactgaagaagcttttggtgatattaagcctcacatgagctggaacattcctgcatttgctgctgcgccagttgttgtgactcgtccaaggtgattgcctaagcacattgttttggatccatatctactactctaatgtttctatgttatctgcagagtacgagttggagttcttcc

SEQ ID NO: 183454 - DNA, 315 bp, Zea Mays
gttcctcgaaagtttgatctcccattctccttccggtttgtctccgctggaatccagggctgctctactgctcgaccccatgctggatgaagctggtcagaggcacgggaccgcgcttccggcgtgccttcctgaggctgttgacatgccggacagggatgcgtcccacgagttgtcgccttctctcggggagccattggcctcctcgctcgagccgtgcacaggcgttgatacttcggtcctagggccgacgtcggctgctggcctcgtgggggaggctgctggcgtgtccgtggacgtgggcgtcggaggtgg

SEQ ID NO: 183455 - DNA, 513 bp, Zea Mays
gcggccatgggagcatggagcgaggcagagaggttgcccgcacgcatggggagagaggagagatgagagaactcggccctataccgatgtggagcacgccccttggagcagccacagggagcgcccgccattgctgtgtcgtggagaccaacgagcatgaatagcagagggcccggcaggaccttcgatccaccacggcggcaggtatggacagcggcggcatatggcccgtggcccggcacgtagcgcaatggcgcggcgagcgagcagaaccacagcggcggtgatttccgaatctccctcatctcttgcaatggcggaactgggtgcattggtgagaacgaggagactgcgatgcccgatttatactccagtagcgaagtccgagcgaggcacgaggagcgacatccccgacgaggtaatcggcgttctgttgcggctccccttgcgccatagcagtcacccgagaaagtaggagagggagatgatgaagctgtcagcgcggacccacat

SEQ ID NO: 183456 - DNA, 460 bp, Zea Mays
ccagcaccgcgcactagcagtagtaccaagccaacacggccgagtggcagcctggcacaagtagccaagcaggccgttcccagcccacgcccgagaggccggaccccgagcccgaggctggattatatgctgctactgtaccgtatccgtatgttctgccatgctgctggaatgctgctggaatgtgtgcaactacatctgtcgtatgctgctactatcccatgattgagtatggtgtgtggtcgtgtggacaatggacgtctggactagtggacttggacgtgtgtaattgtgttcgggtgtggactctgctactgctagtggactgtgtcgtgtgtttgttatgcactgctagtggatgtgtgtgcctgtgtggaatggaccatcacgtcgtcgccaattatgtgtgtgttgtttggtgaatgtttggtaatatcgggtagtttgcgggtacccgaac

SEQ ID NO: 183457 - DNA, 315 bp, Zea Mays
cgatcatccacagagacatcaagacgagcaacatccttctggacaagcatatgagagccaaggtgtccgactttgggctatccaagttgctggcagcggagggcaaggactctcacgcgtcaaccaacgtgagagggacaatgggctacctggacccgcagtgagtacaaatcatctctctcaaccttgttgctcaggacaggacgtgctttgttagggctttgatagtgtaggaaggggaagaatacagatcgctcagccatgttcgattcagtgtttcgtttctggaatagttcttcgtgcgctacacgccac

SEQ ID NO: 183458 - DNA, 332 bp, Zea Mays
cccctatggatccgcctctggctaagcaggagcttctgtattggtctatggccggcgctaaagctctctcctatcttcaggttggtggttaggcttttagtgtgttggtcgtggtagtgtttgattgtatcaggtgacagttgtgtttgtcctctttgtaatagggtctttaccctcccctttttcttcttaatataatgatatgcagctgtcttgcgtattcgagaaaaaaacatcattggcataagggcaacaactcagagttaacagaaatagagtataaattattgtcataaaggcaatagttaaataaaatcaactgaagttcacat

SEQ ID NO: 183459 - DNA, 464 bp, Zea Mays
gaaagaaagcataaaagctcatgttcaaaggagggtaggagaactacttttgatccgggagatgagtataacaaggatgaaacatcgaatggccatggtgttgagcaaggcaactggagtgcattccaaaatttcttgttgagagcagaagaaaaaacaagatctagtgatgcagacctgtttgctggtgagaaagaacccccatcacggagaaaacagaatgtaaacacagcagatcctattattttagttgagagagatggtggcaacgtctgtgagcagaacaaaataggttttgattcagccaatgggaggactagagttatccgggtcatgtccaatgatgaacttgttatgtctggagaagggagaatctatatggattgtgaaatgaaggagattgaagctggtggaggaaggtacaggagagggacaggtgacgactacatggtttatggtcaggg

SEQ ID NO: 183460 - DNA, 623 bp, Zea Mays
aaatattttccttggctgttttgctgtcgagcatgttcatctacaaccaggtacatttctaaatgaacgaattagtcacatttggaagtttgaataaggagggtattgtagactacttagggtgcttcagtttttttgtctgaaggacgctaacctacgagcgtgctgctatttcttctagatgggaggtatagatgaatctgcgttggatcgtctctcgctggtcacagagatgacaaagcacatacgtgtccgggcctcaggtggaaggtccactgcatccgaacttgggcagttctcgcctgtctttgtttggttgttgcgagtaatatatttcatcccttttctcctatactaattatgtatactgaacgttgaacgctttgactgttccctagctgcacatcatcttataaaccgtcaaacataaacctcaggccctgttatgcatcagacacctttggtgtgcgacgagccgatgacaccgtgcttcctttactacaggacttttatctggatttggcagaagacaacagaaaaattactccacgggattacctagagctagcattgaggcctgttcaaggtggaggaagggacatatctgcaaagaatgcggtatg

SEQ ID NO: 183461 - DNA, 277 bp, Zea Mays
ccggcgtcgggttccttctctccctctccatcgtcgtggcctgctggccgttccaaggctcaacgatggcgcgatgatggtggtgaccaacctggggagctgccttcttataaggacgtgcttgtctcctcctccacttcgttggtccctcaccccgttgccggtgatggctgggtgaaggtcgttgatcggcgtgctcgctggcgtcgtcctcgccctttgaagcctccatccagacccatcccggtcgacctgcgtggaaagtgcttcaactgct

SEQ ID NO: 183462 - DNA, 432 bp, Zea Mays
ctaattttctcaggtctcatcagtaagtaacacaatttttatttgtattaagagtttcgtttttttttgttttgagagaaatatttacctttcttatgagacccaattaccatctatgtttcatgataaattggtgtcacaacagtgaagcttcgcgtgttcatcgttgctgtcctgattgtgatcaacttgggcacctgcatggcaaaggttggatcttacggcacaactgtgtcagcgtcaccgaggcaaatccgagtacttaccgccgcaactgatggaagaaatggacctcccagcaatgatcaccagtgcccgctcgggacctaccccaattgttaagcaatggatgtatcaaaacactgaggaacagctcaaatacgttcacgaaaattacacccgtctgtgctgttaggggagcatgaatatcat

SEQ ID NO: 183463 - DNA, 322 bp, Zea Mays
atttttaggggcaatagttaaccatggcacagaactcatccccacaagcagaaagcatttcccaacatctcccaccatcaaccacggctctttcttccccatctctctctcacgctcaaccagccacgccaagccaagaactggtggcgccggccactagccggccctccatctccggcaaaaatcatggcgagcagcggcccaatcctaccttcttcactgatcggcagttgaaaagggagagggagcagtgtgcacatcacagggagattaccgcacgatgtctggagaccagggggcacgcggccgaggcgtagcttga

SEQ ID NO: 183464 - DNA, 294 bp, Zea Mays
cgggttcgacgattgtgattagatcacagcgtacctcttcgtgatgttaatcagtgccgtcggatggggatcggacggaagctcgtgtgccttggtcatttttttaatccagtctgttgatcgggcatccgacggttgtaatcgcacgctagtgtataatggcagggatctaatcttagccgtagatgtaggatcgtccggccctagtcgaaacataccccttcggccaggcaactttgtaaatgaaaccctggcctttctaggaattaacccgcagtccatgcgccggtggtc

SEQ ID NO: 183465 - DNA, 571 bp, Zea Mays
gtactaccgaactctttctctaaagtatccccaaattccttgagaagatcatcaaggcttgctagggatatatcctcggcgtcgaaccaatcatctatcctgggggaggtggggctggaggggccttctcttgcttaagctctttgacttgctgctctaggctttccacccgggagtttaggtgggtgcagtgggaggagagatcatcgtagtggttgtcgagggtgtggaggtatccggccatgtagacgatggtggggtcatcttctgtggggtctcctcctgacagagcctggagtcttttcctccaggtgggggtatttttgttgctgggtggaaaatatcgaaggggggtctcagagatctctcgactgtagttttggcacagctgtttaagggcttttcgggcaacactctggcaagtgtctgggaagcggtgcccgatgaaggtgacttggaagggagggtggtttgggtagtttcggctttctcccaggtagactgccatagagcacttttctactccattttggcggtattccttcgagacatattcgggcttcttgcggat

SEQ ID NO: 183466 - DNA, 435 bp, Zea Mays
gacgggattgatggtggtggcgcgagtgaaggagagcggcagcggagacccgagaggtagggagagaggggaggctggggttgtaattctgggacgggattgacgatggtggcgcgagtgaaggagagcggcagcggagacccgagaggtagaaagagaggggaggctggagttgtaattctgggacgggattgacaataatggtggcgcgagtgaaggagagcggcagcggagacccgagaggtagaaagagaggggaggctggagttgtaattctgggacgggattgacaatggtggcgcgagtgaaggagagcggcagcggagacccgagaggtagggagagaggggaggctggggttgtaattctgttgtaattttgtacacgtgacgtgcgtacggcgtcatcaggcaggcaggtagccggtttcgacgt

SEQ ID NO: 183467 - DNA, 642 bp, Zea Mays
gactattatatgcaaggctatctgcaagatcatctttcgtcatggcgcaaaggccagcttcaagcttcgggaaacccatgcttcgggccatctcccggcagacgggtaattctttgttgtccgggagacaatacaagaaatcatcttcatccataccgttaaacactaaggccccctttggatacttcagttcccgagcatagtgtttggcttcaaaaatttcttctttggataatttctttcccgcagcatgtcgaatgatataatcaagatcctcggaggatgcttcgggggtaagagattcggcttctttggccgcacttttttcaaaaactatattagtatctggaatcatttctttggccccttgttcggttgttgcaagcttcgtctcaacaggcactttgggccctgcctcggcttcatcctggttttttatagcttcgacttctatttgctcagaaccagctttgtgttgcgttttgtcagctccggcagttttcttcgtggaagaagggcgttttgaatccagtgtgtctaaaatatctaaaacattcaccatccttttccttctaggggttgtggcagaacttttttctgccgtcagcactgttgcttctgtcgaaggactcagaacccccg

SEQ ID NO: 183468 - DNA, 372 bp, Zea Mays
actaaattgactgttcaatctgttcagtgtgtttttcttggatacagccctgaacacaaaggttatcggtgttatgatccatctcgtcgcatgcgtatatctcaagatgtgagctttaatgaaaaccgacccttcttttacaactcttccactcattcttcttttttattccacagagtctacctccttcatgagccttcctcccatttctgaaacttcatcagtaccaccatcatctattgtttctaccccagatgttcttattcccatcacaccaccttccacttccacaccacctcagtcttactcttccaaaccacctgtcactcagacttacattcgttgtcctcgctctactaccacggctagttc

SEQ ID NO: 183469 - DNA, 637 bp, Zea Mays
gaagaagcctacgttgatgatcgcgagcagtttgctccgcctccctaccatggggatccgggtcaatcatcctctcatcctcctccctacccgggtccgggacccattcttggtgacccgcggctatccggctctagttaccatcaccaccctccacctcctcctcctcatcgtacatcttcgtcatctgttttttctgcgggtgatgagccccttagggactcctcactcgaggaagacgtgatgaggaccttcttccctgactacacatcataccctccatcatatcctccgtcctatcctcctcctggaggatattgattcatgtatccttgtctctctctttcttcgtttttggtacttgttgccaaaaagggggagaaaatccaaaatttctagtcattctgtttgtggttctttcggttatgtatttcttttggattatttttgttttggccactgttgtggcttgtatcctcttatcattgtatgaaataaaactgctgggtttttattcaaagtgatatgatggtcttctggccatcatcttttgtcccatcagtttgtaatgattgctttgctatgaagtgaaaatgatgtgtatttagagatagtcatatgcatcacaactcctgtt

SEQ ID NO: 183470 - DNA, 504 bp, Zea Mays
gtatatttacatcaggggcaacagcagctctgaaacttgttggtgaatgttttccatggagtagagacagctgctatatgtacacaatggaaaatcataatagtgtgcttgggataagggagtatcctaccatgattacaattacaactctacttactggctagttaatgtatatatcactatgcaagtacacgctccaatggtgcaatgtgtcatagatgctttatctacatatctttatagcctcgtgccctcagatgtatggcaaaacaactattttcctttctaccccatcatcaataggttttataaatctctaaaattgttttttgttgaaaatgggttctttcattagcagtctatttcaaaagctgagaaattcaaactgacacagtgtaccagaatgtgcattggtccaatacaaactgtagattttgtccccttaatatatttacagatatgctctgagcaaaggagctactgcatcagcagttgatgttcaag

SEQ ID NO: 183471 - DNA, 568 bp, Zea Mays
tccgtccactgtgggttccatcgacgagggcaacataaccattgtcaccccttccaagtctggaaaggaaggccggaaaacttttagcttcaataaggtttttggcccatcagcaacacaaggtactgtacactgtcactactagcccttccttttcagttatgtattggaaggagatccatatagttgtacggtgtgcagctgaggtgttcttggatactcaacccctcattcgctcggtccttgatggatacaatgtttgtatcttcgcatatggccaaaccggatcagggaagacatacacgatggtgagtaatgcacatcaatatttgcctagtaagagtgagtgtaaaaaattatgagtaccactgactttctctgtttataacaatttttattttaaataatgtgtttatgtagagtgggcccaagaacatgactgagcaaacccaaggcgtcaactatcgggcacttggtgatctatttaagcttgctgaacaaaggaaaggaaccttcatttatgatattgctgtacaaatgattgagatttacaatgaacaagttaggg

SEQ ID NO: 183472 - DNA, 298 bp, Zea Mays
agcgaaccccggattttgtggcataatctggaaacctcccccgacgtcctcccgccgtgtagccaggtacagtagacatacaccgcacgatcgcatgtccctcaaacgcaagcctcgatccacccttctccgccccagcggttcttcggcacgacatcctatcctcgttcttcactcgtcgccgcacgtaccttgtctccacctgtcacctgcaaccacagcctgccaagagacacgtcacacgcacaccgtgttgtcaatcgctcatcaccaaggtgctagcccaccggcatctcaa

SEQ ID NO: 183473 - DNA, 1171 bp, Zea Mays
atggaataaaggacattgttgtcaagcacccaacagagcttaaactgcacaaggttgctataattgagaagctgcaggagagaatatgtgatactgacaaggtggtccgtgaatcgttatacaatatactgcagtctctgatcttcccatctttgaaagaggtatatctctttctccgcttttctgtacttttgcttgattagaaatgtattcttttaattgaaatggttattcatgatgttcttacacgttgcattgcattttgacattccagttttctgtaaatatgccagtaaaaaataatattgcttgtgtgatatcatgatttctactaaccacaatatggcacatgctttatttgttgcattcacaaatacatcgtataagtttctttttatttttggctatttcaagcacatcattctttatttgcatcgctttgttattccttgtccagttaaaatttctagcttttgacttcagatgtgagactataattatgcttacaggataacactatatctgtgcggagtacactgtttttgctgatggctaatattctgaatggaacgacccatctatctgtggagatccagttaatggcttttaggtttttggagcttgtggttcttaatttcccgtcatccttttctagttatgctgaacaggtaagtcgtctgctttcacagttggtgtactgaatgatgagtcacttctattgttctgagaaaattattttgctgggagatgcatattccttgcttccatcacttaattagttctactatatctccatccattaatatctgacgttggttagttcaattttgaactaaccagtgtcaaatgttaatttacggatagactaccccccccctaaaatttgcatatgttaactaccacagcttgtttcatagtccagcttttatcaagtaataactactaaggaatatatgttttatttgaactgcttctcacccctagagattgtatattccccgaccatattcattaccaacttaaacttatagtttcatttgcattatctttttctgacagaccttcaacaactttgttgcggtactgagcaacgacagaatcaacctacatgataggaataaacttaacagtgttcttagtgggcttggccactgcctttccttggttgcta

SEQ ID NO: 183474 - DNA, 459 bp, Zea Mays
caggaatcctaagaatgatatgataaccatgcttaaatacagatggcataaattttgcattgataacgatgtaggttggtgataggtgttttttcatgttcattcatgggcctcaccttttctgatgtgacgaaagaaaactatattgatcttgatctgagctatacattgaaggtcgatatagtaaaggagcacttagacattgctgctcatagatttaggtgctcatagatttaggtactgccatcaaacattgtcttctgatccttatatgcagtgcctggttcttatagcttgcatgtattttatgcattgactatagggaaaagaagtgtgtgcattgctggtgatccaattacctctaaatcaagttaataacttaaaataattgcagtttaaatgttatgtcgtatgctctctactaatactaatcgttatttcaaaactttgtatttaata

SEQ ID NO: 183475 - DNA, 372 bp, Zea Mays
gtaaaagtggctgatgggagaacttttgtgagcaaatattgtgttcccaattgcaagtggctttgtggtgggctgacatttactactgattttaaggttttacctctgggtggttatgatataatcttgggtatggactggttggagtgccacagtcccatggaagttcattgggcagaaaaatggttggagtttgactataatcacagaagggtgcagttacaaggagttcagcccaaaattcagacctgccacagtttaacctgtttccaattgggatctttgatcagacaagaggcggttgagcaactcttggaattacagggagtggagagtatggatacggccactgtattgattcctgagtcgatc

SEQ ID NO: 183476 - DNA, 283 bp, Zea Mays
gcactggactgggcctcaaattcagagaaacccagggggctcggagtaagactctgcagacacagagcacagctcccgtggatggcgggttctatttcaaggaaaccgaggggttcatatgaaagagtgcacccgcgaaggggtacggtgcattatgggccgttcgattagatatcaacacgccagattggatcgacttcaactaaataggtacgcaaagatagccgcacgatcgaccctcaatgttccagatttaaatacaaaagaaccatcgagatccatc

SEQ ID NO: 183477 - DNA, 777 bp, Zea Mays
cacgcatgacaaagatgctcatcatgtgatctagtacatgggatagtggcactacgagtaagctgcatcaaggcatcgtgtccgaggtgaccaaggcgacgatgccaagtggtagaagacgtggtggcagcaaaaacagcagcagtggcaggtgacgaagacgaagaagaggtggcgtgcggaagccgaagggtgtagagggggccggtgctgtcacatctgaggagggggcgtcgagttgccgagtccttcatagtaagaccagaagagtcaaactcgacagaacaagaattatcaggagtaaaacggcgaatagaaagaagattgtggaccaaagaaggagcgacaagaacatcgggaatgcgaaaagagccgggagggccggcggcacccacagatgtgacaggaagacacgagccattcgccaccatgatggacgaagggagagaggaaggacggcgaacagaggtgagtataccaaggtcgggagtggtgtggtaggtagcaccggtgtccgcgatccactcgggacccatcggcggagtcagagtgggggagtctggaaggcagccagggcgaccgcgtcccaaccaaccagcccggacggtggagcagccggcggcgtgggccacgacgaagcggcaggcgtcgaggtccagggcgacagagaggcgaaggcgaaccccggtggcgaggtgaaccccggctgcgcaccagcgaacatggccgccgggggacgagcctcagaacctggcccctggaacggccacatggaga

SEQ ID NO: 183478 - DNA, 942 bp, Zea Mays
aaagaagcctacagatagtaattacaaattatagtaataatttgacaaggaccaagaagaatacatatacctgttgatcaataatcacaagatccaaatgtttgattggatcatcatcatttttgccatgaaattcccaaactcttgatatccgaacacaaatgatatagtggtagacccctggtcgaacttgtgatagtggtgtaatgtccatctgcaaatacaatttgttaaaaatagtatcaatttatgttgccatggctctcaatagattgtagtacttctttatacacaatattttctgttattgttccacatgaaccgtcgtcattttctatcaatattttgagccctttcttttctgtaactcgtgacacagctaaatatagttgaccgtgtgtaaacacctttttctttaaatataaccctacatttgatagtgtttgtccttgacttttatttatagtcatagagtagcaaaccttgattggaaattggcgttgacataatgtaaaaggccatttattgcccttagttgtcagattaatgcggggtatatgtattttttcgccaacgtgtgtacctgttattattgttccttctataattgtgtctcctagttgagttataataattctggttccattgcatagtcctaaactttgatttaaatttcgtagaagcattacaggagtgccaattttaagttttagtctatgagaagggaaattgtttgcgtttaaagtgtttagatactcaatagggtataaaatattggcatcatttggagcatctgtgcatttagatatgctatctgcactatagtattctctctctactgttggcaaaagagagataatataatcatttatttcatctacaacatcattagttgttgctaatatagctctttttttgatataatctggatcattatatttt

SEQ ID NO: 183479 - DNA, 643 bp, Zea Mays
gttgccagacagtttggactggaccaagatgtgcctgcagatgttcaccgtgccaaccaggattgggcgattgcttggcagacctaccagctggaaggtaagaatgtggctttcttcatccctcactctgagcctgggatcacaacacggtatgcacagtggtggaggcagcaacttctgccttctggcattgatgctgctacagcaagtgctccagtagagtggaagacttccaagcgcaaggtgaaaaagacaccagcggccatggaagctgaagctgagaaggagcgtaagatgaagaaggcccgggtctctcctacttatactgataaaaagcgcaaacttgaagagttgtatgatgctaagttgtcggattggcttccaactgcaaggaatgagattagtgacaccactagtgatatggaatcggaggaggccttattgcctaatgttggaactacaaatgatgatattgtgctactcatgccaaggaagcagacaacgactgcacctgtaagggcattgatggataatgacatgatcctggctctaggagagagaggaaactttatggttgatgagcctccagacatccaaagtgaacctgaagctgttgtccctgcaacgctggatgaggaaatag

SEQ ID NO: 183480 - DNA, 543 bp, Zea Mays
cttgaaaacagtcaccccatcatcacagtgtcacactcacaccagcagcaggtggagataaagagctggatgttcctcactctcaccacacccccgagaatttcacacctagcgaccgtggagacagagttggatcctcgagctcacctcacactgctctcctctcttcgtcctgtcctgaatcttttcttcctcgataagataagagcgtatcaggacaccaccatctgttatgtccctcatcgttcatccattactacttttatttacttagaaacattgaaacataagagccacaaccatttttctgttggcacaaaattaatcgagtgagaaggtgcatgatgaaccatgcagaaaactgcaagctggcttgtatgtctgtgatgcacctagtgataagtcataaaattgaaaacagaggaatggattgtattatgtttcaatatacctctgtttccacaggggagagctgggccagtgaaccaatgccatgtttgatcactttagctaagccaagcagaaccactgatatgagcagat

SEQ ID NO: 183481 - DNA, 531 bp, Zea Mays
attccaagtaatcatgttgcggacactgctcattttgaatactctgtaggcatagtctactgcaccacattttgcgtacaggtccacgagtgcggattcaacaatgacatctccgcatcctctcatcctcatagaacggcagtggatttcttttcctagcttcactgcagacagaccagcacaagatcgcagaagagtccctaagctataccagtcatcgtcctgctcctgcatatgcatctgtcgaaacaacgagagaaccttctcatgcttcccagtttgacaataccccccaagcagggcacaccatgaaactgcattcggagccttcatcctgtcgaataccttgcgtgcatccaccatcataccacacttggcatacatgtcaagtgtgctgctctccacgatgacgttcccacacaggccacgtgtcacaacctgcgcgtgtgcctccctaccctgcctcgctctcttcatgttcccaagcgccgacatcatagagccaaatgtgcagccgtccggccaaacccc

SEQ ID NO: 183482 - DNA, 441 bp, Zea Mays
tggaccagttaatacttgtgaaatagattagaccctctccacatgttttagcttagttcaccctacactaaataaggaatgagagaccaacccaaccaatatagtcttgatggattgcatgatctgcctatccccacctaacatcaaacaaacttttgacctacatcatgtagtctatctcatctatacctatcttaaccatattccccaactctgatgatatacactaaccttgaatcaatgagaccaagaccggagaagaacaagatcaacctcgtcaaggaaggagggaagtcaaactcaatcttcagatgcattaccacccaacacggagttcttcctcgccataaaactttcttacccctggctattctttccctaacctatccatctcttatatcccacataataagtagccgaatacctatgctctcctaatca

SEQ ID NO: 183483 - DNA, 331 bp, Zea Mays
aaaacacaagagagttgcatgtcctattaaaaagaggatggtcatattgtggaactgttattttgaaacggagtggtcttattgtctgaacctgctattttgagctctgaaatatatgtgattgactatagaattatttcaagaacaaactgttattggcatttgttcttgcgagtgtccagcagtagcatgcttgtcactctggtttggaaatattgaaaatttcatctttgaccgactaataaagagtagaacaaaatatatttgcatttcccctagtcaatgaaccagttcaatttacaccaaacaatttctatacaaaggtataccc

SEQ ID NO: 183484 - DNA, 321 bp, Zea Mays
tgcttgcagtgctcacggtgtatgcacacaagggctgtgttgaggaggggcgcactgtgttcgatgcaattgaaagaggagattatggcaaagtggaagtgaccattgagcactatgggtgcatggtagacttgcttagtcgggcagggcaacttgatgaagcgtacaagatgatagagcaaatgtcgattccaaacaatgatgtggtctggggcgttttacttggtgcatgccgtatgcatggcaatattgacatggccgagaaggcagtccagaaactaaggatcctaaacccacatgagggtggttactacattttgc

SEQ ID NO: 183485 - DNA, 391 bp, Zea Mays
cacacatcctccattctgacatgtggatcccatgtgttggtaaaggctactatcagtgatctgctctaacatctcctgtaatattccataaaaaaagaactattgattcccactgataacattccattaaatgatgatgctcacaatcctactccctaccaacaccacctcacctcaccatgtggttcgtccctgccttcagaatacatacacaggctgtccccttttttaggatcatcagtgtctcgtatgcacccatcattctgcatccatggaatagagaaatcggaccaggtaactttgttgaataaactatgacccttttcctctcaagtttatcaaaactctgtaaaagtgggtctgccgtagcttctaccggaagcaaaacagg

SEQ ID NO: 183486 - DNA, 1178 bp, Zea Mays
tctagatcatcttctagcgatgctcctcttgttgcctttgggtcatctgatggcgtcatcagagttctttcgatgttgacatggaaggttgaacatactctaccttacctccttttcttcattgctggcgtactgcaagtttaaattgagccatttgatccttgcagcttgtgcggaggtatacaggtggacataaaggagcaatagcttgcttaatgacatacatgtctgcagctggtgaggtaaacttctgcacagacatgccttgtcttcgactctagctgctttattttggtggttacattttgttctttctgttgtgttcatatgttgtgattttctattttcatgttcatttttaacagttaattgttgttaattcttttgatttttatttctgaggttattactgttataccttccaataaataacaaggcatctcttcaggtacatttagtttctggtggcaatgatggcctgctgatattatggagtgctgatcatatccatgactcacgcgagcttgtgcctaagattagcatgaaggtattgacttgctgacttcagttcaccgattatttatgtatcagaaaaaataaaatgttgcagaacgtctgtaaattacttgtacaacattacttagcatgcgagtaggttaatactgtttttggggtattttctcaaggcccatgatggaggtgtagttgcagttgaactttcaagggtgatggggagtgctccacagctcattacaataggggctgataaaactttagccatatgggatactgttactttcaaggtacttatataaatatttgcatgaagttatattatttattatttcaagtagagcttaaagtaacacatttgctgctcaggaaataaggcgcattaagccagtgcctaaacttgcttgtcatagtgttgcatcgtggtgtcatccccgtgcaccaaaccttgatattctaacttgtgtcaaggactcccatatttggtatgtatttctgctctccagagacatattagttgcagatttttctctaatgatgctcattatagcttattgcactgttctatactctattattacagggccatagaacacccaacttattctgctttaacaagaccgctctgcgaactgtcatcacttgttcctccacaggttcttgca

SEQ ID NO: 183487 - DNA, 286 bp, Zea Mays
gtccaagtcacttggtttcgcgcaggtgtagaggtaagcgatggacaaggacgtgccagtggaggagtgacgtaaaggtgggggagtagaggagcagtgatgcgcaggtaggggagagcagaggagcagcggcgtgcaggcggaggagagcaaaggagcggcgacacagcttggtgagaacgaggatttcctatgcctatggtggtggtagcctggtagggcatcattggatgttataacatttagataggctagtgggctgcctccctttctgtgccgagtgggc

SEQ ID NO: 183488 - DNA, 325 bp, Zea Mays
cttttacatctcggctcattctctattggtagagtactgcaaattctttgttggaccgccattgaggtgggccccatctagacttattaacagagaggcatgcttggccaccgtagcccacaaggcgtgtcacaagcccatgaccgatgagcaactttgcagtagaggagctaggtagccaggtgttgtggccacccttgctgttggttgtgccgttagatatccgaagaaaatggtggtggccgttgtggatttgtggaggaagaagaggacactaagatacgcgatgatcctgatctaacgaacgcctcaatggccaacgaag

SEQ ID NO: 183489 - DNA, 400 bp, Zea Mays
ctgtatttgcctcttgaccgagcctatctgatggaggtgttgttcgagtcatagttgttgaaacagtgataagtatggtgaaatgcgcatggtaattctccccgtatggcgtaaagcagacttgacatcagtcctgtagccatcccattgttagcagccttcgtggaggagttggtggtgtcctttggtcgatgttatctaggccgaggccagctcgagcgagacggaggttcctcccaaggccttggtcaagcctgcctcagggcatataaccgtacatggaggggttagttcagttgttggagtagcctcctgcggcattcgcggggagttgttgccagggtagttggccgaagccgactcgggcgaggcggagtttcctcccaaggttgcggtcgac

SEQ ID NO: 183490 - DNA, 284 bp, Zea Mays
aaggttcagtcataactgagtttattgagatggtatttctgatggctccagcacttgctcatgttcagtgataatttattttattgcaatgctattcctgatagtttccaaaactctccgcttcaatagtgtacacacttgagttgctaccttattctgtatcacaaaaaatattgaacactcgataggctgaatgtttggagtgttagttccctttagtctctttccgaagttcgtcgagccgacggaattaaatttccagatatccaggacactagcccacc

SEQ ID NO: 183491 - DNA, 399 bp, Zea Mays
cggcgttttattaacaaaactgaaaatcttgtgttgcaaggatgaactcctgatttcagcgctctccagtatttactgattaggttaggaccagtagtattatttcttgtgtagtgcaatacttctgacttttggtagtgtgagggcatgaaaataaggcaaggggaaaaaagacatagacactagaggaatttgtttagaattttttggttgattgttgctacatatgtagtatgttagtttcctacatcattctgccatctttgggtattggccaggttatgatataaccttatttatcagacagttagccagttaaaagttgaagagtgacagtttgacggacaacatactcttggttgttatgtgcagtggactcttgctacagacctgcaaaac

SEQ ID NO: 183492 - DNA, 438 bp, Zea Mays
cattttcccaacatgcggagtgtggtgcaggacttcgtacgggcatgtcccacttgtcagcggtacaagtcggagcatcttcacccgacaggtctcctcatgtcactaccgattcccaccgtcgtttgggcagacatcagcctcgacttcattgaagcactgccccgtgtcaacgggaagtcgatgatcctctccgtcgtcgaccgcttcagcaagtattgccacttcatcgccctcggccacccatacaccgccgagtcggtggcgcaggccttcttcgccgacattgtatgcctccatggcgtgccgcaatccatggtgtccgaccgcgacccggtgttcacctcgacgttctggcgtgagctcatgcggctcatgggcactaagctgcacatgtcgtccgccttccacccacagtccgacggccagatggaggcg

SEQ ID NO: 183493 - DNA, 673 bp, Zea Mays
ctccacggatttgttggaagaagacgagctaatgccatacattggaggaattttaaaacagctacttggccgccactctatcgactcattcatggtattcaactttgagggaagcaagaaggacaatcaaattgccagcattttctcatactatgacatgtctgtgatgggttacccacgtaactatgaagggtgccccttgctcaccatggagatgattcaccattttctgagatcgagtgaaagctggctctcattaagccaggacaactttctgctaatacatgcagaacatggtggatggccaattcttgcttttgcattggcagccttattggtttacctcaaaaggtataatgatgagaggaaagctctggaggcagtctgcaaacaggcacctgatgggttagctgagtttttttcaccactggacccagtgccttctcagctgagatatttgaagtatgtgtcaaaacggcacaaatcactagaatcatggcctcctgttgacagaatgctgaatctgaactgtataataatcaggaaggtgccaaattttgatgggcaagggggatgtagaccaatattccgcatttatggcctagatccccttgcacctaatgacaggggtactaaacttctctttttgaccccaaagacaagtgattttgtc

SEQ ID NO: 183494 - DNA, 1077 bp, Zea Mays
atgagttttgagttgattttgctctagatacctcttccctgcccccgtgactgttgtcttcttaattagatgtaggtagtacttgctatgttatgctatcttcaattctgaatatcatggagccatctaacataaccaagttattatgtgcgatcttggtttaatcagaatggcattgattttcatatagcaacagctaagtttatgcatttgtaatttttacttcacatctatgtgctttctgcactatcatatgtaatcagttttggtgtttaggtcgagctgttattagtgctgctgaaatgggaatctcattcccactgaaacgaagagatcagttactggagtacgttttaactctaatgggtagggatcaaagtaatgatctcactgatttcaacactgagcttttgcacacacaggtatatgctcaagttttgacccttgtttttgttttcagatatagaataaattcttcgtttagttgaagcttcactcttttaaattagcttacatctacaatatttctttatatctttttcactcctgctcattatgtaatagcacagctacttattcaagttttataacatttttttactcttttctaaatcatacttacatatgcagagccttgctttaagtgcctgtactactcttgtctcgctagaaccaagattgccaatggaaacaagaaaccgtgtcatgaaggtctgcatggctatgttgcaactccacaaaacttcactaatagtctgtctactacttgaagaatctttatatagtttttacttgatttatgttccactttcaggcaacattaggtttttttgctttgccaacagagccctcaagcattgttgagagtctcgtaacaaacctaattattctgttaggtgccatcctgcttacaaggtaattttgtaaaagtatagttcagttgtattttttttctcaaacaacacaggagatatgcgtgtcattttattaagaagaacgaaagagaaagtaccacatacatcaaacaaccaaaaccacaagacctgtacccctacagctacggactaggcaactaaa

SEQ ID NO: 183495 - DNA, 628 bp, Zea Mays
ggtcaaggcgcaacgaaagacaaaagagactccacagtccagcagaacatggaccaggggtccacaacaagaccaccctcaccaagagcgtggccaacagctccatgtccataatatcgctaaccaatagcaaccaggcgaagcccccctcggcgccaggactaccctccacaacaaggtcacactggcggcgcaacaagaggcagaggccctcaatagcaaaggaagttttactgtgtctttcacggcgaggatgcagggcacccaaccagagattgcccagaagccaaggaaacaaaagaccgcatggctagagccatcctatcaaacaaccagagagccatcattcacaccccccaccttcattaacgaaacgaacacccataccacccccaacaccagcagaatttcaaccatgcttttccccagcaaccgcacctgcagcaccaagaaagattagcactgccaccccaccaccaccaaaacaagaagaatttgccaacccattgttcagaggggtcatccatatgatccccggagggtccaatgtagaatttgagaacaaacgataaaagaaagattactaccgaagggtcaatcacgtttcacgtcgctctcactggaacag

SEQ ID NO: 183496 - DNA, 663 bp, Zea Mays
cgcagatgcctacgtccacagctggctcctcggctctgctgggccagatgtcgtcggcctcgtcgcggcaccaaactagactgcgcgtgagctctgggtcgccatcaagcgcattttcgaggccaacctaggcagtggtggcggccgctggaagaagggcaagggcgggccccaatccgggggtgggcacaggttccttgctctgcatgccgcccctagtactgctaccccccttgactgtcagggtgcatcagcagccttggcgcccgccggggacaaacccagcctggcacagtcctggcaaccctgacatcctcagcgccttcactcaagcccaggcccacactgcccccgcccagttctccgacaactccgttccaaccccgccagagcattgcggctgggatcaggctggcctcgtagccgccctgaatcagatgtccctccaggggtcttcttatgtcctcgacactggcgccacagccgacatatcgtcttcggctagtatactcctgtcccatctcccccctccttccggcatcacggttggcaatggcactaccatacccatcacatgtcgtggcacatccacactctcctcccccacctctatttatcaccttaacaatgttctggttgcaactgaccttgtgcgcaacctcc

SEQ ID NO: 183497 - DNA, 458 bp, Zea Mays
tcgacactggaggccgtacctttggggacgccggttcatcgtcaaaaccgaccactacagcctcaagtacctgctggaccagcggctcgcgacgcttccgcagcatcattgggtcggcaagctcctgggcttcgatttctccgtcgaatataagccggggtcaaccaatgtggtggcggatgccctctcccgccgcgacacgccggacgatggggcgctgctggccctctcggcaccgcgtttcgacgtcctggaccgtcttcgtcaggcacagctcaccgatccagcactcactgccattcgtgacgaggtgcaggctggcaccaagcgcgcgccgtgggaggtggtggacgggatggtccagtacgcgggccggctctacctacccccttcttcaccgctgctccgtgaactgctcgccgctgtgcatgccgagggccacgaaggggtccagcgca

SEQ ID NO: 183498 - DNA, 384 bp, Zea Mays
acctgggcggcgccgacgcctagctccactcgtagcctggacgcctaggcgacgcctaggcgacgccttttaaacagtgggtgctagactggttctgaaattacaatgacatgatgaatcacatgagtgcagaaatagtaaaagaacagtgtcgataatagtatgcaatttttatgtattaccatgccaaattgtttgtgatcgtgcttgaaggcaatactggaagcagtgttcttaaggcggtaaggcgaggcgaggcgttggactgccacctggacgcctaggcgagcataattcttcaagcgtctggccgcctaagcgacgccttaaaaacactgactggaagtgcgatgcaaggtcctcagttaatccttttttaaaaac

SEQ ID NO: 183499 - DNA, 448 bp, Zea Mays
ggcaggttccacgtagagtaagctaagggagcaccagcattcgagaccctacccctcagtatcatatccagtcggctcaacaagtcctcattgggaatctgtctgtttgtgacccgggtggaatcattgatgccggtatacaagtaagcagggtaaactctgtccttcaaaggttgaatattcttgaagacaaagtcggcgaccacggcctcagcagtcagacccctatccttcaataagcagatttcagcgagcaacactttggcttcggctacctctgaaaaagtgggagactccacccagctaggcgtgcgaacgtctggttgccttcctgaccgaggggggagggatttgccgtgattctccatggtgaaccactcgaggcgccatcccttaatgctgtccttgagggggatatcgaggtattccactttcctccctcggcaaa

SEQ ID NO: 183500 - DNA, 809 bp, Zea Mays
ggatgtggatactgatatatctgatgaagacgaaggtgacgacgatgaactgaaagaaagcataaatggttcagaggatgaagctttagaccagaatgaagacagcgaagaggaagacaagtcaaaaggcagtggctctaaagcgcagaagaggaagttaaatgattatattggacagctaagttctgctgatgcaagccttcgagttctgaagaggttagcaactgccaagaaggctgaagttccatctgatgaaactggtaaaattctatccgatgaagatttcaaacgcatcaaagaactcaaggtatgtggattttggatggcttatagatctacagtaaattttttttaaagctaattttggcaaaataaatttgctcatattctgatcttagatggatcattgatgtcctaaccgaatatatttgtgtttcaggcaaagaaagaggcgaagctggctttggctcagcatggactaatcaagggtggcgacacaaggtctgtaacctttaagatgccatcatctgaccagctcagcaggaagcgtgtcgatccacttgagcttgaggtgctctccttgtacctttgtcgcgcactcacgcactcacacagtgacacacatgcaatgcacacgcttgacactgaataaatttcgtgaggcaggctcacgtcaggagaaagatgtccaaggaagaaaggttagcgatggtgaaagctggaagagaggatagaggtccttacatggcaagggcggccgtgaaacagaaaaaggtaagcttcctggctgttggcgtgtacgttttgtg

SEQ ID NO: 183501 - DNA, 1185 bp, Zea Mays
ggcttcaacacatcgtccttgcacaaagggactttggatgtggagtacgcctttgaagagaactggtttggatggaactgaatacagtcttgtgttgttggatactgaaggaattgatgcttatgaccaaacggtatgtactagcggcttacccttgaattaacagcctattatttagaattgacaatgatgtgtgcttattgatgttaacaattatgatattttttaattggacccacacctttttttgttgagctgcacttttgggtgaatcagaatcatagcactgaagtgtgttgactatagcttacttctctggtgatcttatttagttgtttgtgtaatactgcatatatttggaatttctgcaatgttgtctcatgtgtactctttccattttggcaggggacctatagcatccaaatattttccttggctgttctgctgtcgagcatgttcatctacaaccaggtacatttctgaacaaatgaattagtcatctttcgaacatggagggaattgtagactgatacttaggtgcttcagttgtaattgttttcatattgaaggacactaacctccgagccttttgctacttattctagatgggaggtatagatgaagctgcattggatcgtctctcactggtcacggagatgacaaaacacatacgtgtcagggcctcaggtggaaggtccactgcatctgaacttgggcaattctctcctgtctttgtttggttgttgcgagtaagatatttcattgcctttctcttgatattaattatgtctactgaatactgaatgctttgaatgttccctagttgtgtatcatcttataattcgtcaaacataacatcaggtcctgttatgcatcagacacctttggcatgtgatgacattgtgcttcttttcctacaggacttctacctggatttgacagaagacaacagaaaaattactccaagggattacctagaactagcactaaggccagttcaaggtggaggaagggacatatctgcaaagaatgcggtacgacagatttttatgggtgaaatgtagttatgtacttctgcttaggtaacttgagatatggactattcttatacttattttgttgttctggaagataagggagtccatccgtgcccttttcccagatagggaatgctttactcttgtg

SEQ ID NO: 183502 - DNA, 836 bp, Zea Mays
gcttcatatataaacaattgccctgccgagttggacaaggtcgaagagatcaaaacggaaatacttgtaaagcactcaaaaggcttttcatggccttcagttgctgaactttgtgagtggtataagaacagagcaagggacattgactgcttaagtggacagctggaaaactctctggccatgatagagcttgcatgtcagaagggcattgtagagttgcagccattctttgatgatattaaatgcctctaccaggttgtatattctaatgaattgaatgagtttacaatgaatcttttgacatgggaagatctgcctgattatgaaaagttcaaaatcattctcaaaggagtcaaagaagatacagttgttcaacggctagaagaaaatgctatccgttttatgaagaaattatatgaacacaaacaagaatcctaccttgttagttggctgaaagaggtagctgctaaaaatgagcttttgatttgcttagctgtcattgaaaatggttgtggggaatcaccaatatatggtctcttcaaggatcttgctgagatgatagaaacctctgttcactgcatttatatgtgcagtgcaactaaccagtggaataccatgtcatcaatattatcaaagtcactctataaaacaaagagggagaaatcgttagtggctagtgaagaagactgcaatctgaaagatgctaagcatgctcttggttcttctatggtttcttatgaggagatgcaatgtgtctgtgctgatatcttatctggtctgggcaatgctccagaagatttttatcactatgattcagtacctgacaaacctaatga

SEQ ID NO: 183503 - DNA, 685 bp, Zea Mays
ggctggaaaactgggtgcttcttgcattgcagaactatgtagtgatctggctagcttagagggaaagaaatttgagggtgtgctagaggagtttgcaagtcatgcattcagtttgcgatgcttcttggagtgtttacagtctggcggagtttccgcaaatgaaattactgataatactagtgaagcaaagactccaagaagctctgttcatgatattgacaatgctgctgaccatttgtccaaggtgaacattgagggtgttgctgacaataaccataatgaattttccgagcataaccagtgcgtaggtgagttagataatagtgatgggaatatagtatcaccagctatggttatcttggaaagtgtagaaagcatggtaaaaaatgatgacaagaatgattcaactgtgcagctaaatgtttcaactgaatctcgagttttgaagaacaaaaggaagtacaaagttgatattcttcgatgtgagagcttagcctcacttgccccggctacattagaacggctattccttcgggactatgacattattgtgtcgatggttcctcttccttcttcatcagttcttccaggcccttcaggcccaattcattttggaccaccatcttattcctccatgacaccttggatgaagctagtactgtatacagcaggacattgtggacca

SEQ ID NO: 183504 - DNA, 822 bp, Zea Mays
ctcgaaatgaagctccatcttctgtggctggtgagtacgacccgaagagcgatcctacccggaagccacggaagtctgctgatccagggtggaagtatggattttggccagatcttcaaaataaagataaggtggaatgcaccctatgtggtcaggttgttagtggagggataaagaggttaaagcaacatttgacaggggcatatggagatgcaaagttatgtcccaaggctagcagtggattaaggaaggagatgacaagttatttggaggcaaacaagagaaaaagaccaatgtttctagatgaagatgaagaagatgatgaagtggtggaggtggcaacagcagatggggcgaatgatacatctgcagtggagtctcaagcatccaaggtgcagcctagttctggtacaacagccaaaaaaagacaatcaaccttgcaatttaaggcaagtagtaaagcacaaccaaagacagccaagtccgtagttgagatgttgcggagaacaccagaggaggtggtggatgagagactttcaggctcttatgagcccacaatcttggccagtgcaaaaagtaaggaggacaaacactatgtggacatgcagtgggctttgttcttctatgagtgtggtgtacctttcaatgccgcagcagctaggcagtttcagattgcaattgaggccacagcacagtttggttcagggtataagcctccaacaccttaccaactaggcgagccattgatacagaaggttgtgaagtcaacaaatacaatgagggaggaacatgagcgtgcatggaaacactatggttgcacac

SEQ ID NO: 183505 - DNA, 416 bp, Zea Mays
tggcaacagagttgcagccgggccacaccgtggagttcggcacttcgaggatctcctcggttctcgtgcaggagatgcagcagcttggatactttggtgacggtgtcgggagggttccgggcatagaagagatcccagagcctgagggcgaattggttgtgtttgaggcatttttcattgccggccttcgtctcccggcgcatcgtttcgtggcggaggttttgtggaggttcgacgtgtaggtccaccagttgacacctaatgtcgtggttgccctggcgaagtatatttgggtggttgcttcgtacggcggtctgccgtctgcggaggtctttgccaagaactattgtctgcactggcaaaagaggaaaataggaaataaggttgcacaatttggatcgtgcaccttcacgctg

SEQ ID NO: 183506 - DNA, 480 bp, Zea Mays
cacggcctcgtcgatggtgctcattgtcgggtattgtaagtgcgggctggtgcagaatgcgcgtgagctgtttgacaaaatgcctacaaaggatctcgtggcccggacggccatgattaatggttatgcacagactgggcggccaaaggtggcactcgctttatttagggatctggaggctgctgggattgagcctgatggagccacaatggttggggttatctctgcagtttcacagataggcagcacggagttggctgggtgggttggagcttacgtcgacaggaagaagatcgaaaggaatgagaaggttcttacagcactagtagatatgcacgcaaagtgtggcaacattgagcaggcactgagtgctttcagggagatcccacgacctgatgcctatccatacacagcactgattagcggcctggcaacacatggacacgaaaatctggcactttcagtgttcgaaaggatgcg

SEQ ID NO: 183507 - DNA, 454 bp, Zea Mays
atgacactggtcaactgtcagtgtgtaatgggtatgttctgttcttgtaatatagggtgaagaattgacatttgattacaattatgttcgtgtatctggtgctgctcctcaaaaatgcttctgtggtactgccaaatgtcggggttacctgggtggagacatatcaattgtcgataccatcatcacccaagatgatacagaagcagatcattttgaacaaatggttgttgacaaagactccaaggagttgctgggtccaaatgagtctgattctgatggtagccacccaaatatttcagaacctgaattttctatccaaggggaagatttacatgattgctcagctgcaaaagtagaattagatctgcttgaaggaactagaggaacctcattagaaactagtgagcctgaacatcccttggaagcatggagcccaccagaagatgaagatgtc

SEQ ID NO: 183508 - DNA, 311 bp, Zea Mays
gttcatcagtttcactgtgtttttctgttctaagaaagtaaacgactgcatggactgaaacatgcatggatatacatagaataatgatgctaaatcgattctgagggatcaaaattcatgaactgaaacatgcatgtttagagaggcattccatcagtttcaatgtgtttttctgttctagaatttcatgaacttgaaacctgtttagagcaatcagtttgactgggatttatttctgctcccgaaatttcgtcgcacatttagcgattctttgagtactgtatactatttattattgttatcgtattcag

SEQ ID NO: 183509 - DNA, 331 bp, Zea Mays
ggagtgggtatctgaggagaagaagcgagtgcttgcatcattggaccctcaggtacttaacttgcatcagttgacgcttgtatttgtagtcaagttatttcaatgctttgcttaaaaaccgacaaactgtccacctgttctacttgttagggtgagatgttgcatgagatgatcgaaagtgtagttcactccctggaagataagttcacttcagtgttttcgactctccttctgaactgtggtcaggtgcggtttgacgatgtcatgatacaaattcgataccttgatgactcccatttttttgtactgaggacaaccgacttacggttcg

SEQ ID NO: 183510 - DNA, 426 bp, Zea Mays
cgccgcacgttgaggcaggtcgttaatggcgtcgtaggctcatggcggattggaagagggcaggaggcatcgtcgcactagtgtggaggcactgaggtaggtccgcaggtggcgggtcgtcggatcaaggaggcgcggtcgcgcgttcctgccgtcgggcagccaggggaaggagtgctagaggcagagaccagaggggaagcagccaagtgggtggcagagcgttggaggctgaaggtcgtattcacacttttgcagcaccgtgtgtgtggcatggagcgggtgcctgcagggcagatgactcacggttaggataaattgggagcttgctaacctaggaaggagacgtcctactctgatgggtcgggatgaggtatggcacacgccatagcacgccataccgggtcctccgctgctgtatagaag

SEQ ID NO: 183511 - DNA, 586 bp, Zea Mays
ctaaattataattattagaatgaattcaattccctgcctaccccctttccctgaggccccaacatactgctcatagtatatttatactcgttgggtagactgtttatctcgctgcattgtattgtatcctgatgttgcggtctgatatctggtgcagttaggtgctgacatgttccttttcactaactagctagcattactcattcagtgaaatgatacttaagtaattaccaggaactttccatatcttgctggtctccaaaagctcatatgatgaactgctataaccataacctagcacaagatacagctatcactggaaccagaccaagacaaacagaggcatcaaaggtccactgctatttcagaccggacacccacccctaatcctcacctctgaactgaatcttcctaattttggggttcacagcgtttttacccaagtgcagaagaaacagagctgcaaagacagacagactaactcccattcggaccttgtcaactctgcggcagaagcatcagagcttgcaaaagcagctcgccgcctgtaactagcttcacatctcatacggcacagccaccagcc

SEQ ID NO: 183512 - DNA, 509 bp, Zea Mays
cagcgatgttagggtttaggggttggcgagagcaatgtggatggggcgtgttaggtggaaggggcgagagaaatgcgaatggcaatgagatagagcgggatgcggcgagtgaagtcggcgacgacgcagctcatcgacgcgatgagaggtaagggggcggcggtgaggtacctggtcgagggggcaggtcgtcgacggcggatgtgtcccagcggcggcggtgaggtacctggtcgagggggtaggtcgtcgacagccgttgtgtcccggcggcggcgattaggtttggagaaaatagtgggggagaaagaagaggagtgggggagaaataagaggagtgcgggagatagaggatgagagcggagtctgttttagtgacgacggcgaaacatgttttttggcgcccaatgtgtttggcaatgcggaggctaatgcatttaagtatactagcgctgggtatattttgaaaacatgtgcatagctcaatggtttgacctgctaactataag

SEQ ID NO: 183513 - DNA, 375 bp, Zea Mays
aggcatcaaatccaaaaggtttttattagcatggaagcgaaatccaaacccctgaccaattcgggccgagcagcaggcggaggaggagttgcatccgtggcctcccgtgttgctcctcctcgcgcccgcgtccctattacttctccgcgtccgtgctggggcgcggcgcgcccaccgatcctgttctacctcgcgtctgcgctgcgacgttacctgctgctgtcgcccgtcggtggtggaattcgtcgcgcggatcgagccgcgggctcgattcgggcttggcgcctctgtatatatgtcggaattcgccgtagcgtgtgattaggttttgttgttcttctgtgtcggcctggtcttcgcgtgttgtgttttgtt

SEQ ID NO: 183514 - DNA, 412 bp, Zea Mays
atttgtcacaagtaacactaatagcattatcgattagacatttaaaatgctaaatctaagctctgtttcactaatttaccacactctgcataacttgctttacgaacttgaccatacgaagtgtctatttgaaatcatgaacacaatcacaacacgacataccactcaaaacattccaaaaacatctacttgctagacgttagaaacattagacctacccttcgtattactaaccctaccacacatcacatacatgcctacccatatccttcgcattattaaaccaatcacgctgcgtatacgagcctaccaacatattcttcacgtcatttaaacctcaaacctatatttcaccccacatcgcgattcacatatctagccaacccatccatcaatccagttatatgaataa

SEQ ID NO: 183515 - DNA, 424 bp, Zea Mays
ataaactctttggatcatacgccctcacagtgcagttcttggtcgtgatccgagttgacttctctttgagttcgttttgagaaaaacccaacaaaaccccattactctaaggatttctgatctgcaatttgattccttgtttgttcgggttcatacttcaccagagaacttcttttaccccgtgcaaactgtctgtcaaatttgagatcgttctgggcatttttgcttgcccggcgctgcccgtgtgcgcgacactgtcagactccggcactgtcggaccttaggctaccactgccgctcggacttccttgtgattttgactctaatattttctaggaagttaggtctcttgttattagggcttttggtgcatacaaacgacactggtttgtgttgtactctgatctgctgctctgagtcacta

SEQ ID NO: 183516 - DNA, 664 bp, Zea Mays
ccataaccctcttgctatgttgttttttcttcttcatattctttaatgacagaaatactcatggagatggagggattaacacttatgaggagctttcaatcgatacatctactgtttccttgcaggatcacacctatcttggtaaattttcatgctaatcttatttgtgtatattatgttcctagattcggattttacattcctactagattcaatgcatgaacaatggttactttgtcaggggcaaaggttgatggtgcccgaggcaaatttgctttcctgcatggagacagagtcctcaatctgccaatgttttatctccaaggtagcattcctgcttcctgtagaccatgcagtgtatgacaaaacttacctctaattaatttgaatataaggacaatacatttttaactgaaccatcctgttgtcctttccgaaatctgaatggtcctaatattgactgtataactagtggtataatctcatcttacaaagtatatctagaaatgccatctgtgttggcctttttcaccgtagtgaggactattttatgtcgatggcgtatattttcaacatagtggaattatattaaatgttctgttatggaacttctgcaggagttgttttgtttcctgaagcttccctacatcttcgagtattccag

SEQ ID NO: 183517 - DNA, 2197 bp, Zea Mays
atttgtccaccaccacgagtatgcagtcagccccgttggacttgggtaaggcttcgatgaagtccatagaaatgacctgccatgcctgatcaggaataggcaacgcttggagcaacccagggtattttgctcggtcgggtttcgactgttgacagatggagcaggcggccacatattccttgatgtaagatttcattttgggccaagcaaacagctggtgtacccgtctgtaagtgactggaaacccggagtgacctccgatcgcactgtcgtgcattgtagacacgatcttcagttggagggaaggattagcacctacccaaatgcgccctttgtatcggagtagcccagctttaagttggaaaggactatctggagcttgatgaagagtgagttcggcaataagctgctgagtgtgtggatccgtctcatagcctgctgttacttctgacagccaaaccggtgtgcctgaggaaatgtgataacaatcaagattatccgaaggtcgcctcgaaagtgcgtcagcagctccattctcaacaccttttttataaaccaccttgtattggagtcctaataacttggtgaatactttacgttgccaaaaggtattcagttgctgctcggtcagatgggctaagcttcgctgatccgtgtatatgatgaactcgtcatgctgaagatatgccctccactggtcaacagccattaaaatcgccaggtactctttttcgtatgttgaaagaccttgattcttgatgcccaaagctttactgacaaaggcaatggggtgcccttgttggctgagaacagccccaattcctccagctgaagcatcagtttccagctcaaatggtacagaaaaatttggcagctgtaagactggggcggaggataatgccgacttcaaggctgtaaaagcatcctcatgcacgctagtccaaatgaatagagcatttttcttcaacaaattggtaaggggctttgccatgactgcaaagtgacgaacaaattttctgtagtatccggccaaacccaagaagctgcgaagctgtttacaattaatgggtgtgggccaagtggagaccgctgaaaccttggcaggatccgtggacactccatgtacagaaattacgtgtccgaggtaagcaatttcttgtttagcaaaggaacacttggacagcttaatctgccacttgtcctgtctgagcagctgaaatactgattccaggtgagataaatggtgtgaccatgtagggctgtatattaagatatcatcaaagaacaccaaaactgacttccgcaacagaggtgctagagtttggttcatcgccccttgaaaagtagccggagcaccagaaagaccaaagggcatcaccttgaattcataatggccttggtgggtttggaaagctgttttgtgttggtcagcagaagacatgcgaatttgatggaagcctgcgcgcaggtccaatgtggaaaaccaagctgctccatggagttcatccaaaaactcatcgatcacaggcactggaaacttgggcttaacagtcatggcattcaagtgcctatagtcgacacaaaaccgataggtgttgtcctttttcttgaccaatataaccggtgatgagaaggcactagagctaggctgtatgatcccggtttggagcatttctgcaatctgagtctcgatctctgttttgagtgctggtgcatagcgatatggccgaacttgcactggttgggctcctggtacaagctgaatatggtggtcgcactctctgggaggcggtaaaccttgtggaagaacaaacacatccgtataatcactgagaagttgttgtaattcaggggaaagctgctgcacaatatcctgctccttgtccgacagtgagtccaacagacatacttccagtgtttggccatgaactgaactagcacccaaaccccagagcttaatcttggaatgaaggtaaggaatgaccaaacatttagcactccagtgtatccacatcgggctgaaagcacacagccaatccatgccaagaataaggtcataattggatagtggaagtaccttcaaatctgaggaaaaaggaaaaccaccaatgtaccaagtgacatccagaagttgttcagagcaagtgagttgggcgcccccggcgacttgaactcgaactggtgggtacagtggctt

SEQ ID NO: 183518 - DNA, 308 bp, Zea Mays
ctgctatcaacaggggggctgctattgatttggagctgcttggggttcctagttttaatctggaagcccttgatagccctttttcggcagatgaggtgtggaacacaatcattagtctacctctagataaggcgccagggccagacaggttcacgggtcgattctataaggtctgttggcccactatcaagtttgatgtcatggctgcaatttcctgtgtttgggctagaaagtttgccaacatgaattatctgaactctgcttacattgctctcattctaaaagtggaaggggctgacaaggccaag

SEQ ID NO: 183519 - DNA, 332 bp, Zea Mays
tccgaacataattgtgctatgtggttgggtcaaggtctgactttgagttgaaggggacctgtatgccatataccgtaggcctagagcctgttttagattagattgaattttattgttgaattattcctggtagagccgccactcgtgaaacccctagatggtgatcccatcaggttcttcatatttaaggttatcttccagttcttgagtctgtgtggagtatgtgatcaagctgctaccgcttgggtccgtagcttaggattcccgaagttcctcaccttttggtcaatgtttcaagtcatccgattaatcgcgattaatcatccaagtcg

SEQ ID NO: 183520 - DNA, 325 bp, Zea Mays
ggaattagtaggcgttgacgcaacatgcgatcgtcagattatatgaagtaggtggggactagataacgatgcttacaatgtggttgtgttggacgaagaagcaatgcagtagcgaactcaaactcgaaggcaagtagttcagacagtagtggatgtttgagagtgagcagtcaggacacagagtgtggtggcagatgagcagcggtggccccactcactgctagcactcaattgacgatgaagacctgatcaacaagacaaagaccttatgtggacggatgacacaacaaagattgcacaacatacttgtcgatgcacgtggaac

SEQ ID NO: 183521 - DNA, 1103 bp, Zea Mays
caaaggcgaatgtacgaatagtcagttggtgttttactcgtctaatcgctaagtgttgtcataaataattgcgctaaaatttggttataagaatacactggtcacgtggtgtgtttggatgtgacaagtagattaggagtgtggggtctgtcgaagcactgtgatgtccaacgtgaatatcaaagtgcattgtggtggtaattgcgttaagttaatcggtagtgtctcgagtgcatgccacaacatggttgtatgcgagacaaggtaacataaggtgtgctcgacacgaatgttcggtcgacataagtaggaaattgtgtttgcttaattagagaggtggtgacatgccgaagtagtcatcgctttctcaatatttataagtcgaatcgaatcgatgcgtattttgtgttcattaaattatgcttcgcatataatgtgtgattgtgctcacggattcgagtagacacttcaagcaagtcaagtaggtttgtggtatgagttgtgtaatggagttaattgttttaggataattattgaaatgctctgttggtatgataaacatgtatgtgttcatgattgggaagtaaatgcatggtgattgtgagttggagactagtagtttgcgattcgtatgatttggtcggtgtgcgaaaatacttgtgaatatgaatgtttataaaaatgttgtagtgtatgtggtgtctcgaattgtgataataataggcaagccgacgggtatgctgtctagcgggcggtgtcgttgttctagctagccgactattagatgaccttggttaagctcatagtcacgatgatttgcttgttgtagtctaaatgtgtatgattatggtcgcgggtaaaaatctgtagtgctcatgtggtgtctaaactaaaatgcggactagtgggtgaaaagcgcttagatataagtatatgccggatttgatgattgtggtgaatgcgtttgttaactgaatgtgataattttagtgcactaaatgatttagataaaatttgcaagtctacttgttagtcctcatttgattaatctaactctaacaaatggtaaagtggtagaataattcaagtctctaaaacgcggc

SEQ ID NO: 183522 - DNA, 427 bp, Zea Mays
gaaagctgatgactatcaaggtacaaacttatgaccctttcaacttttttacaatggtttaaggttatatatgttataacacaaaagtgctgattcccgaactcttcctgtattcaaaacctaattagcaaaacgagtaagcggccaaataatatatgtggaattgctgttcaattcattatatagaagcatcaagcatgtaacattcaaaacatgatatctttatagggccatattgtccttgcattatgggcacgaaagaaatggtgataggcagtatacgatggccaaaatattgcgcaaagtaattgcaagatgctttatctttattgtgttttcgtgtcatagatcatcttgtaatgtgctctatgataaattcgtggttttggggctgtaatacagaatttagttcattactaattttgtt

SEQ ID NO: 183523 - DNA, 549 bp, Zea Mays
atgacatgctcgccagcggcaaaggaggactcaggtgttccaaattgagtaccggagagtggctacgcagcaggtgcttatggctcttgcgagcaacatggagtgaaggagagcacgggcgcacataaataggccgagatagggagtcagggcgccggagaagggaagaggaagagttgctggaagggagagtaaattacagctaaagatttgatggtcattgaagttgagaaactgaagaatttagaacgccattaatggtcgccttaacttcaacgagaaacggctgggagataatgctgggcagcgcgggcgtgggtggaagaagaaccagcgtggggagaggaagggaggattcatggcagttgagtgccgttcactccgacggggaggcgagcagacgaagagcgctgtgcaggtagcgcgcgcacaaacaacaaagcagagaagaaatgaatcggctggaggaagctgaagggcccgacgtgtgggacccgcacgtcagcgactagagagtgggagtgggagtatgacacgctaggctagtat

SEQ ID NO: 183524 - DNA, 336 bp, Zea Mays
atttatcgatgagtacaaatctggagagcacatctcttcattttgggagaaagattacttggaaatggcagtgaagcatcaccactaacaattacagcccaatgtctaaaacacaattgacttcaagattgggaaagagaaaaactttgacgctcaaagtcattgcagcccaatgcctaatcaactcccgatgaaaattaagcatctagcttgcctctagccctctctaggccatgttattatgttgattcgcaagtgctattttttgacgtctaatcactaacatatcaatgattagaagaggatctggtatcatcttgctcattttgcatggcc

SEQ ID NO: 183525 - DNA, 714 bp, Zea Mays
taacttttggtctcactggttatccatactcggagtttgaactgatggctgaggagcttcttatgagtgactcaataattaaggtaatttttccctgtttgtttcttgtgatattcaattattcacctactttgtatctgctttatatgtacaaattattgcgctttaacttgatttctcccccaggtgttcggtgctttgagaatgtctgtaaagatgctcctaatgtggaactccagaatggaaattgatggcggtggagattcgatagttgcaacttctttgttagatgctagcaacctgatagttctgaaggtttcttgttggtccaatattaattactgtttttatctgcttgtctcagtatgcataagtatttctcatatgtttccaggaatcatctgtgatacactctaatgctaatcttggagtccgtggccaaggtgtcctgaatttgtctggggacggagacacaattgaggcacaacgccttattctatcgctgttctacagcatacaagtatgatacatatgcttttcagcatcagttccttttttagccataacctttctgatgtatttgtttattgctgcaaaatttcttagtgcatcacatagcaatttgcattttgaactctatggcgttgcgctgctctagtccaatcaaagatacagtacaggtcatttagcaatgttaattgtgatggttcatac

SEQ ID NO: 183526 - DNA, 386 bp, Zea Mays
catcaataaggcaaccgagctggaagagctggaagaatagggaaggaagcaggcaatcaggcaaccgaattggaagcaggggaagaggatcaggcgagtcttatctccagtatatcaatcaagtagtttcctatttctgctatagcagacagtagagtttcgtgtttccagtatagaaagtaataagttgactgggtgtgtttcctgccgcctatactataaaggctggctgctagtttgtaattgggcatcgaagaataatacagttacctccttgaggtggactgttcttcgacggtggcgccttcagccgccggcgacaacagtcctcctcctcgctacattctgcgttcctgttctcaagccactcgcttcctccactctcc

SEQ ID NO: 183527 - DNA, 283 bp, Zea Mays
ccaggccgccgccagaagcggagttgatacgaatcgcgacatcgggaaggggacgatccgccatggggcccacgcaccagcgcctagcgagagaaagagagctcgtgccctagccgccgtagcactcgccagggaatcactcggcttcgccgcatccaccgtccaccagacgccaacactgccatggttcggtggaaaggttggggatgacgaccgcgccccatatgtcagtctcttgaagcaaagagaaaatgaaaaagggaaggaggtggagtaggccgca

SEQ ID NO: 183528 - DNA, 589 bp, Zea Mays
cctttggggactggagacagcggaggttttgcttggtccatactgcctgatttagggcctgcacccggattctatcggcggggaggacttgtcagtcatcaggttgagagcatggtgccgctctcccgtggggttgccggaggtgttggacctgcatgctgtggagccggcggtcctcgatgaagatagggtttggattccacgttcgttggtgttccctgtgatagtgaagattattggatcggagggtgtccttgaggagcagctaccgccacctccaccggatccctctgatgatgagccggagcagggtcgtcgggctcggcgggtgcggaggctgggtgatcaggcctcattgcctcggacttcggtacactcgcggctgggccctcgttttcattcctcgtcgacgcgtgatggaccctctgatgatgttgcgttgatggcttctggtgattcggattgccctttaactccagtggatgttttggtggcgcctgtctcctcggattcgttggcaggaccagttgatgcccctaccctcccgtgtgttgcagttcaggagctggtggcgcctggtgttctggcc

SEQ ID NO: 183529 - DNA, 818 bp, Zea Mays
caaatctccagaggttaactcaactgagactagatttggtttctcgttaggtgatgcagcaatcaccgaggcctatgtcgatccttcagagactgctttgcttggtcctattgtcttccgtccctcgaatcactgtatgtggtcaagcatggttttgatcagaaacaacctgtcgggtgtggagatgctgcctctccgggcatatggtgggcgacaatctattgtccttctagaggaatctgagcctgcttggaagctagagttcagccttgggtccaatgttcataataaatcaacgatgaccaaacaagagatcccaagctctttgtgcagtcaacagctaaccaaagagatacatgttaaaaacagcggtgaccttcctctacaagtgacaaaggttaaagtttcaggagctgattgtggtgtggatggatttaccgtggacaactgcaaaggatttagcttagcaccgagtgaatcaataagaatgctcatttcttttcaagctgacttctcttcagctatggttcagagagatcttgagttggtcatgactactggcatctttccgatccctatgactgcaacaattccggtctgcatgcttaaccagtgcagaaaatcttatctcagatctgcccactggaagctgttggtaatcttgtttggagctttagcactgcttattctggtctttgtccgttatgccccagattctttgacagtgggctctcaagactatatcaagattgatgacaaaaaaagtgccattttcgaggagaacaagaaaagtaccattaacaagacccttttcctta

SEQ ID NO: 183530 - DNA, 435 bp, Zea Mays
ccccagtcgcttgccagaacgccaagcacagccccagcactagacgtgcacacaggagcttgcgctcagctctgctcgccgatccaccataccaaaagcgctctccttcgtctccaaccccaccctccctcacaccctcaccagtcacctccacaaacgagagaataaaggtgaaaggacccctcggattcacaacggtaaagcctgcggcaccctgctccttacagcccactcaccactctcgctccaactccgagtttgagtgcagcagaaggcagagcaggaaaggaatttcggaagggacgggtacagcccgcagcgccaccacaagggagcacctggaccaggagcctccaagcgcaagcaaccaagcgcagcgcagagcacaacccgacgcccagcacaaccagcagccagggcagcataaagcaatgc

SEQ ID NO: 183531 - DNA, 402 bp, Zea Mays
ggagcatggtcgattatccgtccgtcgaagacgcagagtgaataaaaaaacagaacagaaaaaggatccgagaccatgccggtcagactcgacggaaggcactactagctttacggggttgcgctggtccgcggatccagcgaggaagaaagcgggggtagtagcaagcataggggaagggaaatgcggttggggtttttgcgtggtacggtccgtaccttgaaaaccgctttgctttggttggagctgtggtggaggagtcgagtgccaaagccctgctgttccaggaaggaagagggtggaatgcggcgatcgcgctgcagcggaagccctcgcggcggaaggaagacagcgtggttggatggatgtagtagtgaactgcgctgcctctcttttatgtcc

SEQ ID NO: 183532 - DNA, 665 bp, Zea Mays
ggacaggataaacatgtttgagagccagaaaaaggagcagactccaagttctggtaacagcaactcagcaggtactggtagggtggttccagggagaggtgagcaccgcagggttccttctggggcctccatggagaagttagttagaaggtggagcagtgttagcgacatgagtattgatctcagcaacaatgagagcgttaacataaatgacaaaaaggacaatggaactcctgttgtgactccaacatctactgatttggaggccaactctaaagcaaaagctgatgtggactctaatggacagaaggatttagtcacatcacactcctggccttatcaaaaggataatgtaccaatggatccgactaccacagatttgtgcccaccctcaactttaagtaatacacttgctcctcatagtgatggtgcaggaaacgacatggttataaactctagcattgagagtgagtcatcctttgggaaagaagcgggggttattcaaggactcacaaggatgtcaaatcatgctacttcaaatgtttccactcgaaaccatctaaaatcttctgcaaagccagttgaggaaggcttgctgaaaaataaggatattttaaccagcacatcgttagaggagcatgttcgcatgatagataaggaaataa

SEQ ID NO: 183533 - DNA, 454 bp, Zea Mays
cccaaataatgagcgacgctttctgtagcaactttgatgtcccactttgtttcgtgaaggtacatatagcaccatcatcaatagtgagtggtatcttgaagcgtgaatgggcagttctcccaccaggcattatggaatcggcaaccctagatgtagctattgcaactgcaatcttgtcctgactacgtagcaccgcaagcaatgccttatacagataagtctttccagtcccaccaggcccatccacaaagaacacatcgccattactagtgtcaacaatagataagatcttttcataggcagacttatgctcctcatttagggtttcttgcaaagcaacatcttctatcatcgcctcgatactttcctcctcgtaaatctctctatcaataccttgtgaatcatcatatctatcgatgatagaagggagggggaatgtctttatgtctttacc

SEQ ID NO: 183534 - DNA, 1266 bp, Zea Mays
ttatgccaacactgatgtagttaaaggaagtaagaatcaagaaatagcttgaaagaagatggcatccaggtgaaagaatttggacttacaggaccagggccctccgtagatggaccaccaacaaatgccattatcctagcacctgatccaggaacacaaaccccaaggagattggctgcaacacttaaggcagctccagtgcacctagatgcacgctgatcagctggaacaggccaagggtccttttgtatttcttctataacctacatacaatgaaattatatgatagattattaatattcaacacaaggctatgctatatgaaatagacagtgatatctcctattttaattgtaattaatgtaattggcccttaactgagttcaatacaaactcgcattcagaagcaggcagcagaaatctagagatgctctcagatgaaaggccatctctggtaccagcaatcacgcctgtggtaggcattttcttccccgcaaaaaagcacatttgttccaatatttgctccttggtgacctcctttgttcctttgaatacatatgattttggcaataagccaaaacccaattcatgaacctgaacatgcagatggtacatgctactaaactaaccaatttcatatcaaaaagaacaattatatggagcattagaaagcaaacaatgggcttttacctgcacatacgtcccgaacgtaatgaatccaacaagagaattatctggcaatagctcaacagcttgtgccagtgcagacttcaaataaccaatttcttcttcaatcatgcaagtatctacaacaaaaatgaaaaccggtggaactataggaccagtttcagttgaagatatgtactcgacggtggtgtactgaggaaagagttccgcagggagattattttctgagatcgaagagtagtgttgagggaactggttgcgttgaaagcagaatgaacagacccaaatcttagcaacatagtcaacaatggagaaagggttgaggatggaacgacacatgcgacagcgaagaggtgaatatggaagaacagggatatcagaaattggtttcaaaggtgtgtagatagcggaaacaggaatcacacagttcacagtctcctgttttgtgcctggaataacattccagggcatccttatcccatcttgtagctctaggtcaaggaactcagacatcttcaatacagcagccttgtacaatagttgtaagaggcttccacaagtcagacaaagaaatctggc

SEQ ID NO: 183535 - DNA, 456 bp, Zea Mays
gccgaagaagaagcagccggactcgaagcagaggcagaagcccaagtcctcgtcctcctcatccgcagccaccgccgcgccgcgcctccagatctcgtcggagaacgagcgccgcctccgccgcctcctccttaactcctccgcaccatccccgtcacctgccaacgtctcggaagtccgcggcgagtcgagggagcagaaggcgcggcggctgcgtggcgtgtacgacaagctcgctctcgagggcttctcttccgcgcaaatcgagcaggcgctctccgcgatacccgtgcgcatccactagcgttcttagaacctcacggcgatgatgtgaccgtatgttcgtattggctgtgagctgatcattttccattcgtgtgtcttgttttttctgtggtaggattcggcgacgtttgaatcggcgttggactggctatgttttaatctgcctggcga

SEQ ID NO: 183536 - DNA, 398 bp, Zea Mays
ctctctgctacaacttcctctggagtcttgcaaagcatggcactcactgatttgcttgccttctgtgtatttggttttataggagctgctacaacaaatgaagacatggaagcttgagcaatttgcttttttgcttgcttggtttttgtcccagaacttggtaggggacatacatcaatctgctccccttcctcttcaccttcatcaccatcagcagtaatcataaccctcatgttccttctcagataggtgtgcatctcctttgaaaccacttctggtactctagcacacttcatggtgtcaccaaacccaccggctagatgctgcttaaacctcttgattccagatggcacaatcttcttacagaagacacactgaacaaaatccttctttgttgt

SEQ ID NO: 183537 - DNA, 504 bp, Zea Mays
atggcaaattctactgtggagattcttatatagttctgcaggtaataattttaacctttcctttttccagagccaccagcattctctcttttcccctacacaaactgtattttattattattaattaatgcactgtacctgtcccattttttagacgacatgtaaaggaggtgcttttatttttgacatccatttctggatcggaaaagattccagccaggtagtaggttttctgtgcctgctcctcagatctcctacgacgctacaaacgacattccgtgcccacctgtcgaaaactgttcttgtcacgcaggatgaagctggaactgcggcgatcaagacagttgagcttgacagcatgctcgggggccgtgcggtgcagcacagggagccacagtgctacgagtctgataaattcctctcgtattttaaaccgtgcatcatacccatggagggcggctttgcttctgggttcaaaaagccagaagtggacaagtttgaaac

SEQ ID NO: 183538 - DNA, 524 bp, Zea Mays
gtaaatagggactgctacattctgtcggtccaagtattaaatgcacccattcatatacccccattgggataacggtgtgcttgatactgacggatgggcctgttgcggtcgacaggtggcccatcttgcccgcaccacttaggtattactcctcagccctaagtgtgggatgccttcaagacgaggtcttcggcactactcatgtgatccacgtccgggcctcgcctgctcgattggtggtctgcggactccgcccatggcgaggtctttgtcgtggccttcaaggcccatgtcgagaggttgcggtcgtaggcgtcaatcaacatcgaagggcttgtcccatgatgggcagtctcttcagccatccttgcggccttcgatgatcccttcactcgtgggtggccaatggcctgggcaaggtccgtgtcgtagcctcctcagccttcggcgggaggatgatagtcggaggcattgtcccatgccaacggatgaatccaacataagcgaagttcctcaaacattcc

SEQ ID NO: 183539 - DNA, 676 bp, Zea Mays
cacttgaatagtccagccaaaaagcgcggctaaggctttgatctggacctccgacagctgcttactgaacactcgggcatactcgtcaagagtcttagaggagacgaactctgaccgatcagacccaacaataccttgttccatgagaatcctcttcctacccagcttagctggcaatggaactggcaaccgctcaaccccgactctagcaatcctcctgcttttccgaggtttaccaccagcgggagtgggagcagcagcccgccgataattcccactaggaacccgtagagcaccacaggcctctttgatcattctgtcaatgaactttaccgcattggagggaggaggggaggagttctcacactgggagactgcgtctttgaacgatccacccttcttctccgacggaagtaggtgacaagggggcgagcttgccccagctgcctagcatgatctccacatttcgccgcttctgcagaggcaaccccaggcattggcgcaactagaaggcgctcctgtccagccggctgtaggcccagagcgataccagcaacaaccagcgtttggacttactcatcaatcgggtcagcaaaaaaacctgtctcctcggcgcccgccaaaagcagggcccatcacacatcacctgaaacgaagcatcctccgccacccccag

SEQ ID NO: 183540 - DNA, 810 bp, Zea Mays
ctattgcagaatcacacatgggatctggtgccttgaccccatggtgcaaacattgtgaccgacaagtgggttttcatgcacaaatttaatgccgatggctctcttgatacaaggctcgctgggttctccgtggatttacgcaacgacccgacattgattttgatgagactttcagccccgtcgtgaagcctgctactgtgtggactttcttatctttggctgtctccagcaactggccgattcatcaacttgatgtcaagaatgcttttcttcacgtgactctttctgagactgtttattgcagccaaccctcaggttttgaggattcagccagcccacaacatgtttgcagactcaataagtccctctacggactgaaacaagcaccacgtgcctggcatagtcggtttgccactcatctactctccctgggattcatcgaggccaagagtgacacatctctgtttgtctaccatagaggaactgacacaacttatttgttactctatgtcgacgacattatactcacatcatcctctactgttctcctccgacacatcattcaggccttacagttggagtttgctatgaaagatttgggtgatctacatcactttctggggatgcaagttcaacgacgagatggaggactctttcttttgcaacgtcaatatatgctggatattttggatcgggctggtatggcagattgcaagccctgttctatacctgtcgacacaaacccaaaggtttctgcagctactggtactcctgtttctaatccatcggatttccgcagcttagttggag

SEQ ID NO: 183541 - DNA, 471 bp, Zea Mays
tgggacatgcatccgtgatgctcttctctatggttgtgctgaatttggcacagtaagtgggaaaatcagacattcttccattgttatattatgttaacatttagtaatttatagaacaatgaattatcatattctacatactctttggatagaacattaggtcatcaacacctcttccttttgagtatactttagctgtaataatgtatttaaaggataaatcatcgtgatatcctctccagtaatctttttcttgacttatgtcaggtacctgacaaaatggaaatggattgtgataaaacagtggatgcgaacactgctaagtgccagaatattcttaaggatgttttaagatcggagaactttgctttgttgtgcagtgtactctgcagaactgtacatcaagatggggaaagaactagatattttgattttggtgtgattgattcaaggatgaaaaatggaaattat

SEQ ID NO: 183542 - DNA, 690 bp, Zea Mays
gtggtggcagtccgcgtggcacttcaaacaaatcaacaaatatatccagtaggacgtccattggcatagagaccagtgctgtggatattatcaccgtttgccatcttgactgataaaccccgcccatggttgaatgtggagacccaattgctgtgccaaatcgttccggatgaacgtgtgtgtggaacctaaatccaccaaagccaccactgttgtattgttgatcgtgacttgaagcttcattgcttggccatcatcaatgctcgtaaaggcatggagggatatgcccatgtcctcagccacttcgttcttttccatgtcatctttcaattccagcaaaaaaatgcccttggccgcatacttatggtctgctgaatatttctcaggcagttaaaacattcacctttcgcgcgcttggcggccaattcttctgggttcagtctaatctaggcttgcccggggctactatttttggcatgggccaactaccaagctgtgctgccgagctacgagtaccttgctttgtcggtgcgaatcccaagcgacactcatatgctctggccaaactcattgcttgctgtaggttggtcgggttctgcagttcgacatcagtgcggaggggctcgccgagtcctgcagtaaacaagttgacctgctgtttcaaggagatcctcgcaacagcgtatcagt

SEQ ID NO: 183543 - DNA, 307 bp, Zea Mays
cctgatttcaataatcagccacctgtttttctacctcagtttgtgatagggagaatatctatagggtcgagagtttactagaatggcaccagggatgagtgggatatggtgatcaaatgatctgggaggtggtaggcagtaggaacagaaaacacatcctgaaattcttccaacaactggtgcatctccatggtactgtcaggcacaaactcagtctcagttatattctccatcaaagcaaaagcccacacatcatttcccttcatactcttctcaatctgcaacacagaaatctccttcacctcct

SEQ ID NO: 183544 - DNA, 281 bp, Zea Mays
gcgaagtccgacacgtctctctttatttataaagattgtgatgatgttgtttacataccactctagttgacgacattgtactgacggcatcctatcctgctctattgggagcatcgtcgatcgtctcagccctgagttcgccatgatagaccttggcgctctccaccactttctcggtatctctgtcacacgctcctctgatggcctactcctgtcgtagcaacagtatgttgtcgatctactctagcgagccagcatggctaagtgtcacccacatttac

SEQ ID NO: 183545 - DNA, 611 bp, Zea Mays
atgatttaaatagatgctttgtacgcaggatccaagaatcagaggtcaaagaagctttaaagaggatgaaagggggcaagacgatgggcccggatggtatcctaatagaggtgtggaaatgccttggggatattgctatcgtttggctaaccaagttgttcaaccatatttttcgatcaaacaggatgcccgataagtggatgaggagtacattagtaccaatcttcaagaacaagggagatattcaaagtcgtaccaactatcgagggattaagctcatcagccacactatgaagctatgggagagagttattgaacgtcgccggagaggaatgacgcatatcaccatgaactaatttggattcatgccaggaagatcaaccatggaagcaattttcttagtaaggcaagtcatggagcgatataaggagcagaagaaggacttgcacatggtttttatcaacttggaaaaggcctatgataaaatacctaggaatctcatgtggtggatattggataagcataaagtcccaacaaagtatgttacgctcatcaaggacatgtatgacaaggttgtgactagcgtccgaacaactgatggtgatacaaat

SEQ ID NO: 183546 - DNA, 352 bp, Zea Mays
atgaccgagcaactctgcgaggtggagcaaaagatcaaacagacccgcaaggagggagcctaggacgacgttgttggtccacgatgactgtaacatgacacgttgccgccaacccatgtccacgccatgcgtacagtactatcggtgttttgacccgagggtcctaaccaactggtgaatttgtgctacatgtcccggtccggatgggtgatggaagaagacacaacatttatcctggttcgggcaatagaaggccttacttccagcagagggggaatgagacttatattatcttgcacctaagtgtttgtagtagggggtacaagctggttgagagggagtggatcccaag

SEQ ID NO: 183547 - DNA, 415 bp, Zea Mays
gtttgatgctctgtttagggtttagggtaatgctcaatttagttaactcttagtcctttaaatctgttgcaggctaactcattcggagtaggtttagaaattgattgggattcaattcagctagaccctagatgggaggaggaagactacaagaagttgttaacgtggaagtggtgtatgatacactgggcctgacaaatgaggtgatgggtggaaccaattgtgatggttggcaaaacgattatggtgatgcaggggcagctatagaatgcaaggacattgacgatgacattgtaatgtttgatatgaaaaatccagttatgaggcttggtaacatatatatatagtagcatgaaggagtttaggctcgcaatgatccaatatgcaattaacaaggaatttgagctaggcattg

SEQ ID NO: 183548 - DNA, 310 bp, Zea Mays
gtatgattcaagctgctcatgttgggattggcatcagtggccaagaaggaatgcaagctgttatggctagtgactttgccattgcacagtttcgttttcttactgatttgcttcttgtacatggacgatggtcttacttgagactgtgcaaggtatggttatagttgctcaactttaacctagcatatagttcaaagtactgaatatgagatgttctgttgcaggttatcacatacttcttctacaagaatctgacatttacactaactcagttctggttcacttttcaaactggtttttctggccagcg

SEQ ID NO: 183549 - DNA, 398 bp, Zea Mays
ggactggccaaaggtgacgagacaggggaggtacattggaacgacgagtatagacacgagtaataggtagacgatctgacgaaactgatggtgaagatgtctctggtggagatataggcaaaatgggatcagacaagtgtggggataaaacaatgtcattactaggagaagacaaaaaagatatggtctctaaaggagaatacgaagaggaagtagaagaattataaaagaaaggacgattttcaacaaatgccacatcacgtgagatacgcatgcgacgagctgaagaatcataacatctatagcccttatgctcagaactatatcctaaaaagacacattcgacagattgagcggttaatttggtgcgctcgcggggtgctagcagaacataacag

SEQ ID NO: 183550 - DNA, 617 bp, Zea Mays
ctccgtcctgggcatcaccatcaccaccatgccacttgctaccaaccatcgctgtccattccattgcccatccaccaaattcagttcccccactcactgtccctgctaccctccatttccttggtggggccttcgatatttgttggcctgggcgttgctccttcggagggggcacattgttcccatctggcgtggcattttcgtatggcgtggtgtttccctcgatctcggcatggtgtttccctcgatcttggcatgtgcccatccttgagtttcacctctcggttgcccttcataggcacaacccatgccacgtggtagtcccaggggacgaggccttgcttagggacactccacttctacaagttggatttctccaccttcgatggctccgaggaccccctgaattggctcaatcgcatgagcaattcttttgaggccagcacactttgtccttgtgcgtctggctcttgtcgtaccacctcaccggtgtcacccaaacttggtactgcacgttggagcaggatgagggcatgctaacttgggaacgcttcaaggaactctaccacctgcgttttggctcgatcgtgtgtgtgaaccagctagtagagctggct

SEQ ID NO: 183551 - DNA, 812 bp, Zea Mays
catcgacctccgggccatcctgcccattgccctctctggttcgtaccactaactaccgacctgatcggttcgagcatgctgatgctttattagttgcgctcttctagagtagccactagccagcatttcatgaaggacaacttggttgtattttccgctaaaccgagcgttctagaattttgtttggttcgtttgattcttattttagctcccatttaatataatatctaaatcagctttctcggaattccctctggattttgctgctatttgcaggttgatcccatccgtctacatagtacacctagttgtttatgcttgtgcaattatgcatgcgattttatgaaacttcactaatagctcaaattgaatgaagtttttaaaaacaaaaccaatttagttttgcatatgaggtatttcattcgaagagcttctcttcctctacggtacctgaatcaaattgcttttcagggttggagcaccttaccagcgtagacgagagatttgcaaaatacagcaacactctgttcagggagactagccttgaggtgaaccgcgaacagttgactcccaaggagaacgacaaactcaacaagtctatctccacctaccttcgccttctagctggctatttgcatcttccctctgccctcaagacccttgaataccttatccgcagatacctgtatgaatttagctcagctaattttgccgatggccctacgagctctagcttattctcttgtttctggtgggaaccttcatgtagggtgcatgtatacaattcggatgagttgctgctgagcgcactg

SEQ ID NO: 183552 - DNA, 314 bp, Zea Mays
gatcaagtgcacaagtcccccacgggcacacccatctccctgtagttaaacagcattatcctcagctcctcaccctcaaagagacttcgcaactccccctcacctacactcgccccagctggcgaggacaacaattcccgcttgccagccctatccacacgaagacgcccaccctccacctcactcactctacgctttgccaccgcccttcgccgcctgcgcccagcactcggaccaggaaaaacatcagcatccatcacacgcggagaagcctccgccgcaaccacatccaaggccgcaaaataatctaagtc

SEQ ID NO: 183553 - DNA, 479 bp, Zea Mays
cttcgggtgaacactatcagacctctgaatatccaaagctttgccagcctctgggatgggcgctgcatccagtgtttcagcaggggctgcatcagaggaatcttcagccaacatatccagcatggcacttatctcagcatcacttggattcaaaggtacctcgaaatgaacctgcctctcgtcatcagggatttcaccaagtgaggcaaccaaagcactaacctcttcgggagagggtcgcactctaaggcccaaaccgctatcaccagcaggaggatttgacacaaaatcggtaaaagccttggaaggaggcagattccaggccgagtatgcaacaggagcaccgatgttcgacaccttgcctctgagtatcatctcgagccagctgaccaaatccactgcaggaattcttctgttggtaacccgggtcgaatcagcgaggcctcgatacagataagtcgggtatgctctgtccttta

SEQ ID NO: 183554 - DNA, 403 bp, Zea Mays
aaccaagtcagatagttcactgttcatctatcaccaagggccagacactgcctatttgctgctgtatgttgatgatattgttctcactgcctcctctgcaaagtttcttcagtatgtgattggggctctccagcgtgagtttgctatgacggacatgggtcagcttcaccattttttgggcatttctgtgacacgttctgccaatggtctgtttctctctcaacgacagtacactcaggatattttggagcgcgtcgggatgagcgtgtgcaagccgtgtagcacacctgttgatctccactccaaattatctgcagatggacctcccgttgatgacgctactcagtaccgcagcctggcaggtgctctacagtatttgactttcacccgtccggacattgcc

SEQ ID NO: 183555 - DNA, 486 bp, Zea Mays
taatagggcatagtggtcacctcgagttaagtatgcgtgccaattgacagtgaacaatctgagtgcctttgaaacctttttattgatgatatttttctcgatttacagaatacatcatcgttccgagagcctctgtgatgtagctacgggtagaacttcctgagatgttctatgttccatgagttcccaatttctgttccgtccatctgagtgaggcgatatgatcccggtcgagtgacttctgctactatgaatggtccttcccatagaggtgacaatttatgccatccctcccccgttagaatttggcggaggacgagatctcccactgcgaaggatcgatgtcgtatggccttatcatgatagcgcctcagagttcgctggtatcgcgctgattgaatcaccgtattcagtcgctcttcttcgagtacgtcaacgtcttccagcctagtagcttcagcttctgctatgttatcaaagattaac

SEQ ID NO: 183556 - DNA, 275 bp, Zea Mays
tttgttagtttcttggtcgtaggagggggcataggatgctctgttgcctcctactaccttctcccctaccattttctttctctccgaatggtttggttcacgggaagcccaagggcgaggtggagtgggggacgcaggacagctcaagaacacaaaccttggggcaagcgtacaaaacatgccaccccgacagctatataaaagaccaagtctactgccccgatcaaagtttaatcatgcattactttattcgtaatccgttgtgccatcagcgc

SEQ ID NO: 183557 - DNA, 488 bp, Zea Mays
tcggttgttcgagtgtgcgacaccgacaggaggtcgaggtcgtcgcagcagaggaacgcgagcgagcagtgagggcaacaaggctggcggtagcgaaactggcaacaacaagcgcatgagtagaagcatcggcggtagcagacctcgaggctctgcgaggcagtagcactagcagctctgcttctatcgataacaacaccaatgacgagctcagactggcaagggaggcaacacgagagcaggtggcgcagtggccagccacgcgtccccacgagcgtggtggtggcagcccattacaatatcattacaatatacacaacacactaacactctcttcaggagcacacttgtctattgcgacaacatcatcgttgtctatctctctgtccagcaccggcacacgaagcatgttgagatccatctccactttttctaggagcgtgttgtgttgttgttgggtacgtccgcattcatcacgtcccgtcgag

SEQ ID NO: 183558 - DNA, 840 bp, Zea Mays
tggagttgttgagcggagaggcagtgtctgaagaactctaccaagttgcgcagactgtatatactctatttggtggcgatgacacggagtatgttggtgctaaaaaagtcctttccaaaaggtagcaaacaaacatgccatgtctctcttttttcaagcctcacaaacttggcaattcgtttggcttttgtgctcttaaatgaggttcaattctatgcattgcaactcgggagctcttaaactgccagtagtaaattaccgaggtctagatggcagatggccataatctcctgggcaatagtttggttgcatcaattatttgagccgtgttacatcatctttcagaatactatcactctgcgtggttttctgtatcatgtggatgctataagatcaagttctttctgctggattcacactacttacatggtttatgtctcatcaggaatgagttggagagccttgtgggctacactgtacaagactcagttttgaaaaagctagctcagttagctcagaagctcgattcccttcaacgagcaagtgcctatgaatctgtacacagaatagcggatgatgtaaatgaaaatgatagaattgaatttggagcagacttcgatttcaagccacttgcccgtttcattgttgatgtttctcttgacgcacccttagaaagtgctgaattgggcagtggtccatttgaaaaatggcagtatgatgcttggagcacatccacaactagtcattcaactgctgttaggggttctgtgagtttgaggtggctgaaagatcagtgtgctttgataactaaaagtggtggctcaatgctctcaggagatg

SEQ ID NO: 183559 - DNA, 984 bp, Zea Mays
ctgcgtatacactataaccagctttctcaagcaaggcgtctatcagatagttgtaacaagggtagcagtgaagagtagtcatcattggggcgattatttatgtgctgatggcacaatggattatgaataaagtgatgcaagattaaacattgattagggtagacttggtcttttatatagctgtcggggtgtcaagttttgtacgtttgcccaaaggattgtgttcttgagctgtcttacatccccaaattcacctcgccattggggttcccgtgaaccaaatcatatggagagaaataaaatggtagagggagaaggtagtagaaggcaacaaaacatcctatgtccctcctacgaccaagaaacaaactggtcatgctacggatgtgaccaaacccttgtctgcttccaaagttcaccaaaacggttcctatttcgatgcgcacaaacaaattgcttttgtaatatggatgtatgcatatttaccggtgggtgagggcatcggctggatctggacgaggctcggcggtgggcgtcttcctctgcatcttcttcatagcgtcggcggaggggtcatcgtgttcttcggaggaggggcagcgacgttcgaggagcacgcgtgtgccggatcgatggacgagctggacgtggcctcgggctccgtgtcttcttgctcggcgtcggtggtgggtgaaggcgacagctagatctggagaaggattaggtgagacacggaaatagggagcggacgagacgaggcgaggcgagacggggtgctgcgtcggcggtgggtgaagcgacgactggatctgaaggaggacgaggtgagaccctacgtcggcggtgggtgaaggcggcggcgggatccagaggacgaggcgagacggggagatggggagcagacgagacgaggcaagacggggtttgtgtgtccgaccttctgacgcgtgtttttcctgcccgtgaaaaccgttccaaaccggg

SEQ ID NO: 183560 - DNA, 336 bp, Zea Mays
actggtccacgggctgagcattgcagtatcattcggcatcaagaagctgatggtatatggtgactcgttggtggtcataagccagataaacaaggattgggactgctcgaccgactcaatgggcaagtactgcgcaactgtgcgaaaactggaaggcaagttcgaaggattggagttccatcacgtggaaagagaccgcaatgcaacagcagatgtgttgtcgaagctgggatcttcatccaagaaatatcacagccgagcatccttacggatcaggtagagaggaatgcaacgccttgagtcagccagaggcagatcccaacgactggagagagc

SEQ ID NO: 183561 - DNA, 533 bp, Zea Mays
tgctgaggatggccggcaacagtgatgaagtggctggtacaaatactcggcggccatggagaatgagatcatccttcacctgccatggggcggtcagagtaccctctctgatctgattgcagaggcgctgaaattctggatcagaggcgcacactcttgtcgtagatcctcatataactggaaggtggggctggacactgcgttgagcaggccgtctgctgtgttgcgacgagacagggcgtctgcaactgtgtttcactggcctgccctgtattccactgtgcaatcaaatcctaacagtttgctgacccactgatgttgaggtactgtggacagtcgttgatcaagcatgaacttcagactatagtggtctgtgcgcaccacgaaccgtcgaccccagaggtaaggtcgccaatgacgaacggcctgaaccaagccaatgagctcgcgttcatatgcggtgagcttgatatgccatgctgcaaacgacctactgaagaaagccaccggacctgctccttgatgcaaaaccg

SEQ ID NO: 183562 - DNA, 1095 bp, Zea Mays
gtttgcttcaagaagcaaaggcatcaagagaagctggcctttccatccacattcattgcagctttgcctagagcgcggtgtgaaggatccattgcctccatttgagtctcccgatttgatccggtcacagccattaaatatttccactgactttgagcaatctgctgcttgcttagaactcaatagtgttggtctggtgaagaatagagatgctagttccttaaacgagtatacaggcaatatcaacttccagtcatgccaaccagtagatgagtcacttggacctttgccatacacatcgccagaggatgggaaatctggtatcaaccaagtgggaagtacaaatgaatcagatcatcctgatgaggttataccaatagatctacaagataatagctgtacaaaagcaagtcagcaaattgaggttgatgtgcccttgcggcggttgagaaatcttgacttatcatgcgagccatctgaaaagaagtgcaaatttgtagtcaagttaggtgccacgacggatattcggcgagcagaggatatagcatctaactctagctcagtttcagatccgatggcttcaaagacttgtcctgtttgcaaagtatttgcttcgacttcaaacaccacattgaatgcccacatagatcagtgcctttctgcagagtctaatactgagcttgttgaaacggtccttgtgaaacctaaagtgaagccaaggaagaagcgattgatggtggacatatacaagactgctcttccatgcacacttgaggatcttgatcagaggaatggcactaattgggcagttgagttgtctatgtctccagtgagcagagaggtttgcactgagaaccgaagcccagaaatggtatcatttgacagaagagatgatgaaagagaaggagatgtctatgttgattctaacggcataaaaattagaattttgtccaagtgtaatgatgtacctttggtgttgagggatgaccttggttcgaggaaagttgcgaagcatggaactggaaaaggtatactgatgagcaaaaagatgctgaagtcaaagcttttgaagaataagaagctcaagatgcatgg

SEQ ID NO: 183563 - DNA, 661 bp, Zea Mays
taggcctaaagtctttgacctgctctgccccctcttttttcggtatcaaggtaataaaggccgtgttgagcttgtagaaattgttgaaattcctgctccaaactgccctaactgcagccataacctctgctttaatacttccccagcaatctttatagaatcgccctgtgaatccatccggccctggggccttatccaaaggcaagcctttaatggtttccaaaacctcttgttctgaaaaaggggagtctagatcctccagattatgtctaggcagtccaagggcatccaaatcaatagtcctttccctgtttccacattgtccaatgaggtttgtataaaactgatccactgctgctgctttttcactgtggttggttaggatacgatctccatcaaccaacatggccacgaaattcttcctcttacgatgccttgcatgaatatggaaaaatcttgtgttcgcatccccctctttgagccatgaaattcttgaccttaatcttgccatggttcgcttgaaggaggacaacatcaaagattgttttttgagcctgtttttaagccagatctctgccggggtaagtggtctttcatcatgtgccatctccagtctatgcagcaactcctttgccaaagccaactgcaatcttacatgccc

SEQ ID NO: 183564 - DNA, 457 bp, Zea Mays
tccgtccccgtgaacccgcaccctccagcctcccgtgctccactggcgcccttctggaaccctcagccctcctaatctcagccgaagttattaacctctttttttcttatataggccaaattagttcccctcccgcgattccaaggctttgctcttcgatctcagccgcgccgtgttcttcgcggcgagttcggagcgttggtgcccaatccgtcgaggttgtgagttgcttccgctgctgctactgccgccgccaccgctggtgttagtgatctgatctggtgggcggattgcggcgcggaggtggaattgttttggctctggggaaagctagctatgcggattgaggcgtcgccggattgagcatgaggggcggggctgctggcggtggcggtggtaagcgtggcgcggatgatgggatcgccggatgggcggctcgtggagttgttcggtgcgg

SEQ ID NO: 183565 - DNA, 333 bp, Zea Mays
gcttgacgccgaggacgccgaccgcctcgacatggcgaccacgttcccgttggtctcgccgtacaccaacggcgcgctgctcaagccatggacgcccgaggcggaaaagtaccgcgtcggtgtggtgcacgagttcctgaacctgacgctggagaagcgagcgatgatccaccacatcgtcgagttcaaggaggagttcgggctcacgcggcacatgtacgagtcgttacagaagcagaaccgcgctttctacctcgccggcacagagatgaactgggccttattcctcagggacgcgtatgacgaaaatggcgtgctcaaggagaaggatcc

SEQ ID NO: 183566 - DNA, 624 bp, Zea Mays
cgtcaggatcccttattaaatatcccggcagcgccttctccactccctgctggccgtcttgagcatgagcatgatggacctactccttttctttttccagccaggagaatcaacaacttggcccttgcaagcacggtgcttccaaaacgtgtgccgctccatttattacagaaaataacaaatgatttctctaaggaccgtgaacttggttccggtgcatacggaaaagtttacaaggtataaataatttaaggcgtggcacatatatacagggttacctggccctacatatattcatggacagagtaccattttctgctctgcagctacttgcattaacccatgcttaattatgcgacgtcaagcagggagtgcataaaaatggcgaaacgatggctgtcaagttgcttcactccatggctggacttgatgataaactttttgaggaggagtttcacaacattgcaagactccaacacaagaatattgtgcgtcttgttggcttttgccatgaaactcaacgccaattcataccgcacgatggaaaaatgatttttgctgatagcaaatatatggccctttgcttcgaatatatgcataatggaagccttgacaagttcatta

SEQ ID NO: 183567 - DNA, 491 bp, Zea Mays
aagttttctaagtatgctcactttcttcccttggctcatccctttacagctcttttagtggctaaactatatttgtcagaagtctatcggctacatgggttgccagctgctatgatttcagacagggacccggtctttacgagtcacttgtggcaagaactgttcaaaatggctggtactcagttatgcttaagcagtgcatatcaccctcagtcggatggacaaacagagcgagtgaatcagtgtctggagacgtatcttcactgttttgtccactcttctcccaagaaatgggcgcactggctgccgttggctgagttttggtataatacttgtcctcactcggctcttggaacttctccgtttgaagtgttgtatggccactcgcctatacattttgggcttgttgacaatggtcagtgtacaattcctgatcttcaagagatgttggcagagcgacagctgatgctccagcaagttaagttgcatct

SEQ ID NO: 183568 - DNA, 728 bp, Zea Mays
gttgtgtaagcacagaaggtttgataaggcaaaggaggtgttcaggacaatggaccagtgcagtgttgcaccagatgttcggagtttcaatattttgatcggaggattttgtagggttggggaggttaaggaggcagtgaagttttacaaggagatgcaacatcgttatgttacaccagatgtggtcagctttagctgtttgattggattattctcgaggagaggggagatggaccatgcaggggcatacttgagggaaatgaaggggcttggattggtgcctgatggtgtgatttacacaatggtcataggtgggttttgtagggctggatcaatgtcagaggctctaagagttagggatgagatggttggctttggatgtctgccagatgtggtaacatacaataccctgttgaatgggctctgtaagcagcacaggttgcttgacgcggagaaacttttgaatgagatggaggagagaggggttacaccagatttatgcactttcacaactttgattcatgggtactgtaggcaaggtaactttgagaatgcattgcaattgtttgacacactgttgcgccagcgtttgaggccagatgtcgtgacatacaatagtttgattgatgggatgtgcagaaaaggtgatctggccaaagctaatgagctatgggatgatatgcatgctcgagaaatcttacccaatcacattacctacagtatcctaa

SEQ ID NO: 183569 - DNA, 309 bp, Zea Mays
tgttacagccatagtggtgctcaaccaccatgttagtgtctgcattttctctctctattgtcagtaagggggtcggtcaagtcatgttggaagtcttagattgctgtggtgttgtaaggggtcagcggaacctagtcccagtgtcttctatgtcgttgtatcttgttgttgttagtctggtggattggtgtgtaatgtggtttgttctcctcttaaatgttgatgtgttggggcttgtaggggggtcgggtctgcttgtcagacaacgcccctgctccgttctatcatgtggtcagcttgctacatcaa

SEQ ID NO: 183570 - DNA, 496 bp, Zea Mays
gctcatggtctttcacttttccaatacgttctgaagagtcagctcagcaggaggtcagttgcattctgtcatttgttgctttgtgatactgaaacatgtgatgcggactggttctatttggattgcatgacatcactcatataaacgcccttaaaaaactggagaaaatactattgttatagcccccttcctgataactacatatatgtaatctgactccagaataatctgccattggtaccgtggctgaatgtttcaagttacctgtttgttgcctaaactgaaccttgtggctcttgatgcagatgaagaattacaaggagatgggcttagtgatggcaattaaagcaggcacagttccgaagttcagaaagaagctgggggatttggtgtccgaataggagcgtaattgaccgatgtggaattttgctgctgtccacgtggtttgaacatttccacattcagcttgttgtctgtaacgatgtgattctgactg

SEQ ID NO: 183571 - DNA, 435 bp, Zea Mays
ctaaagtgtttctgcgtgctggtcaaatggctgaattagatgctatgagaactgaggtcttgggatgttctgctagtaaaatccagagaaaagtacggtcatacttagctcgaaaaaaattcattcagttgcgaatatctgctactcatctccaggctatttgcagaggtacatcttaaatagtactgaaaatatttttttagtattatctctgattttgaaggggaaataatgattgctgaactgtgataactgaagggcaaattgcaaggcattattacgatgatctccgcagggaggctgcttcattgaccatacaaacctgctaccgtatgtactttgcaaggaagaactacataaatctctgtactgcatcaactactatccaatctggtctacgtggtatggctgctcgcaagaaactccagttccgtc

SEQ ID NO: 183572 - DNA, 484 bp, Zea Mays
cggcgacctccctgcgcgaaaattcacgtcgccgccgtgattcgtgtccactggcggttggataactacggcaaagaaaagatctcacggcggggaagggataggatcgcgtcgtggatattttcgggttgccgtggcctcgcggtatcccgatcacgtgcatcgacaacgtggtcgtgcggccgtcgccggagtttgcatcctccgccgcgattgtgccacgcttccggtcagtgaccacgtcgccgtgaactatgatcattacccagtgactgccgtggcttctcgtcccgtgaactgccacgaatcaccccgccggtgactcgcttcttctccggccgccaccgcaccatcctcaattcaagcgccaccgtccctggaagctataaatcgagcccgccgttagctccgcaacctcattacacatcacaccgtccagtatcgcccccaaacttgcaaccatgagctccaatttcgagttgcc

SEQ ID NO: 183573 - DNA, 1138 bp, Zea Mays
gttgggtggcagagagtttctgcttcctgttgggattgttctcaaggtataacctgttgccatttccttaagaatgcttatcatttaaaacaagcaatatggtacataatcatgcattgagcattgtgtgtgcaatggcatgtgctgcatggataaaagctatgttacaaactagcttagtagcttatcgtgagttatacaggttagagcagtgtgcttactcccttgcctgtccacgttcggatcctggtacaatttcttattgcaacgtccagggggcatcttcccccctgtgttcgagttctttttatataagctttgtatcattggataccttttcatcagatgcaccctgctaatgtcgtatactcagtgtgcattgtataatcaataaagagaccttgggttctctgttgatgcattccattttttagctgttgaacttcgtttaactaaatatacaatccacaaacttattttgtcctgtgctccaaggttaccaatctgcttgtttaatagaatttatgtaatttagtatgtttctgcctctattctcatctactgttagactcagtctttccattgaagtaggtatcatgcaatttgtggacttgtgtttgacttgtcacatattatgcaaatcattatgcttctacctttgcaatattatagtttagttcaaaagtattgaattattgttaatgtagctttagcgttgcatttacatgatgatgaattaccaatgacaggcccttattgatgcaagtgaccgggaaatctttacaagcttgacttgctgctacagtgataaacatggaagaggaaagggagttgtcagtactcaactaattggtgaaagggcacaaatagttcttgacgaagtcagaaatctgtccattctgactcgcacacagtgtttggtgcatattggtacgttctgcgttttttttttctgtgcttaagatgccttgacaacctgttatgccctgacattgattttgatctttcaaatgcagggcaatacttccgatctgtgatggaaggatttgaaaatgatgactatataactgtagtgtctaatgttccctttgtgtttacattgacgtacagctgaaatttgggccgtgcttgactttgg

SEQ ID NO: 183574 - DNA, 336 bp, Zea Mays
caccatatgtgcaccggatgtgttcccttgctaagattgtcaataaaattatggccggtaggcatgcgctcaagcttccgggtctggtttcctcaaaccaaagtgcatttgtgaaagggaggagcatacatgacaattatcttatggtccagcaaactgccagagccgtccacaagcagaaggatccggttgccctacttaaattggacattggtaaggcttttgactcagtctcttggccattcctgtttgaagttctccggcatcttggttttggcccattgtggtgcaatatgattgctaaattgctgcactcctcctcgactagagtgttgg

SEQ ID NO: 183575 - DNA, 367 bp, Zea Mays
cccagaagcactatcctctctatgcttggttcagagttcagtgaatcagtttttcttccatcggctggtgcaagtggaggcatccttgtggcatggaagcaacacctgagatattcaggacaaaacaggattgctaatcatagcatctccaatcagttctgtaaggatggggatgtgattggtggctgacttgtgtgtatggtccccaaggcgacaatggaaaaatcatgttccttcaagaactcagaaatatccaagctgcatgtcctgggcattggctcgttttagaagactgattgatgatctggctctcaaagagattactttacatggacgcaaattcgcgtggtccaatcaacaagatgag

SEQ ID NO: 183576 - DNA, 433 bp, Zea Mays
tgtcgcaactaaggcattgaacaccatttccagggagcattgagacaatgtagttgtttattttatcagctgtaaggttattaggacatacaatggcgcgtgtagctaggtatgtagggtccatatatctctctaacaaatctgggtagacctcggatatgagggtcgcagcagcatcaccatccgtgcgtatcaataaatcttcaggaatcgtaacccatgtaggttcggactcgtctcctcttgtcatggctggcaaagcaccatcgccgatatctaagacccatttgctaaattgttccaagtccgcgcgttccttcccatgtaaagacgagttggagagcctcatatttgttcgtagtttcaaaacagttgcatgctgccacaacggtgagctggtaatcgatgcgttcactatggcagaccgtgagcc

SEQ ID NO: 183577 - DNA, 378 bp, Zea Mays
ctccattctaaatgaatcaacagaagtgttgaaatggttacaagctaatcataagttaaagtggtacagatgtgctttcaatacagaaattaaatgtgattacattactaataatttagcagaggtattcaataactggataagggacattaaagacttgcctgtggctgagcttgctgataaggttagagagatgatcatgcaattatggaacaagcgaagaaatattggatccatgctacctgaaaaaaggatacttccagcaattatggtccagctcaaagcaaatactagagggttggggcatttgaaaattgtaccatctgctaattggagtgcagagatttgggaccacaacaacaaaattgaaaggcacat

SEQ ID NO: 183578 - DNA, 302 bp, Zea Mays
caatcccattgcttagcccatgccctgtcaaacatggcatgcctggaggcgacagggatgtgcatacgaggtgaacagatctgctggatggtgcatcacatggaaggcatgatttcgacgtggtctcccatttaccaaatcagctgtcgacagttggcaccactgttcctcctcttcctcaaattatctgaccgaagtaatccaacaaagaagacaaggggtgtagcagaaacggagggagcacagagtacacgcttgtgttcaagtgtttgtctcggtgattttggttaggagaaatgaag

SEQ ID NO: 183579 - DNA, 343 bp, Zea Mays
gcatatggttcagttccttcagcagcatgtttgttctgggcttccaggaacatgggggaagggacgaccagatttaatgtgaaggccgatggagacgaacatgtcgttgaggctgcgaattaggatgaggacgagggtacggttaggaacatattcaccaaggtcctcagggcgtcggccacgcccttgatgtgccgatagtagtcggtgactgagatgtccccctgggccaaggtccaaaactcggaatcgaggtggagggtgcatgtttcctatgaactatgactccatgaccagccacatcacacgggctgtggagcgggaacgtggcaccatgtcggat

SEQ ID NO: 183580 - DNA, 382 bp, Zea Mays
aaatttctggagtagcggggtgtgggttcgagtgctcgctttgcactgcgggcgctaggcgtggggagggtgaagtcatagtagcataggtgtccacattaggttctcaatagagtagtatagattagtagaaccttcatgaaaggcactttcacattgtgtaatatttcattcatctttttgtattagaaactgatagtagacagtctaaggccctgtcctattttatccaaagtggggcctaataaaatattactttggctgcagttttcacacgcccctccataatctagagcagcctacagctacacctagttagcagggtgttaggctgcaatagtttagacatgtaagaatcaactacagcctatgcatttttcgt

SEQ ID NO: 183581 - DNA, 434 bp, Zea Mays
aggcattgttggacaaagtcagccacatcttgtttcatgcccttctagacaaacatgtgcttaaccttttgatacgtcccttgaataccagaatggccccaaccgcactggcgtgaaatgcatcaataagtttgatgcgtaaagatgagttgttgccaatcgatacttgtgtgccacaccctgatggaccgaataccccctggcatcaggactactaatcgccaactgctgcagcaaggattgtgcctccggatcagtaacatatgagttgagaacctcctgtagccactgaggttgaatgatagacaaagcatgaagatgaagtggagagtgcagacgagatagagcgtcggcgacgacattatcgtgccccttatacacaatctggaattggagccccatgagcttggtcattgctttcttttgaagatcgg

SEQ ID NO: 183582 - DNA, 391 bp, Zea Mays
cttttgactgcccactgattaaagagtcggtctggcataggatttctccttctgcggcctcagggagcagtggaattccttctcgacctgtggctcttcaacctgaggctcgggtttcggtctgaaataggatctctgtggtgaaagctaagccgaagaaactggtgtggagacggaaggcccatcaacacctgcaggtggcaggtgctgttcctgctactccttgcaaagcagcccttatggcgggaaatgtctggggcccagggtctcgttcgctgggtggtggttcacgggattctttgcgcgctgatgatggcaatgccgttctgggtgagggctccggtgttggggctggccggcctcgtcggcgtcgaccgcgcaaacgtcggcg

SEQ ID NO: 183583 - DNA, 427 bp, Zea Mays
agagtctgatcaaagttcgccagggacaattcttgtagaccaatgagggcagacagagcaggagaaggaactccactactttccccactggtgacatactgctgactgttctttcgagtcaaagggacctcatcttcttcctccccgtcgttttcatcagcaacacaaacaaacacccccattgggatcagcagcagatggagcaaccccattgggatcagcagtagatggagcacacccattggggtcaacgtcaataaactcaggcacaggcacttcctcagcagcaggaaccgaaggaccaacgtcccaatccaaactagatactcgccgaagacgtctctttttctttttctgctcatcagcaggagaatcaagttgattggctcggcaagggcgtctcggacgaacactgacaggtctctga

SEQ ID NO: 183584 - DNA, 286 bp, Zea Mays
cgagttagctgcttatgagtcccagaccgatccactttattatgcgatgcgttttgtagacagtctgagagacgaaatcaaaacagttgttatggtacagagaccacacaacttgggtactgcttgttctcttgctattgtgtaggaggctgtggaatccagccggcgtcgacgctttgaaccatcagtcaacaaggcttggaagtcgggactagcatctgcagaagcagttcggacagaatggctaccaattcaggcagcagtaacggacaaagcaacttctgat

SEQ ID NO: 183585 - DNA, 567 bp, Zea Mays
gagggggagggcggcgtggacctggaggcctgggtgcgccgcgcgttcaaggaggagcggccgctgtcggaggtggtcgaccccacgctgctcggcgaggtgcacgccaagaagcaggtcctggccgtcttccacgtcgcgctcgggtgcacggagcccgaccccgagatgcgcccgcgcatgcgcgccgtcgccgagagcctcgaccggatcggctgacttccagcgcgacggcgtccggccggccgccggttactgatcatcaactacgtaggtgcaatccaacgcataaaagagactcgcagtcctgttcatgtagattagcgcagttaagcattgtggatttcagagacggtaaacgcaggtaaaaacaatcatcatccgctccatctgtgaatgacgaaggtgaatcactcgacgtagcaggctataggctagcagccgtgctaatattttgtggcaccccttgatccattccaaagcgaactctgttgggagttttctatcgttttgccactgcctacaactgtgcggcgctttgcccaaaagcttgcgatgcgttccttg

SEQ ID NO: 183586 - DNA, 283 bp, Zea Mays
ctcgaggtttgatggatagggaactctcgggatatgtcgccgctgggatttatagccatggcgaggggcaatcgggtctgagagcagagaggggcgagaaattagagctggactccatggcgttgcgcggtcgagtttggcgtccacagacggagttgatggtggcggtgggtttatatgctccaggaaggcagagtccgcggaggttgcaaatcccgaccatagcgcgatttgggagagaatctgttgcggacaacagaggcgagaggaaaacccggcggaa

SEQ ID NO: 183587 - DNA, 502 bp, Zea Mays
ttcatatgcttacaatgatccaagatcttgctgcttctttgttgatggagtttgagaagtgggtcttgcgtgcagaatccacaggaactattttgaagaccccattggattcacaatccagtcttggctcagaggaggttcatactttaggtgttccaagtatttttttagcagtgttatgttgatgatgcaaattgcccaggattgtattacttatacacgacaacatacttctgtatttttattaggtaattaaggctaaaaaaagaaggctgggtcgtgcgcaaaagataataggagattattgcctcttgcctggatcacctgtggacgccaatgcacattataccactgctatagagcttgcaagattgactggtgatgttttctggcacgctggagcccttgagggtagtgtctgtgcattagtggtaagcttttacataaagtcattctggttgttaaagttcaactatattcatcttgataagccacattccac

SEQ ID NO: 183588 - DNA, 314 bp, Zea Mays
gttgagggcatcactgtaactctgctgaatttggaaaggcaatacaaagaactcggaaggcggcactcagatctgcagaaggagaaggacttggtgcttgatgaagtgatcaagatacaggaacagataaggcttgagaggaaggagcatgaagattgtacacagtcaagcaacattagatttgatgctctacagaagaagattagtctattgctagaagagggcaggagtagagaggtgcagcttggtgaggaggagctcaagattgtcaaagctgagatagagatatttgtcttgcagcagtgtttgaatga

SEQ ID NO: 183589 - DNA, 286 bp, Zea Mays
cgattggcagaagatgctactgctcagcgattgttctctgactgtaactgccttaaaaccaagtgagaatgaggagactgataataggtaaaactaatatattaatattaggtaaaaactaagaaggctcttgcttagcctgaactgacaacactagacacgatggacctcgtagtttctgaatcggcgaactgtaaaacaaacattgagctgtttgtgttgtccgacactggatggtgggtggatgcatgcatgagtgaatcggtactgaactgatgtagagatg

SEQ ID NO: 183590 - DNA, 434 bp, Zea Mays
gccaccagatagcccgtggatcatcttgggtgatttcaatatgattagaaacccagaaaattgtaacaagctaggtggtaacgtccagtggatgctcaattttaacatggccataagttagcttggagttcaggaaattccacttaagggacagacattcacctggtgtaatatgcagcgtcacccacttcttgaagaattggactggtgcttcacctctcaaacatggtgatcgcaattccctggcacaatggcccagacgctgacaagaggtacctctcaccacatcccctgggtggttgtagtcaaaacaaatgtccgtagaccgcatgttttcaggtttgaaaactattggctgtagcacgaggagttttagacaacctttcaaaatgcataaaacttactgattcactaccctgacccggccaaaagac

SEQ ID NO: 183591 - DNA, 281 bp, Zea Mays
gtggaagaactgaaaaggaaggttgctaaagcaaccgaaaaaattgaagttgaggtggtgaagcatgagatatgcgagatcgaaaggtcaagagcacaaaagaatgccgacgagcttcatgcttccaaagaaagatgttatgaaatatccttggaatgcgccaagaaattaaaggacaactttgctagggttggggcatattcctctgagcagagattcatccgcggcgaccctggtggagttgtccagtggattagcggcgaagccgaagcttttgacga

SEQ ID NO: 183592 - DNA, 953 bp, Zea Mays
atagcttgtttttattaataaacaggtgaagaactatccaaaaaacaagctgcccaagaagctacaatacgaaaactgagagcacaggcatggaccagaactctacgctatgttcagatgataaaaatgctttcctcagtaccaattatactactttttgttcttttgttgaagctagattcgtgagtttgaagaagagaaacaacgtctgaactcaaagatccaggtaaaaaagaatatcaacttgccaacttggtacatttagtatgatccaaaccgagttcttttcttattgatgtctgtgatgcaatgtaattaaattctgcttaccttcttgaacatcatgaaaaatgcaaaccttttctggatttcataatatgaaatagttttcgccctctttattacttgtgtttttgacttaatgcactgggtaccatttaaactgtgcttacgtcatttgtatcccatggtagttacaatcaaacaagcttacctgtatggttgtttacagttttgtgttttagttgcaattatacaagcttccaccctatgatctgtagatagatggagtaaagttagtttggcgccctgaacaaaatgttatgtcccatttacttttctgtccttaaaagtaagcatgtacttgacaatttatgagtaagcaggttgaggaggctaaggtcgaaagcattaagagagacaagatggcaaccgagaagttgcttcaagaaacaatagaaagaaatcagactgaacttgcagctcagaaggagttctacaccaatgctcttaatgcagctaaagaggctgaggcattggctgaagcaagagtcaacagcgaagccaaagttgaactggagaaccttttaagagaagctggcgaaaaagaaaatatgctgattaagacaatcgaggagttgaggctttctctcacccgacaagaacaagaggta

SEQ ID NO: 183593 - DNA, 418 bp, Zea Mays
tctatatttaaacttcacttcacaaacagtacaatctacagtgcagaacatcgcttttggataaattataaatagcttcgacttataataatattggctgggcaaacgactagaagcacgagatcacttcagatcatctttgccgagcataagcacgccgagaagagcagcttcgactttctatctcgatcccatgccccagtcccaacggttgtcatggctatcgaatcacatccctaacacagcaactccaagtctctaacttcacgttgtaacttgtaagactgtgttcaacagtttattcatagtttacttaaatactctttgaggagttggtctctagtatgcttagtgtactggtgctcctgttcattttttttttcgttttgttgggtggtgtgtagagttgtatgaggtt

SEQ ID NO: 183594 - DNA, 400 bp, Zea Mays
gaggaaggctggcagttggttgagagcaggagaagacatcgttttgctgtgccacttcctcgtcgagggtcccaggtggatcttcgaggcaagtgctacaactgtctttctgccccccatcttgtcgtagcctttcgtagcccaacgcagtgtttccggtgcttcaagcctggccaccaggcgacatggtgcaccacccttcctgagtggaagtcagtgtgatagcggctgagtcatcaagggtcgtgccctccgttgtggcaacggttgtcggtgcagaggggacccgggcttcaggaggaaggtaccccatggctcagcacaaggaatcggtatgggtaagaatcactctgccattagaagctctgatgaaggattctaatgaggcattcgactctca

SEQ ID NO: 183595 - DNA, 367 bp, Zea Mays
gtagatctgattaaagtccccagccacaatgcaggggtccacacaaacagctctgatctccaaaagctcttgaaaggactgcctgagactgtcttgatttgggtcatagacacccggtaaccaaccaaagaggggcacgttgcaattgcatagaaaccgagaactccttcaccatggatctatcggcggtaaaaattccatcgcgccaagccacaagaataccccctctggtccccgaagcaggacacaagacaaaattgctaaaaccagtccccaaaagagaaagcaccattgtttaaaaggcgtcgcctaggcgtccaggcgacattttttgctaggcgtccgcgccgcccaggtaaaattgagt

SEQ ID NO: 183596 - DNA, 352 bp, Zea Mays
tgcatcaattagagtccactctgtgtatttaccaccaccaaaacttgattttacttctgagcatcaggaatgggtagaagaagaagcaaaagaggtagtgtgaagatgtacttaatgtatgagcctgtgtgtgcaatcattcctcactgatactgattgctaatgattcaggtggatgactcagctgaacttctgttctctgaagttctgaacgcactccacaaaatttcaggaggaaggccaattacaggttcttttgatggcaacttgaagattcttgagttgagaagaaatattggagaactggaagagatcctggtggcagagaagactgactttatggttaagtagt

SEQ ID NO: 183597 - DNA, 317 bp, Zea Mays
atctttgtcaacagaaattgctgatggatctagtagagatgtggctgaaaaaggtcctgtccatgcatataacttcccagggggatttgattgttttcttgatcaatggtccacagctagtaattttttctttgatgttcattttatcaagagatcgatgaaaccatctttgaacctttttgaagtttttgggttggctgtctgttgggaaaaatctcccatatactactgcaacttcccaaaagatctagtcactactggcaacaataacatcaaggaaatgtggggtaattttcagagaagatgggaaaaaatag

SEQ ID NO: 183598 - DNA, 968 bp, Zea Mays
cgaggcagccagctagggcgcggtcaaccgcaggtacacgcgcttcttccgattggtcgagcctcagaattcccgcctgatcgttctggcctgctaagtttcttggttagaacattttctgtaataagccaataagcaagaaccttttctgcagtaagccaataagcaatgcagtagtgggcgcagctccggaggagtggaatgacggcgccaccgaatgctagcatgggaccgctcagtttgggtggctgcggggctctcctctccactcctcagcctaattcgtggcattgccgcgggttctcgattcctgagaggagcgtctttatgttgccactgcgccggggtttgtcaaggaagaggggctgggttcttgattcaagaagtaacggtgctgtggctcgtgatgaggtcggtgccgggtcgtcagagcttcggcacatcgagaaggagctgacgttcagcccgactttcactgactatgttaaaatcatggagtcggtgaagttggacaggagcaagaatttacatggcgccgatggccagagtttgaggagaaggttcgcgggtgatggccgacaaaggaataggaggtctggtgatgcaaggaataaatcatttgaaaggaatcaggggcctcagagggacttggcgaaggatgagaatcagaaggatgttacaggctttgtggataaaagagcaactggtcatgtaaaaagtagcaatcgcaggcaaggggaggttgaagactatgcacagagaagaataattcgtggtggtacaagaggaaatggagacaatgggcagttctcatcacctgtgaaggctaaagatactaggggtagtatgtctgttcataggttggtgacgaacaaacagactcagtcagttgcagggaacgatttacaagggcgagcaacttatactccatctcggacttctgcccttccaaatagcagtattccatc

SEQ ID NO: 183599 - DNA, 486 bp, Zea Mays
cgggacgcctgcgtgggacaggtggatttggatatgtttatgaggtatggttgagatgccgtcatttttctagcagttcgaatgtttccttccccttagcctcttttaagttaacaagttaagcaggggataccacatggtaacgagggagcgatggccgtgaagaggcttaaagaaaaaataggtatatcaccgaaacagtttgagaatgaggttcataatctgagcagaatcgagcacaggaatattgtacggcttataggctactgcgatgaaatacgggaaatactatctcatggtaaaaacaagaatgatccacctattcgcgaacatattcaagaaaggttattgtgttacgagtatatgcctaagggaagccttgacaagataatttatggtacgttatcctccagatctttcacagtatcgtttgtttgataacatacacacacaaatgtatactctcagttcaaaattataaatccg

SEQ ID NO: 183600 - DNA, 348 bp, Zea Mays
ccgccgccgccgccgccgctaggaaacgacgtctcgtctcgtgccttcaatctctccttttgccgtcgtcctgtgtttatcgcttgatttcctctgttatcccgctttcttcctctgtaagggcaaatgatgatgcaaagtcatgcaccactctgaatgaggggattatcctctctttgggctgacaaacggacttctacccatttttcgtctgagccttgtgattacatccgatttctttattgtctccctggcttttcttttttcttgctgcttactgtgacactgatcttattgcgtttgattaatggagctgtggagtgatctcggagaactagatgatgtggg

SEQ ID NO: 183601 - DNA, 345 bp, Zea Mays
attcagttttcagcatgtcttggatgaaatgaaatgtatgtgctaactgaaaatatgaaaaagtatgggcttaatgttatccaaacaaaaatctggaaactaaaatgtatggactggataccgggaactgtatttgatcaaagcagagtacggacatgaactgaaacaatgatgtctgagctgtttgtagggatatttgttcagctatttctgcttggtgtgttatccaagtagtaaacgaagtatgcttgatcggctataatcttgtaacaaagacgtgctactactttaacaccccataatttataactgcttattaacacagaataaacacccacgcctaat

SEQ ID NO: 183602 - DNA, 637 bp, Zea Mays
tgtcattacttctgctgttagcctgtgatagggtgggctacaagatgctctacgttggtgcggtttgcgcaacctcagtcctccagggcatatctttattctgaaggtgatgtaacaactacatcattgaaccaatgatggttattgctacttcctgatcggatcgttcatgtgttaatgatggcagtgatcaagtcaggtaccatttaaagatttgtagcatcttttgtcaaggttatctttcttttggaatcttgatgctcgtttttttgtgtgtgtgcatattattggttgctatgctcagatctttaaacttcaatatagtacttcctgctcctgggtctgtcagcgtggcatgcaaggccgtctagcttgtctcaggttctttcatgtcacgccccatcgcccttttgcaacggacctaaggtggtagtggggctttcaggtcgcccatgcagaaattccaggtatgggttctcttttttctgtggtggtaaactggcaggggtcgcgagcttcaatcatggtaatgttgggtatgctcgcaacgatggagcgctctcaccggagtagcccagccctggcacatggcggcaggggacgagatgtgagatgtctgccatgatcgcgagaggtg

SEQ ID NO: 183603 - DNA, 314 bp, Zea Mays
cttggctggctccgcccaattccgacgggatcgttgtgtgcgtcctccttcacgatggccagcttgttcggcgcatctttgtatccttcgatcaggccatgaaccttgttctttgtgattgcgttgagatccaccctcaggcgggccgtcacgtactaggaccgcttatctttccccgtgctgaggtcgcctccatggcgatcgaaacctcgttgtctacttcccctctcagtggctatgtcagagcccctcccctggccctctctgcacacactgcgcctttgccacctcctccctcttccaccgattgggtg

SEQ ID NO: 183604 - DNA, 447 bp, Zea Mays
tatatgggcctctatactagaagggcctttatacgcttaacagagggaattgccatgacaatatagaggcaggtatacggatgatcagatgacacgttgatgaggacatggcaatgaaccactggtgccactgtgagctcaaggaaagtggacggagcaacggtggcccgattctagccgatgactagcatcacagtcgcgctctggtggtggatgaggcccccccaagcgacactgagtgatgctctccatagcgcgcatgcagagagctcgcccacatgccggttgtgggtgctcacataatggcgttgggttagataaaattgcagtgctcacctacgctagcttgtgggctgtactcaacaaccacacatgtctaggctcgtacacgcggctcgcctgaatccttcgcagacgtgcgtgtgcgcatggccctcccacgtccac

SEQ ID NO: 183605 - DNA, 345 bp, Zea Mays
attctggccaaatgttgaaaaggagatggtttagtgtatttttttgccaaaaagttgtccctgcagaaatcaaaaggatcaagcaacatattgctagggggtttggtgatgtagggaagtgcccaagagcgtctgaactagttacgaaggagatgacggactatttgaagaagaatgcaaggaataagattctgttgttagataatgaagaggaggatgtagaagagggacaaggagatgcacagaaagatggtggtgcaatccctgtaccaaattatggcacaataggagggaaagtgaagaggaaatttgctcaaaatgatatccagtccttcatggtttctg

SEQ ID NO: 183606 - DNA, 638 bp, Zea Mays
gttaacttgtgagatctcagcttagttctgtggatgccgtttgatttcgttgtagggtagtatgggaaaacggagcatccatagagaagataataggatatgcgggagggaatgtgtggttgtgatttctgttgttctatttgtcatgttttgaggtaaacgatgaatagtgaggctcaccgtaccttgcttcttgtgcttatgagggcaacgatagctatgtgtttagacttcttgtgtgcatcttaagatctctagtatgagctcctgggttatcaatatggatgcaccaacttgcctgtttgggtttttctttatttactaaccctctttctcccaaacgtttctggtgtagcctcctatcggtcatgtttcttgcgatagcgtgtttgaatctggcacaacttacttactatctagaatgctcatgtttgtaatttgtgtcttggaatgaggttagttttatgtttgaatctgccgctgccatgtgcatgtttagtgcagcctcacacacctttgaccagaaacaatggtgtttgtcttgattctgctggcacaatttgcttgctatccaaagtgtgtggtctaataccttctgaccaaattcttaatacacttaatggcttaacttgttagtg

SEQ ID NO: 183607 - DNA, 460 bp, Zea Mays
ctaccacacatatccagctctggctccttggtgccctggtctctcactctaagtttgacgttgttgatttccttatttgtgagatcgaggacactgtattggatggtatgcgtgctcgtcgtcagctgccatatgctcaccacttgtgccacatttttgctcagctgattcggcctccacagttccagggcacacttgaggcctcacgccttgtttttggatcctaccgtccagcgcctgaggatccggtaccagcttctgctccaatttttgacactcaggccgaggatgctgctcttcatcagttcgaagctcaggatgcagcagttgatgatgatgatgatgattttgggattccacctccgcctccgcctcctatgcctccacgctcacatgatcatgaggctgggagttctcgtgctaccactactaccactcctgctattgaccgtgtgcttgc

SEQ ID NO: 183608 - DNA, 723 bp, Zea Mays
tgaacatagcatgaagcagatattccagttttatttcctttttggagtggaattaccagttcaccttgaaattatcgttatttatatattccagttttgttttcagcttggagtggaataaccagtttgccttaaagttgctgttatttatgtggtgttatcatttgtgctttcactttctttatgccctctatcccagtgtgctccattttctatcaaaccaaaatgattgtattattttatatcccttgcaacgatccaacaactatatgatatatgaccttgctcatttttttagtctgcgttttgtaattgtccattccagctttatcgaaaacagcagcatcaatacttgaatgtgtcctaaggagggatccccatgaagctgaatatatacagtcgatccaggaggtggttcattccttagaacctgttttggtgaagaatgcccagtaattcttcaaatctcccttcatgccttatcaagaatatgcctaaaccttcagtgtaacatagtttcatttgataatgtttcagatatattcaaattttggagcgtttgttggaacctgagagatgctttatcttcagagtgccatggattgatgacagaggtgaagcacacgtcaatagaggtttccgtgtgcaattcagtcaggcgttaggtccatgcaggggtggtcttcggtttcacccatccatgagcttaagtgtggcaaagtt

SEQ ID NO: 183609 - DNA, 626 bp, Zea Mays
aaaatacaaaaaatacggcccacacagcgcgcccgcgaccatcgcattgttctcaagctcggctcgctgctggtggctgttcggccttactggtacctggcggtgcacaaggacgaactcgaacaacagtgcacgtccatgatggaacagggcatcgtacgtcgcagcgactcggcgttctcctcgtcaagaaaccagacgggacctggcgattttgcgtcgactaccgggcgctgaacgccctcaccgtcaaggacgcgttccccattccggtggtggacgagctcctcgacgaactgcacggcgccaagttcttcaccaagttggacccgcgctcgggatactatcaggtccggatgcggtcagaagacgtacacaagacgacgtttcgtacacacgacgggctatacgatgccatttgggctatgcaacgctccgacaacgttccaggcattgatgaatgatgtgcttcgcccatacctccgccgttttgtagttgtgttctttgatgatattttgatctacagttcgagctgggccgatcaccttcgccacatccgcgccgtcctggaggagctctgttgtcaccagctgctcctcaaacgcaccaagtgtgcgttcggcgc

SEQ ID NO: 183610 - DNA, 392 bp, Zea Mays
atgcagaggacacaatgtagagagctagagaagcagaggacggggccctggagtggcggcgaacggtaggacggggccctggaggacggggtgacgagcacaacggacgagaatacgacctaactgcttgggtcctggagcggtggcgcagcggcgacctaggtcctagagtggcggtgcggtggatgtgaggatgagacacgggaggatgaggacctggaggacggggcacggcggatggagtgtgcgtcggccggtgactggagtggcgacgacgacgtcacgtctatgtaggagacaagagtgcatggcggtgaatggagtgcatggtgggtgcatgcaggaatgcaagggctgagagaaggctgcccacattgttaactggattgggc

SEQ ID NO: 183611 - DNA, 427 bp, Zea Mays
tcctctgctcttcctcttcctctgcttcctcagttcatctgctgactgctctgctgcttcctcaggccaacagcaccctgccaccttcatcaattaatggctagcccatcttcagtcaacaatgtcaactatgatccaaagacagacaaagcaaggaaggctagctcaaatgatccaggttggaagtatggttattgggcaaatttggcaaatagagatcaagtgacatgcaccctttgtgacaccatagtttccggagggataaaaaggctaaagcagcatctagcaggtggctatggagatacaaagatatgttcaaagaccactactgcaattagaaaggagatgagggattacttggaatccaaaagaaggaaaagagctattttcctagatgataatgagcagcaagaggaggaagaggatg

SEQ ID NO: 183612 - DNA, 393 bp, Zea Mays
cttccggcttgggaacatgtgggcaggtatcggacgtgccgaagataatgtcgctagtcttttcagtgacatccttggatccatgctcgatatttctaggtcttcggcttgggaacatgcagataggtaacagacgacgaaggtagagaagacatgcgatcgagctaaggctaagtgcaccacttatgcaagacaatataggatggagagcatcacctgcgaccctgcatgttggtgacctggcacgtgttagacttggaacttgggaggcggcgtatggtcttcttgaggtgagagtgagaagatatgagtgggaacatggatggcagtagagaagtcacacagaggaaaagtcctaatgtttttatcttaaaaatgtaagtatgcctctca

SEQ ID NO: 183613 - DNA, 346 bp, Zea Mays
aagaaagacagcagtggcaaggttactgtcaaccaatcactggtatgttgcatctgttcaattggagcaaataagctttactattctacattacttgctcagaagtctcatgcagacagtttttaaccaggaactgtggctgaaggatgtggccctttctcgttttgcagatacaaaagattgtccgccatctttggtttgtacaattgtacttttagtaatcacataaaccacaacatcttctgttatgtaatttaattatcttattctcttatggcagaccaacttttttggagctcctaaacgtgtccttaacacatccaagcagaaactgggatccccaaga

SEQ ID NO: 183614 - DNA, 499 bp, Zea Mays
ttgtcgtacctttcctaccacatgtcctagccgaggctttgctgccatggccctcctcgattcatcttcactcgctcctattccacctcaccatggtgccagcccttgcctcacgacagccacattcaaccaccactgccaccaccaccaccaccacactccttcctctcccccgtcgagcgaggagctcatgcttattcttgccatctcacactcagttccccactctcccaaccttcctcaccttcctcgacaataataaggtgagtgtagcatacgacatggtaggcattacatggcctagcgtggcaatttgggtgcagcaccacatcgacgatgcaacgtaggcaagcatgaggtagtagagtgagcatggtgcagcactacgcgactacacaggtaaggtgagcatgtgcagtgtggcgaaggtgaggacgatggtgcgggggtggatggaccataatggtatagtaatataactttaggaattttattatgc

SEQ ID NO: 183615 - DNA, 384 bp, Zea Mays
cctagattctcatcaactagatgacatttgtggtagatgaacgacgtgagaaccaacccttgatacaggtatgtcgagcaactcgtatagcagtcatgcatatcattaatgagcaagataaggccatcatgtctgttgagctagcaagattgtttgtacaccagtacgacaccactgataactctagtgaggactagctagcggtcggttccacatgtctcctagagctcacgtttcaaaggtcgaaggatccctatgtttgagcagatgcgttaggaccagttttagtagcccttggttttcatggagcgcatgctacactatactagtgtgccattgatgattccatagtgactccaactttacacttccgtggacttcaaa

SEQ ID NO: 183616 - DNA, 415 bp, Zea Mays
cccatttgtaaaattattggcgtatttcacttcagttttttactttgtgaaggttgttttcacgtggtttggagggaaatcagaaagcagttctacatgtgagtctagctctggccaaacagataaacatgcacattcacttgaacacaccaaaattggaaagaggaagtctatagaatcaagtcagcttgtcactcatccaattgatgagattctgtattggcacaatgctgttctgagagaactgagtgatatagcagaggagactaaaaggatacatcagtctggagatttttctgacatagcaggatttaatatgaggctgcaatttattgcagatgtgtgcattttccacaggtatgaaccttcaaatcttaaatcatgtgaatctttttttttatagtgttacttgctg

SEQ ID NO: 183617 - DNA, 860 bp, Zea Mays
ggcggtggtggtggcgacggctggaagcgcccgcgcgcttcccagggagcgggtgtggtggaggaagcggcagcgcagggagccgatgtcatcgtccttgacgttggggtatggctattcctgtagctgtagtacgacgagtagacactgaccaccttccgctcttaaacaaaataccatatcatgtgtggcatagaaggatctttttacaactttttgaatacttggctacacggattgttactttacccacttgtaacagttttttcatatttagaattcggattgccataacataacaaacattctcatacaatcatgaatcagcaaacaaaccactaatgctactggtggtagaacctgctggattatctcttgtgtcaacaacccatctaaacagcatcgtttctgggacaatcactagaacctccaaccaactagtgtttgttctgggaaaaaaaaccctataagttatcatttgcatgcatgtttgtccttacatgctacagtttctgaccaccttgtaatctgtagctgtattagccacttgattagcttcgttgcagggaatgtcgtgtggtggatgcgcagcaagcgtgaaacgtattctggagagtgaggtaagctaagttagatcagcatgccttagatgtagagcttttggccaaagtgcttgttagctctctactgtttctagtagtgtttgtaactctgtatgtgcttggatttttcagccccaggtacggtcagcaactgttaaccttgccactgagatggcagtcgtctgggcagtgcccgaggatagtgttgttcaggattggaaggagcagctgggtgagaagcttgccaatcagttgacg

SEQ ID NO: 183618 - DNA, 674 bp, Zea Mays
ccacactaccacaaatccacaataacaaaagttaaagtgttcaactaatagcaactagctagtcgacaaccacaaacaaagtggaatgaaatgtgcagtagtccacaaccacagccatagcacaaaagcaactaaagtggaatgcaatgtccacaactgcaagcacacaagtgttactcaatctccctatatcatatctcaattacggatgaaaaggtcggaaacgattggcaaacactaaaaccgttaccgttttcataatttttatcggaaaaaacggtaactttggaaacaggaacgatatagatccggcaagctgacagagcagggaggcagggaccggcgattgacgagctggaggagcagggaggcgaggaccgacgagctgacagagcaggcagtggtagcgccgagcgcgagtaggtcagcagggaggcagcgtcgcgcgaccgttggggagaagggaacttgagcaacaacgcagggaggaggagagggaggcacgagcttaggcaagatgcttactggatgacggtgaagcctagggatgccggaggcgacgagcggacggaggcaccacgagtccgtgacgactagctcaacgctcaacgaggctgtgggcgtgacaaaggaaggatgtctgttttaggttaggggaactaggttgggttggg

SEQ ID NO: 183619 - DNA, 478 bp, Zea Mays
attcaactgagctgaacccctctttgcacatttggcaatatgtccgggctcaaaccgttctccacaagcataacataaaccattgagacgcctgaagtctctaagttgtctctcttgagtaagatcagcacattgttgccctttatcatccccttttggaagtgcttgttgctctttcaaatatggcaactgacgttgtcctttacctcgtcctctatccaacacctcctgttgaatctgagctagcaatatagcacgatccaccgtagtgggaacctgaacttgcaccacatcctgcagttcaaacttgaggccacaaacaaagtgggtaacaaagaatgtttcatcatattgagcattatgcaccgccactccataccgagcctgctcaaattcatgaacatagttatccagcgtgccgaactgacacaacgaaaacagtcttcgcagcgctctaggataagcctcagcaccaaac

SEQ ID NO: 183620 - DNA, 279 bp, Zea Mays
ccaaggccaccataaacataaggtctttgtaccttagcccaagatagcaaacaatttcctccattggcctactcctgccccttccataagaaacctcttctccttttatttatggctttaaaaaaccatttgggcagatccagagctagcatcagatgaatgggagttgcagaaatcacggatttgacaataattaatcttccagctttgcttaaaagaggtgctttccaacctggcagcctatttgcaattttgtcaagtaaaggttgaagattcgtc

SEQ ID NO: 183621 - DNA, 735 bp, Zea Mays
ttcttgacattctcagcgacattagcagacatcgcttctaaggcacgatgaaggcgttttgaaggaggcaaagcagcttccacatctaatgctaaaatttttgggtggtattctttattcttccaaggaagatgaccttcctttgacaggataggcatgtctgatttgcaggacggattagaagcagaacttacaactgtggacacctgatcagctgaataatcattgacaggacttgcaggtttaccattcctatcgcattggtctgaggttgttgtaagctctggcttcttattagaaacatcaacttcatcaactggtgaatcctccaaatgagaccttcccattcggacccttgctcttttgaccaatggcaagtgctcatctccatctgacttgcatacttcattctttgaatttggagaatctgaaaggatttcactgtactcagcacgtaattcatctttatttggtgttgtacaatcttcataatgaggaacaggttttctatctgattttcttattctcctgaaaattacttctgtattcatgggtagattagatgtgccatttgatttcaattctgtctctgaagttccattttcagatgcttcactgttacaagtactatccgccttaacaggaggattcaacattttgctgccgttacaagtagtccccaaagttacaggttggttggaagtgcctctgccagaatgcaaccagacattatct

SEQ ID NO: 183622 - DNA, 522 bp, Zea Mays
gtttgaccggtgaagtcgaagcacatgcttatgatgctttccgcaacattacgttcttggtgcatcaaatctatattatgtggtaacaacaatgccttcgtgtaaggtagctcccagataaacgaggtgtgcgtccaattgtgttctttaccatacccttgaaatcgacctcctacgcccggttttaggtcacgatgttgtatcatgatattttcaccagtttgccgcttcggtggcccatctctaaccctcttgccttttcggaatgactttgtatcctttctaaaaggaagattatggggaaggaggcgtcagtgaacatcaaaaaatgtttccttcttaccatgttctaacctatatgcttgtgagtcacccatacatatcggacaacgcagtatgtcatggacacaccaaccagaaaaaatgccatatgctagcagatcatgaattgaccatagatatgttgcgagtagagtaaaccgacatttcatatgactatcatatgcctcaaccccctgccac

SEQ ID NO: 183623 - DNA, 296 bp, Zea Mays
atatcctagatttacgtgtaagtattgcaagaaagagtcgaagaagcggtgctacacattttaaacaacaccatgcatcacgtgggggaaaagtgcagggttgtagcaacgttctgccggacatttctgattacttttggtggtacattgacaagggccaagataaaaggaaagcaagaatagtggtggaggtatggaggttggcattggtgggttcatctcgtggttttgatggtgacgacaacgacgagttgtaggccgcaatgcgtgtttcgttgtcgtcctctcaaaagcac

SEQ ID NO: 183624 - DNA, 592 bp, Zea Mays
gtgaaatgagggggtcgtgtgaaaagaagcaccagaatcaagaatccatacacaagtacctgaagtggatgtgaaaggtggttcctcaatagaaggctaagaagcagcaacaaaacctagcagagtcaaagacagtcacagaactagcacatctggcattgaagaggcagcaaggcgacgaaggaacgtcagcatctcctgagtgactaaatcagcagaactcccctgagaacctccagtacttgcactactagcaggctatgaacaacgagtctgagccttatgcgccttcggttcctctctaaggaacaagacaatacgactgaatatacatgcatggtttgcagtcatactctatggaatagcaggataaagcttattcacaagccatcgcaaaacagatttgggtgtgtgcgtgtgcgtgtggcaagtttcctttagtacagattaagagaaacttgcaaatgtggaatacattaggttgatcaaatttactatctgatacctaggtactagcactactttaacatgccatggtgacatggtgcaggcaaaaaaaagtaatcgcaaactactaaatcctcgtgtgcat

SEQ ID NO: 183625 - DNA, 376 bp, Zea Mays
caaaattcgagctcactggtgatcaactgggagcaatactgggtggtgtggtgcgtgttgctcttgcggagctgacggcgggctcaatttatagaacccatgagtggtggccgggaatttgagcgttgacgcgcggcggccgaggaaacagggagctactagcgcagtggattggtgtccggttaccgtggcaacctctccggcgatcaacgaagagctaaagcatgtcacgacgatgtggtggagatactcaggcacgtggcaccaggccggaaggcggcggtcaccggcgtgcttatcgggttccacatagacgagctctgtacggtggtcggatttgtttaccggctggacttatccacggcgatgatatttg

SEQ ID NO: 183626 - DNA, 531 bp, Zea Mays
attttagatgcttattttacagctattgtataaccagttcgctgctgcatctcacaaatcaacttcagtgttataaagttgtatttattgatatcgattaatcacaattagttgtcctagtcagtatcctgaacttgactaggggctacgacctgattaggctgattagttttctggtagtctgattcattgtcgacttctgatgattagtcggatgactagtgggtggaagaatagaaaaaatggaattgctgggcagtttaggacatgggctacatctgggatggtttacggcaattggcctcatgtttttcagcccaatttgcaaccctacatgcagccaccactctggagttgtctccatgcttgatttgcactctagaacatatactatatagtgtatatttggtatactagtcctgatatatataggttgagtaggatagaccagggctgactagtcgtcctggttgatgactaatcgtgactagttgcctggtgggtcccatgttgattagaattgatcagact

SEQ ID NO: 183627 - DNA, 1137 bp, Zea Mays
gcacggtccatccgaagcattcaccaagttttgaatctccttcctccggtcagatgcacggattagagcacttccttttagtatcctctcagaattctgattcaagtttgcttttggaaacctctgtccttcaagaagagtgcagagctcaattggaacatgattcggtttgtccttgctcttgctcaaatccaagcatggcagcatctgatactcaatcaccttgccatgtttctgagcataataatccacgagcctccgtgtttggccggattcagcatccacaaaggtcatctggctggcaggtaagggtgtcaaaccttgcactgtgtacttctgattagtcctccgatgaatcacagttacacgtcggcctttaagctcatcaaccagattttccatttgcctcttgttcaaagttgtccgataatcaaggtacctcactaatttctgaacaagatccatcaccggtccagctttgtaaaacggcatgacagaatagtcaacacacaggatcaacccttgctgagtggatttaagggactgctgggttcctttcatagctacagcaccctgcccaatgtctatactgctgcttggtgagtaaaatcctctaccaaggataatcttgttccatcttgaggcctcacgcacaacaacatcaaggccctgcaagacctctctaggcacaggtaaatctgagagttgacttaatggcagctgcttcttcaaatctactgatacaatgtaggtctttgatcgaactctcacacgaaataaacctgcaggcagttcagcagaagtatacagatttcttccaccatcataagcaacacatgaggaaagacgccgtaaactgctttccctgaagagctcatccttgacagagagaaattctgccttggatagctctttgcccgaagcattagacgaagcttcatcaagcttgatgtttatgtcataatgaaaaatagttgtcacctttcggtagctgacaataaagtgattcaccaaaagtttaaccgttgcttgagataatgaacctccagaatcaggtctctgcattggcacacgtgtattaacagaagatgtggcagctagtgttgatcctattggttctactctggccatttcgct

SEQ ID NO: 183628 - DNA, 374 bp, Zea Mays
ggcgcaaccgataactaaagtgttgcatagtcatccctacgacacgaacacgattactcatacaagcgcgcaatctcaaatatacaacaaacaaagggctcaacggcaccatcacgcaataatacaaatcacaactgttaccctcacaactctattgggaagagggggagggcactgttttcactcactatcacaacaagagcagtgagggcaactaaaatgtcacataggctccgccttcagaataagacccgcctcctggaaattgaacaacatcatcctcaactcttccccctcaaataggtcccgcaagtccccctctccaatgcatgtcccggacgtcgaggaaagtagctcgcgctgaccaccctgat

SEQ ID NO: 183629 - DNA, 481 bp, Zea Mays
ggctaaacatagagaattcacactaaacttgggatcttgccacagggacatgggcgatctaggtgtattggacctccccatctcagaggatgaggtccggtctgcagttttctgcctaccttcagatagagctccgggtccggatggttttaccgggagattctataagtcatgctggcatatcattaaggatgatctgcttgcagctatcaatgccctccatcaaggtaattctcgggggctgtggctgttgaactcagcttatcttaccctcatccccaagaagtctgatgccacaacaacgcctgatttcagacccataagtctcattcatagttttgccaaattggtgaccaagattatggctaaccggttggctcctctcctgccaaggttagtggctgcaaatcagagtgcttttgtgaggggaaggtctatccacgataactatatgtttgttcagcactcgatcaagtccctt

SEQ ID NO: 183630 - DNA, 362 bp, Zea Mays
cctccttccctataatcatccttttagaaaggatacaaagtcatttcgaaaaggcaagagggttagagatgggccaccgaagcgacaaactggtgaaaatatcatgagacaacatcgtgacctaaaatcgggcgtaggaggtcggtttcaagggtatggtaaagaacaaaattggacacacatctcgtttatctaggagctaccttacacgaaggcattgctgttaccacataatatagatttgatccaccaagaacgtaatgttgcggaaagcatcataagcatgtgcttcgacttcaccggtcaaaccaaagataacatgaatgcaagaagagacttagctgaactttgtgatcgtccac

SEQ ID NO: 183631 - DNA, 293 bp, Zea Mays
ttgccggtccatacatgccggatcacaagtaggcgtctcgtgaggggatggcaggtgcagaatgtttgtagatgtgtcgccagatttacgtccgggagagcgaatcgctcgatggattggtagtgtttttgttcatatgtgtaggttttctcacatggaaggaatgtagtatagaggatgggagatgaagattaccgtaggtgaaagatgatgttgtaccatgaggggggaaaacatgcttgtagtagtaaagactgctgcttcagtccacgtatctaaaaagttcttctctg

SEQ ID NO: 183632 - DNA, 463 bp, Zea Mays
gcatagagggctctattggcggcagttgcccatcaacagaggtgaaggcagaggctgtgaagtacgacaatgggtggctagcgccagggccaacacctgatgcaggggcacaccacagttgtggcagcgtaggggaggagagggctgccaacggctgatggctggcgccagggccagcgcttgacgcaaggtcgtgtgatagaggtgcatgggagaggagagaagccattgaggctcaggagcagccagagggggcagaggtggcgctagccatggagggaagtggcaactggctaaggccaaccatggcaatggcggtaatggttggtagggactaagagacatcggataccatgttagagagggagaaaaacggagctttgtattgaggactagaggattacatatacaggaaaccctaataggtgatatggactagggtctaggcccataacatatacat

SEQ ID NO: 183633 - DNA, 1144 bp, Zea Mays
cgggatttggggaagagaggctcatcaagcatggtcactcaggtgatctataccatggtgtgctccaagacgggactgccgtggtggtgaagaggatcactttgcgcgtggctcggaaggatgcctatatggcagagttagatttgtttgctaaaggattgcatgaaaggctggttcctttcctgggtcactgccttgataaagaagaagaaaaggttcttgtgtataggtttgtccgaaatggtgacttgtcaagtgcactgcacaaaaagtcaagggaggaagatgaaggcttgcaatctttggactggataaagaggttgaagattgcaacgggagtagctgaggctctttgctatctgcatcatgagtgttctccaccgatggttcataggtattaacttgtcaatatttgtttgctttgtatctgttaacattttttttgtttaagacgataaagttttagatttatcatagaaattcaatctgtatcattacttgaaatttagtggttgacagtcagtctccgctatgtgtgtttcactatgggtgctctgataattgtttttttagtttggtactagaggtttcagcagctactgcaatgagctttcccccatagatttggtgacagctaggaatacattgaacatacactaatgtgtgctagcaatcgctgactcagaaacttaatattttgtgcttgatgcggtatataccgtgcattatctgagtactggaaattcaatgtggacactgctgttatttgctttaatatctttgcagagatgtttctgctggtctatatcatttaaatactcaccaattttaccatacaaaataacaggaagttctttatcaccctgatttcaccttttttcatgttttgttattaatgtgaggcatgcagtagatcgcaatcatttctgattgttttgtcattttgtcggttttatatggccacatgaatgattctgactgcatagatgcttccttccaagaccagtaaattagatcaatgcaaaggtttgccgttgactaattttgtcagttttgtactatagggatgtgcaagccagcagcatccttcttgatgataaatttgatgtacgccttggtagcttgagcgaggtgtgtcctcaag

SEQ ID NO: 183634 - DNA, 740 bp, Zea Mays
agcgttgagaactcccttatgggcatgtatgctagatttgagcaaatcgatgctgcactcttggtgttcgaaggtatggaggttaaggatattgtttcatggaacaccatcatctcatgccttgccaagactgatcgtgtgaatgaagccatggatattttcagtgttcttcatgctgctgctggtggtgggcttgcgcctgactttgtcacggtcttgagcatgctgcaggcttgctccaatgcaggattacttcatcaagggcagatgctccatggatacgtcatgaaatctggtttcgtgtacgatgtttcaatatgcaatgctctcataagcatgtatgctaagttaggaagaattgattttgctgagatgatctttgagcggatggatatcaaggaccttgtttcctggaattcaatgatcaatgcttatggtatgcatggcgatggtcattcagctctacgggttttccaccagttgaaggatgctggaacacctgcgccaaacgctatcacatttgtgagtgtgatatcagcttgcagtcactctggtttggtttcagaaggtcacaagtgctttgaaagcatgggaagagaccacggcattgaacctagcatggatcactatgcctgcgtagttgatctgcttggaaggtctgggaggtttgcagaggctgagcaattcatcagggacatgcctgtccgtcctgattcaaccatctggggacctcttttagc

SEQ ID NO: 183635 - DNA, 566 bp, Zea Mays
cagccaacacccaaggccctaagcaagcagttctgatatctcttaattcctgcataaatagcagcttctcagcatccccttgcggcccatacacacaggttagccaccatgcagtcccattctctttacaaaactgaaccgacacactgtgattatcaattctgctctgcccagttgatttaagatggtgtctccacgcaaccaaaatgcccccactaactccaacagcagggaggaaaatgtaatcgctgaaattagaacccagcatggaaagaatggtttggtaagggatattctgcatttttgtctcctgtagacaaacaacatccatcttaacagtttcaacaaaatccctcacagagtcttgtcttacagatgagttcaagcctctaacattccaaacaaggatttttgatgggtccattaaaaaataacagcaagggagcaaccagcgcaagaccctactcaaggctccaaaacagaaggagcactccagccaaacaaggctgcaagggcttcaacatgacactgagacaggggttgggaaaacagtttggcgtatgcat

SEQ ID NO: 183636 - DNA, 280 bp, Zea Mays
gctttatggacttctagggttgggagcgttcacctcaggcataagaccataacgccccgtgtctagtcccgcacgcacaggcacaaccgctctgttctgtcctccacatcgcagtcgctaccaccacacacggactaggagccactggcgcacacgaacgtggagccgccgacaccgcacacgactgtagtcgccgcccaagggccaagacgcagtgtcgccccaagagcttccaagcgcccacagccccccaaccttccaagcgcccaaccctgtgtag

SEQ ID NO: 183637 - DNA, 428 bp, Zea Mays
tgcgtacgcagcgaagattttggagatggccagtcagacgagttgtaatcccagccaaacccccatggagtcacacctcaaactcagtaagttcagtgtttgctctaaaattgatgcaactgagtataggaagatagttggggcactacgctacctggtgaacacaaggccagatttggcatatgcagtggggatatatatcaaggtttatggagagacctactactaagcacctggttgttgtcaagtgtatactgcgttatgttgtaggaacgaaggaacatggatgccattattagaggaaagaagggggagctttgcttctgggctacagcaacagcgatcatggagcagatgtcgacagacggaagagcaccaccggcatcatgttcttctttggcaatagtgtggtgacctggtagtctcag

SEQ ID NO: 183638 - DNA, 290 bp, Zea Mays
cttgtataacatcggttgagatgatttggacatgtctaacaaagacctctagagacatgtagtaggatcataagacgtgatagcaatgggaagagagacaaggaaagtccgaagttgatataaaaagaggtagtaaaaggagacttgaaaggatatgtaatatacccaaatatttagccttgagtaggagtgcaaggaaaacaaccatccatgtgcctgaagtaactctagtctaccccaatttgcttggaactaaaagcctttgttactgttagtgattctaactaaat

SEQ ID NO: 183639 - DNA, 428 bp, Zea Mays
taaaaactcatttttctaatttatttcctgattttatcaatctctggactgggcctcgaatactgataaacgcaggggctcttgcgcaagaaaccagagacacagggcaccacttgcgcggactgcgggttgtttctctaaaattataaggggttttctgcgaagtggcatggcgaaggggtattgagcattaggagccgcccgatctaaatcctgcggttcagattaaattcagatgtatacgaatctgtatgcaatcaccaccctcggatcggagttcaaaggtctggattttatgcgcttgagcccatcccgaaccgtccgatcagaacaacggctccgatcgagttgcacagcggatgaaggtttagacctaatccgaccgttcattcgggaatcaatggccatgaactcgaccccatcccctg

SEQ ID NO: 183640 - DNA, 505 bp, Zea Mays
atccactcatctacttgggattgaataagtcgtttggatggtttataatctaggacaggataaagctgatcgggtgtcagtacgagcacttattgctttatttcttatcctttcatgggttgtgatcattgtccaatgcttcacgggttctgatatattgaggtggcgatcattttatgcaacacatgatatggcatggaaagctcattacagggaagtgttcgaccatggaatccgagaagctttgtgctgcctaggacgtgcaaaatatctgtaggtggcagtccaatgattttacaccttggaactccaatattagtttagttatttgagctgataattatatttactaatttagaactgtattggaagaagatgaggtttattctgttgcaagactccttggtgatttggttgcatatcgtgcttctgggacaggacatttggagctcttagcaggttggctctttgacgctgctttcatataaaaaatctcagtgtttgc

SEQ ID NO: 183641 - DNA, 353 bp, Zea Mays
tgaaatttttttgtgttggcatctccatctctcaagtagtgcaatcgggaacgcaagcatgcaactgtcctttccaaagaagcaaggacaaggcagtgttgtttcaatttctgcagcaaccatagctcatctgaggacaacgacctgctgtcctgcgccatctccaacctgtgcagcacctcgcgagccagccccagctgagaattgacatttccaaccgcactatgcccccaggactgcaaccgtcgcgccaatcttttaagcttcatcgacaccctctccagagggcaagaagactgaaccggttgatcccaggaagcatcaacctcctccaaaaaacccgggagtttagg

SEQ ID NO: 183642 - DNA, 511 bp, Zea Mays
cggttttacatggatgtccctggccttcagtaagaatactgtttacatatttaccgagcttaattcttggattactttggtttcattaaagctacacagtatttgaccttcattttttttatctctactctgtcaatccttgctagggtacttccaatattcttacacttgaacaatttggcttgtttctgttctccagctatgatccaacacttttactgcatggtcagcaatatatagagatatataaaccaattccttcacgagctaatgtaagttgtacaccaaaattgttagtcttgaaagagtaactcttcatgatctatgggttaacgtgtgatgtgtaatctagatagcagatggtaaattcttttagaaaagcagggccctacatcctctttatcataaattgacagaccggtgcctgcatttaagtaaatctatcatagttccctaatttattactatttaacatattttacagtatttactattttatagccaaaatgtg

SEQ ID NO: 183643 - DNA, 424 bp, Zea Mays
tttgattttgcttcctcaaaaagcatgtaagcttcatctaacctatcaatcttagctaaaccatcaataattgacccatatgtagcaaccgtaggaggtacatgtttcaccttcatctcttcaagagcttcataggccttgtccacctttccagatttgcagaacccatcaacaacagcattataagcccgagcatcaagagcaaaacctcgctgcttcatggcatggaaaatgctggaagtttccctagcttggccagcttttgtgagaccatgaatcaaaatggaataacttcgtacatccggaaggaaaccataacctttgatatcctcaaatattgcccttcccttttcaacgtcaccagctttgaaaacacaatccatgtatgtattcagtagagtaagatcaggctggcatcctcgac

SEQ ID NO: 183644 - DNA, 344 bp, Zea Mays
acaggtgcatgggctaggggacgcgagggctccgagacggccgaccacaccgcggagaggacgatgcggaggggacggcgtggcgcctagcatggttggtcgggcaggctccgtcctaggcaagtcggcggcatggctggtgatgcagaggaaacgacggcgcggaggggaagtggaggctaggccacatggcagggtgtgatggagaggcgaggggaggggtcctggacgtgtcggcggcatggctggtgatgcggaggagacggcgcggaggggaagtggaggctgggccacatggcaaggtgtgatggagatgtgaggcgggggcattggccgcgccagac

SEQ ID NO: 183645 - DNA, 286 bp, Zea Mays
ggctggcctgccctgccgaagcgcgccgtgccgtgtctccgtgtgccccttcctcccagaaccagaagaagttctcgaagcttctcgaaacatcgctccgtctcctccttcagccaaaacccagatcccgaaaccccagacgagcactgctccgcatggaccatcattggcgcttccctgcggtcgccggcgccgatttctgcccggtctgttccgtgcgtcacttccccttctgcccaccgccgcctctcccgccgcatcccttcccctacgacctccagccgcc

SEQ ID NO: 183646 - DNA, 722 bp, Zea Mays
tggcaattcagtgtaaagcacatagatatgtatggaggcctccatcctaatcgttttccttttgcccaacacagcagggagaatgcaccggaagataatggttaccatcgcactccccatggtgcggatcatctcgagcagagccaggctgcagatacagataataagcatataaatcatctgtccacagatgacaatgttccctccagtgcttcaggccacaaacatggtgctatcagccgccatccatctacatcttctgttgatgatcgctccatcaagtccggtgatgattctgatggggccgagagtaccagtggcagaagcagtaatacagagatctcatttatgaataatgataccatctggataccacctcaagcggcagataaggaggatgaggcccagagttttgctacgagcattgcttatgacgacgacgatgacgattatagtgatggtataaagtggggccagtcaagtttcccatcccctggtaagcagcatgacgccgacactagcaatcatagggaggaacgagaaaaggcaatgctagaagctatgaatggccagctgaaggtacttgtcagtcggtttctcgcatctgctggcattccatcttccaacgaagagggtagcgatagctggcttgatattgtcacctccctgtcatgggaagcagcactacttatcaaacctgatggtagcatgggaaaggaaat

SEQ ID NO: 183647 - DNA, 726 bp, Zea Mays
atagaaaacaacgagaataccgtgcaagaagaaaggctgaagaaaccaacgaagaaagggaggcgagaaataaaagaatgtgtgattaccgagcgatgaagaaggctgacacaggtacttcctgcccataattaacattgtcctattttttagttactaatactcattcttcctgttgtagtactatactcgcccagacagacgcaggcttatgctactggatcttcgatcgtaatacaaaccaacacaaaggtggcagagccggtaacacctgttgttgcgaggggctctttacaccaactgccaacatcagtggaaccattttcaaccatttctcaaccttcaacctataatcaatccggtaggtattcgttgttgtaattactatttacataatttattaatttgatttccttttgtcttcagcaattactgcatctaccatgggcaacctcataatgaaccgagcgaggtacatcaatatggatgatgcagatagagaaattctactgcataagcgacgtgaatacaaaaagttgagacaatgtgtacaagacgacacgataactggtgagtacaagtgaatcattcaaaaaataaatgtgtctcctcttaaggcttaccatggctttctacgatgccagatactctatcaggtgctccattatcaatccagacacaacaacatattgttcatgacacacctacccatgaacctgaattgag

SEQ ID NO: 183648 - DNA, 292 bp, Zea Mays
cgacatccgacacctctctctttgttcacaaagagggtgtgcagatcgcctacttgctgctctcatcgacgacatcatcctcagcgcctcgtcctcgactctcatatagcatgtgatgaccaaactcacctctgaattcaccatgagtgatcttgacgacctataccacttcctcgacatctccgtcacccgctctgtagatggcctatttctgtctcagcgacaatatgctgtggaccttctccaggacgccagcatggctgagtgtcactctacagcgactcccgttgac

SEQ ID NO: 183649 - DNA, 333 bp, Zea Mays
gctaaactggatcagaccgccagcgcggctgtcctcaccgccgacggatccctccgccgcgattcgtgtcgccggcgtttggattcgtgcacagggctcggggataacgctctgggtagaaagatcttcaccgccgtgcgctggacgtcactccggtgactcaccgtggctgccccttctgctttgcggctggagcagattagctcgccggtgaaccaccgcctcctggccttgcgccgcatggcttttctttccaccgcgacgccgtgactcgctacggctgtccaatcgtcgccggtgagctcgccacgacggtggacacgaattcaccgc

SEQ ID NO: 183650 - DNA, 325 bp, Zea Mays
gtctaaagtccgagactttttccgcccttgccaactttttcacctatattcgcacccaattcggcaccgtcatcaagagcatccagtgcgacaatggccgtgaatttgataattcccaggcccgcacattttttctctcccacggcattgtcttacgcatgtcgtgcccctaaacttctcagcaaaatgggaaagcagaacgttctcttcgcaccataaatgacattctgcgttctcttttgtttcaggccagtatacctccggcttattgggttgaagcccttcacactgcgacatatcttgtgaatcggctccccactaaaac

SEQ ID NO: 183651 - DNA, 594 bp, Zea Mays
cacctctgtagaaggcttacagattgtgagaggaagtcccaaataagtgcaaggaaaagctttaactgaacaagagagagtttccacagtaagagccagctcatcatcggaacaatgaataggggagaccgagcttttagccaggttggtccggaggcctgaggcgtgaccaaataaatcaaggatgcgtctgaccgcaatcagatccagaatgtgaggcctcaagaaaaccacaacatcatcagcatagaaggaaacatgatgcctgacctgctgaacaacaataggttgtagcaaacccaacgaagtggcataattgattaaagaattcagagtatccatgactaggataaagagcattggagaaagaggatctccctgcccgagaccgcgacgatgaataatgatgtctccaggctctccattgactaaaatctgagtggatgaagtagacagtaataaacaaaggagatcccgccaacgctgaccaaatcccattttacttaaaacctccaaaaggaacgaccaagaaatagagtcaaaagccttggagatgtccaacttaagaaggatatgtggttctttcttcctgtg

SEQ ID NO: 183652 - DNA, 410 bp, Zea Mays
accagattggaatgaattccacctcaagcaccgtgcctagctcaatctgggaaagatgaatgctccctatagatccggtctacatctaagattcctcagcctttattagacggggacgcgacgacctgagcacgattgaatcaaggcgagggaagaaggcgacgacgggggctgtacacgacggcgaggtcgcaagggcacgagaaccccaatcgggagagtgtgggagcgggagggcgcgagatgtacacgacggtgaggatgcaaaggtaaaggcgcagaaaccagagcgagagcgcgcaggcatgggaacagagggggagggcgtgggtgggaggagggtgggatagcgcgtcggcctggggatggcgagtcctgactcccgaggactagccaaacattgctagcga

SEQ ID NO: 183653 - DNA, 446 bp, Zea Mays
gtaaattttaggtttcaattaataaactgaattttatccaactacctgtcgcgtcctttctgctgaaattacacaagcagctcaggttcgcggaagcggaatcggagtccgcacgacgtcgatcatggcttcaccatgccttgcttctacttctgattctcgttgcttttgctgctgttgctggattgctgcagggagtaggaagaggaggaggaggagcctcagcaccagcggcatcacctgcggatgccatccaaatggacgcgcaggtctcgactcactgcggggtgccatacacagcttcactactcgccttcgatcccgtccagcgcctcctcgctgttgcaactctgtgagccccattccaaaccccgccttcacattagtacatcacaaccaaccctaaaccactgccacacaattcattcagttgtaaactagagctt

SEQ ID NO: 183654 - DNA, 396 bp, Zea Mays
aaagaaaaaggcatgaacaaccggctcaacacacattcagctcaggggctgtccagccgaagagggcagcaagtgcctggacatgagacgggggaaggggctgatcaaaaagtctgctgtatttttgcaaggcctcctgactgatgccttcgttcacatcgatcacctgcagtgctctcattaccttcttcctgaatctgttctgaccatcaccaaaggcagactgaaattccactccaataccagcaatgcgcctactacggcgtggaggtgcagcagaagaattatcgttccccggtctgacaggaggaggagccggtaaaatgtgatccgcagtccttataaccatggaactgaaggaagacccaggatgaataggggtggccaggtcaggtg

SEQ ID NO: 183655 - DNA, 450 bp, Zea Mays
taggagtggtgcggaaggaggttccgaagtcgaccaaccaatcggtgggggagggagggagcggtgaaggcatggggtgcgaggagagagccaggggaggtgctccgacaaagccactaggagggaaggcagacaacaaggtcttgatcgttagcgaggcaatcgtagcacggggaaagacaggtctaggcacgtggcggcccgcctgagggtggagcgtgacacaatcacgaagaacaaggtccatggcctgatccaaggccacgaaaatgccctagaaaagctggttgtcgtgaagaaggacgcgcacgtgcacggggcctgggacgggagctgtgacaggggtaggagtcccctgaagcgaaaccagaggggcggaggatggtgggacctcgtagaagcatgtcaaggcgacgtgcgcctgctggcagcggggcgagcgggcggcgg

SEQ ID NO: 183656 - DNA, 382 bp, Zea Mays
gtagttgcaggtttcttactcctgggtaggttccatttgtcttaaatagctttagagcaccaccttatgatatctccttttgactatgattattttcctatgaataatttttctgggaatactattaagataccaactaatctttgatatcctctaaaccaaacgcttcatgatagatgattcttgaggttgttgaatgaattggtcttgcgcatgtttgcaggcctttattggcccactaatctttgatacccactaatctttgtgctctcaattagctctaaactaatctttgatacccactaatatttgtgctctgaattggcctaattaatgatcaagtggtcatggtgtatgtcaactaatcactttctcttcatgt

SEQ ID NO: 183657 - DNA, 344 bp, Zea Mays
gaaagagtgctcgagggcacgacagtgcagcaggtccatgccaccggcggcaacatcgccggagggcccaacacggctgcgcgagcgcacacctgttgcagtagatcgggtgacaccacaggcagcgcaacggcgacagtcgtctagccttgccaccatcgtgcagtcgtcgtcggagccgtacgccatagacgaggtgatgcatagcgagcacgacgggaagtttccaagccgggacgggagcgaacaggcggagacaatagcgaacgaagcaagtgcgccaaatgtagcgggcgaggaggaccctctatattatagcgatgcttttaccgtgccttgctggg

SEQ ID NO: 183658 - DNA, 1407 bp, Zea Mays
gtttattctccgacttgtcagccgatgacttcactgactcagacttgttagcgttgctgacctttgagatacgttctgctacttgaccaaagtaagtataaaaacctaacacaaaaaacaattgctcaactgaggtgttggacttgaactgttggaaagcaacaccaattcttacaacaccctctggaggtggtacatccaacaaaggcccaccatctgctgtaaccatagctacctcaaatcggatatcatctagttcaatacatttccacaaattagaatcactgactgctctctgtccatttgaagtgctagaagtttcaagtgagagacttaggtgagaagaccaagtagcccacttcatctgactcgcatcaacaggttgatattcccacagaaggaagcaagctggatctctgtcaaggtttagcaatggacacttagttgatggtgactggcagaagtataggtcttccacatgcagtcttgcacccgaaaatgatgattgggggttagtattcttggttccactgcaccttgcgatttcatcagtatctaatggaacagagagatcaaactctttaagtgaaaatgtcaggctgttgattgaagactctggcaatatggcaccacgattgggtacaactccatcagccaagaatgaagcaattcttaagcacgattgctcctggagggttacctaagaatgaaaatcacaggcaatatttaattgagcagaaaaggccaaacaaatatgcttcactgtgatgtaaaggcgacgaaccatgatagactggcatgtgatgactgtttttgaagcaaacttcggaggtgatggagaaggggtggtctgaagacaatagagggaaaacaaaggaactccagcagcaaagtctaatagttgattgccaaatggatatataggagggcaaaaattttgacctgataaaaccatcaagatcagaatcaagcccaagtggatatctaatctgatagaagaattacaaataatttactcaccgaagtcaggcacaggtggaggttcttgtgaaactgcttgcatagacggctgtatcaatgtgcatggagggcgagaaaaggtgtctctgcagtaacatgaatacatgaggcccgttgaaggttcttgaatcattgtgatagctcagttagatcccaaattgccttgttttaattcaaattaatttttgaattatcctgttttcaacatcatatgcaccttgagtaacccaagtaatacagtctggtgcataaccagcatctagccaccgtcaagcacatctttcgctacatcgtcggcacagtcaactacggctttgtctacccccaagcgctacaagcctacaacaccgacagcaggctgacaggctacatgctcaccaggtacat

SEQ ID NO: 183659 - DNA, 276 bp, Zea Mays
aattcctggcagatgtggtcgtaatcgtcgcggtgtttatattaattggcttattctgcatgcaacactatgggacagataaagttgggtggctctttgcacctttggtgctcctttggtttattctaatcgggagcgttgggttagtgaacatacgcaaatacaacagttctgttctaaaagcatacaatccagtctacatcttccggtattttagacgaggcaagtctgagatttggacatctcttggaggagtcatgcttagcatcacaggta

SEQ ID NO: 183660 - DNA, 966 bp, Zea Mays
attctcgggcatagattgtatcgtgaaattagacgagtagagcaggtcaagaaggagccaggaaagaggtctaggggaaaaggaggatcttcagctatttcagtcgtgtcctaccagtgggaaactgttgcgtccactttcgacgagtttgatgatgtggcagtaagttttgacttttgagttcctcatatctgctcccaaagagtgctatttgttttctgctcaaaatttgtgttactactactactacagtggaaatcttggacatgaccaatatagaggaacaatagtggaagtagaccttgttgtgttagccaaaattcacattttaaagttagtctgcacaaacactaataaatcaacttagaggaaaaatacaataattgactaaaatacgccagtatttatcttgctggagttttcctttcttctatttcttgtattgaactagagcattttttccagcgtgcttagatcttatcaatgcccatttcatttttttaagttttaattaataatccatgatttatatgcaagataaaaagggaaaactttgcggttgtgactggtttataatacattgcagtagcacatggacatgtacattaatagttgaacttattggaaccatttcctagggtgccatcaagtgtttcgctgtctacacaacacacttgtttgtaagactgttcatgccagccatgttataatcatgtcatgcaacccatccatcgacatctaaataatgtatcaatactcaatagtgcatcaacttttagttgtaagcttcaatcaagtaacaataggttggctactgaatatagtgtgcttggaagaaaatgctggtatggaatgttagtcagttgtttgtattcttatctgttttttatattggctactttcatgttctttgctgtgtaggaaaaactcttttcaagtcggaacaggacagaggtttcacttgga

SEQ ID NO: 183661 - DNA, 278 bp, Zea Mays
aaggaatgtttggccattttgtttgccgtggagcattggagagcatatttacagcatgatgaatttgtcatcagaacggaccagcagagtctgactcatatggacgaccaaagattaactacaccttggcaacaaaaggccctgaccaagctaatggggttgaatttcaaacttatttacaagaaaggggttgagaatcaggtggccgatgccctatccaggagaccaaatctgaaatgtgatgacacaactgttcagttaaatgtgcttgccagctc

SEQ ID NO: 183662 - DNA, 374 bp, Zea Mays
atatcgatccactcgctaccacttgaatgagtgggctgcccaagggaataacccatccaatgccaaggaattgttcaatttgcgccattcaacagctagaaatgtgatagagagaacgtttgggctattgaagatgaggtgggctatattaaggaaaaaactcatattttgacttacaaaatcagattaggatcatcaatgcttgttgcatattgcacaactttgtaagggataggcaaagagatatggatgatttacttttaggtcaagttgatcaagtaatatctgttgaatctcatgatgttcaaagtgaagtgagtatgattaccaatgtgcaatcatcaaatcaatggactaactttagggacaccaaa

SEQ ID NO: 183663 - DNA, 421 bp, Zea Mays
gccatgcaggagaggagggcaagcgtggtggaggtggcgatttagtagcaggagatgaggagacggaggactagcgctggaggcctgggaggttgggagcgacggtgattatgtctcttcagcaccccagcagaggggaagagcaggggacatcggagggtagcgagaggagagagatgagcatggcagcaggagcagaggcggaggaattgtgcaggttcccgatgatccacgagcgcatgagttttacggatcaatgagcgatagacctgctatggcccagatcgaacagtctacatggtgtccttactgcatctgacggttaacagcgacgtggattgatccactacccaaaccttggctcttgattagtattatagagatgaataagagttctatcatcagtataagtagttgttca

SEQ ID NO: 183664 - DNA, 396 bp, Zea Mays
ggggacggtacaataagcttacgcgacagttgtcaagtggcgcaggcccgataaagctctcacttgaagaggtatctcacctgaacatttcagtctttctctatttatagaacttaacactaactgacgctttccattgcagataaaaaaagaacttgaatcgggtaaatacgaacgtatgttgcaatatttggatcagctcacacatatatttataagctgtgatgagcataagtcaccatcagtacctgcgtatcgtgccaatattagatgtgggaacttaagtagtgcaagtactgggaagcgcagcattgacgagacctcttccagccatgttcggcagaagagctcgaaagttcatttggctcagtcattacaaaatgacattacccacga

SEQ ID NO: 183665 - DNA, 450 bp, Zea Mays
attgggattaatgttctttgttctttgatgaccccttgctgagtgaaaaatacctgtgtatgttacaaaataaactacttgtatgttaaaaaaagtttctccctgccattacattgacatctcaaactcctcgcacctgttgccttttggaacatatacgttataacccacattttgcattgtgatttctctactaccaacaccaattttcttagaaggctatttagcagtaatttttgtactagctacaagaaacccattctatgcaataaatatccatattacgtaggtctgcagattacggcatatgctgcaatagcaaatgacacatttgtggcatattgctttcctttcaaagctttgagaatcatgtagtcatgcattagattcacatgcaccaaatttaagctaactggaaagtgggatcatatttttttatctcgtgcaaat

SEQ ID NO: 183666 - DNA, 401 bp, Zea Mays
attttcttacatactttttttaatgttgtacctatattacgttagatttaatcgctattgaatcgtaaacgttaaatttttgtgcgcagccggacaatattgatataagattgatacctaaagtcggtatgacatttagtaacgtggacgaggcgtataatttttatagtcaatatgcatacgaggttggattttcgttgaagaaatatagggagcgtaagaattgtaaatggttgaattgttcaatggaaggaaagaatgctgaaagggtagctggaaatccaaggatacataacacatgttcaaaacatagcgttgaattgttcagattgtgaaacttataaagcatagaacattgtcgaatgtagcatacatatatgtgcaactatgcataacatggc

SEQ ID NO: 183667 - DNA, 629 bp, Zea Mays
gtcctagcacagattttcgcagttgtggatcagcatatagaagatgaaactctgataaaggatctcaatatgaggaaccttcctgcactgagcaagaagtttgttgaattacttgaattactggtataaatcgtgtcatcgttgttttagccttttaggtcatgttcatggtggatacctcataactttgtcgatttcttgagtgcagcaaaaaaacaaggaggaagacttgggtcaggtagtcattttgttccaagatatgcttgaggtggtcacaagggatataatggaggaacaggaccagctcggcacgtgagtagcttagtttccttttgttacagcacttgatattcttcttcggatattaacatgcatgacatgccacttatgcagatcagcttgcatttttttctgtcatagctatattgttctttctttttgtttgttagtaaaaaactaaagctggactgaagttcaattttgtttctacatacaatttggtgatttatcttgttactttttgtttctagtataaatgttgcagtagtttgtgttatatatattttttatttttcttccagactgttggaatctgcacatggtgcaaatagtagaaaacatgaaggaat

SEQ ID NO: 183668 - DNA, 343 bp, Zea Mays
ctctgctgagcacaacaataacattctggtgctcatagttcttgctcagtatcttccaagattgtatctcatattccccttaacttatgaaattgtcaaagctactggagttgttgcaaagactgcttgggaaggagctgcatacaacatggtgctctatctgatagctagtcatgtatgacactcatatgtacttaagtggtttcatcattccgtatcttgatgtaactaattgttagatgtgatgcaaatcattcatctttccccccttttctttcaggtgctaggtgcactgtggtatttgctatctgttgatcgccagacattctgctggaagacgaac

SEQ ID NO: 183669 - DNA, 391 bp, Zea Mays
gttctttcgttggttgttgattcgtccaagcctcacggttcttacaataacttttatttcttcttcttaattttccaggttttttcttcgattcggcgcgtggcaacctggtcagtccaatccgtccgtgaagaatttatccgtattttcgtttgcgtcgcatcgtttctgcgaaggatttcctgttcgttttgggggagaaaggcgtcgtccttgatgtctactatcgcgaccccgccgccgccgattgcgcaagagaaggccgccagccggaataagcgcaagtaccgtgccgagccaccttccgccgagttgggcccatacgggctggagtacccgctgacggcggactgcatgggattcgagtttatgtcgcctgagaaggctgcca

SEQ ID NO: 183670 - DNA, 2086 bp, Zea Mays
gatctccttgggggatttaagcctacagatgctcgatcgatatgttttcctctttatatggagttcaaggatcttttttctcgaagtttttctgcaaaggtgtgtctactgctttgttctcatattgtgatcctacactaaacttctttgaccaagattactgtttatttgaagctatatcttcttggctgattctctaataaataaaaaatgatatgcttacttatagataaacgtgaaatgctaatatttcagctcatgataagtccacacattcgaaactcttgagttttagctacactaagacatagaccaccctcgctccaattgtcttgattcttatttatccaattgttcccttatttaggacaatgaagctatgatacgttattgtgatgagtttgtaatgaacaagaattggaaaaaactactaaccactttggaaagatatgttgcgaaggctcagaagctaattgaagggtctaagtcttcaagtggttcaaagaggaaacgacctttgccagcccatgttgtttctgattgggacaccttctcttccagactgaatatggcttgtagtcaaattggttcagcaactggcatgtcatttcagtttgtggagggtgcttttatttcagctttaaggaaaggccattggattttgcttgatgaggttaaccttgcacctccagagacacttcaaagaattggtgctgtactggatggagagaggggcacactttgcctagcagagaggggagacgtggattatgttgaacgtcatccttgcttcaggatatttgcctgcatgaatccagcaactgatgctgggaaaagggaactgccgtacacttttaggaaccgctttactgaatactttgttgatgatcttatggatgacgatgatctacgtctttttgtcaggaaatatctggatggtctgaatgctgcaaatggagttatagatagtattgtgcgattttataaagtggcaaaaaaggagtgtgaggagagactgcaggatggagctaatcagaagcctcaatttagtttgagatctctatctcgtgctttaggatatataaaaaacgcagagaaaaaatttggcttcaggaaagccatttatgatggtttctgtatgttctttcttacattgttggatcctcctagtggaaaaatcatgaagaacttaatagtttcacttctgttagatggaagagtgccacctaacatttcttttgttgactacttcactgataagcctttgcaattaggtggctgtgaatcggatgattttttgcagagctatgttttaactcaaagtgttactgagcacataatcaaccttgcccgtgctgtttacattagaagataccctgttcttctacaagggccaacatcaagtggcaaaactagccttgtgaggtatcttgctgcaaaaactggacatgagtttgtccgaatcaacaaccatgagcatactgatctccaagaatatctgggtacttatgtgacagatagtcaagggaagcttcagtttcaggagggtgctttggtgaaggctgtgcgggaggggcactggattgttttggatgagctaaatcttgcaccgtctgatgtcctggaagctttaaataggctgttagatgacaacagggaacttttcattccagagctgcaagagactataccagcacaccctaattttatgctcttcgctacacaaaacccacctatgctttatggggggcgtaaaatgctgtcccgggcgttccgcaatcgttttgttgaagtgcatgttgatgaaataccagaagatgagctagccacaattttggagcagcgatgtagaattgctcccagttatgcgaaaaggatggttgaggttatgaaagaattgcaaacacatagacaaaatagtagagtgtttgctggcaaacatggtttcataacacctagggatctatttcgttgggccaatcggtacaggacatttgaagggaagtcatacgaagatctggcgaaagatggttatttactgctggcagagagattaagggatgtcaatgagaaagttgttgttaaa

SEQ ID NO: 183671 - DNA, 285 bp, Zea Mays
gaaaaaaaggctgcctcctaggtcatatacattgtagtcactcattgcttagagaactgaagcaacatcaaatggtttgttaacattttatgtaaatcaatgctggaaagcacctctgtgttgttgtggagaaggtatcctctatggtgttgttgatgcctttattgagagttatcattagggttaaatttagccgattcattcagatgattcatggcatatctacgttaatgatgaatggtaagggaagaaacatttggtcttgaaccacttcgtgaagtttgc

SEQ ID NO: 183672 - DNA, 719 bp, Zea Mays
gattctctgtcacgaagcaaactacttgttgaatccaattcttccattgctgaattcaaagattcacccttcaaaatattagactgatcagcctcttccaatctgacctcgagaagctgtgccttcttctgccattcatcagctaactgctttgacttggaaccaaaattcctagcatcatcaacatcactctcaagttcatcaatcatgcgctccaatcgaaccgccttttcttcagcagccttttttttctgaagctcaagctttaatgcaaagttctcttcttcaagattctgaatcctctctgcagtcttcttcctgttgccatccaccttggaatcaaccagccctttgaggcgtgtaacctctgcaatgagatgctcaacttcctgggccttcacctcagaagccctaacggcatcatctacctggctgagggcttcattcttggcatcgactgcatcggccagctcgtacctagccttctcaagctgctccactgtcgaccgcagcacagcgtcatcatcctcctgctggtcgtggatgcttgcctgcttcgactctccggcagggagtttgtctgcctcctgcgcctcaatagccctcctttgcacatcaagagcatcttgcagcttggcattggcctcatcagccaccttcttggcacgctccagctcagcaagaactctgcacttctccttctcgttctccagcaactg

SEQ ID NO: 183673 - DNA, 607 bp, Zea Mays
ctggttccaaggggtgctacacggatgcaaagatgtgtgaagtcgtgacgaggccctgcgtcaggggagggatgcatagtgacgctgtcagggtgttcggtgaaatgaccggcgcctgggtcaagcccgacgaacacgtttatgccaccacaatcacatgtttgggcaggctacatgatgcagatcatgcacttcaggtactggaaaagatgagggaggcatgggtcgagctgtgggagttaacatgcaattctatggtgggtgtgcttgtgaaggtgggaaggatggatgagatattgcatctaaaggatcagatgatgctggctaaggagaagatggatgtggttctcgcgagaatgttgatgcacgtgtactatttgagtggagaagttgggaaaacattagaattgtttgatgtggttgccagtgatggtgtgacactgtccaatgtggcatatggggtgatgaacaaaggttgtgaagaagaggggatgacagatgagatatataagctatgcacatatgagttcaatttggtgatcagaggcctcttgagaaacaaacagtggaaagttgacattgacttacttgaacttatggttgatac

SEQ ID NO: 183674 - DNA, 281 bp, Zea Mays
gttgaccgatgcaactgcaaggcttgaattttcacaaaaacaatgcgcctccctcagatatgaggtgcgcatgcttcaggaggagcttgagattcggagcaaagagcgagagtacgacctcaaatcaatggatgctggtcggaagaagcagcaggagagcatgaagaagataactgcactagaagcagaatgccagaggctacgggccatggtccagaagcgtctgccaggccctgcggcgttggcaaagatgaaagatgaggtcaagcgacacggttcta

SEQ ID NO: 183675 - DNA, 795 bp, Zea Mays
ctgcaagggatgtgttcctccctcctcggaacctccaaagttgcgcgctttcacttcctctcgagcagtatgtccaaaaggaatcgggaaagaacaggattccgccgcctaatctttgcccccttttgtgaaatgaaataggccgaactggcccctgtttgtccgcagactatgggccggtgccggttagcgaaccggtgaagtcccgggagctatctggcaacacaccaaaggcagcgcagagaagaaagcaaggagcgaagggggggcaaggatgcagctagagagatcacggagagaagataaaaaaaaggaacgcaggacgacaccctcggcgtggcgacaacctgtaactgttggtggcacccccccaacaccagaatcgctaccacacacgagagcaaagcaaacctagagctggggttgccggatcaatggcggaagcagctaggcgctgctccgggccgtaaaggaacgccccccaagaggcagcacaggagcagcagaagtaaaatgagcgagcctaggagccgcgcccaggaacaccgcggaaggcacggaggcgaccagcgctggggcgcctcgagtcgagcaatgcaaggaccggggcagcagcgcagcgggtggcgcggccgcggatttgaaggcctggggagggagatgggcggggtagagagagagggaggctgcagagagtgcaaggacggacggacacgctgctcctcgcctgcgcgctcgcgctgttcgagaaggcaagctgggctgggcggcagagaagcagaggagaggagggta

SEQ ID NO: 183676 - DNA, 625 bp, Zea Mays
atcagggaaaaaacaaggccgatttgattccaggtggtttgaaggcacaaacagttagcataccagtagaagatgagcttggagactatgcacgtgcacgaggatttgagatatttgataaaatgtgctcagagaaagagagagttcaaatgagtgaggctgctctgaccgcaaaggcacgtatggcgttgtccatgggtgacagtgatatggcctttgagattgtgaaacagatgaaaggcctgggtttaaagccaaagttgcgctcatatggtcctgctttaacagcattttgcaacagtggtaatgttgaaaaagcatttgaagtagaagcccatatgttggaatctgggatcacacccgaagaagctgagttggagacacttctcagggctagtgtggttggccgacgcggagacaaggtatattatttgctgcataaatttaggactgctgtcagacaggtatcccattccacagctgaattgtttgaggcttggtttcggagcccaacagcatctaaagttggaaagagaaagtgggatgcaggtgctatagcgaaggctattgagaataatggagggggttggcatgggtttggttggttggggagagggaaatggac

SEQ ID NO: 183677 - DNA, 293 bp, Zea Mays
ttctcgagatgtgagcttcaatgaaaatcgtcccttcttttacaactcttccactcattcttctttttattccacagagtctacctccttcatgagctttcctcccatctttgaaacttcatcagtatcaccacctactgtttctaccctagatgtccttattcccatcacaccaccttccacttccacaccatctcagtcttactcttccaaaccacctgtcactcagacttacatttgtcgtcctcgctctactcccacggccagtcctgatgatgatcctgttgctgata

SEQ ID NO: 183678 - DNA, 372 bp, Zea Mays
gtgaaagaaaaaaaaagagcacgtgattaacctaggctctgattaccatgaaaatgaatatacatatacaagtgtctgcatgtactacacactaggagagccagggaaagaagtcaccacatggctacatgcagagatccactagacatgatcaccaccagccgactgaataggccaggctcaagacccaacacaaaaaacacgcctattatgggttggacggctgagtaggccaggctcaagacccagcacacacgtacacagtcaaactctaacaatgactagtgcttaccaaaatctaattgagtgcttgagagctttgaacacctcctatattgaaaatggcagaaaatagatgtcaggaattatttt

SEQ ID NO: 183679 - DNA, 305 bp, Zea Mays
ggaagctactcggattcattgtcagccaccaaggaattgaagcaaattcagaaaagatcgaggccatcatgagaatggaagcgccgcggtcgcagaaaaaaggtgcaaaggcttactggatgcatgacagccttgagccggttcatatcaaggctaggcgagaaagggatgccattttacaaattgctcaagaaggtagacaagtttcagtggaccacagaggcacaggaagctctagaggcactgaagaagttcttgaccacaccatcagtactcaagccgccgcgccaagctacgcctggtca

SEQ ID NO: 183680 - DNA, 691 bp, Zea Mays
aacttctgctggtaaagaggccaggatacaagaggtcgaagcaaagtttacccattgtcaagcaatttgcaatcgcatgactcaggtatgatatgaacataaaatggatgaattaacacctagatgcagagttgttattttagtctattcactcctttactatctgatacattaatactgttaatacggagcctacccatatgtttgcagggtgtacctgttggttcttatgtggtttgcttttctttatcaggagaaggagctgcttgaaaagcacaatgtctggcttgatgaagaactgaaagcaaaagtgaagaacttggctgaactaagaaaaacaaatatggatgaggaggctcggttgtcagcaagtattgctgaggcgagtctttgtgatctaactcatgatggatagtcattgtgatctatctcatgatggataaatatgatttagaacacatgcgctgacttaatcttcgtgtttcagcttgaaagagagatatctgaatcctctagctccttgaggcgaagcaaagaacgcatctctgaactggagcaaagggtatcctacatggaaaaggtaatttctcatgcagatgattgcagtattactgtttccatctaatcttttctcttcatgttttggtgattgaaggagttgcgctcaacaaaggatactgcagctgctaat

SEQ ID NO: 183681 - DNA, 342 bp, Zea Mays
cacatgaagatccaaagatgaaggcagattatccggatcagcacaccaaacacgcagccggaaagaagacaaatcaacaacctccccaggaccaagaagcagctcatgaaccaggcagtgtccaacgagaagctgctcagcagaatgaacatcccggagatgaaatgggaggccgcgaagctcaatatccagcaggaaaggcatctctcttccaccggaggccaagaactgacgagaccacctcctaatgtgcacccgaagaggaggtgcaaagaaggtctgaccctcactgagcatccgatcagccagctccacgttgggtagaagggcgaggaaggtatt

SEQ ID NO: 183682 - DNA, 494 bp, Zea Mays
ggagacgtatctctcatcagccttcctccggggggggagcgtctggggatagtccttcgcaggccagtgggaatgaagctgctggttgcatctccagtgctcccctgccggttggcgtccgccccaagagaaagcgggttaggaagcgtcgttccagagcaaagccttcaggtgtcccacccccatcttcctcggatcgtccaggctgcatggcggccactgctgcttcggttaccccagtgcaccacgttcctccgtgtatcctgggttggagccaccaaatgacgagagcagaggatgatcttcaatacgcggtaatggtgactgtgatcagcgatcggtcttcggttcgggcttcggagattgctgagctgcttgcccctaggctggaaatggatgctagttctctggtgttgcggcgggtttcagcgtcaagttatattcttgtcctccctgatcgtgataaggttgaggagttggttggcagatgggct

SEQ ID NO: 183683 - DNA, 1501 bp, Zea Mays
cttgtctccgtgcgaggcatattataacaaaaaagctgaaggaactagagaaagaagcttacagattggcaggcaagaatttctctctaaatgctactgctgatatcgcagacattctatatacacacctaaaattgccagttccaaaaggctgtgagaaagggaagctgcatcctagcactgacaagcagtctttggaccacctaaggtattttttcattttccttgttagttctgacatcaaacatgttatttctagttctttggaagtacttgtgtgccactttatgtccgtgcattatggatggaaaattttaaatgtgttagcatatctagtgtctagtcactgatggtctattggtagttttgtgtgagtaaaggtaaattattatgttgtcttgatcagagctagaaaagtgcttgtggaccaccggccacatgttattggcagttaatctctggacatgcttttagaatatcattgtgctaatatgcactctttttctgttttttttgaagtcaattaacaggattaactcatttttcatccctaattaaatacacgcatgcatgttcaaataatatcttcaatttggaaaagcttatgccaaagagaagcacatgtatcactgctttactgtattttcagtatataggctgctgctgatgtccttattgtatgcactcggaagatcggtagcaaggcaacactacaacagccttgccaagctggtcttcctttcgtttgaaatctatggcactcttttgatttcacttggccccaaattttcctcgacataaaattgccgtggctttatagtttactataaaatccttatcaactggacataatgctctctttaggcttctattaattatcccagtaatgtaggagaatttaatttgaccattttactaaaatatttttgaattcttctgtttcctcagggatcaacaccccattatcccattaattaaggaacacagaacattagcaaaactgttaaatggcacgttgtggtccatttgttcacgtgctcaattgtgcactcaatcacaaaggtacatcatacatggaaattggcttcagacgtcaactgccactggccgtttgtccatggaggagccaaatctgcaggtcctttagttgtaataaatgctttgcatgttttgtttggatttcagttattgagaaataacctactgacttaacctgttactatgtagtgtgttgagcatgtggtggaattcgatacagggaaaagcgataaagattactcaagcatttcagttgatgatcatcataaaatcaatgcccgtgattttttcatacctaccaaggtttttctcatttcacttttatgtatttattaagttttccctttaattaggacagttgactattttcctgtaacaacactttatttaatatcatgatttacttattttgtaggagaactggttattcataactgctgattactcacagattgagttgcgt

SEQ ID NO: 183684 - DNA, 3433 bp, Zea Mays
ggaaaaggcgacggccgcctgggccctggaggagcgagaaggcggaagaaggggagcggcagtcgcaggccgcagctcgttgatggtggttagggtttcgccgcccgcacgctcgacctgctgaagaatcgcccccctgttgaagaggtctgcgcctcgccctataaggctccggggaagaggagatagacatcagtggaccccggcgcgcggctgatggcggagcaggagcggagggacgcggaggctgggggcgatgccgcgggcgcagcggtggcgtctcacaccagcagcatgcaggtgaggtctccgcaccctacttctcggctgtcctgtacgattttgggagctttatgatgcgtagatccgctcgctgctatttgattggctaaacctgcgtccgttgcgtgccttcattttagtttgttagtgcgtagtaggttctggaagggagctgtcggaattttgcatggaggcggtggggaatttctgtgggccaaccgtgccttagatccgagttagctgccgttggagctggtaaattattgttctgagagggattgggtgtgcttatttcttggtgaactgtagtaatgagcgagatatcataagacttggtttttttgttcatgaggaatatgtgggtatgtttttttttgttttttgtgctatccccatgctgctgtaccagcacctgcatgtttgggaagtagtgaggcctgctttactgtggagttagcctgtgtcacttggtttctcactctgtcagtgaacttattggtgatagtctcgatgtgaacagttcagcacaatgagattgacaatttaaacaaagacgaatgtgccctgagcatgatgtaatcactacccatatgccatatcatttcgtaaacgtggggcatacttgattgaattatattgatacaatatatcagctactaccattttgattatttctatgccggcagtagtatccttctatcttgaaaactgtagagccttcccatctcatctgaaatttctatacaatcaaaagttccagcttaggtggatgtgatctacattgataaacttaacatctaggaagtaggaacagaagttgttttgatttaaatttattgcatcatttgattatatgtaccggtgggattttgttcctctgaagccaaatatcccaacttcattgaatgtctcacttcattgtagaaaaacaatcgacttttggtagtttgacctaaaagaaagataataaaaggcacccatgatactccctttcagtggttgttgcgtatgtcagaaaggtcaaaacagcttgtgatacctgccagctgatctatggtcatatttgtatccgtagttaactagttatactacccaatccaagtatcggtcacttcagtattaaacaaacactgatagccatgatttgttagacattgttgcaatggactagagcacgtgatgaatgtttcacttgcacagaatttttattgtggataagaggcccttgcagcagcatgtcattaggtctaggtgcagcagaggtaccaaggatagcaaagtatgacagtagctgggcataatgtgggagagcctagagtgcagatctaaccacgtcaaaagtcctacaagtcttaacgttcatatgattagaccgaaattttgtttttaggaatttgcaaattttgattagttcttactgtgttagtcattggtccaacgtccaatgaatgtttaatttgtgttaactactagcctttctagggtatctatatcgaggaggtccacacgcataatataatgatgaagcattcttctattttctgtctctcgagctctctagttctctctaccaagctatatctgtctgtctcattacaatccttaaccccattcagccatgtatattactaacgatggttacaattctaactgttccagcgtgtcaaagtataccgtttggctgatggtgggaagtgggacgatcaaggaacaggtcatgtttctattgattacattgaggtatgaagaatttctttgctaatatgggtggtatttataatttcttattcatgggtctaagctaattctcatactttctcctgattttctttgatagtgcccaaatatttgtttgcctcttgatctactttagttttgctaccctagtaccttgttgcaacatgcttcatttgaccctcattctgtttctacaaataatgaaattgtcaactattcatttttttcactgtcaagggaacagtgtcccaatgtaaaactaaagaaaaccttgtcgaagtagacatcattttcatatttcatactgtaatggtgattcatggaacagtgtcccaatgtaaaactaaagcaatagtccactaaaaatgaaaataagcacaaattacttgatgatgattcatggatcaatatatcggtgtaaaagtaaagaaatggtccagtacaaatggaaacaagcagaaattacttgtagtctatgcctctatggcaccatgatattctgtcattgtattatgatttctaatctgtgtgcttactttttggaccttatatgatttattatttcgttggtttcagggttcgaaagaactcggtttgactgttttagatgaagatgacaatgagacgctacttatgcacaacatcacatctgatgatatttacagaaaacaagaaggtgaactaactcagtatcactctgtttttgagctaattcatatcttttttgcaacttcctaatccatttcttttgttagaaacaatcatttcatggagagatcgtgaagcagcgacagacttagcactaagctttcaggaagctgcaggatgctcctacatatggtgattgaagcaagagctgtggtgcagttaccatgtttttgttcaattactctttttggtttatttgtgttctttgttggtgctttgcagggaacatatatgtgaaattcagagaaaccttcagttcagtaaccttggtggtgagtttttaaaaatcagctgtgactgtttattcaaccacacatttgcatgcagcatgctcttctcattttaacgatgcctgcagctccggaagttggtcgtcgtcaatcatcagaatctctagaagcctctagaataatgcattcaaatggtacaccccctttgctgaacgtccacttgagattgtgccattgtggtatctttcaaaaataatatttagaaattattttaaagcgtctagtttgggaacataacagaaaagtatcttactgtccattgcaaagtaggtgactagattctggagtgaagcacaactagaatctggccgttcactatttttgcttggtgttatgtgaacgaaaaggcttgcaccatctgaatataaataaatgtgtcctatgttagtagagttcagtgaccatttgttactcta

SEQ ID NO: 183685 - DNA, 310 bp, Zea Mays
atcttgcaagagaactattgcaaggctgagagcaaggatttcatggctcaaagatggggatgctaatacaaagttattccaccttcacgcccgtcatcgtaagaggaaaatttttgtggcatgtctggttgatggggaacaaatcctaatcagtcacgaggagaaagctgcctgtgtggaccaattctacaccaatctgttggggaacagtacggacagggttcaggcgattgagttagagactcttggaatgcctagttttgatctgaccgatctggaagcccctatttcagaacaggatgtctgagat

SEQ ID NO: 183686 - DNA, 682 bp, Zea Mays
ctcctgctctctttccccttctctctctatctactgttcttgcttgagctgcgatcctcttcctgaggcgcgggcgttggatgtgatacgtggttggctccgcgccatctcctccggtggcgatgagctccaagtccacctgctgctgcttatgaggtatggtgcttgcgagacttgtccatggttgcttgcttcgttttgcttagagatgctctcgccggggcagccagttgggctggtatccaagcaacctaggattggtagaattcgagcagtttctaccagtttccaagctatgtgattaaatcattaaagtgccttttcaaaattatcttctccatgtagagatagagatgtattttcagttcatgagttgtacagttcctactgaagggagacctacaacgtgctgaaattctgtgttcaagaccatgttttttttattttattatatcaactataataaatttgaaattactttcatggaagtgatttagtggagtaatctagcatgagggttagttccagtggaaattcatcaggagtgtatcttgttgggatcaagtctgtatttcctttcggtgagcgtttttttccggtccatcatctataacaacctacgatcttgtttcagatcttgctgaatgaattttgtggtttttgagccatcctggtaaacctt

SEQ ID NO: 183687 - DNA, 452 bp, Zea Mays
atcattttgcattagagctgaatgtattgagtcttattgatggtttgaagataaaaaatcatagtctataagacacgatctaaaatcatttagtgttgacttgctagactcgatgtcacaggctgtgcccctgcgcttggtctcagcccacgtggccacgtgcagtagttttgggatgacttgtttcagtatatgaggtggaaccatttcatgttcaaagtctaagaaatttcattctctatcaacactacaaaagtggttttgtcttatataataggatccatattgatagggaacgagaccttaagttggtgatagttaaaaaatatcaaatacttatgaaatgtttattatatcttttaaattgaaaaacatcatagcgcatcggttcaatcttccctatatgtttcagattgaattagaaggaaggtcatatgcagcactaggcaagc

SEQ ID NO: 183688 - DNA, 547 bp, Zea Mays
tgtgtggagaaacttgcgagggagtgttctgaactgatgaattctattgggttgaataacgaagtgcaatcaaaagagcggatactttctgtattcatgaactctgttcagttgccttcacaaaagaaggatggtgatagtactcatttatcgcattcaggaagtcctcagcagggtgagatcaaaactccagccaagggcgatgtacaggagacaacaggtaaggtcctctctattcttgggattgctgtgagtcagctatatggtgatattagagccaaagtgtctgaactctcaattaaagctattggaaaagctaaatttaggacagatgattctggtcttcaagctgatgctggaatgagcttgcaagtatttgaacaacatatagaaaaatgtgcattaatttctggagttgttgatgaagtgcatgaagttattgggagaaccttagcagaaacaagtgctgcttatgcaaagcccagtcctaggcactgggcctctacttttcaggcagctttgcactcaagcatcaacttgattgaac

SEQ ID NO: 183689 - DNA, 355 bp, Zea Mays
attttggaagttatgatgtttgtagtttgtttctgtgttccttaatttttattccagttcattcatatcaatatgtgcatactaccatgaacttatatcctgatgacaacattgtgaccttgtacattttagaaaacaaacttcaaggaatggaagcaagtacttcaagaacttggcagatttttgaaggctgatggagcatataaaggatctagatcactaagatatgacaacttatttgattcttatccatcgaaccttgtatctattgcacgattccattcaaaaagggtgctcaaactgaaggaagctgtgctaacaagctaccgcagaaatgaggttacacataactgtt

SEQ ID NO: 183690 - DNA, 394 bp, Zea Mays
cgacctcactgctctggtgttctgccacatctggatccatgtcgtggcctctggtccccttcccttctccgagactagccccttcctttgtcgtgggtgcatacctcatcatatatgctcgacaagctgcacctgggtgtggtctccgccttcgactgcttcatcttgccagcacccacaacctccctcattgacaaaggcgctggcaaggcctcctccaagcggcgtaggtcgctaagggagatgaggagtggtctggaggggagcgagtgcagctccagcacggccaaggtccaaggtctaggaggaggaagacaaatgcagaccacagtgttgggggaggttcggtgacgggctacactgccgtgtgtggcatgaccgcgagaggcttggg

SEQ ID NO: 183691 - DNA, 601 bp, Zea Mays
cgacgtctcagtctttgtgtacaaagagggtggggacatggcctacttgctgttgtacgtcgacgacatcatcctcaccgcctcttcgtcaactcttctccagcgcatcatcgacaggctccactccgagtttgccatgacagatcttggggatctccaccacttcctcaacatctccgtcgagcgcctccccaccgggatcttcctgtcccagcgacagtacgccgtcgaccttcttcagcgtgcaggcatggtcgagtgtcactccacgacgacccctgtcgacactcatgccaagctctccgcgactgctggtgctccagtcgccgacccttccatgtacaggagcatcgtcggtgctctactgactcgacctaatttggcatacgcggttcagcaggtgtgccttttcatgcatgacccgcgcgagccacatctggccttgctcaaacggatcttgcgctacttgaagggcacgctttcctccggtcttcacctgggcgtcggccacatccagtctctcaccgcttactcggatgcggactgggctgggtgtcctgactcccgtcgctccacttcgggctactgcgtctacctcggc

SEQ ID NO: 183692 - DNA, 618 bp, Zea Mays
cgcattgaacaacacgcggtacatggggaggcaaggccttcagcaaggttggtcaatcctccactccagtttaccgtcctaatccatagccatgtggacagcaagaacgtgtctggttgggtggcactgtctccactagaactcgtggcagctccggccgtaggactggtgagctgccacgtcttggcctttgcagtctggacaaggttgtttccataggatccaggggggcccaaccttggcatatattaggttctttattttatttgcaaacaaattaaagccaagatgtaagaggcttctagttagggttgcactttcacgtgcagatcaagttagatagcaaggttgttgccatgcaccccattacagctcgaggacgagctgtcttagaatggtgggggaatgttatggggtggcagcccagagcatggaggccatagggatgggctcaaggttaggattagtgaataaaggttagattagataagattgagttagttacttaggattagattagataagattgagttagttacttgggattatattagataagattgagttagttacttggattagattagataagattgagttagttactttggggccaag

SEQ ID NO: 183693 - DNA, 315 bp, Zea Mays
tttggtgtgcaatgggattcttgacaattatgatcaatgggattttcatggcgatccttcagtgcatattagtggtctagataaaaaaacacaaagcgatgaaaggcatgttaacattgggcaaatgattgaagatgccattgggcatatatatgatgacgcacctatggtagatggagatgcaccagtgatcggacccaattcagaagttgaacagttttacaaacgggtcgaagaatcaaaaaagcctttatgggaaggttgtgaactcacagaggtaaccttatttgtgttgttgtttaatgtgaaatcctc

SEQ ID NO: 183694 - DNA, 343 bp, Zea Mays
ctttccatttggcattaaatcgccaaaaaccaagaaaaaaagcatggtcctaaatggagtcctctccttttgcgtaaaaaaacataattgaagcaaaggaattggagcatagtattaaacttcggtgccttgggatacgtaagactggcttcacccgtttgcatgtgtcatcaaactccttcaacaatgactgaatctcctcttcatgagtacccactgtttgattctgcttggtctccaacagaactagagtccagatgtcattctcctttatccacttctgtatttgcatcactgaaacatcagctacctgagttacttccatattcttatctcctaccag

SEQ ID NO: 183695 - DNA, 314 bp, Zea Mays
ccaaaagctagaaaagcggaaaagaaaatgcctgcaacacgctgtccttgcagtcaaaagactgaatgctgctgctgctgtcccacgttgtccttgcagtcaaaaagattgagatgctgctgtccctgcagtaaaaaaccgccaaggactgctgctgtccttcccacagaccacgaaacttattccaacaatcctctccctaagtcttgtgtgccgtcttgttggatagttggaccatcccggacctggagcaaagctcaagaaactcgatcctcccaaggggcttggtgagcaggtccccaagctgatccttg

SEQ ID NO: 183696 - DNA, 272 bp, Zea Mays
ttgggtcctctactgccagctccgtcgccgccttcgggggatcccccaccatcggcacagtggctgacgacgagcctccaccggacacagtagacgcaggggcagcgagggagccttcaccggtttccgggggtggtgccgggtcgacctcagcctcggccaccatcgggttggccttcgcttcgggctgcgcgctgttcaggggcccaaagtcttccacgtcctcgacacgcgccatctacaacacagcacaccgattcagcaagcccacg

SEQ ID NO: 183697 - DNA, 478 bp, Zea Mays
attgtttttgcattcaattcacggtaatcaatgcaaaacctccatattttatctgccttcttgaccaatagtacatgtgacgagaatgccgatgtgcactctcgaatgatgccttgtgccaacatctgatcgcactgacgctcaatctcgtctttaagcagttgagggtatcggtagggtcgtacaaccactggttctgtaccagccagcaaccgtatgtgatggtcttggcgacgtgatggtggcagtccctgagggtcctgaaacaaatcagagaaagaggacaacagttcttccatacaatccccattcttgtccatggatgcaaatcccaacactgagtccccaacccctgtcaatttaccaaccttcccttcctccggaatgccattgtgtgtgtgtcaaagttgcagaccaccggtcctagagatcgcagccactgcactcctaatacgagatcgaacccatcaagaggcaa

SEQ ID NO: 183698 - DNA, 1261 bp, Zea Mays
tccaaaattggatttgcggcagaaccaacagtgatatataccatcaaggcaagatttttcaccaagccacaagcctgagcataaggcaggtagaattatagggaactgaattaccaatgttctatggcttggaaaaatgagttaggacaccaaaatcgcttacttgtccttctggtgtttcagcaggacacatcattccccaatgcgaattatgcaactggcggggttttgccaattttcctattggttagattagaaaaaaaaattaaaatcaagtattcatggataagtattagatgagagaaaaactaggatatccaccttcacgcccaatgggagagttaagcctccggagatgtgaaagtgtagaagcataggtcaggcgattgagcacctttgtaagaaagataatggaacatagatcagcaaaaaaaatcattgaatgaagtcggatgtagtgccctaaagatgaggataaaaccaaaaaaaaataggcacctgagaaacccctgctctggttccagcttggttagcctgtccccagtttccagtagcaagggagtacttcaaaccactggtaatagtttttgcttttatagcaaattgcaaattaacttcctttccattatctacacactaggatcaaggaaaaggaagagttaataaccacaaggatcgaatgggtggggaaaatagaaaatttcacagtttagacagcagaaaaccttttgcacataagatctcacgtcccttgttaacttcctgaaaagctatagttgcagaagaagaaaaatcaggcaattaatccagtaaaaaaagggttgacaacatttaatattcttgtatatttaggcaaaccattctaaacagccctccaagcagtggaccagcaagatctagtcgtttgtttccataatgatctcggtcatcctcagctcttcgactaagagcgcacatcagtaggcggtgaataatatacctgcaaaataaagggtagatcaaccttgctactttcaacagaactttaatttttgcagatgccagctacaagtccacaaggcttgacaaggagaacatacccaaaatagtatgccttcttagtttcacagaattccccaacaccaacatgaggcaacatttccttctgaagtatttcctttgcgtatctgaaatacagaaagatgtaagcatgagtggaacaactcaaacctaaatacctaatatgtaatatcaactatttgcttgacatacttaattctct

SEQ ID NO: 183699 - DNA, 459 bp, Zea Mays
gctaatatattggagggaagaggaaattagggtcgacagctagctgcgcttcagaacgaagaaacatcaatattatgacgcagaggcggcagcagagctagttgcatgagcttatgatgttaaaattatccaggaataatgttgaaacagctcgcaagtacttttctcatctcttccggtatctgcaaaacaaaaaggagaaaatttcaagaggtttggctactgaagaccctcgccttatcaagaatcgcaccgacaatgtgaaaaccaacacaaaacttcacgataggtcttctactctcagagattccttttcaatatcatgaaccacatatatcttctcgaacatgacaaatattcgatataatggcaacatcattcaaatcattgttggggcgaaggcgaacacgctacccttcgctctatgacttcgcctgctacacatccacaacacgtccg

SEQ ID NO: 183700 - DNA, 459 bp, Zea Mays
cctaacctatcaccgaaaaatgaatcttttacatctcgactcatcttttaattattctagatatactgcaactgcaagcatcatcctgtgtcccaagaaaacgttgcacaacgaataggagggcgcgagctggaaccacggaggtaaagacacaacagcctttggaggcggacccgtggaggccaacgttggtgttgcttgcagcaagtgaacctcgtgcagtgcagcccctcatggtcctgcggccaccagtgtgcaaagggcggtctggctggagcagatggtggcgaggccagcagacccccttgtacgaaggagagtagttgtggtagttgcccgatcgccgcatatgagggccatcgccgtacggagcgttgcagaggggcgccatgtctttcagccttttgtacgcggaggtgaacaaccaccacgttgctcgggcgcgctgatgcagctacg

SEQ ID NO: 183701 - DNA, 341 bp, Zea Mays
ctagcgcgtaagttttcccgagactcagaacacagtgaacgtggacggcgggtttattatgtgaaaacagagggtctctttatgaagtttgccacgcgaaggggtatccggaaatccagaccgtccgatcactgcccatcggcccagattatgtctacgcagcaaataacgtataactattttcgaccaccagatctaacatccacggttctcattctcttacccctagatctaatcctagacgtctggaaccgatccaacggtcacgatgccattagccgaacaggtacgcctgacccgatccgagacgtccgcggtttgatcaacagcgcagcgcccag

SEQ ID NO: 183702 - DNA, 294 bp, Zea Mays
ttcattattacccagccctgaatcacccgtcacttgttgtagatgctggctctcatccatccctatgcagcgcattgatagtctagtgaatctagcatttctccttcatcccttgtgttcgctctaggtttagtatgttggcatagccctggttattattgtagacttcttagctagactttgggtctgtttggattcaagatctaattactagctagctaaaattagctaaaattgattctagtgcatccaaacaagagggctaatagacgtgataattttttagccaagttt

SEQ ID NO: 183703 - DNA, 1118 bp, Zea Mays
tcaaaccacccaaacccacaagagagctttcaggtgggcgggtggaggcagaggcgcatgcatctagggaagtacttcaatgtcctgtgccgtttcgtgccacatgcagaggtgcgtgcatcaatggaagttcgtcctgtggcctgcggacagtggacccgagtgaccggacgcgacgcctacgtctagtcgtccaggcacgacgcctacgtcagcacgtccgggcgcgaggagttctgattatttatgtatggcaaatactcattatgaaaatataaaggcatctaggcactatgcagcagatcatgaataaaaaagtagtccctaatctataactaataataaagaggcaaaatttcagcctattttttgtctatccatttttaggcccgtctctctctaactacaagacaatagagactttctttgtccagacttcatctagaccaatatggagtaggaatcctaatcaaaataggttcctcagatcatgagtactctaaaattgaacccatatataataatcaaatagaaaaggtaagagtcgttctgctatttattttgctcgactttatttagttctctatcaagagggagacaaaaaaatcatgtccatgtgttccttattttatattctccgtccgtttacaaagcaagcgaactcccaatttttatctccttttttattcaagcttgtagagttcaaatattttacagaaacgtggtggcaatctttctaaatatttttgtacaaatattatgtagtagtaacatgttcgggcttgaactccgggtgcagaacgacagagatatatggtatatagcctgagacaccatacatacatgtatataatgaataaatacatatatattacgccgtaccattattgttattctttagtttgatttgattgagtgaagctcttcagtagattcagatgcaatgaactgcggtgtggtgtactggtatgacctcgtgacattgaaaaggcggcgggcacgaggacgaccatgaccaacacaacatcgtggtgcacatgctagacaacaagcgtggcatgagtcggacgtaggtggctagaccgaggtcgtcacgggagcctctgggcacttgacct

SEQ ID NO: 183704 - DNA, 372 bp, Zea Mays
cggagatgctgatgacaatgctagagttggtggagtagctagtgttgatgtgccttcaaggaagaggacgagctgttaaaggtactgttggttgtcggtttgttggtgtccgtgatggcagttgcccaatgttcatatgcttgggcgagggacatggccctctccatgtcttgtgggttttggacctcctccatgtcatcttgaaatgttgctcattgagggtctcagcgcgtcccacgtgcgccaggaagcgcttcgtgtgctcattgacgatgatggtctttcgtaggggcaccagctgggagagcgggttgcattggttgggcgggctgaagcgcttgttgagacaagtgaagtatgccaagtcgttca

SEQ ID NO: 183705 - DNA, 394 bp, Zea Mays
ggggacgacacgatttgtttttctggtcgtcctattcgtcgattaggcgtccaaatcgtccgattagccatctctggtcgaccagtgtgcggcgggctaggtgtactattgggcatcaccgtttttttcgcctagtagccgcataaatctgttggcaccccaaaaccctaaagcctcccctgtgcctgcgcccctctcctaaactttctgtcctctgccggcggcggctgctccagcctccagggctctccaccatctaccagctctggcgtctccagcagtccagctcatccttgaaggtcgtccctgccccctgctcatctacaaggcacaagatgagctcgtcatccgaaggtcatccctgctcccctccttcccccttgtctgcagtttt

SEQ ID NO: 183706 - DNA, 736 bp, Zea Mays
cttgcatctgctcatcaaacaaagcgtcgcactcgcctcgaacaaatcctttgttgtcatgaagatcatagttgagtaactcaatgttaccataagtgttcctccagtcgtccgcaactacaactctacgttggcagatgtgcttgatgaataactctctattcatacttgtctataacaaagccggtttaaaatgcccttcgtcgcggtgtccatgtcgctctttagatttgtagccattcgatcgattgtcaacggacgtagtcgtttctgtaaatcctccctgccaacgccacctcgctgcttcgtccgccgcagaagctcctccctatgaagcgagtccatggcgctaggatcgccacccgacatggtcacgccgctactcgtgtcccaccctgaggtacgagaactagctaccccttcctgtgtgctctactcttgttgttttatgcacgtcccttgctccccactcctcctgacgccatgggtatcttctagaaagaggacacacaatcaacacgggtagagggaagaaagcattgtggtctccgtcggcgagagcgacgttggtgtgcgcgtcctcctcaacgcgttcgatgcgcgtatgctcttctcccaaagcggccattcctcgtcgcgcttcaactgacctaggtacgaaaagatcatcgaaattcgaatcgtcggtgttgtggttttcgtcacctgctcatcaccgagcaaggacgaccataac

SEQ ID NO: 183707 - DNA, 391 bp, Zea Mays
ggcgagcttctttagcttcttatcatagtccatctttagggttcgataggcttcacgggtgttggcctcctcgccttccgctatgtcgaggcactcttggagggatgttttctccttcttaagctccttgacctgctgctctaagctttccacccgggagtttaggtgggtgcagtgggaggagagatcatcgtagtgggtatcgagagtgtggaggtatccggccatgtagacaatggtggggtcatcctcggtggggtctctccctgacagggcctgaagtcttttcctccaggtgggggtgtttttgttgctgggtgggaagtaacgaaggggggtttcaaagatctctctgctgtagttttggcatagctgtttaagggcttttcgg

SEQ ID NO: 183708 - DNA, 442 bp, Zea Mays
acacgatctctgttatttgttctggcggactgtgtgggagatgccaaggttcactgaaggtgttgggacccatgaaatacatcctgtgtacatgaccttgtgactcttcagccctattagtttcaatgacctgtgtaattatcatttttttatcagaattctggaggtgcatggcattcaagatgttatctatgcagaaaaggtatgaagtacctcatttagtgattctaggaagggaaaggaatgatcaatttgggacccttgatgagttggtgccggcccaggtaactcatcagtgccaacaaacttcatacgagcaacacttaaaacaagagctaacaagataaggaggcctgaaagaaatagaccaaatagccaaggtcccccaaaagtatatattaactcctccagagctgtataacagtgaggcatgcgatatctg

SEQ ID NO: 183709 - DNA, 360 bp, Zea Mays
ggaagacagaattccggtctggcagcgtttgactaggatggtgggggatgctcctctgaggaaggatggtcagggctcaaggtcaaggaagtcggtctggaaaaggatctccccactgcaggaggatgggaggtcggagtttgcatctgctgcatctgtcgaaggtgatagcggtggaggccatgaaggcttacgatgcaagcggaaccggaaccgttccaagcgttgacggggagagatgaagacggatgatcaccatcaacaagtatctccggttcctgttgttgaagcagtagtcccggagccatccctgttgagtgtcaacaattctaaggtttttgattccacactcaactccag

SEQ ID NO: 183710 - DNA, 964 bp, Zea Mays
aaaggataaacgtctatatgagtttctgtccagaaacttccaggtatttcagtctgtaataagttttgtatttaattacttgacaaaatcagtcatgtggttgttcctatttcacatgcgttgcttgatcctataattatcttgcaatgttcatgtttcagattcttcaggaaataagtaatgctagttctggcacctcatatcagctaggggacagttcatagattatcattatgctggcaatcctggccttttttgagccagatgcagataatataacaaaaggaattttatattattttttaatagtattgtttttgaaatattcatttttttaaatttacttgtttccatgtttgttcaaacatgccatcatataatcaattcgcaaaacggtctgttgcttagggcacacagcaaccttagtagcacccctggtcctaggtttcttttctggagggagtggatttaaacaagtctggataaaagacacccctcgtcggctgcgttcctgagttataaccatttgagttgtttccagcgagatacacatgtccataggcatgttgtaaacaattgttggcgcgtctggggcagtcatcctttagggtgtttctcttctcggtctgcacaagagaagcttcttcctgatgcaatgctgttggaccagtctttcccctgcaggtcgatattttctagagccttgccaaatgatttgacgtttgcacattttcaccctccttcggcaggttccttctgcaataagttcatgatattgccaacacagattgacgagggttacatcatatatttgtgaatgaatatctaagttttgtattggttaaaaacacgaacttcatatatatgaaaacaacactctgtgttgcaaactatattattacatcacacttattgtgatgaatctattcaggaagaaaggcacaaggctgctgctctaaaaaat

SEQ ID NO: 183711 - DNA, 1238 bp, Zea Mays
acggaaggagaagatagcctctggtctgctgaacccattcgtcgcccatctcaaggttgcacaagaacaaattgccaagggaggctattctatcacacttgagcctgacccagagattgatgcaccctggtttaccaggggcacgttggataggttggtttgcgtcccattgttaggggttgtcatttgcaaatttgttctttgacaatatacgtggtgatttgaatccctctctttcgcaggtttgttcgatttgtcagtacaccagaggtcctggagcgggtcacaaccatagagtctgagatattgcagatcgaggatggcattgccgtccagggcagtgacagtcttgggttgagatctgtaagcagacatctatgcctgataacttttgactaacatactaatatcagaaagatgagatgttcatatttgtgctttgttaggtggaatactataatgggaaattggtggactgcatggaaggtgaaatgctgacgagcatttctttatttcaccacgagtcatagaacaaacagcatatgtgccatctgtggagtctttgttttatcacctaagtaatgagcaatgtttatttgttaccaaaaaagaactttccgtatcttcatggaccatgatacttggcaaattgctatgcaatatttactttagcatttaatcattataaagtttggtgtaaatgtaaaatcaggcaatgctgttggatcttttacaggcagatagtttgttttcaacatactgggctgcacaaggaaatcccaatgtatatgcatggagtgacctttcctagttatatggattcttaaattaattgttttagttttagctttagctagctcattggaagttatgcattctgagatggagctagctatcacgtcgtgcattttaggaagagatcactctcatagtctcatctactttaaaaaagctacatttttcttgaaggatgaatctgaggtgcaacttgttttggcgacagttcttgtattcttctgccctgttgctgaatgtccctgacccatctacttacaggtagtaaggcaagttacaatcctgatgcagatagggcacttgttccatacaaggtgaatttgtacagataaacctgcctcttctttctgcaaaagagtaatggtatatgtgcttatcatgttctgagattccatattcttggcaggctggtacacaaccaattccaccattgcagaatcatg

SEQ ID NO: 183712 - DNA, 282 bp, Zea Mays
gtccgattgaccgcagcgggagaggaagtggtccgggctagggacggggtagaggccggggacttttcattcgtctggctaagggccttcttggcgtcttcgccatgtgccgcacccaggcggtcgaggagtctgtgcatcgtcgcaggaccgaccggctacatgaggatattcttcgttatgcagccgagactggtcatcctctccctccccggtcccctccacctccagcccctaccttccccgcagaccttaatgagtggcaccaacaggagtttggtg

SEQ ID NO: 183713 - DNA, 409 bp, Zea Mays
ctgcaactgcaaatcacagggttgactagggaccaatttttgttgccggcatgccgctcgtgctcgattcagcatcttcgtcgccgtggctggcgataagaggttcacgattcagctctttgttccttccagattcagtctctgaccaggcacagacactcaggcaggcttgcgtctgctagtgatcccaccatcgtccgagaataataatcggagtattcgcagtgataaggaatgaatccgatggaccgggatgcttagcggccggtgctacagtactaataatttatcactggtcagctcaccaaccaacaactttttaaggggggcattcgccatacggtgattggcgtgtctctgggactttctttttggtgtgttggatcagtagagtatcgtatcgttatgg

SEQ ID NO: 183714 - DNA, 333 bp, Zea Mays
gtatcaagatgttaatttactaatgcattgcttactaattttctttcatttgcatatgcaaaataatgaaatgtcaggactaaacttttacactaaatactggtttgcaatttcttgtggccacagaaaacgaacaatactgttgcaagtccttgtgtaccaaatcatgtctctaattcatgttagcattatccgcattttaattcttggatgactaattttgaccttacaactgcttctttatctttaggtcaggacaatatgcgagtcaccttagtattacattggccttagtaccttatttactaatatagagccaggatcaaaaatcac

SEQ ID NO: 183715 - DNA, 316 bp, Zea Mays
gtgctacctgctgatctcaagtttggggcaccgaggttgatctttgaaaacatagcagaagctgaggctaccagactggaggatatcgatatactagaagaagaacgattgaatacagtgattcagtcagcacggtatcaacaaactctgaggcgctaccatgacaaagtcgtacgacatcgatcctttgcagtgggagacctcgtcctccgccgaattctaacgggggagggatggcacaaactgtcaccactatgggaaggaccattcatagtagcagaagtcactcggcctggatcatatcgtctcactcaaa

SEQ ID NO: 183716 - DNA, 830 bp, Zea Mays
agcattcattggagaactaactgctctggaatcaatgtaataccctgaaataaaaaaacgtgctgcagttcccagtttttcagcaatcttatttacattcttttccttgaaaaatcacaaggaccgtgggcatcaatgcactatctggacctgtcccaaaggagcttggaaatcttaccaatctcttatcactgtaagatcctccaatcacgttattgtcctgggaagtcttaacaaatggatattctctgactaatatttatgttcagttactgtcatgcatctgttgtcctggttatacttgcttttcaattgttgcgttaaaaaaatacttgctttccaattgtatgaaaatcatgaggctgtatgccaagagcttgaagttttgcatatactatggccatatatcgagtataatcttataatatcgttttctcacgaagttagtataatataatggaagtgagaatctgaatgcacatcttcccaatccaacattttaccagcatttcaaattttttattgtcaaaaggcacttaacagcacttccatttgaacttttctttggatcgaacttaatttaattagttaattctttcagggcattgggctcaaataattttaacggcacacttcctgatgagctggggaaactgacaaaacttcgacaaatgtgagttatctatttggttgctttacatgtcttctacatgaccatctatgctttcttcactctttaaactgataactatatgcatgacataactgaaaaatgctatccaactttgagttgcagatacattgatagtaacgacttcagtggttctcta

SEQ ID NO: 183717 - DNA, 527 bp, Zea Mays
cacaacacaacaaatacttcagcaacaaggaggaaaacaaagaaagcaaacacattacgaacggacttgacgcgagcagaacaacaacaaccgaattcctgaggacctgatcatcaaacaacatacatgtcggctaacccaaaccaatgtaaaccacatcaccccttgtagcaacgctgcacagttgcctccctccattgcgcacaacaaggggaggaatccttgaaggcatgagagaccattcaactgagtggggactaagagtgagggagcatgccaatcgaagcttgtcgaagaacaaccatctcccttgaagttgacgacgagcacccacaaacaacacatccaagcaccataaaccgccatcccacgcccttaaaggggaggaagcctttaagagggagtgctagaacatggttccacctggcataagattgatgtcatccattgttttcaggtcaggcgaccagctggtcgttcctgaggaccgaccaggcgcctaatcacgattagggggacgattagga

SEQ ID NO: 183718 - DNA, 465 bp, Zea Mays
atattggttggggatggaaagagtagattgtagtggaaggaggtcaaagggtgagggacgagtgctcgtaggtgacacatggtgcccgtgcggtgggatgttgggcagtagcgatgatgcaccaccatggctaagaggtggttttgtccacaatgaggtggaggaactagagtagcaatctaagtagaagtgttcttgtggatccactggcattactgaggcgttgatgatagtttatgggataccaacttcaagtagtagcatatatgtagtaggtggaggtcaattgaagttatgtatctacgatcctcatagagaaggatgtagtatggtatcccgcggcatacaagggtggtgcttgcaagtggagttgtagtgaggtcaaacaacttgttgaagacgatgttgaatttggatctaggtcgaccggctatcgtcttgctgggttgcttggcgggcaggttg

SEQ ID NO: 183719 - DNA, 339 bp, Zea Mays
cacaaccagcgagcactcaatgcccagctgaataattccagattaaggacaccaaggccaccaaactgcaaaggccgctgaacacaatcccaggaaacaagacaatggcctccatgcacctgctcctgccctttccaaagaaaacctcttcgtattttgtcaattcctttagttacccatttaggaaggtccaaggcaagcatagagtacacagggatgtaagataagaccaccttgaccatcacaagctgaccagccctgctcatgagagaagatttccagcccggtagcttgtttgccactttatcgatgagaggcagtaggtcagattttctaggc

SEQ ID NO: 183720 - DNA, 488 bp, Zea Mays
atctcctcggccttcgagacattcccaatcctcacaagtgattccatataaatggtgtataatattctatttggacggcatcggccaaggcatttggtgaaagtatgttccagtttctcatgcatatccagatccagatacaaatacatcaagtcaagaaaggctggcatcagatgtttcatatcactttcaacaaactcatccatgagtttttctgcaatctctatctctctagcttttgtcattatctcaataatcttatgatatgatgcaacattaggagggatgttccggttcttcatttccttgaacatttctagggatttcattggctcaccagtgcgtgcataaagctccattcggcagatataagcttgggcaggaagctcacaaccactccgaagaagccaatgccatgttgcctcagtttctttaatatctccttccttggagaaggccctcatcagtgacaccagcacatcagtgct

SEQ ID NO: 183721 - DNA, 346 bp, Zea Mays
agaagtcgcctaagggtgcagccggactagcacaacaagtgcgaaaaatcgaagtctaccacgaagactatccgtgcagaagtcgcctaagggtgcagccggactagcacaacaagtgcgaaaaaccgaagtccaccatagagactatccgtgcaacagttgcccgaaggcacagccggacgaagcgtaacaaaagcgaaaacgactacaccaaactgtccgcgcaaagaccgactacatgcgcaccagtccagcataacaattacacccgaccaagtacgtaacgccttcgcgagcatagccgaatgtgcgagggcacacaacttcatcatacaagccattacac

SEQ ID NO: 183722 - DNA, 393 bp, Zea Mays
cttgaataccactgacattgacaaatgtgaacctcgcatggttgagatcctctcggaatactctgatgaaaatggagtaaatgtttgcagcttggctcgggtaaaaggttgctttaccttttttcatagggtagcagtggaggatttctgtttgacaaggtggattccaaggtctgaaatgctcagcttttcccaccgtgttcctgcttttgacattgttgacatcaaagatcatgatataccacaagggtcatggtatctggaaccaagtgcccttcctacaaggatcatacattaacacatgtatagtagcagaagtagccatagccctattgtaatgaactaatgactccacccttctctatccctccattttgaattgttctacttatc

SEQ ID NO: 183723 - DNA, 721 bp, Zea Mays
gccagatgttgtcacgtatgggattctaatccatggacactgtgctcttggtgagctggagaatgcagtgaagctgttggatgaaatggtggcaggaggggtggagccaaatgcaactgtttatactagcgtcgttgcattattgtgtgacaaagggtggatttcagatgctttgagagttgtggaggatatggtccagcgaaaggtgatattggatgaggctctgtatacgactgtcttgagtggtttttgtaataaaggggatttggtatctgcaagaaggtggtttgatgagatgcaaagaaaaggtttggcaactgatggggtgacctacacaacgatgatcaatgggctttgtcgggctgttgagctggaagaggcagagaaattgcttcaggaaatgtgggccaggcggttggatgttgatgaagtaacatacacagtgctcattgatgggtactgcaagagagggaagatggcggaggcctttcagatgcataatgcaatggttcagagaggagtgacaccaaatgtagtgacatatacagctttgacagatggactatgcaagcaaggggatgttcaggccgctaacgagctattgcatgagatgtctaacaaggggcttgagctgaatgcttgcacatacaactccctgatcaatggcctatgcaaggcaggctatctggagcaggccatgaggactatggcagacatggat

SEQ ID NO: 183724 - DNA, 585 bp, Zea Mays
gtaaggcgtcgcctaggcgttcaggcggtggctgggcgcctagttccgcctagccgcctttaaaaccatggctgatagtagtattactttggggactatgttacaactggtacctatgtgtggtgaaggagggagtcctacccttttatagctcaagggtaggaccttaagctcaagggtaggaccttacagtgagaacttgtttcctaatggtaagggtatgatatgttgtagtgttgtgtttagtagtcccgccgatgtagccttcctgacgtcgtctccgagattgtgcgtagttgttcgccaggcatggtgtaccgtcttatacgttcggtatacgggtccctatagcgagtccgacgctaaggtccccatagtgacgcccgactggccccacagggcagagtcagggcatgtctcgaggtcgtgcttggcgtggccctgccttctgtcagaaaccctgcgtcaccctcctagcatgcgtacactcgatatggtgtattgctccgtcctgcccgacatgtgggttactgtggcgacttcgatacttaggttctccacgactggggttgatcggtcccacaa

SEQ ID NO: 183725 - DNA, 419 bp, Zea Mays
tcgagatgttacacagcgcccaggtgtggatttctcagagacattcggtcctgtggtgaagccagctacagttcgcacagttctctctctggcaatggcccgtgcaccagcttgatgtgaagaatgcttttctgcatggcactctgtccgagacagtatactatgcttagtcgtccggatttgaagaccccacacatccagattttgtttgtcgattgaacaagtccctctacaagttgaagcaggctcctcgtgcatggttcagtcggtttgccacatacttgctctccattggatttgttgaagtcaagtggaacacttcactttttgtcttccaacatggttctgacactacctatttgttgctatatgtcgacgaaatcatcctcaccgcttcctcgtctgccctcctatgccgg

SEQ ID NO: 183726 - DNA, 404 bp, Zea Mays
gtggtagagagattaggatagcaggcgcacttgaaccctcgaaggtggttgtaggagggagaggtgccaaagagagcaaagaagggggtggggtgacgaaccgccttggtagggaaacagttgagcagataggtggcagtggccagcccctcggtcgagtagcgagtggaaagggaggcctgaaataacagggagcacatgaacgccgttcggggaagaagtgtaggagcacgacatcctcagctgaacgccgtgagaaaggaagaagtcgcgggacgcggagttatcaaactccccgcctgttgtcacactggacactctagatggtacgtccaaattgagtggaaacccaagcgaagaagtgaaagggcgtagggaacgtatcatggaggagtgtagacaca

SEQ ID NO: 183727 - DNA, 445 bp, Zea Mays
gcaccttatcgctatccatttccttctttcaagcaatcctgctctagcacggcggcgttctgggccggcgattaggcgatgctaggttcccgtgttagtccgtgtcttagttggtggtttcctgcgttaagcgatttccctgagctggataagcatccatgatggggtggttaggtgtacttttgccgtgagttgcttggtcactgtgaatctagtctggctggaggttaactgcttgttggccatgggtggccgcatcaggaaatagcagaggctgaattttcgctcttagttgtatgtagaaacaggaattttgtctgcgaatcttagacatcgaatcttggtattctttctaggtgggtcatggatatacttctctttgcaatttatgcttccagcttccttgcaaagggaatttgtgttcatgagcacatgcatgtagaac

SEQ ID NO: 183728 - DNA, 373 bp, Zea Mays
cacctattatgagccaccagccaaaggaagaaccgacacttaggaggtgcccaagatttccagatcattttgtaatgctcaaaaccaacagagccagtgaagaaacccttataagccaagcttgcagaatactgcccattagaagcaattgaaaagatatgcttatcctcagagttaggttgcaatacaacatcagatattgcattccagagatgtaggtaatctacttgagctccccaggtcaaggcacctttaatatcagagacccatcttctattagttagggcgtcgcgaaaagttcttttagaaacaattctttttggaacagtcaagaggagccttggagcaatatcagaaacacttctggcattaa

SEQ ID NO: 183729 - DNA, 393 bp, Zea Mays
ctggaattgatttcgataaagtctttgcaccagtggctcatctggattcagttcgtttttttacttgcacttgctgcacaggaaggttggaaggcacatcatatggatgtaaaatcagcattcttgaatggaattccacatgaagaggtctatgtagtgcagccactaggttttattgtagatggccaggagcacaaagtttatagattaaggaaggctctgcatgggcttcgccaagcgccaagagcatggaataaaaagcttgatgcaacactgaagcagctggggttcagccagagtccattggaacatggactgtacactaaaggaactggtcaagcacgagttctagttggagtgtatgtggatgacctgatcattgttggaggaaac

SEQ ID NO: 183730 - DNA, 968 bp, Zea Mays
gaaaaggaaggggaaattcaggaattctctcaggcgtatggctatggagtgcctgtgctctggtgagcagttgaaggcgtcagatgagaccatgcggtcatctgattctacgatcacaaaggatttctcggccagtgggtactcttctcggaatggagagattgagcagtaccttgataatggcaacatagaggaagccgagttgtcgctccgggagggcatttgcctaaattatgaggtaagttgttttcttttgtgaaacagattttgttatggcaccaagaacagctgaaatatatgctgaatgtgactaggaaatgccaccaattcagctagtatgattcctagttaagtcaatcttgggtttcttttgtcaattttacttccttgtgaagatttttgtacgtaactaaaatcaacctgcgtgctgaatgtatttttttctgcagttagttgaataaatatatggttattatctttttcttcactaaaattagttcactacctcctacctagcagtttatccaagctagccttttctgtaccagtataagtatttcaagggaaattctttcttatttcaagagaagacttaccatttttattactgccattctctttcttcgatttcgttagatgccagaatgtcatctgtttaagttctatatttcagcattacatttggacctagctgtttctagctcgactgacagcacatgctaaacaggaagcaagggcattgctaggaaggctagaatatcaacggggtcatgtagaggcagcactccgtgtctttgatgggatagacatatctgcattagttcctaagatgaaaatctcaattgctagaaaaacagaccgtcggaagactcattcacagtgggattccccaccaatgcccttgcatgctgtcagccttctcatggaggccatatatcttaaagcaagagcacttcatgatcttggga

SEQ ID NO: 183731 - DNA, 293 bp, Zea Mays
gtttttctgccccatatctcgcctaacaactacataagtcttatctcttgcatgcccaaccaatcatgcaaccatcaccatcataagcgcttcatcctctctactcttatgaaacatcagttttgactgtcatcctgtctacaaaaaacccttgcatttctctactttaaagaacaagattgcaccgtcgtgtttcacacacgaagcttgtagatctatttttctcccccacatcttgcctaacaactcagataagataattcttatctgtttttcgccctcacatctcgtct

SEQ ID NO: 183732 - DNA, 631 bp, Zea Mays
gaggaaaggtcatcatagtggttatcgagagtgtggagatatccggccatgtagacgatggtggggtcatcctcagtaggatctcttcctgacagggcctaaagtcttttcctccaggcaggggtatttttgttgctaggtgggatgtaacaaaggggtgtttcaaagacctccctgctgtagttttggcatagctgtcggagggcttttcgggcaacattttggcaagtgtctgggaggcggtgtccggtgaaggtgacttggaaaggagggtggttcgggtagcttcggctttctcccaggtagactgccatagagcacttctcagttccattctcgtggtattctttccagacgtactccggcttcttgcggatccccatgcgaagcgcgcaactccgcaagagatgagggaatccttccacctctgagcagtaggatgtcctaatgaccaaagagccttccatctggtagaggaaaagaagggtctgtaaatatcaggggggaaaggagagaagatttttcttagaggtaagaggtattttctttttaaggcaaacttttaaggtcggggctgcgatctacggccagtcctatgggctctgataccacctgaagcgtcccaatcctt

SEQ ID NO: 183733 - DNA, 595 bp, Zea Mays
gtcgttgcatacaatgctcatcaggaaagaacaaattgagtaggtagtgggctttgaacaagaaatgcattaagtggatggagtttaccatggtgctttgaactccgactggtcatggggacagaatcatagccgatttgggaatggatgcggcctatgtagagtcgacgttatctagtatttgccataagaattattcgttgaagaccttgtccggatgaaagaacgggggcagcaagcggctgctgccccgccatgaatgacaacacgagcccttggaagatgtgtagggaacaatttgaggttaggttaagacatagatctaggttttggagaggtcaacacggggcctagaaattgaagaggtagatgtagagagcttacatggagtctgaatccacattgacttgcccgctcgccgctggcgatgatgcggaggatgggcgacgaagaggaaggtgagcccgggggcgctaggcggcgagcggaaaggcacaaagcaaggctgagcagtgtagtggagtcgtggtcgggttcggagcaagcgttggtttctaggcgagcggagttcgtcctcgcgtgtagtggagatcgt

SEQ ID NO: 183734 - DNA, 310 bp, Zea Mays
aggaaacggaatcattaagaacgtcatgtgggaagaaaatgttgcagatgccagtgtaggtgctgacgcacttgttccgtactcaccggacagaaatctccagcttcagatcatagaagacgatgagattgggggtggtgctgagaggtatggccatggaagcaagagagagatgggtatcatgcgtgttatgatattcctaccacccaggtatcacctcctgtttctgatggaggtaggcagtgcctcaacattggtcaggataaggaccgatcattggccatgccttgcatatgtcgacgaatacttg

SEQ ID NO: 183735 - DNA, 602 bp, Zea Mays
gctagtgctgccgccgaagctgccaatgatgctagtgcgacggctttggagatgattgttcaagctgagaaggcgaacgccgaggctgccaagaaagctcctagacctctgcgtcgtgatgtactgatgtatgatatgcatttttcttcgatcctaaaattactttgtcatttgaaataggtgtgatgcgttcatcttgatgctagttctttattgttttaggtggtgaacaaactgtgtttgttagcaattttatttggttgaattctattgtttctgttgttttcaaatcaatggcagttcgtcatcactttcactgattaaatacaactcatttaccaagtgcaaatgctaaagagggaacaagggagggaacactgggagtacctcggcctttagtggtgaatccaaccaggagttgtccacatctgcaatggtgagggagaagttcgagttggcacaccttgcgctggggctgtgaggcaagagtctgccgcgagcacaccctcgaagtcgctgacgatctcatcgaggggcatgattggcttcgggtccgacggcggatccattgccgtcgaggagcacgtgagctcgatccgttc

SEQ ID NO: 183736 - DNA, 908 bp, Zea Mays
gaagaagtgagatagggtggcaaaggtctctgacttacaggtagtgagagaagtcatctaggatgaccagatagtagttgtaaccagaaatgcttggtagcgagaatgttcaaaggtcacagtggacaagatcaaaggggcaagcggttcgagacatggaagagggtaagggtaagccaatgtggtgtccaagctgacaagcatggcatggcgaggcaaggttgtcatgggggcaagagatggtcgaggtgctcgagagtctggagagaacgttgtggttgggggcccaagacaaaggtgccaagtggagccgagacagcgacagcaagggcgtagggtgtggcaacacgggatgagggaggtggggtggggaaacgaataggatacatgggacatgtgttgtcgcatcgagcgaccaccgcatgtgaaaagatcccgtgtggtgagcccctagagatcgaacgccatagaacagtggttgttagtggtgaagcgacgaaccaagagaaggttgtgtacgatgtcgggggaaacaagtatgttgttgaggtacaatagaccacgtatgactgtattacctactgaggtgacaggcagagttgacccattaccgaaaatgacggatgaagggaaggtggtgttgtggggatgagataaagagatagtatcgaggtcaagaatggtgtggtacgaggcgccagagtcagcaacccagtcggtgggagtagcagtagtgggttgcaaagacacatgatacgaggagagtcaggggaggcacacccaaagagttgctcagatgcccactagtggcgagcagactaatggcgagcatggttgacgatgaaggagagcgaatggtggcaaacctctcacagagaactgggttcatgaccactatcgcagccttg

SEQ ID NO: 183737 - DNA, 440 bp, Zea Mays
cggaatggtcatgaagattttccgcgctaagagagattggaagacaggttggaaaaatgaagattgtatcgaggacattgctgtatgtgttggttccgatgatgaagagggttcaacagaagaaggtgcaggtcgaccctaaggatcaagaagactttgacagggcactgaaagccattcaagcttggagtcacgtaagctgactactgaagcagcggacaaaagatgtgtgggaatccggtggtgttagcgaggtgtgcattcaaggtgcttgtgaaggaaggacataagcagcagacaaagcaaatgcccatccgggggggactgccccactggtgccagagcaacagaatgctgctgagctcgaggagaagcagaacatgaagcggaaaattcttggatacaacgaaaggtaggaagaagaagaagaactgaacgga

SEQ ID NO: 183738 - DNA, 479 bp, Zea Mays
gtttgacttcatactgccctgccccaaaggatcaagatcgcatcaccagtggaagcctcgggggctgctaagtaacgttatctgactggctgactgcgccattgataaccttgggttacaactgcacaggaggctgcgacccacaggccatccggggctcattgcagctgacgaagcccctgcagactactccccgacaatatggcgacagcgacaatggcaaccgccgcgggggccgcggcactgctttactacacactgaaccgccgcctgcagacagagaggctgaataaggaaggggagtgcagcgatagcagggatgtgacacccagggccgcacagggttctcccagcaggagccgtgtatcgcggagggacgtccgcgcccctgccacctggcttgagactatctcgacgctgtcagagacgctgcggttcacgtattcagagacccttgggaagtggccgatcggcgacct

SEQ ID NO: 183739 - DNA, 586 bp, Zea Mays
ctttcatgttcggcgcaactgtgtactactgtgcaggtttcaccagtggttagcgctggtacggtttgttgcaaagtcattttcatcagttagctagtggttagcgattggatttgctttgtttcctagctcactcctcagtagccgcggtgattgtttgggggccacggccttttttgatctcctcgtggtggcagactggcaggtgaggtaaagaagacccgtaggtttaagaataaaaattgggctggagcctggaggtcaccacacctatttgcaacgtgttccaagcgtgtcactactggtatcaccaaagctctcgtgagggcatagatagttgaactacgtttagaagatgatctacagaatagcttaatgacttttgacatggatagtatagctaccatgtgatgatgtgaatggggttttcttcacgttagagatgtccgacacgtttgtgatctttgcattcttcaactcatgcattcatgtccaaatgctacctcgtatgtcgttgtcactgccagcataggctacgacctgtcaccttaattaggtctctctagttctgtcagggacaggcaaa

SEQ ID NO: 183740 - DNA, 1017 bp, Zea Mays
gcggcgaggtatgcatggcggcgacgacggctaaaccatagcgagacagctcggggtgaggcagcacgtcgtgcccggcagtggcggcatcgctttcttcctgtcctcccccaagcagttcacggtacgcctccttcctgcattaaacacatgattctgggcctccacccttggatctatgttaatctggtatctaggtttactttttcactcgtggagctgtgccaaattgactaacaaattgaccttaagtgttatgagtttacatcgtatactccatcatttataaaagaaaacccattcatagatcacacagattctgtcagcatcccaaaaaaaattcactgaacattagcatcatgtgttccttggatctatgttaatctggtatctaggtttactttttcactcgtggagctgtgccaaattgactaacaaattgaccttaagtgttatgagtttacatcgtatactccatcatttataaaagaaaacccattcatgagatcacacagattctattagcatcccaaaaaaatttcactgaacattagcatctaacacatgacattactttgtatcagcttcaaatttttttactaacacaaaagagaagggaccactaccttgatctatcgtggtataatagtggtatctataataaagttatagagtatcgccgcacagtgaatgggtaccatcaaaagtcatgcacaaactgaaattggaacctctctaaaaacattttgtgtttgtaggtcacggtgttggaacctgtcgtgcgcgcgtgtcgcagatgtgcattgcagatgttcgttcaccagcgaacctgcagctgccgaatctacagagaccataggtgagaaacgacgtagggaaatagggctggcaggggcacgtgggtaacttggtcctaaagcattggagaaggagcataccacaaggaaaccaacacggtcagtcaaaaccaaatctagataatcatcatgctacttctatgttttatgtctgtttttg

SEQ ID NO: 183741 - DNA, 656 bp, Zea Mays
ggagcagcagaagcttgaagacgtccgtctacgtcgtcgcgctggttgtcgccgttctgtcatacatcggcctccaggttctggtgttcttctgcaagcctgtggagacctgggtgcacaacgtccaaggcacgctgcaaaggtacctgaaactggagtcgtcatcatcacaggacccccgggcccggcttcgtgcagtgcaggaaaccgccgaggccgaccagcttctccgcaagtctcgcatgtacctgcttctgctcgggatccttgcggcgagcgtcacgtaccaagccgggctcaacccgccgggcggcttctggcaagcaagggccgccgacggtgtgcaccactacctgcccggcgacccagtgcttcacaacacctaccccgggagatacctcgccttcttctactgcaacgccacggcgttcgtcgcgtccttggtcatactcatcctgctgctaagcaacgtgttcagcacccaagggatcaagtactgcgcgctgcaggtcgccatgatcatggacctcctcgggctcatcggcgcctacgccgccggaagctgcaggcaagtgtccaaatccgtctacgtctcggtgctcgtcattccagtcttcctctacgtcggcgtccatgtcatggtcttcatgctccaa

SEQ ID NO: 183742 - DNA, 355 bp, Zea Mays
cacaggcaagaaatgagctatcttggttaacctatccataatgacccaaatggaattgtggtgccgggaggtgttgggcaatcccacaatgaagtccatgctgaggtcctcccatttccaagatggtatagggagtggctgcaaggtacctgctaccttcaaatggcttgctttgaccctttggcaagtgtcgcactcagatacatacttagcaatttctctcttcatcctggtccaccaaatataaagatctgagatcatgatacatcttgttactccaggggtgcatggaaaatttgaaatgatgagcttcgtccaaaattttcttcctgagttctgggtccttggggacaac

SEQ ID NO: 183743 - DNA, 305 bp, Zea Mays
ccacgcgagtacaagctctagcgtatctggcgtcaacgcgtgtgcggccatcagggctacgacagtatagcaagccttcgtaataagcgcaacaggcacaatattggctcaatagtcgggtacacgataagtccacacaacgtgcgcaacaggcgcatttgtggctcgatgatcatgacagacgaatagtgcctacagggcatgcgaaaaatacgcaactcggcgatggcggtccgactcaacgggagcggtaatcacatgacacagccaaattcgtacgacacaaatatttagagcgattttat

SEQ ID NO: 183744 - DNA, 320 bp, Zea Mays
cgggggcccagccgaagatatgatgaaagcgatggagagatcaccagagaagctaccggggttcgctcctacggacgccctgcccagagtcgcagagcgtcgacaagaacgggcgagctgtgctcgcccgcgtgtcacgccgccattgccatcgcactccacgtgctcccactcagaatcttgtcacgatccaccgcgcggaggcggagcaggcagccaccaaaccggtcgatcccagaaggcccggcgcggcggcggcggccccaggtgaggtggatcggagcagggatagtggatccgtgaactgtgatggcgagagc

SEQ ID NO: 183745 - DNA, 322 bp, Zea Mays
ttcttcttcttcctctcctcctgtttttcttttttgcttttgcctcctcatcctcttgtatagttcatactactactagtcttcttctccaccggctgactcgtccacgcaaaccctataaaaggcatccgagtcccactagctccggccccgtgtcttccccagttaactccgttgtacgtctctctccctttcactagctccgatctccttggatcgatctcctgctagctcctcctccgatccacttgtcgacacgatcgatcgtcgtcgtacgcctgcttggcgtacatactgctactaatggagacggcgctgcagc

SEQ ID NO: 183746 - DNA, 565 bp, Zea Mays
ttttctacaaaaagggcgctgacatcgcctacctgctactctacgtcgacgacatcatcctgacagcctcgacgacccagcttcttcgtcgcctcaccgagcttcttcactccgagttcgccatgacagatctcggggaccttcaccacttccttgggatctctgtcacgcgttccaaggacgacctcttcctctcccagcgtcagtatgctgcggatctgctccaacgcggcggcatggctgagtgtcaccctacggcgactcctgttgacactcaagccaagctgttcgctacggatggcaccccggtggccgatgccacccaataccgcagtctcgtcggagctctacagtatctcacgctgactcggccggatctcgcctatgccgttcagcaggtgtgcttattcatgcacgatccacgcgagcctcatctggccctgctcaagcgggtcctgcggtatgtcaagggtaccctctccactggacttcacatcggcaccggcagcattacgagtttgtctgcctactccgacgctgattgggcaggctatccagactctca

SEQ ID NO: 183747 - DNA, 342 bp, Zea Mays
cattgcagttcaaggctccttgtacttcctccaccacctgatccgaacaccgaattggtgttatggagcatttgctgattttggtgacaagccccgaagcttctccgaaaacccgcaacaactattttgtcaaggttaactcactcgccaccggctgcacgaagagcaccacatcatccacgtacattgataccctctgtccagcaccccgccttaaaagggggagtaactgacctagatccgccgccctcttgataaggaagttcagcacgtccatgactagaataaacaacattggcgagagggggtccccttgccgcagcccccgttggtgaaatatga

SEQ ID NO: 183748 - DNA, 450 bp, Zea Mays
ggaaggtaaccgcctgaagatgttgggagaggacacacgaaggtaaagtggagggtgcgacagagaaaggtatccatggggtgcgatggagggaaggtaactgcctaaagatgttgggagaggacacacgaaggcaaagcggagggtgcgatagaggaaggtatccagagggagcgatggagggaaggtaactgcatgaagatgctgggagaggacacacgaaggcaaagtggagggtgcgacagaggaaggtatccagagggagtgatggagggaaggtaaccgcgtgaagatgttaggagaggacacacgaaggcaaagtggagggtgcgatagaggaaggcaaccagagggagagatggagcgaagataaccgcgtgaagatgttaggagaggacgcacgaaggcaaagtgaagagtgcgatagaggaaggcaacaagaggacgcac

SEQ ID NO: 183749 - DNA, 325 bp, Zea Mays
tcagctataaatagactgacctccttccgtgacatgccggctcatggaaacagcgtccggcagtaagggaaggtggttatcgtgattggaactctccaagaatattggcatgcaagcctgacgcaagggaaagaatcagactaattatagtaatccaacaagggaaagtaatcaggctaattatagtaatccaacaccccccgcagtctgaacgtggtcagctacagggaaaaacattcagactggacctgaactccgtgaacaccgacgaaggcaatcctttagtgaagatatcagcatactgagaggaagtgggaacatgcaa

SEQ ID NO: 183750 - DNA, 882 bp, Zea Mays
tgatattccaacaaactttatagagtctcccagtgaaaccatcgggacctggagccttgttagaaggtatggtcttgacagtttcccatatttccagttcagaaacaggcaactcaagatcagcaaggtcatacatcggtagtccaagagcttcgaggtcgatggatctagctctttcagccgtatggccaataagttttgaataaaaaaggtcaattacttcagctttctcatgatggctggtcaggatgttatatccccatccttaagtttagtcaccagatttttcctctttctgtgccttgcatgcatatggaagtatttggtattagcatctccttccttcagccagcttattcttgatctcagcctggccatagtttttttaaaggaggccagcagcaaggattgcatcttgagcttgttttttagccaattctcagccggtgaaagcagtctgtggtcttgggcaatttcaaatttataaaggagctcctttgcaagtgccaactgtgaggcaacatgacccactttcttagtactccagctttgcagccttttagaagtctctttaagctttctatccagggtcacaagggggcaatgcaaactacccatagagtcccatgcagactgaacagtatcaagaaacccatcaatttttggccagaatgcttcaaagtggaatcttttttttcccaaaggcattatcatggagtcccaagagtaaggggcagtggtcagaagcatgagaaacagaactttgaagcagcacatttggaaaaatagcctcccaatcagaagagcaaaaaactctgtccaactttaccaacacaggattagcatgctgatttgaccaagtaaatttcctgtacttttgtg

SEQ ID NO: 183751 - DNA, 327 bp, Zea Mays
tcctccgctccccggtgtcacacaccccgctgcttgacctcgatgactacctccgctctctccgcctcactctcaccaccgcggaggcttctgaggtcatgaaggcgctcgcccccgacacctctctcgcgctcagcttcttccgcttcgccgccacctccctccccggcttccggcacgatgccttctcctataaccgcatcctggtcctcctcttcagcaaccgcgccgatcccgccgaggccatgcggctcatcgcggagatggagcgcgacggcgtgcccggcaacatctccaccgtgaatttgctggtcgggatgggcgtgg

SEQ ID NO: 183752 - DNA, 329 bp, Zea Mays
acagtactctgaaaatttggatgcagctgcgtcctttgcggtggactgtggtggtagtagagcaatatcaggttcagataattctgtctatcaagctgataatgccaaccttagtgctgcatcgtactatgttgcgggtgcacctacatgggccgttagcagcgttgggttattcttggacgcagatgcacccaatgcaagttacatcatctacagttcacgccagttcgagaacaccctagactctgcactgttccaaacagcaaggatgtcgccatcatccctgagatactatggcattggacttgagaatggaaattacacggtca

SEQ ID NO: 183753 - DNA, 892 bp, Zea Mays
gaattctctggcctccactttcagcaccgtcaccctcactccaccggcgaacgactggtaccttgatacaggtgcctcttcccacatgacctcacatgatggtaccctctctcactcctcaatccctcggtatccctctcccacctctattgttgttggtaatggttcacttctgcctgtcaccgccaccggcacaacacaccttggttcccttaccctaaataatgttcttgtttcgcctcaacttatcaagaatcttatttctgttcgccaattcactattgataacaattgttctgtggagtttgacccgtatggttgttctgtgaaggatcttctctcgcggaacgtgatcatcaggtgcaatagctccgggccgctctacccactgaagctgctcgtggctcactcccttgttgccagctccacatctgcctccctgtggcatcgtcgcctcggccaccctggtcgcgaggcactctccaaactcacttcggctatccctggttgtaataaaagcttggagtctttgtgccatgcatgtcagctaggacgacatgttcgtcttccttttaatccttcagtgtctcgagcgtccaacaactttgatcttattcattgtgacttatggacctctcctattgttagtgtctctggttacaaatattacttagttgttcttgatgactgctctcatcacctatggacgtttcccttacggcttaaatctgacacgttttccaccctgtctaactttttcgcctatgtgtccacccagttcagcgcacgcatcaaggccatccagagtgataacggccgggagttcgacaactccagcatgcgcaccttcttcctcacacatggcattcactttcgcatgtcatgtccctac

SEQ ID NO: 183754 - DNA, 649 bp, Zea Mays
aagtttgggtcgaggaccccggtgtcgcttggatcgacggggaggttgtaaaagtcaatggagacacggttacggtcagatgttccaatgataagacggtatgttggcaagtttcggcactgctaggcttgtatataaaaggcaaacggttaagaagggccgcacctatgctgaggcacaccttctataattggcaaggcacttaacagttatggatgacatgcacacttgagttttgaaacctggccctttgtttaggttacggtgaaagcgtctaatgttcatgctaaggatcccgaggaagcgccatgcggagtcgatgacatgacaaagcttgcctatctgcacgaacccggggttcttcagaatctgaaagctagatatgacatgaatgaaatttatgtaagttattaggataaccggtatagcctaaccatatgtcctatatattctccacagcttcttgctaactgagctggccatgcttttctgacatgtgtttgctaacttattcattattaaaccagacatatactgggaatattttgattgctgtaaatcccttccgaagactgccccatctgtatgatactcagatgatgcagcaatataaaggggcagaatttggtgaattaagccctcatccttt

SEQ ID NO: 183755 - DNA, 732 bp, Zea Mays
caggtaaactatgttgaacctttgctaagttctccaatagtaagcgatgctgcattttgtacaatgttgaggctagcacgttgcacagcccctcctctttgcaattgggcgctcgacattgctgctgcgattcgtgtgatatctgttggtgattttgaaatggttttggatcttacacctgtgatcatggaagatgatagtaagaagccatcatctggcatctttgaacaaatagtaaatgggctgactattgcgtgcaaagcgggtcctcttccagcagattcatttactttcgtctttccggtatgtcctccactatttttagttcaaccataaattcactcctattccccttgacatttccctttctctttcaacatttacttttccctgtttttgtccttttatttatttatttatttatttatgttgctaccttttggttcagatcatggaaaggatccttctatcttcaaaaaagacatgtcttcatgatgatgtgcttcacatactatctatgcatatggatccaatactaccacttcctcgacctaggatgttatcagttaaaaatttcttagttctttcagacttaatgctgttccttgttttattctcagactcctagaatttactatttttttttctgtgcctaggttctttatcatgtgctaagcactgttcctgcctatcaaccttcagttgggcctatgctgaatgagctatgcctag

SEQ ID NO: 183756 - DNA, 616 bp, Zea Mays
agccctcaccactgctaagacggctgttgtcgctgctcgaaaatgcaaatgtgttgctgccctcgcctgggagggcgactcaccgaggtggatgccttcgcccgacagctagccaatgctaaacgtcacctgctcggcccccatatattgagcccctgccagcgcccccgatggtcgctcctccctcagagtatgaggccatagttataactaacttccatgcccaggcggcgggtgtctacaacatccactctccggttcccatcctcgacccagctttctccacttgcgcccattagtgtcacttcatcctccattcctcctcactgtccagcgctacgccctatagatgaccatgtcctcaccaacgctgcatccctcactatcccatcctggtggcagatgaatagtgtggtcctctcgtagatccttggggaccgtcactgttgagttgtaggatgttggcatggtggcactgcccgttaggcttgggttgccatcgaggagcagttcctcgacaaccgtgaggctcgtgctctccaccttgatgttgcttttcgaactttctgcaagggaacctctctgtcaccgaatactgtcgtcaaatgaagcgcat

SEQ ID NO: 183757 - DNA, 800 bp, Zea Mays
ctaacgttgaggcggagtgccgcgctttggccagtgtagtgaccgaggttacttggctacgacaacttcttctcgagctgcacgctcctctttgtcgcgctccgttagtgtactgcaacaacgtcaacaccatctacatatcctccaaccccgttcaatatcagcgcaccaagcacattgagatcgatcttcacttcgttcgggagcatgttgcggttggagatgttcatgtactccatgttcccacatcatctcagtacatcttcatcttcatcaaggggttgtcttctaccgtctttatgaaattttggtctagtctaaacgttcgtggcactgatggttagactacaggggcgtgttagactattgtattagactataggcccgactgttcctgtggaccaagggcggcaactgtctaggcagcgtccagccccactagtttcttttagattaggcaaagatctctttgattggcggtgtttctataaacccaggaatccttgcctcttttggtccttgtatattaggcaatgatttccttgattggtggtgtttctataacctaggacatccttgcctcttttgtttccttgtagattaggcaaggctctccttgattggtggtgtttctataaacccaggacatatttgcctatacatgtacgtgttatgcaccccaacataatctatctactacttcccagccatatatttaccgtttgtgtattcaaaatgccccatgcctttattactttacatattactccctctatttaagtatataaggcgtaaccacc

SEQ ID NO: 183758 - DNA, 306 bp, Zea Mays
ggacggagcgtagacgtttgtgatggtgagggctgtgtttgtgaggggggagctgagcgtggtggtaagggagtaagggcgtgaaatgctggacgcaaggctgaacacggcgctgtcccaggcggtcagcgttgatgcagaagaagcagggaagtctagttggtaggaaggagcgcgctttgaaacagtttagttcgcaaagtttggattcctgaagacaagcaacagagggagaggcaagggagatagcattacgaacgatagtgcatttatccggatcgcctaacccacggacgttccaagaca

SEQ ID NO: 183759 - DNA, 322 bp, Zea Mays
tgatattaatagtggtatgctgatactgcaaccctacacaaaaaagcaagacgacttgatctgatcatctcattttattagagttgtttactaacccacacaatgcaccgactcatcaagaaacaaccatggagtttctattacatatcctcactagtcaccatgactagaagctcataacttctgagctgaataaacacaacatcggggagtaaactgctggcaaaagttcaccacctgacctcactgacgcgggcttcttcggagtatgaatacatcggattcctcgtaggcgtactcagggtcgaggtgctcccgtgcc

SEQ ID NO: 183760 - DNA, 271 bp, Zea Mays
gcaagattttcacggcaatcaagaaaatgctcctcgacgacaagaagggtaaatgggccgacctgctacctgaagcagtctgggcactaaacacgaccgagtgtcgggcgaccggattcactccctttcgcctgctatacagatcggaggccatgaccgcgcaggaaatgaaacatgggtccccgcggacaagcgcttcagcagtacccgacgtcgacgagctgacctccaaagatctcatcgacggagaccgtgtcttcgccctccaggc

SEQ ID NO: 183761 - DNA, 297 bp, Zea Mays
agacctcggccccacccaccttcgcctcagcagtacgcggcggggatggaggcctttgctcctgtgtgagcacggcagggagcggcttgctggggccgagggcggtggacttcgcgcctagcggaggcttgctggtgccgggggcggtagactttgtggtcccctacgccatcttgacctcgcggcgcgggtccccgaccctcgcgaacgcccggcgtttctgcgacacgtcttggcgatccttttccatcactgtcgatacaacagcagcaacattccgtccgtaaggaaaaatcc

SEQ ID NO: 183762 - DNA, 981 bp, Zea Mays
tgctgttcaggtaagcaatgatggcactcaatttgctgtcacatcccctgatcgcaggatacgtgtattttggttcaaaactggaaaattaagacgtgtatatgacgagtccctagatgtaaggaactctcccctggaaaacatttggaaagcacaagttatgttattgcattatttttaattgatgaatgttgtcatttttctaggtggcgcaagatcttcaaagaagtgatgttccattgtatcaccttgatgctattgattttggacgacgaatggctgtggagaaggaaatagagaaaacagaaaatgttccacaacctaatgctgtctttgatgagagttgcaattttcttatttatgctacccttttgggtgtaaaggtacgctgcactttctttctttcccatacttccttttatatgaggttggtcttcatatacttaaatatttttagtgtatcttgtattccttttgtttttgtaaacatgtgatgagcaatgtttgtattagagattcttcaatgctctaagaccttgctcaaactttatggttttactggaagattctggcattgagggcatagtagttagtgctgaactccaaagtcaaaacaaatacaaaaatacaaaataactcatgctgtgtcttgattccttgtgtgtcaagactgaagatagggttctttcatgtttctcctcttgattggttgtgtaaatagatgatagacaattccctgctttttgctgactgttttttgggtcatattgttattgaatcttttctgtaagacttattaactttgtcatacatgtgtagattgtgaatttgcacacaaataaggtttcccgtatcctggggaaggtagagaacaatgagaggtttctgagaattgcactataccaaggagacaaaggcaacaagaaggttagaaaaattccttcagtagctgccaatgtcaatgatagcaaggaaccatta

SEQ ID NO: 183763 - DNA, 306 bp, Zea Mays
cctccgcttccgccggaccgtacgcatgaggccggtgggtataaacccttttcttcccttaggtcttgccgtatccccgtacccagccattgcctgccaccgtcgtttgccgtagggagaggagtggaggtctagggcgccgccgacgtcgtctgcggccgtcaccgccgttcagtactcgggtaaggattccggggaagctccgtgtcgtgagggacctgggcaaactcctctcgccctggaatttggtcggaatcacggggaatttctctccgtcgctcacggttcgccgtcggccgcactcca

SEQ ID NO: 183764 - DNA, 816 bp, Zea Mays
tgctcatgagcctcagatttatggcgcagggggaatgtccaacaaaaatgagtaaaatcatcaactatcacaagataatatttatagcctgaaatactcaaaactggagaggtccagacatcacaatgaacgagttcaaagggtgcagaagtattagaaacaaaactagcaaagggcagcctagcgtgtttgcctagctggcaggcatggccaatgcggcgagctgctttattacactgtatagctgaaagcttatttagggtttgaacgacggctggcgctggatgaccgaggcgagcatgccacaactccggagtaacgacagcaacatggcagcgaggcagcagacgatgtggaatggtgtagagatcctcgttgctattgcaccaaagaaggaccgttttggtttggagatccttaacagaaaaaccagaagcgtcaaactcaatagaacagttattgtcgcgagtaagttgtcgaacagatagcaaattgcgagcaagttgaggagcgacaagaacattattaagatgaaagtagcgatcagctataggtaagaaagatgtgccacggccagatgaagggatggactgcccgttaccgttaccgaccgtaatggagcacggtggggaaggaaaacgggagaggagtataccgtcgttggaggacatgtgggatgtcgctccgctgtccataacccaggaagaggagtcctgcaccgccatctgattaagggcgacaatcaggttggacgtattctagccgcctgaaggagcacctgcggcggcgcaaaggcggtgtgagcctgttgtggag

SEQ ID NO: 183765 - DNA, 856 bp, Zea Mays
catactcctatagcattatttcgtatcccctttctttagtttttggttgcatgcggcatcatacagaatagtctttcaggtttcaagcctgtaaaacacatggtcttctctggtctctatcctgccgatggttccgactttgaagctcttagccatgcgattgagaaactaacatgtaatgatgccagtgtctctgttacaaaggagacaagtaatgcacttggcatgggattcaggtaccactgtacccgatttcctacatgtgaactagttcgtttctgttgttttcattacactgagtatgggacttgcagcaatctgtttttttatgtctgctttacagatgtggcttcctaggattgctacacatggatgtgttccatcaacggcttgagcaagtatagttttttcgcataaatttgatatgttggttttttgttgcataatttcaacacaatacatcaattgatgttcaaaaattaattaaagagcttcattcctaattattatgctagtatttcaagggaatttgtaactttgaggtgctgcctttagaaggattaaatctttttagcagaaaaaagtagagaatatctttcttcataaggttaatggtcctatatattttactattttaaagtatattggttacctgtgtcatccttgaaactcttccattcatttgaacatatagggcccataggggggggggggtgactggaatacgaaatacgatggcaaaaaagaggaagttataatatgtgatatagtgtaaataatttgtgtgacctttaaattgccttgaggttctgattgtcactgcgtttatttaggaatatggagctcaagtcatatc

SEQ ID NO: 183766 - DNA, 1183 bp, Zea Mays
tgaaatcttccccaaaacacaggtcgggacatgctgtgtccgttttttccctttgtcgaatatgagcatgttgacgcttgaactgtgttgcggatttatttatttaatgagcatgtttgtttcggttgcaggatgaagagcctaacgagagaaggattgggaagttgtgcgagtacgcttcgaaaaaccctcttcgagtgccaaaggttcactccccttgcttcctcattggaatttcgttgtttccatgccaggtgtggaggttctgaccttttgagcgaattgatcttgctgctaaacttagacgacccttcagaatacagtttgctagctttgtagcttctgtagtactgattataaatgcaatcgaggatcgagtggtataacttatcttgaaactggagatgcctcatggatcattgttctaggcctctaaacttaatgttttcagtatagttcccttgtctccttggtgccctcatttcagagtagtagtccttgttaaacatattgtcaggcatgattgcctcttaagcaaattcaggctctgtaagcttgctgtcttatgcatgttgatatctgagcagatcacagtttacttggagcagcacatttaccgggacttaagaagtgagcagtacggctttgcaaaagtggtgatgttgatatatcgcagactgtcggtttcctgtaaagaacagatgtgagtcttcttttcaagtttctcttgctcatatagccctgtattctgtgaagttaatatttttatttggtttgcaatggatacttcttacactttgttattacctttgctggttacaaatgaaattgttattttcttaattcaggcctctgtttgcaagtagcctattaagcattgtgcacactcttttagaccaaaagaggcaggacgatttgcgcattgttgggtgtgaaaccttgtttgattttactgtcaatcaggtattcctaatggactagatgccaatgcccgttagcaggattaagtttatataggtatgtcccattattggtgatcttgagtctgtctattccaggtggatggtacatatcagttcaatttggaagggctggtcccaagactgtgtgaaatagcccaagaagtaggagaagatgaaagggcaagtgccctacgagcggcagccctgcaatctctttcagc

SEQ ID NO: 183767 - DNA, 322 bp, Zea Mays
aagattatttttgtaatctgctgggggctgatttgcagagacattttactattgatctgagtaattgtcacaggactgcgatggatctaagtgctttggagcagcctttttcggagaaagaggttatggacaccattgcttgtctcccttctgacaaggctcctgggcctgatggttttacaggaaaattttacaagacatgctgggacatcattaaagtcgacataatggctgctcttaactccctttaccatggtaatgcctataagcttgatttgctgaactcagcgtatctcattcttctcccgaagagagaggatgc

SEQ ID NO: 183768 - DNA, 494 bp, Zea Mays
gctgggcacaaccggcggagaagaaaaacccagccagcagatgtttcttcgcagttgctgctacctggaaaccaagaaaatgcagcaaataggacgcaggatattgtcaatattattacagtgattgtgcacttgcatggtactgactgctaacacccatactcaatataccgtttcaagactttgtgattttaaccagtatagtggaatttgttgtccgtaatgtcaggttctagcgtcggtaaagtgcctagcattcctcccataccagataagcagaatctggttgaaattatcagcaaaataaattcattgaacaatatgacctctgcggacaagtctcctccatctgaagtcgttgatttggatgctttgcaagagcaacaagtgcaacgggaggattctgtggggaagacgaccaacggaatcgacaagcaaactgtgccatcaaccatggatttgctaggagtttttccaactggccttgcaacttc

SEQ ID NO: 183769 - DNA, 532 bp, Zea Mays
aaaatttggtggaaagaggtgggatgagcaatcttttgcctgagtgcgtgagtgcacatgaaggagagcagtggtggctgcaagacacgcagggagaaaaggagaaggcccggatgagcttggcaccgctggagatcggtgtggggtgcaaatgagggcaagctcaacaaggaggagcagcgctggatgcatggggattgagtggaagtcgctctggcggcgctgcaggtcttgcggagctcaagctcaagaggagctgttgcatggttgttgaagaagagtctgtgtgcctgcatccttgggcaggcgtgtgaaagcttgggctgctggcgagggagagctcacacagatgagatgaggatggcaagcgcacccagtgaacacagtacttgtgaagaagtccagcagctgcttgcttagctttgcttgcaggcagccaggtgcaagcttccttgcctgcacgcgctggtgcttgctttcacgagcggtggcaaacacaaatcacgtgggataagttggaatgatggtggca

SEQ ID NO: 183770 - DNA, 277 bp, Zea Mays
tcaccggtgaaggcgaagcagctgaaagtttattttcgtcaaagattcaagaatgtcctgaaccaggaggaagctggaactcccaattctgtcactgtgcttcctccatccaccacagacgtggcagctgctgacacagatccatctgagtatcctgtttcagatgttgacgctgtgttggcaactctgtctagaacattaacttcctccctgtctgatgtggcagcagcacacgcggctccgtcgaaggctaatgccttagacgttgacgctgagt

SEQ ID NO: 183771 - DNA, 344 bp, Zea Mays
gtttcagtgaaatcatcccctatgacggaacaaaccaacactagcatttcacatttggcattggaaaccaccattatgggtgatgcatccatgcattctgtctcaactgttatcagctttgccccaggctcgtatgaaatgcagagtgaaggagtgctggctgaactagaagctggaaagactttgcagaaatcacaatcttctgcctccaatctttctgatagaattgacttagcatggactggttctggtcagcttgttaacgattcatcaagtagcatggaggcagtttcattcatacctgctagtctgaaggataatcctgcataccagaaggttatagc

SEQ ID NO: 183772 - DNA, 365 bp, Zea Mays
gcgggaatgcggggggaagcctcgggtcgatggtggcggactctggctgcatggggaggtctccggtgagcacgggccgggcaaactagaggggttgggtgcggaccgaggggtgtcccaagatgttgacgatgaggtggaactcactgaggcaacaggagaggcgagggctcgacggtgaccatagaatgagcgcgagaccaccgcgagcggcggcggaactccctgggcgcgcgcagagcgagagagggggcgagagtgtttgcctggggggcgcaactgagcgaggggagtgagtgagtgggcgtgggctctaaaaggaggccgggtgcatgcagaggtggccgggaaacgcacgacgtggg

SEQ ID NO: 183773 - DNA, 272 bp, Zea Mays
gcgctggcgcacacaagggcgaggtgagatctcaccgaggcacgggggttgagcggctcctgcgatggcagacaacgtgatagaggttttgcgaggggaaaagaggagaaggtggcgagtctggcgtccaagggagatggaatggataaattgccgaactgctcacgaggcgtgggtggttggggatttttggggaagaagagcagggccttcgtcggcgctgggacgactgcgtagcacgcgcgtgcgagcaggtcgcgcgagttgtgcgc

SEQ ID NO: 183774 - DNA, 305 bp, Zea Mays
agaccagctagctattgtgtcacatgcttctgattgtttgccctctggagatcaggtatttgtcaggattttaatttgctctaatgttgagctaaacagtgatcttatatatcgtgccaaagctactttatggttttaagtagtgagtagtgacctatctgtccctttagtgttacacatatttttcgatgagaaatgatgctggaataactaagtatttgtgacggatactgacaggtgctggatgttaaagtattcaacatatctgaggggacacaatcaatgtccggtcgccttgttttgac

SEQ ID NO: 183775 - DNA, 983 bp, Zea Mays
cttgactacttcaaagctgtatggcttccaagacttggtcagttcatgtgcctttcatgtatcatattttgcttctctatctctggttttttactgtagttgccaaagggttttagttataccttttcttaagaagtaatgtgttaagttatttggtgaggtttcttgattgctgtcagatcctctactgctgagtgctgattgttaaatatcttccaggggcatggataactgtcttaaaggccacggcattggctagtgcacaggtagcttcagcaatagagagttaccatcacctgctaaaacttcggctgctgaatgaggcagatgaaagtgtctactggcgtgctgattggttggtcgataagttgggtacaaaggtccattcttactactggctggatgaattctcaggaaagaacagtttttcgcgttactggaggagtgagtggagtagtggcccaaacccatggtgccagggaatgcagattccagattccgatgtcgtcattgaaggcaattatgccagtgtggtcagccagaagaacaaggagaagtcccatgtcgtactgaatccaggttctgagtttgcgttgtgcgattgtagctggtcaatgaaggggaacctttgcaaacatgtaataaagtcggcaaaggtctgccgtgacaggggattggcactgccatcgttggccatgttccactattaccaggcattggcaaatcttgttcattgtccacccagtgatactttgattagtgaccatgcaatggctctggcagtttctgttaaaacacagctagatgcagtgttgtgcgctgttaatggaagttcttcaattaggccaggtttccaggatccacagtcaacgagtaagacaagagaagctgaaattgaggaagccaactctgagaatggtgtgtgcacaagtcaaccccagcctggtgctggtgatgatgaggatcaggccattcggactggc

SEQ ID NO: 183776 - DNA, 537 bp, Zea Mays
aaagaagcccatggttcccgcataaattgatcagaacttcagatggcatatctgtggcgaagattgcatgtggtcagtggcacacagctatagtatcctccacaggtaagctgttcacatatggacatggagcatttggtgttcttggacatggtgacacacgtagttttgttcagccgaaagaagtggagtccttgagagggttaagagtcaagtccgtcgcatgtggaccatggcacaccgctgctattgtggaaacatcaggaacactcaagagcaatgctcctggtgggaagctgttcacatggggtgacgcaggcggagagaagctgggccatactgacaaaaagtcaaagcttgtaccaactcgtgtcgaatcgctcgttgattgtgattttactcaggtgtcatgtggtatttcattaacagctgtgctaaccataacgggtgttgtatttaccattggaagcaaggaccatgggcaattagggaatcctcgatctgacactgacagcgcatgtatttgtatggttgaag

SEQ ID NO: 183777 - DNA, 296 bp, Zea Mays
gataaaggctacggttcgtcaatctgctctctcaaaagttgctacatctggcatcttcaataacagaactctaaatcctcaggtaacaacttttgctctttgcaaatgttcacttctatatgcgcactgttgtattgaagctttcctcagatgatgatcaactgacttctgcttctgaaagagattgaatctgtatagaatagtagattaattattgagagttaaaaaggttatataggggtgaggagatcttggggcaaaaggaaaccgatagtcaagatttcctcagggcagga

SEQ ID NO: 183778 - DNA, 501 bp, Zea Mays
ctccctttctcctcgccgtcgtcgtccacgaccccacctctatcccctttgcctcaaacatccaccttctcctcctctctgatcccatctcccagctcgcattcgtcccaccctgtgtgggtgtgtgtctgcgccagagaccaaacaccaacctccccccaccctcgacccatccccacctcgccgccgccgccgcacagtctccttccccgagatttgaatgcgttaggaagtgcatggggagaaaggatgccagagttgcgtagtggagtccggcagtctcggttgagggcaaagaaggttgaggatcttgtggtttaggaccctactaaaaacttggttgtggcggcacctacggtggcaggaaggcgtggtagaggaaggggtgggaggggtggagggagaggagcaggacggggaaggggaggaagaggaagaggtgttccagtgcttaacttggatcctgaccagcctcttgaggttcttccaggagctcctgcg

SEQ ID NO: 183779 - DNA, 805 bp, Zea Mays
atagtaatacataagggccactgtctgacggatcttccaagagtgccatttcagcggcatacctcccaatttgaacattaccaaagagacggcaggcactcagcaagctcctccaaacagctgccgctggtttgattggcatcttttcaatgaactcctgagcagaatgtaatttccctgaacgaccgaggagattgaccactgaagcataatgctcagtgcccgggtcaataccatattttgatttcatagagttaaaatggtgtaagccttcatccacaaggcctgcatgagcacatgctgatagcacaccaacaaaagtcacatagtttggttctactttggcctctctcatcagctggaaagcacaaagggcttcttcagcatgaccatgttgtgcatacatagtaatcatggagttccaacaaataacatccttcccacatgttgactcaaacagcatccatccttctttaatgaagccacattttgcatacatgtctacaagagcatttgaaacatgaggattaatgtcacaacctgctttgatgatctgggcatgaaactgctgcccatgaaacatgcttgccaagttgctcgccacagttactagtgctacaaacgtgaactcattgggtgtcatcccagagacacgaacctggttgaagagttttactgcctcttccccttgctcattctgtgtgtggccaaatatcatagcattccagatggccatgtccctgttttgcatcataaaaaacacagccttggcatcatccacaagggaagattttgaatatgcatc

SEQ ID NO: 183780 - DNA, 471 bp, Zea Mays
caccttcaaactataaagaccttataggatttcttggacttgctggttactatagcaagttcgtcaaaaactttggagttattactcgacctctcaatgatctattgaaaaaaggggcattgttcatatgggcacaagtgcatgaagaagcttttcgcaccctcaaacagagcctaactacagctcctgtactcatgcttctagacttttctaaaccatttgccataggaacagatgcttctagcaaaggaattggggttgttcttctgcaaaacaatcatcccttaccatacgtaagcaagactcttggggtcaaaaattagggattgtcaacatatgagaaggaatatctagccatcttgctagctgtagataagtggcgtcagtacctccaatattttgaattcttgatatattcagaccacataagtctatcccatctaactgtacagagactacgtacaccttggc

SEQ ID NO: 183781 - DNA, 710 bp, Zea Mays
aaagttcttgattcaatcaacttttcttcaagtcttctaattacttcacttttatcagctaactcctccatagtgcaactaatctcttcaatatgctggatctgcgattttagttcagcattctccatagaaactatgtttaattcatcaatcttctttcccagctcctcctctagggcagcaacattttgattacacttcaaaatcattgcttccaattgttgcctatcagaaacaacatcatcaagttcaagcgacttagatgcaagctctagttccaaagattttattacttttctcaaccctgtaatctcagctgcttgatctttcgctacagatgcagactcttgtaacaggctaagatcaaatgataagccctttgttaattcctcttttctgattaattcggacttgagaagtgaattctgtgtgcttaactcctgggctgatacttcgataatgtctaagtcattggataacttgctcatcgtgtttatttgctcagtaatgtaattgtgcacatgatcagtaaccaattgcaagcgaccttcaatggtggaaaataacttatctgcttcaatgttatccattaattcaaccatgcactgatccttgcacaaaatattccgaatttcctgcttcaacgtttcattttcagaaatgaaataattttctctagtacttctgcgattcatggcatcaattgtcag

SEQ ID NO: 183782 - DNA, 299 bp, Zea Mays
ggagtggaaaggaaggcgccccaactcggccagccgcgagccgtagataggcggtccgaagcgaaggcggcaaagctccttgaagcgctcccaggacggcatgccctcgtccaacaggagtgcgtagtaccatgtctgagcggcgccggtgaggtggtaggaggccatccacgtccgctgctccaccggagtgcgctggccccagaagaattgttcacagtgtgtgagccaattcagcgggtcgaccgagccgtcgtatgtcgtgaagtcgatcttgtaggtccgaggctggaaaggcg

SEQ ID NO: 183783 - DNA, 329 bp, Zea Mays
aatttgtcttatgggaaacaacaggtagatatacattattgatgaaaaacgagacctacagattcagtagtgaaactgtgaaatacgtacactatcctcccaccccaccaccaccacacgtgagactgaacgaaatgtaaaataccggaaaccggacctcttaggttagcaaaacatcgtatgaagctggaaatgcatgtggatgtgttagtgccagctctattcatgtgctcgtgctgctgatggtgtcgggcgtctcttctcagaggtattgttcgtgtatcctcgctcggttctcttcccaccacagcctggcatgcatctcgctg

SEQ ID NO: 183784 - DNA, 584 bp, Zea Mays
gggtcactgagcacatcatatggaagacacataactggaaaggttccaccgacactgcaagacttatctcggcgtcaggtccagcaaaacctgcacaggcctttacgccctcatcctcgggtgggcgtgcttggttcgttgctgcagcaggatatcgcaaactggtatgaaaactgcgggccgccacagtctggatacaggctgggcgtttctaaagggacggcatcgcttgatatgaacagacatggaaactacgagaccttgaactcaggagtgttcacagcaggatggaatgcccttcaattgggttctgttagctctcttgccgatccagagtaccggttgccaaggtatggtacaggtcagccttgtacaggtggcaatgggagaacggttcacccgttggataagcttgtgcgaaaggatatctgtgtgactaacagaaacccagctgattttactgtaattagtgacatgaatgagtatatgagaagcctttgagtgtgaggcagggaggagcgttgtagttgaatacgtttagatcgataaatttcaccttatcagtgccaagcaatcatcattga

SEQ ID NO: 183785 - DNA, 476 bp, Zea Mays
gctgcctctacctccgaagcaaggaatcctagcagaggaaaaagcagagacacgctgcactgcggctccgtgctgtttgcttcgctttattccccttccttgttccagcaccagctctcctctcccctgtcactctccatccggccatcccgccgcccaccctttcccccatccgccgaacccttcgcctgctgcgtccgtctggtccgaggcgtttccgttcctgacgccaagaacgagctcttctacgtacgcctgcacgctgaggtggtttctttgctcctgcctgccaccgtcgtcgattcttcttcttattcttttccccttggtccgtagccattgttggttggtgtcatatactttcatgcttcgtgtcctcctgctccttccattcctctccttcccgtagccattgttggtccttttacctgttatatattggtagtgccatcttcttgctgctacttctctttccc

SEQ ID NO: 183786 - DNA, 1148 bp, Zea Mays
gcattttccattgacctcccccccgccccctctcgtccgtctcctcctccccaaagcttcgaattttcccgagccggagccacaccttctttctccccgcgtcccacgattcgccgtcggaaagaggcaaggcaacggaaaccgagccgtcctgcgtgagctggggcggggtcccccgtctgggtgccttccgtgccactctcctgcaacgcggggcgcattgtcttgctgcccccttgagaagggaagattcccgccatctattaatcctcctctcgtatgccgttttctgcctggggaggacacaaacgcagcgccgcgggaaagccgggcgccgcatggatcgaggcatccggtgttcctgtctcaagacccagttttggcgtcttggcgtagcgggacggaggaggacgacggggtttcggagcgcagggtcgcggcggcacgccgggatctccgaggcgccgcgctgttgagtgttgacgccttctcgttcctgggaggaggtgatttctctgctgagggcctggggagtctcttggttcagtccctctccctctgcagtttatttgctttttttaggtaggtggagtgtggagttgttgggtgggagagggcctggaatttatttcgagctgcttctttggagaccattgtttctcgaatctgagttcctcttcttcggagggagttgtcaattgcgttctgattgatttggacaagatcggaaggaactggcactctcggtgggcgtacaaaaactctgagcttgtggccttatcgacttcttgggggcatctgggagtagcttcagcgattcacttgagtctggaggaatggcgccgaccaagaggatggagaagctcaagctcagcacattgttgactttcatgcgttgccacaggggctctagtgatgaccactcacggattgggacagtggggttctcccgagtcgtttacgtcaacgagcctgatatgcttgaagaggagggattcaactaccccttgaatgaagtgtcgacgacaaagtacactctggccaccttccttcccaagtccctcttcgagcagttcaggagggtggccaatttctacttccttgtctctggtatccttgccttgactccacttgcaccttacacggca

SEQ ID NO: 183787 - DNA, 328 bp, Zea Mays
gaatcagtcttttgggccaaactatcttcctcctagctcgaccttcagcaagagattgaggatgagactccacaacaggtgacgaggcactgataggagatgaattttcagcaggttcaatagatggtggagcatgatcatcaacatcccccacgtgctccacctgaacactgatagactcaaaattctggttagtagcactggtagatacagccaaagtgaacatagcaaattcattgaacacaacgttcctactataaaatgccttcggtgtatcaggagtccacaatttatatgctttaacaccagatccataacccaagaaaac

SEQ ID NO: 183788 - DNA, 275 bp, Zea Mays
gaaaacatgtcatgatcaagaaaagggtaggagtcacaagcaatgtacaatgatgttctctttgacctccacattagatcaacccagcgactgaaagacatctcagaacacccagctccttgctcaggaatagttctgatctcattccggcaaatagaataataaagctctgacaaaaattctcttggcagatcatttcctccatttatacggcgattgttcctaataaagtcttcctcagtcatcttcttcttaacccttacattgtgctgatc

SEQ ID NO: 183789 - DNA, 296 bp, Zea Mays
agatacaacagaacatcaccactgttggaaacacagctgggttatcgtagataccctgtgggctatggaagcaaactcgaaggttctgagcaattggcacggactcaaaaacgccggtgtctggataaagttggtgatgccagtctcggtagcgtagaggacaaaactaatgtgaactatcctggtcaggtgccagagaagtcagctgagatggcaactaagatactgaagcagcttgacacattagtaccttcacagaaggaaaacacatcagaaacaaagcagaaacatgagag

SEQ ID NO: 183790 - DNA, 1536 bp, Zea Mays
ccgcgccaaggaggcggaggtgtgcccgcccgagtacgacaactacgtgccctgctactacaacatcacggacgccgtcgacgtctcggatctgggggccggcgtcgtcataagctacgaccgccagtgcacgcgcgacggcagggtcacttgcctcgtcgcgccgccgcggagctaccgggttcccgtgcgatggcccagcggcaagggcttcatctggaaggacaacgtgcggatcagcgggcaggagttctcgtccggaagcctgttcaagaggtgcgcgaacaaaacttgctccgtcgctaaaattccaggtggtgggtttggtgtactggttgtgaatttggtggttgctcattgataacaggatgatggtggaggaggaccagatctcgttcccgtcggacgcgcacatggccgacggtgtggaggattatgcccatcaaatcgctgagatgattgggttgcggaatgaattcaatttcaatgaggctggggtgagttattgccatatgttcagtttaacctatgctattactagtaattacctatttgacttccaaatctagtgaaggcatacccagaagccagaactagctgaagtatgcaactgaaccaatgatatttctgtcaacgaggtgtcattcacccattcttttggcacaaaacctaattattaaaagagtcactcgctcttggtagtgctctttgtcaacacaacaccctacgaatttgctggcttctgccaaaattttctgtccactttgttttttttttcttttcaggattcaggacacctgtactttatagtggttccataagtaacccttgtgatttccgttgagcattttctttgggttcgatgttttttaaagtatttaaaatttctacttcattattttcgataaattcatggcacagttttaagcacataattgttttttttaaaaaataagtagcaggagctctgctattcatataagatcggagaagggtttcaaaaacataggtaggttaagcacataattgttgatcagttattttggggcaaatattctatttatttgggaaacagtatttcatttcattcataagttgtttccctgtctgatttatcgtttaaaatgacccttcacatcatgatttgttattcagcaacacttgtctgtcgtggtctttccacttggcggtactttagaaatcttgcatgttgagtgggctggctggaaagtgccggtctatttctacttaatttgacttgggaaactctgcatgcccaatgtgctggaaagtgtatatcagagcttactactgtgcctgcaaaagtatgttggcaggaccttaggatctccactacgatatattattaaagcacagttgtttttaaagatcatcatacaaaatacatctggacatactatgtagatcactttatgctctgattggctgaagtaagactttgggtaattgttatgtttacaggaactcttatttctgatggtgtttcttgctatgccattttcaggttaggacagt

SEQ ID NO: 183791 - DNA, 489 bp, Zea Mays
tcgtactcagttcggtgttaccatccaaggaattcagtgtgacaacagccacgagtttgacaaccttcgcgcccacactttcttctcctcccttggagtccgcctacgaatgtcatgtccctatacctccgcccagaacggcaaagccgaacgcaccatccaatctatcaataatgtcattggttctctacttattcaggctaccattctaagtctgtccagcaccaggcccattgagattgatcttcattttgtccacgaacgcgtcgctcttggagaagttcgtgttctgcatgtctcagttcaccgatgtcttcaccaaaggactcccagcttccgtgttcaatgacttctgagtctcaatgttcgctcgacggacgcttcgactaccggggggtagacaatctccgtatatgacaactgcatatgctgtgtatggctagtgcttggctggccctgtttggtagtatagaatatggtaggagattg

SEQ ID NO: 183792 - DNA, 371 bp, Zea Mays
gggggttttccgacgcgctgcaaggttcgcgcaacgcgggtctggagtgatttctgggattgcttccggttccagcatttcgtaacgagaggcggcgccgcggtcgacgcgtttctggatggatttcttgtccttttttcgtcgcgcattttccaaatctcatcactagaggacggggggaggttgagatgtggaagtacagagcgatgattctgctgttgctttatcggaattcgggacttcgtttgtttggtgcatctcacagctgtaattttcctcgcgctctttttatcttctggggtttacggggatgctcaggcaatccctttaagcaggcgaccattgttccatcggatttcgtcgatgcgctc

SEQ ID NO: 183793 - DNA, 367 bp, Zea Mays
tgtcgtgcagtccccaggccgcgacgaagtgcggttccatggcaattgttggcgtcggtgagaaattggggcagcaccaaaggcttcttccacccgcgagtgcctcaatgatcgctgtcgtgccccgaggaagcccactgacccgagcttgcgcctcaaacgatgacggaacacaatttccacggcggcggtgtctcttcctcacaattcgcgacggggaaggatgatggctcgactagggaatcagagaggcgaggcaagaggtcgcggcgggttttatgcctcccaaggcagagtccacctcccccaagcacacggcagaaaggatgaggatccgggtgaggtttcgccatttctgttgaaacca

SEQ ID NO: 183794 - DNA, 424 bp, Zea Mays
atcaattgctcctatgcaatccttgaagtggggccaaaatctcccctctcgcaaacgaggatgaatctctatgaaatttgtgtctttgggcttgattacgtcagatgacatcttatatagtgcattaagtacttcactatacttgcgactaatagtttccaaggagtgaccaaacttattccttatctgcctaaatgattgtggacccccacatgcccacaagaaaatacctagagcttccatagtactgacaccacggcttggaagcagaccataactttccaccaacatatcatgcaatcgtctaaaaacagtacgtcgcatgcgaaacatgtcaaagcagtcgttactattctccaaagttcgctcaacccattgaatacctgtttcaaccattgttcttctagaaacctcactggaaggc

SEQ ID NO: 183795 - DNA, 477 bp, Zea Mays
cacacctagtagaacggggagcaagcttatgcggcgcggtggcagagaggttcggatagcaagcacatccaaagactcgaagctgcgcatatgtgggaggtgtgttgtatagggcagcaaagggacaagaggcgtggacagttttagtgggaaggcaattgagaagataagtggttgtatgaagagcatctacccaatagcgaggaggcatggacgcctagagcagcaaggtgcggatcatattgttggtggtgcggagcatgcgttcggctttaccgttctgcgacgatgtataggggcaagacatacgaagtttcacaccattggtgagaaataaggtccgggtagaggagttgtcaaactcccgaccattatcacattggacttacttgatcgtgcgcccaaactgagtatgggcataagagaaaaaatgagagatggttgaaaaggtgtcagatttgaggcacagaggaaaag

SEQ ID NO: 183796 - DNA, 302 bp, Zea Mays
tcttgggaacaagactcttccctatccggcttgtatgacaagtccggcgtggggccttgagacatctcacagcgacttcctcgagggagcgaagccacaaatgaggccttgatcatggaggtgatggtggacatagctcttgttcataagaacaatgctcttccctgtctggtttgcaaggcaaatccggcgtggggccttgatcatggagatgttgataaagatttgcttgctgccgagcgccgtggagccacgaagatgaagagaggaaggggatcaagagagcgccatgctgttttttt

SEQ ID NO: 183797 - DNA, 1139 bp, Zea Mays
gttggtatggtgttcaataatcacacagaagtcaaccgattctaccgccggtatgcccgccgtgttggctttggtgtctcagtaaggaggtcttcgttctcacgagaagggacctgcttatatctggagcttatgtgctgcaaaggagggaggccacgttatgagccgaagtttcggaaaagggcttcatcgaccactaactgcccagccaaagtacgagtgaagttgtggggagataaattgttgcatatagagttggcgatccttgatcataatcacccagtgagccctgcaatggcaaggtttttgaactcttataagcagctctctggccctgcaaagaggcggttgcgtatgggtggccctgggactatgcctgttgaagagtcaagcaagatgcccatggataagctgggggagcttgagcagcttctgtttggtgagagcaagcacaacagctttgtggagaggggtcgtttgaagctccaacctggagattcggaggcccttcggcttttcttcactcggatgcaggccaaaaatgccaacttttttaatgtcattgacctggacgatgaaggctgtaccaggaatgttttctgggcagatgcacggtctagagccatgtgtgagtactatagtgatgtcatcacacttgatacatcatatgtggctagtaaatatgatatgcctcttgcaacatttattggggtgaatcatcatggacaatctgtcttgatggggtgtgccctgctttctgatgaaacagcagaaacctattcatggctacttaagtcttggatagcatgtatgtacggcaatcttccaaaggctattgtcactgactattgtaggggcatccaaagtgctgtagctgagattattccgggagtccgtcatagaatgtgtttgtttcagataatgaggaaggccgcagaacgtttaggtgggctgtcagagtacagagctatcaacaaggcgatgcataaggctgtatatgattctttaaccattgatgagtttgaagaagaatggaatactttaattacatatagtgggcttcagagcaatgactggttaagatcactttatgaatgtcgatcttcatgggttcctgtttttattaaagatacattttg

SEQ ID NO: 183798 - DNA, 1257 bp, Zea Mays
tggcgatcaacgtgcctggtctgccctacgcggccgcgcctgctggacctacctcctacggcatgagggtgctcagcatgttcctctccgaccaaacatacaccctccgccgcgccgacgagctcttgcagcagaccgcctccttcgccgccaggagctacgcgctcctcccggccgacctgttctcaaaggcacgggaatggtgagacgaccgtctccctgtttttcttgtgttccttctcattactcttcttcctttgaatggctgtatgataggcaatgcctcgaattccccacgagtttcatgtctgagcgggcgtagtactcagcaatgcgtaggatgatcagctcatattgacctacatgcctaatgacaggcctaggtgattttaggtagtcagctgcctgcaattctgcacaccacgatggtaaccctgatatacgatttcgtacatcgaatatgacattcctaggttttcaaggcgttagacttgctgctgggtacaagtgaggaggatgatctagggtaactgttcattttcacggcggcgccggttgccgacgattggttaacgtgcatgttgttcgcgcggcaacgagagctgttttccggttggatggatgtgaatccctacatgttagtgttcggttattccgacattctagtaacggctgcatttaaggagtttccaaaaggagcccatagtgcaacgctggaagccttcttcctttgctgagctgtgcaataaagcactggttctttcctcacgtgtcagtactttgaacgccgatgtggtcaacgcaaatgcaaagcttgtggtgtattaataggctgtagttgctccaactccaaagtttaagttgccttgaaggggtgcatcaaaggctcaagcaactcagagcaagaaatctggcgttgccctgtggccttcaccaggatggatggctgctgacagtaagaaatattgtgctacctcgcggaacattttgaagtctaggacaactgaaacatatctttctgactggaagaaaccctttggattttagtaacatcttattaatgcagtgttgcattgtatagttatcttaaggctagcggtctttaaactatatatgatcagctgcctgagtttagttctcatttatttcttttacttacatgatgatttgactattttcttatttttttccttgcaggtatattgtgcctgccaagtctgcagtcaaaaacgtgtcaccagctggagagggctcagt

SEQ ID NO: 183799 - DNA, 303 bp, Zea Mays
atcattttaccattaacatcttccaagggcataagcttgtttgcctgcattgataacttctcaattccaactgatgccagaccatgcaatacatccataatcccagatcccatctccgctggcagtacaatcggagaagaagcctgcataaccaagctgcagttgttctttgcatttttgaacagggctgggttcattgatcgcagaaatcctccatctttggtctgaataaatgggcctaaaccttcagccaatggcggtagctccaggggctgctcaggtgggaggctaattgggctacca

SEQ ID NO: 183800 - DNA, 560 bp, Zea Mays
cacactacatccctatcagcttgaagggttaaactttttgcgatattcgtggtttcataacaaacgcgtaatccttggtgatgagatgggtcttggtaagagatgcttgtattgtaaggacaaagttttttgttcaaatgttgttttgggatttgagaaaatgatgacaattgcagggaaaacgatacaaagtattgcttttcttgcctcactctttgaagacaagtttggtccgcatctggtcgttgctcccctctcaaccctgcggaattgggagcgtgaatttgcaacttgggcacctcaaatgaatgttgtatgtggatcaaactattttgagaccaaaattgtgtgtaatttggacagacttatatccccttaatactttttccttattgtggacaggtaatgtattttggagctgctgcttctcgtgacattattaggaagtacgagttttactacccaaaagagaaactgaagaagctgaagaaaaagaaatcttctccatctaatgaagataagaagcagtcaaggataagatttgatgtcttattgacgtc

SEQ ID NO: 183801 - DNA, 434 bp, Zea Mays
ccacgcagccatgccccagatctcttcctcttgtgctcgatccgccctgctcaccggtaagtcatcgacgtgggccaccgcctcaccggtaagtctcgtgtttgatccgctctgctcaccagtctccttcccccttctgcgcttcttccttcgctcgcttctcggacctccgaaactcgctctgtgttggttacttggttgcgttgcgccgtgacggtgctcccactccccagatctaaaatccgataagtccccagatccgctctgtgttggttacttggcttcccgtgctcgatcgactcctcggttgcgcgagtccggtgctccctgctctggttttcctaatcctacattcctacctaaccctaaatccttaatactacatgctctggtgttcctcaatcctcatatgctctggtgttcctcatcctcgg

SEQ ID NO: 183802 - DNA, 655 bp, Zea Mays
cacatttcagattgtcaagtacatcagacagacggttcatgtgatgaattatacagtgatgatttcccttctccagcctccacctgagacctataatttgtttgacgacatcattttactgtcagaaggttacatagtctaccatgggccacgggaagacatccttgaattctttgagagtgttggtttccggtgccctgaacggaaaggagtggcggatttccttcaagaggtgacttccaggaaagatcaacagcagtactggtgccacaaccacgaagattaccattatgtgtcagtcccagagttcgtgcaacatttcaagacattccatgttggccagaaactccagaaagagttacaagttccttatgacaaatctaaaacacatcctgctgctttgactacccagaagtatgggctgtctagctgggagtctctcaaggcagtcttgtctagagaatggttgctgatgaagcgcaactccttcctctatatattcaagttttttcaattgtttgtcctggcagtcctcaccatgacagtgtttttcagaacaaagatgcccagtgggaagttttctgataacggaaaatttatgggtgctttggctacttctttgatcacaattatgttcattggaattactgagatg

SEQ ID NO: 183803 - DNA, 638 bp, Zea Mays
gttagtgcaacaaacctcaaggttgttccatcaacataacatgccaagactgtttttcaagttggacataaccaaggctttcgactctgtctcttggcccttcctaattgaagtaatgcagcaaatgggttttggacatatctggcgagacattgtatgtggcttattagcctcttccactactcaggtgttgctcaatggtgtcccgggtaaactgattacgcatagaagaggactcaggcagggagatcctctctccccgatgctatttatccttgctatggatgttctgggccttctgtattccaaagctgaggaagctggcctactccagcaactatcaagaaggaaaaggcttcacagagtctcgatgtatgcagatgatgtggcgttgttcttacaccctacagctacagatatttcaacttctcttgacatcctccagctttttggcgatgcgtcaggcctttgctataatccacagaaatcaaatgtgtaccctatcaaatgccccgaggagactattgaggaactccggagttggctgccttgtgagattgcaacctttccttgcatatatctgggtctccccttgtctttacacaagttatccaggaatcaggctcagcagtttgtgg

SEQ ID NO: 183804 - DNA, 458 bp, Zea Mays
cactgagctgtaatgttgtatatatctgagtggaagttgagcgtgcgcactgcttatgtgaataacttatgacttgcctagattgatttctgtagaaatgttctataccttatgccatgcaatgcctgcactgcgtcacgctacacaatgcattgtgcagtaacctctgtattattcctttaattcagcatgttcatatgtcacggatatagtgctgttatatatctaaatagactatgaattcatacttagataaatgagcttttcgatgactagtctattttgcatcagtagggatgccttatatgtttttttttggcccaactggcatgcttctgtttttttggggaagttgtcgccttttcataattcttgttcgttgtgagaaaatggtgttttgtgcatagcatttgatacttgaaagctagtcaatggggcacttatgatggagttatgta

SEQ ID NO: 183805 - DNA, 582 bp, Zea Mays
ctcctctcggtacgtcaatttactcgtgacaacaattgttcgattgaatttgatgctcttggtttttctgttaaggatatggcgagtcgtcgcgtgatgcttcgctgcgatagtgatggggacctctacaccattccagctgccacccacacctcaccgcacgcctccattgccatcaccacctccctgtggcactctcggctcggtcatccgtcttctactgctattaatactcttagaaatactttcgccatttcttgtaataaagtagaaccacctctatgtcattcctgtcagcttggcaaacatgtgagactaccttttactccttctcaaacacgcaattctgcactctttgatttaattcattgcgatgtttggacgtctcccgtggctagcatatcagggtgccagtactatttggttttgttggacgattactctcatttttgctggacttttccacttattcgcaaatctgaagtagcctctcacatcactgatttctgcgcctttgtgcaaacccaatttggcgtcacaataaaatctttccaggctgacaatggcactgaatttgctaac

SEQ ID NO: 183806 - DNA, 428 bp, Zea Mays
cttcaagcgagatccctgacacgtcaccagcaaaaaaaaatctttgtttcatcgtcagtgaggaggaacatgagagaggagagaacgggtggcgcgatgcgacgtcggctgtcgtgctcgtgaccgcaacctcctaccgcgatcccgatctgccgctccgtccgtccggccggcaagtccccgcctccgcctccgcgcctgactgtcccctccccaccatttcattccaattgagagccgtggggaccaatcaaccctagatccacctcgtccctccacgcgacaggagaggtatctccctgatccaactccgcatggcctcctcctccttcgcccccgacgaccagaccgacgccgacttcttcgacaagctcgtcgacgacgacgacccggccaccgacttgcctcgggccgtctccgccaccagc

SEQ ID NO: 183807 - DNA, 369 bp, Zea Mays
tcggtgttctaggcgggtgttgatggcatggttggggcggtcctgggtggccggtgaaccatcaggatatctctgtccgcgcataggcgagcgccggttgggcgggctggtgtgcatgcgtcgcttgggtgaacaccagctcggtctagcgttgggaggttgaagacgttcatctgccgtcggatgtcgtggatggttcagattccacatcgatcctagggtagtgggttataattagggtcgttcggttgagatctaacggctctggtggacggatacccccttcaacactggaaaattataaatgagacccctggaattttggaattagaacccagcgtccatctatgggttagtctgagtgtgaga

SEQ ID NO: 183808 - DNA, 515 bp, Zea Mays
cttgaagattatatatagctcatttaaatgtgtgatccatgtcaaaaggtggacctgattaactgattttgaaaacattatattcacaccttaaattattaaatttgtttcaaggccaagtagcaatgtatatacacccaaatgcgtctctaccaaatttgaaatgtcttatcataaaattcaagctctaggtccatatagatctcattctctaaaaattgatccatatagatctatccctacatgtaaacaaaacctagtcatgcatacctatgatttattccaacaaggcgcccacaaaaataaatgatcaaatattttatcagaatttacatatcatttcttttttctagtcattgtaatctgtactattcaatagacacatgtttgtgaaaattatagagatgcaaggcaggttatccgtaaacccgtaaatagactaaatttttacgagttacccacaaatttgcaaaagattagcctatttgtgggtttatggacaacccgacttgcat

SEQ ID NO: 183809 - DNA, 399 bp, Zea Mays
gtgattgctgatcttagcccctgatccacgaggtccatggctgaattgggtggggtgatagagggagaagtggcgactggtgtggtgtggtgtcggaggtgccgtggaggtggtctgaggggacaaccaaagtcgtcgacgatgggcattgtgaggagagtcggctgtggcgggcgcggcgggggaccacccgtggatgggccatgccacatggaggtgcgattggtccacaggttgtagagtgccaaccaagcagtgccaccaccaccacggccaagccttcgctgacgccgaccaccatcgcttccggagcctgagctagtaccacctctagagctagagctggtagagggtgcggtgctactgacattggtggagtaggtgagcgcgaggataaac

SEQ ID NO: 183810 - DNA, 745 bp, Zea Mays
agcggtgcggcagcgtcgctactacggacgagctccagcttgctcagtggcggtggccagcctgggatggctggaggtggtggtggcggcatgctttcttcacagtcgcccttctcctcgcttgtctccccgctcacacagtttggcggcaatggtcttcttggaggcgcctcgaatgtctcctccctgctgaaccggacgacgttcaggaatggtggccctatgccaggtccggggtcgatgcagggtggtgggatgcagatgagtacactccagcagagagctgggttggatggtgccagcgatttcattagcacgggagggtcagaccctctctcattcccgtcttcctcacaggttaatttggtcaatcagatgggatcagataatctgcaagtgacttcacagcagcaacagcagatggatgcagtgcaggatatgcagcagcagcagcagctaccaatgtcttacagccagcaacagttgccggcacaacactcgcagcagctccagcagccacaggctacagtgaagttggagaatggaggaagcatggttagcatcaaatcagagcagcagatgggacagcctgaacagaatggtcctgcccagatgatgcgaagtgctggttgtgtgaaacttgagccacagcagttgcaagcccagatgatgaggagtttaagttcagtcaagatggagcaacagagttcagattcatcagccttcttgcagcagcagcagcagc

SEQ ID NO: 183811 - DNA, 413 bp, Zea Mays
ctcagagtgagggacaagatcttgcttctgatgctactatgaactctaccttcatttatttgctcatccagattattggattctgcattcagctcttttctgtgttcatcatccaatttttatgcatagtgctatctttgtgtctcaataacttcctttgttgttagttatggtgtcaacaaacacctattattattcgtgcgcacgttctggagccgccttggcgtctctgtcccggacgacgcctcttcagaacgaactctgtgatcttcgaaggcgtgcacccctccaccacttcggtcctccgccagtgcaagatgaggccgccctgaggcgtatcagactgcaccgcgaggacaccgccgtggctaacctttggtgccgtgcattcaccacggcgatgctctgatcaa

SEQ ID NO: 183812 - DNA, 377 bp, Zea Mays
tcttctacaaatttgatagaagtacacaattaaatataatcaatctgtagacaacaattaataaagatgaaatcacaaattacaagttacagttagaaattcaaaccacaaggtgatggaggtggactggtcactgttgaaatcacaactgtgttgtctgtgtatgctgctgggatcctggcctcctggggacctgactacctgagcacttgacgcctggagccctggacagatgagtagatgacaggagagatggagccatggaggtaggggcgtgccggcatggggcggtcagcggtggcgggtggccgatgggcagcaccgcagcaggctgggtgcctaagccgctgagcagggcaggtggggcagtggcgccg

SEQ ID NO: 183813 - DNA, 356 bp, Zea Mays
agctgcaggcgcaccatgaaaatcaactagaggcaagtgaagtaatggaccagtagcgcaatgtgggatattttaaggggacatgtgttcattgataattaatacatggatgtgtgtggggacctcacttgtagccgtccgctcttgcttataagaccatatatcagggagacgcttatgtaaaaaaacactaggaaaataatccaggaacctttccttgttagatgcatgtccatgtgtccttgttttcgttctcatatatagtctttgttagagtccttgttccacacagtctctatcctgtatcggtgtaaatatttgggcctagtgcgttcctcaccggtaaggggtattac

SEQ ID NO: 183814 - DNA, 535 bp, Zea Mays
atcaatctactacttcccagccatacctttcttcatggtatcacgagaccgtgtcctctcctgatcccccttccgcttctgcttcccctagatcgccaccatgacctcgcctttccctgcttcgacgctcctcgctgcatcacccatggttgggaatccctccccctccccgcgtcctcccagatggaggaggtcccttaggtcaccgcggtcgctgagacgcagtgcgaggatcacgtcttggcggcaaggtccctcgtgtggctgccatcgtgcgtgctgtcgagaccgaatgcaagaccaatattgcgaccaaggagcgtgacaccgcatacgatcgcttgtgccagaccctccaccatctagggagcgcgcaatggcatacgctgccaattcgttattgactcaggaggacaacgacgacgacaagaagtctgtcctcgccgccaacgacgtccacgacgccatgcttctccatgagagagacaaccgctgtcctgaacctacatgcctaggatgttgcagttcagaacat

SEQ ID NO: 183815 - DNA, 286 bp, Zea Mays
gacgatagtttctctatttccttaaaaattaaataatggaaggtcatgacaatgaggaagattgggctacaaaggctaaggcatgggttgctgctaaatctgttatgggaaaccaccagattcaacagcatgccatatccacaagtagaactgaaggtcatcataatggttaccatgatcagtatcagcaaccagctggtctgccaacagaagttacagaagctttgcacccaccagtacctcaatcaagtattgatcatgtgccatttccaatgacaggtcaaca

SEQ ID NO: 183816 - DNA, 503 bp, Zea Mays
gcggcagcaggcgcaaaacacatttgggaggcgggggatcagaataagaatcgcagaggaggcgaagacgaatgtcgctactacttgtagtgggtgccgcggcggcggcgggcggaccggaccggaccgagccggacccaaccacggagagagagtggaagagaaagaggcggtgataaaccgtacgaatcacgcaagcgcggggcggggcggggcgagggtgggaagggagtggagagtggaaagcggtggtgcgatggaggggtggcgatggcgatgctggattccgatgcgatatggggggtgcggtggggcggagggagggtctcgattcgattcgacggtgtatcaacgctactctttctcttcactctctctctctctctgtccttcccagctctcctctcgccgtccctctcgctctgatgatatgatttgagggaggaggagggagggagacggggcgagccgacgggactcgacggagcaggtggggctttggc

SEQ ID NO: 183817 - DNA, 648 bp, Zea Mays
gctgaaacaaaggaaccatcacgccaagcaactaaaatacctcctctggacccatgggcaggactaaaaacaaaattactgaatccggacccaagaatagaaagaatgttgaagtctgagatggagaccattttggtttcttgaagacatacaacagcaggtctgaggcttacaaccaacgacttttcagagtctctcttagcacgactgttgaggcccctaacattccaaaccaaaaaacatccaggctccatggagaaactaaagccatctaccaacacggggacagaaccagctcaggcctgcaccccagggggcacctcccagccaaacagggccgccagagcagcaacatgatcactggacagggcagcatcaaacaacctagcatacttcctggcatcttggaaagaaatattttcctgatcatcacagaaacccaaaagtctgcaaactttagcagcagattcagaccccaactcagggggaaactttgcaacccttctgctacgccgaggcctgaaattgctcggcaacaactttctgcgcttaacgctgagaggaggattaggcaacagctgagccgttggcaaaataatatcatttctgaaatcctgcaattggggtgacagcaccaaattttcaacc

SEQ ID NO: 183818 - DNA, 401 bp, Zea Mays
gcgatgaccaactgtcttgcaacgaaaacaccttggctctaggtggcagaaagcaacgaggtgatcatccgtgaagcaattgaaacaacgacctttcaagtcttttggcaccaggcgacgtgcccgcagtgcactaaggcgatgcttcttcgccttcctagattcaactctggtccacccaccaactgttgtcttcggcgcactctccaacccacgaaaccggctatgttgatgctcgtgatgagggttaaacgtcctggtctcaagtggggagggctccctcggagacgaaatagtctgtgctggaacaagcggaacccgcgggtgaagcagaatatcacggaacagaggccggccagcccaagaacgtggttgtagaccgtcgtcaggggaacccgccg

SEQ ID NO: 183819 - DNA, 468 bp, Zea Mays
aatgcgctgtggcttacgacaagaaggcagtgctgattgatgggcagatgcggattctcttctccggatccatacacttccccaggagcacccctgatgtaactgcattttacaaaatctcttctccccccactattccctggagaggtttatggctgcggtcagttgtttcttgatgcaaagctctcaaaagcaaattgttttagccgtccctctttcttccacggttagtttcttgtatggggtttgaaattttctcggtcattgtctcctccggcctccctcccttgtttttctctacaacaaccgtgtttcttggttcttccttgcacaacatttggataacccaaactaagaaatttccgacgaaaaaactattttgggtggttttgtggcattttttagaatctatggatctgaagtgagtgcttcttctttcttttcttttcaatcaaatgtgggaagggc

SEQ ID NO: 183820 - DNA, 657 bp, Zea Mays
cggggccgtggccaacggcgccgcgatgcccttcatgaccgtgctcttcggcaacctcatcgacgccttcggcggcgcgctcagcatccacgacgtcgtcaaccgggtgtccatggtctctctcgatttcgtctacctcgccatcgcctccgccgtcgcttccttcgtccgtaagtccaccttcagtggtaacataacactcccactagagtcagacaccgagcacacgcacgcagactaaggctgctcagctgttttccgtccgaccagaggtgacctgctggatgatcaccggcgagcgccaggcggcgcggatacggaacctgtacctcaagacgatcctgaggcaagagatcgccttcttcgacaagtacaccagcaccggcgaggtggtgggcaggatgtcgggcgacaccgtgctgatccaggacgccatgggcgagaaggtcggcaagttcatccagctggtggtgaccttcttcggcggcttcatcgtcgccttcgcgcagggctggctgctgaccctggtcatgatggcgaccatcccgccgctcgtcgtggccggcgcggtcatgtccaacgtcgtcaccaagatggcgtccctgggccaggcggcgtacgcggagtcgtcggtggtggtggagcagaccatcggtt

SEQ ID NO: 183821 - DNA, 515 bp, Zea Mays
taccaatatcaggttcatcttcacatggaacactcgattcgggcaagagataatctgtgagagcgccaacagcatgtaattcccggcaggccttgagacaaacaaccttcttgattatagaaacttttccttcagcataaattgtttgtacaggactgctcattggaagatgcagcgtacatgtacctaatgccttgtcaattttgaatcttggtagaggtttaaaatacctggcatatgttggtaaaaactgttagtatttgcaccaggaaatgttttgttgtatgaaccaaaagaaaaccttatcaaagaaagaaaacagactcatccgatggtagctttgagcagaaaaagttaatcaattgaatactagagttcaaagtcacaattgctccagtagattcaacaccataaaattcttcattgcatagtgtgtttagaagaggctgacaacaagtagattccaatctctgagattcttcccgcatgatttgtccacttttcagaaacttctg

SEQ ID NO: 183822 - DNA, 1236 bp, Zea Mays
gggaagtcatttttctacttgcaaggatgtttctgcatacctcatggcacttcttgggtatccagagctcaaaccagccactaataagtatgaaagcacaggacaaccttactcgagtgctaacgatggtgatgatagtgtaagtatgaagtgcacaaaactaaattttatttacttaaattcacttgttttaataaataaagtatgtaacaggctttatgttttcaagatcaaattggttcaattatggacaagacgaatgtgcattcaatttcttctcttaccttctccagctattccagtgatccaaatgatgtgaatgaaaggaacttaaacaaagcaaatgtttatcaatgccagaaatgcaatttgactttcggtgaccggacttcatatgcgcaacaccatttggcgtatcatgaaatgagtgttaagaggcgtaggactggcaagtttggtgagccagtagtagggaaagatggaaaatttgaatgccctatttgtcataagacctttgaggaggaaccacagtactttggtcatgtcggatctcatgcaagatatgaaggtttagctcctgaagcattcttggataaggctacttccagaagggcagctaatgattcattggcagaaattccatttagccttcaggaattgactgaatcacatggacagaacaacaaggtttcttatggtgaaaagggttttcagcaccacaatcattcaaataaacatggtgataataaccttacagccattgatctttttggtacaaattattcggataatttcatcaggccaaataaaacttggggtagtcctgaagagggaccttcctgtaatgatgctccaagtgtatctagatatacaaattttacaggccatgctgatgtgatagtttcagaaagggcatcaatctccaataatcaatctgttagcaacattaatggctttatatttagtgatcagccgggaggtaaccatgttgtcagacctactgcctctgtaacagccaatcattatgaggaccagattattgatcgtggcagggctgctccgaatgctgacaataatactgtgaaagcaagagatgtcaaccttaattcatgtgcaagtgcaagtacaatatctttccctattgcttatgcaaataatgaaacatcagctgcccttaatgaagctaatcggtcatcttctactgccaaatgttttagtggcagttttaataacaac

SEQ ID NO: 183823 - DNA, 582 bp, Zea Mays
cttgtccacctggcaggcctcccactgctcttgagtgagatgtagcttcccaccaatggtgataggcccagagagggcatgtggttcgtcaccatcaacgaccttgagacgacatatcgcttcttcgatcgtgatcgtggagaggtctagcagagactcgattgagcgagcgatctgcttatacttctcggggatgcaacgaaagagtttctcgacgtctctctcctcatcgtaggtgtcgtcgctgaactgcaccatcttctgcaacagagtgttgaggcggagagcaaagtcatcagcatcctcacctggcttgaaggccaggttctctcactccttgcgaagtgcttgcagtgtggtcttgagggcacgatcgctgccgatgcgggtcgcagcgatggcgtctcaggcctccttgttagtctgcttctgagaaagcgaaaactgcatctcaatcgggactgcagcaatgagggcatctagtgcacgtcgatccttgtagtagtcaacgtcgccatattgaactgcttcccacatgtggcgaacctgaagccgtaccctcatcattgtggcccactcgac

SEQ ID NO: 183824 - DNA, 842 bp, Zea Mays
gcctcagtaccgatcaccggctaaaggtcatacaaagctgacactctccaactgttcccatttaaattttgttcccttccaaagtaactaatgatgctcctcaatcctcattgagtgtgccaatgcggtaatggaacttgattgtattaccgtttctcatctagctagcttagagtcacaaactagccaaccaacaactactgtaaagtatcatttagtatcactgagaagtttgaaatcattcgccacgacttctataaaagttgaaccatgctcaaaatgtgtagtccattcacatcaattcactaattcatggcttactttggtgggttataggtgcggaaacaatctcattcatgcttgcatgatgttctcctgagttttcaaaggcaaacaattttgattccagcaagtgaagcaataacaagatcttttgagcggtttctgctgcttgctggaggatctagtgctgtaaatacaggtgtatcagaggaaggccccaagggggctaaggaggtcctgtatattttgaatgctttgatatgctgccttccccttatggcctccaaaccttccaatactatcttgaaatattttaaaccactattagatttgcatcaaccaattttgataaggagtcttctggacattctgcatgctgtttgtgagagtccaaccgtacagctcaaatctgatgtgttattggaccttctgtgctcgttgggtctgtcagtgtcttcagaaaggaaatcaggagatgaaatggcttcaattgcacgacttctacatgttggcactaaaaaaatttacaagcaaaacagggacatttgtgttgtaaaact

SEQ ID NO: 183825 - DNA, 431 bp, Zea Mays
atatgcgagatgaacaagccaacccaattatcaacttagcattactttccacaaggtgattccagtaagcaatttgggtgaacagaggcttacatagccttggaagcacactcactcaatggatgaaggacgctagtggttagggaggacatatgcagatgcaggcctctccccatctcctgtcaatcttggaagcatgttcatgggctagccagcagaaggtgtcgaaccacacaaaactgttgcccgatccatgcgttgagagtgggaggaggcacggatgggatgagccaagattgacaggagatttgtgatctgatttctgttctggtttttgaagctgttttttttgtttgatgtgatctgtgacaaaactgtgtgtgtgtgtgggggggggggggggacacacagacatcagaatgaaaaaagcg

SEQ ID NO: 183826 - DNA, 299 bp, Zea Mays
cttcaaggcagttaggtccttgaagaccctacccttttcaatcatcgtgctaggaccggcctcaggagcatctagcagctcatcatcccttccttctgcatttgcctgatgagaaagactaagatcgctgaactcatgcactctaggatctcgaccgtctggaaaaacacgttgcaacatctcaatgtcactctctatgagttcaccaaccgggtgatcatcatctgaatcggcagccatagcaaaggcatatggctcctcttcattcctaaactcatgactgttggaggcaataaaac

SEQ ID NO: 183827 - DNA, 430 bp, Zea Mays
agaaaccttctccccctttttggcaacaagaaccaaaaagagagagagccgccaatccaaagatcaccagttaggaggaggctgatgaggagcaaagaagtggtgcgctaggtgagaggcaaagtgttcttccctagactgatccgagggaggagcactgccagaaggatcctggggcggagggtgagaggatgattgacccggatccccatggtagggaggcggggcaaactgctcgcgatcatcaaaataggcttcttcttcttcgtcgtcgtctcctgacataaatggcaccccgtaggcctgctggtgccactctttgatctccgggggaggaggatggagaggcacgtcaggcgagcgaggggcaaagggcatacccatagtggaagcttgacgacaaagattgtcgtcagtctcccgctgacgc

SEQ ID NO: 183828 - DNA, 320 bp, Zea Mays
ggtgtggccgtcactatgtactagagggaaagctcaatagtagagacgacaaggagcattcgagagaggtcagaaccaaagcactgcttacatgaggagaaggctcaggactatccacagagttacctgaccgagagcttggccttcatgtgggttttccttgcgtggggctccaacaaatactaatgagaagcttgcacgcttcataatacctcgataaaaatatagacacattgataatagtttgcatctttatcccatttaagctttctcatttactttgttacctcggttatatgctttacttttttttatcttag

SEQ ID NO: 183829 - DNA, 633 bp, Zea Mays
tgcgccccagctcgcgcggaggctgtccgcctccgctgtatctacctcgccctctcccgtgccctatggtgagaacagaactgcttctgcttgaacctatctgtagcggaaatggttgtgaagtgtgctattttacttgcaattgcggaagcaaatggacgcaatgtgttgaatcacttcgaactgcatagctggtttggaatgaaaatgatggttagtctatggtggggtttccttttgtgtactgttttaggtctcatgattgatattttttcgctcataaatcacacaatttctctgtgatttttgctcaaagtgttgacatgaggctgctggagctgataataatatgctatttgaaaagcaaccatcattcaaaccgcatccttttgctatttgaaaaaaatcaaggtcatatgcttatcaaatgtgtgacctctttcttctgacataatcagatacagatgacgtacatgagtatgccacaaagctcggatttgaaaaggtctctgaacagactatagatgagtgcaaatcaattgctgttctttacaagcacaagaagacgggtgctgaagtaatgtctgtgtcaaatgatgatgagaataaagtttttggcattgttttccgtac

SEQ ID NO: 183830 - DNA, 474 bp, Zea Mays
catgacattccatacactcgtctgcataatcagccgccaacctataaccatttgcgtgtttttgggtgcctctgttaccccaacatgcaagcaacctccaaacataagctcgcccctcgctccacggcatgcgtcttcctcggatatcccccctcgcacaaaggttaccgctgcctcgacctatcgacacgtcgcatcatcatctctcgccatgtcatattcggtgagaccgctttcccctttgtagccacctcagacgcctcctcccacgcctcccatgactttctcctcgacgacgatatggtttcggtgccttgctctactgttgttgcaggtgggacttcctcctcgccacccgtggtcactccatcccactcgggtgatgaccagccaccccccgacgttgcgacatcacatggatcgcctccttcgacaccagacgggcatggtcacgtgcccccgcctggacccagc

SEQ ID NO: 183831 - DNA, 1325 bp, Zea Mays
ccaccagcgaaatgaacggaagaagagagcggagggaacaactgccgcacggcacggagacagacgcggacagaccgagcgattggtcggcgaccacctcacctccgccgccatccactcctcggctcgggctccacggtgagcactcgccgccctctcccctcgtcccccgtggcgcatcgcgatcccacgggctgctgcgtgccagctcgttgcagcgcgggacttaaattcgtttggggttttggtcggtgctggatccgagtcctgaagctttgcgatttgcggctgggattgggctcatttgatggccacgcccgtttcttcgcttatcgtgagcgcgcagggggttagttcgagacgggattaggcttatctcgagtagcatgcatgtgttcgccgcgcgcttgctcctttttaaccccaatttttcgctgaactgggtttcaaacgaggacttcatctggctaagtggctaagtgggtcttaattagggaaggaaaccgttattgatggcagaccgtttcatctgtccatgcttacctgttagttcgattaagtaatctctaggttcacgaagtagctttggctggggatcatacatagaacatatacttttgtagctgtatactaccctgtgtggctgtgtgccaatgttttggtagtcgtcctcctctcagcttgctcattagactaaacaaagttcacatcccattaggttttcgctttaaataggtatgagttggaacactgttcttttactgagtactaaattctaatgttggattattggtattttttactgctcgtattggctatgtttgttgtcctcaagctaatcatgtattgtcatattttagcattattattagcagtcatcattttgtgttttctgtttagatgtccacttaattcataatttgtcattttccaagatttgttttaaaaaaataagacaacgggtaagcttgacttattgagcttctctgtctcaatcattttgaagcattcgtttggactttggtctctatgtaaatagtgctctacagcctacattccttttctatatgacatgtccatgttctgttcagccgttgtctaattccttctattttctgttttttttcaagcaatgttactcgttaccatcattagctgttgatgggcatatgaacgatgtccacatctcgtcagatagatgatgggcctgctgtactacagttatgcagatggacattgctacaaccccatctcaaactatcaaaatttcgagaggcttttatatctccaacaaggcgtctttttggactgctctcagaccatgg

SEQ ID NO: 183832 - DNA, 825 bp, Zea Mays
tcagattctgcaacttcaactcctgggagcatgagcaactaccttgctcatatgtctacattaaacgaaatcttactcggtgtgtcttatggtgatgccatccacattctttcattgtatggaatggtaataataactgcaatataacttgcactgtttatttgtgaatctgtttttggaatattaaactagatgaatgcttttgcatatttctattcagaacagatcctcaccactggatgtgtgctttgctttgtccatcaaaaaatgtgttttatctgtttcattataatcaaggtgaaaattttcatcacatcgttagagacttagaacatcaatagatcattgtttctttcaattgttatccacatgcaattttgtgtttctcactgtgctgtgtgctgtgttctttttcagtttgtcttttagagatatatatataaggcatgctgttgtttcctgtacaagtacaacaacagtttgaaggacctctactatagttttgcaaccccttgttaacttgtcatgtttattagtataagttgttggaactgtatctgactgtaacaactttcacttgcttcactaacatatgatggctgcccaacctcattgaccaataggtgcagtatccaattctcttttctttagagcatttatttaggtatcctgcaagtagtagtagtgttatgcgtgttctaatattctatgtcacaaatgtaaaacattttattaattgggcacaaaattatttaacattgctgcactgatcgctgttcctgaatttaagagaatctttatgtgatacaggttccagatgttgct

SEQ ID NO: 183833 - DNA, 469 bp, Zea Mays
ggtctcttgttcagaagggaattaaggtgaatcaggttatctacaccagtatgatagatgcattgtgcaagtcgggaaagtttgatggtgctcataatctgatgcagaaaataatcacagaagggtttgtgccagacgcccacatgtacagttcgcttattgatggactatgcagggaaaacaagctgttggaagcaatatcactattgaatgatatgattgagagtggagtacaggccaatgctgttccatttaccattctaattgataaacatctcagggagtttagatctgattccccaaaaatgatatccgataggatggctgcggcaggtgttaagcctgatgtcgtcacttatacagtttttatacgctcctactgtcaagatggaaggatggaagatgccgaatccatgatgattcagatgatcgatcatggtgttcgtccaaatttaaccacatataacac

SEQ ID NO: 183834 - DNA, 401 bp, Zea Mays
tccatatccatcggcaaaggctggtcaccttcagcttctgactccaccctgaatttcagttcatataagtagtctccaattaccacatcaactacttgcggaatcaaattcgggtcaagcacggccaccttcagccttgccctgtcaaatttccgagtaaacagcatatccacctcttttgagatgcctagcatagaaccaaccgcccagattactgagtactctctaagttccttaggtaaaccagtgaactgcacccaagccttaggcatctcatattttatttcctctccaagcccctcttccttgacaagcatctgtgcaccaaattttgtatgaacagttccccactcgatcatgcggtgaagttcaccccgggaagggaaacacgtcgagaacac

SEQ ID NO: 183835 - DNA, 316 bp, Zea Mays
tgtgaactttgtaaagctatgcatgaaatgttaaattctaagacaaagcctactccattaagtagatttcaatttcttcaaaataaaatgatccaaatagcgccccaagaatcagtttccaaattaaagtaaattgtttcttcttgtttctagcataaaacacgatgactcttagattgtttccaaggtaaataagtacatttttcattttgccgacatcatcatctacgtttttgtttccccttgtgcacacttactagctacattttgttattattgaggagctcaagaattttaaaaatatactctaacaaat

SEQ ID NO: 183836 - DNA, 422 bp, Zea Mays
agccgatttggactcctgcgtaccttggcaagaaggcgacgagaggggtcccagatcctcatgactccgtgctcgacctccacacgcgaaccgttctcatctaggtgtcccaagctgatgatagagttcctcaacgcggggatgtagtagactccgatgagcagcctgtgctcaccagacgcgacggtgaagacgactgagccggagcccttgatctctacgtcggaggcttccccaaacttgacggagcctcggacgctagagtcaagctcggtgaagaactcccatcggccggtcatatgatgagtagcgccggtgttgaggcaccatccttcgatcatgtctttgctggagccgtcgccgaggaaagcgcgtgctttcgactcatcaaggtggaggagtgctactgcggccggtgtcac

SEQ ID NO: 183837 - DNA, 285 bp, Zea Mays
tggacaacgtctgtacaccggccatgggatagtgcgcatgaagcagcaactgccaaggagcagcgctaggaggcgcgatacagcagcgccggagaggcgcgctaaacagtggaagagtgaggaacgagaacccaaactcgtgataccatgaggggagatatgctgtagatatggttgatgaatagatgcacagaggttcacaggatatatagagatcaaacggcttatagaaatagggtctgattgatctcctagaaccaggactacctaaatagaaaggatctc

SEQ ID NO: 183838 - DNA, 378 bp, Zea Mays
ggtcatacgaatttggggttggcgctcgggttagccggattcaaggactccggcgaagtccaccgccgcgcccctgggcgacaccgccatcgggacagcttgggttgggaacgacgccgctcggccgttggatgcgtaagggacggtcccgattagatcaagcttaccccttcgtccaatccaactgcgtccgtcgatgcgagatccagcggtgcagagtagatctttgattcattaaatccgtgccgttaatctttaatccaacggctctgatcgcgtaccgattcggcccgggatacatctaatcctagcggtcgatagtcgatcgtgcggctgagattgcaagatacctcttcggccgtgctttttgctaaagag

SEQ ID NO: 183839 - DNA, 745 bp, Zea Mays
cagacatggggactatctacacaaattaggcgtacttacatgtccactgcctaggctggtgacaaaggagggtacaactacgactaattactagtctcctatgcactaataacaaaacgaagacagtatgaacggatttaccagacaccgtgaacatatttgcaactggatcttggaaaacatacacaacaatcttaaaattgtaaagcagtaagagggatggaaaaattgatgtgaacatcaccttcgtaggagaggagattgtgatgcaacagagacaaacaccgaactccacgagatctgaacatcaaatatcagatgatattcgttactaagcagttcacaaatttgcttcattgcacggccaagttttcatgcaacctagaccctaatcagttcatggggattaccggatccgtataccctaaaccctaagcagtacatggggaataccggatccgtaacagcgcttaggggacgagacgattaatgtacctgcgattacgaggagttaggaaacgggacgactccaaccttgtggacgaactggcggcggcgcggcccaaaccctagcgacgtcaacggtcagggaggtttgcgataggaggcagccggggacgagcggagacggaacggaatggaggaatgtacctgagaagcgaataccgcggaagggagtgtggtcgaggtccccgacccgatgcggcggaggaggaggcggcagccgacggagagctgaggcgcg

SEQ ID NO: 183840 - DNA, 767 bp, Zea Mays
agggggtgggcattgaacttgttgtcctggaggtctcttggctgctctttttaaagctttctttcctcctttgaatcatatgagtgtgaagcctaacatcactacacctttaaagtgggagtttcatcgtgcgttgggccaggccatggcactattaaatgggtcgtgccttgggcccgctaggcacaacccatttggccatctatagtcaatagtctagtactcctccctcatcatcgtacctgatctcgtgagtgtggaaaaagatgagagaaaacacttcatcttgtttgaccccacaccacacagtcacatacctcgccatccgcactcacctaatctatgtgtttggatcgtgtttgaataactatcccatttaagcaatgtctacctatatgatatatagaaaccgtagcgatgcactggcaactaactatgaattagtcatgcaggagctcattcagcaaatggcgaatgtgcagtacaccgagaacatgacagaggaacaggttgatgctatggcaggaagtgagactttgcggcagcaagcttcactgttcggagcaacaagaaactataaggttgaagggacattcatctatctcagcagcatatttggatcaaacaattgtcttaccaaaaaatgtaattcttacgcaggtgttgagtaagtccacaaacaggctaagggattcgttgcttccaaaagatgagcccaaacttgcagttcctatgttactgcttattgcccagcatcgatccaagta

SEQ ID NO: 183841 - DNA, 392 bp, Zea Mays
ctgcgttgcccgtccgtgtctttcgaggacgggctcgacggcgtcaacgagcgcctcctcaccgaggagcggcactacgtgaatctgagcaggggctgcatccccgtggtgcgcggcggggacggtgcctatgatatctcttaccagaggatttgcatcgccctggaggacggtggggtgatcgcgctcgattggcctgataatttgtacttggacaaagagcatggactggattccacggtgcttatggtgcctggtacgcacgaggggagcatggagaggaacattaaggtgttcgtgttagatgcactgaacaacgggtactttcctattgtaatgaaccccagagggtgcggcggctccccggtcactaccccaaggtgaaagtcttc

SEQ ID NO: 183842 - DNA, 325 bp, Zea Mays
gaggtgaggattgaattagtgcacgtatgtgtgtggtgtcgtggtgtattttagtagtggtggcgtaagatatttgtttgaggtgtgcgggtatatgccgtaatatggttatactcgcaacaaagaaatatgtatgtcttgttaacacaacgtttaggttgctgtcgtataaccgtgtgaagaatgctcgcgatggtcatgtgactaaaaggtgatatagtggcaagcgagaagtaagttcaatatttttaaatgattagttgatagcacctatcgacatcgtcatgatttttgtcgtatggcggatcgatgccttgtcatcgta

SEQ ID NO: 183843 - DNA, 492 bp, Zea Mays
cacgacgccatcctccttcacgaggctgctgcgatcgtcaacctccactcctaggccgtcactgcgcaaaatattcagagtctcgttcacgtcgtcctcgacctcgccaacaacaactacacccgctggcgcgatgagttcctcctcgtcactggcaaatactccctggacagccacatcctcgatgacactcccgcgcctcacttccccaactgggcacgcatggactgcgttgtcaagtcctggatctccggctccatctccccggaccttgctgaaatggccatggaacgcggcgccactgctcgcaccacttggctgactctcgagaaccagtttctcgggaatcgggaaactcgcgccctccacctcgacgctcagttctggcacttcgtccaaggtgatctacctgtctccgattattgtcgccgtttcaaaaccatggcagatgccctcggtgatcttggcgaaccagtcttcgaccggacgttg

SEQ ID NO: 183844 - DNA, 321 bp, Zea Mays
gttaacttatctttcaaagtgttgaacgcctcttcttgtgggggccccaagcaaaagacacctttctttgtgagtttgtgcaaaggggcagcaatctgtaggccagctctgaatggcttcaaccttgctgctatccacctcaatgacctgcggagtaaccacataaccaagaaacgagacacgttgcgtgcaaaaggtgcatttgtccatgttaccaaacaagcgagcaacacacaaagcattaaaaacaacacgcaaatgttctaaatgatcttccatagacttgctgtaaataaggatatcatcgaaatagacaacaac

SEQ ID NO: 183845 - DNA, 349 bp, Zea Mays
caagggtgtcgacacaaggtctgtaacctttaagatgccatcatctgaccagctcagcaggaagcgtgtcgatccacttgagcttgaggtgctctccttgtacctttgtcgcgcactcactcactcacacagtgacacacatgcaatgcacacgcttgacactgaataaatttcgtgggggcaggctcacgtcaggagaaagatgtccaaggaagaaaggttggcgttggtgaaagctggaagagaggatagaggtccttacatggcaagggcggccgtgaaacagaaaaaggtaagcatcctggctgttggcgtgttcgttttgtggtggtagcatgtctttttttaa

SEQ ID NO: 183846 - DNA, 1112 bp, Zea Mays
gcatctttgtggcaaggtgcatgactactccagcctttgttttttggctacgtgtgccatgtacttcttgcacctcatgagcactaagttgactactcaatcagttgagtgtgtttttcttgggtataggccaagcacaagggatatcattgttgggatggttgctcgacgaatgcgagtgtctcatgatatggtttttgatgaagtcttgtcctttttaccctcgtccttgcatcgtttcctcaacgtctcttgctgacccattttatttcttgtttatatctgatgtcgctataccccgtgtgccgatttcttgctcaacgcctcctgttatgccttctttgttttcttcagaggcttcgactatggttccagactacactgtgaagcctcatgtgacacaggtctacatgacatcgtctctagaatgtttatgttgtgccatcttctgaagtgctcaatccttataatgcttcacctacccctgatgaatcatcttctcctacggaatcttctcctattgacccatcctcacttactgattcttcacctgagccgcttcatcgtagtcatcgatcttgtcaacatgttgatctatattgtttaggaccaattacttggcaaggttttgctagcactgttctttctgaacgacttcttattgtgatgttattcttcatctagaatggcagcttgtgatggctaagaaaattgttgtgtttgagtgcagtggcatgtgggatcttatttcccatcctcatatctatcctattacctgtaaatggacacgttctaatggttctcttgagcgttataaagcccgtcttgttgcttgtggttttccgtaggaacatggccaagattatgatgagacatttgctcttgcgcatatgaccacagttcgcactcttcttgttgtgacctctgttcgtaagtggtccatctcttagcttgatgtcaagaatacctttcttaatggtgagttgtgtgaggtctatctatatgcaaccacattttgggtactctattccggctagtatggtttgtcgtctttgccgctctctttatggcctcaagcaggctccttggacttagttccattatctttcttc

SEQ ID NO: 183847 - DNA, 1025 bp, Zea Mays
attctttcctaatgaagagactgcattgagggttcttaatgatggtaaagtgctccgaggtcctcggttcagcctggtgtttaaaagatggtccagattttctcatgcctcttcctcaatcatgtcgagcttggtggaagttgagattaccggaatcccggtgcatgcttggtgccgctcaacagctgaattcatattgggggattcttgtatcattgaggaggttcatccggacactctgttgcagaaaactcttccatcctttgtagcatgggcttggtgcttccaaccgaaacaactgcaccgtgatatgattctgcatattctggagccaggcccacaaagctctgaacggagatgcttagcctataatataagcgtaagggtacttgcaatctgccatgatggtattagaggttcctcgctgctaactccaccggaggatggcgatcagtctgatggttcggacgacatggatgaccaaaggaatgttgagcctcggcgtttgggcagttccttgccccagcgacggtctgttcaccttcgccttgggcctctcccgccgtccggacatggaaggacttcacatacatctaggggacatgaacagccactctttgacgcaccggagttacagcagatggcctcggataatgggatgatactccttaatgagttgcctacagaggagccaaatagtctccttgatgaggcccctattgacagctggacatgcactattgggccgctgaactccacccagccgttttcgcctcagtccaaagtgactgggtcgcaggaaatgacagggctgagttcgcccctcccggtggtgtctaggcttgggccccccgggtcgctgaccccagccaggccggtttcgcctcagtccgtgaggaatgagacgcagaaatcagctaggcttggatcgcccctttctctggcccgtgttcaaccctgcatttcttctgggtcgctagccatatcgaatctgaaagtctattcaagaaggaaaaatactactc

SEQ ID NO: 183848 - DNA, 896 bp, Zea Mays
gctatattggctagatctgaaagggaagctttcattaacattggaagaactcactactgccaagaatagatggaatgttcctagcacttctgctaggaaagaaaaagaggagtcgtctgatgacctgtatgatgctaataatgatgatgatgctggttctgactgctcctcaggaaaacgaaggcgaactaattcaaggaaaaagggtcaaaaacgccgaaaggtaaatagagattgtagcattcttgaaaaaaaggtcgagcttccacttagaaatactgagagcattccggtggaagtgccaaatgaacgggtgccatatccggtacacacaaaagtaccaaatggacgagtacccatgccagtagacacaaaagtaccaaatgaaccagtgtccttggcagcaaacacaaaatgggcatcaccagagctattggagtttataggacacatgagaaatggcgatcaatctttcatttctcaatttgatgttcagactcttctgcttgattatatcaagaagaataaccttcgtgatcctcaaaggaaaagccagattatttgtgactcgagacttcacttcttgttcaggaaagcacgagttgctcactttgagatgttaaagcttttggaaatgcattttcttacgaatgagacttcaacagtaactaatagtagccaagtgactatcaatctcaattcagctcatgtagataccaatggacacaatgacacggctgcaaaagtttcccctgataagaggaggaggatctatagaaagatggaaagagatacacaagttaatcttgaggattatgcagcaattgacatgcataacataaatttgatttacatgaggcgcagcctaatggaggatttagttgatgatgtcaaat

SEQ ID NO: 183849 - DNA, 824 bp, Zea Mays
ggatttcggcaggttcctcggggaggaccccaagcttaccctcgccaaggtccgccccccgtttctgcgcattcctgcttgcttcacatcgtctctagagaatatgacgaccaggataaaaatgccttctttgctcactagtatttgaatggacgtttaatatctccagcagcagcttaccatcattatccctatattcaaattccaccttgcgaacagtgttttaggtgacggtgaactgctggacacggtaggcgtgctttggggttcgatttaatttcacattgctccactgctacttaaatgatagatagagttcatcatagcagtagttgtgtacttgtgttcgctttagcttagccgtttcggggactgtctggatggtacactttttttgtgtgtgtacctgatcagtatagtatgcttttgaacataataacgcatccaaataataataataaggtaaattacaggtgcataattagatttgaactccatcggaaacgcaagagtcgttagtaattatctcctgtatatatgatgctatccgctgcatttgacatgcatctcttatgggatcactctttcagattcttcttaagaagtcagatccggatgcctcgtctctcgatgtggagaaactaattgccaaaaatagagacaagctcgatgatattctgagggactgcatggaagctaataagaagggtcagggttttgacacatcagaaagtgggccctctttgaatacgacacggccaacaataagcaagccgaccgaatccaaaagttctttgaatatttccaagcccagtatgggcaga

SEQ ID NO: 183850 - DNA, 423 bp, Zea Mays
ggcggcgaagagcggtggcgaaacggggagtgggtgaattgtcacgaggtgaaaggcgtcatcgtggtgagatggagggtggtcgtcttcgtgtggatgtgactggcaaacgggaattgttgtcctcgccggctggggcgtgtgtgggtgagggggagctgcgaagtctgtttgcgggtgaggaattgaggataatgttgttcaactatagggagatggatataatcccgaaggttgagccgatgtaatgtgtgatgccctcgctgtatgtatgtaactataatttgtatggtaaggctgcgtgccttcgctgatccggccacgcccgtaggcggcctgtgcacttgatcttgcgcatttattgagttggtccggctgcacccgtagtcgatttttgcacggaggatccgattgcacccttag

SEQ ID NO: 183851 - DNA, 857 bp, Zea Mays
ggctaaatttatcccagatgacattgtacttgaaaagatcatacctccaaggaccctggaacactttgaacttttgggctatcatggttcagaatttcctgagtggatgctgaatctgacaaccattttgccaaaccttgtacaccttaagctttctggccttgctacatgtgaccatctgccgcctcttggccagctaccaaatttgcagtccctggtcatagaatgtataccaaatgtcaaggctgttggagaagtttttgctggtggcagcagagcgtttctgaaattaagggacctcactatcagtggtatgccaaacctagaaaggtggctgacaactctatcaactaccaatgaagaggcccatgtgtatgtgttccctaaccttcaccatctgaaggtgtcatggtgcccaaagttgatatttgaaccatctcttccacagtgccttttattggaaattgatgcatgtggtgagatcttgcaaggatggacagcctcacattcacaaataaaccttaggccaacaagaaggttaagcttccagttctgtgacttatcattttcaaggggggaccaacttcatttttttagctccttaagttcacttaagttcctgacagtaaggtcatgcgaaggtctggacacttggggagaaagtataggaacattaaccagccttgaggtgttggagctttcactctgtgatataccaatgtttttgggaagaatcgcttcgttgcagagtctgagtattgaaatgtgccatctaccttgtgatttttctcattacttgctacagcttccattcttgcggcagctacaaattgtttgttgcaacgctaagttagagt

SEQ ID NO: 183852 - DNA, 501 bp, Zea Mays
gggtggggggaggtcgacgaccgtgcacgcggttctagatgctgtgtgctctggaacctcctcctaggaccgtgggtttcagtacgcttagccacgtttctaggctaacagcacaattttgtcgactagttctgcaaagtgcagtcacggcggcgtcgtattttgtttgttctgtgcgcaggcgactgttaccttctgctctgcttctgtacgtgcattgttgttagggatattctaggggcttgttttaggaccagccgaacatttccgtgttttcaatgacttgagagtacttgactgttttgcctgataccccagagttgccaacaagtagtcaaaagcgcggtaacggtgggcatcattgttttttttttgttctgcgtatgtgtctgggatggtacctactgctcatgctctgctaggacatcatactgtatatgtacattgtgcaaaatgcgctaccatgttgtcctaagattgttatcacaccacatttgatgc

SEQ ID NO: 183853 - DNA, 633 bp, Zea Mays
cagtaatgccatacctcaaggctattctcatgaatgcaactgataaatccaacagaatgttgcgtgccaaatccatggaatgcatcagtttagttggtatggcagttgggaaacaaaagtttaaggatgatgctaagcaggtaatggtttgctagttccccttatattacagtatacagtcgagtccataactctttccgtctataaaagtgttaaaacattattttttgtggcctttgtactcaataaacgaaatcaaattgggttgtaggatgttatatgctatctgttctgtatctgttaatgctattgataattcattttggtgttaggtgatggaggtccttatgacactgcaaggatctcagatggaggctgatgaccctataacaagctacatgctgcaagtatgttagaacttgaaaccttgttctcaacttttttttgtcaatttaaatctttttttctcatttgatctatatgttcgcctctgtaggcatgggcaagactgtgtaaatgccttggtcaggatttcttaccatacatgagtgttgttatgccccctctgctccagtctgctcagctcaaaccagatgtgagtgtcacttctgctggaccagaagatgaaaatgg

SEQ ID NO: 183854 - DNA, 495 bp, Zea Mays
atcattcggtccatcaatgatgttgttcgttatctactctgttccaagcgtccatgcctccttcctactgggtcggccctctccaccgtgaccgaactgatcaacactttgccaatcaagactcttgccttctatatgccacaccttgctttgcacagcactccaccggtgtatgaccatcttcgagtttttggctacaaatgttatcccaacctatccgccatagatccccacaaactcgctcccagatttgccctgtgtcttccttggctattcccaccatcacaaaggatatcgctgcattgatctctcctccaatcgcatcatcatttctaggcatgtcatctttgatgaaactgcctttccctttgctgatcgcgatggaccacgcttccctaaggtttttgagtttcttgttactcacactgtgcctaatccaattggaccacagcacaagctttttcctgcaggaactcttcccgaggatcctggagt

SEQ ID NO: 183855 - DNA, 970 bp, Zea Mays
aatcccatatactggaattgattcttgctattaatcatagttatctacaagggatgctgcacctatgtggttgttggaaagactatcacctttttttttctccaggtgaaacaccataagagctggagatccaacacacaatgtatttctcttttgtctttatgtgcaaagaacaatgaaggcaaagagttggcccttagtttttctcaaggatcagatttcgttgaaatttcttctgatgttgacaagctgtgttcaatttggagcacagtttctctaagggttgatagttctgaggatgacagtgatgatggaaaaccttacaaggttataccaagaagttcgtaccatcttgtcaacaagaaaaacaactatggcattgcatttgttgatggcttgctagagtttgtgaaaaagccgggaaatccatttaaagtgcaggtttttgatgaatctattttttctgatgcttcaagacttactgttaaccatatgaaatgggacaattatacttacttggatgtggacgatgatgtgcctttttctgtgagggatagattggcaagtggtgcaagttctcaacatgtaatcatcaatgttgacaagattgtttttaccatcactcatgaagtctctgatactgatatttttttcccacttgtccaaacctgcataagtgatatccgtgttgttacgcaaatatttccatctaaaatcaggattctaagttcattcaaagtctcagcgcagtatttcattgcacgaagaaatctgtggtcagtcttgtgctaatatctatatttgttttcctgtctaattgcattttgctggtttcttccaaacttgcaaggagatttggaattgagttcttgctatttgacacacagggaagaactcatctctcctatcacctcctatacattctttcgatttaagttttttaccccagatccagttactaagtatggaa

SEQ ID NO: 183856 - DNA, 1303 bp, Zea Mays
gcctcctttctggttctcctcctccctcctccctcccgcgcagatctccacaagcttccagagagcagcagcagcagcagctcgcctccacgcgacacgaggacggacatggcgaccttcaccaagctcgaggattcccccatgttccgcaaacaggtggcgtccctcgctcttcgctcctctgcccacgaggcctccctgatccggccccgtcgaggcaatgtttcgtgtttcttgggatctcggtcggtcctacgtcgtcagttggatttgggtgtgtcgaatggaaggattcggtccgttgtcggagtctgggtggttgtgacggagctatggcggatttggatcattttgtgtgcggcagatctcgacttggtagcttgatccagtgtgcctcggtcgttttgggtttgaaacacagggatttctcagcagagtcgacgttttgacgtgatgcgtaattattgctgcaattctgtgtttgttatgacgaattgggcatgttagtgaaaatgggtcaatcatcgtccgatatttgggattgatttctttgaaggggttagaacgctgacaacggcgcagctttgacgatcaaattgcactgttgcattgcacaacatatttgaatagaaggggttgattttatttgaattgagctcatggatggacctggtacagagggtgaagcttttgcttgagcaaattttcagcctggttgtagttgttacaatggtttactgttcatttttatttttgctgaggacactactttgcccattttgaattgatggttgcattttttgttgaatcaccttctggaacaacaacaatccatttttgttgaatcagtctgctgggacttttataatgaatattggaccctcttaaaaacatcccctctattctgttccttatataaatcaaacaaaaaagaagaggtgtaggcattgtgctaaacaattttgctgggtaacttggctcactaatttctctccaaagggcagacctattgacgtagggtctagagaagggataaacccagtcaagctttctcaaagtacggagaggctgcttaaacccgtgacctggtgggctgcttaaacccgtgacctggtgctgcaccaggccttcccttctaatttctctccagaatcaccaaattatctctcttcgttgccccaaaaccttgtttttgaacttcaaaatgaaactatacatgcatttaaattattgtcccaacttgtttccaatacctgcaggtcaattctttggaacatcttactgatgaactgaaagaacggtg

SEQ ID NO: 183857 - DNA, 559 bp, Zea Mays
atccagatgagatttgagaaggcaaaggaagaggtaaattcagatttggcagtttttgcaggagacttggttagcgtaatggaaaagtatgcagactctcatcctgagtggaaagaaaccttggaggacatgctaatacttgcacgtacctgctgtgtgatgacacctggggaattctggcttcagtgtgaagttatagtgcaagatttggatgaccatcgtcaggagctctcaatgggtgttctgaagaaactatatactcggatgctttttatccttacaagatgcacaaggttgcttcagttccacaaagaaagtgggtttgctgaggatgaagttgttatccatcagcgtgataagattatacagtctgcagataggcaggttttaactcaaccaggtgcagatggtacaatatccagagccagtaaaagtgaggcaagaaaatcatacagtcaggagcagcataatttgaaatggaagcgcagccaggagataaagcctgttaagcttcttccaccacttgacacagatgttaagaaagatgctgtttctccaa

SEQ ID NO: 183858 - DNA, 523 bp, Zea Mays
tgatggggatacgtcgcaaaggaaggtgacaggagaatacagggaatggcagcgctacgagggacgacgctgcgtgtgcaccgaggggctccagctagggaacggcgagcgttgcgccggttgcgaggaagatgcaagggaggctggcagactgggtgagaatgtttggtgcagcgaagatgttcgaaggcacgatgagcgccactgttattgtggtgtgggagcagagggacgtcgcgatggtggtcgatcgcgcgtttggaggggactgcgcaggtgacgacgagttggtggtcggtcgcgcggtggagaggaggctggtggtgtggcccgtgcgggcgtggagaagcgttgtttagggtttagggtgtctgttgccggaacatgaagagtgtcggaacatgaagagtgcctgttgccggaacatgaagagtgtcggaacatgaagcggtgtctgttgccggaacatgaagagtgccttgatcagtttctgcgatcttgttctgctccagtcctgttgtcg

SEQ ID NO: 183859 - DNA, 284 bp, Zea Mays
gtaaaccaccaacggcttcgccgtcccctagctccgcacgggaatgcgaagaatgtgagacttgagagatccaacaggggagatgcaccgcagcgacggcatggaggtggcgggagggtggaggccgcctgctaccgctagctactgagacagctccgagtcttcgagctctggttccggcctgcgcatatggtacggatgccctccccttggataccttcttgctaaatctgtgaaatgcttggtcgcaagccgcacctgtcgccgattcctttgtgcagcta

SEQ ID NO: 183860 - DNA, 284 bp, Zea Mays
cacatggacaatttctgaggtgcgcagtgtgccggcgaggaagtagtgctctggagtcgacgaggagaggccacaactggattgagcatgtgtgcctagattgggggtgcattgtgtgcactgaattgatgagcggtgctgtatgaatttagcatgattatggtgacgagcttgggaggtgccatgctgattcggttgccaccctgcctgatggttgtcgcttgcttagctccgatgccaggctgagcctcacatccttgcacacctggtctgtgcctctgtac

SEQ ID NO: 183861 - DNA, 472 bp, Zea Mays
aatgtcagtcgggcccacagctgggtccagcgggctatcaacgtcaaggccggagacaaaggcaagcacccagggcccgacaacgaccaggacgagaaaaggaggaaagagggggaggcaacgccgaggttggggaaggtcgcgccaggggggttgcggcagctagcagccagccatagccgatgtcgactgggaagaggagcaggcggctagggttagaaggctactgataccaaattaaatgagggattaaccagaatgtgtgtagatacatatagaagcaccataatgggttggatacaaggcctagggccaataggaaacaacacactaacaaaaacggatgggttcgtatttaatattagagaacaaaacatgtatgaaatttaaaaaatgcacaatttattctttttggcaagaaggcataagattaaccctatttttactcatttaattagagacatcttttgta

SEQ ID NO: 183862 - DNA, 743 bp, Zea Mays
ccacttgggcttgaggttcagctacatattacagaagctgtctgtcctgccttaagtgaacctggtaaccagttcctatctatgaagcttgaccattcggttcaatacttcaattactatttgcaaaaaattgaacttaaactaatatttttgacaggcttacgggcctttcttcgatttatgactggggtatctgtgtgcctaaacaggggagatatagatccaaaagctcaacaggtttacttctgtgtgcttttgatattgtgttgcctgcagtaagatagattatgtctatatccttattccattttctttccttattactctacctgtctgccagcttgcagaagcagcaggatcttcattggtgtccattatcgtagatcacatattcctctgcattaaagatactggttagtagtagtgccaaacaatttcagatatcaacctttttgtcctgctacggtgacttgtttgttaaatcattggtgcaaacagagtttcaacttgaacttctcatgcagtctttgttcttctcacgggtaattttctccaagacttcaactgctgttatactttacagtatgatttgttcactgttagtacagtccgctgatgatatgcttgatttagaatgcatgacctcatagaggatttaattacaagtttttctttatcttaaaggcaagcatttcagacggcgaatgctcaaagaacttatcttgcatcaaggtcggcgggat

SEQ ID NO: 183863 - DNA, 307 bp, Zea Mays
cgacagtagttgttgacattgagctcgccttgctggaagacctggaactaggcgtcgaggtggagaacacaagtctagtgtgttgctgaggaactgggactcgatggtgagccatgcatggtgtgccgtcttcctgagctcgcggacgatctcctgaagctcgacggtgacagtgccgaagaggcaggacatgacgatgctgttgtgcctgtaccgggacaaggtgttggagaagacctctgtcgagggcgtagcgacgaagcgtcaataacatgaggtcgcaccagtgcgtgtagtaggtggagag

SEQ ID NO: 183864 - DNA, 351 bp, Zea Mays
taatgtatatcccattcgttgcgacgagagtgacattgcagttgtgcaaggtttgctgccgtgtggaatttcgtccttcccctataaatatcttggacttccattaatgctgcgaaagataaccaaggatcaggtgcagccaattatcgacaaatttgcaaatcagcttcctggatggaaggcagacttgatgacaagggctgggagaacaattcaagtgcggtttgtgcttactgggatgctcatctacttagcaatggcaattgatctcccaacttatatcacaaaagcaatcgataaaatccgaagaggctttctttggagaggtcgcaaagagataaatggggggca

SEQ ID NO: 183865 - DNA, 1229 bp, Zea Mays
cttgctttatattcttgttcctattaagaactgagcaactagctaagctgagatcaagttacagtttactaaatactggtatgttaaaaaggaaccctcatgtagctgtgagagtaaatttcttcttcttgtgccagagtatattagcatttcttggttttcaattatatgtcagtttgcatttctcacaaacacatgcattcattctctggtgctatcaaactgatgcatattttgatgagcagcactaggactatggtcatacgattagtgctagatgctgagttactgacaacaataatctcatctgttgtttgatgtggtggttgtgtcaatcaaaaaaacatttttccatcaccaacagaggaactgcgatttagcaagcgctgcgcaatgttgatgacctccattttcagattacttgttgtttctagacccgaagagtgtaggttctagtaattatttgtgcctagctctatattttttctttaaagaaaaaggaagaaaagcattagaatctttcacgctgaatttagaagaagctctatcatcaaacaattttttattgagaaatattttttccacactttttctagcagttctctaaaataaaccatggaactgagagttaaaaaagcagcttcttctcatttagttgatgcatggaatcctatatgtgtcactgagtttactttagagaattacagagaatcaattctgatgatcaatgaatcaccatacacaaagaacacaatcaggaagagctcaaccaatctgtctcttgctagctgctagggctactgtttccattttgcagactttgtgattcgtaaaattctttggttggtgcaaaatagaatttttctaaaaataattaaatatttatattgtcaaataaaagcaccagcaatggtacctccatgttcatgtttataattatctgtgattcttacatatttcaattactatgcttatttgttaaggttaaaatgtattatcatgtgacctgccttttgtccacctgcactgcttgttcgtagatgtgcatgcttgtccctcttgcactgcttgtctgttacctgcagcaatctttgccaaacggacacagggaacctatgccccacaggactgcaccacacgtgggacaggtaatgcaggtattgcccccgctgtggctggccggtgtgcaattcaccaggctgccaaacgagccctaaaggccccagcat

SEQ ID NO: 183866 - DNA, 377 bp, Zea Mays
gacgggctgaaggtctcctctccagggcgctgagtgaagccccgaaggacccaacaagccttgtatcgatccagggtaccgtcgaccttgagattgtgctgaaagatccacttgtcggtgaccacgttgttgccagggggtgtcgtactaggtcccacatgtggttggccagcagggccttgtactctatggcttgacaccagtagggtcggcgagcgtgctatggaccaaggacggtacatgcgagagagaagtgatggggcctgtgagtaccagtggtcgtactcgtgaccattgtcactctagagagcacgaacaatgtggctgaactgtgtgcagacccaagcaaaagaagtgcgagaggcggtgaatgtgtt

SEQ ID NO: 183867 - DNA, 277 bp, Zea Mays
gttagattggatggtttcatggatgaggtgtgctcttcttgggatcagccagccggtagatgcggtttgttcactgcagcgctttgtggataaactgaaaagttttgtgaggcagctacagtcatggagtgagaaaagaattgggctggtcaaacgacaactgtttttggccaaggagattattcatcgtctggagatggccagggactcaagggtcttatcctttaatgaagagtggctgcgctgccgtcttaaacagcatttatgggggttgtcc

SEQ ID NO: 183868 - DNA, 406 bp, Zea Mays
cgtctctcgtctctctcctgtaaccaaagcgccttcttcccggactctccccagcatctcgctccatgacaaatcccaccgcgggtagatcacagcacgccatgccgcttcacgcgcgcgtgcgcgcagctagttagctagcgaacaaacccagcagaaacagacgccgccgccgacaacaagcgatctagaagagcacaggaaggagcaaggtgttgctgaggaaggcgacaatggccgcggagcaggttcagctgtgcatctccgccgacagcggcggcggcgaaagcaagcgtgacgccatgccggtggcggtggccgtgtccctgtgcctcctccacgacgcgttaggcgtcgcgctgttcctcgcctcccacccgctccacaccgtctacctcctcttctt

SEQ ID NO: 183869 - DNA, 334 bp, Zea Mays
atcaaatgtaaatcgtgctgtctcagccatatgtctcagatgacggtggttctcaatcattatatacattcagtatactcactggattcggcacagagccattttgattgaacacagcaatcaggtcatataaagtaaataaatgatttgctattgcttgggacgttgtctatatcgtgatccgcccagccctaatcacgatggcatgctcttgaacgcatccctgctgcccgttagcctgctacggtgctatagtctccaggtgtctgtaagttcgtggtggcaggctggcagcagcttgccagttaggacttgggagcagagcaaatcattt

SEQ ID NO: 183870 - DNA, 347 bp, Zea Mays
ccccgccgccggtgagctggacgccatcccggccagccgcggtacccctccccttgctcaccgccgtggataaagctgctcaccgccgtcgtgcatctccgtgtctgccgcgtgtccgagtctttccaccgcgtcgccgtgactccctatagcagtcccatcgtcgccggtgagctcgccacgactgtggacacgcactcacgcggccagtgccttcttcttcatctccggccgccagcgcaatctgctcaaattacccgtcaccgctcgctcctcctataaattgagcccgcggctagcttcgcaacattctcacgcaccaagccacccagtattgcccccagccg

SEQ ID NO: 183871 - DNA, 673 bp, Zea Mays
gtgcttcaatgacggtcgaacggcatagcaatgtgggtgccatgtatgatgctggtgtataccccacctgtcggcgccactgtctctggacgcgctgttgaggcctttactcacttctcgttgtggattcatctgagtgaaaacctagtactggtatatccggtcgcgcggcgatggagtcttcagatgtctctctccttggagacctcacattaggaggttcctcataaggtgatagaggtgtgacatttgccgttgttcaaaagtggttgtcttgcaccttggggacatgctgttgccaggttctgagtatgtggtgtctccaatcacggtcagtgtctttgttagatttgtagtgccttttgtgggggtggtgtgatgttggtttttttccgctttgtggtcagagctcagtcagcatctggagttgttcttcacctatgttggatttggctcaagtttagattctgctttcacccattttattgtgagatttgttcttgtggaggaaacaccatgaaaaaactgctaaagtttgactacagactgagcacgttgaagattattattactactactattactattattattgctgttattatcattataggttttatcttttggagatgtattggctataagtctttaggtcgtatgcctatctttgtag

SEQ ID NO: 183872 - DNA, 535 bp, Zea Mays
cgatggtgagcgtgcttggagcctgtgctcagcttggagacctcgagcgcggaaggcgggcgcaccggtgcctgagggaacgtggctttgcattgaacctcaggcttgcaacctcgctcgttgacatgtatgccaagtgtggggccatcagtgaggcaatggaggtgttctgggctgtgccggtggagagcaccgatgttctgatatggaatgctgtgatcggtggccttgcggtgcatggcatggccaccaaatcggtggagatattcctggagatgcagcgtgctggggttgcgccggatgagatcacgtacctttgtctgctgagcgcttgtgcccacggcggtctagtggatgaggcttgggagttcttccgctcacttgaagcgcaagggctcagaccacatgtcgagcattatgcttgcctggtagatgtgcttggcagagcaggacgcctggaggaagtgtacggtgttgttaaaagtatgccaatgaaacctagtgtttctgtgcttggtgctctcttaaatgcctg

SEQ ID NO: 183873 - DNA, 1486 bp, Zea Mays
gggcgtttgtgcaggacctagctgatgcagatcgcagcatgatcattgatagttttccgcagtttcagtggcattggcttgggaatctgcagttttcacttggattactgcccaagttcttggccgatatggaggggcttgtgcatgatctcaacctgggaggcagccataatcctgggaggcttcgttcgctgtttgcttgtttctctacggtactgcagattatgtcttctggtgtggctgagcgaaataacctaagagaacttgtagctgggcctctggaaggtttagctcctcaacttttaaggtgtgcatcagtgatagcctctaaccttggctggtctgagaggatggaagacgcatccaaatgcttggtcttgcttgcagagattctgcaggaaaggtttgctgatttttatgtccattttgtggatgtgttggtccagagcttggaagttgcctcctcggcacagttggcggcagcacttaagactaacctgcaagttctatcactgcaaaatttggggctccatgcagcttctgttggagctttgcttgacttcagttcaattttatctaagtcacgtcttcatccaaaccacagcgtggttgcaaactcagcagctacctacattttttgcttacagcatggattggaagatgtagttgatcaagcaattgcatcagtgatgaatgagttggagctgataaaatctctgctagcggaagggcaagcaagttgccctgatatccatagtccccccttagaattgaacagtgaaaggaaaaacgagtcgaactcaggtgtgcattgttggccacaatattcagaggatcagttgctttgcctaatgaaatttgatctcaagattcttctggcgactattgcactggatacaaaaaagagaaatgagagaacaactaacttgatacaattcatcttaaagaagcttgacccatttggtgcccctttccataatttccttgagatgcagtttcagattttctctacactacacaaactgagcaacatggaactctcaagcaatatgccagcatctgaaccatttgaaagagactctggaggttataaaacacagccggttgtgttagaaaagaagatttcttgtgaatgtaaaaagaagtttgtgcataaatatggcaaatacatagttcagggccttaatgcatcatcatctttgacactgaaattagaggctctagattggataggttcatttgaaaaattgatccatggattggagaggggtgtggataatttcagtttctcttatgaggtaatttgggatgctaccctttcgagtgatatcctttttgctgtcttggattgtgcatatgatagggagtctaaagtaaggtaccatgttgcaataaccttggagttactatttctgggaaggctcatcaaccccatgaatttctatgttgttgctcaggttctgctagacaagcttagtgatccaga

SEQ ID NO: 183874 - DNA, 442 bp, Zea Mays
attgacattggattcatatacacagtgcttggttgttttgtgtgtcacgtggggttcatgtggaagattgggatcaagtcacggtgcccacaagttgagaaatttttagtagctcccattcaccccctcttgcctcatcggttcttaagtgtcccatctcaagggcgccagaccaacgaggtcttccaaaatacttggcttgatggtgagggtgactcgtgcaaagtgcttgtgcgcatatgtgaccgaggtgtctaggtcttctttgaccatgctaacgaggtgcacacctttgagtgcatgtcgcgccacgactagggtcaccgcgtttccagccgcttcaccaacggtcgcatcgacctagagtatgtgatgcctataccaccctagcatgtctctttgaatggagaattgatcattgtcatgttatggctcactctcg

SEQ ID NO: 183875 - DNA, 274 bp, Zea Mays
gtctacaccgtcgatttgtcatcgacaccaatccaccatagattgggatgcctccatcgacttgttccatcgtcgctccaccttgtgcgtactcggtccatacaaccgaatatgtgcgatccacatggctcccgtgacatcatcgctgagtcctacgtgcatcttcttcgtgcaatagggctactggcttcctactgtgttgcctcatcgagccgcaacactgttgcccggatgtctgcttcgtcgttgtatctacatcgccattcttcgtgca

SEQ ID NO: 183876 - DNA, 484 bp, Zea Mays
ttcgataaaaaacatcttcatcttaataaccaatctattgctgttgcattccactatttgtaggaatatagaaaagtctcattaagatacactcttcttctcagggtgctcattatcttcagagatggggttatgagtttgtgggatattaaagctagcaaagcagtatccatatctggtaaaactacgcagcagcaatcacagaaggaggctaaaaatgtaacatcagcatgctgggtttgtgccaagggaagcaaaattgctatcggatacgataatggcgatttatacatttgggccattcctgaggttacaagtacacaaaattcctcatctatgggtggccagaatctacctattcagaggcttaacctaggatacaagctagacaagttgccaatagtctctttgcaatggatccctagcgatggaaaggcaggccgtttgtatatcaatggtttcaatgatcatggacacctatttc

SEQ ID NO: 183877 - DNA, 342 bp, Zea Mays
aaatcagtctctaaaaaatgttgagtgtgagattggaccatctgtgcatggcgcctgaaatatggcttacgttttgatatatcatgaatttgtggttctgatcgcatgatatataccactctatccggtggtacattttatcttaccattgagtataagcaacaatatattactttgttactggcgggaagaaacctgtattttaagggttaaaggagtggaatgtatggaacatttgaaatagcagtgtcaaatgaaaggtacatgctacgagatgtcactgttatatattgcagaggactatatgtttctcagtccagatacgaacgttgggcaaactag

SEQ ID NO: 183878 - DNA, 717 bp, Zea Mays
tgcaaggaaaagctgcgatctcacaccgtagcagactttggacttccaagagagtttcttctgaacactgtatggggtagacattggatttttgcacattatttttgagaccagaggcactgccaaatagctgcaagatatcaagagtgatggagatttcatccaccgtagggtgtaagaagagggctacatcatctgcgtaaatggagactctgtgtagctgtcttcttgctgctagctgctgcaataaacctgcctcttctgcctttataaataggtgtccaaggacatccatgaccaatatgaatagcatcggtgaaaggggatccccttgtctaagccctcttctatgctgaatttgttgtccaggaaacccattgagcatgacttgtgtggtggatgaagcaaggagaccacaaaccatgtccctccagatctgtccaaacccaaactgctgcatgacttcaattaaaaaagggccaggagactgagtcaaaggccttggtgatgtcaaagtttgaggagcagccgagataatctttgttgatgaaaacagttttgatttctgttgtactaacatgaagttgtcctggatgaatcgccccttaataaatgcactttgatttggggaaaccaactctatcgatttcatctgtagagaacgacatagtgaggtcctctaaaccttccacgggatgaaccaagtttgcaaggttg

SEQ ID NO: 183879 - DNA, 366 bp, Zea Mays
caatgtgccactgcctgcatctcaacaccctctacatgtgacagatgcagatgaggaggacaagagtgtaaagcagcttaacgagtgtgccacaatatatctatctctccaggtactctctcctttccccactacagggcctttcccaagcacaagtcgctcgtttccttcaatatcaatcttaggcctctcagatttggatctcatcattatttgtttgcaggactgcctcattgagtcaaaccgcaactggaaggtctgccaagcatgtaggtcttcttatttgcaatatcttttctaacaagatttcttagttcccagatgagattggaattgtatactagcaaaggaaatttaaatgcttca

SEQ ID NO: 183880 - DNA, 390 bp, Zea Mays
ttgtaatctcctagattggctaactgccatgtatagcctaggattggtttccatctatagcctaggactgtttccttgtacagggaatagcttcccatgtatgtacttccatgcatgcctactggctatatataacaggctccccacccacaatgggtgtgtggtgattccctccattcttcccttctacatggtataagacttttagatcctgcgcctccacccctcctgctgcgccacacccttcttgctgcgccaccgtttctccctcccaggtcgccatgactgaggccaccatccatgctaccgctgtgttcgtcgctccctatgcgacgatcaacgccaagaatcacatcccggtaacccttgagttaccttgagctggcaaag

SEQ ID NO: 183881 - DNA, 1263 bp, Zea Mays
gttcaacgaatgctttcacatcttctgaacacacaaacttctattttgatgtgaacagtgatagcctgcacgatgctttagataggtacgtcctgttgcattctttattttttaaccttattttccttgtgagaaatttcacttatgcttgtgccatctaatcttaggtttgcccaattttttatcaagccattgatgtccccagatgctacacttagggaaataaaagctgttgactctggtatgtgatatctttttgttttttctgttgctgttactggaatgacactttaattttctaacttccatttttcatttttagaaaatcagaaaaacctcttgtcagatccttggcgaatgagtcaggtacttgcattttccaagctcatgttaaataatcagacaagttaattatagagatctgattttatttgtatctgttctttcttgttttcagcttcagaagcatctttgtgcagagaatcatccttatcataagtttagcactggttgttttctgaacattttttccctttcctttctgttcttacattacatacgattaatgacatttagaatacactgctcatttcctatctaattttatatttctttgaatgacatgacatctctttattttagcattcatactggttgtttacagaaaccttttatttcagtttttgatagtgatagaaataaaattggacacaaggcttgagcttattaaatttcattttgacatgatatctctttgcttcaacaataaatgatgtttcaatgtaataaagagttcttttatgatatatgcttcactgcttgcttgaaatattggaaatctttagaacttattttcactgcttgcttgaaataatggacaatttcttggaactgattctcactgcttgcttgaaatattggacaattccttagaactgatattcagaattcttattgattaggaaattggaacacacttgaagttaaagcaaaggagaaaggattggacacaaggcttgagcttattaaattttatgattcacactactcagctaacttgatgcaactcgttgtgtatggaaaaggttctccatcaaactgttctgtatttccttacaagttatatgctgttaaaacttttttttggttgttttgcttctcatatcttttgtattttgcagatagccttgataacctgcagaaccttgttgaaaataagttttgcgatattagagatgttgggaggaagccattttcatttcc

SEQ ID NO: 183882 - DNA, 598 bp, Zea Mays
tcccactcatcggaaccctaatttttagcaagttgctcgcaaatctacaaagtttggtagctggaacaggcaacggtaactaatcgaggtcgtctcatggcgattccacgcgcgaaaaaaagaagtgaggaaatgggggagagagaaaagaggatctagtactacgagcgttagggtggaactcacttaacgggcgccgagagatttccagcagcgggtggagtaccacgcgacggagggaacgccggcgacagaccgccgttttgtcttggcggtccggctctccgcaacatcgtggcgagcgagaagaaatgacaggagatttgcgatgggccaggccggattgtcacacgacacgagacaatacccactcggacctggcccatcaaaacaccgcttaacaggccaatattgactacggcgctaccttatgcaactccgcggccttggcaggaaggctgaggaccgtcgagcgagttgggatctcttggcggggaggatggcgacggacagtccccagaatgtcagagggacgcctgcggctagatcacaggaaaaaggaattaatggattgagttgtgctcatctaagatccgtg

SEQ ID NO: 183883 - DNA, 456 bp, Zea Mays
agaaatattgatcatgatccattaccacccctagatggagcacatgcgagtgatgaactcacgtggttggtggcagagccagccacagatggggcgccaccggcgcaggaatagtgattagatccttgaacttggcatcgtcggtgcatggatgaagctcggatggcatcggtgattgggtggaggcgcaaccgacatatggggtctgtcgcccttgtgataaataggccgatcagcagctacaggagataatggggcaatagtattgtggatggcgataaactgggtcctttctgccccttttcttcctttctacttaatataatgaggcgcagtcctcctgcgttttttgaggaaaaaatagggccatgcttctctcgctgtgacaattttttggggaagagaacaggtgcagggtctgttgcgccgccaggaattagaactggtgtttatggc

SEQ ID NO: 183884 - DNA, 358 bp, Zea Mays
ccgacccgttgccatcctttagaagaggacgcactgcgacaatatgcccaaaggcgtgagatggccaaggagaaatacttatcacactttacggtggatcgtcaccagaaaatcgttcgacaaggagagattgaaatggtatctctcttgactttgcctcaggtccccactgtgagtaattccaatactaatccatctattaaatcttatatagattagtgaggagacaaattaaagcaacacacagatgaatctcttaaaatgttaacacgttcgtatgagaatatgttgttccaagtttcccttcatatgaacctaacacaaccacccgtgcccggcacatcggctataaatgggt

SEQ ID NO: 183885 - DNA, 288 bp, Zea Mays
ttatctatatctttttggagagcgaagcggctgcgatccaatttctaagagaggagtggaatcgtttcagtttctgtttgggcccaccgcaaagagagggagaagtggaatggtgggattcgaccgttttttggagcaagctcgtcccaaatatggtgggaatattcccgatttagaaccacctcgctctccaactaaacggacccgtaaattatcattgcttcagcagtcatttcttgtgagaaactactgtattgtcattagctttctttcctgcatttgttaggc

SEQ ID NO: 183886 - DNA, 275 bp, Zea Mays
ctgaactggaatttccgaagggcagccgcacgtgcttgccaagttgacatgaatgacatagagtatgagcggacttattacatgagatggaattattttgtctaagcaaatttagggcagcagctcctggatgaccaagacgatggtgctagaggttggtggaggtggcgaggttggcttggggcgtggcagggacggtgtagaggccgtcggagctattagagcggagaatcacgcgtctggtctgcagatccttgacagaaaaaccaaacgcg

SEQ ID NO: 183887 - DNA, 477 bp, Zea Mays
tcggcggtggttcgggctacggatccggactgtgtgatggaggagcgggaagatcccgagcggacggagtccccggagcagcgcaaggccaagaagggggtaaacctccgcaagagcttggcttgggacagcgaattttttaccagtgaaggttcatcttcgcttttgttttttcctggtccccacccatgtgaaactctatctgttttctggaattattgcctctcgttatacactctggtaaaccttaattatgcagattgatcgcaactcttaatctttcctggtctatgcaggggttctcgacactgaggaattagccattgtaaacagcacctatcgtaaggcccaaggttccaggctgcctggaatcattgaggaaacgaggagatcaggggagtcaacaacctcaactctggaaagtgaaacctgggcgatggaaagccttgagactgaactatttgataatgtccgtgc

SEQ ID NO: 183888 - DNA, 432 bp, Zea Mays
cccatggatggttggttggtttcagtgcgtggctacctgcgacttgccaacaatgaggagaagtcagaagactccacacacaagagtctctccgggaaagagagaaagggatggcgtttgtcatcaaggggtgaaaccctaaccctaaaagtggccaaaggcacacacagtagcagacagcgaggctggcgggagggggattggaactcacagagctgctagctgcgcgcatgtggaggcctgcaccaattcccacctcgtgtctgcaaccttgaactcctttaaacccccattggatgcactaaaaaactggcttcagatgtggccgcctccaaattccgaggtgcatgggctccctttcccaatgaaccggtgctggagtacccttttatttattagggctttgtactttggtgtctgggtctttcaagt

SEQ ID NO: 183889 - DNA, 364 bp, Zea Mays
cgcaagtacaagccaccaaaaaaaaggctaactggaaacatatacaactcccattacatatggatggaaagccatgacataccaaccaaccaaacagggtgacctgaaggacggaacaatgattccacaacttaatggacaagattgacaatcgcagaacagagacgacaccacgcgcagttaagcacacaataaccgaaatgccttggtcatttgatgcccctaactttctcagcaccagcaacaaacaaacagtaccacaagcacgcacatctggtggaatgagaggctcgaagcacgtacaaggatatgttgcggagccgaaacttaccgatcacccaaaaacagaagaaaaagacacaat

SEQ ID NO: 183890 - DNA, 453 bp, Zea Mays
ctctgttcgtcactgtggttggtacacgacctggggtttctggctctgatgtgttaaatgaggtgaggcatcgttttggtgttaagctggaggacatgaagattcatcagaccttccctaaagacttcttgttgtttctaccggatgaagacacggcagccaaggttctcaacgaaggaagacctctaaggagacccgtttcactttgatgctcaagagatggtccagatttgctcatgcatcctcatcgtcgatggccgagttggttgatgttaaattaacaggcatccctgaacatgcctggtgtcgatctacagctgaacacttgctcagggactcatattgagttgatgaattgcattcagaaactatggaaaaaagggattttccatcctttgtggtgaaagcatggtgttttgatcctgaaaaacttgttaggaaaatggatttaca

SEQ ID NO: 183891 - DNA, 535 bp, Zea Mays
agagctccaactgttttttcctctcttgctcggacgagcagtctttcgtctgagacaacctcttccatatgtagtgaccccttgctagcaccaacgacgagcttaggcgggcgagggaggcagcgcaagagcaggaggcacaatgagtagctacacatccccatggggcgcacacggtggtagcccagataggtgcagacgcgtcgatgacgctccaggcgaggacttacgcggcgacagccgagacgggcgtggatgcaccggcggtgctcctagcggcggcgaccgggtcgacggagatcgtggcctctactggcggtgtggctctccctccccggatcggtaccatcgtcactactggcgttgtcagggacatcggtcccagcggtgggtggcctaccctcaccaagaccgactacgtcgagtgggccacaacgatgaggatacggctccaggtttgccacatgtgggaagcagttcagtacgacgacgtcgactactacgagtatcgacgggcgctggatgcactcattgc

SEQ ID NO: 183892 - DNA, 403 bp, Zea Mays
tacagtcgacgatgcaaccatccttcgtaccttgggtccgaattttctaaacaacactgctgtgctgcctgcaattggatctaggggtgggattctgcttgcagcttcgaatgattttttctcactttcgcaagtgtacaccacctcacacactgtctcggccatgatcactatgaaggcggacaattcagcttggtggatcacaggggtttatgggccacagtcgagcgctgagaaacttgttttccttcaagaaataagtggcctcgcagcacaacgttggacaaagtggttggcgttaggagatttcaatctcatatatcaagcctcggataaaaataattgtaacttgaatcggcgcctcatgggcgcgttcaaatcagcactggacaacctacagatg

SEQ ID NO: 183893 - DNA, 583 bp, Zea Mays
gaggagggaagacccttggtgaagatgttggcaaactgcgagctcattgagacgtgatggacatggatgtcccgacaacaacacgctcacggacaaagtggaggtcaatgtcgacatgcttcgtgcactgatggtagatggggttgacaaagagttagatggcgcttacattgtcgtagtatactagggtactcttagcgagggagatgtgaagctcttagagaagctggtgtagccagctcgcctcagccaccccattagcaatagcctgatactcaatcttagcactggagcgtgagaccatagactgttgcatggaagaccaagagatcaggttggctccaagaaacatcgcataaccgaaggtcgatcgatgggtgtctaagcacccgacctagtcggcgttggtgtagacaatcaactcatgagtggaggaacatcgaaggtggaggccgtagtcgacagtgccccgaagataccgaaggatccgcttgaccgcacccaagtacggctcacgaagatcatgcacataaaggcaaacctagtgaacgacatatgcgatgttaggcctggtgaaggtgag

SEQ ID NO: 183894 - DNA, 305 bp, Zea Mays
atttcctttagcactttctacaatttatcaatacgaaattgacatacaaaatataatttagcatgcctgctccattttctttcttggtatctaaaatagaaattttatgaacaatttgacctttatgagttctactaaaacttgaaatttatataaactaattgtactccagttatctcgttgccgtcttttcgtaataggtttcttaaacgtatatgttcacctatttcaagagtaatttttttaccaaacatgtatacatacataggagtatatgtgaatagtgtggtatacaatacatcgac

SEQ ID NO: 183895 - DNA, 413 bp, Zea Mays
tttctaaaattgcagccatattgccagtcgtcggtaactgagaggcagaaccagaaactttcttttcggttctttggtccttatactatcagcaagcagatcaatccagtggcttatgaactggcgttaccagctggcagttctattcatcctgtctttcacgtttctcaactcaaggcggtcatcggatctcgtattccggtgagtcctgtgttacctgatttgtctcataatcttcaggtgccggttgctgtgcttgataccaggctgaggcgtcacgcggggaaggtccagaaccaattgctgattcaatggagcggatggcatccgacattagccacctgggaggaagaaagcgacatcaagcggcgttttccattcgcaccagcttggggacaagctggcatttcagg

SEQ ID NO: 183896 - DNA, 824 bp, Zea Mays
gcttcaggttgcctgggtaagaacataaaattgatcgagtcatggaaaagtttgatgaacgatactacaaatgcaatccaagctcctttaccagtgcggaaactacatatgttcttgcttattctgtaatcatgctcaacactgatgctcacaatactatggtcaaaggataaggtaagcaaataataacaaacatctttgattcaagattagttaatttatgagattttcaacgtacaaatgtctaaatctaacttcatttaccagttagatttgttaacgggaaaaaggctgatgacagggtagttggagcaaatgacatgctcataaaaacataaaagacaaatttaaactaaagagtgaaaagtcggagtaacaataacacaaaccatttaccagttagcttcattaatggggaaaaggctgatcacagggtagttggagcaaatgacatgctcataaaaacatacaagacaaatttaaactaaagcgtgaaaagtcggagtaagaataacacacaccattgttatacagtagtttcgtatctgctgatgctttggatgtagctcaagctttggccttatgaaggtctgtgttttctgttatcactgatacaacaattttaagattcatgatggaggtttgttgggcccctatgatggttgcattcaacatgacacttgatcagagtgataaggcggccacatcataatgtttgcaaggattcaaatttgttatgttggttacctctatcatgtgcatgtagacacagagagatgcctttgtgacatctgtagccaaattcacatatctgtagaatacac

SEQ ID NO: 183897 - DNA, 620 bp, Zea Mays
aagattgggagacttcagacatataccttcagacgaggtgctcatctccagtccctgtgtgtctgcgccgccagtgtagagagaagggtgttggagggagagagaagggtgaagggagccaccaatcctagaagaaaagcagttgtcctgggctcctggcctccaggtacatgtaactgtctgcaggtattccagggaagacgaagagacggggggatctaggggggctagctatattaattatgggccattcaaacagactgttggactactctgaccctgattaattatcgcaactgatcgctaaccagacaattaattgttccatatcgtcgactaatcggacgatatggataatcagcttacctgatcgaatcgaacaccttgatcgagctaagagtaccgatcagcccgactaatcgcgattagtcggacgatctgaaaacaatgggtggctctcttattgcttggaatactaaggagacataagtttctcgttcgagtacaacggccgagttgagtgatatggctcttgtgttggcagaaataacttgtttacggtggttggcctagtgccctcatattgattatgaatgttattcataatacaatccaccact

SEQ ID NO: 183898 - DNA, 1140 bp, Zea Mays
gtcaaactggtggaaagcacttggtggtcttcttatagcacatggtactaatgttgacctctctattcattctattattcttgtaagttgtgtgaagcaacacctcttttaaaatatcgattctcctccgcacagacaattctattgctgtcttttccctggcaaaagaagaaagtattacagaaagatttcatttgaatgcaagcaaaggtgtattatgtatgcacttaattttttgcatcgtagaagatattcacaacagatatgaccataataagtacactgaattatactcttaaggaagtgtgttctcatgtacatcttcacctgttgagtgcaagcttcacatcgacatcttaaaaccgtagtattccaaaaccatggttttgaaatactttgcttccaaacacgccctattgttttcaggccttgtaacctgtaaagcctagaaagtatactctgttttcaaggcttaacatctttctatcaacctaaacagtaagcgcattcatgaacatctcaggtattgacttcacaccttccttaaaattttgtttgaatgtaaaccgggtatattcttaaatgaaatacactggttagaccgttgaagttgtcactaatccaagtttgaaggctggcacaaacttcattaagaacaaaatcacaggaatgtttcttctccttgttaagttttttttgtttattttgtccttgatatgtggctatgccaagctatccgcattaggttttaggacaacaaaatgcttttgccaccttaaattgtgctataatttatttattttcttttatctacacgcagattatttgaaggagactgttcgtgatacatttagatttgtcaggtgctgtgttgcggttccttatgaattttgtactcattgtatttattccctttttgtagccctttgctaagcttagtcttgaagtaaactttgcagaaatgcttaaggacaaccgcccctaacccgcgtctatatattcagtgtcagtccaaaaggggtcaagtttctctctactgctgataaaatagatggagcaccactggtatttcagctgactgcagagatgattgaactagaggagcacggtagttcacatcataaagaaggtggtttgaat

SEQ ID NO: 183899 - DNA, 756 bp, Zea Mays
atttatgaggatcttatttacgtaaagaagaagatgttaacgctgacaccattcaataacattgttggtgcatcatccacatggatgcatatgcattccacaaataaggttgaaggtgcgcattatttgcaatttggaactatatactctgtgcaagctgaaaagatggaaaaaatcgagacttctcagaatagcaaaagaagcatgtgtgaggaaacttgtgctagttccaacaatatggatattagggacaatagctattcaaatcaaacaagacacatgcctaacgagctatttactatctcaaatgaagaagctagcagtacacatgattgtgaaagttctcggcacaatactgaatgcaatctagaaaaaaatcaagaagattctaattttttagcttgcccagtacatgaaatggaaattgccaaagaggtgaggataatgccagggagtcaggttttcagtaaggcgtgcacagatgctcagcttgacaaatcaaagcacatgtcttgtctggtgggtgatgctgttgttcttaattcagcaaatgcagatgaaagtgcttgtagggaggacgtgtgtctgcagctttctctagacaagtgttcacaagagctccaaccaacttttcagcatcgatttgatggtgctgttaccataaacaggcatgctgtggcaggagcattagctgggacagcagtcagtgtttctttgcatccaattgatactgtgaaaacgataattcaggctaac

SEQ ID NO: 183900 - DNA, 485 bp, Zea Mays
tggagagtgcgccggagacaacacttggtggttggaccagagttgaatcaaggaaggcgaagaagcgtcgccttcgtgcactgcgggcacgtcgcccggtgccaaatgacttgaaaggtcgctgtttcaattgcttcgcggataatcacctcgctgctttctgccaccttgagccaaggtgttttcgttgcaagacagttggtcatcgctcctactactgccccgggcctgtgaaagctgacaggaaggttcctgtacatcgacggctgttgagaggaacggtttggaacagactttcgacagttgagccaacgatcgctgatcgtgttccgcagtatcagttgcctcgggtcccggtctggaagagacttcagccttctgtgcccctttcatgcaagaagaaggtctgtatctggcgtagaatctcccctccaggcattgagaagggtccagcacatcacatgatgatagcagggggagtggat

SEQ ID NO: 183901 - DNA, 754 bp, Zea Mays
agagaattaagtatgtcaagcaaatagttgatattacatattaggtatttaggtttgagttgttccactcatgcttacatctttctgtatttcagatacgcaaaggaaatacttcagaaggaaatgttgcctcatgttggtgttggggaattctgtgaaactaagaaggcatactattttgggtatgttctccttgtcaagccttgtggacttgtagctggcatctgcaaaaattaaagttctgttgaaagtagcaaggttgatctaccctttattttgcaggtatattattcaccgcctactgatgtgcgctcttagtcgaagagctgaggatgaccgagatcattatggaaacaaacgactagatcttgctggtccactgcttggagggctgtttagaatggtttgcctaaatatacaagaatattaaatgttgtcaaccctttttttactggattaattgcctgatttttcttcttctgcaactatagcttttcaggaagttaacaagggacgtgagatcttatgtgcaaaaggttttctgctgtctaaactgtgaaattttctattttccccacccattcgatccttgtggttattaactcttccttttccttgatcctagtgtgtagataatggaaaggaagttaatttgcaatttgctataaaagcaaaaactattaccagtggtttgaagtactcccttgctactggaaactggggacaggctaaccaagctggaaccagagcaggg

SEQ ID NO: 183902 - DNA, 1033 bp, Zea Mays
caaagatgcacgtcttgtacacccggagccaaattgaactcatttaggatgacctagagctgtagaaattccatctacgtttgagcattactgcacctcttatatgtctgacaccaacaaccattgttcatagtgtcctgtactgtttgtatctgctgaaccttactggggatgagcttgataagagagggtgccaagaccgacaaggattgcccatggagccacctgccataccaaaacgtgctgctagcaccatctcccaccgcagttacaagcgaagcagtgaacatagcaagaccagaacatactgaaaagaaagaccaaaagcaacatgaccaaaactaccacactattgcctgtgcccctcctaaaggtctcccaataagcttcaggaggccctttgctctagctgagtaccaaaggatgcactcataagttacagcttgcaacaccgttgtaaggcttggagtagagccgttaaaaacacagttgtcctgtcccaagccaccaatattgccagtgaattgaaccccttctgtagtccattgttacctctttaactgcctggtaggctggtaccactagcttgagaatctatgggttgatggttgggctgcaatggagacaaaagcaattttctgcaacctgcaaaatggtgaactagattttccaggcgaaaacacatgaaatcaataggtgctgtgtggtcttctcttcttcatcagaaggggcaagcagctgggtgggaagtcctcttttagtgatccggtccgcatttcaagaacggttctttactgcaagccaaatggagagcttgcagcaaagaggagcccaggacttccaaattcgtttccatggagcaaagcggatggaactaaggaaaaaggtattgtaggccgactttgctagagtaagaatcgttcctagtaagcctccaaacaagctgatcagcatcattctgcttcagcgagaaaccttccatcaagtctcataagcggagatattatgtaagaacctggacagagagctcctc

SEQ ID NO: 183903 - DNA, 296 bp, Zea Mays
gggaaaagttaattttgtggagatacgttcattttggcacatattccgtagtttcgacagaatgtggatcttcttaatattgtccttacaggttagttgctcttctgtgcactttctttctgccacagttccttcaaggcttcaatacctctgttaaacattatcatcccattttgtgatggtttctgattttcatgtaggccatgataattattgcttggaatggtggaacaccaagtgatatttttgatgctggagtatttaagaaggttttgagcatatttattactgctgca

SEQ ID NO: 183904 - DNA, 307 bp, Zea Mays
aaaggattatcagattgatatggacaagcttatccaactatggatggccaatggttttatctcagatcaaaaaaaggtacctgctgaaaccgtaggtaaaaggattgtcaatgagctggtctcgaggtcatttttccagtatgaggagcgaagttggatggggtacaattctacaacttttttgaagattcatgacctcatgcatgatcttgcactgtctgtttcggaaaaggaatgtgtctgtataacaagggaattgattaaaaatagtgagttgcttccaagtgctgcccgccacatacttatt

SEQ ID NO: 183905 - DNA, 816 bp, Zea Mays
cggtgcaagtcgccggagcaacgctgttaggcttgagcacgaacgcggcgtgaccgacaagctcggtgaggtggagcacgatgagcgagacgggacctcaacgcctccagtaggtcgatcagcggcgccgatgggcatgccgccggggagcgccagccctagcatcatgggcccgatcatgtacttgaacccgatctcgtccgtcaccagcgccgcgatgacgacgacaaaggaaccctccgacaacagtgaccccgtcggcgggcgcttgtacgcgatgtactgacccgccgcgcgcgccgcgcgcgaagcccacgaagagcacgaacgccacaaatgaggccaggatctgtgtcgtgaacgccaccgacttcgcctcgcagaccaggatgacccccgctcggtgcacgcacggaggaaccatgaggtgacgtcggtgagcgcgatgcggccgaggtgggtattgaggaggtcaaggtcggagagcgcgtcagcgatcacggggaacaacgacaaggacagccggacgacgagttccgtgacgagggaggagccatgcaggtcctcgtgttgtcgtagcacgtcacatccagcggtttcactttcaccgtcggctccagcccacccgacgacaggttcgccaccgccgccattgatggttttgatgttagttagaattagatggtaagtattgggcacactagctaggcagcgtcttggatctttcttggcgttgctctgtttgtggtggctctgctcttagatgtggatgtagagggacaatagagcgccaccccctccaaagctcttcatgaa

SEQ ID NO: 183906 - DNA, 506 bp, Zea Mays
tcagttccattaccaattctaaggaggtattccgaaaaccatttatcagattgagccctcatgttcatagtcaaacgtatctttcttatgctatcccacaaataagatctctacaatgtggcatccgttatttgtgctcttgtaccacgtgtcactacaggaagcacctggcgaaaatctccaccaaatactataacctttccaccaaatggcaaagaagatgtcataatatcttatagggacctatcaaggcactcaactgcttgacgctttgtcatcgcaacttcatcccagataattagggacgctgtgcgaagtaactccgcagtgccactttgctttgtgaagttgcatgtgctattgtcagcgagtttaatagggattttgaatcttgagtgtgttgtgcgtcctccgggtaatatggacgctgctatacccgaagttgcagtagcaattgctattaatccctctgaacgtactctagcaagtagtgccttatataggaa

SEQ ID NO: 183907 - DNA, 593 bp, Zea Mays
gttctctctcctctccccaccttctctctcctctccccacgaaccgcgccaccttttctgacgccgcatcatcggcgacttcatcgccgtcgacaagacgcatcaaggcagtgcctgctactcccgcctccgcattcttgccccacggagcgtgctcctgctctcggccgccgtcctggtgctgaacagctgacacagccggagagatccgcccggcctcggatccgtttcttctcctgctggtgccttggtggtgagtgaacctagcttccttctgccggttgattcgatctaggagctccgtttgttcttgggggcatttactttgccgtggccgtggtccgtgagcaatcaaatccaaatctgtctccctttcgatttgtttgctgcggagtgcggagtgcggagggtgacgcgctgctagctcttaatctctctgcttgtttctccttcagatgctgatgcggactcgggactcctacggagagctgaggtgaccttgttgagtgtgcccttacccagcgccgcctgcctccgagccgagatctcctccgcgcaccccggcattctctctctctgtctctggtgccgac

SEQ ID NO: 183908 - DNA, 1169 bp, Zea Mays
ccgcgtcctcgacatctaccggatggccaccgtcaggttcaagggcgatctcgacctctggttccggtacctcgagttctgccgcgacaagcgacacggcaggatgaagcaggtatgccaccaccatcaacagtccaacaccagaccgattcatctttagttggttgctaagttcaaagttcacctctgtaacttgctgctgttctgctcgatttcacagatgtctcgttctggactatacactgacattctgctatgctcacaagaagatcggggaaacctgaaacctttctatgcctataatgtgctatattccagctacacatctagtacgacgtggggccacacactctaatttggccaacaagttattagccaattattacaatttgcattgcacgttcttcatttatttcttatcaagtaggaatgttcaattttgagctatgatcataaggaagacctttatttgcatacactggcaaactttgatgttgttctgtccttatgcttgtcttcttacttcaggttctggcacaagccattcgcttccatcccaaggttcctgggctttggatctatgcagcagcatgggaattcgatcagaacctgaacgttgccgcggcacgtgcactgatgcagagcggtctcaggtcttgccctcagtcagaggatatgtggatcgagtatcttcgcatggagcttacctaccttaacaagctcaaggctcgaaaggttgctcttggagaggatgtcaagacgctgcaaaagaaagacaacgatgcgagccagtggaaagaggaaaacaaggaactgttcatgccactgaatgaacaggtcaaagatcctaaggagccaggctcggctggagatgccctggaggagaaggaagacctgttttggcgtcaagggttgttaatcattcagaccatatatcatggtgccgtggaagctcttccgtcaagcttaaccttgcggaagaaattcttggagatactaaacagtgttgacttggcacattctgatgagttaaaactggaggtcctggatgaccttaagagagatttctctcatagcgaggactactgggattggtttgctaggcttcagcttagcaacttgaacagttccagtaattcgaatagaaaggatgctatatcaaacaagtt

SEQ ID NO: 183909 - DNA, 743 bp, Zea Mays
tacccaatactaggaaccaaatttcagctgcttcttcgtgtttccctcttttgcaaagctcctggatacaagctgtcatcacagcatcatttggtttcagaaatctcgcaaccatttctcttataagccttagcaccacatccagtcttccagttccgcgaagatgccatgcaaccacactattaaacaagctgcaatgaaccgtcattccagccaacaacatctcatccaatatctgctcagcatgttccatttctccttccttgcacagagccttcgcaatcaagttgtaagtcaccactgtctgctttatcccctttgagaccatttcatcaaacagcctaagcgcctctgagcaatgtccttccctacaatgccaaccgatcagctgattgtaaataacctcattgggggtgatcccaaaaccctccatctcctgcagcactgcatcaacctcaccaaaccgttggccccttgcaagaccattgatcaggatgccaaatgtgacaatgcttggtctcagcctgccttcaaccattctccccttcaactgaaaggcctcttccaccctcccactcctgcacaatgcatccattagcacgttgtaagtgacaaccgtcggctggataccagaccgttccaactccgcaagcatcacaaaagcagcatcaatctctccagccctgcagagtgccttaatcatcaccgtgtatgtgtacacatcaggagcaacagcgttgcca

SEQ ID NO: 183910 - DNA, 285 bp, Zea Mays
cgagagcgcccgcaggattcggtcggattgatgagaggggaaataggctgacagagcgggtcccacatgtaggtgacgcacgcgaagtatgggttgcacgggttgaaaggctggccagtgggcccaggttgtcggcgccccagcgtgtaggtgagaaccaggccgcgtggagggaaatgtaacatgggccagattgaggaacggtggcccagatgggatttgcttctcctttttattttcactccttcgtttctaagcttagtttgaattcaaattttgaactcg

SEQ ID NO: 183911 - DNA, 400 bp, Zea Mays
cctacactggattatattgtttgagctatatgccagtgttagaggtgtatgttgtcatgtgaggcaagagattcacccacaaagcaaagaaggcaaacacagcaaatcaggaaagtggctagattggcatcaaattgagggcaattctgggcgcaccattagcaggtgcaaatttagaagcttagtaagagtgatctggagagaattaaggggtgattgggttgcctaatggctatgtatactgtgaggtaccatgagaatatgcaagcaagaattagaaggaaaagccttccctcttgcttggccgtgggcaagaagcttagcaagagcgattgggagaaaattaaggggtgattgagctgcctaatgactgaatactgtgagctatcatgagaatagg

SEQ ID NO: 183912 - DNA, 385 bp, Zea Mays
atcggcgcgtactgtgcatcaggatcatgctcgcgtagacgccttggcccattccatggccgtatgtccctaccctctcgtacgtacgtcccatgtgcattacctccctccccccaacttggttctgccgggggcaccacgtactccgactgtgcaactctgagatcgcactctgttgatctgttccggcggtcaggcatgctggtcttcttggttccaaagatgcggcggtctagacgtccactactcctgttgctcccaaactggtcgtcctcctcttcgttctcacacccctttctcgtttgcgtctttttgggctgacgctgtcccttttcgaacctcgagtcccccaaacaaatctctctccgtctctcgctcttcacgc

SEQ ID NO: 183913 - DNA, 285 bp, Zea Mays
gtggggtcgggagccgctctccgtatgacctggaggtacgggtgcagcgccttcataccatagaagagggtacccctgattcagggtaccgacagtggcccccgggcccgcctcaggggaggatgcgagcctgtaggtgggaccagagtctgattggtggttggaccgctgctcctgcgtgcctgttgctgcaattattgccggcccgcctatggccaatccaactgctatgcctattcccacgactgactggcccgtgaccattgtacttaatgtcactgttgg

SEQ ID NO: 183914 - DNA, 392 bp, Zea Mays
gctgcagtagcacaccaattggggtcaaccaatcagctatgatagttactaggaagtggagatgtcgacatggcagagagacccttgttgcacaatgctagtctgttaccaagtcagcaccagctagaggagaggtggtggcgtggtgccctgcatgggctgtggtcaggtggcataggcgattgcaacactctagatgcgaccctccgagagggcagagatgcatgaaccgtgtgggtagcagaggctggcacacagtatcacgaagaggctgaccaaaggtgttggtcggtatggtggcagtggacagtcccaccccgtccgtagcaggcgaagagggcgaagacggatggctttgtaaaccttgccattgaatcgttgatcaacgggag

SEQ ID NO: 183915 - DNA, 394 bp, Zea Mays
atcccccagctgctctttccgtcctcgcgaggatcccccagccgttccttccatcctcgtggatccgagcgcgctcgatcggatacccttaatcgcggctaccataaacgcgctcctaccccacgaaatcgatggcgcgcgtgttgagggcgtggggaggaggtgcgcggccgccatcaacgatgtcctacccatctgctccgcgattcccgccattcttcctggttgcctatcagtttttggttccccgctgaagctcaaatctatctgaatggcttccctatgaagcatcatctggttgctcattggcatcacctttgttctgttgaaactggacatcttctatgttggttgttaacgttaagaactgttcttgttaggaactgttatcttg

SEQ ID NO: 183916 - DNA, 666 bp, Zea Mays
agcatgttatggttgctgcctcggctttgttcggagcttttgtaccatcgcaaggacacaaccatgcaaatccagccaaaaaaaggcaccatgttgtaatcagcaaccttacctcgttccaattcgatggtccctggcaaccatcccatccaagtgttgacatggatcaagcatgtgccgttaggcgttagaggagaaaacccaatgaaagtatgctttttttatcttacgtttttgtcttgcaaagtattttagatgtttttccaaagtgattgcttgagtttgactttatattctgattttttatgcaacacactccttatatggatacatcatacatatcattgtcttagaaatggatatgtatggaaacttgcactttttgtgtcatgttaataaaggtaagctcaccaactttggtaagcggtaatcatatttatgttagaattatccatacaaccctattaggccttgtaactgtagttgggctaggctcttttattgccgaccaagctacccagcgctgcatatacgtagatatgaattatatcgtatttgttagaacctcgttagggttttggcttagtcctcttgtaattacctatacacccctatgtaatgggcctggcccaactactacttggtctatttcatacaactttcaac

SEQ ID NO: 183917 - DNA, 298 bp, Zea Mays
agaaactatcccacatgactttgagcttggaggaaggaaaccccttagctccagccaaggaccacagaagagcttcctccccggccagctgaacgaccaccaccaagcttggggatgaaccattaaagaccacgccatttctatgcttccacagcatccaagcacccagagcgaccaaagagtcaaaacccttcttactcagcccatctagccgagcactattggaacaccaccagagatcaaaatcctcaatatcatgtcctggaatgaagccctgcagtccaaaagtcctgaacaa

SEQ ID NO: 183918 - DNA, 715 bp, Zea Mays
aaaagacttaaagcagtggagcacaaaggactgctcatactcatctaaggtattttttagatatgttactaatggaagctgtttttcgctataactaagaaaatcaatatcgttgttctcttttttggtttatatcatgcaaacatgttcttaataaatcataaactgtaacctaacagaatttatgcatccttttgtgaaggcattttttgagcctggccttccatctggttggaggtggacctcaccgtggaaaattgaaaggttgaattttgtagataatgatggatgggcatatgctgcagattttcaaaacttgaattggccatcatcatcctggagatcttctaaatcaccacacgacttcgtgagaagaaggcgttgggtacgttctagacagcagtcgcaagaacaaagtgcagaaattcctagaaaagtacttgctactgtcagtcctcattcatctactgcgttgccttggacatcgatgattagggatatggatttatgcttgcaagttcgcccatattctgaaaaatcagaggaatcatatagctggagccagatttgttcactaggttctgagagtatacctaaacagcagcactcttcactttctaggcaaagcaccgtaaagcagtcagtggtatcatcaaggaattctgttcttaagcttgctgaactcgagaaaaaagatgtgctctcatattgccat

SEQ ID NO: 183919 - DNA, 366 bp, Zea Mays
gtgctttactgatggggttgtatatacttgtgatgtattacaatagttgtgtgtcgtgcaagtatccacaaatggtgaaagatggtgtatgttggtaattagaaaatggtcacttcgttagccaatagccaagcttatgccgagatttaaaatatgggcaagttaaattgaaatcatgcttatctaggcgtgtggttaaataataataattttggcttgtgcagtgaggtggtgacatgccgaagtagtcatcgcttcctctatgtttctaagtcgagtcaaaatgcggggtactagtagtacgctaggcaggcggtgttccaaatagataaatcgggtgatgtggtagttgtcaagcgtgataga

SEQ ID NO: 183920 - DNA, 271 bp, Zea Mays
gtaactatctatatcatcaaacttttgaccagtacatgcattattttccatttaaggaacattttgtaaataaaatacacccttgtctatttgtcatgcgctattctcacctgttagccgctattctaacctgtatgctggtctagcatctctttctcattgcttattattctatgtgattgtggctgtgtacatgtttgacagtggtccagtttttcttctttcggattttgcttctgtttgggtgggagatgctagctcattagaaggc

SEQ ID NO: 183921 - DNA, 1055 bp, Zea Mays
tgagcgacgacggcatggcctccgctgcggtggagccgcccaagcgggagcaaaattttctagtgaaggtggggatggaggcatggacgcagtcgttcgcggttgcacacaaagtcaggttggtgcacatcctcaagaatctccacacctcggaggtgaaaatctactccgacgcgtccaaggagttcataggagtactggatggtgagtctggcggcgaggtgctgcaggagtacgtgcaacagtcaccgcagcttggggagctgctcgaggcatggcggctccaccgggagaacccggggatggcgcacatacttttgctctttgcagctgtcctgggccaccctgatggtaagctgcggcgacatggttcggttaagaagagcttggacggtgtcgctaggatgatactggaggataaggagaagatgggggatgtgtatttggagctgaatagtggtgagttccgacggcagaatgcagcactggatttgcttgctgcaattgtcaggcgtggagggggtctagcgtctgaggtcgctgagagatttgattttaagatacctattttgccgcagctggctgggacaatgaagaagaaggggagcagggatggaaggaatcggcggaagggtgccgactttgggtccacaaggcggtcgtttattgggtttgccatgtcatttttggaggttgggaatccaaggctgcttagatgggtccttcaacagaaggaggtatattcaggggtgcttcgtgggattggaaatgatgatgctgagactgtcatctatgtcctctcaactttgcgagacaatgtcctggtagatgagtctcttgtcccaccagggctcaggagtgtcctctttggaagtgtcacattggagcagctgagcttgatctcaggaaatcttgaatcaggggaagcagctgacattgctcatgaggtattggtcatggtgtgcactgatccaaaaaatggattgatgccaggatcaaatttgagaggtaatgagaaacgcttactagatctcatgaaaaagttgaaagctact

SEQ ID NO: 183922 - DNA, 775 bp, Zea Mays
tacaaatttgttttcggttgaattgttattttaataaccgaccactaaacaactaattactaattaataatttaacatgcatgaagtggcgaaatgattttactaaaacgcgcaactagcgatttgcgtgaaagacggcacgagcgaaacatacgagaaatactaaatagagagtgtgtttatactaaagaagtattatttcgaaaacattctattagacgtaattatattaacatgtatttataaagtgaatctaaactataaatgagttcaattaattgctactttaataattgtcagataaatagatgaccaattaattaacattagaaagtgcatgatgataaagtaatgttacctaatacatcgttaatatagctctacgaagctaacacaaaagaaataagtcgaaacggatttacaacacaaatatattggatatttaatggttcgcggaatctaaacgatgtggcacgcaacagcgcgcgcaaaccgcacgtgaacagtaacaatgacacatgcggatagcacaagcagtccgtgcgacaactcgcgggcagtgcacgggcaacagcgcaagacgcgaactcgcaaacgctacaaagatgcgacgacgtgcgcgaacaacacgacaagcgggaaatcattaacagatatcgtgcttagaatgaacacatattaaacaaatataaacatttaatttggcttaaatcatgttaacgtccatttacacgtgcgcaaattaaaactatacattagttttaattagatctct

SEQ ID NO: 183923 - DNA, 1133 bp, Zea Mays
cgaaaccaatgcatctgatttgctggacactgagtggccaggtcattattcacaagtttgcttggactacggcagtcagtgagagttcaattgcacttgtgattgatggttctcatgttcttgttactcctcttattttgggcctcatgccacctcccatgtctctgttccaccttgcatttccttgtgcagtgaatgaggtttcttttgtgaccaataactcgaagagccatttggctgcttatctctcaaatggcagcctgtctgttgtggaacttccagcacctgatacctgggaagaatttgaaggcaatgggataagtgttgatccttgctgttctgacttcactttgaataactgtatgcacctcacttggatagatacacgcaccttgatcggtatctgttgctatagtgaacacctctcttcaacaaaaatcaggtccagtgaagccagtaaccttgtagataaacatgattcgctgtttttcatccatgagattgaacttaaatgttcagagagttctgtgccaggttcagtgtgttcatctggttggcatgctagagtatcaaagaaagtgcagttggagagttcagtcattggagtctctccaaacccagcaaaaagaggttcagccttcattcaagttagtggtggaaagattattgagtactgctcaagtttaaatctgttgaatatgtgtccaccagcacaattcagtggcattggttctgacctttgttttccagcatcatgtccttggatgactgcagttctgtgctatgaaaatggtatgacagaaccgcttctctttggacttgatgaaagcggcaagctttatatgggcaaaaggttattgagcaacaactgcagcagcttcacattatactccagtgtttatggagccactgagccagttatgagccacttgcttgtgactactaagcaagatcttctattcattgtggatgtcaatgaggtcttacttaaagacatcgaggtcacaattgatggccttgtcagtagtcctgctcgcggtaagcaaaacaaagagtacatcactgtgtgggaaaagggagcgaagttggttggtgttctccatggtgatgaagcagctgtcataatgcaaaca

SEQ ID NO: 183924 - DNA, 820 bp, Zea Mays
gtctcgtggaacaccatgctcacggcgtacgtgcacgcgggcgacaccgacacggccgcgtccctcttcggcacgatgccggacccagacgtcgtgtcctggaacacgctgatctcgggctactgccagcacggcatgttccggaactcggtgggcctgtctatggagatgtctcgccgtggtgttgccctcgacaggacgacgctcgctgtcctgctcaagtcatgcggtggcttggacgacctggcgcttggtgttcagatccatgcgctggcggtgaagacgggcctggagacggatgtccgggccggtagcgctctcgtcgacatgtatggcaagtgcaggagcttggatgacgcgctgcgcttctttcatggaatgggtgagaggaattcggtctcgtggggtgcggcgatcgctgggtgtgttcagaacgagcagtacacacgggggatggagctgttcgtgcagatgcagaggttggggcttggagtcagccagccggcttatgccagtgcctttagatcctgtgcagcaatgccatgtctgagcaccgctaggcagttgcatgcgcatgccatcaagaatgtttttagctctgaccgtgttgttgggacagcaattgtggacgtgtatgcgaaggctggtaacttggttgatgcaagaagggcattcattggtttgcctcaccataatgtggagacatgcaatgccatgatggttgggcttgtgcgcacagggctaggagctgaggccatgcaactgtttcagttcatgaccaggtctggtgttgggtttgatgtaattagcttatcaggtg

SEQ ID NO: 183925 - DNA, 359 bp, Zea Mays
ggcgtgtcctcccctagtcgtggattcatcaagcacggttgcatctgctgccagcgcgaactcgttcacgagcatcttccccctctgcggactccttcaggcgcatcctcgccttagctgccagcgcgaactccttcacgagcattgttcctgctactcgtcggtggcgtcttctcccagtgtctgcaactgttgagggcttctgctgcttctttgggacagagaatcaggtttgagacaaggatcgggccatctcttcactagttctggttggttacttctaccgctgctactgttgttgcgtggtttaccttttcgtgcttgtcttatttacatcctttgtacgtcacgcatcaatc

SEQ ID NO: 183926 - DNA, 488 bp, Zea Mays
cgcggttagagcgagaggcgggaagaggtggaggaggccgggtgcggacagttctgccaaagtggccttaggcgagtcgtgactgcgtctgctactcgagcttggcctcggatgagtcgtgattgtgtctgctgcccgggcttggcctcggatgagtcgtgactgcctgtcccgctcgggcttggcctcagacgagtcgtgattatgtctctcgctcgagggtgtcctcaggcgagtcgtgactgcgtctcccaccgggcttggccttgggcgattcttgacagcctctcccgcccgagagtggtctcgagcgagtcatgactgtgtatcccaccggaggatggcctcgggcgagttgtgactacttgtcttgccggaggttggccttgggccagtcgtgactgtctatcccactcgtagatggcctcgagcgagtcattactgcctgtcccgcccgcggatggcctcaggcgagttgtgactatctg

SEQ ID NO: 183927 - DNA, 555 bp, Zea Mays
ttgtggtctctccatgaaacggctcacaaaacccaccgcaaacataatgtctggcctgttatgaaccagatagcgcagacttactaccacacttttgtacatcgtcgcattgacctctagtgttgcctcttcgttgaaagcttcagtctggcctccattgacgtgtggcatcggttacaatcccacatgttggacttctccaacaacttgcggatgtacgccacttgccttaacatgatggaggtgtgtccttgcttgacctccatcccaagatagaaagataagagaccaaggtcactcatccgaagcagacgacgcatctcctccttgaatgcatcgacatccactagccttgctccaatgatgattaggtcgtcgacatagacccagaccagcacacgcaatgttgtggcgcccttagtgtacatcccatgctcgctaaagcacttgatgaagccgagtttgcgtaggttgttgtccagctttgcgtttcacgcccgtggtgcttagggaagtttgtacaacgccttatttagccatagaaccttcgctttg

SEQ ID NO: 183928 - DNA, 386 bp, Zea Mays
ctttctttggacagatcactctgcttcccttctcccttaaatcctaacatggtctgtttgttaatgaatggctgacgctaccccttaacttttgcctgctccaaaatatcatactgagtctgggctaacacaatagcacgatcaacagcagtaggcaactacattctgaccacactttggatatcatatttcagtcctcgaacaaaatgagtcataaaaaaatctcatcgaacaatggattgtgtacggctacaccatatcgaatccgatcaaaatccttgatatactgatccagagtatcagtttgtctcaactccaacagttttcttagagcatttggatacgcttccgccccaaacttcgtcaccactgttgcagaaaattcc

SEQ ID NO: 183929 - DNA, 291 bp, Zea Mays
ctggagctgaaatagtgccacggtcacgaagatgatacccctgattaaaagcaacatgagagtcatcattgttagtacaagtatcaacaacaagatcatcatcaggattggccgtgggagtagagcgaggacgacgaatgtaagtctgagtaacaagtggtttggaagagtaagactgagatggtgtggaagtggaaggtggtgtgatgggaataagaacatctggggtagaaacagtaggtggtaatactaatgaagtttcagaaatgggaggaaggctcatgaaggagg

SEQ ID NO: 183930 - DNA, 580 bp, Zea Mays
aattaatttagcaagggctgaaggtcgcctcttcaataaactcaagtggccaaatgatcccaaattggtattttctaagtgctgaatgcacatttttctattgtgtctttattttcttggtagcctgcatttttctttagtcattagtctgatctgttcttttgtaatctgcccagaaagacttgatcaagagattgtattcacttctgacaattaaagaatctgctgcaactgtccctaaaaatttagaagccaggcgaagacttcagttctttacgaactcactgttcatggaaatgcctgttgcacggcctgtttcggaaatggtctcctttaggtggggctcctttagtctatttgcttgttcattttgttgtggacttgccacttctcttttggttgcaatttgattattttgttctgtgcatttttcccctggtttggctgttcaattatactattttcttacattctgtgtcttcattttttgttatgcagtgtgtttactccatattactctgagattgttctctacagcatggctgaacttcagaagaaaaacgaagacggtataactaca

SEQ ID NO: 183931 - DNA, 464 bp, Zea Mays
aggtcgcgtcgtcggaccatgcgaacccctccttgaggagggccgtgaggggtgctgtagtggcgccatagttgtggacgaacttacggtagtagcccgccaaaccgaggaatccacgcacggtctgtgctgaccgtggttgaggccagtcgtggatggcctggacctttgcagggtccatagcgacgccctccgccgagatgacgtggcccaggtaggcgacggagtcgacgccaaatgagcactagtacctcttcacaaagaggcggtgctggcgcagggtgtcgaggacggcgcggagatgcctcaggtggttcgcccaagagttattatctatcaaaatgttgtcaaagaaggcaagcacaaactggtgaaggtaggggcgcaatacgtcgttcattagagcctagaattttgctggggcgttgcacagcccgaacgacatcaccaggaacttgtagagg

SEQ ID NO: 183932 - DNA, 275 bp, Zea Mays
atttataagacccaagggcggtggcccgtgaatttgagatggcgcggtggcggccggagagaggggagagcactggcacaaggaattggtggctttcaccatggtgaggtcaccggtgaccaacggagatgtgtaatacgagttactccgatgtggtagagcacctaggcacgtggcgcgctgtcgataggcggccaactccgacgagcttatctgaactgaccgtgagtcaggcggacacggcggccggggctgaacagtggcctaagttcatc

SEQ ID NO: 183933 - DNA, 457 bp, Zea Mays
gtgtctggttttaatttggggagggagggcaggcagaactaagcagcattcttttcgagtttcggcgaagtggttggcgtcattgctgctgcgggtgattgtgacaggccactgtgggacttcggctcggcatcaatctggagccgaaaggaaccaaatgaatgatggcatttactagtagctagtagtatgctgggtgtcctcttcggtccgacattgcgaggaatagaggtccactattagatctcgacgctgttgggttgtgacttggtatgagcagttttaccagcctctcgccttgactgtttcacacactttacaagttacaagcacttccagatgaaacatagtgcactataacatgatgtaaatgcagtagtacaacattacagctgactagcaaggatgaacttgctgtcaagacatgactaatttgattggagtcctggtttgtcgc

SEQ ID NO: 183934 - DNA, 468 bp, Zea Mays
cctcgatccccaaactcttccctaccgcagctcccacacggccacccactcctcgtgggccacggtgcatcacccccgtcctcgcctatggtgcacgtcggaggctcaaaggtcgacgtcacgccgctcgcagagctccacgcattcctagggagcgctacaccgagtcgttgcccaggtcggaagatcgtcgccttggccccacctaagatccgcgtcgggctcgacgctacgccgcgccgccagctccagcgacccgccagctctacgccccatcaggtagtcacgtgaactgaatcgatgatgttgctcatcagttgtcatgaaatgtgatgttgcttaccagtttttcatggtattatttagtctacaataacatatccaccgggtacccgatgggcatgggtacaggtacaattcctcgcttgattgacttggtgggtatggatatttgtagaagtctcgggt

SEQ ID NO: 183935 - DNA, 338 bp, Zea Mays
ggcagcgtcacagtctgatgaaggtcgattgggacaacacgtggacaatgatttcctacaacagttccactagaagtttacaaggcatactgtcctcgttctctataggaacagttgccgcacttctcttgatttcagaagaacaccaagggaagagctctgtggatcagctgcaagctattgaagaattttgtgatcgcctggctgaggaagcgcagatagaggtggtgcccgagctttctaaatatctattgatggtgatctctgctacggcctggactgattatgatgcagtgactaccctttgccccaaggaccaacttccacaacatgaactc

SEQ ID NO: 183936 - DNA, 578 bp, Zea Mays
gaaaaacggaggcgtgctgtgcaattctcaaaggctggcctggatgttcctgaagaactctcactgttcaagaaaagcggtggtacgaaagttcctgaaaacagtgatgttggggagcaagtttccccattaaagtttgttgagccagcaccaattgtggattctggtagagaatgtaataacaaaatgaaggatctagtgaaagctattgaatgccaaccgattatgggttttggagctggcattccagagccagaaactgaagagcctagtgatgatgctcatatgttgacaaatcagaaaattcagttgtcaattccaagttgttctggagcagaattagatttgcaggtcatcaatctgatccgaactatatacttatctcattttctgcatgctcatcaatgtttagattattcaaaagaatgctagttccgcctatccgtagtcctttcctgatgctagatcagaacctgctatacttattttaatataatccattgatcgtagttattctttttttggtagggtaaagaactaggacaagggcagcattctgtacaggagtgcataaatcc

SEQ ID NO: 183937 - DNA, 361 bp, Zea Mays
ctgaaccgggtgttgtttggcagcaggaacagctgaagaggcgtcttgttcatgcagcaggaacaacatctttcagcacgaatgatgtcttcttgtagcggggacgacgttgtgtggaagcagcaacaggggtcttgttctaggcagcaagaacaacatcgtgtggaagcagaaactggccatcgcctggtctagcacctgcgtccagccgccggccggagaagaagaagccgccggagatggtcgaaatcgtcggctagagatggaggaaaggatggtcggagatggtgggaaggagtcaggcggatggacggcggatggcagatgggcaaaccctaactaactgtcgcctgtattcgtg

SEQ ID NO: 183938 - DNA, 565 bp, Zea Mays
ctcttcatttttataaggtaatctggaaaaatacaaggacaaacacttttgcttgtaccttggtcccgaagatggcgaaatgggacagtgcaatggtcctgaagcttttgcaaacttttttggtctacttgactcccttccgcataatggaagcaaaccaaatggttcacactcctttggcaacacgatcgatttcaggtacctttccatttctcaaggaacattttgaatacatgttttgagggaaaagttctgtgtagttaatatgtttcgaattggataaccttttgttccttcttttatcatgaatccatgatgtaagcatacctgattatcacctatccgtggtctgtttggtagagctctagcttcagttaaaacaactctagttgtggcttttctgtcgaaacaactttttctaacttcagcttcactagctagaaaaacgtttgctaaaacaacttcaacttctcctagaccttggaaagggtaaaaagtccataatgctgaagagagcatgtgttggttgtctgcttgcacgatctcatcaatcctgcacagctgg

SEQ ID NO: 183939 - DNA, 394 bp, Zea Mays
gaatatttagctcatcagggacagctgaaatttcactaaatacgaggcacagaaccttgatgccactaaacaaagaataatgacataacatggccactacaacaaaacgagtaacctgacatctcagttttcacaacctacacattgtaaggccatgaacattggtggaattgaggcaagtagtacttgttggtgactctcaaggtgtgatgttgaatgaaattgttgtttttatattttcttacctccacttgttgtttgataccctgatgtctcccatgccatgctctatctcttctcgttatttgatgttttatcgcaacaattatttcctatcaattaattttaagcaatgatctaagatgttctgaccgaaccggatgcttcctccaca

SEQ ID NO: 183940 - DNA, 890 bp, Zea Mays
attgtcatccctcccccaacttgctcgggactaagaggctttgttgttgttgacttcgacacaactaccagtgttattaaaaaggcgcttaagtgctaaagcgctactgaggtggtaaagcgttgtaacgtttcacgaatcgacgtaaagcgctcgttttaagcgctaaagcgccactttttagcgttaaaacgctctagaccgtaaaaaggccacgttttgtcgcttttcagatttccaacccagccaatttctcctaacctaaaacaatgacgtccttctccaaacgtcacggacgcgccccagccatcacggaccacgagtttgctccgtcctcaagcgtccctgggcttcgctgcctccctcccctcctccctgcgttgctccctgcgttggccatgctcgcttcttgtcctgctcaggctcggcgtcgccgctacctccctatgctgctcggcgctcgccaccatcgctccgtatctggctaacagccctgctcagcgctcgtgctcgccactccagtgctctagcttgttgtctctgctcgttgtccctttgccgttcacgctcgccactgcctccctttgcttcccctgcccctgctctcatccttctccccttcccgattgatctgctcacattctcctctgattttggttatgatgatgaagcaacaaacaatagtgttggctatgatgatgagcaagacaaagtcaagaatgatggtggtatagatgatttggatgatggttattgagatatgatagagggagattgaataacgcttgtgtgcttgcaattgtggacattgtattctactttagttgcttttgtgctatgtttgtgcctttgtggttgtggacattgcatttcactttagttgtttttgt

SEQ ID NO: 183941 - DNA, 414 bp, Zea Mays
ctgctcctttgcgcgtcatttctggtttgagttgctcaggccttttggtttgcaggacttccttccaggacaagatatagatgattttgatcactggtggtgtttcaatagtgctcggttgggtggactgagtaagaagggctttgactccttggttgctttaggcgcttggatgttgtggaagcatagaaatggtgttgtcttcaatggttcccagccaaacttggtggtggccattcggctggccagggaggaagctttcttgtggtctttggctggggctaagggtttttcttacctcctagctcaacgtcgggtggtttagttttttctgttttagtgttggggtgtctgtcagctgacaaacgctctgtccctgcccctgctccagatgttgtttctggctaggtgggg

SEQ ID NO: 183942 - DNA, 603 bp, Zea Mays
gtaagtggttgaacattaaaaaaatcagtttaatgtcataaaatgcattatgtaatatgtatgttatcatactgacatgaggagttggggtctggtcaaaaactggcccactgtcattgtgttccatttcctctgttgccatttcacctctctacacaaaggtatataattagtataattgtgtagtatgtatagtaaaatggaattataacatgagacatgaactgctaacaaacattttttccggtgtcacgtcaaatttcggcaagcgggtgcaagctgatgtggtttgaggtgtgatatttgtgttcctcaaaatgatgtttcgaacatcaaaacagaaatcctgttgacaaaaaagtgtggttcgtatactgctaaaaagtagtatgcatacaatgtacgtatgatgagtaaaaatggtattggagttggacaaattacctgttgatctgtaaccacatccgattcgtcgggacatgtctcaagcactctacggatatgctgttgtctttcatgaatttcttcaaactgagtaccacccagctgggtctcgagctgcgaagctgggaatggcatatcgggtgtgactgggtggcatga

SEQ ID NO: 183943 - DNA, 343 bp, Zea Mays
gatccaaactggaaaagggaaaaataaaagaaaactaaagaaaaatgaacccaaacctggcttccttactgctcagcccaacaaaccaacaccagcccagtacatcacgcccgccaacctgcacctcgcgcacgcgctcagccttccacgtgcgttcacctcccaccgcttacatgagggtctcgcccgtcagcttctcaaggccatacgcgtgcaaactcccacagacgcgcgcccctgtgtgggtggtcatccacaaatcgctacgactaccgcatgggccgacacagtagtcacctaccatatatgtgcatcgttgactcgtgggaccaccttagcaggc

SEQ ID NO: 183944 - DNA, 299 bp, Zea Mays
accatcgacgtttccactctggccctatttgcttgctgcagcatcccttccgcatcatcgccaccgagaagctccccgaccttatcttctatgcccgatacatatgatatgtatgcacgaagcattaattaacgctcgtctgacatgcagtttgctccaccctaaacaacatggagattctgctcgtcggtggggagatcatggtggagggccacagccccaccgctgctgccattgacgacaccaagcttcgatgtcgcgtgcgctcctttaccaggcctaccgcagggaacatcttc

SEQ ID NO: 183945 - DNA, 492 bp, Zea Mays
agaggcaaagaggaacaagttctgcccacaaagacagcaactagcgttgcagtcgaggcggaagatgatgatccagaggagccaccaggatttggtttcaacaatacacagcgtaatgatattggagcaacaaagccacagatgagtttggaaaatggtaatgaagggaagccaaatggaggcgagccagctactatcagcaatccaggggatgaggaggaagatcctgaagtgccccctggatttggttaatggaattcactaacttcagtggaatgcagctgtttctttcttagcaatatatacaagaagggaaatgtttaatcttctgttgacaggaagagtaatgcaagctcatgtctgcgacagttgaaacccgtgtaatgatggttacttctatccagccccaggataccctttctgtgatagtggcaaatatgttgggtgctaacagtctgacaacgagttccaggcacgaagttttcgaagaag

SEQ ID NO: 183946 - DNA, 457 bp, Zea Mays
acggaactcaaccgtgagaaaagatgcaaaggaggatgcaccaaaggtttgtttctgagttttgatttggcagttgtgaaattagtacttgtagatattagggatcttactttttattgcgtgtagagttctcccaaacttgctgctggatcttcaagggttgggcaacggacttcattgccacaggctaatgattcatcaaagtcatccaacagcaaaatatcatcggataaaaaatctggaagttttcttctgccaatctcctctaaagaaaatgggttatattgtgatgtatgcatgcgaactgaaacattgctgaaccgaatatttgtctgctacagatgcaaggtgatatagatttatttaacttctcgtgtcttatactatgtgttcttaacttggacttctttaacaggctgctgtgcacataaattgctacagaaatttggagaattct

SEQ ID NO: 183947 - DNA, 1796 bp, Zea Mays
cttctgaatgcattgaataagcaagttaggcatttcactggtttgggaaatacccctatgacttacaacattaggcctgtcattgaagaaattcaaaggtctgcggaggatagtggtgacagacgaactttgaagatgtgcttggggatgctaaagtccatgagaaatcgctctgatcagaactttgttgcttatagaaaggtatcccttcagcaacctattaactcagggtcatttcttgtgtctttttgacacgtttggtgcatcttttccagggtcttggtgttgtttgcaacaaaaaaggtggatttggtgtagatgactttgttgttgaattctttggggaggtatgccttagtttttaatattcatccattctactcctagatcgagtggcagtagtatagccatgaatatgttgatttataaactttgcaggtctacccttcttggagatggtatgaaaagcaagatggtattaaacatatacaaaataacagtgaagatcaagctcctgagttttacaacattatgttagaaaggccaaaggttgtgttcagtctctgattttaatgagatgtaacttgtaactggtcatttcaattcatggtctttttatcctattaacattttagttctgtcatgatggaagggagaccgacatggatatgacttggtttttgttgatgcgatgcacaaggccaactacgcgagtagaatctgccactcctgcaaccctaactgcgaagcaaagtaagctccttttaaggttcaggttccaaccttgtgaatgttaactgtttcattgcttctgtggttatataatatcattctttgattattggtcagaatttatgtgtatgatgtgcatgaggtatttttttggagggagtaaccctcctctgtgtactacgtaataactatgtattaatgaaatgacacacaactcttctgtgttgttcaagaaaaaaaagaatttatacgtatgattatgcaaaagctgacatgagagctatgtaagcttgtctgttaacaattgtcgatagatgtaacattcagctttacttacaaaatttgctctgctctgttgttcctctaataaatccttttttgtggaattttgctgttggttgttagattattatgtactctttcaagatacttggcattccttaataatatttactatatttcgtcgatctggaaatcagtatgtctgagcattgagcaatataatgtagctagtctattttgcccccctttttttcttcttaatataatgaatgcgcagttctcaagaaaaaaataatgtagctgttctcacatatccagcttcatttaatggagtgcggtggtattcaacttgggatttacttatcaagttgctttgacaaacttcagtacacgtttgcttggttatggttatgcatttctatgctaattaaattgatactcaaccattgataatttgaatatatgtatgtgctaccatgtttgcatgtctcaaaatgcttggacttttttttctcttcctaaggctaatgtcgagtaatttatgctcctttattaaaaaaacagagtgacagcagtggatggtaaataccagattggagtttacacacttcgaccaattgcagaaggcgaggaaatcacttttgattacaattctgtaactgaggtgagcacatttcttgttcctttatgaaattatgtattacattgcaacgtttgatgtctgcatacttattttgctagagcaaagaagaacatgaagcatcagtctgcctctgtggaag

SEQ ID NO: 183948 - DNA, 393 bp, Zea Mays
cctgatggctgtgcccctgattcgcacgtctacagcataatggtgcacgggttatgtggggcaggacgagctggagaggcggttgcgctgctcacagacgcaatggggaagggatttgtgccgaatgttgctgtatacaatgctttgatcgatggctactgcagtactggggacttggagctcgcaattgacatcttcaaggggatgcagagtaaagggtgcttgccgaacgtccgcacatatactcagctgatatgtgggttttgcaagtcggggaaagtagagagggccatggtactatacagtcggatgattgaggcaggtttagctccaaatgtggtgacatacacaaccttaatccagggacagtgcagcgaggggcacttggaacat

SEQ ID NO: 183949 - DNA, 294 bp, Zea Mays
taatcttcaggagaacgaggcatagtattttattataaattcaaaagggtggttaagttggcatgggagcaatattattttactcaaaattccgaaaggatttgatatatttccccccattattgtgctctcaataatcttaaagagaacagggaggcatattattttattcaaaattcaaaaaggtggttaaattggcacgagaggaacagtattttactcaattaaaaaagggtgattaggtttgtgccttccaaatataaattacagtttcagtgatatagctgagttgat

SEQ ID NO: 183950 - DNA, 498 bp, Zea Mays
gtaggtcctactggtcgagcttcagctggcagtgtattggacgtggggggcaagaaaaatcatggttcagttgcgcccggtacaaaaccagcaccgagatggtgtccacctgggttaagtcgtacgcaaaagcgtcgtgtccagcggttgaggactatggaaatgacagaaaagatggaagaggaggaacgtgacagatggtttaacgaggataggccaatggttatccctaagaaaacatggagggagaaacgattggccagggaggaaaaagatgatgacaacagcagtggttccgataaagaagaaagcactgaagcacaaggggacatggatataaacatggtgtttgttttacctactgagttcagagcaggagagggagatgtggctgagctaacattgggggctgagcgtgctgtgtttgaaaaaacaagtgagcagggatctcatctaaaaccattatatgttcgtggtcacattgatgggaggccaatg

SEQ ID NO: 183951 - DNA, 997 bp, Zea Mays
cccacgagatgggaacccctcattgttggttcaaggttgctgtttttaaggctatgttaatctgtttgttttcatatgaactgttatctggattgtaactttgttgtgttttacttttacattaataagatgatggaggggggatggatcctgaggcactgagacgttgcatgagcttcggattttcagataaacagtctgatgctttcattgggcaatgtatggtcttgggtatccttccttgtagtttcttgtgaatcagttgtcttgagcccctgaccgttgaatttatattgtttcttggatcagatggcaatggtttcaagactagtacgatgcggcttggagcagatgtgattgtttttacacaaaaccaaaataactggtacttaacctttgcattcatccttggtacttttattttttgacattgaactacaaacaagcatcctgtgatgctacctttatctttgctaatataaggggctcttggtaaacttgactaacatatttcctttttcaatagtacatactataaagttctaaggaataaaagtgaaacaagtagagatgttgattgatagcagtttgaagcaagcatatgtgcttttgaaatgcttcctttttctcgttcctatttgagtagaaatgattcaattataaccctgattcttgtgaaatgacggtgtacattgtttttcagttttgtgtacagggaaacaggcatcactagaaactaaaatgatagcaatgtgttccatatgtcatttagtgcatgttgctctactacattcctgttgatctgttatgtcatttaaaattggatgaaattgcttgattcctctttagctctactaaaatgtctctccacctaacccatgtgtctactgaagtaaaagatttttgtttcctgtagggtgccaactagaagtatcggccttctttcttacacatttttgatggaaacaggttgcgatgatgtgctggtgccaacggt

SEQ ID NO: 183952 - DNA, 295 bp, Zea Mays
tgaccactttgctcaactccttgatgtccttaaattggtttgtgcactggctgcccatcgaaaatttgctgcactctttgttgatcgtggtggtattcagaaaatcgtctctatgcctagagttacccagacatatatgggtctttctgcctgcttattcacttttgggtctcttcaggtagacacaaccatacttgttcgtgcaatcttaaagataatctgctgctacttttttctaccatgctaatcttctgatatgcttgcagtctaccattgaacgtgtttgtgcgctttc

SEQ ID NO: 183953 - DNA, 809 bp, Zea Mays
cgcgggctctgcgacgccgcggagctcgacggggcgttggagctgctgggcgagatgtgcgggagtggtgttcatcccaacgtgatcgtgtacagctgcttgcttcgtgggtactgcaggtccggcaggtggcaggatgtaagcaaggtgttcgaagaaatgtcccgcctaggagtcgaaccggatgtgatcatgttcactggtttcatcgacgacttgtgtaaaaagggaaggataggtaaggctgtaaaggtgaaggacataatggtgcagcgggggctggagccaaacgtagtgacatacaatgtgctcatcaattgcctgtgcaaggaaggatcggtaagggaggcactggcattgaggaatgagatggatgacaagggtgtggcaccggatgttgtgacatacaataccctgatcgcagggctttctggtgtgcttgagatggatggggcaatgggtttgcttgaggagatgattcaaggagatactctagttgagcccgacgtggtgactttcaactcagttatacatggactatgtaagatcggtcggatgagacaggcaatcagtgttcgtgagatgatggccgagagagggtgcatgtgtaacttggtgacatataattatctgattggtggattccttagggttcacaaggttaatatggctatgaatctaatgagtgaactgatcagttctggattggaacctgattcattcacctatagcatattgataaatggcttcagcaagttgtgggaagttgaccgtgcggagatgttcttgcgtacaatgacacaacgtgg

SEQ ID NO: 183954 - DNA, 543 bp, Zea Mays
ggcaaccaatcagccccagagccacagccgtgtgaatcgtcagagaatttgcatgctgaactgaccttagtggccagctatagtttaatagttttgtaatagaaaaaagcacgttattttgctgctcttttgtgggaggagaacagcaaaaggccgttggtctttgatgatgttccatttaccgagctagcagtagcagctgacttctgcgtgcgtttcactttcacggaaccgagcgccacgtttctatcacggcgcagctttcagttatcgtttccttaactggacaggtgggtgcatttgccaacaggcgcagatggacccacgtgtccccatgcctcttctggtgggccctgagataggcccattaaatttgggccgatgggaggagacagcagctcagcatgggcatcaactctggtggtcctgctactgccaccctctgtttccttctctcttaccctagacagcagaccaccacgggctgtgttgcctgccctgcaaacaatctttttcgctttgttggcttgctgcagagttggt

SEQ ID NO: 183955 - DNA, 463 bp, Zea Mays
ccgcgacccgtcaaggcgtgaagccgtgaacccacccggagccgcgccacgtcttctccccctcctgacctcccccctgccccctcgtcaagctcatcatccggttccgcctatcggatctcgccgtgcaccgccgctgattccacccaccgctccgcacgcatttgcaccccaactcctcacagatctccccagatctacgcgctccacgcactgccattttcccgctccgattcttcccccactccagtctacgccgcgcttaatcgcccgcccgctgtttcacttccgttgaccgattcccgctcgcatttccacaccctgcgcttggttcggaattggtctcgatggagtaaagtccttgcaatggcggaagacgcgcacgagttgttcgattcctccccgccgcgggaggagggctccgacgagcagctcgcggccgtaccgctcggcgacgaggcgg

SEQ ID NO: 183956 - DNA, 535 bp, Zea Mays
agtaagcatgcagattgataataaatagtttgagtgcctttgagaatgaaatcttcttattgatgatgtattttctgattacagaatacaatgttgccccgatagcttttgaaatctagctaggggtagaacttcccgagatgctctatattccatgaattccttatttccgtgccatccatttgagtgagccgatatgatcctggtcgagtgacttctgctactatgaatggcccttcccacagtggcgacaatttgtgccgtccttcccccgttagaattcggcgaaggaccaaatctcccactgcaaaggatcaatgtcgtacaaccttatcatgatagcgcctcagagtctgctggtatctagctgactgaattactgtattcaatcgctcttcttctaatacatcaatgtcctctagtctggtagcttctgcctcagctatgttttcgaagaccagccttggcgccccaaacctgaggtcggcaggtagcactgcctccaaaccatagaccatgaagaagggactatttc

SEQ ID NO: 183957 - DNA, 527 bp, Zea Mays
atttcacacccctcaactccagccgctagcaacaaagatgatcacgctgctcttccaaatggttttggcttgaatcagttggataatgacataggggttggctgggaggcaagctgcattgaacctatcctcgatcaacttgtccatgggattggggtaccaggatggtcttcagttggccaaagacttattcaagcattgattgatgaagataggatcgatagtattaccaacaacacttacataagcgagggctatgcatttgatacacatgaaattcattttgatggaggaggatggaagcctcactcaaataattataagttagaacctttagcgaattttgaagcttcaaggaggggcccaaatggtctgacaatggattctgactggaaatataatgatgtgtcaaatagaagtggcaatgtcatggataaaaccaaggtgtggcctgagtttcagtacagtgagatgtgcttcaatgataggattatcattgagctgagtgaagttggtgtatctattga

SEQ ID NO: 183958 - DNA, 1483 bp, Zea Mays
attttgcatgggaatttgacaaggtgcgtacatcatagactttttatgtataacatctttgtggtgatgttattaattctaatctcttgctaccaaaatgatgtagggggattttcatcactggttggaccttttcaatcattttgattctttctttgagagttatatcaaatcaaggaaagatttgcatcttgaagataattttcttgatgtggatcccccatttcctcgagaagcactacttcaaattctccgtgtatcaaaacttatattggaaaattgtacaaatagacacttctctagtttttttgaggtcagcactttatgcgtgtcctgtttatctgcagtcatatttgtttttctcctttgtatttattttatataagataacagcataactttctggtttccttcatttccagtagtgtactgctaatttatgtatctttttgttacagcagcatctgtctgcccttctagcatcaacagatgcggatattgttgaagcaagcttgcagacattaatggcatttgtagacaagtcagttgggaaaagctcaatacgcagtgcatctctcgcttcaaagttatttgccttatctcaaggctggggtggaaaagaaggtggtcttggattagtagcatgttctctacccagtgtatctgatccagtttccactgaggttggatccacactccattttgagttctatcgtgctgctgataaatcagagaaatcccagtgtctagagaaagagaacaagttggaagtaattcatttatcgaatgtcaattcgtgcaaggaggcagatcttgaaatattggacaggttggtcaaggattacagtgtgccacaagctttaaggtttcttcttcttacaagactgagatttgcaagggcttttgactctttaacatgtcgacaccagtatatctgtatccgcttgtatgcttttattgttcttgtccaagcaggccatgatctggaagttgtatcaacatttttgaacaatgaaccagaattcattgatgagctgttatcactacttagctatgaggatgagatacccgaaaagattcggatactgggagtcctttcattagtcgcactgtgccaagatcgacctcaccagcctactgtattgtcctcggtaacttctggtggtcatcggggtatccttcctattctcatgcagaatacagtggattctatcatcaatggttctatgaaatggtccataatatttgctgaagcacttctttcgcttgtatctatgctggtatcatcaacaccaggttctctagctctacaagaagcaggttttataccaactattttgcctcttctcaaagacacaaacacgcaacatttacatctagttagtaaggcagtgcatgttattgagagcttcctggattatcacaatccttcttcagcagtgttcagagatctaggtggactagatgacactattgctcgtct

SEQ ID NO: 183959 - DNA, 318 bp, Zea Mays
aaaggttgcagaactaccagaatcaatgagcatgaccaacatctgattctgaatcagagcttggaccctcatacatccgtcacattatgtgccaaactcctccacacacttctcctcattctccaacttctgcaatacttcatcagtcaaaactagacccatgtcttccacgatcagattatgtagttgagttaccaccctcttcggacattttgcttgatggcctggctcaaatttatctccacaaataaaacacaacccattcgctcttctatattccctcaactacctgaactcaggatacaatattccttccct

SEQ ID NO: 183960 - DNA, 357 bp, Zea Mays
gttcaaccggttttcagtcaacttttcccaacggctgacagcctttggggaatcctttatatacccctcacactctctctctctcttcattcacttctgccctcttcacaaattcttggctggccaaccttcaaacaagagcattcaattcacctctcacacccgaaatcgcatctccttcaattgtttgaaggaccttggtgtgaggtgaagtagatctaactcgctgttgatttcatctctattctccctttctcttcatctctcgagctcatcgcaaacttgaatcttgtgcggatttgttactcttggaaccttgagtttcttgacgggtagaggttgcttgggagtctccaa

SEQ ID NO: 183961 - DNA, 1469 bp, Zea Mays
caaaccgccgcaggaatggccctaggacttcattcatcaagctttgaaatgttgagggagcattggacagtccaaatggcataaccagaaattcgaagtgaccatgatgagtacgaaaagttgttttctccacatcctcgggatgtacccgtacttgatgataccccgagcggaggtccaatttggtgaagtagtgtgccccatggagttcatctaagagttcatcaaccacgagtattgggtatttatcttttattgtgcagtcattcaaagctctataatctatacaaaagcgccaagaattgtctgctttttttaccaaaaggacaggagcagaaaatgctgatgtgctgggtcgaataatcccttgtgtgagcatagttgtgcactgtcgttccaattcatctttctgcagttgtggatacttgtacggtctaacagccactgactgtgtccctgtttttaggtgaatcctgtgatcacagtggcgggctgggggaaatccttgtggttcttgaaacactgattcaaatgactgcaatagttgctccatcatctgagggtctgccatatgtagtgaacgagtggctggttcatggatgtcattgcgtggtgacccaagtcccttccaaaagacccgccgacccccacgccagaatgccatacagaggtcgtcaaagtcccataagattggacccagcgtacggaggaaattaacccctggaatgacatcgaaactgtccaatggaatggcgtagcagggtattgcgaaatgctcgtggccgatgacgactggaatgccctctgtgaatcccttgcaggccactctttcgccattagcgactgtcacctgacggcctgggcctggtcccatggtgatgtccagtcgcttcaatgaggctaggtcgaggaaattgtgtgtggagcctgaatctagcaatgttgtcaggtgatggccatgtatagagagcacaatctgcattgtcttctgtccaggttcccataaaagcatggagtgagagcacaggctctattggtgctgggtcttcttcttcggacggcatgtcctcatcataatccaagacctccagatagaagagacgctgacaacgatgccccggacatattgctcatcacaattgtaacagaggccttgcttgcgtcgctcggccatttccgtgggtgtcaggcgtttgaatctttgtgtcgactgctggggggttttgagctggttaactgctctgaaactgatgttcccgtagctgcagggtgaggtgtggaccgtggctgcctctgtcctgctggcatgtgaccccatggcaagctctgtgatcagcgctcgtatgcccgtgctgttgcgagtgccgtattgagatctggcggattgagcagctccacatcgatgtgaatcaggtcagggagtcccgcagtaaacagctgcacctgctgttctggtgctaagggagcca

SEQ ID NO: 183962 - DNA, 318 bp, Zea Mays
caaaatataaagtccaaggagtaatagtgagttatgacatgtctagctcaggaatatcattaacccgatgttctacaatgaaattcgctacgacttggcctttcatagatttcaatggttcataggccaagtcatattctattagtgcataagcccacttaccaattctaccactcataattgggttatgcaacatgtatttgatcacatcggcttgaccagaaacaatgcaatgactagacagtaaataacatctacatttggtgcatgcgtaaaacaagcataagcataacttttcaataaaagtgtaccttgttt

SEQ ID NO: 183963 - DNA, 848 bp, Zea Mays
agataatggacatgtatcaggaaccaatatatcacttccaaggttattgaaatcgtcacagattcttgatgtgcagagcattgcctgtggagagaaacacgcggcaatagttactaagcagggtaaggtattctcttggggtgaggaaaatggagggagattgggacacaaaacaagtgacagtgtctctgaccctaaaatcattgactctcttgcctccacacctatgaagactattgcattgggggcaaagtacacctgtgcagtttcagtttcaggagaactttatgaatggggtgaagggattcacagcctagggttcaagaacaatcagtgtcaaagaagcccatggttcccacataaattgatcagaacttcagatggtatatctgtggcgaagattgcatgtggtcagtggcacacagctatagtatcctccacaggtaagctgttcacatatggacatgggacatttggtgttcttggacatggtgacacacgtagtgttgttcagccgaaagaagtggagtccttgagggggttaagagttaagtccgtcgcatgtggaccatggcacactgctgctattgtggaaacatcaggaacacccaagagcaatgctcctggtgggaagctattcacatggggtaacgcaagtggagagaagctgggccatactgacaaaaagtcgaagcttgtaccaactcgtgttgaatcactcattgattgtgattttactcaggtatcatgcggtatgtcattaacagctgtgctaaccataacaggtgtcgtatttaccattggaagcaaggaccatggtcaattagggaatcctcgatctgatagcg

SEQ ID NO: 183964 - DNA, 454 bp, Zea Mays
acctcttcacattcttcatagtcttcatccttctcatcattggcctcatagtctccatccttgtcatcagtgttctcagtggtttcaccctctagactttgtggtgtagtaccactagacggagcccaatgatcatctcctgtgttcctaatatcttcatacatgatggctttttcttcctcatgcaacagaggcccatctttaaacttggcaattcctttgtattgctacacattaggagaaagaagatgttagacatataatatgtaacacaagatgcaataaagacaattatccaaaagttctattaccttattcaatttcttccaccttttatttgtcgcactccaggtttttttcgcagtgtcccatcccaaaccattttccttcgatagtcttttccaatttgtgtactcaatcctcatcttgtcccatttgttcttgaactgcattt

SEQ ID NO: 183965 - DNA, 656 bp, Zea Mays
tgttcgcctaaaatcatgcattgtagccacattagcattgttcaaactccaaatgcctacagcattgcaatcacacacaaggggacctcaaaacccaaacattgcaaacttcaatccccatatgcaaacccatctggaatggataatagaaccccaaggtagagcagcagagataaacagccacggggaggagctccagtctacagccagcagctgacatcacgtgggttgtggaggttcacttgcccaaaggcttgggaaataaagcaaatcacgtgcactgcacaagcagtctggacgggctgggaagaagaaaaaagatttcaaggattgccataaggaagggaaagtgactattcaaagcaaaattggaaatccgaccaagcaagttaggggccctatagcccaaacaagaagcatctcaagtccgatggatcagatctccactccacgtcatgacgtccagcagtggtggtcccagaaatggagctaagtatggcagtctaagagtccagctaggttgaaattaaagcattaaactatgtaccagtcaaagtaccaacctgcaggtcccgcggcgggatctggcagccgctataccggaggcagcacgcactgccgaagtggcgggcaccgtccggcggcgctgccgcgcg

SEQ ID NO: 183966 - DNA, 847 bp, Zea Mays
cctgcttctggtattgatgatgacaagggcaaagccagttttgcaattgctgggttgggtcaagaagggtcttcaggtttaatctcagtgaatgatgccttctatgttgaagggacacttcctagtggtgtcagtacatctctgccgaagaaaagtctggagggaaatgccttcagcaatcaacataggattactgacactcaggaaggtttgaaaactgctgagatcaaggaaaatgttgatcatgatcttggcactaagctacctgatgattcgaacactctgtttgatgtaccatcctttgagcatcttcaagaaccccctaagccataccaaagcaacaacatggatacaaaagtgggtggccatgctatttatccagaagagttgacattatattatctggatccccaaggaggtgtgcagggtccatttctgggtgctgacataatctcttggtatgaagatggatacttcggtttggagttacctgtacgtctgtctcagttttcagatgatgttccttttcgcccacttgttgaagtcatgccccaccttgtgcaaaagccgcaatcgcgtatacctgtaccttgtgatggaaattctgaatctcttgaatcatctcaaagtaaatttgaatccagtgtccgttctgcttcctctgtgaggggtgaccaattgtctaactgggatactgaaagcaatgctgttgatcctaaaagaggtgatcatgaagaatcaataccttctcgtagtggttggctatcttcaccggaaacaggaaaggatatatcaaatactagtaatcgccagcagcacattcctgaatcagtgaatcaggatgccg

SEQ ID NO: 183967 - DNA, 608 bp, Zea Mays
catacctcaggtcgaggctccgacaataagcatattacagtttctggtgcatttgtttgcagaccaagtaactgagcctcagggaaatcttcccagagtttcccaaggcataaacaaagccactgcaaaagcaaaggttctgtttgtgcatgaagattctcaggttgcagatgtctcaggcaaacatctataagccctgcattcatacaagcctcttgacccatcctatgcccatccacgatgactgctataacaaaagcggccattgcacgctgttctgggaaagcatccaaactgtcaagaaacctaataaaatatgtatgtcctccatctttaaccaagtcaacctgacaagactgccatttgggaaaatgttacaggtaaaacaacagaatctaatctaaagaaacaacaaaatgaccttacaagattacaatgaagagtgcataccttatcaagagagagaatttttgtccatataaacactaaaatttgacgtaactctattgtatttgttggaagcagtttgagtacataaggaaatattccgacagacagggcctacaacaatgaagtgccaaaggttgaagactaaataaagagaaaag

SEQ ID NO: 183968 - DNA, 306 bp, Zea Mays
gtgggttctgatgactttgatttcgataatcttgagccagaggagaaagaatttgaaaatcagaatatctcagagaagggcctatcagatgcttaccaaaatgtcttaaataggcttgcccagctacagaaacttgggaaggttggtaaaggtactgacaggaggaagcgattgaaaggaggactggagctggagccatgcatggacacagtgaataatggttggagaaaggacatgctgcttgaggatgtggtggatattgacgttggctatgatgcacctccaccatcgtttactgctggtttg

SEQ ID NO: 183969 - DNA, 578 bp, Zea Mays
actctgttcaaacattttctccacttcagaaagtgtattatcctagaccaggaacgtacaattcagcacatgtctatcttcccaactccactgatgtccctcttgcaagtaggcaattttcctccaaaattcaaccttcgatgcatggttttgattccactaatagcaaccagccatttacttccatcagacctcctatgccgatatctcggcttgatgctacttccgggccattaacaaatttgcatactgcttccgaaatctcaaatttcaaagggatgtttccatcaagcctacctgctccagttcatgttgagctaaagccgcctattacactccctgctgaaatgaatagtgaatctaccatatcaaatcaacaaaattattgcaaaattgggctagaaatgtcccttgaacctgtaaatttagtttatgaaggaaataacaaagattctgttgcaacttgtgacataagttgtaatttaatacctcaaccagtttcaaccccgcagacacagactcggccaacttcagttgatcatgccacaccagttgtagaccctcaaactatcttaacc

SEQ ID NO: 183970 - DNA, 424 bp, Zea Mays
ctatgaaaccaagcacgaggagcttgtttcagaccatacaatgcgcgacgaagacgacaaacatgcgctgagggggtattaacccttggaggaggatgcatataaacttcttcatgtagatcaccattgagaaaagcattcttgacatccatctgggagatagtccaagaagatgaggttgcaactgcaatcaaggttcgtacagtggtcatatgggcaactggtgcaaaagtctcatcatagtcaagtccttgagtctgttggaaaccacgagccacaagacgagctttatacctctcaatataaccatctgattttgtcttaactttgaagacccatttacaagtgataggaacaacatgcgagggtaaagaaactatatcccatgtgccagtgcgttcaagagcagccaattcatcaatca

SEQ ID NO: 183971 - DNA, 970 bp, Zea Mays
ggatgctactacttgcctaaatgaaagtcaacctgtcgatgataatgataatgatgatgacatatgcaatgatgtctccaactatggtcaacctgaggatgacctaggtgatgactctgacactttaccatctcctaaaattccatctcaagttatcgatcagagctcatctagctctggaatcaagcgtccaagaggagatgccataccagtcaaaagagatgtgagaccacggagccgcatggcaaagataggagatgaaatcaacactactttgatggatcttcggaacgaacttaaacaaccaccacctccacctattataccttctttgaactctgatgccgaattatggcaaaggcttgaaaaaatgacattgactactgatcaaaaactgatagttgggacatttctagcatcaaaggattaaaagggcatgcgtggtttcttatccgcttcagctgaaacaacatttcagtcatgggtattcaagtttttgagtgattcaacactactgtgaagtgattaggtgattcacatatcattagttttattgtttcaacttgtacttagctgatatgttttgcacttgttttaggctcaaccaggtactcttttgtggatggaagggtggtgttgttggctggctgttttggtgtgaattccttaggtggttgcctgttattttgctcagtggccaggtgatgtttatggcggtggtgatgcctcattcttttgcacgtcttctaagctgatcaataaggcttaaggagatggatggtgctgctcatagctgaatgtttagcaccattatatatacatatttgtgtgtgtattgtaatagcaactacctcagactgtttcgaatctattttagacctattaatcagctgtaatgaacatgttgtggagctattatgaactgattattagcttatcatgcgcatgtgattatagtggtgtaagtttt

SEQ ID NO: 183972 - DNA, 335 bp, Zea Mays
gtgcgtgggtgccaaggaagtggtgttctctagagtcaaggccgtgtctcgctcgtcgattcgctatctagtgccgcaggcaaaaggtgagccaaaggaagatcttgactcacaggggcacccatgtcttctggattaggttgttccctccctcacaggcggatggatctcgaatgtagtaatttgtatgtagacctcgtggattaggtgccatttgtagtctgtcgccacaccgatttgtctggtaggtcatttagcgtaggtacttggcaactgcgtgcaccaagaggcctcccgtgatttttcgcacccaacatctatcttgtaagacgtcg

SEQ ID NO: 183973 - DNA, 690 bp, Zea Mays
tgtgggctctgcggggaaatttagggtttagtattggggttgatcggacgatctagtgtggttaggccaacgattctccctgctgtggctcatgattttccaatttcgtgtaaatccggttcggtgtggtgccttgtttttttttctgttttctttattagggctcggattctgagtcacgaaatgaatgatcatctgatcttgtagttttgggggacttcgtctctcgtaggagggattctttggctgaggtagtgaggttgccctcggattggtccaaaaacgaaaaagttagccctcttcctcaggtccaatttggcatttttttcagaacacatacgatttctgccagtctgaagttttggactttatgtgagctgttgccaattcaactgcttctgctacacgatccattaactgctttccgatccgtgttctgtgatgtttgccctcttcctcagggccaatttggcaatttgtcagaacacacacaggtatggattttatatgagctgttgctaattcaactgcttctgctacgcaatccattaactgctttctgatccgtgttctgtgctaactcttgtcgattaagcgttgctttgtgcgagatatttgaaataatgtacacgccagccaacacgtggcttcgccaaatggtcatggagccgtagaacttgccaaaatgcc

SEQ ID NO: 183974 - DNA, 298 bp, Zea Mays
ggtctgaagtaagtcacccatcctgttatgtgtgcttaaagcttgccatcttatgagcagattatcatgttaaaatcatacacaaaaacatttgctcaaagttactgtttactttatgtcctgtgcctacccttttcaatttgcctgtttctcttttttccatatttacctcttgagatctatatatacggaacaacttttatctgtatcaatatattttgttatagttctgccaacttggcgattgaaggtcaatatggaatatacttcctctaggttctaaatgataatatatcta

SEQ ID NO: 183975 - DNA, 838 bp, Zea Mays
tattttggtggtcctccttgcttcaaatatttggtacagtgttgcgtccttgcatttcatttctgctgatgtgttatttcttaagtgtgttaactatgaatcttttcttgtaagcagactgaacatgtgactgatgatgtgaagctcatggatgcaagaagagctgagaagtttagatttcagcatatggatactggtgcagaagagtttcagaaaatgctgctcacatgtggtgcttcattgtcatgtgcaacaaaagagtaaagatcattcttgaatgtcatgttccactatttcatgctgatgatacaagattgacctttagggttgtttggattgtgggatcagagaagtgggatttggattaggatgtggggtgatataatgctaacctttaataaaaaaataatgaagaattctgctcaataacccactaaaaaaataatgaagaattcagctgcagcagccccgacattagcattgacagtaataaaaagcaccgtcctttatgtcaccaagtctgttagtttattccaggaaaagacatcaaaagctacagctgattgacagtattgatgagaatggcaatgtcggggctgctgcagatgctataatttctccagcttcggcgactggtttggctgctgatgggacagatcacgttggtcagggcccagtcattatcggggatgtggcagatgctattgtgtctccagccacggcaataacttttacacgttctgaacctattttgagtttggttgagcctactgcggctgtggcagacattctgatgtctccagctggggtggctcccagtcttcttccttcttctggc

SEQ ID NO: 183976 - DNA, 544 bp, Zea Mays
ttgacatgtcatatgacaaaggcaaattttgatgtggaacatccaacttgcgtggatttgccatttcaaaccacaaacaaccaaattggccagttacctttacaaaagtatggatctttgctcgttcacacttcacacttcacaccacagccatgtaaacaatcattttccaatatgaaacagagggggtagaaatgtatttccgatccacttcagttcttcctccctctctctccaactcctgtgttggtgattggaagctgggggccaccaccacctcttccttctcgcaatatgaatcgcagcctgatctgtgcttctacatcctatttgtccccccagcagcgagtccaagctgggtgccggcagctcatccatccccttccagcagtgggacggatccagatgctgttgctcgcctccattccccgcccgtaggaggcacctcatgcacagccacaacctccctatgcacatgcagctcacaatgacagattcaggaagggcaaagaggtggagggggcacgcaatgctttgatcggtg

SEQ ID NO: 183977 - DNA, 401 bp, Zea Mays
atgaaatgtcaatgcatatgatgtcatgcccaaattttagttcttgaacaccaggcctggatgacatccctttagctagtaatccagtcgggcaagaaataacccgaacggtttctcacactccttcgacctttaagggtggcctagttcatggggatgcgttggatcttgacgtggcagtctagggttacccgactcctatgggtacggttgagggtgcttcagccctcgagggtgccactgaaggcaacccagcccccgagggtgctaccgaggatggcccaacccctgagggtgccgagcttggctactccttggctgcttccatggacgttcatgtcggatcatctctaattccatctgaggaaccagtggtgaccagtcctccaactgctcttatc

SEQ ID NO: 183978 - DNA, 512 bp, Zea Mays
ggacaggtagaagagagggtaggaggatggagaaccagggaatgtccaaaggttacccgaaaaattccttagtggctggtaattcagttccagtggcgagccatcgaggattaccccaaagtgatgagaggcgaagagcaaacagtaacagttacagggctgaagatagtaaacttgctgctctcaaggcttatcgaagagcaaaggggttatctttcaagtgtggcgaaagatggaatccgaaccatacatgttccaatagtgtgccattacatgtggtggaagaaatgtgggtgattacatctcaggcggtgggagaaattgaagtagagggaactgagagtcagctgccaccagaggatgaggaggcggtgttggctgtatcaatagcagctgcgagtggcagtgaaaacaacaaaaccatcaggttgtgggcttcaatacataacaagcagatgttggtgctggtagattctggaagttcggctagttttatgagcctgcatttgatg

SEQ ID NO: 183979 - DNA, 548 bp, Zea Mays
aaacgatcaaccgcccctagggccccatgctgatgagcaaggcctggatacagcagaggaagagtatgtgggcacaggtgatcagccacatggtgcagtttctgatgagaagagcggtgcagagactccggagcaagaattcagccttaccgaccaccgaaacgtagcagttcctgacgccaggaacatctcggagaccagagaagatgaggaacaagccagtgcagatgatcattcggacaatgcagtcaccgggaaggcaaaggtatatgacgaagacggggaggaccgggaagcgaggtggaaggatctgacagacgaggaggaggacgagctggagtcgctgtgggagcaccaggatctggtagagcagctgaagctcgagctgaaaaaggttcggtcgtcggtcgggctgcccacgatcctcgaggagtcggacacaccaaaggctccggtggaggacctcaagccatggagtatggatgctaagttccttcgcgaggaccccatggacgagctgaacaagttctacaagagctacagggaga

SEQ ID NO: 183980 - DNA, 1193 bp, Zea Mays
aggatgcaaaaaacttggagaagttcaaggaaggcagtagcttacgtgtccgtatacttggagtgcggaatcttgaaggagttgcaataggcaccataaaagtaattacaccatgtcacccaaaaggaatgctagtggcacacttatactattgtgtcctgatttatttcacttgaatttatacttttcatttttcaacaaagatactgagcacctttcttttgttttatctttcatagcttgtgtcacatcatttaccttttggcatctgttttgttcctcatgccttttgaatttgttgtgaacacacatgcatattatatccatgtttatatggtaatataggagttgacatattgtaagttttaaattggttttcatatggtatagaagacttgaactggtgtcaacttgcatgtttagtatatgtccatgtttacatggtaatataggttactgatattggttcattcaattttattgccttaggatatgctctctgtgtttgcaggacagtgcttttgaagggtctgttttcactcatgatgatgttaaacctggaatgttagtgagagctaaggttgctactgttgagccattcggtgctattgtacagttttcaagtggcgtgaaagcactttgtccgcttcctcacatgtcagagttggaacatgttgttaaaccaccaaagaaatttaaggttgctcatttccacatcaattgtttgcacatgaattttttatgttaagagatgttgaatatgatgatgaatgaactttaactttgttctatgtttaggttggagctgagcttcttttccgtgtgttgggctgcaaatccaagagagttacagtgacatacaagaagtctctggtactttgcccttaccttatgaatttctatgaattttggtacattatatacaacagtacatgatattgtttctaaatccttcctagtttttctgtagcttataatcataaaagtcgagctcataactgtatgtgtgtgcattctttgttttctctgagaatgttagtataattatggatctatttcaggtgaaatcaaaacttgatgtgctttcatcatatgctgatgcaaaaattggtttagtgactcatggatggattactcatattgaaaagcacggttgctttgtaaaattctacaatggagttcaaggttttgtt

SEQ ID NO: 183981 - DNA, 321 bp, Zea Mays
agatctatcaacatcttgtctctggtctcgagaagatcttcatcctcatttggaggttgctgccattgtaatccaggcaccacttcataaaacgaagtccaaagaattgaaagctggatcgtcacctggtactatcaaagcggttacagcaggtggtgcacatgggttaccaagggatgatgaggcaagcccatcaccattacttgaccgtctaaagtctggtggagcctgtgattgtggtggatgggacatgtcatgcccaattgttgttcttgacaatgcatatgatggttactgggctgattccgtaatgaatgaaag

SEQ ID NO: 183982 - DNA, 406 bp, Zea Mays
gctaaagtgagagtggcaaatggggaaattttgcatagtgacacgatggtacgatcattggaatggtggaccaatgggcatacatatcaatgtgatatgagggtgttggggctgggagcatatgatgctattttgggctatgattggttgcgtcgccatagtcctatgcattgtgattgggatgataaggttattagctttgtggacaatggagtggaagttcagttggtgggcaatactgctcagcaacaggttgtgaaggaagtttctactatataggtggcgaaatggctgcgagggaatgatatctgggtgtttgcattgttggaggaggtgattgaggagaacagcaatgaggtccatctagaattgcaggtattgttgggggaattcagtgacatttttg

SEQ ID NO: 183983 - DNA, 1074 bp, Zea Mays
gtctgttcgcatctttatttttattggctgattcgtttaaacctcactgtgtacagggcagaatcactgtccctgcatcgctggtctgccaagtattgccctcttttgccacctcctaggtcaactattgcagctgctttcagtccagatggaaaatcacttgcgtccacacagtaagtttattgattcactgtataacaaactgaaatgaaagacacgccaactaactcaatctgttttctcagtggtgaccatactgtgaaaataatggactgccatacagggaaatgtgtgaaggttttgagtggacatcgacgcactccttgggtggtatgtctatcataccagcatatatttttttcttgtgtatttagattagcaccctgtgcttcgagctcttgcaaagaaaggaaactagttatagtgtgattgtcgatttttcagtaatgatctggctagaacattagttttataatttcgtttttcatattatatatttttttacttggtgacaatctggctagttgacagcatttttttatcaaaatgatatttttgatctttctttgcatcccaatattacctcagaagtcagaaatgtaagctgctaacctattgcaggtcaggtaccatcctttacattctgacattctggctagtggaagtttggatcatgaggttcgtctgtgggatgctaatacttcagactgtattggatcacaagacttccgtaatttctctcagaggactccttgcatcctattcataaccaattctgagaaataagtaacttatattatatttgatgttcctctggtagatcggccaattgcgtccattgcatttcatggaagaggagagattctggcagttgcatcaggtcacaaagtgagacttgctgtgttgaactcgaaaagcaagaagaaaaacaaagtttttctctactgtttaatagagcccgttaacataacatatactaatgcccaaatcattttatacgtttctttgtcagttgtacatatggaactacaataagagagatgatgcttctgtcccaaccatcatactaaggac

SEQ ID NO: 183984 - DNA, 443 bp, Zea Mays
catgtagccgaggcaactgtctcacccttccactctacgaggatctggtgtaccccacgcgccaaccgggaccgcacggtccttttcggttctagaactgatgcaccatggtgaatggtgggcaatggcggaggagcatccagtggtagcccacataacttcttgaggagcccgatgtggaacacatcgtgcaaccgggcgcagggcggtagggccaaccggacagcgatgtcgttgattagttcgacaacgtagtaagggccggagtagcgcgacttgagcttcccagtggcggcctggggaatggatgaagtcgctcgctgtcggagacgaaggagggcccaatcggcaatcgcccacctggtacgcaacatgtcggtggagcttgtcctagtgcttcttctggaccttctgcgtctgttccaaatggtagcggatgtccg

SEQ ID NO: 183985 - DNA, 334 bp, Zea Mays
tactgggaaggtagagcggcacaacaacagtcgtcgcccacgcgtgcggctagatgtaccaacggccaagatttttcgcgcgacatggatagtgcgaatgtcgaggaagttgcatcggtttaataagaagaaatagctttcttgattgaccgttgttggagtacctgcctccaaaggtgtggccccccttctgtccctttgtgttgagccaccccagaaactactttgctggctttgctaaggtccgttcgaaggttggcttgttgttggagtttgcggaaactacttttctccatcaaactagggtgtagtctgaattgttcgggcttccctt

SEQ ID NO: 183986 - DNA, 278 bp, Zea Mays
gttggcgcccaggaacacggcataaccgaaagtggaccagcgcgtgtcgggacagccaacccagctagcgtcggtgtagaccacgagctccgacgtctgggagggttggagtagaaggtcgtagtcgagggagccgcggaggtagcacagaatccgcttgagagcggtgagatggggctcctgcggggtgtgcatatgtagtcacacctgctggacggcgtaggcaatgtcgagcctagataaggtcaggtactgaagcgcgtcggttaggctcccgt

SEQ ID NO: 183987 - DNA, 391 bp, Zea Mays
gaccttcatatctaaggctccgtgcatcactacttcgaagaaaacttaatgttcaatctattcttgcaatgactgcaactgcgacaactcaaaccttggaggagatagtgactgtcttagaaataccatctgataacctcattaaaacatctcaaataagggacaatctgcagctgtttatcagcatgagcaataacaggtaggtcactttatatcgttctattctaagtttctgtgggtcattttgatgacaaggcgggattgtttagtatggtttacttatgtaagaagccatgccacctggtttccatgggcacatgttgatccagtcctttaaaaacacagactgaaggatctattgctgttgttgaaggcttcaccttttgttgac

SEQ ID NO: 183988 - DNA, 315 bp, Zea Mays
cgccgagatctggagttcgaggtgggcgactgggtttggctacgcctgttacaccgacaagcacagtcactggtcagccgaccaaaagggaaactgggaccaaggtatgcagggtccttccaagttctggaacgcatcggctcagtggcataccgtctggaattgcctaaaggagcccgcatccatgatgttttccacgtaggactactcaaacctttcagaggatcacctcttgttctaccaccagctctgccagtactggaaaacggcaggcttctgcccataccacaaaaagttctcggagctcgacttcag

SEQ ID NO: 183989 - DNA, 563 bp, Zea Mays
gggcaagtagcctatcctagagataaggaaggttatcccgagattacaatcaatcctagagtaaccatattcagagttgcctaatatactctaacatcattcgcagtcgtagctagagcatcacaaacggtcagactggaggacaagctgaagagctgaccccccctgcagtcataactgtgtcgcggtgcagaggcaatgattggataagaaaccgaaaaggagctcatgcaggcggtagccctttgtgccgataatgtcgaggaagcctagtgcgaggacgcagagccattgcgaggttgcgtgcgtagggtagttgtggtcgatggagctgttgaggatgccgaagaagtcaagccgcataagtcgtgggcacgggcgcagcacgcgggaaggcccacagtgtgccaggaggcgccggattgacggtgacgcagaaggagggagccatagacaaagacggtgtcgtagttgcgacagttgatgtagaaggttaatgtcgaggtcgatacagtcaagccatcgtgagtgaggcgtacctcgagtttgctaggcccgaaaac

SEQ ID NO: 183990 - DNA, 332 bp, Zea Mays
cgagaatggcgacgggcagttcgtgtgctacgcaaggcaatcgagccagtcggtaagcgccatgtacaacctgtaccgagctgctgaccaggcctcgttccccggtgacgacgacgaccatgtcctccggcgcgccaggagctacagccgtgcgttcctccggcagagacgagcctcaggccagcttaacgacaagtggatcatctccgagggcttgcccgacgaggtaactaacacatgtgttgtttggttgggctatgtatccaataacgtccactgcatatacgcacttgacgttcttcccagcaggttggctatggtctggatttccc

SEQ ID NO: 183991 - DNA, 1073 bp, Zea Mays
atggaagaagagaagggcaagcgagtgtgacgcccaaacagccaggcatggcaaagagaggtagtggtgccgcggggcaggtgatggctgaggtgcccgagagtttggagaggacgtcgttaccagcgtggccaagacgacaatgccaagtggaggcagaggcaaccgcaacaagggtgtagggtgtggtaacacgagataagggaggtggggtaggcaagcgaataggataggggacccgagatgtcgcatcgggtgaccatgacatgagtggtaaggtcccgtatggtgtccccaaggatcgaactctatagaacaatggttgttagtggtgaagcgacggattgagagaaggttctgtatgatgttgggggcaacaaggatgttgttgaggtacaatgaaccaggaaggaccgtgtcacctactaaggtgacaggcagagttgacccattgtcgacaatgatggaagaagggaaggtggtgttatggggatgtggtaaagatacagtaccagagttaggagtggtgtggtacgaggcgccagagttggcaacccagtcggtgggagtagcagtagtgggctgcgatgacatggggtacgagtagagtgccagtggaggcacctccaaagagtctccaggatgggcgctggggccatcggtggtgagtaggctaatggcgagcatgcgcggtggagatgacaaggcctcgatcgtcacagagacaatctccgcaccacggaacacgaatgaccctggagcttggtggccctcgtgagggtgaacaaaagctaaaggatacacggagaacccgattcatggttcgatcaaagagcacgaacgtgcctcagggaaattgcccattgtgaaaggagacacacacacggtagggaggcacatggaccgcggcggagcgaaggacaagcgtatagggagcaagagcaggaagggagaggtcggcgcctgcaggccacccatgcccccatgttgccggaggaagaggatattgttagcaacctggacatctgcgttcaaggtctatcagaggttctatcttttgttgacaaaatgca

SEQ ID NO: 183992 - DNA, 384 bp, Zea Mays
cgcaatttctagccacctcgccgtggtcgtaactcggatgtggctagacctttaagtttaattccgcaattatttcggtcagccaacgttaagttttagaaaagactattcgccccctctagtccaccatataggccctacggcagcaaccgatgacacccataagtaatggttataactagtgcttcatatatattgtatgcatcttgttcattttttattaatcatatcctagaaatgatgttcgtacctaggacgatcggatcaaaagttgctgcggcattaatccatgatcagaatgctcgacaccaatattgggaaccatccacaagtgtgtcaagtattgctcaccaatttctaaaatataattgcgcctaaaaataa

SEQ ID NO: 183993 - DNA, 375 bp, Zea Mays
ctccctctcaagataggccaaaaatatttctcatgtccatcttgttacaacttgacttctctttaggacctagatcttttgtgaagcagtcagctagctggctacgagacttaatgtactctagccttaagaccctactagcttctccttaatgaagaacctatcaagctccacatgctttgtgtgataaaattgaacagtattgcttgtaatattgatcgccgcaatgttgtcacagtgaaacatcagtctcattcctcaacacccgtaactcacctagcgagacctttaactacatcatctcacataggctcaacactattgccctgtactcagcctctgcagtagaccgagccactacgaatttgcttcttg

SEQ ID NO: 183994 - DNA, 421 bp, Zea Mays
aggcttgagagaagagaggagaacaggaagtggtttttcttgcttgcccattccaagtgcggttacagcatataaggccatcagcccactaatttaggatctcataacaggaaagaactactaatactaggaaggttttacttatagaaagctatctcaataataggaaggatttattcatggaaggctattcccttatcttagccacctgccggaccttcctcttccggaccttcctcatctcgcgcgcctcctgtgcgcaccgcgtgttctgctgcgcgtcgcatatctcgacgacgcctagtgtatgtgtggtcgtaacgcccggccatgacaagctcactaaggggacctcggttccccctaccacttcacaagctctctatagcctcggtcctattgggttgtctccgcgcccaag

SEQ ID NO: 183995 - DNA, 330 bp, Zea Mays
agggtcgactactgtccttggctagctccaacgtatcagagccttactctcagctcccattgacgcactagtccaagattccgaagaagtaaagtgcatctttgaggaatcaagcctcaacttccagagacgctccatatcagactttggccagctggacaccttccttttttcgtgcgaaggtggaagcggcttgccggaggatcaagtcttggcgttctcaggctcctctgaaggctgatattgcctgacggtgcatgttgctcaacgagcagaaagcaattttggatgtcaagtctgacacttttgctaatgttgccaagctcaagc

SEQ ID NO: 183996 - DNA, 386 bp, Zea Mays
tggagctgtggccaagcattctcttccaacacagaactctgcagccacttgcacacagtggagaattgcctaattgagggaaaggtgccatgggaggacgatgtgtacttgaaacctttcatggaagatgactcccttttgcacagcttgtcaatcgatgacgatgatgaagatggggactgtggagtgtcaatggaaaagggacaatattcagctgggaatgaggttttagctgaaccatgggggaacaagctgagcagcatatcagaaagaaatgattctgacatcagtgctcaatttcagcaagagtgtactattggtagtacacaaagggaagtcagagagtcccttcatgtggcgattgatggccacctaaaggttgcacg

SEQ ID NO: 183997 - DNA, 364 bp, Zea Mays
tgcagaagtcgcctaagggtgcagccggactagcacaataagtgcgaaaaatcgaagtctaacgcgaagacttaccgtgcaaaagtcgcccaagggtgcagccggactagcacaataagtgcgaaaaatcgaagtctaacgcgaagacttaccgtgcagaagttgcctaagggtgcagccggactagcacaataagtgcgaaaaaccgaagtctaccgcggagactatccgtgcagaagtcgcctacgggcgcagccgggctagcgcactgagtgcgaagaatcgaagtccttcgcgaagactatccgtgcaacagtccgcgcaaagaccgaccacatgcgcaccagtccagcataacaaatac

SEQ ID NO: 183998 - DNA, 456 bp, Zea Mays
gtcataagcatagaggccataggtattgggcaagctgccgccgtcctcctcctcctcctccttcgccacttcactccatcgcgaaaccaacgccttcttcctactggtgttctccgtgtgctgacgcaacgtgagaacaccctgcatcgtgttcagtaatccagttccaagacgaggagctgagtcgaggcacgcggtgagccaatctgtcgcgatccacacgtatccaccggatgtcatgctcagattgtacgccagcgagaacacgtcgattccagaatcgtcacgcgcgtgcagcacgaaaacccgggactccatcatcgcagccttgaccagcacggcggccatctcgctctttcttgcccctggcctgatcgcagctttgtacaggatcttcagtctcctcttggcaagctcgtcgtctaaggaggacacgccgtttcttccgtagtcgtc

SEQ ID NO: 183999 - DNA, 398 bp, Zea Mays
atacccccgagtaaaaacaacatgagagtcatcattgttagtacaagtatcagcaacaggattatcattagggctagccgtggtagtagagcgaggacgacgaatgtaagtctgagtgataggtggtttggaagagtaagactgaggtggtgtggaagtgggaggtggtgtgatggaaataagaacatctggggtagaaacagtagatgatggtggtactgatgaagtttcaaaaatgggaggaaggctcatgaaggaggtagactctgtggaataaaaagaagaatgagtggaagagttgtaaaagaagggtcggttttcattaaagctcacatctcgagatatacacatgcgacaagaagatggatcataacaccgataacctttatgttcagggc

SEQ ID NO: 184000 - DNA, 532 bp, Zea Mays
ctcgatatcgctgcggctgtcgtgctcccgcagcgcacaggaaggtgagtgaggaggaagaaaccgcatgcaaggggacgggagtacgggaccggcgggcggaagacgaacgggattccaaaaaaacgacttgtcgtggcggagcggaatccacaatagcgacgagccgtcggggtctgccggcctggatgcaaaccagtctcgtcgtcacggactcccggaataaatactccctcctgcgtatagctcttccctgtcctctcatacactttctctgctcgcgcaaagctcttcctcgtgtaaagacgacgagaaatttatgtactctcgcaccacctcacaaacagacctgatcctctccgtttctttttgtttcccttttccctcttccgcgattccgtcgcccggttcaatttggacgcgcgcggcgtagggcgcccggcggaaaccgccgaattcccctcttcctcgcgcgtgctcagcgattcgaggtaacagccttttatcttcttccccttcatctccgcgattt

SEQ ID NO: 184001 - DNA, 349 bp, Zea Mays
cttgcctgtgcaaaagtgtgcagcagtggaggtgaaggtggctaatggagaaaagatgaggagtgacaagaaggtggttgatctggagtggtggtctgggggtcatacctatactactactctgagggtattggagttggatgtgtatgacctgattttgggttttgattggctgaaaaagcatagtcctatgcaatgtgattggctgcagaatgtgctcacatttgtggacaagggagtgactgttcagctaagaggaaatgcgggtcagcagaaggaggttccacaaatttccattctacaagtgaataaatggttgaaaggcaatgaggtttgggctttggttatg

SEQ ID NO: 184002 - DNA, 336 bp, Zea Mays
tggtcttagaacgctttgggcgtgatcaatatgaacacctgatccgccagctattccatattagacagacttctaccatagctgcttacattgaagaattttctggattagtggatcagctagcggcatacgagagaaaaactgaccccttattctataccatgcgtttcatcgatgggttgaaggaacatattaagtcttctgtaattttacatagacctcctactctcgatactgcttgtgctctcgctcaattgcaggaggaggtctcggagccacctcggatggaaactcgcaagttcattccaccctcattgccaaagcacacacaaactc

SEQ ID NO: 184003 - DNA, 407 bp, Zea Mays
ctcaaccttgctggtaggacagcccttgtgcgctttgttctcttagccatcccattttttctattccttgcaatgaatgcccctaagtgggtgattcacaaaattgataaaatcagaaaaggatttgtgtggagagggagaaaagaggtgaatggaggcagctgccttgtggcctgggattcagtcacaagacctttgaagtatggtgggcttgggatccctaatttacaacacatgtgttgggcccttcaagccaaatggctttggcttcaaaaaacagatcgggacaggccttggcatggcttgtccatccccattcagcagcatgttaaagacctttttgcagcatctctgatttctcatgtgggaaatggctctaataccttgttctggacagataagtggct

SEQ ID NO: 184004 - DNA, 316 bp, Zea Mays
cgctcgagtaattcatcgagtacacgctctgtatgctctaggtccttgacaacttcaacagccttgacaccggcaacctcgtcctttcaccactgtcatcgcatgttgcttccaccgggcactcccctcctgtgggtgttggtccctagctccggcgatcgacattggagatgatggtctgcagcgacggatgcttgcgacgcagaataatgatgatcacgctgagtggcgagggaggtgagcgtgagcgcggtgagcgaatgcggaagactaaaaccataggtgacacacacacgatgtattaccttgcgttgat

SEQ ID NO: 184005 - DNA, 305 bp, Zea Mays
cgccggatagtattatcgttcaaactaaccctttgtttccttaaaaattgctgacgatagattctggctcaagggtattgccaagcttggccctgcatctcagagaggcgatcgtaagtgcttgatctcccagcaccgtcaacttcctacgacaacagaattagcaccaatttagaatccaaacacaactcaacgtcctccatctcctctctaataataagataacacataacattgcatgttccatagcaaagcacggacaccctgctagttctgtttaagtgaccagcaatgggttactaaat

SEQ ID NO: 184006 - DNA, 356 bp, Zea Mays
ttggtggacatggttttcaaggaacctcctatgtggcatgtcaaggctgtgctaggggcattgccactgtggtgacagctcttcccttgctgctgccgaatcccccagattgcgttggagatgaggtagctgtaggcgtggaagacacttgtggaggtgagtagttgttcatgattatggagctgagggataggcatggtagtgcaggtgacggcaagcagagtggaggtggaaaaggtggggcaaagattcataggtactttctttacgtcacatgtatgcttgagatgtttctgggctcgttggctactgtgggatagccggataggggtaggtggttcttccatcttttgccc

SEQ ID NO: 184007 - DNA, 366 bp, Zea Mays
ttgcattaatctaatcttatttgagatcactcattgaatcgtattaccggtaatttgttgacaaccaatattggaatactcaaggaatatattacctcaaaatcccaaatattatgcaattctagcattgaaattttgtcccaaaagaatgcagtcctagctaggtaggggctatctttaaagccatgcatgcaacgttttggtagagtacattttctttggaattcgcatgcaacattaattacctagactaacaagccttccaatgtatcatttcactgtcaattaatctgtctgggaatttctaggattgtattactctgggggtggagagagtttttagcaagatccctgtgaagcttgtta

SEQ ID NO: 184008 - DNA, 607 bp, Zea Mays
gagcagccagtggaacaataaaactatgggatttggaggaggcaaagagtatgcaaatatgaatatttaacttactatatatatgcatgaatcgttgagtaattctatcttttggctcgtttcctatgcagttgtccgtactcttactggacatagatcaaattgtatgtcagttgatttccatccttttggggaattctttgcctctgggtcattggacactaatctgaagatatgggatataagaaggaagaattgcatccatacatacaaaggtcacacacgaggagtgaatgctattagattcacacccgatgggcggtgggttgtgtctggtggcgaagataatatagtaaaggtaataatttaccagtaactcagtgctgtgtgtttcaattgctagtttttctgctggaatttgatttttcttttgccttaatctttgtaatgaaaaattcttattttttggaactcgtcacaatatgctttgccttggcagctctgggatcttacagctggaaagttattacatgaattcaagtgtcatgagggtcagatccagtgcatagattttcatccccatgagttcctcctggcaacaggttag

SEQ ID NO: 184009 - DNA, 378 bp, Zea Mays
tgcggtgccgccggcggcggaggcggaaacagaggcggcgacggcagggtggcatttgtttgggtggtggaaatggtagcagccgggagcagtagcagcaaagagaagaggagggggaggaaggcgggaggcggcggcagaagcattgcgcgccgcgatccggcggcctccaccggcggcacgggtggagactggagagaggaagggggggttttggtttggggctttgggaagaaatggttcgggggtttggctgtgtctgtgtgggtgcagcgtgcacacgggagagagagaaagacgatgccgctccacgcacagacgcagccacgcctgctgcactgtcctgtactggatggatggtggcggactggcggtggg

SEQ ID NO: 184010 - DNA, 373 bp, Zea Mays
ttattggatgatgactcactggaggatagcttgatgggatagaggccagcctcgcacttgcctctatggagtgtttgctttgtctcctgttcttttataagaaaatgttcaggatgaaactcaacaaagacattgttgtctcgggtgagacgattaatagaaactagacttttgttagcacttggaacatgaagaatatttctgagatgaattttatgcgaaggggactgcaaagtactatgaccaacatgtgagatctccatacctgagtcgttggctgcatgcacctgctcacctccgtgatacttatcatgaatggtcatcttgttcaactctccagtgatgtggtcggtggcacctgaatccatgtacc

SEQ ID NO: 184011 - DNA, 304 bp, Zea Mays
gttgctcgtcgcggttcgtgggccagacatctccatcgccgacgtgctggccggttcctactcggtttccgtcaagctctcgggccctaggattggggatccttggtggctatccacggtgtacggaccacaagggatagccgagaaagagctgttcctggaggaggtcgccgcggcgcgtgacgcctgcgaagggccttgggtcgtcatgggtgacttcaatctcattcttgacgagactgacaagagcaacggcagggttaaccgacggctcatgcaggagtttcggcattgcgtcagtgat

SEQ ID NO: 184012 - DNA, 288 bp, Zea Mays
cacaattataatacaagcagaaggcttaaacagtgatttaataatgtagccatcatagaaaagacgttttttcacgcacacatagtattgtttttgttaggtgtcaggaatattttttatacaagttagcaagccaagtgaaagggagcttacatgttttattaacatttgaactctttcacagctgaaatagtctatcagacccatgtacgcgagatctgactgagccttgagcaactatggtgctatttgtttcaatgtacatgcctgcaactatactgaactgac

SEQ ID NO: 184013 - DNA, 332 bp, Zea Mays
agacgatagccctgattaaaagcatcatgaggcccaatattgttagtacaagaatctagaacatgatcagtatcaggactagccgtggaaatagagcaggaacgacgaatgtaggtctggatgacaggtggtttggaagagcaaggtgaaggtgccatggaggtggaaggtggtgttatgggaatgaggtcatcaggtgtggatatagaagatgatggtgcaaatgaaaattcaggaatggaaggaagacacatgaaggaggtggattctttgggacaatatgagttagtgtactggttgtgaaagaaggggcgattttcattaaaactcac

SEQ ID NO: 184014 - DNA, 286 bp, Zea Mays
tagagcctcacatgttgataggtatctagcatctatgtattcgcggatctcatttggtggtggtatttgaggacctggagatgcattatttgtgttcgcagtcaactcaaaatatatcctagctcgatcgcttcccttcgtaacatatttaaacaagtacttgatcatgtgtgttttgttgcaccactcgacattaatatgtgcgttgtattttttgagcaattgcatattgtatggcaccacgctcctactgtccaatgtgactccactttttactacaaaccga

SEQ ID NO: 184015 - DNA, 459 bp, Zea Mays
tatatcttaccttgatgtttatcttataccgaccctttgaaatctcctcttttcatctcaatctgagcgttgtactttacctattttcccttggttgtatccccttccttgtcgcttgcgagtttttaactccattatttgttgtgctccggttgggtattgcctttacctttctcatctctcgatcttaccttggtaattacattatgtctgttatctaaaatctccaatctcctatcccaatttgagagcggtgttttactcatcttatctttggcaacatcctcttctttaccgcgtgtaagccttgacatacccccattctttattgtacttataccactggctcttctatgccttcatcttttctcctatactctcgtctgttatcgcctttgacccttgcgatatttatgtcttctacctaaattcttaccttgaacttatccttcaaaagcc

SEQ ID NO: 184016 - DNA, 513 bp, Zea Mays
acttgcgaggacaccttcattcttgcgaccgagaacaagagtagggtggttgggatgaacaccgatcgcatctctcagcccatcctccgcgtccatcacccacgcctcaacgaaataccggtcgcagctgatgccgagctctgcttccatcttctccgcctcaaacatatacagttcgcagctgatcaccgctgtgactttctgaagcgaacggaggtgctccaggccgaggttgccatggctaccttggcatttcatcagggaccacttcggctgggcgctaaacagaagctcttctaggtttggcatgacggccggcgcacttggacactcaccatccttctttccatagctcagcactagatcatctgtcccgttccacagggtaaacgagacactcgagtcctcgttgagcacaaacaggaccatcgaggtataaaacttgcaggatctcaacttgtggaagaaaccatcagcggcaacgttattaactcttactgtggatctcgttga

SEQ ID NO: 184017 - DNA, 396 bp, Zea Mays
tctgcagactcctcgtgctcggccaaatcaacagtacgtgacgtgaggtcccgtccaatccctttcaaaaatcgagatgtgccagcagtagtagctttactcttctttttctcgaatgtggacaccaattttggtagagggaatttagatttctttgattgtcgtgaatcccttgatggctgtggagaaggtggtggtgccctaaatgttgatgcttgtggcagagacggtggattagaaagagaatgaggagcagcatgggaagattgtggaggtgatgatggatgtaaaggtactaaagtttgaggaggcggagatggttggggatgagatgacgatggcgttggtggatcaaccaatttgacatcccttcgaggccaaaggatgaaatttttg

SEQ ID NO: 184018 - DNA, 1032 bp, Zea Mays
aacaaaggcaccatgttccatatcgtgattccaagcttacatttctattacaagaatcccttggaggcaatgccaaactggcaatgatttgtgctgtttcaccgtcccaaaggtactatctaagttgaccagcaggcagcaattcattcattctgtggccagtcaatgttggtttcctgattcctcactgcacattctttgttgtcatacagctgtaagagtgaaacgttaagcacacttaggtttgctcaacgtgcgaaagctataaaaaacaatgccgtagttaatgaagagaaaattgaagatgtaaatgcgttgcgtgagcaaatcaggcaattgaaggtatgattgtgtaccatctgacagccaagtttctctatattattgttgttttgattcgaacctcatcggccctgttgcaaaggcggtctaggcttacccagcttgccttgggaaacagtgatgccttgtcacctaggggtctaggcgggcccagcactcctggatgtctatcgcttttgaaaccatgctcatcagtaatgtgttattttctatatcctacaatgcaggatgaacttcaccgaatgaaatctaatggaggcatagaagggaacagcggcagctttgccactggatggaaccctaggcgcagtttgcatctgttgaaaatgagtttgggtcatcctacaacattccaatgtataaaagaagatagtgacgaggaaatggaaattgatgagaatgatgttgagaagccctacaatcatgaaaatatggcaatgtcttctattaatgttaaagaatccaaacgtttccaagcttcaatgaatgtaagtgctggaacttcacaggttgaagatcttgacagggataagattttgatatccataaaaaggtcctgctgtagtgctaataaatttaatactggtactgatgttggagatggaaaatgcaaattaaacattgccgccagtatacagaggggacttcaagtcattgaaagtcaccaaaataatagtgcatggaagagag

SEQ ID NO: 184019 - DNA, 409 bp, Zea Mays
ccaagccatctccacaaccgtctggttgtgccactcgatgatgccgttctgctacaggatgtacggtgcggagtagtggcgttgaatgccctcattcgcgtagtacgacgtgaactcaaccaccgtgaattcgccgccgttgtcggtgcgcagcacgcacaacttgtggccgcacttcgcctccgcagtgacctgcacacgcctgatggcgttcacaacctctcccttgctgccaaggaccatcacccacatgtagcgggagaggtcatcgacgagcaacaaaaggtagtgtcgtactccttgtgtggctggtgtcaccgggccacacaagtccccatgcacgagctcgagtctctctttagctcggaagctcgattgttggggaaaggggagccgtctctgctttgtc

SEQ ID NO: 184020 - DNA, 271 bp, Zea Mays
cttgtcattatattcgaactattgtgttggactatcttgccaaacaaggcaaagtgtggtgtggagagagcaagggttttggtgggtaatatgttgagaaggtaggttgcggtgcctagagccgcgacccaaaaactgggggaacactagactgaatgagcagagagtgaataacattgttaatggagcaaatgatgcgttcaacctttccattctgagcagaagtgtagggataggccatacacatatggactccatgtgaagagaatgt

SEQ ID NO: 184021 - DNA, 315 bp, Zea Mays
ggccagaaagatccccgacgagaataactgaatgcgaggacctgggatttgttcatcagcgattgctgctgctgtgtgtccgcccctcatcgaggcctcctctaaccgtcgcttaatcacaggtaaaaagtccctaaatgcattcgcgacaccttaatcttcgtgttcccgtcggtaattggatctgcgtgagcctgcgtactagtttggtatgtcgccgtggagtgccacgccgccgggtgtgtcgtgcgggccactgctgctgggggctgagaaggaagacgatgggagaaacgtcgatttctggtggacggc

SEQ ID NO: 184022 - DNA, 351 bp, Zea Mays
gcacaacctttctagggacttgtccaaggttagtctcaaccctgggaactactcagctaacatgtacccaccagaggtaccgctcaaggaggcttatgtcacactctattaggaaggttcagccaagactcatagtaaaaccctatctagtcggatcaacccttaccagataccaaagacgacacacgcttgaatctctcatccatggtatacaccatatagtagtggcaccaagtgtctagtttacacataagcatgtccacactattcatcacatcagtagatatcacaaatagtagtaaaagtaattagcaagtgtcggtgtttcgaaccagctccaacaagtaaatt

SEQ ID NO: 184023 - DNA, 441 bp, Zea Mays
ccacgccgcgacgcgacgcatgagcggccgtggtggaggcctctgtagcggcggagcaagcggtagcgcaccggaggggccacatgctaacgagagtaggtgctaggcccagcacgcaggcggccatgggagcgcatagtagggcttctccccttcggcacgggctggaggctccaccgcttctgcgtctccgttctcttgtttcgggactggtgaatggctgggatggcgttcgggtttacccgaaatttcgggtcggacacgagcggcacgcaggtcggtaggcgaggctgcgagaggcgacgagctggactgctggagctggcaggcgagggtcggtggccgtgtggcggtggtccgatggcgatggacgtggaccagtggtcgggctcgggttcacacgggactgaaggagacgatgagtggagctgtggacttgtg

SEQ ID NO: 184024 - DNA, 440 bp, Zea Mays
tataacttgtgttctgtatagttgcagcattggggtgctataccaagttggtagggctgtagttggtgactaaatttggttaaggaagaagggttagttattgtatgaaattgtgagattaagggcactgaacatgaagaagtgaagtggagcagtggcagtccaatatggatcaaaaatatctgcagtaaagatcttcacccactacggactccatgggtttccagggaatgtttggataagtgaaggctggtatgaggtagggtcgtgagacttggtttactagctaaggactgtattgaacttgtactagattgatcacaacagacacatcctcctgtctgcttgttgtcttgtgcccagccgtggatgaggttcatcacccctgcgtttacctcctatgtgttgtccatgcactcctgctacgtgtccataatcgt

SEQ ID NO: 184025 - DNA, 727 bp, Zea Mays
atcatggtgtggattgaagacactcgattgcagttacttgataattgcaaagctgagaaggtaataaacacatacttcctccttccaaaatttaaggtttttagtttgtcaaatcaaacttctataaatttgttttagtttatagaaattcaccaacatctacaacatcagactagttttgttaaatctaccatgaaatgtcttgtggatgttgacatattttgttgtaaacttggtcaaaagctagagaagtttgacttgtgaaacggaggtactacaaggcaagaaatatagatcatatggatgacctttagctgttgaacttaattgatttcattcacctctctttgcagatatcatgccctgccgtgtcaacagtctcgccatttgttgagcaaatgtatgagcaaataaaagagagcataaatgagtatggagtggttatcaatagatggcctcaatatctgatgagtttagagagtgtatgtacacaactgcattctttgaaacagacctcatatttctcctacaattgagtcaacttatatttcttttctttttcaggctgttgctgatgttgagagagaaattatgaaggcactggagaagcaatacatggatattctaatgcccctaagagatggcataccagaaaaaattgagaagcaggtccagagattaacaagaagacaatctatagctccctatgttgtgccaaatcaggtag

SEQ ID NO: 184026 - DNA, 290 bp, Zea Mays
gctcatcggagtgaagggaggcggcagcgccggctccgatcgagctcgagggagggcagaagagaggccgacggccggtgcaggtttgagaggagctccgggcgctccttttataggtgcccggggtggggagcgatggccagctggcctcctacgggcggtgcacatcaacgggtacaacggtgtgcacaacagcggtgatggaacatcatggcgaggggagaggggcggtgacatgcaggtacatgcccacaacacgacggggacaaaacggtgtctaactccactgg

SEQ ID NO: 184027 - DNA, 372 bp, Zea Mays
aaaaaaatgcctaatggatctttgcacactgcagaagggatgggggaacttaaacaagtagagcaactgaaaggcctctgttaaaaacaagatagtacttaacagtggtttatcatgttgattgactagttttgtggtcatattatcactccattagtcttggtgcatgagcacactacttatgggacaatacgggcctagaacagatatgtctgacataagcatatacgctacaagaatggcatccattcagcattcatctctacatgtgtgtatgaatcccagtatatagtgtgggttaccaagagtaggacagtgcccaaagaatattaacatatctgatgagatcaattttgaaataagagatatgcc

SEQ ID NO: 184028 - DNA, 504 bp, Zea Mays
gtgcccgtattagattcttgatagaatattatagaaaaaaggggagggttcaggtcatggtttggttgggcgccacgtctgacaagtgcccgcactgcgtattgcgttcatggaggccgttgtccatgatgatcatgagccatgaatagaggccagcggagacacctcgatctcgatctgcatcactgaaaatgaggcgtaaaaatccaacagggatcggccgcatgcgtctcgggctcagaaatctctgcggtcacgtgtccaggggaggggcgcggatttgctagcttcacgcatgcaacaggctaggcttatctcatcgtcggtggatatacgtaccaagcttcgttctttctatcaagaattttgtatgtgatcttggagaagggacaaggggtgtttggaatgtccaatccaagctctgagtcagcaacgcaacaccagaccagctggaagaggacgtgagcgaaggcggggaaacagcggcctttccaagcgcgcgcg

SEQ ID NO: 184029 - DNA, 409 bp, Zea Mays
caagaatcccagaagcttcctgataagtagtgggttcaacaattgccacaccagctcgtgggaaaccatagcgatctggaggttcaatggtaccacgatcacgacgacgatatccttgataaaaaacatcgttagactcaaaattgttagtacaagaatcaggtacaggatcagtatcaggaccagccgcaggaatagaccgggaacgacgaatgtaggtttggatgataggtggcttggaagagtaagtagaggatgatgtggaggtggaaggtggtgttatgggaatgagaacatcagatgtggatgtagaagatgatggttcaacgacaggaatggaaggaagacacatgaaagaagtagattctgtgggataatatgatgagtgagtagactggttgtgaaagaa

SEQ ID NO: 184030 - DNA, 359 bp, Zea Mays
gagagttagacgacgttgatgttgccgcaatagccggtgctacgagatgacacgctgtggagttcgtgaagaaggcgatgcaatcaggaagcttcactaatgtcattagcgacaatgtgatactccgcctcaacgctcgagtgggggacgacgttctgacgcttggaggaccaagacgaggttgtagcctagaaacagaacatagcctaaggtggattggtgtgtcttcggacaacctactcgctcaccattagtgtaggcgacgagctcagaggcggaggggtagcgaagaagtctgtcatcttgagtgccctaaagatagcgtagaacatgtttcatctccattagatggggctctt

SEQ ID NO: 184031 - DNA, 536 bp, Zea Mays
gctcatgtaagtggactcgggtagttctcattgtttcctgagctctacagtgggttcctctctatccgttgtccaacctttggagcaacaaatctcagtgcaggtggttaatggtcagaccctctagtgtacccaacatattccagatgttgaatggtctgttcaagggttcacttgttgttcaacattcaagctgctccctctgcctacttatgatgcaattttgggaatagactggttgacccaatatagtccgatgtatgttgattggaagcacacgtggctgtcctttcctcatggtaaccaatcagtggtgcttcgtggtctgactccattaatgccatcagggtcattgctgcagattcagcttgtatgcactttatatggggaaccattgtgtgctgtcaccgatctgtctattccaccttcagttcaacaactgctatacacatatgcatatttgtttgaagaaccaaaaaccttgcccccgagtcgattttgtgaccactccattcctcttatccaaggtgtcaggc

SEQ ID NO: 184032 - DNA, 324 bp, Zea Mays
gagggatgggtgctcgcttggtccatgggattgcggcatttttctctatgtgccgaaacatttctgctgatgtacatgagctggcaaggcgtcaacgggagactaacgacagtcttcgtcatcaagcttccactatgggtatgccctttgcccctcgctcgcctgacgtgcctctccatcctcctcccccggagatcaatgagtggcaccagcaggcctacagggtgccatttatgtcagcagacgacgaagaagaagaagcctacgttgatgatcgcgagcagtttgccccgcctccctaccatggggatccgggtcaatcat

SEQ ID NO: 184033 - DNA, 625 bp, Zea Mays
taacaacttcaacttatttagcagccgaagtcatactattttcacattggtgagttcacaattttatttcagcatttagtgattactgaagttctgcaaatgtttcacatatattttttcttatgccataaatactcctgagttccaggattcaccactcaccaggtcatatttatttaccacatttgtgatatatttctctcatcctttttcttaatacaaagatatatcgctatcttgtgtgttcgagaaaaaacccacatctatgatatgctgtatttctttatctgacccatagcatatctttgttctttagatgattgaaagtagcgcccgtggtgatgagtatgatggcgtcatgtattcacagctcgtacgttgttctggtcctatgaaatattatgtttccacttaccagtttccctggatttgtaataccatttttacacaattttcattttctagaatttgattgatctagctggctctgagagctccaagacagagactacagggctaagaagaagggaagggtcatacattaacaagagccttttaacgcttggaacagtaagttctcattggcaatccctgtgacaatggctggtttcccggttattatcag

SEQ ID NO: 184034 - DNA, 330 bp, Zea Mays
ccgggatcgacggccagcacccatcgtccccaacgcactgaccgtgcgcggcggcgccgcccagctaatcctctgatgtgagcacggcggtgaactacggatcagcgatttggcgagctattccgaacgcggtgatgagcaatcggtagtggtgattatggcgaactcaatggggacaatcttaccggtggttgattggtgtagagagccgacgacggggtttggcggcggtagcggcctccgccgagcaattatggaggtgcaggggcccttctcgtccagcgatgcgatgagcggtttcagtggtgtcaggcgaaactccctacacac

SEQ ID NO: 184035 - DNA, 318 bp, Zea Mays
gggaaatttgcgtgtgctggtggatgatcgagggtgggagcgggtgctatagcttcgggatgacttagcgcagctgcccggggctcaatttatagtgtccgcgggcggtggtgctcaatttggatgaagatgtgcggcggccggagatagggaagaaccctcggtgcggtgaatacgtgtccagaggcgtggcaattgctccggcgatcaacggtgagtaggggtaagttgtggcgatgcggtgggaagggtaaacacgcggcacaaggccggagggcggcggtcaccggcgtttccacggcggcacaggcagaccgc

SEQ ID NO: 184036 - DNA, 674 bp, Zea Mays
gaaaaagtggttgccgcttgcggaattctggtacaattcttctttccactcctcgctgggtacttctccttttgaggtcttgtatgggcgaccacctcgcagcctgggactgtctgcagttgatgctattccagttggtgatcttcagtcttggctggccaatcgccaattgatgactcaaactatcaagcaacacttgctgcgtgcccaacaacgcatgaaacaccaagctgacagaaatcggtctgaccgtgtgttcgctgtgggtgatatggtgtaccttaaactgcaaccttacatccaaagctctgtagcggtgcgcgctaatcacaaattatcctacaagtattttggacctttcaaaattcttcagcgcattggagctgtggcctacaagttggagctgccaacctcttcctccattcatccagtgtttcatgtgtcgcaacttaagcctagcgtcaaaccttctattttggtgagcccgtccttacctcctgataatgtggatgtccagtttcctattcaggtgatggctcggcggtccatttcgcgcggcggacacgatgttcgtcaagcgctggtgcgctggtctggcgccgaaccggctttggatacctgggaagatgaagttgccttacgccaacgttttccaactgctgctgcttggggac

SEQ ID NO: 184037 - DNA, 383 bp, Zea Mays
ggcctgctggccgttccaagcccaacgatggcgcgatgatggcggtgaccaacctggggggttgccttcgtataaggacgtgcttgtctcctccacaccgttggtctctcaccccgttgccggcgatggctgggtgaaggtcgttagtcgacgtgctcgctggcgccgtccccgccctttgaagcctccacccagacctatccttgtcgacctgtgtgggaagtgcttcaactatttctccccctcccattgcgcggcggtgtgccgttgtccggtgaggtgcttctcctacgggctgcaagggcaccgtgctcacgtgtgcccgcaccggcggacgacacctcccaagcctctgcggtccaaggtgtggcggcctgtctccc

SEQ ID NO: 184038 - DNA, 419 bp, Zea Mays
atttttagcaatggatccattctccttgtcttgtctatcggccctatagttcttcctggaccattttatcttaataatatccttgttgctcctaatattattcagaatctcctttccatttgttggtttaccattgacaacatgacccatttggcctctctgtgaaggatcttcactctaggaatatgatcataaggtccaatagtttgggcccctctactccccgctccttccaccgtcgccgcctttgtcatctgccttggtcgctaccgctacaccttccatctggcatgaccacctcgatcatcctggctccaaggcccactcgtcacttgttaggtcatttgccattcattgtattgaaagcattgctgcttctttatgtcatacttgccaattgggccaccatacttgtcaag

SEQ ID NO: 184039 - DNA, 279 bp, Zea Mays
ctcgttcacctgttctccctgaaggacattggcagcagacagggtgaccaaacaggacttgcacctgatgaataagtcgagggggtctgtggcctcggcaaacgctatctagtgcgacaaacaagtagaaggacatcaccataccgtctgggagcaggtgcacactgtgggttttgccggcggttgtcagcgctgagcaggagcacaagtgagttgaggatggaccttgtgagggtgttgaggatgatgagtgtttagggcctccttcgtgtccgagag

SEQ ID NO: 184040 - DNA, 325 bp, Zea Mays
gatcgggtgctccgaccatcggtatggggcgggaggaccggtagttgccaccagtatctggcgatcgttgagcttttgttgtctcttgttctccggcgatccgtgtccaccgaaaatgacattaacctctctgtcgacacgcgggaaggctccacctcctccctcctcctgcggctggggttgtcgcggttctcctgatcctcctcgcggcgggggaggaggtagaggttggaagggtcggccatgcccgatggagtgcttgaagtctctgtagttccaaacggtgtggcgcatgtccttgtggtacaggcactgggcgtcgagg

SEQ ID NO: 184041 - DNA, 387 bp, Zea Mays
aacacacattgcatactgaacatcccaaaaaaaacagtagaactaggaaaatatactcgagcacaggaaaggatgaagtaaaacgaagagcaccctcaccggatcgacagtgccaccagatgccgggacacaaccttcgcgcagtggaactccagacccgcctgcttcaccccaggttgctgccgccggacagcgaaaatggatcccgtcgggacaccctcaccctctgccgtatataccgtcgcagccagctccaccacccccggccatggatcccgtcggaccttcccctcctccaacatggatcctgctgcagccaactcgccccccgccatagatccagtcgcggcctcctcgccctccgacgtggacctcgtcggaatcgca

SEQ ID NO: 184042 - DNA, 709 bp, Zea Mays
gttttaaggataacggaagcccaagatatttgcatgggaaattagacaactggcaaggtaatgatgcctgcactgaagccagatcttcctcatcacaatgaattgggaaaacattactcttctgaatgttggtcttcagaccagaggcttcaccaaaaagatgtagaatccccttaaatgcctcaatatcaaccgcatccggccaaagaaaaacaaccacatcatccgcgtataaagagatccggtggtgaaggaatctcgaagaaaggggctggaggacccctaccgcagaggcacgctgcaccataatattaaggacatccataaccaagacgaagagcataggagacaatgggtccccttgacgcaaaccccgccgatgatgtatgacttctcccgggcatccgttaagcaaaatctgagttgaggaagaggacaacaaaccgcaaacgacgttgcaccaaatctgtccaaaacccagcctaatgaggacttcaattaaaaatgcccaggaaacactatcaaacgccttagaaatgtccagtttgatcatgatacggggctgtttttgttgctgcaaaaaacgggtagtgtgttgtaccagcataaaattatcttgaataaaccttttcttgatgaaagcagattgattaggcgagacaagatgctgcaactgacaagccaacctattagccataagcttagacac

SEQ ID NO: 184043 - DNA, 483 bp, Zea Mays
gagcttgatgatcatgttccgagtagtgcgatccttcatagaaacattgaaggggtcaaactccataaaacacgaattatcagtagtgaagcaacgaatagaaaggagatcctaaatgatatcaggggtaagaagaatgtcgttgagttacaatagcccgagaagaaccaagccacctgctgaggtgatggggaggttggagccattatcgacaacgatagatagagtagctgaattagaagggtggaagagggagatgttattggcgttattggtagtgtggttggaggtatcgaagtcggccacccagttgatgaccatagcaggtggattcaaagcaatagtgctaaacaagttagcagactgctgatcccagctgtcgggccatggactccaacttggcagagtggatgcctatggtggaaatgctggagcctgcaggggttcagagccaaggatgtcgagcggcccaaacagtccaaa

SEQ ID NO: 184044 - DNA, 776 bp, Zea Mays
atcccctcctcgccgagccgccgccggggataagcgtggggaagtgagcagccaaaatctaagacaccgatccccgggcgtgagtcgcgaaggtagcggcggagaaaagggcggagccacaacgcggtcgtgagcccgcagccaccggttccgtgcggctagacggagagagaggtatccgctcgctgcaccctcttgccgtgacccgcgagacgctaaaaaaagccgacgggatttggcaacttggcggtttggttcggctgtagcgtgcgtgcgtggttggtggcatacgcggccgtctcgttgcttttatttatttcgatccgttgatgtttgattctgcgtccgtccgtgcgctgcttcgtgaatctgctgtgtcgcggcggcggcggaggaatccgcaccgccgtgcgtggggttggtagatctgttcatccctgcgtgtgtttccgccgctgaggcgttttcttcgtaattcttttcgggagtgctctgttacgctgcggagtgggtcgcacgctcttttctggatgcctatggtgttgacatgtgggcgtagggaagggccgaagcccgaaggggacagccttgagctttctgcttgttttttcgggtgctttttaaatatgttttttcacgcatttctggttcccttttcccccgcgtggtgttgtagatcgatgaacagctaagcgaacaccatctgatgttcgtcgttgtttgactgttgcatgacaggttgcgaggcttgctgttcagccatgtcgacggcgcaa

SEQ ID NO: 184045 - DNA, 394 bp, Zea Mays
cggttggctaagctggacaaactgcgacaggctgttaagagtgatgcagagatgaggttcgagagggaaagggaagaactcggaatgaaagttgaatcacgggttcaaaaggctgagaacaatcgtatgcaactaatgcatgatcgtttgaagaggcaggctgcattagaggagaggacaaaaaggtactttatgcaaagattgacttgggaaaacaagtacagggagcgtgtacaatctgcaatacagaagtgtaatgctgctgagaagagacgattggggctgcttgaatctgagaaaagacgggcacagagtaggctcttgcaggttcaacttgctgtgaagactgcctctaaccagagagaaactgagaggagcaagttaaatgagcaat

SEQ ID NO: 184046 - DNA, 868 bp, Zea Mays
gtacaatccacagcttgttgcgagacagtttggttatgatcaggctgctcctgtgtccattgtcagggaaatccactttgagggaatcgagttgtggataccaagtatcggtagatatgggatgcctggtgaagattatgttgcatggtgtagcagcagtgggcagttctacaagcatcaaaatgatgtccaatatggttgctcggtattacgaaatcatgaaaatggggctatttcgtcgcaactgaatgtaaatgagaaatgtgttgtagtgccaacacttgatcaatttatcacccaagtcactaggagagaccacatcaattacattgtagaagggcagccggagaaaatggataatggaagtcatgaggatgaaacagaggtgattgtctgtggccttgaagcttgtgtcaaggatagcagaactacttcagtgaaacagaatgtgcagaaacaaagagataaatttgctgaagatggaggtgatagtaagaagaaaagaaaagtagaaagtaacacgaaaaggagttcgttgcaattggaaggtcagaagtattcttcactccagaaagctctaaattctgattctaagaaatgtgaggagttggctcaagttgacagtgatgatgaatgcattgttctcgaacagcccaagaataaatgtgaagtaataaacctggatgatgatgaggaacagagtgtttctaatcgagaacatcataacatgcaacttgtcctagaactggaagagtttgtccgctctggtcttctctcgcaatgggaggaaagctcagatgaagatgatgtaagtggaagcaagcaagaaacccagaagaaaagcaacaatgacccctatgctgaagca

SEQ ID NO: 184047 - DNA, 578 bp, Zea Mays
aagtctgatgctttaacgactctcactcagtttttcgcctatgtgaaaacacagtttggcgtcacgattaaagttgtgcaatgtgacaacgggcgcgagtttgacaactctagctcccaaacattcatcctcacccacgatgtcctcctacgcatgtcctgcccctacacctcacctcagaacggtaaagttgaacgcatcatccaacacaattggctctcttctctttcaggccagcatcccaccaaccttctgggttgaagctctccacacggcaacgcttcttctcaacattctacccaccaagacccttcatttttctactcctcacttcgccctcttcaaaatagtaccctcctatgaacaccttcgtgtgttcggttgcacttgctatcccaacctctctgccaccactagccacaaacttgatccccgttccgctaagtgtgtttttcttggctactcgtcgcatcacaaagggtaccggtgtcttgaccccctatccaaccgtgtcatcctttcccgtcacgttgttttcgatgagtccacttttccctttgctgaacagcaacccactg

SEQ ID NO: 184048 - DNA, 296 bp, Zea Mays
tccaaatcatttgatgcctcattttcaatttcaaacctcctatggcactatttcacgttcaaacgtcgttttcgcgtcgtttgacctctcgatcgccatatctctcgatttctgtgccataacactctgtgtatgtatttattcacatttcatatacttatgactatgtgactaatacgtgctcacctcttctgtcatttcagtgaccttgcctgcccgtgagccgtctcctgtcctgcctggattctctccctctcgtgtgagatttccaggtagctattcgttcttttgtcatc

SEQ ID NO: 184049 - DNA, 325 bp, Zea Mays
aaaagcctaaccaccgacctggagagaggagagagctttagcgtcggccatagaccagtacacaagcccctccttagccattctaacagcagaaataacactaggacgacacttatcaaacacacacttattcctatgcttccaaatgatccaaacgcccaagatgaccatggagttgagacagttcttcaggtggactgcaactctagaacaactattcttccaccaggtttcgaaggagagatcaacttgttggggagacagttcctgcagatttgctagcgtgaggaactcaaaccaaatttttttggcaaagacaaaccac

SEQ ID NO: 184050 - DNA, 498 bp, Zea Mays
gaagaagcaggagttattcctggagggacttattgggccactccaatatcagttgatgtctcctttccatctttccaaagacttctaaacaaggctatagctctggaacacaagcgtgttgagctaggtgagatgaagaggaaggctaccaaccaagggcatgctggtattagtactcgtccctgtttgtccctgttatgcttcatcgcaaggcaccccaatgcttggcagtcctaggcaaccgaattccagaagtcagtccctcaccaatcaagcattccggtgggaccagttggccctaatacttcaacaaacaaggcatgcttgaaatgtgcacaaattggtcattatgccaacaactgccctaacaaggacgcctacaccactccagctccaatgaagcagggtcaatcctcggggaataaaaatcaggcctttatcaatcaatagaggacaacaaaacttctcgcgtggcaaagtcaaccatgtggaagcgga

SEQ ID NO: 184051 - DNA, 345 bp, Zea Mays
cgaaggctgagccgatgtagcatgtttgctgccctcgctctcgtgttgcggtagtgagtgaaaacgttgccctcccccggatcgcaatagagagggagggcaacaagatgtgatttgtattatttatgcaatgtggccggcgagccccttgttgtgtgtatgtaaactatgatgacaccgcatgctgcgcttgttgtgaggttgtcccgacttgtaatcgtgctggcgtggcacgtaaatgggatggggacctcgctttccacagcgatgttggacacttatgatgcatacctggctgtgcccttaggtggtttttgttcgaccgtgtcagatagtagagacttc

SEQ ID NO: 184052 - DNA, 839 bp, Zea Mays
ctataaaaactatggccgccccatttcatcctttcatatacatccaaccaaacacatccttagagctgcaagaaacccctctttcgggacgaaagtttacctggtccaatgagcgtgacaatccatccaacacctgtccggctggaccgtgccttttgttcagttgattgggatgatatttttccggatgctgtgcttcagttcaaagcactacatctggaatttcagatcactgccccttgttattaggccttaaggtctgctcccagggtaaaaggaggtttcattttgaaagtttttggcccaagatggcagtttttttggatgcagtcaagcaaaactgggaggcacctgttactgctacttgcccagtctagagtttatttatgaaactgcaaagactcagcagagctttgcaaaagtggagccaacgtaaggttggcaacgtaaagttgcagctcgcaatggctaaggagattttgcaccggttggaaatcgtcagggactctcgtgctttatctcaaggggaggattggctgcgcagaaagctcaagggtcattgtttggggctggtttctctggatgaacttcatttctaaacggcaagttgaggacaagttatatatttctcaggatgagaaggaggagatagtggcagatttctatgagaagttgcttggttcagaagaggagagggaattttgttttgaccttgcagccttccacatgcagcagcagcatgatctgtcccctttggaagccccttttgcagaagaggaagtttgagcagtaattagggacctaccgatggacatggcccctggtccggatggcttcac

SEQ ID NO: 184053 - DNA, 384 bp, Zea Mays
cggttcctcccttcttcgatgcattcatgtatgaaatgaaatctagtgtctatatgtttactgcgattgtggaagacatgattcttactgagctagatggcagattggttgcccacgttgatcttcacagcgtcttccttccctcctctcagttctgctagcagacgcgagatccgcattccttggcaagcatccgttgttgcagcaatatactctgcctcacatgaaggcaaagaaataaccttctgcttttgatattgccagttgatgccattgttgttgaggaagtagattacgcctgtggtgctcttgcgggtgtcgatgtcccctgcaagatcgctgtcactgaacccaacaacatgtgcgttcagcttcttcctcgag

SEQ ID NO: 184054 - DNA, 486 bp, Zea Mays
tcagtggtggtggactgagatgataaggttgcaggtagctgtgttagattatcagcattgttggcatacaggagcgcatacaggagaagatgtttgagaatgagaaagatgaagaagagtgcttgtatgtgttgtttgtgtcattctgtggccaatggcctgctgccataattgtcgtgcaggattgatgttacttgtagaaggtttgaacacaatgtgttttgtgttcctagctttgttgctagaaacacttctagttatgaatttttatggttaatggtgtagcactaacgtgttgcaatcgagataatttatttaggtcctatgttgtagtcaactcaagaagtcagcctattttgtcaacaattcaacatgcaccagcggattgggtatttgtgacaccggattcatgatctaagggtttctccataaaatatatttgattgcttaaaagtagggatttgggtaggactatataccagtgtg

SEQ ID NO: 184055 - DNA, 445 bp, Zea Mays
ctccttggtgaacgcgacgcagccgaagacccgtaggtgagagaccgccgacttgcgcgcatgccaagcctcgtacgatgtcatcccgttgagtgccttggtgggtgagcggttgaggatgtagaccgctatcaccaccgtctctccccagataacaaccaacattcccctctgtttgaggagagttcgagccatcttcacaaccatttggttacgttgctcgacgatgccgttctgctgcaggctgtgtgacgcagagtagtggagctaaatgccctcatccgcgtagtacgacatgaactcagtcgtcgcgaattcgtcgccgttgtcggtgtgcagcacgcgtagcttgcggccgcactctgcctccgtagtgacctacacacgcctgatggcgttcacaacgtctcccttgttgccaaggatcatcacccacatgtagcgg

SEQ ID NO: 184056 - DNA, 386 bp, Zea Mays
ctcggccagaggcagccatgccttccacttggctggagagttgtagatagtgcaacgcaaatacatctccagacattgattaacgcgttcggtttggccatccgtctgtgggtgatatgctgtactgactaacagctttgtgtccaacagtttgaacagccctttccaaaaggcactagtgaaaatccggtcacgatccgagacaatagaagcaggcacaccatggagtttaaccacatgagtgagcacggctgaagcaacttgattggcagtgaaagggtgacgtagaggaataaaatgggcgtacttagtgagacgatccaccaccaccaaaatgcaattgaagccatcagagcgaggaagaccttcaataaaatcgagagaga

SEQ ID NO: 184057 - DNA, 419 bp, Zea Mays
agggcgccatggtgggcgaagacggggagcagggcgtcggatcagggagcgaggcgcatagaagatggagctaggaagcagggcgccatggagggcgaagacgtggagcatggcgtcgagccggggagttgggcgctgggccggagagcggagtgcgagcacgaggaagagggaggtcggcgctagcgtgcggctgggcagcgtggaggtgttcctgtggtgttggcggtgccggtcgcaggtgcaggggaaggtcgtgcaacctccatggaaagggaggcgggcacggggaagggggagaccggcggccacgagaggtggctcatgaactgagaagagtgggagggagggaagagaagataggcttgataccatgttggatagaatagaaaaccctaaccctaattagggtggctaat

SEQ ID NO: 184058 - DNA, 372 bp, Zea Mays
atcatgattgtcgcattataattgtcttttgtgcatcaacatgcttctctcacctttattccaatgaaaagaacttgtgaataatgtgatgtactgctatattagaaatgccttacctcgtgtcagatcgataagtcttgttaggtcgtgctacgtgtttctcttgccttgctagctaggtggtattgtaattgttcacctctctttgccaataaaaattgttgcctgttttgcccataaaaagaccccccttctccaaacaaccttgagtttagcaagtaaaacctcttaaaaaaatcatgatggtgttggtgttttctagcccttgtgtgttgcgctattggtaatgcacctgcacagcttatagacccc

SEQ ID NO: 184059 - DNA, 356 bp, Zea Mays
cttttgactttctgtttaatgctcacatactggagaagaaaaatgtaattagagatcaatgttttaaatcatctagtcgatcctagacgccataggggcaataaggtcgactagtcgacgattagggtgactaatcgcccctagtcagcagtagttagtcattcactcgtcctactgcttcttgccctttgaaacgagctctctaatgttttgaaacttgttggacatctttcgcttgtagctaacatacactaacttgtttaaccttttatgctctaagcggtttctctttttggtatggacctacataaaaaagaagaaaacacactaattggtggtctgggtagcaacttcac

SEQ ID NO: 184060 - DNA, 357 bp, Zea Mays
tgttagattgggttgatcaggcctgccatatgtgtcttggcgtttatggtagtcgatcatagattaggcaaggatctctattgattgggtgttttctataaaccttagatgatccttgtctatatattgtacaccacttgtacctatataatcaagctactataccccaagccatatctcctttcatggtatcacgagtccatgtttcaccttggcttccccctcttccgctgccctagcacactggccctccaccatgctgcgtttacgcggcggcctcctctgtcgtgccatggctactctcctccccaccccttggcaccatgttccccacgccaccacagtcgtcgaagggca

SEQ ID NO: 184061 - DNA, 385 bp, Zea Mays
atggaatgtccaccagccaaggcgcgaacaacgtgttccacggaggggaagaaagccaggtacgagttggacgcagcacgtcggatttggagcgcatcagcctcaagaccatacttcgaggcgagtgcctccaaaatcacaagggcgcagtcaggaccctcttggccaagaacattgacgatcaatgcacgatgaaaattctcctccgcctggtcgagcaaccttgaacgcctaagaatatgcgaacgaggggggtgcaccaccgaaggcaaggaagatgaagccatcgatgagacccgaccaggtgctcccaaatcctcccggtccatccttcggtgcctctgtccacggcgagtgcacttcatcttcttcattccatcaccgc

SEQ ID NO: 184062 - DNA, 402 bp, Zea Mays
gaagaatggttcccactggttgaagttgggttttgccagttcaagagtcaccgggatgtggttcttgacattgatcgtcgcatagggggcgacaatcacagcgggagcaggagtggtggcgtcggtcatggtgaccaggggggaggaggtgcggcgcaacagggaggagttggcgctgcgcacagcagggagatgggcgcaggatctagagagctgataccatgagcctgattagcaattgattgtaatcaaggggtcaccctgccttaaccctctcctgtgcctgatagactgaccgggttttccattcaccaaaatttgggtagaagaagatatgagaagattaaaaaccagattgcaccaaatctgtccaaaccccaaatgatgcagcacttccatcag

SEQ ID NO: 184063 - DNA, 423 bp, Zea Mays
ccggaagatacacactcgtgaaatggaaatgcacacgtaggacatattctcaccggcaatcgacagggcgaaggggttgttccgcggtggccgaatctcgcgcggcaacggagaactccctggatgcgtaggttgacggcgtcgggcaccaatgtgcttcgcgaattggcgagcgaggacgagcagcccgcgccagagcaccacggttccagcaccccctcctttctccctcggatcaatccggcagaccacggactctccctctctcgcgcttcttctcgtctggcggcggctcacgattcggaggtggacacggtgactggtccccacggtgcgtgctacttatggtcaggtggtgaggagcttgcctggtcgacgggccgcaacgggaggcgcgaatctctcgaaatccgttgagctcac

SEQ ID NO: 184064 - DNA, 425 bp, Zea Mays
acagtggcatatttattaatgaaaaatacttttatcttggattgcgtgggcatgtggaggatcagttcaatcctaaaaacagatttgtggtatatactgttttggacaattttagttgtatctaaattcatacatgtagctctaaaacactatcacttgcacaggtgaccattttaaccatgtttactctgataactctatactcaacgatcatccccatttccctttacgtgtccattgaggtattttgttcaacttgtttatttaggatgacctaacctatgttcgggctattagagcttatgtttcctttggctgccagatgatcaaattcatacagtgcacacaattcattaataacgatcttcatatgtaccatgctgagagtaacacccctgctttggcacggacttctaatcttaatg

SEQ ID NO: 184065 - DNA, 638 bp, Zea Mays
ggaagacaaagcccttgattcgtctaagtatgagagcatctatagaccaaagaatatgattggccctgctcctagggtaggatggctcccgaaggtacgactctacgttcaaccctactctcgacggtcttatggtgttggcgatctggataaggcttctgctcatcatattaaatgtgacaaacttactcccttgtccccaaaaggaaagcaaacaaacgtacggtgcttgaagccatgacataacacacctagattcttcatatgcaagggacattggggtgaatgctctaactaaatatctaaaactctaggatatcctggcaacaatagagttgtgcccagaggttgaggacaagcacgtttggaggttgtcatcctctaggcaatattgtgctaagtaatcttatgagggattctttatgggggcatcctctttggctcctatgagcgcattggaaaacttgggtgactggcaattgttgtttcttcatttggttggctatcaacgataaatgatggacaaccttgctaggaatggtttacaacatcatcctagatgtctattttgtgaccaagagttcgaggccaacaatcatctactggtctcttgtgtcttctctagacaatattggttt

SEQ ID NO: 184066 - DNA, 568 bp, Zea Mays
aaccaatttgggggaaacgagaaatttgcgagctctagggggtgattcgaagcacgagttgcttcactggttgcgtaactacctaaaggagcggatggtggcggcaatttatagcctctaacggcggtggcgcccaattttaccgggatgtgctggcggtcggagagaacaatggtactggcgcgtggaagatatggctttcaccgtggcgcttcctccggtgatcaccggttgaggagctacggcggctattggtgagctggtgcggctagggacgacgtggtgagaagcttggagcgtggcacaaccgcggtgaagcacggcgactccgatgacggtcatacggccacgtcgccgggcgaagggcagggaacagtgaggccacagtagctcatgcacatccgcgacgagatatttgcccggtgaacgaaatccatacacccgtggcacgcatcccggcgaagaggtcgccggcggtgaacgttttgcgctggcggtctgatccgcacaagcactgtaccatggaggagttcattcagtcgacctgacagtcataattcaggctcga

SEQ ID NO: 184067 - DNA, 350 bp, Zea Mays
aaggattgccactccatggacgacatcgtagccttccagcggaatggcatagcagttggcagtgaaggtctctgtgccgatgaggagagagagtcccgggtgaatccctgacatcccaccgcgtctctgttggccactctgatgttgattgctgggatggtggcgaggtgcaagataagtcgagcggcaaggatctggtggatgaaattatgtgtggaactcatgtccagtagtgcgatgagctgatggtgattgatgtcatcatttgcatggtgtcttatgtgcggatgcctgctagcgcgtgcagagatacgacaagagggttagatgtgtcctcccgcgcggcctcc

SEQ ID NO: 184068 - DNA, 290 bp, Zea Mays
gtgacactcagccatgccagcgcgctggagaagctcgacggtgtactgtcgctgagacaggaagatctcgtcggaggagcacgtgacggagatgttgaggaagtgatggaggtccccaaggtctgtcatggcgaattccgagtgaagaaggatgatgaagcgctgaagaagatccgtcgaagaggcggtgaggatgatgtcgtcgacgtagaggagtaggtaggcgagactctcaccctctttgtagacaaagagggagacgtcggaggaggcggtgaacccgagctggc

SEQ ID NO: 184069 - DNA, 614 bp, Zea Mays
cttctgggctcttgcaaagcatggcagctactgatttactacctttttgagtagctggcttcggaggagcagagacaacaaaggaggacattgcagcttgagaaaccttctttgcttgcttgtatttagtaccagaacttggttcagattgaacgggggcagcagcagcatcgtcttctccttctatactttcatcgtcatccaaaacaagtgcagaccttgtcttcttaagataagcttgcatgtcctttgaaacaacctctgggacccttgcacacttcatcgtgtcgccgaatccgccggcgaggtgctgtttgaacctctttattccagagggcaccactttcatgcaaaagatacattgcacgaactccttcttagacggatcaggccaccaaccgaacttccagccagggtcctgtgacttagccttccgcttcgaattgttagcttgttcaacaaggtctggaggcagacctgctattgccttgtcagcaagcgtgcttgagtctgcagcagttgacgaggccgacggaacatgatctgtgctgccagtttcagccacagaggacgccttccctcaggcaatttgggactgcgggaagatgacttga

SEQ ID NO: 184070 - DNA, 352 bp, Zea Mays
gaaccgattacttcaacggtgtcatacatgattggtagggatgtgatggaggggagggggcaatgcaggtgcaggtgcattccgaatctccttccctttctccggattctattgttctttgtttcctcctattcgtttctgtagtgagaaatgtcttcggtaagatttggttggtggaaattcactgcatttacttattattgtctcccaatttcctcttcatagtcaggaactttctggttcagtggaaatgtggaattgtaccaatgtagagtctagaataagtgtgcccttatcctcccagttagcataatgtgggtacttcgtttgtcatgtatggggcatagtgcaa

SEQ ID NO: 184071 - DNA, 419 bp, Zea Mays
ccctgcctggcgcagtcctggcatcctcggcccctacactcaggctcaggcgcacactgcgctcgcccctgttcagtcccccgacaaccctgctccacctatggcagcgcagggcggttgggatcaggctggcctcatcgccgcactgaatcagatgtccctccaggggtcctccccttgggtcctcgacactggcgccacaactcacatgtcctcttcggcaggtatactcctgtcccatctcccccctccttcattcggcatcaccgttggcaatggaaccaccatacccatcacctgtcgtggcacatctacactttcctcccccacctctacctatcgtcttaacaatgttcttgttgcacctgcacttgtgcgcaatcttttatctgttcgtcaattcactcgtgacaactctt

SEQ ID NO: 184072 - DNA, 370 bp, Zea Mays
cctggcccctgctgccgaagaaatgactgcaacgggccttgctgacattgatcccaatgggtgtgctccgcctgctgctgaccccaatgaggatgatgtttgtgctgttgctgtggaagatgaggaggaagagaatgaaactccattaactcggaaaaacagtcggcagttcgtcgccagcggtggtagtagtggggttccttctcctgccttgtccgcccttattggtctgcaagaactgtccatggccaattttgatcaagctctagaggatatggtccctgagaacttgttgttggaacctgcagatgctgatgcaacagaaacttgtgcagccgtgccagatgctgggttgaggtcatcccgtgcc

SEQ ID NO: 184073 - DNA, 380 bp, Zea Mays
gccgtagaggaagtagctaatgccgaggacgatgctgtcaaaccgccgtggacgaggcgtgctctaggtttgctacgcctggaaacgcgtcgtagacgaatgcacgtgttggtgttgccagtaccgcacgtactaggtagaaggctccaaccaagtgtcagtgtctgaagggaccaacagagaagacctccacgacggttgtggtgcagcatgtcgggagtgctgttgcagctcacgattgtcagagtggagtagacgaagtagttgaggatgagatggcgacgctggcaacaaggttgtgctggaagaaggtgaagaggtaggcatggcgacgcatcgaggattctggagtcgcggcggcgagagccacgacacacagg

SEQ ID NO: 184074 - DNA, 451 bp, Zea Mays
ctttacgcataaagcagaactgtatgaagtgcttgtttttcagtcataactttacatgaatttcctaaaattgagtacatttgttcaggaatgaactgaaaacagaaaaaggcatacaatctaccacatggtcagtttgttcagtttacaacattcatgttttatggttattggaaaagaggtggtctgttctgtctgcgtaagggaactattctatttttatttagggtttagtaaactgaacaaactaactcaattttaggaatggtatgggactactgctgtataagacaaacgttttgtctgtttgcagaccacctcttttccaataaccagaaaacagtaccaaacagtacccctattaaagagttttatcgtaccacatgttgaagtacatttatatcctattccagtcacaattttactaatcagtttggttattggattatga

SEQ ID NO: 184075 - DNA, 486 bp, Zea Mays
ccggcttcgcttcaacccacactagatatccccaatgtaagtaatacaaacgagctgcaatctcttaagaattatgtagatgaacagcgagaacaaatgcaaagtatcataggggggtatgcaaaacgactataggagactagcacgtgcatttgataaatctagcattgcaaattttccttcgcacgaggttgagttagggggtaacacacgtaatacatcggctataggttgtcacgaccaacccctttatgggatgccgatggacacgtaccctgaacaaccacaaatcggcagtaaatcggccgatctgcacatgtccggactgtccgcccgtgatcgcggaccgtccgggctagccacagccgggcccatttttaatgagttacccagacatgcacccgagccaccacatatggcacagaatctgagctacccaatcggactgtccgcgtacaacgatggacggtccgcacataatcacgg

SEQ ID NO: 184076 - DNA, 777 bp, Zea Mays
caagcgtgaacatgaggcaaaaagtgtaagcagtgcaagtgatgaagatagttgggttgatgtcaagattccagaatctcctgcaggaaataaaacaccagaatctcaagaaaggagtgtgattcgaacctgccgagaaaatactctggtatgtaattcattttttttggttctgcacaataaacattggttaatactcatttgtcaccagaaatttttacttgcagtggttttgacatagatcggctgaactgtgtcaatcctgtagaattaatccaatccacaacagcatcaaaaaattgatttgaatgcagattgtagatttgtcaaaccgaggggcattaaaatttctgtatacctctgaaatgaaacgaggaagtgttgggagataagagatattgaataccagagataaccagatcagttgtgtgtttttaatactttgtatgagtttgttagataaaataaggatgcttttttctttgttaggagtttcttattgagttcttttcaaggtatctgaagcctttttattagcagtacttttagagaagtgggattgatgagcaggcagacttacaagtttcaactttggatgtagtaaaaacatatttcttatcttttgttatcatatgtattgcagccacactatgaagctactgctgagatgactgatgtgaacccatgtgtatctcttactgtacgtcttctatcacttcagtcgaagacatccgtgcacattgaggaaatctacatatttgctgatcctgttgagcc

SEQ ID NO: 184077 - DNA, 633 bp, Zea Mays
attctcttgatcatgaaatggcagtaaggatagaattttttcattggttgagtttgtgcctgaaggctgacagtggatctatttggcatatttgtgctgccatggtgctttcatcagtctaatattatttttccctttacttcagggttgttatattcaaaatggagctaacttttcttgaagcatatgcagttatgcacatgtaaaatgagagcagtggatgattaggagataactagggaacctatacttcttgtgtttcctttttccttgcagaagaggtggttctgatctgtgcaatacttacccgaagatgaactacacagactgatttgcacacaatggttcccttttttcttttggggaataaactgtctccatacaacccaaagatgaactactattttttgttttatttttgacttttgaggccactcattcaaatgaattacgcatactgatttgcacaaagaatgatgtgtgcaaggcatctacatgttatctattttaagaccacttatcccattttgactatttttacgtttatgttctttttttcaattttttgtctgcatataggttgagtgtcagtcatcttgttcttccttatgtttgtccatgtccttattctac

SEQ ID NO: 184078 - DNA, 398 bp, Zea Mays
tgacggtaagggccggtttggtgagctgtgcttgccgaagacgcgtgatgaagtcgaaatgtggccccaacaggactaatacagtcccttcctcaggtgtgtcgcggcgggagagggcgtcagccaccatgttcaccgctccggtcttgtattcgacagtgaagtcgaagcccagaagccagaagcttgcccacccaatgatgttgagggatcgtcgcgaggcgctgatcgagcaggtacttcaagctatagtgatcggtcttgacgaggaagcgacgaccccagaggtacgaccgccagttgcggacgacttggacaaggccgatgagctcgcgctcataggcgtcgagggcgcggtgtcgtggcgctactggcctgctgaaaaatgccaccaggtg

SEQ ID NO: 184079 - DNA, 346 bp, Zea Mays
ggtcggggtacctctgtcgggtcaagggcaagcgtcggatggtcggtatctggcgggagaagtagggtagcggtcggctggactggtgtcgtgaggttgaagacgacgggatagccatggatcataggatggacgactgggatcggatcgcagtccggatggggctgctggatcatcacgatcgttggtaggaagagcaacggtcgagatcataacgtgtcataccccttcgccatgtttagtcagggccgtcgatctggatctgacggataaaatttaatctagggcaataaaatccccaccgttgaatctcaatcttgcggttctggtcgcataccgattcatt

SEQ ID NO: 184080 - DNA, 790 bp, Zea Mays
ccagtttatacctcttgctgcaattcaaccaaaaagaagagaaagcaaaaggcgagtgcataaaaaaaagccgcactaatcagcaaaacaaaaaaagacacgtgcaaaaaaagagagagagaaaaaacagttctgaattttggtagataaaatttgtaagtgcaacaaaacaaaaggcagtttgtgtgccttctttttatagtttcagaaatcagattgctgttctcagcttttggtgatactatttgtgtaacggctcgcgtctctattacggtttggactaggaccagcacaacactattgtggaacgtttattcaacttgttgtggctaacgtggtactagctattccttggatctattgttttatcagccacctataaatccacaaatttttctacaacaccacgaggttgtgctagctgccactgttgttgttgttcttgctgtttgccggcacctcctgtattgcgtggtgagaatttgtaagaacttgcttaactagtttgagaatgagagattacaacaatgattccttgtagtttataggatcaaagatattttttattgttttcttgtctttactaaacatggcaggtgatatgaagatttttgagccaaccgaacattatattcaaggcatcattcaacacttgccttcatatgccggtaaattcgatcctcatgcatacattgattgggagctcaaggtagataaggaatttgatgagcatgatctatctcaaaaacaaaagatttatattgcctctaatgtgttaactgagcatgca

SEQ ID NO: 184081 - DNA, 428 bp, Zea Mays
gccgtgctggcgcacggctgagacagaatgtggcaaggagcaatactcttcttagattgatctttgctaatcctcctaggtacaaactaaggactttatatagtccagtacagacgcacataaactgctgccgcccctatttattctctaacaaactcctactatttctcctttgatatctaatctaaacaaacttatccttatccctcttatcttgatctcttggcgtggcctggcctatgggctgcttgggccgcctttcatatgttttacccaccataacaaaccgggtgtgacatcctccctctgccagtgtcacagggcgtgtggtcggacatcgccatcgacttcatcgaggtgctccctcgcgtgcggggcaagtcggtcatcctcaccgtggtcgaccggttcagcaagtattcccactt

SEQ ID NO: 184082 - DNA, 375 bp, Zea Mays
gacattgctggtcgaagaagaaccatgctgggctcactggatcacgagaatggtgactgtgacagccaccatggacgacatttcagcgagtggaggatgttcgcccaactgcgctccttctacaatcgggctggagttggatttggtggctggtggaaccgccacagcgagacgaagaccatcgtcaccagcaagcgggagaacgggtcgacgacgctggtgagctctctcatctgtattctacactaaattatgaattactcttgcattgtccgtctgtcatctgaaaatttatctctcgctgtatcggcgtctgaatggttggtggttttctcacaaggtccaattcgaccaggggcatgatctggtgctgac

SEQ ID NO: 184083 - DNA, 277 bp, Zea Mays
gtttgccattccttaaatgataatgcttctcagggagatctattttccttctatgaaacttgccaaagttacagttggatgatagcagatgagaaggtcagaattcagaatactcctacttcccttgcataaagttaatctgtactaataataagttattctgccttaggttgtgacattccaatcagctaaatcctggcgatacagacttgaccaaggactatattcagatggaaaaaagagtccatggttttccaatggcagcagcaaatttttt

SEQ ID NO: 184084 - DNA, 335 bp, Zea Mays
acagttcattgttttttcagacgctgatggctttcttggagactcgtggacggtgcagtgtgagatcatccagcaatctttgttgggaggtcagcctcaagatgaggacctagtgccagcggccccggcggacgggcaacagcttccctttgagttttttggcctgggtcaacctgtgccggcggcgggctgggatcttaattttcctcctgatgacaacgttcaagctcaacctgcagacaacattcaaggtgactgggaccagtggattgtcaatgatccccctgctcaaccacctctgcagccccttctggaccagccacctgatgagcagc

SEQ ID NO: 184085 - DNA, 324 bp, Zea Mays
ccaatctttactactcttaagacgctactgtaggcgtgcacattttggttctgccgatccctctgcccacccgcccctctgctccccgccatcaccgcgatgccagccgccattaacgccgatcctacgatccggggccctgcagcgcggccgccatcaacgcaccctcgatccgccatctacgagccccgccatcaatgctcctcgatctctgcttcgggcagacgcatcctccatggtcctcccctccgcatccgcatcctccgccatcgttcgcccgcccgcgtcgcgttgcgctccaaccaatctccgtggtcctctccc

SEQ ID NO: 184086 - DNA, 355 bp, Zea Mays
gcccatctacagtaagcaatataaaccgcttgcctcccctgccgaaaccctagcgctgccgtaacccaaaccctgcctgcgcccctgcccattgtctgccctctaccgccgtcatttgtccagtgcattcaccggcggctgctccaatacaccggcgccggctctccaggactccaccagcgttgtctccagaccagcaccggtgagcaatgacgaagaggacttgatgactggtgctggtcccttccttctcccccttttctatcttattatcagtatgtctacactctgcggtcagttgttcttgacttcttggttcttaccatcacagcaccagtgcattctgcagtctcta

SEQ ID NO: 184087 - DNA, 607 bp, Zea Mays
aacaataagccaataacatccctatacaatcagttttgcatataaaacagaattctttcccaattctgcatataaaacagacctactaacatatatgttgatctttcttgacaattgtatttaaaagtcgttttagcacatgaatcagaacggttagcatataaagcagctctactaacatatatgttgatctttcctgacataggttgatcgatggaggtttctgcggcataacagttggctccggtggcgatacattgatttgtccaaggtattttctttatatttttatgctcattcaagattttatatatagttgatacatgttttgatcatgcaactataaacagggtggatggaagtgtcacttgcatgatggttaattgagtctatgctccaaggaagctctacaacgtaagattttagattttacttttaatttttcaagattggtatatttgactaacatgttgattttgaattatagaattgtggaattgtttaagatacctgtaaatcctgggatttgtgttaagttgatatggtgagctatattctgcccctccttagtcaccatggttgggctcaccacccatttgtttagtat

SEQ ID NO: 184088 - DNA, 281 bp, Zea Mays
cgctggtggaattcctcgtcggcggtatagattcagatttgctgttgctcttgtgctgctctgctccccggatttctactactgcgagcttctttctagctgtgaggcactgagatggatccgctgctgaatgtgtgtacaattattgggccgtggcaggtggcgagtgaggcgctgctggtggtatgcaggagctaggaggtaggcaacaaccatacgaaggcaagggcgagcggagccgaggcacaccgcgcgttctgcgccgaccagcactgcccgat

SEQ ID NO: 184089 - DNA, 277 bp, Zea Mays
aagccaatgtcattgcaggaccagaatcatctgccgcaaagaagatagtggtagactatgtctacgcattcttgaggaagaacttgacggagggggagaaggtgctctccattccgaaagaccaactactcaaagtagggataacatacgagatatagggattatgctgggcctcaagttacaatcctatgtatcaacttggcctgaagtcatataaagtttatgtatatcgagagattcaagattcaatgtaaattattcaattttattccttcca

SEQ ID NO: 184090 - DNA, 306 bp, Zea Mays
gaatgatactgtttggtgaattacaagggcgtgttagccctgaggattcaaacaaaaaatttacggagattatcgatattccaggaatgctccaggtcctcgccggatggcgttgttagcctatacgcgctgggggacgccttcgtcttgacgatgaaaggaccctcccactttggctccagcttgccccgtgcctctgtccgagttgtccggacgagtacgaggtccccttcgttgaattctcttgggacgactgtgtggtcgcgccatgcctttgtttgagcttggtatttgttgagggcctgc

SEQ ID NO: 184091 - DNA, 489 bp, Zea Mays
acctcacctctctcttgggtggattttgtttgtagaaggcgactttcttttcagatgactgaggggctctaggaaggggatcgctagagatgttgggaaatgtgtcaagtgtgttcctaagatggttaggttttggaagccacacttgtttctgaggaggatctctcataggttcatcaatcacaccatctctcacagggatgactagcttagtagaggtggttttgataagcttgggagtggatgaaggtttctctgaaggtgtcaaaccactgcactcacccaccttcccaaagcaagcgacactcccatccttagtagcaaagcctaacctcggtccgcaagttcccctcttgaactgactgaccatcatgcccaactggggctcactgcacgacacccaactcaagatagatcgaaggtatgtgttttcttccttgatttttgtcttgtcgtgtctgcaggaatcaagggcagattgcaaaccct

SEQ ID NO: 184092 - DNA, 380 bp, Zea Mays
ggactgtgcagtcaatggactgcttatgccatatggttggctgtttgcagttttgttaagtggctgtgtggactgcttatgccactagtatatacgtttatggactgctataataatgaattgatgatgttattcatgctgtattttttaaccacgcatgctcctatttctccatgtttctgcagcttggtgattgggacaattgaagagagcatatatcaagatgacatgatgtttgtgaaatgcttctgtaggaatgacaggtacacttgatccatatttacatagcttctgaaatgtttcttacattcatgattgatgattcattacaagatgtttgtaatgtgtatgttacaatctgctagggggatacattctac

SEQ ID NO: 184093 - DNA, 308 bp, Zea Mays
tcgcggccaattgggagcaatccaaagttaaggggcactccggtgcaagatagttggcccagtaaagagagtttagctgccgcaacagagttcagtgaggcggggagcatctcaagaacaggcgaggtggatgtcgccttgcggaaacccaccgtgcaccagagtcaggatgatgatctgaagtccaagctcaaaattaagccaaatgttaacctgaaaatgaggaaagatatgaatgaggacttaaggaacatttctctccttcaaaagccagatgttgcaaaagatactgtaaacccagagcagga

SEQ ID NO: 184094 - DNA, 369 bp, Zea Mays
aggccatcatgagaatggaagcgccacgatcacagaaaaaggtacagaggcttactggatgcatggcagccctgagcaggttcatatcaaggctaggcgagaaaggcataccgttctacaaactgctcaaaaaggtggacaagtttcagtggaccacagaggcaaaggaagctctagaggcactgaaaaagttcttgactacaccaccagtactcaagccaccacgccgagccatgccgaatcagcctacagaagacctgttgttatacatctcctacacgactcacgtggtgagcaccgagttagtagtcgagcaaacgccggaaggacagacatatccggtgcaacatctggtctacttcatcagcg

SEQ ID NO: 184095 - DNA, 483 bp, Zea Mays
cttgtatgacatttttttgaaggaattggcttgtctaatgttaacatacataatcatgttgcgtttaaaacccataagatgaattgtttgaaagaaacgtatatgcatctcatgggtcctcggttcctcccagtcccatggacatacgtactatatctataaaaaggtcattcgaacatgtcaactcagcatctccctaaatgattctggattaggacggcttcgaccgaatttcgtcagcacacaaccaacaccttacgtagcccacccattgcactgcatgcccccatttcaattttgccatgccaacatgcaggtcactgccgtccatcttcacaaatatacgaaaattgatggggccctggtagcaagtccataactgacagcagtggtcagcgagagttactgctgcacgagactggtccactatcattgccattaacacagattacctgtatcacagactaaaattagaattactgc

SEQ ID NO: 184096 - DNA, 900 bp, Zea Mays
aaacaagaacattgtatccagtcagccgccccttgtttcatcatctgctgatttgactattccaaaggtatcaggaaattctcatatgcatgcctcctaatttctgatagcaagacactttgatgtagtggttgtttccattttttatggaatatctgtatccgagattcatgtttgcttgttcccctcatatatatatatatatatatatatttaacacagacaactgctacaccgttgttactagcttcacctcatcagtctactagtgtgtcaacgagtttgcatactggatttctgcgttctcgaagtacctcaggtggcttgctagcttaacacattcatgacaacattagttactcaagccttttaccttttatttacagttacattgtcatgcctatcttttataggattgcctaggcaaccttcatatactactggatttgggattgctttaaatatagagacacttgttgccgtcacggaacaaagagatacaccaattgaggttggttttgttttctgagtttcctcttttgggttaatacataactcatctcgtgctaatggacttttcttaacttagacacctccacctgaagttcaggacaagattctttttatgatcaacaatatatccatctccaatatggaagttaaggcaaaggaatttaacgaggtcatacaggaacagtattatccttggtttgcacaatacatggtcatgaaaaggtatcattctcaattactgattttgtatagatttgtctgacaatgctgaggtatacaaatcacttctcatcttaacagggcaagcattgaaccaaatttccatgatctgtatctgaagttctttgataaagtaaactcaaaatccttgaacaaggaaatactgaa

SEQ ID NO: 184097 - DNA, 469 bp, Zea Mays
tccggtcccatatgacaaaatcccccattcccattcagccattcctatcgtgcaagccatcacacactccggacgttgggcccacattgcagactacggacgcccacgtgacagccaccattagttttgcacacaccggacccacgtctgctcgcgcaaaaagttgcctcaatttgacactagcaggaacatttgaccatgattgctttctctaaagaaggaaggcttataagctggtagaagctatgttggctggccggtatggtcataaaaatgtgcaaaccgtgatgacgacataggtcgcgtgggctgtgtttctttggtgcggcccaagtagctgctaggaggcccgcacgcttcttaccctgacccagcttggctttagggtcagtctcccttgctttctctgcctagcgagccctcgccctctagcccttcctgctagcgccgtctccgtcccgtgctctca

SEQ ID NO: 184098 - DNA, 460 bp, Zea Mays
atcgtcttgggcgacaactataggtggacctccgccgtgggcgcatgtggtgtgccggtgaatcggcggtggtcctccggcgcggcagatcggcggctgggcgagggcgaccaccatatgacggcttggcggtagatcgactatgctcctccaacttggccatgggcactgggcagtgagcctctgtcgtgggtgcctgtgcggtggctcgttgccgtgtaaccacggccgtcaccgtggatggtggttcctacgacgctaggattggggaatggatactggggaagcaggaggctcatcagggctggcggctgcgagtctgcgaggggaacaggagcaggtgattcaggttaggtcaccgctacagtcagggagaaagatcgagcctgtgttctaatattataaatgttactgtactagcaacacatattgttgtcgcgtcctaattaatcaatacatt

SEQ ID NO: 184099 - DNA, 403 bp, Zea Mays
agcctgctgctgagtgagagtctgaagaatcgaagcaatagtagggtcaatagccggaggggcagcaggggtagcactagaactcccagcctcgtgatcatgtgagcgtggaggcataggagccggaggcggaggaggaatcccaaaatcatcatcatcatcaactgctgcatcctgagcttcgaactgatgaagagcagcatcctcggcctgagagtcaaagactgaagcagaagctggcacaggagcctcaggcgcaggacggtaggacccaaagacaaggcgtgaggcctcaagtgtaccctggaactgtggaggccgaatcagctgcgcaaaaatgtgacacaggtagtgagcatatggcaactgtcgacgagcacgtatgccatccaaaacggtgtcc

SEQ ID NO: 184100 - DNA, 601 bp, Zea Mays
gtcatgtcaggttgaattggttaaagatggaggacatgcatattttattaagtttcttgacagtttggatgctttcccagaacagcgtgcaatggccgcttttgttatagcagtcattgtggatgggtataggatgggtcaagaggcttgtatgaatgctgggcttatggatgtttgcctgagacatctgcaacctgagaattctcatgcacaaacagaacctttgcttttgcagtggctttgtttatgccttgggaaactatgggaagatttccctgaggctcagttacttggtctgcaaacaaatggaccagaaattgtaatatgcttattgtcggagcctcaacctgaggtatgatgccttcatattctgtgtactctctttttcctgcttcacaagatacatattaaacttttggtcttgccaggtcagagctgctgctgtttttgcacttgggaatctccttgatactacatcaaatagtcatgatgatggttccgatgatgatgaaaaggtgaaagctgaaataaatgtagttcgaagccttctgcagatctcttcagatggcagtccccttgttagatctgaggttgctatagg

SEQ ID NO: 184101 - DNA, 1201 bp, Zea Mays
tgagaataggcgaacacgaaaagcttctgtgtcgtccaattcccccaattgtgctagaaattggcctacgtgttcgtgagtgcctttattgccttcgcttgagaatttggagaaatctgacatactagtccccggaggatatggaacggtgtcccattgagggtcgtatggcctctgatgggactatcctaggccggatacactgacacctaatttatcccgaaattgttcgactatttcttctcgaacttcatccatagcgatcgatggtaacccatcggtcctcgggacatggggctcatgtggtcggttatcctgatgcgggccttctgcactaggacgatcaaaggtgacgttcggtataggcccctgaggcatacctgtttcataccccattgtcgtttggtatgaggtgaacctttctggctccctagggatcgaaaaatattcaacctcatgcatgggtgatggcatgctatgactacgatgtgctgtaggtggggtgtagtgtcgctgaggtgagtaggaaaattgttcctgacgtgcaacactctgtcctgtgtagatgtactcggaccgtccgacctgggtggccagacgatccgcgaagggactagacgacccagtactgtacccggactgtccagttgtgctggcatctcatgcgagccatgtggcgggctcggtgtggctctgaactgcccgacgtaaggtgctgaaaggtctgctatgaaatcggactgtccgaggttatatctggactgaccgacagtatttggcaccgcatgtgtgccacatggcgggctcgcgttgcactggacagtccgacatatggagccggacagttcgtgcgatggccagcggagtcagaaagttcaccgcctaatagatctgacttaatagatccgatctgatggatctgatctaataaatctaatctcagtcatccgcagcggagtcaccaaaaagtgtgttggcgcctttttgggccaaacactaatgatccctagaccccgctcgaggggaacgagaccttggggaacctctctacgagatggtagataaaatataagacaaataacactacctataatatggttttgaacttcacctctatgctagcaccttcttagggtcaactagcaatgaaccctaggtccttcacgtgatgtgcaggaccccaagtttggctctgcgaggt

SEQ ID NO: 184102 - DNA, 309 bp, Zea Mays
aatagaagaaaatcctcaggctttgcagattggattgtcatgtcttccaacttaatgctgaaacaatgtgccacttcttctaatacctctgatccaaggacctccgacctagtaccagtaacggtgacaagcaaggcccttctcaagtttaattcttcccttgccataccatccgagaaggccaaaacccgagatgttaaatgcggtggggaaacttcaggaatgacttcagacgccgacagagaatgtgaaacagccttgccactgcccagagttcctctgccacctttggaacgtcttctttttttc

SEQ ID NO: 184103 - DNA, 433 bp, Zea Mays
ttaagggtgctacgtggtttccttgggcttacaggatattaccggaagttcattgcaagctatggcgaaatcgcagcaccattaactgtcctattgaagaaggaatcatttcagtggtcggaggcatcaacaaaggcattcctcgcactcaaacaggcacacatgaccgtctccttgctgcagatgcctgacttgagcaagagttttgtggttgttccgacgcgtcaggttccaggtttggggcagttctccaccaaggtgcacgagcgtgtggcatattttagtaaagcggtggccagtggcggagctctataaaattaacatcccgagccactctataaaacttgaaggttactttaaacagcccctaatatattgtgcggctaattataccgctaaaactaaatatatcacaaacataaactaagataat

SEQ ID NO: 184104 - DNA, 402 bp, Zea Mays
catctattaacattaaaatattctgcataaaaacatttgcccttttgtttatgatggcaccatcaaacatgggaagcacttctaattatccaggagttttgatacaacacagcacatattccacatgcaattcatgatcttatgttttatacgtgtacctgaaagaatataatcatcttattgtttagtccttgtttagcactttggaaattaataactactgtataaatctactttctttgaaggaactttgcttgctcttgtagttcttgcagttccctcaacggagactacaattcaaatttgacattactattaaaaacaatagttggattgtcagattggcatcatcatgtttgttgtattcttatacctgcttctaacatctcatttcattccagg

SEQ ID NO: 184105 - DNA, 309 bp, Zea Mays
ccaggactgtaactcacaagccagcctttttagcttcaatgacaccctttccagaggacaggagctctgaactggcaggttccaagatgcagccaccacctccagaaacccagggaatttaggccaaaactctcgaagtggaagcatcacttccccatgcagacctctctgactttgaggattaagggacaatgatctgaacatgtggtagcattactatgaagagaagcatccggaaataaatcctcccaactgcttgggcagaatacatggtccaacttaacaagagtgggatcattcctctgattg

SEQ ID NO: 184106 - DNA, 329 bp, Zea Mays
gtttcaaacctgctggtggctttagtggtacccgtggtggcattcttattctgtggaacagtgactttatggagcttgttaactgtacccagggtgagtatcacatctcagctcatgtccacatgaaggaatcgaacgtcgcattcctcctgaccacggtgtatgggcctgcgagaaatggtaacaaggctgcgttcctacgcgaactgcaagacctcaagcctcagttgggaacatcatggctcattctaggagacttcaactgcatatacaaagccagggacaaaaataacaattgtcttaacctgtggctcatgaatcaatttaga

SEQ ID NO: 184107 - DNA, 630 bp, Zea Mays
ctgaaatcaaaataccacccattttatcgtggtctagaaattggcagcaagcctatgctgatcctaaccgggcaacccatagctactgaggaggcacacctcactggtggtccatgtccttggggccgagccaagagagcatgcgactgcggggctggctcatgcgccatccggatccgtggtctaggccacatctaaatggacttggaccacacttgccaccatgcttgttgcgcttggcatcatggcctttagagtccacaatcgcttactgttggggtttctaggtaggcggtgtagcaggggcagaaatgatagttggggagggtgcgagtccattggggcctgtggttgtggtgagcgccacggtgtgagctatcttcgtcatagccatctcctcgggctgtaggtcgtgcctcgtagaaatgtagggagggggttggtcctccgaagatgaaaactgagggcagtgaagtgctcgttgaagccacgaatgatgctggggatgagcgtgcattcagtgatgggcttgctgggctcgctgagcttgcagaggtcctatgtcatgcacttggagcgtcggtagtactcggagaccgtgatgtaaccttgggaggagcaaaattcttg

SEQ ID NO: 184108 - DNA, 357 bp, Zea Mays
cctatcacagtttgttgcccgtccttgtgacgagttactgtctggaggagaccacgacttgtatcaaaagaaagagtgtaattggagttcttcatttccactgttttggcttccagctttgaacaatcatatggttgagggcaagaaaattcctgttcagttgtgtatgttttcactgcagcaggaatagccttttcacaatcctgcccagtaaccacatagtaggtctccaaacctagtggaggaacataagctctccaataaaggcgatgacgaccagtcgaaatattttcatcgctgacaaactgccactcaggggaaagttgacttggcaaacaagatccatttgaattgaga

SEQ ID NO: 184109 - DNA, 400 bp, Zea Mays
cgtggttgtccatggtgcagtgtgaggaggacgaggtcgcgccaacggggtaggtggaggaagccgggtcgaggaggatggggacccaagaacagatgttctaaacacccgctgcctaggcatgaaggttggcgacggtggcaacctcgtatgccatggagggtcgacgactgggggctcccgcggagggtcgatgcaggtagagccaagcagatgacgcttagcgctggccagctgacgagtgaaagcatcctgtgtagtgtgttcgtgctctcatgcaagagcggcgacatgttcgcgctcccgtgcaataggcacaacagtcgtggcagcagtgagggctatggccaaggtagagtgagccgctacaacatcagggggcatgactggcggatttgcg

SEQ ID NO: 184110 - DNA, 370 bp, Zea Mays
aattcgaggaagcaaggatcgcccacctggaaggtgtaactcgaagagatgacgtcctcggagactcgtcatggcctctacggacagagcgacgccgcaggccaggatgcctagatcggcagctcgcctttcatgagcgctgagggtaggtcgatctggcttcttctctatcatcgcggcctagcaagatccgaaggagcgcgtggaggagtgagcgccccccgacaactcatcatgacctcgacagacggagccagaggagaagacggtgcgggaggcggttggctaatgaattgttggtcggcatggtctttaagcaggacccaaatcggcgtcgatggaaggtttgcgtcggtttggggcgatgtcg

SEQ ID NO: 184111 - DNA, 379 bp, Zea Mays
gttcctttggtttagttgaatacttcatgatcttcagcctcttcctccccaaacccaccgagacattcacagatccatcatacctctcggccgtgagatcagtaggattggatgtgatgactgttttcctggagctatcaagagcctttcttctatgcattaataactcagcaaattcagaaattaagcaaccagggtgcagggttgtgttgccatgtgttgctactctgcaaactgatgctgttgcaactgaaatggggcgatgtgggcgattgagtgcagcttgaagaagtcgatgcttctgatttattaagggaacatcactaactagctgactcctcttcaggcactcaaccatcttgagccaaaggttctcaag

SEQ ID NO: 184112 - DNA, 384 bp, Zea Mays
gctaactcgtttagcaccatggctctagtctcttgctaactcgtttaacactatgactttgaatccacctgttgcggtcatcgactgcgtgtttgactctagcgtctccaaccacaccaacaacaatgatggtaatatctcccttttccacccctctcattcaactacatctatcattgttggtaatggctccatcctccccgtcaccatagcaggtgactcagttcttcccaggccattctaactaaacaatattctcctcacctcggatatcattcatactcttctttctatttgccactttactactgataatattattccgtgatcaccagattcgatagcttcagccctctacacactacgcctcccaaggtctcttgc

SEQ ID NO: 184113 - DNA, 652 bp, Zea Mays
cagaatttgattccctatggacacatctacgatatatgacatcttccatgcaagtgtttcatagtgtattggctgcttctcagaagtttagcgcacaaaaaggtgcctctcaggagccttgtccacattatggcaagattggtcatactccaggtaactgtttttttgcatagtccagagaagttgcctgaataccatgcttgtcaagctgccggtaccactcgggatcgtggtactgcttccactcctagaggctctatgtcagttgttactgcctctcctgagaataaactaatcaagaaccctgctgaaattgtttgttatattgtgctcatatgtgctactggagaggtctgtacccaaagaaaaagcaagagatgtggtggaaggtgtcaataatgtgctaaaggtggccacaagactgcttgctagttgctacagctgctctgacaaacctggctggctggctcccctacaactggaagacatccgagaggggggaatatgaatagaactaatggctggacgtgtccctctgtgacctctgtttgcatgttctggttggccagttttgctgctctttgtattctgatttctgaatgttatgtaatgagcagggtcctgtaggagtagaagtaatgtggccttttaa

SEQ ID NO: 184114 - DNA, 276 bp, Zea Mays
tttctgtctaactcccagtcccagacccagacccagagaagatcagaagaagggggaagacagctcgtgcttcgacaggcgtcagccctagcgcagcttcccggcgacggcgatgagcctgggagctgaggtgatcgagctctccagcgacgaagacgaggagcctgtgcccagcactaccgctctcatccaccacgccccctcctcccctcccgacgtcaagccgcacctgctcgccgacgtcgatgtgaagccgctgcttcttctcccgccgcc

SEQ ID NO: 184115 - DNA, 272 bp, Zea Mays
caaagttggttaattgcgatcgtcgcacagttttgtcaatgttaggcgctgattttgacaataacttcatttgtctcccctcggttggggcaagtggtggggtgctgattacttggagagaaaaattaggaagaatcgttgcctctcgcgtggactccttcagtgtttcagtaaaattcaaccctgctgatggcgtggcttggtggctcacctgcgtgtatggtccgcagggtcatgacagaaaaattgcatttattcatgagttgagagcg

SEQ ID NO: 184116 - DNA, 357 bp, Zea Mays
gaacgaactctgaacgaagatagggaagaagacagaggcaagagaaaaagagaattcaaggtaacaagctttggtgttcaattatttccaaaactgtcttctggttacaagaactctgctattcattacaatcacccctgttcaccgatgggccaactagcggattcattcggccgcagagaccctggaactaggcattctagcatgccggcccaagacaacgccgcttgctaattcaactggctcccttctcgcgctatcttcaccggtagctgcagctactcctccaggagaactgacactctccctctctaagttctcttgcttgatcgttatccgaatcttattatgttgctc

SEQ ID NO: 184117 - DNA, 584 bp, Zea Mays
atagcctttatgggaagaaggatatcccaagaagacacaggctgccgagcgcggagctagcttatgtggtgttgtggcagagaggtttggatagcagagacacccgaaaacacgaaggtgactgtagtcgggggtcttgttatatagtatggtgtagggaacgacgttgttcacagaggaacagggccgacgattgaggaggtaggtggcggtgacgagcgcctcagcccagtaaggtggcggcatgtgggcatgtatgaggagagtgcggctgatgttattcagcgtgcgaaggatccgctatgccttgccgttttgctgggatgtgtaagggcaggaaaatcggaaaagaatgccacgagatgaaaatagagaggtgagggtgtggttagcaaattcagtgccattgtcagtctggaaagtttttattgtaaagccaaattgggtttgcacacaaaggcgcaaaaatcagtgatgtgagaggctacttcagatttgcgaataagtggaaaagtccagcaaaaatgagagtaatcgtctaacaaaaccaaatagtactggcaccctgatatgctggccacggg

SEQ ID NO: 184118 - DNA, 566 bp, Zea Mays
caattgctggctgggaaagctcaaacattgcaggaaaatgactccaagttctttgtaaaaggtaagttaaatcctctcaaacctttgtgcacattttctgatgtcaatgcctatatttcagttcatactgtagttttctcaaaatggaccatggactgtattttcaaaactttttaaatttctcatctacaatcagataaattaccataattgttttttcaattttagttgcacattgtgtcatatggccaacatctgaaaattatgtttctggcaacacgtagtatcgtattgctttaatcccatttcccctgcagatcatcttgcatcgatatttttgcttgtgtattcatggcaaaggctcgagttagattgttggcctatactgcttgaggaggtccagacaaagtatgagttgaatgctgcaaaggtgactttttattactgtcaagcacatttatatatttttgcttgatttttggtctaacagaatattgttatactgcacagctgtggtttccattgcgagccttacttactcaaacttctggtattccagtggatga

SEQ ID NO: 184119 - DNA, 301 bp, Zea Mays
gctagagaaaggaagttgggtagaggatgacaggaactaaagagcgaatgttctagacaaccaccgcctgggcatggagattgctgatgacgacggtatcgtactcagaaggaggggcgatcatatgaggcgttgggagggcctaatgcaaggggagtcaagcatgtgacgctcagcctcgccaagctatcgggtgagggtatcagtagcagtgcaatcctgttcctaggtctttcatgcttccgagcagtagctacgatggccttggccatctggaggggtgcaacaagagtggactggg

SEQ ID NO: 184120 - DNA, 768 bp, Zea Mays
ctttgacaagattttctctgatgagtttattcttgacataataggtgcccttgaatgtatgctatcttcattgtttccccatgtttctcacataccttcattacagcatgcaatcatgtgatctgattatagctgcaatgggtcgtccaaggttgctggtttcttattttaactagatgtactctgtacagatgatccagaggttccaagagtgcaaaatcaccgtgcttttctgaaagatcatgtagttttcaaagaggtattttgatttttttgcacatgtcctgcttgagaagaaatgattatttaatgtatatataactatgtttctgccacaggccatacgtattgaaaatgtttctgttgtttcaaagattcatcaaacatacagaatcggctatcttaaggtcaggctcttcataattgttagctacagtaacttctatactccttgatatatgttaatatagtccttttacttagcctcttctatggcatgacattttttgggtgcatttgcaggatgttatactaccacgaatactggatgatgccactctagcaagtctgaacacaatgatacactcaaataatgcttcggttagtgtttctgcggttccgcctcaccccagtattggtatccttaaattgtttcccatgtgttacttatgatataatgatctgctgcaggttatttccctgctaaaggatgacacactctttattagacgactatttgccaggatgaggtcatcagatatttcaatg

SEQ ID NO: 184121 - DNA, 1548 bp, Zea Mays
tatattcttgatgtcttcgaatgatgctattggattattgcaggtatatcaagtaatttcctttgaaaagacttcttgaccatgttgctgtggttgagtcatcgagactcgagagatccattttcctatagctaaggacacgttaagcttttatatttttggtgacttatttgttttggcttctcgagttagtattcgaagagcatatttctctttgctagggttgttgattatagcttcatatcacactcccatcatatcctcaatgatgtcacttgaaattcgacagtgaaactcaatgatttctgtgtgctgattgatgaaactattcctgttggaaacaacttgtcatcaatacaattgttatgaccggcaaggtgtacaatagaaggcccaaggcccagtcggctataggagaaagccatggcgctgagccatagccgccgggttggtagggcgattagggttatctgagagtgaaaataggagaagatttagatagattaagtctaaggtggttgagtcagattagatgatgtattagggtgcctgtgctatataatgcacaggagatgattaataaagatcagaggagaattaatctaagaaaaggattatttccccctctcacctacaccagccagccgccgtgcccagcacggtgccaccagttcgccgccaccgatccaactggccgcgccccctctctcctcacccctagcacctcaggccaaggcgtggtcatcccaacaataaaggaagtttaacattttgtggattgaaattacagttctctttgtgtgggtctattaattgaattgatgattgcaattcagttatgtacttaattagttaattttcatattttccctctttattgtagcctgcgataagtgagatagcttccatatcagacaaaaacgttgttgggaaattcttccttgatgcaataagaaagttgttggatgctacaaaggctgttaatgcagagcctgtggatgatagttcaatggaaattgaagccgattccaacaaaaatagcatgaagaggtttgtatggtttatgatcttgaaatttcttagttatttgtagattttgattgaatttctgatgttgattttaagccttgacttgaataccagggctctacttttggattttgcagcttcattgatgcctggtttagctgcaaagtctatcaatgtgttgttcagttatgtgaaacctgcaattaaggtacatatctggtttaatgcaaattaagattatgtttttcatgtaaccatgaatctaagttcagtttaccacaatttttttgtttataggacagcgactctttgattcaaaagagagcgtacaaggtcctgtcaatgctgctcaaggtctgttaatatttttcagttctccatacaattgtgcacataatatgttccatttatttaatcaatgttaattgtttcaggatgctgaatttattgaaaagaatctggatgtcctgtcagaattgatgatttcgtcactaccatgccaatttccctcgaaacgtt

SEQ ID NO: 184122 - DNA, 439 bp, Zea Mays
accctggacaccactatacagcgcctagaacggcagcagcaggaaagccatgctgccattgatcgccttgatcagcgccagcaggagatcatccctcacgggaaccagcgtccatgaggcgggcccaatgccaaccatgaagaccacccaaccagattccatcatctgaatttcccacgatacgacgggaagacggatccgctactcttcaccaacaaatgcgagtccttcttccagcagcgaatcgttccagaggaacaggtatggatggcatcataccacctggaaaacgctgcacaacagtggtacatgcaattgcaccaggaagaagggacgcccccttggcgacgctttgtcgagctgctgaacctcaggttcggggcccccatccgagcctgtccctcggcgaactagcgagttgccggcgcacaggaacggt

SEQ ID NO: 184123 - DNA, 403 bp, Zea Mays
tcttggccacatcagcagaagcacccatgggtgttcattggctatgcgaagggctcgaaggcctactacatccttgacctaggaacacagcgtgtgagcacggcgcgggacgtagtgttcgaggaagggcgaggatgggcattatgggacaaggcggtggatgacgacatgactccaacgtacgatgacgacaccatcgagtatgtccacttcgagggagctagggagtaggcaactcttcttctccgagcaggtccccaagtctccactgactccgtgctatgctctccagccacgacttcggctacagtgagctcttcgccaccacgtactccagcaccgacagtaaccccttcgggaatgtcctccccgacgccagctcgtgtcgagcacgacttggtgg

SEQ ID NO: 184124 - DNA, 307 bp, Zea Mays
tgtcgctaagtcattatggggctggactggaactaattatgtcactaagactagcagtctagcatatgttgctgctgctattttattcccaccaatgtattgtgggtttaatttgatatacctgtctgctgctgctattttatgtcttactgttttaatatgtcaatattcataggttaatgtagcttgcagcttgaaagaaaagaagaggggttggatcttcgataagagagagatggatcatggatgctacaagaacaacaaagagaagtgcagagtacataccaaagcatggacaacaaaaagg

SEQ ID NO: 184125 - DNA, 406 bp, Zea Mays
gcgacgcgtagaggctggcctctcgtgcggttgcttcacctccagcattgccaccaagcaggaggttcaaaactctggtatccggcaaggggcgtatggtgcggccgtagactctgtctacacgagggatgccttccatagcaaaacatttcttgactacatctcagcactgggaaagaaaccactggcgggtgctgatcttcttgtccttgctaccgtaaaagcacagctgagggccttgaatcgctcaaggggctcaagggacctccctgagtttgagatgtttgagggcactgatgagattacagaaatgacacacacagatggagatgatacattgagtcgagggaaaaagtcaaagcgcatgaagagttcatcgaagaagaaaactgacatttccaagcat

SEQ ID NO: 184126 - DNA, 1325 bp, Zea Mays
tagttggtgtgttgcaatcaataatagcgtccagaaaaaggcgtgcacggagaggtataaatggcaatatttttgaattccggtccggactatgactttcaagcattgctgcaaacttcgaatcaccaacatcagaagccagaagattatacagccgatgtgtattacggaagtagatctctcgaaaaggctgatgtctggtaatatcgtttattgcatttgaaaaagactgataaagttgtggatcttcacagttaaaaatatatcgtctccaaagaaccatggcaaaaattgagtaggctggaggaaaaattacagttagaggaagcatccgctgcaaccttgagagtgcaataatgtatggatctccaagaatatctgcaataagcccatcatagacagttctgcagttccccaataaaatcctaaaccaatgtaccgaaacttccgtggaattttcaatcctaaaacctccagtaggatgggatacaccattcgtatttgatttcaaacctctcaaaagctgcataatatccagaccatcttttatttttagagtagcaaccatccgctcaaggctaacagctccatgaacaacagcccccacaacaagagcagaaatagcagcagatacttttgcagttctcccaacaaaacctttccctgagttgctgagctcacttgtatgatttccatatgcatcatgggcctcaggagatggttgaaactgattgcggtgcatctttggaggagcaaaagctgctgtaacagctgcagaagtttcaaccgccagagctatttcaaaggcacggctgaagcgatctccaagagtttcttttagtaagcaaagagaatttatgtgaataagtaaagtgtgccgaacaaaatttagcgaagtagccacagaattaacaccttgatagtttcctcctgcaaaatccaaatgttttgctatcatatgcccagcattcacaacgattgcagaaacagcagaagcaactattgaaaggtctccatctggatttgcacccccattttgcctgatgcattctactaagcccaaaacaatgtcatgtgcaatttgataactatcttctttctcaaaagtgagtggattcctgggtgctgcgcctgcaagaactttcttttcctttaaactgcgctgaattccatcagcttgccgttgcactatctctttcatattctgcacgagtcttgaactccttccattcaacttttggcggacctgctcatcaatctcctcgcctgctaaaatacccgaagaagataccaaatcaccatcaatggaccgcccattatcaagc

SEQ ID NO: 184127 - DNA, 271 bp, Zea Mays
tgctggtccactccaccattcggtttccagacctgcttaccactccctcccacaccttgacgattgtctctggttctacgtggcatcgacgtcttggacaccccggccttgatgtcctcgccaaacttcgcagcatcaccgcaataagctgtcttcgcaacactcccgatttcttgtcagttaggccgtcacggtagacttccttttgctagttcatcttcctgcaccacacaatcgtttgaaataatacattgtgatatgtggacatctc

SEQ ID NO: 184128 - DNA, 537 bp, Zea Mays
agtattccccataccacaaaactgaaattgagaagcaggtcacagagttactgagagccggcttgatcactccgagtgtcagtccatttgcctcgcccgtcttgttagtgcaaaaaaaggacgagacatggcatttttgtgttgactatcggaagctcaatcatatgaaaatcaagaacaatgcgggtggttaaggagatacttgatgagctagcagggaccaaaattttctccagtttggatatgacctcggggtaccatcaaattaggatgggggaatcagaggaattcaagactgagttcaaaacacaccaaggccattttcagttccgtgtgatgcgtttcgggcttaccaacgccccggtgactttccagtgcgccatgaactcggtattgaccccatatcttcagaaattcgtaatggtgtttatcgacgacatccttgtgtactgtcccagctggcaatctcatctggcatttgaggctggtattcgctgctttgagacaccatcagttctatttgaagaaaaagaagtc

SEQ ID NO: 184129 - DNA, 839 bp, Zea Mays
aagaaagtggttcttggtcctcatcaatttctgcttctaaatcctctttgaatttttcaatacgatcaagctcccattcttcctcctcaacatttacttgatgatttaaagcagctttgtcaattactggatcccagagttccataaagcgcattgcatatctatcaattggccggagctggttctcaaatgatgaactcgcttgtcctgctgcagctgctgcagctgccatctgtttcacatcagcaagcatgtcagtatcttcatcaccaacagccaatgtaagagccttttccttatttaatcgattggtagacagagtaatgtgcttctccttctctacatcagaagagttatatttttgttcttcgttaatgtgctcatcgggttttccattctcctcattaaccaattcatcctcctcttgtctgcccgcagcctcctcactgaattcttgattgtccacggcttcttcctcctccagcttcttgagagccatatagtcagcttcatcttctgcttgtctaatagctgcttcaacatctgcaattgacagagccagatcaacatcatttgaaactcctgaggttgtagagcaattcttctcctgatcttctgcatgaagagatgtgtgcccggaaaagaattccataggatcaagtttcttgaagaattccgtattgtagctacctcgttgtatcactaaatcatcaagagctcgtttctgatttgctttcttgagaatgttctcctctatagtgctttcactaatgagtctatatatgtgaacttcacgagtctgaccaatcctgtggcatctgtcctgtgcttgttggtcc

SEQ ID NO: 184130 - DNA, 311 bp, Zea Mays
gcaaagtcgtatgtggagcatgccttggtcgtgctagtgttgagcatgtcgtgctgcagtggtcggtaggtgtgtccatgccattgagtacaacatagttggtagacagtataacaacttgtactttataatacctttgggtacacccaccaccataggcgtgattacaatgacacctgcacctgcacatctaatatagtggtattggttcgcttgcgccacgagcattgatgccttttgaccataacatcgaccataacattgctttaaatatgatgtacaagagccttctctcaacagctaggagtcac

SEQ ID NO: 184131 - DNA, 2971 bp, Zea Mays
ggcaacatatgtgcctggtagttctgctcgtgttgatggttcagaagagaatgtgttacctccatgtttatgtgcgatttttaagagaggcaaggacttcggtggtggtgttttctcacttgctgcaaatgttatgagtgatctcatacataaagatccaacatgctatactgttcttgattcagctggtttgccacaagcatttcttgatgccataatgtgtggtggactttacaactccgatgcagtctcatgtataccacagtgtttggatgcattgtgcctgaacaataatggtcttcaattggtaaaggaccggaatgctttaagatgttttgtgaaaatctttacgtctagatcatatatgaaagctcttagtggtgacacagcgggagctttatcaagtggacttgatgaattaatgcgtcatgcaccatcattacgatcctctggagttagcatgtttattgaaatcttgaacactatttttaaagtgtggtgtggtgtagactctatcccctataaggaatctgataattactctgcagttattcccatggatactgatgtggtggttgctacctcacagagtgagggtgtacctcctgaggtaggatgctcaggcgaaacagttgatgctcctttagatgctgtaacatcatcatccattgagttatttcttcctgagtgcatatgcaatgttgctcgcctgcttgaaactgttctgcaaaatgctgatatatgtaggctatttattgagaaaaaaggcatagaagctgttcttcaactgtttaagttgccatcaatacctgtatctgtctcaattggtcagagtatttctgttgcattcaaaaacttctcacctcagcattctgtttctcttgcacgagcagtgtgctcattctttagagaccaccttaaaataaccaatgaactgttgggttcgatctctggaactatgctggttggtagtgaacctgcaaagcaatcagctcttctgaagccactttctacccttgaagggcttttgtctattgccaattttctcctgaagggaactaccattatggtctcagaactggcttttgctgatgccgagatattgaaggaattggggaaggtttatattgaagtcacatggcagatatctttactcagtgattctaaggtggatacgcaagatgcagatcaagatgatttggctgaggaagcttcaatttctgaaagggatagtgatgatgacacaaatacagcaccactttcaagatatatgaatcctgtttcagcaagggcttctatatcaccgtggagcatggagcaagattttgtatcaactgtgcgatctgtttcccacatgcaccaccatggtcgacactcattatcaaggataagtgggcgcctaaatggagtgttgaatgcaacaagtactgatttggatggtccttgttttccagcagagacatcaaggcgtcatgatgctctaaagagaatccctgatgatgttgtttctgaacttctgaagaaattttgttgtaccatgcgttccttcctttctacccttgtcaaaggattaccggctcatcgtcggcctgactctaaccttaacccaaattcgagaagtcttgtgactgcactagctcaatttttccttagtgctcttggtttctctgggcattctactgctggttttgagatgtctttatctgtgaaatgccgttaccttggaaaggttgtggaagacatggctgtgcttacatttgacagtagacgtcgcttatgcaattctgcactcgttaatagcttctatgttaatggaacattcaaggatgttctaacgacctttgaagcaaccagtcagctactgtggacacttcctttctctgtccttgctgctgccacagatcaaggttcctctattaatgagaaggtgtctcacaattcctggctgctggatacgttacagagttactgtaaatttctggaatattatgtgaactccacgttcttattgtctccatcctcttctcataatcggcttcttgtccagcctattgtaactgagctgtcaattaatctattccctgtgccttcagatccagaatcatttgcgcgcatgctccaatctcaagttcttgatgcagttcttcctgtttggaatcatacaatgtttcctgtgtgcaacccagcttttgttacctccctggtgtcaattatgaacaatatatgctctgttgttggagatatgaagcaaagccgcagtagtgttggagttgccaatcagcgtgttactggcccccctcttgatgaatctgctattgctacaattgttgaaatgggattttcaagggctagggcagaagaatctcttagaagtgtgagaactaacagcgtggagatggcaacagattggttattcaaccatccagaagattctgtccaggaagatgtgcagcttgcacaagcgttagctttgtcacttggaagctccattgaaacacccaaggaggatggaagcaataagaatgatacagtcattgctgaagaaaaaggtgtatttgtgcttcctttggatgacatccttactgtatcgaccaagcttttccagtctagtgattccaccttggctttcccattgactgaccttctagcgacactgtgcaaccggaataagagcgaatactgcaagcgagtagtattgtatctttttgagcagttaagacatttttcgtcagatgccacggatatgggtgctttgtattctgttgctcatgtgctggctttgcttctgagtgaagacagtggcatacgtgaaactagtgctgaaaatggtgtcatctcccaagttcttaacatattaggaagtcttaaatcaaggacagaccagacagatcatacttggaattctatcagtgctctgttgcttatattgtataacatgctacaatttaatccaaaactcagtatggaaaca

SEQ ID NO: 184132 - DNA, 1131 bp, Zea Mays
aaacaggagaagtctcggcttcagatagaagtatgttatgctagcacctggcaacctgccctgcatttgtccttattcaaaatgcttttgaatttaaaaatataagattccatgaggaccatctattgctggttaaaaaactgcagcacattctgccagatgcaatatgccatgttgaccatataattaaaaagttgttcgatttctgtttgataaactgtgcattggttcagtgtcgtaggatctatgatttttttttgctgtgcgtcatgttgccttctagttggtgtcaaaacaccagctctactggcaattgtttgtttaaattgacgcctccctaataatagccaatttgctctggaaacggtgttatctgctatatgcgtacatgctctgaaattgatgaccctttttaattcatctgtcttcaaggaaagggggttttttatagactaaattcggaatgtttggttgggacttttgtgttagaagtagtatttgatggagcatgtgaacctccattgtagtttactttacaaacttttttggttgaatgtattgatgtctctaatttcatatgtttctttataatggtaatacagctggaaagttctttaaagtctgccaaggaggcacaggacttgttgcgaagtcaagctgatagtgccagggcattgatgttcaaggatgaagagttcaagtcactgcagattcaggtgcaattcaattgttgggattagttgatcacatagctatgtcgcattgctatgttgctttgacctggttattgagtgtattttagccttattaccttatttattgttttttatttgaaatgaccgacctcaggtcagagaaattaacttgcttcgtgaaagcaacatacaacttagggaggagaacaggcacaattttgaagaatgccaggtaatatattaaattggtaatgtttaattgctggttcatatctggatgtgcataattttttattttaattttgtgcgttcagaaattccgtgaagaagctcaaaaggctaaaatggaatctgagaggttgcagaaccttctactggagaaggaggtagacgctgaaatgtgcaaaagagaactggaaatgcagaaggcagaaat

SEQ ID NO: 184133 - DNA, 398 bp, Zea Mays
cagtgacagagcgtttgtcagctgacagacaccccaacactaaaacagaaaactaaaccacccgactttgagctaggaggtaagaaaaacccttagccccagtcaaagaccacaagaaagcttcctccctggccagccgaacggccaccaccaagtttggatgggaaccattgaagacaacaccatttctatgcttccacaacatccaagcgcctaaagcgaccaaggagtcaaagcccttcttactcagcccacccagccgagcactattgaaacaccaccagtgatcaaaatcatctatatcctgtcctggaaggaagtcctgcaaaccaaaaggcctgagcaactcaaaccagaaatgacgcgcaaaggagcagcccaccagcagatggttaata

SEQ ID NO: 184134 - DNA, 287 bp, Zea Mays
tcttagttgctagtttgctactatgtgatttaggtgttgtccaacttcattctggaaaaattaggttgcaggaggactttaaaaactagctgcatagtgtgtgttttttctctctccttcatgtagcgaactccctttcagagcttgttcgcactatgtcttacacgaactgttggaagaaacatccctatagaatcttcttttgatatggcaactccatcctcagcttctttagagaaaggctctccacaagtcagtagtcacttatggactatagcactttgctc

SEQ ID NO: 184135 - DNA, 834 bp, Zea Mays
ctcataacttcgaggagaaacggccatgagacagaatcaaacgctttggtgatatccaatttaagtagtatccttgcacaatttttctggtggagcataatggttgtctgctgaacaagcataaaattgtcaagaatggatctgcccttaataaaagcactttgattctgagataccatattgtcaaggtgactagccaatctatttgctagaagcttagtgatgagcttagcaaaggagtgaaccaagcttataggccgaaaatccttgacctggcaggcatcgtccttcttgggcaagagaaggatgtaggctgagtttagcagatctaaattcacccattttctgctccaaacagctgtagcagcagccataatatccccttttatgatctgacagcacgtcttatagaatttcccagtaaaaccatccgggccgggagccttatttagaggaagagataggactgttttccagacttcatcttcagtaaacggactgtccagcgatgtcagattatgggcagggatgtcaagctgagccaggtcaatggtgtgcgcccggtcaggtgaacatcccagcagcttgtggaagaaatcactgataacctccaacttatccccatgagatgtcttcaccgatccatcatcagaaatcagattgccaacaaaattcttgcctttccggtatttagcatggaggtggaaaaaggcagtgttggcatccccttcagccaaccatgagatcctggagcgactccgagccatagaacgctgcagcgatgagagggccacaatgcgaccatccagctgatccaccaaccacatttctaac

SEQ ID NO: 184136 - DNA, 275 bp, Zea Mays
gtttagggaaaagctcaccgaagctcaagcctcgttgtggagccgcacaacaccatggacggggcttgctgctgcgagattcacggtgatacttccttccctgagtttgagttcatctctgcttcaagtaatgtcgtttgaattgaaggtttgatcatggggtcacaggattgggggatacggcaatggtcggcgtcgccgcctgggcgtagtcgagaggttgaagatggcccctgaccattgcatccacactgacgaccacgattagatcactg

SEQ ID NO: 184137 - DNA, 880 bp, Zea Mays
gggcatttggaagatgctcgcactgtctttgatgaaatgatccatcttggtagtgggcgtgacatttacacttacaacacattcgtcgatgctatttgcaagtgtggcaacatggggctggctctgcaagttgtattggatatggaagcaaacaatgccaagccaaatgtcgttacatatagtacgcttatggatggattctccaaactggagaaatatgatgaggcactcaagttgcgtgaaaagatgaagtctttgagaatacaactggaccgagtttgctacaacaccttactggccatatatgtgaagacagggaaatatgatgaaattgctactgtatgtgaagaaatggagaaattgggcattgagaaggacactgttacttacaattccttgattaatggatatggaaagcaaggacgcttggacatggtcgctttccttgttcaagatatgcgggcgcaaggcgtagctcctagtgtgctgacatactcaactttgatagatatctattcgaaggcaggaatgcatggagatgcatttaatgtctatttggattttaaggagtctggtctaaaggcagatgttgttctgttcagctcttttattgatactttggccaagaatggcttggttgagtgtgctttgtctttgcttgatgagatgatgaagatgggtatcaagccaaatgttgtaacctacaacacaatcattgatgcatttggcaagtcgaagatttttactgaggaggattctgatattggtgacatgggaattgttggggtttatggtggccaggttgtaagggtcactaatccagtgataagaggagggcgctctgccactgatgttaggatgaggaggtcacaggaactat

SEQ ID NO: 184138 - DNA, 1175 bp, Zea Mays
tggactcagtcaaagctgatgttgtttgcctccaggaaacaaaaatgtcagttttttctcgcttgtttgtgttccgtttgcttgggtccgagtttcagaattttgttttcacaccttcagttggggctagtggagggattctagtggcttggaagaataatatcagctcatgtggctctaggattgatgatcattgtgtctcggtgaatcttagccttgagacttggtcatcttggtggttgtcatgtgtctatgcccctcaagggaatcatgagaaaattcagttcttacaagacctcagattgattaggacccactgttctgggccatggctggttgttggcgattttaacatgattctgagtgatgaagacaagagtaattccaatgttgatcgtgctatgatgggcaggtttagaaggtggaaggatgatcttgccctgctggagcttcctctgattgggcgcaggtttacttggtcgaatggccatgcctgtcctactttagtcagattggacatgatgttttgtactgctgattgggaagatttatttccagattgccttcttcagagtgctgcaactcaagattcggatcactgccctctcttgttgggcctgcatgatattaataaaaggaaagggcgcttccattttcaggccttttgggtgaaattggagggttttcaggatgttgtggctaacacatggagttcgattcccgcaggccagtgccctcttgttagtctttccaagaaattacatgctacggcaaaggctttgcaacgttggagtgataataaagtggggggtttaaaacttcaacttgaaatggctcaggagctccttcataggttggagatggctcatgacagcaggactctatctccaagtgaggattggttaaggcgtacccttaagaagcacatcttggtgctctcctccttgtcgagatctatagcccgtcttcggtccagaattaattggttgaaagaaggggacactcatacttccctgttccatgctcaggctagattcagaaagaagaagaattttattggctcattatctacaagtgaagggcttattttgacatcacatgaggataaggctgatgctttgttccatttctatgatggcttgctcgggactgctttggggagagaaaactctctt

SEQ ID NO: 184139 - DNA, 485 bp, Zea Mays
gacgccttccagcgcctcgtgccggagagctctgaggaggagctgcgacgaggagctgtccaggccagacgttggctcgtccaggattagaagggatggctccatcaccatctcgatgcccacgttgacgcgcttcctctgcccgccagaaatcccgcgcttttccacggttcccaccaacgagttcctggtcccctgaaggtccagagagtcgattactctctccactaccagcaccttgtcgcgatgcttcatgcttgcaggtagcctgccagttaggattacagtacacaaaaactgttataaactgcagtaggatgacgatatgatgaacacaaaaactgttacctgcactttgcactgaaccagaggttttcctccacggtgaggttcccatggacgatgtcgtcttgcggcacgaagccaatgatcttcttgtaagagcggatgttgacgtcctttccattaacgaggacagagcccgt

SEQ ID NO: 184140 - DNA, 389 bp, Zea Mays
tgcatactaaggagatggtataccagatacccataaagctagttggtcacatatttcctaccaatatgctagttcttccaggtcaggacatagatgtgattctgggtatgaattggcttcgtcagcatggggcggtgatcgacgctctacaaaggacgatacagttggactcacctaacggtaattataagttgctgatccgattaccaactcttaagagagcagtggaaagagtgtgtgctgctacagttaaagaggtcaaggatatacctgttgtcagggaatttccagatgtgttccctgaagatttaccaggtttgcctccagagcgagacgtggaatttgtaatcgaattgcagccaggtactgcacccatatccagaagatca

SEQ ID NO: 184141 - DNA, 352 bp, Zea Mays
cgcaggtgctgctaccgctggtgcacatgccgatgatcgagtacacgctcacatggctggagtctgccggggtggaggaggccttcgtcttctgctgcgcgcactcgcaccaggtcaaggagtacttggagaaggccgggtggtccggtaagtccgggcccgggagcatggccgtcacggccgtcgagtcccacgatgcgattagcgctggcgacgcgctccgcgtcatctacgaccgcggcgtggtgtgtgctctgtcctgcttccctgttccggattatgttgcctttctagtgttcgacgtttgaggattttagcttggcatgatcattccttgagtttattactgatg

SEQ ID NO: 184142 - DNA, 314 bp, Zea Mays
ctctttccatcttcttcttcgcttccccccaaaagctcctcctctccatcgattccattccattcgaattagcgatcgcccactacccgcaacctcctaccttaggcagcgccaaaccctaaccttactcgggtacgccaccaatggctgagtcggaggacgccaccgccgccgagcccgggtccgggccgccccacgaggacgaggatgcgctgctcgcccgcgcccacaccgtcatctccaggatcatcgaccgcgagctcgaccccaacccccgcctcctccacaccctcgccaccatgtgcgagctccac

SEQ ID NO: 184143 - DNA, 493 bp, Zea Mays
gctagagattagagactcatcttagctgtcactgccacttctctccctagggttgtaggtgcccaagacaccgccactgattctcttgctgtgtgtgcgtggctatcacaccggcatcacgatgtttcatcctcatatgcgcggatatcatggagacactgttgctgttgctttagtgttgatcaacaacaaacttgaggagcatatgtgaatgtattgctgctgctggtatgcgaggagtcgaggaaatacgactacttccactacatcatcgtgctcttctttcgctgcgccgcacgtctagcattaacgatccatgattctctatttgcatgttatcttagttgaacatggtaggtatgttagtgcgacgtgatagatatgctagtgtgtagcttatctgtcttcctatatattgtccatgccatgcaacctgtggttgtaatgctattctactcctaaaggcttggtgtttgttgctgcctcacttgct

SEQ ID NO: 184144 - DNA, 278 bp, Zea Mays
gcacaacaagtgcgagaaattccgatgtctatcgcgaagactatccgcgcagaagtcgcctaagggtgcagccggacttagcacaacaagcgcgaaaaattccgatgtctatcgcaaagactccgcacaagagccgcccaagggcgcagccgacctagtacaacgaaagcagaaacgacagcaagaccaactgtaatcacaccggcacagcataatcaaccataccagacaaagtacacagcgccctcgcaggcgcaggcacgcgagggcacacaact

SEQ ID NO: 184145 - DNA, 391 bp, Zea Mays
ggtgcaagtgaagctctttgaggtcgtaattttccaaggaaagctcgtgggaacagtagcaatcgttccaggaactgcacaccagatgttgatgatgatattttagatttcattgaggaacaagatgaagaacagctggatgatgaggaagaagatccacatgatgatgcagatgtgatagatcgtggggatgcaactgatgagcccactgacgagggagaaaatgcagcagctgctgatatctttgatagcttagatgattatgagtgactcggtgatgggcatggccattgagagagaggaactgggtgatgtactgctgtttaggggttgttatttgactagtgtgtgctgtagttttatgtggattatgtgtgctggtatggactgg

SEQ ID NO: 184146 - DNA, 635 bp, Zea Mays
agaggatgttcccggggagggtaccgtcggtgctggagtacgtggtgatggagagctcgctggagccggagtcgtggctggatggcgtggtggcgaagagctcgttgtagccggagctagagagcgtggtgttgtagtcggtggagacttgggggctggagtaggcctactcgaagaagggtcgcctactccccccggctccctcaaagtggacgtactcgatggtgatgtcgtcgtacgtcggagtcgtgtcgtcgtccaccgccttgtcccaggcccatcctcgcccttcgtcgaacactacgtcatgcgtcgtgcgcacacgcagtgttcctgggtcaaggatgcggtagaccttcgagccctccgcgtagccaatgaacacccccggggtgctcctgtcgtcgagcttgccgatgtggccaagctccttggtgaacgcgaggcagccgaagacccgtaggtgagagaccatcggcttgcacccatgccaagcctcgtacggtgtcatcccgttgagtgccttggtgggcgagcagttgaggatgtagaccgttgtcaccaccgcctctccccagaagacagtcggcattcccctctgtttgaggagagcccgagccatccccacaaccgtc

SEQ ID NO: 184147 - DNA, 355 bp, Zea Mays
ttcatgcttgctttctgataaaaagcatgtcccagagagacgagcatgttcgtgatgtgagtgttaagcttttaacgcagctgaaggaaaagttcccacaggtacccattcatttggtttgtcatgttttgattttattgatttgagacactgatgtgacttgtgttctgaattgtcaggtcctctggaactcttcatgcttggatttacttcttatttctgttcacaatgagttgacttctggtccagtcagtgatcctgcttgggttgcaactgtacgctcactgtatcaaaagatcgctagggaatggttaacaagtgctctttcatatgctccatgtaccacacaaggcct

SEQ ID NO: 184148 - DNA, 361 bp, Zea Mays
aaaaattacccatatctacaggatagtcgaagtgctcagcagctggatcaagattgacaatatgaattgtccttcccacggtctggcaatggtcgtataaactggagcaataagttgactgcaagcacgccacaagtaaccaattagagcaagctatcatctacctcctccttaatcagaccctagaccccagtgcggcaagtattcaaaagttaaacatctttttgcaagtgatcttaagggtacatgtgccgtaacccaagattaattcatgtgtacagcaggggattgagttgggaaatcagttcattgccctctgtcccctgtaatctaaaagggaatttgtttatccaaacttaac

SEQ ID NO: 184149 - DNA, 915 bp, Zea Mays
ggcattttttatcttgtccactatgatgtttggacatacccaatactcggcgtttctggtaataaatattatcagctcattcttgatgattactctcattactcgtggacttttcccttgcgcttgaagtctgatacgttccccaccctttctcgctttttcacttgggtttccactcagtttggacacaccatccggattgtccatagtgacaacgaacaggagtttgacaactccacgtctcgtgtcttcttcctctcccatgatgctcagatgaggatgtcgcgcccctacacttcttctcagaacggcagggtcgagcgcataatccactccacaaataacgtcatgtgctccttgctgttctaagcctcccttcccgctcggtactgggccgagggcctagccactactatcaatctactcaaccgcctccccaccaaggcggttcctcaccccacccccgactttgctctctttgtcacctctccctcctacgatcaccctcacatgcttgggtgcgcttgctactctaatctttatgccactgcccctcacaagcttgcatcccgatccactcgttgtgtcttccttgggtactctcctgatcacaagaggtaccaatgtctggacctctccacccacaaaattctcgtctcgcgtcacgttgtttatgacgagtccgactttctcttctctgtatctccttccactgcctcctctgagcacgacaccctcctcgaggcgaactctgtggtttccccccttgctccctctatcgtgccatgtgtggccccgcccccctcacgctacctcaagcgaccacaacccccccccccaagccaccaagcgcggccccaagtctcctgtgttgccacatgcggtcgcgacctctcccgcacccacgtcaccaca

SEQ ID NO: 184150 - DNA, 477 bp, Zea Mays
cggctccccaagtcgagctcccaggaccgactggacgactagtcgacgacttgaaaacagggtttgagaacctgagttagtttttgtgaacagaggaagtagaacatgatccagcataccaaccaagcaggtgtccatggcaatgacatttagagtgtgtttacttcgaggcctcccagatgagagcttcccaccaagcagcaatctttgccccaggcacccgaaatcggacacctgggagcagccatcgcgccaggcagctctgcctgggtgcaaagcaaagagcccaagcatgtttcgattctcttcaggcaagattgcctgcaaacagagctttgaacgcctatggacaagatgattgcctcgcaagactgctgcttgggaggtaccgatccaaacaactctgctcttcaatgcaggttaacagattatggtaaacacacattacacaaacttatattctatctataaaaggaa

SEQ ID NO: 184151 - DNA, 1981 bp, Zea Mays
cgcgtattggtaagtccggggtctgatgggcctcacgggaaggtccgcggccgtgtccgtgcaatgcgggtggggttccgggttccggcgatcggggactgacgcgggccgccactcggaatggtgttctgggggtgctgtgtgcgttttgcccctttgtcgagggttttgatgggtaccctctcagccccggggatcacacgggaagcgtccgtggcggcgagggaggtggctgtgtggtgactggtgacaggcgagggagctaggatctaggagcggcgggaacgaagaataaggggagtacaacggatgggaaaaacttgttgatttgccagtcacagttttgcctggtctgggaaaggggtcacaaaggtctttttacacttaaaaatcaacttaataatcaggaattcaggattgccaaactattagttttttatgtactttaggatttttagactgcagattatctgaaatttagattagattttaatcagttcttatatatgctgttccaaacaggccgttagtttgttcgtttgttggtattttttgctaccttgttctcttttgcgaactgtgtacctgacatcttttccccatccgttggttgcatagaaatggaggaggatcactcggtgatactaatatctgaaggtgctattaaaagcatcaaacttagcctctctaccggagaagagatagtgagttctacaaacctggtgtttttaccagtaattccagcataccgagatgccttttctccaatgatgacttaaatgtttttttatttctgaagtgcacatactccataaacgagtgcccagtgacccatcctagccagcttggaaatccgttccttgggttgccacttgaagctgggaagtgtgaatcctgtggtgcctctgaaaatgacaaatgcgaaggtacacaatgtttttttgttcataacactttcatacagtgtgctctagagatcagcttagcgaggacaccttttcctttcgttaacaattaagtttctctgcttatgtaggccattttgggtacattgaactacctgtacccatataccatccatgtcatgtcactgaactgaggcaactattgagcttgatatgtctgaagtgccttcgaatcaagaaagggaaggtacttgtaaaccggaactgcataaccttacttcgttgtttttctatacttaatttcctgatttgtttgaaccttatgtgtttttacactgatgcttaaccttgggttgctatttatgaaatctttttcacctttgcaggtgaaacaaagtaatggaaaaggaaacgcggcaccaactttgtgctcttattgcagggtacacaccagcattcttcttttttgttctggcttgaagtaagagtaaatagataccttggactagttactggtatatgtagggatatggaagtaaatgcccacgctaaaataaagtatatcagtgtttcaaattgaaccactttcctctgtggtctgaatgattgacgagttgttatttaagaggctgaagacataacaggatatactgattcagtgccttagggaggtactatttcacactgaaatttattcaaatgcagctaatctggttatatatccttcataagtaacttcagtatagttgacaaatatagcatacacattgaagtcagtcatatgtccttgttgattagtggatggctttcatacagtaatcttgcttgctgctggtctggtgccagtgcttacactaaacctgtgttggctggatgagtgtccactaatgtttcctgaccatcccagaacttgttgtttataggatattccagccctgtctttgaaggaaatcaagacaacagatggtgcaattcgtttagagttgagagcacctcataataaacacatgacagaacgttcatggaactttcttgataaatatggatttcatcatggtggatgttctcaccatagg

SEQ ID NO: 184152 - DNA, 479 bp, Zea Mays
gtcgcagtatcacttaacatattgttggagctggagaagacactcacgaatctccgtgaggaaggcatcgcaccacctccatttgagttgcccctgcgacgggcagaagaatcgacatcgaggtcggtcgtacaccacctagaagggtgtggtgtgaagcgccatgtggaacaaagtattatagcaatactctgtctaagcaagccagtcaacccaggcacgtggacggttccccaaggcgcaacagttgtacatggtgatcaccttgttgacgacttctgactagccgtttgtctgagggtggaacctcgtgctcaagcgaagctcgacgtcggccatcttgaaggtcacgccacatgtgactggtgaagactgggccatggtcgctaccgatggaggtggggaagacgtgtagacgaacaacgacctggaagaagacatgtgcgaccagggcagctatgtatgggtggctgagggca

SEQ ID NO: 184153 - DNA, 454 bp, Zea Mays
gaaactacagcggtcactgccacctggtgcctgatgctccttgctgcacacccagactggcaggaccgtgctcgggctgagattcgagaagtgtgctgtggacagacagcgatggacatcgacgtccttcgtcagctgaaaatagtaagagactctctcctggttcctgtggctacaaacaaatcattcttttggtgacgcacactaactaacagtggcattaaaaaaatcttttgaagcttacaatggtgatacaagagactctccggctgtaccctccagcgtcactgatcatgcgtgaggccctgacaggcatcaggctcggtggagtcgacgtccctcgcggcaccatcatccaagtagccatttcattgctgcaccttgacatggaagcctggggtccagacgctaacgagtttcgtccagaccggttcgcgaacggagctgccgcggc

SEQ ID NO: 184154 - DNA, 321 bp, Zea Mays
tttggacctttcagatcctccgctacactgcactactccctttttatagctcaagggaggaaagagctacatctctgcgtctgcgtgaatggtgggccctgtcaggggcggagctagaattatgacataaggggtccgaccaattcatcaacactatatggtgaaaaaataccgtatgatgttatcaagctttttcgtagatttgaccacatcaagcactcgacatggaataagaactctagttctttacaaattgtcctagtctatgagttcattttctagctaattgatttgttgaactaaaattgtggcacagtaaca

SEQ ID NO: 184155 - DNA, 928 bp, Zea Mays
ctccagcaaaacaccaaagctgatgttcttcggcaaagtgagcttaatgtgtgctgtattttctccctatttatctcttgtagaatgtgttggcttatcttctgccacaaagggaacttggtgttgccgatattgtgagaatagacaacagagggaaagttgtttggcatataacaacaatgcaatagctgctgggagagttgaaggagttgatgccttggaacaaatattcacgcggtcgatacgtattgctacaacacttgagactggatttggtggttgcgcactgtgcaagtaagtgttcttccatggcatgttgcttgtatatccaccctggccttcttttcttttgcactgataataaattacatgtactttcaatcttacctaaaacatttcgtatgctggcagagaaaatttggcaaacttctcatcaagtaatgatatttgttgaataagctggttaatgaatcggaagctcaatgttcgagcgctaaatctctttacccatttcgaactctctgattacttttgcataaatgttagtttcattaatcttactttaagctttatttgccctagttaattctgtgttagcattagtcgtggttgtttatgggtgtttggcgctaagtattgaccagtttgtggaagtcatatcattggtaccttctatcaaaaaaggttacatattgttttcgtttaatgccaacttgccaagtactacgacatttcttcaaaacttggagtgccataactttaggtccactttttggtatacaacttttgttgtttatatatgtttatatttgatgatctggagttgccaatgtcctttcctgtcacaagtatatataatccatgttatttggcaggctccatgatttcagcaaaaagaaattcagtacccgaaccgtgctgctttgtg

SEQ ID NO: 184156 - DNA, 277 bp, Zea Mays
ggcggctagactcgggccggcattagggttccgccaccagcgcagggaaggggaagagtggcgcgagtgagtcgcccccagcgcggcgaccgatctcgaagcgtgacaagatccccctttgctgctgctgcccagccggtcgccggaggacggtgctcgccggcgcaccagccggataattgttgagatttgtgttgcgcgagttttcctggtgcttcgattgagattgatcggtcgaccgatcggtttggttggctccttttccgttttatttttc

SEQ ID NO: 184157 - DNA, 412 bp, Zea Mays
attagctatgtaatagtctcatactttttttttatttaggggagcaagatggtactctatggaaatggctggtgttgtaacatatactggtgcaaagattatccaaaatgctcgattacttgtagaaaaaattggaaggccactggaactggatacagatggcatttggtgtgttttgcctggctcttttccagaaaactttactttcaagacaaagtgagtaaactacatcaatgagaagtaattttcaaacaagctgtcttgttttattactgtgaaaatctcctatagctgctgtcactaattcaaggctggattgtctgtcctagacatttatgttgaaatgattgcccgagttgggtcttgagtgtagtatttgctggattgcttttaatccttgtggtttctagct

SEQ ID NO: 184158 - DNA, 514 bp, Zea Mays
aggaaagctattggagagcataatgatacaaaccagtcctgcatgaagttccttagagaaggcagtgtgcagtcttctccaaatggatttctatcaagtgatgctgctccaagaaccagacaaggcacttttgaccttcaacttccagccgatcattatatagatgacgatgacacatcagataacaagcccatagatttccttggtttggcatcagatgcaaaaccccagaatgatgctgagcttacattagttagtgcagaacgcttgggcaagttcagtgataatagttcatcctcaggtttgcggactacaaataatcttggaagccgacaagttaccaacctgaatgaatcaaatactggcttctttatgggtagagcaaatggatctgtttccagaggccttccgcataccctcgagaactcgtggcaccaaccgatattgagatcaagcacaactactttcaatttcagtaaagaatactccaaagaaaagcacacaaatgaaggta

SEQ ID NO: 184159 - DNA, 523 bp, Zea Mays
cgcgatggtgctggagtgtcacgacatcgttgctcaaagaaggcgatgaagagcgcgaatagtcggggtagaccatgtgctagaggcgcacaacgatgaagtcgacaatgatgtagggccaacaatgaggatgacaacgggcggtgatggtgcaaacccgatcaccaatcagttagaataaaaggactcacaacaacaacaaatttggctgcggatctagggcgataacagagcccgtgggcttgagcggcctctccacaatcgtcaccactgttagctgatatatcagacatgtgtttcctgccatatagacgcaggatcccctaccatacaagtgtaggcatacttgccttactagcactgccgcatataggaagctacagccgcatataggaagatatagatacaatcctcccatttagggggtagagatagttttcctccattcaaggagatctcagggtattgtttctataaacctgagatctcctacccctctgtccctctataaatatgtgcgcct

SEQ ID NO: 184160 - DNA, 391 bp, Zea Mays
agaatgcttcaaagatgttagatggctcagaaccagttgcaggacatggagttacctttgcacgatgtgcttttcgcatgctactaggtggacttgccgccacatccaggttatctgaacaagaattctgctcagtttccaccatgatatcaggcttaactgatccctcatctgtaagcatgtcaacctgattttccatataattctcttcattagcgtcagtgctttgaggattttcatttcctgcagatccaggattatctgatccatcggtgtcatcaggtgcatcaccctctggattttcaccaaaatcaagttccatgtcattattttctatattaacttcagtctcattttcagttgtttctgtgggcggacgcctgtagttctc

SEQ ID NO: 184161 - DNA, 613 bp, Zea Mays
tggcgcagttctgatccaggacagtcaccccgtggcttttttcagtcggccagcagcacccagacatttatctctcgcggcatatgaaagggaactcattggcttggtgcttgccatccgacattggaggccatatctgtggggacgtcgatttatagtgcgcacagatcatttcagcctgaagttcttgttagatcaaaggctagccacaataccgcaacatcactgggtgggcaagctactgggatttgatttttccgtggaatacaagaccggcaacagcaatacagtcgctgacgctctatcacgccgtgacaccgatgacagtactattttggctatttctgggcccagatttgagttcatcgaccgacttcatctagcacatgatcaggaacccgcgctggtcgccctcaaggaggaaattgccagcgatcttcgcagggctccctggactctcatcgacggtatggtggctttctagggacgcctctacattccgccagacgcccccctgctgcaagaactcatcactgccatacatgaagatggtcatgagggggtccagcgcaccctccatcgccttcgccgtgattttcactcccccaatctc

SEQ ID NO: 184162 - DNA, 362 bp, Zea Mays
ggttgaaagggtgtgtgaggcatgccaggcaggcaaacagaaacacacctcttttccagcgcaggcagaataccgggcaaaacaacgcttggagttggtacatggtgatctgtgtggtcctattgccccaatgacaccaagaggtaacaaatatttcttgctgttggtggatgatttgagtagatatatgtggatggctgcaatctcgtcgaaagaccaagctattgatgcagtgaaaagaattcagatgcaagctgaaagggaatctggactcaagttgaagacacttcgaactgatcgaggtggggagttcacctcgggtgaatttgcggagtattgtatggccagtggtattcaccgac

SEQ ID NO: 184163 - DNA, 1287 bp, Zea Mays
ggaagagcttttgttactgatgtggagaaactaagaatccacagcaaaggaagaccgctgcgtgtggctgatgttattggcttcttttcggataccacagaggtttgttcttatattatttatctagtgcagtttctgggttccatgtggtcaaacactctattaacttgttggttccgtgatccagcttggtatatgtccaggatcaaatttgttgtacgcagtcgaagtgcttgtgactgaggttagtgaaattgctacaatatgacaaaaagtctattttttcatgcagtatattgtctgttatgcaacgttaattaaagcatgctattaatagtatgaaggagcaagagacatctgttttctgagttctgacacaattaatatccaagtgtattggggctgtcgggtggttcatgaataaaaaattgcttagctatggtcttgcttgctgatattatattttgtattaaatatgaaacacaatttaccaaatgtttaaactttaaactaacaagcatctcttgtcatgtttacagacaaatgataggcaacctctgttggactctggtattttgtgctgccttatatatatcctcaattctctattgagccccaatgagaactccacagataccttgcctgttcaccaagaaggatccagaaatgagaaaaacaaaaatttggatcctatgcaatcacgacggcttgaggtaatctcagtcttctggttctcatagaaacagggccctatttgcaagattactgttgaaatacacaaaatcgtaaattgtttaacattgagttgctgctttgtctgtattattacatgtttttttcctttgtgtcatatatgtatatggtgactatttcttcccttcattttctcctggtcaacttggtttttgatttttattcttttttctgtctatggagattgagggaagtgtaatacatattatgaaagcactggcgagccatcaatctgctgcaccaagtttaattgaagatgatgccttacaagttcttttccacatggttgcaaatggttcactatctgtgttgtcacagttcagggatggtattgttccccttcacacaattcagctccatcgccatgcaatgcaggtaatttgaaactatgtaacattacgttttggagggtcatgtttctctgctgcatcaatagttgctaaatatattaagttcataactggacaggtccttggtcttcttcttgcaaatgacaatgggacttctgcaaaatacatcaggaagcaccagctg

SEQ ID NO: 184164 - DNA, 681 bp, Zea Mays
aatatggatgatgtatacaccatccttagttgctaaatagccaatgagtttgatatcaccactatttagtgattttatattcatattggtattcacaatgtcaggattaaaaaccacatgcccaaggcccatgggtcatgatgagtaaaatcgctctaaacgggggctcgacaaggcccagctaacccccgattgcagacggaccgctgtcgactctacgaagtggcggttgcctcaagacctagtgtggagcagggatgcttgggggtcgaatgagacagaagagggtcgagcgaaccacacccggtctaaagaggtcagccgaatcagacacgagcgaccgaaccgcatgccattcgagggtcaaacgtgggaggctaaccgctctgtactcaacccccatcgatacaacaagtgtcgcgacatggagaagaatggggggatgtcctgttctgcctaacctccatacatattatgtcttaaccaactatgagctctcaccccgctcgtacaagggtgaaaaataattgtttagatgtactacgtgggtatggcgatctgacagatatgggggtacgaacgaacccatcgatacactagcccataccggaggtgagaatcaccgccacaggtggcactatgctaccagctctacgataaggcagatgacagacgttcgta

SEQ ID NO: 184165 - DNA, 410 bp, Zea Mays
agttttttttgctgtttccaatggagaatagctgttttcttatttggaatgtgagggggctcaatgatcgtgccaagagagattcggtcaaaaccctggttcttgatgtcaagccttctattgtttgtctacatgagaccaaattgtgttctatctcggactttgatattctgtctattcttgggtctggtttcagtaattttgtttctagtctagcccaggggactagaggaggtgtgttaattgcttggcatgacgggtctttggtctctgtggcttcggtcgtgaagaatttctctgtctctgtccaatttcaggaagagtctggttcttgctggtggttcacatgtgtgtatggacctcatcaggataattttaaacatgagtttattcatgaattgagagcggtt

SEQ ID NO: 184166 - DNA, 445 bp, Zea Mays
tagtgatcatgtcaaacagctgattgccatttcagacggtttgtcgagtgttctttgctagaataagtttttccttatcgatgaacagcctaatgctggctatgtatgagaagtttatcggagtcacctgctcagccaacctcctcaatcttcgtatatgcatttgctgctagtctgctactgctacgtttacacaggagtaaagactaaagaatatcaccgtgcctgtctagtgtctgtaccagcttgcattgcattccaagttatgatcgtggccgtttcctgaggtagccccccctcggtttctggatcttggaccatgctatgtctgcgccttgagacttgattcttcaattgtggttcagaggcgcagcacatggaacacgtcctggcatacccaggctgtctcctacggacaccggtaaggccatctatttccaattgg

SEQ ID NO: 184167 - DNA, 1037 bp, Zea Mays
gaaattagttcatttccacttcaatcccgaaggggatttgaggttcccaatgtagcccttacagggcaccttttcccctcaaactggaaaaacactaaccattgctggcatttttcttcttttacagggcacttacagcattcagatattctcattggctgtcctactatcgagcatgttcatatataatcaggtgtgagctatggtttgtactttccaacccttttgttggagatttgtcttgagttcatcctaataatgttggaactgtttcatgtttgcacttacattaattgataacatatggccattataacaataacactagcatcgtcaaaagaagctcaaatacacataagaaaaggagatgggctttgtgtatttggttatctacaattctacatcgaacagcttttatgtccttccaactatgtttcaccttccaactatctttcaccagcatgtaggtggacggctaatatattcaaacaattgtcttgttcaacaaaatatgctgtcaatcagatgtctcatttctatattgtttaggctagatgggcttgatctgtgatgatatcaatggcctgactaatgcatgcaagaaggaaaataattggtcattgtgatcattgctaggaggaaagttaggatatatatcttctttaatttaaaacaatggtggcttatattagccaaggtggcagaatatgaaccactttatgtagccgatctaatggctaggaatggtatccatacttgtatttatatttgaaatatatgatagtgcgactatgtgagcacatggatatgacataaaaacttccatgttgcaatgtgattaatctgtttcattcaacatgttcaagggaataagaaatatttctttttctcttgcagatgggtggtatagatgaggcagcccttgatcgcctttcacttgttactgaaatgaccaagcatatccgtgtgagggcaaatggtgggaggtctactgcatctgaacttgcgcagttttcacctattttcatctggctact

SEQ ID NO: 184168 - DNA, 458 bp, Zea Mays
gaaggcctacagctactttggggagatgaagagactgggagtgatggcaaatgtggttacgttgagcacttttgtcgatgcattttgcaaagaagggttggtccgggaggcaatgaagctgtttgcacagatgagggtgaggggaatgatgccaaatgagttcacttatacttcattggtcgatggcacttgtaaggcagggaggctagatgatgccattgtattgcttgatgaaatggtgcaccaggggttggtgccaaatgtggtgacgtacactgttatggtcgatggcctttgcaaagagggtaaggttgctgtagcagatgatgttttgagtctgatggagagagctggtgttaaagccaatgagttgctctacactacacttatccatggacacttcatgaataagaacagtgagagggctctggatttgttgaatgagatgaagaataaag

SEQ ID NO: 184169 - DNA, 520 bp, Zea Mays
atgatcttaaaagcataattgggatgagcaaaagagaggtaggtaactctactataaatatttgttttggaaacaatcaaagtattgtaattcaaaaaatgttgcatcgtcgctggagatggtggtgcatatctgttagtcaagtatgtgttctaggtgatgttagcacgcatggtagaaaagctgagttgctgccttctgctttctgttccgttcagatcgacaagatgatgtcaaagttgatttcggactcggagatgaacgagtaagggttgtattgatctcttcccacttaggaaaggaggagaaggtcatagttctaaatttaaatatcgatgcttgttgttatcagatcgctgtggaatccagatgattttgggtgttgcttgtgagaatattctgatgttttgtttttttaaaaaaaattacaggaatgtcttctctacgtataggttttatacaggaatgtcttgtctacgtaacgtataagttttgtttttaaaaaaagaatataatcggg

SEQ ID NO: 184170 - DNA, 393 bp, Zea Mays
attattacatagcttggttgatgcatacactactacatggtatttatatcgtcctgacgattgttacatcaaccacattacacattatatatagcagtatagaataaatgttgtacatgtctaataatgcacactaataattgtaaatttgcaacccacttatccagctgattgatattgtgatcagttcacgttgcaagagtttctataaggtggtctgttatccacactacaatctacaaacttcatcagtacatcctcatacaagtgcagatcaaattgcatggtgaaatgtgtacttacaaattcgtttgtaagtgaacttagctaattatatggatactcacatagttttttggataccgatcataccaataatttacgaggaggtgc

SEQ ID NO: 184171 - DNA, 303 bp, Zea Mays
gttgggcctctcggccccccatttgtggtttgtcagccatggcgtcgccgtcggtactctggcatcgctgtgtgcggtccctggttggagggcgaggatcgtcgggccatggatttccatagggacggctcagatcatgtcgggtgtaccggttcggtgtggccacatctcgatcgttggatcgtggatgtgagggcaagatctgaccgtacgctcattaaaccgtggcccttgatcacgaatctgatgaaccatgttgcataccggttcgccgaaggatgaatctaatcccgaccgttcagt

SEQ ID NO: 184172 - DNA, 411 bp, Zea Mays
tgcatggcgccgctagcgaggcgccaggtcgcctcatgcccactgccgcgtctgatccatctgtttgcaagtcggtagtataatatgctggttatgaatttggtgcacacttgcctgcatcgtcttccagtagtactagcattcccaagactgtccaggatcgtcctcgagatcatcacgaggagacgcttgcttctcgctcctaatttgtgtgcagttaaacaagtcttggcaagaaacactgaaccgaccctgacgctgaccggaacctggagcgccatgcagacttgagctgccaagagcaagatgaagacgttccaggggccgacggcagcgaattcctcaagcgcaaataactgggaagacatgtatggatgttcatgcgcttgccgcaagctgtctgctgctgcc

SEQ ID NO: 184173 - DNA, 302 bp, Zea Mays
acgagacattcagtgcagtaacatgacacatgtgctgtccctttcacccctccccttgtaggttgtagcgctggtgagtaatgctggggacgagtagtggcattggtgagcatgacacgagtgtagcagcagcgcgaggcgagcaacatcatggatgagcggcagcgttggtgagtgggagtggaagcagagtagttggtcatgacatgaagcaggtggtggcgcttgggtggacgtgaaggaaagagagaaaatttgggaattggaatgaatggaagctgctgaaatccaggaccacatcg

SEQ ID NO: 184174 - DNA, 288 bp, Zea Mays
ctagggttgacattaggaagacgtattaccgtggagccatttaccatgcaaattcaattttctctctatctaaagcatcttataacattgcatgagatggtccaacaatataatatgacgttcgtagttaacgaccctaacttctatgtggtttatactcatataaagagagaagcatataaattatttaaatttaactaagcatgtgaattttgcatacattactggtatagttcttcatttgaatccattaaagcatatcagtgaaatgtcgtacagagagaccac

SEQ ID NO: 184175 - DNA, 313 bp, Zea Mays
ctatgagttgatagtacgtataggtgttaactgaaaacaatatcgcttgaaagcagagacactgtgcataaatttttgctctggcgcaagtcaacatgactgtgtagaggtgctcaactgatagattacagtcctcagcataagcttcatggcaagttacagtagtaacgaagttgatttttccttgcaggtaacaattcatttgcaagttcataacagtccatttgtgtcccatctcacaaaaacgttaacttcttcaatagcagactagtacactacgtttgtgttctgaccatttttgttactctctcct

SEQ ID NO: 184176 - DNA, 271 bp, Zea Mays
tggggtgtactacaatgacgttggcactgtagcaggacctgttgggccctgacactacacccctcctggacaagcaggtcgtccttgagttgcaacctaacgatggtgctaacgatgactctgctagatacaaacctaacacctaaaaataagccttttatatctcgacttattttattattccgatcgcgactctttttgaccccttgagatgagacggacaccttccgcgccctggacctgcacatgtgcaactacctggatcccatgg

SEQ ID NO: 184177 - DNA, 549 bp, Zea Mays
gatggagcccaccacctccatttgagtagcctctgccatgtgtggtaaaaaaggggacatgggatggccaacaccgcctggaaggggatggcgcggagcgtcgtgtgggatgaggtattgcagcaatattctacccacggaagctagtcgacccatgcacgtagtcggttccttgtggcatagcggaggtacatgactatcatcttgttgatgacctctaattggccatgtggtcgcttgggatatagaagtcctcgcgcaggtactgaagggtcttttaggtcccttcgtggttagtggaatgggacagtgcagccacctggtggtccaaatcgtgctatgtcgacatgaagatgcgcttgacgtggaggacatcgtcggtggttaccagatcggggcaagaggtgccttgggggccagcatgtgagatgtcaataggtgccttaggggtcgatgcttgagggtgtctcgggggctaatgtttcgggtgcctcgagggctggggcaagaggtgccctaggggtcggcgcacgaggtgccttgggggcc

SEQ ID NO: 184178 - DNA, 1503 bp, Zea Mays
acaagttcagaattaccagattcatctgttgcagtcctcttactttccctgctcattttggtagtaaatgatggcaccattctgcctccaaggcacactaatcacaaccactaatccactatttcgaggaataattctgaaccatcaactcaacagtaagacaagccaacagttgctttcccttctggacatggctttgttgggctcgcatgtctctcaccgatggtaggcatccgatttggtaggaaatctgggcgctgatagatccattggcagatttattgggtaatgaaaacagtgattggtgagaacatgtcatgtaacctcatgtcaggtggggtgctatctgtttggtaggattaaaaaataattgttctgtcttcatcctaggtatatcgcaagttcttcggcgggtactgcaactgctcataccatggttagtcttagtgaacctctcttggtgttcttaggtttacctatagctattatttatctgtagctattatctactgggtttctttcttggtgttgatagtttgttggagattaggcgtttgatttcctttacaaaataggttcagtttgaaattgcggccaaagcaatgttttcatgtggtttcatcaattttagtttctatatttacatgtgtttgattgtcccttgctctcgtttagatagagatttctatcaagagtatagaaagttggtgcctgacaactagctgcttgcattcatccaccccctactcttatcttgcaaaagcccacttcttgtgttttgcttgtatatatattaggctggaccaaagtgcggttaagtaacctctaacaaattgtcatgacatgagctgattagcggtctattgtaagcccgctcggacttacgaaagtggaggtcacatttccattccaccaatgcatgtagattttggttcagacttccatcagtgaatgaaaaaaaaggaaaagcaagagagaatagcaagtacttatatcagtataaaaatataccaatgggtagtgagcctgcaacgttgtgtacgtatacatggggaaaatatttggtttgtggcttgtgtgaaaggacaatttaggtttgtattctatatctgagaaccattcatagctttaagattttgttataattgtcatcccatggttttgctcggaatagctgaccttctctttgtgttttttggttgatattagtgtaagatgatgagtccacattagtttgatgtgcacctaacaattaggttcttccttcttaatactacatgcattgttttagattctagcctatatgtttagttgcaggtcaagtctcttaacaaatttggttttgctggttgtttaaactattccagtttgttgtggcaattcaagtgacaggtccagaaaaaaacatatctctagctattcgttatttcatattgaattttcctcatattgtagagaaatctcagctaatctgttcacatcttgaaaatacaatcacaattt

SEQ ID NO: 184179 - DNA, 1000 bp, Zea Mays
atttggaatagtctcaataggcaagcttgataagtctaatactgcaaggtactttggtttggaggaaatagaagaataccacacagataatgctctgctggtgtcgaatgtaattaaggtgcgaagcctggatggatcaatggttgatggaatgcccttgctgcattggagcacagccactcgtcgagaatatgatcccactagcactgcttcattatttccaccataagttgtactgaaaccctctcttttagattggaaaatggcaagttcacgcacaagatcatgcattcgaatacatttaatcctaccaaagcagttcctctctgcaacgtgaagcatgctccgtcgtataagttctttaagataactttcagcagtgtcttctaagctgcatgcccctttttgttcaataaatccttcagctatccacaatctaatcaatctctttctgtgtattagatagtcttctggaaacatagcacaatacaggaagcagttcttcaaatagtctggtaagtatttataacttagattcataattttctccacgcgattaaggttctcattgttgtgtagctcccagataagctggtcataaaatagcttccactcgtcaacattcttcggtctcagcgacaatatgcttcctattgccacaagggctaatggcaaaccatcacatttctccacaatgtttataccacactgacgcaactctggagggcagatatggttttcatctttcagaaatgccttcctacaaaatacatgccaggaatcatcgacacccagaggttctactttgatcttacaactacccttagctagtgaagctacctcctcaattcttgttgtgattattactctgcttccaaggccattatctacaagaacttctttaattttaaaaaaaacattagccatccagacatcatccagtatgatcaggtactgccttttgtctagagtttttgtcaattgctctcttagttctgca

SEQ ID NO: 184180 - DNA, 519 bp, Zea Mays
atcaaaagaaaggtgcagcgattgaagttaccgtcagttgatgtactcatcctggtgctaatggctgctgggccgccgctgctgcagactgctgctgggccgccaccgtcgaggatggtaagctgctgacgccgaggaggaaggtgcagggctgccgtcgctgaggaaaagggtgagcaggtgagcacattgaggaacaaggtgagggcagagggcacccaccggtgttggatagggagaggtgagccgccgcacaggcacaaccgccggaacatgagagaagagtagcagccgctagaacaggagagaagagcaggtgagctaaaccctaacgtgtgttttactgttacactaatgggtccagccgtccagcccatatcccaaacaggtcgaaactggagccctggaaaattagtcgtccccacctaaaatggacgactaatcgcgttagtcgactaatcggacgactgggcgattactcgagctgatcggatcggcctccctagtcgtgttaacagg

SEQ ID NO: 184181 - DNA, 435 bp, Zea Mays
taaatttcaagttcattgttttgcctttgcttcagttacgaggaagagtaggaagatcaggtacagaaggcttcgcataccttttctacactgataagtctttgctctcaagagttgcaacggtgagctcaacagtacaccttatagtttgttattggtatccgttattttgtctcataccgttttacctaatgtgacgctgaaagcatatttggggtgttgtccaagatgttgaagtcccaataaaaaatagaatctgacttttgattgttccaagatagtttgtgcttgttacttgtattttactaaggtcaatccacattgcaggtggtactaccttattacctgtttgtcatttactcattttcgtagtcgagacctactctcacaaccggtagaatattgccactgcgacaaccccttaggcaagatgtg

SEQ ID NO: 184182 - DNA, 592 bp, Zea Mays
gttgtggaggcctgcggggccggtgactgactgaccgaggtcgaggccgccacgccggaggtgcaccttgcctggcacacacccatggagaccgacaaggctggcgaccgaggccgaggccgccgcgccggaggtacgcctggcccggcaaacacccgcggaggactccacgacgaagctggcaaacgacgcgacgagatcgttgaacgcctccttgagtagctcgaccttctcgggcgggaggtcggcaatcgactctgcgccgtccagaaggccctccacctacggcaggtccagcacgacaacgcggaggcacgcgggtagctccggcgagatggcactcaacctgagaacgttcctcagcgtggacacgaaggtgatggcgtagctatggaccattgcagctctctcagatatgcgccctccaccgcccccgacccacatctagctttgcccccaccatcgccttggctgtagggagctcatcctcttcctgctcgtgtccaactcctccaccgaccgcgacgcacggttcgatcggatctggcggggtggtggtggcctggtggattggatgcgtcgtggctttcat

SEQ ID NO: 184183 - DNA, 486 bp, Zea Mays
tggacaagctcattgtttctgagaggatggagatgaatgtggttcttggtgctgcacttgtgaacatgtatgccaggtgtgggcttgtgaacaaggctcgtgagtggttcaatatgctccaggaacgcaatgtggttacgtggacctccatgattgcaggatatggcatgcacggacatggcggcgaggcagtcaagctattcaatttgatgagacagcaagggccaccacccaatgatgtcacttttgttgcggtgctgtctgcgtgcgcacatgctggattggtaagcgagggccgggatgcttttgcttcaatgaagagtgtctacggattggtccctcgtgttgagcactattgctctatggttgatatgtatggaagggcaggacttcttgatgatgcgatgcgatttatacatgattcgatacccggagagcctggacctgaagtttggacagctatgcttggtgcatgcaagatgcaca

SEQ ID NO: 184184 - DNA, 1153 bp, Zea Mays
gacatacctgtacaggttaacaaattgcaaaggcaactccaagaagagattgatttgcacatggcgttgacagatgccattacatataatgcggcgctgatacttaaggcatctatgaagcttcctgacaaggtgcacactttagatagagtattaatatatccatttgattgtgacactcatcatggacccagaaatcttatgatatcctgtcccttttacaggcacacgagctattgattagcatatcctctctggaaaccgctatcacaaagcttgaagaggatctacatcacctgcactaccagttatgtgatgcgaggaatgaaaggctacttgcagaaaataagccagaatgcttgctacctacagcgtcagattgccaaccttctacagcttgcgattgtacaagggaagaggtaagttatcttcaaattcaaagttcaaatctatttttaaaatcacaccttttttactatgaaaattgtgactgtttctttgtcaattttctatttaagcctgaacaaacattaagatattcgagattcaaagattatcaccaagtggaggacggtttgtcaactgaacctgaagatcaacaagatgacgaaaaagacgccgaagatggagaacatgtatctctaaatatgctggtagaaaagcaccaagacgtttctttaactggactgttggaacacattttacacacacttcatggaacctatgaaaattaagagttgataaaaatataattgcgtccctgcagatgcaagaggcatgctctatggaaaatgaaggcaaagaagatcagaagatagatgcattaacatttagtcagcccaatttcaagaaaagcgacatgagtggaaatttgtggaataatccaaaccagctctctgaagagatggtgcgctcgatgaaagatatcttccttcatttatctgcatctcccaagatatcacgagaggagccttttgctaattcatcttcatcagcagaacgtctatctggttcaacattgactactttgtcagattcatctataatcgcctcagtgctgcggagtccttcgattgactggaacaacggcgatggtattattgatgatgttagaaactttgacccgtacaacgttaaaggcaaggaagcacgg

SEQ ID NO: 184185 - DNA, 331 bp, Zea Mays
gcatctgtgagacatctagagtccaacagtttagtagtgtgggcaaatggaatcatcatcatagggataatgaaatcaatctttaatctaccaaagggaaagtggccagacgagttagtgaaagcagtgtgaaaccataacactgttgtttcaaggtcaatagggttcaccccatttaaactttggttcgaagatgaagcaataacatcgaaagaagcaagaataggatcaataaggactctagctttggcaaaggatgaagacacttgcaaagcatcaaaagacaccatagaaggaatcagacttcaagcaatagaccatatcaataaat

SEQ ID NO: 184186 - DNA, 533 bp, Zea Mays
cagacttcttcagtccagtaccgcgcactgactgtgaaaaaaaaggatttatttcttctagtacgatgccatttcttggtttcaccacagcaccgttgcaggaaagcaaatcgagttttcttttcccttggaacacacttgttggtcgatgcgtgcgtgctttttttgccttttcaaaaaaaatgggcaaagagaatgcactggaatcgcgcttttgttagtagtaattgagcgtttcgaatctgaatggagcaggtcggggtcgggcatgtagtattttacattgtgggcttgcagcagcattttacattgtcaattctcaagcttggtgcatcggtggggtatgactttatttatgagaacgtgggagtgtgaaaactctcggttatcttttttcggagaggatcttttactaatcccaccggtacatctactgttgcaaatctcctttgggggtgtcgagatagcgatggatcccgccttccttttgtcctaagctgtgggggggtctgagatacctcctcctgacttcc

SEQ ID NO: 184187 - DNA, 396 bp, Zea Mays
ctgttattaccactttctccacatgtcatgacccttgcgaatagtcccatcaccactacacggaacatcacaaagtatgcggtcgaattctagcttttgtagtttgcagggatctttatatgaacctgaacaatcctttgcaagagaacaataggggaagttttctgctccatggtttgttactattaggttggcggtgcacattctctttgtattatggataaggaggtcacatcttcgcatattgagatcgttggctatcacctaaccagtctcacaagaacaagggagaatatatatgttagtacttagattgccccagattagggagggggatttggggagaaatgagaggacaggaagagtgaccagtaggacaacgcccaagtcagggga

SEQ ID NO: 184188 - DNA, 340 bp, Zea Mays
gttgtggtcattggaggcaaggctgtgaggaagcgattgatgagagacccatcagccaaagtacagcctcgtactatgagaccactgcatttactctagggccccaacatccgagcaccccgcagagaacctgcgggcatttcgaagctaaaaggagagcttcccccaaatggcatggaacccttagacataaacaacagaagcatcaaatcaaatacagaacaacataataccgcagcttcaaatcctgattagatagcccttgaaggtttgcatcaccaacatacaagacacaaccactagcttgcattaaaactgacagaggtgtgtccaacctgac

SEQ ID NO: 184189 - DNA, 274 bp, Zea Mays
ttgagccattaccggcgtccgccgcgtggctctgtctttacaccgtgccgtcgtgactcctctaagccatcccatcgtcgacggggagctcgccacgccatttgccacgaattcaccgcacccaggttcttcttcacctccggccgccagcgctgctcggtcaaattcgccaccgccgcttaccctcgctataaattgacccctccccgaactccgtaggctagtaagctgtccagccaccacgaatcagccacagtcattcactggaatccgc

SEQ ID NO: 184190 - DNA, 849 bp, Zea Mays
ccacgataggatttgactgatgttccaacaaagataacaattacatgattcatttcactggctttaaagacttgttgtcctgggaattcctctgctcttcgtccccatagtgatacctcaattttatttccccttcattaaattagaattttgttacaacagtaacataccattttatacatatgtttcaatggagcaatgggcatttaccttagatccacaaggtggatcagccttttcatgcgaactattccactgctagtctgaaatggtgttgcatcagaaagagctgtaatgcatccaatgacatctgcatgttgttgttacaacaatgttaatttgacaaagtgtttattgtctttttgaaaataggaaaacggattgaaactaacagtaccgatgaaatactcattgtttccttcaagttggggtagttctgggaacggtgttagatggaatgtatattttggaaaatcttgtggatcctcatttacttcctcaagcaaagtctttggatgtagcctgatcatatactttccatgcacaggtttgaaggatagctttgcgttgtcaacataaatttttctcatgattaaaatcttgctttcctgtagtcgtggttgaagtgtatatatagcttcttgaggaacttcagcgtacatcgcagtcccctataaagttaaattgttatagatttaagttgtgctaaacgataagacatttttatgcatatattagggctgttagacaagttaaatggggctgaatagaatgcttcattagatgaagaagggagtacaatgtatagccagaagggtgcaacactagggaaggtgtggcatcctggct

SEQ ID NO: 184191 - DNA, 400 bp, Zea Mays
tttgcagattgcacttgcattttttgtggcatctttctttttgtctgtcaagatggccacaggttaataactcaaaccttttaccttcaagtcagaactttattttttgaaagtgacagagggaatttcattttgctccttctgcagtgattggctacatgtatgtatttggctctggcttacttggtgcatttcttttccgtttctttgttgaggacaaaacttttccctgtaagttgctagcttaattttgatttgtctcagtcatataattttagttgtaacttacaagttttgtcttttccactcagatggttggacattagtcatggagattgtcccaggattttccctctatcggggcctatatgaacttggtcagtatgcattctcgggaagc

SEQ ID NO: 184192 - DNA, 293 bp, Zea Mays
gaagtttttacccagtttccccttagttcctttgatttgaggtggttgatactgagaaactgaaagagctttcagcctgattgtctgcgcttctggcagtgctgttgtgctgctgcagcagcaaagtcttcatgtgtagctctcagagtttctctatgtttttttgtgcaattgtaatcaagctctgttgtatggattttcttagtggatctagtgcttgctatagccaattggtaacttcattttcataaactgccctcttttgttgaccaagttacccaatatcttaatgg

SEQ ID NO: 184193 - DNA, 279 bp, Zea Mays
gtcgcactcagttgcaaagtactgcgcaaagaagctgcccgcgaagtgtgcggtcctcgccgtgagcaatggcaagattgagttccggagagagtcgagcgtccatccaggtaaggtctcggcagaagttctcccgtgtggtgatgatgagatgtattgcgtagtgccgttccgagctcgtcaggctaaagggggcgcactttctttacaagaaaataaagatgacggtgagggtgacgccacgcgtgactttggcaccaagggaagtgaattggagaa

SEQ ID NO: 184194 - DNA, 484 bp, Zea Mays
ggttcccattctgcatttagattatcgttctctctttatgtgccatgttggatggttctctctacttccagttcagcctgcatacattactaataaataccaccaattttgaatccagaactgtgttggtgtgccagaaaggccctggtgtttcttttcccttttgggctcactatgtacagagatgctctgacgccttgttgggattggagtaaatactcgaggttgaggggaatcaatccttgaatcttaagcaggagaaatagcacgaagcatggtatttggttcaggcactgcaacgcgggactgcaggccatatgccagtgaccatgctcctgcagtttctgttctacagtttttaaagcactatggcaaatctaatttgcaacacatacttatacttaattactttatcctgttccacacttagtgtggaaacatacacagcaaattgttataggaagtgtttgacattagcatatat

SEQ ID NO: 184195 - DNA, 1058 bp, Zea Mays
gtcatggagaagtaatatgctttagcatctattcagcaaattctgatgtacaggcagctgattttggaaatggcaaaacttgcatttgggttgatgttctagatggtggaaggggtgtcctgatggagtttgctcctttctttgaagattcatcgatcaagaaggtgcaataattttcctatgacctatgtcgaacaatttaatgtctatttttctctttctatgttagttgaggtcgtactctacactgtttttcctcacttttctatttactgttacaaacttgaaacaaattggatgtacttcactattttatccttgtcggtttcatgagatcatcaacatgacaaaattgcaagctttgggttagcaaaaccatacctggttaataacaaatgcatcacatgtgaactacttttagctttgttttttttgaattttctgaagtcaacatccatgttctcttcatcatgtaggtttggcataactatagttttgatagccatgtcattgagaattatggaatcaaaattgctgggtttcatgctgatacaatgcatcttgcacgcctttgggattcatcaaggaaaattgatggtggatattcacttgaaggacttacaaatgaccgtagagtcatggatactgttccagaggatttacctaagcctggaaagacatcaatgaaaaccatctttggcaggaaaaatattagaaaagatggatctgaagggaaagttgtatctgttgagccagtcaagaagttacaaagggaagacagagagttatggatttgttattcttctctagattccatgagcacattgagactttatgacagcttaaaaagcaagcttacaacaaggagatggatcttggatggttgtcctaggggcaccatgtatgatttctatgaacagtactggcgtccttttggtgccctacttgtgaaaatggagacagagggaatgcttgttgaccgtggttacctttcagagatagaaaaggctgctattgctgaacggaaacttgctgcagataagtttcggaaatgggca

SEQ ID NO: 184196 - DNA, 364 bp, Zea Mays
ggagttttcagatttgtctaccacggtttcagaagttgcattttcggtgtttgctcccactacaatgctctcatcattgtgggtgctctctgatattgtagtattgtcggaattatcttctactgtagcaggaatgggatcactggaatttttggatttgtcaagatcaggctcagcttctttctgctgcaggagttcctttatagttgtcgtctaatctgggtttgaagcaattgcgttctctttcatttggttgatatggctctctttctccacaagagctgcttccaattctttctgcgtgttggtaagatatgtcgtggtagtttctgaatccatgagcttgtttttcaattctgccctc

SEQ ID NO: 184197 - DNA, 293 bp, Zea Mays
taataggagtaaaccatgtcaaaaaccaaaggaatgacttgttttgtgttgatagtgctaaaattgtaagtattacctctatctccaaacacaaggtctattgttttcttaggggactttgactacaactactcaattaatttgacacatttgtgatgcaaaaccatactgataagcaagtaccttttgaatataataatatattaagttccaaggcatggatggcgtcgacataaatataagaatatattaaggaggtgtttgggactgctccatgttccagctccggcgtg

SEQ ID NO: 184198 - DNA, 415 bp, Zea Mays
gccgtcgtcgtcaacacctccttctgcacatggaaagggtagtgatctttattgtgatcattctggactggatggacatgtggagtctttatgttacaggaagaggaagattcagcagactgcccatcgttcttcacagactactagtaattctactgttagaggttctcagagttctactgatgcagctacctaggagatgctcatgctccttcgtcgtcttgctgcctctacaccactaggagccgttggttcagtaactcattctttcacttcgacaagttttgctgctgcttcgatgtcttctattgagggaccacctatcactccatgtactcatgcccgaattcttgattttggtgcttctttccatgactccttattccacccatctttcttcaatgcgggctccatc

SEQ ID NO: 184199 - DNA, 770 bp, Zea Mays
aggatgcatgaaggaaatagaatcataaacgaaagtatatgacagaaaagaaagagacagaatagaaagagaaatattatgttgaacggctcagatttaccccaatatcaacacgacacatcctactctaaatgaacttttgagtaggattgttcatttggaaataaactggttgcttgtatatggtacaccaccgccacggcaatgagacaatcagttgcaaactggttgcttgtatatggtacaagccatccaagtttaacattgtattgagcacaataccaaaccctaaatcctaaaccctaaacaattcaagtggatggggcatttgacatcacagccgccgaagagtagttccaaacaagaaaggaagatcaacagataagcgacaaataaatatctagaaaataaaggaatgcatagggtgtttggtcatcagtcatcacagccagagaagaagagttccaaacaagaaagcaagatcaacagacaagtaacaaaaaacatcagaaaaacaaagatcatttggatgtgacaaccagcacagttacacttagagcatccaatcccaggtctttaggtcagggtagttcctggttcctaccatgggtgtctttttgtttctttgtttttggccaccgtaatggggtcttttgtctccctgtattgattatttatggatcttttttctgctcttcttaatgaaatgatgtgcatatctcttgagggttcaagaaaaaaatctattggaaaggttgcagaaacagaat

SEQ ID NO: 184200 - DNA, 673 bp, Zea Mays
aacaatttctttggggtgatcatgccatggattctgtatgtttctttgacaaagcatgctgtgacctgtttacatgtcttcaagtattatatgacttatattaactgtaatactgtctatgccttaggtccggaacataacagtaagactaacaaaggctatgaagtgggccttgggtgttagaaaatgtctctccaaaattcaggactttctgaaagatggctgctctgaaaaagtaaattatgtggaaatagaagaactagttgctacgaaatgtgccccgtgctgtgagcctagtcttacaaaattgcaggtatgcaaccctgggtacatttgtagcatgtacttggtcttaaaatatactgtgatgttttaatttcccctacccactgcaggcgtatgcagaggaagcgaaattgctgattaatgaagtaaacaatgcactatcatctttcttaacagtaagccccttgttagaatttacagccatacacttctctgcagttgacagaacaaagttattttgcatcctatattcttctgccaactctttcatggaacttttttacaatgtttcttgtcatgttaccttaggtagacaaattggaaacattatactcaagggtttcagaattcccagttaagctaacagaatcatcgactttgttttggg

SEQ ID NO: 184201 - DNA, 650 bp, Zea Mays
gctgagaccgcgtgggccgcgcttccctaagccagagcagccgagctcttcgtcgttcgtgattcgttgggccatcgccagcgacgagctgcaaccaggtatgctcatccaagcatcccgtattttcccttcctgctgcacgaaatcgagccttctaaggcgttaaccctaattaagctactttccttcctatttgaatgattgcttggttacttttattgagcgtaatttctttttataagttaaggatgataacatcattagacgctatcaatcgatgaaaggttgcaaaataaaagttaaattgtaattttattttagttgttttgtatctaaacaatttttatttgaattatgaatttgtcgtattttattaaatatacttatcttagagccggtttgatgagtagtgaattggaggggatcccctcctggcaaatcagcccttgggaatgccctatcgccaaatcctgactccacaactgagcggaaaccagccgtggctgtactatcagcgattgtttttggctgtagaggtgaactggtgaagtgatgggcacggcgatcgtaagcgacgggggcggtgagggaagcgatggaaagtcggttgacgggtggcaggcagagaaggccgtcgcgggcaaccgtag

SEQ ID NO: 184202 - DNA, 1082 bp, Zea Mays
agggaattggatgcagagaccggcccaaaagtcactaaacaaatgtagatgcaatctcttagtcatgatgttcgtgaactgatgtgtagatgcgacatgtagcacttgaacttgccttaaagcaacctcacggacgaagtggatgtcgatctcaatgtgcttcgtgcgacgatgatgaattggattggcagtcatatcgactgaattgacagtagacaatagtcgcagaaggaatccggacatgaagcttctaaagcaactatcatagccagcaacactccacaactgaaacaggacattgtagtctgccacttggaagaccaggagaccaaggtgtcactgagaaaggtgcagaagctcaaggtagaacaccgggagtttgggtagtctgtctagtcgacatcagagtaggcagcgatggatgacacaccgctagtgcctaggtgaagaccgacatcgagggtgcccttctcctagcataggatgtgctagatcagtgcgaggtggggctcttgttagtcatgttcgaagagacatacttgctaaacggcgtaggtgaggttgggctatgtcagcgtgattgtgtgaggtactgtagagcgccaaccagactccaataaggggtcagcaatagggtcaccatcagtcgtagacaacttggacttatagccaactagagtcgccgtgggataatactcaaccaagtcatctggagccatcgtggggtgacactcagccatgccaacccactggagcagaatgacggcgtactatctttgtgacatgagcaagtcgttggagcagcgcatgatagagatgccaaggaagtgttggagaacgccaaagtttgtcatggcgacctcagagttgacccaatcgatgatgcgctatagtagagcaggagaggacacctacaatacaatattgttgatgtcgcgtagtaggtagacaacatctcaatctttataaatagacacgtgccagactacgctatagagagctatgcttgcaaatgtaggtagcaaacccctggtgctatatgtgaggtgcttgcttgcggctgtacaacgactttttttttt

SEQ ID NO: 184203 - DNA, 334 bp, Zea Mays
ttgagtttgatcttttttcttgtccgtgaaggatctcgctacctgcctcctaggggcgcccctacttcagcttcatcatcgtcctccgcatcctacttcagcttcatcatcgtcctccgcatcctacttcagcttcatcatcgtcctcgccacagccgcacgctctgactacctccactatatccagtacttggcatcatccacccggtcatcctagccctgtcgtgttgtccaagttgtgtagtagctcagtcatttcttgtactaagggcgcccctgagcatctttggcatgcctgtcagcttgtcgtcatgttcgacttcttttatcaagc

SEQ ID NO: 184204 - DNA, 280 bp, Zea Mays
ctgcccaccttgagtgtggccatggccaacctccactctccctttgtttgcgcagggccacctctggtctgagctcgcgccggtgagcaccccccatggcgtggcattttccctatccatggccgctagttccatgcgccctcctctatcggctcctccctctgttcatctcggtttgggcaccgtccagcaccccctccgcccactgcatcgccggcaaactcggcctcaactagtgcgccgtggcctacatggtcagggtctgcgacaggaagtcgcg

SEQ ID NO: 184205 - DNA, 491 bp, Zea Mays
ttctgtattatgcatcaatttaaatttctgtttatgtgccactttgtcctctgctactgtttgatttttaatatatttgttgccatggttcttcgggcgttacctaggcgttgaggcaggcataccacaggattccacaaagctttagttatgtcatatcgcttagttgtcaaggcatatccccagcgccacaggacaccagaatgcctcgaaaaccatgtttgttgtaccagctatataacatgtttgttttaacagtcattttttggagagttctactagaagctaatgttttataagggctacagatatagcatccttttcttttcagcccaatgaaatttgctactgcgtgggtctatcaagtactccctctgttccagatataagccatttcaacattcttggacagtcaaagcatctcgactttgaccaaaattgtagagaattaccaagaactatgacatcaaataggtgtactatgaaaatat

SEQ ID NO: 184206 - DNA, 321 bp, Zea Mays
gcagaatctacaacagaatatgaactagctggggaatgaaagtcataactaaaactaaacccatctttcagctggggtatcagtacttgtgaggggcaaaaatatcagcataccttctcagcttggccaattgcttcctcctttcgtaggtatacatgtacatgtgggccggcctggcccggcacggcacaggcccacaaaagcacggcccacaaaggcacggcccacaaaagcacatatctaattatgggccgtgccgtgctagcacgtgtgcccagtcatcggcccacggcacggcccacaattagttatgtgtgcaag

SEQ ID NO: 184207 - DNA, 334 bp, Zea Mays
ctaaagcccctctgcctctctctctctcacctcctgtcccctctcctctccgtgtccggtggagcttctccacctccggccaagatctggaaccagcgagggtgcccggcggttctcatcccggaccccgactctttcctcatctctgcaacctctggatcctccatctgcccccctgcaggatctggaagctgcacccgtcggggggagaagcaagcagcacatccagcccgctcgagctcgctcatctgacctcaccactgagcttccgcaggatcttcacatccccattccattgacaacgtgaaagagaacatgtgacggggctgccaag

SEQ ID NO: 184208 - DNA, 306 bp, Zea Mays
acgtggctcgttgcccgtgacataagccagcgggcggagtctgacgtaaggcacctagaccgcgtggactctgcatttattacggaaaggacgtgtcgcctgtccaccctgctgacacgcgatgtgccccctcaacatttattgtgtcctgtccattccactggcaggcagcgccagggccatcctgcagacggtgcacctgtccaatccgttgtcaaacagtatgcccgtgttgtgcggcgcattgatctcatcatcccttgtacgagaagcttcccctgcacgccgatgctacgcagatctcgg

SEQ ID NO: 184209 - DNA, 497 bp, Zea Mays
gtccaagctctccagtagtacctctgtttttggttgtaggggatcttttgaacacctttgtcatgcttgtcagttaggtcgctagttaggctctcattccctacctcttcttcttgggcagcaggcacttttgatctgatacattgtgatgtatggacatcccctgtaatcagcatttctggctataagtattatttactcattcttgatgactcactatttgtggacttttcctttacgtcagaagtaggacacttatcccaccctgtctcacttcttcgcttgggtctccactcagttcggtcgcaccattcggagtgtccagtgtgacaacgggcgcgagttctataacaatgcatcccatggctttttcctctttcgcggcgtccacctccgtatgtcgtgcccctacacgtctcctcagaatggtagggctgagcgcatgattcgcacaacgaatgacgtcatgcgctctttgctctttcaggcttcccttc

SEQ ID NO: 184210 - DNA, 532 bp, Zea Mays
tagatatgttcctactatcaacttttgatcagtagtaattgtcatattctcaagcctttgccacaacattgcatcagggttaacaaaaggcataggcgctggaggtggtggcttcttcagatcatttcgaagttctaccaaagtagcactgagttcatctactacctttgttgtgcgactctttggtttaacattcctcttgggtcggtacaccctctccttgtgggcgcttcaatccagaacttgacgagctatgatcaacactttgagatggatggtgattgggagatggtaaagtgtcagaatcatcacctagatcatgcacaggctgaggatagttggagaagtcactgcacacatcatcattgaagtcactgtcatctccaggatgagtttcattcatgcaggttgtagcatccatagctagagagccatcagcactactgtcaataaacaactcctgcatctcattgaaaaacttgataggcttagaaaggagcctccttgccctatcctgcatacagaaacatag

SEQ ID NO: 184211 - DNA, 921 bp, Zea Mays
gccgatacgtgagcttagatttgcaacatttgtcgcttatcatactcattaaattgcttcgaacagactctgcaaactcagctaggtgccgcatccattcttgggaagtttgtggaggctggatctcaagtgccatcggcaagtctcctcggtaaaggtgattagcgatcctgtgtttcatgttttatgccagtttccttccatgtattgatggcctgcttctttactgatctggctgcgttacctgatacctcttattctctgacttaataggcagtaacaccttgattgtctcaaatgctctgaatcataaagcgtctgctccaagttacaagaagatcatgagggtgaatcaggggcaattcaaacctggcactaaccggaatctttcatggcagaagcctgtgtcaagtgataaccttctgataactttctcagatgatgatagtggggcagactctgggaagacagggcgagataaagttaggaaggctagctctcaaggtacacagagaacagggaacagtatgcaaactaggatcatgagagaggaagtatctcagcagaaaaaccttggttcaaaagtaggtcctgcacacttgcctgcttttccattcacacatagaaatgttggggccggcagggcatcaggtaatacctttttcaggaaagagctgcctgtccgccaagttaatcctctaaagtctaaacagaaagttcaaaatggggtaggagtacattctgaagatcataggttagaaatcttgcgccataagatagctgctaaagaaaatgaactaaaaggtcaaaaaagacctttgtccgctgttgctacaaagaatgcagatttttcttccaatcagccaaggctgccatctgaaaagataaggcttgaagcttccagcattggtgaatattcac

SEQ ID NO: 184212 - DNA, 799 bp, Zea Mays
tccatggagaggcggtggacattcatcttgcccgtcggcgcccaggggaggtgagcaacgacgctctgtgtgtcttttctgcttcagttggctacagcctacaagactacaatcgtaaaagaaagcagtatttttaagttgtttgctcctcagtaaattggcagtagtgccgcccgtgcaggggaaaaaacatgtatacatgtttttgctatcctcccgcaccacggaagagtaatcctttctgaaatagttttgtctaatcgtgaagagtcctgcaccacaaaagggtaatcctttctgaaactatgttgcctaattgtgaaaagtcctgtcaaagctgtgtccatttcgttgtttaacagagtagtaatgttagcttcaaccttttgttggtatacgaatgggcagtccttggtagaggaagcttgaccaatctgaaacacaagttgttgtgaggtggccaatctggtaccttttcctgtcttctgcatctattaataggagaggaggaaattctttgtaatcaactccattttcctttatttgtatactgtggtatgtagatgatcgtgatgtaattgaaactttgtcgccctaacatggttttacgttccaggggtaagggctcaaggagtgttctcaagcgtctgaaaaatgggacaactatccatgatgctggctacttcattccaatagagctggatggtccagaggtacacactcctgttctctttcccttgcttgctttgcttgtattttttcccattctctgctagctgttatgagtggcttttcatct

SEQ ID NO: 184213 - DNA, 427 bp, Zea Mays
ctgccatggaaaatgattctcctcgttcaaaatactgttcttgctcagcagggcactctcctgttagctctcctgtcgctatacagtgcagatcaacaagactaggcaatttattaaacaggaacgaagtactagatcgttacattgatagagggcatggagatgcaatcgtagatgagaaacagaagcagtgcgtacctacggtttctaatttgggaaggccacctcgaccccactctacagtaccatccataccgagaccattcaaagagacaacggaaagctacccagatgtggacttaaacgacgccttcctttggcgacttgctcaagagggtataggagatacccacaagattacaactatgtgcagtgcatctagacgccacataaacatgtcagatgcttctgaaagagaaagtgcaac

SEQ ID NO: 184214 - DNA, 439 bp, Zea Mays
aagattctgtggagatttgtgctcaagagcaattcatcagcaaattgtcaaaccagatcacacgcgtattaccaatcccaaaatctgtcagacgtcagtcctctatccccctggcagttccaagacgcagccgacgtgtggcgggggttagagttgaatttaaaattcaggattggggaaaaagatctaagaaacaagctatggtggccctaaatattattgaggacaatgaaggattcagccgtcaagctttagacgactacgccaagctcttcaagaatactctttctcgtagtcatgtgcaggctcttgctgccctttttgggtggtctgtcccagataatttagaatatataactgggactggggatattaccgcagcaagcttattttagctggcgatgttgctgatattgtttgtcgatttacctctcattgt

SEQ ID NO: 184215 - DNA, 452 bp, Zea Mays
tggctgaacaaagagtgcagcatacacatacgaagccaaaggtcatttccgatggtaattgttaaaaactttgttcacaccacatatttccccaccctagaagtcaaacctcatattttcacgaataggtgacgatgatgagggtgtcatattcgaagaggatgatgatgataacgatggatacctattcgctgggcaatgtacgtacatggatttacatgttgctaccatggtttatatagatacacatgtcttaatcgttgttttctaaaaaaatattagatgatgagaccgacgaggacatcaagattgatggtactcaagaagaatctattgacactgatttgccagacacgtacaacaaggtgtacagtaacgtgcctgaagaaacacatatgctgaagtctgttcccaactgcggttattgcaatgcgaagaagtttgagtatgag

SEQ ID NO: 184216 - DNA, 340 bp, Zea Mays
caagagcatggtagatgctaaccagactggagcaatgcaaaccttttacttgagtcctctatccaaagaagaatgctttatgattttcaaggaacatgtgcttgaagatttagttgtgaataattactgtcagttagaaagcattggctggaagtttgcggagaaatgtggtggcaatccaatgtgcattaaagccctaagtgggttgttatgtcattctgaagttggattgtctgaaattgatatgattgttgatggtatcttaccagcattaagattatgctacgatcttttgccagcacaccttcagcagtgcttcaaattttgttccctattcccc

SEQ ID NO: 184217 - DNA, 415 bp, Zea Mays
atggaacaggggcccacaacaggaacaccccaccgagagcacaatcaacaacagccctaaattcataacatagccaatcagcagcagcagggttgagtcccctctcgacgttgcgattaccctccgcagcaaggccgcggtggtggtatgccaagaggaagaggccggggcagagcccccaacaacccagaaagtttaactgcatgttctatggcgaagacgcagagcacccaaccagagattgcccagaaaccaaaaaaatcaaagaccgcatggctagagccgcctccgaacaatcaaagagctatcacccacacatatcaccctcatcaataccaccatcctcattacgaaaacggacactaataccacctccagccgcaacagaactacaatcaaagggccccaacaccca

SEQ ID NO: 184218 - DNA, 1635 bp, Zea Mays
atccaacagtttgtgtgccatgtccagagcattacagcggggtggagagccgccaatgcctgtccaacgcaccatgtgtccgtggcgccaaaaagacagggtcaacttctcaaagttgcagatgaagggacccaaagaacgcagccattctaccccaagcaccacatcaaagccatccaggggaagagtgtagcaggttgtggtaaaattctcttcgccgacggtgagtggggtttgagaacagacgcccccactcaacaccttctcaccatttgcaaccttgacaagcagtcctgctgttggagtcacatgcagtcccagtcttggcacaatagcatcgcggatgaatgtatgggtggatcctgaatccacaagagcaatgagagccacaccattgatagagactttcagtttcagtgtgtcggcaatgtcaatcccagtgagagcatgaagtgatatgcccagctcctctgccagtgtatctgttgtcccggtatcttctccatccagttccaacagaaaaactccgcgagcagcacacttgtgatcggctgtatatttttcagagcagtggtagcattcaccgctggcccgtttggcggcaacctcctccggtgagagcctgcgcaaacgtggtctgctggtagccgatgacgagggttttgctgcagttgcacatgccgttggttttgatgtagcatatggcgtccttgatggggccgaggacagatccatacggcgttcataggcgcgtgccaggtgcatggcccgctgcaatgtagtcggagtcagcagttcaacatcagtccgaagcggttcacccaagcctgcggtaaacatctgagcttgctggagctgtgtcatatcctcgcagcgacttagaatggacagaaactgacgttgatagtcttcaacggtgccggtgcgccgaaggtccttgagatcagccataccgttggtccgtagaggtggtccaaaccgcatatgggtgaactcaacgaagcgggaccaagtgaggacaccgcccgtgtcccgctctagagcgtagaaccattctgctaccacaccgtccaaatggagtgatgcctgccacaccttctcatcgggtggagtcctcatgcccctaaagtaagtctcacatttattgatccacgacagggggtcagactcaccatcgtagtggggaaaggagacattgggtcttcgatagccaccatcgtcgacgcggtcacgaagagcagatcctgtgctatgcatgaccccgacaggcgctgcggtacgtgggccggtttctgaagattccggcagctgctcgtcgattgggcgcttctccaaaagcgtgatccgttgtccatgcaggtcgaggcgtgagttgatggtggagagctacgccaatatctgatccaacttggctgagtcggaggaggtcttcgcaggatcgtgaccaacgccggacatgttggtcgatgcgtcggaggagtctgagacggctactgcggcgtggcacaaaatcaagagggagtcgcttggttctcttcgtcatagctgggggaggtagtaggtagcttacttctttggttacctcggccacaaatgcttggacaggggtgcttttctcaagcgtcgacgtatcgg

SEQ ID NO: 184219 - DNA, 340 bp, Zea Mays
ctagaatgctccttcctttggttgttcgggaggaacgatggtctgccggaggcgtggtggtcgtggtcccgtccgtccaggtatccagggccagcaggaggggaacgaggaggcgtgtgcggcatggccgcgtgggggcaaccgctggaacagcacagcacagggcatgtcggtttcttctttcgttccgggcggcagggggacctagctagacaatgccacctacactactatgagctacgagcccgtgtgcccgcctggttactgttccggcatgcagctcgcgtgtcctgtgccgaacaatccggagcatttgggcatcattacattgttcagctag

SEQ ID NO: 184220 - DNA, 928 bp, Zea Mays
gtcctcaggtgcaccgccacccaggagtgttctagtgcaacagtgcatccgtgataaggctgtgctggagaccctatgcaactatgtaacgccgaaattaataatccttttaacagtaggattctgtcatgatttttgatatttttttgttgataattcattttactttcaggctacaccaacaaaggaattcagtcactcgaagacagtcgtctgcttttgcactgctgtgattgttgagtgtttgggtgctgtccctaagcttgacacagatgtagtgcagagggtgttgggatttgtgtttgactctcttaatcctgcagtgacgcgagaccaggaatataaggttacctcaaatgatttgcagtttttttggccccttttcaatggtcatatttgttatattttttctttcccttttactttgcaaccctcaactggatactgtgtgtacactatttcgaacattatgaatcttttattgtgctatatgggtttacttcccattgaagaactattgacatcctgctttcttagcaatgttataactacagttatgttgtatctttatgaccaggctggcgctcttatgattgttggagtacttggaacccgtgcgactctagcgcctaaacttgttcaaaatttgattcttttcgttgcaaggactgcacaacatgatgcattcgagtcagttgacttgccatggcttcgtgtttcagtgatggctcttataagtcttgttcaggtttggatttaacttattgtcattcatatccttaggaaattctggcttgctatgtaaatcattgaactcaatattggtgatgctgaggtagaagtattgataaatgtctgctaattttacagtcccaatctgtccatgttttccctaagaagccactgatggttttgaaagacatcaggt

SEQ ID NO: 184221 - DNA, 762 bp, Zea Mays
gaatatgcacagccgtcatcacagcctccccccaaaaccgagaaggcatctggcgttgcttgagcagggctcgtgccatggccaccacagtttgattcctgcgctcaaccacaccattctgttgcggtgaataaggagcactgaaatgccttttaataccttcattggcgcagtatgcggcgaactccgcgacggtgaattccccgccattgtcggtgcgcaggaccttcaacttgcgcccactttccacctctgctgccgccttgatcttcttgattgcttctgccgctgcgtcctttgatggcagcaacacagcccacataaaacgggtggcatcatcaacgagcagcaggatgtagcggttgcccaccggtgttgctggcgtgactgggccgcacagatcaccgtgcaccaattcgagttgattatgggcacgatatgctgctgcggccggaaaagagcgccgcctctgcttcgtggtgacacaagtgtcacatacctgctccacatgatcgaccaccggcatcccacgtgccatctcctccttgctgagtcgtcggagtgcatcgaagttcagatggccgaaacgttcgtgccactgccatgcctcaacatccttgcgcgccgcgagacagataggttgtgcagcctcgaggtgcaaaatgtacaacctgttctttcctcgatgtaccttggccagcaatcggtgatgattgtcccaaatgtgaagcacgccatggttaatcacaaccttggaccctc

SEQ ID NO: 184222 - DNA, 342 bp, Zea Mays
gctgttcaacagaactgggaagctcctgtacagtccatatgtgcagtagagcgcctttttctcaagttgcaacggctcagtaaagatttacagaagtgggggcaaagaaaggttggtaacattaaactacaaattgagatggccaaggaaataatacatagactggagattgcaagagattccagggacctttcaaacagggaagagtggctaagaaagaagcttaaactacatctgcttggtcttgcttctctggaacgcaccatttttttctcgaacacgcaggagaactgtatatcattatattaaaaaaaggaagaagggtccaaaaatagaccaaac

SEQ ID NO: 184223 - DNA, 620 bp, Zea Mays
gagacacaatatctagactaccaaagatactctaacaagtggttggctgaggcggaagtggacgagagctcaatggtgggagaagacacagaggcggacgagagtttgacgtgagaggacaagtggtcaagcatgacatggtggttggctgaggcggaattggacgggagctcaacggttggagaagagtagaagacacaaaggtggacgagactacgagagtttgacgtgggaggacaagcggtcaaccgtggcatggtggttggctatggtggaagtggacgggagcttaacggttggagaatgcgcatgaacagtttgaggcggttgcaagccctctcggtctgcggctgctctcttcagtgtgaagcctgctggcatcaagaacctcctcaaggtgaggaaccaggccaatcctggagatcagggccaggggaagcagattggaacttgtgcatgtcgtgatggctggcggtcagccaatgggagatcggcaggggagaaatgagagcatcgggaagaaaacccaagggacaagaatgtcttttggcatatgtccttcgttcaccatgctggcatattgagttctcttgctacgtctgcgaaaatggtacagatgt

SEQ ID NO: 184224 - DNA, 470 bp, Zea Mays
gaaacatttttgagaggactggatgatggtgttgtgctacccacagtccaatctctctaccttggacgatttacacctaccaaaaattatttgtcaaaattattcaaatgttttccagcactttcttctttgcatgtgatggcatcaccatcagatgaggacaacgaggaagtggtactgcattttccaccctctagctcgctgagagatgtcaacttcacagggtgtaagaatctgatcctacccatggaggaaggagctggattctgtggcctctcgtcgctcgagtcagtgaccatacacaaatgtgacaggttattctctcgatggtccatcggaggacgagcaactcagactcagagcatcatcaaccctctcccaccctacctgaggaaactcttcctttcttatatggaaactctgcctcaggaagctctgctcatgaatttgacatctcttgagaaactcac

SEQ ID NO: 184225 - DNA, 476 bp, Zea Mays
aagttcctttggtcactgatgtatttattgcctgcttggcagtggaataaatctggtcagtttgtgttgcatgaacctaagaaacaagaatttaattagctgacggtagcagttggaaaaacgtctcaatacaggggtagtaagcctacccttgcttctgaatgcatgagtgcctcatgatgcgcagaagatgtcaaaattgatactgcagaagaactgtttcctccatcgacagttataaagccagagctaccagctttactattagcaaaatccagagtaataccaagatttgggacgtgttcaacattagcatcagagatctcagcctccttacatgatctaatggaacttctttccttatacaagtagacatcatgctcaaattttcttgatagagcctctagctccagtatgtcttctctaacatagacaacacgactggacttacaagggcagctccgcagttcttgttc

SEQ ID NO: 184226 - DNA, 549 bp, Zea Mays
cacctcgcccgttactggtgtacccccggtggtgatgcacttctgaagccgtgatcaagctagaaatcgaccctgaacacaactcaaggtcatcgcttagtattgtaccctcggggctcctactttgttgtgctcaaccttttgaatcatgtagctggagcttgccaagcagagttttaggaaccaacccttaagtttggttgaggtccggacctttagggacccagtccgaggtactaggacagctgtcctagggtggtggagggtgtagccttacggtacagaactaggctaagcggctacctagctccggaccacccccgagaacgtggtcctttcccttggctggaggtccctagcagttcaatcctcgttcagcaccaaagggggcccaaactaagcgacaagctagttacatgatcacaacagaagtcagaaaccacgtgggggttagaggaaacaatatatgtaaattgaagcaggaaaaggaattgaacggagagcaaattcttcattcgtagctgaatttataagagttaggcgacggac

SEQ ID NO: 184227 - DNA, 803 bp, Zea Mays
ggagagagcggctttacggtgtcgatggaggtcgctgccgcgttaaggttggtagaggaaggcaaggcgtacgaggtcgactgggctggcttgatttgggcaacggtgaagagggaggtagtagctggcacgacacggcgatacgcaccgtacctcctccatctgatggtgcgccaaaggccggagcgtttcgttgagggtaatgggagcttggcgcttgagaaggggttgaaaggtcaggtattgcagcaatgccagttggaggacgaagaagaaacctctttggttttttggggcacccaaaactttggtgacttagaggaaatgccaatttttggcagccaaaacataagttttttccctcaaccgcaggaggtggggggcaattgcagttaccaaactatttcacgtttccaagccctcatgcaacggatccaaggttatgtgtctgacatggagagtaaatacctggataaggaaaagacttgcagggacactcaacatgaggtggagtgcattaagaatatggtgatggaaaaggatcaacaaattgaagctactgtcaatgctatacgacaggaacttttagaaaggagtgttgtaatgcgaacattggaagcagacaaggatcaattgagccgcagtgttcaacaatacgataagttactcaagaagtctttagctaaatttcaggagtatatgaatatggtaacacgtggggaaggtgttgactcgtatttggagaatcttggtttaactggtgggcagaatctcacttgggtgtgccaaatgcgttatcagtg

SEQ ID NO: 184228 - DNA, 292 bp, Zea Mays
actgggcttcactctggtggtttttggcccatctacagtagcccgcccctccaaaaaccctcccagctaccaggacccctcccagccgcctgaacccttcccagccgccagaaaccctactcctctcctctgtcctctctggtttctgccaacgtctctgctccagcctccaagtgctccagccagcaggtaatgcagtttggatgctctagcgcgatttgtttggatgctgatctgctctaggtagcagccagcaggttcctgctgtactttttactgaattactgcaagt

SEQ ID NO: 184229 - DNA, 338 bp, Zea Mays
aagaacaatcaggatgtatgtagtgagtagtgactatactaagtctaattgttagttctctgcttatgcaggtacttgcctgagtcatatatcaggagtgatgacgtaagtgttagtactttggaaagaactacatatagcttagtgtttattttgcattcttactaacatcagttcatggcttatgtactatgtgcacatatggtttctcccacttattcaaatccctccacctatgtgtttaggtctttaaggtattagcgaaatatgtgaagtaataaatactctattttcactgtataagttttattcaagaataagttaggtgtgtactcaaa

SEQ ID NO: 184230 - DNA, 562 bp, Zea Mays
aactctagcaggaccgccgaaccaagtcctctgccctaggcgggaagggacagcacaacggcgaccatcaccaggatcgaccccctcggttccagaagttggacttcccaaagtatgatggcaaaactgatccattggtgttcctcaaccggtgtgagtcctacttccatcaacagcgcatcattgacgaggaacgcgtgtggatggcctcctacaacctcgacgacgtcgcccaactgtggttcatccaaatacagcaagatgagggcactccatcatgtgtcacttctccaaactcctgaacctgcgcttcagacccccctgcgttcaaacccgctcggcgaacttgttgcatgtcgtcgaacggggttggtacttggtggtggactaccaggaccgctttcaagctctcctgccacacacgggccatctcacggagacacaacgtgtacagctcttcattgtaggcctccaaccgccactcagcctcgacgtcgagatccacaacccccagcccttgtccgtcgccatgagcctcgccaggaagatggaactccgggaa

SEQ ID NO: 184231 - DNA, 336 bp, Zea Mays
tctatcgcgaagactatccgcgcagaagtcgcctaagggtgcagccggacttagcacaacaagtgcgaaaaaattccgatgtctatcgcgaagactatccgcgcagaagtcgcctaagggtgcagccggacttagcacaacaagtgcgaagaaattccgatgtctatcgcaaagactatccgcgcagaagtcgcctaagggtgcagccggacttagcacaacaagtgcgaagaaattccgatgtctatcgcgaagactatctgcgcagaagtcgcctaagggtgcagccggactaggcacatcaagtgcgaaaaattccgatgtctctcgcgaaga

SEQ ID NO: 184232 - DNA, 325 bp, Zea Mays
gaacactggtgcgggagaagctagaagagttgtcgatcaaagaacggcaacatagcaggagacgggaaggaaaagagaccatgagatcgaggagaactggtacacctataagatcaagagatgacaaggctaaaccgaccatgcagaagtgctacgagtctgaggccgagaaatatcatgctagtgagacaatttcggtaccgagggcctcgtcactcccaagtccaccctatagagcaaccggcatgtatggaacttccagatatgttacagatcagtcagtgctactgcaaaagagtgaagcactccatcaccgaggatttac

SEQ ID NO: 184233 - DNA, 473 bp, Zea Mays
gtcccagtcgcctttgattccttccccagtcttcccctcagatctgcgatccttatccctcccggttccccgtcctctcctcggccccagtcgaggagacgccgctgcggctctcgactcctgttgcaataattttgtaggcgagaattgggagagtctggaggctgccagccggtctagtggctcggccaaggcgagcggtggtcccagcgccgttctttccgcctggtgccggagtttcagtcttcaaggctgtgctcggagtttctgtgttctaggggccgggaggtgtgtgctggtgtgaatttggctttcttttgatccaattggtgcttaatttcagcctgtcgaaagaggcttctagcttgcaggttcatcgccgttggcgccgaacttgcctgccgtacagtctttctagtgccaaagttgaattttgaggaactgtgaagccgctttaagcaattacctttgcc

SEQ ID NO: 184234 - DNA, 796 bp, Zea Mays
taactattttcacgttactagcaaatggtagggatttattttacacctaggaaaatatacacaagagagagagaagaaaggaaatagaaaaaaggaaatagaattctgctcggaggcccaatgccccctcctcgcgcccgtgtcctccccctggcccatctccgacccacccctcgccctctccctctccgccaacccggccccgcttgtcagcaccatcgtctccctcctcctcaggaactcaaagtgctcgcacccttgccatcgatcgccatcctcctcccccttgctgatagacacagttgagctgggcaccgttttttccctcgcccgctgtgcgcatgtacctacacgccaccatcgtccttcaccgtcatggcatcacatcgccacccatgtgcgccaccctttttcacttcctgccggcatccagctggcaaccaagctccctccccgaccgcctataaaaggaccgcccaaagcccctattcacctcgcaccactcaccatccctcctccctgagctcaatctgtgcccacgcggccaccctcccccaactttggtgagatctccatatcctcctccagccgtccagagctcaatcaagctagcgcacaagcttcactgcttcctcatgaccacaatgcacctctcctcacccccaatcaaccaccaccacctcgtcagcagcattaccatcacggtgaccctccaccccaccgtggctggccctccctagcttgcctccggccaaattgagtctggccccatgatcacccacctctccttgtgcta

SEQ ID NO: 184235 - DNA, 561 bp, Zea Mays
aatggtctttgtaggtttaggtgctgtggttgtggtattttatttgccaggggttttggatacaatttaacatgtgtgcagtcggttgtggttttacacttttattgtgatgagagatcctaaattaatgccacactttgttgagtagttgggcttgctatttttcaagttgagcttccttgtttcaaatgaaaatgtcctcattgggcatcccgccatatttcgtgtgaaggtacccagccatcaacaagccagcaggggtagtgcattggctaaagcatagtccagaggccgacaatgttgattgggttgtaatcttggacgcagatcagattattcgagggcccattattccttgggaactcggagcagagaaagggaagccttttgctgcttattatgggtatgtttttacttgttcagctattaactctgtattatccttttctgtaccaaggcagttttaactaattggaaagggtggcactccaaccaatcattgaattatccattggttccaatattctgtaggggcattgagtacctatccatctacttggg

SEQ ID NO: 184236 - DNA, 340 bp, Zea Mays
gcaagctgcaaccatacagatgcggcgaagtgaatatcacctacccgttctacctttccgacgacacggcggacgtcctggggaactcctcctcctactgcgggtaccctgggctggccatcgactgcgtggacgacgagtaccccaccatccagctcggcggcggcagcagcacaggctactcctacaacgtgacggacatcgactatcccacctccaccatctacctcgccgacccggacgtcctcgacgacgcgagctgcccgcgggtcgaccacaacgtcaccgtctcgccatcgccgaccttgtggctcaacctgtcggactacaccgtccgtta

SEQ ID NO: 184237 - DNA, 377 bp, Zea Mays
ctccatttgatttattagcacaaacttaaaccacaaaaactgaggtcaaatcacattgcatttaggacaatacaacaaaacacagtgaaagacaagcttctaggcagagatcactcaaaataaatggaaatattttatcaggggcattctcctactgccaagccttcataagccttatgtccacataaggattccccagagctcacttagccagcttggttgtggccaacgagacaagacagacagacagacagatgagccccaagaaagcagtagtactggtactagcagtagcagcaggccatcaaccagagcggccaagcagacttcaatgggagaaatacactcggatttccattcttgatgcaaaaaacatc

SEQ ID NO: 184238 - DNA, 318 bp, Zea Mays
acttagtgccggaggagcccgacgatgtggattgtgctttctgcaagacatgggtggcagtgaggcgatatgcgaggcgagcactgaaccccaaggcaaaggtgcgcgcggagagagaggcgaatggagggagccagggaggaccgtacccgcagaccacagtcgctttcgtcgagcttagtctggcgacgaagacaaagcagtcctgttattctttgtcagcctttttcgtgcggcatctagaagactccgtcgattggaggagctgcctcatatgcgtccatgaccgttgaagcatgatcgtgtggctacaataca

SEQ ID NO: 184239 - DNA, 319 bp, Zea Mays
gaaagatccttgttatcttcgttgtgagttacttcgatgcagtgttgtttccttcacttccccaaactataccctgggatcactcaagcctttggcttagaaactttgcaagtctggtgaccacgtcgccgacctagcaacttcacgcggctaggcgaacacggtatggtttgacgactctaatttaacgttctagtgtccatatatgtcgatgaagctcaccgaagtggtcgtttggtcattgctattctgaatagctcgtaacgcgagcttgacgccgcatattagccccgtgaactgcccctgtgtcgacccgcca

SEQ ID NO: 184240 - DNA, 400 bp, Zea Mays
ctcggtttcgcacaggaggaagggaagaaatggggtgcgcatacttggtgggtgctcgtcgccagcgaaggaaccgacgaagaagtgaccacctgccgtaggacggcggcggtcgcccagttgtcgcacgagaggaagaacgcgcacgcggggtgaacagcagaacagaaggcaggggtgaattccggggatgttactggatggtgatagctgcgccgttgggccaccgggctgaaaccgtgtgtgtggatcatctgctcttggaatgtgccttctcccatgcgacgtgtgctatactattggattcatggcgccagagtttcccaaactcggaagaggtccggcgagcggtgtctcggagaggacgcaccaccgtgggcgctggacggctggaggggac

SEQ ID NO: 184241 - DNA, 349 bp, Zea Mays
caagggtttggctagacttgtctttgagaaagctaggttcgctcgaagtagtggtgcaagtgaacatggcaatgggtgtggcatcaacacatgtaggcatggggtggtagagcgatcatggtgcagtgcgacttaggtgaggtgtgcatatgtgtggcgacgatgcagggggagagggtggactgggatggcatacgagtatgggaatgagaactcataacatgtttagggagctgagtgcacaacttaaaggtaatggtatcgggatgagaattcggaacaagggagttaagtttaatttgcatgtaatcggactagaatgagaactcgggacaaatttaagaacgtt

SEQ ID NO: 184242 - DNA, 601 bp, Zea Mays
tggtaattcattttcatacggtgataatttgatggaagaggcacttgtcttgcaagcattgagtcctctgttacagagatatcgctctgagaatagcgcacaatctgaactgaaagtaaagatcttcactgggaacataactgagaagcataggatggcccttgaggtttatttatgtcttcatgccctgtctgatcaagtgaactgttacttacagtctgagtgctttaaattgtatctaaccgtgtattagttttctgatttctgatagtctgttgctctaagtgttggcttcccaagaggtgcagtggagcatgttgctgctgaagataaggacaacctccttggtacagctgaccttgttatatattattcttgtctcgaggagcaattattccccagtgtgctagtccaagccatgagtcttgagaagctggttatagccccagaccttgcaattattagaaaacatgtatgtttgcaatgacacctcatattagattgtgattcatctctagattcaaatactgattactgtgtatagtatgttaaataaacttacatggttgtcatatggcctagatcaatgatggagtaaacg

SEQ ID NO: 184243 - DNA, 355 bp, Zea Mays
gaccatttctgcattttcatcatcaactgacatggcagcatctagatcacttggatcaaaactgttactttccgatgtaaaatgagatgcaaagttactttgttccgggtggattcgattcatctcctcatcctcatctccaagccttaagaacgcatacatctcatcctcatcacagattctaaacatatcaccctgatccctattatccttattttcagcattctcaataataaagctactccaatcaatagacatggtgtcatcatcattaccatccatgatgcgagcacgcaattgtcaccacctatttctagtgttagcacaaattattacacataatgatgaaacaaat

SEQ ID NO: 184244 - DNA, 324 bp, Zea Mays
gtccgtgctcaaattgactgcatggtgtgccaagccagatgatattcctgcttctattggtcttcatgtggaagaaccgccggtcgctgttgttgatgcctcctcatctcctcagacgttagtttatcccatctcagtgaccgtttctcgcggtggatccgccgatgttgggcccgcctatgtcaccgtcgttgaacaactccgatgaggaccttgagtgggatcctaactggcggcgtaggcattggttcacttgtccatctttctttgtttgggcactggtgcatgcgcggcttaggcccaggacccatgtatctacgacta

SEQ ID NO: 184245 - DNA, 2721 bp, Zea Mays
gttggatttcgatggcggggcgccgccggagcaggcgtggcggaggcggctcaacagccacgcgaacatcctcaaggagttcagtgtcactttcatggaggcaatgaggatggtatggacgcctcggggatccggtcctctgtgttgggtgttttaggacatgtgctttttctattcctcttctagttcaaagctgttgccttgttggtgctgcctgctaagttctgctcccgcaattgcagatgagccttggcctgagactatggtcgtatgttcgggaggaggcgtcacatggacgggtgacatcagctatcctcctatgcatgattttcttcagaacacaaatggatccaaaaactgtgctgacagggtgtgatctgttgttgtgcttgcagaaagcaccgatcgatccgttcacaaaagagcgctgtaaaccgtcagcttcccagggtgtgccacttggtgggatggggtgtgtgctaatgccattgcttatctgaacttcatatatcgatgcattctggagaactttgccttcatatcagcagtatcggtttttacaggagcggaagcatttcgagaggtttcaggggagagttcaagaattggcacatcatacctggtctttgtgaaagttcgccggtcatggagaaccagttctctgtaatgtttctatcttatcatgctgtttctattagactttggtttgctgtatgatgtatgtgtgcaatgctttatgtactcttgaagcttgatgtgtatgatgatatgtccttttgagcactatagatgtttgaagtatcacttaaacaaacacattttaagttccatgtgcaaatgagttattatattttatataactatgtgatcaatgcatttttttgggagttcgataagatgatatttctttgctaagatggcataacactgccttttctgaatggttgcatgcaaccaaggttatgatgtctgggaaggttacttaatcttcacagttggcacttgctggtgggctggttacacttttttccactgatatatgaagtatggttgataggggcattttttttgtcaagctatgcatacattctataacgcatttcgtttctttagttggtgcaataactttagattgttcttctttcatgtacctgccttcgccctttgtaatgcatttcgtttctttagccagcacaataactttagacatacctattctaatgtctttaaacacttcattaagttcttataattgattatatttcaggtagattacaattttacacctagcgccgcaaatttttgcagtattttggccttagttttactattaaggctcaacctttgaacagttaaatatactgcttttccagatatttgtatctcgagacgggggtaataagaaatactcatcagttttggctcctggacatcatgaaggtctgaagtaagtcacccatcctgttatgtgtgcttaaagcttgccatcttatgagcagattatcatgttaaaatcatacacaaaaacatttgctcaaagttactgtttactttatgtcctgtgcctacccttttcaatttgcctgtttctcttttttccatatttacctcttgagatctatatatacggaacaacttttatctgtatcaatatattttgttatagttctgccaacttggcgattgaaggtcaatatggaatatacttcctctaggttctaaatgataatatatctattgcaattggtatttagttttggttctagtaaggtactatattggtgggagtggcatgctgatcagattaacaacttggtcaaattttgtgcttttcatgctatctattctgtagaagtaccttaattgatgttttatgcgattttcaggaaaaatagtgactctggaatttcttcatgggactggaatttaagtggtcaacactcgacctatcatgcattgttccctcgggcatggactgtttatgatggtatgccattgtagatctatggtaacatgcttaaatttgcaacctacgcaaggaatttgttgtattttttaagttcttaccaaagagactgttgttttttaatagggcactgtaatgctaatgcaataaggtggcagtgtgttgatagcacagtgatttcgacccctttaagattttcttaatttgttgcaggtgaacctgatccagaccttaaaatctcatgtcgtcaaatatcacctttcattcctcatgattacaaggatagcagtcttccaacatctgtatttgtgtatactgtaagtggctaatggaattccgtttatgctgagttgaaaattcttgcaggtctacattttgtactttcctgtttcctattccctagcaagacattttgaaaagcctactatgcatatttatgcaagatatttcctttaaaatggagttcacatatggccattcaattaggtgctgaaatatcatctttgtgtaaactctatttcaatattttgtaactagtggaatatgaaatcattgtcgccttacatgaaatttggaaatgccaattgttgacgaataataaatgaatagttcaatgacggtgtatctgccaattgagttttgctatttattgtagatgattttgatattaaaatacccttttgctccaataagttacctaacagcctttctatttggtggttcattgcagctagtaaacactgggagagatcgtg

SEQ ID NO: 184246 - DNA, 1471 bp, Zea Mays
ctttgagccgcaacaagcatcatccacacataaactgtgtgtgcgaccagagcaaatgcctcatcgttttctattcccgactgctggatctaccccttggcgacaagctgacaatctgggccttgtgcttgacgatgatgcctgctcattacgctttagtttgtaaacccacttcatgtcaattgggtgatggcttggaggatggtcgacatgagcccacgtcttgttctcctcaattgatgtcatctcctctgtggctctgtcgtcaccttgagtcagcgggcattgccttgagcctccacgaacatgttcggttcatcatcatcggtggtaaggagcaagtcctcatccaccatgaactcgttctgccaagccaagaatttccaccgacttgagcacattttctagcgtcctgaaccggagaggcgacttaacgtcgtggttggcgtcgaggtctcgagtagtgttaggtggtcgatgggaacaaacatcgtcgttgctttctggcctagcagctctcttagatctggtcgacgtcgttgttcgatagtagtttgcacaccatgtcaccctctgacatttccctaagcccctagaacccgaggtgtctgaacctggcgtgccattgctagggcacattcaagcttcaggcaacgacgcatgcaatctgagtgatgtcaatgttgagggcgtccacgactcatgctcgacaatgttcaattgccgctcgagtagtcgagcttccactgccagagcggtggagccatgacacaacatgcaccgccaactcatccttggtcaagttcgagaaggattttgatcgccatcacgatatgcgagtaccttggaggagtggcctataggaatttgcgcatgatatttgaatcttggtacctagtgtcgaggacctccagttgatttactacgtcagtgatgcgcatgctgaagtcgttggcatcttaccgttgttgaacctatgcgagtcgaacttgcgttgtagcgtgttcgccttcacttggcgcattcggtccatggtgaggtgcattttttgagtgcgactagcaatcttagcggttgccttgctcgcgatcaccccttgcatcttcggaggtacaccaactagtcaccaagggtgatggcttctagagcattgcgattgtcagtgtagttgacggtgctgatgttcactgccatccacatgccatgaatagtagttggtcttggtcaacaacgagtactgcctactgtcgccactctctcatgacccggtagatcaccgggttgtagtcgtcattgctagagccactcctcatctcctgtcggcaatgcggtgccgaggcagttcgttccgctgcatgactgctagcacggccttgacaacatagtggctctgataccaaatctaatcatctacttgtcggcatgccttgttggagacaaagaagatgatccgtggataacccaaatgctc

SEQ ID NO: 184247 - DNA, 929 bp, Zea Mays
gaattatttaagcagtcgcttacatgggcctcacgcccttacacatcatccggcccacacggcccaacaccttacagaatattgagaattcaaaaatcaatcgatgccgtctcctgtcgctggaccggccatgacatcttccccgccgtcatgaattgattgtccccaatcaagagcctctggaaaccgagtcttcaacacatcaatatcttcccaagtagtagcatcatctggtagctcggaccaggccacctgaacttgtaccacaggcttgtgaccccgccgaactaaacgacgatccagcaaccgaacaggatgaacatcccggccagacaggtcgaccaactgagagatgtcagaaaaaactggtgtatacttgggtgtaaatggtttaagctaagacacatgaaacaccggatgaaccaaagccgtagaaggtaaatccagcttataagcaactgatccaatacgttgcagcactttgaagggaccaaagaatttaaaagcaatcttgggatgagctcggttgaccactgaactctgaacatagggttgcaattttagaagtacactatcccccacctgaaagtcccgatccagtctgaacttatcagcttgatgcttcatgcgattctgagcagcagctaagcgagtcttcaacaactccgaataagccagcctctcttggagcaaatcctgaacagattgatcagtgtctcctaacagatgaggagctgcagctaagactggatcataaccatataaggctttaaacggagagcagcccaaactagtgtgatatgcagaattgtaccaaaactcagcaagagccagccatttcttccatttggtaggattgtcatggatagaacaacgcaaatacatttcaagacattgattaaccctttcagactgtccatcagtctgag

SEQ ID NO: 184248 - DNA, 395 bp, Zea Mays
gctgagtccggggaagcatttgcagcacgaaggcccgtccgtgaaaggctgggtgttgccccggtctctgttcgacatgtggaggctggattgtccgtgaaagactcggcgccttccgttgccttggttactggggacacgcatacagaagctatggagccggtgattggctgcatggatgctgggttgagtctgcccctggagaatgttcatgggcctggcactgtgactttgggtgtggcggtttctagcctgtctccttctagttctgggagctcagtgggtcttatgccatcatcagagattccaggtgcttgcgatggcccgggtggcaaggtcttcttgtccataaccgatgttgacgttgactcttctgttccggcggtggagacttt

SEQ ID NO: 184249 - DNA, 375 bp, Zea Mays
tcaaaagatggacctttgccatgtctagtttggtcctaccctggtgaatttaaaagcaaagatgctgctggtcaagttcgtggttcccctaatgaatttccagggattggtgctacatctcctcttctttggttagctagagggtattttctcttgttactcattaataatataatatgcatacaacatgtgttcccattactgtgattcaaattgtggaagaaccctctgcacacctttccttttaataaaaaagttgaagggactttttccaatccatcatatgcaaatatgtttttctggtgcatgcacacacactcaatgctatcatttgcaggtttgtgattctgtctggtccgacaatcccaattatcg

SEQ ID NO: 184250 - DNA, 311 bp, Zea Mays
aggtcttcgccaagaactattgcctgcattggcaaaaaaggaaaataggagataagattgcacaatttggatcgtgcacctttacgccgaggactggaaagacttcagcggaagtcatggagatagtcccttgtgccaggaacaagtggggcaactggtgggatttttggttttatgtttcttgtggggaagtcgaagatctgcctgggctccctccggccattctgtgctctcactgctatgtggcgttccctcgattcgaggtggcggaggatgatgaggacgaaggggcccttcggtacgctgcccac

SEQ ID NO: 184251 - DNA, 313 bp, Zea Mays
aatgtctgaacgaagaccatccacaaaacgttgcacaaaatagagaggatccacaggtcgcccgtacgacaccaacttgtctactaatgaagaaaactgatctacatattcagttactgtgccatgttgacgaatgcgaaacaattgtctaataaacaactcatgctcatcttttccaaaacgctctaaaagcacgcggcaaaaaacaggccaactagataagtgtgaatgttcgtccagagatgaaaaccaccgagcagcccccccaacaaaatgcatcgacgctaccctgatccataggtgcggttctact

SEQ ID NO: 184252 - DNA, 309 bp, Zea Mays
aaattgagtcttgcactggctttgaaagtgaataagtgattcgggtgaggtgcaaactaaaacaatattattaagtatactgattcgggtgaggtgcaaattgaaccaacattatcccataaggccataactgatttttatatttatgttctataactaagatgaccaggaaccctgaaatgaatgctgacctattttgcccaataactactactcggtaaatggcatggtgtgtttgcctttgttgggagtggctatagtaataatctgaccaacatttcctgtagatgaattttggtagtggagtag

SEQ ID NO: 184253 - DNA, 2620 bp, Zea Mays
tggaggcatgtgcttgctgtgaagcaacagcctaggaaactccactggcagcagcttgtttctgttttgagttacctttctctcagattgaagttacctctttcgtcttgggtgcaacggctggtctttagttaccgtgggaagaaagatacgcgttatggtcaaattgatatgtttggagatgctgatgggaatgaactccccaaaggccctggtgtggacagaaatactattgatataatatactcagtaaataatcatgctgctgtttggtggggaatccatgaagctgcccggcactgcattaaccttcggcttcgaactcatctaggtggtcccactcagacatttgcagctctagaacgcatgcttttggatgtaacaaatgtattaatggtggaagctaaggaagctgaaggaaggtatatagggccagctgacatttgcttattgccaatgcgtcttctattggattttgttgaggcattgaaaaaatatgcttacaatgcatatgaaggttcctttgttctatcacccccaccaaaagcaagttccgtgtttttccatgcaaacaaacgagtttgtgaagagtggttttcacgaatttgtgatccaatgttgaatgcaggattagctatgcattgcagtgatgcagtcattcactattgttcactgcggctggtagatctcagaaacctggctgcatcatctctcagaggcaatagtcacatgggtggggctactgaaagtcatgcctttagagagaggttagaagcagatgttatgaaagtcctccggcatgcttccctggcactctgcagatgtcatgaaacagatgccttagttggacttcagaagtgggctgcatcaacattctattcttactttgagcaagataatcaactagttcggggcgtatctgatcgcgacaatcgcttctcctggatatcaggattgatctatcaatcccaggggcagtatgaaaaggctgctgcacattattcacatctactgcagtcggaggaagcccttatctccatgaaatctgatggcattcagtacatcatagagcgtgttattgagtgctacacatccctttcagattggaaatgcttagagagttggcttgctgagttacaagtgctccgtgctgtacacgccggcaaacctttttcaggagctctaacaagtgctggcaacgaacttaatgctatccatgcaatggcgtgctttgatgagggggactttcattcagcttggggttatcttgacctgactccaaaaagcagcaatgagctcacccttgatcccaaggttgcacttgagagaagtgaacttatgcttttgcgtggaatgctgcgatgtaatagcaagttagagggcataacagaggagcttcataaggctaaattgatgttggatgaagcactcactgttgtcccactcaatggattgcctcaagctgctgcttgcgctggccagcttcattgcatatttgcattggaagaagccttggggttgacctcccaaaatggacttaatcaatcacaatcaataatggattctttactgaaagcactgcatgatcctgtcgataaaatgcatcaagattgcaacatgtggctaaaggtcttcaaagtgtaccgtaatacacggccatcttctttatccactcttcttctctgtcagaagcttgcaagtctttctagaaagcagagcaattttatgttggctactcgtttaaatcaatacctcatagatcatcctttgaagtcatctgatgagatggacaaggaaatacttgaattgaacattaagtatgaaggtgccttgctgaagcatgcaaatggaaataatgaagaggctctatctgatctgtggtcactggtccgagctagtgttctgtctagagttagttgttcatctggcattggcacttcacattcactggttgctagggcttgtttgaaactctcaacctggatggagcaagcgaactcaagtcctttaaattcgatcattccaatggtagtaaaagatttcagcgattctgatggatttcaagatggggcagagaaacttctatctggtgatagtgtatctgtttcgactttggattatcatgcacttgctcaagaaatcataggcactgctcgaaagatatcctggcaactttgccccactatgggtaaggcttggcttgcttatgcatcctggtgctttgctcatggcagttattctctgtctggaactgattcaaatttgcagaattcactgtcccctgttcttcagtctgaactctccccgagtagatgtcatttaacagatgacgagaaatctgaggtgggtgaaataatcagaagtatctgtgctgatgaacatgcaaatcatgtgggttgtgaatacccaatgacaccagggtgttacaattctgcaccagagcaccccatatctttacttgttgaacaggcaattagtttgatagaaactgcagctggagcaccaggctttgagtcccgcgaaggtgatgatccctctgcagttctagcatcagagctggtggttctttgtaaatgtgattctggaaaggacactgcacctttgattggcaagcttactg

SEQ ID NO: 184254 - DNA, 357 bp, Zea Mays
tgggttcctagcacgttggtgttccctgtttctgtggtggttcttcattctgatggaagttcaacttccggtgtggatcctcctgcgccatccccttcgggctttgtcgacgaagatagtgatcatgagcatcatatggaacggccggggcgccctgcgtcttctgttcgggttccaattcatttgcgtctgggtcagcgcagtcgttctgggctggtggatgatatgtctgttgtggctgttcatcaggatttggtggaggggggatcagttgatgctccggctctcccgattgtttcggttgaggagcgggaggcgcctggtcaccctccagatttgggatcagttgatgccctg

SEQ ID NO: 184255 - DNA, 399 bp, Zea Mays
acgtcagtgattaacacaaaaacagctgaaactgttaatattgcctacgaagtaactacttgatgtgtagttcttgtgagctcatcctttttaaattgctgtgactcgaatgatcagtggacgcatcttgactggtcccttctgtatggaaatcgttggatggatctattatgttgtaacctcaagtttctggagagagtaatgtctgacaaataggacccgagtttgacaccctttctttttttggctggaataaggtagcctgtagagatagaaggggtatacgagaattgtgctattcttctgttcatgtcttaatgactgttgccttatggagtttgaaaaaatgcgataggaaatgaataatcctacatattacatgtataaactatgaccttg

SEQ ID NO: 184256 - DNA, 384 bp, Zea Mays
gcctaggcacgccaggcaacgccatacgcatccaaggcgcggcgggatcgacgcctagaacctaggctcgcctggacgcctaggcgacgccataataaccttgaggataacactacttcaaaggaaaccaaacatcaactcctatctctggtcttcttttcctttggggatgtctgagacagtgcgtacgaagaagggaggcgagaacaaggaagcaccgaatcacacctcaagaagttgtctgccccatcctgatcttgtctcttccactgctgacgctgatctaggaaccaccggaagtaggtaaatggggagtcagaacgaagagttgaaagccaaggccgagattagattggggacaatgttttcaagtcagacgacttg

SEQ ID NO: 184257 - DNA, 274 bp, Zea Mays
atgccaagcgccatgatgtaaatgggcgagtagcacactctctggagtaggcaacaaccgaccatcctaaatagtggcccttgtggtggggtcatcagagggtccccctaagctctacatggaacacgtcattgacgtgtgccttctggaagctaaaggctgtaggccacctgcccaacacgctccaactcctgaacggggcctgcatagcgaggaccaagcttacccttggactagggctctagtgagtgcgtcgggcaatggagacggcgaa

SEQ ID NO: 184258 - DNA, 351 bp, Zea Mays
accgaaacaaccccgatttctgaagttatgaagcaatcgggattggttgtggcagagggggctattgacgaagatgcacatactgctgaggctgaagaagctgatattgaggaagaaaatgctgatgaagaggaagactataacactctaatcccagcaaagcccagccacttagattttgaaaaatctactgtctctgaggccgatgtgcccatgatgatgaagctcgattacttcggggagacagagaagaagcttcttcattttgccggcgaagaaatcaccccagagccaaaaaatgatgaagtagtagttttcaaaagctttttcaaagctggattgcggttttcg

SEQ ID NO: 184259 - DNA, 329 bp, Zea Mays
gttgtccacctctttttactccttaatagccctttggactttctcatttcatcaccaagtatctttagctccgcctccattccctttagttactccacacaccttaaggccatcttctaaatgcaggttaccatcttctccccacatgtttgtgtcatcgtctttctttcaagtcctctttgatggtcctttccatgaagacttctgccttctctcctttcaatttccaccactttgttcttgcaatcttggcttgtttatccctacgagcacgcacataaaaacggaagacctcgaccacaagcttatgttgagaggcaacacactcc

SEQ ID NO: 184260 - DNA, 629 bp, Zea Mays
caaggcaaggggtcagcttcaccgtcaaagtgtggaaaggtaaaatttggtcgccgtggtccaccgtcttcatagcgatcacggtggctactgtgcagtggagctcggcgaccaccgccgaatccgccattgtaagcgccagaactgggaagctctgcacctgcgtgactctccagggcaggacccgtggacagggtagccgcggccagaggtggcgctagcggtgatcctgtcggctgaacaggttcctgttctaggagagcgagccgttgagcgtgggcgtccaggcggttgttcattgtggccagctgtcccagaatacggtccagcttctcggagtcagtcatcttcccaggatcttcgtcgctgccggacatggatgtcgctgcagctttggaatctgataccaaattgttgtgaacccggctgcgatgcgcagggcggggaggagtgcaccacgaagggtgggatattaaggtggattgagtagaagaacgcagggaatagggtatgctgtgtggcggctgggagctaagatcaccagatggcgtaggttctaccagggtgatcaagcagccgcacccacaggcacaacttctttgataaatctcctagtacaatctaaggcc

SEQ ID NO: 184261 - DNA, 652 bp, Zea Mays
ggagcaccagcgcgagggcctgtgcctcattgcggaaagccggggacggagttatgcagggacggcgcacgtagacttatcagaagcagcgacggctgggcagctcttcggtaagtgactcccctccctcgcacctgctcggcgtaccatcatttgcatagcgtgcataccgttgttgaagccgattgctagctcgtcgtggcggggcgcggcgccaccattaccccggcgttgatctgagagcgatagcaaaggcggtcggtagtggggagtcgatggcgtttccgccgtcgtccgtcggtgaccgcgtatttttcctggagcgcgttggcgagtagacccgttggggaagatgatgtgctggtcgtcgatctgttaacagatgctcgtgattagacggagggtagtgcatgtggcatccgcaggatcttagatgggcggagcagatttaatcgcgcatacccttgggcgatccaatctagaccatccgactgataatgagcgtcttagattagactcaacttacctcttcgtttatttaaatctgagccatccaatctagatccaacgtccgagaaaacaggataccccttcagcgcagtcgttttgcagaggagcccttaaagaattgcagaatgaacctggcgtccac

SEQ ID NO: 184262 - DNA, 693 bp, Zea Mays
attgacaaggcaaaactgcttgagcgtgagtatgttgcgtgtcatggcaaagttaggcagcatcgtgtagttggtgatgatgtaagcagcgttggagaagtgagggttgaggatttgaagattgcaccacttcgggcgggtgtcctagatccatagcctctgctcggtctagtacccttgttcctcgtgcccctgatggcaagccaaagggcaacgatgatcaatgctggaacaaaggaagggcaaatgtgaattttgatttcctagctccccttaccttttggttctagtggtatttctagcctatcggtcctactccacctttatgtttgcccttagatgttgagtgtggtgaatctctaattgggagtgaaataatcccttatgagccaaccctttgtgtagagtgatttcaatccctggattgaaactgccaaacattaactctaatttggagttaaagaatcccttatgagccaacactctgtgtagagtaatttcaaccctagatcgaacctgccaaacgttactctactccctctttttataaaggaagtgaggagagatattacgtcaattaaaccatgggtccctccaactaatacccaactaccctgatattatcctggttgtgaagtcataaacagagccatgcctttggtagtggcatggtgtcagagatgttcttttgtt

SEQ ID NO: 184263 - DNA, 541 bp, Zea Mays
ttggaacattttgaccaagttgttggtgattgcttcatggattgcgtcaactgtcttattggttttgcaaataacaagtgcactcctcggattagtttgaaggctattgctctcctgcgtatatgtgaagatcgtttggcagaggttttgattatctgtaaccttcacctacatattcatgagagtagggccctttttgcgtgtctcaactctcatttatctctaccatacagggattcattccaggcggcgctattaaacctattgatgttgttccagaggccaattttgatgtgactgagcattattggtttcctatgctagctggtttgtctgatttgactttagactccagaccagaagtcagacactgtgcactggaagtgttgtttgatttgttgaatgaaagaggacataagttctcttctcccttctgggagagtatttttcatcgtgtactatttccaatttttgatcatgtaaggcatgctggaagggatgggctttcttcttctggggatgattggcttcgtgatactag

SEQ ID NO: 184264 - DNA, 708 bp, Zea Mays
ggaattaagaccttttcttagactcttctccactttcttgatactttggcaccaccaatttgagaaacgagtgcatccatgctgaggcacaatggctaggaggcctaaattgtgtagtatggacgtccatatctgccgagcgaacacgcaggagacaagaatatgctggatggtttcctcggcctgatcacacagagggcaagcaactggatggggcagacctctttttgcaagtcgatcagctgtccaaaccctgtttttgattgccaaccatacaaagaatttgcatcttaagggggcctaggtctcccagacacgtcgccaagggccaaaagggatagagccaacaaagagagcatcataggccgatttgctataataagtaccatgagcagagaggcgctagatgtgttggtctgcgatgtcaggttgcagaactaccccatcaaccaagttccatagctgcagatactccactaggaccgttacaaacaatcctccccgaatatctaacacccattgacgatttgtgagcccctcggctattgttcttcgctttaaagcccttctagaaatcacttggataagggttggagagtgttcagccacagttttaccaaggagccaacgatcagaccagaacttcacagattcaccactgcctaccattgaggtaatagccacatcaacgaaggcctttgcaatttg

SEQ ID NO: 184265 - DNA, 740 bp, Zea Mays
ccacgctcaggtgtggctcccagtgatcgtgcatgtagagatagacatgttggacgacatttgcaatgtcgggcctggtgaaggtgagatactgaaaagcgccgacaaggctctggtaggcagtgaggttggtgacatgggcaccatcaacagagagctttatctacgtgtccaccggggtcgcatatagcttgcagtctagcatgctagtgcgctccaggatatctagggacgctgctggagaaataggccatccggacgacgttcaacaacaattcctagaaagtggtgaagaggatccaaatccttcattgtgaactcatgctgaagggttgtaatgatctggtgtaggaggcctgaagaagaagcaatgagcacaatgtcatcaacatataggagaaggaacacgatgtcactatcatgccggtagatgaacagagaggtgtttgacttagcttcagcaaaacctagcgagagcaaataagtggtaaacttgcttcaggccatagagggacttgttgagtttgcagaccagggaagggtgtgcagggtcatcaaagtcgattggctggctgcaatagatggtctatgtaagagtctatggaggaacacattcttgacatccagttgatgaacggtccaagagcgagagagggccagtgagggaatgtcacgaacggtagcaagcttcaccattggactgaatgtcttatcagtcaactctagggcgctgagtgaag

SEQ ID NO: 184266 - DNA, 712 bp, Zea Mays
gtgcccctgactgtttatctggtctgacatttgtcataagtggtaccctcgacaggtgccaatttctatgtataatatttttctctcttactttttcactttttgtggtggcttttgttaggtttcagctctagcattccctaacttgcttgggactaaaagtctttgttgttgttgataatatcatgtagcatagtttaatgataatgcaatgaccaattagttaaagaccaccttatgtttgtttctgtgtgcagtcttgaacgtgaggaagcaactgatctaattaagcgttatggtggccgtgtgactggctctattagtaaaaagacggtatgtatactagtagggcatctttttatgtgactattgttgtccttcatatatttaataatttgctgatagtgcttgttcacagagctacttattggccgacgaagacattggtggagtcaaatctaacaaagcaaaagatctggggtattacttactatttttcatgaaaaatatgttgtgtattcattttattttgtcatttttatacgtgcttacacatcattgcagtgttccattcttgactgaagatggtttatttgatttgatccgaaaatcaaagcctgcaaaggctcctgtagacaaacgtcaaaacaacaacagttctgaaaagcttcagaaatcacagacaaagagctctccagctaaagttgaaaaa

SEQ ID NO: 184267 - DNA, 674 bp, Zea Mays
gtgaccttaattgggcaggggatatattaatttaatataaagtcaagacatgggccaaggcccattacagggtacacacaatacactaacatattggtatcttttgccagttaatctccaggatgttcttggtgccatgtatggtcatgcttgtgaagcaagtgcattgctatctggattcaaacatgtatcacaagactgcactgctttgacttctgaatgtggttcgttgctcgaggaggtaaataacgaaataacatcttgatggaactttatgttttgagttttatgattgcataagagttagtcaagacaattgtgtgaattgggctgtggaaatctgcaaatggtttgtaactacattgaccttgaattgagaaattaatggtatttagcttgatgtttggtattgctaaatcgtatttgcaattctatgttggtttttaactcttcaactataatgaactagagctttcatatctggtggtctgttttatattacactctctttttatttgttcttgacaacgtgattgaaccagttacttcttgttcctgttttcctgttgaattatttgcaggttttagctatagcagatgggttgcatgatgtatacactctggggaaggaagctgctgctgctcacagttcccttatgaccaatctttccaag

SEQ ID NO: 184268 - DNA, 287 bp, Zea Mays
tggaggtgggcctccacactgtgctgttgataagcactggcaaagttcgccacaaaccgcgtacagagctcttcccaggagtagattgatcctggggcgaggttcatgagccaagtccgggcaggtccagacagggcgacatgaaaatatgtcgccattacggcggtgtttccacctgctgccgtgatggcggtgacatatacttgcaggaactccgatgggttcgttgtcccatcgtatttttccggcaggtgtggccggaacttgggcggccatgacgtcgtgca

SEQ ID NO: 184269 - DNA, 623 bp, Zea Mays
acttttccaccatctgcttgctaatgaaactggtagaacttccagaatcaaccaacattaataacatctgatgctgaatcaatgctctaagtcggatacattgagaatcatcagccccattaatagcattcagagacagcttcagttcctcttcttcctgtttctcctcttgctctatttgctccaatacttcaggagttaaaaccttctccatatcctcaggaactagaacatgtaactggactgcattccctttctggcaccttgcttgatgaccaggttcaaatttctctccacaagtgaagcatagaccattcactcttctatactcctttagttgtctctccttactccatcctcccatctcaacacctttaccatctgctctatttcctcctcccaatctaccaagaacaggctgcttgggtaaaacttcattcctcccttatcaataatatcctgttgaacttgagccaatagttgtgccttgtgaacagtagcaggaagctgggacataactggatactgaatttcattcttcagtcctttgacaaactgactgacataaaatgtttcatccatcataggattatgaacagcagtagcatatcttgcttcctcaa

SEQ ID NO: 184270 - DNA, 544 bp, Zea Mays
atgattcttagaggcaaggtatcaaatgttggtgccccagtggcatactcggcctggaatctgcctcctaccaaagccttcactcattttgtttcgaatccacctgttgctgatggcggtttgggccttagagtgcgaccctctgctgaagaagttaacgccttggttgcctcgctcgggggaattcctgatgacgaacgacaggtccactttgaggtgcctttggatcctagtgacacggagataagtgctatgcttgacttgctggctgaggactcttctgatgctgctcctgttgggacattggtggtggcgcctctcccagaaactgatacaaccttggatattcagaaacctgtcagtgtctgcccaaaacgcccttgccgagccaatcaacttgatccttctgctgatgagcagaaaaagaaaaagagacgtcttcggcgagtatctagtttggatcgggacgttggtccttcagttcctgctgctgaagaagtgtctgtgcctgaatttactgacattgaccctaatgggtgtgctc

SEQ ID NO: 184271 - DNA, 408 bp, Zea Mays
ggcagcgcaggtgttcgatgagatgaaggctgctggattcgaacctgacaaggtcacattcaattccctgctggatgtatatggtaaggcgcggaagcatgaggaggcaattggggtgctaaagaggatggagaatgccggatgtacacccagcgtggtgacctacaactcgctcatctcggcttatgtgaaggatgggttgttagaagaggctctggagctaaaacaggagatggagttcaggggtatgaagccggatgtggttacatacacgacattgatctctggccttgacagagttggcaaaattgacgcagcacttgctacatacagtgaaatggtgaggaacggatgtagcccgaacttatgcacctataatgcattgatcaagttgcacggggtgagggg

SEQ ID NO: 184272 - DNA, 413 bp, Zea Mays
ggtcgttgccgtgccatgcaccccgctccgtgccgcagcccacccaacaaccacgcgcgacactcagttagggaccctcacgtcaagacaatcttctccaacttcctccgtgtgcacgccaaatagtcgcccacatcgcacagctcacgcaaccaccactcacgacacccatattcacatctggcactctcatctaacccctccccacactcccaaaccggtacgcatctcttcctatgcctacacattgcttcgccttgcctcttgcctagaaccaccatccaccggtaccacgatgcgctgagcatcgccgcgtttgtgccctgcctcgttgcgtcggagcttcgccaagccaccaccgcgaccatctctgtcgagctcggatgccgctctgacctattatgtcctattca

SEQ ID NO: 184273 - DNA, 282 bp, Zea Mays
gtcggcgatggttatctctatcttccttatagatctgtcgcggttagtagcaccagccaccacggctccaagatgagcaatgcggtggcctcgctgctggcgctggcagtggttagagcaacctgtcgaggaagacctccatcctctctcctcctcgacttcccaccccttgcgccgtgcgcgtaccactcaccaccggccgtcagtggaagaaggtgtcccgaaggccgcctgctcttgccggtcttgtggagcgagcgtctaacccgagcaggccagttc

SEQ ID NO: 184274 - DNA, 298 bp, Zea Mays
cttctgattccctttctgtttttatccgtttcctggctccgaggaatgatgcgcacactgaatgctgtccactctgtgacatttaagagtgatgccagtatttggcatgcagagtccagattttttagacatctcccttgctgtggaaggccttagtttcttagaggtggagtcagttctccctatacataagacccatgcacttaattatgaatataggaatgaatctatagttagtctcataagcctgaacttctcctagctcattacggggtagacctgctggtgctggttgagg

SEQ ID NO: 184275 - DNA, 1086 bp, Zea Mays
gtcataaacaggctgagagaaattatgaggtgtaacagatttgattttttcattccaaaggtaccatcagtatttgataattatttggatgagtcctcttgatggtctaatatgatgtactaatatttcacacccatatttgttccattttacaggtttccaagatcgaaggtaggttgaaaaatgggtattatgctcgccatggttttcgtaccatcaagcatgacatccgtaccatgtgccaagatgcattgaggtaaaaatgacctaatcgaacctaggttaagatttctagaagtatatgtgttcactgtatttctaacatttcctattctacctcagatataaagatggcaatgatttggatgatgtaaagcaaattgttgtctccttcatacaactagcaaagagactagggaacccaaggtacatttctgagagaaacggagcagcagcccaggacagcctggacattagtcaatattcattcgatactaaactcaaaaagaagcaaaacaaaacaagagcaaatttggtggctgctggagcagataattcatctcgcgcatttgaccttgaaatcaaaagaagcctgtctaaattaaagaaaaaggatgtctgctctggtagtgaaacatctgatgatgatggctactctgaaggtgatgaaactgagagtgaaactactgtttctgatactgagagtgactttgatgtaaattctggagcctgggatttaaaaggaaattgcctaaagttaactgaacatggggagtctgtgatcgatgatcgtatattaggtgcccgcatgacaaaggccagccttgttcctccagttactaggaagtatgaagttattgaggagtaccttattgtagcagatgtggaggaagtacaacgaaaaatgagagtttctttacctgatgactattctgagaagttgctttcacagaagaatggcaccgaaaatttggagcttccagaggttaaggattatcaaccccgaaaagtagcaggggatgaaattcttgagcaagaagtatatggcatagatccatatacacacaatctactgagtgacattat

SEQ ID NO: 184276 - DNA, 763 bp, Zea Mays
tagttattgtttatttctaaacactaaggtatgtataatctgatggttattcttaaatttttggagtaggagggtgtaggttcgagtgctcactctgcattattttttgcacgactacatggacggagcactattttttgcacggtgtggtagttacgcgggtggggtcggtgctaggcaagcgcattagctgactacgcagacactgaggtccacaactcagtagttgagagagcattgcacgtgcgctgggcgtggggcccacagggcacgacgccgaggcggggcgcgtgtggcgggcctagaatgtcagcgttgagggtgaatgcgtggttgcaccaagtatcacattaggtttttatagagtagtatatatatagatagggaaattccattttttcaaaaaatattaatatatttttaagctgtgggggtctcccctacagtctcttacagtaatttttttgtgaacccattaatatgttgtttgttttgttcttattatgtatgataactcgcgcaatgacttcattaattattaacagtagcaaattctaggtaacgttttcttcagtggaacttttatttgctgggtgcagtgagggtgacacatattcacatgcatattgctacaaaataaacgttggatttatctaagaaaaagacaactttattttttccaatatatacaactatacaagaaatgtttttaatcaagtttcctctcggattaagcaatttttaggtaatgggataaaaggac

SEQ ID NO: 184277 - DNA, 407 bp, Zea Mays
gagtaattttgtgcacaagctagcccttccctcagttgggtctagcggggggattctcgtggcctggagtaatgagattggtccggcaagcgcttctagggtggatcaccatagtgtgacaattcagttcagtccacgtgaccagcagccttggtggttaacatgtgtttatgggcctcaaggaaacagcgacaaaattcagtttatgcaagagcttcgcaacgtgagatctgcttgtcctgggccctagattttaatgggcgacttcaacctcatctacaaggatgatgataagagctctggcaattttaataggcacctcatggacagattcagaagactcatcaacgatctgggggtgaaggaattggccttacatggaaggaaattcacttggtctaatcgtc

SEQ ID NO: 184278 - DNA, 501 bp, Zea Mays
cgagtatgtaggcgttggaggggagaggaatgccgtttcgtggaacaccatgatatcggcgtacgtcaagaacgaccagagcggggatgccatcggggtgttccgcgaaatggtgtggagcggggagcggccgaatgagttcgggttctcgtgcgtggtgaacgcgtgcacgggatcgagggatttggaggctgggaggcaggtgcacggtgcagtggtgaggacgggatatgaaaaggatgtgttcacagcaaatgcgctggtcgacatgtactcaaagctgggagacattgaaatggcagcaacggttttcgagaagatgcctgcggcggacgtcgtctcatggaatgctttcatttctggctgtgtaacccatgggcatgatcaccgtgcactggagctgctactacagatgaagtcttcaggattggtgcccaatgtgttcaccttatctagtgttctgaaggcttgtgctggtgctggtgcattcaatttgggccg

SEQ ID NO: 184279 - DNA, 412 bp, Zea Mays
gaagcaaagcaacagaagggttaggtatttgggaacaggtacaaaccttcagacgaattgctcatgacggacaaatggaggatgaagatgaaccgcaagcggtgacggtgatcaacacttcaacagctaccggtggatttgcagatgagatctgaagaggatgagacggaagggaactaagggaagccaaccgccaatgtaaaagagtagacggaagggaactgagggaagccaaccgccaatgtaaaagagtttgctgctacataagggttaagggttttgagggggttgctgtttcatatgccctgtagtcaggcaaaagtcggcagcccacatcccaaatagtactaaacgacatctggtcgctggttcttccatgtagggcaattaatcgcggctagaaacccattag

SEQ ID NO: 184280 - DNA, 351 bp, Zea Mays
gagaactgttgcgccaccctcctagctccacggcctcgccgggggccatgaagcagtggcgagacgacgtcgaccgcctgctcggcatggcgcactctagctcaaccaggcccaggccttggtcatcccggtgtcaacatgaggcgtcggcgtctgtgcgctcgccctcggtgagggccacaccgactgaggacctgcgggcggagctcaaccgccggcgtgcgggagaggaggccccagtctctctggggaggtctaacgacctacgggcagaactcaaccgcaggcatgtgggcgaggatgcacgtttctctctacagagggcgcgtgagcgccgacagaacgtcgagg

SEQ ID NO: 184281 - DNA, 490 bp, Zea Mays
cttgcatattagtgtgaagacctgaggcctctccaaacttgctgagaacattcctcgtgagttgcatttcttcttcatttggtttaatgaatagaaccatgtcatcagcataaatctatcgtttgaccttgaaaaccacaagaggttgcagcaaacctaagcctcccgctttaagaaagagactattaaggacatccatgactagaataaacatcattggcgaaagggggtctccttgaagaagacctatcctatggctgatctcctttctagtttgcctattaagaaggatgcgagttgaggcagtgccaagcagattagagaccatgttgcaccaaatgggaccaaatcctatatgtcttaaaccttctagcaagaattgtctaagagaccgagtcaaaagctttggagatgtccaattttagaaaaaaactaggaacctttttattataaaggtgttttattgtttattggaccatgagatgatgtc

SEQ ID NO: 184282 - DNA, 456 bp, Zea Mays
ctcactactggggaggcctacatattatagtgaattaaatttaagtctttgagagctagtgaaaggcaatctagtgtgacgacctagttgacatgagtgacatatcgagtgactaggtattttattacatgagaatcctatgaagagcttcgcgactaggatgaccaagacaatggtgccatagcatgagtgacgaagcagtaaggagggcaattgctggggatgctggtaactggatggtgtaaagcgacctagggttgtttcacctaacaatgactctcctgggaagcaaatctttcacattggtcaaaagggccaaactagatggaacaagaattggtagtggtagactggtgaacagaggtaaggttcttaataataccaggtatcacaagaatatttcgaagatgaaaattaagagttaaagctcagagtcagaggaaaggcatgatggca

SEQ ID NO: 184283 - DNA, 842 bp, Zea Mays
ccgactacagttaaccatatttggacgcagggcccgcaacacccgaagacctcgtctagaatcgatgacgagacttcgcctggaatcgacaacaaagcctccgaccacaacgccctacgagaagatggggaatcattggccactggtgcgaagtcggctacgggtgatgactcagcacccccacggcgtacggggcccaaggccctggcgaagacaccctcgacggtcgccgaggggtgaagggtccgatatgcgagcgaaggcttcaaacactcgagggacccatttcctcttagctagggcctagacccacttgtaaaccccttggaggggtggacttttagatgtgtttgggtgtgcgtactttgttgtgtgtaatgaccccgctgctggggaatattccaggaatgcagtaggtaaccgggggcataatggtacttgggaccacctactcgcccggttacctataaatatccccgttctgtacacgcataacaagatgctatagtttgctacctatcgtttgtagtgcacctgagccctatcaacttccgagtttttgggtccgcccgtccacgtgttggcaaatccaaaatttggcgcccaccgtttgtgctccgaaaaccaacacccacgatggctccaaaaaagtgactactagagctagctcctccatggacgaggccacgaaggcggccctcgtcgacaagaaaggcaaagcagtactcgcagatgacaccctatctgccacagttgaaaacaatgagacgggggcagtcaacagcaagcaccctcgtattgaagacccacccaccctagaaggcaacattcacacatgcagc

SEQ ID NO: 184284 - DNA, 439 bp, Zea Mays
gagagccagcatcgcaggtccccatctccggtgggtgctccgccgcgggagcgagtcggccgccacccgtcatttgggcgtgtaggaagacgatgtatcgtccgtagatcggggaaccgacgactatgatcggtcgcacagatcgtttgggaatgattaaatccgagccgtgggtagcgaatcggagggtcataggcgcgtaccccttcgcatcgaactcaacctaatctgatccgtggatgttagatctaatggttgaaaagaggtatacattatatgctgcacgatctaatcatgtgcgtcggtttgtgatcggacagatctggtttatccatacccttttcggccgagtaaatatgcataagagaccctgggttatcactgaatcaacctgcagcccagtttaactgtgcgctgagtcttaggaaaacttgcgagt

SEQ ID NO: 184285 - DNA, 439 bp, Zea Mays
ctgcgtggctcgcctcagagccccagccgtatcctgccacccttgtccatgagcgcccgctatcagcgcagctagtccctccctccgcccgctatcttgagcggtggtgatggagtttactttcgaggatgcagcggaactgtgcgcgctcgtttcgaatcagcaatcccacgtcgacgagaagcggaggtcggtgtggtttcttctaccggcgcacctccgatcagaatgcatttctgtttttgcaccctgcatcacaaaagattcggggccctcttaatttgcaggtggctggagtcaatgatcctcagaccggatggctgcatcaggcgcgcgaagcgacccaagtttttgcatgaagtgtaagcgtgcgccaagttctgggatgcgagtagtgttctaattcaggctttttcttggtctctttaataagttgtcc

SEQ ID NO: 184286 - DNA, 829 bp, Zea Mays
attcctttcaagtactattagatcaactgatgcatgctatatgccacaaaaatcatgatatatcatcaagtacaggaggaatgccccatgctgcattgagtaaaacacaactgaaaaagagtgtgaattcaaatcttttagcagatgagaagtggcatttgataggcgcttctgtgtgggttcggttgatatctgtgcttgaacatcgtctaagggaattctttgagaaagagggacttgaacatgaagctggtgttagtggttcagaattcaggggtcttatcacttctgttgctgcaaagtttgttatggattccattcattttgtgtcatcttcattagtaccactgcatgcatcgttcttgaggaagaatttaccgatgaattcaagttcaagtttgctcttctggttagagtccaagttgcctcagcaactcccagtcagtgatagctatgatcacctctcgaggatttcacagctttcaaacagtgagaatatggaggcattgtttaatattttgtgggaaatatctgttaatcctgtggatgtttgtaatgcctttgtgagtgaaggagttaattgtttttccttaagcaacacgaatgtcactagatcttggaaggacataagatgtcctgtggttgagtgtgataaaattattactgaaagaagtggagaggaacatgaacacagacttggctccaagagattgggacagggattcgctgaaaaagcctcttataatggtgaagtgttgtatgaaactaaaaggagggagttgatcatacaaaaagagtttcagagcccaagggaaattctaaggagaag

SEQ ID NO: 184287 - DNA, 341 bp, Zea Mays
cctcccgtaagctatagcacatgttttcatggtcgagcgactatttttaagtacgtgttccaccaccagcgttttggtccccagagcaccttaaagttgttcttggcctcccacaagctgtagggtttaggttttagggcgtcccgtgacacatgtttttgtcgtcgaacagcgatttcgtgcctcccgtccgccacccatgatttgaccattgagactggtaaggctgttttggcctcccgtgagctatagcacacgttttcatggcccagcgaccatttttatgtccgcgttccaccgcacgtgtttttgtccccggagcaccttaaagcggttcttgg

SEQ ID NO: 184288 - DNA, 751 bp, Zea Mays
agacttttcactgattgaaattactgggcgcaggagcgttggatgtgaagatggtgatgattcggataggtacttttccccacagagtgagttttctcaagacacttctgatacagattcgatgagcacaagtattagtaggatgtataccttcaggttagggacttcgagcccattagatagtcctatcaaacaattgggagtaggagacacaagtcctccctcaaggaagggttgccattctcctagatatccttggaattcttgccggggatcagatgatgttgattctagctttatgagttcacctcggcatgatgatgaagagaggaaatatgatgtgcaaccaattgattttgagagtagacacatctggtatcctccaccacctcaggatgaaaatggtacttttcaatatgatgaggatgatgacaatgatgtttgtgatgggaaggtctttggacatattaaccatgattattgtgacggcgaagatgatgatgatgtgttagggatcaaaggaaaacatagtatatctcacaaagagttcttgaggagtgctttacatgggcatttcagggctctcgtctcacaattgctcgaaggacatggcattgatcctgtggatggctggccagacatagtatcctcattagcttggcaagcagctacctttgtcaggccagacacgagcaaaggtggtagcatggatcccacagactatgtcaaagtcaaatgcgtagcatcagga

SEQ ID NO: 184289 - DNA, 520 bp, Zea Mays
ccctccttccctatctacaacgacagcagtgaccctctggggtggttcaacgactgcgagcaattcttctggagtcagcacaccctggagtccgacaaggccttactggcatcgtatcacctcatcggccacacagatacgtggttctggcggctgaaacgcgacgagcatcaggtcacgtggccacaattcaagatcatgtgccagcagcgctttggttcccttgctgcagtggcaacttctgcctccacgtttgtcgcgccctcgtcgccgacaccgcccctgttatcaggggcagccatcactgctacccttgaccccaagagcgacgcccaggagagggcggatgctccgcgacagacggcggcggctatccacctgcaggctgcagcatgcagtttcctaacgcgtcggcaggtgaagcagaggatgggggtgctccattgcgggggagccatagctgcaccagcgcggccgagcaacgtggtggctattcacctccatgtacaagaggctgcaa

SEQ ID NO: 184290 - DNA, 281 bp, Zea Mays
ttatacggggttttcatttttccttgagaaattagtttagaaaaataagaatctcttagaaaatggagctcctaaacaggcccgggccaaaggcatgtgcagtcagttcgcccgaacagggcccatgaaattatgggggcgcacaaaatttttcctctagtagactatctagtacatatccgtctgctagttgcgttcaagcgtgtgacaactgacaacgtgactgtgtgagtccctcactccctctcaaatcctgtcgttcccaattcgctctggtcccc

SEQ ID NO: 184291 - DNA, 619 bp, Zea Mays
cacaagtacaattgtatcatggttgtggtggataagttttcgaagtatgcacatttcctagcactagcccatccgttcacagctttaaccgtagctaagctttatctgtcagacatatataagttgcatggactgccatcgtcgattgtgtctgatcgggatcccatattcactagcaagttatggcaagaactgttcagattggctgggacaaagctgtgcatgagtagtgcctatcatccacagtctgatggtcagacagaaagggttaatcagtgtttggaagcttatctgagatgcttcgttcattcttgccccaaacagtggtattcttggctctcgctggctgaattttggtataacacttgctatcataccgctctgggtaaatctcctttcgaagtgttatacggtcatgctccttctcagcttggattagacaccgtggatcagtgttcggttcctgatttacaaacttggttgcttggtcaccaacagatgctacagcaagtaaagttccatcttcagcgtgctcaggacagaatgaagaaacaggctgataagggtcgagtggaacgtacttatactgtgggcgatcaagtttttctgaaacttcagc

SEQ ID NO: 184292 - DNA, 625 bp, Zea Mays
gacaatcaagaggctgtgtttggatcggaagaaaccattcttgatatccggtatgcttggaacttccaaatattgtagtattgctacatttacattgtcgtatctatagaatgggttcaaattttagtagtgactggtttctgaaattgatgctagtgcaaagtgtttatgaaaccaatcagaagtgggtttttgtatgctacttcaactatttgctgggtatggttttttcttttttgacagaaaacattgtaaaaacgattttaaactgctggtatctgcttgagcttttgctcttggaacatctttaaacctagatgaagtcaaatgctaattacgccaagctgcaaagctcatgattgaaatgttccttcttagcatcttataagtgcttttcttgacaattttctcgtttttgtacttgcagtgaagcaaaactagcatatagagccgaagtttttgagttacaaaagcagcttgtgcggcagcaagcacaatttgatttgcttgcaggccaggcttcaactcttattcaaggtagaagatcacgtgtatctgctatgtctgcagttagtggagagcttatatcgctagatgagatactttcttccagaaacttggaggt

SEQ ID NO: 184293 - DNA, 414 bp, Zea Mays
tccatccgtaggaaaaacctcctcatccagtcgttgccctccatccccacatgcccacgctgctcgtcgcccctctccaccaccaggaatcattcagttcacccaatccagcgcatcgcatctgcaaccgtgcgtccagttcctgctttgctcagctgacgcggtctctgcagtagatcaggcctgaggtgagctatgcttgtcgcatccttgactgggctcacacgcaaacactacagttagtacactagtataaccaagatgtccattgatgtgatagaatttgtggtgccgtctcaagcagctgcatgatttatgtgatttttggttctgtctcaagcatctgtctgatttttttgatgattggtgacatctcaagcagaagcagttgcctgatttttggtgccgtctcaa

SEQ ID NO: 184294 - DNA, 510 bp, Zea Mays
gagagatacgtatgtgacaagaagagggaccataacactgataacctttttgttcaagactataccctagaaaaacatgttcaacagactgtgcagttaacttagtacactcacaaggtgtatgtacatccaaaaagcttgaatatggtcatagtgaggtgtatcaaaaagtacatcaccaggttatttgccaaatagtttggaagacgattgtctattgatttgatagacaacagtagacatagcttcacccaaaaccgagaagggacaaagaatgaaatcaagtgtgtgatggcttttataccatgttactaaccttggggatctaagaagatgagcactccacaaatggagatgactatatatagactcatggcctcatgggccacatgtgcttatagtataagggccttcatacacttcgggcgtgatcagttcacttctctgccagcctggctcggatatgggaaccaagccgcctggagccaggctaaggaggtgcaacacgag

SEQ ID NO: 184295 - DNA, 298 bp, Zea Mays
ggacatgacttggtctaattgctagaactccaataatcttgtgaagaaaatgatcttcacacaagacgacatctaggataggttgtcaagaaaattaatataaagttagattaaggttcactaaacagggacatgacctagctttgggtttatgcaaacaaactacctgcattctaccagcacacaagcacgaaaacaaacccaagttgcactagcggtcaaactaagaagaatcacatgccacataaacacatgtctaaaggacgcaacaaacaaagctagaaattgcttataaaac

SEQ ID NO: 184296 - DNA, 817 bp, Zea Mays
ctcctctgcagatcaggccaagacgagggatgcagcacccgctgataggaagaggagcccattgagaggtagagctacccctgagcaatcggagaatccacatgccaaggtgattgatcatcatcgctggcctgctatgatggggggcagggtgtctgcaagcacaatgtccaagagcatggatctcactgataagatcagtaggtctgctcttccatcagttccgtcacgtggtgtttcaccgaagcgaacaacagtgtcctctgctgcaaataccttgtcaagaagtattgatcttgctgataaaattgatcggctggtctcttcgtcaatgtcatcacaaggggaatcaccaagaaagtcaccttgtaatggtgcagatgatgtgtccaaaaaggttggtgttcgtaaagatctcaaactctcatccttggcaatatcaagaagggtgtcaccagtaacaacagatgataaaattgatcggctggtctcttcgtcaatgtcatcacaagggggatcaccaagaaagtcaccttgtaacggtgcagatgatgtgtccaaaaaggtcggtgttcgtaaagatctcaaactctcatccttggcaatatcaagaagggtgtcaccaataacaacagctgcatcagatggcactagaaccttatcaggaagcatggatcttactgaaaaagataacagtacactctcgccagtttcatcacccagcatttcaccaagtgcatcattatcaagtgtgtctaatgccgcatcacagactactacaaagtcatccgagagattaattggacctgtttccaac

SEQ ID NO: 184297 - DNA, 454 bp, Zea Mays
ggaagaggtttgacgaaaagtttccacaatttgcatcagattctcgtaatattcgttttgcattggctactgatgggtttaatccatttgggaagatgagctctatgcatagttgttggcctgttgttttggtagtctataacctcccgccatggctttgcatgaaagatcacaatattatgttgtccttgatgattcctggtcctaaaagcccaggatatcgaattcatgtgttctttgagccacttttggaggaccttaaggatcttttccaaactggtatatccacatatgatgcatcgagaaatgagagttttactttgcaaggagccgtgcttatgaacataagtgatctacctggtttaggaatgcttgcttctcatatggttcatgggaaatttgcatgcccaccatgtggtgaaaatgtatggacgaaacaactgaagaatggtcg

SEQ ID NO: 184298 - DNA, 457 bp, Zea Mays
gcaaaaatgtctaaaatagcatcgaaaccaagtgtgacatgttttgagtcctatttttgcaaagccaatgttacggatggagaagtgcgaagcacattgtttggagtcccaaaaatccaattttctccttcaacgactccctcacagccggcctcctcagagcaggctctcatgccaacaccgccttcgctccgctccactccacttcatgtgtcccagccatccttggcgtgggatcaagcaggactggttgctgccctcaactagttttctttcgagaacccttagctgtgggtgatggactccgagccatatgacgtctgatgatggtatactcctctctcaccatctcccttctcatccttccatcacagtcggcaacggcgccacacttcctatcacctatcatggatggtctgccttactttctacttttcgcctaaatgttttagctgtc

SEQ ID NO: 184299 - DNA, 426 bp, Zea Mays
ggaggtgcagaggagccatgggtgatggaggtcttgagctgatgcgcttggtgcagatgtgtccgtggtgccagtgggcagagttttcgaattccttggcactggagtatgagccggacgatcgacgaccgtgcgtgtggcttgaggttgatttcccatggaggagttcgaggtgtggctcaggcttgcagcgggttgcggcttttggcgtggcacagcgttggcgacggcgcagttcatgacggcttctttcgcttcctttcccagtttgtggtggtctagtgttttgttgagtgtgttgtttgcatggtggtggtgttcgcttcggcgtgttactctgtcgtcgttgtgctgagttggtatggtgtcggcgtgttgatgtcccaatccaaccgcctgttgtctgtcccccgtcttgcggagtcg

SEQ ID NO: 184300 - DNA, 341 bp, Zea Mays
tttcatcgaccctggcgctccagatcacatccgccatctgcagaagtccttgtatggcctgaagcaggctccgcgggcatggtaccagcgcttcgccaccttcgtccggcacctcggcttcgtcgcctccatctccgacacgtctcttttcgttctacgagaggggacaagtctcgcctacctactgttgtacgtcgacgacatcatcctcaccgcctcgtcgtcggccctcctacaacgcattatgactcggttgagctccgagttttccatgacggatcttggcgccctccaccacttcctcggcatcgctgtcacgcgctcctccgatggtctcttcc

SEQ ID NO: 184301 - DNA, 1006 bp, Zea Mays
gtggcttgctccaccgataaacacagcaacaaggccatggtgcatgtcagcttctaccgcaacagtaagcccgcgccgatgatctcctcgccctacttgaccttggtatggtcagggcttattgatggatgttgggagcatctaaagctttattgcagtttaagtccccatatgtgccatagttgtgaggtgaggtgaatggttttaatggcacgacggaattcagtggatttttgtgtttccactgcttttgctaacagtcgattcgaggtttgtagggcgttgatcttgaactaattcatgggagtgaatataattggtgattagctttgtctaagatgagagagtccaattttccttgtttgcccatgtggagtaagcatgtccgagatgagcgagttcaattttcttgtttgcccatgtggaattaacaaatgttatatgaattggttggtctgtatacattgtcagtgttcctttaaggcttgtgtaaattcattagaaattcccatcaccattttatataggtttttggcacatgtggttttgtttgacaaacaattaaattattggggttatgtcacctgattcttttgtatggtccatgttgttatatgtaaatgccaaaattaagaattctatgttagttcaccatggaacttggtatttgttatataccatgttccatttctaattgaaattgcttatgtgtgcatttttagcttgtttgctcaaattgttacttgatgctctttaatctattcattgtggttgaaaaatatatctgacaaccagccatttgtttagttatagttttagtccttaagcttcagagaaaatatcttctcagggatgatttcagcttgaatgtttgagctttgcaggtgagtattcacgttgaggcacttcatgaaaatatatttgtggagtacgtgtagtctctcccagttatgcctttagcttggtaaggtttgattttttacaatagccattgttccgatttgcc

SEQ ID NO: 184302 - DNA, 618 bp, Zea Mays
atcgccctgtgaatccatccggccctggggccttatccaaaggcaagcctttaatggtttccaaaacctcttgttctgaaaaaggggagtctagattctccagattatgtctagacagaccaatggcatccaaatcaatagtcctttccctgtttccacactgcccaatgaggtttgtataaaactgatccactgctgctgccttttcacagtggttggttaggatacgatctccatcaaccagcatggccacaaaattcttcctcttacgatgccttgcatgaatatggaaaaatcttgtattcgcatcgccctctttgagccatgaaattcttgaccttaatcttgccattgttcgcttgaaagaggacagcatcaaggattgttttttgagcctgtttataagccagatctctgctggggtaagtggtctttcatcatgtgccatctccagtctatgcagcaactcctttgccaaagccaactgcaaccttacatgcccaacctgcttgtcactccacccttgcagtcttcttgctgtcatctttagcttcttctctagagtctggaaggggcatctgacagcttcgactgagttccatgcagaatgcacttcct

SEQ ID NO: 184303 - DNA, 497 bp, Zea Mays
agaaagtgtccatgaagctgaagagattgtccaaaagactgcagtcttgggggcacaaaatggtgggtaatgttgggactcaattgggcttggctcgcgaggtgttgcacagactggagattgctcaggatattaggaccctggctgtagaagaggtttggttgctgcgaaaactgaaacaacattgtctcgtcctaacttctttacaaaggacaatcgcccaattaaggtctcggatccaatatttgaaggaaggggatgcaaatacaagatttttccatatgcaggcttgctttagaaaaaagagaaactttatttctcatttggaggatgagggcaggactgtgactaaccatgaccagatgcaggagctgttggatagtttcttttcagatcttttggggactgaaatccagagacctttcactcttaatttgctaaattgccacaaggatccagttgacctaagcgatttagaatctcctttctccgaaagg

SEQ ID NO: 184304 - DNA, 397 bp, Zea Mays
tacaatttcagtggcataccttctctaataatatccaccttatctacaatccatccatccaaacaagaaacccaatcatcctaatcttgcctatccctcataacaaacaaagaaccaagatcccaatgacgcaaccaaacaagcaaatgggaatatgggattatcccatgccccaaagtaggaatggctctaacatatcccaccttccctcaaaccaaaaacaccctatgcaaccctagtacaagggatatatcaaatacaatcaccaaatacgttgcaccatgtatgtacaaaatcaatataagaatcgttaatgacaacttgtggatgatccaatcgaatgggatcagttttgtgtctactagccacagttggaatctcattagctacatattta

SEQ ID NO: 184305 - DNA, 796 bp, Zea Mays
tactaactgattttcacgtcttgaaaatcccctcggtcacctcaggcgccaaaacgaagcccttctttctattaacatcttccagaaggatttatcggatataaacccactggtgagggcttgggccttgcgcactatggctggcattagactacacgttgttgctccgcttgtgttggttgctatcaagaaatgtgccagggatccgtctgcgtatgtaaggaaatgtgctgcctacgcactttgtaagctgtgcgacttgattccagacgaaaatgcggctttggaggaggttttgtctagtataacccacaccttcttctctatgcagcaactctgcattccatatacgtatctcaagcctgccctgttgatgttgttgcagatcgtggacaccttgttcagcgacaattcccctggagtagtaggagctgccgctgttgcatttaagtcggtctgtccaagttgtttaccgttagtatcaaaacatttccggaggctatgtgagaccctccctgatatcgaggaatggactcagatcgtcctcatcgagatcctcttgcgttatgtaatagccagacatgggttggtcaaggattctttactctttgcttcagatttaccgacagagattcatggcgttacagattcagatgctgttgctagcgtgcccacccaatctgattctatcgtcaatggggtttctgatactatatcaagcatcatgctgttccggcactacatcgaacaatgctcaggttcctctgatagagaaggcaataatttagaattatcg

SEQ ID NO: 184306 - DNA, 400 bp, Zea Mays
gattgacccttttgtaagtcttttcgttgccttttattttcgaagtctatgctagacccgccagatatcatgtttattatgccgtgaactgtcgattgttggaagtgaccttcatctttgggaggtgggggtgtatgatttgagggggagggtggagttggatcctttcttggtgggatagctggggtggtagtttgggggaaatgagggtaaggttgtgtgttttggtagtgagggggattgctgttggtatgaagtgtgggcgatggtctttgtcggctagtctggaattgatctggccattctttccttggcctctttggtgacggggcaatccctagttgaatgcccgacgtcctctccatggaagacacaatatgaccttcgctcttgtttggat

SEQ ID NO: 184307 - DNA, 380 bp, Zea Mays
tgaaatatctaaattactggtgagcttggtcatgacatcgggtcctggatggccgagacgacgatgccaagtggtggaggaggtggtggagaccataacgggttgggaggacgcgccggtggaggaaggctgaagcatgtagaggggccccgagctatcacagattcacagcggacgaggggggtcctggtggccagatccttcacagagaaaccaaaagggtcaaactcaatggaacaagaattggcgatggtgaaccgacgaacagaaagaagattgtgagtaatgtgaggagctacgagaacattgttgagatagaacggtccaaggagaaccgaggcacatactgaggtgtccggcagagtggaactgtttccaat

SEQ ID NO: 184308 - DNA, 291 bp, Zea Mays
cacaaccctgttcgatctgcatgcacaagtcgtcaccatgttgaacatccgcgtcctcatgttgctcctcctcgacatcaactccacgttctacgctcgatggtatgacacattccttctcaccctcaccaagttctccttggaacaccatttcctccccagcatcgtcgctcctgcctcgcatgattgggtacacatggacgtcattgtccgcacctgattcctcggcaccatctccaacgaattcgtcgacacagtgttccaggctcctagcgtggcgccactacccgc

SEQ ID NO: 184309 - DNA, 432 bp, Zea Mays
ttggacgaaatatttgtaatcttctgtttttctcaatttcaaccgtcacatctaatccatatgatacatcagagtccctaaaatacatgaagcattgataacataatttctcaggaaaagcatatgatgtttaattaggttagtcaattaccttcgaatgaggttacgcttaaggcaatgccagaaattaaacgtcatggaggaaatggcaaattcgagaagagaagtaacttctagtaatgcgttcactatttgaattgaatcgtctgagcctggtaaagctcaaacattaaaagtaaataaatggatcattggcaagagaaggatttcaatggtgatcagcataatccatgaaatttacctgtggcaatcaagtcaacataggattcacccatgtctgcatataaacgagcaatagcttttacatcttct

SEQ ID NO: 184310 - DNA, 312 bp, Zea Mays
aaattcgtgcctccgacgccatccaggtgaaggttgacgccccgatttacgacaccgtcccggaggaggagtacaacgtgctcgtcgctcgccgccgcaaggaagcaggcgagttcatcatcgacgacgacgggctcggttacgtcgaggacggccgcgaggaggactggagccaccgcgctctcccttcctcctccgacgagggatctgaaggcgaggacggcgccccccgcaagcggaagcagacgcgccctccccaggcgaagcgccagccgcagcagtccgccaaggtggcctctctctccgccgctg

SEQ ID NO: 184311 - DNA, 951 bp, Zea Mays
tacaccccccctggacaagcagctcgtctcgagctacaacatccaacaaacgatctgtaatgacctaacctatcaccgaaaaatgaaccttttacatctcggctcatcttttaattattctagatatactgcaactgcaagcatcatcatgtgtcccaaggaaacgttgcacaacgaagaggggggcgcgagctggaaccacggaggtaaagacacaacagccttcagaggcgggcccgtggaggccaacattggtgttccctgcagcaagtggatcccgtgtagtgcagccctcatggccccgtggccaccagtgcgcagagggtggtgtagccagagcagatggtggcgacgctagcagacccccttgtacgaaggagagtagtcgtggtagttgcccggtcgccacaaacgaggcccagcgccggacgaagcgttgtagaggggtgccatgtcttgcagcctcttgtacgcggaggtgaacatccaccatgttgctcagccacgctggtgtaactacggctcccccgcaatggagcacccccaacatctgcttcacctgccgacacgataggaaactgcatgttgcaacctacaggtggacgaccgccgccgtctatcgcagagcaaccaccctctcctggacgtcgctcttggggtcaagggtagcagtgatggctgcccctgatgaagggggcagtgtcggtgatgagggcacgacaaatgtggcaacagaagtcgccactgctgcgagggaaccaaagtgctgctagcacaagatcttgaaatgtggccacgtgacctgacgctcatcgcgttctagccaccagaaccatgtatgtgcgtggccggtgaggtgatacgatgccagccaggccttgttggactccaaggtgcgctggctccagaagaattgctcgcatccgtttaaccacccagagggtcaccgat

SEQ ID NO: 184312 - DNA, 508 bp, Zea Mays
ttgtgaagtaggagtagaagggtttcaatcaaatagtatttggtcttggacgtgctgatcaaattggattatgcttcggtatttggggatgattgggattagttggagtggctgatttaaggctaacggagatttggtggtttagttcaggtagtattgttgatttttggttatagaataattagtatttggactatatagcagaccttccccgatgatttggttactagcatgggcaattagttgctctgcaattgcaaaataaggccttgatcgttttagtagtacatacttacggctgcattatcatctcctctccatactggcggtgatatgtttccggtggccttcaagtgaagctgtgggtagttccagaatactggttccctgtcattctgtgtaggtgagtagataaccttctatcattgttaaaaacatcttgattgtagctggattatgacatatatactatcttatcagctgatccagtacacgggctgttatactg

SEQ ID NO: 184313 - DNA, 430 bp, Zea Mays
ctgttgcacttctcccaccagtgttgcctctaccctcaccgatttcatgacgtcacccccaccatacatgaactttacctcactcgctgctctcgtgactgtgcgtgcactcctccacgacggccagctcatccagggcatgttcgtgtccttcgatcctgcctgggaccctattctccaggactgcgtcgagctccaccctcaggcgggccgtcacgtgcctagaccgcttgtcttcccacgtgctgtgatcgcctccttagcggttgagctcgtgtcatctccctcccttcctagtgcctctatcggggcacctcctttggccctctccgctcacaccgtaccttcgccaccaccacctcccccaaccaccaccgattgggtggttgactccggggcctccttccacactacccccacaactagttcg

SEQ ID NO: 184314 - DNA, 480 bp, Zea Mays
gaatttgtacttatcttgtacacattatgtttttgacatactaaatttggcatatttcaagggaactgtgttgttgtattcatatactatttctagtgtgtggtgtattcgtatactccatttatcctaatgcatgagcgtaggtgtcctacaaccaggttgtgggaaaatactaacaggactgatgcaaatatggactactacatgctctgggcttttttagctggtccacttttcattttagttttctatttggggaactgctggagtaaaatcttagcctgccgctaataagtttttgtttgccgctaataatcagttttgggggaaaaatttttagtatccttttggagatgctctaagtagctcaatgcctcaatcagagacctttcgctttcgacttggctttcgtgtggcaacgtcattcgacaagcccatccacaatacatcccatccttcaccatcacagacccagagcca

SEQ ID NO: 184315 - DNA, 341 bp, Zea Mays
agcatcaacatgaatcacttagtgctacatatcagtttggaataaatgatatataaccatggattgtatctaaatcttcaaagttagtgtaaacgggagggtaatgatcaaatatggggagttctctcatgtatgccgacacacagctctgcatcttccagctttattaaagtgtgtacaagttgtgatttgtgaaggacatgtacaaagacaacatcctagaagctttttgaccagatactggggaggaagtcagatttactgatgcaagtaacaatttgaaaccaataaattactagtattttttcttgaaacaaggagcaactaggttattaaaactc

SEQ ID NO: 184316 - DNA, 306 bp, Zea Mays
ggtgccaactttagcattccagagctgaacattcttaagcaacattactcaaattgttgctcttgggtgagtcgtgctaagaacatactcagaaaactttatgctacgagtgactatcacaatgctgttgaggagttgacaggcattctgaaggaagcagaattactaggagtaaaaggcatgctatttaaatacttcctcccatggatactgttgtattttaaatgtttggttgttttgatcattttcacaagagctattatcctatgcagttgatgaattgcctattgtggagaaagaactaaa

SEQ ID NO: 184317 - DNA, 491 bp, Zea Mays
tagaataaattggtgtctcgtttcaggtttgaactatcatccaccagtttcaatagctatcatcaaattatcatccacccctctagcttttcaggtttgaacttagctgcgcaggggacagtcaaaatcaggtttgtgcatcagatctaaaatgcagaaagtagaacacaattcaaaacaaactggcagtaccttgttcatgtggatccatgacagggaagatgcatggggaatgggggtgggttggcggcatcacctgtgtccttcctttaaaagcagtaatggtgggcatgttgagtggaaggtaggcatcgtcgttgaaaggttgcgccaaggttggaatggggtattatatatggatggggggcggaggcgctgattggaaacttaccgcatactatggaggtcagccacctactatggaagctcggtggcggcaatggaaggtatacccactcgtgtgatgctagctcattgcgggggatagaagg

SEQ ID NO: 184318 - DNA, 441 bp, Zea Mays
ggcaagccatagtgcacctgggcaagagcgcgaggtggcaggccatagtgcacctgggcaagagcgcgaggtggctggccatagtgcacctgggcaagagcgcgaggtggcatgccacaatgcacttgagccggagcgtgaggcgataggctcaagtggacctatgctagagcaggaccacaatgcatttgagcaagcgcgcgaggcggcagaccacaatgcacctagtcaggaggacgagctggcacgccaaggttcaccaatgcgtgatgatgactatggggaggactacgatggagaggccgatggagaggccgatgacgaggttgttacaatgacacaggcaacgaacttcaggtaattttattttgacgatgagttctattttttgttggattgatatttataccagtgcacaatttacaattttgtaggttttgg

SEQ ID NO: 184319 - DNA, 828 bp, Zea Mays
atttcatgatactgtacgcgatgcctgggactcagttggaacaacgaattgtcctttcctcactcttcactataaactgaagaagacagccaggaggttgcaagcttggagtgataggcaggttggtcacattagatctcaactagctttggcaaaagaaatttctcataagctggaaattgctcaggatgaaagggtgttgactccggatgaattttggctgaaaggcaagcttaaaaaacattctttgcttttatcctccctgaagcgtactatggctaggatgagatcaaggattttgtggctcaaggatggtgatgccaacacaaaattcttccacctgcatgccaaacaccgtaagagaaagaattttattgctacgttggttgatggggatgatatccttactagccatagggacaaggctgcagcagtggatggtttcttttcaaatttaattggttcatgctgggacagagagcaagcagtggatttggaggcccttggcctttctcagcatgatttggctgcgcttgaggctccctgttcggaaagggaaatatgggaaaccattaagcttttaccttctgataaagctccggggccggatggatttactggctgtttttataagtcctgctggaccgttatcaaatctgatatcatggctgctattcaagctatctggaataataactttgttaattttgacaagttgaattctgcttacattaccttgatcccaaaaaaagagggggctgaacatgtgaaggattttagaccaataagccttgtgcacagtttcggcaagctgattacaaagattct

SEQ ID NO: 184320 - DNA, 372 bp, Zea Mays
gtcggttgcctcaaagcttatcccggcatcccgcggaatctcgctttgcgatgaaaccatagctccacccaattcttgcggcttcagagaaccagcgctccctgccgtcgctgtccctcgttctcccagcgcctctcattcagtcatccctcctctccgaactgaccgatgcggttggtgccaaggttccggccctctaatgctgcttgaactccagccttctaatgggcgcggctcagttggtgattctgttcttggcccttgccactgcggtgggggcgccgccgagcgaggtggccgtgggcgctctcttcacgtacgactccacgattggccgcgcagcgaagctcgccatcgagctcgccgtcgatg

SEQ ID NO: 184321 - DNA, 426 bp, Zea Mays
cccgagtccaggttcactttcgatcttgtcgctgacgaacatgtcacgcaggtgcttttgctgctctcgattctcagtttagcattcgtccctctttccatctgctgacttattttcgtgctaactgtgcaaaatgcgtaacttcaggagggcatgttcaatgttgccggggtgcccatggtggagaactgcatagctggctataacagctgcatgtttgcttacgggcaggtaaactgcaggtttcacttgctagtcgctgctgtaaatactcaagttttaagattgcattattctgttattacaaaattatctgcttctgctagactggaagcggaaaaacacatacaatgcttggtgacatagaaaatggaacacggaggaacaatgtgaattgtggtataactcctcgagtgtttgagcatc

SEQ ID NO: 184322 - DNA, 351 bp, Zea Mays
atgtgatttgacaagcgacagtgatgtgtggtgagtgtcattcctccagtcctcccaatagaatatgatttttgtccctgaattttctcttaaatccgactctatttactatatgcaggtacaagaagatggaagtttgtatgacccccctacccgaggttaatagtgtagatgaggttgccggtggtcaactagagccttttcccaagaggctttatgcagtacctcctcgtataaccgatggctctgtgcctggtttctcagttgagtcatatgaagaggacaataacctttggcggaaacatgttaaggcttacaagaaaatcaataacttgcttgatactggaagat

SEQ ID NO: 184323 - DNA, 752 bp, Zea Mays
attgagagacctcacaacaagcaagacacctgaggcatccatagctgctgctttgtctagggatgcaaaactttttgagagaactgctccttcaacatattgtttgaagtcgccttatagaaaagatccagctgattctgaggccgtgttgtcagcagcgcgtgaaaaaattagggcctttcagaatgtgctttctgactctgaagctgaaaaggaggcagatgaagctgagagggatgatgattctgactgtgatgatgctgatgatgaccctgatggtgatgatgtgaatattgaggtggaagaagacaaggatcctcttcttgccgtcaaggcacaagacgaagtaccgagtacaactacagttattggcataaagaccaagttagatagtgtaggtaatgcattgaactcatcaagtagttttactaaatcagcaaaaggtgctcctctcccttatttaggcaggtccagtgcagcagatacttctaatgattcacctcttggaggcccatcagctaatcatgaagtaacccctggcgattctgaaaatactcaaattgatgaaagcaatcaaattgagccttgggtatgtgcactagcagaaggagactactgcgatcttagtgttgaagaacgccttaacgcactggttgctcttgttggtgttgccactgaagggaactctattcgtggtgtacttgaggtatatattatgatcctgctaaactactcttctatcttgtcattcc

SEQ ID NO: 184324 - DNA, 502 bp, Zea Mays
accggatcctgatccaatgaccaagaatcaacgctatcctagatctgatctgagacgtccgctacacaaacgacggccagatctgctagctaatcacagtcgatcatcacagaacggatggccaggacacaacaatgcgaaggggtatctgcggcccgatcacagccatccgtcaccaatccaacggccagccagcgctccatctaatctctaatcgggatcgttcatcaaatccaacggcgcacgcagcttcttcttccccaggcgagagttacggcgagccgcggtccccgcacgacggtaatgccgctggagcaacactcgttccccacctaatgtgccccctaccctaccgacagctggatcgcatagagggaagaagggtgaacatggtgagagctcccataccggtgctcatgcggcgcagaccctcgcccatggtgaccggcggcttgacagcggcgaaggaaaccggtacgcaatttccggaccgcccatggac

SEQ ID NO: 184325 - DNA, 1645 bp, Zea Mays
aatctggatttctcattcagtggtggactcaattcgagaaaacagagatttgatgaatcatttggcttgagagtgttcaaaattggctacgaagtgtatgccgatggtttaacaagagttttacgaatttgtgaacatgcagataatcccaaaattgagaaaattcaatggccaatagcaaatatacagttcagaatttcttatgtgtgtattcatcttcttgacaaggaccaggtttgttccttttgacttccaccaggcctaagcatgagaccgttttttaatgaattgtgccagtaatctattcatacttgcaagtcaaattcagtctcaaatatcattttcttttcgtgttcaccttgttgaagaatggggaaaatgtccaattgccatctacaattttagcagcaagacttcagcatgtttcttctgattcagttgtcacaaatagattcaagcaagtatctgttgcaattcatgtaagtattggtccctctgcaattttgtgtttcagtgcaaaaatgcatgtaactagattattggctggaacgaaatttgcagttttggacttattttttatttacacattggagttcatgatgacagtgtacctgctgccatgtcgtcaccaccactgaggctgattattaggaacttgcttactgtcttatataatttgcatgcattaacaattatttacatgttcaatcatttgtacatgtaattgttttctctgttgaaagccattgcaatgcatgagcagttttggtagtatgtaaataatgaagcatttttccccaaaacaactgcagtcattgaatgtggatgaaaaatgggaaggggcttcaattgggacaattcttaggaggaacaagcttcaggatgctactctcgatgaaaatattcttcgtatgatctttgtactgaattcaactgactccagtgtcaaacaaatacagtattgtgccatcatcctacaggtaacttaaatggcgtgcttgctccttgctaacatctacaacagtatgttcttaggcttgctggtttggacattgttaactagtgcaatatcacaagaataataaattatctaatgacgatatgaacagcctgttgatcttaagattgatgaggaaacgttaatgaagctagtaccattttggagagcatctcttgcaccttcaggcacgacaagcacacaattttatttcagacgttttgaagtacatccaattaaggttccttgctctcgttttgtttcacatttgtaattatttcatatagtgttaagtttgaaatactgattgggttttttatgaaatttaataatgtaaagatcatagcaagctttcggcctggtggccgacgcacaacatatagttctgctcaagaggctctgagggcactacttcatagtgttataaaggtatatttaaaagcatatttcatctattattaaagtggacccttttttatcataaaaggacctctttctttacttcacatcacagtttcatctcttacctcttcattttcaggtgcctgaaattagcaactcagctgtggagctcaatggggttctcctaaatcatgctttagttacatttcgtgagctacttctaaaatgcgctcagcactactcatg

SEQ ID NO: 184326 - DNA, 310 bp, Zea Mays
gttggtttatcattcatctcccttctctgattcgtggtttcatttgtttgacattattggttcatgagcctagtttagtaggtgtggatttagcaatacatatagcactagtcttattatagaaaagtgcaacattattgaaattgtcacatatcataccctttttaagtgtagctatcgtccaaataatttgggaccaacaacaaacaaccaactaaataatcgataacagtgcaaggaggtaagggtgttggagcatccctagcctccacgctagatccgtccttactaaactaggtctatgaaccat

SEQ ID NO: 184327 - DNA, 559 bp, Zea Mays
gaaattatgaagatcaatgtgaacagatatgagtggcatgaattttttccacaaggtcctctatatgttatcttgatttttgtgttttttcctttctgtaatagtattatattcgtccagtcaaattacagtcaaacaaaaataatgataccatatgtctcttgcaccagtcaagagtaatgctggcgctattcttgctgtatgggctcctataattcttgtgaggattctattcttgcagtactttggttttaattgcgcatatgcctctgtaaatgtgattgtctgtttttatttcttccaataggtctattttatggacacacaaatatggtattcggtattctgtactattttcggtggtatgtgtggtattatccatcatcttggtgaggtgagatggaacatcacttaacatgggtactcatttcagatggctatagtgtactaaattgttaactccgatactcgtctagattcgcacaatgggaatggtgagaagtcggttttattccttaccagaagccttcagtatgtctctttgtcctcctgcaacacc

SEQ ID NO: 184328 - DNA, 543 bp, Zea Mays
gggttaacctggcccaaggcaccgccatggagacacatgatgaggcgacgactagtgtacttcacgacgagcgcggatagggtgacgaggtggtctggtgccacaagaagtccctatatgttacttgacgatggcgaggatgacaactggatcaataggattcgttgcctaatggggtggcgctggccccagttgagatctatctcttccgagggggcacggtgcataagctcttagtggctagggtttgggcccaagtgcggttggacaagagtgccatgtactcttctatagcgcgacaccaattgggatcgacaatagcgttatggacggaagacagaacagacgaaatagacaaaaaagaagtcgtagagagaataagacaatcactagctgtagggcactgacttcatgccgagtaaccattgggtgaacatgacgagggtcatggtggagaacaagggggtgatacactgacgactcagcaacagagcgagttatggtaccatcgggtacacgtcgctgatagacgaataggatcgg

SEQ ID NO: 184329 - DNA, 3021 bp, Zea Mays
agaaaagctgcagcttctcaacgattctgaggaaagaacccgcaggattaatgaagttctggaagtgcatgttgactcacatatggatcctaattatgagtctgctgaagaaacagatgagaaaagaactggtatatatcttcctgtaatgttaatgcttcatgttgtttgttgattaataaatattggaattctcttggagctgtagcatgatttcatgtggtttgttgcagtatagtctaaatatacatctactatactgcaccgtaattttcttgcaaagttgcaatgcagtacatttaaattaatgttgcgataagcatcaactctattacaataaatcagatttctgaacctaacctttaattaagtggtgtctgagcatttgcttgtttattatatgcagttggaaagtcggtagatcggacaagaccagatacaaccatatcacgacgaatatcaagatatcttagcactatgcagaaccatcctcaaaaagtttctgattgtagccaccatccaaaaaacttgtcaacagaaagtacaatatgtggatcaggagcaagaagtttggagaacagcacagcaaacagaactatgtatgaagctggatcattttcatcttctggagtaacaatgtcaaatgacacggagccggagaaagtctggcactacaaggatccttctgggaatgttcagggtccatttactcttttgcaactatcaaagtggacaagttacttcccacgtgatctgagagtatggcttacatttgagagtgaggagagatctttgctgttgactgaagtgctttcaaaacagcagaaagatttcactcaggctgcatcacatacaagcagcaaggcaacgctggttggcactggacatacaaggaacaaccctagtgtggatcagaccaatgctttctcccctgctggtcatagtgtggttagttcttcaggaataactgttcagtataataagtattctgttccagaaagggaaagtgtgtactctccagatgatagcttgtcgctgtcaactagttcggttccgccgaaggatgcttgtactgtgaatagccaaacacactgccagaataagcattctgttttcattcaatctcctggaagtgcatatgggcacacagacttgaaccatgatggaatacagggaggatgctctggtgaatcaaaccaccatcacagcagcggagccctatggagtcctaccgtggtacaggtgagttgtggacatggtaatgtggaatctcatcagagccagcatgtttcctggtcacaaagtcaacatgaatctaaaaatagttcacaacgacctgttaaagatctgaattcaaggcgggatctatcgaaaaacctacctactcaacgtatagggaaagatgtctccagtcctttgtttgcttgtgcttggagtccggccgagtcgaggacagcttcaagtcaacatgacggctcttgcttaagttcaacaactaatccaaactttctcgatgaacttcattattctattgcttccgcaaagcctaagagctgcgctccagcaacccctattgaagacagaggttctagttcaccatcaggcatgctgagtcatgcagaaagagttccaatctgcagtccacaatcaacccctttggcatctgctttcgatatgtgcaagatggaggagatcatgaatcagcaaagaacactggagccggatacatcaaatgcttcaattaaccagtctcccgaatcaaagattttccctgtatcctctcctgataaccatgatattgaccgtgagtttcctagtccagttccaagatctgagaataaggacattgcggttgacagctcaggattaacaccagcatcacctgaaaatattactacgaatttgcctggttcagatacatgcaagatggaggtcatgagtcagcaacaagtaactgaggctgtcgtatcgaattcttcagataatcattcccctcaatctaaggtttcccctgtatcatctcctaataacgaagatatgaaacatcagtaccccagttcaacccgaaggtctgagaataagattcctgctgtggacaatttactttcaacatcagctgctcgtgaaaatctaacgacaacttctgcccatgattctgatacatgcaaaatggtggagttagtgaatcagccaaaaacacctgaagtggatgcatcaaatgctccactttgtcaatctcctcattctcacacttcccaggtaccttctgacaatcaagatattgaacgtgaatgtccaggtccaactccaagatctgacagtaaagaacctcttgtaaacaactcagcgacaacttctgcatcagcctctgatacaatcaaaatggaggagtttgtgaatcagcaaaaaacagttgaagcagatgcatcaaatgctccacttaatcaatctcattctcacatttttccagtaccttctgacagtcaagatattgagcatgaatgtccaggtccaactccaagatctgacactaaggaacctcttctgaacaactcagtgttaacattagcagcgtctgaaattctaacaacaacctctgcggcctctgatacatgcaaaatggaggactcagtgaatcagcaaaaaacgcttgaagcagatgcattgaatgctccacttaatcatcatcctcattctcacgttcttcctgtatcatttgataatcaagacattcagcatgaatatcctagcccaactccaaaatctgacagtaaggaacctcttgtggacaactcagtattaacatcagtagggcctgaaatgctagcgacaacttctgtctctgatacatgcaaaacggaggagtttgtgaatcagcaaaaagcagttgaagcagatgcatcaaacgcttcacttaatcagcctcacatttccgctgtaccttccgataaacaagatattgaatgtgaatgttctagcccaactccaaggtctgactgtaaggaacctcttatggacaac

SEQ ID NO: 184330 - DNA, 709 bp, Zea Mays
ggcctacaccacctcgccgtcgacatcgacgtcgacggcagcggcggtggcctgggccttcgctgccgccacctgcgtgaaactcctcctcgtccccacctaccgttccaccgacttcgacgttcaccggtactggctcgccctcacgcacgcgctccccgtgcggcagtggtacaccgacacctcctctcagtggacgctcgattacccgcccttcttcgcttacttctcccgcctcctctccctccctgcgccgctcgtcgacgccaccctcgtttcaatccccgtgcgtgacgcgacgcccttcgcgcatctcatctacctccgcctcactgttgctttctccgacctcctcctcctcggatccgtcctcttactggcgagggacgcgcagcggaaacagcggccgttcctcgctctcgctcttgtcgtatggtcgccggcgctgttagctgtcgaccacgtccactttcagtacaatggattcctcattgggttgctgctgctttcgctgcacttcctcgagcaggggtgggatcttattgggggagtcgtgttcgcatgcttgctgtgctcgaagcacctgttcctcgtggcagcgccggtgtactttatgtatttgttccggcattattgctgtggccggggtgtcgtgaaggggctgggaaggctcgtgctcatgggttctggagtggctgctgtttttgcc

SEQ ID NO: 184331 - DNA, 491 bp, Zea Mays
tgacatttgcatgcaaactgagaccagacagccctcaaataaaaagttctggcgctctgacacggcggtggagaagcgaccggacagaaaaaaatggcgcgcacagaccctgctgagcggcagcaagcagaagaaaaaaaatctgagcgcccagcagaggaagtgaccgttcaaaataaatgttgcgcgccctgcagagataagaaaaaaaggtgatgcgcgccctgcaggatgcgaccggattaaaaaatttgcacgtcaggctgccagcagaagtggaagcgaccggtcaagagagaaaaagatgctgcgcgactgaaaaaaggtgcagctgacagacctgcgcgaacaggcctgcgcggacagacctgcgcggacagacctgtcagagaacggttcaaccggtccactatgccggttcaaccggttttaaccaggatggtcctggtaaaaaaactggttaaaagcagctgagctgaagttcagctccg

SEQ ID NO: 184332 - DNA, 520 bp, Zea Mays
aaggctgggccaaaaactttgaagaagtcttgtggggcacagtctgttgggacatcatcatcaaactcatctgtagagtcataaatcctcctctttgtagggtctatgagaacttcataggcctcttggatggacttgaaatggctttctatctcatccttttttgcttgttttgcctcctctgttgtctctgcaagaatcagggcagcctgcttatctggatgatgtttgagagccatctcacggtaacttttccgaatttgatcttcagtggccaagaacctcaagtgccccaacccaagcaaagcatagtggtcctgctgttgactgccagatgacttcttcttccctttgctgctaaaggtatcagaagcagtattaaaatcttggcttttgtcatccgatgaaacgctgtgatcatcagtttctatatcttcatgctccgcaagaccaagcagcttcattgccgcagcatggaacgaataaccagcaggttcatatttcaaagcttttacaggaa

SEQ ID NO: 184333 - DNA, 485 bp, Zea Mays
ggtcaaacacgttttcggtgatctcggacttcccagcttaatcggatgggtcagcgagtaccaggagcaagcaagggtgctgaaacaagaaagtagagggcaggatcagacctgaattgagctggccacggcgaggtcacaaggcacgatgtttctacggtggcggaaacacagattgggggcaatgagcgattcgcggtcgttggtggacaattgaagacaagcgtgggtgctatggatgggtgattaccctatggagctcacggcgagctcaatttatagcaggcatgagcggtggccggggaattggacgaagacgcgcgacggtcggagaaggagaaagttactggcgcagttgattcgtggagtataccgtggcagactcaccgacgatgatcggatgactaacgtgagtcacgacagcgcggttaaaggctggaggcgtggcgcaaccatggtgagtgtcgcggattccggtgacggcc

SEQ ID NO: 184334 - DNA, 583 bp, Zea Mays
caaaagcaccttggttcctatgcatgtgcctgcactggaggttgctcagtttgtgaacattcttggctgcaccgaaggggctttccctcggtcctaccttggtctccccctctctaatgagaagcttaatttggctgccttcgctcccatcattgctagtgttgatcgctatctatcagggtggtgggcgagcctcctcaatcaccatggccgccttgtccttgtcaattctgttctggacagccttcctgtttatgccatgggagctctagtccttccccagggtgtggtggaagctcttgacactaggcgccgggctttcctctgggcaggagaggaaggcatctcaggagctaaatgcctagtgaattggaaacgtgcctgccttccgaaaaaagatggcggccttggcattcgtgatctccgcttgcaaaacacatgcttgctactaaagcttctgcaccgtgctcacaactctccagattcagcatggtcctgttggctacaagtggagtttggtgggcctttatctgcaccagacaatgccacagcgggttcgcattgggcggcccttcgtcggctc

SEQ ID NO: 184335 - DNA, 415 bp, Zea Mays
acttgacagtattgtaaaaaatattggaaaagattatgttaaacatttctcagcaagattaccagaggttagtatttcatcctgtaacatcttcttgatatgggaatagagacggttccaatctctggaaacaatatttatttattgagaggatgtagcttggacattacaataactaagttctctttggttgtatttttcatttttgctaggtgttctgcaaggcatataaacaagttgatccttctatacatcatagcatgaggcacctttttggaacatggaaaggagtgtttcctctacctccgctccaaatgattgagaaggaacttggttttcagtcatctgccaatggatcatctagtgctgcaccatcaaggactgattctcaatccccgcgcccatccaatagcat

SEQ ID NO: 184336 - DNA, 493 bp, Zea Mays
ccactcataccttcgtagaagctgcaactccaacaatctggtatcagagatgccaggcaacgacgacaacaccagcgatgtcgcatctgctgccgcgaccaattccgccaacgcagcgctagagcaaaagatcgacaccatgacgatggcccttgtcgatctcaccaccgccatcactcaaatgatcagtaggccgccaacaccaccaccgccctcagcgtccaccagccctacttccatcccatatggcatgctaggttatggagggatacctcccttgtcaaaccccgccgcgccacccataccatcaccgccgatcaccaccaccatagccgctccactcccatccacctcaaccaaccttccaccgccaaccttagccttgctgccacccacatctaccatgcccatacccatccatcagatacccttcccacactccccatcaccaatcccaggcttttccgaaccccaccataccgcttacccatcg

SEQ ID NO: 184337 - DNA, 341 bp, Zea Mays
ggaaaggttaggatagcagacacatccaaagacacaaaagtgttcgtaggtagaaatggtgccaaacaaggcgaagtgggggtgggagcactgatcgcgttggtgggaaggcgattaagtaggtggcgctgtgaagactctcaacccaatagcgagcagggatggaggtttgaaagagcaaggagcacataatgttgttagtggtgcgaatcatacactcaaccttgtcattctggggagaggtgtacgaacaaaacaactctagctgaacactatgggaaatgaagaaggcacaggaagagttatcaaactctctcattgtcacattgaacggccttaat

SEQ ID NO: 184338 - DNA, 439 bp, Zea Mays
ctcaaatagatgttggatgactgaccgcttagcatggcaaggattggaacatccagaacaatgccttctttgtgaccgccgaccagcaggatgaaacagcgcaacacatctcagtctcttgtgtcttcactagagaaatctggttcagcactttatccacagcagggctgcatcgccgtaccccaagacttcaatgatgaagtttttcaagaatggtggaggaaagctgaggcaaggttgcctaaatgcaaggaaaaaggtttaaattccctggttatgattgtggcatggtgtgtttggaagcataggaatgcttgtattttttagaagaaccctcctagcacacccagagttcagcaagaaattttagaggaggtcagagcttggttttaggctgggcctgcggtcttaagagaactttggccatagctgttggtag

SEQ ID NO: 184339 - DNA, 2023 bp, Zea Mays
tacacatcgcccccgcacatatcgatctcgtcgtcgtctcccccggtggcatgctccgctcccgctagatccgatctattatctatggatccccgccgtctccccatccttctctccctcctgcttgccttcttctccgccgttgtcgcctctgacgagatccacggatgcggcggcgtcgtcgaggtcgacgttcctcatgttgctctatctccgtgtacagtgtgtttcgctttggttaggtgtgacttgttacactgatgcgacttggggttttgggtggtttcaggcgagctctggcttggccaagtcgaggaaggcatcggattccaagctcgattactccgacatcacggtatgccgtccgctcccgccatcgtcagtttttatatcttaggaccgtctcatcccatcacgtagacaagcttcgtagttgcactcagctgtcctttcctatcgagctttgactggtatttttatgcatgattcgtttagtctaaacatacatttgcttgatgccgttcacttgaattggacctcatggagagctgaacacgttctggttgcatgatgctgagttaccgccgctgctctaacaactatcctagtttcggattgcctgttgtcccatggtattcagatcactgccctatgggtttgcatggttgggtttagcgactctacactctattcagaccatttagaattaccattagggcacaagaggttgccctgccggtgttttgagcacatactgatttcttgtttctggtagctttggtgattgctggaccttaattatgctggggggagcgatgggggatgattcaaataatattgtccattagatttgagtaagggagagagtttatccagcgatctgaaacgttggttttcatgttttgttaagtctgggtgcaatttgtttagtggaggttgtgggtgtgggggatgatttggttgggtgggttctactaagtttaaactgatggatattttcatctctcatatagtgacatatgcaaactgtagcatgtagagattaatatcatttttaatacatggctattattctagtattgctctatttgtgtctgtgtatgttccgttaatcatgcttgtgctttggttttgatgcatatgtttttatatttatttatgatttgcactaagcctccaactgattccctcttaactttgtgtatcaggttgagctctgcactgttgatggtttggttaaagaaagcacacagtgtgctcctaatggatactattttatccccgtctatgataaggtatctttgtgttttttgtttactttagttctggattatcttttatgtgttctcattttatttacacatacaattttattgcaagtaggagcaaaggttaaagggcactactccctcctgtcacaaaacatgttatgttttggctactgtcagcatgatgccctgtttaagtttttgtcatcaatatcctttttgatatttcaattgaacttctagaaattgtatagcctgatcttccttcaaaaaacagttccatactattacatcattgatatattttatacatatttagacaattagactactagttattgtgatcaaggtatgtaggctcctaatgaatattacaaagaaatttattttttgactgtatgacatccaaagcagcacctatttttttttgtactggaggaagttgctaagatcataattttgatattctcttccattgtttctaaaataaaatttatgtctactatttatgcttgtcgcttctgtcaacacagggttcgttcatggtcagagtgaaggggcccaagggatggtcatggaagcccgaaactgtaaaataattccttaactgaatctttcctttgtttccctccttactttgtctttactaagcactaagtgcatttgttcttttactggatgacatgttcacctaacacttcaggttcctgtcatcattgatcacaatgggtgcaatggaaatgcggatataaatt

SEQ ID NO: 184340 - DNA, 350 bp, Zea Mays
ataaaatttccagctacacctgaatacaccaaaacaaaagggcttggtaacagcaaaggaaggatgactggcaaaaggagaaagaacaaaaggagaaagaacactgaccaatcaacaaaacctacagatttgccaaacaggttgtgtggagcagaaagtgagcaagctgacaatgtaggtgcaaaaagcacattgccccagattgttgtagagcctcactgtgcagcaaagcacttgaagggtgatccacaaattgccaaacagggtgttgctgctcgtcaaaatggtgcagaaactatgaaagggcatgaaaatcaatttggcatttcattttgtgttgcaagtactga

SEQ ID NO: 184341 - DNA, 435 bp, Zea Mays
ccagtagaaaccaaaagaagtatattgtgtctgaagcaatagtgcatggttcttaatcctgctacataggagcagaagaaaagacagttgtccaagaaggttcgtggtcaagtccaactgcatgaaaattaagttgttgggccttttgagaaaaacaaacaattcacactccggtaagcaaacagctaatctttctttactttatatagatgataagattttgccattttttcaagatgcttgaacaagccagaggtctattcggtcttccattcttcatggagatcttctcagtggctgctggggaaatttggaaggaaagaaatggcaaaatctttagagggcaagaaattttgtgggcactctgaaacttaacttgcttagaactaatgttgcgactccgaatgctgtaaattcctggcttgctagttttag

SEQ ID NO: 184342 - DNA, 419 bp, Zea Mays
ccggagccgaaaccaccggagccgaagccaccagagcagccaccaaagccgaaaccaccggagccgaaaccgagaccaccgaagatcctaatctagaaaccacacttggtgatattgataacatacttctgaaaatggctgaagaagaagttgctgcggctgcggtggacacgacaattgagaaaggaaaatagcaaattgaagatactttggaagagaaaactttaattttcaagatatacttggacaagagttatcagaaactgaaaaagaagagctaaagaaatatgctatatcctgcgaatacaaaccaggggctctgctatttggcggagtcaatgaagggaaactaagatgccttcggaatcgaaccgaggccaaggttgttaggactttctcaaagagcgttggcgtgccga

SEQ ID NO: 184343 - DNA, 780 bp, Zea Mays
gttggggccaacagggcgacgctgagtcgaggggcgtgtggggcgggcccagtgtgtcagcgtggggtggaagccgtgtgtagggcggacccagtgtgtcagcgtggggtgaagccgtggtagcaccaagtgtccaccttccgttcttaataatagtagggatagagagagaaaatggcaagggggggggggaacggaaaaaggagagtgcagactggaatctcttggatctggatgcaatgtgggatcaagacaaagtgtgacccatgctagtggccaactggaggaagtgctgggagcatgcagcattgtctggtatgagaacagtattataattatctggacacatgcctacggaaggctgattctcgatctgctgttttcctcagactgctctagagtaccagagcacgtagccttgctccaagggtaccctaatgtggatgaatgacggtcgaacactgactctgggctgtacgcgtttggtggttatgtgctcaggcaacactgggtggaaacctctgaatataatctgagtggtccaggatgctcatttgggccttctgcagttttttcagtacctagtgccatttagatcgtgttctaatgtttttgtctgaaataccagaacctgttcatgcgttttggaccgtgagttcttttttatcatcagaaaacaacttcccgttcttcaggcatggtttcccagacctgctggcaaagctctcggtttactttgcaacatggtatgatgtttctgtggtgggaggccaaagtttc

SEQ ID NO: 184344 - DNA, 400 bp, Zea Mays
cttgggtaatgaatttttacttcaacccttctattggaaccatacctatcttacctttgattattttctccacttcgccacttcgcgagtcttgccttaactctatccttagttatgcttttcacgattatcatctttacccttgtcacctctatatcttaccttgatgcttatgttatacctgttctttaaaaccttctctcttccatctcaattttatagttgtattttacctattttcccttggctgtatcctcttccttgtcgcttgtgagtttttttaaccccatcctttgttgtgctctggttgggtactacctttacctttctcatctcttgatcctaccttggtgattacactatgtctgttctctaaaatcttgaatctcctatccaattt

SEQ ID NO: 184345 - DNA, 1222 bp, Zea Mays
actcattgagccttttggccagccggttagcgagaatcttggtgatcagttttgcaaaactgtgcacaagactaataggcctaaagtctttgacctgctctgccccctcttttttcggtatcaaggtaataaaagccgtgttgagcttgtggaaattgttgaaattcctgctccaaactgcccttactgcagccataacctctgctttaatacttccccagcattctctatagaatcgccctgtgaatccatccggccctggggccttatccaaaggcaagcctttaatggtttccaaaacctcctgttctgaaaaaggggagtctagattctccagattatgtctagacagaccaatggcgtccaaatcaatagtcctttccctgtttccacactgcccaatgaggtttgtataaaactgatccactgctgctgccttttcgcagtggttggttaggatacgatctccatcaaccagcatggccacaaaattcttcctcttacgatgccttgcatgaatatggaaaaatcttgtgttcgcatccccctctttgagccatgaaattcttgaccttaatcttgccattgttcgcttgaaagatgacagcatcaaggattgttttttgagcctgtttataagccagatctctgctggggtaagtggtctttcatcatgtgccatctccagtctatgcagcaactccttagccaaagccaactgcaaccttacatgcccaacctgcttgtcactccacccttgcagtcttcttgctgtcatctttagcttcttctccagggtctggaaagggcatctgacagcttcgactgagttccatgcagaatgcacttcctcctgaaaaccttcaagcttgggccaaaaggattcgaaatggaaccgccgttttccaggcctattgtcactgagacccaggagcagagggcagtgatccgaatcaagtgacgcaacactatgaagaagaactctggggaaggttagctcccaatccacagtacaaaacactctatcaagcttaacaaggaccgagttatcttgttggttagaccaagtgaatttgcgtcctaccagcggaatctccttgaggcccaggtcattgatcaaatccctgaaacgacccatcatggctctattaaagttggagttattcttatctgatgttttatagatgagattaaaatccccagccaccaaccaagggccagc

SEQ ID NO: 184346 - DNA, 878 bp, Zea Mays
aaaatcaggaaagaagagcgccattttgatagagatcggaaccttggatccggtttagctagtcgtgatgttcccgatgaggccaaggcttttcctgtgaagtcagtaacgtcaaagggttcaggtgaaaggagtgatctttcttcatcaaagcaaaaaaatgtctcacatcataaccatttggaaaattccaagaaagcaaggcaagattatgtaggttttcctgaagacgagagcaaggaatattttcaccagtcagatgtgcaaagatcagatttgtctagtaagaagaggatagtgaagaaatgggaggagagtcagtacaatccagtagctcaggtaagcaaaggagctatcaaggaaacctatagggatcagaacttaaaggaagcaaagttgatgtcattgaattctgaagaactgttttctatgacgagctccaaaccaccgaaagctcaacatgctgatcaggttttgttttatgatggggggcgtacgaacagcgagttagttgaggataacacacactttagtggcaaaacaggtctccctgagcaagaaaatagtctttctgataaggctttagacttgggcaaacctgctagtgatgtggcctatattcagacttcagctgtaacttcaagttcttcaaaggcttcagtctcacaaaaaaagaagcagaccactcaagctatgaagacatcgtcaattgagtctctttctttgtcaccacagagaaactctaacattgacaatgtctctgcctctcatagtagagtttcaggtaaggatggatctctgaatgctaactcaagcactgtgccggccatggcaaaacaactaaatactcaagttggtgtagcagtcaatgatcaatg

SEQ ID NO: 184347 - DNA, 367 bp, Zea Mays
ccaagaattcatactaacctccaactggggtattatttgaccattctctagtcctatgatttccatgcagtagctatctttagcataaggacagttatcatcatcatcatgttttacagggacttctacttgataaattgactccgcaaattcagctgcatatggtattcttgtctcagtatcaatatcaatgaaatcctgaaataaagcagaaggatgttcgaggacatgagcacaccgagaaacaataagaatgtgatgctttcatttcatacttgataaatcacaagggaatcaaacaaatgagcatgttaatcataaggtgtttgctcctgaaaccatgggacaagaaaacactatgttattg

SEQ ID NO: 184348 - DNA, 519 bp, Zea Mays
tcagagagatacacatgtaaggagtccaaggtgacttacaccaaaagatagccgcaagtgaagaagtatagtcgaccgtgtggatcagttcctagaatctctgctcctctcattggatttgcaatatttctagatccatccttccgtatcaaacattcaggacaataccaatcaccttcaggcaaaagatcctccaccaccccaacacatttcgaatgaaatgcagctggacagccatcacagcataacaagttgccatccatgccacaaagataacattcatcgctgtttccatcatccacttcagcagatccttctggaaattgagaagaacccactgccaccttagcagaagagcccctgcccctcttttttcttcttacaccagtgcttctgaagccctcgtcgtttccatctgactctgacaaccttgaccgtatagccccgatctctagaacatcatcagagagtgaacgcagcagctcgagttttacccctgcaggctgcctatagtactct

SEQ ID NO: 184349 - DNA, 280 bp, Zea Mays
gtggattcctagctaataagcccaaaactgctactgaatggaggaaggtcaatgatcgcatcagggctgaattggacatgaatccggaacttaggagtataaagacagttcttatgaggagctatgacggtttaccataccatctcaagtccgctttcttatacatgtccatatttccagaagattacaaaattaagcggaaacgtttgataaggagatggattgctgagggttactgtagaggaatgcatggcatgagtgcagaagaagttggtgacag

SEQ ID NO: 184350 - DNA, 507 bp, Zea Mays
gtctgtgtgcataacatggccaagctgtccagggaagcaactacattccgccgtgttatggagtccctattttgccacttcgataatactaattcatggtcatccaaaaatggtcttgcactttgtgttctattggacatgcaaatgttcatggaaaagtcaggtgctctattcacattaactcaaagtaaacctttatcaacatgaccactttatttattagctacaagtctacaactggattttgcagggacaaacattaatttgatgatatcagtactagttaagcatctcgaacacaaggccatactgaaacaacctgagatgcaactcagcattgtcgaagtgataactgctcttgcagaacaatcaagagctcaggcttcagcagcaaccatagttgctataagtgaccttgtgaggcatatgaaaaagacactgcatttagctcttggcagcaacgatttggaggtggtaaagtggaatgacaaactccgcatggctttt

SEQ ID NO: 184351 - DNA, 497 bp, Zea Mays
ttcagcacagctcctcagcattctcttcaccagttctccttgtgaagaaggcagatggatcatggcgtttctgtattgattatcgggcgctgaatgccattaccgtcaaagatgcttatccaattccaatggttgatgagcttcttgatgaactgcacggtgctcggtatttcaccaagctggatttgcgctcaggatatcatcaagttcgcatgcgtccgggtgatgtggagaaaacggctttcagaacgcatgacggcctctacgaatttctcgtcatgcccttcggcctctgcaatgccccagcaacatttcaggctctaatgaatgacattctacgaccatttttgcgtcgtttcgtcttggttttctttgacgatatcctgatctacagcagctccatcactgagcacttgcgtcacctccgtacagtgctcactgttcttcatcaacaccaactatttgttaagaagtccaaatgtgattttggtgttcca

SEQ ID NO: 184352 - DNA, 282 bp, Zea Mays
gagcgagggaagttgcaaggaagctgcgcgcgtgactggctggaacgggtaaggaggttgtttggtctggttcggtcgccgtggaggtggatctgcccgcccgcccatccctctattctattgcaacgggatcagccacacccgcatggtacagtccagtacagtacccgcccggtgtcggtgcggtgggaggccgttaaagcctcgccagccaggctggccctgcgcctccccagatccaacacgtcccaggtcccgccccgctcctaccctctctctctc

SEQ ID NO: 184353 - DNA, 658 bp, Zea Mays
agatcgctatggtttcccacgagctggtgtggcaatttttgaaccactacttatcaggaagcttctgggattcttgagtggcagctagctaagattgatgaattggctgctcttgaacgcactggtacatgggatatcgttcctttaccctcgcatgttgttcctatcacatgcaaatgggtcttcaaagttaagtcaaaatcatatggttccattgagaggtataaaactcgtcttgtggctcgtggtttccaacagactcaaggacttgattatgatgagacttttgcacctgttgcgcatatgactactgttcgaaccttgattgcagttgcaacctcatcttcttggactatctcccagatggatgtcaagaatgcttttctcaatggtgatctacatgaagaagtttatatgcatcctccctccaagggttgatattcccttagggcacgtttgttgtctccgtcgcgcattgtatgggctgcaagctcctcgtgcttggtttgtgcgattcatctctgtcatcacagttgctggtttttcttctggtgaacatgatcatgcattgtatgttcatgtctctccaaaagggcgcactttacttctattatatgtggatgatatgctgattacaggtgacaactcaaaacatatt

SEQ ID NO: 184354 - DNA, 410 bp, Zea Mays
agaaaattttatgtatgctactctcaaaggattttctgtttttgatgatcgtgaaggaaccaaagatgagttaaggcttgccattgggaaatcagcatctgttcgggacacatcatctgttgatggctatgataatcctaatgaacttgattcaggtgaacgaagaatacaaaaggatctaggccttgagccaatcccctcgatgcttattcttgatgccatcttccgaaaatcttcgtcatccgtctctgtctgtgttcagcggcccaagtttcttgtggcacttgacttcttactagcagtaatcgaattctttgtgccatctgctcagagtcttctatccaatgatgaagacaaggaccttttacatatgatcactccagtagtattgaatgatcaaatttatttcc

SEQ ID NO: 184355 - DNA, 433 bp, Zea Mays
tactgaagaaagctctggctttacttggaacctgaataggaagccctgtccaaggtctactggagtctgttttttgaagccacaaccaacgcatccggagggcccacccgagctctgggaggcttgatattcccagacctccaagttgaagaggacgacacaccttgccccaagccaccagacagtgtcctcctttggcgtcctttcttcctctccatagaaagccctttcttattttatcaatcgcatcacaggcccagtggggtatatcgatcgccattgcaagatacacagtcatacctgttagaacatgttgcactaggattctcctgcctgccctggtcatcaaatcagctttccagttaggaagttggtcagcaaatctatccacatatggctggaactgctgcttggacagcttgtgcaaggatag

SEQ ID NO: 184356 - DNA, 523 bp, Zea Mays
gttcaacatgaaataatgaataatagaaggcatgtactgacaaaggtgagatttcttttacttatcttttattactaaactgcaaggagtggcatattgatgtgtgcactcatatcctttaattcaggataccactggttcagtcaaattgtgggagatcacccggggtgctgttattgaagactttggcaaggttatttgtttctcaatttcgtagatgtttttcccttggatatatatctgctatttgtatcccgtttttgtaatgacactggttcttacttgatgacctttcgaactaacaagatgtttgtagaatgctaaactgattcgttttgattatgcaggtttcatttgaggataagaaaaaggagttgtttgagatggtattattgaaatgtcatgatttcagagttttatttaaaaaatcgctacccatgtactgtttaatttatcaattgattattaggtaagcatacctgcttggttcaccatggatgctcgattaggatgcttgtctgtc

SEQ ID NO: 184357 - DNA, 448 bp, Zea Mays
cctttgtcatcaagcccaggcaggagatctggtaaaattccttccagtgtgcatccactggaagctgacaatgcaggaatggttagttaaagcctcaccaagactttttctatttcattgcaaattaagtgcatgaaaaggaaaatcttctatgtgaagtaatgaaagttcgttggacacttgcaggtagtcatcaaggatttcacttccaaagctgtggtctcacagtttagggctcacacaagtcctatatctgctctttgttttgatcctagtggaacacttttggtgacaacctctgttcatggccataacataaatgttttcaggatcatgccaacttgcgttgctaatggcacaggcgcaacgcgctatgattggacagcatctcatgttcatctttataaactgtatcgtggcatgacatcagctgtatgtttactaagca

SEQ ID NO: 184358 - DNA, 411 bp, Zea Mays
ctaacctaatatgatctaatctaaagtgagttacttaacggactagttgatactagtgaaatagattagaccctgctggccatgttttaacttaaattagtacatcataccaaaccacccatgaacaaataacttaccagcatatttatggtgaccatccctcctagatgttgccataatacacttatcttatgccaccagcctgttaaccatttgtccttacccacaagttatcctaactacatgaacctaattcggataaaaacttcaagaatgaagatcgaagatgttcgacctcatcaaatcaaggaaggataagattcaagatagatcttcaaaggaattaggattcacaatcttggatagaacctttcctcaccctaccctttcttaaccaaacctatctatact

SEQ ID NO: 184359 - DNA, 1768 bp, Zea Mays
gtcgaaaaaggctggggagctcgaaggtgttattaaagcattagaggtaatggctttgcttgtatatcatggttacatgtttttgtcccccagtcccagttagaaacagtaaataactcatgataaatttcttctacaaactagacacatctgacccaagttgaagatgaatacaaggaaaagcttgagaaggagaccttgtccaggagagaccttgaaaaggtatatctatttttatgttcatgtcccctgcaaaattttagttgtttacaagtttattaaatcttgccataacccggaacaagatcttggatgttcttacattgttatatgtgatcttattaccgcaggaagctgtcaacttgaagcagaagcttgaaaagtgtgaatttgatctggagaatacaaggaagtccagtgaattgagcctcgttccattgaccagcattgcagcaggctcttctgatgtagtagacacaacagtacaaggactgtatgatctctagcacttgacttcttttgtttagtcctacagttttcacaaacatcaagagtttggtttgttatgcaattgtgtttttttttctttgttgtgctttgattaaaaagtggatcttttttcgtgggaatacctttgtatatataattatattggatgtcattaccttatttttgtgttagatccttttagataggattgtctttggtgcatgtctaatacaaaccccctcaaagtttgcaactaatatgtagactgtaagtcctcaaccccccttaaattcttgggttggttgtaaatgtggtacatcaaacattcaaaccagttgaaatgctaggaaaacaaaagattctgaaatatttatcaaaccgccagctgttaactactctattgaaatgattaaaagtagtatcacccttccatattaaccacttttggtggatgtggactagtggcctgtcccctgttcttggctctgcttggcttgcagcagacccatggcagagttttgtccaagcagttctgcagttgttcccccctgaggatgtgatgatgctggtagggctaactgagatgatatgtggtcctactgcagcctcttttggtggtatggctatgcaaactgagatgagggtacaatagggcatatgaaacttaattcctaagtaacaatgatgctaggataagattaaaaacttgttaggagtttagtttgttgcaagttgatctctttagtcctttccatgttattttatatggagatggaatgggaatattgtcatgactcgtgaatgtagcaccccctgagctttttgttttattacactttctagttatctaggtcaacttttagtgaagatttttcatagaggtggatgtgggaatgtagaaagcatcagttctgagcattctagaataatatttatggcatcgtctttcttattagaaatctagatattgtaacagtcgttgacatataattgttaaataatgatacaaaccatttccacttgacgcgtccatccccctgatttatcattattattcagtattgtgttaaccatccacattttctgtattgtcacatttattgaggaagtagtaaagacaataggaaaaggcaaaatgacgagagatgagtgaatcaatcaaaatggctgttcatatttaaagtctgtgtttcactaaagctcgctcctattttgcaggcctatttctgatgcagttaatcagaatgatctaatggttattccaaaggtacctagtggt

SEQ ID NO: 184360 - DNA, 366 bp, Zea Mays
ctggaggagaaataggaatttgcgctcatcgccttcctccaggcaaatgccgaagtattcgcatgggcaccgtcgcagatgcctgggatccccagggaggtgatcgagcaccatctgaagatccaccctgacgccaaaccggtgagtcagaagccttagagacagtccgttgagcggcaggacttcatccctaaggaggtccggaagctgctggacgctggcttcatcgaagaggtccatcacccagtatggctggccaatccagtcatcgtccccaaggctaacaggaagctttggatgtgcatcgactacaccaacctcaataaggcctatcccaaggacccatatccacttccacgaatagac

SEQ ID NO: 184361 - DNA, 447 bp, Zea Mays
ggggaattggcaaggcttccattccggacaacagtggaggattatcaggagaggttctgggatttactggcccacaccacgccactcactccggaacagaaggtacaactcttcacggcaggtcttccagagcgtatcaagatcgatgtcgaacttatggctcctcgggatctcaatcatgcattaagtttagcaagagcatatgaacgaagggctcaggcactcgacgtccaccatacatcaactaccagcaagccgtcgaggcctccccagcggccatcatttcctattccagcacaacagtccactataacagtagcagcaccaaccagcacgggggcacaacgtccatttaagaagctcacccccgacgagatggctgagcgccgcaaacagggactgtgttacaactgtgacgaacaatacgtttgtggtcatcggtgcccg

SEQ ID NO: 184362 - DNA, 1231 bp, Zea Mays
cgttgtcaccaaagaaaatggagaactgaatctagaagtgatttgctttcctctggtgcaactagtccgaggacttacacacgacggagttctcctttgagttcacctttcagcagcaatgacagcatccacaaggtattactgtctctattgtctattgtattaaaatcctacctagatgactagaagactagagtaaaacattcgagttttcaacccttaattgtgctgggaagtctcttcatagttagaagggatccagttttcatgttgttggttcagctagcgatttctccactcaaatcattctggaaacaccttgttttcactgatgtgttcaatcagagcaggaagccttggcagaaatttgatgacagatgacactagagtgcaaagctagaaaagaaagctttttttgtcaaattgctagtgtacttaatcacttttaatggtttctccttcccttcacattactttgcaatatatgtcatctttttttatattgtcatttatttttgaaaatgaatttttataccaggatggcagtgacaattatcgactccgtactccatatggaagcccaccaaagaatggattggagaaggcattttctgatgtcatgctgtatgcagttcctccccgtggtttctttccatcagattctaatgctggatctgtccattctatgtcttctggacactcggataacacaaatgggcaccctagaggcgttccaatggatgctttccgagccagttattcaagtgcagttagttcatctagtcatggttctggtcatgacgatggtgatgctttaggcgatgtttttatatggggagaaggaaccggggaaggaattcttggtggtggtggttcaagagttggaagctcctcaggtgcaaaaatggactgccttgtaccaaaaccgttagaatttgccgtgcgacttgatgtgcagaacatatcttgtggaggaaggcatgctgcacttgttactaaacaaggcgagatatactcatggggtgaggaatcagggggacggcttggtcatggtgttgattgtgatgtgtctcagccaaaacttattgatgctctttctcatatgaacattgagcttgtagcatgtggtgaatatcacacttgtgctgttacactatctggagatctttacacatggggggatggcacatttaaatttgggcttttaggtcatggaaatgatatcagtcac

SEQ ID NO: 184363 - DNA, 532 bp, Zea Mays
ctcttttggtgtgcgcacgtctcgcggcatccgggcccacgaaaagatcgtgttcccgcaatctgggcagtttacgtaatccgggcccacgaatcaaggaactgagccgtcgttttctcagctcagctctcccgtaactatcgctcccgccgaaccctagccaaatccgccgccgtatgctgcttctcctcggcgcccggcgaaccctagactaactgccgccgtcgcattaagattctcccccgcagttcccccgccgtcgcattctccttcaccaccgcagagacccgccctcgccttctccgccgcacgccctcgccttctccgccgcacacaggccgtggccttgttcttcgtctccggcaagggccccggaatctaggaggcggttgtgccgcccctgcgttctcctactcgtcagagaccgagacctcgatcttctccaccgcggcggccgaacgccgactcccctaccccgtcgcgaggtccgtccccaacgtcgagtccccgacgcatttgacacagccccgcg

SEQ ID NO: 184364 - DNA, 425 bp, Zea Mays
cccataggcattgctttgaggccctagacaggactatgcgtgatattctttcggaacatagagcggaaaatgcgaacatcccatttggtggcaaacctattgtgcttggaggagactttcgccagattctacctgtggtgcgcagaggctcacgatctgccatagtgaacgcatcgattaccagctcaccgttgtggcagcatgcaactgttttgaaactacgaacaaatatgaggctctccaacccgtctttacatgggaaggaacgcgcggacttggaacaatttagcaaatgggtgttagatatcggcgatggtgctttgccagccatgacaagaggagacgagtccgaacctacatgggttacgattcctgaagatttattgatacgcacagacggtgatgctgctgcggccctcgtatcc

SEQ ID NO: 184365 - DNA, 501 bp, Zea Mays
gctcggtcgatcgagcgaccaagaatgatggcggctttagagttggtccatgtgagtaggcgtatggagcttgagagaaagcgttgtgctggtgacgttgggaatcatgccaccttgtgcgatggtgacgccagcgagaagcttgtcgagctctgggtcattccggacgatgagcaacaggtgacgagggacgatgcgactcttgttgtcctcgacacataattttaaatgaaatgaccacaaatttacacgtcaatgttttccccaacaatttgcatattgttgcgcgaaacaaaatgcatgttggtaccaactctcccaaggtttcatcgagccggacgttgtcgcggtagcaacgacagatgccgagacgaacacgtgacaccagggccacaccagtttagggtatgcgaagtcgaggcgaacgttgtctcggtagtgacgatggacaccgagacgagcacgtgacaccatatgaagggcatcacctggttctactag

SEQ ID NO: 184366 - DNA, 545 bp, Zea Mays
gcttgggccgtacttttttcatgcttcgggccagcccatcaggtccggcccaaatgtacacctataaagaagagtattgttcgccttcatcgatccccatccacatcgcccacatcgatgaggaccaggagttgtagtgtgtaccggatggggacatggacaaagcacagcgttggctgacttactgagcctgtgcctgccaacccaaggagctgcagatactatatataccaaggagcagcaacagcaccaggtcattgagcgaccagaccctgaacccgacggcgagctttgcttgaggcgagcctgcagactcaagttaccttttcagtcttcttctcctagatacttcacagttgtacccatatcctctataagcttccagaaactagtttgattggtgctgtggtttttgaattgtgagtgaatttgatttcggtcggtgatagtgaggtccattggtatgggtagaaaactatttaaccattagaaatgggtatacccactagtgtagggaactccaactccaagcacctccccattat

SEQ ID NO: 184367 - DNA, 284 bp, Zea Mays
aacaatgacatgtagtgtccatggtgtgtgtatctgtgtaccactctgtgtgcatggctgcatgcagacaagctggtctaggctgattggtgatagtttggaaagagtccaggctgataggtgctagttagaaagtagtccaagctgattggatggagtggtgtgcatagcgccaattcacatggtggaagccatgtcctctggatgagcaagtggatcacgatgattgttgcatgcatcccccggatcatggcgcgaaggccagcatgaaggcgagctccgtg

SEQ ID NO: 184368 - DNA, 318 bp, Zea Mays
gtcgtcaagcggtagtccttggcaacaaatgggcacaattgtggacttttgaaaattggtcatcagaccagaagcctctccaaataaggtcaacaaactgacaattgtctcaatttcctcttttttggcttaacaaacagagccgcatcatcggcatacaacgaaatcctgaggataggcgagcggttccccagcttgctcaaagctccagactcagcagcaatcttcaggattttttgcaacggatcgatcgccaatacaaaaagaaggggggagagagggtcgccctgcctaaggcctctgccatggcgaatagga

SEQ ID NO: 184369 - DNA, 406 bp, Zea Mays
gggaacatgtagctgtaccttttgctacatgggctcttgcaaactgggctatagcatcagatctgaatcgcactcttgttcaagaacttgatagtgatggacatgcagttgcaactgcgttgaaagcagccgaaagaactgttaaatggcatggaactctggtggctcgagctcttttagaagaccagaatttggccttggctccatcagttcctgattggtgctctagtcttctttctacagcttctcaggctactgcaaatgatgacatgccattgggtcaactgtcattatcaacattcctattatctatgatgcgatgtaatgagtcaaaatttgtaataaggcagaagggccttcatcctcttcgtagtattgcaaaaaagatagaaaatcagaatggcca

SEQ ID NO: 184370 - DNA, 342 bp, Zea Mays
cgagcagcttctgatgatgtcagtgaggtagatgagtgactgcatcacgcgacggctgtactgagtactaacttagcaggaggaggtggaaagtgggattttgggtagttttaggctttatatatcaggattgccctagtatgtattttatctgtatgtctcgatgctaccagtgtgactcctaagatgcagaagtcataacttgcagaatgcattatgagctattttctggccactgcatgttcatgtcctaatggaagtttcataaaatgcatgtcttgtgactttttgaagattaaggaacgattctttcacctaatacttaattacctacccctaaat

SEQ ID NO: 184371 - DNA, 343 bp, Zea Mays
cagaagacgcctctcctcaagcaggtcaagcagttttataataaatttgcagttattgataaggagtggagtgtggttgtgtttggaccaaaccttagcgacacggcgggtgtcctttaacctagcgacaaatgcacccgtggcacaacctgcatggttagtaactgttgtccaaaccggttcaatgacagggaggaaggaggggttatggagccaagcattctcaaaacggaagcagcgagttttggggatagaggtgtctatggtgatttttagaggggtgtgatctgaggtggcgtgagagagggaggtgagggaggtgttgggtgcagtagactcaaat

SEQ ID NO: 184372 - DNA, 394 bp, Zea Mays
tagggtgattactataccctgctaacgcaacaatcggcttaagtcgaaaacgtcttaagttggagcaacatgatcaattagacaacaaagagctcagggagcataccataccctactcatactcaaagggagaataactcaacgttcaataaaccgctgaaaaatatcgtcttaatgaaaaatgctttctgttttaacaaatcaatgtttgctttcactctccggttactgtgcaggagcatcctcgcgaggaaccttatctacaggatcaccagaagcagaaggattactcgaagtagccgacgcatcaagtacgtcagccacaatgtcatcaggcaccacaacgccaggcctcttcatcaggatccagccaactcggacggccttatccatc

SEQ ID NO: 184373 - DNA, 673 bp, Zea Mays
gcatctaccaggatgcaccatggaggggtgcaggtgttgctgtacccatgttttcaatcagatcagatgaggaccttggcgttggagaatttctagatcttaaacttcttgttgactgggcagtcaattcgggcttccatcttgttcagctccttccaatcaacgatacttcagttcatgggatgtggtgggattcttatccgtacaggtatgactaatattcaataccaaaggtttcctgctcgtaatggtggtttttcttgaaatcagtaaggacgttatctaaacagtagcagtgcccctcatgtgtgaattacagctccctgtctgtgtttgctttgcatcccttgtacctgagggtacaagcactttcagatgcaattcctgtggatgttaaggtatacctttgttatgctttcaaattttttcattgtctgtcttggttgtgttatttttattccactaaatgtttgttacctcgtttggtacccaatttaaaatttactacaggaagaaattcagcaggcgaagaagcaattggataaaaaggttattgcatttgcatgttgtctttgattgttgtagatctctgagtaaatctttaatgtttggttattccttaacttggaaatgacctgtaaattaggatgtcgactacgaggcagcattgtcc

SEQ ID NO: 184374 - DNA, 329 bp, Zea Mays
gtctaatcacgagcgttcgttaacagatcgacggccagcacatcatcttccccaacgggtctactcgccgacgcgcaccagggaaaatacgcggtcaccgacgacggcggaaatgccatcggctccccactaccgaccgcctttgctatcgctctcagatcaacgccggggtaatggtggcgccgcgccccgccacgacgagctagcaatcggcttcaacagtggtatgcacgctacgctaatgatggtacgccgagcaggtgcgagggaggggagtcacttaccgaagagctgcccagccgtcgctgcttccgataagtctacgtgcg

SEQ ID NO: 184375 - DNA, 617 bp, Zea Mays
ggccgagccattaagaccccgcacgttccaacacacaatttttgacggatccatttggaaaaacattgaaaaaacgaccatcaatacacacagaggcgatcaggcctacaccactgcaccctgcaagtcttctgggacagtccagttgaagagagccgcaagagctttaacttgcagatcagtcagccgctcaccgaaaaccttggcatagttatcgagaacctccagggacagcgattcagatggatccccaccaagaaggccgagctcattagcaatcctccattttcctttcaaaacttgtgctggggccattaccttttcaacatctgctccagccaagcgcctgctccgccgaggtagagccccctcacaaggtgccctggggcgacgctgccgcttctgcttctgcggcccacacaggacccgagcggccggcctggacattctagcgatgaaatcagcagtggtcgctgactgagcagccgagagaggggattgtgaagcagcagcccctctgcgcttccttctgaaatatttgatgggggaacacggccacctactgagccctgccccaacagccttcatggacggcttcaacacagtccccacacggg

SEQ ID NO: 184376 - DNA, 341 bp, Zea Mays
gggaattaattgtgataccggcacaactgggaggcatgaggcgctgccgcttcgcaatccggaaattggtggagatgaagagacggatggagggcacgatgggcttgaggtgctgagcctcgggtgacgagagaagatggacacgaggagacggttgggagcctgaagatgcagacaatgagttgcatgggaattgagaaagttatggcagcggaagatggacacgaggagtcggttgggagcctggagatgcagtcaacgagttgcatgggaattgagaaatttacggcggaggacgaggggacgttgcttatccctgaaactgtcggccagaaggggac

SEQ ID NO: 184377 - DNA, 361 bp, Zea Mays
gaaaagctgttcgtcagaatctacgtgtttggatacagattctcaaattgcagattctgttcgaacaaacgataaaatgaaactcataacgcagataaagttcattacaaaataattagtggagttgattacatcataagtaccgttacaattgcactaagtcaactacgccactaatgcatttgcaattgcatctcgaaaatcactcatgtctaactcatcagatgtgctagtactactctcacctgcaggtagatcatgacttaggctattaggtcctacttcatcaaaatctctatcgtgtagagcactatctctaataaagttatgcagtgtcatacatgcaataattatcttcgat

SEQ ID NO: 184378 - DNA, 667 bp, Zea Mays
aaatcaagtttataggcatttccatggtaaagggaattaagagcagccattatgtcgaccttaatgatgtcccagcatgtcttgtaaaattttcctgtaaaaccatcaggcccaggggccttatcagaagggagacaagcaatggtgtccctaacctcctcctctgaaaaaggctgctccaaatcagttagatccatcgcagccctgtgacaattactcaaatcaatagtaaatggcctctgcaaatcagcccccagcaggttatgaaaatactcctcaagaatttgttgcatatcatcatgattggtagccaatcttccatcttcctcaagcttggaaatgaaattctttttctttcgataacatgcatgcgaatgaaagaacttagtgttggcatcaccctcctttagatagtggatccgtgatctcaaccgagcaacagtcctttcaagagacgcgaggctaagacaccgctgcttcaacaagtttagcaaccaaacttccccactggacaaaattctgatatcctgtgccatttccagcctatgcaacacttctctgacaagccccagctgcaaccttacattacccacttctttatgcccccaggactgcaatgtgcgagctaaccttttacgcttcaatgacacatgctccaacggacagg

SEQ ID NO: 184379 - DNA, 388 bp, Zea Mays
ttggcacctgttgcatggatctgctatgccttgttcacttcattatccctgtctaccttggggaagccattccttcagccaaattatattctaacccctgatatttcaatatggtcagttgactttgtgaaatggtgggcattaaacaaggctcaatcattagcagcaaagatgctagctgtgcatctaaagggcacaatcttcttgaattattggttcaagatgcaaggagctcggattggttcacatgtcgtcattgatacagtagacatcacggacccatccttactagcagtcgcagatggtgcagtgatcgcagaaggtgttctcattcagagccatgaagtccgtaatgaagtgctgagtttcaggcatgtcaagattggtc

SEQ ID NO: 184380 - DNA, 363 bp, Zea Mays
caagtgagcacgtcgcccgtgtcccgctccagagtgtagaaccactctgccgccacaccgtccaaatggagtgatgcctgccacaccttctcatcggatggagtcctcatgcccctgaagtaagtctcacatttattgatccatggcagggggtcggactcaccatcgtagtggggaaaggagacattgggtcttcgatagccaccatcgtcgacgcggtcacgaggagcagatcttgtgctagccatgaccccgacaggcgccgtcggactcaccatcgtagcgtgatccgctgtccatgcagttcgaggcgtgagttaatggtggagagctgcgccaatatttgatccaatttggctgagt

SEQ ID NO: 184381 - DNA, 386 bp, Zea Mays
tttttgtacctattttaataaaagtgttgttttataaaactgtttctactttctaagaagtgtagtttttgcgatgattttccaatcattgtgttgctttgtgggttaactgcagtaaagaaactatcaataccgttactcatatttgaatgagaataaattgtgatattgtgctgccatacatacaacatactcatacttaatagtacttgaccattgctgttagtagatgctcatcaattatgtattacatgttttaactattgttgtggttcttgtttgctttgacttgactcatgcatttttgtttgaaatgttgtagctgggtacctgaatacttacacccttataatccctctacttttcatgtcatcctcaccacaata

SEQ ID NO: 184382 - DNA, 362 bp, Zea Mays
cgagaagggaactacggaagtaagaaaactgagctgacgcgaacattcgtagaacataattgttcgagaaggagaatatcaaacaatacataccctagacacgacgcaagcagatagtgaccagatgaacgggatttggcgagaattcacctgaaataatcaattgaaaagctcttcttctcaggaagcctggaataaagggcggcggaggaaggcaagttctggacgaagctgaggaacaggagagggacgcgagtgagaaactgagaaggcggcgttgctccttgcctccttgtcgatcctatccgcttgcttacttcagctcccgctcccgcgggaagagcgactcccgcagctacgcg

SEQ ID NO: 184383 - DNA, 536 bp, Zea Mays
gaggatttaattagtacatgtatgtgcgtgtgtgccgtggtgtattatagtgatggtggcgtaagatatttgattgaggtgtgcgggtatatgccgtgatatggttatactcgcaacgaggaaaaatgtatgtattgtgacacgacgcttaggtcgctgttttataaacgtgtgaaggatgctcgtgatggttatgtgattaaggagtgatgtagtggcagacgagaagtaagtttaaattttcaaacgattagtggatagtatctcgatgttgtcatgatttttgttgtatggcaatgtgatgcttcgctttgtcaatcatcacattccatgcccctttggataaataaatgtcttgttgattgattagaggtcttatacgagtgttatcgcagcccaataattattggaggcaagtagcgttcatgagtcaatccttgctaaaattgaagaacagtccgataacatatgcacataagtgctttaggtcttcagtagccagtgtaagtcttatggagttttatgccatgttttaa

SEQ ID NO: 184384 - DNA, 613 bp, Zea Mays
tttcatcccaggccccacgggatgacttggtgtcggagtattcttccttcttcacatatcaagcgcttgctggctttatgtcatccccatcacccttggatgcacatttgacaagctatcatagtttttccaggaacaattttactggtccagttacatccttacctcttgctactgaaaagttggggatgcaggggtcctatgcattcttggctgatgggaatcatcttggtggtcagcttcaacctagtctatttgacaagtgcaacagctcaaggggcctcgtcgtggaaatcagtaacaacttgataagtggagctattcccacagacattggctcgctttgcagttctcttcttgttcttggtgttgctggtaatcagctttcaggtatgataccatcaagtatcggggagttaagttaccttatcagcttggatttgagtaggaatcgccttggtggtgtaattcctacttctgtgaagaacttgctgcatttacagcgcctctctttggctcagaaccttctgaatggcacaattccacctgatattaatcagttgcatgctctcaaggttttggacctgtcatcaaacctcctcatggggatgat

SEQ ID NO: 184385 - DNA, 612 bp, Zea Mays
tcatatatatatgtcaacagagtttttggcattcgccactagcttagctggcgtagcatgctgtttcacccagttcacatggtgcgctgtgagctcgtctcattgtgttcgtagtagcgttttcggggattctgaattgatgaggtgcacgctagtttcccctgtattgttgtctagcctgtctgcatgctgctacccctgtaaggttcacaggatgctcgaggtgatgctgacttcgatgttgtttttctatatgtaacaggaaaatgacattatatcaaccttaacttttgtgtcaagtatgaaccaaaaatataattaaggatttgagagatcctttttgatattctcttatgagcagatgtactttctgtagaaagtgtaacagttttttttacaaacgtggaaagtataaatgatttttttttcacaaaaaactgtctgaatagtaccttttaaatgatgtgacatgtttctgtgaaaataaccattttacatttataaaccactagatttttattcctgttgaccatcaactttattatgaagaagtgaagtatgagcaatggttgatactatgtgcctaatctaatgaggtcatagtgttggtga

SEQ ID NO: 184386 - DNA, 475 bp, Zea Mays
gagacgatcgagaggtcaaacgacgtgaaaacggcgtttgaacgataaaaagtgccataggaggtttggaattcgaattgaggcacgacatgacgtggaattgagccgatacatcacgaataggtttatataggtgaatatgagtgaagtatgtgtttggtttgaatttaggcgaagaaaatgagatttgggcactcggctcggaaacgatcgctcgaaacggggaattgggtgaaattaaagcctggaatatcggatgggcatgaaatttggcgaatatgttacgggaggtgttgtgaaagtgcctgaaaaatttgggttcaattggagcatttttggctggtttgggcatttcaccgaacacgtgggggcgaagttttagggtttcggggaaatggctatttgagatgggaaaaccctcccgaaggagctaggaacctgcaaggatatttaagagacacatgggaacacattc

SEQ ID NO: 184387 - DNA, 558 bp, Zea Mays
ggaggagcacaatgccaaagctcatgccaagtatcaggaggggctcaagggaatggaggagaaagatggattgttagcactgtgcggtgatcatgatccttcagtttccccagtaatatccgttgcaatggggggtggagcggtatagcttttttcttcagacaatggaacaccgagtagttgtaggacatcagacagtttttgtttcctgtgtctggaaattagcatcagtaccaaatggaaatttgtactgagtggttttagtctggaatgaagtctctaactgagttcatttgattccttttctcttgggacatatttagcttgttgatgcactccttggtgaggttgatgctgccgtccatgatgggcatgctgatatgtctgctgctaagggccaggtggaacagcaagatatggaactagaaaaggaggaagatgaagcgtgtgctccaaagaagtacaatgaatatttgcactccttgaatgataggcagaaggaggctgcatgtaatgatgttgctgttcctctaatgattgttgctggtccaggaagtg

SEQ ID NO: 184388 - DNA, 663 bp, Zea Mays
ttttctgtttctcctttcagacaataaccattgatcaggcatgtatagtggattttgtctggtaccaaacttccagccatcatttcattcagtagcttaactgcctcattcatgttcccaagcttgcaataagcatccatagcaatgttataaagcacgccatcaagatggacccctaaatctctaaatttctggaagtgcacaattacttcagataccatgcctaacttcctgaggcactgtagaaggtaagcaacaatgtaacaatttatctcaatgccatgggataccatgtcttcaacatgataccatgccttctctaggttacccattttgcaatgactatgaatgagatagctatagctatatagatcaggggcagatccatgtctggtcttgatctccaagaccttttcagcctccttcagtttcatttctttgcatagtccatcgattaccatattataagccatggcttcaattggaaccctctcttgggatatctcttgtagaacagcatatcttcttaccatgttataagctagatcaaactttccacaatcacaaaggccaattataaatgatgagaatccatgtacatctaatttcactcccatttcaatcatcccgacctacatttggaatgcttcgtctgccttgttt

SEQ ID NO: 184389 - DNA, 521 bp, Zea Mays
tgtagcgccggcgaggctcaggaggtggaactcagagtcgctggatagcatactggagcaggaggcgagagtggcggcggcgaggagcacgaggtggggctcggaggtgatggacgccatgccggaacaggaggcagcggtagcgccggcgaggctcaggaggtggaactcggagtcgttggatagcatactggagcaggaggcgagagtggcgccggcgaggagcacgaggtggggttcggaggtgatggacgccatgccggaacaggaggcagcggtagcgccagcgaggctcaggaggtggaactcagagtcgttggatagcatactggagcaggaggcgagagtggcggcggcgaggagcaggaggtgggactcggaggtgatggacgccatgccggaacaggaggcagcggtagcgccagcgaggctcaggaggtggaactcagagtcgttggatagcatactggagcaggaggcgagagtggcggcggcgaggagcaggaggtgggactcggagg

SEQ ID NO: 184390 - DNA, 494 bp, Zea Mays
attgactccaattttgtccatggtaggacgaagctggaactgctgcgattttaacagtagagcttgatgctgctcttggcgggcgtgctgttcagtaccgagaaatacaaggcaatgaaacagaaaaattcctgtcctattttagaccatgcatcatgccacagccaggaggagtggcatctggattcaaccatgttgaggtcaatgagcaggattacaagacccacttatatgtctgccatgggaagcatgttgttcatgttaacgaggcaagttatctgcgtgactgtcttttttattcaagtatgggtattcatgtcgtataataagacttgccattttacaaccaggttccctttgctcgatcatcccttaatcatgatgacatatttattttggatacgaagtccaaaattttccagttcagtggctcaaactcatccattcaagagcgagcaaaagctcttgaagttgtgcagtacatcaaagataca

SEQ ID NO: 184391 - DNA, 617 bp, Zea Mays
gaaaaatatggattttgctgaaaaggatagcagagtagtcagctcatcaattccatctcgaggggtttctccaaggagaagacttgcctctgatggtgttgatactatgtgcaggagctcggagttttctggaaaggataacaggccatccacctcatcttccacatcacgtggaatgtctccccgaagaaggcttgcttctgatggcataagtgctgtaaccaaaggcatggactttggtgataatgctaacagaccatcaacctctaaaggagtgtcacgagggatttcaccaagacttcaattagcctctgatggtgttggcaatgtatcaaaaggcacagatcttgctgatggactggacaggccatcaacctcatatgcaacaccgcgaggtatgtcaccacgacgcagggttgcatctgatgccagcaatgccacttcagaaaggatcaagttcaccaaagaggattctggaactgtgtcctcttcagttgcacctagaggggtctcaacattaagacaacttgcttctgatggtgttgaatctgtctcaaaaagtatggatcttgttgagaaagatactagacctactacctcatcagcttcatcacgag

SEQ ID NO: 184392 - DNA, 292 bp, Zea Mays
ccgaggtagacgcagtagcccgaagtggagcgacgagagtcaggacacccagcccagtccgcatccgagtaagcggtgagagactgaatggggccgacgcccaggtgaagaccggaggaaagcgtgcccttcaagtagcgcaagatccgtttgagcaaggccagatgtggctcgcgcgggtcatgcatgaaaaggcacacctgctgaaccgcgtatgccaaatcagggtgagtcagcgtgatgtactggagagcaccgacgatgctcctgtacatggaagggtcggcgactg

SEQ ID NO: 184393 - DNA, 758 bp, Zea Mays
gcaatcgttgccgccgtcaaccgagacaacagcgaggtaggtgggatttctgttcgtattatttcctttctgccagtttcatcatacacacaagagttatacccgtgtcccaacgtcggcccatatcaatgttcccattacaacagcccatacggcccacatccagccttacacttcctattccacatccgccagcccctgaacatcttccagccttacccttcttgaccagccgacgatcgactatctccaatggaaccagttcatacttgctgaggtccacagaaaccggaagagtagaaaacactggcgaatagttagcagtaaaaggcttgagttgggaaatatgaaaaaccggatgcacctgggctgataaagggagatccaaacgataagcaacagacccaatacgttccagcactttgtatgggccaaaaaatttgaacgcgagcttgggacagggtcggttcaccaccgaatgctgagcatatggttgcaacttgagcaaaaccaaatcccccacctggaactgccgctcagaccgcaagcgatccgctttgagtttcatcctgttctgagcaacaaccaactggtctttcaacatctcagtaaagtgagcacgctcagccaacacctgggccactgaatgatcagtatcagatggaataagaggggcagcagcaaatggtggatcatagccgtacaaggccttgaatggagaacaatccagtgaagtatggtatgatgtattgtaccag

SEQ ID NO: 184394 - DNA, 1149 bp, Zea Mays
ctcggatctggtctgattacaaacatgtacatgtatttttcctattaaattcgtttattttcttttgcaaaaattatagggcatacatgtgtactccgccccttatttgtagtgatcctggcttactatttttccattaacagatactaaggttattttggctgtgcatatcacgttgtagagttctgggtttttgctctgaagaacaaaatggacaatgctcagagtgacaaccgaactgataccaagcaagatgatgatgcgcgccaaagcaaacaggatgatgaggtaaatagaaacctttactccttttttaaaatatttcatggataaatggtgtttattgttgttgacagctcacagttttactattgatggttatcctatcgttctgccttataattttgtccacctaatgatattggtaattagtcccctctaatcttatttcattggcagatcctgacactggtagggctaaaagttagttaggaagaggattgggattttatttgttatgcctagaattggctgggcattcgatagctctgccattccttctggattcaattgggaatactggtaaattttggttattaccccctaactttgacctaactatatgcagctggttaacttatattttatggcatagagtgcttgaacgatgagaggtgcgtgggccaaagcaatatatagacactggttaccattgcatactctgaattttagtcatggagctaaccaaccaaatgtcaccagtagaacttatctgtccacttgggcaaagacaaatcttggacctatctccattaacgaactattttggccagagcgcgtgtctttgtgaaagcactccacaaatgaatttctttgtctgtcagtttctagtatcctatcttaagggaactttttaaaattggacccttgaatgcgacttgagtggatttaccattgtagtttaaaacttgtgttatctacaaatacctgtttccattagttgcctaggcaatgaaatcaagtgtcgtaaacatcaggatcctgctcacaaatcctgacattcttttactctatatatgcaggaggcccgccttgaagaatataaaaagatcattgatcaaaagatttccctccgccggagcaaccaaa

SEQ ID NO: 184395 - DNA, 1012 bp, Zea Mays
ctttcatgaacaataatacgaacaaccaagagatgtggaggttcctgaatgtttcccctgataccatggataccgaaatgcagatggactctaattcattggtttacgaggcaagcttgattcagggtttcttgtaccttgacaatgagggttctccaatttgttggacagtgatgaacccggaacctcctaggcgcttgatatgtgctactgctctggaaccaaactcaaagctgtcgaaacagtatgttgaaatgaggttggagaatgatgcatcaacgtctgaacacaagaagggaggaaaattgtctgataaggctgcagatatccaagacaatgtcagtagaaaaaaacagaaagcaaacattgcttctttaaataattgcgtaagtatggacaatttaactgtcaatcctattgatcctgtagttctcaatgagggagagcagacaggtacagcaatcactgagcaggttcctgttcctttgaatctagtgcttgagaacaaaaatgacaaggaccaaggtgagcaaagcagtgaaacttcagaacaacttatgtccaaagaaccacaaaaaagggacatcaaaaggcaaaagagaacatggtctcatacatgcaagtttgatgatgatgaccttctgatgacagctgtaatatataagctgacagcacgttacaggaactcttttcatcggaagctcagaaataaattcggtttcaggcgtcttccaacataccactgggagaatgaagataaaggtgacaggaagaagtttcctggagaagcaaggacggtgttgaacaagttacttgaaatgggcattgttgctagagtggatattcttcaatgtcatggtccaggaggcaaaaatgtgttgaaggatgggaacataactgcgagtggcattcaatgccagtgctgtggtaccacattcacaatgtccaagtttaagtgtcatgcaggtctcaggcaagaagtcccatctctgaatcttttcttggatacagg

SEQ ID NO: 184396 - DNA, 2372 bp, Zea Mays
gcttcttcgggccaagatggatttcagtttcatgtttgtcttcctcactttgtttacccattggtttttttggatttcctttgtttaatgatatgcctttttatattaaaacaggtatgcttcaaaagaaaaagatatatgggctcgatctgtcattaaagaccttacaattgaagctggttctggtcttcttgttcttgaacctgtagatgtttcatggaaatatacttcagtcaatgaaaagacaaacatagtgttggtgtcgacagatgtttgcatccatctttctctgagtgttgcttctcttatgcttaaactgcaaaaccaaactcttgcagcattgcagtttggtaatattagcccactaatttcttgcacaaactttaagcgaatttggagctcaccaaaaggtatgtgcatgtgacatactacactttttttgttccttattctggttcttgtagtagggcatcatatgctagtctattatactgattcaatactgcaggtgacctacctggttacaacctaacgttctggcggccacaagctccctccaattatgtcatattgggtgattgtgtgtcctcaaggtgatttgcccccttcatatctatcattttgatgaagttatagttggagaatggaaaccctaaccctaatcagggttgggagtgcaattatataatccaagtagttgggccaagcccattacacagaggggtaaacatgtaattacacagggactgacaaaaacctaacgggattctaacagtttttactttcatcaagtgtctgttgagttttggtctagtaattgttctgtctaagccatcgtcatctttggagatgcatgctaaatactatagcaggcatgtgactgaaaacctgaaactttgcgctggtataaataccacgagtattaagcaaaaagttttaaacattgtcttgctgatggcatgccttttttcctttttgtctacattgatcactatggatgcactttgcaaatagccaatgagcacaattttttcatatgggtctctaattgtgatattacaaaataacagttatgtgtaaagctcataagaagtctacgtggtgttgttaactgcctcaaaactacagatttaatgtgtcattgtatcacaaaactatatatttatgtaactgtgacaatgtaccagggaagtacacatttgatgcgtctatggcaaaagtacagattttgtttggtcaaccatatggttgtagttttcagagtttctgcagctttgtgatgcaacacatttaatatgcattttactatagaaattctttttttgaaacaatgtatagaaattattatatctgttattttgtgatcgatctaatgtagtattttggaacctcctcctctgttatgcatgaaaagatgcaaacttcaatggacttgtccacgaaagaagtgatataacttttattctttttacctttattagcaccagattgtttgaatatttggacctttttatattgcttcagcaggagctgatgtcttgcaccttctcaggtctgtgccaccttctcaggttgtggttgctataagtaatacttatggtcgtgtacgaaaacctcttggatttaggctaattcatgtattacctggttctctggatctcattgattcctgtcaatcaactgaagaaaacgaatgttctatctggattcctgtaccaccacctggatatttagctctaggatgtgtggtaaatattggaaggttaccaccttcaaaccatgtagtgtattgccttcgttctgatcttgcgacttctgcgacattttcagattgtatacacactctctcacctgctgctgggtatgatatcatttacttttatttgtctgatataccattttgtacagtggttcttttttatgcatgaagtttacaatgaaataccaacaccatgtgaatggttgttcttgttttaattttgttcacagaataatctctgaatttagcatctggcgtgtggacaatgtgattgcttcattctgtgcacataattctatagagcaacccactaaaacagaagctcttaatttgcaccatgttctcctccggaatccaaattgctatattgttaaagatctaagtgcagattcatctatccagaatgaccaatcttctgatcaattaaatcaccgcaagagtctttctggatgggatgtacttcgcactttgtcaagaccaagtaactattgtatgtctactccccattttgaaaggatatggtgggataaaggaaacgataccaagaagccattttctatatggagaccgttacctcgttttggttttgcttcggttggtgactgtataactg

SEQ ID NO: 184397 - DNA, 301 bp, Zea Mays
aaaaaaacaattgaatgacaacattgatagaaaaaaatatggtgaagacgagcattatgctttagaccatagaattggtttggataattcatatcaaatagataagagtgtgaggcttgagaaaaagaccatctcatctggggagattgataacaagtcagatgttggaaatgatggtggtgtcaatatctctgccatgtttgatgagaaatcagatgttttgccattagcatctgcatccctgcctgctccagaacccattttaataaatgaacaatgggtgtgctgcgacaagtgtgag

SEQ ID NO: 184398 - DNA, 2644 bp, Zea Mays
tctagatctaacggaccaagaggcctgcttgcacgcttacttaattactgcttgcatagtagtagttgccttcgctgtgatgcttgcctctcttcgctgccccatatatcactgattaaaaaactaacaaatacttcttagataaacttgatcaacactttttctcctttttgtaggattgtaggtatgtcaggtgtatggcagtcacttgtgttggtttcattttgtggtgcatgcacatttttgacctcgatatcattaagtgccattgcaacgaatggagctatgaaggtatgctaaatatttgcacaatatttgacaattcttagggctggattgttcacccttttgattgtcttctttgcttttcataccatttgtgggatacagagaaaagtctctgggggcataaattgaatcttgattcaatgctgggacaaagtactttttgttgttctagtgttcaaccaaaacaaactaacgccaacaaactgacttgcatgttgaatgacctatagggtggtgggccatattatcttataggccgtgcacttggtcctgaagttggagttagtataggattatgcttcttcctcgggaatgcagtggctggatccatgtaagtgcacgccattagcccattacagccactaattgaggttgtcattttcatttttctggtacaatgccattatgatgttaatgcaccctttctgcacctgctgcgtaggtatcaccgtgaactcctcttctagtcagcatgtgataaatagtatgtattagtatgtagtgagtaaaggagtataaagtagtcaactgttatgcctctttttgtttcaatatagagggagggagggagggaggaggggaagggggtgtgacatgctgctcaccgccaacgtaaaaaagccagccaatattttggagatgaaacccagcctgacatgggaggtggcagtaaatagacttgaagattggaatacacccaaagaatcatctttggataagagcatgtggaaatcagaacacatgtccaaaccatgatcaagtcttttagtccagatgtactatttttactgctactaatacctcatttttaccttttctttatcctcccttttggcttttgtttgggttccatctctagcctaccccaagttgtttaggactaaaaaggctttattcttgttgttgtatatttggcctgtcaacaattggaatgcagggcagctccacctgttgggtattttataaggatccactcaactctgcgattgaattagtatagtttatagatagatgggaaaccaattaggaaactgtgagaagatgccattccagcctattaggacccataataaagaacagtgccaaaccgcctcccctaaggctgggctgtgctgttcacactaggtactgacgtactattaacaacaggccaaggatgagttagttctgttggagattagattatattgggttgagcagttatttactccctccatcccataatcattaactgcccccactgcatggacaagtgagctgcatgtttgccagcgtctgtgcatggcagtgattccttccaatttaattttcttgtcatcaaattaaagaaatgaaaatgtgcatgccacacacacatggcagcgataaaagttttttctttaaaaaaattgcatgttgcccaattggtttgtgagcatggagataggaggggtatttcttttacagtagactgcttatagcacctatgtgaatgccaaaactagttttatctatattctgggatggaaagagtatttcgttaattttagagataggttcttaaaggtaaagtcatctcatctatatatagatttttggattaagggatatttattccattgataaaatgaaaaaactcagtttctgcttaacagcattcaaccaaagagatcagtaaagccacagactgtcatgcaagacagtgagcaaaggtactgaaatttagacatcgcacttagatctattgaacttaagaccctatcctattgctaaacttccacccattccttgcaaaaatctctattaaacaagtctccaacttcagacacagatccttgatcctctgttactcctcttttcccaataaattgctccaaaatctgaaccagaaggtgctcctgaacaaaacctgcataggggatgaaataaaagcattgttgaagatatgtagatggggatgtgtctgtttcggttgtaagcaagaaatagatcaaaagtcccattcccttttctatccatacccttgtggcatggccattgggcatcagcatggtccttcttacctgggttcagggccatatgaagcgtgtccatgacagaagagtacatgaattatgtttgataacactcaacggaactgcaaatgttttgaatatttttctacctgtaggtagggtgcattcatgcaggagtcactcttccgcgccttagaaacttatttggttattttcaggtatgtgcttggggctgtagaaacctttcttgacgctgttccttctgctggacttttccaaagtaagttacaaatggtttggatcaatatatttagtttgtgaatagaattttcatcttgttatgtatttcaagtgtggttcat

SEQ ID NO: 184399 - DNA, 654 bp, Zea Mays
gtgcccctgttctctcttcacttggaagtaccgtagcgattggagcgacgtcagcctgccaacgtttgcgaatcccatcgacgacgaagagctgtgccgcaaggaagtgagattctgtgtcacgtctttggcgcaggaaatcttctcagcatatatgctctgcatatggtaaagtttgctaaatgtgcttgggaaaataagctccacactgcgatgagaacagtccagattaaagcttagataacgcagatgcttcatctgatcgatagatgctgggactaacaacgctcgttcatggtactgtctcgttgtaacgaccagcgcccgcagtttcctcaggctcctgaacattctgtccaagacttcctcgttaactaaggcgcgacctgaccgttcctcagcatcttcagctgcaaatgttttcctcttgttttcgctgtactcttcgacgatgatgagagtgcgtagatttaccagacctagaattttctttgtgatagctgatctactgtcagtcccagtgccaacaaagagatggcgaacctcctgcggaatatgttttggtgagctatttgaaacgactctgaagcattcgcttccgctgaccctctctgccagctcgtgtagcaggtcatgaatcgtgaacgcctccgt

SEQ ID NO: 184400 - DNA, 576 bp, Zea Mays
tctcttgtcatattgattaaatttctctagtgtctttgattttaattaaaaccgtctattcaccccctctagccggtgtcctagatcctacaagtataactacttgtaaacatctctgtggaaaattaagcaggaaaagtattagcccgcttcctcaataggaagtcgggcgcccccttcacttgtgcgtccctgctccctcgcccttcagcttacagcgacggcgcccgcagccatggcatccagccttctcccatccctacaacatgtgcaaccttccgggtaggatctgtgatcctatcatcacatgtgggattcagcagccacttgtggttgagattcaactccatcaaacatgcaagaatttctatgttttcaaaatgaccaaggaattgaatcctttttaaaaatctttggggatagctttcgtggccttacatcaccaggtccaaaactggctagaagaattcgggcgtggaaccacgtcaagattaagttttctcaaaatccattcccatacttctctggtcaacacacaggagaatagaatgtgatgtatggttttctccgcctggt

SEQ ID NO: 184401 - DNA, 291 bp, Zea Mays
cattctctattcaaagcaagaaagcttgtctaaaccgcatcatgaaaattgttgataaccgttgggtgaaacaaatggatactccgttgtatggagcagcactctacttgaaccctgggaaattctatagcatgaaacaaagtgatgatgaaggctatgttggagagctaaggggttgcttcaatgatgtacttgttaaaatggtgctagatgaggaccttagagacaaaattgatgctcaggcagtcctttatgagaaccaaagagaagcatttgcaaacccaatggcta

SEQ ID NO: 184402 - DNA, 399 bp, Zea Mays
gacaacggacatgaattctgtaacaatgcgtcccgtgactttttcctctctcgcggcgtccacctccatattcgtgcccctacacatctcctcagaaaggcagggctgagcgcatgattcgcacagcgaacgatgtcatgcgctctctgctcttttaggcttcccttcctactcactactgggccgaagccctcaccactgctacctacctcctcaaccgtctgcccaccaaggcggttgcccaccccactccttacttcgctcttttcggcacccacccctcctacgatcatcttcgtgtcttcgggtgcacttgctacactaatctcgcctccactgctcctcatgaattagcgccccgctccactcattgtgtcttcctcagatactcccccgacc

SEQ ID NO: 184403 - DNA, 294 bp, Zea Mays
gagaatgcggtgaaagtgtttgacagtgaaactggtatatcacaacgccgtctttctaacggaatttccatcaactacaaggtaattcctcaattgttttgtttgcctgttgttatttagtggatagaagaatttttttacattcatgttcctatttgcatgtagttaggcttattttcgttttccttacagccttactaaaaatttgctctatgatatcattagattacacaaaatgaagctagggttggtgtcatgcggctcatagtagggggagggagagcgacagaagat

SEQ ID NO: 184404 - DNA, 632 bp, Zea Mays
agggtttcaagcctcttccgacttctccttcccttcccttccccaccacaacgcggccgccatagacgcggtaccgcgcgaactcccatagatctgagcgagccaccctgcgaatcatcccctgacgcaccaaatctggtcagaaacggtgaagagttcggacacgatcttaagcgtcgttgatttaagaccacacacaaacacatctgtttgcccttcccccctatttttttcctgtttcggacgattcataagaacagacctgcaaggtttgcagatctacctgttcaagaaccagggaccttgttttggacgcccagaacgaacccttgaccctgcggatctgctcgatccgttttggatctgcttgcttttttctggatctagagagaatgttcaagtcgatggtttatttcgtgaacatctcaatcggggaggttgaggtgtggcccaagggccaggcgagcgcaggcctggccgtggcggcgtgggcgcgagatatccgcgttgaccgcctttccccgcccagcgagcggtgccctccgctggccgtcatgcacaccgtggccgtcgccgcccgatgcctcgtcatggagtccaggccgcccgtcgccgccgacgtggcgtcgctg

SEQ ID NO: 184405 - DNA, 532 bp, Zea Mays
taacctatgctatgttgtcatgcaaataacctagaaaggttgtatatgttaataattggaaggacagtcgttcaaattggtcagtccaattaagaatgattttgtgtgtgaggtgaggtggtgacatgacaaagtagtcatcgcttccctatgtttataagtgagtcaatacccattaggcgttcattaaatttcacgtcgcacatagtgtatggttgtattcgtgacaaggaggtgtaggttttactcaattagaagtttggttgatgtggctaggaaatttgtttcggtttgggtaatgaagtggtgacgtgaccaagtagtttccccccggttatgagtcgagtctagatgtgttatgccttcaccgtgatacccatcgcatatgctaattggatgtatataaaaaaatgaaataggcgcatcatatgatttagtggtactgggcttgtgatctaagtgcattatatatgtgtgatgagtgttgggcttgaggattgtcattcgggcgaagaaggtgtaatatacttat

SEQ ID NO: 184406 - DNA, 371 bp, Zea Mays
cttgactaacattcaaccttcgtcagctcttctggaaggattccttttgagcgtctttgtggcaagatgcttgattatcaagactttcgtctgtttggccgtgtttgctatgtgtcgctcccacctcgtgagtgtacttagttgattgctcagtcggttgagtgcgtttttcttgggtatagtactgagcataagggatagatattgttgttgggattcagttgcttgtatgatgagaatctcttgggatgttgtctttgatgagattcgtcctttttatcttcgtccttcttttgatgcatcatcatcatccttgtttgatcctctttcttttctgttctctctagattctcctgctcctactgcctctg

SEQ ID NO: 184407 - DNA, 401 bp, Zea Mays
ctgaatgcactgtatgtccctgcccctgcaaatggtattccttcagttggccttcctcatgttgcttcatcaggactagtaacatccagcactcccaatatgaatggacatattgagcagagtaggaaaagaaagaatgttctaagtgatggaaattttgtggctgagggttctcaccaaacacagggttcaggtcatccaatgagcaaccaacatgctcccaataaaagtaaaactcatactgatggtatccagtatcctattgatagagattctgtaagcaaatcagttgacccaacaattaaaaagcaaaggtccaaaagcaaacatcacagtagctattctgatggaggttctacactctttcttattatttcagtttgcctaacctaccatatttc

SEQ ID NO: 184408 - DNA, 650 bp, Zea Mays
gcacatcatcatcaacattgggcaccagctgctccacggtctcgagctcatcaacaggggccaagggaccttggatatgctcagaggccggagccatggtcccccgttcagcagccaaattcgggacagcagcaaattctgcacgtataccagcagtgatctccactgccgaggactcctccaatatctcataatttccagctgtctgatcacattgactggcatcgccttccttcctaggctgaacttcagaccttgggcctagacgttcaagagcagatcgtctgcccaaaagtacactgtcttccgtagaaccccttcggccatcacagtcccctggtggcgaacgcgaacggaaacgccgcctctgtcgtgtggaaccattcatatctgttgggatctggatggggtcagggacaacacgttgtccatccaacaccttaatctgaacacgataggcaacagatagcctctcagcgcttggtcctattcccagcggttcagtaatccagagatctctagaatgagggattgaggccaagtcataacaccaaccataacagcgaaaggcctccaaattcttgagctcaagagtctcctcatgtaccttctgcacccaggcgaaagggttcaaaatgtgctggacagtg

SEQ ID NO: 184409 - DNA, 1276 bp, Zea Mays
caggatgctgcgatgacggcgaactaccggagatgctcttcatgttctctgtgagctcggattcttaccctccttttgctcattacattatacggtaggtttgctatcctgggaatcgaactgccaaagctgaccccaaagcctccgcctattctgaccctttatataggatcagcttcagctcgtcgttctatcgcattatttcagctagctattgacgatttgatgcacttaaaacacctgcacagcctgacgatgctgttttgtttttgttttttcgtttaaaatttcatagatttctatacatgcttgtaatagctgccactgattgtctatgttgagttgacattttacaactaaataaacgtgcaaagtgttcctcttgcctgtgttcaaacgtggctaatgtctggttctctgatcatagaaattttagacttcatcgtcatatttttacctgcctgttattttttagattcactgcttcatgatcatatatctagaatagcaggggcctttgaccacccaaatgactactatggtctcttgtttctttggttttctgtgacaaaatgaaggattcatggattggttttactttgcaacattctaggtctgccacgtaattatatttctgcaacaaggcttcagatttaacacacaaaccttaaagaagttccgactgctgcaatcttcaaagcatgctctcgctccatttgtcaagccattggtggcagctgcaatgcctgccagaactgttgcctctgacaccccaacaagagcaacccacagggcttcttccgtctcccctccaacacgccgaggaggtcacgctgggcgtcagtcctcggctatctcacttatgtctggaaccagttcaactccttctgtcttgccaggccaatgcattcctgtattgctctttgtctttgaggatgatgcggttgatgtttcaagtgctgcagcaagtcccgatgatataggtgatgcatcttcatcaaatcagggttctacccctgatggactaccaaaacagagcttagcttcaaaaagttctggttcagtaattatgctttcccgggcagcaaacaaatctgagggcagttcaggcaaaaaactgcattcgtcactggagggacagatccgtgtcttgatcaagaagtgcagggtgcttgcaggcatggagcctggacatattggcccaaggggcgtaagtaacatgagtcatcatttacccctgttctcactcgatacctcgagggtagttgcactgttg

SEQ ID NO: 184410 - DNA, 1218 bp, Zea Mays
gtgctatatgatttgcgaaataaaaggtggcgtttttttggcgatgttacacaagagcaaaagatccaatgcaaaggcctattgtggctgagaaaaattgttattgtgtgcaactatgttgaaacgtcaaacacgtgagttctcacttctataccatcttccttgccattcctatcttgtaactgacctgaccctgtttggtggagcttcggccgtctttagctccgtctccttcattcactgaagcaaggagtcattttattatctctcttctcaacatgagctaggagctggtgaagctactatttttggcttcactagctcaaactcctccgtgcactgtagcaaggagcatgggagaaagctcgctatatgggagtttattgcattgaactatgatccttgaaatactagctgaactgcatttctctgctgatatttttatctcattttattaacttaggcctctaatgcctttctaattacaatatattttagtcacagacatgtatcattcttttggctcaggtacgagcttctctttttcccaagatatcatcttgattatagctctttactctaccgaaaaccactgcttggaaggccaattgtcatggatgttttccaggattatatattagttacttacagtccatttgatgtacatatcttccatgtgatgatctcaggagaattatcgccttctagcaatccagttttacaggtaatgtccatcgtgaaagaaatttgcaaccccaattcataatgtgtttccaatttttctctgtgaatagttattttattctttgtccggatgaacagctttcaacagtgcgagaactttcaatcatgagtccaaagagtccacctgtttcaatgcgcttcattcctgaacaaaatgacaaagaagtgctgaagcgagatactaatgaatcttatgatcttttgtcccagcaaccatcaaggtactttcgccccataatgttacacaatccttttctcctttgtttttattgttttttttatttatgatatcagatgtttgatcttgcggaccaatggggagctttctgtgcttgacatggacgatggacatgaacacgctcttacaaattcaattgaactcttttgggtcacctgttcccagtttgaagagaagggtagtcttatcaaagaggtttcatggcttgactatggtcatcagggtatgcaggttag

SEQ ID NO: 184411 - DNA, 491 bp, Zea Mays
gcctgtcgtgaaacaagaagcgcaaggtgggcgattttgttacattgaaccactgcagatgggaatccaatctgctactcccttgtttactgattgttgctgtgacattcttgcaggctctgcgcctccaccgagggatgatcaggatcgctttcctctgtttgggaccttgcagtcgtgagattgttggtgctgtaatctgcttcttcctccccctattccattgtgttagcgtgattttgtgcagcgaaacagtctgaggagagactgaggtttgccgtgcagtgatcttgcaaagtgtaaggatcgcatttcagagtctcctcaccgtatatcctactctttggcatgctagctgatcttccatccatcatagctgttctgcatcctgtgttccgatttgttctctcgtatttctagtgaaatgatttccaagatgaagtgcaaccaggttctccagcttccaaactgtcactggtggcttagctaga

SEQ ID NO: 184412 - DNA, 716 bp, Zea Mays
agacccacccggacgttgctgaggggaggtggttgcttctggggccacacgtggctgtccgggaacacctgtaggctacaaaaaatgtgctggactgatagggtgcagcacaaagtcagtgggatcgagcaaaaaatcaagatcgtgtggacggaggcaatatgaatgatgggaaaagggaaatgaggtctcatcaaacacaacgtggcgagaggtgatgtctcgattggtgagagaatcaaggcagcgatatcccttgtggttaggagagtagccaaggaaagtgctgagcatggagcgaggagcaagcttgtgggcggttgtggctgaaaggtttgggtaacaagcgcaaccaaagacacgaagatgattgtaccgtggaggagcaccaaaaagagcaacatgggggatggaggtttgaagcgttttggtgggtaggatgtttagcaggtgagttgcgacatgtaacgcttaaaccgagtaggaagggggcatacttccttaaaaagtaaggtacgaaccatgttgttgatggtgcggatgatacgctcagcaaggaggtgtagggacaagacatgcgaagatggatgccgtgggttaggaagaaggtgcgagagctcgcattattgaactcgcggccattgttatgcaatcaatcaatactattctagctacatttccacatggtatcagaggttacacatatataggcaaag

SEQ ID NO: 184413 - DNA, 1233 bp, Zea Mays
aagaacgatgataaagctgttgaaatgcaagacggttttaatgcacaattatctgatgtttctgaggatcttgaaggcaaagactcgggtggcgaagatgaggataccttggataatcagatgggtgatactggtgatgcaagtgaagtggttggcaagaaatcatgggataaggatgaagatgatgatcctaagacatctattgagaaatatgagtcaggctcatcagccaagggaacacaacaggatgatagggaaatgagagctaaggatgatggttctattgaggaggaagatccgatggaaatggattctgaggaaggaaagaataataatcttgaacatgatcctagtacccatgatgaaaccgaactgaatactgatgaagtcatggacaaagctgatgcatatgatgaccggactggacctgaactccctgaaccagagaatgattccattgatgttgacatggtggaacaagaacaaacggatgaaataaatgctgacaatgaagatataggtacagaagaagctgaacaagcagatcagaggttagatgcttcagatgatatggaggaaggagatatggcacaacatagcgatggtgtggtagataatgaaggggagcatgttgaagatgcaaatacagacgcaggtgagatggattcacaccaattggacaaggcggattcacttatgcctctgtcacaaggcctacagcctgacaatatgcaaataaattctaatggagaatctgaagcgaacttggccaacagcagtgatatgcatggcgctgttgctccttcagtaaatttttcaggaaatgaagtgcccaatatggaaatatctatgcccaatactggtaacgattcaatactatcgtctaactccaagccagatatgcaaaatgatgctcagcagcacatcaagcagacaaatcctttcagaagcatcggagatgcattggaggactggaaagaacgggccagagtctcagctgatactcaggatcatcaaccagaaactggaaaagatagtagtgagaacactactgaatttcgttatgtgcctgagggtgaggagagcacctctcaggcattgggtgctgcaacagctgaccagatcaattatgacaatcagattaatcaatctttcttggaagatgaaagctgtatcaggaatttggaacatagtgatgagagaacacctgataaccctgaggtgccttacctt

SEQ ID NO: 184414 - DNA, 387 bp, Zea Mays
caggattatggtattgagcgccatgcggaccactatgcctgtgtcattgacatgctcgggcgtgcagggaggattgaggaggctttcgagatggttcaaacgatgccgatggggccacatccgggggctcttggtgcactcctgagtgcctgcaagacatatgataacgttgagattgcagaagttgtcgcaaacaagctatttgagttggaaccttggaacactgggaactatatactcttgtcaaacatatatgctgggaaagaactctgggaggaggcagaaagggtcagatcactgatgagaacaaaactgccatttaaaagtcctggatccacttggtttgaggatcgacagagagagcatgctaagatgtctatcatggac

SEQ ID NO: 184415 - DNA, 351 bp, Zea Mays
aacgggcgcatctcgtcctgcacaataccaaaaacgtggggttggtggaaggcgtggcagaagacgttcggttgcatctgaatctggtactgctactgctactgatgaggacaacagctggacttggtggactggaggaaatatttcaaaacgtactttgcagaggggggctcttctacattcaaccagaagaaaagctgctcgccaaggtattacatggtttaactgttagtagtcttatttcatccactaacagtgtccaggacatgaacaagttgacttgttttgttacctgctaggtggtaaacagtggatagcaggtttatcttaccatgaaggttccaaatttcc

SEQ ID NO: 184416 - DNA, 367 bp, Zea Mays
cttaattcctatgtgactgatgaagaagctcaaaggttattggctgaattggtgcttcatagtcccaatgaacaaggtttttctgtgcagcagggtgtgatcagaagaggttctcagatttggattgctcagaactcagcccttagaactaagatcattgtggcattacatggcagtatagtaggaggtcactcaggctgtctggcaacctatcagagggtgaagaggctattttggtggaaaggattgaagtcagatgttaaactatttgtgcagcagtgtgccaacatgctaagtctgaaagagtcctttacccaggattgctccaaccccttcctgttccccagggtgcatggcaagatttgac

SEQ ID NO: 184417 - DNA, 282 bp, Zea Mays
caagttatgtcatgatgatgggagaattcgtaaatttctacttgaaacatttcatgacttgtatgccaatttaattaattgaagtctatatgtacgatgcaatgatacatgatggaggcttctggcttactttgatgtgagaatttcctgagttgtcgataagagattcttgagaatacaatatacttggtgctttacttgtttcattaattaatactatgttgacttgtttgaccccttgaagatttctgatggagccgcagaagacatccgttcattagt

SEQ ID NO: 184418 - DNA, 491 bp, Zea Mays
ctagtaacatctgccagcaatctgtgatcgaccttgattcttttgcatataaaccattaaagaaagatcctgtggcgctgaactcaagaaggtctaaggtcagttgcctgctgccactgctgttatcttttgcagttctgcttgtgatcgctttcccagaatttcaagtgtaatcaggttcgcatgatcctcgttgcaccaacacagtagacttttcagagtataattgacaactctccaatttttctgcccttggattttctctggagcagcttaggttacctgccccgaacaaatccaccactggtacataatttgatggagagtttgagacaatggcgatctttgccgtgaagcattgggaagaactttgttctgtgagatatgacatgcggggagatgcagatgttacgtcgccatggagatttatagtttcaaacatccacatggattagagaagttccctgagctgaagtagggtgtaaaatgca

SEQ ID NO: 184419 - DNA, 971 bp, Zea Mays
gcacagcttatacatgatcttaaggtatgaattgtaaatagagtaatgctgctttctatacccacaagatccatggctcattgattgttgctgttggctcaatttaattttttacactcgtcttaacaacctctgaaggcctctcttattgatcttaatattcgcggatcacttgctgtgaggcaactcttgctactttttactggtgaacttgcatgtatgtttgcgaatctccaacttgcaaatgctgttcagtgataatgatattcttgcctgtgcagaattcaaatcctggagcccgtatcagtgtcaaactagtttctgaggctggtgtgggagttgttgctagtggtgttgtaaaaggacatgcagaccatgttcttatatctggccatgatggtggcacgggagcttcaagatggacaggtatcaagaacgctggacttccatgggaacttgggttggctgagacacatcaaactctagtagcaaatgggcttcgtggtcgagctgttctgcaaacagatggacagttgaagactggtagagatgttgctgttgcttgcttgcttggtgcagaggaatttggttttagcactgcaccactgatcacactcggttgtattatgatgcgaaaatgccacatgaacacttgtcctgttggtatagctactcaagacccagtgcttcgagaaaagtttgctggagaaccagagcatgtcattaacttttttttcatgcttgctgaggagctaagagaaatcatggcaaaccttgggttccgcaccattactgaaatggttggacgttctgatatgcttgaggttgatccagaagtagtgaagactaatgagaaacttgagaacattgatctctcactaatcttgaaaccagcttcagagattcgtccaggtgttgctcagtactgtgttgagaagcaagaccatggcctagacatggcattagataac

SEQ ID NO: 184420 - DNA, 661 bp, Zea Mays
tgcaggtgcaattagagactgatgtgcagaatggcgctatcaagtcaaaagtttgattttatacttccctagggagaaagttgtttttccctctctttttttttactttgaattaacaaacctgcggcattcattggctatctgcaagtgtaagtcattgagcgtttgattgactgcatgcacatggaacccacaaatctttattgggtcactttacgtttcatcgtaagatccactgcagtctgcagtaccattatgcatgtgcagaattatccgggcctctagcctgccaccgttgtcggaagcagatggaaaagattcagcctgccaccgttggctgtttctgacaattggtgcataaataatctttcttctatttgaccacctatattatctatggcatacaaaagtaaactaggtaactaggtctgaaactacagttgaaacaaacactccattggagctatccgttatgttgctattgcaagtcagcaggacggaaaaaaaatactgtgcctatttactacattatcatgtgatctcctgtcgcctgtgcacagtccaactcttcttggagttgacaccactgtacatgctggtttcgtcatctgtaatataacatcagttctctttgtaatgctcgaatcaggctgtcattaac

SEQ ID NO: 184421 - DNA, 1177 bp, Zea Mays
cgcatctgatcagggaatagcttctggtgggcaacttgtgactgaaattcaaacatgaatttgataaacatgactgaggccttcatggagctgtgcagtcaaatcatattttgccaacaaactaccatgcacaagcaacatgatttgggacttattgtttctacattgtctgtgttccaactagcaaaaccacaaagaattccacctaggacagtcaagatcaatactcaaaccatcagatttatcgatatatttttgttctttgataatgagtctacaagttaagagcgaaaacttcatgttcaaggataccataatgtggcatccatcaacagtggtggaatgaacatgataagagaaatgaatgtcacctcaatatagaagcttacaatcaacttcattgctaaaagaataatccagaacatggtatacctgtcaggacaacaatgttcagtaattgagaaggatgcaatacaagacaagacaatgtgaagatgggttaacattttaacatacttgaagagggagaatgcaccttcgtgcatccctctaccaacaaataaccgaggctgcagacaaacatcgaatctttaaaaaaaagcatccacaatcttgaccgtctaattaacagcagaaaacaagaaatggaatgctacctgagaccaccacatcatgatcgttatgaccttaacatttgaactctctaggattcttctcataaatgggaaaagaaatagcatagaagcaagtatgtttggtgccatatatatcactactgccagtatatacaaagatggctgattctgaccatccccaagccagctttttattgttcttgcaagaccagtaggattctcccaagtgtacgcgtaagtcactggtaaaatcacaacccatgcagcagcagatattaatttcaagacatatcgtagcttgactgcaaatgacatgcttctttttgctttccagccaaatacgagatctaggattgctgtcacacacatgatagattcattagcattaattaaatcctttctcaacataacacatatatgcaaatggaagaaaatgacaattatttccaaaaaacgatgatgttaaacatacatctcttgatttccagtaaaagaatagcccaagatgatgttttttaagggaaaaaatctatataacccta

SEQ ID NO: 184422 - DNA, 744 bp, Zea Mays
aaaaatattaccttatcgaacttcatgcttacataaatttatctccttgtcataattacgaatgcgacaatggatgcattacttatgttgttagctttacttaaaccttccgagacttactgattttccttcctataagcgagcaaaatttaggttagtgacggattttttcttcgacccgatagaaggtatatgacagcctttagtactattcttgcagatttaactatataggaaggaaacagtcatcggctgagtggcggaagcggttgccagaactggcaaagcgacttgaggagatcttgtacagaaaattcccaaacaaggtatcgctatcgcattcccttcatcgtttgcaaggctttgttggtgtactagagatcaagtatatttttggggagcaaaaataaaatcttgctgcttcatcaccattttatttttggttcctgtattgtttgagcagactgactactacaatatgatgaagggaccagttgagccgcaattgcagtttgctattaagaccttgagcgctcagaaccaacacaatcaacaaaacccacaaatggcaaggcaaatagcatcatcctctagctatggtactatgattcctacccctggtatgacgcaaggcaccaatgcaagttctaggattccttatgtcacagaaaacaatggcctttcatcgtctggtgcaggcatggttcctcagaatgctaacatgggtgcctcgatgcaaggtgc

SEQ ID NO: 184423 - DNA, 633 bp, Zea Mays
gtcgtgcgtcgggaccgggggtaggggaagaggagagatgttgacaggatcgacatcgagggaatcaaaatcgaaaggtggggaggagccactaaggggaaacattctcattgaaaacaacatgacgagagatgatgatgcagtggatgagaaagtcaaggcatcggtatcccttgtgatccgaggagtaatcgaggaagagacatcgagtggaacaaggcacaagtttgtgggaggcagtggcagatgtgttgggatagcaagcacacccgatgacgcgaaggtgctcgtaggagggtgccaaagagggtgaagaacccactgatcgcctgggagggaagacggttgaggaggtaggcggcaatgttcaacacctcagcccaatagtgggcaggaagagaagtttggaagaggaggcaacgaggcatgttggtgcatgcgatcggctcgaccgttctgaggggaggtgtgaggacacgacatcatagctccacaccatgggagagaaagaaggtacgagatgtggagttatcaaactcccttccgttatcacattgataacctcggatgatgcgcccaaactgagtcgacactcgtacaaataagtaagactggtgaaggtgtcagacttgt

SEQ ID NO: 184424 - DNA, 1004 bp, Zea Mays
cttgccttcatcacatggattagcaacttttttcaattgatcatataattcatgggatgaattctcactagttttattttctttactagaaatttcgttagtgagaaaagcatgctcttgtatcaaattttcatgagcaacactaagttcctcatgactcaattttagctcctcatgtgaacaagtaataacataaagtagatgtttttgttgttcacatgaatactttagaaatgagttttcactttccaaatttcttgttttatctttctcattttctaaatcaatgttcatgctagcaagtctatcaacaagctcatcatatgaatatgaatgattagtcacattagcattatataccttcgtattaccttgtgacatgaagcaatgtggtgtaatgaatgggcttgtagtagcgatatcatcgtccgagcatgaacaatcaccataatcatcaagtatgcttgagatagaacaatcatttgcatcacttgagtttgagccagcacaatcatcattatcaagtgaacttgtggtatgtctttcatcattatcatttgaccatgaggtggagcaatcttccacaaccaccgtgttgaggatgtgctccacatcctcgctagagatcctcccatatacgccatcaagatatgtccaaatatcatgggcggtctccatatacataatttccttaaacaccttatcacttatccattgatataaaatgttagtagcttggtgttcaagatgtaagcatttctctttttcttgggtgagatcttttgtgttctcatcaaagggtttataaaagcctacacttatgatccaccacaattttgcatcaattgtatgaaaataatgactcatgcaagttttccactgtgcaaaatgtgtgccatcaaaaatatgtggttcacaagtaacctctagccctttagtcgccatccaacttactctcgggtcggttaagaccaccaaatgagagaaccaggctctgataccac

SEQ ID NO: 184425 - DNA, 291 bp, Zea Mays
ggaaaagagaagattgagaggaccattgtgtgggatgaggatcaaagcaagtttatgcttggttggtttactgacttcataaaagaacaatatgctggttttaagattaaaaaacaacgccacttcaagtgtgctgaggcattgaacagacaattcaatatgggggtcactgctactcaagttgaaagacattacaggcattataaagagaattggaagtttgttgctgcagccttaagcaagagtggtaacacttttgacacaataaggtctatggtagtcatatctgaa

SEQ ID NO: 184426 - DNA, 421 bp, Zea Mays
gaaaactactgcagccctccagcactagtactgggagcagccaaaaaggagagaccctttgctccagcagcttgccatttctccctcttctcattgacaaaatccaagagcatggtgaggcttggtgacacaccatcaaataccactccgttcctatgcttccaaatcaaccatgccccaagaatgaccagagagtccaatccttgtcaagccagacacaatggctgaaattcttttccaccacaataggaagtgagtgtcatcatgaagaggagccaaactttcttagaatgttataccagcacacccttcagaaaacacaagataccagcaaatggttggtctctggctcttaatcacaaatggggcatctaggagggtgattcaagcctcttttttccagcctgtcagcagtccagca

SEQ ID NO: 184427 - DNA, 535 bp, Zea Mays
cgcggagctggtgcggattctggtgaaagcaaaggatcgtttctgcaagactctgaagctggagaaaaggatgtctaccttagccactcctgcatccacgacgagatactacatcaacggcgacgagctgggaggaaggagtactctgtcatgccacaagtgtaccatgagtctcgggaggatgcggagcgtgtaagaggacgacacttgttgggcatgtcatcttggcgtgctccgcacgagaatgccaggaagccaatacgaatatacctcaattatgatgccgtcgggcattcgcccgaccgtgattgtaaaaatgttggcgacatcgtgaaggtcagtttgtcacattagcttttctcattgcaccaccagctattttatctgtgtagtagaattgaaactgttgtttctatttggtagcttggcgaacctcctgtatcatcagcaccaggaacacctatatgcgatcctcatggtgatccaccactggtgggagactgctggtacaattgcacccttgaggacatagctg

SEQ ID NO: 184428 - DNA, 321 bp, Zea Mays
ccaatttctgagttcctcgatcgtcagcaatttgttgcggtgtccatattttgtacgacgaattaattggtgtggcaagagtacaacgacgaactcatgaacagtgctgttcttgcgagcgaagaatggttggtgacggtgacctggtggtgtttatgacaagatctcgacgcggcgggttgtttggcctctgggctctgccctagttgtctttgagagctactcgcaccgagatggagtagtatctcttcaatgccccctgattccctgagccccaattttttttccttctttagtttcttttaagcctttatctttcag

SEQ ID NO: 184429 - DNA, 574 bp, Zea Mays
caatttccaatttcccccaattcaagcttccgccaccgtgaaacgagcttcaccgtcgccagccctttcccggttagcccccgtcccctgcttcctcgtttaagctttctcacatacctacgatgcttgctaacccaccaatttgaactgcgagctcaccaatcactgggaacacgatcaactgtccgccacccattcggttcacgtggacagagcttgatagatcactatttgcgcaattaagttaggggaaatggtcaggccgaccccaatttcatggtcgccgctcggagaacccagccgtagccccaatcggccggtctgcacgctcgccggagctcctccgcgcgctgccgacgtcagggacctcacctgtggagaaatagaacctcagggaccccggtgcaatttgtcagcgactgatacaaatagtaattgaactcgttcacatttaaccagaaacccgaggtcctttctgtaaagccgccagcgtgggggcgcgcgggcgcgctttccctctggacctgggccgctgggctgaatccggcccagttctattaattcttttcctttt

SEQ ID NO: 184430 - DNA, 731 bp, Zea Mays
aatgactaagtagtatttgtaactagacacgctaacaacatgatacgtccacaaatcataatgaaccaactcaaacaacttggaagctcaactggaggaactagagaaaggtaaatgggtatgttttcctagctgacaggcatgacaaagatcatgcccgcttttattacacgagatagttgaagcaatagacaaactagacagcacatcagagccaaggtggccaagacactgatgctaggtagacacaacaacaatagacatggcacaggaggcaggagaccctaggaggcagtgtgtagagggggatgttatcagtgttgatggtggtgtggttggaggcaccgaagttggccacctagtttttttctcgaaccacgcaggagaggtgcacatcatttcattaaaaagcaaatagggaggccatgggagaaaagagtcccccaaggccaaaaaaatacaacacccactctcacaaaatacaatacacggccatgacctcctagggtcatccgtgcatcacattctaaaaagcccttcatcaattacagtccaaaccaccatctgtgcatcacattctaaaaaatgcaagcattttgatgcttccatagctcccaagtaactagaatcactagggagttaaattatttctgcatcaccttaggtagggagctaacaactctacaccaccaagaatttaggcgattgttaggatccggcggcctcacaat

SEQ ID NO: 184431 - DNA, 315 bp, Zea Mays
gtcacggtgttatactgttactacagattcaccgaaccaaatccatgctccatcaaacatgaaacagttcctagcttccatttttttcagttttagcagctaaacagctcgatttgcaccacagcaaccacatccgcaataccactgaaatgaacccaaccaattctccacttcctggtgctcaattgcacaggaaatgccctaattcgcacccgaccatctgcaaaatccatccaattcacgacataaaccaagcctccgccaagcaaaaccgcggctagactggaaacttgttgggatctaaactaagcgctt

SEQ ID NO: 184432 - DNA, 744 bp, Zea Mays
cttggtcttccaagcgccagaacacgatttctcgctccagtgctgaagccgaataccgtgttgttgctaatgtcgctggtgaggcaacctggcttcgacggctcttgactgaattgcatgctcctctgccgaagacgaccttggtatactgtgaccacatcagttttgtctacatgtcctccaaccccattcagcaccagcgcaccaaacatgtagagatggacattcatttcgttcgggaacatgttgctcttggcaatgttcgtgtcctacatgtaccgacaacttcacagtatgctgacgtcttcaccaaaggtctgtcgtcttcggtgttcactgattttcggtccagcctcaacgtccgctcaacggatgtatcgactgcagggggatgttagacagcaatattcattgccttgtatataggcgtgatgcctggcttccttaagcagtcggccagccttttatagcaggtcaggatagagagagatttggggaagagtctaggatggtaaggatcaattagggtcctgatgtttccttgtttaggatgtttccttttgcctctggctcttcccctatatatgtaacagcactcttctctatcaatacacacacaattcatgcattctacttcccttacactaccatataaggcccctgcccccgcatggttaccccttttcctcacaccttagcacctgaccccgccactgcacgccaagctcgccggtgccgacgtcg

SEQ ID NO: 184433 - DNA, 619 bp, Zea Mays
tggtcatggtattataatatgcaggttgtaaaaactgtgatcagattgttcattttgttctagcagctacattgtgtgattgtccttgttttagtggattactgaattcaaggttgtgtcccatatttaatgaaatttcagctgtactggtgaactaatattcatctatctcaccctgataaaagaaattaaaactgcacactgcacacaatgagaatatcatgactgacaagtcgatgtaaacaccagaggcggacccaacaaaggatagcgtgactaaactagacaacataaacactggggcggacccggcaaaaaaacttagggacatggttgtaatcatgtgcacattggcggacccaggacttggtgaagactagggcaaaattcttggagcgaaaagccgaaaacaacattgaaaaaatattgtaaaaggaagtttacaaaccgagatgttcttccactacatgcttgtgcaatacaatagctaagaacataacgtgaaacatagagtacaacaataaataactagtaacgatttgatgcatttgcatattccatctcctcgtcaataactcctaatttttagttttcaatccaattgaatataaacaactat

SEQ ID NO: 184434 - DNA, 287 bp, Zea Mays
gcaagacaatcattagatcactagtccaggaagtctctacaagtctacatcccattccaaaaggtacctttcattaagggcattaactcataatggtaggagcccactttggtcccaagtaaaaacagaaagaaataaaggaagtaaacatagtgtcatagtgatacaggggcagacccaagttatgttgagtgaggtacatgacaatttttcaccatgagtgcccccacacaaatgaagtcctcagtcctcacacaccaccaaatataaggctaacttaataatca

SEQ ID NO: 184435 - DNA, 756 bp, Zea Mays
ggcttctccgcctccgtcgcctcgccaatcccggcgaactatcgcagtgccctggccgatccaaattggcgtgctgcgatggcggacgagtacaaggcattgatcgacaacggcacttggcgccttgtacctcggtcgcctggtgcgaacattgtcactggcaagtggctgttcaaacacaagctccactccgacggctccctcgcccggcacaaggcacgctgggtcgttcgtggcttcttccaggaggaaggcgtcgactacgacgaaacattcagcccagtcgtcaagccggccacgatccgcaccgtcctcaccattgctgcgtcccgaaactggcccatccggcagctcgacgtgaataatgtcttcctcaacggcaaccacgaggagactgtctactgcgagcaaccgaaaggattcgtcgaccctactgcacctaactctgtctgcctgttgcagaagtccctgtatgagcttaagcaggcaccgcgagcctggaatcagcgcttctccagcttcatccgaagtattggcttcaccacctccaaaacgaatgcctccctgttcatctacaagactggaccgcgagcctggaatcagcgcttctccagcttcatccgaagtattggcttcaccacctccaaaacgaatgcctccctgttcatctacaagactggagacgccatggcctatctcctcctctacgtcgacgacatcatcatcaccgcatcatcaccggctcttctccagcac

SEQ ID NO: 184436 - DNA, 598 bp, Zea Mays
ccttgccccggcctcacaccatcacatgtccacaatgctgccgtcctccagatcgaggtgacttactttcgccccctcccctgctcccggactcttgcgttttctctctcttttatttatttatttgctcgcgctcttgttccgcctgtcggttttctcttctttcttgaatgacagatctagtatccagtaatccagttagagccgcctgtcgctcttgctgccgtagttgcctccttgtcaaatatgtgtatactgggctactggctcgtgtgatttccgccacacgccaatgtgcctttcttcagatgccgtttcatctctgcaaatcctcgaattccgatcgtggccgttacggtttcatttgatcgatttccaacaagaaaaatctgaacctgcctgcgttcaaccctgtggcttcgtgccactccactagtttgcagtttgcactcgattcggcgacagagaaaaaaatagatttttgatttttaattaacggcgatggatgtcgccattggcagatctgggccgaacgagtcccccgtcagcaggggcaggccgagcacgccatcctccaaccaccgcccctccacgccgt

SEQ ID NO: 184437 - DNA, 412 bp, Zea Mays
cgctagaatcactagttcaaattcatgcattggagaagacagcttctggacgctacgaacccactttttatggctgtttgctcaatagtttgccattgtcatttgattcttctgttcttgcccttaaattttgtgagcttggtgctatccatgaaggaattctaataagcatcatgctggacatccagccgcttcctatcttgcacacttttggctatcgagaactggtatgtggtatgctttagttgggttatggaccatccttcatctccaattccaagtgttgtggtagttattccctgttatctgttttacagtgccagaagtacatagacaattatttcaagggaaatggcagtgtacaaatcggcaaaaaggaagctaccaccattggaaatctttgtgcatttca

SEQ ID NO: 184438 - DNA, 1394 bp, Zea Mays
cttcaagaaacccttcaatctttgtccataaggattcaaaatgaaaacgccttttaacacctttgttatctctgaaacccaataataaaggacagtgaccagaatcttcagaagctgcactttgtaacccatgtagtggaattcctcctagtcaatagagcacaacactctatcaagcttgacaagagtaggctgattctgctgattagaccaagtaaacttgcaccaatgtagtggaatctctttaagagctagatcatctaccaattttgtgaatcgacccatcatagcccgattaatatgcgagttgtttttatcctcggcctgcaatatgagattgaaattcccaggaatcatccaaggaccctgacaggctgctctaatttgtctcagctcttgcagaaactgaatcttggcttcattagattgaggtccatacctctgtttacaaatcgtccgactaatcgcgattaattgcgattagtcgggctggtcgcctgtaagtggccgaccatggggacgacgcgatttgtttttctggtcgtcgattaggcgtccaaatcgtccgattagccatctctggtcgaccagtgcgcggcgggctagatgtgctattgggcttcaccgttttttgggcccagtagccgcataaatctgttggcggccctaaaccctaaagcctcccctgtgcctgcgcccctctcctaaactttctgtcctctgccggtggcggctgctccagcctccagggctctccaccgtccaccagcgccggcgtgcagctcatccttgaaggccgtccctgccccctgctcatctacaaggcacaagatgagctcatcatccgaaggtcatccctgctcccctccttcccccttgtctgcactctgcagttttgcattctgcgtagcagtacccatttgtttgcagtctgccctggccctgctcatctagtgttctatacttctattttctatttccttacttcaatagttcttagcttcatagcagcgaccagtttatcccaccagtccagcagcaccaatgatgttattcttaccagtttccatcagtccagcagtagcacatatctagtgcctagtagtgacttgacctctatctgttgacatgttcagagtttcatgctgccggttttattcactggtttcacttatgctgcattgatgctagcctgctactgttatatttcagtaattcagttccaaacttctaattatatatatatatatatatgcctaggaatatacataggacgactagggacgaccagaaccgattagtcgacctaatcgtcgccctaatcgcgattaggcgcctggtcggtcctgtcggtcgactagctggtcgcccgacttgaaatcagtgatcaaggc

SEQ ID NO: 184439 - DNA, 507 bp, Zea Mays
cacaggtctccagatctggacgtgccctcgggtccccagggtaagccatgggcggcgaccaccccgtgagcgcacgaaggtaggaggtggggttgagcttgcttgacggccgtgggtggggaggtactggccttggctaaaaggagcatgaagaattgagaggagaggatgtccttttaagcttggggcagagaggagctctatgctcatctccaaagcagcgccagcatcttgttcggttggtgcacaccgccactctatggtcttgggcaaaacaattaagacacctcccatctgcatgcctgatgaatttccttcttctctcctctctgtcggccgattggagctggcttgaatactgatttgatgtcctttgcctacgccaccagtagggaaggcagactacctcccagccatgagttaaatcctccccagcctaggtagcagtagcaaaacgcgcatcggagagatctggttgcttctggttttgattcgctggagaagatc

SEQ ID NO: 184440 - DNA, 305 bp, Zea Mays
gtaaaagtgagaaatgcaagatttctatggaatttgtacaggtggacatcgcggcagagcaaagagttccaacatctgccaaggtcaaatgagacaatggtatccatacttgcagatgctcatatgctcagtcaagcagaatcactactgctttcattgattgatcatatgactccagctgtttctagtgaactattcagtcagattatccaggtgtattcagaagcaggcaaccttgggaaatcagttgcactttatgattatgcaaggggcaagcatttgattccttcagcttcatgctatca

SEQ ID NO: 184441 - DNA, 434 bp, Zea Mays
gttgcacacgggaagagcaacacaagccttgcatgcctgcgccatcgccagggccgcagcggagcaacactacaacggtgcataggtagcacttgataagcagatctacaagtgtagtagcaagcgtttggtgcacaaatcagagttgagaaagaacggtacaataccttgcgcttgaagggggcgagtggatggtttccaggagggaaaatcaaccaccctggtaggtaggttgtagagctaggagggagggaagaggaaacccacggtccaagggcttatccgtggggcagcagctagaggacgacatgggtacacagcggccaaagtacaacgcactactgcggcagagggatggcgaggggcgtccaccgcgcgccccggccgatgggcagcatcacgtggcggagacctgcacaggcgctatgagaggg

SEQ ID NO: 184442 - DNA, 1406 bp, Zea Mays
ttcataaccaagtatggcatcaaatacccccaaaggtaacaccctcatatcagtatgatagaaatgtccatgtgaccaccactccaagtttttaaccatagtgttacaatccaatgcatgcccactagccaccttaactttcactggctgacagtgttccacttttaaacccaacatatgcaccatatgttggctgatgaagttagaggaactgccagaatccacaagcattaacatggtatgttttcccaccactgacctgatcctcatgctttgttcattgtcagttcctgatacagcctgaaaagataaccgacagcagtgatcctccctctcatcctcctgggcaagtttccggagaacgtcatcagtgagttccattggctcctcctcagtaaccaccgcattcaactgaacgggtttcctccttacacacttggccaggtgtccaggctcgaatttctcaccacatgcatagcacagtccattaagcttgcgaaactctctaacttgtctctcacgaaataattctccccccatttgttgtcctcttccatctaccttattaccagccaagttttgcttcgtagcatacccttgtctggcaaccttatgccttcctttctccaacatctcctgctgtaactgggctaatgatgcagcattatctacagtggtaggttgatgcatctgcacagcatgctgaatctccaacttaagcccatgtataaactgtgtcacaaaaaacagttcatccaaccttgtgttatgcacagcagcctgatatctggcctgttcgaactcatgcacatatgaatccagagtatccacctgcttcagatttctcaattttctcagagccttggcatacgcatctgccccaaacttgccctctactgctgtcacaaactccgtccacaccctcgctccttgtttcaatttctgcacctgccaccatctcgctgcattctgttccatgtgaatagaagcagccgaaacccacagagacgatggaacttgatacatgtgaaaatattccaggcacttatctatccaaacagcaggatcatcaccagaaaatctagggaaagacatcttaggcagtacctgcgtgttcgcgtgcccgatcggcctctcctctcgatgtcgatccaccctcggctcggaatggtctcttctctgaaatcctcgctcaaaacccatgttctgctggtgattcctccttcctcgattctccacttcccctgatgaattctccagctctcttcccatctgatccagccgtaattgagccatctctcgacccgtctcctccagcttcaggtacaattcatcagtctgataccttcctcatgtccttcacctcttccgttagtgcttccatcgactcgaacatccgattccac

SEQ ID NO: 184443 - DNA, 480 bp, Zea Mays
cttgccacagagacgctattgacttgagttccctggaggcccctttctctgagaaggaggttcgcgacactattggggctctcccatctgataaggccactggaaaattctacagatgttgttggcatattattaagtcagatttgttggcagccattaattcactccatcagggaaatactcacaagttggggatgctgaattcagcttatttagctcttctccctaagaaagttgatgccttgtctgcaagagattttagaccaattagcttaattcatagttttgctaagttggtcaccaaaatgcttgctaatagattgggaccttacctacaggagttggtggcaactaatcagagtgcctttgtgagaggcagatcgattcatgacaacttcatgttggtgcagcattcaattaaatctctccacaagaagagagtctctagtttgctcttgaagttggatatctccaaagcat

SEQ ID NO: 184444 - DNA, 459 bp, Zea Mays
aattagtgcacgtaggtgtgtgtgtcgtggtgtgatatagtagtggtggcatgagatatttatttgaggtgcgcgggtatatgccgtaatatggttatactcgcggcgaggaaagatgtatgtattgtgtaacacaacgtttaggttgctattatataatcgtgtgaaggatgctcatgatggttgtgtgatcgaggagtgatgtagtggcaagcgagaagtaagtttaatttttcaacggttagtggatagtatctgtcggtgttgtcatgatttttgttgtatgacagatcgatgcttagctttataaattattgcattccattccctttggataaataaatgtcttgttgatcgattagaggtcttatatgagcgttatcgcaaaccaataattattggagacgagtagcgttcatgagtcaatccttgctaaaattgaagaacagtccgataaca

SEQ ID NO: 184445 - DNA, 395 bp, Zea Mays
ctggcatcggactgggcccaggtatcactagccaccatgtatgtcaagagatactggtacgaaatcagcccatccatctttggaacactcatcgctttccttagaagggtcacgttttctggacagctgatgagaaataggatgaagcagcactcattgatgagaaacaggataaaacagcaagatccagtggaggtttctgatgcagtgaagagagctgttgctagatcgctcatatcaacgtatggcggcaaggaggacgacgccgtagaaacatcgcaatggcaggaactcaagggcctctctcagctggaagtcatgctaatttggcacgtcgcaactgaacactgtgatatttcctctggtcctgctcctactaatcggactattactcc

SEQ ID NO: 184446 - DNA, 314 bp, Zea Mays
agctcttttcaaggttagtaaccaagcccgaggcgcatccaaaggcgtgtaggatgtctttgaccgccacaatttcatccctagaggggttgatgaagatagcagcatcatcagcataaagagacgtcctaagattggttgtgttcagcggaaggggggagaggattccttgtcgggttgccagctcaaggatgcgctgcaccgggtcaatggcgagaatgaacaacataggggagagggggtctccctgcctcacccctctcctatgcaggatacctggcccttgggtgccattgagcaaggccctagaagag

SEQ ID NO: 184447 - DNA, 890 bp, Zea Mays
gaaaaagaggacttacagtgagtcaattcttgagcaacctcccaaagatactgtgaaaatgaaaagcaaggttcgcatgcaagaaagcgagcaaaacaaacacgacaccagagaagtttctgtgaagagtttcactcaaaacgttgttgacacacctgtaaagaaaaaaggcaagttgaaagagaataaacagttgccttatgtggccaaggatcattttgtaagcagtccaaaatctgtgaaagagcaagaacaagagttggtacctttgcccttatctggaatcaggaagagttcatttcctaaagtggacagtgaaattgaaaagaggtgagtcacttgtgtataaagtacttggggattgaatctccagttcacatggaatatgactgtgtgtgcaaaatttgctaacacgcacaagttccctgcaatcagacctgatgagggctttggaattttgtttgtttatcaggtctggcgagggcattgaaatttctgttttttatcatgtcacagaatcctcccatcttatgttatctcatgttttcatcctaatgccatgtgtgcacattctatatgatgatgaaaacaatgtttgaagtccgcatactgttatatgactgagattttccatttgcagggtgattagcatactgggaaatgaaatctcttcgttgacaataaaagatgtaacaaggaactgcagtttgccatcaactcatgtatactctggcagaccaactgacaagatgccactaggaaaaattgagcgttctgttcaggtgcttccttgttccaccatatacagattaaaatttatgcctgtcattattttgtttgacattttgaggatgtcattttaggctgtagaagctgctttaaaaaagctg

SEQ ID NO: 184448 - DNA, 779 bp, Zea Mays
cacgacatccgcaactgcacgccatgggagagaaagaaggtgcgagacgtggagttatcaatctctcgaccattatcgcgctgaatagcctggatggtgcgaccgaactgagtcaacacccacacaaagaagtgagaaagactgttgaaggtatcaggcttacgtcggagaagaaaggtccacaagtagtgagagaagtcatccaggatgaccagatagtacaaaaaccggagttgcttggaataggggatgtccaaaggtgacggtggatgcggttgaaggggcgagtagcgtggaacatggaagaagaaaatggtaagtccgtgtgaggtccatgctggcaggcgtagcaaagcgaggtagcattgccacaagggcaagggattgccgaggtggatgagagtctggagaggacttcgtggtcaagatgacggtgccaagtggaggtagaggcagtggaggcgagggcatagggtatggaaatgtgggcggaggaaggaggggcgaggaagcgaatgggatataaggggtcggagttgtcgcatcgaacaaccacaacacgagtggtaaggtcccgtatggtgacctcccagggatcgaactccttaggataacaattgtcagttgtgaagcgacagattgagagaatgttctgtatgatgttgggggcaacaaggatgttgaggtacaaaggttcgggaaggaccgtgtcacctactgaggtgacagtcagagtcgacctattactgacaatgatgaagggaaggtggggctatgag

SEQ ID NO: 184449 - DNA, 2003 bp, Zea Mays
cacgcctccaggtgcccaggtcttcgtaggtcccttagctcggccttcgtcagggttcggggtccttcgctggcgacgatcacccatcaggtatcccttctctaccctccccttcgtcttgtgcgaaactgagcacccgaaccctaacttagctagttggctagctgtattcggatctgatctgactacaactgtatatttgtctattaacttcatttgtttttcaaaaatcattgggtgtactgtgtacatacatgtggacggctggacgcccatgtcctttactgggcccgtccctgcttgatggcgtagagctgctcgcccagttagcttgtcctgaagtcgattgggagcaatatttacttatctgcaatgcttacagcactactttagcttttcagagttcatctggatttcgagctgacgggataggagccatgggaatggatggatgtgttggactatagcagattagtcctgcggtcacttggaccagcgctgcacgcgatctagcagattagccctttggtcactactcactcgagaccggcattgcacacgagccttgtgccactcatggatttacgttgctgtgcatttcctgatatgggaacacatatcctgtatcttatttggattctgtgttctctgttataacttgtcaggaacatattattccatagtatgtctattctgttgcttaacctcgttactgaaacagggccattgcggtcgcatgttattgcacattgacacacgttccttgattgataaatgtgtttttcttttctcaaacgacacaggagagctgtttgttatttcattaataagagaaagagaataaggagaggccagtgaccaactcccgtggctgtctagttacagacacaccacttacgatagagctttaacgacctcatgagtagttcatggagagctaacgcacaaaaaataaactactctcattttccactgcatctaacactactgaaatacaagacctggcaccctcaaacacacaagcattgctatgtttacctatcccccaagccacaaggatgatgaagggtattctgccctttctttctgtcctttggaacacttctggtcacgccatgccaccacttgtagaaacgagtggcagcaggttgaagattaggggcatccaaactcaaatttcggaggatgaacacattgccaaacctgttttattagacatcggaaaggggacaagcagtgggatgtggcagccctcttttagctaaatgacctgaagtccataacctattcttgattgccatccaaataaagaacttgcagcagagcggagccccatgatttccagacacgtttccatcgtgtaaatttgatggcactgaggaaataggcattgtaagcacacttattagtataggaccctggctgagttaggcgccgtatgtgttggtctaatacatttttctgcagagtcaagttatagcagatcttatagcagaagatattctgcgagaacttgtacagtctgtgctctttttttgtttgttggttacagttacggatatgatgaatggtgtgcctattttgttactttcatatcagtaacatcatttgaagctaatctggatgcttagagagatttttttatgtaatgatagtaccacacaacagcaaaactggctattttagttttctcaggatggggaattatctgtttgtttatttgcgtactatccatgcgcttctgattcacaacatccttttaggtctcctttgaaagaagaattaggcagcacatctttacgaatcgaggatgtcagtttctatgaaggacctggacccagctttccgtggctctggacaaaaggagtatccttttcaggctttcgtttattttgttacacaattacattatgactgttttttagcgtttgtcaccttcatgctggtcgaatctctaacctctctcctagttattggttagtgattttgggcgatgacatgag

SEQ ID NO: 184450 - DNA, 492 bp, Zea Mays
cctccacattaacaagcaaacttctcatataaagaatccaccatacagtagtaagttagtaaccaagataaaggtcaccacagaacaacaaaactctgatggctttattggcatatagttggatgtaaatttgtatcatttcgccaatttattttttgtgctaagtttcaagttggcacaacaatcagatccaagccagcatgataaggagggttgagtaactatggattgctctaattaagctttacaatatgcaggctgaacctccaatttatcacaacagggagtggaatggcacttggtagcatcagtcttcacatgacagttagctttagcaacaaatctactatatggagtgcagataaagtgtgcatcgttagatcatacttcaatgaccaaccatccaaaaaatgtttttagacattgggaccgacaattagggtctatttggttgcgtcccaggcagctttgcgccttttcctagcaccacac

SEQ ID NO: 184451 - DNA, 717 bp, Zea Mays
aaaaccgcctagcatgttcctggccctgtaggagtctgtctccgacctccgcgagaaagcagtcccgttcgtgaaacatttcttctatagttggtgtagctgctgctccttgctggtatgggatgagtggaggggggtctctgtcatagaccactttaaacggggttgtcttcagggctaagtgataagaggtattgtagcaatattcagcccaagcaatccagtcaacccaggccctcggacgatcccctgtgatgcagcgcagatacatggcgatagttttattgaccacttcggattgcccatcagtctgtggatgaaaggctgtgctcatccttagtttgacgccggctagcttgaaaaggtccctccaaatgtgtcccgtgaacactgggtctcagtcactgactatagagcttgggaacccatgcagtcggacaatctcatcaaagaatgcccttgctactgtggctgctgtatatggatgactcaatggaatgaagtgggcatatttggagaatgatcgacgactgtaagaatgactgatttgccatatacctttggtagggcttcgatgaaatccattgagatgtctgaccaaatctgagctggtacctccaagggttgcaatagtcttgctggatggagtgtttctgttttgttttgctgcaaactgcacaagaacgaacccaatctctaactagtgccctgtccccg

SEQ ID NO: 184452 - DNA, 463 bp, Zea Mays
cgagatcgtgttacaacaggtgtgtgctcaaaatgagagagggtcctgcccttttatagttcaagggaatgaccttacagatgggacttgtttcatattggcaagggcgtgatcttttgtcttcggtagtcctgctgagtagttttcctggcgtcgcctttaggctcatgcgtagtcgtacacctggcatggcgaaccaccttatccgcctggtatacaggaccctctagcgagtctgactctgaggtccccatagcgacgcttgatgggtactacacggcagagtcagggtatgtttggggccgtgcatggcgtgaccttgcctctttgtcagaaaccttgtgtcacccttccggcatgcgtaagcatacaaccggtatggtgtattgctccgtcctgtccggtatgtagattactgtagagactccggtgcttaggtcctccatgactagggtcggttgga

SEQ ID NO: 184453 - DNA, 866 bp, Zea Mays
gacgaacttgagcggcagtgcgccgccatgatcgaccagggcatcgtccgccgcagtgactcagcgttttcttcctcggtcatcctcgtcaagaagctggacgggtcgtggcgcttctgcgtcgactaccgcgcgttgaacgcgctcactgtcaaagacgcgtttccgattccggtcgtcgacgagctccatggcgcacgcctctcaccaagctggacctgcggtcggggtatcaccaagtgcggatgcggcaggagggcgtccataaaacggcgttccgcacccacgacggcctctacgagttcctggtgatgccgttcgggctgtgcaacgcccctgccacattccaggctttgatgaatgacgtcctgcgtacctacctccgccgatttgtgcttgtcttctttgacgacatcttgatatacaacacctcatgggcggaccacctccggcacctctgcgtcgtcctcaacaccctgcgccagcaccgactctttgtcaagaggtccaagtgctcctttggtgttgactccgtcgcctacctcggccacgtcatttcagcggctggcgtcgctatggaccccgtgaaggttcaggccatccacgactggccccaacctcgttcggcgcgagctgtgcgtggcttcctcggtttggcaggctactatcgcaagttcgtccacaattacggcgccattgcagcacccctcacggcactcctgaagaaagaggggttcatgtggtccgacgaggcaaccgccgctttcagtgccctcaaaagggcattgacaacagcaccggtgttgacattaccggacttcaccaagcccttcgtcgtggagtgcgacgcgtccacctatggcttc

SEQ ID NO: 184454 - DNA, 278 bp, Zea Mays
ccgagtctgtggcgcaggcattcttcaccgacatcgtccgtctccacggcattccccagtcgatcgtctctgaccgggactcggtgttcacctccaacttatggagcgagctgatgcgcttgagcggtaccaagctacagatgaccacggcatttcatccccagtcagacggccagtccgaatcggcgaacaaggtcatcatcatgtatctcaggtgcttgacgggagaccgacctcgcgactggctgcgctggctcccgtgggcggaatatatcttc

SEQ ID NO: 184455 - DNA, 453 bp, Zea Mays
caagaggaggaagaaccttttaacaaacttccagaattggatcttctgagctcaatgtatctcgaagaccttccagctgtcttggaaaacttgctatgctgtgaccatcttatgacagatgaattgtgagaatggtaagggcaataaatttttatggcactgtcttagcatttagtttatgttaggattactcagcctcttcacttttgcttgctgcagctgcttggcccagatctgctggtctaagcagctgcagccccatatccttcaatatttttttgatagctcaattgctttgcgggcgtgtttgctttgaagccttaaaaagctgccagcgccaggcagcatcatctgggatctgattatgctttcttgatattgcctggtataagcaggtttcacaaggcatcaaccaaacaagccctggctgctgcatcagcagcacaagctaca

SEQ ID NO: 184456 - DNA, 358 bp, Zea Mays
aggatagctttgcttgagaaggctagctcagtgagtgcccctgcacctgcgcagtgtgcactttgtgagggtttgcagtctgctcttgagttctgcagacacgacaagacaagaatcgaggaagaaaacacataccttcgatctatcttgagttgggtgtcgtgcagtgatcctgagttgggcatgatggtcagtcagttcaagaggggaactggcggaccggggttaggctttgctgctaaggatgggagtgtcacttgctttgggaaggttggtgagggcagtggtttgacaccttcagagaaaccttcacccactcccaagcttatcaaaaccacccctgctaagcctatcaccc

SEQ ID NO: 184457 - DNA, 485 bp, Zea Mays
gatgactccacgatgacatggcgagcgtgacgaagtcggaggggaggctattggatgtcgaagttgataacagaggcgagatcgatgatcaagcctcacattttgtcgagcaagtggcacacgagacgcgatcgggaagagttcgacatgtcaattcttgtgaagatgcgacatcgacgacaatcaactcttgacgatgaaggtgtatgacgcggagttagggaccgtcgcggccacaacagtacggcaggggcgtggccaaagtgcggctcatcggagtaccatgacacgagtagcgctgacgtcgatggtagagtctgccacccgtgctggggtggatcgggcgcatacgcttttcgtggatgcgtatcatgacctcggcgcgcagactgcccccttcaacaaatcagggaaggaggtggggacccgcttcttggggtggctgcaagatgagctagagtcgctatcgtccatcatgacaggcc

SEQ ID NO: 184458 - DNA, 554 bp, Zea Mays
aaaaaattttgtgttggcatctccgtctctcaagtaatgcaaccgggaacgcaaacgagcaactgtcctctccaaagaagcaaggacaaggcagtgctgcttcaatttctgcagcagccatacttcttcagtagacagcagcctgctgtcctgcgccacctccaacctgtgcagcacctcgcgagccagccccagctgagaattgacatttccaaccgccttatgcccccaagactgtaaccttcgtgccaatcttttaagcttcatcgacaccctctccaaagggcaagaagaacggaccgactgatcccaagaagcagcaacttcttccaaaaaacccgggagcttaggccagaagctctcaaaatgaaacctacgcctccctttaagatccgcattgagcttaaggatcagaggacaatggtcggagactccagaggcactgctatagagaaaacaatccgggaaagcctcctcccaacatgcagtgcaaaaaacatggtccagcttaacaagggtgggaactatcctctgattggaccaggtaaatcttc

SEQ ID NO: 184459 - DNA, 612 bp, Zea Mays
gtgatgtttccagcctcaaatgccgggtccgttccgtcaagaaatctgagatggacaaccccgttgcaatacagacgatcaagggttaccttttggtggccagccatgataaaattcttgtcttcaacacatcgtctcagtattatgggagagtcggtgcgcctcggccgctgtttgccacaagcatcaaggacatcaaatctgtgtttgcgggttctggtggcgtgctgcccaccgagccagctgggaagcctgttatcgcggcagaccgggagaagctggtgatcttgggtcttggggatggccacattgctatctataggtctaacttcccggtgtacaagccagagagcaatgctgttgtatggagtggaccagcgctgcttttcctcctgttcttgatcggcatttggcaagtatacgtgaaaaagaaggattctctgggatggacaccagaggagacatttaacacctctgtaacagcaccaacggggagccttttgaatcatccaactagtgatcgagcctttgccgacagcacagcaagaagcggtgaccggggctatgttgatggaacatcaagagccagtgatagaagctatgtggatgcca

SEQ ID NO: 184460 - DNA, 896 bp, Zea Mays
tggtgtgaaggatccattgcctccatttgagcctcccgatttgatccggtctcagccattaaatatttccacagacattaagcaatctgctgcgtgctcagaacccatcattagtgttggtctggtgaagaccaaagatgccggttcgtcaaacgagtatacaggcgatatcaacttccagtcatgccagccagtagatgagtcacctggaccttcgccatacacatcaccggaggatgggaaatccggtatcgaccaagtgggaagtacaaatgaatcagatcatactgacgaggctataccaatagatctgcaagataatagctgtacaagagcaagtcggcgaactgaggttgctgtgcccttgcggcggttgagaaatcttgactcatcgtgcgagccatctgaaaagaagtgcaaatttgttgtcaagttaggtgcctcggcagatattcggcggccagaggatatagcatctaactctagctcagtttcagatccgatggcttcaaagacttgtcctgtgtgcaaagtatttgcttccacttcgaacaccacattgaatgcccacatagatcagtgcctttctgttgagtctaatactgagcttgttgaaactgtccttgtaaagcctaaagtgaagccaaggaagaagcgattaatggtggacatatacaagactgctcttccatacacccttgaggatcttgatcggaggaattgcactaattgggcagttgagttggctatgtctccagtgagcaaagaggtttgcactgagaacggaagcccagaagtggtatcatttgacagaagagatgatgaaagagaaggagatgtttatgttgattctaatggcataaaaattagaattttgtccaagtgtaatgatgtac

SEQ ID NO: 184461 - DNA, 543 bp, Zea Mays
gggcggagcgaagcggtggcccgtagcgaaggttgaggaggtccttgaaacggcgccatgtgggaatgccgccctcgtcctcctggatttggatgtaccacaactgggcgtcgtcttccaggttgtatgaggccatccaaacattttcttcctccatgatgcgatgctggtggaagtacaactcgcagcggttgatgaagatgagagggtcggacttgccgtcgtaacggggaaaatccatcttctgaaatctcgacggacgatcgttatggtgtttgctcgtgctcgggcgaggtccgttggaggacgacgacgagcgatcggtcagagcctggatcgctgcggcgttggcctggacggcggattgtagggtctgcatattggccatgagtgcctccaaagtggacttgatgtcgtcccctgtggtactagtggtggccggtgatgtcgccaaagtggcggacggtggagagagggcggcggccggaggcggtgtagcagcggttggtgatggagaggaagagctagcggagtaggatcacc

SEQ ID NO: 184462 - DNA, 639 bp, Zea Mays
gccgcacggtcgaacaatgctggcaatcgtcacttcagctagacttgtttacctgctgaacataacgaaaagtttttgtggcgtgtcggacacacctacacggccgtagatggtagaaacaagcagtaaaacagcagcattgtccaaaagaaagccgctgaggtcaatgctgatgagaacgagaacccaatccgagcacacaaggagggtcaccgattaggttagcaccccaaaagcgagcggaaggcaagtgaggcaatcaatctatcggccacaataagaactgattggggggatctcgtccgaggaagggcgacttttttgggtgggtgggtgtggggggtttgattcaatttctcaaccccaatcgaggatgagggaggggagagttgaaaatcgggccggagcttaccggatttcctccgcgcgacattaattccgcggcccgaccaggtagcaatgaggcgggcaggaatcgaaagctgcggcacgggtgggaggaggaagggcaggcggcgggcgtgctcagcagcggtgatggtcccccctcgggagtttggagatgatgccgtattgccgtggcccgtggtggtgcgctatgcttttgagacacgaggggaggggggcgtgggagtctgg

SEQ ID NO: 184463 - DNA, 400 bp, Zea Mays
cagactctgccgagtacgggtgcgccagtggtataaagtggcagtacttgctgaaacggtccaccaccgtcaaaatgacggacttgtcgcgcactttgggcagcgcctcgatgaaatccagcgttatgtcggtccagacactgttcggcacaggcagaggtatgagcagtcccgccggattcaagtgttccgacttgtaacgctggcaaacgctgcactcccgaacgaaatcctgcaccaattgtttcatgttagggaaatggaaatctcggcggagtcggtgcagcatcctctgaacgccctcgtggacgtcctcgtgcaccgcctggactatttcctggatcagagtggcggcaggcggtatgtagagccggtccttgtattggatcatgccgtcaac

SEQ ID NO: 184464 - DNA, 2145 bp, Zea Mays
atctgcttgactgctcttaggtgtgactttcggggatcatgcatgtagagatagacctaccggacaacatacacgatgtcaggtagttgaaggtgagatactgaatagcactggcaaggctgcagtaggcagtgagatcgttgacaggggaaccgttgccatagaccttgacctgcgtgtccacctgtgttgtgcaaggcttgcactccagcatcccagcacgctccaggatatctagggtgtactgatgttgctgaagaatcaagccattcggcgatgctcaacaacaatccctagaaaatgaagaggacccaaatccttcatggcgaacttgtgctaaagggttctaatgatccggtgcagtaggcccgaggaagagacaatgatcacaatgtcatcaatgtatagaagaaggcatatagtgttactaccgtgctgatagatgaacagagaggtgtccaacttagcctcagtaaaacccagggagagcagatatgtggcaaacctactataccaagtatggggagctcgcttcagactatagagggacttgagtttgcagaccatattagggtgtgcagtcaacaaaaccgacaggctgactgcaatagacggtctcaatgagagtcccatagaggaaggtattctagacgtcgatctgatgaactggccaagaacgagagagttagtgagagaacttggacagtagcaggcttcacctggattgaacgtcttagtgtagtcaaaccatgacgttaaatgaagccatggagaaaccaaacgggccttgtactgatccatagagccatcagccttccacatatgtgtctagactcacttgctagtcatcacattgtgccgcctaggggacgggcaccgaatcccaagtgtgattggcaaggagggcctagtactcttcctccctagcgtgatgcaagtgagaattggcgagggcactatggacagaagacgacaaataggagaccgacgtggacgtggtgagggttgcagtgaagaggcggtgatacactgctggcttggtctgagattggggcggtgcacccacccgcacatgtagttgataggcatgcacatggttggcatagcgaggtgaggccggtgccggtgaggccccattggcactgctaagtacgaaggaggcgtcaccggagccgccaacggtttagcagaggtcggcaggggggcacacggtcctaccggttgtggtagggcaacctggagggagtccaggggcacatgagccatgaaaggcaccggtgccataggcaggagcggcgtggggaaacctgcaaggggaaacaaatggtggatgactagatggagatgcagagttaggatcacgaagaaaattcaactcgggaagggagtcgatggtgcactgggagggagtcgaaaaggggaaatccgtcttgacgaagatgacgcgacgggagatcaagagaggatgagtggtgaggtcaaggcataggtaccatttgtgattaggggagtaactgaggaagacgtagctggcggagtgaggggcaagcttgtggggagcggtggcagaaaggttggggtagcctttctagacttgaccatctgctatttcatttgttttggcccaccaatcattgaaggaaaaattttccagttgaggggtcaatcctgaaagcctactttctggaagaggatataccatacttgttgagcaaatacacatgagtaaatgatcaattgtttctccagcctggtcacaacatgcagcggtcatggattttgagttaccattcttgatattgttattgctttattacttattagtaaataacttgtgctctaaatgtgccgcccaaactgttgcagaagcaaagctgtttttcgtccactgacaattctctcaacttagatgtcagacttgtaaatgcggtctcaagtaatgatcctgatgtcatcaaatttctgttggttatggctctttgcaatacagtggtccctatcaaaaggcaagtcacagtttcttttcgttactctgcatggtattaagctgttatttataaaattttcatactttcagcaatgatggtactgtgtcatacaaagcacaatcccaagatgaggaagctttagttaacgctgcagcaa

SEQ ID NO: 184465 - DNA, 544 bp, Zea Mays
gaaagaagcaacaacatataaatgatagtaccaagtgctgcagctgcaagcagaggcgaatagcttcatatataagtgaagctaggagggcttgcaggcttccacttttgataggcgcatctcctgtgtgttacggcgtgcctacaatcattaggaagaaagtaatgacggattctaccacgagagagatgacctaaaagtgtggtagtatcggcatggtattggtgactattgatagtgtgatctatggcgttgatggagttggcacgaaagtgtgccagctcaaatgcactgactaatttatgctttatacccagtgcttggacgcatggtcttgctggacgacctgcagtgggcgtgcacctattggtattccagagctgtaacgagtgtatattgaagtaaatgttctgtacaatggcgctgtacataactgtaatgtcactggagcatcacttagagaaagtatgttgaggctattgatttcaattgtataacgtgtactatagttttgtccaggaacatagagaatgcatgttgaggc

SEQ ID NO: 184466 - DNA, 478 bp, Zea Mays
cttcgtcaacgtccgacgcggaaatccggatcacaacgagctgcgcggaatccgcgggaagctagccatgaaccccacgatcgactcagccataagacctacgttcctcgacttctttgccctttcgccctcggttgtgattgcttaggtagccacgggattgccagggcggggaatttggagccgtcgccatcgaccgtcgtggggagctctgatttcggccggggttgcactggcgtcgccgcattggactgcagggcatgtgcgcactgcatctccgaggctcggacacctggcgtgcgcccaattatcgcgccggtgagttttgccgcggctctgctccgttcgtgttcggcgcctcagctcgtcaccataggtaagccccccaaaccgttgcttacgtttgcgcaatagggagaaccgacatgggtttgcataatttcgtctttagatgcggggattgggttgccattgcggc

SEQ ID NO: 184467 - DNA, 320 bp, Zea Mays
cccgtgcggcgtgctgcggactccgagatgaagctgtgcgaggagcccgagtccaggagcgcggagaatcggacgctgccgatggtgacgccgatctggagggtgtcgatgaagcggaccccagcgagagcggagagggagaaacacggtgactcctcggtggatgcccctggtgcggcccatacggcgaacacaggcgcctccttgtcgccgggatcctccgctgccgcgttgccgtcccgcgcgacgtcatcgatctccacaccattgaggaagaaaaggcggcggcagaatctgttgtggccacgggtgaacttctc

SEQ ID NO: 184468 - DNA, 389 bp, Zea Mays
atttgtagtttataggataaaataaagtggtccaatcacatattttcatccaaagtaataactaaattgttctatcgagtacgttcagtgtgtccacagctccggccccaagaatttctgcagctagggttgagtagctccaaaaagaatcttggagctgagctgtgccaaataggcatttattgtgtctctgatcattaatgctatacttacctttaatctatttgaccctgctccagtggaagcatgctagcagctcagtgaacaaccgacgaggaaaaaagaaccttgtcttatcctcatggggtgatgagtcaacgctttccgaaggctatgttaaccctcactatatttctgattactataggtcatataatgagagaaccaac

SEQ ID NO: 184469 - DNA, 331 bp, Zea Mays
attcctacggtccagagaaacagttagcaggtacttcaaccttgttttagatgctctatgtgtcatgtcacgtgacctcattactatgagaaccacagagacacatccaaagatatctagtagcccgggaagatttcacccttactttgaggtaacatatctcacacacacatatataaatggaattgatccttatattaggtacttacaaatacctatttttctgtttgatagagatgtgtaggagcactcgatggcacacatgtaccagcatgggtccccatttatatgcaggataggtttagaggtagaaaacactacccaacacaga

SEQ ID NO: 184470 - DNA, 284 bp, Zea Mays
agatacgtgtattttgtgtagtgtggattgattttgagtgcatggtcgcaagaaacgaattagtgcgcatatagacgaggaatgagtgggatgaaatggtgacatgccttcgtagtcatcatgtcgtgtgttcgtgacctaactgaaggtcgtagagaaaggtcgattacatgtgtgttattattgtcaccttgtggttctgtatgaattgcaaggtgaagtagtaggctctctgtgtgatgctagatgtctaggtagacgttcgtgaattgtggtgctcggac

SEQ ID NO: 184471 - DNA, 385 bp, Zea Mays
ttctcagaattagctcaatgtccaatcaatatacaatttcttcaacatacacatgcatctgagcattttttaccgtttctcattcagaacatagaagatcgcactttgcagaaaccgacagtaaaaaaccttatggaggatgaattggaaaaattaatgctgctgaagaaatttccaaatgatgaggttcagagaagaaaagccgacctgggaattgatgtctctcttgatacgatttcagagcatacaaataaatcaacagataactcatatcaccaggcaggaatctctacgccttcaactccatcaatggattatggggttttgaattatactgaagaatataatcttgaatctgtgctggtgaattttctaggtgaaatat

SEQ ID NO: 184472 - DNA, 752 bp, Zea Mays
cgacattgaccacagttccattcgtaacaagcttaaagctaaacatcaggggatctggcaacagtatgtccattatagatgcttgtagtgccgtctggatagcatctttaatattcagctcacctgagctatttctcccagagtgccatttcacttttatttttgaaatcaagttgttgatagacgcatttagctctgccttggcattcctttctgctatggcggcggccctggatccaagaggttcatcactactacttgcctttacaaagaaggaagcatcaagaacaggcaatttgaagttctcaagaggtatgagaactctggcagagtagtcccgatcaattctagttttgtgacaagcagcatccccgtctgaaattacttcttggtccacatccgtgtcatccaaatgcacagcaacatcaacataaaaaacgacatcagtaggattgaaaagctcaagttccagaaggcggagcccccagcttcctttatagggatcaaccttcaataagtttatgtctttgccactgacaggttttaagtgtgtttcagtaaatcgagcaggtatttccatggacaacaggcgtgctcttacaagacgcatgccctgcacaacacagatattcaagggaacaactaggcgtcttccaggtagaagagaaacatctccattctcaagattcgcagcaggacctgaagtgtgatatacaaatttagtcctcaaactacaaatgacaatatttttg

SEQ ID NO: 184473 - DNA, 572 bp, Zea Mays
aatggttaaattctaaatttctcccttctaaacccatgaaccccttttgcaggttgcagcctattccaccaccgacgctgaaggccatacgcccccaatcgaatcgatcacatctatgccgtcgatcaccagaggtgggcgtggggggctcttctccacgcaccggggcgcgctcttgtggctccgccgttgccaaagcccactcttgtcgacactagccggcggcggaggccggagcgacgcgccacatctgcccgtactcatcgtcggagctggccctgttgggctcgtcctctcattcctcctcaccaaattcggtacggacctcgtgccccccttgctcatcgatgttccaattcgcgcttctgagttaggcagtagcgttgagcggagcaaagttcattgagggaatcagacaaatgtgctaaaacattaggacctggatcagatacagtagcaactgctactggaatctatgcagtagctgtatctgtttcattcaaaaggccatgaatggctaggatcaaagccatatgtttttttctctttccctccccaagtcttactgttag

SEQ ID NO: 184474 - DNA, 1442 bp, Zea Mays
ggaactgaagcagaaaatgtttatcatgttggccaagtggtcaaatgtagaattatcaatgtgatccctgcttcaaggaaactaaatgttagttttgtcatatcccataataggtgagttctctgcatgctcttttgttctactattttcatgttctattaataatctgcctttatttgacatgatgagctgtaattgttgccttaattttgtagacgtattcattgaagtttattgtttcatagagcatatttctgtcatttacttgtcatcttgtttttgaacttgtactgaaatactgaatatccagaatggtcattttcctgatgtgcagatttatatttggaaatactgaaatacatgatgagctgtaatcgatgcttgcatttatttttgccacctgtaggattgctccaatagacactccaaagttgggcagtattgtctctggtgttgtggaacggcttactcctgcagctgttgttgttagtgtaaatggcttctccaaggggacaatactgaatgaacatttggcagaccatcatggtatattctcatctgttatatgatttgcgttgcatttaaacattgcatcgatagttttcccgtgtgggttcacacgcatattccttgttgctgttaaatactttaattgtttatattcatataacattactgctctgctgaccatggtctgttttttcaccactaggtcaagctgctcagttgaagaatgtgttgaaacctgggcacgagttcaaccaactcttagttctcggtgaagtcaactaacttcatttgttatcaatgcactttgaaaaaaaaacagaacaaccctttttctgttaataaacatttgacgcattggacatttttacacagttatgttgtaaaaattatagcaaaaaatgaatctaaagtcactacgtcatgaccagtacttttttttgaactgatggaggatcaagcatacactgtctgaagtgttgtatatctagagggagtaccatactaccacgtaacagtttatgaaaggatgtgcagaatttcacaatggcaagtaggaagttcgctgttttgcatgcacacttgtagcgtgtcatggtctgtacattacctcacgatacaatcagttgtttgcactgcttaatgatgatgcaccttttgttgttgtcagatggatatttgatcacattgctaatttttccaactgattttctaataccggtctgcagatactgaaggtcaaaatttagttctttcggcaaagcactcacttataaattgtgcaaatgacattccttcagagatatcacagatgcatcctggtgttgtagttcatgtaatctttctctagttatttttacttagcctaatgtgagcaactgagctgacatttaatttatcttagggttacatctgcaacattattgaagctggtt

SEQ ID NO: 184475 - DNA, 399 bp, Zea Mays
cgtctggccgtccgactggtggtggaaggcggaggacatgtgcagcttcgtgcccatgaggcgcatgagctcgcgctagaacgtcgacgtgaacactaggtcgcgattggacacaatggactgcggaatgccgtggagacgaatgctgttgggtaaagaaggcttgcgccacggacttgacgttgtacgggtgtgccaaggggatgaagtggaagtacttgctgaagcattcgacgacggagaggatgactgtcttcccgtgcacccggggctgcgcctccacgagtccaagccgatgcctacccatacgatggcgagcattggcaactgttgcagtaaaccagctggatgcaggtgttccgacttgtacatttgacaaatcgcgcatgcccgcacgaa

SEQ ID NO: 184476 - DNA, 359 bp, Zea Mays
ccaatttgggagctgtcctgcaattttgtccacaattggttgcacttgctctttagcaagcatgtaaagaaatggggggagaccaagatagaagcaagggaaataagatatctcacagggcagcaggttttgcaccaccataatgtcatcctctgagcactgaataggataaacatttgatttattctcattattgtgtagacccgaagcttctccaaatggacgcaggatatccattgtgatcgaaatgtcagatgcagaagggggaagcaacaacaccacgtcgtccgcatacatggagatccgatggagcctggatggtcttgacagtggctgcaatagtcctgcatcttctgctt

SEQ ID NO: 184477 - DNA, 600 bp, Zea Mays
aaactgaatatgcagcatcactgtgaagaaattgagaaggaaatatcttctgccaagaaacagttagaagaacaatcttgcattattgcccagtctcaagctgaacagaaacaacaatctggggttataacaaaattgcatgcaagaattgaggagctagagcatatggaacaagaacataagaagatgcaaagacaacttgatgcatacaaagagatgagggacaacatgttaagagatgctcactgcctaaaagatgaaacttcaaagaaggaaagcaccctgcaggtgaaattgagggaggcattaagtgctcttgatgaagcaaactgtgcccttgctgacaggaagcgtgagctgagccagttagaaatcagtctccatcaccaaaaggaagcgattgagcatttggaaaaactgaaagttgatatggaagctgaagccaagagctatatgtgtgacaaccgtatcctgaagagagatctggatactgctcttactgccaaagtggaagctgaggagttgcttaggcaagaaaaaatgcagttaacatgtgctcttgatgaggcaaaatataccctttctgagaggaacagtgag

SEQ ID NO: 184478 - DNA, 597 bp, Zea Mays
atctaacggtgcgcacctactccgatccgggccatcgatccaagactctacggtcagatcaaatccaccgaaccggtgtccagtcgatctaatctgggccgccgatggtcagatcaacggtgaccgtgcgtcttccttctctagactccaggccatgacaatgacggtctgcacgccatggaggtgccatggccgagcttcccagtcacgtcctggtgactcgactccaaccgaaacgaggctatgcggagccatgatcaataagggaccatgtaatggggatcttacctcattgctggatgattgtgactccgaccacgccacagtggtgtcacgacggaatctcaaacaccggcgacgaattccacgaccccttcatcctactgctatcctagctcgacggagcttcagcccccatggcggcgcactgcgtagaccggcagaagattcaccagcgcaggccccaccaatcacccgatgcacacaacctaacctcgtgaggtccatcccaagtaggcgaccaaggtacgccgagaacgagacaatggcaaactcgagttctgccgctgccattcccccacaacacgaactctcgcc

SEQ ID NO: 184479 - DNA, 281 bp, Zea Mays
gccgcagttagcaataggtgcacaacatagccaaccaacaccccacaggcgaggccgttcgccgtcaggaatatccccctagggtcgcggtaacggcacgagagggcggggccggggacgtgcgcagcaaccacgcatattttactgcctgtttcatggcgaggattgtgcgcactcgacaagagattgcccggaaacaaaggccaccagggacaggatgtctcgagcacagccagctgacaaccagagagtcgtcgcgcacacataccaccaccaacaac

SEQ ID NO: 184480 - DNA, 660 bp, Zea Mays
caagttgcacagctgcggacgaagtcttgcaccacccggcgcatggcggggaagtggaagtcgcggcgtagtcgatgtagagtgcgttgtaccccttcgtgatcgtcctcgtgtatagctgccaccagttcctgcagcagcggcgagtccgggggaacgtacagccgggcggcataagccaccatgttgtccaggagggaccacggcgcccccctggtgcctgcggtaatctcatcatggatggcgacgagagcggggtcttgaatatgtgcttgacaaagacggtcgatgaagtcgaagcgaggtgccgagagagacaagactgccccctcctcgcaggtatcatgccgggacagggcattggcgacggtgttggcggtgcccggcttgtactcaactgtgaagtcaaaaccgaggagcttgcccacccagtggtgttgtgggatcgtcgcgagccgctgattgagaaggaacttgaggctgtagtggtcggtgcgaacgatgaacgaacgtccccataggtatggccgccaatgtcggacggtgtggaccaacccaatgagctcgctctcatatgctgccaaagagcggtggcggagcgtgaccggcatgctgaaataggcgatcggatgctgatcttggagaaggactgccccaaac

SEQ ID NO: 184481 - DNA, 567 bp, Zea Mays
gcagtttatcgtatactgcgatatttaaagtcttgtcctggaaagggaatattctttaagagtcatggtcatctaaaggtggaaggatactctgatgcagactgggccagctgccttgatgatagaagatcgacttcaagttattgtgtgtttgttgggggaaatttgatatcatggagaagtaagaaacaatcagttgtatcccgttccactgctgaagcagaatatagagctatgtcacttatgttatgtgagatgatgtgggttaagaatcttctatcagaattgaatgtattgagaagaagtcccctgaggctatggtgcgataacaaatcagctataagtatagctaataatcctgttcaacatgacagaacaaaacatgtggagattgatcggttcttcatcaaggagaagttagatgatggaacattagagctgagtcatgtgtaagttcgaaggatcaaatagctgattgcttaactaagggtttaggagtaaaagagtgtcatatattatgtaacaagatggaaatgattgatatctatcgtccatcttgagggggag

SEQ ID NO: 184482 - DNA, 359 bp, Zea Mays
gttgcatggcccttctgataaaagatgccaatccaaataaatcccatctgctgcagatagaggaagtggttttagggagcaaagtacttcttctatagggggaagcatagatcgcattgctttatcatcatgtaaaataggtgtaggtagtgatttgaatgtatcatcaactagagccaattcagagctaaccactgattcatagaaatgttttgcttgatcaaagtcgtctttgaatatttcctcagatgtattcatctcagctttctctgactgaataagaacaagtgacttaaaggcatccttggaaggaaagtcgatgatctttacttcctcaaagagaatgaagcaaggaaaat

SEQ ID NO: 184483 - DNA, 421 bp, Zea Mays
acatgttctgcctagcgacatgacacgtgtaatgacagttaaaattctaaaaacaaatatgtaatacattttttatttatttgagatttctacaatcactgtttttataggcactattaatgcttaaaattctatttcatcttaaatcaccatgtacctaaaacttcttttcatggagttcttggttttaatatggtatgcaggagctatggtcattgttggagttcatgatgcctgatatatttgctactggggatgttgatctgaagaagctgctgaatgcagaagatcgcgaactaatttcacagataaagtccattttagggccatttattcttagacgtttgaagtcagatgtaatgcagcagcttgttcctaaaatccaacatgtgcgtgactctttttacacactggcaattag

SEQ ID NO: 184484 - DNA, 516 bp, Zea Mays
gcctccctttgcgccgtcgcctcccctcgtgtcggccgtcgcccctcaccggtgagtatcgtcctctccctccctctccctctctagctctatcctttctcaaaaaccctaacctcccgtgaggcaggctccacggcggcgacagtctcctcgttgtactcacggtcaccgagcctaccgtcgacgagccccgccaccatgttgatggtcgacgaaccctaacctcccatccacaaacttgtcgtcgacgagacacgccctagatctcatcaaagttgttactgtcaagctcatcaaagcagataacggtgagtagcgtagcttactgttaggttgttttcagggaccaataacgtaaatggaaatagaaagaaaacatcgatgccagtatagttcctaataagcaacaatattatctgttaacaactgaagtcaggcgggatcacaagtacatagaccgttatcggattacagggtatttgattccaggttgagccaaaccaaacatctggattg

SEQ ID NO: 184485 - DNA, 285 bp, Zea Mays
ttttcactaaaattcacaagaatggccgcgactgcaaaagggctccacgcgctggaggctgcagcaaaggtgccacacacttgaggttcgagcagaggacctctgcagcagccatgtgatggagggggcagccacgtgatggagcaacggacgcacagcaggggcggagggagaggagggtgacagcgctagagaatggggcaatggagcaagggcggtggcgctaagcagggcgcacgccgcgtacaggtggcggcggccacagtgttgcgtatctaggactcg

SEQ ID NO: 184486 - DNA, 454 bp, Zea Mays
agtccatctgttcagcctgcttcatatttgctggcatttcgatctgaaacaactatgctcctcttaaggaaagcacataaagacaaaacccttggagttgtttgtgttcgagtatgttctttgacacttacatttttctttttttcttatatgctctttccttatggaggattgacatccaattgtttattttaacttaggcatcgaaggtattgcaaaaactgttggagcctgagccatttttagacaaatcgatgtatactgatgtcatgctaccaaaccaagtctctgatgaaattcctaaaagcgatgctctcagcctagtacattctacagactactccagtatgtttggagaggaatttagcctgtcagagaatcagtttgatggttcattactgaatattttggatattgctgctgtggaagaaggcattcttcatgtactatatgc

SEQ ID NO: 184487 - DNA, 321 bp, Zea Mays
taggaatgacattagatttatgggcattattgtgcagcccagaggcatccccaaaaagctgaagaatgccaagagtgatagataaatctgctgctgttggatgaacaaaaagggcaacatcataagcatataaggagatccgatggagctctttcctgttggataactgctggagtaaaccatcctcctctgccttggaaaacatacagactaggacatacatggcaagaataaacaataaaggagataggggatccccttgacgaaggcctctccggtggatgatgtgctgtcctggaaatccattcagcatcacttgag

SEQ ID NO: 184488 - DNA, 379 bp, Zea Mays
cataacttggaagctcttggctggtccttgagtatgcgctggctttggtttaaaaagactcagctagatcgcccatggacggagtttgacattcaggtccatcccactgcaactgcgatgttcgctgcctcagtggtatctgttagcgtgatgtatagggaaatagggcccaggtggctcggctgccctaacagggtgcggcggctgcctcccccctctgtatttggttagttggctgtgtttggcaaggatcccctcgattagacctttcctattgttagattagatctttcctttattagggatatccttgcctatatgtactgagccttgggctcctccaattaatcaatcaactattcccagccatactattctt

SEQ ID NO: 184489 - DNA, 1044 bp, Zea Mays
ctccgccaatggggctgctgcccgcgtcagcagccttcatggggtcaggcggaaaccggtatggcttgttctcaaccccttgctctgttgcttccgcatcatcaaattcatgggaattatgaggaagtagctgtgttgcttcgacaccatcaaattcatgggaattatgaggaagtagcatgttagtgtagctgaattcccttttctctagcattgattgatgatcaactgaaaccgataggctgatcatttgactgtcacgtcaagttcttgtttgattggttgcttgtgcttgcttgtggataggttctattcaaccttttcctggtctaactgaaaccgataggctgatcataagagtggaacaatatctgattcgtcgatggactcatgtgttatggtttcatgtaaaattattaaactgcatagtgcatacaattgcagtgagatttcaaattgagaacgaaagatttttaacgctaaataacattgactagtgtatctggtaagaatgttctaggatgtagtattgacctctagttgctttagcatattccttcgctattgtgcagttaatgagtgttttgggtagctcttttcagacttgatgaggatctgagcaagaccaaaccagtatcatacaaccaaaccagtatctcacaacacttgcttgtgatatattgttatgtgtttcttcctttttgtgtatgtttatgttgatgttctgttctgtagaaacccttctttctatcaatcagcaattgcctgtgacatattgttatgggtttcttccttgtgtgtatgtgtaatgttctgttctattgtagaaactctcctttcatgtgatattatcttctgttacttttaatgctctagtgttcactgactctttttataatgcagtctgttgcgagattaacagcaggcatcattcagacatatctacaatgtgatcccgagtttaagtactcagaggttctaaatccaaaacgtttcctcacgaatccctctaccccagcccacaacgatgggcttgacaatgca

SEQ ID NO: 184490 - DNA, 286 bp, Zea Mays
tacaaatagaacttcttgtttcagagcagggttgcttagtttccttcttgattggtttaaagttgagaaagggaatgacattgtaatgaaaatcgcagaaataattcagatcattggtggacacagtatttgtggaaaggatattcgaaaattttttgccctccttcgtgacgaggagattattgcaaagcagcagcacagttcattgcttttgacaagtgttagtcacatgctcaaggaaaagggtcctgaagctttctttgagtttagtggtcatgactctgtg

SEQ ID NO: 184491 - DNA, 353 bp, Zea Mays
cagtcctggcagttgtcgaggaggcggtcttggaccatgaggactttctcctttgtgggctcagggtggaccgaggcctccctctctaggcgagaggggcctgctagttgctccgaggcgggctcctgaagctggaaggcagagctctcggcctgctggatcgcaacacactccaggagtccccttatctcaccatggattcagcgtccctcagtggtggatggctctggcatggttcggagcaagattgatattgcggtgaggttctgactagccctatgaaaggccagaggggcttcagcctcggcatcttccatgatgcgacgtggaaatcacatgcctggcacgtgctc

SEQ ID NO: 184492 - DNA, 315 bp, Zea Mays
attcagaacaagtcacccactgtatggaaattataatgatgtttgtaattcaggagagcgatgatgtccatgctgaactggcatcattccttcttcagaaccttacaaaagaagcacaagtaatctgatcctctgttgtttgcatcaccaactagttattgtcatcttgtactaaaatttctgtccttactttacaggaaactctcccggcatcttttggacttgcagagagggtactaggcctatgcagggacaagctcaaaccagtgtttcatgagttacttaaggccactctcttggatgaatacagcaatg

SEQ ID NO: 184493 - DNA, 1315 bp, Zea Mays
gtgggatgtctcatctggtgagaaccctgaggttgtcggtggagccaccatatttctttttaacagcaaaaggcagcttaaaacaggaagacagaagctgcggctgtggcccacaaaggaggcagatggaggagtccccaccacaactcctggcaaggtaacactcagatctacttttcttgaactcaggattcatctgttttagtcctctcccagctaatctctcacttcgtttttacttattacttcaaggtggacttaccttttttctatgtaacttataggttcctaggaatgagaggggtgagatagaacgtttggaaaggcttgttaacaagtatgagagagggcagatacaacatgttgattggcttgatcgtcttgccttcagtgctatggacaaagctatggaaaaagagtgtgagaggaaggccaatttgtaccctagtctggttgttgaattgtgcagtttcgaacatagaattgtcttccaggttaacattactgaccttgttatacatatatgttatggcactgagctatttttttcctataactcactatgcagctacatgattcttttacctgtaaaattgatctcgctttgttttggtgcacaaggtgatcattgtgtattaagaatggtcaatggtcttctgctactttcatacttggaggaattcacattttgatgttgttgagtcatataatatttatctgaacatgacttctcctgcttgcaagttatagaaagtgtaattttatcttcaccagagaaatgctgagtgttacttgtccatgcaggaatctggagcaaatttttatacaccggccccagtatcattatcaaatgaactggttactgtatgggaccctgaacttggaagaaccaatccatctgagcacaagcagttaaagcttgctaggagcttgactcgtgggatagttgatagagatctaaaaccaagctcaaatgagagaaagtaagtgaagacacattattttttcttttcttcttttcccctctgtcaacttatatctttcacaaggaattttctggcttctagtttcatgctgtcatgaacttgtgagacaaccgcattcatatgtcagctgactgaattagaagatgttggaagcagaattctgccgttcatgttaatagtttgcacattggtggttttctatctgattggttttgtccttactttgtaggttactacaaacaattattaagtttcctcctacacgcaccttggaagtggatgagaagcaattggtgtggaagtttcgtttctctttgatgtctgagaag

SEQ ID NO: 184494 - DNA, 784 bp, Zea Mays
gttgaatttagctacattgggaactgatgagatggatggttctggatgtgctggttcatcttataatgatgcaggagggagattaagctccagttgtgtttcttacttgaatgacaaatccaatacgacagattcttcagaatttgacggatccaccttcactgaacatggcttgggagaagaaagcaatagctaccagaagttaacatgcccctatgtttataatcccagttatgcaaccatggattccatctttagtaggtggaacagcgacaacagtgggaactacagtgtcgatgttgaggctaggttaaccgtcaaagacgaaaatagacatgatcattcgaaactgggggcttccacagggcggagtaatgtgaggatggaatgccagttgatagggtcatgttttagtgctactcatgctgaagacacaaacgatcctctagggatcagatcatactcctctaaggatgttactgatagttgtagccatactgaaatggttcagtgcagcagcaagtcctttcattttaaatcagggaggaggaacataaaatcaagtaaaacaccaagctatgttgatttgactgcgtctaacagagtgagaggttctaataggcacaagaacaatggaaaagatagttcagcagtgtggcagaaagtagaaaggaatgacaagatggtatctaaagcaggccatccgagcgatacacctgttcatgataagggtgcaaatgaagttggtaagaagggtgtacaggaagatccaacaagaattcgg

SEQ ID NO: 184495 - DNA, 321 bp, Zea Mays
gtggggcttttggatgcgtcgatggataacagtgatgctgtggcggcgtctgtctcttcggattcgttggcagaaccaattgatgcccctaccctcccgtgtgctgcggttgagatgctggcggcgcctggtgttctggccttgtgtgatgttgtggttcctgattattctcctgttggtgcctctgctgatttggctgctgagttgagggaggattcggttttggcagtgagttgtgttgttagtgcttcttctgctagatggaatttgaagccgcctgtttttagagtctactctaggaggttgagaccttctattttg

SEQ ID NO: 184496 - DNA, 541 bp, Zea Mays
catcatttataatgtgacagattttaaagatactcattgtagaatacagttctttttagatatttctcgtgcatagaaaaccggctctacttccttaacaactcagctgctagcttttactaacaggatctttttttgtttcttgcgcacattgagcccacgggcccaaccaacagagagggagagagaggagttgtgaaagcccagcaggcaaagaacggaatgacgaaatccacagcccagttattagcatagcaagaagttgtgtggtgggcatcagcgtgtcgtcacccggtcgtcctcgctcactctccaacgacaattccattccatggcatgtcgaagttgaaatcccaccactgcacgcacgcctgtctcctccctccgcttgtctgtacgtacattcgtgagcaacgctgttctttcagttcagcagcgacaaagttcctgctgtgtttgcctagctgtgtgtctgtctgtctgtgcagctgatataccaatactgacaggggtggcaagtctttgtttttgtccacgaaag

SEQ ID NO: 184497 - DNA, 340 bp, Zea Mays
gtgtcaggttactggctattaagtttgttgaaaaaacagttcttatgtacacaccagatcctgatgtcccatctgatccgccaactgaaacaacagaaggtatggcttatatttcctttcatatggaagtggaccctattttccatgtttaggaacttttgggtgcatgttgatttaggcatctgtaaaacgtttgcagatatggcattcaatgtagcttggttacgaggaggtcaccctttgcttaatgttggggatctggccatggaagccagccagagtcttggattgttgctagagcagctcaagtctcctaaagtaaagtcactcagtacttcca

SEQ ID NO: 184498 - DNA, 414 bp, Zea Mays
gattcttactgtctaggttaacagttaactaatgccccctctttctttcatggtgtactcatcattatgcacactatctgatttttgtaacactgactcatttatctagatcataacacgccagatgatgccaatggacaaacgcaggatgaaaccagagacaataggtctctggttgataataatacagctcaaaatttatctagcgatgacatagaggcaatgaagaggtgatattctgatcatatttgacttctattgaatatacactatgttttcttctctgttcactctgatttacttccaagtatgtatgcaatttgattttccaaaacagggatggtgcaactggtgacgagattgtagaagctttaatagcaaacagctcaacatttggaaataaaactgtcttct

SEQ ID NO: 184499 - DNA, 466 bp, Zea Mays
gttgaaccgaagtgtcccaagtacatgtcgtgatatggttgtattgagataataaattataagtgttgcgtgatatgagactcgatcgatgtagttaatattgaattggcctgtagagaggtggtgacatgccgaagtagtcatcgcttcctctacggttaagtcggagtcatgcgtgatgatgttatttatggggtgaatgcgtattgaaatattttatgttgtgccatatgattaggaagatgaaggatagatatgttgtttcggaaatgttagccaatagattcgaacaagcgtgatagaggttgagtcacttatgttataaaattgatgctcgacatgttaggtctcctaaaatgtggtgttttaggtgacttgtgtgttatccattttaagttgagaaatgtttaagagaagctaattaatttgctcccacccatgttttgagtcgcaatgtctaaaatgg

SEQ ID NO: 184500 - DNA, 367 bp, Zea Mays
ctgaattactggtttgttacaaaattgtagatataatagggaactaatttgtgttgttttttatcagagatgcaggagctctaaccgtctgaatattattgtgtactgttgtgttgtcaatgctctgaatctacagctgctgcagtgctattaggccattagtttagtgaacatcaaataggtaaacatagcttaagagatagagatttgaagagagtaaaaagtagtacaaatatcgtcttttcatagcaatgggaatacaacatgttaaaataaggaagaaatccaagtaaaaaatagagaaaactccattgtttcagctaaaacagtttcaacttacaatccatctgatagttgttgccgaggt

SEQ ID NO: 184501 - DNA, 373 bp, Zea Mays
acaaactgttggaggtcattcgccagaaaccctccatagtcaatgatcataaggatggaaaatggttggcagaggtccatggaaacatagaattcaaggaagttactttcagttatccatcaaggcctgatgttataatcttccgggatttctctcttttcttccctgctggtaaaacagttgcagttgttggagggagtgggtctggaaagagcactgttgtggctttgatagaaaggttctatgatcctaatgaaggtaacaaaacacatcttcttagaggctgttgatttgcttccttcaaatttattgctccttttaaatcattggctaacttcgtttgcattgcaggccaggttttgctagacaatgt

SEQ ID NO: 184502 - DNA, 371 bp, Zea Mays
taatcgtttaactgtcaagggaactcaggtatggagaaacactatttcactctactgtgctcactagtttttgtgttgaacatgtggtctgacaaaaccttgctacaatttggcagcgtctttttgatgggaatactggaattgtgctctcagcctgtcctcttgtaatggatgaatcttttggttttagtaattcatctgcccagggaaatcagacaacttcctccagtggtggtcttggcagcatgatgggtggtgttgttggaggcgtggttggagtagattctggatggaagtttttcaacgaaggctcttctccaatggaggatggtgttgtagtcatgtttattatgcatcaacatgctcttgtg

SEQ ID NO: 184503 - DNA, 379 bp, Zea Mays
cccgagcagtgccaccctgggaaacgttctcggcgaggttgtcggtgagggagccgagaatccaggacttgaggacgcagtccattcgatcccaatccggggaggggaccagagcgtcaaagtggacgtgaacctggagagagaacttgtagagggtcagtaaaaattgatcgcgccaacggttgaagctgacggagtcgatgtcgaggacgatagggacgaggctccggatgttgttgacgtgatggcctgggcatggaggctgaggagggcggctgcctcctgcagcagcatggcgtcgtggagatctgctagcaggtgcaggggagtcgccttcatcggacaaagtgagggcggcggcgacgaccttagcgacggc

SEQ ID NO: 184504 - DNA, 378 bp, Zea Mays
ctgatttcatgtatgcgcatgtgcaggtccatacaaaaaaaagaaacagattagagcaccaaagattgaataagttggtgtatgtgagctacaaccggaaaatggaaaatcggttcgcaaaaataagagagctcggttccaaaggcaagaaaagcaacccactggtgcttgaagagtttcaatgggaaaatgaatgggttgatgaggaatctgatagtggtaatctttgggctgccgttgatgaagcattgggtgcaacatagggtctccggggccgaaatgtacctatggctgctggtggtctagttagggggacctcttcttctcagcctcatccaaggacctatgttcgaactaggaagcgtccaaggaatactc

SEQ ID NO: 184505 - DNA, 495 bp, Zea Mays
acctggccgagcgaaagcgccgacgaggacccatacgccgcggcgctgttccggacgatcatcggcggcatgtgcctcgccgggatcatcatttctccctctcagaacctctcgaaccctaattcctgccgcctcagtagcttctttccatttgttcactggcacatgcgtagtatctatctcccgcctcacggacaaagaacaggcggcgccaatcctattcctatatggagatgtataccttgcctgccaagtaacaacacgaccaacaacagatctagcgatcgacaaggtagcccagacaaccttcgctgcgagctgacgactggcagtgagatctagcagaagagctacatatgttcgtgtgcctatgcaaaaatagaactccgatcgatctctggctgcatgcagctctcaaggcgtgcgtgcagcaaaaactttgcaagctcagaagggtagctagcaggaggtggcgagataagccgggaggagact

SEQ ID NO: 184506 - DNA, 405 bp, Zea Mays
aactgatctgatcggatcggacatttatatcccagctgtggcagcatgcaatgggcattcttcagtttgttctgaacggccggcagtaatataatggtgatcttggagcctcatgacaaacaagaggagacagcagcggaaagctagatgcgttttgagacagtgcatgatgcttcgtcacgtacagtatttgtaaatgccaactgctcgtgtccatcaaattgatgaatgggctacggcctacgagtacgtcgtgtcgtatacagggagcgttgaatctgtgttgaccccagcacggtcctcctccatcagtccatctccttttgggtgccggcttcagctgtagccgtacgtcgttgctgtctgtcatactcaacaatacacagagcgagtgagagagagaga

SEQ ID NO: 184507 - DNA, 340 bp, Zea Mays
tttccatagtgggtgatttaggagagcataggtatccaactacttattatgtaggatataagagatggataggttagggaaagaatagtttggtgataagaaggttcatggtaaggaaagcttttcatcgcaaatgatgggtcttatctcatttggagatctggtctgcctcccttcttgccttgtcgacgttgatcttttcctttctttcggtcttggtgtctccagctaggttttagggtcatgtagatatatgtgggtaggataagccacatgaggtaggtcaagatctggtttgatgtttaggttggaatggatggtttagacaacccatcgtgta

SEQ ID NO: 184508 - DNA, 392 bp, Zea Mays
gtcctcaggcggcgcaaggccgacggcaagaccttcagcagcgcacccaacggccacctgccgcattccgtctccgtgtgagtgggctctcgattgtatttaccggattgttatccttagtggcgtgtgtgactacgatagtaggtttagagtttgctggggttttggcctgccggcttgtattgtatgtccgttttggacggtcctctattgctctgcatacgtacatgcatacatggcatttttgtgtatgtgtatgcatccccttcccttcccttccagtgttgtgttgagctcatctagaaaatgggcacagctgggggcatcacttctcgagagtccggtcagcatcccggaggatccgcgacgatcacgcacacaacgcactcggg

SEQ ID NO: 184509 - DNA, 1002 bp, Zea Mays
gttttgtttgaaagtgccatcttacattaaagaaaattagtgtataatcagttgtggcaataagcaatgtatgttgtcctcattattgtattatgcgaactgcgaaggctgaaattgtgtttatttttcagagagatggttatagttctcactttgttcctactgaagaggatacatcgcatgagaagtctgtgcctggtcctcaatttgttcatgaaacatgggaaacatcacttgaggatttttttcagatacctggtaatgagttctctgaagctaaaactatatttgctgatggtacttttttagagattgctgataccacaaagataggcagagtttttggactggatctgttgcaagaaatgatttaacctcataacgcgggattaagttggaatggacagtttgacgttagtacaatagttgtcattgatggggtccgtgctgaaatccgtgcaccttattgtgacaagttctctaaaaaggcaaaattcaatgactactttatttatcttcacaatattattgagctatatagaataaaaggggttggtctatcgacattttttacccacttgaccaataagttgtcagaacctccctgcagacctttagtatgtagcccacaacaacttgagggctactgacgtcgactttatggattctgggattgtgtattgagtaccctggcgctgaggatctcattggctagagctggattatattatggaattcatagaatacgtcgcttggcaccattggatgtgagaaatgctttgaaatcagtactgtcaagtactcctcttaaatatgattggaaagagtaaatttcacaacatggacatccagtcctcaaaaaggttttaaggcacatccctgttgaagataaaagcaacaaaaaggttcaggagaatgaaggcgcacgcgtacgggggtatgggttgtataaacctgatgctggtagcttgtctatttttgcaagacaaataagcgaacatg

SEQ ID NO: 184510 - DNA, 378 bp, Zea Mays
gtttgggataagaaagattatggtaaggaaaggttttcatcacgaatgatgggtcttgtctcatttggagatctggattgcctcccttcttgccttgtcgatgttgatgtctttctccttaaggcttggtgtttctattcgggttagtgacatatggttaagatatatgtgggtaggatggattatatggtgtaggtaggtcagaatctctattaggtcaaaacagaggggttatgtaactatctgatgggtaaggtagttgcatatggctgagttggtctaagacaccagtttaggttcaaacatgtttataggagtgggatctaatctattttaccagcatttaattaacatgttaggtatctcatattagattag

SEQ ID NO: 184511 - DNA, 1206 bp, Zea Mays
gggagaatcaagggccagtgcagcgccgatggagccgaaggtgagggctcaagcggacacccaggaccgccgaaagacagagtggcaagtagcgtaggatgaggcggcagtgggagcgatgtggggccacaaaatgtcggaccaggttacatagtgatatggccgatccacaggttgcagaggaatggccagggtgtgccatccttgccagaaccaccatctccgcctccagtgcagccaccaccaccatgcttgtgccgacaatggttacctccaccatagccggtaggagggctagagggggcaagtggatgaggtgacgggatcccagaggtaggagtggagggtgaggggtgctgagacggcccaccgggaccgaggctgtagagagcctatgcggtggtgggaggaagcgagacccccttagtgggctcctaaaggatgaagtcattccggaccttctagaagtaggggaaaggaacagacccacaatccaagttcgtaggtggtcgtagcgctcgttgagacagcaaaggaggttgaggacgagtgtacaggaggagaccgtctccccgaggtcacagagagcatctgccatacccttcatctggcgacaatacttagtgacagagaggtcgacctagacgaagatatgtaaggcgacggcgaggtgaagggcacaagcctcatggttgtcgaggaactagtcctcgatggcaacccaggcctggcgagcaatgcccaccatactgacagacgatgtcctgcaactcgatagtgacagtgccgaggagccaagacagaaccacattgtgcacatgacgcaaggagggcacaagcaggcagtcgtcagtgagcacatggtcgtcaagggcatagcgctgcaaggtgaggacaaggtcgcgccagcgagcgtagttggaggtggtcgggtcaagaacgactgtggctagcaacaagatgttctagacaccaatcgcctaagcgtgaaggttggccatgacagaggcttcataagtgatggaggcatcgacatcgccgggggcgaagggcgtgttctcgacagcaaccacctccagttaacgcttggcttccgcgagttaacaggcaagaacatccacagaggcacgttcctactcctagacaaggacagcaacccgctcacgcgcggtggtaataacatacttggctgcgtgaagagcaacg

SEQ ID NO: 184512 - DNA, 513 bp, Zea Mays
cagccagaaggagttagtgtggctgtagtgctgctggttggtgtggctgcagtgctgctgttattggaagttgtgtttgccggtgcttgttgtatagctgcttgattcggtgcttctgtgaagatgagtacagaagagatgaatcccaagagaatggaagaagaggctgcaacgaagggaacaattggtggtggttcaggtgggattacaaagagtgagatgatgagtgagacgaggattatgatccaggagcttatggggttggggttaaagttatatgagttagagggcagattatgatccaaagccaatacaaacccatatgagttaaagttagaactagtgccgaacgatgtgaagctagagggcagcaaaaattacttgagctagtcgaggagagtgtgcgtcctcttaggaggcaagggagtggagcactacttggaggagacctgtgttgagccggttgataagcttggcactgaatggagaacttggcatacaacaaactctgtg

SEQ ID NO: 184513 - DNA, 288 bp, Zea Mays
caaagcctcgtacacagttctgctcttctgaattttcatggggatgcgactcaggagagctggagcaagctcacccacagatttcccatgtaaccatttatcagtccaaaacaacgtattcaggccatctcccacaatagagcaaacagagactgagaaaaatgttgctgcatttggatgcacctgaacgtcaaaatctgaccatggccgttcaggctgggtctttttaagccacatccaacgcatattcagagaccagcctagcacctccaaattgtggattccgag

SEQ ID NO: 184514 - DNA, 330 bp, Zea Mays
tgacatctcctatgttgttcagcaagtgtgtcttcatatgcatgatcctcgggatattcacctctcggcagtcaagcatatcctgcgctaccttcgtgggacacttagtcatggtctcctccttcgcccatccatgacctctgctctactcgtctacacagatgctgattgagccggatgcccgaatactcgcaggtctacttcagggtacgctgttttccttggagataacctcgtctcctggtcctccaagcagcagcctacgatgtctagctccagtgcagaggctaaatacagggtggttgctaacggtgtcgctgaagcttcctg

SEQ ID NO: 184515 - DNA, 426 bp, Zea Mays
ctctaaaattttgagaaccagttgaatatcagattcttttggatgcaaaaacatgatcacatcatcagcatacaaggacactctgtgttgcaaaggtctagaagccaatggatgcagcagattttcgagatcagcttttgaaattaaccatcctagcacgtccatgacaagtatgaacagcataggtgagagggggtctccctgtcttaagccctttttgagctgaattttttcgccagcaacaccattaagcagtacttgtgtggacgaagtagatagcagtccacacagaacattcatccaaatctgcccaaaccccagtttttgaagaacttcaaggaggaaaggccaagatactgagtcaaaagctttagtaatgtcgagcttcaaaaggattcttgcttgtctttgctgatggagaagtat

SEQ ID NO: 184516 - DNA, 275 bp, Zea Mays
tgtttagtccatctaggtgctaggaagtggcctggtggcttttggtgacttggtcttatctaagatcgagttggactaggaggaatggtttttacatgtttgcctatggcaggcatgttgcataagaggattagcacatgagcattcagacatgaagcatatctgtggagctgcggtttcatttgctgggttctaggtgtgatgcacgaggaagagaggtagaagtgtcttggaggagtgtgtggcagtctacatgaaccacaaggtgcacacaa

SEQ ID NO: 184517 - DNA, 686 bp, Zea Mays
ttccagatacttctttcgatttacttgtatgctagaggattagccgactagggtttgaggatgttgggattttaactctcgagccactcaatttgactgcccatgttcgtctggcggggaacgggtatctgtggaatttttttttggggctcataggttggtaaattttcgaggggtactggtcggttcacttgtcgagatttttaattagggttctgggaaattatatccgtaagatgccccttggtgagggttgtgggatttccttgtcggattgtgccattgtgccctagcaattccggaattagggtttctggtggtggtccgtgtaatttgggcccataggatggtggttgaggtatttttcgttggtgtggaattggggtaaagggctttaaatggggatcgttgtcctgtttgtcattctaatttgactgcagtggatgattgctagttcctgtatggttgagcatagtatggcgcccttaaaatagggggaagctcatgctgttgcttgtttgtcatgttgaaagctggaatcgtatgtttaatctactagaaactttattctgggtatcaactgctgtaagatgtggttttagaagcctatcttgggtatttatagcggtgtagatataggcttaagcttcagagctgtgagtattgttcatattatttgatcttca

SEQ ID NO: 184518 - DNA, 631 bp, Zea Mays
agaatacagaacttcttgcttcatccaaaacacaatagtcaagttgatggtaaacaaatgtatgataaggatggaaattgtactataaagggaaggaaacttgttaaacagattgagattgaaggtatgtataagcaatcatttcagtcatcaacattactcgccttgaaacattacatcggaaaattcttcaggaaaaggctagcatattacaataaggaatgtccgaactgtaaacttgtagcaatgtttgaaaaacaaagcaagcttacactaacatatttttattaacagtaaaaaagatacgggttgtacctcaaagaccaaagcttcgagcaacatcatcctttagaaatctctacatgcaagctggcagtgagtatgtcagacagatttctaagattctgaagagccaggttacgatgttgacatccacatcatctacatctttgccggaaggttaatatgaaagtttttgttttcctatagcaaaccccagtcacagtaatatttacatcgacagtaacacagtgtctatggctctatgctttcagaaatgttcacatgcactctagaactgcaaagttcttgcaaaggtcataagagagattcaatttctccacaatatttg

SEQ ID NO: 184519 - DNA, 904 bp, Zea Mays
ggttcttaatgatggtaaagtgctccgaggacctcggttcagcttggtttttaaaagatggtccagattttctcatgcctcttcctcaatcatgtcgagcttggtggatgttgagattaccggaatcccggtgcatgcttggtgccgctcaacagctgaattcatattgggggattcttgtttcattgaggaagttcatccagacactctgttgcagaaaactcttccatcctttgtagcaagggcttggtgcttccaaccgaaacaattgcaccgtgacatgattctgcatattctggagccaggcccacaaaactctgaacgaagatgcttagcctataacataagcgtgagggtacttgcaatctgccatgatggtattagaggtccctcgctgctgactccaccggaggatggcgatcagactgatggttcggacgacatggatgaccagaggaatgatgagcctcggcgtttgggcagtcccttgccccagcgacggtctgttcaccttcgccttgggcctcccccgccgtctggacatggaaggacttcacatacatctaggggacatgaacagccactctttgacgcaccggagttacagcagatggcctcggataatgggatgatactccttaatgagttgtctgcagagaagccaaacagtctccatgatgaggcccctactgacagctggacatgcactattgggccgctgaactccacccagccgttttcgcctcagtccaaagtgactgggtcgctggaaatgacagggctgagttcgcccctcccggtgttgtctaggcttgggcccctcgggtcgctgaccccagccaggccggtttcgcctcagtccgtgaggaatgagacgcagaaatcagctaggattggatcgccc

SEQ ID NO: 184520 - DNA, 343 bp, Zea Mays
cttgaaatttcatctagatgcagtggactctttctatggcaaagtagggttgactgactcctatattggctgccccgaccaacactcgatacttgcaaccaggagcgaatatgatcatgcaagattgcaacaggcaacaacaaaaggttcgatacttacatgcaaagacagggaaagaaaattagaagtaacgaaaaagaaaggcacgagagaaggaacggtgacctctcctttcttaagattccctgacgctccacttttccgcgtcttctatatttctggcttcggtgatgccacgattgatggaaggcgacactgcgttcacgaaataactcaattatta

SEQ ID NO: 184521 - DNA, 339 bp, Zea Mays
aaacacagaaaagattacgaatgaaatattagctgggttgtctggggattctgatgatagcgagaactttgatgtggaaagtgggaacgaatatgccgaagatcggccctggcggccaagtcatattatcttcggaaagtcgtccatcaaacagagtcagattgatgccatgaaaggaagatattttcgtgacatgtctattgtgagagttgggggggcgccgcccctgcacccaaggaagatgaagttgttgtttacaggagcttcatgaaggcaggtcttcggttcccattgagcaaatttttggttgaagtattgaagacattttagatctttctt

SEQ ID NO: 184522 - DNA, 528 bp, Zea Mays
ccagttctcatttttgtgtcatcacgtcgacagacaagacttacagctcttgatatcattcaggtcgattctactatggatctatgatactagatgggtataactataaacattactgcaatcttatctgtttaatgtgctctacgtgcagcttgcagcatcagatgaaaaaccaaggcagttcctgagcattgaagacaactccctagacatggttctttcacaggtttctgacagtaatttgaggcatactctgcaatttggcataggtctgcatcatgctggtttaaatgacagagacagatccttggttgaggagcttttttcaaacaataagattcaggtgtgttctgctttgatagccttctcttgttacacataattctaatatttcagcttatctggttaagtatttctcttgtaagctatgctagttacatacttgagcagcttatacagaccttgttgcttgacgtttttccaggtgctggtatgtaccagcacattggcgtggggtgtcaatcttcc

SEQ ID NO: 184523 - DNA, 1779 bp, Zea Mays
caaacagtaatgctgcaagtgcctccgctgacaaacaaaagcccaagattgttgaccgtggttctatgcaatggacagaaaaatatcggccaaaagttccaaatgacatagttggcaatcaatcaatggtgagtagttctgcttttggttatgttagttaattcatatatgtagcgatactttattacaaacttcatatataggtcaaacaacttcatgattggttaaaaagttgggatgcactattccttcattctggccaaaagggtaagggaaagaaacaaactgacagtgcagccaaaaaggctgtgttgctgagtggacctcctggtatcggtaagactacaactgctaaagttgttagtcagatgcttggtttgcaggccattgaggtattagtctttccactatttattccccatttttacttggcaggcctgaattcaaacaatattttttttgtgataggtaaatgcgagtgatagccgtggtaaggcagactccaagatcgagaagggtgttggggggagtacatcaaattctatcaaagagcttatcaacaacgcgactctgaattatagtgacaatcggttggtgttgcagcatgaatcatgaacttttttgactttgtattttgattattatatattaagtgggcaacaattccataggttaaaacatcccaaagctgtactagttatggatgaagttgatggtatgtctgctggagatagaggtggtgttgctgatcttattgctagcatcaagatatccaagatccctattatctgcatttgtaatgaccgttatagtcagaaattgaagaatcttgtgaattactgccttatgctcaacttcagaaagccaacaaaacaacaggttatttttttttgccatgttcagtcctagtgaagcaatgagcttcagaattactaatgtttccttgaattacaagaacccagcaccacattctttacttttgttgtatctaggcatgcacaatttagttagcctggtgcaattcatgtcatgtatgaaatgaatctgtatttggtttgtttctgattctaaaatttgctgtttgtaaactatggttttattgtggactctgaacttctgaacattgctgtttgtgtacacttgcacctaattgataaaaaaccctggccattggttgtcacaagctaccaactacaatgctctttctgttgcaattcttctcatcttacatgatgtatacagttgcatgtgttaaaaagagagaactattaattttctacctggacgtggatgactggatgttcattttcttttcttggttctaacttctttacttgacagatgggtaaaagattgatggaaattgccaaaaaggaaggtattcaagctcaagaggtatgccctattgccctgtatatttcccagactccagtgcttctaaccttgcatgaaatttttgagatttaaattaacagaaacagatcagttaacaaaattaaattagtgtttgttgtctcttatatttctgtgtaggcttctagtatgcttatctctttctgactctgttatgtagacttcaatgttctgctactaatttttttctattatgctagaatgcaatggaagagcttgctgaaagagtgcacggagatattcgcatggcactcaaccatttgcagtatatgagcctctcccagtctgtggtcaaatatgatgatataaaggagcgacttaatagcagttcaaaggatgaagatatttctccttttactgctgttg

SEQ ID NO: 184524 - DNA, 442 bp, Zea Mays
gaaaaaggttggtcatattagatcacagcttggtcttgccagggagctgctccaccagttcgacatagctcaggacagtagaagtctttctcctgaagaattttggttgcgtaatagtctaaagcagcacagtcttgctcttgcgtctttatggtgttccttggtccggttgagatctcggatctgttggctgaaggatggggatgcgaatactgctttatttcactctcatgcgaggtatcgcaaagctaagagtttcatccctagaattgtttcagaggatgaaaaggttttcactgcccaggaggagaaggcggacttgttcactgatttctatatgaatctgcttggttctgcaattaataggggggctgcggttgatttggaacagcttggagttcccacttttgatctagaagctcttgacagccctttctcggcg

SEQ ID NO: 184525 - DNA, 939 bp, Zea Mays
gagcaaaagtctcatcataatcaagttcttgagtctgttggaaaccacgagccacaagacgagctttatacctctcaatggaaccatccaattttgtcttaattttgaagacccatttgcatgtaataggaacaacatgcgaggttaaaggaacgatatcccatgtaccagtgcgttcaagagcagccaattcatcaatcatagctagctgccactcaagaatcccagaagcttcctgataagtagtgggttcaacaattgccacaccagctcgtgggaaaccatagcgatctggaggttcaatggtaccacgatcacgaagacgatatccctgattaaaaacatcgttagactcacaattgttagtacaagaatcaagtacaagatcagtatcaggaccagccgcaggaatagatcggtaacgacgaatgtatgtttggatgataggtggtttggaagagtaagtagaggatgacgtggaggtggaaggtggtgttatgagaatgagaacattagatgtggatgtagaaggtgatggttcagcggtaggaatggaaggaagacacatgaaagaagtagattctgtgggataatatgaggagtgagtagactggttgtgaaagaagggtcaattttcattgaagctcacatctctagaaattcgaatacgatgagtagatggatcataacaacgatatcctttgtgttcaggactgtatccaaggaatacacactctacagattgagcagtcaatttagtccgctcacgaggtggtaacaagacataacatatacatccaaacacacgaaaatgatcatatcgtagagaagtcccaaaaagaacttcacctggtgatttgccagaaagtttagatgatggttgtctattaatgagatacacggcagtggaaacaacttcactccaaaagtgtgaaggaa

SEQ ID NO: 184526 - DNA, 476 bp, Zea Mays
gattttttctggagcacctaatggcatgctacagcaactccaccaaatttcttgaagctggagctgtcccaaacaggggcttagatgtgtagtttatattaatcatggattactgtctggtcaacctagggtgttcatgcatacttatgtggtaatgaaggttttggtttaatatttttgggcctttacctatcataggcaaattagccagacagtcgcattgcaatgtgaccttgtaagtgtaattagttagtgagatcagatgccaattcatgttgagatagcatttcctggccaccatatattgtattattgctcagtgagatgtcaaattgagatcctgcagactcttggccggtagttttcacctcagtttcttccatgagttctcttatttcctcacattgtctcttcttttattcacctttccctataggcttatcatcttctcgtagtggaattcttgaatttttttc

SEQ ID NO: 184527 - DNA, 373 bp, Zea Mays
ggttgggccgttcaaagacagatacgtcatgggaacagattgaagacttcaagcaacactatccaaatttcaagctcgaggacgagctttttgttgggaaggaaggaaatgttgtagactccattgtagggcgtcagtatagcaagcacaacaagaaataaggggggcgcgacagtaggccagcgcacagccctgagtcgtagcaagggcttatcccctggtttatctctgtgtttgttggagtctgtttcagttatcccttaagtttagcagataagttgttaggccacctgagttataaaggagaccttagtttgtattaggatttttatccaagaagttgatgtcggctggcacaactcttgggtcatcc

SEQ ID NO: 184528 - DNA, 549 bp, Zea Mays
ggaatgtgccaagttggtatctttcacttctaacgagatttcctaagcagatggtgattcccttctttatgtttgcttgtccttttattttcagttaacttgaacttaggtttagtttgtccacaagcctgagactttggctatttaggtttttccgttaacttttcgcgaatgtggaatgagataggaaaccttgtttgttaggcttaataattttgattacaatcatgtgaaagttttactgaaaattgaattgttctttgataaacctcagggctgcatgattgtcaggaattcctcgtcctccagaacttgtattcgtcagtggacaactgaacgggtcagtcggtctttgtaaatttagttgggcattagttgaagtccgtgtacagtatttatcttggccaagttgatgtagtttagttgaagtcagtgtacagtatttatcttggccaagttgatgtagttgtggtgctaattatattcagttttgatgtaccagtgccttctgtgcatcaaatggcatttttgtacattttagatttctgg

SEQ ID NO: 184529 - DNA, 598 bp, Zea Mays
gccgtttgcgctggattggctggttggttcgcacgacggcgagacgggtcgagttgttgggctgtgtgccagccatgtggttgcttagctggctactgggaatccggttgaagctttgaaattgatttcttaatttttgggtccccttttgcgacgcggtttctggttggtgagagggatctgcagcagtagaaaaaaatgtggtgggctgttcttcctgatgttaaactggaagtcgtcgagaaattactttcatggtggaaatttgaggattctgatcatagttttatttcctgattttgtttgtcagacgagctaagttgatttcggagaaaatatttatttccttggccgtggtagatttggtcacggcagaaattgaccaccatgagagcaatgttcactttgattggtggagaaaaaggttgcaatcattgacggcgaggcatgtcgagttgtcaacttggtgtctatgctgatgcaaaaaggtttgcttgcataaagtccaatggagccaagggtgcttgtttcttgtttgtgcccttcagttgcaacctgcaaaggaggctcgctcaactagtaaaaaacaaaaacgttt

SEQ ID NO: 184530 - DNA, 343 bp, Zea Mays
aagagtcgacaaccgtgcatgcccctacgagagaagcaaggatcgacgatggtgaattgtgcttcactggagaacaggggccaaagagctcgggcaagtcggagacagaagcatgctccccatgcgtctctgcatgctccaaatggttggccacacgtgctagccacaacttgatgatagaaacctcctcctggagaggctgcaacacttcctcaaatgagctgaaacatgtgttgaaactctgctcacaacgactccaccaaaggggtgaccaaggactgaaggttcaaaggtgtctgaggcaagagaggcataataatagctacgacaaacatgatcgccg

SEQ ID NO: 184531 - DNA, 561 bp, Zea Mays
ttttttttttgtgtcattgagttattagaaaacatccggtctatgctattcattgccacattggataggtctaagcttatatcattcgttatgaaaaatacaatccacatttatctatatatctgttaattactgcaggggaacgactcacctgtgattatttcatctgtttctgcttccgttgctacccctgctgctggagttctgtcggcttcagttgctatccctcaacagtctgttcctgtatttcgccagcctttaggtgttcatataccacatctcccgatgaattatgtcccttacaatcagtacatttcaccattttttattccaccccctacccttcacccttttatgggtaatgctacattttctcagccaccttcaacaggggtcatgtacccaactcctggaaccgcaagagttcttccacctgtcaaattcccagttccttcattcaagcctggtgctaacattgggagccaggcatctattggagttcctggttgctatggaacatatggttctagtccatcggtttacactaataacgcacccgtg

SEQ ID NO: 184532 - DNA, 650 bp, Zea Mays
caaaatctgggagattctagaggaagaaggagatcagatagggaggggaattgaagtagttgttcgatatatttctcagcctgaaatcgttacggtgcctgcctgttcatagtatttaagtatcaactattacaaggttggacggcctattatgccacctagtcctctcctagaaacttggcattgggattcctgatgcgacgacccaactccaacccagccatgtccgacgacgacgcctgcttctcgacgcacggtacctagcgatgctgacaatccccctccataagaaggcgtttgtccccaagcggctgccgaaggaaaacgctggcgcagagcagcctcgtcctcccaagtatcaagggcagcatcataaccagaccagcgcactcgaacttattggtcgacgttgtggccgccccaagaaaaggatcgtcggtcgagcacatgtataaggtaaagaagtgctgaccagaatagaagatttgacactgggcttcagctgggacacatggaatacgggatggattgacggagatgatggtaactgcagcctgtatgccacactgccgacacgttggagtaccttgtaaggaccaaaatatatgtaggagagcttatggttggcgcgagtagccactgaattctgg

SEQ ID NO: 184533 - DNA, 349 bp, Zea Mays
gcttgcgtcatctttgtagatgcctcctgaccataaccttcttgtctttttgggattcttttctctttcgtcattaaattgctactatctagcaaactctagtcctttggtattgacatgcttgtattcctttagtactcttgtttcaagtacttacctctgaatttctactgcctacttaaacacttcagtttatatgtccatgatcatcctgtcttttgagaccctttcctattctgttgttaagttgctatctttcggcaattcgtactcccttggtcttggtatgctcgcaccttcgtaatcttgcatactcttactttttatataaatgcttacctttgtaccc

SEQ ID NO: 184534 - DNA, 589 bp, Zea Mays
gccagcatctcagtacactgacgctcaatttcatccttctggcggtgtgggtaccgatagggtcgaacaaccactggatccgacccttccttcaaacaaatgcgatgatcacacggacgggagggtggcaggccctgtggctcttgaaaaagatccttaaatgtatctaggatcccctgcagacgaagatcatgtccaacttccaaactgcgtaactgaactgacttcccatgatgtagaaggccttgcaaactgacatgtccaccctcgaggaaaagagacatttggagggagtcaaagttccagctgatatcacccaatttctggagccattgcaccccgagaactgcatcaaacccttccaagggaatcaccaagaaggaatccgagaaggaatgatcctgtataccaaactgaacggccgacagacgccccagacatggcagtcgagctccattggccacctgcacctgctgcttggttcctgacagttgtggaatctggagtaaggaagccgcatggccgctaatgaaattgtgtgtgcttccactatccaccaagcccactagtcgatgttgccccataacca

SEQ ID NO: 184535 - DNA, 484 bp, Zea Mays
cgagctggaacgccagtgcgccgccatgatcgagcaggggatcgtccgtcgcagcgattcaccgttctcgtcgccggtcctcgtgaagaagcccgatgggtcgtggcggttctgcgtcgactactgcgcgctaaacgcggtcaccatcaaggacgccttcccgatcccggtggtcgacgagctgctgaacgagcttcatggtgcccggttcttctccaagctggacctgcgttccgggtaccatcaggtgcgcatgaggctggaggacgtgcacaaaacggcatttcgtacacacgacggcctgtacgagttcctggtgatggcgttcaggctttgcaacgcaccggcgacattccaggcgctcatgaacgatgtactccgtctcttcctccgccggtttgtccttgttttctttgatgatatcttgatatatagcaagaattgggaggagcacctgcaccacctcaggatggtcctcgaggaa

SEQ ID NO: 184536 - DNA, 728 bp, Zea Mays
gaggagactggtggaccgagctatgcacgccgctgatagacgcgtgcaagatcggcgaagcgagccgaagatggtgggggcgggggggggggggaggagagtcgtgtgggtggaggtggtgggtagcacgggtagaggcatagacaacggggtagcgcgtggcagaggcgacagacccgcatgcggcgcaaaagagggcaggagaaggggaggaacgccgactcaatcgacatcgagggaatcaaggtcgggaggagctagcaaaggggaaacatcctcatcaaatgcaacatgacgagagatgatgatgcgatgggtgagaagatctaggcaccggtaccccttgtgatcattgtacccgatcgtggtgaaagtttgaggagcgtggcagaggtgttgggatagcaggcacactcgaaggtgctcataggaggggatggtgtcgaagagggcgaagaacggagtgggatggggaccgccttggagggaagacgattgaggaggtaggtggctgtgttcagcgcctcaacccagtaccgggcaggaagaaaagcttagaaaaggaggcaacataacatattggtggtgttgcgcatcatgcgcttagctcgaccattctgagagcatctccaagagagtcctaaaattgggtcctaaaatcgaaataggacatgatttaagtgatttaggccctgtttggtatagctttaggatttttagtggaccag

SEQ ID NO: 184537 - DNA, 424 bp, Zea Mays
cgactggatgctcgtcggcaagtcctatgtgcccgggctgtccaccaaccgtgggaggaggaggttggacgctggggagattgtccatttcgccttcccttcgtacgagaagatctatggcgggttaaagatgactgccaagaaggcggcggctctggcacagattgttcgcttttccaccaaacgagccggagaggttttactcaaatcatcttatcatgcatgtttattcttgagatttttttgttcaaattgctacagtttgctcctgtctcattctctataatgatggttgtagattgggaagctgtccccagagtggacgcaatgccttgtcccgcttgtcaactcgtccaaggtgaagattcaggggaagctcgtgttcccaacaatggagctgaggctgatgcaggagatattgctc

SEQ ID NO: 184538 - DNA, 424 bp, Zea Mays
aaggagttgtggtaacggaacgctgctcaggtttaaccggtgctatagcagtcttatgaggccatatctttgaatgtttctgtcgactctggtcctgcacttgctcctgcaattgggccaaaagcattgctcggtcgagatcatgaggcacctgagcgagcactggcccttggatctcaaattttaggcccttgacaaattgtgaaacaaagaacatttcatcataaccagtgtgaaacatagaaacttcaaaccagaggtcttcgaaacgctgagcatattcattcactgtggcacgctgtttaagatccaataaactagccaaagcctttctgtaatcctcggccccaaatttcctttccactgcatcacaaaactgcaaccaactgcaacttgacacattgagcttaaacacttgccacca

SEQ ID NO: 184539 - DNA, 505 bp, Zea Mays
tgcggttctgcgccccgtcccgaatccctgtagcgtccaccttctccctcccaccgcccggattccgcaagactgagagcagcgctcgctcgcctcctcccaatctccgcatcgtttctgtccaggtcggcggcccgatttgttgccgggcgtcgtcctcgcccccgccctgcctgccactcctcgtaggactcggtcctgtccggactcccgctccacctgtcccctcctcgcttccatcgccattgccgccctcattttgcccccctcccgctcgaagccgcctgctgctttggaccgtgccgagcggggcggcgtaaatgcccgcccgtgcagaggatcccagacagccttctccgcccccaaaccccgtccttgtttcccaccaattaggagcaggggaaggttctcgcacgcgtgcccatcctaccaacggccaattccagatgcggagggcgtcctgactccacctgccaagctccggcctctgctctgctccgccccg

SEQ ID NO: 184540 - DNA, 437 bp, Zea Mays
tactcgatcagctcgagccagctgtgcgcgagtccccctggccgcgcgttcctctgctcggcgtacgtccttggcccggcgcctcctagtgtagacttgtccccacatgacatctccccctccgtcgagacccagctcgtccccgagctggaacgctagatgcttggcacggaatgtgtcgatgtcctcccaggtggccgatgcagccgattgacctttccactgaatcagcactaggcgcacaccacgtgcaagacggtagcgcaccgctcgttccggctccggaacaaccgcgccatggtgaattgtcggtagaggtggaggtgctgctggcggtgtcccatggaatttcttgagaagtccgacatggaacacgtcatgcaggcggactccggttggcaagtcgagacggacggcgacgtcgttgatcatctcgg

SEQ ID NO: 184541 - DNA, 609 bp, Zea Mays
aaagcaactgcggctcgggaggggagatgatgtctttgagaaaatattttctaacagcttacatgctcttcaggtatgttcattctttgagtggccttaatttttgctgtcgactgaaagacgtcaacatcatatatcagtcgtcctttcatcatttgttaccaacacgttgcacgttcaggatgcacttatcttaatgttattctttaaaatgaggtgtaaagtactattttcaccttttgtccttgttttttcagcgaagcactaaccataggtgcacaataatgtcatgttaagttcacatgtctgtggttgttacatctatctatctcttaaataggtggtgcaattctactactggaaaaaacatgagctggcagcaaggagggaacaaagtgttgttagttcaggaacagtctgctgtccagttacacatcattcaaaaggaacagaattaccattaccatgcaatcacgcacttgcacaaactatatttggatcatataatactgaggagattgtccagtggaatgattttgcattagctgttgctatgtgggaaaaatattcagaagagttaaagaaacagttgttgacatttttgccata

SEQ ID NO: 184542 - DNA, 295 bp, Zea Mays
ctcaagcacaatgcacaaactcacaccgacttgttctccatcatgaatcagtgcaaactaaatttacctcacgtagcactatactatggcagaatgtcatgccatgcaaccaggaagaataaactattccctccttgcctttatgatcagcacataggagagggacactgagactgagagaaaccaaggctagctaatcactcatgtttatctgcagctagcgacgatgcaaaatattaatttcacgccagaaatcatttctttcccctgtacagcacagccctcttgcatggag

SEQ ID NO: 184543 - DNA, 848 bp, Zea Mays
gctggaacacctgctttacatgcctcaggtggtctgtccaggacgaactatatatcaagatgtcgtcgaagaaaaccagtgtgaacttccggatgaagggcttcaagatgtcattcatgagagcctggaaagtggatggtgcattggtaaggccgaatggcattacaagaaactcgaaatgaccacaatgtgttcggaaagctgtcttgtggatgtcgctgggatgcattcggacttgatgatatccactgcgaagatcaagcttggtgaagaagcatgaaccctgtagctcatctagaagttcatcaaccactgggattggaaacttgtcttttactgtttttgcattcaactcacgatagtcgatacaaaaccgccatgtattgtctgccttcttcaccaacaagacgggcgatgaaaatgctgatgtgcactcacgcatgatcccctgctgcaacatttggtcacactgcctctcgatttcatccttcaagagttgggggtatctgtatggtcgcactgccaccggttctgttccagacagtaaccgaatatgatgatcatggtgacgcgaaggcggcagaccgtgtggttcttcaaacaaagcaacaaaggattgtagaagttcctccatgcattctcggcttttgtcaatggctgtgctgcagagaatcgggtcccccatgcctgtcaagcggatcagccgtccttggcgccagaatgccatagtgtggttgtcaaaattacataggacgggtcctaaagaccgcaaccactcaacccccagaactagatcgaagccatccaatggtaaggagtagcatgttgtggggaaatcctcagtgccg

SEQ ID NO: 184544 - DNA, 328 bp, Zea Mays
tgcatgtccccctgtgctcctttctccactactaaggagttcactggaggggagagtcttcgccaaactgggggcttgcgctgaacggctggacgatccatcgtcggtggaccagaagtgtcctcaccagacagacgcagccacaccggagtacgatcgccactagagcccaaacgctgccacaccgactttcgcccagcttccggcaaggagcaccttgccgcttgatgggggtttttaagctgataccctcggttttgctggtgtactcacttttacccttccaatgctatagaacagaagggcaaaattgagcaaaaaatacaaa

SEQ ID NO: 184545 - DNA, 844 bp, Zea Mays
cgcgtcggtgttacgaattgagctgcctccaaacaaaaggcaaagataaaaggcaaaagctggagagagagagggacgagggagggaggccattgatagagaccacgagctgttctagaagtcaccgcgctgcagcctgcagctcaggggggcctgttccctggatctcgccatcgccattgccgctgccccccacctactactcctgctcctagtcctacacccctcctactccaatccaagaggtgctttggatcgcattgcttcgtgctagagttcggtggtcagcctgcgtgtgggacagtggtactccctccctgcttcttgattcgtctctgtggttgtgtttttagagccactgctttccccccttatcttcatctggtagagtgggtttgatgtggcttcctgcgagaaagatctcactttgatagtttgatgtcttcatgatctgtctgaggtttttcggcttgatttcggcagctgattaagcacccgcagataccactttttttttcttcgagtatccgctcttgttggactggatttctgaagtgctcgcagattgtctgtttatttatatcgtgttgcctccttgtttctgattattccaatcttctggacaattttttcccttccgtagagcgcgaaagatctcattttgatctgctaaacagctgcaattgtatcccaatttgcttcagtctccaccactggatatctcattggggtttctccaagatttgcatctgcatagcgtttgtctcgatgctgttgtctgttctgcatttgctcctagtgtccggcatttgtctgtctcttcatgctgctcccatgatctagg

SEQ ID NO: 184546 - DNA, 492 bp, Zea Mays
tgaaactctaaacatattactaggatctcccagacttgaaaatggtgctgacacggatgcccatattgacaataatttgcgactgaaatgggtagagagcttcctttcaaaaagattctgctggaaactgaaagatgaatttgcacatttacggaaatgtatcattctgagagggctttgcagcaaggtatgggtagtgaagtgaattatgggaacattcatagtttctattccaaacaggcatagtgatactgatatggtttgttgctcaggttggactggagttagctgcaagagattatgatatgaatagccctaacccattcgacaaatctgacattgtcagcattgttcctgtgtgcaaggtagtaaattactgaaacttaggaaactgcttattgtctgcttgtcagataaactactgattccattgctgtttctggtgtgttctattttcagcatgtggtctactcatctattgatggtcgaaac

SEQ ID NO: 184547 - DNA, 482 bp, Zea Mays
atgatatgccttccttctgatggccagaatatgttaattgatcagtttggataccattgcgataagtagctgtctagatacaccagtacccacaaattctctcacacccaatatgccgacatggtggggtaaatcatcgtcaaaagatgttaagaaaaccaccaaggaaaacctgatcgatacatttcatcgcttgataagtccaaatgagcaaaagggaagcacaaaatcaaaacggaattgcaggcgtggcaataatacagctgctgagaaagtttgcaaatcaacaacagtgtcacgtccaacttctccatcgaaagaagtttctcgctgccaaagtttttcggctgataggctgcatgcccagccacttcctattcctggagtacgccctcgagtaactcgtgcagttgctgatgtcaatgtttcaaagcccatattggaaaaacgtggcaaacctccactgcttttgccacttccta

SEQ ID NO: 184548 - DNA, 498 bp, Zea Mays
ggaggacaggaagaaagcgatgccgccactgccgggcacgacatgctgcctcaccccgagctgtctcgctatggtttatccgtcgtcgccgccatgcatgcctcgccgcagtgcaggtcccctctggcgcctcctgatggtggcggcggagaggaggaacggtggtggtgccctgagtggaggaggcagcgatgccgatgcggccatggcttggctgcagccatcagtaatgcagcggagaaaatctagagagggtaggggaagccgtggatgtggcaggggggctgcctcggcggccatcgcggggaggaggcatgtgcgcacggtgaaggcattggtaggcattgcgagggaagaggcagacgagggtgtgggtgatgtccccgatggaaggcgattgtgggcttactttgaaggcgcgggcgcgacgatggcgatgagaatggcaggagacatgggctcgacggtcgcgacgggagggggtctcgtacaagggtg

SEQ ID NO: 184549 - DNA, 698 bp, Zea Mays
cacgtcaaagctttttacaatgttcggcaacaaccgaagctaagcctaagctagagctcgaatcatgacgcacagaatacattgattctagatctgtgccgtccaatgttgtccacaatactggagattctgaccacagcatataaaaaaagatatgtgttctttattattcttattattatttcttgggtgcaggcagatgcaggtgcgcgtgcccaagtcaacatttccttctacttctaccattcgccgactccttgtgccatccggcctaacctcttgtgatgctcaaagtaaaagcatctgtgaccttgatttcagctcactattctttgttgctaatcaatgtgttggtgtttgactcttctacacacttcacactagcaaaccccaggccgtctctaaggacaaatctagctagtctggtgcagccaaaaggaatcttcgtgttctacactccacaaagaccacaaaaagtgtcatctttttcttccttttcttggtcgacgaaaggaggaggaggaatgagctcataggaggcaacaagtgatgaggggtttaggattcgtgttgctgttggtggcagctgcagcattgatcaggccatcagaagtagtaggggcagaggaggaggactgggagcttttcttgttgcagtggaggcagcataattctcttccatccccacttctcaatgg

SEQ ID NO: 184550 - DNA, 424 bp, Zea Mays
agtgagaaaaccacgcagtcgtttgtccagacaaaacaagaacaagaacccagcagcagtacgcacttcctcctcctcctcctcctctctctctcgctctctctcctcttgctctcgctccctctcgctcccccagtccgcctccctggcccatcagatccaattccttccccgacccccatcccggatccgccgcaattcctccgtgcgtcgagctcgattgctccccgcccgtggaatttgctcctttctcccgcaagaatcccacctcggccggcgacttggggggacctgccaaggtttgggcgcgcgctcctgcttggcgtagcgggccatgggcgtgctgttgccagctaggctgttcgtgcgccggatgctcagggttgtcaggctcaacccgttgcagcgcagcgccaagagtgga

SEQ ID NO: 184551 - DNA, 509 bp, Zea Mays
tgccccactgtcgccatccgcggggagggcctcggccaggtgctcaagacctgctacaacatatacctcagcagcaacagtggggccaatcagctctgcgccaagcttgcgctggcgcaggtcctgctgattgtgtttgcacgcgtggaggtggattcgatggacgtgcgcattcggacggtgtcgatcacggagatgatggacgtgtctgatcgcaacctgaacgactccagcatcgtgcaggtggctcaggggtttataaacgagacaatggaggggagtgttgcaccagagccagggtcacatttggagccaaccgaggtggatggaaaggaggatactgggatgagcaagattagagaggatgggcttgcactcttgaagaacctgtgtaagctgtcaatgaagttctcgacgccagataaccctgaggatcagatgttgctgcgcggcaaggtgttgtcacttgagttgctgaaaatggttatcgacaatgctggccctttctg

SEQ ID NO: 184552 - DNA, 444 bp, Zea Mays
acgaagagaaggccaaatggcaggcagtcgaagcccattcaaactctcctttcccaaatcagaaggtcggtcgtttcgccagctttaatgcaacgtttgaaccggagcatgcgtgctacagtaagggagtgacagcccatcctccttcagagcattcaacgcctacaagcctgagccctccgaggaaggaaagcagcaacattgaagtcgccgatgcaggttgggagatggttaagcctcccttctggtggaggaaagacaggcgcaacgctcgctctgcccaggcctcgcaaagatccatctccaaagaggagcaagaagagagggaaaaaagatttttgaagcacgttcaaggtaagtgctgtaattgtttcgccaccaaccacagagctgcagcctgtactaagcccactaaatgctggagatgtcacaaggatgggcacc

SEQ ID NO: 184553 - DNA, 533 bp, Zea Mays
tcttattgccaaaatggaggctgaggagtgtcatacaaaagaaaaggaggagttttgtggcataattaaagagaaaggaatgatgattgataaacttcagcaatacgtcgctgtgctagaagaagaaaacatggtcaagaaacttgatttgggaagtcttatcaagatggagtgtgacaagtccattcgtgaagtgaagaactggtattctgaaattgttgagatctctgacaaaaagcttttggagctggaagaaaggcttagattcgctgagcagaaattttcatgcagggagcaggagatcatgaatatgtttgatcaagaggaatcagattggtatacactaattgcagagaaagaaattgctatttctgatattcaacaaactgttgaatctgttcagcttgacatcaagcaccttcttgaggcagcagcagcaaaagtggcagaagttcagctagaggtgaatcaactttatggttttgctgaaactctgaattcacttaacatcatccaagagcatgatactgttt

SEQ ID NO: 184554 - DNA, 297 bp, Zea Mays
gggagcagtggggtggaggaagagagggtaggacaggcccatttccgaagtggacattccccaaatttcagggcagtgatccaggaatatggtttgatcgatgtgtagattacttcaatgtctattaggtgccggagtgaatgtgggcgagttcggcttttatgcacatgaggggaatgcgtcaaggtggctgcaggtgtataagttgaaacatggattgtgtgattgggggcagtttacacaggcagttagggagaagttcggagtaggcgaatatcctcaagctatgagagattt

SEQ ID NO: 184555 - DNA, 388 bp, Zea Mays
gtgagagcaagacgtgaccatctcctaccttttacagctcacaaagacgaagctcggaggagctggtgaccagaccttggggccatgcatggatcactttcccaacccttgttatcgagtatagagtaggacgggcggataaaatactagatcccgagctcggaaaatatggcgtcggtgcaagtggaggccaatcatggccacggtgctgccggctctccaccttggaagctttatcacaacccccactacaccccgcggggcaggggcacccatctctcctcatcctgctgctcgccctctccttgccaagtccgcaggagtcccgagccccctcctatgatcattgcgctggacgacgaggaggtcgaccaagggtacgggtacg

SEQ ID NO: 184556 - DNA, 551 bp, Zea Mays
ggaggacagggacggggacgtgtacaacgtcgaggtccgcatggccgaacccaaaggcgacacatttggccccgtggagaccgcggtgtggacgccagttctgccggcgcccatggacgccgacctgtaccgggcgtgccgtaacataaacaagagcggcagctgtgggggagctgccagtggtagtgtgctcacgtctgtgagcaatgccgcctcggacggtggtgctggtggcaatggcaccaccgtccgattgagcaatgccggctcaggaggtggtggtggtggcaatggcgggctggaggggagacctgtggtggtggagtgcaagcccaagagggaggtcagcggcaggaaagaggatttctactggccacaggattttgtgctcggggatgttgtgtgggcgaggtctgggaagaagtccccgacatggcctgcgctggtgattgatcccctgttgcatgcgccggaagtcgtgctcaactcctgcgttcctggcgccctctgcgtcatgttttttggttattccgctaacgggcatggcaggg

SEQ ID NO: 184557 - DNA, 794 bp, Zea Mays
tggtgagactgcaacatcaaagaaaaagacgctcggggcgagaggagacgtacctggctgccgcgacaagacaaatcaaattgcactacaaaacgaataggaagatattctgctcaacaacacagattgaatatgaaccttctggaccatataaatagagcgtagttcattcgccattttcacaagtcagaagcaattctgttaatcaacatggaacgttttggtcagattgtaagcaaagatactatacatatggggcacggatatagatagacaaaatgtatacatgaatactcttaaaagcacttgaaggagttgcacctagatcaaattttccccaagctaagtgaaacagagagttgagtcagtgcatcataaaaggagtatgagcaattaaccacatgtgaatataacagtttatcctagtgcatcaagttggtataacaccctcagttgcaagcgatgtccaatccattgctagagcttaagacccaattggtcggcatgtatatagtcgttctcactgattctttctccatattgttcgagtttgtgttttttattctttgtacggggctgatttcacaaagaaccatattgcaagtctgaagttcaagatatagtatttttaagagagaaaaagcataatattttactacgctgaatcattcatccactctgtccacattcaacctccacccgcccaaacacaatttcaacttgattagcccctgttgtttcaaccatctcatgccttttcttgtagaaagtagaacctaaaacaaacaattgta

SEQ ID NO: 184558 - DNA, 462 bp, Zea Mays
gtggtttttgcaggaaaggtaagattttgcctgcgttagtcatcttgcagatgatgttggagaaaggagtagtccctgatactgttgcgtatacctgcttgctgaatgggttgatcaatgaaggccaagtgaaagctgcttcttacgttttccatgagatcatatgcaaggaaggcctgtatgcagattgtattgcctataattcgttgatgaatgggtacctcaagagtcgaaatgtgaataccataaaaaggatgatgtctgatatgtatcagaatgaggtttatccaaactctgctagctataacatacttatgcatgggtatgtcaagaggggacaattttcaaagtcattatatctgtacaaatatatggtgaggaaaggaatcaggccagacaatgttacatatcgtttgctcattcttgggctttctgagtgtgggttgattgacattgcagtta

SEQ ID NO: 184559 - DNA, 273 bp, Zea Mays
aagggtatgaagccagacaacctgacatttccttttgtgttgaaggcttgtgcaaaaacttgtgctccaaaggaaggtgaacagatgcacaaccatgttataaaacttggatttcttctggacatctttgtttccaattctctgatttatctatatgctgcttgtggtgctctggcctgtgcaagatccgtctttaatgagatgctagttaaggatgttgtgtcctggaattccttgattggtggatacagccagcacaatagacttaaagag

SEQ ID NO: 184560 - DNA, 430 bp, Zea Mays
ctattatgttgaccttgttatcttcaactagcaggatctttgctttattgccgattggagaacactttggtttcttgtggagtgattgttcttcaagaactttgcacgcagcagcacctgaaacagataccaagtctcctcgggaactggaaacccgttcagcttgactattcagctcaaggaccattgcattatcaggttcttcagctgtgctcctaacactagcaccattcggttggtgagcagtacaggtatttgtaaagttatgctctgttgatgagaaaccatttgagaacaatttgcggtcatgtgatatgtcaggcggatcatagcacataagcttggcgccgattaacttcgtgttgttcattattgaaactccaggagacagaagagaagctctcatttgtggcttgaaaaagaaagaacc

SEQ ID NO: 184561 - DNA, 2655 bp, Zea Mays
gttcgttctcattttttttttctgtatctgtaagtgtatgaaaatcatataaggaaataagttgcaagttgtttataaattcttatattttactgtaacaaagccagtggggccaaagtagttctgcatgtagatatatttctatgttaaagtacaatgtaagctgcaaaacacaattcatcttttgtgtttgattctgttttttggaatgcagttcatggagagccattgcttggggtcattagagtatgctataacattgctcttaataggtacctgttatatcactaccttcttgtttgcagtatgttgccttgttgccctttggaccatgtatgataatttattcatttgtattttgttagcaagagccctgtgaaccaggctacctcaaaggctatgttaacccagatgatcagcattgtattcaggagaatggaatctgagcaggtaaagaattccacatatcttatcttgtgcctaggaaaatgattcattgaggttgtttctctaggtattattttactttcttggttccaggtttctgtattgcctgcaagctctgtggttaaagatacaccttcatctatcacaaatgaatctgaaaatggagaaatatctaccgatggccaagatgaggaaaaagttactccgggagatgcattgtctatgaatcggccttctgaagcacctccaacatctgttgaagagcttcagaatcttgctggtggagcagatattaaggtactgaaactggatctcgttgctcttggaactttcaaacgtgtcttaggtattgcattggttccatctaattacaagagatcttttacaggggctggaagctgttctagacaaggctgttgaacttgaagatgggaagaaagtgtcacggtttgttaagcttgtactaaggtttttttgcatctctaaggtgatgcatccgggactcagatgtggcagtagctaattacctttgcccctcccctcttctgtttttccagtggaattgacctggacactgtgaacataatacagcgggatgcactattgctctttcgaactctttgcaaggttggttgctttagtaatgttactttagtcggagctataagaaagtaacaattatatcctaactatgttgtgttatccttttagatgagcatgaaagaagaaagtgatgaagttgctaccaagacaaggctgctatcacttgaactgctccaggttagcttacttctttgaggttgcttatttttatttttttctttgttttgattttattcgtagccattctcttcagggattgctagagggagtcagcaacgcattcacaaaaaatttccacttcattgattcggttaaagcatatctttcatatgctcttctgcgagcatctgtcacttcatctccagttgtttttcaggtgaaaatttgaaattcattcagttttggtttttatcatacctggtgtaacggtactcatcatttctgtaataaaagtggactatcatgttaagttgacttctcttcttttattacagtatgcttgcggtatattttcagttctgttgctccgttttagagagagtctgaaggtaaaattattattaagaggagtcatggatggaaatattgtttgttgtgttgtgttgcttttagtaacattacattctttgttttttttcaaatattggtgcagggggaaattggtgtcttctttcctctgatagttttaaggtctttggatagctctgatagctccctcagccagaaggctagtgttcttaggtgactattcttttcccttatggaatcccagctgtatgcataatgtgcgaacagacacagtttggtcattcgagacatctggtacatttttgtttgatgttattggactgatttcgaatcaggatgttggagaaagtttgcaaagatccccaaatgcttgcagatgtgtttgtgaactatgactgtgatcttgagggaccaaatctttttgaacgcacggtaatcatattttttaaatgtccagaaaacatagcttctgaatttctcataaaatgtgtttttttctttggcttgcaacacatctgactgataatctatctcctaccaggttagtgcactctcaagaatagcacaagggtctcaaattgctgatactaactccattgtgtcatcccagacagtttctgtaaaaggctcgtctctccaggttactatgatttaggttacaatggcctcctttataatatcttgtttattgttagttttacatgaagattttggattgcagtgtttggtgagtattctgaagtcattggctgtttgggagcaacttcgaagatattccttaaagcaagggagcattgttgaatctcatgaaggggatgcttcaaggagcgtgacaactgatgagatgaagagccaagaggatgttcggaatcagtttgagagagccaaagctcataagtcgacactggaggctgcaatctcagaggtgggatgcctgcagttttcttaatcaattcagaactgaaatatcacattgtttcttgattgttttagttcgtagctgacaccttcgccttaatcttttgcagtttaatcgtaaaccaactaaagggattgaatatttgttgtcaaataaat

SEQ ID NO: 184562 - DNA, 703 bp, Zea Mays
ctcggctgagactgaagttcgccgatctgagtacattgagtcggcagatagtggcaggtgaggacagggacgacgataccgtcattgctgaggttgaccgtgttcgtgtcgaagccatccgcgctgttgatgatttcctccgttgaactgtcgtggcagcccatcgagtcgttgctagcagactattttatgaatttctgactcacatcgtcggcctgttggcctctcactgttcatcgtcccatatgcttgggaaatacttcttcaagtgttggccgttaaccgccaccgggaacttagtcccgtttaattcttcgagtatgtatgcgttcctaggtaggacctgatcgactttgtagggtccatgccagttcggagaccatttgtcgtatgccgcatcttttgttccgagtggcagcactggttcccataccagatctccggcctgattttctttcggcctgacctttttgttgtacgcccgggccaccttagctttgttgtctctaatcttttccaacgaccaaagccctagttccgtgagatcctcgacattatcgttcatcagagcagcgtactcttcagccgtcaggtcattctggaattccacacatcttgagccggctgcaatttcccacggcagcacaatctcctacccgtataccaaatgatagggcgaagtcctagtggatccgtgacaaga

SEQ ID NO: 184563 - DNA, 985 bp, Zea Mays
ggcccctcatcaacaagaagcacttgaaattgaaaatagtggaaacaactgtcaaagtgacagggctgagtttgctgtgcatggcaaaagaataatcattgtcggagcgggccctgctggtttaactgctgctcgccatttgcaacggcaaggttttttggtcactgttcttgaggcacgagaaaggattggtggccgtgtttatacggatcgcacatcactttcagttcctgtagatttgggtgctagcattattacaggggtggaggctgatatagctactgaaagacgggctgatccatcctctttgatctgttatcagcttggtcttgaacttactacgttgaatagtgcttgccctctgtatgatgtagtaactggtgacaaggttcctgattctctggatgaagatttagaagctgaatacaatggccttcttgatgagatggcactgctttttgcgcataatggtgacagtgcaatcggtttatccctggaggatggactggagtatgctcttaggaagcatcgcgcaactcaacctatggattctgtggaccaggatggccacttgagatttatgacaaattctagagctgtagacatttccgtaagtgcttcaataggaaaggagatagatcattgtggaaagaatgataagatagatgtcctcagccctctcgagagaagggttatgaactggcactttgcacatttagagtatggttgtgctgcaacgctgaaatctgtatcccttccatactggaaccaggacgatgtatacggaggattcggaggtgctcattgcatgatcaaaggtggctatgacactgttctacggagccttgctaaaggacttgatattaggttaaatcatgttgtcactgaagtactgtatggatctgaggagttaggtgatagctgtaaggatgggaaatatgtcaaggtttccacttcaactggaagtgaatttactggagatgct

SEQ ID NO: 184564 - DNA, 457 bp, Zea Mays
aacatctgtatagggaaatcgttgctaaacttgactgcatcgaaaagatagttaaagaccagaacattggtatgaagtcaggcttgcataaacatgttgctgatcttaaggagttggttaaagttgagtggaagaagtatgacgtaagtttaaattctacttttttatagattgctattgaactgtacctagttttctacttctcttgtagattgctatcgaaaatatagttacagaccagaacattgttctttactttttcaggttgtatcagcgttttctatcgtagataacttgcagacatttgaaccgtatatagatgttctagagctcaatctcctgaggagagagcttgtacatgatattcacgtatgggatcgcagactgtacatgatgcactccctcacgaaagagaactgtcgtactatgccaaatgacgcacaattttctgagaagt

SEQ ID NO: 184565 - DNA, 377 bp, Zea Mays
ctatgtgtggacataagcgcaaaaattaatgatgtgagtggctacctcggacttgcggactagagggaaagtccagcaaaagtgagtgaagtcatcgaggatgactaggtagtactgcgcactggcaacgggagaggtcaaaacatcacagtgaataagctcaaatggtagagatgaaactgaactggaatttccaaagtccagccgcacgtgcttgccaagttgacatgaatgacatagagtgtgagcggacttattacatgagatggaattattttgtctaagtaaatttagggcagcagctcctggatgaccaagacgatggtgccagaggttggtggaggtggcgaggttggcttggggcgtggcagggacgg

SEQ ID NO: 184566 - DNA, 315 bp, Zea Mays
tgagacttggttaagaaggaagggtggcgatccttccttgtacaagcagagtttgggattagaggatagttttgaggttaatgacacaaacctagaaccagaatctagctcagtttccaaaatagctggtgaggaccaagaatctctgtcatctaagccgaagtttgaagatcttattcgagcatacaaccaagaaaaatccaagtttttatcttcatttattggtcaagtatgcatctgaatttagtgtcctaccattttttgtgcattgatattattgtagttagcatactgttttttcacagagactccgag

SEQ ID NO: 184567 - DNA, 303 bp, Zea Mays
ggcaacggtcacaagaccgaaggacttgggcgggttagggattctagaccatgataaatttggcagggatttacaccttcgttggttgtggcaggaatgggtggatgataccaaaccttaggttggcatggatacctcggcggacgacactgatcgagcacttttcactgcctcaacaagggtcgtcgttggagatggccacaaatgtcgtttttggcattgttggaaccggatcgccgacacatggcgtgtccgttgggccgcccacacatacgacgcgcccacctaggccgtcgggtcacg

SEQ ID NO: 184568 - DNA, 351 bp, Zea Mays
atggacataccaatattgttagcaatctgtcggcagtgaatcttgtcgccatttgctactgtgacctggaaaccttggttggaactgtaggctagccgcagcccatctgcaattttgaggctgacaaaattgtgggtagaacccatgtcaagaagagttgtgagggcttatccccgaatgtcgacttgcagttgcatggtgccctctgaacggatgcctgttaaggcgtggagtgaaatgatgggtgctggatcctctagattggattcatcctcgattcctatatcttcctcaaaatctgtgacctccagatagaacagacgcgggcaccgatgaccacgaacgtattgt

SEQ ID NO: 184569 - DNA, 569 bp, Zea Mays
ctgaaacatgagtggcctgccagatggtcatccttcgtacctgatcttgttgcagctgcaaagagtagtgaaactatatgtgaaaattgcatggctatattgaaggcaagttattttgtctgtattttcagttttgacattttcgttgacatctttaatttacatattggacccattatgcatatccaatttaataacatgcagcttctaagtgaagaaatttttgacttctcaagaggtgaaatgacacaacaaaagatcaaagaactgaagtcttcacttaataggttgggtttgttgtcaacttctatattttcatggctaccttggatgtgctgtgtgataatttattcgtgaatctatgttttaacaaaaaagttacttggctctttagtcaaggatacttctgttttaacttatatgttattttctttgttcagtgaattccggctcattcatgagctatgcttgtatgtcttatctgcaacgcaaaggccacagctcatccgtgctacattggcgacactccatgctttcttatcatggatcccaattggattcatttttga

SEQ ID NO: 184570 - DNA, 374 bp, Zea Mays
atgtgcggatcatgtcatgttgtttatgagggaatgtgatgttatcaccaaattgctaggattatgctacaatcacccctgtttatctagatatgggtcttaaccagggagggttggacttagatctgctgatgccccatccaaacagtaataatgaaaactgtttcactgaaagagtttctgttgtgaataatgttccagtgctaaggattgtaatcctttttaattttagggaactacaaatctagtttcatgttcaaatgtagctttcttttaattaccttgggatgttcctgaaatttcactattttattgaaatagcatcacatattttttttgctgtgtttaatttcgctccagtggttctagttgag

SEQ ID NO: 184571 - DNA, 330 bp, Zea Mays
ccgactaatcgcgattagtcgtccgactaggggttatggtcgactagttaagcctattttgggccactaatcgggcctctattatgagggtcggcccaccatctgtacacagcacaaacattgttttgccctacacccatgcctgtaccaatacggtacgcactgttgcgcatgcgcccttccccaatgccgccaccccttctccatcgtcgtcgccctcctctcttgtcgccctgttgtgctcaggcagccccctgctccagcaacagctacgccccctccatcgcgcgacagttgtagtctgcagaggccccctacaacgtgctcatg

SEQ ID NO: 184572 - DNA, 494 bp, Zea Mays
agatcttctgcccaattcttgaatgttgaattctaccccaactccagcgacccgacggctacgacgcggagctgaattatgcaaggccagatttcttcccctgttcttgattgaaaggttgtcattgctaggagtcggcagcaagttggagatgtgacgagtaatttttttgaaaaagtcaacacgcatagagatttcagatgtatccccagttcctcgacactgatcctgatttttctgtagagattttgtatgaatattgtgcccagttgcagactcctgagactcctccatgagcctttgtctgtttccttttttctttctgtaatagacttttagaggacgatcagtttggggtaaaggaattaaaggtgggcagaactgggccagctccagcgacccattgtgaatttggggcgatgctgttccagtagtgtccacagtcccccaaaccagtctagcctggggcgaacctgctccactcagctccagca

SEQ ID NO: 184573 - DNA, 530 bp, Zea Mays
ctctacactaatctcattgtatgattcttggctccatgaaatataatcatgtagcacaattttgattgtcaaccttactcgtgatgttttattccagagtcattttagctatccttgtgtggcattttgtgcctgaatcacatagcaatcaatgttatcaagtcatcttactaatcacgattagtcggactgatcaatgtcacggtgatcagttatgtactacaataaatcacaattagtcaggctgatcggtgccatagcgactagggttaattagacgatttgataacattgatagcaatcactgcaagcttccatgtcaatccaaacttgctgtaaaatcctgcagttgacatgaggatgtttttctgcgttggagttatgctagttgaattttgtacacctacatacatgccttacttttaacattgctgttaaactgagtttgtttatctgggttctatcaggacaatacaatagatcccttggtattcttactgtcttataagcatggtctttgaggtgtcgcc

SEQ ID NO: 184574 - DNA, 1228 bp, Zea Mays
cagaactgctgctacgttgcttgcaaacagtcatatgtttatacatactgcaaaagagttttggttgcgagaagccaaattttgttgttctcgtaagtagaaccacaaccgatctatttctattgaacaatagatgcaacgtctcaaaagagtagctatgtagaaggtaactaattgttcttcatctttggtctttttgcaaagactgaaagttggtcagcaccatgtgtttcttcctataaaagagggagcaatataggttaattaaaaatattaagtacatatattgatatctatatgggtattatcggatgtgttgaaaagtagttaccttgtcggagtcatcaattgcattgaaatttctcttgtatgatacactgaggttgtcaaagcaactgtaacatatcagattaaaagatgttataacaaaacattgtatattttctggatgatatgaaaagaaagatataaaaagtagacccactaacctagtctgatcaatctccataagctgtaattcatgtggtgatgctgcttctgaaccagaggtcttacatagcaatgtacatgttagttttatttttgcggattaagatttataattgagatgttttgatagaaagcagtacctgtatatcttgtgtctttggctctattggtactaggggtggtagctttggaagttgagatgagcttgcgctgtggagaacaacaggctcttcttttttgaacacggaaaggagtaggtcttttccatgcctctttttgatactaagaatatcaaatgttggatctttgttgtccttattaggtcctctctttttaatactttttcctggaaacaacttggtcacaacagtcaatttctcacccacaattgctttaatctcttccggcaattcagatttgttgctttgtctcagtaatttctctacggttttcccaataagtgatgtcgctctctcatcaaagagcacgaattctagctcataggtgccatcagtggcatatagagatattttatacctatttagagtataggttatagacattgataaaatacaagaagttttgtgtataaaaatgattgtacagagagtttacctgtggaccatctgagaggagatgtggccttgtttacaaatgtatgtttttccttcatatcttgttgatgtattgcattttgtgcatccttgatagaaccagggcttattgtcagcaattcttg

SEQ ID NO: 184575 - DNA, 343 bp, Zea Mays
gagcaaaatgatgtggaggtcactaaccatcagaggtggtgctattgttcaaaatccaatggaacaggaggtgtgacctgacagtgggcaacgcttgaaggacaggcagacatccagcgacgcttgactgcggtggggatgggttggattggcaacttcctctgtgcgggctcctggccagcagatacaatgaaaggaggtggctgtggctgggaaggaagacggtagccgtgactgggaaggaaggaggtggctgcgattgagaaggttgcagcatccaacaacttcatccacctatatgaactctgtgggcgacgattgcagtctgcagggaagtgaatca

SEQ ID NO: 184576 - DNA, 564 bp, Zea Mays
ctcagaccccagttctgtcggctgagttatacatgttagtccacccatatggacagttgacaaattactggaggatgctgatgtcgaatttggactgtaagctcgaagtacaccaagagtactcgagacagtagcaacaccagacagaccagaacctgtagctcccacattttgattgtggggatgccatacatgaacaaagtcctgaaaagaacagaattagatgcagacagtcatgtatccaatgcagaaacaatatgcaaaattttaattcagaagtttatgttctgctgctgtacctcgtacactctctgttgggaagcagataaatgcccaggcttagaacttaatgcttcaggtacacgagcaaacggcccttgagcataagcaaaagtttcatgatatgtaggaccaccgccctctctttgtttcctttgttgtgaaaatgactgggctatttctgcatcaatcaattcaacagcctgacaagagcatgttagtcatgaggatcaggggaagaacaagagcttcagctgcttatccattaccaaaggtagaagtggt

SEQ ID NO: 184577 - DNA, 676 bp, Zea Mays
aagacacttcacttgtccacacctcactatgccctcttcggcgtagctccaacatatactcacctccgtgtctttggttgcaaatgttatcccaacttatcttccactactcctcacaaactcgtcccccgctctaccttgtgtgtcttccttggctattccgatcatcacaaagggtatagatgtctcgacattcactccaacaagatcatcatttctcgccatgtggtcttcgacgagtaatcttttccccttttccctttgccgagcagtcttccacaccgtctgctacggatttcgagtttttgttggacactgaccctcccgtgcccgctcctattggatcagcacgttcttgtcttcctacaggttttacctgcacaaccatgtgcggctcctgcaacaacgccaacggagtcttccgcacagccacgtgcggcctccgcagcagctagcccatacgtacttgtgcagcttcctacagctgtgccgaggaggtctcccctgcaacctgcggcatccaacgctactccgatagccacacctggcgacatgcgtgctcagccacgtcttgtacgccaccgatttgatgggtttgtctacacccgtcgttctgctccaaccacgacatctgtggctcctgctgcaacttcttcaccaccaccagcatctgtca

SEQ ID NO: 184578 - DNA, 570 bp, Zea Mays
ttaagctatactgaacacgatcatggacctcaccataagtccactttgtgggacccgccaggtaccggtaccaaaatgttgacatcgaccaacttacatggatctgtatggagaacggaggggcagatgccatatcggggatacaacaagacacacccctacggacgacaccaggagggctagagcaacctaggggcaacaagtaaggacccctgagtagaatacaatttctgactataaaagccacctttgatctataaaagggcaggacaaccttctttctcgacacaagcacacttactctaacacgctcctgaacaatacatcgatcaacactacattggactagggccacggtctaaaccagtttaatcccttgtgcctcaactccttagctcggactcggatcctcgtgattcaccatttgaagtgactccgtgcttccacccccagcgtacacaaatctactgttcctcaggttttcgaaaccacgaaacctctccttcctaaaacacaaagtatgtaaccagtagaaacaggctttaaccctaggctccactctagccagac

SEQ ID NO: 184579 - DNA, 394 bp, Zea Mays
aatttatataagagggtggatctcttctttcttgtagattcaataacacaatgctctcgcaaccagaaaggtaagtgtataacgttcccatttttggttgatttttttgtatggtgatatttatgattatgttagaaattatgcaggtggagctggagatgtatatccctctctcattcaggcagttctacctcgaatactctatgctgctgcacctcctgggaactcagcatgggagaatcgaaagcaatgcctaaaggtaagtacgtttgatggtctttatgtagtagacatcacatgctgcactgccttttcttttgcttaccaatttgtcatttgattattaggttttgaaactttggcttgaaaggagaacactttcagaatatattat

SEQ ID NO: 184580 - DNA, 424 bp, Zea Mays
tagaaagtagaaccaaaattgcctagcaaaaacacagccagctagaaggtggttaatagtttccttttcctgatcgcatagcacacaaagagtggggtgggggagattccttttagccaaccggtctgctgtcttgtgagcaacaagccacatgaagaaggaacattttgggggagtccaccctttccacactaggtcagctgccccaaataaggttgaacctagaaaaaaggcatcataggctgatttggccgtgtattgtcctgaattagagagcctccacaggtgtttgtcaggaattccttgctgcaggattattccctctaactgctccaagataagaaagaactcctgaaggatttgcaaagtaagggttccatgaatgtccctcaaccatctccaatcagccaaggcctcggcttct

SEQ ID NO: 184581 - DNA, 414 bp, Zea Mays
tcacagcggctgagttcgcatcgtatagcgcggatgagggcgttcaacgccactacttcgcgtcgtacaacccgcaacagaacggcgtcgtcgagcggcgcaaccagacgattgtggggatggctcgagctctcctcaagcagaggggaatgtcggctgtcttctggggagaggcggtggtgacaacggtctacatcctcaaccgctcgcccaccaaggcactcaacgggatgacaccgtatgaggcttggcatgagcacaagcagtcgttctctcacctacgggtcttcggctgcctcacgttcaccaaggagcttggccacatcggcaagctcgacgacaggagcaccccatgggtgttcattggctacgtggagggctcaaaggcctaccgcatccttgacccaggaacac

SEQ ID NO: 184582 - DNA, 1193 bp, Zea Mays
cgaagacgacgagccgtcgccgcgcactcgaacagccttaggtctgcacgccgccctccgcgcctgcactcgcaatagagccatgtgttcttccgcgggcctcctggctgccctcctcgcgtccgcagagaagctgttcgtcgaaatggatcagggtagcagatgggacgggacgccactgcttcaatgcattcagatgttgggtgggcactcgcttagtgtgaaagacctgcattcctggcttgatttggttagaaagtcacttggaacgagctgggccacaccacttatgctagcgcttgagaaggccatgggcagcatggaagcaaaaggtcctgctgtgacatttgagtttgacggggagagctctggtctgcttggcccaggtgacagcaggtggcccttcttaaatggatatgggtttgccacttggatatacatagaatcattctcggatacccttagcacagcaacagctgcggcagccattgctgctgctgcagcggcaacatctggaaaatcatcagcaatgtcagctgctgcggcagccagtgcccttgcaggagaaggaacaacacacatgcctcggcttttcagctttctctcttcagataaccagggtgtggaagcttactttcatggccagttcttggtggtggagagtgtgggtggtaggggtaagaaagcttctttgcacttcacatatgcgttcaagcctcagtgctggtattttgttgggttggagcacacaaacaagcatagtttgctcggaaaggatgacagcgaattgagtctgtatgttgatggaagcctgtatgagagccgtccttttgagtttccacgtatctctaaaccacttgcattttgctgcatcgggacaaatccaccaccaactattgccggcctgcagaggcgccggcggcaatgcccattatttgctgaaatggggcctgtctacatcttcaaagaaccaattgggccagacagaatgagacgtctagcatcccgaggaggagacacactgcccagttttggaaatggcgcaggcttgccatggaaggcaactaatgaccaagttaagagtatggctgaagagagcttttcactcaacaatgggatagggggaagcttgcatcttctttaccatcctagtcttctcactgggcggttttgtccagacgcctcaccttctg

SEQ ID NO: 184583 - DNA, 433 bp, Zea Mays
attcttgaagtaaacacaatcacatctacttctaaagcaacacaatagataggtaaaatcacacaaccccatcctcaagaacctagaaacaattagcattgaagcaagtagcagaagtctatacccttccagtccctaaaatcaacaaattatggtatgtcaaacctcgaagtgccgatcgatcgctagattgtctagaaaacagccctctcgtactctgtctctttctcgatgaagcaggcacgcaaacgcaccatgggttgagatggtcggctcggctcagggaacataagtgggggagcaggagaggtgatcgaaagggaggaggatgctagctgtcgaggatgtccgcgacggcagccccggatgagggttgggcatgatgcgcgggggatgcagtgggaagggggcaagggagtcgtctccggtgggc

SEQ ID NO: 184584 - DNA, 1307 bp, Zea Mays
gaaaaggttgccatagagggagctatttgtgttacagggatgaatccatcgggaaacaactcagcaactgtaatggaggcagatgaaagaaatgcagttccaaaagaatttggaagggctgccaaggaagtaattgaagctgtgccccagagccaacatgaagttaatgcaggtgttataaacaattctcatgatgtggtggctttacctgaggaggcccatccagttcagcccacaaataattctggtggatgtcccgtggtatcttgcataatggaagacagtaaagttgctggagattcgggcaaaattgattatgaatatttttgtgattttgttgaggaacagagggagattccttgtgtacaagagatttctggagaaaacagtcgaatgggtgagaaagagagagaagaaacctcccatgaatctcctcaactagagattgtagaatgtgtgcaagacatcgttcttagggaaacagactatgatgttaatcaaaagatagtttatccagcagtggaggatgtagcaacttccgatagtatgagtacatctcttctgggtgttcctgaaccagaaaatgcagaactcaataaacatccttatctagcaattaaagatgaggaagatatacccatggaagctgcacgaggagaagtagcagaaatggaacaaattagtacttctgcaaagggaggtgccgaggagcatggggacttttctgaacttgatcacatgggccgagcagatgctaaattgcatttacacttaaattctgaagtgcctgagaaaattgatgaaatagagtgtaaagaagtcgctggcactatgagactaactgggagatattctgatcagaagcttggagatgtgcctgaagttgggtacacagaagatgaaaacattagggggctggtagtgaacacaagtgataggaaaccttcagaagtctctcaagtcgagcctgcaaaactggaacattctaaggatctggtgaaagaggaaacagacaaatccgaaaatattcctggattagaatgtataggattggaggaaactcgtggagatttgatggaagagtgtgcaaataccaagtctgataatgttcccgaattagaaaatacaggattaggaggaactcatgggccaatagaggatactgatggtagactgaaggaaattcatgatgtcaatgcagaactggataaacacaatgtgcatgagagcgatattgatagatccgaggacatcatgcaaatcgatccactaacacaggataaagctacgtggctggcgaaggaaga

SEQ ID NO: 184585 - DNA, 339 bp, Zea Mays
gttgaggtgtgtgcttcatctctttgtgactttgttttcttttcgcttagccgttacttgttctttttaatgtcttgtactctcgtaaggctgtagcaggaaaaggtcaaaaatgcaacacattgggggtaaatactgcttgttatttggtacagagcatgatgggtgctttggtacagtggcgtatgtcaagggcgtagtgatcaagggtaggcagccctcgactacggagttcgtagtctcctgccgtgtcttccaggaccgaaggttatgccccttacggcggctgggcttgagaggagatagagagagatggataattgttttctccctttctca

SEQ ID NO: 184586 - DNA, 559 bp, Zea Mays
gctagatagatgaccaagcatctgccctcctttaacattgtcaagagcatttctttgctggtattgaccctggaagtttggaaggtcagcaggatcactagcttgtgaagaaactagttcagtgtgtggcagagtcccctgttctggcagttgcattgaatggttggaagccatttgagactgtttaagggaattgttccttaacatagcctgctgatgctgtgaatttggctgctgctgatttatatgatactgattttgaataaactgggaattaggttgcacctgatgctgcgacattgggtgctggtgtagtagttgatcatgagtcagctgtgttgactgaaaattcaccttctctgtttgatccaaaggcccattttttatctgggactgttgctggacggactgaatgtttagctgattggaaaccaacatctgattcatgcttgatctagattgtaaatttgcaacattcatgctctgactatttgctgtggttaaaggggtagagccaatagcataaaagctgccggaaccagccatatcaactgatgct

SEQ ID NO: 184587 - DNA, 555 bp, Zea Mays
tcttccctagcgcaagcccactcgtggctcactcgcttcttcggtcatcgactgaccagtaagttggtgacctaacccacccactgcagcgccaccttgccttctcatcactcgtcagctcgtcgcgatcctgcacacaacactgatactttgcctcctagtccacaccagcagatgggcaagctgttgttgggaccgtggcatcacctatacctcgctaacttattagggtcccaccacgccgttgcaacacggcaatggttgtcgcttgccgtcaccgtcatctatcgctacctcgcctcctgcactcgctcctcccacctgtcgtcgtctcaccgacgccatctcacgtcaaattcgatgactcaccacaactacgcgtcgatacggctgctccaccccaacgcctcgtcctcagccagtccacctattttctctctctagctctcctttaggtagccaaaaaggtcttttttggtattcatatcattttgtaaaaactagatgttatcatttaacattcatgttattatcatcaatctacatttaactagt

SEQ ID NO: 184588 - DNA, 412 bp, Zea Mays
ctcaccatacgggatcttattacttgtgtcgtagtcacccgatacgacagcttcggtcccctatatcctatccgcttccccgcctcatctctcatcccgtgttgccacactctatgtcctcgccactgcatctgcctccacttggcaccgtcatcttggccaccccggccacgacgtcctctctagactcttgggcacctcgaccatcccctgcccccacggcgacattgcctcgccttaccatgcttgtcagcttgggcgccacactcgcttacccttctcctcttccatgtcctaaaccgctcaccgctttgatcttgtccactgcgacttttggacaacccaaatatcgagcatttctagttaccaataatatctagtcatcctggatgacttctctcactactttcgg

SEQ ID NO: 184589 - DNA, 369 bp, Zea Mays
gaaatacataggtttctcataacacttccacatcaggtgaaccagaatctgttacactaatcagaaacccaccaaacaacacaaaaggataggagatgttgcagccaagttggaagcagaagtagaaggttcgaacaataaagtactagtgatagctgccatgttattaatgcagacaatgagtcaaacatcatacaagttcacaaatcacaagtagattacagataattggaagtaatcatgaagtacacttggcaattaagaaaagatgattatatgaaccaccattttttctcctgttttcaattgatgcatatcaataattgccatcaagaaaagaacaagttatctatctacctaagagaacca

SEQ ID NO: 184590 - DNA, 1128 bp, Zea Mays
gtcatgcaaagagccatcagaatcacatattaggcgttatactcaccagcatggtagcttaacaattagtgttcggaggcttcaatctcgaaagttgcctggtgagcgtgacggaaggatatggatgtggcacaggtgcctcaagtgcaaacctaaggatggtgttccacctgccacacggaggataatcatgtcagatgctgcctggggtctgtcgcttgggaaattcctagagctaagtttctcaaaccatgcttctgccaaccgagttgcaagctgtggacattcactccagagggactgccttcgtttttatgggtacgtgtctgctatattctttacagtatcatattgttctgtgctccagtgagatctcaacaattcaaatacaactccaggtatggaaacatggtggcattcttcagatattctcctgttgacattctctcagttaaccttcctccaccagtactggacttcaattgttgtagtacacaagagtggctaaaaagggtggcagttgaggtgtgctcttttgttaaatttgaagctatgttcatcctctgcatcctacacatcagttttagcatgaacatcatgtgctcatgtatttctttctatagatatttggcaaaatggaatccttgcatgtggaggtgtctgaatttcttcactgtactgaaaagaacattgtaactgaggatgaacctgtgagggaatgtgttcaaaggcagattatcgagatgaaggattggcttaaaatgcaaagaaatgaatatgaggtggtacattcagactttcctggcattttttaacctttcctgccatatcattaactttttatcaagagttacaatgattttatattgatttattgccccttttcttgcagatgttgcttttaccagtcatgagggaaagcaatcaccccatgcagacatcaattgatattctggagctcaaccgcttgcggcgtggtcttcttcttgatgcttacatttgggatcggaggctatgccatatagactcggttcttaatacacatggccatatttcaaaaaccaatccagataatcttgatattctcctatgcaccagactgaaggagtggaaagctgatttgctttg

SEQ ID NO: 184591 - DNA, 364 bp, Zea Mays
gacagagctagcttgtactccagcgatcgagttggcttggctactacaagcccttcaagtggtggtggtggccgcgctggtgccggggtgattaataatatagtaggagagcggcttggagaaggacaagagaataggagatcgaggggatgtctctcctcggaaactggctgtccacgaagcacaagcgctacggttagcacgcaagcagctcgtgctatgcgcggtgggcgtggcgaactggcgagacgctgtggctggctggcgtgtggatgtggggcggcagggcatggcgctcctcgggttcttatagcggcgacgtgggtagggtatagcggctggcgtggcggtggggctcccccgg

SEQ ID NO: 184592 - DNA, 452 bp, Zea Mays
cctcattttattaagtaagaagaaatagggtcggaaaaggacccgaatacaggacctccttatggaggccagaaacaagcataaaggaaacaatccatacacaattataagatacaacttaactcaggcattggtactgggagcagctaaaaaggaaagacccttagctcctgcaaccatccatttctccctttcctcagcagtggcctctaatagtgtagtgatattgggggggacccgtcaaacaccactctatttctgaacttccagatcatctaggctcccagaatcaaaagtgaatttacccccttcttggtcatgcctgacacaatatcagcaatatgtttccaccactgcaggaagtttgtgtcatcttggataggggcaagaatgtggagcccgaatttccgaagagtgatgtaccaatataatctggaaaagctacaagaaac

SEQ ID NO: 184593 - DNA, 433 bp, Zea Mays
gctgggcactgtccgatttggtgacaatttggtggctcggattgagggacgaggaaccatcaagttcatgtgcaagaatggcgagacccggtcatttgttggcgcttatttcattccccgattgacaacgaacatcattagtattaggcaacttgatgaagcgaagtacaagatccatgttgatgatggggtgatgcatattcaggaacctgatggaagattactggcaagaatagtgcgggttgaaaacaggctgtatcttctccatttgaagatacaacggcctgtgtgcctagaagtgcgtggtcgtgaagatgaagtagcctggcggtggcatgagaggtttggccatgtcaatatggctgcactacgaaaactggagaaggaagaattggttcaaggcttgcccaagctcggacaggttgaaagagtg

SEQ ID NO: 184594 - DNA, 484 bp, Zea Mays
attgttagcactaatcctgacatgcgtgcgttgggtcggttagctcctagaattgttagctgctgcatgggcaaatgcaaaggatgctcaccacattgtgcggatgagcggcatgcgaggtcgttgtgatacgtcattggaggatctacatgcggttagtttgttgcgatccatcgtgcggcgtcgtgcgcgcgcgacaagctggcaagcgtggagtttgtgctagcatttccgtccagctatataatcctgtgtactgctcgattgtggttatagaaaacaatacagaggctgcgtttgtgtgcagtcagggagtgtgagcgtcatagccattatttgttctagctactgttcatcttcctttagcgtcctgtgttctcgagtgttttgagcgcctgagattcccaacatacatttctgaatggcacaatctttcagtgacattaaagtgtaccaggtcacttgagtggtatatttctaaaac

SEQ ID NO: 184595 - DNA, 289 bp, Zea Mays
acagaccctccctgcattgattctatggagctctctcctccctaattgacataacaacgtcaatctcgtactggacaccgctcgcaacaaatctgatttctcattgcacatagaccttctgacgcacattagccctaaactgcactgcatatgacaagagggctgcacttcttgtgtcattctttgtctccatcactgaacatctacatctactttaaggttaactcttaatttgtccattctcctggaagtgcatgcccacacatataccacatcatgacagcattct

SEQ ID NO: 184596 - DNA, 537 bp, Zea Mays
gtattttccaagctggaagtttggcattagtgttgcagaagttgtaccaaatgattactcttggtcttacatttcccaaactgcaagccatcttacagctacagcagatagattcacttgcggaccataacgatagagcgaatgtatacacgttaatacatatcctatgacccaaacgtaacactcgggataaaactacaagttgcagaaatccacactaatcagatgcgcctccgcagaacatcagtgaattcagttgcacgcatcaaagcgcacgatggtggctctatattcgccttctagtcagaatcacatgcaccagcaaaccattccaccgagtacttgtacttcaattccatcgcagtcgcaacctaacattcatgggaacctctccaggaaactaacccagaccgggtcgtacccctcgagctcacccgatacggaaaagctacagcaaaggcgggtgacagatctggcgcgagggcgcccttggcgcgagggtttgttgtgggtgtgagcggcgggcggagagcgtta

SEQ ID NO: 184597 - DNA, 446 bp, Zea Mays
cccagcttgctctagtaagagaaatactacaccaatttgaagttgcccacgatatgcaactactgtcgctagtgaaagaatggctaaagcaggggcttaaaaagcattcttttgctctatcctctcttaaatgcaccatttcccgtttgagatcaagaattaattggctaaaggtcggggatgccaacaccaaactcttccgtatgcatgctagatacaagaaaataaagaattttattgccaagctagtttcaggtaataacacatacactaatcacgcgagatgggcaatctagttgatgaatgctataataagctcttaggcagcagggtggacatatccatatccattgatccgaactacttggggctgccttcttatgacttggagaaattggactcaccatttactgaaaacgaggtctaggaatccattaaacagctac

SEQ ID NO: 184598 - DNA, 505 bp, Zea Mays
actccctctatcccttcatagattatccaaccaactttggcccctggtggataagattgctgatagattacctaactggaaggcggacttattaaatagggcagggagaagaattctagtgcaacatgttctcactgggatgtgtgtttatactgctatggctattgatttccctatgtgggtcattaaggaaattgacaagataaggaaaggtttcttatggagaggcagaagagaggttaaaggagggcattgcatggtggcttggggaaaagtgtgtagacccttgaactttggaggtttgggaatttccagcctccttgagctctgctgggcacttaggatgagatggctatggctgcaaaggaccgaccctacccgtccctggaataatcttccggttcatgtcccaagcaaagctaaagccttcttctcttctgtgcttgtcaccgaaattggtgatggtgctaacacttacttttggagtgacaagtggattaatgcc

SEQ ID NO: 184599 - DNA, 940 bp, Zea Mays
atgagtggaatatatttgaaagtctagagttaagacgtaatgacctaaaatcaagcaaaatacaatctgattggaggcaaacaattatctagtagatatgttggtagttgcgtgacgaaacagccagacgttaataatgtaaccatattttagcagcaattatctagtaggaatgaagtacctcagtttcaaggtaagaagatgaaccttgacactgcaaaaaaaccaattgttggcaattaagataggaagaaaaggttttctgattcactggtcaatttaaaccgaagaaatccatacctctgagtagttcaacaaagacaagatgccagatgttctttttaaggcagagtggtggcatatgcataacattccccttggaaaaaaatcctatcacaagcataattcattgaagcacttttgtactgtaggattagtatgtgaaaaaatggctgtgcataatgactattttaaagatcgtaaactgaagcttataaaccaaagattgtaaattagagattgtaacctaaagctgaattaaagtttgtaagctgaattcaagattataaattaaagcttataatctgaattaaagtcagtataagggatgttcagagatggtcattgacaaaatattggccatggtatttaatataaacacgacaaattcttaataagaaatgacttgtatgtgtctatcgtcgtccccttgcgtgaccagtgtggtgcccttttgatccatctcaggcatgatcaatcgctatccaccatctaaatctgcaatctgcccgtggtcgatgacgattttgcttcttctcccttcctgtcagtttctgcagccacattgtcaagattttgtgctagcattattgtaaataagcagctttcatggaaggcaaactcaaggtgttgtcgtcataaataagtcaccaagaaatta

SEQ ID NO: 184600 - DNA, 306 bp, Zea Mays
aaagagcgatgtatacagttttggagtggtaatgttagagctattgacagggcggaagccactagacaggtatgtgatctagattgtatccaatcctggttcgcttcagcttcgaagtggttgttgaaatagcctttggatgatcattgcagttccagagagaggtcagaacagtctcttgttagatgggctacccctcaacttcatgatattgatgcacttgctaggatggttgatccagcattaaacggaatgtacccagctaaatcactctctcgttttgcagacgtaattgcactctgcgtt

SEQ ID NO: 184601 - DNA, 305 bp, Zea Mays
cttcctgctccttattgggttgaggctcttcacaccgccacatatcttctcaatctccaccccaccagcaccctaaattcctccactccccatcttgccctctttggtcgccccccatcttacgaccatctccgtgtctttggctgtaagtgctatcccaacatctctgccactgccgcccataaactcgctccacgctccaccatgtgtgtctttcttggttactcgtctgaacacaaaggctaccgttgtcttgatatctccaccaatcgtatcatcatctcccgccatgttgtgttcgacga

SEQ ID NO: 184602 - DNA, 328 bp, Zea Mays
agcttgtttgaggcttattgagcagaaacaacccgttgtaaaaggccattaaaatcgggaaaataccatattttggctctgtggcgttgaagtggtccctgtgtttgattggacaggctagtttacagtgtcatctgagattgtgatttatgccatactcagttgccatgaggctatcgacatcctcctttttggagcttccttaagcttgcttgcacaatcatctccgtggttgagatggtttctttattgcgctttgtttcggacttttagctgtgtcgttcgggattacctgtgccttgttagtaccagtatcttgtttcgggct

SEQ ID NO: 184603 - DNA, 523 bp, Zea Mays
ggggatttttgcgggtatattacatggctccgcctcattaaaaacctcaccccccgggaggaaaagagtgtgggccggaatggtactgtttggtgaattacaagggcgtgttagccttgaggattcaaacaaaaaatttgcagagattatcgatattccaggaatgctctaggtcctcgccggatggcgttattagcctgtacgcgctgggggacgccttcgtcttgacgatgaaaggaccctcccactttggctccagcttgccccgtgactctgtccgagttgtccggacgagtacgaggtccccttcgtcgaattctcttgggacaactgcgtggtcacgctaggccttcgtttgagcttggtatttgttgagagcctgcatggcgaggacacgatctccgtcgatgaggtctttggaggttggttcatctacgtcggggacggctgaagcgcttgtccgtggtgacccatgtttgatttcctgcggggtcatggcctccgatccgtatagcaggcgaaa

SEQ ID NO: 184604 - DNA, 382 bp, Zea Mays
gcaggtagcagatcctgttgttacattttgtgaaacagttgttgacacttcttctatgaaatgttttgctgaaacacctaacaagaggaacaaaattactatggtaagcattttcttgagtgcactctttgtattttcttttgacatttcctgtgttgatctttatttgtaaatgcaagcaactgatatgttattgtaccttttgtctttatggcatgatacagcttgctgaaccattagagaagggcttagcagaagatattgagaatggtcttgttagccttgattcaagacagaaagaaattactgacttctttcgccaacgctaccagtgggatgtgcttgcagcaaggtcaatatgggcttttggacctgacaagca

SEQ ID NO: 184605 - DNA, 416 bp, Zea Mays
tgagaggaggtacccttgttgtttgccctatgtcattattgggccaatggaaggttagtatcttgatttactattgaagcaattgtcattagtaagctttttatttgtctttgtaatcaatggcagaatatttgaatgtcactgctaattttttcaatcttatcctgttattcatgcactgcatcttgaacaaacttaataattagtttagtttctgcaataaacttaatcacacaagaaaattaattacatccatattgtccatcctcacaggatgagttggaggcacattcggcacaaggagctctttctgtgtttgtgcattatgctggtgataaaactagtagcctcatgctgatggctcaacatgatgtcgttttaacaacctatggtgtcctctcagctgcatgcaaaac

SEQ ID NO: 184606 - DNA, 615 bp, Zea Mays
gctagtctccggcagcatgaacggttcgattcggtaagagtcttcgttggtatctgtttctatttactatctatctactatttggattcatttgtttttttttgttcaagttatgtagagtcatggcattatgagactgaaattgtagtatgcaggccttgttgagactatcttggtatcaccatgtcacacttgctgtattgtctgctggcacagtcgcacagattgtcttttgtcttaactgttggttgttctaagagaaagtgtgcatttatctatacttcaattctcacaatccgtcgatatgttttatctctcaatgttcttacttctgtgtaagagcatgggttcatggccttactaatgtcaaatgtcacggtgcattttcctataatctcttaataggttatacggattagggactgctctgagtaactttgagaatgaggcagagtttttgccccaacctgcttgtactcttgtgggaaagcacaagccaggaccactccccagcatttggtcacctggaacaggcttcatagctttctcatccagtatatcatgcataaagaagctcggacgtcatgtccctgatgcatcgaacaccaattcatc

SEQ ID NO: 184607 - DNA, 497 bp, Zea Mays
tggtttagaaaagctctagctgttgaacctgtcaaggggaacctacggctcagtgggtactcagcttgtggtcaggatggaggtgtacaactacctcatgcgtatgttgaaggtaattttcagttttaatgaatcagtttagcaatcttgcattcttgcctgctaattgcctgactatgttttcatgtgaatctctcctcaattgcagatggtgttgctaatgctgatttagtcctcttagtaacaactagaccaacaacaggtaacacccttgcatgggctgtggcctgtgaacgtgaccagtggggtcgggccattgcaggtttgtgaaccaactcaattaagtacagacatccacatgccaggggtttctagtgttgttctgaccctacatgtattctttttctgcttttaggacatgttaatgtggcccctcgtcatttgacagctgaagctgaaacattactttcagctactctaatacacgaggttatgca

SEQ ID NO: 184608 - DNA, 318 bp, Zea Mays
agcggggaccaagaggagagggagaccgttcctcttcctcgcctcacctcacctctccacctgccgtcgtcttcctttcgttcctagacacgctagacttggctttggccataccttggactccccttccctctcctctccccgtctcccggcgtgcgtgcgtactacttactgcttgtccaatcgccgcgaccagagctcccgcgcacgctactggagaggattccagcgcccgtcgagcaacaggactctagcgcccgacccgacaaacgacagatagtagctactgcctccctacaccgtctcggcatctccggg

SEQ ID NO: 184609 - DNA, 377 bp, Zea Mays
tgcattatgtcacttcaaaatataaaatgtgaatttagtggggaccattttttcagagatcttgtgataaagtgagaggtaacattaaaaggatttggagttcagagtgcaatggctatacccatcacttagttctggagggcctccagctttttgacttccagaagaaggaaaatgaaccacttggaccagaatatcttggtgtcatgcaggacacaatcagcaaattgacctatgaaacacttcagtcagtggcttgtgttgtcagtcatgacaaggttacttttgataagactaggtctgtaatggaaaaaattgtaaattctcaccttccaagttacttggccagcttggatcagaatgatattgcatgccag

SEQ ID NO: 184610 - DNA, 520 bp, Zea Mays
atcccttcagacaaggctccagggcctgatggatacactgggcgcttctataagcatgcatggccaattattaaaggggatttcatggcagctatggggaggattctgttgggtgatgtttcaaatttgcaccttcttaactcagctttggtgactttacttcctaagaaatctgatgctgcagagataaaagattttaggcctatcagccttattcatagttttgctaaaattgttaccaagttaatggcaaaccggcttgctcccacgcttcctgagctgatatcccctaaccagagtgcttttgtaaaagggagaagcatacaagacaactttattatggtgcaacaaacagccagagcaatccacaaacaaaaaattcccaaagtgcttctcaaactggatattggcaaggcatttgattctgtttcttggccatttctgctggaagttcttgggcatcttggtttcggtccagtatggtgcaatcttatctccaagttattgtgctcatcctcga

SEQ ID NO: 184611 - DNA, 594 bp, Zea Mays
caacaagcgcgcataattgaagtctctctcaaaaagcctacccgtgcaaagaccaactacaggtgcagccggaccgacataataaacgcgctagacctagtgcacaagtcccctacgggcacggccggatcagcgaaggcacacagcctcatcatacaaattatagttacatacgtacagcgagggcatcacaccttacattggttcaaccttcgggatgatacccatctccctatagttaaacaacattatcctcagctcctcaccctcaaaaagacttcgcaactccccctcacctacactcgccccagctggcgaggacaacaattcccgcttgccagccctgtccacacgaagacaaccaccctccacctcactcactctgcgattcgccaccacccttcgctgcctacgcctagcactcggaccgggaacctcagcacccatcacacgcggcgaagcctccgccgcagccacatccaatgccacaaaataatccaaatcctcatccgaagactcttccgtccacaccaccaaactcccagaatcatcagactcaaaaatcttagacacagaatcacccgaatcattttc

SEQ ID NO: 184612 - DNA, 310 bp, Zea Mays
agaaaatatcaccataaccgctgtcgtgtcaagcaacatcatccagtaagggaaacactaaacacgtccaaaagttacacccaaatatccacaaattgcatatagcaagaacataccacagtcaaagccacaactcacaagattcataatattcaagtaccaggttgtcaaaccacccatgaaaacattggtatccatcaaatcagatgaatctagattgacggtgcgcaacatacaatttccaaacagtagaaggtcatcaacaccacacaccacctgccatcaatcgtgacagcaatatgcagctata

SEQ ID NO: 184613 - DNA, 382 bp, Zea Mays
aagcaagtattcttttacagcgcaattaagatcttttcgttcattatcctttagagggcctaatgctgaaattttcacatcccaattttcttgttgcctagtatatccttcgcgtatagaagcacccaaaaggagccctgtataccgaatgtgtgaatcatgtcaagcaaactgtggttctaaacaaatttagcacttatatatgctcatgacagtaacacaaacgaatataagcacattttacaaggtctaatattgactttaattgtatcaaagcatttttatgttggtgcatttcatgtatactgcaatttcatgtattgcattatccacaatgtcatggtaagaacaaaccatttgaatcatcaggagatgattcttt

SEQ ID NO: 184614 - DNA, 418 bp, Zea Mays
cagtcgtgtgcgccggtggcctggtccttgtgcgctggcagctcctagttcttgttcaccgacagctgtgcgggactggagggcggctgaccggctgtgcgcctgtgagaagacgaccaagcagacttgccgagcaagtctgcgaggcggggcgaacgaccaagtcccccgccaagcaagcctgcgagactgagtggacgaccaagtcccctgccgagcaagtttgcgaggcagggcggacgaccaggcattcaccaagtgagcccaaccactaggccagcgctgcaagcatacgtcaaccacggcaggaccgagggattcaactccttaagagaaagccttcgcacgaccacaataggtcacacaaaggcttgggggatgctgtcaggtacccgggaatgtggtacccaaaacaagc

SEQ ID NO: 184615 - DNA, 656 bp, Zea Mays
cacagctacttctgtgctttacgcttacttattggaagccatgcttctgatcagcacaaagtgttcccacagagtgccaggacgagatgtgtaaaacctgtggaaactactgagttactgacccactgtgccaagtggaatgaacattttatatttgaagttccagaacaggtagcggttctatttgtttcttttctttcccatcttcaatgttctagtgcgtcatttcattcataaaaaaaaaactatttctagcatgtgggcactgctgtatgttttaaccttcttctctagtgatataacatgcacctctcctatgtattcaatgaaaaatgcgcagttagcctttctgttattttgcatcatattttttattatcatgataagtctcaatgtctcacaataaataagttgctgaaacctataccggtgttatttttgttcaactggttcttattagtacagctgaggtttagggtgacttatttcttttgctttcccttttgcagtcataggatacctaatttgtgatgtattcccctacctattttgtcaccttgaatgctaattagatcgctctaatcctaatggtatactttgcaggcatcagctaatttagagattgaagtaacaaatcttgcatcaaaagctgggaa

SEQ ID NO: 184616 - DNA, 393 bp, Zea Mays
ggtcatgaccggatcaacaatttcaagcttaaactccctgggaatggagctcgggctagaacaccaggcgataatcttgaacacctcacgctgtcgctcacaatctgggtgaagatcagcaatccagcaccactcattgaggagagcttgcacagattccaactcctaagcataggaagggatgccagacacttcaatctccacttgaaaaggcagagacaccgccgcagatgagttgaggattctgcttcatcgcataacatggattttagttgtgggagacaaattcacaattctgcccccatcataggcatggtccgccatttctaaacttggaaggataagaagaaaacttgcaggacccaatcgacacatagacagtgagacagtgag

SEQ ID NO: 184617 - DNA, 324 bp, Zea Mays
caaagaacaacaacaaccacttccagaagttgatggactcgttgtgccaaaatcacggctttcccgtcttccacaaactccgagagtgcaaactcctaaagcgcttcatctccaagccatcgaccaaaaaagtgaagcaggaagagctggtaaagccgctagaacaggaagcccccactgaagaattcccaaggccatggggtgcctcataatcttcggatggggagaagcatacagagatcgacgccaccccaaggcagcatgatgagagttgtttgccctagatccctcgatcccacggtacgcacagtggtcagaattctc

SEQ ID NO: 184618 - DNA, 808 bp, Zea Mays
tgtgctgcaaacagtaccacagttggggaaggctcatctagacgtgggcggttaagtgataggatgcaaacaaaaggtgataactgataactatctcttctgcatgcgccgagataagctaccatgtatccaagcattttaatctgatgtgctgtggttatctagaaggtaacttgtggaaggaactgtgggaggctgcaaaacctatacctgctgttgaacaaactcctatatatgatgaagatttagctgtgtgagtagagaacagattgactagttactgtgttgaatcttgacgcctgtcataaattataatcgaacaatataaccttgcagggagagcatctttgatgctttggaggttattgagccatcaaaactgtttgagcagctacttggcgtcattgtaagttcaataatgccacccccccttttttttgtctaactttttagctagctgaccttatttatcttacgacacatgttatcaccttactgatttctatttgtgaataccagctttctgtatgctttgtggcagcagaatcagttttagcagcagatagcaatctgtcaaaattattctacgattgcaaggactacataattggcgtttaccacaatgacatgtcaaaagatgagctagatgagatgtacaaggtattcttcttttatctatccatccagaaattgtgatactgcagttggagtctagcatgacacactgatggcacgccaggtgtacgagacgatggaagccatagtaacccaccctgaagaagctctccagatcatggagcaacctgat

SEQ ID NO: 184619 - DNA, 524 bp, Zea Mays
gcttgaaagagctaagcaagaactcaggcttaaggatgattctttgagaaagctagaagaaaacttacaaaatttggagagcaaagccaaagggaaagagcaactttgcaaaaacttgcaagagaaggtacataattgatgagggtattatttgaagagttggtccttccggtatttcttggttattgtttttcatttgtgtctgacggcctttgcttgcgtaggtgaaagagctcgagggtcagttagattccaaggcacagtgtcaaataacatcagagaaacagcaacggcagctttctggaaaactaaaagagaaggaagaaatgtgtaatgtacttcagcagaaggtacgagtgaaagtagttactgctgtttgcatgctaggagcatgaatagttagtgttcttacaggttcttacttagcagacttgaaatctttatattcccatgttcatcccttttcagattgcggacttagaatgcaagcttagacaaccacaacaatcagaatctgaggttgc

SEQ ID NO: 184620 - DNA, 336 bp, Zea Mays
aacgattccatgcctgctccagaaaaaaaatcaagcaacactaatgcatcagatagcagccaccagaatgagaacattataatggaagcaaaagaagataatgcaacttctgaccttgtggtactcgacaaatctgaaagcaccaatggttctgtacctgttactgcagaagaataaaattcctacaacaccactgcatgggagagcaaccaacaagataacagttcctaacaagaacagttcttaacgttaacaaccaacatagaagatgtccagtttcaacagaacaaaggtgatgccaatgagcaaccagatgatgcttcatagggaagccat

SEQ ID NO: 184621 - DNA, 271 bp, Zea Mays
ggactggacagcccaccacactcttccactcccctcccccgccccgccaccgatccccaccgccgaacaaccgacgggtgctgctgctcctgctcctgccgccacctgctacgtagcatacgcggacggacgtaccaccaaacccccaccgaactagctgccggtccatcgcgctacgccgctacctacgacgatcgggcaagcgaagcgcgcgagttcgacgtcgtcgtcctctggcatcatctctatccgccgtcctgtggtatcgtca

SEQ ID NO: 184622 - DNA, 609 bp, Zea Mays
tcctttgaacttacatggctttggagaatgtgtggtgtgtcctgctcatgttcaccaattgtccgcatgggtatccgctgacttgttcccatcaaaactttgatgaactgtgttgccttcttcaacaattccgggcgccggtaacgcagccggtggagttacagcattccggccatcgctcgtacagggtgtcgtcatcgccgtctcctttgtgtatgccctaactcttcgatagctatgaacaaaagctgcggcggctgtgtgtaggtcgttttttttcaccttctatactcgcctaaaccgtcctggcctatattcatggcatgatccaatctcctgcgcgatttgctgcgcagtttgcatgtcgcgagatttacgtgagctatccgttacgattacatggccattgtgttacatttccataaacatgcatcaccccatcgtgcgaccgccccacgttcccgatcgacgcgcgcgtcaccccactacccgatctgaccactctcgtcccgtcagatgcgaatttacgcatccaataacggcaaaatacgcaaccataacgcgcgtcccacgtctacacacccgacccccgtaccctcgttaccattt

SEQ ID NO: 184623 - DNA, 479 bp, Zea Mays
ctggccacggtgaccgtgagaagtgcggctagacagtcgtgttccccgcgaccagagggctcctagcgcacttgcgcgggtcggcaagcatcgtatacatatgagaaagcttaaacgagggagagggaggatgaactgaccggaatggggctggctgcggtgaggtggatttcgcggtggcggagaactgatttggggcgaattcaaaattcgcgagctctggcgaacgattgctaacgattctcggaggctgggtagctgatgaccttgtggggctggtggaggcttcaatttatagggctcaacggcggtggctggtgaatcgggcgagacgcgcggcagccagaggaagaaggcactggcgcaagcgctaggtggcttctaccgtggcggtatctccggcgatcaccggacgctcctagcgtaactatccgcgatgtggtaaagcgcccggacacgcgacacaagaccgagcgacg

SEQ ID NO: 184624 - DNA, 352 bp, Zea Mays
gtcacgggttggttctgacacgtggattccagaggcccaattcgcgtccgtgtgcaagagtgtgataactatactttcgtacattgattgtagctgaactggtgtgccactcttgtacttcttctgcccttacttggatttagcttgggttttgatgggaaggctaagctattcgaggcaacctataaggaaagggtacagtacccagtaggagtgagctgagtgtaggtacttcagattttgtttttgaaatttcatgggtggacaggtgtacatttacgattgtggttatgtcttgataggaaatattgtgtgaaactgtgaagtgagaatgtgaaggcttggtctttac

SEQ ID NO: 184625 - DNA, 362 bp, Zea Mays
cgctccgggagacgccattccgggtggtgtatggtcgtgacccgccctccatccgctcttatgagcctggtgaaacaagggtggatgcggtcgcacgcaacatggaggaacgcgaggcattcctcgccgatgtgcgctatcgcctcgagcaggcacaggcggtgcagaaacgccactacgacaagcaacaccggccagtgacatatgcagtcggcgactgggcactccttcgacttcgccagcgagctccgtcctcaccgccacaacagacatcgggcaaactgaagccctgcttcctagggccataccgcgtcatcgagctcatcaacaacgtcgccgttcgcctgcagctaccaacacag

SEQ ID NO: 184626 - DNA, 361 bp, Zea Mays
caagtactcatcattgacaccaacatactcctcaacattgtcgaacacgtcaggaagattagactcatctccatctgcctctacatcagtaggttgttcacaatctacttctttagatacaaatgacggatgaccttcttcagcaatagccaataagtgggcatgaaggtgcaagatggacttcttcagcagtaagtatccatggaggcacattatcagtatctggtggaacaacatgcataattgtgcatttctccatctcaaaacacaaaagcaagaagcataaatcgtttctctggtttgtacatttcaatgacatcaataatctgagattctgaatctagttgaacatcctcaccag

SEQ ID NO: 184627 - DNA, 522 bp, Zea Mays
gctaccaccgctgctacggaggctcgagggtcaggagggtcgacacccccgatgccccgccacaatacacggtggtcgtcgcgctggaatgccatcgtcatggcctcgaggtcccaagtgatgggccctaaggtccgcaggtagtcgacgtcgaggatgaagtcgaagcaacccaagtcgaggccgacgcacgtgatggagaagtgctcgttctcgatggagatgggcacatcgcgggccaccccggcgcagcgaaggttgtcaccatttgggacagtgaccctgaggtgctcccctgcggcgggtaccagccccaaacgacgcatggtggcactctggaggaagttatgcgtggagccggtgtccagcagagccataagtcgctcccccttgaccatcaccggaagcaccatggagccctctgtgcgaatgcctgcgagtgcctggagggagaccacaaaagcaatagcggcctcagggtcctggacggacgcagcctgcagtcctgcgtcatcggtagcc

SEQ ID NO: 184628 - DNA, 1118 bp, Zea Mays
aaggacaattgggtgccacagagtcgtgaacctgaggaggtgaaggtgagcaccgaggggttggaagttagaattggtgggcggagagatgagaatgtgtcactggatgatgggcgattgtcacaagctgcatggattcgtcaatacatggaacaacaagaggaggtatagatgagtgaacaagtatttttcacatgaattgagtcatctcttagtactctttgaaaaactgttggattttgttagtcttatgttttttttgtccgcttgcttagtctccaattgtatcgttctgtttcatacttctctcaggttgttctgaacttccagtggatactaagagcttctacatcatgaacctgtgcaacttacagttttagaagacaaataactgattttgttgtctaatctaagtagcacaatgttttgttctatttgaaaaaaagaacacaaaatggttacacaaattggtaactattgttcactgggaactatgtttcacaacaattcaagtctcttcttatttttattgcttatggtttatctttttgtttcaaaacgttaactatcctcactgcagttttagattttgacatggtctccaatgtgtagtttttttgtagaacgaggtaataccctgcttataaagataacatatgagtttttccaagttccaagccagggacaccagcgagcgataactctaatatgtagctttgactattacttgtaataactccatgccagtaaacattaagtaatagaatgtaagtccttgagatgacacatctactaatgttattttcttgtggtcaatctaaataatcttttttttacacatgaatgggaaatttatgaaaacatgacacctttcaccaatgtatctgaggttgcatgtacccaacatccgaatatcctatgcatacaatttcacaacctctatcaagtctttctgttaactgttattccttttcatttcttttaatatcatatttcttggtacattttttcttttggatatcactgatgttaggaagaggatgcaaattccaatgattcctctacatgggaggatcactgcttacaaagttttgaagttgtcgaagcaaagccaagta

SEQ ID NO: 184629 - DNA, 1172 bp, Zea Mays
ttgggtactgacaactccatgaactttaatcagcaacaatttctgggtgcaaatgcctcaaatttgcaattcggtcactccccgcatgaaggtaggtcatcggctggacgaccaccacatgccctcgttgcttttgggtttggagggaagctcatagttatgaaagaaactacctccatgcctgcaagttttaacagtggaaatcaggtaccacactagttaccttttgtaacacattgtgtactgaaggaacatcacctatttgagtttactaaaatatttctttcttcttgcaattcaagggtaactctagtagcacagtgtcggttcttaatctgttggaggtagtctttgataaagttgatccttcaagtgtcactaatggtagtgcacttagttatttccatgctctatgccgtcaacctgttcctggccctctggttggtggaagtgctgcatcaaaggatgtaaataagtggcttgatgaaatgattgcacggtacgagtcttcctctagtgaattccatagaggtgatactcgcaagttgcttatttcattgctgaagatactgtctcagcactatggaaaactgcgttcaccttttgcgtctgacccatcgcaagaggtacttcctctcatactctattattaactgaattgtgcatttacatatcttctctgttttctctggtccgctttcctttagctatccttatttattttgacaacttgcattagaaacattgcgtcatggcgatttgtttcgagttggatggtgtaaaccaaaacacaagttggataagctactgaacttaagatttatatatactcagtacaacctagagtttgtttacgagcaatatttcaaccatgtaatgatacaaatacctgtgattagcattgtcacgtgggaactttgcttggttttgtattttcatgtttcattactaggggaattcaactactttttaaattctgtagtttgtaaaccatgcctaattttataatttgtacatcttttacatgaattcttaattcttaataataggagacagatggtccagaaatggcagtaactaagctattttcatcgtgtaagagaagcactgttcatatgggagattatggatccctagttccctgcatgaaaagtattccttcagaaagtcag

SEQ ID NO: 184630 - DNA, 288 bp, Zea Mays
cgtgaatgaggcttatcaggcatttgctgagatgacaagcagaggaattgtaccaaacaatattacttacaactccatcatatctgcactttgtaaggcaggcaatatgactgaagccttgaagttagttcagaatatgaggcagagtggccttgttcctgacatttacacaagcaacattctaatcgacggtttgtgcagagaaggaaagctgaagatggtggacaaccttttattggatatgtgcagtaatggtctaaccccagacacagtgacatataatacaat

SEQ ID NO: 184631 - DNA, 302 bp, Zea Mays
cagagacgtcatgactaggtatactaagagcttctaaatcaatgattctatctctgcccacatttgtaccaatcagattgaagaagtgatcaactgctgtagccttctcatcatgcccagttaaggtgacatccctttccctcaatgaggtcacaacattcttcctttttcagtgtctggcatgcaaatggaaaagcttagagtttgcatctccatccttgagccacgaaattctcgatctcagcctggccatggtccttttcaaggaagatagtagaagggtatgcttttttaacttattc

SEQ ID NO: 184632 - DNA, 291 bp, Zea Mays
agtcggcgtagctcgccggggtggtttcaataccggtggtgttgtcaagaattttttcagtgcgtctagagcttcttgtgcttctgaagtccactgaaacttatccaccttcttgagtagcttgtaaaatggcaaacctttttctcccagcctggatataaatctgctcagagctgccatacatccagtgagtcgctgaaccttcttttgtgaccggggagcttccatcttcatgatagcttcaatcttatccggattagcctcgattccccggtggctgacgataaatcc

SEQ ID NO: 184633 - DNA, 284 bp, Zea Mays
gagatttttgacccggcccggtgcttggttccattgatctccgtctgctactccttcctcctacttggttgccttgccttcccggtccctgatcggagcctgtcgccggcgggcgggcgggctgagtttactgcccgttactggggggacaaagagcagaaggaacagagagtaaaaaatcttgggccttgatcggatccgaggacggggcaatgcggtaataaggagcggccatcactgccggagtttgatccatccaaggagaagaaagaggaggggaggcc

SEQ ID NO: 184634 - DNA, 803 bp, Zea Mays
ctattcttcctcctgaaaaaatcccagatgcatatgctaatggttccactgaagagcaggtacacctgaaaccatattatctgttgtagtggtggtacattcgaggagtccatgattaatgctctccctacttttataccactctatgtcatattaataaacacgttttgttcatttgtgcaggcatttatacaaaatctcgcactcttcttcacatccttttttaaggtcaggtgcttccctgaatactagttctctagtataagatcaatttagggtagtagacaaatatttgtatggatttgtagattgttctccaagttctgtaactaatatgcaatatgccatatttcagattgtactttatcagcttttgttgtttgtaattttaaacactagtggaagaataaatagggaaatgctaatgtatatgaagacactccataagaacaaatgagtctccaattggtctaaccccttccctttcatgctaaatgcagaatcacatgcgtatactggaaacaactcaagaaaacagtgctgctttgcttatgggtctcgagtaccttattggaatttcatatgttgatgatacagaggtttttaaggtagggatgctgaaatatatttgccatagaaatatggcataagaccaccgtacaacactggataatttactggccttcttatgaatctttacaggtctgcttggattactggaatgtatttgtcttagagctatttgaagcacacaatgaaatggaacctgcagcagccgtaagcatgatggggcttcaggtgcg

SEQ ID NO: 184635 - DNA, 728 bp, Zea Mays
gctgcattggagacatattgtgaacaagtagtgagatgcattgaaatggctttaagttgtgtggagaccgatcggcacaaaaggccgagtataggggctattattgatgagctaaataagatggagacaaataccgaccaggtatagtcactgatgacactttcatttctgattatttaatgtttatcttactgttaaaatctagccatgacataatacgaaggaagttatatcagccaataaatcttcataatcacatcatcaacaacctacatgtttggtacagagctactaatgcatgagatggacggttcaaaccacaacggctccttttttattgtggaactccacgttttggacaagaagtgattaatgttttctattgaagtagtaatatttgttagtaagacaactcatttcacatgtcttttcactgctctgaataaatgaaagaggaaagtctgttttgcacagtgaatttaggcatttacaaagcgtacacaatatttcaattttaccaccatgttacaccacatttaaaattgtaactccaacgttttgattttcccattaaacattttagctttattacatagagaaacaacaaaactgccaaaacattattgcctgaattaaattaatgttttcctaggttctgatatccacgtttaaaataccatctccaggtattttcagtggatatatgctcgactccagcacaaacacaa

SEQ ID NO: 184636 - DNA, 343 bp, Zea Mays
tataccccgcattaatctgacaactaagggcaataaatggccttttacattatgtcgacgccaatttccaatcaaggtttgctactctatgactataaataaaagtcaaggacaaacactaccaaatgtagggttatatttaaagaaaaaggtgtttacacacggtcaactatatgtagctgtgtcacgagttacaaaaaagaaagggctcaaaatattgatagaaaatgatgacggttcatgtggaataataacagaaaatattgtgtataaagaagtactacaatctattgagagccatggcaacatacattgatactattttgaacaaattgtatttgca

SEQ ID NO: 184637 - DNA, 1067 bp, Zea Mays
ttcaggtcgaagggcaacttagccttctttctggtgctattctaacttttggtctcactcgttatccatactcggagtttgaactgatggctgaggagcttcttatgagtgactcaacaatcaaggtattttccctgttggtttcttgtgatattcaattattcatctacattgtatctgctttacaagtacatttaacttgattttttctaggtgttcggtgctttgagaatgtctgtaaagatgctccttatgtggaactccagaatggaaattgatggcggtggagattcgatagttgcaacatctttgttggatgctagcaacctgatagttctgaaggtttctagttggtccaatgttaattaccgctcttcctattttgctgcttgtgctcagtatgtataactattgctcatatgttttcaggaatcatctgtgatacactctaatgctaatcttggagttcggggccaaggtctcctaaatttgtctggggacggagacacaattgaggcgcaacaccttattctttcgctgttctacagcatacaagtatgatatatatgcttttcagcatcagtgtcttttttagccatcacctttctgatgtatttgtttattgctgcaatcttagcgtatcgcatagcaattcacattttgaactctacagtgctgcactgctctagtcaaaccaaagatgcagtactggtcattttttttgattgccagtacaggtaatttttatagcaatgctaatcgtaatggtttcagtcatatgtccccacttattttaagtgtatctaagcaatagttatactgctgtaatgactgtcatacttttgtgtgttgtcttgtttgctgtctggtgtctgctgtgtcatactatactgctgatgggtttttcctgtacacacaattcaaatttacaactacccgggttgaatgttcaatatgtggtcacatgagatattatgttctttttcgcttctgtgaccagttaaagaaagaatagtgataaatattcattttgtaggttggacctggttctgttttacggggcccac

SEQ ID NO: 184638 - DNA, 290 bp, Zea Mays
ttccaagtgtgcacattattgtgtttatccatgtggatggtactcgtggcagccatcacctaggtcaagctcgggctcgtcgggcttgctttccacctccggccatggccgccctgcagctcccccatcacgttcctctcaggtcagcacccagtgatatgtttgttctgttgggaaacattacaagttcatgaccaatacttaatctaagttttgcggaccgaagcaaggaggaagaagatgtacaattcaagcaggtacaaacccattcctttttctctaaacctgac

SEQ ID NO: 184639 - DNA, 632 bp, Zea Mays
tgatgccgatctgatgtctgaaatcgaggatcaaatccaacctttattcaatgatggtctccgacaacggataattactcttgtaaaggttggacctgatgaaacttgaatacaccatttgtatgccttttcatttttttggttcaacgaatttaattgggcattttttttttaaaaatcatggtgatgttaaggccacatcctgtaaactcagcactcaaagagcggttctaagctaaccttttgggctcaagtttgaactttaaacgcttaacaacatgtagagtagtgtacatgggcaggggtcgaccttttgcactaaattaggtgggcttaagttgcttttgtgttggcttctccctggtctcctgttccatcattttctttgcagttatatctgaagctagttaattccagctatttagtatggcttaaaaaccattttaaaaatgcaccttcaaaggtttagtcctttttctttgtgagtaatgatgactgaggtatatttaactttccataaaggagctgaacagggaagaaccagctggaattggcagtccaagctctgagcgttatgtgcttgatttcagaggggctcttgtggaaagaagggcaattgtctcgagagagag

SEQ ID NO: 184640 - DNA, 282 bp, Zea Mays
atcttcttcagttaacctttactgtaccatcagcagtctcattcagacagcctgaccgagcaagtttaagccgccatttctttgattttcaagtggtaacacaaccagtgatctatagcaaagttgtagtgctacaatccatctatatctttgctataacgtgtactcacaaaatgtcactggatccccttcaaaattgagctcaaagttcatgtcataacaccgttaatctgtatctcagacttcaggcagcctgacagtccatcttagattgggtttttc

SEQ ID NO: 184641 - DNA, 377 bp, Zea Mays
tacggctcagctcagccgagctgagatcacgatgatgcgccggtgacgagcattgccggatatgattgcctacccggctaccgatgcgtttatatcgcgtgccatatgcgtacgtgcgtgcgtatgcctgtatcaccgtaggtgtgcgtcgtcatcgtgggatccgagtacaccgcaactccgaattatcaattgacaggggcggcggcacatgtccatttcaaggctgtgtcactgcgttctccctcacttctcgttctaatccggagagggatagccatcgttactcgttaggtcgtgacaactccctatcgcagtgtctgcttttggaagttcagagaccgtgtgattggttgtcgcgtcctaactgctcaggc

SEQ ID NO: 184642 - DNA, 276 bp, Zea Mays
cgcaattcgggcgtgctggtggacgatcgagggtgggagcgggtgctacagcttcacaactacatggcgcagctacgggcgaggtcaatttatagagctagcgagcggtggccgcgaatttgagcaagacgcgcggcggccggagggaaagaagaacactggcgcaagtaaattcgtggcaaacggcgtggcaatctccccggcgacgatgggacagccttaaggtgtcacggtggtgcggtggaaaggctaagccacgcggcacatggccgggag

SEQ ID NO: 184643 - DNA, 426 bp, Zea Mays
cacaccacccccaacacaggcatgctatctcactcacacccatctccttccacacaccctacctcaattgtcgttggaaacggatccacactgccggtcatctcagtaggtgcctcggtgctccctagaccattgtatctcaacgacgttctcgtagccccacatataactcacagtctgctttcgtccgtcggttcaccattgacaactcttgttccattgaatttgacccctctggtttttctgtgaaggatctggccaccaggacccctcttgcccgatgtgacagcgtcggacccctctacacgctcggaccctcttccaccgacgcgtctccacctcccgtcctggtctccaccaccacttccaccacttggcatcgtcgtctcggccatccaggacctgacgtcatgaccaagatttcca

SEQ ID NO: 184644 - DNA, 618 bp, Zea Mays
tgtctcaacagtagaggcagatgtcatggccgacattgtgatagaaacaatgaaacatctaccggaagcttcatttcatttagcaacaaataacggtgtccagcaactgaattttaaatattcctctggtctcgtaacacaaaaccttccagccaattcagactccacactattcactgcacaatctacacccacagcagatggagtcagcatctcaccatctgatgcctttgttatgactagcgttcatgatgctaagcgtgatccaagaagggtatgatctatcttttggtgactttcaggttgtgttttatgaagtcaacagaaaaatgcttattctgaggatgctgatgtgttgcaggaccctcgtcgcctcgatccgcgtcggatagtttcatcttctgctgtaaattcgatacaggtgaagatggaaaccaatagtgtgcatcaaacagataatttgtcgaacacactctactccaattctcggaaggctgaaaactattcagactatcaaggagatttacacaaaaatgaaggtgaacagcagtcagcttctcaacctaatcaaacaattgccaaagacaagttggagcttctggatgttgtcactgaacc

SEQ ID NO: 184645 - DNA, 878 bp, Zea Mays
gtttctaattaggttgggccaatttctagcagcagacgcattaaacgcccgaaacgcggtgtttcactctataacgcgtttaaacgtcaaaacgcgacgtttaaacgacgttttacgacgaatcgtaaaacgttgtcgtttcactttctgtcagcgttttatagtttaaacgacgtttaaacgtcgttttaacgtcgttttaataagcatgttaatttctatttgtttaagttagtgatatgtgtttactttgcatttgcagtcataaaaactttttgcagtttatgactgaaaatggtatgtctactggtgttatcttatatgatggcgtagaggattgtatgacaacagttactggaagagaaatgggtctaaactttctaaattacatttttaataaatttaaggaaagaaagtgctggagtgatggctgggaattaagtgatatggaaatagaaattgaggcaggaagaaagtttgtcattaccaagtaggctgacgcagatcttactgttgaagagggcacacaaaatttatttgtttatcttggtctcctggtaccgtattataagaaagaaaactcaattctagcatttttttattccttgagaaaaaatatcttatactttcatgattttaagaaatttctaataaaatggaaaatgtttgtcaaactcattagatcagtgttagctttaaaagcgtctttgatcagatcgaccttaatctgtgagatgtccacagttatcgcattgcagcttaaattatctaattctgcatatcatcaagtgttatcaaaaaatgtcaatattggcgtgcttcaataaaatgggttatgccacacggacaggtctaccactacaggaacaatatctctt

SEQ ID NO: 184646 - DNA, 931 bp, Zea Mays
ggggcctaactatgattcattgtgatgaacttgttctacagttgcaggcaagggaggataagaagcgtcatggagttgggcatgtgaatgagaagagggttttggaagaaactagtatgattgatactggtgaattgaaatctgattcgactgttatggagattagcatggctgggttaagacaaggaacactcaaccaatgtgcttcaagttcggagaaggtgagaacaatttccgtttcaatgtatttttttttccgtttgaccaatagctgatgcatctcagtcacaggaagaagcagtgcaggagaagcatgatcagggattggtagatgaaaacacaaacagaggttcagctgacaatgatgcacttgaatgtggtggagtgaatcctgatgtggccataacaatgtttcatgaaactattcttacaacagaagctgtcaatatagctgggtctaaaatttcgtctgagaaccagcaaaaggaagcaccctttgaagtacactctataacagaagtcgaaggttctgaatcaaatgaatcatcaagaaaggagcctgaaggagctcttgctcttccacaagagcctggcaacctggtaaaagttaaacaagaaagtttggagaatgaaaccgagatgtccatttttagggagaatgacaaagtttctggaaaagatcaggcatcagcagagtttataattgatccttcaaatacggatgaacggagggagaatgatattgggcggcccgatgaatcagcaaaaggctgtgaaaggttaacttctgattctataaacacagttcactccaaatttggcaagtctagtaatgaagaggataagagaacacagaacaccaggtctacggatccaaaagatataaaggaatcattgggtagaattcgtgccgaaccatcaaacagggtac

SEQ ID NO: 184647 - DNA, 467 bp, Zea Mays
tattcttctagtgttgttctgaaggtcggaaatgaattggatatgcttgtcagcactaaaccgagacatattccccaagattcaagttcagctaatgttcaatccaaatcacaaactacagtgcagtctccttcgcgaatgcggcgcacagcattgttatcaccttctaaggttaaggtttcaaagaccagtgcttcaccaatggaactgtcttcaagtacaatcatgccacaacaatcatcttcgccggttcagcctcggcgagtgatgtctgactctgcagtaaaatttttatcagagataacagaatcagcatcaggtgagatgtcttgttcacaaactccagttgaacatgaaccttcctctctgatggaaaacaatccagcaccaacagcatctctgttacctttgtgcacacctcctcctcttcctccccctccacccactgtctctttactccctgttcc

SEQ ID NO: 184648 - DNA, 351 bp, Zea Mays
acctgagcggagggacatgaagagattgcccctccccaatcacccgatcagccacggcaaccgaggggaagaagactaggaaagaattaggcgcagcacgacgtatgcggagcgaccctgcttcaaggcaaaacctcgaggcgatcgcgtcacgcacctccacggcgcagccagaatcctccctgcctacaacactgacgatcagtgcacgacggagttcctcctcagcccgatcaattcttccacagcgcccgacaaagctcaccggcttatccaggccgaaggcaggcggaggaggcaactgctccccagcgcccgacctcctcttcctctgtccacggcgagttctct

SEQ ID NO: 184649 - DNA, 371 bp, Zea Mays
ctaagaactcaacctagccgagctttgcacggaaacactcccttctttatggtctatggttcggaggcagtgctacctgctgatctcaagtttggggcaccaagattgatcttcgaaaacatagccgaagctgaagctactagactagaagatgttgatatactagaagaagaacgattgaatacagtgattcagtcagccaggtaccaacaaactctgagacgctatcatgataaggccatacgacattgatccttcgtagtgggagatcttgtcctccgccgaattctaatgggggagggacgacacaaattgtcaccactatgggaaggaccattcttagtagtagaagtcactcggcctgtatcata

SEQ ID NO: 184650 - DNA, 481 bp, Zea Mays
caaaagaggcctaaaaggccatgtgataaagaaaaatcgaacaaaggactcaattgtcatcaatactacctgtggttggataagatcataattcttgaaatggcacttcttctgaactttgtcgagtttttctttcataagacggctaaaatcatttgccccacagcagaaatctactatctgcaagaccaatggagtttagcatgttcataaatttatgtaacaaaacaacattataaccaattttacttgtatagataaaggaaagggcaacttcaatatttacaaacaaagatgccatgctacaaaatattgaacacaataaaagtcttagtcttagccaataacttcattaagaaccttcagttccgaccctggttctcttagactggtttcaacgcctcccgcgagcagcccctctccttcatttagcggacacagtttcatgctatgcaccacaacgcttctctctaccgagcac

SEQ ID NO: 184651 - DNA, 323 bp, Zea Mays
cttcatcttcgacagcaggaggcaatacctcagacatgtcccctcccggccaatcaccaggagaaatcaccctcacagaaatgggataaaccaaagtgcgagggacaaaggatccatcctccccaacaacaagaggttcctgaacatgtagatcaattaccgctggcaggctatccggagagaaacaccacgcctcgagcttgagaacagccatatccacactgtcaattgaatctgggtgaagtccctgaaccatgcacagaccatccaacaggagctcagcagttcccaccccccaaaggtgagcagggaccccttccaac

SEQ ID NO: 184652 - DNA, 420 bp, Zea Mays
agcgaccacagtcgcacgatcaagatccaatgcatcggattaaaccttgaatcagtacgcagcgcccatcgttagatccagatctgacggccgtgatttaatgaaaccgcgatctaatcctatccctctgcaaccgatccaacggaccacactacattgcatgaacatctacgccagatcgaaccccaaccgcacatccgaggatcaacggtttagaattggtcgcgcgaaggggaaagagataacctgatcccgaccgcaccttactagatctacggtcagggcacttcctcttccccaacggtgtagcacggtgcgccagtactccccacgacggaatacgccggcgagccctcccccaaaccgcgccagtaagcgattctcggctctaatcgactctactcgaagctatcgaggttg

SEQ ID NO: 184653 - DNA, 373 bp, Zea Mays
actcataattgttagtacaagaatcaggtacatgatcagtatcaggaccagccgcaggaatagaccgggaacgacgaatgtaggtttggatgataggtggtttggaagagtaagtagaggatgacgtggaggtggaaggtggtgttatgggaatgagaacatcagatgtggatgtagaaggtgatggttcagcagcaggaatggaaggaagacatatgaaagaagtagattctgtgggataatttgaggagtgagtagactggttgtgaaagaagggtcgattttcattgaagctcacatctctagaaattcgaatacgacgagtagatggatcataacaacgatatcctttgtgttcaggactgtatccaag

SEQ ID NO: 184654 - DNA, 832 bp, Zea Mays
gatctgttgttagcaaaggaggcagtactacttccagtttgatatgcaagttatgtctccagaagcgaaatcttatgctcactagttacaatacaaatgcaagttatatccagcatctacagaagaataatggccaacagccagtgaccgctcccagaaatgtctctaaggttagttcttcccattctgctgagcctgcccccaaagtggaagccgagccagtcacaaaggttaaggcacaacgagttggaaatgtggaagctacaacccagccagttctaaatgtgaaagcccagccacccgccaaagtggtaactcagaacatcactagtgtccaaaagacaaaagctaaaaagtcaaagtccgaaaaaccaacgaaggctaaaaaagttcaagcgatcacatatttcggtctcatatggaagaaaaataagaacgacaaggatgatggaagcgagttcagggcgaatgatgtaatccttaaaagcaaggatggtataggttcgtcaataaaaccaaaatgttgtctatgtgacaaagcatattctccggaattcctgtatgtacgctgtgagaggtgcaaaagtaagtttatttatcttcgctgtagcttggagaattatccttttttgcgttatgtttcacttcttttgttaacatctggaaattgcacgcttacagattggtttcatggtgattccttgcaacttgaagaagataggattggtgagttggttggataccgatgctgtaggtgccggaggagggccatccccccgtgtcctcattcagataattatgtaaagcctgaacccgaatttagtgagcaaac

SEQ ID NO: 184655 - DNA, 513 bp, Zea Mays
ttgtacttcttctggcgacgcccatcggcggtctcgatgacgaactcagtggagaagatgttagtgagtttggcgccgtatccgttcctcccgccggtggtcttcttctcgttgtcgttgtagttgctactggtgaggaggtggcccaatatcatctctggcacgtagacgccctcctcctggtggacctcgacggggatcccgtcgccgttgttgtatacggagatgcagcagctgtcgacgtcaatctcgacgcggagcgcgtccatcttgggatcccgctgcttgttgtcggcggcgttgacgaggatctcgtcgaagatcttgtagagtccagggacgtaggtgaccgagcggttcaccatggcaccgtcctcgtatatccaaagcgcctgggtgtgcttctccacggagccgatgtaggtgtcagggcgcagcaggatgtgctccagctgcgttttcttctggtacatctcctcgatggtcttggccccgccgcctgcggcggcgttg

SEQ ID NO: 184656 - DNA, 449 bp, Zea Mays
aagtaagaactcggattacaatatcatagattgcctaaacaaccatccaaaacgaatcactaggaaggtataggatgtgtatataggagaataaacctcggcatcaattcgttccaagtccttcactacaaattcagcatcactattctgctcctcagactcaagaatgcagaaaacatcattaaccaaagtactatcataagatgtatttccaaggacagttagatcaatatccccatcaggaaggtaagtctttagtggaactgatccaaatgcaaaaacctgaccaatatagcaaacaagtgctagttattacatataaaaccaatatgccaaaaggttcaacagatggttctacatgagatagaaaggcattatactgatcaaaatagtctgtcaaaagtcaaaatcatcaatgtgcattacaacagataaagcctaagctaaac

SEQ ID NO: 184657 - DNA, 449 bp, Zea Mays
ctacgatcccctcaaaggtgcaaagtttgtactagcgaagtctgtattatccggcacggtcgaacaaaaaccacctgaggatgcaaccaggtacgcgtcataagcgtccaacatcgccgtggaaagcgaggtccccatcccatttcacgtgccacaccaccacgattacaaatcgggacaacctcacaacaagcacagcacgcgatgtcatcatagtttacatacacacagcgaagggccgccggccacattgcacaaataatacaaatcgcatcttgttgccctccctctctattgcgagccgggggagggcagcgtttttactcactaccgcaacacgagagcgagtgcaacaaacatgctacatcggctcagtcttcggaataaggcctgcctcacgaaagttaaacaacatcatcttcaactccttgccctcaaaaagattccac

SEQ ID NO: 184658 - DNA, 375 bp, Zea Mays
tcgcccacagacggcgggttaatttgtaaagattacggggtctctttagcaaataggccagggcgaaggggtatcgggctatttgggccgttggatctctatctgacggttgcgattagatttttttataaaacctaactcagtatccaacgacagccgctagattaagatctgatggtcgtgaggcatccacgccgtaacccaatctcgaccgcaaagcctgcaaccgacggcacagatttaatcgagtgaaggggtatgggtcgatctaatctcaaccgcccacaagtgatctgacggtgacgaggcgtcttccccgcccgacgccagagcgcggcggcgccgcccagtttgcacggcggaatcccgccggag

SEQ ID NO: 184659 - DNA, 684 bp, Zea Mays
ggaattgcatcttcaccacttggcgcatgtttttgacttgctgaaccgcgatcaatggaagtttaagctctccaaatgctccttcgcagtcaacaaggtgtcatatctcggccatgttgttagccaagctggagtttccacagacccaactaagatccaagcaattgttgactggccgacaccatcatgtgtcaaagagcttcgcagcttccttggcctagcgggttactatcggaagttcatacgtcactttggggtaatctcccaacctctaacatccttgttgaagaaagggattatttttgtatggacaccagaccatgacgtggctttccaaaccttgaagcaagctcttgtcacggcgccagttttagctctacctgatttctctacaccctttatgatagagactgatgccagtgacactggaattggggctgtactcatgcagcgaggacatccgttggcatttctcagtaaaacattgggacccaagtccagaggattgtccacttacgagaaagaatacatggcgatcctgactgcagtccaacagtggcgcccatatctgcaacaaagtgaatttgttatcttaaatgaccataagagcttgtcccaactcaatgaacaacgcctccacacatcctggcaacacaaagtgtttactaagctcttaggcctaca

SEQ ID NO: 184660 - DNA, 547 bp, Zea Mays
ggtgggcgaacaactgtgtttcaggggacgtcaaacctgcacaagctggttgcgaaacttgaatgctagttatgtgagaattgtatggcaagagcaaggacatgaagctaagaagcagctcattgtttgtgtgcctctgggattgatgcagacaggaaagaggcaccctgatccctttcttgtaaatgttggtgagcatgttggcattggcatcttgatctgtttccataggtaaggtgaagaggattgtgtaagataaaagggacaagctgtatgtaaagacaagccaaagctgagtgaatttcaggcaccttattgtgtggagggtcctgtgtttgttgagtaggcaacgctcgggctggtgtgagatgatgactgcatttgtgttgtgttggtggtattttcactgctgacatgactgttgtatcggatgacatcttttctgttttatgacagtggcagtgtgatactaggctgttaggaggggacgggggaggtcaaacccaacgtacatcatgagtggagctgctgtaatgtaacagaagta

SEQ ID NO: 184661 - DNA, 302 bp, Zea Mays
gaagaggtgaagggtaagtgattgtggtgaccaagctgacaagcatggcaaggcgaggtaacgttgccgcggggtggggaatgatcaaggtggacgagagtcgagaaaggacgtcatggctggggtggccaagacggtggttccaagtggaggcagaggcagtggtgacgtgggtggagggtgtggcaacacgtgatgtgggaggtatgtccggaaagtgaataggatagagagtgggaaagagttgtcgcagcgagcgaccacaacacgagtggtaagatcccagatggtgagcctccggg

SEQ ID NO: 184662 - DNA, 421 bp, Zea Mays
agactacccgtgcaaaagtcgcccaagggtgcagccggaccctccgtgcaaaagtcgcctacgggtgcagccggactagcataataagtgcgcaaaatcaaagtcttctccaaaagactccccgtgcaaaagttgcctacgggtgcagccggactagcataataagtacgcaaaatcgaagtattttccaaaaggttccccgcgcacaagtcgcctacgggcacgaccggatcaacgaaggcacgcaacttcatataaattacggttacatacatacaacgagggcatcgcactttacattggttcaacctttaggttgatacccatctccctgtagttgaacaacattatcctcagctcctcaccctcaaaaagatttcgcaactccccctcacctacactcgccccagccggcgaggac

SEQ ID NO: 184663 - DNA, 665 bp, Zea Mays
ttcagctactctgggaacgtgtaccttggaacagcagggaagcaaaagaagaagcatgtcatcatcattatatctgctctgcttggagcatccttgctacttgcagccgccctctgttgctatatgctgacacgcaaggccatgaattcatcatcctcaccacaagcacaaggtctgttctcctcgatctgctgtccgttatcgagcttgcattcatgtctgcatgctctaccattgcagagaaggcgcttcctgcagagcagaacaagttgcagaaatacccaagcacgcagcagctgcagtcgatcgccaccgagacggctcatccctacagcctgtgtgagctggaagaggcgaccaacaagttcgcgagcaggatcggctcagggggtttcgggatagtgtactacgggaagctgagcgatggaaaggagatcgctgtgaaggtgcctagcaacgattcgtaccaggggaagaagcagttctcgaacgaggtggtcttgctctcgaggatacaccataggaacctagtggcgtttctaggctactgccatgaggatgggagaaacattctggtctacgagttcatgcacaatggaacgctcaaagagcagctgcatagtaagatcgatcgatcgatctatctatccatccatccatccacg

SEQ ID NO: 184664 - DNA, 294 bp, Zea Mays
cgccagtacatcacagaataaatcatgagttggagtataactgtatgagatcagcagacagtgctagtagttcaacacaccactgccaaaaaaatatcagaggaatagattcaccaaaacatccactataaatttaagactctacgttccagtgtgatgtatttgttactcataagctagataccagaagaacaatcaaaaccatgatgcctttaaatatgtctaagtaatctatctattcaacacatttccttcatttgtgatactaagatcatgaaatcagagtcacagcag

SEQ ID NO: 184665 - DNA, 361 bp, Zea Mays
aataaagtgtgcaaacttggagaaacggtcaacaactgtgagaatcactgacttgccgcccacctttggaaacccctcaatgaagtccatagaaatatcactccatacttccgaaggtagtgatagaggttgcaggacaccaccgggatggagatgttcagttttattgcgctggcagactgaacagcctttgatgaattccttaaccctttgtaatgcatgaggattatagaatgacgactggaacctgtgaattgtcttttggattccttcatgtcctgtgtcatgggcactggataatagtatcagccaaagagtagaggagcacatatacttttcctttgaaaaggagcaacccatc

SEQ ID NO: 184666 - DNA, 271 bp, Zea Mays
caagatgtggaagctgataactttgcaatcaaagtatggaatagtatcaacatatgagagggcctcttcgtctcccctcccagtcaggcattccacctctccccagccccccgccgatggccactccgtcctggacggccacccccacggacgctcagtcgcccctcttacccccttctggactgcttggctctaccccctccttgtcattgctggccaagcctcttgttcctagaggtcgctcgaagactgatcattggaaagagctttc

SEQ ID NO: 184667 - DNA, 628 bp, Zea Mays
gtctcttttccgctccacggcctccggggcaagatccccggtgagatctggcggttggaggatctcgaggtggtcaacctcgctgggaactctctccggggcgcccttcctgcctccttcccgccgcggctgagggtgctctcgctcgcttccaacctgcttcacggtgagatcccgtcttccctttccacctgcaaagacttggagaggttggatctttcaggcaaccggttcactggatcggtgccgagagcacttggcagcctgcctaatctgaagtggcttgacttgtctggaaaccttcttgtcggtggcatcccctctggtctggggaattgcaggctgctccgctcgctgcggttgttctccaattcattacacggttcaattccagcagggattggaaagctgaggaaactacaggtgttggacgtatcaagaaacagattaagtggcctggtgccaccggagctcggaaattgctcagatttgtcagtgctcgtattgtctagccagtccaattcagtaaagtcacatgagttcaatctgtttaaaggaggaattccagagagtgtgacagctttgccaagactccgggtgctatgggtgccaagggcgggcctggaag

SEQ ID NO: 184668 - DNA, 748 bp, Zea Mays
agttttcctgggagctgtacttttgtgagagtttggtcaaaacatgtgttgtcgtccaaaatatatttactcattaaggatctttatgtatgaatttcaggtattggtgatacaacagattgattttatgacatcaaaggcatggatgtctgcagataaacaagtggagagaaaggttgggcatttgatcagacaaatgattgcactagggtgtgtttagtttatggtagtgcagtttaagcaaaaaaatgaccatgccaagtaaacttggccttcgtttggttggatgccgaagtgttgatggccagccaagccaaattctgttcaacaacaaaaaaaacttaagtgaactcaggtgaccaaaatggccttcccaatttttggcttataaccaccaaaaaggacaaattttgaccggccaaagcatgactgttttttgctttgtctgcacggacctagatttcattggcagatttgatctcagtgttatgttatggtatgaattgaagggcaaagtaacagaactgaaaacgcactgctatgtagtgtgagagaaactatgaatgaataagtttatttttgctttgatttcctctcctgtgcattttttgaatcagagattcttctcaatcttgcaggtgattaaattaagtacacaaaatggtgttccgtcggagtacacagatatgatctttcttcaaacaaatctggataaagtagaaggaacacaaaaggtaggtctaacatg

SEQ ID NO: 184669 - DNA, 324 bp, Zea Mays
ttagaaaattggataaaatgtatatataaccacagctagaactgattatatcttatatttgcaatacatcaacaaacagtggaatcatgacatcataccatatacattgctaattctacataaacgataataagaaagatacgtgaagccagatcataatgcaagacaaggagaaccaagggtacctgtctcaagtgcagcattgtaatgtcctttgccaactgatgctagcatgcgcaggaaatagtggttacaatatgatcctagcatgttgaagtcacaacatcagaaaacttagaaaacatgaaatatctaaaacataac

SEQ ID NO: 184670 - DNA, 433 bp, Zea Mays
tgggaagcatcaaattggtccccaaccctgcctccttaccggtccactggaattctggcacaagatttgaatcaggggctgacgacaccgaggtttcccccaccacaacatttgctgtcttaggccctaccccaccaccacgcactgcacaaatgggcgttggggcaataacatcgccatcaactccttcgccagagccgccgcacgccccaggtaaggagaatggccacactgctgctgggggtgagagttactatctgacgttggggaggaagaagaacccccggtgccaccgcggatgggcaggagattacagccacagaaagtgccaccgtgtacctctgatgatagtaccggctctagaatgtggattaagtccaaccggcaactccaagctgaggccagcaagaccgataaatcatgatgcgcttca

SEQ ID NO: 184671 - DNA, 490 bp, Zea Mays
cttgatcacattctaaaactgaaaacattaatcatttttagttggtctacaccacactgaaaacattaatcatgtttagttattctacacaaaatgtagcattctagctatggacgtccaacaaattatttggtggttgcaacttgcaagtcaacatcatatcttactaactttcttcatgaaattggtaacaaagttttttatccccaaatttattgaggttcagtcctatgaaccagaggatgctacgacaatgatccctatgaaaatcagaatcctacatttttcctataaaattatcttgagacaaaagaggcctcacttattggatgcattgtttaatttagcaggaccaactgctagcttatgatctggtgctcaggtcaatacatatgcatgcaaatgggtcagatgtgcagttccaacaagcatgatcagagcatttgcaggccagcagatgctccatgtggttgtagcatggttgcaggct

SEQ ID NO: 184672 - DNA, 1270 bp, Zea Mays
atgcagcttcgccttcgcatcctcctactctggcgctgccagggctcctcgtactcccgccggtttcggcagtggccaccacagacgttggggcagccatggtggaggcactagcaggggtggtgtaccctgactgcatctatacaatccatcaaatggtcacatcgccatgtggcctgggccgcacactagtggtgcgctgacgcgtcccctgcagcaggctccgcaagccgctccttccttcagtggtttcgggtgccctgggtagcctactctggtggcaccgactctacaccatcaatagcctgttcagccctacccggtgcagtcttggacaccacgacctggggcatgcgatcagcggtctcttactaactcgtttagcaatatgactctgacccatccaacggtcactgactaggttgccgacttcagagcctcctaccacaccactcctaacgttggtatactcctctactcatcacatccatccctctcatccttctatcattgtttacaatggttttcttcataacacatgggtgttatagggctcctaacggtcagcgaatgaggagaagcgcgatgtcctttccgctcccgccccttccgcttccgtcccttccgctcccgtcccctgccctcccacctccggccgacgccccagcccctccaacccacagcctcacgccggtcatcctcccatggtcggcggccacccaacctgctaccccggcgtcggtttcctctcctctctccgcccagtctgtggctgatattcctggtggccgttcaaaggcgcagcgatggtgtgaacaggagtttccttcggctgcttcccggagtgatttacgtcgctcgtataaggaggcgctagtggatggaaggttcactgccagcggcgctgatgatggtgacggtggatgggtgaaggttgtgggacgtcgccgtcgaagtccctgctcccctcttcccctgcgcccccccagacccgttcctgctgatttacgtgggagatgcttcaactgtttctcgccgtcccaccatgcggctgagtgtggcagtttggtacggtgttttcattgccgcctgcctgggcatcgggtgcgcgcgtgcccacgccggaagaggactctgcatcacccagcgaaggtgttggtgtggcgtctagttcccaggaaggtcgagcgtgtggcgtccagttcccaggaaggtcgagcgaaggtgttggtgtggcgtccaattcccaggaaggtcgtcccggaggaag

SEQ ID NO: 184673 - DNA, 599 bp, Zea Mays
caaggtgctcgacatctcccacaacgccttcaccggcgcgctgccgcaagcgctcggctccatcgtcggcctgcaggtgctcaacgccagccacaaccagttccagggacaggtccccaacgccatcgtcttcggctgtgtgagcgtcgtggctatggatctctccggcaatgcactcgacgggggcttgccggacctgtcgccactccgctctctagcccgtctcaatctgtcgggcaacaggctccgcggctccatcatcggggcgttccaggagcagttgagggtgatagacctcagcaacaacggcttctctgggctgaatttcagcagtgggtatgccggctcggcgttggtgtacctcgacttgtcaggaaacgagcttacaggagaattcaccattgccggccggttccagaacctgaggcatgtgaatcttgcacacaaccagttgtccaatgctaatttgctggtgtccatgggtgggatatctgggctagagtatgttaacctttcaagcactgggctgcatgggcaaattcctgctgatttctcttcccgattggttggattgaaggttctcgatttgtcacggaaca

SEQ ID NO: 184674 - DNA, 405 bp, Zea Mays
gcccgctgtgacagctcggggccgctctacacgctccagccctccaccgccggcgcgtctccacctcctgtcctggtctccaccacctcctccaccacttggcatcgtcgtctcggccatccaggacccgacgtcatgaccaagattaccagtggtctcgatccttcatgtagtaggggacattttgagggtctctgtcatgcttgtcagttaggccgacatactcgtctcccatttactacttcttctcgggctgagcaggcttttgacctggttcactgtgatctttggacctcccatgtactcagtctttctggttataaatactacttggtgattttggatgatttttcccattttctctggactttcccgcttcggttgaagtccgaaacattccccacc

SEQ ID NO: 184675 - DNA, 368 bp, Zea Mays
acttatggctactcttcaacaaaaggaagatgaattggttgctcttcgtgaacaaatggctcatgaacaagtggctaaccacaaccataataatgacagggatgcctctaccagccataaccaacaacattctgaagctgcactcactcttgaggcgatacaaagaatgatttctgagggtgtgagagcacaatacatgcaaacacattattccatgcgtccagggtatgtgaaaccatatccaccagaagttgacatggtacccttcccaaacaactatcgccaaccacagttaattaagttcaatggaactggatctccacatgaacatgtggctcatttcttagctgcttgccaagacacctccc

SEQ ID NO: 184676 - DNA, 548 bp, Zea Mays
tggagcggaaagccgccggtaagtccctcttccccgacagtccgtaaaccagcggtttgaggcgatttatcggccggtttgagcggctaatcggccggctagctccggcttatcgggcgcatcggctaggacgcgtcgcgcggcttaccggccggttaggccggtttatcggtgatatgagccgattaatcggccagatgggccgattagccgagctgtcgagtaggggtagggttaggttaatttttccccttttggcttcaaatcatttgaaattattggacctccgattctagcaacgaaagacaaggttcatcttcacccctgcttccctatgtcaattatccggttggtgaggtaacacagcaaccaacgaggtgggtgtacgaatgggaggaccctgagtagcgtaggaccactcacacagggatcggacaccaaggcctacagcaagcatattggacccccgattctagcaacgaaagacaaggttcatcttcacccctgcttccctatgtcaattatccggttggtgaggtaacacagca

SEQ ID NO: 184677 - DNA, 298 bp, Zea Mays
gaagagtaaagtgtcccttggctttgaggctctggcacgcgctcaatatcttttgaggagaaaaccatctttggagaagatgcccattcttgaacaggtgtgatgttattacttctacatgaacaagttcttctgaatagtaaatacaaaatcatgccataacttattcattggtggtccagattgaagaatcacttgaagagcttgcgcctgcttgcacattggagcttctaagcttgcctcagacacttgaaaattctgaacgcaggcgaggtgctattgcagctctctgtgaact

SEQ ID NO: 184678 - DNA, 426 bp, Zea Mays
atttgatttgctggttgtactactgtcgaaccccagcccgtccgtaccctacgcatcttcctctcccatccatccactctttgcttcatcgatccccactgctgtgctgtgctgtgctgcgtagcttatccgaggggacaggtgagggagtcgagggggacggcgcatgaaagaaagagaccgagggggaggcggcgagagcgagaaggcaccgccgacggcgagacctaggatgcagacaaggccaaatccacatcgatggagccaagcccgatggccgttggtgttggcggcccaaagaggaggtggacgcgcagtcggaggcggaggtgcgtatgcccatcgtcgccatctagctgcgcctccttatatgcccctccggctccgattagcttacctccatcgatctccccaccatggacgcca

SEQ ID NO: 184679 - DNA, 343 bp, Zea Mays
cgcatctttgtattaatagaagaaaagaaagggggagagaaccccaatacagcacacacaccactagagactaactacggatcaccgactaaaacatggaggaaacacgacccacaccgctgttttaagccagcaactcttcgacttggaggaaggacaaggccttggcaccagtcatggaccagagcaccgcctcttccctagccatcctaagggccatgaccaagctgggattacaaccatcaaaaacacacctattcctatgcttccaaatggtccaagcacctaggatcactaaagaattgaaaccttttctcacaatatccgatgcccgggagctgct

SEQ ID NO: 184680 - DNA, 332 bp, Zea Mays
tgctcataataagtgctggactgcaaatcatctttgccaaaagaggttactgcattccgaatattgtgatcagaagaaacaattgaccacttgcttgtttctggtgttttcactcagcaagcgtagtacctcctccagcattatgtgggtcccccagcccaatgatatttcctttgatgattggtgggcacgagcaaatgatagagtgagtggtccagttcagaaagaggtaaattccatcatcttaggagcatgggctatgtggaatcacctcaatcgctgcgttttttattggcgtttgcgaagcttgaatgaagtgaatttcttgtgta

SEQ ID NO: 184681 - DNA, 514 bp, Zea Mays
gaagattttggtcggatgtgcctgtcaatctaccaatttcgtcataaatggacacagatgcaacatgtatgcagccatcacttcgtttggtaacgctagcacccatatcacagatgtttgcaaaacatgataggatgcaaatcttacttattatggaatgataagagagaattagttcagcatcaaataaagcaaggcacttcttcccattaaacttcacatggaatggagaccccattaccaagcaacactagagctagaaatttaactagaacttaggtcaatcgcaggcgacacatcactacacacttgcaaaacggcaaaagtcaacatccacaaccacagtgtatagcacggggtgaacgtgagacgagacactacttcggctacttcgcggcggccttcgtgggggacttgctgctgcctgcggcggcgacgaccttgttggggaggagggcggggttgatgttggacaacacaccatcgtgcgtgatggtgacctcgacaagcagat

SEQ ID NO: 184682 - DNA, 366 bp, Zea Mays
atgcaggaagctgccgtatgcggacagccagggccatcagagcctgcgcatccagacacaggatccaatcaggcgcttagtctcccattctctgtatgcagattgtacctttttccttcttgataaaatgacacgcagctctcctgtgctgttcgagaaattaaaatagggaacacgaccccttcttgtccactgaaagtctccccacacccacactccatccttcttccataaatatggaacggattgtcccaagatatccagctctggtgttcatccctccatcctaggacagacctttctctaacagagagtactgtgttctgacatgggagggagctaaggtcagacccctcctgtcctttg

SEQ ID NO: 184683 - DNA, 533 bp, Zea Mays
gagcccgagaggaggaactggggaagggaaggcgaacatgttgacctaactgataagcatgacacaaactatcgaaattgcccttgctacaagagattactaagttgtagattgcttggacataacattgtacctaggatgtttgagacgacgatgccaggtgatggacagagtaatagcagtcaaggcatgcggggatgacatggcggtggaggaagcgggcaaccggagaatgtacaacggtcctaagtcgtcacatcgggcgagaagggtcttagtagccagatccttcacacataaaccaaaggggtcaaactacataaaacaagagttgttggtggtaaacggatgaacaaaaataagattctggatgatattggtagcaacaagaatatttttgaggtggaatggtcccagaagaaccgagtcacccactgagataaccaggagggtggaatcgttccccataatgatcgagaagggaaaatatgggtgagggggatgggagtgagataatgtgtcgatgtcaggag

SEQ ID NO: 184684 - DNA, 504 bp, Zea Mays
cgtcgcaccacccagctgaaacgcgccaccgtttccccttcctccactcgtggcgactgtttcttcttcccactcgcggcaaccattaatggccatgaccggcagtttctcgtctcccagacctcttccctgctcgcccgctcatgcccttcccctattgacagtaccgccatcgcactgactatttcccttcctcccattaactctagcagtttcaatcttacaccatgcagccatcaatggcgtgtaacgtagagattatagagcattcaagcgtgcactaactcgtcctcttctcactggcgtccattacaatctccctcgccctataaaaactgcatcaccagatcgtgctcgtgcccatccgcccgcctggcagctcttcctctacgcctctctggctctagccgcgcagtcgctgtactcgtgtgggaagccccctgctctccccgtcactagagttagcatcccacggccttgccgatctcccgtcccctactgtat

SEQ ID NO: 184685 - DNA, 351 bp, Zea Mays
gtaagcacaaaagatgcatcaaaagtcttaaaagataacttagactcatgagatgcatcaacaatcttctttttaggcattttatcaattttagcatgtgaagtacgatgcctagagctagaagcttcattcttgtaaatataagcatgatgagcaacagaatgagattgtctagcatgaattcttctaatcttatactcaggatagttctcgggatataaaatgtaaccttctctatcttgagccataggagccttgcccttaacaaatgagaaattttgttttcataggcattaagcttggtgttgtcttgactcccatgttggaagccaacaccatccttaatgtcag

SEQ ID NO: 184686 - DNA, 507 bp, Zea Mays
catggtaagacttaaactcgcaacttgttggatggaagacaatatacaataaccactatgccatgcctaccttgctaatctagataaacaatatatctgggccaagccacacctatacatgcagctaatcaaacaaacgctaaagtatcacaagcctgggtacataggtgtaacatgaaaccaagtagccaacacaccgtacctccatcaatgttttaagttgtcgattaatcacgattggtccaaacctacttggatgtttaatcgtgtttggtccaaaccgatttgaacaagtaatcgtgactaatcgtgaaaacattgaactgcataacatgagtctggttggtctacgtgcggacatccaaccaggttcggacccacattagcagctgctataatagaccataacaggccctccaccggtccaccccatgtgtctcggtacaatcactccactatataaagttagaaacaaaaataggaatcgattaaagatccgttaggaac

SEQ ID NO: 184687 - DNA, 461 bp, Zea Mays
caacagatcaacgatcgagatttttaagtaacctagattttatcccgatccacacgatgtaggatcgacgactcagatcgaacacgacgaagggttaagtaatgttatgatctaaactgttgccctagctaccaatggtcatgatgatttccccccggtcgatctaggccgttgttacaaacatcaacgccccgaagcttatcacctactccgcgtccagacgcggtggtgccgcccgaaccgcggcgagcccccatcgccatgacgaccacctcgcaaattatagccccaaatcctaattcaaagatgctatcttaaacccgggctacgatgatcagagagacccaaaccatcgtgcccaactgccgagagagccccgcctatggagctccgcactccgcggcggacctctaagtccgacgagaaattcccctacactgcagactctattctccaatcta

SEQ ID NO: 184688 - DNA, 1680 bp, Zea Mays
aaaatatctgaagagacagtatatggatgacgcttgaatataagatttaaagccccaattttgccactttcggctaatgctatggctgtttccaccaatggcattgaacggaatttgctatattctcctgctgcatacctgcataataagaccattgcatttagcctgaagtaagcggcaagcaagcaaagtccaataaaaagcggcaagttccacatgtgcatgcaatcaactttgcaaaagaaagctaacatcatcatacagtgcagaaaaataggaaagtggttttaagaactggaatgagcaaataggttagacaaatgaaaacaagccaacatgtaatcttgaaaatgttatcgataaaatggaaacaagacaagaaacattcctttgactaagaagataagtgattgcatccatttctctttttcctacatgtaaaaaattagagccaggttgccattgggtaaagcttatttcggttataagtggaacgctacgccaaattactaaggggagtatatcagtgcagaaacttctatagtatcttgagtaatgaactgtgattcagatatgctctatgcatgtaacgaattatgttaattagatgtgtgtaggattaatgtgactcaacaactgtaatatagttgtaaatgcttccaaaaaattaacatttcctggttatgcattcttatcttgagaaagaatagcaagaacataccttcccatattaatgcccaagaatgtctctaacatgtctatgtgccgcaataaacgaagcctaatggtgcgactgtcccatgttgagcccttactgctgttatctaactcagaaaatctgtaacaatcagttatacaaagtccaaaagaaagtagagcccttaaatctgcttctgtaggcccaactttgtttacacattctgataatacaaatacttggtctttaatttttgctaagtacgagtctatctcatgagtattggcatcagagtgcaaccagcatgctttaagaacttcatccttatctagattgtatctagaagcaaaatctaaagcgtccttgtatcgtttctctcttatcagaacagagtacatttctgctactgtaactttggagaatgatatcagactccaggacatttcatccccttctgtttgttggtgctccccagaaccactcagcagacaaggttccgagtcactatccatccgcttattaactggagtgtttgttccatatctcctagattgcaaaacaaaagcatgtccttcagtagcctttgccttctccaatattggtgtagataaaaccgggtcatcattggaaactatcttgtcttcagtgatgctgtacatgctaatgctaccatcttttcttaccaacataagaacattatctgtccaccaactgatgtccttaacatcaattaggtgtctagcctttccaagagtttgaagtggaacagtgcgcaagtcaccatcaagtgaaaaaaagtttacaaaaccagtcaaatccaacgtagcaatatactttccctgaggcgagatcctgattttcggggatgaaacaaaggttctttgatccttcaggggacaaaataccccttccaactgcatgcttttaaatgaaagactaagttccagatttttgttgaagtgtaatagatacataaaataggt

SEQ ID NO: 184689 - DNA, 278 bp, Zea Mays
atcgaccacggagcgccccgattagatcccgatttccccaaaccggtgtcacacagcagccatcggatcatagatccaaggtcacgatcgtaacacacgccagtcgttggattactgatcatcgaatgagattgatcggcccgaagcggtaccccaaaggaaatccgagccgtccatcagttgaccaacggctccagttttcttccccaatccacagtagaacacggcggcaccggtcaccaggggcggcggcgccatggccggcgatgagccatacg

SEQ ID NO: 184690 - DNA, 668 bp, Zea Mays
ctcatgttggtatttcctccagccttatgatgagtcgtcaaaacaccataactgaaaagtggttttgttatgttctatcgaagagaggtgggtgaggtactttagagagtcgatgcaatagtggaggtagaaccctgatgttggggctaaggcgtatcgtcattgttccatgggcgtcgatgatatggcaagggacacaatctcctagtagtaacatttgtatagatcgtgcgagtctattgaagctaggtacctggagtccatcgaagttgttgtgatggtggtggatggtattgatgtcattgcatactgtagattatggttgtcttgatgtagaagacaatgtagttgtctcgcctcttgctacgcagcccgtgcctcccttcccaccgtggagtgtcgaggatgacatgtgttgcaatttaaggctactagaagagctttgatctcatatgtcttcgcgtcaacgtgaagagggatgtcaaagcaggtaccacagtaggtgattgtcatcggtaccaatgaagtccaaagatattgatgttggtgcgacgttcgacgttgcccgccagtcgtgcgaaggttgtgttgatgatgttatgcgtggcgtctattaagttgcatgcaccaatcagtccaatccaaaagcttaagctgttaggagaagg

SEQ ID NO: 184691 - DNA, 582 bp, Zea Mays
caggtcaaaagcctgctcagccctagaagaagatgtagtaaaagggagacgagtgtgtcggccaagctgacaagcatgacaaaggccctcaaaatgtttccggttacaagaaggatgtaaactgttggagatcttggtcatgacgtcaggtcctggatggccgggacgacgatgccaggtggtggaggtggtggtggagaccaggacaggaggtgaagacgcgcaggtggaagaaggccggagcgtgtagaggggccccgcactgtcacatcgggccagaagggtcgtggtggccagatccttcacagaaaaaccagaggggtcaaactcaatggaacaagaattgtcggtggtgaaccgatgaacggaaaggagattgtgagtgatatgtggggctacgagaacatcgttgagaaagaatggtccagggagcaccgaggcacctactgaggtgaccggtagagtggaaccgtttccaacgacgatcgaggtagtgtgtgtggaaggagatgggcgtgagtgagatagcatgcctatggtgggggtggtgtggtaggatgcaccggagtcgatgaccctgtc

SEQ ID NO: 184692 - DNA, 404 bp, Zea Mays
aacgccacgctctccagctccggctacaacgagctcttcgccaccacgccatccagccacgactccggctccagcgagctctccgtcaccacgtactccagcaccgacggtaccctccccgggaacatcctctccgacgccagctcgtgtcgaacatgacccagtggagctcgtgaccccgctctcccacgacgaggagcgcgtcgacgcgtgctacgacggcgagtcgttgtggtatcgaaaggtggagggccttctcatcgacccgtcggtgccgggcccggcgtctcgcattttggcaggaaagttgcatcttgcatgcgacgatggcgagcctcggtctttcgcggaggccgagaaacacgcggtttggcgtgccgcgatgcagtcagagatggatgtgg

SEQ ID NO: 184693 - DNA, 416 bp, Zea Mays
gaagacgacgacctttataaataccaatgacatgtattgttgtgtgacataaaatagagaccagagactcgattgattctattctatcaagtttagtactcgagtagtaatcttgcacaacggacgacaaaaacaaaccatgcggaagcgaagtcgccaaggtcaatggcacttgtacatctagatagttgttgaacgaaataaaagacattggaaccggacgagctaccactaccaacctgcaagcatatcgcgagagggaagcaaagaggagtgaaggcaaggtgtgcctctcagcgctaacggatacagacgcttccaaagcaggagtggaaggtgccatggtctaaggccagaatccaaattccctcatcgcttgagctggaagccagctacactcttccatactaatcgag

SEQ ID NO: 184694 - DNA, 1128 bp, Zea Mays
cagatttttcttttacactttgcttttcattcagtacagaatttattgtcttcaaacttcgcttcaaactttcaattcctcctttgatgctttggtactcaaaagtgtaattactgactatcaacacatcattgccactgaaagactcattttcaagtttcttgtgtttcatcaaatccaacaatttggtgcaaagttggctggtcttattaagcaatgacaagccttgcacctgcaggttgtccactctagcctgaagctcttggtcaaggcgaattgagaagggtgctccatttccaacaacttgtaaacgatttaagagtgcaatgttctcttgtctgagggacccaacttcaagatgacaagaacgaatttcacatctcaacttttgctccacccctgtcagtctaatcagttccattcgcaatttcctcattttatcactgtcacactcaacaaatttcttgtctaattgagctttgcatccctgtcttagacttgtgattgctctttcctgttcattacatgttgtttgtagtctggcaatcactttgtgcaatgctttgttctctccctccttgtccttcaagtattccctggtgtggtccctttcctcaacaacctcagcaaaacgagcatccttatctactgaggaattatggagcttctcatgctcgtttctaagtttctctagatcgtcatttaatttgttgttttgcaattccaaactagcaactttggttgaagcttcagccttatttgcttcaagaaaggcaacttctctttgaaatgacacattctgctctgcaagttctctcacccgttcatgtagtctctcttcttcagattgaaatcttgatagtttgacagaccaatcatgtgaccttctgtccatctctctctccagtgtagtttgtctttcactcttctccttctccaacctcctagttctggtatctagttctttctttgattgtttgtattgctgtttggcagcagatctttctgcaacgtgtgctcttatatgtgaagacagttcatgcgttaactgtttcctatcttctgtcaactgctggatcaactgaaacatgtcatttgagctcattcgcttatctctgataatgttga

SEQ ID NO: 184695 - DNA, 429 bp, Zea Mays
taaccagattgtctatcaagatctgaccaaagttctaggtctggatagatttgactctgagaaccttttggatgtctcaactacagttttgccactgaaaagtgttgctatggatcctacaaatttgttgcatctgaagactgtcccatctgagaatggactcaaactggttgaaaattcaagcgacaatctacaggatttggcttgtgaaagcccccttgctggaaaagtcaagttcatgtgcagctttggtgggaaaatcttgcctaggccaagtgatgggaagctcaggtatgtcggcggggagacacgcctcatctcgataaccaggaacttctcgtggaatgaactagtgcagaaaactctcacaatctacagtcagcctcatatcatcaagtatcaacttcctgacgaggatctggacgccct

SEQ ID NO: 184696 - DNA, 448 bp, Zea Mays
ctatgtcgtcagatgatagagcagggattgctgtcaagcacgcatgggttcaatttggtgataaaaggtctgttaagagacaagcggtgggaggatgccatcggcttgcttgaggttatggttgatataccttctgctggtactgcggctaagtgggaagagcttgatatcatgacagaatgtgttgttcaatgcaatcttgtcactactgcgtcctctgattttcatcctgaattcatcagtctgtttgtcaaaaattttggtggctctgtggcagtatcaagcaagagagtattgtttctcagttggggctacatggaggagtatgaggttctgattccatttcagttcctccaggttcgtgagagccaagtaaatgatgtttgccaggacatgggtgtgggagataagtgcttggctgccattcatgactttggcgatgttcggg

SEQ ID NO: 184697 - DNA, 347 bp, Zea Mays
ctgcttagaagttccctcaattctgtgctgtacacattatcatcatctccagggatgaaagtattagctcttctaataagagcagcatcatgatcaattggttggtcagaattattatcatgccaattgtctgcagtatcattagactcatcatcattatgccactcttcatttacttcagggagatgatcatcactctgccactcatcatagacttcaacaggacgatcatctcttctccattccccatgtgattcctgaaagtgattatttccatgcagctcttcaagcactgcaggaagatgatcactgtcatgctgatcttcttgcgcttcaggaagactacc

SEQ ID NO: 184698 - DNA, 659 bp, Zea Mays
atgtcgttaactatatataatcttgcagttccttggatctctgaaagataatttaaatgctgaagttgctttgggcactgtaacaaatgtcagggaggcttgtacctggcttggctatacatacttatttataaggatgaagactaatcctctggtgtatgggataacttgggaagaggtaacttttcctcccaccattcacacatatgtgatgtaaacttttctaagaaggatgtatcttttagtatgagatttttgacattcactaaaaaaactggcgaacagtacatatggaagtgtcacatgcctgtattttgctgttatgggcactaggcccacagtgcacttccaggtcagccggggctactgttcacgtgtgggtactgtagcgcgtgatgtttcctccgttgagttctgaagacaattttttgggttctaatttctatctcgtattttttattaaggttatgggagatccttctatgggtgcaaagcaaagaacatttattattgatgctgcacgagcactggacaaagctaagatgatgcgctttgatgaaaagagtggtaacttctactgcaccgaacttggtcgaattgcaagtcatttttaccttcagtactccagtgtcgagacttacaatgagatgcttcgacgt

SEQ ID NO: 184699 - DNA, 501 bp, Zea Mays
tgtgtgtcatttcattaaggcagaaaaaaaataaaaggagaggagcactcgaacactttacacagcagctgcaaacgacctaaacgaccacccccagcctaaggagcctcccttaggaggagcttcttaaggttagaagccccagccaagcaccacatgtgggattcaacagccgattgagcaaaaatcgcttgtggctgaggttgaactccatcgaacatgcacgcatttctgtgcttccaaagctcccaagagactaaaatgaccaagaaattcttttttaaaatctgtggatagcaacagtggccttacaccaccaggtccaaaacgggatagaggaattggggcgtggaaccatatcaagattaagtttcctcaaaatcccatcccaaacttctctgggcagcacacaggagaaaaggatgtgatgtatggtttcctctgactgatcacaaaaagggatgctgcttgatggggtaaccctcgcttagccagtcgatc

SEQ ID NO: 184700 - DNA, 271 bp, Zea Mays
aagagttgtgtgcggcgcgcggtggcggcactagcactagcactagtggtgcaggctgacacgcggggacagctgcaagcatctcgaccgaaccatccatctctctagaacacccggagaagaagaggacagccagtcaccgcttcagtgcgcgcggcgcgtccccttcccgcccttggctcccgccacgtcgtcgtcgagacctcgtcccccgtttgactgcaccactcactccccatcgcagaggccagcgcctcctataaatcccgtt

SEQ ID NO: 184701 - DNA, 540 bp, Zea Mays
acaatgcatcttgcacgactttgggattcttcaagaagaacagatggaggatattctcttgagggacttacaaatgatcatagggtcatgggtgttgttccaaaggaattacaaaagattgggaagagatcaatgaaaaccatctttggtcggaaaaaaataaagaaggatgggtcagaagggaagattactgcaattgagcctgttgaaattttacaaagagaagacagagaattgtggatctgctattcttcgttagattccatgagtaccttgaggctttatgagagcttgaaaagcaagcttgaaaggaagccctggacttttgacggttaccccagacccggaggttcattgtacgatttctacgaggagtattggtgtcctttcggtgctattcttgtaaaaatggaaacagctggaatgcttgttgaccgtgcttacctttcagagattgaaaaggttgctgttgcacagcgcgaatcagctgcagataaatttcggaagtgggcatctaagtattgccctgatgcaaaatac

SEQ ID NO: 184702 - DNA, 370 bp, Zea Mays
ccatgttcaacactgctctgcccgaacctgtcaccgccgctcttaccagcttgctgggaatcgacgacgagcatacggaacaacttgatgaggcattgatcggcttggtggggcaggggatcgacggcatcaatccaatggaaggcgtcccagccgcagggggggcggtggatgagtgaacctgctggccactccatgagttccaacgttttgatgaatcaagcatcctgcatgtaccctgcgtcttctgtttttattcttcgcctatttgaaagactgctgatatgttgcctgcccagtgtcgtgcttcattttgcgagaataggcatgctgctgctgatctgcgtcttcagatccgaacttcatcttg

SEQ ID NO: 184703 - DNA, 554 bp, Zea Mays
cctgggcaccgtgtctacgtgtgcacacgtcgacagacgtctctgcaccagccgaggcaggccttggtgtggcgccctatttcccgcacgatgacctcggtagaggcctcaacctgcatgaagggtagcgcgggagacgatggcgagggttctggtggtggtgggagaaggcgtactcgccgcgggcagaggaggcgtcaggcgtgaagcaatagtgggcatgtcccttgggatgactaccctggtgtgccacctttgcttccatcggcgcttgatcttgcccctcctacagactctgcctggcctttgtgtatcatcaagcgatctaggaggaccatccaagctgaagaagatttccggtgtgctctgctcatctccttcgttggcctggaggtctctggctgtgccgcggaggtctccgatgcgcttaccttgaggttcggccttgaggctaacatgctcgacctacgcctggctacgccgagcaccttcgtcactttactccccaacactgagttggctgaccgtgtcttcaatggaggtcaacctttcct

SEQ ID NO: 184704 - DNA, 523 bp, Zea Mays
gttcaagcacatgtcccggcaggcttcgaacgggacggactcgttggaggacaggtcgaagccgtagtagtcagcgtgaggctgctcaacgaaggtgaactcctttccgtcgtcggtcgtcaagaacatgggcttgcatcctctgttccagttcgtcggatcgaccatctcgtagtccggggggcatctgcatctgaggccacccaggtagtcgcagagcccgttcctcccacacagtccatgcacatagcacatctgtatgacagcctgccccgtgacgcgccacgcccccgtcgacgcgttcaagctgtacatcctgaagttgccgtcgtagccaatcgtgatcctcctcttgacccctggaccagaatccgaagcctctatcctgaacccgtcgctggatacgaaagtacccaggtcgtccaggaccgctaccctggtgctgttgaacctgttgcggccgttcttgagggcgttgtagtcggggctcggccagtagatgctggtgatctccgggccgtcg

SEQ ID NO: 184705 - DNA, 310 bp, Zea Mays
agcctataaatgtacccttcaatcaatgaaagatcaagcaagcattaaccttgctcggcttcccctttcccctgtgttcactgttcacccagtgggtactgttcacgctgctctccttccgctgccctaaccctaggacgacggcgcccaaacgccatggcctcgagcctcgaccttcaccgcaccactcataccacctcagaagccgcagttccaatagaggaggaataaattaagaaataaatggaagatcgttaaaattgcatttgtggttttaaaattttaaaattgtgggccagaggaatttaac

SEQ ID NO: 184706 - DNA, 689 bp, Zea Mays
gtcgccatccttgaaaaatgcgttccccaagaatgcatttcctagtttttgcctttctacagtccgaccatcttttgtatgtatctcttctgtagaacttcccatagtagtatgcaagcacatcaccaacagtctttgtacccagaaacctgctcagcaggttgagattcttgccaaaaatgtagagcccaaggagaaatacctctgcctcaagatcactccaaagagcaacgggtgaataaggtagaggacttaattgtttggtttctctctgctgcattattgaattattggtaacattctgtccttcttgagtggggcaagggaccattttttcatcgtatgcttgattactgtcagatttaatttgaactacaggcactactgtatgtggatactggaatgttgcagcacatatgccagtgtcattgctagttgcacaagttgaggtcacctgactgtgcacatctccagtgctgccttttgttccaaattctgaacatttttgcgtttgtagtacctcttccgtcttatcaacttcgcttggtgatgcccacgtaattggtaaagctaacccaaccacaacagggtaaccatagccatggaatatggaatcattatgtgaactggccatgagcttacggcactcatcctctgtagcaagattggggatttctgcctggtgctca

SEQ ID NO: 184707 - DNA, 332 bp, Zea Mays
gccgtctgcaacagtctaaccaaagtttatcaaaaaacactgttttgtactattctacattgtagactgcaatgttcgtagagtgaagttttaatatggatatatggaatgtggataggcaagctgctggagatagccttagtaacatgcaaagtctcaattacaaattcaaattctgtacgggtttagtagtatcgatccccaaactgaaagcgaccttcagacatcagaatcaagcagctcaaccaccaaatttctttacctacgaattagctatcaccactgatataatcagatcatgcagtcttcagatgattattgccaaaccacat

SEQ ID NO: 184708 - DNA, 402 bp, Zea Mays
caccttcagtgagggcgtcagagatgctacctggggagaatttgaaacagccttccgtgagcaccatgtaccccaggggatagttcaactcaaggaggatgaattccgggagctaactcaaggcgggagaacagtcagtgagtatgtgcacaagttcacagagttggcccgttacgcgcctgacgatgtcagcaccgagtccaggaagatggcccgttttctgaaaggactaagacccgagcttaagaccatcctcgccagccaggacttcctcaacttctctcacctctccaacaaggctatccaagtggaaagggcaaaagaggaagaaaaagggcacctcaagaggaaattccaagtcctccgagctcaacagcaagaacgtcaccagagagctcgacc

SEQ ID NO: 184709 - DNA, 416 bp, Zea Mays
gttcggtttctacatttggaaactgtttattctatcaatgatgcacttccatgtaggactgaatgctcttggttgggtgactgaatgctcttggttgggtagattatacacggctaggttgtttgttgggatttagttggatcacacggctagattgtttgttggtgatttgggtagattacacggctagattgtatgttgcgtttctcttactcaataacctgaaatagccttggatatattacttgttgctgaaaataagattggacgctaaaccgctaaaccaatcacagcttataatcttcttttaactttagtttggttgaggtgcgtttccactacaaaggtgattgttcagagcataacattagtttggttggaacttggaacggtttactctgtcgatgctataagtt

SEQ ID NO: 184710 - DNA, 328 bp, Zea Mays
gcacgtccgagaggccattgctgagggtgggttctcatctgtctatgctgctcgagacctggtaaacccagcgaagcagtacgccctcaagcgcgtgattgtccaggacgaggagtcgctgaacctggtccagaaggagatcacggtgatgcggtcgctcaaggggcaccctaatgtggtcacactggttgcacacgccatactggacatgggacggatgagggaggcactgctgctcatggagttctgcgggaagtcactggtttctgtgttggagggcagaggagcaggttactttgatgaggagaaggtggcgctgatcttccgg

SEQ ID NO: 184711 - DNA, 352 bp, Zea Mays
cattgaagaaagcagcgtaagctgacttgctactgtaataaccagtctgggataacctccacttatatgtattaggcatatcatgatgtaggattgttccttccacttggtcccaaacctggacatattcttccagcacctgtaccgttagtttccgacgaatgtcagccacccattggcgatcatttaaagctgctgctactgttctccggttagccactctttagggataatctgattcagatggggagcgaaatcagcaatgcagtttccattcagccacctgtccttccagaataggattttctcaccattgcctacaattgaggtaactactgagttgaaaagagcc

SEQ ID NO: 184712 - DNA, 851 bp, Zea Mays
aagaagggaaattcacagtatggccaaattgtacacatgccaaaggacatggtcacaacagtcaatggaaacgtagatgcaaaatttgaagatgaagttagagttgtgaagaatgataggttccaaaggcaacgagagtcttggggtggggaatgcaagaagggctcaaaaccatggcctggtcgaaaggcagctactgttgatgaacttgttaaacatatgtcaaatgttccttcatatttacagcgtaaagaaacttctgaccatcttcaagacaaggcactgaatgttggagttcttgagtgggggcttcttgctaactggtctcagcaagaaaagcataagctcactagaagctatggaccatctccacccaatactagcaggtctgtactattcccatctccatcacattcttctccaagccccagcagcagatctcttgagagtaatcaatctaccccaatgagtggccatcatcattcatccatcagagcacagcagaataggctcacagataaacaccatgagagggccagatgtccacctagcccaaattctgcagtactgagcttattgtcaggtcatggcacacatccctgtccagagaacggtcataattatgttgggttgggtctcagcaatgtttctttagcctcagactctctaggttcttcctctagaagttgtggaagacatgaaatggttggagatgaagagactagacggaagactgaagacgttgtccatcattgttctcgtaggctttttgcagacagcgataacattgggaaacatttcttcgcatcaaataccaatgactccatgtgtaatgatcctgaacagagtat

SEQ ID NO: 184713 - DNA, 741 bp, Zea Mays
gcttcaaacagagccaggaaccgcagtccgcgcttgccacgagtggtcatgtcgtgctgattggtgaccgggggaacaagtaccgcaccggcagggactgagggtggaggcgaggtcgtagaagccaggacgcagggactgggtggcggtgaagttggcgccacggtgttgttctaccatcgagagtagacctggccaaggaagtgaccagggaagggtaaggaggcccagcgagcgtggcagggctagttgaagaagtaccaccggtcgttgctaggtcgacaggagtgcacatcccagcggcgagcgttgatgtagagccgatgggagagaagcctggtggagcgccggtggtgctagacgtcgaagaacgccaggaaggtccagcaggagggccggctgaagtggcaggcccaatgagcgggactaccggtgttcgggggttgccggtgtgcccagtcgagtccgacgtagaggcaaccggtcgaagaccagagttgttggtggtacctgcagtgaagaaaggtgacagctcgaatggaactggaaccgtgtcaggtatgtcatccaaaaaatcaaatgttgcgctcttgggtggagagggattctcggaaaagggataggaggtttcctcgaagaccacgtagcgagagatgatgatgcggttggagaggcgatcaaggcaaagatatcctttgtggtgggggagtagccaaggaaaacacataaggtggagcgaga

SEQ ID NO: 184714 - DNA, 320 bp, Zea Mays
cgccagctaaggtcggcaatggttatcatcgtaaccgcggcagtggctcacacgcggctataaattcaccccttcctcgcccccttttctcaaatcaaccgagctccggccttcgtctccaaattgcgaagctgtagcaaccattcctgtcctcgattagtcaccctggccggagtattgccgttttccccaatccagtccaccgcgccgccaagaacatctcgaccgtggccagactactctggtaaagctctgcatctctcaagtgttgttctagcagctatgtaggcacttaaagctcaccgtagcatccgtttgac

SEQ ID NO: 184715 - DNA, 662 bp, Zea Mays
aaaggcgataacaggcaagggtgtaagagataagaggtgaaggtgcacaagaaacaagggtatgagtacaataaagaatagagctaaggtaagactggcacgtgacaaagatgagattacgaccaagggtgggataagtagaacaccactctcgaattgagaggggagaagggaggttttaagtggcagacatatgacaagcatcaaggtaggatcacaagggtaaaggcgatagcaaacaaaacacattaaacaatgaagttgaaagtttgcaagcagcaaagaataggatacatcaagaaaaatgggtaagatacaactttcaaattgagacagacgagagaagattttatagagggaaggtataagcaacagggtgagatgtagaggtgacaaaggtgaagatgatatcaatgaaagcatgacaaagaatagaattagggtaagactcgcggaatggcgaattagaagaaacaatctagggtaagataggtagggtttcaacagaagagttgaagaaaaattcattactgagagaagttataaaggaacaacgagatcaccaaggatttgcaacctaaaatgatcgctcatggaccgttaagacataagggtggtcaaggacatgttaactgaaatgtcttgaacaaacactggggtat

SEQ ID NO: 184716 - DNA, 340 bp, Zea Mays
cgatcaaggagtcttcttcgatccaaagctcgcaatgtagtttttttgttccttggatttcgttttcgtttcggtgcaacacactcattagcagtgatatcattatggtctccgaacagtgagttcagtgcaacaccctcatcgatagtaaaagtggttagcaattcttcttggtaaacctcatcggcatgttcgtcttcgaattgataaccagcagtgcaaggagtatgtaaacgttccctagggttcaccttgtgaactaccctccatgctttaacttcggatttgggtacgacatatagtagacctgctcgcactggtgtgcaaggataaaattatc

SEQ ID NO: 184717 - DNA, 1925 bp, Zea Mays
cttggtttctgagtttagtgacttattatgcgtatttgacatctttctaatttctgcttcgtttcattgataagctggctgatgttcacattccttttcttttatagacacgattactggagcttcgtacaattcctgaagcattaccctttttcattactccaaaagcagtagatgaaaattcagtgctgttacagcaactaccacactgggctccatgttctgttacacaggcattggagtttcttactcctccttataaaggacatccacgtgttatggcctatgtccttcgtgtcttggagacttacccccctgagactgttaccttttttatgccacaattggtacaatctctcagatatgatgaaggggtgagaattctttcagtgatatgcatgtttctgtcatcaatgtacacaaaggacaacttcagtctacatcttttgctttatcattgctcatagaagccatattattttcttaaataatctattacttgtatcttatttcttatgccttttaactcaatcagaaactggttgaagggtacttgcttggagctactcgaagaagtaatatatttgctcatatcttgatatggcatctgcaggtgaaatttatttatattctaccatttcctctcttttccccattttaaaaagatattttatgattatgtaagttatttattatgtaaaattctttcatcgagttttttggtccgtaacttgaaatgcagggagaatatgttgatgaatctgagaaagatgcagctgctctgaaggtattatcttttgttttttttttctgtagatggattttccattccttccttttcatatcaaaatatgcattagcaaaagaagtactgtttttctccattgtgcttcttttcttaacttcattgataaagtttgagccataataatccttgagtatcattgccttcttggtgatagtaaccaatacctaaccagtaaccagtcaaaggttatttgaccctaaataaattaattacatcatccttgaaatttccactgcctgtgaaggcccataaataatgggtttgagcaattaaatgatgcaatgttattatgcatacatagtagagatataaacatggagtggataatttaatttagtgggtgaaatttgcaatggcgttttttttattaatcatgcatacttatatgtactccctctgttccaaactataaggtgttttggctttcatagatatactaggaccttaaaccctttcttcttaatttaatgacacagttgacagttctcctccgttttttgcgaaaaaatatatatactaggcatagtgtacatctatgtacatagcaaaaactactcccttcatccttaaataaatcaattcctagaatccatgcaagtcaaactgtcttatgtttgtagttttgttttcatgtttaaaggttacaagtatcaatgcagatttggcctcctcgggtgcgagcgtcctcattagctaaattattgtgctataatgtttgaaaagatcatcacaaaaatcatgtgtgtagtgtgcataaagttaagtatggttacaaaaattcagtttcaaattcattctagatgtcaagaaacaaaatagacaggcagtcaacctggcacggttcatcatgtgctgaaatgacacttgtgttttctgaatctgaagaattttaaactgcattgttgtggctcaacttagctttaggtgtatacgtacatgttttgtgttgactttttgatacgttgtaacatgatattttagctgaagaggatgtcaggaccccaggaggccaaagtattggtgtcacaaatattattcatgtttcattatttttttccagggcagtgcattccagtccttgctcccagctgttaaggacaaaattatagagagtttt

SEQ ID NO: 184718 - DNA, 844 bp, Zea Mays
aactacgactagggaaacgaaaggaaaggaaaggaaaggaatgcaaggaaggagagacacaatcggcggcaacagcgattgatttcgtccgccgcacctctcctctctctccgccgccgtcgccgccgccaacaagggcgaaaccttccgatttcttccacttctgctgttagggttccgcctccacctgctctgctctggtgagttgttatcttccctccgtttctctttcttctctttttcccccctttctggtgatgatgcatgcacacatgatgagattgctctgccgattgtcagtcctctctccctcagccgcaaccgcaaccccgccaagggacaacgcaaatccttcctcttatcagcttcagtcactactacacctacctgtaccacactgttcgtcctcctcggttcttttgctcctaatccttgccactacccgatctatcccttcacttccgccgcgcacctgcatgtgcctttgtgtttatgtctagattcatcgcaccggacccatcttgtgcgattggattcgattgcttccgtattcctcatcgctatttctgggtcaaactccttgttgcgtctatccaaatcctttcttgcatgtttgactatccctcccgtgccaaacccaaacaaaataataataataaaacccctttcgccccccattcaccttagttcaaacttcgtctcaatacccttctatcagattcttgtgcgcacgacccaacccaaatgagtaaatgacagacgacgacatatgctcaaccctttctgtgcaggtatcttctgcgcaatgccaatgctgtaatggatcgatcgtcagattcttcca

SEQ ID NO: 184719 - DNA, 342 bp, Zea Mays
gtggtccacgaatatacatgttttttcagaccctctgcatgacagttgtttgttggtcatcctgtgtgctgcacctgagttgtgtgttatgatacaggttcttgctgttaaaaagatagatagcgccgcactttctttacaggaagaagacaatttccttgaggctgtatcgagcatgtctcggctaaggcatccaaacatcgtgccattgacaggatattgtgttgaacatgggcaaagacttcttgtctatgagtacattgtaaatggaacgctgcatgatatgttgcacttctctgttgaaataagcaggaagcttacatggaacatccgcgtaaggat

SEQ ID NO: 184720 - DNA, 337 bp, Zea Mays
ctcagaccgccgcgaccccgtccaacggagagtagagaaaatgggatgtggactggacctgcagagaagcgccatgtttcctagtttctcccaggaagggtgaacaagagttgggtcatctggagagagaatttgacgaatccactgtcggatcgatgcacaatcggttggttcctctcacaattgacgatcagattctagaggatgtgtcaaatggtactgaattccatggtaaggatgccttcactgcttacatgttcatttgattgtagctgtaacttcatcttacaacacaacacccccgacatgtattctggttctattgggaatgctaaaa

SEQ ID NO: 184721 - DNA, 324 bp, Zea Mays
ctcattggtcactgaccaaaacagggccatgaaggctgcaattgggaaggtttttccgaattcctgtcaccgtttctgtaagtggagtattctgagtagaaccaagcaaaagctgacccatacatactcagagcatccaaccctaagagatgagcttgagagctgtgtgcttgagactgaaaccatctcgacattcgaaaccacttggatgtcaatcattgatagatatgacttgagaaagaattcatggcttcaagcaatatacaatatccgccaaaaatgggttcctttgtacctgatggatacattctttgcagaaacgtt

SEQ ID NO: 184722 - DNA, 545 bp, Zea Mays
ctttacgcctcaaatctgacaccctctccaccctaaccaatttctttgcctacgttcgtacgcagttcggtgtcactatccagagcatccagtgcgacaatggtcgcgaatttgacaaccttcaagcccgcaccttcttctcctcccatggagtccatctgcgtatgtcttgcccctatacttcacctcaaaatggtaaggctggacatgttatccactccatcaacaatatcattcgcaccctcctcattcaatctagtgttcccccaatttttgggatgcggctcttggcactgcaacctatctcctcaacatattacccaccaaaacacttgcactctctacaccacactttgctctcttcggccacaacccatcctatgagcaccttcgtgtttttggctgcaaatgctaccccaatctttctgccaccactccacataaattatctcctcgctcaaccccttatgtcttccttggctattctccccaccacaaaggctacctatgctttgatcgccaatccaatcgtaccatcatttcct

SEQ ID NO: 184723 - DNA, 501 bp, Zea Mays
cgaaggaataccttctgtttttcgcacaagaagaataaccttcgaccactgcattaaggagagagtgactgaccggaccaggcaaccgcatcgctgtaacgcgaaacgttcagtcagatcaacaggcctagggcctagacgggctgtgtcccatggtcacaggagctagttagtcacaagccctttcgcttctagcacgcgctgtctgatgcacatgcacgtcagctgctaagctaagctccatcctcagctaattgtctgatttaagcagtccagcaccgcaccactccggaaacaaaagcaagcagcacagcatctaagatgaacataagaagcaacaggactgacattgtcaagtactatataccacatgctttggttccaaaaggcgacaaaacttcaaaggcgaaatcttaactttacgatggccctacaatatattacctgcaagcaaacagaagcacgcagccaagtttattttccttcttgaggttcagctct

SEQ ID NO: 184724 - DNA, 484 bp, Zea Mays
aggctctgttacgccgttacgtcagttgcgtgaaacctatccttcgttgttgtatacttatttaatctggccagaggatggaatgtgtgcactgggtgatggatgtttcacgacatcaatgaatgtttcacaatctagcatccgttttttttgcttcacatgatgtcatacaaaatcgctacggtttcatttggttttggaggtacctacgagtacgatggaacacaacggcatgtttctgcgtcgttggagccgttggattcgcttcaacatttgtaaggttgtctcttaacgtatgatgcttgtgcaatgacgaccatatttgagaaagatatttgttaaaaaggagacttgtcacttaatatctagcttggctgtttgttctagtgaggtggtactatctaggagcgctgtgctatatgtggttgtgtcgtgttttagtttgggtgttttcttaccatctatctaagaggtaacgacctat

SEQ ID NO: 184725 - DNA, 790 bp, Zea Mays
tgaaccaaaactgttgggcgacaacgcaggaggttaagatgtgttgcactatttcctgggcttggtcacataaagggcaaacagcagggtgaggcagcccctcttttgcaatctatcagcagtccaaactctgtcccgaattgccagccataagaacttcatttgggggtgcccaagacttccacaacctctttcaaggttcaaacgatatagaacctatgaagatggccttgtaacgggatttggccgaatagatacctgaggtttcatgcctccaagagtgaatatcatcctcatccttcagaaccacctcattaaccatatcacacagaaggtactgctgtaaaccaaccaaagataggggaggtttgaaatccctcacccaggagatgttatcaagggcctgagccaatgtcctagagcacatgactttcttatgcaccttccgataaacttctggagcgacctcagaaacagagcgcccctctaaccagcgatcagaccaaaacaacgtgtttgctccatttcccacagctgtaactaccaagatgtcaacaaactttctgacctgcggctatatgggaagatccagacccctccatggcctgctagcaccagtcttctgcaaccacagccacctagcttgcaaacctcatccctgcaatttcaggttaggtattccaagccccccgagatttaggccttgttaccacctcccaaggcaccaaacagatgccacccttcacatccttccttcctttgcaaaggaaaccccttctaaccttgtcaa

SEQ ID NO: 184726 - DNA, 413 bp, Zea Mays
caacaagtgatgcaccgtctcattcatctggtcacaaaatggacaagacactggatggggcaggttcctccgctcaagacgatcagcggtccaaacccgattatgatacaccaaccatataaagaacttacaacgtgacggggcccaggttttccagattctcttccaagggccaaacttggtagagcccacgaagaaggcctcatacgcagacttgctgctataacaaccatcttgtgtcaacttccacctgaactgatcaggaacatcagattgcagcacgacctcctcaacaaaatcccacacctggaggtactcaattaaaacctgaacagtaagagcacccttgatatcacgaacccaactccgcccaaacaaggcctgagccacagtctttcgcttagcagttcaca

SEQ ID NO: 184727 - DNA, 376 bp, Zea Mays
gacatcacaatagatttgtttttgatgggacctctcctaatgctagtcttttaactatggcagaggatgatttgaagctctggagtttagtaggcgcaaagggtctttccctcttgcgtggtctgttagggggaaatggagtccgagcctctagtcttttagtcctttgtgtttttggcgcggttttgtcgcgttgtaattagtggttgttgtaggatttcttaaccccttgtttctccttaatataaatgatatgcaactctcctgcgtatttgagaaaaaatgatacgcgaccagcacaaaacacgcgtagacggacggaggaccacactagagcgcgcagaagactatagaggccaaagccaaggagtacgac

SEQ ID NO: 184728 - DNA, 314 bp, Zea Mays
ccggcgatcgcatcgacccgattgccgaccctaaactttaatccgaaagcagcagcacgaagcggtaacaatatggtatcgcgtaggatgctactcatcgagattcgcagagctgaaccggccacccacggcgcacggcgaaaatcgaaatccggcgacgaatttcagacaccaccacgatcgccacctccccggacggccacgaaaccttcaccagacaccccgcaaagctcccggacacgactcatgtgcctggtcctttggcgaagatggtaatggcgctggcgcacgattcctggtcgcagttcaagcct

SEQ ID NO: 184729 - DNA, 855 bp, Zea Mays
tgattttgttcttggactgtgtagtattcatagtgacttgtttatttcagcgcctagactggagttctacctcctcggcatcttcgcagaaggatttcattcttcttgctgcctgtgaagcacatcagacgcttccccagagtgcagaatttcctgctgatgtgtttacggcttgcctcacaacgcccatcaaaatggctttgcactggttctttctccccccttcttttttgtgtgtgtactgttccttctctccttttcttagcatgttgtgcttacactagtacatgcctataaaccatgcaggttttgtaagcgaacatcactccatggtcctctggatcgttctcttattgaccaaattcctggaaggcaaaatgaccgtaaaacacttcttggagagctcaattggatttttactgctataacagatactatcgcatggaatgttcttccacgtggtacattgtttatgagagaaataatgtttttggggaacaagaaaactagagaagattattaaatttcaaaataaatgttagcctatatttggtttatgatacatgtttcactgtgcagatctgttccaaaggcttttcaggcaggaccttcttgttgccggtctcttccgtaacttcttgcttgctgagagaatcatgcgatctgcaaactgttctccagtttcttatccgttgttacccccaacacatcaacaccatatgtggtaactaacctgactcgtccttctttttgcttcaactactttttgtacattttgtaacttgctaaatcccagggatgcatgggacatggctgctgagatttgcctttccaagcttcctcagttaattgctg

SEQ ID NO: 184730 - DNA, 292 bp, Zea Mays
gagcgccctgattagatcggcctatccggcaaccggtacctagccgtagccacaggatgggaaatcaacggtccaggttttaagtagctgagatcgatctacatacgtcggatcaagatcgcacggaccagatctgatccccatctcccgcaaaccggtacgtcacgagattcattggattctaatccaacggtgcttaagacattacgcggagagctaatcttgcccctacatctagatccaacggcgcgcgtacgctcttcctcctccgacgaccagcgaaggtggagca

SEQ ID NO: 184731 - DNA, 395 bp, Zea Mays
tgcagtttgtgtattctgttgaggtgcggagcgatggatgctgaggcatattctgtaatatctggtaaccttgtaagaacattgtggagaattggaacatccaagaaaaataatcccgatccactctgggataaagcaagaggaactgcttttcactccttgtccaactacaaggttatactatgattctttgtctatgttatgagtttaactgctatttttttggttgaaaacctatttccaaatttcatgttttttaacaaggggcgctttacaggtatcacttattcaagatgctattcctgatttctggaaactaaactatgagttctttacgaacgaacataatctggcagttctcaaggccatggagcaccttcaagatgagatcatca

SEQ ID NO: 184732 - DNA, 453 bp, Zea Mays
cccattctagcgatctgtcattcccttcctcatccatggcaccccatgccatttccccacctccggtggctgctgtattcgcgactaaacggcagcagacacgctggctaggggcaccaacagccgacaggaagctctccagcagggcgtcccttcccagccaacccctacgacgcacaactcctgctcgccctattgatgctcgacataatgcctaggaggagcgttacgttgcatacagctagcgtttcatccaagtggcccatcttctgcaaccaaggtccctcgtcatgccccctgcaaatcacgcaccttgttgtccggcgccttgtccttgctattccttgctatgtgctcacaattcgtgccttcctccacgtgcagctgtcttcacatcgggatgccattgggtgtttggtgaaacacccaaaccatgcacactcgtcattctcg

SEQ ID NO: 184733 - DNA, 449 bp, Zea Mays
gctgaaatggtgttcctcattttgagtggcagaagagctttctggaaggacctccgtatgcttactgattgctttgctatctttccctgctgcaattttatgcgcaaaagacacaccagcatctgcgaccaatgcaagtatgtccctgggcatgaaacctgacgtttgcgctgctaaatcttttatgaacttgtcacaaatactctgaaaagtggaaacgtataagtgggaggtgcactataagatggtaaataagttttgggccaaagaatgaccaaaagacacctcatcagcaactttaggaatgccttgaagtgtctcagatatcagttcgtttctctgttcttcattcatagtcttcatgtcgatctcatagcggaagcatcttctaattgactgttgcattccttcagaactgtccgcagttgcaactagtatgatttgaagag

SEQ ID NO: 184734 - DNA, 1005 bp, Zea Mays
gaaagatctccaacgtcttgatcaacttcctgtaagtatttcttcctttgaactacagctgctatttgtggccttgtacttaaaattctcagcaaatatcatatgttgcaggttagattcaaacttttcctaagctcatttgcgcaaatagcaaagtacccacatacatattgttgtatatattttttgaccatgtattctgaacttctgattggattggactattttaaaaagtttggaaattttcttgaaggtagtgggttaaggtaccagtaagacaaatgaagcttttgtatgctgcagtgcaaactatattattttgtgcattttcccggtaactgtacatttttttatggtaataacatatacttacatggtaccagactaccagtccaataaggcagtctttgacacaacttcggtcactgatttgaattgtgatatttttgtaaaacctgtagattgctcttgaaacatatttacactttaaacagtttgatggcatttacaaattatgtctgtcccttcatgacgtgagccagaatcataatgcacgttctggcataattatattgttctagcagattgatgttggtgcaataattcctaatttcagattgatgttggtgcaataattcctaatttctgtgatgcagctgagtaatttccgtccagagttcagatccggtctggatgctttcacgaaatttgttcttgaccgaacaagaccaaaacaacttggagctactacaatgacaggtcccatccttgctggattgacacaatcgtttcttgatgctattaataatggtgctgtccctacaatctcttcatcatggcaggtatattatgattgcttatagcaatgtggcttctgttgttttttttggcttacagtttcacagatcgcgtttctctctgggtggaagctatctgattcttttaaaaatttattatgcagagtgtggaggaggcagaatgccagagggcatttgattctgctgt

SEQ ID NO: 184735 - DNA, 339 bp, Zea Mays
gtgttgttccacgggcgagaagctgtcggaaggttgctggtcggttcttgagccatcgacgttcagggtccgaggggagagcttcttcaagtacgtacagtggcagtgttgtaaacacaattctgacaatattgtatacatgattatgcctgactgaactgtgaaattcatgcagagacaagaggaaatacccggccccagactgctccccttacacccccattggagcagacatgttcgcctacacgagaaagattcatcacattgcgcagcacctctcgcttccgtctctcaagacacacgaagcctttcctaccctcctcattgtgaacattcagg

SEQ ID NO: 184736 - DNA, 323 bp, Zea Mays
gccgttcggcgtaggggcggcggcagggagatggcgatccttggggacggcggtgacgggttcatcgatgtcgtcgtcgtcgagatcgccgcagaggtcgaagggagggggagacgccatctagccgcggagacgcccaagaggcaagaggcaaggggacggaatcgaatcgaggatgcgcagtggggatgggtgctcttcctcgtcggttcacacctctctcacttgccgaggagaggaaggagaggcagcagcgagcgtgtgtgactctctagtctctacgactctacctccaccaacattgcggttgtagttgcagttcc

SEQ ID NO: 184737 - DNA, 280 bp, Zea Mays
cccgttgctccgcgtagaaccacaatcctgcgctatcacccatcccggccggccgtgccacaccggagccatatctgacatctagcgctgggcccaccagctggcaagctttagtgagtggtttttgtcgcagtccggttcacaaagtgggtcgggttttttcctcgtgctacctttctcaccgtttctctcctagtctcctctcgtttcccgtcctcctcccgttgggagtataaaatttcctaatccgcaaacgaagcttccagaaggcttcttcttg

SEQ ID NO: 184738 - DNA, 395 bp, Zea Mays
gtggctgccaggaaggtgacgacacctgctcctattgcgcggcctgtctgcagccaggagggatgcagttccagcgtccagaagaggagcgtgtatggtctgtcgtcgacgacatcgggcatggctcagattgctcggagcgcagagaagctagtcggtgggtggcagctggtggaatccaaaaagtcaaaacggcaccgattgaagctggagcgacaacgtcagcggcggcccgtcccagaagacctggctggcagatgctttaactgcctctctcaggatcactttgtcttccagtgtacgcagaagacgaggtgttttcggtgccgggaacagggacatcgttcttttgaatgcagtctgcttaaaagaccggtgtggcagaggattaagtc

SEQ ID NO: 184739 - DNA, 605 bp, Zea Mays
gaagaatctgcacttcatatgcagactttgccatgtactgaccatcaggcgaatgtagccaagtgaccgtgccttattgtgattgcagcaggtgtatatcctgtaggcgcacccataaggccacaaattccgtgatgatctgctggctcatattgtgatccacatccatcacccacttgttgtctgtcaatgcctccctcaccgttctatttttcctcaagctgtgtgcatacaaagctggaaaaagtgttggtggcacatctctttggtcttgactcttgagtcttgccatgtgttggttagctgttcatttgtgatactcccgacatccaaaacaagtggggccttaaaacgcatgcagtcagctcaatctgatcataggtataatttataatgtgtacgtgtgtagtttggatatatagaagtgatatgtgtaaacatgacataacattatttcataaatcacaatattgcactcttgtgacttgttcagtgtccctaatatgcgatgataaaattcagttgtcaaagtggcatagcattggcatcaaaaaaatttaaaaaaatcatttcgtgtttactaagagtgcttacctcgatacctt

SEQ ID NO: 184740 - DNA, 560 bp, Zea Mays
cgtgaggtcacgtggccacagttcaagatcatgtgccagcagcgctttggttccctcgtagtagtggcgacttctgctgccacgtttgtcgtgccctcatcgccgacaccgcccccgtcatcaggagcagccatcaccgctacccttgaccccaagagcaatgtccaggagagggtgcttgctccgcgatagacgaaggcggccgtccacctgtaggctgcatcacgcggtttcctagggcgtcggcgggtgaagcagatgatgggggtgctccattgcgggggagtcgtagctgcaccagcgcgcccgagcaacgtggtggttgttcacctccgcgtacaagaggctgcaagacatggcgcccctctgcaacgctccgtccggcgctggccctcatctgcggcgaccgtgcaactaccacgactactctccttcgtacaagggggtctgctggcctcgccaccatcttctctagccacaccaccctttgcgcactggtggccgcaggaccatgaggggctgcactacatgggattcacttgctgcaagcaacaccaacg

SEQ ID NO: 184741 - DNA, 420 bp, Zea Mays
ggcgtcccaggcgtccttggcaatccgtttttgtgaaagcgagaactgcatttcgggcgagactgcagcaatgagggcatccagtgcccgttgatcctcatagtagtcgacgtcatgataccgaactgcttcccacatgtggcgaacctaccgctgcccgctcgacgtagttagtcttgctgagggtaggccacccaccaccgggaccgatgtccctgacaacgccctggaccccgctgtgatcatggtaccgacccggggaaggagagcggagccacctgtaaatcccgcaatctccatcgacctagccgccgtcgtgtccgcgcatgtctggtctgccccctctagagcgccgtcggggcattcacacctgtctgggctgccccctctagagcatcatctacgcctgtctggtctgct

SEQ ID NO: 184742 - DNA, 574 bp, Zea Mays
gaagcaattttttagtaaatatgagatgatattagagaacaaatacaaaaaggagtggcaagcagatgaagaatcttcccataggtctccattgactgtaacaaaattttacatggaagagcagctggctaaagcctatacaataaacatgttcagaaaatttcaagatgagttgaaagcaacaatgtattgcgatggtatgccaattaaagttgatggccgacttgttacttttgaagtgaaagaatgctcatacatggaagatggaaaggacacagagagcaggacctatgaagtttacttttgtaaagaagaacccaaagttgaaattgagtgtgaatgtggtttcgttcagttcactggcatcctgtgtagacatgcattgtctgtgttgaagttgcaggagatatttgagatcccaaaagattatgttctcgatcgctggagaagggactataagaaattatattataatgcaaagaaacctaatgaaatgcctcttagtgacattgttgaacgctctgattatttgttcacacaatgtagtcagctgctcaatctagggtttgtatct

SEQ ID NO: 184743 - DNA, 313 bp, Zea Mays
ctgcctttcccgctcggggttgcctcgggcgagtcattactgccagtaccgcacgaggttgtcctcgggcgagtcgtgtctgcttgtcccgcccgagggtggccacgggagagtcgtggctgcttgtcccacctgggcatggcctcgggtgactcgtgcctatgtctcctgcccaagagtgtcctaggacaagttgtgaccgtttgtcccgtgtaggcttggttgtcctcaggcgagtcgtcactgcctctcccacccgagagtggcctcagccaagtcgtgattgcgtctctcgcctgggcttggtctcggg

SEQ ID NO: 184744 - DNA, 1517 bp, Zea Mays
aacccatttatgctctgatttctaaggttctcaattaccgctatactaaattgaccactcatgatttatacttttccatgctgttatcattcatctggttatctagttcttttagtatccagagcttcgttgatgttaacttgctgttttcaattttctgaaacatttggtttcagctgtacagcaaagtgacctgaccttgtttttttcacaccataactaatattatgttacatgacagaacatcggcatgttggctctaacaacttcaacttatttagcagccgaagtcatactattttcacattggtgagctcatagtttgtttcagcatttaatgattactgaagttctgcatatgttttgtattagttttttttccttatgccacaaatactcatggttccaggattcaccatgtcatatttattaaccacatttgttatatgtttcccaccctttttcaaagatatgtggctctcatatgtgttcgagaaaaaacccacatcaaatgtgttatatttctttatttaacccatagcatatttgtgctcttcagatgattgaaagcagcgcccgtggtgatgagtatgatggggccatgtattcacagcttgtacgttgttctggtcctaagaaacattctgtttacactttccagtttcccctggacttctaataccatttttacacattttttgttttctagaatttgattgatctagctggttctgagagctccaagacagagactacagggttaagaagaagggaagggtcatatattaataagagcctcttaactcttggaacagtaagttctcattgccaattacctgtgacaacaacagatttccaggttattaccagcagcattgacttcaactcagcttctgaagaccttgacctcatataattataacttgtatcaaaattgaatctgagcatatgatggaaagtaactggtagaatatgtggagagcttagcctgttatcggatacaagtactcatttgcaacttcatttcttttgagcttcactgtgaagaggagggtggcggtgacctagtatttttttattaattttccactcttaggatctttagctacttctgtttacgtgaacattttttaattcaaaggtcattggaaagctcagtgaagggagggcaacacatataccctatcgtgattctaagttgacccgtctactacagtcatcattgagtggccatggtcatgtctcagtaagtattaacttttacaattgcctttctgggagccattccttttaactcattccattgttctgttggagcattgaagtgaaccactgaaacctcttgaagtaatcagctgatacagttactttttcttatgcagctaatttgcacaattactccagcatcaagtaacatggaagaaacacataatacattgaagtttgcaagcagagcaaaacgtgttgaaatttacgcctctcgcaaccgggtaaatagttaggcatacaaaactgat

SEQ ID NO: 184745 - DNA, 372 bp, Zea Mays
gcacccgaaaccaaaaccgccaccgccagggccatgtccagggaaagagtgagagcgccgctgccgtcgaccgatcacaacaccatcgccgtgttcttggattactacctgggggattcaccttatcgtgtcgctcatgtgtgaccacttcgggaggacggaacccagtcgtacatcgctcaattcatcgccgaagttgcgtccccgccgcgtttccatcgtgcgccgtgattggcctcgtccatcgtccgtctcttgtgagtatgccctgcgttgcactcacttttgccctataatagcgtagcaccgtgttcacctcactccggtgacgcctccgccatgcttagcgctcgtgccgccacgccgagccag

SEQ ID NO: 184746 - DNA, 456 bp, Zea Mays
gcacgaacactgactacataattaaaaacatacgatgcttccaaagtccaaacaggctaagagctagcacaaaaacaaaataaaaatcctcacaaaaaaagaaggaaaggccctgtgcaccaggatatcgttgtcagggaatgacaaaatgagatacacagtattagcgtcgttcaactaaatgtatgaatctttgattggcaaacataatagctgcgcagattagtgatgccatgatgggcaaacctagtgaagagcaaatagaaagtaactgtgctagtcctgacctcctgattattgccacttttttataaattagatcacgcctgcttgagaaaatatatccaagatgccaaaataattgtgcagattagtaatgccatgatgggaaaaatagtcaagtacgaatgaaaagggactacaatggtcattgtttacaaaattagtgcaaagcct

SEQ ID NO: 184747 - DNA, 341 bp, Zea Mays
gtcagaggtattttaacaatcttttcaattgtgagaatgagactatggacacccaattggatgattcctttgatgatttaaatagatgttttgtacgcagaatccaagaatcagaggtcaaagaagctttaaagaggatgaaagggggcaaggcgatgggcccggatggtatcctaatagaggtgtggaaatgccttggggatattgctattgtttggctaaccaagttgttcaaccatatttttcaatcaaacaagatgcccaatgagtggaggagtacattagtaccaatcttcaagaacaagggagatattcaaagttgtaccaactatcgagggatt

SEQ ID NO: 184748 - DNA, 386 bp, Zea Mays
gcatgatttcaatttaacttgcccatattttaaatctcggcataagcttggctattggctaacgaagtgaccattttctaattaccatcatacaccacctttcaccatttgtggatacttgcacgacacacagctatggtaatacatcacaagtacatacatcttccttcgttgcgagtataaccatattacggcatatactcgcacacctcaatcaattatcttacgccaccaccactataatacaccacggaacacacacacatacgtgtccccatattacgcacaagacatcaacagcatagtgactccaacaggactaatcataccctgatttgcatcgactatcaccatcaccgatcacatgcataaaaccaatacacttc

SEQ ID NO: 184749 - DNA, 305 bp, Zea Mays
cccagtctctccacctagaatcgaatccgcgatcttcttctgctccaagcaaagccgcacccagacctcgacggacggcgagcagcaagagggcaagcccgtaccctatcgactcgaacctcggagcggcggatcggtactcgtaggcagtggtggacatggcttcggcggcggtgatggtgagctcggcgggctccctgctggcgatgctgcaagagccggcgccggagctcaagctccacgcgctcgccagcctcaattctctcgtccacgccttctggcacgagatctccaccagcgtctcc

SEQ ID NO: 184750 - DNA, 1028 bp, Zea Mays
caagctcagtgaagggagggcaacacatataccctatcgtgattctaagttgacccgtctgctacagtcatcattaagtggccatggtcatgtctcagtaagtattaacttatacaactgcccctctgggagtcattccttttggaactcattctgctttctgttggagcattgaagtgaagcactgaaacctcttgaagtagtcagctgatacaattaccttttcttatgcagctaatttgcacaattaccccagcatcaagtaacatggaagaaacccataatacattgaaatttgcaagcagagcaaaacgtgttgaaatttacgcctctcgtaaccgggtaaataattaggcatacaaaattgatttcctgtaccactattctagaaaatgaaattaagacataatgaactttactgcccagataattgatgagaaatcattgatcaagaagtatcagaaagaaatatcctctctaaagcaagaactcgatcagctaaggagaggaattgttggtggtgccagccaggaagaaattatgagtttacgtcagcaggtatgttctgttgttataactgcagaataaagctgtaattaagttgttatgtgatccttggaaattgactattattttgtgtggtggtaagttgataaccgtttgaaaagtacttttcttttatctttagttggaggagggtcaggtcaagatgcagtctcgtctagaggaggaagaggaagcgaaagctgctctaatgagcaggatacaacgcttgaccaagttgatacttgtttccaccaaaaacaatattcctgccttgacagatggtcatcagcggcataattctgtcagcgagcaagatgtaagtattaattgccctaccattgcacatttgtacatattcttccttcatgcttctgtttcatttggaaatatgaattatctgtatatttcagaagttaagcacttcacaagatagctctacacttgtccaaaatgagggcacaacaaaagaccacctaccagac

SEQ ID NO: 184751 - DNA, 548 bp, Zea Mays
agtgcaagtattagatagaaatttgatatatgaaaattataagagaagtccaatttatcccccctccccaacacacacacccatcttataacttgtaagaccacaaacccctcgccccctctgtgtcaaccacacccaagcccatttgaagctgatttctatcctacatggcactagttttgccgtgttagcatccacgtcatccattctgcatcatgggcacacacgttagcaacattcttctctcgtgttctcttcctccccattccaacccttccatatccttctaaactgctgtttggccatgcctagaccacaacaccaggcttcctgctgcccgcagctgtgccgaaaccagtgtccatactctgttgtttttccatcctctagttctcgtctttgctttctgtgttcccttcccttctttgtccacttcagtttatgctagcaccagcaaggtcattgagaaggaattaggaaagcaaccaaatagagtgaagccagagtatgagccctagcagtacaccccattgctgcatactgcttcc

SEQ ID NO: 184752 - DNA, 283 bp, Zea Mays
cccacaattaaagcagccacttgaggaactgggtagggcggggaaacgagcaccaagggcactcggctgattgttcttggcgggggtaggagtgggatggatgaacactggttgcttaaagggatatgtgggtggacgaggagaagaacgatttgggttgaagggacgaattaccaaccttgtccgcttttcaaacccctgagatgatccttcaccccccatatctcttggtttttccttgtcccgaattcttagcttccactgacagtgttgtgcttacagc

SEQ ID NO: 184753 - DNA, 994 bp, Zea Mays
cttgtccataggtagatcttttactgatgcccatacctcttcagcagtgaaaggagcatctaaatgagataagtcctgctggaataatgggtggaagtctgccaagttgaaggagtaatttctcagatcaccagaacttcgcagatgttcataaaaatcatccactacttcttgtttctcctcttgagtaacatagattctgtcttccacctgtagcttagcaataaaatttttcttctttctaaaccgagtgtgctgatggaaaaaatttgtatttgcatctccttcctgtaaaaacagcaccctagaatgcaaacgggcaatggtgtgttccaaagaagtcaagcccaaacaatgcatcttgagttttcttcgcaaccaatcctccccctgtgatagagaacgagaatccctaacaatctccaatcggtgtagcacttcttttgccatagaaagttgtagcttgacattcccaaccttgcgatggctccatttctgcagtcccctactaagcctcttcagtttgagaaacaggatctcaaccaggcaagaagaagacactgggtcttcccagttttgctgaactgattcatgaaaaccatccaacttcgaccagaaactctcaaaatgtaatctttgtttgccagtatttctaaccttgagtcccaaaattaatgggcagtggtcagacactccagcagtagcactctgaagaacagcatcagggaaaacttcttcccaatccgttgtgcaaaaggcacggtccaaccggacaagagtgggattttccctctcattagaccacgtgaatttaggaatctctttaagttccagatcatctagaacacgcctgaagcgacccatcattgcgcggttcagattgctattgctcttatcagcagcttgatagatacggttaaaatctcccgcaatgacccaaggtccagggcacatagttctgacatcccggagttcttgaaggaaagaaatttta

SEQ ID NO: 184754 - DNA, 579 bp, Zea Mays
tttcatacaatatacatgctactgagttttgtaagtaatgttgagtctgatttgtcacatggagagcataaaattcaaaagcatggtgacgaaaagggaagcagattgactaccagcacaaccatgtcctcaagtggaagtctaaaagttcagatatccctagcacaggcaagaattgtcctgtgctttccatctgagttttcatgggatttgagccacccatctgtcctggataagttcctggtgatcgaccatacttcatgtctgaacatggtagaaactgcatcacaccctcaaaacgaaatgcaaaatgaggttcatcttagcaagtcgtgtacctcaatacatttggctgtaggggacatagatgtatatttggttaagccagtcaataatgtattggttggtagaatctgttcttcaagtaggcaaactttctctgcaatgaaaattctttctgttactggatccagttataatgactctggcatcacactgatcaggagaaagtatcctgtaactggccctgagattttgaacaatgcttggagtttgccaaagatgcatgatgaaaagatc

SEQ ID NO: 184755 - DNA, 376 bp, Zea Mays
ctctttatcagtgcaaaaaaatcattgcaaaagtgaatgcataatgatgcaacagaaggctttgttgccaacaggtatgcacggatgctctgttccttgcagtactgggtgttaatccatttatctaagaaccagtagtactgggtgctctgttccttgcatgagtgcacaataggttaatgttctgcgttgcttcacactaatttcatgggaattttatctaaagttttccacggttttataaatgactcctgtaatacttgtttgaaagagcaatgaagcatcatcgattattcaaagatctcagtgactcattgaatactttgaatttttttgaataatttcacaaaattctctactaatttgtgattccctg

SEQ ID NO: 184756 - DNA, 750 bp, Zea Mays
atgagccaaaacagggcttacctgattcaacacatgttgtaagtagcaactgacagttttccagttaaacagaacacgctatatattatgtttagtgagcctgtattctatttggttgaccgttgttcagaccagaacatttcaaaactcaatgcaggattcacttccaatcccagagggtggaatggagaaagggaagagcatagttgacacatcagatgtcaaagcaatgtctgaagtagagcacttgttaatgcgaaagacatttactaagtatgtagctgcataattactattcttcaatttattgtgtttgatttgctatattttttcttgaaatgaatttcgtaaattctcaattcataactagcattcaccgtcacccctggtattatctggttctgtgatgtcccacctcttccagtctaaaacataattcaaaagaggtttccttttgttgtactgctgcacgtggtgtgttcttcacctttcctttgtttgtgcttgtgtgttgctttcacaatgtattctttttcaatgctactgaagctgttcatgccgagcattacatcctttgcagggttgagtttgatcgtcttacagacttattgcgtgcaagaaccattgagtctgatccacctaaaccaattgtttctcgtgaggaaaagaatgaagaaagtatcaaagttgatggaattagaggctcagcgttacgtcatatggacctagatgattctcctgctgttaaag

SEQ ID NO: 184757 - DNA, 1149 bp, Zea Mays
cgcaagagagctgtgtataattatattaagaagaatatattaggggaaagaacccacacacaccccacaactcctaaacactagtcagccagggggggcagaaatttggaggaaggataagtccttaaccccgtctgaagaccacaccgagacctcatctatcgacagcagcaatattaggagattttccttgaaaaccgcattggtttctatgcttccaaaccatccatgccccaagaatgactggggaattgaaccctcttctagtctgcccttgcactttaaggaagctgttcctccaccactcaccaaaattttgctccttaggctgtggcatcagctcctgcaacttggctctccgcagcaactcaaaccaaacttgcctagaaaatacacaagagacaagtggttgatagtttcttgctgctaatcacaaagggggcagcactccggatgttgtaaaccccttctagtaagtttatccgttgtccaacacctgatatattccaccagccaaatgaaaagacggcatttgttaggagcccaacttttccagattctagtagtcggcttcccaccgctgtgccgcccaccttcccaagcgccgtcgccacgggcgcgccccaggctgaccttccgagcgccaccgccactggggacgtgcccctgtccaccattgtgccgcccaccttcctacagttgactcttgctctccctggcttcgacctggccgccaccggccagtgcctgaccgtgttatcgtctgtggtggtggtggcctagagactctccttggtcctccatctacaactcgtggaccggctgcatcaccatgtggcctagccagtccccgggtgtccctcctccgtgacttcctccgccctagccagctcacttggcgataactagttcaaggtatcccttcgtccaccctacccctgcaccgctagctcctcaaccatcactttgtccactgccaaaccactccactccgtcctggaccccgtggcccaaggggtgggatcaacagtcccttgctagctacctcacgatgaccctcactgctcctgctgtcaccgactgggttgctgattctagtgcctcctaccacaccactctagatgctagtatactctcttatttccacct

SEQ ID NO: 184758 - DNA, 1351 bp, Zea Mays
agagttttaagtcaggttgtcaaggtggaagtgtatggaccattgcaaatacatcctgagtatatttacctcactccaggcgcctcttttgtggtaaccaactaaccattaataacctgctctctttctataaatttatgccagctatatctacatccctacaagtttctaatgcacatttggggatgtactattaggctagtctcgatagtagtttcattgtggtttcatgcacatttaatagtgtgccacatcagaccttttgatgacatgtcatatcatttaagagaattaagtttcatgggatgaaactagtttcatgggaatgaaaccatgtcaactcgtttccaaggtcttggaaaccgtgtggaacctccattgagagtgatttgtttcatctttacatattttactaacttctattggtcattgagttacatcatttaattggtatgttagtctgaaatagcgaggtgatttttttgcattgagaggcattgtttcattctgagtttcatgacaccttggatgatgtggcagtgttggaaaaagtggtacggaatctccattgtgaatagccttagcatgctgttgccaaatcattgacattttagttccattttcgtaaaaagattgtgggtcctgagttttatcttcctcctgcttagctttctgttaaaggtggtccaaaaactggagtttccattgaatactcaagtctgaacatgggaattgtagaagttcaaaataccactgggaaactatctgcaaaatctgtggggaactctgtaagttgtaccattttgagatcatttactcctgaatcttgaatctggatcagttatacactcaatgtactgagctgttgcactatttagactgtacgtgctgctgttttagcaaatggaggtatcttagtctgtgaagcttttggaagagttgaagtggatatcccagtggctatgacattgaatactcaaagtgaacgtctttgtattggctgtagcatgccagtttatccatctctgcctaaggtgtgctttgtatctgtttgctatatgcttatcttttcacgtttgccattccttaaatgataatgcttctcagggagatctattttccttctatgaaacttgccaaagttacagttggatgatagcagatgagaaggtcagaattcagaatactcctacttcccttgcataaagttaatctgtactaataataagttattctgccttaggttgtgacattccaatcagctaaatcctggcgatacagacttgaccaaggactatattcagatggaaaaaagagtccatggttttccaatggcagcagcaaatttttt

SEQ ID NO: 184759 - DNA, 594 bp, Zea Mays
ccaaagggcacaacagggacatgtctgacagtacggtggctctagcgagtcaagctagcgccacacctcagtcagcttgtggtagaaggcatcgacgaaaaagtcctactgatgaagagagctagcgagctccagggtggagatgtagagagtggtgctgctcggctggtagagagcttgtgcccgctcccacatctcctgagtggagggcagagcaaagagatctatggcaaattccaccttcatactgccaagaagaatctgagtcgtctgagcctcatcagcaagccaagtatcatagtcggctaagtccaccatgtagtgctcaaatactgggcataacactccataacctaagcagaaggaggaacaccatcgacccctgcagtgggctcctcgggatgttccggatcagggggaggagatagaccgataaggtgaccccatatacagtggctattgagacacgaacgaaacatagtggaccactcccggaagttagtgccatcgaaggtgacaaagggaagttgcacaacggggttagaacgaggagaaactgccatgctgagtggagggtgaagtgcgcagcaggaa

SEQ ID NO: 184760 - DNA, 559 bp, Zea Mays
ggaattcacttccccctcttccttatctgcatccacattgctgaccatattgtctgccaattgacggatagagctatggtttgagtggttagaatccaatgacttgcggtggccgtcttggcggacacggtgaacctgcttgcttcttggtgggttcagtcctctgatcctgacagcagaagatttcctatacgatgcagtccttgcgcttggtccccggaaactccgctctgaccccattgtagtaggctcagctcccacatcttcgtcttccccaaccaggtgatggtgtgctgacctgccaagctccggagtcaccccattgctagaagcagtctcccagatcatgtgatcggaaggagacgcgtacttgctcatcgagtttgtcgctggatcccgcagcgacctcactcgcttgagctgcaccaaggttcttgacagtggggcatccacagacacagagtggcgcctcatgtccatcatcttgaatacgcactcctctgttccaacttacccagcaataatggaaggcggtatcttcaatgttggcatgaaaatg

SEQ ID NO: 184761 - DNA, 621 bp, Zea Mays
gtgtacgtcgctcagcctccggggttcgtcgtctccggcgaagaagggaaggttctgcgccttgtcaaggcgctctacggtcttcgtcaggcaccgcgcgcgtggtacgccaagctggatgcttctctggcatctcttggttttcggcgcagcatcaatgaacatgctgtgtacactcgagggaaaggccaacatcggctgatcgttggtgtgtatgttgatgatcttgtcatcactggtggagatgtggccgtaatcaagcacttcaagcaggagatgaagagcacatttcaaatgagcgatctgggattgctcagttactacctcgggctggaagtaaagcaatgcaagggcgggatcgccatcagccaaggggcgttcgctcagaagattgttgaagaagcaggcctgaagaattgtaatccaagtgccacgcccatggagacacgcccaggactgagtaagtcgagtacctgtccagctgttgattctactgcatacaggcgcatagtaggtgctcttcggtacctggtgaacacaagaccggacatagcatttgctgtgggatttgtctcacgttttatggagaagcctactaccgagcatctgcttgctgtgaag

SEQ ID NO: 184762 - DNA, 485 bp, Zea Mays
atttactttttttataacttcttgattactttactgtgccaagacttctgattgctaattttgatctagccaagattttaggactggacgtctgtgctgatactattgttggagatgaaatgatcaaagggatctccggagggcaaaagaagcgcctgacaacaggtgactgcatattactgccatttaagtatgctagcgctgtcagctgaaattagttattgcaaaatagcacgctcttttcagtgttcaagttgtgctaatattgtggtacttgcaggtgaattgctagttggttctgcccgcgtgctgttcatggatgagatatcgacaggccttgacagtgcaactacatatcagattatcaaatacctaaggaattcaacacatgctcttgacggaactacaatcatatccttgcttcagccagctccggaaacatatgagctatttgatgatgtcattcttatagccgaaggtcaaat

SEQ ID NO: 184763 - DNA, 599 bp, Zea Mays
tctcgctgacttccaccccggactcggcgaccacctcatcaacctcccggcgtttctctcaaggcgacgagcctttcagtttccaggctcgacaaggtggacgttcaaagacccaacgctggagtgacgactcctcgtctggtggttcgtctcgtaagttttgctcctttaaagaggccctcgtatcaggatccaggcgcctccattctcttgtcacgactagttcaagtgccccagagggtgtgaaagacaaggagaaggctggtgtggtggagcagaagcagcttgtggaatcacttcgggacgagcttggctggcaggtggttgagcgaaggaagaagacccagcgtgtgcatcttcctcgtcgagggtcccttgtggatctccgaggcaggtgcttcaactgtttttcttcctcccatcttgctgcagcgtgtcgacgttccacccgatgctttcgatgctttgacttcgggcatcaggtgagctcttgccccacgagacctgtggcacgtacgaggcagtgtggcggattgaagcaagaaaagaaggtagacagaatccctgtctggcagcggttgactaggatggtgggggac

SEQ ID NO: 184764 - DNA, 523 bp, Zea Mays
acaaacacaagacggcatatctcaacaagcttggcattcgttatgttccttacggaatcaacaccatcattgttgtccgaacaatcatggaaaaaaccaatacatggcccacaaggaccagtttcatcggccatccaaaaatcaacctattgaagcactcagtcgataaatgtccacataaattcaaagcaaaattgataagacataacaagtaccttggacatggaaggcaagattctttctgctcctatatatttctgtaaggtatttcttgactcgtcgtccaaactcaaacaagaggacatatcaccactaaagtatgaggcatatattctagactgaggtaacttgtatttttgcatattgaagaatgagccatcaataggtaatgagaaggtggccttaaatagaacatcagaacaatattgtacactaatttttccatgcagtagcttaatggagcaactcacgtgcacacacacaaaggaacttttaagcatgtcttaacgctgctccctcgaat

SEQ ID NO: 184765 - DNA, 522 bp, Zea Mays
tctgttagactactattgtctactaatctactgcatatgtgagacatctgaggaaaaaaaacgaggctaattaaccggattctaagcaacaatgtgcaacccattcagagccaaatcggtaggcagctccaagatacagcggaatatgattgcataagcttctaatagcacaacgagtaagcattaaccatgagcaaaatttacaccgggacagctcctggaaaggcacgcagaaagaaatgacgcggctctagcaagcttatttcctcccgtagtcccgttggacgcagcataaataaaaactagtacttagtgccacgggatccaaacaggctcatcattgtacatggtacacggagatgtagcacgaaatggtggcgcgacgctccccagatgggatgagcccaaatatgagtactgagaactggaaaggccgattctaccaactgcgtaatagatcgatgcggccatgtatggagaattcagagttcagagggaacccaaaattgggaggaaggagcg

SEQ ID NO: 184766 - DNA, 604 bp, Zea Mays
cacgagcaacggctaccacacgaaacaatttcctcttcctcctcagcggcaccgtctcgtcgtcacctccctcctcttcccttcccgcggcccccgacgccctccgtccctcgtcgtcatccagtcatcccctacacccgataaaaggtacgatggaagaagcagcctgcaccgctgctccgagcctcccttatcactctccgtggatcaggaccgctcccgtcagagtagtggcgaagatttgcccgggcggagaccccactggatccatgcaggtctccgcccgtgttcccgatccggctaactcctcctccgcttccgtctcattcgtccccataatcaaggagtctgctctttctaagtgagtctggttgcttttcctctagcttatttaagatccggccgatctcatcaactaatctgacttattttggctttgggttgctgaagtatgacccaccgcaaacatcgcgagcacaaactcgattggtgctatctcaacgacgattcgtacacagacatttttcacaacgaggttaaacagcttgtggataaaatcttctcctctgatggccacaaccacgcatgtgtagtcacttgcggt

SEQ ID NO: 184767 - DNA, 712 bp, Zea Mays
gcaaaatgcaatagcattgttcaaactctttcatccagttcacatggtctggtatctgtagatgatgaagaagttcaggtagtcttgaagtgcatggtgcccaatgtatgctctcgagcaatgataaatagggggttgctgcattctgatgatcttgtgaagcatggttctctgaggcttgtttttgaatcagttaacctgctttgttatatcactgaatccatcaattgcatggtatcaaaagggagactgaagtcagaattcattggctcagagaaagtaaccatgaaaatagatggtttcccagtattaagctgttctgatgctacagatgcatccttagttgatgaggttcaccagggagatgaaatgcaggtcaagaggtggacatctctaagagaatacatccaagatgaagttcatggagctatgcctgatcctcaagtctttctcaagttactctcttctaccagccaaaaacatcaaagttattctcagagcatacaaaagaataatgctcaactttctgagcctcctcaaaagaaacgaagatgcagtccttcctgtgaagttgatgatattattattggtggcattgatgttgagcaggataaggacgcatctgaagaacaaggcctggaattaaaaaatgaccgcacaaccaccttgtgtgagatatggagcttagataaacaagatccaaagacgaaag

SEQ ID NO: 184768 - DNA, 734 bp, Zea Mays
aaaggacaggaggcaggctgcaaggctaagatccatgtttaacgatgttatgtggaagatgatcagtaatgaagatgagcaaacaaagattagtaagcaagcagatgactatgaaaggtccgaaggggaatgcttctcgaaggctggagcaataagagatagggggaaaaaatccctgtaagtttatttctaaattctctttgtattaactgaaatatgcagtttatgtgtttgcgactaaacttacaatgtttgtctacttcagtgctatggtggggtgcatatggagggtttgctttcgaactacaaacccttgcaaaaagagttataagcctctgttgctcggcctctggttgtgagagaaactggagtgaattttcagcagtaagtgtctctactttgttgtttgttcaatgttcatatgcagtaactgaaatatgcagtaagtgtttgatgacttcttgaatttgcttgtgtagatccacaccaagaagaggaaccggctagagcatcaaaggttatgcaagttggtctatgtgagctacaacaggaagatgaacaacagatttacaaagataagagagcaaggttcaaagggaacgaaaagcaacccactagtgcttgaagagcttttgtgggaaaatgagtgggttcaggagtctgaagaaggtgaggagctttggagtgcagtagatgaagttttaggtgcaactcaagctacccagggcagaaac

SEQ ID NO: 184769 - DNA, 309 bp, Zea Mays
cactgacacatactatccactaaccgttgaaaaactaaacttacttctcgcttgccactacatcactcctcaatcacacaaccatcacgagcatccttcacacgtttacataatagcgacctaagcatcgtgttacacaatacaggcatctttcctcgtcgcgagtataaccatattacggcatatacccgcactcctcaatcaattatcttacgccaccactactaaaatacaccacagttcacacgcacatacgtgtactaattcaatcctcatataacttgtatttccagacttactcatcacata

SEQ ID NO: 184770 - DNA, 275 bp, Zea Mays
gacatgaaaaacgtcgtggatgcgagcctgtggaggaagagccaggcgaaccgcaacatcgttgatcaactcctcaacgcgatacagcccgatatagcgtggtttcagcttgcctgtggtagcttgcggtagggaagacatggtgcgctgacggaggcgaagcagcacccaatcgcccacttggtaggacacttgtcgatggcgacggtcatagtggcgcttatgcacctgatgcgcctgttccaggcggaagtggacatcggcgaggaaggcag

SEQ ID NO: 184771 - DNA, 409 bp, Zea Mays
caagccgataatgggactgagtttgttaacactgccaccacctcatacctcgccagttgtggcatcttgctgcgcctctcgtgtccctacacctcaccacaaaatggcaaagctgaacgcatgcttcgcacaacaaacaacaccatccgcaccatgctcctccatgcgttcatgccgccatcctactgggctgaggccctcgccactgccacttttctcctgaataggcgtccttcctcctccatccaaaaccagataccttaccaactcctccacaaacgcctcctggactactcctcacttcgcattttcggatgcctttgctatccgaatctcaccgccacctctccccacaaactcgccccacgatcagcaccctgcgtcttcttaggctatccctcctcccaca

SEQ ID NO: 184772 - DNA, 410 bp, Zea Mays
aggaaggataaacaagttttggtgcctccgatatggtttgccagtgaagggagccgaaggtgatctccaagagaagaaaagtcatacactacacgtcaagggtgtaaaatgacggaattgtatcccctcaatcgtgaagggatgctatgtaatagggagggctgaattgtaatttcatatgtataaaggtgtgccggtctggccctaaaaataaatgaaaaatactactgctacgggtgtcggttattttgtaaccttgtgcctgtagcaccttagtcccgggaaagagttttcgaaggtaattcattatcgaagctcatatgcttggtccttcgcctgtgtgtattgtgatataatacctgaagtgattcattcatgtttcatgatgttaacacccttctctcctttgg

SEQ ID NO: 184773 - DNA, 712 bp, Zea Mays
cttggttggtaaatgggccagagagaggtttatgggccttgccttgggtaacccgttcctaggtacccgacaacagcccccgagcctttgtgcgactccttggagtcggtcagaggcttacttgccggggatcaaaagcccaagtgcgcgcaagcgcatcagtatgatgtagccccgagcccccgagtgatccttatggattgcttggggtgttttattcggtaccaatcagtttaggcgcggatccttcctgcgatggttgcattgttttcagatcatccgactaatcacgattagtcgggctgatcggtactctgtgctcgattagggtgtttgattcgattaggttgcctgatcgtccgattaggcgacgatatggaacgactaattgaccggtaaccgatcagtcgcgattagtcagggttgggtagttcaacattctgtttgactgacccatgattaataaaggtagccggccccagatcacgcctgtctcttcgtgttccccgcctccttagaatccctgcaggcgtggtgcactctagagccaggagcccaggacgattgctcccttccctctcccttcttcacccttctctctctccctccaaggctccaacacccttctatctacatcggccgggaggaaacatagggattggagatgagctcctcatctgaaggtatatgtctggactctgaagtctcccaa

SEQ ID NO: 184774 - DNA, 298 bp, Zea Mays
ggaaaccgcgcacaacccgttgcgaacctggagtcggccaatcatggatcacctgcaccttggctgggtccatggccacacccaccgcagatctgacatggccgaggtaggcgacggaggaagcaccaaaagagcacttggtgcgcttgacgaagagttggtggcagcgtagttcgtcgaggacggctcgaaggtggcgaaggtgatcagcccatgtcttgctgtaaatcagaatattgttaaaaaaataccaggatgaagcggcgcaggaacgggcggagcacgtcgttcatcaagg

SEQ ID NO: 184775 - DNA, 307 bp, Zea Mays
cagagcttcgtattcggctgcgttgttagaggctggaaatagcaactgaagggcatatctaaggtgttcgcccccaggtgcagtaaagaggatccctgcacctgctccctgcaacttcaatgagccatcaaaatacatttgccatacttctgcgactttcggattatccggtacctgttgttcggtccattctgatacgaagtcaaccagtgcttgagtcttgatagcagtgcgaggtcaaaattcgatgtcatgagaccctaattcacaggcccacttggctactcttccgatggcttctatgttg

SEQ ID NO: 184776 - DNA, 556 bp, Zea Mays
tacacatataattcaataatataagaacaagttttctaacctaggcatgtttagacgcatctcacaggtagtcgagcctaatacctaaggtggtactaaggttgttgcgcccactagactacagaccctttcaccctataagttgttgggaataggaaaccgacagaggaatgtctctacaagagtaaatttcaatggctatctttgaacttgttctatgttgacatctcgcccctagtacttgcatattgcacattcaactcccaaaacttgtcatgaattcttagtgtcgatacttgcattgcacgctcggctccctaaacttgttctatgttttcatctcgctccttgtacttgcaaattgtgtggtagactctctaaactcatattactataccatctaggtccaacccccgcacgctgtgttgtccttgcccttcgtccctccacaagtgcacgtctcacaaacgcaactactctatgcttcaccacgcttgtcccgcctacctgcatcgcatgaatgacatagtgtcatattaccttgtcacaatgacac

SEQ ID NO: 184777 - DNA, 370 bp, Zea Mays
tagtgaaggtgggactgatgatgccaaaagacggggtgatgcatttgcacatgccttttctgctcatctggcaaggtaaaaaatgctattgcatggcattagttccgaggtttttgtttctttgtgtaccactattggctgtggatagaatgctagtctcatatgtcaatattatccgttctctttgctacctaactggtgtctaaggttagattgatggaggagccagctgcttatggaaagtttggtttggccaacctgttggaattgagagaagaatgtctgagggaatttcagttcgttgatgcatatattagcatcaagcaaaggttggcttcctatatgtgcgcatgcatgtacacatactctc

SEQ ID NO: 184778 - DNA, 1037 bp, Zea Mays
tgaggttgtcacctagaaagactgcatagcctaaagtagacctgtgagtgtcaagacatccagcccagcctgcatcagaatacaccactaactcctcttggctctggcagggatggatcatcaaccccaactgcaaggtgcctcgaacataacgaagaatgcactttagtcctgccagatggggttctcgaggatcatgaatgtgaaggcaaatctgttggacaacatatgcaaggtcgggtcaagtgaagatcagatactgtaaagcacctgctagaccgcggaaatccgaagcgtccagtgcgccaagggggtaccagtgttagataaaacctttggactagtgtctaatggggtggtgcatgacttgtagtcggccataccctctcgattgagaatctccaacatgtactgatgctctgatagaaatatacagccatcacaccgctcaacacacatccctaggaaatgatgtaactggtcgagatccttcatagaaaactcctaaagagctgcaatagtgcgccgaaaaagagccgtggaggatgctgtgaggacaatgtcatccacgtacagaagtaggtagatggtgtcgcccccgtggtggtaggagaacaacgaggcatcagccttggcgttgacgaagccaagagacatcaggtgggaggcgaagcgactataccaagctcggggggggggactgcttcatgccgtagagagacttgttgaggtggtaaacgaagtcagggcgtatgggtcagctaatccggctggctgagcagcgtagatagtctcggacaagtttccgtggagaaaagctttcttcacgtcgagtaggtggatcgcccagtcgtgggacacgacgagggagagtactgtgaggtcggtgttaggcttcaccattggactgaaagtctcatcaaagtcgatgtaaggtcgtcgagtgaaaccttgaagaacccactgagccttgtagcgtttgagagttccatcagcctgaaacttgtcggagacgacgttggtgcgagggggcgcgg

SEQ ID NO: 184779 - DNA, 760 bp, Zea Mays
tggagttcccagacgtttattgggggacacgttggccgggcgacccagttcacgtcgcgccgctggtcctctctctcgctcgtcccaccaatactcgctgcactcttgtcctcgtccctctgttttgctgtctgtgcacagatcaccggccaaggaatgtcgtctgcatcacatattcctacccaacagtccatcatttctgctatgcataccagtgctctcggtggacactttggtattccggtgcatcatattaagcagctcttctggtggcctgatctcaacatgtgagtgataacctttgttcactcatgctccacttatctttaggcgaagccggaccgttctaaatattctggcctcctccagcccttgcctgttcctgcgactgcatgacatacagtttccatggacttcattttgggtcttccaaaatcaggtacaactgatggtatactagtggtcgttgataagttcactatgtacaaccacttcttgccgatccaccacccatacaaagcatctttcattgcccaactgttcatcgataacatttactagctccatggtcttccactggttatcgtctcggattgggatcccattttcaccagccgtctgtggaaggagctcttttctcgcgctgacgtccaacttcacatgagctccacctatcaccctcaatctgacggtcagacgaagcatgtcaacccgtgcttggaaacctatctccgctgtttcgtgcacgcttgtccatcca

SEQ ID NO: 184780 - DNA, 434 bp, Zea Mays
aggtctttttcagagttcgtatccaacccgcctgttcaagacggcagtccaggccatagagcgtgaccttcttcagaagatattgaagccctcattgctacgtaccggggtctccctgaagaggaaaaacagactcatctccggatgcaagtgattgccaatgaggctgaagtaaatgttgttcttaatatgctggctagcgagtcatctgaatctgctcacactgagtcaacgagtgctgcagctgggtgtgccttcagcggggatgagggagcttgtagccctgacggtgttcgttgcaaacggacatgccgagcgggttatccagttgtgtctgccgatgggaagaaaagaaaaataaaacttcggcgctcatccggcttggagctgggggctgactctgccgcttcggacctcgatggtgacccgtcagg

SEQ ID NO: 184781 - DNA, 391 bp, Zea Mays
gggacttgtgtggctcggtaacaccagctacactaggaggacgacgctacttcttgctgctcgtcgacgacctctcccgctacatgtgggtgatggtccttggcagcaagggagaggctgcgaacgccatcaagcgtgtgcaggtcgctgcggaggcagagtgcggccgcaagctgcgcgtgctgcgcaccgacaacgacggtgaattcatggcactccgcgccgtacaacccgcagcagaacgacgtcgtcgagcggcgcaaccagacggttgtggggatggcttgggctctcctcaagcagaggggaatgtcggctgtcttctggggagaggcggtggtgacagcggtctgcatcctcaaccgctcgcccaccaaggcactcaacggga

SEQ ID NO: 184782 - DNA, 906 bp, Zea Mays
gcagccatgacatcaatcttgattatggaccaacagaccttgtaaaaacgacctgtgaacccgtctggccctggcgccttgtcaagaggaagactaatgattgtattccaaacctcatccgccgagaaagggctgtcaagagcttctagatcaaatgtgggaactccaagctgttccaaatcaaccgcagcccccctattaattgcagaaccaagcagattcatatagaaatcagtgaacaagtccgccttctcttcctgggcagtgcaaaccgttccatcctctgagacaattctagggatgaaactcttagctttgcgataccttgcatgagagtgaaataaagcagtattcgcatccccatccttcaaccaacaaatccgagatctcatccggaccaaggagcgccatagagacgcaagagcaagactgtgctgctttagattattacgcaaccaaaattcttcatgagaaagacttctactgtcctgagctatgtcgaattggtggagcagctccctggcaagaccaagttgtaatctaatatgaccaacctttttctcgccccaaccttgaagagctttagccgtggccttgagcttcatggagagagtgagcaacggacagtgactagcagggacagcagcccaggcttcctcaacagctaccagaaacccatccaatcttgtccaaaaaacttcaaaatgaaattgtggctttccatgcacaatatccctaagccccagaagaagcgggcaatggtctgaatcgaatgaggccgaactttgcagcagggcccaagggaactgatcatcccaatccaaggagcagaaaacacggtccaatttgacaagagttggattatgctgcccattcgaccaggtgtacttacgcccaaccaaaggc

SEQ ID NO: 184783 - DNA, 288 bp, Zea Mays
tctgttagcgccagaattagaggaaagatagggcgatagaatcgcgaggttgcgataatcttggcatgaccctcagcgttcgctgcatcgtttgggaggaggagatgaagccgtctgcgtggaggggatggagcttccatgtaggtcccgcttgtcggtggactgaagagcagagacgcgcgcccatgtggtggctgtcctgcggcgagtggcggctgaccgcttggtcccatccgccagaacgtgcttgcgcgtggagatggggataccgccaagtgggccacacac

SEQ ID NO: 184784 - DNA, 743 bp, Zea Mays
tatggtcgcggtcggggtcgtgacgacgaaggtggcaaccgtccaccgcgacccaactttccatccttcgacggcgaatcagatccattgacatggatcaacaagtgcaacacctatttccgagggatgcgaaccatggcagaagaaaaagtttggctagcatcattacacttggagggagcagcagccgagtggtactatgcactggaacgtgatcatggcattctgtcgtgggcacgatttgttgactacatccacatgaggtttggaccacccatccgatccaatggcctggcagaactgaaagccctttataggacaggcaccgtggaggcatatcagcgacagttttcagtcttgctttgtcgctgtgatgacttgtctcctatgcagcaggtgaacatgtttacagcaggtcttggagatcccctacgcaccgatgtcgagctgttggccccgacaaacctgcagaccgcaatgagtctggcctgtgcttatgagcgcaaggaggagaacattgcagcactcagagatagacaaagtcaccggaacctgtccgccatcaaagggactggttcaggaccgggggccaggccggctgctccaaatcggccgtgtttcagacgtctaacaccagaagaattagcagcgaaacgggcaagtggagaatgttaccactgcaacgagaagtactcggctgatcacaagtgcaccgcaaagggggtattcttgctggaaatgga

SEQ ID NO: 184785 - DNA, 373 bp, Zea Mays
ggaaagtcgagtttcttaaaacgcagcggtcgagcctaatgatgttccctagtcccattgtgggaggaggtcgacaaggaccctgacggcatgcgcgtggtttccaggcgcttgatagcttgggcattggcctccacggacgtcagcaaggactcgatggacgcgaacagggtgtccaaggttgcttgcagggcggtgttgttgtcccccatggtgtcggaggggtttgggaacggcagcgcagcggatgatgccacggctggcgaggttggcgaggcacgagatgaactagatcgcctggatagtgataccatgttgtcaagggcgtcaggggatagagtggccgaccctcgagtacgtagattgtagtcac

SEQ ID NO: 184786 - DNA, 745 bp, Zea Mays
acaaattaatgccttgccaccgctcgaagcattggggcaacgccttaagcaatgaggcggactggtagggttcctgatcctaccagggatctctctcaatcggtaggggtgaatgagggaagacaggggcggcatcgatgtgaggaggcagcgcggcggatgaacaatgtcactgtcacatggtatgcagctagaatgtcatgctcgtatcctcttcccaaaccgacaaggttgagcatatgattcgtgctactatcgacatcatgtgttccttgtttcaggcctctgttcttgctcgctattgggtcgagagtcttcacaccgccacctacctgctcaattgactatctaccaaagctctctctgctcccacacgcctcattttgccgtcttcggaaccactcctttctatgaccaccttcgtgtctttgggtgtgtgtgtgtgctaccccagtctctatgccacagcttctcataagctttcctgttgatcctctcgttgtgtgtttctcgggtactcttctgatcatatgggatatcgatgtcttaacctcaccaaccgcttgttgatctccaaccatgttatatttctacgagacggacttcttccccacatccccctctagctctactatcgagctagacgtctttctagaactgaccctatggctccctctagccagccacctctatttttctcagcaggttccccgactccaccgctaccccctgcggtcccgatgcc

SEQ ID NO: 184787 - DNA, 422 bp, Zea Mays
gtgatcttcgcggttggctgcggagggtcagggacctgattgggctcgaatctgatgggcgtgatcggaatcgtgtcctcgtgtccttgccatcaggacacactgttcacgccagcctccttttgtctaggtcagatttggatcgctacaattcgatcacgcacacgccttcaacgctgcctgagatcaagcgtcagcctcaggggtagttaaaagatacagttggtggacgtctaatgttccatttcatcgtcatggccttgtagggctaatatatatacctattttttacatactccgcggagtcccgatatccatatcatagtgttttatgtgttaccctggcctcacatgctaatcccatgcatccgctgtcacggattaccaagatcccattttttttacttagtcttcaatggaac

SEQ ID NO: 184788 - DNA, 308 bp, Zea Mays
gcatgatatacaagcacattctattctagcaccccctcaatcataacttacacaataacacaagttaagattatctctaaatgaaaccagcatctgcatagttagtgccttggtaaagtcatctgcaacctgatcttttgtagatatgattctgacctccaaaaattctctagctactctttctctcacaaaatgaaaataaatctcaacatgcttcatatgactacgaaacattggatttgctgcaagatagggttttccaacattcacaccaaatccttgcagcaggatgataataaaccttcagc

SEQ ID NO: 184789 - DNA, 499 bp, Zea Mays
aagatgccttcatgtcacgacgggagagggcgttggcgacgatgttggtgttgcccgatttgtactcgacctcgaagtcgaatcccagcagcttgcccacccaatgatgttgagggatggttgctatgcattggtcgaggaggaacttgaggctgtagtggtcggtgtggacgcggaaatacctgccccacatgtatggcctccaatggcaacaacctgtacgcggccaatgagttccctctcgtatgccgcaagggaagcatgtcgaggtgccaccggcctactgtagaatgcaggggtctcttgtcttgcagcaacacggctccaaactcgtaggaggaggtggtgagtgccgtcttgagcacctggaaggtggttgcggctgtgtccgtccacccgaacttggacttgcatagcagttccgtcaagggtgcggctatgagatagaagtcctgcacaaatttgcggtagtatcccgccaagccgaggaagccgcgga

SEQ ID NO: 184790 - DNA, 836 bp, Zea Mays
acttcatcttggatgcaattgtgggttgagaacaccctttacgcctttcatcaactacatcttcaggtgatttccgaagcatctccacaattgacttttgcttgcttgcttgatttgccttggtcttgattgatgttgtatccttgtacagataggttgcacgcctgtgtttggctgcagtccctgaacttggttgtaccttagagccttgggattctataggttcatcttgttgaacttgaacaggttcagctgctgcatccaccaccattacatcctcttcctcctcttgctgctcattatcatctaggaaaatagctcttttccttcttttggattccaagtaatccctcatctcctttctaattgcagtagtggtctttgaacacatctttgtatctccatagccacctgctagatgctgctttagcctttttatccctccagaaactacggtgtcacaaagggtgcatgtcacttgatctctatttgccaaatttgcccaataaccatacttccaacctggatcatttgagctagccttccttgctttgtctgtctttggatcatagttgacattgttgactgaagatgggctagccattgattgatgagggtggcagggtgttgttgcagacttgcagtggtgcactcttgctggcttgctgcatacaaaataggagatgagggacagagggagagcaggcgagaagcaacactcaacagatgaattgaggaagagcagaggaagaggaatagcagaggaagaggaagacctgaggaaagcactggaggagaggcggcgctagatggagcaggcgccaagcggcgcgacg

SEQ ID NO: 184791 - DNA, 575 bp, Zea Mays
cacaagcagcatactgggttgacttcagaaatttcagcatcttctgatggaaaaactactctttctttcctgaaacttcttgctcgttcatcatgtggattttgtgaccatcggaggccattcaaccagtatgaatactgtgaaacagtcctcttcctcttgctagagctagctgcattctcggatacatttgagttacttttcatgtatttatcatgtaatcgttttgatatacgtttcactggttcatttttggaaacatttgatggttcactttcatggatctttgatggttcattctttgacagatccgttgggttcttcctgggccggccacgcttaccctttttgccaattttcgttttgcatttcagaactatctgattcctcctggtctcaatcttgcgtgattgtttcttttgtttcttctgcttctttttgggagacagcttctttggtgcagtctttttctgaggagactccacctttagaaccttctcatctaagcacttattacaaacataaacagcatttgtagcacctctagggaccttgaaatgttttctatggaaaag

SEQ ID NO: 184792 - DNA, 380 bp, Zea Mays
cgacattgggtaatactaatggtccagtagcgtggtggccctcctgagggtggagctcgacgcagtcacggagaacagggttcatgacctgatcaaacgccatgaaagtgccctggagaagatggccgtcgtgaagggtgatgcgcacacagtagggtgggtcatgaactgtgatggagcgaaggaggggcgtcaagggagaggtgtaaggtgccgcgccagagtagggggagctggtggtggatagtgcggctgcgttgcgcacgctgtgtgtgaaagcagcggcgggcgtaggtgggatgaccgcggagccagatctgatcggtgtggtgtccactggcgacgagggcgcactcgctgtgcaggcaagcgggagagcc

SEQ ID NO: 184793 - DNA, 572 bp, Zea Mays
ggtaggtgccatgctagaaaagcctctacacacccaaaaacccgccatcagtgctgagccgccgacgggagtccatccctcttcctcccctgaaacgtcgtcgcccgccacccttctcccccagtagtgtcgcgatgctggctcaagacaccgcctttcctttcttgaacgaagtcaagatgctgcatgtgttgaggatatactccatatgattatccgtgtcctttcacagaactcgcttgtaccatctttcttggagtaggtaaattcacttgattgttgttatattttcatcaatcttcttaagaggtgatttgctttgatttacttacagatattagatagaagcaagcaaatatttcaattacatcaattctcacgttaataaggaactttgctattgtcattactcaatgggccgggtttatcaaattgcagctattatggacttcttcttttttcttaaaaaattaactttgtctccgattggtgaacactatttttcctttacttcgtgtcatcctttttgtgatacaattcaaggcaagatgcaaatgtggtttctatatctg

SEQ ID NO: 184794 - DNA, 1301 bp, Zea Mays
cgggccatggaatccagcttagtagactgggggcctatgctaggataggaatgctagagcctacaagggttcgaagctgaggatgctatgttgctcaaacaatccagacatcaccatcatggcctagcctagcgctattgttgctgctgtccatgaggagcagggctaggccacatggtgatgttgcccatccatgggttgtagaagattgcattgcccgaccatgccctttcttcttgccagatgctgaggtgagagtgggttgcctttaattttcggaggagcgtgccaaagtagaggaagaagttggggcaaatggcatgagggtgatcggtgaaggagtggcgatgaaggtcgtcggagcaacaacagggcagtggcaatcatgttgagctcctctagaacaagatcatctgggtcgaccttgaggaaggacgggaagggagagtagcgtcggatgatagccctgatgtgctcaaacttcttatttaggccttgaggacaaggatctagtcgttgacagagtgcccaggtcaaccaaggagtcagtcgtccccttcaacttgcaacagtagtcatcgacgggtaggtcaccctggacgaggtgcagaaggtagcgtcgaactagagggtgcgagtctcatgattctcgactgattctcaaaaacgagtcagaggtggcgtgtcatgccattgcagctccctagcaattcagcggagatggtgccgaagatccagcagatgacgatgttgtccattcgatcccagaatgaaccgttgtctgagggacaaataagatgtggtcgacaaggcgtacagcttgagcacaagcaacacttgatcacaccaacaggagtaattgtcagaggacgcgagaacgaccatcaccaacgatacgaagtcgggaccaacagctgcctagacatggttggcgacgatggcaacctcataagatgcagtagggtcgtcctgtggggaatgccctagggtgggggccgacggctgtggagtgctatagcccaaaccctaccaggcagcgacggccttctcctgttcgagaagggtggctgtctggagatgaggatgtgtgttggtagcctccttgttcgtagcttgagccatggtgagcatgtcgtcaatcttcttgcgaaaggccacaacctcctcgatgtggccacgctccacggcagtcgatgaggtacctgccatggtaaaggagatgtgtgcgttgttgcggcaacgcagcacaagggaggtggtggccctagattggcggcaaccagggaaggagcaaaagtgag

SEQ ID NO: 184795 - DNA, 312 bp, Zea Mays
cagagctggcatgaagtcatcttcatcagaatcaatctgaactgtttcattggtcaaattttgactgtcaacatttggaggatttccaacttctggacatggattaggctgttctgcagagggaatgtcaacactgaaacactcctggcttgactgaattgttatacgcttggggttatttggaggacggtccacttgcttcatttttttaaattaaaagctgcatacataatatacaatgttgtaaaaattaaactgttatatatgcatatgtatttatggtgtggtatgattgaatcaatgaacctaatt

SEQ ID NO: 184796 - DNA, 337 bp, Zea Mays
ctgcgctcctgaagcttctcatttatctcttccgtcacggtgtcccagtaagattgtgacatgatctcgccatttatcagcattagagtgggatcatcggagacgaccttctgtgactgcctctcaacatggtaaaggtccacccccagggtatctgataagtcaactagagatgcacggcctctcttcttgatctccatcttaatctcatgcttcaaatggtcctgcaacaccatagttgaccatggatcagctagaaaaccatgaattctcaactgagcaagtgttcagaacagagctgaacaccaaaaaaggtcatccggtcatcccatatcat

SEQ ID NO: 184797 - DNA, 281 bp, Zea Mays
cagacatgggcaagagtaggacccaggccttctctaagcctagaattgatactagcagacctgcctacaagtgcacgaacacatcgtggagagccagcagccaaagcaaatactataggtgggtcttcatccttatctaatatatctacattctcttggtaagccacaatagcttccacaagctctgccgagcctcggcgacatgctaaatgtagggcagtgagtccatctgtattttgtgcttctaagagagaacggatgaaaccaccatttctctctga

SEQ ID NO: 184798 - DNA, 395 bp, Zea Mays
gcatcaatcctgggcccgacctctgtgttgtttagcacctttttttagccaaaatgactatcccataggagcgaatttaaacaggcttggggttaaaaaaacacccctcattggctatgtttatgagttatatgtgtaacaatctgtgccgcttttagtgagacacacatggctgtaggtatgtgtcctgggcgctcggtggcatgcctaggacggctagtctttgggtgtttctcggcctacatgtgagaagtttcttcttaatgcaatgccgcaggggcaggcaccagcttctcagttcgaattctggtacaacttattacaatgcccaggggggcgtcttcccccttgtggttgagtttttttctttccccgcaggttgagggatgattcgc

SEQ ID NO: 184799 - DNA, 485 bp, Zea Mays
gccatttgctccaatctcagttacacaaccaccttccccgtctgatccagttgctgtaccaactggattctctcctccacggccttctaggctacgatcacggccatgtccgcttgccctaacagctgctgctggatgtcttccatgtctgcaaccttctctgtcaatacctccaacttcgccatcaacttctcccatcaatcaccttcctccttcgacttgcccgccatcacctccagtaggaactgggtctgcaccgatggtttcgctgctggcgccatgatctcccttctcctggaacaccgcagcaaggttgcaggttcggggtcttcctatctctgtgtacagcgcctccgagcccttccaccacctcgtcatgcttgcgacgattcctgatcaccagactccctcacccactccgaggagaacggctctaataccacttgtgaggccccttggccagcggcgagcaattctgcggcgtg

SEQ ID NO: 184800 - DNA, 442 bp, Zea Mays
atggaatgttgagaatgtccaagcagatgatgataattctcgaggaggagggcagaggaggaagagaaaacatgtgaccattcctctattcagatctccattaagtcgattgttgttgtcgccaaggataaggtccccctctatgcagcataggacatctccattgggttcaacaagtcatacaagccatcaaagtcagagagaaatggattatattgatctaaatgtggaaccagaacaagattctcagggagggcaaagagcaatggctgaatggaatgttgagaatgtccaagcaaatgatgagaattatcaaggaggagggcaaagtaggattaaaagaaaacaagttaatgctgagcaagcgagatctttatttgattcattgctagcgatgtctagaaatggtaagttgaagggccatgagacaagtgaggttgct

SEQ ID NO: 184801 - DNA, 514 bp, Zea Mays
aagtagaatcatgggccatgtgaaaagaatctcttgagccaagaatccagggcactatagtacctgacaacgaggcacctatatgcggccagcgcatgagtagcaaccgaggagaccacggaggaagcggacgaagtagcacaaaggcactccatgcgccgagtcaggtggagggcctaatcaggagatgactgaggcgaggcaggtgcaacaatagcgggggcacctcccccgtggcatggaggacatcacctgcacttctcaatggtatgtgttgtcaacttgcaatagcggtaaaagacaacaacaacagtgccccgtgggcaagaggaatcgctgctggagtcggggtagaagtaggagctacggcaggtgacacactcggagtagcaagaattgtcgaagaagacgacaacacaccacaaagatgaatctcctcagcctaggctaaggtgaccgccttaaccagggatgggagaggagaacgagtgaggagctaagcctaaagctgctc

SEQ ID NO: 184802 - DNA, 619 bp, Zea Mays
gttgttcattgtgtataatagtaggcctaaaattcttcggacataaaaatagatgttttgtgcaattttaaatgagaacttcgcctacgtaggaaggtcagatgccatgttagcttggaataaattttgagatggaagggacagatgacaagaaaggttcaattgttttcagtttgcagtagtctcctctacctttgggatactagataaggtccatttacattttgatgcactaccagttatatacaaaggactaaaggagtaacaaggtagaattcaatagtatgtgcagaatgctcatttggtagtttcttttcccatcaggaggactgttgaatttcttgctatggttccaatgtgtatgtatgtttcccaacagaatttttataatgttcagacctattatacaaacgggtccggtgttatgtacctacataagtttttcttggtcttgcgggttgttgatctagctctatgtttttttttgcttataacccactagaaatttaggtatctgtcatgtaatatattcagaaaaggagaacatacctcagaatattagcaaaaggaatttgcatcgtcactatatttgtataattccatgctagaatggttcaag

SEQ ID NO: 184803 - DNA, 351 bp, Zea Mays
ttctggcctggcctggcctcctcttcacgaaatcttgctcccccttggagattgatgccactgttgttcgtctttgccgcggctccgatctgtttagtctcggggggattcggttcatgctgtgcttccacggatgtttctgtgctatcttgaaatgttcaaccgtgtcaagagttaatgctgctactgggattgtgggagtgatgttcttatttagattgctatcatatcctcggtagcaacctttaagcaccaatctggcagcaattcattcaactcatctgtgctcattccttatttttgctgtggagtctccaatagctttgcgttcatctgaaatgtcggcagcac

SEQ ID NO: 184804 - DNA, 540 bp, Zea Mays
gagagccatgtaagattatttactaacaataatggcatgcactctcagccttctggctatgtgatcatctgctgatacttctctgccctctaaccatttttttcagggctgaatttggcgttgttctggtttacttctatatctgtgaccgcacagacatatttccagaaagcaagaaggtaataaggttactcctgctagttactcttgacactcagcaccgcagtaagccacacatgtaaactacagtgggtgttgcttatctaaattttgactgtataatgtttctgatcactgaagctgctatttttatttcttattttatgatctattatggcctgtttcttatatgttctttatgtcttttacttgcattgtaatcctttttttttctttgacagagctacaatcgtgatctgttcctgtttctatacattcttctcatcatagcatcaacacttacttcactaaagaagcatcatgaaaaatcagcattttcaggaaagtctatactctatcttaatcgccaccaaactgagg

SEQ ID NO: 184805 - DNA, 507 bp, Zea Mays
tttgcacctccagttggcgttagtgtgaggcctctacaagctgtggaaattcccaatgggacacctagggatagaaggtgaattgtcaagctttttgagatatttctcttgctaatgcattgtcacattgttagcatgtctcttcaaaacagatgtcgctctcattctattaatgattttctgccccatttcgtagtggggttcaggggttttctcgatctatgtgagattgtcttcttcatacgatgcttggggctgccttaccccaccggttgagttttttgtatataagtagcaacaagatttggattaacagttgatatttcacggtgctgtagggctgtttatcccgatcctactttcgcccagtccacacggtcacgggactcacatgacagttcaacactgacagaagaggtctctgtcgccgagcataccgctcacaccttctacattctatatttttcagatgcttttgtactgaacagttagtgaacttacacgggg

SEQ ID NO: 184806 - DNA, 396 bp, Zea Mays
agggggatgacgtcgtggccggggccttgccacggcgaggaaagcgagaccgaggacgtccgctggtggagggaagaggccgaacgcaggggcacagcgaagctgaggtgagctcgagcgtcgggaacaagaacgggcgagtggggtcaagggcagggcggaggtcgaagctggcgagctacgtctgaagcctgtggacgacggatgaagaaccggctgaacgagttggagttgaggataagtgttggctgatcactgttgtgctggcgtgagcagtactggctgagcagccacgcggactcggcggtgtgtgctggcagccgcgtacagagagaagaacgcccagaatttgctaagagctgagcacgcgtgtagaaaataagatagagatggttg

SEQ ID NO: 184807 - DNA, 365 bp, Zea Mays
tagggaaagccttggggtatggcgcctgctgatgaggatgcttggtggctccccacgtatggaactagaggtggaggcacgatggtggcagaggtaagtgtgggcgcgattgacgttttggtggaggtcgccgatatgttgccataccccagcagcatgtaggtaaagccaagcgggtagacgacgaaagaggcgacagactgccgagcatcgaaggtagcgagccctgtggactgttgggcgtttatggtgattgatcatgtagagagcgatgctgcacgataatgcactagaagtccctgtcggcgtgctagggtcgggcatggcaggggaggcgtggagtcgatggtggttgccgcggcgga

SEQ ID NO: 184808 - DNA, 280 bp, Zea Mays
aggaagggagcaggcacagggaccaccatgctgtaggatggggacggtcgggagcagcatggtggagttgggcgagcttgaggagtattttgtggtcggggaggcatccgcgccgggcgcataaatgaggccgacgtcgaggaagacgagaggcgggccaccgtcgatgtgcgagtagggacccacaactagtgctgggaggatgtggcttgcagatgtgcagatgtccgcgctgggcacgtggatggggccgacgtcggggaagagagttgttcaggcg

SEQ ID NO: 184809 - DNA, 581 bp, Zea Mays
atccgtacgactttgtgcctccaccgccgccaggaagggcttctgtggagggcgatcggctgctcggcctgatccgggaccatggccgcaatccacttcccggttgtctacctgacggcggctttggttacggaggaggtagattatatccccggcaaggatgtgattttgcggatttcgaccaaaagttgccacctcccatgctgaatgataatggcttcggacaaggttttgtgccagacgaaggccctcaccgaaagtattttgacggtgccaatcaccatttccatcagttccacccagagccattgcctggtgcgccgctgcaccctccactgcctcgctaccctgatccccatggttcacatgcttggcatgttgaggcaggtgctgtgccacggccagcagagcctccattcccctctaaccatgattaccgtgctgcaccgccacggttgactgcaaattcatcattgtttcctgtcctttctggttcgccaacaacggaaaattttccatcaaccgctggtaccttgcctccagcccatcccatgccaaacaaaaaccgtcatgacggacac

SEQ ID NO: 184810 - DNA, 362 bp, Zea Mays
atgttttaattgtttgctcatatcttttcaggttggtacacaaacatcgtttttcaatgtcgaatctgggtcccccagctattcaagtaggcataaacctagaattctatcccttattggtgtcccctatctctcaactacttggtggacttttaaagaacctgttggcatttggggtgaaggcatctttactgctcaggggatattagagcacttaaacgtgacaaaagacatctctgactacctttcatatactaccaggtgaatgttatcctatatgctgttcaaaaaagtttgttacatcagccccgattgagaaccatctgtgcatgtctttattaactagataatgcttagttcat

SEQ ID NO: 184811 - DNA, 1467 bp, Zea Mays
caaaaattgatctccttccccgaggttccccaccgacttccctgccgtcgttatcatcaccgccatgaggaggagagcgggaacgatgacgcctcctctgtcttgaagaaccaccatttactccggaatcctgagaagggatcaaccgatcactcctcaacgtcgagaaactaatagaaatctgatatacaaggccaagccttccatcttcagtgttaactcccgtaggttccacaatccaaaggtctctggcagcagggatggttgccgggtcaaaacaccatccagaacaacgaaagacgtcaagattccggagctccagggtatcaggatggacttcatgcacccaaacacactgattcagtagctgctgaactgttgataactcccatgcatgtaaaggaataccagtcagttgcacttccacagggatcggcaggctcactccagacgaacccaaaaacttggaccatttcttggacagcaacgagaacgtgctggatctgatcaagctccacctctctgttagtaccagagctaagcgctcatttggaagcatgagcaatagattggccttggtaaactgccgcagaaccaaagaagatgcctcaacatccaacttaagcgcaatcgcctctgcaatctctgcaagcggaatcaccaagtcactgataacagcaatagacactgcattcttcaaatcatcttcagcttgcgttagaggattattccagccaatgatgcaaggcacatgaggctgtactgctattccttccaaaggggtctcatcacttcctggcaagacagctccatcttggccttgaccaggatccgaaccacccctcgacgatgaacggcgcttgcgatggcgcctgcgacgtgggcgaggcgggaggggttgctgcgagtgtgcggcagttgcgatctccatgaccgtggacgatgtcgcgacggtcgtcgacacagtctccttcctcttctcaccttcagcactagggggtgaaatcctgcgccaaaccttattacgaccctcgaatcgacttggatgagaagccgggatgcggagccggttccaaactggcgctttagaagcctgctgcgaaagcttggttacagacgtcgtcttcactacagtctgaacaccagccgccggcgcagctgaacccagtctatcccacacggagcctctagataaccgccggtgaaccgtgagcctgttgtcgttacgcaccggccctggacatgtataggatcgatgtcccagagccttgcagcgaaaacaccttggctccctgcggcacgacacagcgaagtggtcgtcggcaaagcagttgaaacagcggccgatcaagtcgacgggcacagccttgctagcccgcagcaatttagcactccgctgccttgtcttcttcgaccttacttcaacccaaccgtcggcatccctcttcggggctctctccagaccac

SEQ ID NO: 184812 - DNA, 372 bp, Zea Mays
aaggataagtaaagcggtgagatgctccttatgattttatttacagctcttattagatgttgtagtgagatggtcatcagttttgtcgttgtgcatagatttgtaagtaggtatgtgcacgagtatgttttggcgtagatagaaggttcatggaggagaaagtggtacgcatatatgttgtagtcgtgattgcgttaagttgaatgaaagagtctcaagtgcatgtcgtgatatggttgtttgagataaaaaaattataagcgttgcacgaaatgaagttttgatcgggtaaatagaaaaattaatttggtttgtagagaggtgatgacatgtcatagatagtcatcacttcctctatatctttgagtcggg

SEQ ID NO: 184813 - DNA, 1225 bp, Zea Mays
aactaaggatgttagagcttaactcatggcaaatcttaagattgctgcaagcacaagtgtctgctttctgccttgaagattgtattaatgtggagagcagtattgaacttgacatccttcctgaatctattgagcaaaagttatgttttttactttctaaagccatttcttctcatcagtcttcacgtcttcatcgaggttctgatttcaagtgagcctctgcagacaatctccttaagctgttatatctttgttcatcattgcttaaaaagaatttgtttcaggtctgttgaagccgggtactatgggactgctgcagataactaccacaccttcttaagaaatgcgagtgagtggttgtctcacagagcaaccgatgtaattttactatctttgcagatttgtaccgcagtttcaagtagctttctgctaggttttcctttcttaagaatgacttgttttcttttattacagaaaccattatatttacttgtctctgcaatcatgttgatgacaatgtcatgccttttcctcatgggtactgtgtcttacctatttaagggacgatctctgagtcaagctgatcaccattcagagtcatatttggatcaacgctggcaccttgatgaggttctcgttcttgctgggatgtttctctatgtcatcagtcttggctcaagttcttttgtggaagaagagcagtatacatggcacttcctcacttctactctgtatctaatatttctggccaaggcagttcagtcaatgctaaaaggatcaaatccaacacttggtcataaagcagaaggaaatagctttgacagaagtagctttttctatgctacaagctatgaattaacaccaggcaagagaaatggttacaagttatgtactatccttgttgttcttgttgctggaagagttataagagcttggcatcaaggtggaatcaactgggttcactttcctgatatttccaagttactggcgcaagctgacccttctgttgtaaagtctcttcagattatctcagttcttgcagttgtggtattgttttcaatttcactcactttactcagagcaagaccagagtttgttataggagtatggttgacccacatttcttgtggatttttggtcctactgcatgtttggggaaatcatattggtacttcattaccaattaaccataccacagcatcggtagctcgacaattttatgtca

SEQ ID NO: 184814 - DNA, 418 bp, Zea Mays
tttgttatgcttttaattattatcatatgcacccttgacacctctatatcctacattgatgtttgtctcatacctgccctttaaaatcgcccctcttccgtctcatacaaaaaataatcttggtcgtatcctcttctttggctcgcgagtttgtaacctcatcctttgttatgttttgtttcttattgcctttatccttctcttctctcaatcttaccttggcgattatgctatgttcgctatctgaaacctccaatctcccacctatgttcaagcatggtctcttacttatctcacccgtggttatattctatactttgcctcttgcaagacttatcttatccctattcttgattgtacctagattcccattttttcacatttacctcttcctttatatccttgcctattatctcct

SEQ ID NO: 184815 - DNA, 338 bp, Zea Mays
ccggcatcacccatccaaagagagcagcgagagcctccacctgggcacgagacaagggtgcttggaagagcttcgcataagcatccagattttgttggctgaattgttcactgtccggctccgcgaggatggacttcatgattgaccttcttgctttgggaatatgctgaacttgctccactcccaaccccgcaacgcgccgacttcggcgtatcgcgtccggaagggaagtgggctgcctccgtcgtcggcctccccccactgccttcggaagaggaagaacggcgccaacagccttagaaactcgacggagaaaatcctgctgtcctggcgaccca

SEQ ID NO: 184816 - DNA, 356 bp, Zea Mays
ggatcgtgatttcggcggccttaacataattcgtagatgttctgctcctgttagcttcgttgagctgtttggtcggaataggtagtgaatcatttgctttggattattatgagaagtgtgaatcgagaattggatcttatgatggtgtcccgtgtatgtgtcctactgtctactgtaatttaacaggctgttgttccctagcagtactctcggcggctcagcgtgtttggtcagaggaatgtctccatccagaattatctgatctagaaactgaacctccttgtgctgtttggtttgtcatctgtcaccgtgtagtactcctgtggtagttattccgcaggatgagttcattctgc

SEQ ID NO: 184817 - DNA, 336 bp, Zea Mays
gttggatctgaatgttccttgctgccggtgcaagtccatcatggaagtcttcttaaatctttccattgacatgagttgatcaatcatgaactgtcaagcatctcgattctgctgctctcgtctgagcaactaatggacacacgacatatttgttctctgtacggtggagtttgccagcaagttcaggatcagcatgtgacctcagaggttgttgtataaggggatttggtcccatcttcgccggtttcttggactcactgcttatctttgttgatctccttggagtccaggcttttcactgaaatttccaattcttctcgcttcttggaggaagga

SEQ ID NO: 184818 - DNA, 276 bp, Zea Mays
tcattgttgggattcaaccgctcaacttatgcgggtgtctcgaggtgtggtttttgatgagtctcgtcctttttaccctcctattgtttccccaacatctcttgttgacccacgtcctcttgtttatatctaatcctgttatgatccgtgtgttgtttcccgcttgacgccttctattgtgctttcttccgtgtcttctttggagtcttcggctgtggtatcagactacactgaagcctcctgtgacacatgtctatacacgatgtcatctcttga

SEQ ID NO: 184819 - DNA, 898 bp, Zea Mays
cggattttgtcttaactttgaagacccatttacatgtgataggaacaacatgtgagggtaaaggaacaatatcccatgtaccagtgcattcaagagcagccaattcatcaatcatagctagctgccactcaagaatctcagaagcttcctgataagtagtgggttcaaaaattgcaacagcagttcgtgggaaaccataacgatctggaggttcaatagtaccacgatcacgaagacgatatccctgattaaaagcatcattagacttagagttgttagtacaagaatcaggtacatgatcagtaccaggaccagccgtagggatagagcgggaacgacgaatgtaggtttggatgataggtggtttggaagaggaagaggtggatgacgtggaggtggaaggtggtgttatgggaatgagaacatcagatgtggatgtagaaggtgatggttcagatgcaggaatggaaggaagacacatgaaagaagtagattctgtgggataataggtggagtgagtagactggttgtgaaagaaggggcgattttcattgaaactcacatctctagaaatccgaatatgacgagtagatggatcataacaacgatagcctttgtgttcaggactgtatccaaggaatacacactctacagattgagcagtcaatttagtccgctcacgtggtggtaacaagacatagcatatacatccaaacacacaaagatgatcatatcgtggagaagtcccaaaaagaacttcacccgatgatttaccagaaagtttagataaaggttgtctattaatgagatacacggcagtggaaacaacttcactccaaaagtgtgaaggcacaaaagaagatatcaaaagagtacgagcactctcaataatatgacg

SEQ ID NO: 184820 - DNA, 1209 bp, Zea Mays
cgactcctccgccacagctccaaccaaagcaaagcggttttcaaggtacggaccgtaccacgcaaaaaccccaaccgcatttcccttcccctatgcttgctactacccccgctttcttcctcgctggatccgcggaccagcgcaaccccgtaaagctagtagtgccttccgtcgagtctgacaggcatggtctcggatcctttttctgttctgtttttttattcactctgcgtcttcgacggacggataatcgatcatgctccagcgcttgttactgatgatcagattggttcgtgtgctgatgatgcgagggcatgattttccctcatactcctacccgataacgcgatgtagccttcagccatctatgcacttatgcagggcattgattctgaaagaaaaaagatcgtcaacagaacgggctcccttttgaacggagggggaggggggtttcgtttcgtttcgtttcccttccccgagtaaaacatcgagtcggttcctcccgcgcgtcacccgcttcattgatttcgcatgtgtcgtctttgcccaatcactattgccttcatgtacatctggcttgctcagtgccttcattaatttcgcgctgtggtcccactatccaaattcgtttttgcattattattatcatcactaacttgtgcacaatggtcaatggatcactcccaaaacattttgcaccgccatttaaaaaataaataaagcctcggactctcggtaagggtcatctgttcactttgatatctggatatacgtacctcattatgtggctatgttttctgttgtgatttacttacgatggatcagaggaaacaagtctgaaacacatactactacgcagcaagtgagagtagctgactcaaatgatatgaaagtaccaaattgtaatatgttatttcagtatttgcgttactgtcatttgatatttgctttcgtgtttagaaaacataaacagttctggttcctgaagaacgttacgttttcttgactcatgcatcaacatgcaactggacagtgcagtacatttattcctttccttttgtttctcagcttgccagtgtcagtgcaatggtgactagcaaatcctcgtggagccaggttgtaaaaaataccaggccgacaaacctgtccgttgctgcaagaaacctccaaccacaggaccttggagccgtgatatttggttgcacaaac

SEQ ID NO: 184821 - DNA, 293 bp, Zea Mays
ggtgcccaggcgagagcctaggctcgggccaaacattgaggtcaaggacttcgccagacacgaatctccaaggggccctctgcaaaagctatgcccccctagagcgaggggtaccaagacgcgaaggctatgagacaacgaaggctctagggaagaagacccatccgggtcaccggcccactgtggggctcccagagggcccatttgtcagtgtaactagagggtaggattgtgtgtgcatgtgtccaaaaggtgtcgcagtgttgtaattatcccgttgcacgaaatattct

SEQ ID NO: 184822 - DNA, 680 bp, Zea Mays
gggaccatgagattgatagtgaacttgagacacctgtcagagatcatatcaagtttccaaagattgaaaaaccacttcaatttgtaaagaagggatctagcttgttgcctaagaagaaaaagaggacttacagtgagacagttcttgagcaatctcccaaagatactgtgaaaaggaaaagcaaggttcacatgctagaaagggaacaaaacaaacaagacaccagagaagtttctgcaaagagtttcactcaaaaccttgttgacacacctgtaaagaaaaaagccaagttgaaagagaaaatacagttgccgtatgtggccaaggatcattttataagcagtccaaaatctgtgaaagagcaagaacaagagttggtacctttgcccttatctgccatcaggaagagttcatttcctaaagtggacagtgaaactgaaaagaggtgagtcacttgtgtataaagtacttggggaatgaaatctccagatcatatggtatgtaactttatgtgcaaaaattgctagcattcatgaatttcctacaaccagacctgatgaggcattgaaattttgtttgtttgtcaggtctgatgaggcattggattttttttgtttatcatgttgcagaatcctctcctatactcatgttttaatcttaatgccatgtatccacattct

SEQ ID NO: 184823 - DNA, 307 bp, Zea Mays
cacttctagaaaccccttgtccttatttactagtttttattatcgaacgcttggaatcctataacttacaatccagtcttattggttccactatatcctttaacggctagtatttggacgaagcttcctttgtaatgggatattgaactgaggatagagcgtggacataatgtttggtttcgatgaggctaagtactccaaactttcatttggcagtggtcgttctgggttcatgtatatgataccaaataccagttttgaatttttaatctcatatatgcaggtatttgcttaatgctcaccttct

SEQ ID NO: 184824 - DNA, 352 bp, Zea Mays
gcgaggtactctctgagacaaagatacgctacccataagtctagaagctgttgtacacggtagtcctagctcggcggaggttgcgtcactatttcgaatctcatcctgtgacagtggtgtcgtccttccctctagtggaaatcgtccagagtagggaagcctcgggcagggtagccaagtgggtggtaaaactcctgggagaaactctctcattcgcccccaataaggccatcaagtcctaggccctagcaaactttttagccgaatggaccgatacccagttgctaatgactccaatccaagccgagctatggaccatgtacttcgataggtcgttaatgaaaaccaaggt

SEQ ID NO: 184825 - DNA, 363 bp, Zea Mays
tggatttccaagcaacaggggatgatccaagaagaatacagtaaccagtggtggaacgacgatctgtaggatcactggcccaggtagcatcggagtaagcatgaagctgaagtggggaatttgagtcataaaataaacattgtgtttttgtcccccttaaatatctaaggacacgaagtaagtgcccataaggaactgatgtaggagcagagacaaaccgactcaagatgtgaaccgcatgagcaatatctggcctggtgacagtaagataaactaagctgccaacaagatgtctatatcgagatggatcctccaacggtgtcccatcagtcgaacaaagagataagtgaagatccataggcg

SEQ ID NO: 184826 - DNA, 421 bp, Zea Mays
tggtgacaccatattgcgtacgaacgtaggcaaagaaattggtgagtgtggaaagggtgtcagatttgaggcgtaagggaaacatccataaatgacgggaaaggagataatatgtgaccagaaatattggtgatgggagatgtctagagaccacaatgaattaactgaaaattacaagtagtgtgggaggaggatgcatgaatgggtagacgaacatgacgtcctagctgacaagcatgacaaagatgagtgctagtagttttattacgaggaatagcggatgctcattgatttccaaacttcttgatcttctttctcttcaaccacctcccttggcttcatatcacaaattgctatagccttcatagccagagccgctccttgtctcctgatgacaacacggtggcgaggcagtttgtcc

SEQ ID NO: 184827 - DNA, 2098 bp, Zea Mays
gccaagttcaagctaacactagaagttccatctgacctggtagcattgtccaacatgccagtggctaaggagactgtcagtggacttaccaagactatttattatgaggaatctccacttatgtcaacctatcttgtggctatagttgttggcatctttgattacatagagagttcaacatcagagggtacaagatcagttttcactgtccattattttgacaatttctttcgaaaagcttttctattgttctttccctaattcaatttcacttcatttgtttaattaggaactaaagttcgtgtttatactcaagttggcaagactaatcaaggaaagtttgcactagatgttgctgtaaagtcgctggatttatacaaagagtaagtctgagtctagttttgattctgaaatgtatttataaataatgaggccaattggggctgaagatgtgtttgataattcgagttattaatgtacgtacactgtgatcgggattactaatggcattttctttcctagttattttgccactccttatccattacctaagttggacatgattgctatcccggatttttctgctggggccatggagaactatgggttagttacttaccgagatacagctttgctgtatgatgagctactatcatcagcatccaacaagcaacaggtttttgataatatttaaatcaaatccatttatttcataagctaataattgatgactgttgccaagattgctttgctacaattataaccaagtatatctcctcttttccccttgatatctttacttaggtagcaataactgttgcacatgagttggcgcaccaatggtttggcaatcttgtgactatggaatggtggactcacttgtggctaaatgagggttttgcttcctgggtaatcaatccttccaccattttgttatagtgtatttctgtgtaaagctaattcctttttgtaactcctatgtttcaataggtaagctatttagcagtagaatctttatttcctgaatggaataactggacacaatttcttgatgagacgacctctggcctcagattggatgcacttgcagagtctcatcctatcgaggtattctactattcttcattttcctaatagttattcacttattcttcattataggcccacttcctgttgatggaattggctgcttttcatttttctgcattatattttgtgtaaaagtatttctggtagttctacaactgttgtggtaaaacatttcgctggagatatggatatagactgtaagatacattcaacttaaatagaatcagacacatgacacgtacagtgattgaatcattgctgccctttgatgttattacgattcaatcaatgttctgaaatttagatgaacttttatttgaattatgcatcttaaatgcagcatgcttatgtgtggtaactttggctgtatagcttatgtagtctccaacaggcatggttcttgtgtagtcgtgtacacatacctgatagcaatggaatgttcgcagatgtaggtacatctctttgcctttttaagatgatctgagcgcataagactaaactccagctgcctttctcatctcttcactacagccatcttctccagttgtaccattgccatctctggcagtgttgccagtgtctccttaccaaccacatcatgtcccatctaccatgttggatcgatggcttttttctgacacctctgctgtagagtcttacattacacttttagagaacttcagcaacgtgccgatatattgccaatttcagcattctgtagtgtttctgatttcacaatattagcatgtccatttgccctgtttgttcaggttgaggtaaaccatgctagtgaaattgatgcaatttttgattccataagctatgacaagggtgcatctgttattcgtatgctacaaagttaccttggtgcagagtgttttcaggtatgatgttgtttcttgtacgagttctatcgtattctgtatctttgctggtggagcattgcatcttatcctcccttgcacattattcctttcatttttatcatgaatagagggcaagtacgttg

SEQ ID NO: 184828 - DNA, 681 bp, Zea Mays
gtgctccaccctcctctcctctcccatcgacgcctcatctccaccatgtcaccaacgccgccagccccaagtgaggccgagcttgccgctgctcgtgcttgagaggaggctgtgtaacgcgccaaggagaccgtcgctaagaaggagaaggctgaccttgtagccaatgccgttgccgccaaggctcctgtcgatgcctgtgcctgagtccttgctgcagctaaagccctggagaaggaacaagcagtcgtcgttgccctagagtgtgcggccaccactgctctcaagctagcttagcccccccatcgccttctttttagaggcagttgtgatccatgaggcccccatcgtcgccaacctccatgcacccattgtcggcgtccagaacatccaatcgcttgcctcagtcgttttggaccccctctccaactatacccgacggtggcgattagagaggtgcaccccggctattaatctacaaacctggacgactagatcactatgcggcctaggctgactttgggtgcctgacagcagcagtacaaacaatagcagcaaacttatatacaacaggcgttgttggctactgttgctgccccatatggcttacctcctagtttcatctgtcaccgccctagtgccaaccatgtagtcgcatcctgcactctgcagcaggtcaca

SEQ ID NO: 184829 - DNA, 435 bp, Zea Mays
gaatcagtggtctgcgcacgccgcacggttgaccatcagtgtggaagaatcacacgggagggagatgagagagacgctaccaaaagctgttaccgctctgatttggtaaattttgacaagctgcgcttactagtcgtggatccagaaacagataaggggaggctgaattatggattgatgaggctggagatggccacaatgcgaatgaacggagctaccacagagaggatgcgtgagttgcaaacatgtgtgggtgcgtgccgtgggcatgggtgatgacctgatgggtatgcagcctatgcgcctgctttgtaaccatgggccttcttcttacaactatgcaaaattactacatggtactaagtgctacttgggctgctgccctgccagccccagtcctggatctgcccctggtgcttattggtctcatttggc

SEQ ID NO: 184830 - DNA, 345 bp, Zea Mays
ggcgacgcggccgcgtgtggcacgggcgccgggatcgggggtagggaaagaggaggaatgtcgacgggattgacatcaaggagggaattgaggtcgggcggtggagagggtcagcaagggggaaaacatcctcattgaaaacaacatgatgagagataatgatgcggtgggtgagaagatcgaggcactggtacttgttgtgatcagaggaggtactcgaggaaaaggttgtgactggatcagggcgcaagtttgtggggagtggtgatggaggtggttaggatagcaggccttcgacatttgggtcggcgagtagtgatacattctgtagagcaccagtgggaa

SEQ ID NO: 184831 - DNA, 403 bp, Zea Mays
acctccataggaccaggacgattcaagtcagtctcccggccctcaagatcacgctctaaggtcgacgaggcacgggatgacctcaacccagcatcgggcacgtcagcacaagcctccattgcaccatcatccactggctccgataacaagtcctctgggaccacatcctcaagggtttgatcaaagttggccagagacagctcttgtagaccaatgagggcagacaaagcaggagagggaactccactactctcaccactggcgatgaactgccgactgttctttcgagtcagaggaacctcattctcttccccctcgtcatccacaccgacaacacaagcagcacccccattgggatcagcaacaggtggagcacccacattgggatcagtagcagtttggg

SEQ ID NO: 184832 - DNA, 454 bp, Zea Mays
caaacactacctttccaagcgagaagaatgcctccacgagtgcccacagccggcagggagacaaaatcatcaaagtcaacccccaacatggaccttgttgctgtgcctaggctcaaagtcaggcggcagggccctgtgccgcctcttacggatggtaggctgggcaaacagacagtcaaggggcctggtaagatcagcaagcagcacgctggcgccagcgggttgagccggatgttgaggcatccttgcgtctagagtagaagtgtgtaatgatcccagctcttgtccgtggcgggtcatccggaatggtgcacgatacaaaatcaacggagttcaaagactgaggcggcccggcatcacacccgagtgtcggtgcagcagcacgggcaggcagcccattggggcgagcagacgggctgggggagccaacctctgctagaggccccggcggcga

SEQ ID NO: 184833 - DNA, 342 bp, Zea Mays
aagaaggagagcctgttcgcggatcgcgtgagtcttcatttgttgcgcattgttggttgatgtgtgctgctgtgccatattgctatgtgttcctatttggtgtgctttacaatttcgtttctggggatgggaattttgcaaatcgacgagaaccaggattgctccatagttaatgctgcacaggcaatgaaagctgtcaaaaacttagggtgtgacttgtgagttctgcagatagttgactcctgtagtctttctgattgcattggattttttagggactattcagggtcgtattgatatatgctctagttaccccttttctgtaagaatctattgttattt

SEQ ID NO: 184834 - DNA, 413 bp, Zea Mays
acggaggtgtggtgacatcagcgttggtttaaaaaggatgaaggcacaaaaaggatgtgggctccataggttagtatgggggcttagtagaggggttataaaagaaaggaaaatccttaggtcacatcatgcgaaatacatattcgacgagatagttgaggcattagacaaactagatagcacaacataggcagagtggcatcacgctgatgccagatagctagacatggcagaagaccttgagaggtgcagtgtagagtgggctagagctattggatctgatgaccacgttccaggaagcgagatccttcacagaaacatcgaaagggttaaactccattgaacacgaattgtcagtagtaaagcggtcaaccgaaaggagattttgaatcatattaggtgtcaaaaaaata

SEQ ID NO: 184835 - DNA, 465 bp, Zea Mays
ttaactctatcttaaaattagccagaagaccaccaggagtaccaataatagttattgaagagccctgaatcaatccacatggaagttttaaagcaaacctatcccctaatcttgtggcattcatccgtcggacagaataagggcattgctttcctttgtccttctgctgaatgctgccattaacagaaacaactgaatcatcatatgcaagggctgtattgagttccctccatgcaactccagcttccttgattgcctctactccatctggtaggatatgggcatgcgttaaaaggtgtttcaaatgattccaagaatgtaaagattgaagttctgtatcagagagatttctggtaatggaaaggttggatgccaagagtctggttgatattacttcagaagaaatctgtggattctggattgcaggtgggtttggaacatccaaccaatgtaattctgccgtcc

SEQ ID NO: 184836 - DNA, 398 bp, Zea Mays
caatcatggcaaagaagatggcaagttggtacctgtaattgcttcaaggagctcaaagatagtcgaagaagttggctatagaagaatcaccaatgatgtaggatgtaagagagtaaccctagaaagtggtttgagagttaattcagatatggactatagaagcagagctccagaaagccacgaggtgcagcagcttatacatctgtcagaacctgctggtttacatgggaaatttataagagaatcttcaggtgctggggacaataactgttctggttcaatatgcactgagagtgctgagtttaatgaagttgatatctggtacagggtatctggttttgataaatggaaccctgctgctgcaaggaatccagaatttgccagcatccacagaaatg

SEQ ID NO: 184837 - DNA, 420 bp, Zea Mays
cgcaactttgtccagggcgatctcactgttggtgagtattgtcggaagatgaaaggcttcgctgatgctctctccgacctcgacgcccccgtctccgaccgcattctggtgctcaatgtccttcggggcctgaaccccaagtatgccaatctccggaccatcatcacccgttctgttcccttcccgacttttcacaaagtccgagatgatttggtcttggaagagattgtcgcaggggctgtgcctcctgactctgcggccagcgccctgtacacctccactgcagctccatcggcttcatcaccagcccgtcctcctgcccagggaactcacccacctgcccagggtggtgtgccgggttcgagtgctggtcgtcgcaacaaaaatcgtcgtcacggccatggtcgtggtggtggctca

SEQ ID NO: 184838 - DNA, 705 bp, Zea Mays
aatctccctatccgcagcttccgcttctttgtgacagtaatcttcatatttttgcctgtcatccatgtcagcgaggtcctactttcatttacaatgtggagtagaactgtttgattgtttcttcatgccagttctgttttatagccatcaattcatgaagaccaatgtcatgacatgctttctcaatatctggcatctcaggaatttgtctgatcttttcccaattgatccatttattgtcagcacattacttcttgctatatatattgttgtatagattcatatgctcgttcgaccaaaaacggtcatcgcttgcagttctatcctgtagatacaaatttacgcataccttcccgacactttacagtgtacctaatgaggaccgcatgaagaagaaagttgagaatggaaaattgtcagaaatatttaaaagcaaaattgtttcttcaaaaaaatcaaaaacaaaagatgcaagacttgtgttttgcactccctataggtctagttggttggaaaatcagaaattccacatcttatttattgatgaggcagcatacttaaaagaatgtgaatcattgatccctcttgcaactagtgggataaaacatgtggtgcttgttggggatgacaaacaactacaatcagtggtaaagagcacgatatgtctttattataacttataagaccatttgaatgtatccttga

SEQ ID NO: 184839 - DNA, 349 bp, Zea Mays
gtaaggccaaggaaaccacgcaatgccagcagggattggggctggggccatgcctccactgctgctacctttacggaatccatggcgacaccgtcctcagatatgatgtggccaaggtaggggactgtcggctcgccaaatgagcacttggaccgttcgagggccagcttgtgctctctgagaacctggaatagtggaatatctgtttgacatgttgcaaatttgctgtccaagatgggctgtagactagaatgtcatcaaagaagacgaggacaaatttgcggatgaaagggcgaagaacagaatttatcaatgactgaaaagtggacagtgcattggtgagtccaaa

SEQ ID NO: 184840 - DNA, 377 bp, Zea Mays
aatcaaatggtagtactgttggagttcctactgccaaaggtctttatctcctcactcccacacacaaaaaactgattccatgtttcttgtatctccagtgcatttgttacaaactaacatttttttgggcagaatatgcagatatggtatatgatgtgaagcactggcagaatgaaattgagctcaatgacagattgcagttcttctggatctcacttgagagaatatgtggggcagctaattttggtagtacagtgaagcatgggaaaaagaatcagaagaaaacagctctatccaatctgttcaagactcttgaggaatgtggactatctaagcacaggccaatgagtcatgaggtactttagcgctaaaactaa

SEQ ID NO: 184841 - DNA, 401 bp, Zea Mays
ggcatgcgctctatctcttaattaagcgaaaagaattttacgtacaatcaagggtagcgaaatgtaatgcctacataggacaccgaaaggttaacccacccacgtgacatgacatagtacaaaactaccatgcgtcatcattgtcgagcatggctgcagagccggagcagtggcggctgtgagcaccaaccggtccgctggtcggaggacaccgaccgagtggcatgtgaccatcggatgtacgtggcggggatcatggtggatggtgatagaatagtgcaccgacgacttgtcgcgggagcgggccgagtcatggaatggctcgtcggaggaggggtcctgtggaccaggccacacgccgctggtagatgcgggcgggatcggcgaagtgaatgtaaggg

SEQ ID NO: 184842 - DNA, 354 bp, Zea Mays
ctaaattggtagattcaaagtttcaaacctacatcggctatgctaactttgagaagttttgcatacgagggcactcccaatgcagaaactatctagtagtttccatggcccaagaaactacctatagaaatcatacccaacaatagccctgtttgggacagcttatttctgtagagctttcctgagaagctggctgtctgaagaatctgctagctagataattaggtgtttaacaatcctgattttttgaggagacgattgtcctgagtgtgtaatgtcctgagtgccactggaactaatggtgccttgattaattgctgaatagatacatgttgcatcatgaactagtttttg

SEQ ID NO: 184843 - DNA, 343 bp, Zea Mays
ttcacagaggatgatcaaggcacaatctggttcaagaacaggatttgtgtccctaagattgacagtcttgatgtgaccatattgaaggaagcacatgactcagcttactccatccatcctagtagtaccaagatgtaccaggacctgaagcagaagtattggtggtatggactaaagaaagatgttgcttcacattgctagagggtaaaagttgaacatcaaagacctgccggtttgctgcacccgcttaagatacatgaatggaagtgggaagaaattggtatggacttcatcgtaggtctaccccgcacatctactgggtatgattctatatgggtgattg

SEQ ID NO: 184844 - DNA, 497 bp, Zea Mays
ctggactttccccttgtggctcaagtccgacacctttcccaccctcacccacttcttcacttgggtctccatccagttccgtcgcccggttcgtgcactccagtgtgataacggctatgagttcgacaactccgcctctccatcctttctctcccaccgcatgcagttgcgaccctcgtgcccctacgcttccccccagaacggccgggccaaacagattattcgcaccaccaacaacatgatctattgcctcctctttgaggcatctcttcccgccaactattggacagaggccttgaacactactacccatctcctcaactatcttccctccagggcagtgagccaccccacccccagttcgtcttgtatggcacaaccccctcctatgcccaccttcgtgtctttggttgtacatgctatcccaatacctctgtcactgctcatcataagctctccccccgctccactcgctgcattttcctcggtaactcctc

SEQ ID NO: 184845 - DNA, 383 bp, Zea Mays
gcagagtcgacccattaccgacaatgatggaagaaggtaaagtggggctgtggggatggggtgaagaaacagtaccagggtcaggagtggtgtggtacgaggcgccgcagtcagcaacctagttggtgggagtaacatgagtgggctacgaggacatgtggtggtacgaagagagctatgggaggcacctccacagagacatcgggatgggcgtcgagaccgccagtgacgagcatgagcagtggagacgacaaggcctcgatcgtcatggagacaatctcaaaaccgcggaatacaaacgaccctgtagcttggcggctctcttgaggatggacggaggccgaatggtggtagagctcgacacagtcatggagaactgggtt

SEQ ID NO: 184846 - DNA, 342 bp, Zea Mays
gggtgaacccctttttaaaggcaaatttccccactcgcgccccgaagcgtcacgggcaaggtctcccccgatgcgcaccagggttcccatcctatgacacggggccaggcctcacatgtcatacaagcccgaagcgcgaagaatgcgaatcgtcgcacagggagcatgccaccgccccgcagtagcacgccccttcatcttcgccgcaaccaacggtcaagaaggcgaaccgccgcagaggaagcgtgcaaccgccccgcggttgtgcgccccctcggcttcgctgcagccagcggtccaacctctggcatgggggcccaggcccacatgtcatgcacctgg

SEQ ID NO: 184847 - DNA, 581 bp, Zea Mays
gacacctgtggtgcttggaattgctcgccagaaccgagcggattcggcgaacccgcaccgtgccgcgaacgactacgctcgacctctcaatcaccggtaaatactaccttcgtattttcgcgctagttcgtccttcctcttgcgctggttcagtcgtggtttggtgcaccctgaacacgtatccactacaccggcgaggttggggaatggcgccgccatgtggagacctggccaccgcgtgttggggaattaggcgagggagagagcttgtccgttcgtccaggatcaaacggcgtggattagatgcagctggacggtaggtcgttgtgcgctacgccattggatgtaagttgggcggctcagatctgatggagagcaccgtttcagacagggtagcgtggatcgttcgatttgatcggagggctgtggttggggcacatcttcgttaaacctcgaccacagatctcagatcgtgcgcaccagaacagatcgcgacattttaaaatcgggggccatcggatcgtgatccagtggcccataatgcaccgtaccccttcggttgcgcgttttacagaaaaaac

SEQ ID NO: 184848 - DNA, 654 bp, Zea Mays
cagaagttgcataccgcgcctcatcaaacacctttttgtactcttccacagatccaatctgcctaatctccagtaaggactgcatagcctgtgaatactcctccgacccaaacttcagcatcacagcttcacaaaaattcctcccatgaacatggaccatactgaattttaaaaatctgaaaccacctcttagcattcccctccatgttcaacgatgctgacatcacccaaactgactcaggcactcgatacaaagtgaagtaatccacacactgatcaatccaaatacgaggttccgccccttcaaatttaggaaatggcatacgttgtattggaagttgccctccttcaaaatcctcaacccgccgccctccagtctctctcggacgacccaaaggcacccccgcatacctgcgctgcggacctggaggagcaagaggcggagatgggggaggcccgccgcgatgccgctcactgcgcacagactgcgctgactccatttcccgcgccatctgctcgagacggagttccgccagcgccttctccgcttgatccaactgctgcgcgaagcgaacccgttcttccatcgcctgccgagccacatcagccgccaaccccgcttgcgccagcagctgttgttgaacgtcatccatg

SEQ ID NO: 184849 - DNA, 334 bp, Zea Mays
ggaggaggtaagagacaccattgcttgtctctcgtctgataaggttcctgggcctgatggttttacaggaaaattttacaagacatgttgggacatcattaaagtcgacataatggctgctcttaactccctttaccttggaaatgcctataagcttgatttgctaaactcagcgtatctcattcttctcccgaagagagaggatgctacttcagctggtgatttttggcctattagcttgattcatagttttgctaagttggtcactaagatcctcgctaatcgattggggccatatcttcaggacctggtggcagctaaccagagtgcattt

SEQ ID NO: 184850 - DNA, 372 bp, Zea Mays
tttgccatagctctgattgttttgttccgctacatatcgcttgattatggccttcgtagaaagagcgtaactagaacagatcatgccagtcattcactcgtcaaaacaaaaggtactgaggtaaagaaagtcattcatcagactgaaacggatggaaaaatagattggaggagcaaggttaactcgcctccagttgaagcagcattcgaacagttcacaaggcaccttatctcagaatgggtaacagatctgtggtactcgcgcgtaacacctgacaaggaaggtccagaggaactcatcgatgtagtcaatactgtccttggggagatttcagttcgggcaagaaatgttaaccttatcaatctgctgatc

SEQ ID NO: 184851 - DNA, 310 bp, Zea Mays
cgaatttatacttgctaatctgctatccatacttctaagatgttatcatttaactctgagtatttcacttgattagctaatggtgtaatggaccgggcattgcaacgagcacacaagatatttagtggttctctctcaaacagctattagtgtggcttacttaattttttattgcacacaagaatgcatgctcggctctcctcaccaggcaagaataggcaaagcaagcaaagctacctgtttggttctgttttgtcctatctctcttttcctcttccattgctttggttgaacaccaccaaacagagca

SEQ ID NO: 184852 - DNA, 885 bp, Zea Mays
gttaattgagattagattagattgagttagttacttggggccaagtcttcctatctatataaggatgtgttgtatcttcttaagggggaatcaatcaatgaagaagaattagtccctctaatactctagtctcccccatgctgactccgcccggctatcttctcggcgctatttattcccctatggactaggaatcataacagtgctgatgttgatggggttggaagacatatagacagtactgatgttgtcagagtagaccagagtggtgcggcgcagaggagcttgcagttcttggagtaactggcgcaaccaggtggcgtcagcgacggctttcgccacacctcagtattcagcctcggcgctggatggggagaccgtgtttaacgctcaaaggactaggagatgagactgtcacccaagaacacggcgaagcccgaggtagacttgtgtgtatcaggacaacttgcccaatcaacatcgtagtaaacctctagctcggtctgtgtacaaggtcggatcaacaagccgagacgtagagtgtcatgaacgtaacgaacgatgcgcttcagagcagctagatgaggctcacgaggatcatgcatatgaagacagatctgctgaactacataggcgatggcagacctggtgaagatgaggtaatggagagccctgccaggctatggaaatccacagggtcagccactggatcaccaacagtaccaggcaactttggattgacattaacgggggtggagcagggcttgcactcaaccatgtcgacacagtcgaggatgtcaatcatgtactggcgctgagacatgaacaatccatctgccatgtgttgaacctgcatccttaagaagtgatgaagtttgccgagat

SEQ ID NO: 184853 - DNA, 343 bp, Zea Mays
gcagccggactagcacaacaagtgcgcaaaatcgaagtcttcctcaaaagactatccgtgcaaaagtcgcctaagggtgcagccagactagcacaacaagtgcgcaaaatcgaagtcttcctcaaaagactatccgtgcaaaagttgcctaagggtgcagccggactagcacaacgagtgcgcaaaatcgaaggcacattacatccgtgcaaaagtctacatcgagaaactgtcctcgcaaagaccgactacaggcacagccggaccaacataacaaacgtgctagaccaagtgcgcaacgcccctatgaacatagccgaatgcgcgaaggcgcacagcctca

SEQ ID NO: 184854 - DNA, 1504 bp, Zea Mays
agttgccatgattctaaggtggcttccagaggatatcactattcataatgaagatttggagggtaggttatttttgttttaatttattctttggaacttgaaactagattcattctctggttccaagtttaaaccattaaattagaagaatggaaaacattttctcttctgttattaggttatgctatgtgttctcttctgttaacaacttaacatcgaactagaagaaccaaaaacccttttctcttctgttaggttatgtctcttctgttaacttctttttttggtcacaataggtgataggcggagatctctgttgcgcggccttactgagtcactgtcacaaattctgcctctgttgtattctgtaagtttgcctttacacctttaccatgttcgcatgggagatatggaaacaccgaaatgcctgtgtgtttgagggaagaaggccttctgtccctgctgtttttcaggaagttacttttgaagatgctctttggtgtagggcaggtgccggtgctcttcaggagctcttggcacgccatttcactcctggacactaggatgggttgctagtagtggagtgtagctgtgtggattatgtgggtggtggtttgttggtttggtggtcctgagcccgccatataggtgctcagttcctcggtcaaccattgtacaagggactcaccatttggtagcctcctttatctttctctcttcttaatgaaatgactcgcagatctcctgtgttgttcttaaaaaaatagatgccaatgattctgttgggttgccttggttcatgatattctgaatcatactaaacatgggtatcatgtaatgtcttgttttgtagctacttgagaaacattttggtgctgctttaagtgagcatgcgaagcagcaaatggatttggctaaacaacatgcagggacggtgactgcagttctaaatgctgtcaatgcatatgctgaatgggttcctgtgacagatctagccaaatatggtttaattcacgggtatgtttactggagtgtttgacatccctagttttttaatgggattctcacttgcctcactagttattatgttctgttttgcagatgtgggtccttgctttcttacagcgattttcgcctccacgcttgtgagttttttaaagtgatatgtcagaggtatggagaggctttattcaggctaaaagttaattttactgttttttctctcctgatatgttcttgtttttgtggtgccacctgtctcaggaaaagacctgtggatgtggcagttgctgagtatgatgctgcaatgtgcaacatattccaggtgttgatgaacatttcacaacaatttttgaccagatctggcatgcaacccagttctattgatgagagcgaatatgagtttgcatcatgtgtttgtgagacaatggttgctctaggatcttcaaacatgcaatgcatactagccgatggagccaggactttccagttcttacaacaagtg

SEQ ID NO: 184855 - DNA, 277 bp, Zea Mays
gaacaattacatggtttgtagtgggaagtggcttgagttgtagtagtcttggagagctgaaggaattaaatatcggtggttcgttaatgctaaagcagcttgaaaatgttcctgtagggaggaggagtgcaggagcagccaaccttaagaataagaaggaactgagacaactgtcactagagtggacaagtggtaaggaggagggactacagtgtcatgaggtgctagagggccttgaagctcatgatggactcctggctctaggaatacattacta

SEQ ID NO: 184856 - DNA, 306 bp, Zea Mays
gtcccgttggagtggcgaagacccttgcaaacgctccgaggagagcaaccaagagcgattcttcagtggacaaggcgcacaccgccgggcccgacgtcgtggataggcccgcccatgagatggtgcggcccccacgctggaaggacatgcgccggttggccaggtcccagacaatgggccccaacgcgccgagccatttggtgccgaggacgatgtcgtacccggccaagggcatgacgaacagctccgccgggaatgcaacaccagcgatgagtagtggggctttgcggatgacgccggcgcagg

SEQ ID NO: 184857 - DNA, 357 bp, Zea Mays
gtcgcgagttgttttgttatcctgttgtttttactggttcacattattgttgaattttactagtttttacttgtaaatgttacaaaagatgttacacattttgatttgtggattagggaacatttcatagacactgaacacagattatttatttgatggttggacgtccatgtccttcagccttattgtggagcaaacaatgcatgtttgtatattcccaggcaaacgtcatatattaagcctttgggtgttgagattttccataggaatttctccatctgaaggcgacctcatattccattgcccttggtagcggcgttgctgcaatgaaactttgggactggccatgaggcagac

SEQ ID NO: 184858 - DNA, 414 bp, Zea Mays
ggacagttcaaagcctgtctctggaagcaatggctgacttattggcgcagcccggattacaaccttgttagatattccttcactctgttagttgccttgcttctcggctccattttctggaggataggcaccaacatgtaaattttcttgctttcttcatctttggtcgccagtgccggacttacaaatctaaaagagttggtgtattctattgcagggaagatgcaaccactctcggtatggttattggagcaatgtacactgctgttatgtttatcggcatcaacaattgttcaactgtgcagccagttgtttcaattgaaagaacggtcttctacagagagagggctgctgggatgtactctgctatgccatatgccattgctcaggtaaagaaatgtcgttgaactgtgc

SEQ ID NO: 184859 - DNA, 793 bp, Zea Mays
cactttcaaacatcaaaacccatccggccaccatatgtaacccaaaagttccaagcttcatcggaactgctaaatgtcataccaatttgtggaattcaaaaaggaattgcagcaactatgcggttgtaaataatgcattcagaacacgaccaactggatgttctcatcatttaaagtagaacttcaaccatgcagaaacgaataactaagtaggagtagagcacaaaccttgcaggtgattcctcgagcagctgctgggtgttgtccatcgcaacatcaatagcttgttgggcacctgccggcgtgcttggtgctcttgtggagattgtacaggatctcgggtagactgcacagcgccaactttcttcaccacggacatttttttagtaccagcacagacaccttgctgcctccacaatcaacgaattgagagtgcaggaggacatcagctccagcacgtgcagggcagcacaggtgacggtgccttcatgcttcgtgggaagaggcattggggcaacgaatggaggagcaggcgaggaggtgcacacatggcagaggtggccccggaggttccaaggtgatgcagctctccagcctccctccactccgagcaaagcgaaaagtggtgccaaagcttgtgtttttttgcctccaaaggagcagagaaggtggcgggggcttgtaaaatgtggcacaatgagcatgaggtgctttgcccttcgatttgatatggacgaccaagattgtgagactgctacagttgcagtctctagctactgcaccagatccaggt

SEQ ID NO: 184860 - DNA, 551 bp, Zea Mays
gcacatgtccaccatccgcccgacgctactggaatcctctagaccccactggtggtcgatgccccattcactccccctcccagcacaaccgcgctctgctcgacgctaaggaaggcacacagtcgaaattctatatatacaaagcgggatggaaacatgcgctcccgtgcgtccacgtcaccgtatagtttctcagccgtccgatcttacgctggcggctaccaaacacagcaagttctcatcgcacatgtccaccatccgcccgacgctactggaatcctctagaccccactggtggtcgatgccccattcactccccctcccagcacaaccgcgctctgctcgacgctaaggaaggcacacagtcgaaatagggaaaaaaagaaagtcaccgcgctcttcgtcgccggtgacgctgttggtggtcaccgcaccgtgcaccctgctcctcggcgcgtttgacagcccgaacttcgtttgctctctcatcgtcctcaagcacggcagcgacaagctggtgcatggccagcctcggggcgagattagatgag

SEQ ID NO: 184861 - DNA, 329 bp, Zea Mays
ggcgaggacattttgtggtgcataatgatcgtggatgttggtgaaggtgatggtgtgcttgccccgtttaaactacacctcgagggatgcgttccagaggacattgctgaggtcaagtagccatggcgtgccgaggatgatttcgatgttggtgttgacttaggagagcatcgatctagaatgtctcggtgtcgatgcggagcggatcgttgaagcaattaatcttgttaacgcttgatgaggattgtggtgttgatgcggcgcttcatgagatagcctagtcggacaaagttgatgtcaatgacgttgtgggtggcgcatgtgtcgac

SEQ ID NO: 184862 - DNA, 437 bp, Zea Mays
tctcggcagcatcaaggaacctgtcgtcctcttcatcagcatttgtttcagcaaaccagtcccctttcttcacgccacggtcactgtctgcccgtgtcccagagcacactgaccctgagaacaattgctcctccaatggtattgtgctgaaaatcagtgatatactctctggtgattccttcacaccacaggaggagttaccatcagctagcgttggggtcttgccgtcagatgtgtctcctcctattagcctgtgcacttcaagcaactttggcactccagcaattgtctacaacaatcccagctttgtttctactttcaatggcccatgccaaggcagttcatcagcaaccagcaatggtggtcgttcggctccaaaggaaaagcacaagaggctagggggaatatatcggaaatcatcatcgtgccaaccgaca

SEQ ID NO: 184863 - DNA, 755 bp, Zea Mays
ctctgatcaagtcctagcagtgcgcgaagctgctgagtgtgctgctcgggcaatgatgtctcagctcactggtcctggtgtgaagcttgttcttccgtcacttcttaaggtatcaatatatcttatttgatgctatcaaatcataacatttattgtgtccaaatgttctggagaatacaagtgtccagttcatctagttatatattgaaatctgacaaccacttaacttctgctgaatatttaggccattggcaccacaaactactagtttgttttcattaacttgaaagagcagaacatcttgaggtccatctattacatttttttttaaaaaaatctacacattctggaaatttgttggcttattttcatttgtgctgttcgtacctttatgttagttgtttaaatgaagataaaataggtattcagatactttacaaaattttaagctagtcacattcactttcaaaaagtgtcatacggtgaatttacttagcttgtctaatacaagtttccttgaagcgcatatttggatgaagatcattaatgttggatagattagaataatgggccaaccctagagagggttggctatatagagttcatacacgggcctcatgggcctagccacatgggcctaatccatatactctaacaattaacatggtttttccagggtctagaagataaagcatggcgtactaagcaaagcagcgttcaacttcttggtgccatggcatattgtgctcctcagc

SEQ ID NO: 184864 - DNA, 321 bp, Zea Mays
cgtgaacagggaagagatccctgtgtacccactgtacagagatcctgtgagtgtatattccacttgattccattctttattgttttatttttctctcccagcgctaatgccatattgttaacccaaatttctgccctcttctctgcaaacaggtacatgattttggtttttttcgctatgatccaggtgccattaagtttcttaagtatgatgagattccgctggcacctgaagcagcatcagtcgggctagaaatccgggttgtcggaaatgacagcggggaaaaggttccatgaattatatcttaaattctgctgttat

SEQ ID NO: 184865 - DNA, 452 bp, Zea Mays
gggaaggaagcctaacttggataagatccgaaataagacagggctttagggttattgatgggccttagagatagaagcccaccaaaacgcctatataatgaggggtaggggtgcagttaagagaaccctaatttgccaccagtaaatgaacagtcgttcgcccctcgcctagtcgccatcgcgaacctagcagttcggaacacggcgcttcctccctatacgtgtggatacctcgaaggtgctgcatctagagcaataggaagaaccgcgcgaggatgtgaaggtcaccggcgactgcatagcactgctcgacgcgtttgtctacatcgagacgtcttcctctgccctatacgtctagtggtaattccataatctataaccgcagtagttcctggttttatggggttgaaaattttgttttgcgctagtgtagcctccccataatccttcag

SEQ ID NO: 184866 - DNA, 436 bp, Zea Mays
gaaaaatatgttggtgcaaggacacaggaccttgcaagtggtgttctaggtcctcaaagcacaagcaaaatgcctgtttttagaaatcatgtagataccttaaatgggaccctggacgttctaaaaggccatacagatcatgtttctcgaaaatattctgccagccatgatcagactgatgttgctgaagtcttattgaccagtcctttgagaggaaatcagtctgtggacgagctcgattcatcaaaagttgacagatggcaacatcaggagaaggatagaccctcaggtagtcatatcacagcagctggttacttaaatgccgatgccaagctcaacaatcatgagttcaatccgaagcctcgtagtgattccatgtctaactacatcaagaacacaaataactataaaaagacctctcggaattcatttttac

SEQ ID NO: 184867 - DNA, 373 bp, Zea Mays
tggctctcttgttattctaatgctctacaaaactgatactttttttagcacaactacaaactattttcctaaaccgtgcaatgaacgtgtccatctacaattctcttggactggctcgattacacatggtactaagataagggatgttcaaaaaccataaatacctaccaatctttttcttttgataaaatcttgtaggaagtgaaaacctgatatgcacttgtggctccagcagaaatcaactccctcgagttgtcaaaactcgaaatgcataaataaacagtcagaagtcccacgtttagcttctcaggcaagtcagcagcaccattctacagaactccaatgatgcacagttctagaaaaattaaacata

SEQ ID NO: 184868 - DNA, 855 bp, Zea Mays
tgatgtcttctccaatcaagaaaaggtagtatgtactgtacctactagcgttttagcttgactaaaggtcaggtccactttcttcacagcatgatatcttcgcgcaagtcatgaacccactggtggatgacttcctgggcggaaagagtggccttctggttgcaatgggtcccacaggctctggaaagactcacaccatctttggttccccaaggaatcctggtatactacccctcacgctgaggagaatcttcaacgcacaaggcgaaagcaaggtttccaggaaaccaacgcggtaaaatatgttgttttacatgcagtccttagttacatttgcaagctatggtatggaaggaaccttatcttgacgtttctttttctatgacaataacaggtcatttttcttctcgatgtttgagatattttctgagggaaaaggggaacgcattcttgacttactgtctgatactgtggagtgtgttcttcagcagtcagtgattaaaggtcttcaagaggtagttcccaaccaaacaccttgaacactcttgataggactgagtatcccttgactgtgatttcagtttgaattgcatttattgttgtcacctcctgagaactccatgggtgggaaggtgatgtgcaagtcttgtgagaaatttgcatttcttgctgttatttggaatcgtgatatcacatgagtgtcctggaagctggaaagtacatgtcgttgaattgcatcgtggaagagactgatatgactgatatatctgtagcagacaataagttgttaacttaaatttgttctgcaggtttccctttcaaatcctgcagatgctgagagcttggtttcacgtg

SEQ ID NO: 184869 - DNA, 358 bp, Zea Mays
gcgaaattagacgcgttggtggaaagaactgaatggcctctagatgtgatgggtatactagtgctattgcctactataatagaagatgaagatggaggcaagcgctgcaggagtataccattggatgacgacatgtgcgaagaggcgccgctgtccacgattcagagagatgcctctgcatggacatttgctgcaggacgacaactaggtcggcctgatcccattgttggctcgaaaggcttggaggggcgaaagccttgtgggccggcgacggtgcgcccatcataccatggtgatgccagccctgactgccccaaggctagtcgctggactggccaccggaggtgctgtggtcgcg

SEQ ID NO: 184870 - DNA, 539 bp, Zea Mays
ggcatctcaagcaccgttgtctctttattttgtaatattctaggctgttgacattttcactgcttcattatcatctccggagaaaaggttgtatgtagcaggagaaattgctagaatattatgtgttccttaccgaggagaaacagtgcaacctactgaaaagcccgtcatccaggcatgtgtatattcatttcttatctgaaaatatcttgtttaatggatctgtatatgttcaaaccgtttgtaatttacaggctcgacatatggaattgcaagttggtagagttacattgccatgctgcgacaaacctgtaaataatcattggtttacttaatacatctctttgtcaagctttcatttgtttgctgactcctgcttcaaaatatgcagacattaatccagaaagggccttttgctgatattcggcgtgcattagaaattcttgaaagggttgcatgttctataaaattcaatgagcccattcttcttgttggtgaaactggtactgggaagaccactactgtgcagaatcttgctg

SEQ ID NO: 184871 - DNA, 397 bp, Zea Mays
gtttctacagatgtctgataacaggcgcagaggtgcgaggcatgcccagccggaacaacaggcaccccaggaggatgcagcccaacagcagcagttgccaccgccacccccgatgacagtcgagcagatgttcatgatgcaaactcaagcagttcaggcaattggtcagaccttagcagcgatgcagcaggtgcagcagcagccacccccacctcagcctccagtgcaagttcagatgccacaagtgcctagagacaagcgggtagagttcatgaggggccatccccctgtctttgcccactctgttgatcccatggacgcggaagattggctacataccgtggagcgggcagaggtgttgtatggttcccgacagttgaggggagcagcacagtct

SEQ ID NO: 184872 - DNA, 387 bp, Zea Mays
ttaatgtgtcctgtccactccgctggcaggcggcgtccaggccatcctgcaggcggcgtgcctgtccagtccattgtcaaacagtatgcccgtgctgtgaggtgcactgtgtccatcatcacttatacgttgccagtgaagcttccgctgcacgccgatactacgcagatcacggatgtcagggcgcaagaagattgctccagcaatgaacattagttgctccaagtattacatccgttatgttcctgggcccacatgtcggggctcagtacctttatacgtgcccccttagctataaaaggggaggcatgcaacgttacaacacaggctgaaggcagactcaagctcactcaagcacacttagacgctcacaagttcatacaagct

SEQ ID NO: 184873 - DNA, 961 bp, Zea Mays
gtgcattgttgatctcatgatagatcctggtactcttatttcatcagatggtgctgacctgggtagagaattggaagacagcttagtcgtagataatcaacatgttaacaaagatgacactagcactcagttactttcctctttcagtgaagcttcaagttccatgcacagttcatttgaaaatggatcgcttgaaaaaggatttatttgcaatgctgggcattttggtccatatgaagcaacaactgcccatagtgacaatgatgtgcttgggtctggggtatcaagttcatttgatgagctatcggtcagcacatatgcatgtgaaaacatacctattattcatgaatctaatacagatcataccatgactgaaaaaagcaaagataagtcgatcacatcaaataattcgtcatcatgttcgcctccatcttctgagataggcagtactcctgctgtacgaaggaaaaaggtcaaagacgtctcggagtatatgattagtgctgcaaaagagaaccctcagatagcagaaaggatccatgctgtgttacttgaaagtggtgttgtgccaccacctgacttgttttcagaagaatctaaggaacaaccaaaggacctgattgtttacgacacatctctgtttcaaacaacagatgaaatgataaggacaatgaatgagcttgaatccacagcacacgatggttgtgctggtcttggtccttcattgccacctgatcctggacatgagctccaaacaaagattgttccttatcggatgcctcctgacctcaagcctgtccagggattaggtgtttaccataagtttgatttccgggataacatcaatccctctatacctctctatgaaccaagtccagctcctcaggaaaatccattacaacttataaagcaaatgcctgttacagctgctgctgttgcaacagctgcagtggttgcatct

SEQ ID NO: 184874 - DNA, 308 bp, Zea Mays
cgaactgagcagtacatgagaatataaagacctcaggatgcacggtggagcactcactccacgtctgctgatctaacggcctcgatccgtatgatacggccatgcgcacgacgcgcctaggcacgcaagacgcggccagcagtaggaccaagtcaccagtgctcctaacaacagcatgcagcctcgcgacgtacgaggcaagctatggactacacgctgcatgcaccttgactcattagacgctcacacgtgcaacacagcgcacacccatgcactaactgctcctatgatcgctgcacgattcagac

SEQ ID NO: 184875 - DNA, 1107 bp, Zea Mays
aatggcacagagttacatggcaatggtgcagtgctgaaaagagttgaaatgccccaggttagagaggtgtatgttagtttaaatgtttatttttggtactggctgccatggaaacttgtaatgcttgctttcttcactaggatttgggagcgatttcagccaaggaggtgccgctgcatgagggcaaggaggtgatacttgtggatgataatgacagcgggcaggaagatgatgcagagggtaaggtggatgagaacacacctcgtgttgggctgagattcaaaacttatgatgacgctctcaagtactataaacaatatgctgaggattctgggttttcagcaatcattctgaagtcgtcgtatttaaagtcaggggtgtgccgaaggttggtgattggatgtagtcgagctgggagagggagagcaaatgcgtgctatctatcaagagagtcgaccaagataaattgtccagcaaggatatctttgaagttaaggcaagatagatggcttcatattgatgatgctaagctcgagcacaaccatccatacaaccagtccactacatcacttattaattgttataaaaaactaacagatgccaagaatggggtatctgcctcacgattgaagggtcgcaggaacattccagctgaaaaagagcaagggaacttcacggagataggaaggcttaaatttggggaaggagacgatgaatatatccagaagttttttgggaatatgcagaacaagaatccttacttcttctacttagtagatttggataatcagggacgtttgaggaacttattctggagtgatgctaggtcacgggcagcgaatgattactttggtcatgatgttgtttactttgacacctcatacttgacagagaaatatgatttgccacttgttttcttcactgggatgaataatcatggtcagcctgttctgtttggtactgctttactgtcagatctaagtgttgatagttatgcttggttacttagagcatttttatcatgtatgaagggtctctgcccaaaggcaatcatcactgaacattacaatgctattatggatgctgttcaagaagttctccctgaag

SEQ ID NO: 184876 - DNA, 758 bp, Zea Mays
ttgagccgtgctatgtcagccggctttacatgaataggcacaaaactatctcgctctacactgataaaatcatatcctgacaaatctcttcctgtcaaacaccgcatattaccgtgttgccattccattggcgtttccatgagtgcgatacacatagcggtgtctgcttcaatcacctccacctgatcacctacccattgaaccaaaaaactgatgcaaagtagatggcacacaaccattagcatgtatccagtctcgccctagcaaaacattatacctccctttcacatccaccacgaaaaaggccgttgggacagttttgctgcccactgtgagttcaacagacataattccttttgcttgtgatggctcccctgaaaacccacttagattcatattcgtcttaattagctcactctctttgtatcctaacttagaaaacacggatagcggcatcacattcacacctgctcccccgtcgaccaacatgccccccattggcttcccatcaatgtgaccacgaacatataatggttttagatgagatccctgttcacttgttttttcaaacacagcacgttcagcccccaatgttagctcagccacatctccctctcctgctctgaactcattaggtaaaacaaacaccatgtttatatccatgtccccttgtgcttcagtgctttcttctttatcggaaccactgctgttgtcatcatctttttcctccctggccaatcgtttctccctccacgttt

SEQ ID NO: 184877 - DNA, 463 bp, Zea Mays
ctacttctgctgggcacgacaacaggtgtaactaacatttcggaaacctgaccaataccatactggtcaagaaaacagcagctactcaccaattaacctctaagtaccagtagtaaagaaagtatcggacttcgccgacaaagaccgggatcatgatcaacatgaacggcggccgaggcagctggttcacccggcatcctccactcgggcttcggtacatttgcgactgggcccacgcattcagtcgaagtcgtcgcatggtgaacaggtggatgccattcctctctcgcctgttcaggttgtagagatggtggcgcccatgtctccggaactagtggaggttgaaccagttgatgctccggctctcccggtagcttcggttgaggagccggaggcgcctggacacccaccctatttggccttgggactggcagtggattcgggtgagaacttccaatgtgac

SEQ ID NO: 184878 - DNA, 543 bp, Zea Mays
gtggggtaaaggtgaactcagttagcatttctaagtcatttcagcatcctataaaaaatagggaacccaagagttcttgcaagaaaaagggaaaacaagaggtctcagtcttactggataagaaaagtaagaagggaaacagaaagtcagttttggaaatacacaaaaaggatatggcaaacagtgttcaaactcaaagcatttgtaaggatcagtcaaaagcaggttctagcacagcaccgaatacaacagatatgaggtgtaaattaaattcttgttgcaaatcaaagcatgttaccttttctgatggcgctgacatatttggaaggaccgcacatctacctgcagataatacaaagcaaccacaatctgtacagacattccagcaagccactcaggaaggtcgtgaccaccgtgatagagatgatcaacagttggtttatcaacaagctgaagctatatcccggactgttgagattaccaattctttgtctgaaaatgtagtactagctggtgtttgccgtacaatcccacttaccaaac

SEQ ID NO: 184879 - DNA, 334 bp, Zea Mays
cactgggtcgcgctgcggaattccgtgtaggcgaactatctcctcgaagaagaccttggcgactccttctgccgagtaggggtggacgagggggatgaagtggccgtacttggagaagtgtggtccacaaaggtgaggatgacagacttgcctttggcagtccatcgttgaagtccggcgcgatgtcggtccaaaccagttttggaactggaaggagaagcaggaggccgcctgacagcatgtggtcggttttgtagcgctggcatgtgaggtaccccttgacgaattcctgcactgcagcacgaaggttaggggcgtagaagtcacggcagag

SEQ ID NO: 184880 - DNA, 485 bp, Zea Mays
tgatggaccagactgactcttcaatgaaagctggtacttataatcttgtcctattcctaccaattagttaatacttatcatattagaaagaaagcagagactatgctgggtggatacacgcataagtccttggttttatcatttctaatttcctcttgagggggcgcggtgcagtgtttcactattggtttcttgccgaaggcatttcatgggcctccactagttgggttcccatgatgaccaatctttgttatcatatcgcttgttagctatgctcggaacattttttaatgtccttattgcttcagtattctgttactcataataaatgcatttttaaccttcatcgttctatccttttttcttaaccatttttcagctgggaacatgctccatctcattatcgaagcctgtatctcgagaaagttgattgatacatctgcttacttatggcatggttatgttgtaccatctaggactttaaa

SEQ ID NO: 184881 - DNA, 369 bp, Zea Mays
tacacgttccgggcacaaggcatgatgtaccacaatatcaagtcattcggtaaggaaggtgggtcggagcataaacatctagagctttacttttacgatgatgatcccagtctcgagcatcggtaccgtaagtgtcgtgaagagcagcttcagaaagacaaagaggttattaaacagatagttggcatactccatggaaacccgtactccgagcaccttaggagcatgggccatgttgagaaccttgatgactatcatatcacattgaaccttgaccaaactttgaaccagaagacatataacacgcctctcacttcggaggtggccgctgtatggatcgaggggagcaaacaacgaggccagttcagc

SEQ ID NO: 184882 - DNA, 289 bp, Zea Mays
gaaaatgaaacattactcaaggacaatgaacgactcaatgctgaaaatgattccttgatgaagagcagggaaggagctaatagtcaggttgccgctttaaggaagtctttggaagctgcacacaaggatataaaagacaaggaaaaaatggtaatattctcttagaatcatccagatgatcaacaatttttctgaatcattctaaccttcatttgttcaaagattcaagacttgaggcagtcactggatgtccagaggaaggagctgaatgactgcagagctgaaatca

SEQ ID NO: 184883 - DNA, 1099 bp, Zea Mays
tggggaagacgcatatgttctctaagggccacccgctcggcttcgtgcccgactaccggcacagggtggaggcaatgggggagttcaagcggctcgggagccccgtgagggtcgactcggggagctactgcccgccgcccaagaggaagtgcgtcagcgtgaattctgaggagagggaatgcgcctccgggttcagcttgacccgcgtgccccgggaggtgttctcactgcccagtatgactgctctagacaagaaggacgtggagatgaggctccaccatgagcttgcgcaggtgaaggacctccagattagactgttttcaggagggcataatgttgggagcatgaatggtgcgacggtcgcgtcagctcccggaagcgatatgctgcccaagaaaaaagccgagaagctcaggcgaagcaattcagtgcagacggataggggagctccaccacctatggccacagctgtcgccccacctgtttccagctctattaactacacgtcctcgtttaaacaatgtgccaaccttctcaagtcccttatgagccatgtatgggcaagcccgtttcttgttccagttgacattgtgaagttgaacatccctgactactttcaaatagtcaagcagcccatggatttgggtacgatccagaaaaggatgaaggcaggcatgtactctacacctccggaatttgctgcagatgtgaggctcactttcagcaacgctatgaactataacccagctaacaatgatgttcatttaatggccaaaactttgagcaagaactttgagagccgatggaagcttattgagaagaagctccctaaaccagatgagaagcctcctcagccagatgagaagcctcctcaaccagttgagaagcctcctgtgaggaagcccacaaaaaagaattcaactaagagagtttccattgagaaagaagacctcactaagaaaaaaccctcaaagaaaagtgtacctaagcagtacatctttcggggagaagattcagctgacagtccagttctgcaaccaaagaaaaggaaaacctctcctttggtacaagatgctcctttggtaggggatattgttcc

SEQ ID NO: 184884 - DNA, 319 bp, Zea Mays
ttcagtccagtatcaacatctgtcatggctagagtttcgactgcgcgggtgggtgggttagatatactgtgtgtgtattaatgtattgtgtgtgattgtccctgtattgggcataggtccacttacctcttataatacatcacccaaccctggtttggggttagggtttccacttctatcagacaatatcagtgagagtcccatagagaaaaacattcttgacgtccaactaatgaactagccaagaatgggagagcctgaggatgacacagatggtagaaggcttcacgacgggactgaatgtctcatcgtagtcaac

SEQ ID NO: 184885 - DNA, 756 bp, Zea Mays
gttgaaaaacaaagattccaagttgtttggtcaacttaaagattataataccaaacatcgtgttctattaacggggaccccagtccaggttacttcttcatatacattgtcatgcggtcatgcctgagtttttttttggaaaaactatacatttaactttaccaatacctacctgccaaattggaagtattcctactactgtactacaatatttgcttagaaattcaacagtgtcttgtaccttctagctctcattgttggcatttttttgcttgttaagtttttgttttacttgctaatttcggaatccgggtattcaagtaatgttcatactatcttcctcgtcaaacagatcaggacacaacaatctaattagtatatttgttgaatccacaatatgcttatgtgaaataagaaacgacacttttacacaactggtgtattttggatgctatttatgaatcatgtctgcaaattaagctcagcaacttcacatgagtgttgatcctatactaggtgacgtcatcattttatttgagaccacatttgttagttattcttattcaattcatttgttattaataatatggtcattgtctagtttcgtttcactattcttactatgctgttcgttgtactagtgtttgttgcatcccgaagatttttttgcaagtgttttaacttgatgttctattttcctttttttcagaataatcttgatgagcttttcatgcttatgcacttccttgagggtga

SEQ ID NO: 184886 - DNA, 443 bp, Zea Mays
ctttacaccgtgccgtcgtgactcctctaggccatcccatcgtcgacggggagcttgccacgccattagccacgatttcaccgcgacgtcttcttccttatctccggccacctccgctagccgcttaaattaaagcgccaccgcctcggggctctataaattgaccccgccgtgagcttcaccacatcctcacgcattcagccaccactaatcgctagccgtccttcgctagaactcgcgaattttggatttcccccaaatctattttccgtcgccgtgaatcaagctcgccgtggtcagcccgtttcaggtccaatctcaccctcggttcccttgtttcaacgtccttgcttcctcttgatgcttgccgagccattgaattgaactaagggctctctggtcgccgggaacacgaccatatagccgctatgcttacggccaac

SEQ ID NO: 184887 - DNA, 614 bp, Zea Mays
gcttgtcaattctttagagctaaaagagattcctttgatcggtagaagattcacttggtcaaatcagagggaagagcctactcttgtgaaattggaccatgttttctgcactgcggactgggaggattattttccagattgttctcttcacagtaatgctactactgtttcggatcgctgtcccctaactcttagagttagagagggggtttggggaagagaagatttcacttcgagagtttttggcctaagttccctggttttttggaggtggtgtctgccttgtggaatctacctttgtaggattcttgccccttggagaggccatctctgaagtttaaaagattagccaagtgtttgcaatcctgggggcataaagaggtgggtaatgtcaatatctagttgggtcttgctcgtgaggtgttgcatagactggaaatggcgcaagatatcagatctttgtccagggaggagttttggttatggagacagctgaaacaacattgtctggtgcttgcgtctttgcaaaggacggttgcacgtctaaggtcccgaattcaatttctgaaaggagatgccaatactcaattctttcaccgccaggcttgttaccg

SEQ ID NO: 184888 - DNA, 280 bp, Zea Mays
ccagaagttggagcaatacaatcagatcctggaggtcagttgtctcatgcatatactattcttctcttcttgtgctttttaggaggcatttagcattatcttatctatgctctccacatttattttccaatcttctgaatgttctacagtccattcttattttcttctatagggtgttattgacacattgagaagtctatccaaacctggtggtacccatgagaatactttgcttttggtaatgggtgatcatggtcaaaccctgaatggtgaccatgga

SEQ ID NO: 184889 - DNA, 271 bp, Zea Mays
gcgcaacagacacaattatgactctgtaattggggtacacgataagtccacacaacgtgcgcaacaggcgcaattgtggctcgatgatcacggcagacagacagtgcctacagggcatgcgaaaaatacgcgactcggcgatggcggtctgactcaacgggagcgatccgattaatggagagcgcgacatagcaatcacatgacgcagccaagttcatacgacacaaataacgtgtcgtgttgccagggcccaaccaatgctcgccaatgc

SEQ ID NO: 184890 - DNA, 351 bp, Zea Mays
ggatattacgacgagggacctttacgaccggatcgagttcagcgacgtcgacggcggtgcgtggaagcaggggtgggaggtcaagtacaggggcgacgagtgggataccgagaagctcaaggtcttcgtcgcgccgcactcgcacaacgaccccgggtggatccgcaccgtcgaggagtactaccagcgccagtcgcgccacatcctcgataccatcgtcgagtccctctccaaggtcttcctagtgttctcgccactccagatttgctttcgggcgttggtgctcttctccttttgaccatcgtcaggattctgctatggtataggattcgcggaggaagttcatatggg

SEQ ID NO: 184891 - DNA, 325 bp, Zea Mays
cgaagactgatgcttacagatctgacttgtgcttctgtagcaagtttgacgttccaccctcagaggacgatttcaggaaccactgctcactgatgaagcagtttgcggcaaaagatcctgtcttagcaaaatcagaggtatcttttccattcttgttatcgaaattgtcaattgtgtttgttagcataacacaattgtgtctaccatgagcatgaaatgatctacaagttatgaggggttgacaacataataacctaaggtggcattgtaaattagaaaaaagtgacacccatgtcgagttgtagagagttaactatgtaatcac

SEQ ID NO: 184892 - DNA, 552 bp, Zea Mays
cctgtacacggcagagacggtggcccaggcattcttcaccgacattgtgcgcctccacggcgttccgcagtccatcgtctccgaccgcgaccccgtgttcacctcgacgttctggcaggagctcatgaggcttatgggtactaagtttcacatgacgtccgcttttcatccccagtcggacggccagacggaagccgccaaccgagtcatagtgatgtacctgcgctgcttcactggagattgcccccgccaatggctgcgctggttgccgtgggctgagtacacctacaacaccgcgtaccagacttcgcttcgggacacaccgtttcgggtggtgtatggccgagagccaccttccatccgctcttatgagctgggggagacgagggtggcagccgtcgcccgggacatggaggctcgggaggccttcctggaggaggtctggtaccgcctagagcaggcccaggcgacccagaagctttactacgatcggcaccaccgtcaagtctcctaccagccgggggattgggccctccttcgtcttcggcagcg

SEQ ID NO: 184893 - DNA, 412 bp, Zea Mays
caaattgagttacttaaataagttagataatgttggcaacataaattaggccctaattctataaacatatcttaccctaaattaatacctaggactaactcgtccataaacacaacctaacctacatcactagacattggctgcctagtccatttatcccaaaagcaaagtaaaactctatccaaatctacctacctcgtgtaccccggctatcctaactatatgtccttagccaatgttcttaactcggatgacaactccaagaataaaggccaaagaagaccaaccacgtcaaagaaggataagcatcaactcaagtcttcgaagagcaagctggatcactagacgaatcatgatccactgtccaggatggagtcattcattaccataattctggttatcccaacctatc

SEQ ID NO: 184894 - DNA, 396 bp, Zea Mays
ggcactcttcgataggatgtggggtccgcacggtcgggaggcggttaaggagcggtctgaccgggcgatagagcaggtaaaggttatcttttgttttgtgtggttgtgtgggtatgtgtggttttgctgaatgagtgtgctgttgctgcagatggcgcgtgccgaggatgtcgaggaccttggagatctggtcggcgcgccgcccgaggctgaggtcaacccggtgccgcctttgagtgccggtgaaggctcctcggctgcacccatgcctaccgtggccggtgaaggccctttgccagcccctgcgccgacagccgaagatccctcgaaggtggtggctgagccggcagccgaagaccccatggccgcggccgagccttcacaggtggctgagta

SEQ ID NO: 184895 - DNA, 496 bp, Zea Mays
ggcagctgttaacataccttctcaggatttctcctgcggtgccatatctagtgaagatccaacacaagggccagcagatcatgtgaacagtaaagatgcacctatagtgaactgtggtaaagttcatgtatcgagggagagtaatgatgatgagcagtcgaatggtttacaatccagggacaccagcattattaattccaatgtgtcaagaagaccgtcgggccaatttaactcccagaatgaggttcttgaggaaagtgtttcgcttaatgaaggaagtcaagacaaccaaagttttagtggcgctcctaagaagtttttaaagaagacatcacatgggacaacaaataccgaggaagagatttcaggtcccaagattctctcttgttcagtgcagaggtctgtctttgtcaaatgtgccttcattgacgatataaaacgcttttagatctccactgtgatttattgtgattgaatactaacatagaatgcatag

SEQ ID NO: 184896 - DNA, 397 bp, Zea Mays
tctctgcgcggttcgagaaaaaaatgcaatgtggtcacacacgcaccaacacactcacacattttaattaagttcccacaaaaaaacttccattatatagtagtgcatgcacaattttctatatgttgttcctagctgtgtactagtatctttttggtttctagatatgttcgataatggatgattaatattttaatccaaactcagtcgaccaataaatcaaaaggtacctatgctaatgggtgtgaaagtaatgtagatttgaaggagtagtagatttaattgatagagaggaaatacatgtacatatatagaggaggtcatgagtgttagagagatatgccacataattagatgattgattgatatgcaggaggggttacatatatagagagta

SEQ ID NO: 184897 - DNA, 328 bp, Zea Mays
aaactatgtcatcgtcggaatgactgatgaccacgtcggcgctcttagagctgatagccgagtgtcttgtgacattgccagcgttttctagagatagccgccgagcgacggatgacaacgtggacgctttagagatagccgccgagcgactggggacatcgtcggcgctttagagataaacgccgagcgactgagggcatcatcggcactttagaggtaaatgtcgagcgactgaggacatcatcggcactttagaggtaaatgccgagcgactggtgacaacatcggtgttttagaaataacagccgagttagaacgggccgtgtcg

SEQ ID NO: 184898 - DNA, 332 bp, Zea Mays
aaattgttgtagaaacatttgtaacgctcctagtatgtcacttcttggcagtttggcataaatcattgaatattagctggtaccagtctatctcgtggaaacgatacatttcctcagttaaaagaacctcatggttagttattccccagctggcagtagggaacaacaacctattgcacagtatcaggaagaaggatctgctgcttagatcatcgtcaaaccctttccttaaacgatcttgaagagctgcaacactaaaatcttcttttgataaaccaagtttagcccttaaattgtttgcagcaacagcttcatcaatgcctaatgccgtt

SEQ ID NO: 184899 - DNA, 433 bp, Zea Mays
gggatatgaccaactactagactagaagctgaaatctaagataggcacaaggcttattatatcattctcctccttgtgtagtgacttctgaggaatttgaaccatctcaattctagcgcgaaggtcctgaaacttgacccttccaagtgacttggtaagaaaatcagcgagttggtcctgagtgctgatgtagttggcactaacaatctccttgtccaagcaactcctaatgaagtggtacttgacctggatgtgcttgttgcgctaatggggttcttcaccggctaaggcaaatttgttgtccatccgtctaccaacggtgaccgactcggcaggtggtggctggttgcggtcatcgacaaccttaaggaggcacatcatgtcctcggtcgtcagctcgacgaggttcaatagtgtttcgcttgccaaggtg

SEQ ID NO: 184900 - DNA, 731 bp, Zea Mays
ggtccctgaccttggagccctcttgaccaatcgggtcttggggcccgacgcccttcatgtgggaagcaagtttcacccctcgaccaagtatgggagtttccgcaggctaaggaatattggctggacctatccttggggcatgatgactccgaaaagtactgttagtaccacgtcgttctctactccagacaactttgtggtactggtggtctagataaggctttcgtccatcacgacattgcagttaaggaggtgcacggttgccacgacatatttaatcggcatactcaagaccactattcgatacctgccatcgaccctgtagcctcgtttgaacgtgccagagtaccgacaagcattatgaagtacatgctgctacttcgagtaccaagtgcgtcatacccaacggtgcaagctccagtacttgccacaatgataagaggtatttgccactgcaacacgagctcgacactgtgacatattcatgatgagtcaccgtttatgacttcacgtctaccgacaagataatggtagttgagcctttgctaggcagggcccattgcttagtagacttgtatcactctctcctccctttgtctataaaagggaggggtataacaacgtagaaaaggcttcacttttacattaggcttttactttcaaacttatagtaggtcgaacccagtcaactctgatgttctaagagcatctccaacaaggtgcctcaaaat

SEQ ID NO: 184901 - DNA, 459 bp, Zea Mays
ctttggcactcatcttcaactcaagtgctgttcaatggacagccagaagggctcattcatcatcgtcgaggtttaaggcaaggtgaccctttatcaccgatgctttttattcttgttatgggcatacttggtaagccttttgctatagttgagatggaggggctgttaaagtccatggctaatcggcctctgcatcatcgggtctctctttatgccaacgatgtagttctgttcatcagtccggcggtggaggatatttctttgactttgagcatccttcagctttttggtgaagcttggggactgcggaacaatgtgcaaaaatctaatgtttttccaatatgatgtgatgatgatgctctggcggtggtgcaaagcctgctgccatgcggtgtcacctttccatgtgtctatcttggtctttccttgtcccatcgtaagatatccaagaatcaggcc

SEQ ID NO: 184902 - DNA, 508 bp, Zea Mays
gtttcacactcgtggagagtcgccgcacacagaagcagagacgccgcctggagaagtcgtttggtgttcaagctctggagacctttaaaggacggtgcttcaagtgcctctcacctcatcaccgggttgccctctgccgttccatcatccgctgcctcctttgccatacacctgggcatacttcctacacttgtccgcgtcgcctccagccttaccgacagcaaccttcctttccaccggtctgctcgcgcatggctggacgtctgtgtgctcctgttcatcggctgcctcctgtccatgcggcgcagtgctctgttgatgctgaggggccactcccagatgtgagtcgtggtagaaggcgtcgcctggagtccgacatcgctgttgatgctggtgatgatgtctgcacggagccacagtttgctcctacccggatcatcccttggtctccaagtttcaaccagaggactgaagtgcttgatcgtgccattgttctcacggtaactgt

SEQ ID NO: 184903 - DNA, 463 bp, Zea Mays
tcagcagtagtagtagccagacgaagttttgcttcagtactagatctagatacaacaacttgcttcttggatttccaagcaacagggaatgatccaagaagaatacagtaaccagtaatggagcgacgatctgtaggatcactggcccaggtagcatcagagtaagcatgaagctgaagtggggaatttgagtcataaaataaacattgtgtttttgtcccccgtaaatatcttagcacacaaagtaagtgtccataatgaactgatgtaggagcagagacaaactgactcaagatgtgaaccgcatgagcaatatttggcctgttgacagtaaggtaaactaagctgccaacaagatgtctatatcgagatggatcctccaaaggtgtcccatcagtcggacgaagagataagtgaagatccataggcgtggcaacagtgcgagtatcactaataccagaac

SEQ ID NO: 184904 - DNA, 1776 bp, Zea Mays
tggcaatatgtcaattttcttttggcagttagtcggtcactctgtgtggattttttgttcacaaatgattttaaggctgttaagcaattttttagtcggcttctcattcatactgaactgtacatgtgcaacatgtttgcagctgaattttttcatgaccttcacgaagaggtaatggccactgcttctagaggacatggtttattgatccggttgcagcagttagaggcagaattttcaatggttgaaaaggctattgtatctcagacggggcactcaaattacccacatgatgatggttagctaaaatagctttgcatacctccttgctaatttctttagttgtgattttattttgtttttaaaaatgtcgtggcccaccacaattgttcacattggataagtatggagatgttgtcttttgtgaacatttactatttaaatgttttctgcaattgaacaataggattattcttcagatttgatgttgctgctggtgctggagcctcaaaaagaacctgtgaagctggttgctactgttcaacagttcagaattaaaatagttgttactgtacaactgcattattgcaccccttcttgtcgtagcctctacatgaggtgagcccttcttgtcgtagcctctacatgaggtgagtttcaaagttggtgtatgaactgatgaaattagcgataatcaatgttcacatgtgctattgagttatttttgcacaccgtttggcagttatcatgcttattactatcctacaaaattattatcccatcttttgtatttatgccagatcgaagctaactgcctggggagcacaaaagcgaatgaatcatgctaataacaggttgtattttggcagttctcatctggacttccacctagaccaactgcatgacatgtagaataccaaaattataaccaggttgatagatttcagaagtatgctaataacagggaagttattcaaaatataagtaaaaacaagaagcaagactgcttgagcattactgtccataaatggattacattttggatacacaatgaaagcactgctaaccatttaagtattttttgtgcattgatagtattacctttataccagcatatatgagagataatttgggcagtgtaacaccaccgaatgttttttgtattaagattaacacctcaggcatgccatactttgacttcataccaaacacatccataatcttttagtattgacaacataataagaccacatgactgagaaagattgaagttaagctctgcaaccattatttatccatttactgcatcaaaataatggagaaaattcggttcaatgtaccactaggggaactcaaatgtgataaatggtctatgagaaatattttggctcaaatcatatctattatacacctatacaaattttgaatatgcgactgttgtactaatgtgatgttttacgtgcattgtccaaaactgctgtaatgtgatgatttactatgaagcctagctgctattattcccttgttagtagtaatgcatacctcatcatactaattttcattccagacttccagttagacatgtatcatatgcatgcttgtatgagggacacatttcttggtcagttttttcagaaacatgagaggattagtttcttctttaattgtgtacacttggattgcatcttagcaattttatgtctcagtgatagttttcctaataataaaatcaatacaattcatagacaatgctacttgctttgtctgttagaggtg

SEQ ID NO: 184905 - DNA, 307 bp, Zea Mays
tctcgatgtacttttgggcagcttcaacaccatagttccgtgctatcaaatccagatggctagcataatcacgttcttcaaaatttaatagttttcttctttcgatccactccacaaactgcagaaattcagaaataattaccaaaaaaatatgtgcatttgtgctacccagttctatggatttaaggtgtcatagcacatgcggatggaggtggaatgtgccaaaagaatgtctacgagataaaatacaccaaaattattaattgacaatttcatgtccctcagctttctgtccactcgttgcctg

SEQ ID NO: 184906 - DNA, 615 bp, Zea Mays
gccctgctgcctccgacggcccagcaacagtaggctttctacgctgctccagtctccatcgctcctcaccaggcgctgctggcccaccagacccagcaatacgttcatggtgctcttcaaggacagggaggcgccccactgcagcacactctgcagaccggccctctgcagggaagcgctccctagtctccctacggcatgctggcacagccgaccactccatcttgggacgctcagtcccttacatccgctttcagtactgtgtccctgactccgcctcagcagactaactggtacttcgacaccggtgctacctcccacatgacctccaacgccgataccctatccaatacttcaactccctctcttactgcaccttcctccattattgtcggtgatggctcgcttcttcctatcatttccactggctccgctactttacatggttctttacatctcaacaatgttcttgtgtcacctaaacttattaagaacctaatttccgttcgccagtttactaccgataataactgttccattgaatttgatccctctggttgctctgtgaaggatctactatctcgaaacgtgatcgtcaggtgcaatagctccggg

SEQ ID NO: 184907 - DNA, 774 bp, Zea Mays
tctccatcaagctggtagagcatgtttttgaaaaccttgacgacatcaggattatgagacacataaacaaatgccccacagccaaattgccctttaatcttctcatacacaagattagcaagagtagtcttgcctaaccctccaaagccagcaatagacagtacaactggctgcttggatgcctccttgtcgccctccatgagccttctcacaaggtcactgctcttctcttcggcgccaacaagttctgtcgcctttctgtaaagagccgacagccgcaggttgtcgatgcttctgccaacaggcttggaaggaaccaaatcaaccttgtacctgtcacgccgttcactcacatcctttatgcggctcctgatctccttgatgtctatgccgatgctgtgttgaatcctgccccttgtcagcaggtggaggcttctatcaatgaatcccttgaaactatgtggcttgccatcgccaactcgcaccatgaatctgtcgatgctgtcctcgaggtcgtaggacagctctctcacctcccttgtccagagcttgacttggatgtcaggtgggtggtcgatgggtgcctcggagaccttgatgagagcagcctccatgctcttgagctcagcctccaggaacatgatctcacccctcaccttcttctgcaggttatactcctccttgatcaggttggccagcttgggcaagagagtgcccatcgccccggtgactatctccgccatggttgctcagtcagagctcttaccgaccagc

SEQ ID NO: 184908 - DNA, 322 bp, Zea Mays
gttgattttactttctaactggaatgacaatacttatatatgtttcttctcagctgtcttcccaagtttatatacttttcagtttgcgggttcatctttctccgtgtttattatggttgtcaaactaatagaatgtatggattcctggcacaacctcgcttcgccagccaagtattgcaatatttacttatgtgttttagattcacctattttactgctttattatgtctgactgtatcttggaacgcaagagatttcatcgctgactgatcctgccaaggtggcaataaataagaaaataagaggaactgattgttgtgtc

SEQ ID NO: 184909 - DNA, 1109 bp, Zea Mays
cctgacttccctacaggagggacaatcctgggaaatcaagggtatttattctcttttttctttggtcttgtctttctttttgactttgcgctaacttgtgtacccatccctcctcttaattagtattttggaagcatataaatctggacgtggccgcattgttgtgaggggaaagactgacatcgaaacaattgacgagaaaagcaagcgcacagctattattattaaagaggtatgagttaaagattttgttttggagtagtgtctgacatctctactactgtttgttctggcaattctctatacctacttagaagcaggagggcacgaacttactaatttatacatttctgcgcagattccataccaaactaacaaagctactcttgtacaaaagatagctgagcttgttgaagataaggtaagtttatttggagcagacttaattgtgtggttggtcttaacctgagtctattctgtgataagtttgatattttgctagcggcatgatggaaacattaagaattccgacaattgttgtgtttttatttgcaggtattggaaggtataagtgatattagggatgaaagtgaccgcactggaatgcgtgtagtaattgaggttcacaccaccatcttttatttctatctgtagtctagggattttgactcttgttttttatgtgtacttattttccttgtacgctgttccagctgaaaagaagtgcagatcctgctgttgtcctgaacaacttgtatcgtcatacagctctgcagtctagctttagctgcaacatggtggcgtaagtacgcttaaagtcttaaaccatttgtgcacaacaataacaacaaaacctttacaatcaaagaaaacaatgaaggccctaagcaagtcaggctagtctcgtttagccatttctacagtttagtaatttcattacatttagttttgtgtcttacagcaaataggaaaacaagttattcattttcttgattcttgatgttgctctttttctcccaaaaggacatgacggtgaaaagagaagtctcttctcatttcattcaggcgtggtctttgattttgttatcctcttttctatgagattaata

SEQ ID NO: 184910 - DNA, 318 bp, Zea Mays
cgcgaacagtgcagtctacagtgcaaaacaatattttgggtgaccatatgtgtaacttgctggacacggtcttagttttgagaatttagatgataccggataccccaattactcataaacaaccggtagtttcttatttcatgcctactggtcacacagtgtttctactttatccgagttcactaatttttttctcgaacgcgcaatagcactgtgcatcattattttaagaggaagaaagcaaaaatatttacaaggaggccatgcagagcaaggccggacagaaaaataaaaaccacctagaaaaaggagaaagga

SEQ ID NO: 184911 - DNA, 278 bp, Zea Mays
tggggatgcacagattaaacaccttatgctgatattatctgctgttgttctatggattgaacctcctgatgtaatcacagcatcaatccgaaatgggggaagtgaaaggttctctcaggatccatctttgcaatcttgatttaacccgagaaaaaacttgagaaatgctgatgagcgagatattcattgtgttgcagtgagttcatagatggttgccatgccttgctttcaatcgcatctttaactactggctcactttttgacaacctcctaaaatc

SEQ ID NO: 184912 - DNA, 273 bp, Zea Mays
tgctctttgtcttggttagggatgtccttaacattatggtgcagcgtgcctcagaggaagggattctccagcctctttcttcaagattcctacatcaccggatatctttatatgttacagttttttgtatcactgataagtcaaattcgcaagccaatcatgaatagcttgcatttttagaattgtttaacaacttgcagtcttgcttatactgctacatgtgaatacatgctatgtatagttccttgcattagctgttctctgacatccttc

SEQ ID NO: 184913 - DNA, 630 bp, Zea Mays
tgaattcgaagaggcgagattttcatctctggagggttttaaaggtttaatagataactgcattgatgaaaccttggtgtcacagggtattgctcagatgaaggctagacatcaagggttgaaatcagatccaacaatcatagataagatatgtgctatcctagaaggcttgctagatgtccgctacagtgacgtctgggacagatcatttcatgtaatttcagtggcatttgacaaactaggtatgtgtttcagtacctcagcatatcctcccacatgtatatgattatgttaatgcatttcattctgcatcatgtcagttatgatggtgacaatagatcattgtttttgttatctatagcttagctgtattggagatttggggtttctagtcttatctggtcacagctcacacaggcaaccattttttttattcttgggctccgatacttgtagaatcaaactgacttgctatgttcatttttggatgaatttgattattttatttcttttacttctgctagttagatacttgttattaagggtcacgaattcctgagctgagatctataacattttaaaacaggagagttttcagctgatctattgcccgaagcagtcaggaacttg

SEQ ID NO: 184914 - DNA, 1396 bp, Zea Mays
gtcggaggaggatctggcgctgaaggagcagctggagctctacgtcgtgcgggcgcaggatgcggatccgggcgtgcagaagctcgcgctcgagagcatgaggtactgcccgcttcgcaaatccgcccgattcaggtctagggttgcgtggccccaagggtaactcagcttttgtggtggtcctcgtgtgatattagttgtgggtttaagtttgtcatctttgtgaagatttggttgagcttgagcgtcgtggtgctgtatgtttcttattgcctatatagtgtgtagagattaagacgagttttcctgtgtatgacaatgataattgagtgttccagctgcactcctgtagttctggacttctggtgcaaccaacgtcttatttcttgacccctttgctgccactaaaactgatctgtttcaggcaggagattcgctctgccacgagctcaatgacttcagttccaaagccgctgaaattcctccgcccacactttggaactctcaagtcctatttcgaaacaatgccagagtccgagctcaaggtatctgtgatcacttcgggccacccagctgaggtatgttgtatattggtttggcacagtgttgatgccggcatcttattgttttgcagaagtacatggctgacatactgtcagtgttagctttaacaatgtccgttgaaggagaaagagtatgtgcccaccacaatagttatcttcatattgccattattttttttttgtttaacaaaaaatcaaaccttcagctgttccgtgaatctggaattgagacatcatcttgtcgcaggagagtctgaaataccgtttgctgggttctgaaggtgatattggttcatggggtcatgaatatgtgaggtatggttgaactgaaataatatgtttcctgtctgctacactgtttttcctggttccttcaatcagtgaagtctaaatttttgtatcgtgctgtattgccaatgctactcatgctacgttatgcaaacacaataagaagttggtaagcatttattggactaatatatcacactatatcatgaaacaataagtgatcttatacaagtatatgctgtttacaaacttggtcacatcctgttcaaataacaacagagcatagggatgattgatgattcttttttgtacttggttttcactcaggattttttttttgcatagagtaacctcttcctgaaatgctgttgattcagctgtgtacttgttgggaagtttattttacctgtttgatatgctatttttttaaatatagatacactgtttgcattcaatttctttgcaaaactgttggattttacatgaataactgccctatgcagaaatttggccggtgagattgcacaagaattccaaaagcgtca

SEQ ID NO: 184915 - DNA, 645 bp, Zea Mays
ctggagccgccgtcctggcctcagggaatctgaagagactgggcggctaattaatattggcttcagggccttaaacagctgttggactaccctgagcagatttaagttgatcgtctgattgcccactaggacgattaatcactctatatcgcgattaggctgacgataaggccgatcagttcctctgatcgaatcgacacctctgatcgagtactggtagccgatcagaccgactaatcgcggttagttggaggatatgtaatcactgctccctccaatactatttcttaggccggtgcagtttgagaaatttccctcttgttaggcgtcttctaggaaccaaagcaggcattaatggccacatggaaaccaaactgttggctgcaactggacactagcatttttttgtgatgtgctgagtagcaaccacatgcatgtatgcatgcatgatgcatccaaggagtgaatgcagtgaaacaggaatccaacatagggctgtgaccttgcaagtatgagctcacaatactgcgccatttaatgcctcttggtctatggtgtttccgtgatatctggaatttgagcccctgctcctaagaaacggtgctggagggagtaattacctttgccttcacattttatccaaac

SEQ ID NO: 184916 - DNA, 273 bp, Zea Mays
tgtttcggcggacgacaacacagctgaggcccggtgacctggcttcacctttgagctggctctaccactagacatgggcccaaagcccaaggctgctagggctagtttaaaatatttttggaccacttttaagggaattgttgtagaaagctaaaatctacccctaataattttatgatgcccttaaaactaactaaactaacttttaagagttattttctagagagctcttggagatactccatacatccaaacactatttagaagttttcc

SEQ ID NO: 184917 - DNA, 306 bp, Zea Mays
gcggcagacgatgtggaatggtgtagagatccccgttgctattgcaccgaaggaggactgttttggtttagagatccttaacagaaaaactagaagcgtcaaactcaatagaacagttattgtcgcgagtaagctgtcgaacagataacaaattacgagcaagctgaggagcgacaagaacattattaagatgaaaatagcgatcagctataggtaagagagatgtgccacggccagatgaagggatggactgcccgttcccgaccgtaacggagcacggtggggaaggtaacgggaaaggagtat

SEQ ID NO: 184918 - DNA, 312 bp, Zea Mays
ctcgtaacgtctcctccctgcccgactcctcctcccccacaaggttcggctacccggcggggcggcgcgttctctgtccggttcctgcgtcggcggccgggcggatgtccctgttccggcggctgttttaccggcggccgcccgatgggctcgtcgagatctccggcaacatcctcggtgcgttcgctttcttggcccagtactcggtaatcttgctattttagctgggtgcgtttgtgcgaacctgctcgctcgcgctgggcttctttgttggacctgttcgtcgggggtttcttggaagtaacgcgtccc

SEQ ID NO: 184919 - DNA, 420 bp, Zea Mays
aaaattgtagcccaatcatagaagaacaattttgctgaagagggcaagccatgttcttgtgggtaatttggagataatcatgctcaaactttggctgtcaggctgcttaagtctgaaaatcagactgacagtgggcggacactgacttcaaactcaattctgagcatgatccaatgaaaatctaccttgggctgctatggcaaagttatagctggttggtagcactccacttttgctgcagagggtcggacctggtaccatagaaaatctggagaaaaagagctatgaagttgctctgtcaggcatgtatcaagaaactgaaactgaactcctgatggtacagtgacccgagtggatcagaactccagcatagcctgctcgccgccagcaaccctccctgcgctaagagttgcgtcgccg

SEQ ID NO: 184920 - DNA, 290 bp, Zea Mays
cccgtactacaaggctacaaacaatgaaacagtggcaaaagaagttgagttcaaaatcctgagtaaggcaatccagagacttcactcgtaaatttcaggccatggaaagctagttccaggcttcaacaggggcagagcaaaagaacaggtcctgcctctcctgaaactttggccggttttaatatgggcaaccgcaaaaagaaggataccaattcacagatctctggccccctctcgataaagttgccgtcaaataaacagaagcaccgcaagggcaaggcgagtttaca

SEQ ID NO: 184921 - DNA, 449 bp, Zea Mays
gaggcagtcctttctagtgggctgaagaagcgcactcgtcgaggacagaggaggaggaaggttgctggtgttgtttctggtcaggtggcatctgatcattcgcctggagggcctgctcgtattgtgaagttccttcgtcgctccagggagccctatttaataagtcaaccttccagttaggtaatctgtcagcaatcttatccaccaggggccagagttgttggttggataatctatgaagggatagaggaaggcccagatatttgcaggggaaggaggcaatatcacaaggtaacatatgctggacgtccaagatagtctcctcagagcaccttatagggtaaatattggatttatgagtattgttatgaagcccagaggcatctccaaagagttcaagaatatccagagtaatggagatatccgactgaatggggtgcaggaacaag

SEQ ID NO: 184922 - DNA, 333 bp, Zea Mays
attcgaatctagtgcccccatattgattgagtgcaattcataacatggtatacagagtcaaaaattaaggttaaagttattcctcttttcctaatcgttccactctcacatcgcttggcggctttgtccatcgccttgcggctctacacatctttacagttggctactttggcctggtggcgctcatcttcgcggccgctcactagagtttggtcatctgttgcgacgacccgtctgccgatgctcgctcctgtccgcctggctgccccttgctcgtgcgcccacccactagcacatgtagcaaccacgtgtcaatgtccactcctgttggct

SEQ ID NO: 184923 - DNA, 352 bp, Zea Mays
aattagagttccaaaagggatatcaccgtgtcagaccaaccattgctgtcctcccttcaccttctatgctagtcgggtaatgtatcttttattttccatgaattgttttatcctgcttaagcatatgtatttgcatgagttactgatgcaagcattaaaactgcagttaccaggatgattggttgaaggcctcggtgaatagtcttaaaacatgggagaaagctccttttgaaccttatgccttgccgaagcctgtaagattagtttggcagtgttctgtcactaccttcttttgctcctttcctttcatgctgcttctggggaattcctcctctccaaacagggtctaact

SEQ ID NO: 184924 - DNA, 486 bp, Zea Mays
cgccggccaccacggccaccttccctgctgccgtagaagaacatgagacgtaccctcccatggtgtcatcctctctattcccacttttccccttcgccgcctccacctcctctgctccccccgccgaatcccaatggctttcaaaccctagcttctccttcgatgcctcctccctgaacatcccggctaccacctcatcgtcgctcccgtcgccgcagagccactcgtccgatgaggacacgccgctgcaggccgctcctgcgaaatacgagctggtgccttcttcgccgtcctccgacgaggagagggggtcgcggaggaagagaagtgggaggaggaaacggaagcgcgagaaggagcgctatgatggggcagcgacatcgcggaaggctgggattcgtgcctgggctggattggagacgaagccagccaaggattactatgtcgacgcgaagggcgaccatgataacctggcttttggatccc

SEQ ID NO: 184925 - DNA, 273 bp, Zea Mays
cggcccaacttatctgcagccactcgacccagcctcgaattgcttcccagccgacccattattccctcgccttctttccttttcccagtgtgtatgacgcgcgagccccgcctcgtcaactccatcttctccccctgctttcccgataacaaactcggtgtccgtaacaaacgcatccccttggccgatgtggccacctctcgggtatatatgggtgggcagggacaccccttcgatccctcaaacccagtgcctgcatcgtcgccaaaacca

SEQ ID NO: 184926 - DNA, 522 bp, Zea Mays
atcctccaggagctccggctagacgccctcccgatccgtctccccgcagtgacgccgacgtgcgtggaagtgttgcggtgaactgcaggctatgggaccacctttatgtggctgcgctgttgctgggtgacggctggccgggcgcgggcgaatgagagagtcgggcgacgccacgaggccattgatgtgctaacatgcgaatgtcaggtgagtctggaggctagatgtggagagggggtgatgatgtgccacgacgtctcgccgttgctgctccatgccagctgctcaggtcgactagacggccgcctcaccgctgctactccatgctaggtgctcaggtcttcatcagacctttcaccgaaagacagccaacacgtgtgcacagccctcctcttcccttctcgttgtgcgaatccgaggatcaaaccctagcttaagctgttcgccgccgtcccgccgctccacgcgaagtactcaggtcttcgtcgggtctgtagccgaaaaacaaccaacgactatgca

SEQ ID NO: 184927 - DNA, 778 bp, Zea Mays
ctgcgctgttagtgcactgccggctaatagcgatacacttaagcttgtcattgtaccttgcaatctattcacactctctgaaatttctccctttacacattttccagtgacttagtaatttcatgttgcttagtggttcctaactttggtaacccttttaactgacaggcaggactattcccattgctcagatatggctgttcgaggaagcagtgctttcaagctacgtttctatcccaacttagaagtacaaaatattgcacaagaatgggttaaagagagccggaggctgttctatctaagaactgccaacaatgtcacaaataacatctataagggaaacactcctctatggactggaatggtacaaaatgaactctctgaagattgcaggggtttgaactacacttatttgaataatttgagggaacgcgtatcgtccaaatcaattgtaaatagacatggtaataaccgagaactgatcgggcatagtacgataaatcagcatgtgaaatcagtgccagctccagtacgtgttgttaatgatagtgtcaagtgtttcagcatgcctagagcctctaaggtggagattccttggcctgcctattcaccagcggaggatcctttgcttgataaatctaatacagaggtaattttggagcttgaggataaagttcatgatggtgatgacaaaaagaaaaaaactgttgtaaaaaaggtggtttcacctttcccaactaaagcggccttctctgaggaatctttgaaagcacgggag

SEQ ID NO: 184928 - DNA, 419 bp, Zea Mays
tagctcgatcctggttcagtttcatttctgtcatagtttctaaactgttggtcccaacaattgccggctgcaattgctccttggccaaacaaaaacttgcagcaggtataaacagttaaccagtgtgtaacagcgtcggagaccgaggtttcaaggagttagagggcagtacagtacaagtaagctcatgcttttgttctgctagaatgacgtgcctttatgaaccagcaatacaattttaacggttttgtggtttacacttgcatatgtcagtgtaagtagattatacaaaattttctcaaagggctataataaataaagatattgttctgattatacttcaaattacagctggcgaacacatgcaatgtcaagcacacaacaggagaacagaacacatcttagatgaaacagaagat

SEQ ID NO: 184929 - DNA, 375 bp, Zea Mays
gttgaaggacgatgatgatccagtgcaggaggctcgaagaggaggcaatgagcacaatgtcatcaacatacaggaggtgtcgagggggtacacagtgtcactgccacgccagtagataaatagagatgtgtctgacttagcctcaaccaagccaagttagagaagataggtgacaaaccggctgtgccaagcgcgaggggcttgcttcagaccattgagggacttgttgagcttgtagatcatgccagagtgagtagcttcaacaaagtcggtagtagacaatttcagtgagagttccatggacaaaggcattcttgacatctagctgatgtgctggtcaagaacgggagatggctaatgtgagaatgacacgga

SEQ ID NO: 184930 - DNA, 310 bp, Zea Mays
acagcgcactctccatcgcctccgtcgggattttcacttccccgacatgcgccgtgtggtgcaagacttcgtccgggcatgctcgacctgccagcgcaataagtcggaacacctcctgccggctgggttgctgctacccctgccgatcccgacggacgtatggtcggacatcggcctcgatttcatcgaagctctaccgcgtgttcgcggcaagtccgtcatcttgacagtggtggatcgcttcagtaagtacgcacactttattcccctggctcacccgtactccgccgagactgtggcacaggcgttc

SEQ ID NO: 184931 - DNA, 296 bp, Zea Mays
caagtttgcgggaaaacagcatatgtttctcagaacgcatggatccaaacaggaaccgtgcaggacaacattctctttgggtcttcgatggacaggcaaaggtaccaggaaacactcgagcggtgttctttagtgaaggatcttgagatgttgccgtatggagaccgtactcagatcggcgagcggggcataaatcttagcggcggtcagaagcagcgtgttcagcttgctcgtgcattgtaccagaatgcagacatctatctccttgatgaccctttcagcgctgttgatgccca

SEQ ID NO: 184932 - DNA, 466 bp, Zea Mays
atttgtttggctctgtgtctaagtgttttgagtctgatgattctgggagttcgattgcgtggacggaggagtcttcagatgaggacttggattattttgcagcgttagatgtggctgcagcggagccttcgccgcgcgcggagggttccaaggagctcccgggtgcgagtactgggtataggcggcgaagggcaatggcgaaacggagagtgagtggattgtcgcgaagcgataggcgtcatcgtagtgagatggagagtggtcgtcttcgcgtggatgggactggtaagcgagaattgttgtcctcgccgattggggtgagtgtaggtgagggggagctgcgaaatctttttgagggtgaggaattgaggataatgttgttcaactacagggagatgggtatcatcccgaaagttgagccaatgtaatatatgatgccctcgttgtgtgtatgtaaccataattt

SEQ ID NO: 184933 - DNA, 935 bp, Zea Mays
tagcatgctcaggtataaatcatcaacctcaaatgacatgtttcagttgatccagcaattgactgaagataggaaacagttagcatatgaattgtcttcagagatcaaagcacgtgttacagaaagatttgctgccaaagagcaatacaaacaattaaagaaagaattggacaacagaactagaaggctggagaaggagaagagtgaagtacaaactacactggaaggagagatggatagaaggtcagatgattggtctatcaggctatcaagatttcaatctgaagaagagagactacatgaacgggtgagagaacttgcagagcagaatgtgtcatttcagagagaagttacttctcttggagcaactaaggctgaagctttaatgaaagctgcgagtttggaaacgcaaaatagcaaactaaatgacgatctagagaaactaaaaaatgagcatgagaaactgcattattcctcaacagatttgcaggctcgctttgctgagattgtagaggaaagggaccacatccgagaatatttgaaggccaaggagggagagaacaaagcattgcacaaagtaattgcaagactacaaacaacatgtaatgagcaggaaagaacaatcacaggcatgagacaaggatgcatagacgaattaggtaggaaatttgttgagtacagcaccaatgataaaacgagaaaattacaaatggaacttattagactgactggggtggagcaaaagttgagaggtgaaattcgatcttgtaatcttgaagtaaaatctctcagacaagagaacattgcactcttaaatcgtttacaaggtgctggaaatggagcaagcttctcctcgattcgacttgatcaggagcttcaagctagggtggacaacctgcaaatgcaaggcttgtcactacttgataagattagcc

SEQ ID NO: 184934 - DNA, 334 bp, Zea Mays
ttgctgcttcctgggatcaaccggttcagtcttcttgccctctggagagggtgtcgatgaagcttaaaagattggcgcgaaggttgcagtcctgggggcatagtgcggttggaaatgtcaattctcagctggggctggctcgcgaggtgctgcacaggttggagatggcgcaggacagcaggccgttgtcctcagatgagctatggttgctgcagaaattgaaacaacactgccttgtccttgcttctttggaaaggacagttgcacgcttgcgttcccgcttgcactacttgagagatggagatgccaacacaaatttttttcacctacaggt

SEQ ID NO: 184935 - DNA, 736 bp, Zea Mays
gtgttgctgctcttagtgggcctattcctaactttccttcacatgatgattctccggcacttagactgttccatgccacttctaatagctatgctgatgtgaacaaacctttgatatctccaagaaatgtggataaattcagtgcagtatccagcagctcttcaaatgaccttgaacaaggtgcaaatgtcaggtccaataatgccgagaggttaacattaccagtccaagggccactaaggaaattgttcgctgacatgttatgtcaccagaatatttacttacccgttacatcattgcaagaggcaaatgataacaggaaggaagtcagggttgaatccagtcaagaaactgttagtaatggtttccataggccaaagacaggagagtctgtgatttccattgaaaatggggagtccataaatgatgcccagacacaagaaattactcaagcaataatgccaactggttcttctgtaagtgataaggatgcagaatcacctgttatgggagacaatggggcacatagtactacaagtatcattatcaaagagaagcatgctgacggcgatcaagctgatgatgcacttgattctcacagcatactgattttgatgtctagccagtgcacagaaaagcaggttatctgtgaacaaagccatttaacccgtataaaatactatgggagttttgatgtgtccttggggcgatatttgcaagacattctacagaatca

SEQ ID NO: 184936 - DNA, 402 bp, Zea Mays
gcagaagatgtattcaggattccaacagtgcgcaatccagaaacatcgttcatttctagtccatctgacccgtttttgtgcagcacatcagttgcgtgaggcaactctatcccaacttcttttgccttctgctcgtccacctccatgctatccccgggctcaccagatccatctgcccttctctggcttcccacaacctccttaatgacgtcctcctgcccaaacctagcactgccactctccacgacaaccaggtcaccttcctcttccgaattcggcaagtgatggtcctccctgaccccagcagtacctgattttccagatgcacggttcctgctccctgcctcaaccacctgccagtgatcagttgctgatagcacacggtttttgtgctccccgagc

SEQ ID NO: 184937 - DNA, 406 bp, Zea Mays
ccggcaagtgtgcgggtagcgtcttcattggagggcacccacacatatgagaaaggtggcccctatggaaactttggtagtgaggatggcaaggaggggaattcgatctggtggatgggaagaggaacaataggctgttgtgatgtgcaggagggtggcattgggcatgacaagcagggtgacagagggtgtcacaacggtggtggtggagatggacgagaacgtcatcgccttgtacctcgacatcatgtagggattcatgacacccacagaggaggatacctcttggtgctctagtgatgacatgcaagtggagggattggcaagctacatggtgatgtccgccaaggccatcgtagtggtgtcggcgcgtaatgatggtgggattggcgactgcttctcggag

SEQ ID NO: 184938 - DNA, 315 bp, Zea Mays
gaaagatcttgcagtcctatctgtttggtgtttctaacacttgcccaactggaggttggttagtgctcgatctgggaagatttcatgacaagcttaaccctcgttgcccatgagggctaccaagcacctcgtcgtcaccgctgccttcctcctcgctgtcgatgtcgctgccatccctttgctcgatggtggtggggcgtcctgtccatgctcctcccagcaggtggccaggtgctggacctcagagtgatagcgtgggagcagaggcttccaccgtgacgaccaatgatcctcctatacgagcatggtggctac

SEQ ID NO: 184939 - DNA, 281 bp, Zea Mays
gccacacagagcggaggagacgaggaatacgagggtaagcttattaccatggatcgtgcagtgtgttgacccggccccgcagcatgtgccccctgtaaacccgcaacccaacgtcgtcgagggattctggctaccgcactcacctggtgaaaccttgagcacacgtagagcctcctagacagtccctcatgagccgcctgaaggtagcatggacctagccccagatcgacgatggctgcgctccaacttttctgttcgctcaacgaggtgctctgatctcc

SEQ ID NO: 184940 - DNA, 303 bp, Zea Mays
ggtcttgccaccaaatgaggacttggcgcacgcctctggccaactgtgccttgactgccgctgctggaattagaatagttgcgccgtgatgcataggcgacaggggtggtgtagactctggtggctggcctcgaaagagcttgaggtggccaacatggaagacatcgtgtatgtgggctcccagtggaagacgaacgctgacaactactttgttgatgtcttccatcacctgatacggtcatagaagcgtggactcagcttgccggtggttgcctgcggtagggataggggggtacggtgccg

SEQ ID NO: 184941 - DNA, 276 bp, Zea Mays
tctatagtcttgtggccttggaggctggagcagagtgcagactgcagaccatgctttatataagatgtttttgcacaatgtggaaggccgtggttgtattaagatgtgtatttaatttgccggtgcgaatcttatcttatggtgccgagagataagttgacattcatgtaaatgctggttgcttgtgtgtggacattcaggtaaatcctatggtttcgactctgaatcttattagtttgatggtctcaatcttataatgccaacgctgcctgtgtg

SEQ ID NO: 184942 - DNA, 282 bp, Zea Mays
tcgatttctgatggtcagtgccctctagctaccctatcttgaaaataagggttgttgctcgtgggttgcagagttggagtgataaaaaggtggggcatgtgaaaaatcaacttgatttagctaaagagctcttgcatcaacttgaaatagcccaaggttgttgaagaaacacagtcttgctttggcatccttctgaaatctcgcattggatggctaaaagatggggatgccaacacccgtttgttccattcttatggtaggtaccgaaaaaggaagaatttt

SEQ ID NO: 184943 - DNA, 626 bp, Zea Mays
cgttattatcatgtttttgttgaaggagaacttcagaggtggagtattctttctcagttactctacatttacacgaaaagcttacttccctcccccttttgtttctacctgtacctgcataaagtcaaattcttcatttgctcaaagccatagtgatgcctcatagaagcttcctgtttcatgtgtttattcctattttttctaccattttacttgtgatactagtgtcttggtcactgttaatgtgtttgtttagtcatgaaaggtcgggaaaatggaataactagagatgataacacgagctgttgaaggcagttcgatgcagttgacattttgactgcttttatttctactcttttacccaattattctgtttaggggttcatcagaaatgttgccttcatacatatagataccgctacttgtcacttggttgccttatagagaaagaatctggtaacaataattatagagaaagatgaatacaatctgctgcttgcacttcgtaagcatgtattactttcttttcgctgagtgtcagctcttttgattcggattatgtcatatcatcaactttcttaatttcagattggtttctggcataaagaatgctgctattgttgacc

SEQ ID NO: 184944 - DNA, 835 bp, Zea Mays
ggagcagaacccttaactcatctgcggcggcgtctctgcctttccaagttgagattgaagtgtctggcatccctgcacatgcttgggagttggaaactgtgcatgctctcctcaatgagtggtgctggattgctgatcttcacccagattgtgagcgacagcgtgaggtgttcaaggttaccgcctggtgctccagcccgggctccatccccaaggagtttaaacttgaaattgttgatccggtcacaaccgatggtggtatgctgcgccgttcattggtctaccctatccgggtgtcggtgaaggtccttgatcgaccggacatgttgcagtccctacagccgtcacctcctccggcggaggatgatcccgatcagggcaggcggcggaggcgacgtcgatctaggaggtcgtcttttggtattaatgctcccggaaaaggttcgacgacagcggtcttgcctcgggtgtcggttcatcagcgacttgggccgcgcgtgcaagcctgtgggaaggaaggagtcagggtgcctcgcctggcggtccataaacggctaggccctctggggatatttaacgctgataaaggtgcagtcaagaagatgaagcgagtttggattcccaagagaaagttggagtcatctgtgtctatttggattcctaagacatcgtctgctcttgtgtctccactcccggttgcggttgatgatgcatttttggaagctactagttctactgtcgttactgaagatactttggctggctctccagaggttattccagtggatggtggaatctgttcggaagctgctattatttctgatgctccagcccg

SEQ ID NO: 184945 - DNA, 740 bp, Zea Mays
tttatccagttcaggagctaatctgttggccaggattttagtggtaagtttagcaaaactgtgaactaggctgattggtgtaaagtcccccggaagaacagcctcaacatgtttgggaatgagagtaatataggctgaattcagcaattcaagccttcaggggagccttgctgtaagactaagacacagccaggaggtcccatttgattatatcccaacaacatttataaaaacgccttgtgaaaccgtcaggtccaggggctttatccttaggaagacttaaaacagcagatttgatttccgccaaggatatgggattatcaaaatgcgagagctccaaattgcctttgtgaaaatcagcaaggtttagactaaaattttgctcaacctctttaccaatcagatccttataaaacagaaacatagcctgctgcttagcctcttgggaagtgattagatgctcgtcgaccatcagtttatgaatgaagttcttctttgtcctgaacctggcttgcgcatgaaagaaaagcagtactggcatcctctgttttgacaaagttcactctagacctcagtctagcaatggttctttccaaggaagaaaatgaagacataataattttagttgttttctcaaccactcttcagccgagcacagaggcctgctgtccttggcaatttctgtcaagggcgttaaacccttggctggctggaccgcggctacggagctcgtagccgtc

SEQ ID NO: 184946 - DNA, 333 bp, Zea Mays
gttggtaatgtaaagctgcaacttgctactgctaaggaaattctgcaccgccttgagattgccagggacaatagagtgctctcacccggggaggaatggcttagaaaaaaattgaaactgcattgcctcggattggcatcgttagtgcgcactattgcgaggcttcgctctcgcattttgtatctacaagagggtgatgcaaatacttctttctttcatcaggaagcccgctaccgcaagaaaaagaactttattgcaaaatttcaggttgaggaacgtattgtcacctcacaggaagaaaaacagcaagcagccttggatttttatgataac

SEQ ID NO: 184947 - DNA, 527 bp, Zea Mays
tatttctgagttggtccatccagtttttttgctttccctgtaatctaccctggatggttttgttttcttttgcaacctattggtagactaaagtattgtattatttccccacagctggaagccttgattgctaatgatggcaaagatgtggaaattcaggtcagtcagtgttttgtttatactgctcaagtacatctatatttcttgtaggattcatggcctatttgcttagcaaaatgtggcatgctattgtgctctgcttcatatcttcttatctgatgatacctaatgtaatgtttgtgttcagtctgttattatggaagttcctgatatcttgcgtaggtgtgttagccgtgatgaggctgcattagcagtagcacaaaaggtaattgatctatttgattaggaatatacacatttctcagttgtttgtcctttgtaacttactgttttgactcttaatgataagcttgttttggtgcattatgtcctaggttttcaagagtttgtacgataacacatcaaat

SEQ ID NO: 184948 - DNA, 440 bp, Zea Mays
gcggttaattcttgactttttccatgtttccctttttgtttcttggacctgatgcgacgacggggctgtaagtgtgtgtaagtaatagtccatccatcaatgtacactcatgtgtttcttcttagggttgggcatccttgtgatgtttcctttttggaaaacctggcaattcatcgtttgatagtgcatcttctactagttgttcttgggaagacatctgtctgtttatgccagaaaataaaatccggttcttctgttttgtggtttcactttcgtttgtactgatctggcgacaaggaattccatagtactcacaacaacaacatgttccaaggtcacttgtctgttggtttggttgttcatccttttgggtcttgaatgtctgttcatcaactgttttatttataatattgttttgacttgtcaacacaccacattct

SEQ ID NO: 184949 - DNA, 531 bp, Zea Mays
actgaattggtgtcaaatgcatatgtgccccaaagttgattgaatgataccagtatgtaggtgtcgaccaccacataagacgtgataagtacaactggcagcatggtataaacaaatggggtaatcttccaagggaagcaaggtggatgtggtagctcaatccaggagcatccctccaggtgggagcggtcgtcaacaatgacaactttggctttggaaagatcgagtacctcgaaccagggtgggaaatcggggtctgtgaaccagcagagagtcttgcacagagcataaaccttgtcccccattgttgttaggacagggcaccactttgtagaattgagagtcggcccgtgaatgaccttcttcgtcttggtgtcgaagatgacggtgtcacccggatcacccccgaccctaatgatccacgcgcggtgcactgaccgtagggacgtgaaggtcataccgccagcaacggtggtcagacgggtaactcggtgcaggctcttccgcttcacccgcgaaggaaaggaagtg

SEQ ID NO: 184950 - DNA, 972 bp, Zea Mays
aaaattaccacattcagttaacaaacgcattcaccacaatcatcaaatccggcatatacttatatctaagcgcttttcacccactagtccgtattttagtttagacaccacatgagcactacagattttttacccgcgcccataaccatacacatttagaccacaacaagccattcatcgcgactacaaacttaattaaagtcatctaaccagtcgtctagctagagcaacgacacagcccgctagacagcatacacgtcggcttgcctattatcatcacaattcatgacacaacatatataacaatctcttaacacaatcaactcctacctgacatgagttggctaaatgacgtgaccatttcccaattaccatcacacaccaccttttgccatttttggatgaccggcacgacacacagctattgtaatacatctcaagttcatttaacccatcagtggagcactagcgcatttcagaaaatttcctaagactacgacgacaaggcatcgattttatcatgttcatacaagcattacaagcgtgtttacgaaacctatcgattaacttgatcaacacactatccatgctctttgcctttcaaattttatcgcacaacaagaatcatccccttttgctaatgacaccaataatacctactgacctatggtttaccacccgagcacagttacacgccgcacattagtttctaacatgattctcgcataactcgtaattcaactactcgctagccataaatcacgcacgaccactaccacatcgaccagttaatttatgtggacaccgcctagcgtaccaccagtatcccgcattttggctcgacttataaacatagaggaagtgatacacgaccaaacatttatgtcgagcacaattattcatgtccacatttatcgactagacaagtgaaacactaaccgattattcgcacctctcgtccttaaacacaaa

SEQ ID NO: 184951 - DNA, 320 bp, Zea Mays
cacaccaaactgccacagtcagccgcacggtgggacggtgagaaacagttgaagcacttcccacgtaaatcagtgggaacgggtctgggggtgcaagggaagaggggggcagggacttcgacggcgagaccgacgtcccacaaccttcacccagccaccgtcaccaacatcagcgccgcaggcagtggaccttccatccaccagcgcctccttataagagcgacataaatcactccgggaagcagccgaaggaagatcctgttcacaccatcgttgtgcctttgaacggccaccaggaagagcagccacagactgggcga

SEQ ID NO: 184952 - DNA, 378 bp, Zea Mays
ctggaaggtgaccttcatcttttccttgaatgctgccacccatgcattcttgatgctagtgatcatcaagtcgtcgacgtaggcatccaccagcaaggcatttcctccgttgccccgccggtagatgtccgcctcttgcgggcttcgcctgaagcccatcctcttgagcgtggaatccgacttggtattccacgttctcgctgtctgtcgcaagccatagagggtcttgcgcagacgcaacacattgccctccttgccagagactgcaaaacctggcggctggtgtacgtagacctcgtcctttaagtccctgttaagaaacatcggcttgacgttcatgtgatgaacacgccagccctcctgggctgccagtgcaag

SEQ ID NO: 184953 - DNA, 826 bp, Zea Mays
aaccaagtttacctagatttcccacactgggttgagtgggttgggcactgattgactcaaaattgaccagctttatggccaccgttcagcaacctcgcaatggaagacaaaaaatccttccgacaccgcggccgcaatagttgaatacgtttcatcatcatcaaccattttttatacatcatcatcatcatcaaccatttttttgataggtcatcatcatcaaccatttttaatcgcactctctcgggcggccttaccaaactccctgcatcttcttgcctagaagtgcagtacttgaatgaccaatcgtgcagctgctgcgatactactctccttgcccacactgcgtcgcaatggtgcaccgatctcctgctccagaagctaccaccgctctgtgcttggcactgctacttcttctctttccctgaaccagctccaccgccaccaccataggcggcgctccaaacacggtggcgccatgcgcgccggcgtggtgcggggacttggccatctcctacccgttctggctcgcaggcacgcatctgcccaagtgtggctacgaccaagggttcaaggttacctgtgacaaagccaaggtgtacctcaagaactcgacctgcacgtaccaaatccaggccatcttctacgccatgaagctactcagagtcgccatcgtcggcctgtcgtaggacgatggcacttgcaacatcgacaagttcgtcaatgcctccttcgtccccagcccgccgttcgaaatcgagccccaacaaaaccaggagctgttcttcgtctacgactgcaacctgcgagcgccgcagctgcctcg

SEQ ID NO: 184954 - DNA, 658 bp, Zea Mays
aagtttgaagtgaattccaccgattgggcataattattttgaaagatgacattcccggtaagcctagagctcttccaaatgataacagatccgcccgagttccccatcgagggaacaaaagcaaaagaatcaaaaggagtagggcaaaagtttttaaggtaggccgaataaaagaactccttctttgtttcctgcaaacaaacaacctcacaaccagcatctcgaatagaacaacgaatagcattccacttggcggtagagttaatccctctgacattgtggctcagcacagaccactccatgacgttaacagaaatgggattactcattgagaacaccagacgtttttggggcatacccacaccagtgggtaaagcccgagtcagtccacatgccacaaattaacagaacattaaaacaggcacgcccaggtgccagcccagagtccaaaatacctgcaataaccaaaagaaaaaccgagtacacccaaaagttaatggggcccacaccgaagcccagatcccccaccatccgcctaatggttgtcttgtttatcctcatcagatgaatcattagttttttcatcggccaggtccttcctgtcaaccctccgcggcccaacaggtcccacagacgatttcttttgcttcagcctctg

SEQ ID NO: 184955 - DNA, 608 bp, Zea Mays
ctggttgagcctaaaacaagtgcaaaacatatcagctaagtacaagttgaaacaataaaactaatgatatgtgaatcacctaatcacttcacagtagtgttgaatcactcaaaaacttgaatacccatgactgaaatgttgtttcagctgaagcggataagaaaccacgcatgcccttttgatcctttgatgctagaaatgtcccaactatcagtttttgatcagtagtcaatgtcattttttcaagcctttgccataattcggcatcagagttcaaagaaggtataataggtggaggtggtggttgtttaagttcgttccggagatccatcaaagtagtgttgatttcatctcctatctttgccatgcggctccgtggtctcacatctcttttgactggtatggcatctcctcttggacgcttgattccagagctagatgagctctgatcgataacttgagatggaattttaggagatggtaaagtgtcagagtcatcacctaggtcatcctcaggttgaccatagttggagacatcattgcatatgtcatcatcattatcattatcatcgacaggttgactttcatttaggcaagtagtagcatcc

SEQ ID NO: 184956 - DNA, 285 bp, Zea Mays
tgcggacacaattttcggaaagcacagggtgcactttataaaaaccaggggcctataccgaattacttaacatggaaagggatggcgggttgataagtcaaaagggcgagggttcttttagaaaaggatcatgactgttataatgtgcgggcgaccagagccgttcagatcgaatccaatggtcacaatacaacgcgcgaaggggtacgtaaggatctaatctcatccactggtggttgatccgatgactcacgcgcatcatcactcccacggccgaactcgtat

SEQ ID NO: 184957 - DNA, 361 bp, Zea Mays
cctgagtccatgtggctggacgacgacgtggtgcccggcctggccacgacgccgtgggagttcgaggacgacaaccccttcctcgcctaccagaggaacaacgctctgttcgatcaccagctggaggcatggaacaacgacggcagggtcgagctgttctgaggcgctgagatgatctacttcttcctcgatcgtcattagattagatgtagttaattaatacgtcatccccggcctacgatcgagcagttcgcgttgcacagaccagagcactcacggccgttgaaaataagcaagagaaagagatgaaagtggttgcacgcccggtttcttggttttctaaaacctttggccgggccga

SEQ ID NO: 184958 - DNA, 492 bp, Zea Mays
atgggacgtaggggagaaggattgaggccatagatcttctaatggacggctctgatctgaagatggtgtatccgtggccgttgatccggtttgggcggccgggatcgcattttgcgtaccgattcgctctacgggatctgtaacgtcgatatcggattcaacgagaacgatgtgatcgggtctagatagaatccagagcgttggtgatcgatccaatggctgttgaagcatactggttcgatctgtgttagatataatcggggccgtagattgtggatcgggcggactgaatcacccgatgacccttcactgtggtaactttgttaaagagccctcggattttgattaaaataacccgcggtccccttatggagtttttcgagtcttaggatcacttgcgctgtagtccctgaccttttcagttattggcgcccagtccaggaattaaagaaaacaggaaaaagagatttagaaattgattttgagtataaa

SEQ ID NO: 184959 - DNA, 359 bp, Zea Mays
aagaaatcgacgaggggattggattggactgcgactgttgttgattctctcttgcacgcggcggtcctcctccagagtccagacccaatcccaaatccctaatcctacagagggatcccaaatccggcgtccagtccagtccaacctgtagtagatatccccgccggcttggccgtccgtccttgccccaattccgattgaccggagaggagttggatcagggagcattggaatggccgccgccgcataggatggagctggattcctccggccgctgctcggttgctcccgtgaatgctgtgatcgtcgcgattggaggtggaggcgaaggttctcttcagtaagagcttcaagagctg

SEQ ID NO: 184960 - DNA, 977 bp, Zea Mays
atttgcttcaggatcctgaggaattagggcggtttgcttcagtgatcggtgaacgtgaaaaacacaaagaatctgttgagtacaagcgagcagcagaggaggaatgggcttcaagacatcggcaattacaaatacaggtacattattttgctactttgaattgatgttaaactttactagaaatgtgttgccatgcatgagtctgggaacataacattcaacatgctgtgttcgatgtgatttcagcagtagcgggctcatgcctgcctaattttatttttttttaaaacatactccgtctgtcccaaactaaatcaacttctagagatgtcctaagtcaaactatttgaagtttgactagtttttttagaacacagcttcaatatttatgacaccaaatcagtatcactagatgcatcatgaggtatattttcatatatgacgtatttggtgtcaatgacactgtcaacctttcctataaagttgatcaaatttaaggtaatttgacttaaggtgattctaggaagtggtttattttgggactaaaggagtaataatcaaaatagctagcagacagactactgacataagtttggatctgtcacaactcaagatggttgtttgttgaaaaacatcgtgtaggccgaggaagcaaagaaattgcgaaagagaaagaaagctgaagctcaacgattgcttgacatggagaagagacaaaagcaaagattgcaagaagtccgtgaatcgcagagaaaggtctcttgttctaccagtcttcagtgttatgctagcagaattcattgtaaactttcatatttctttggcattatatggctcttacctctttcttcctgtagaatgaagaagctatacaactgaaggagcggtatcgggcaacggtcggaaaggagctggaagatatagaaaggagacattgtgatatgacttcaatactgcatgcgctaggcatctcagtt

SEQ ID NO: 184961 - DNA, 355 bp, Zea Mays
gatttggtgtatgtttcataaaatagaaagatggccgctaggttccaaaaattgcgtgaagaagggaagaactttgatcctttggttcttgaagattttgattgggacaatgagtgggttgatccattagctaattcatctgctattggggatgaccctcttttcacatgggagcatgttgatcatgccatcggtgcatctacacaacttcaaggccgctactttcctaggagagctcatggtactcaagtgccaattcttgaggatgctgaagatggtcttgatgtgggtgaagagaatgaagacgatgacaattttgtgcttgatgaccttgacatggatgatgaagaagaaa

SEQ ID NO: 184962 - DNA, 1011 bp, Zea Mays
ttacatttttagcaatgagcacatcaacttcttggttacgtacccattcgattttcgaattgatgagatgttatcgtactacatatcttttctgcggttcgtaacacccgcctatataacattagttttattactgaccattatacacatcagcttacctggttccattttatgaagggcgataagtgggaagttgaacaagaatacaatttctttgctcgtgaagacgaaaaatgtacatatctgaacttatggacgacagatactctagccttgttccttgcttcttttgtttgaaccgctaagtatattctattctgttcccttccatagttcttggtttgttttatgtgtacaattagtgtagcacaacattttttctgtatccaaccaacaatcgtgagtcctcagatgtaatgcagcttcactgagtggactgcaaaaaagctcctgttaccatgttattgtggtcagcagcagcattttattacttcaagggtaaatatgcccaaataagagccatggcactaccgtggttaagtttgggatatgagtgtgctgtaggccagatctggttcttgctctgctttgataggggtgtcacccatattgttgttaccctgttttgctaggggtgtgccacccatattgttgttaccctgttttgctagggttgtgccacccatatagttcttaccctgttttgttaggggtggcacccatatggaaatataggcttatattctgaagatagttatatgcttgtctcacctggctattctaatcacttcatttatttgtttgcccactaaaagtttggactagttgagctttagaggttgttgtgcatcgcaggtcccttgtttactagctttctctcatcctctgtgttctatgcaggatgaggtcacttcctttcctctttatgttgaggccttaaagtttgcttttcacgaggatagcatgattcgagttgctatacgtaccttgacactcaatgtctatcacggt

SEQ ID NO: 184963 - DNA, 959 bp, Zea Mays
attggagtcgtgttattgagacgttggagggagtgagtagcaggttgaaggatgtggagagggtgcagcaacaaatcatgatgcagactgaattagtggcatcagttgctgaacaggcggcgaaggagagaaatgatttgggtcgtaaattggaggagactggaagggtagtagcacagatgaggttggaacagttggggaaggaattaggtgaatcttctgggggttctggttcaccatcattggaggtgcagcatagtgggtctctgtatacgagaggtcgtcatgagaaggaggtggagggcggtagagctttcagaggtgattcagggaggatgcaaggggaagacagacagtcttgggatccacattatcagggtttacccaagttaccttttcccaagttttcagggggtgatcctgtagtatggttggatcaatgcatggaatattttaccacttacagggtttccaatgctatgtgggtgtctattgcttcgatgaatttggaacatgttgcagcccagtggtggcagtatcacaagttgaggcatgggttaggtggttggcaggagtttacctcagctgtggttgctaagtttggtgctaatgcttatcctaaagcattgaggaggttgttggctttgaagcaaactggtacactggattcttatgtgtcagaatttgaacaggccagatatggattagctgttcataactcggagtttgatgagacattctttgttacctattttgtgcgaggccttaagtatgaattgcaggatgtggtgcaggttcaaacaccttctacggtggaccgtgctattcatttggctcagcttcaacaggaggtgttggagcgcaataaatttcggggacaacggtcagggttgtctatgcatgtgaaacaacctgtggctggccagaaaacagatgaccaaggactcggggcagatctc

SEQ ID NO: 184964 - DNA, 903 bp, Zea Mays
ggggatgctgcattatctatattacacagtatgacatctgcacggtccgatcttgatgatgcaggtgaaatagtaactccaactcctagggtgaaacgtatattgtcaagtccaagatgccttcctcatgtggcccaggttatctctagcttcaagtgtttgctatctttttccaccatataagtggatgttggagactgtataagtacaacataaaagtgacagtatcttagtctacaaccatcagattaatgtgtataagttaatacaatgcaatccttaaagctctgttgatgcaagtagcatttccttgaactgtcactaaattgtaactctgtccgcaatataatgcacagttgtcagttgtgttataagatataagctatttttcgtgccattaaaattcatgctttaatttgtgattcaattatcttattcaacttttcagatgtatgtttctctttcttttgaacaatttaattgaccaaatgctgacaaaaaacaaattgtattgtataggttatgcttactggggaaccaagcattgttgaagcagctgcctcattgcttatggctattgttacaagaaaccctaaagctatgattcgattatacattactggtgccttttactttgcattggcatatcctggttcaaatctcctatcaattgcacatttgttttcggccacacatactcatcaagcttttcatggtggtgaagaggcagcactatcttcatctttgcctttggcaaagcgtagtgtactgggtggactcctcccagaatctttgctgtatgtcttggagcgcagtggcccttctgcttttgccggtgcaatggtgtctgattctgacacaccagaaattatatggacccacaagatgcgagcagaaaacctt

SEQ ID NO: 184965 - DNA, 497 bp, Zea Mays
cccaatctatttttagtgctaaaattggggctttctcaaattgaattatttgcttctccatatgcgcatcttactgtaatacgcggtggtggcctatgaccgccaggatgtgtctacaacgcagtacctatggctataagttgcagcttcctccacaactggtaggccaatctcccccatgcaggcgcgcacaggagagggaaggctctcacgcgtgagaaactgagaatcgcctgcgggccgcgaatggcgagcgagcacggcttgagaatctgacgatggaggaagcttggatagtggaagggtatttttggagatcaatttgtagatgctggtggaagcgttttctttcctatactggccttctcgaaacctgtaggagttgctctaacaggtaagcatcatcagcccctccttgtccctcagtttgtaatacagcaatttcagatatggacatagaaaaactctaggtccaccactgatagtaatcctctacc

SEQ ID NO: 184966 - DNA, 577 bp, Zea Mays
ggattttcatttttagacttctcctgaactctagctcgtccccggagagttgcctggattcctgtgctctctcaagaagggtaaggacggtctgaatgattgctaattgaactttaaaattgcctactgtctttcgtctccagatcaatagagctttagctgtgcggatcatcttcacatgcagcctaagaatggcatcggaagaacgaacactagatgtccaagcttgctgaaccacctcattgaacccatcaatttttgtccaaaaagcttcaaatctaaaccccctatagaaactaaaggtagataaaccttgcataactaaggggcaatgatctgaggtcatggacccaatggcctgcagatcagcctgggggaagatatcatgccactccgtagtcgccaagaatctgtcaatcctagacatcgtagggtcatcctgttcatttgaccatgtgtataatttaccattgagatcaagttctaaaagctgaaggtaatcgattgtgtggttgaactgtctcatcactcttctattaattaatcctttgtttttctcccttgctctccttatcat

SEQ ID NO: 184967 - DNA, 492 bp, Zea Mays
aatcctggtagtgaacagatctgccgctataggttccctctgagctggtagccaagactccacaggtaggtgtctgaacctacgtacccgggctgtagtggcacgctgaagatcaatcagacgaggatcggtagcaaacggtcgcacctcggtctcatctcgctcccggaagcgggctggtggaatgggtgttgcggaaatgggagcgggagggggaacagtggaagcgagaatggtggaggtggtgggtatggcggaagtggtggatggctcgggagcgactggagctgccaaagtgggaggtggagtagtagctatggcgggtgtagagggagcggatgagcgaggtcaagacgcgaggcgacaaaccctgtaggcaatcttatctaacgagatctgcaactagacacctcgctttgcctactctgctgctgccgctacaagagctgctcaggctgctctatccagacgccgcttcttgcgaccttcctg

SEQ ID NO: 184968 - DNA, 459 bp, Zea Mays
ctttgaggagatacactaaacctgctaatttgtgggatctatatgcattttcttgtgatccatccaccattaagcatgattctgagccaaagtggcgtctcttgagggaatactttcgtctttttaggagaagtttaccgctacagggagtcgaggaagtttctttgtgtaatgaatggtggaggctaactagagttaattctagttattcattgtgttcaacttacccctctgaactcattgtaccaagaagcataaggtacttccatgttcttgacaataacatgtggtagttttgttctcttaaacacatttatgaattatgaggaattgacaataacatgtggtaaattgatactaccatttgtctactacattagtgatgaagatttatttcaagcctccccatttcgatcaggcaagcgcttgcctgttatttcatggtgtgaccctggtatg

SEQ ID NO: 184969 - DNA, 462 bp, Zea Mays
gttttatgagttaattgatgtaaattttatatctggaattgcttccagaggattttctgcaaacgccaggggcctctatgcaattccctactactgtcgggacgacgggttcaattgtagaaaagggtaggggctaaactgcatactatccgggttgaaggggtatccatgtacgagggccgatgataaatctgtggtcagaattagattctcattgtaacgaaccataacgctataacgaccgtcagatcaaggtcagactatccggatcacaggcgcggagggactcgaccagagttgcacatcaaccaatctacgaccctgatcgggtcggatcaacgcggcaatccggttctaatccacaccgtctatcaccggatcaatgacttgacactaatcccccaacatccgcctagatacctaatcttaaccgtctctccacgaatcaacgatcgtgaatcc

SEQ ID NO: 184970 - DNA, 420 bp, Zea Mays
ctcctcgccttcaatctccgagctcctcgcctctggtctctggcggccgatgtaggcatgtagcgaccctccggcggtccggcctccagtgtctggtctcctcctcgcctccagccgtctgacgtactggccactgggtgcctcctctgcctccagtcctagtacgccaccggccatcgcagtgtagaccgtgcggtgctgcctcctctaggctccagtcctctcttccctcactcctgctcggctgctttgctgatgcctggttgttgatgctcctattattcgtctactgcagtgctaccttgctattgctgtgtgctgcacatgcatatattgttgttgtcgtgtgttgccaggcactagtaaccggtaagaccgtagtaccgtgtgtgtctgaactgtgaaagatcagtgaagtgt

SEQ ID NO: 184971 - DNA, 1562 bp, Zea Mays
attgcttgggtgctgagaagtgagtttcctttttctatcgtcgctcttgatccagggtcgcccggcattggttttggagcgggaggtttgagctcttctaagaatcggttttgcgaggctttcgatgggttcggaccgtgaaggccgcggctcggaggccgtggcggcgagtaagccgcggaagaggcaactggtgatggagtccagcgattccgaggccgacgagttctgcatctccacgcggcagaatgctagtggtgccgcgtcgttgggcaatgctggtgtcagcagccaaggcagtggcgatcggtcggaggagaaacctgtgacttctagtcctgagaagcttccaggggttaagtccagtgatgtagatggttcagacaagaaaacgggagttcagctggagagcagtagttcgcagcctgctgtcaagaggatcagagttgagactgtccatggtgatggcaatggatgcagtggaggcgcatctaagtgtgggactggtggaaaaatgctgcctcgggggctcccagcatggcggtttgagaggccagaagtaaggggagggcgtgttctggatgacaaaggtggggtgagtatgaaagcaagcagtgcttcaaagatgaaggagcaggtatcaagtttgggtgacaagagacaggcagagctgcagaaacatgaaagaaggacaccattgaagactgatcagggcaaagcaatcgattctggccaacaggaggttttaaggttgcaagggaaaaggggtgttttaaggatattgccaaagaatgataaggtgaccagggatactggtgatggtaagattctgtcaaggcaaactgaggtggatgaggagactggtaatggcaggattccaacaaagcgaggtgttttaaagctcctgccgaagaacaatggtgctgtgatggagagtaatgaatgcaagcttctgtccaagaaggttaaggtggatgaggaaactggggatgacaagatgccaatgaagaaaactaaggtggttgataaggagaccagtgatggcaagattcttgcaattacaactaacttggatgcagagtttggtggccataagttgccaatgaagaactgtactgtggacatggaaactgttgctgggaagtttcagcaaaagaacagtaaggcagatggagaaaccaaagggagatataaaggatatgaagagaaaagtggcgcccctgcagaatttcagaagcatgatgcaaatggtgagaagagagttctgggaaagctactctctcccgttgcgctgaggaaaagtgatccaagcgtagtgggagtttctttgggccagagaatgaaacaacaaaattcaaagcaacaactgaagaactattctctgagcttgaaagatgatagcactaaatcaagtgaacagaagaatctgaaaaaaagattgcttgagcataaagggtcatcagagagtttgtcaaagaaggcacaactgaaagctgttgatcagcaagccacatctggccctgtgctcaacaagcttgaaaagaagccaagaggaggacccc

SEQ ID NO: 184972 - DNA, 353 bp, Zea Mays
cgtgagcggactaaattgactgctcaatctgtagagtgtgtattccttggatacagtcctgaacacaaaggatatcgttgttatgatccatctactcgtcgtattcgaatttctagagatgtgagcttcaatgaaaatcgacccttctttcacaactagtctactcactcctcatattatcccacagattctacttctttcatgtgtcttccttccattcctgctgctgaaccatcaccttctacatccacatctgatgttctcattcccataacaccaccttccacctccacgtcatcctctacttactcttccaaaccacctatcatccaaacctacattcgtcgttcccg

SEQ ID NO: 184973 - DNA, 494 bp, Zea Mays
cagctttttatcaacaaaatagagcctgaatttaatagaataacaagccaaaccacacagaaactaggaaacaacaaaagtctcttagcctcatccagctctcaggccttgcgggattatcaaatggtttttttatttaaatgtgcttttacagtttacagcactcctgttaaaaggcagtcagaagaagaaacggatgcaagtgcaacccctttgtttggactacaggccacagaacagaaggaaagcacatcaaagtaaagatgcctgggaatcttggcagaaaacaattgagtaaacaagaagcttatgaggatgtagcaaaataaagtgaaaagatcaagatgcacacagtacacttaatcaatggtgccatggatgaggcatcctcaatctgatttgcttaccttttccttttctttcccatagagtgatataattgaaccagagatggctattgcatctttctaggaattctgctgactttgttaggt

SEQ ID NO: 184974 - DNA, 503 bp, Zea Mays
tgaacttgcagatcagtcattccaggcattaaaaacagctttggcacaggcgccagtgttggccattccaaattttgctaaaccatttaccatcgagactgatgccagtgggggcggagttggggctgttttgcagcaggaaggacatccagtggcctatatcagtcgagctttaggtcccaagaatttgggcctctccatctatgaaaaagaatgtttagccattctttttgctgtcgagcattggcgtccctaccttcaacatggtgaatttatcattcaaacagaccaccagagcctgactcatttggatgatcagaggttgtctacaccatggcagcagaaagctttaactaagctgcttgggttacaatataaaatccaatacaaacaaggcagcgagaaccgggttgctgatgccctgtccagaagacccaatatggatcaagatacggtcactgcacaactgaatacaacatcagtatctactattacacctgatt

SEQ ID NO: 184975 - DNA, 314 bp, Zea Mays
gttgctgtgcgtaaaactcttgatttctggaactatgactccaaaaggatgactggttatgttggcctgaagaatcaaggggctacctgttacatgaactcccttcttcagactttataccacattccttactttcggaaggtggggcaacatttctattttttattactgttgtttcttaagtgtggtgctgatactgaaattaatattttaggctgtatatcatatgcctactacagagaatgatacgccttcagggaacattccattggctttgcaaagccttttttataaacttcagcatagtgataaca

SEQ ID NO: 184976 - DNA, 360 bp, Zea Mays
ctatgaccaccttcgtgtctttggttgtgcctgctatcccaatacctttgccaccgctgcttacaagctctcccctcgcttcactcattgtccttttctcggttactcctttaatcacaaggggtaccattgccttgacctcctcacccactgcatcctcatctctcgtcatgtcgtctttcatgaagatgactttcctcttgctggctccgtcgaccctgcctgcaccatgcgtagcctcgtcgacgagcacgacgcctgccccccgtatggcttgcttcgcagacctcgccctcgcctgccaccatcgcgggcgggccgctccctcggcccctggttaccacccagtcgccatccacc

SEQ ID NO: 184977 - DNA, 451 bp, Zea Mays
atcaaagttctacgtgggctaatgctcgtaatacccgtgccgttcaaggacgaaaagcaggaaagacatcttaaacaataagaatctaaagcagtgaaagtttttatttgatttgattgacagggcgtcgccacgtgttttttttaatttaaaacacgaataccaaatcacattcatgttcacgtgaacggccgtgcagccgtggatttgcgttgattcagtccagcaaggatcgtcttcctaaatccaaagatggtgtgctaagaaaaaggcggtagaaaaggggcgcagaaacagcagagcaggggagcgcgaaaccgagacagggacagcgagacgctgacaggcaggataagcgtcgcgaaacgcgaccggcctcgtgccctacccctcgtcccgtcccttccatcacgtattcacgggcacgagctcgagccctcgtaccctcctt

SEQ ID NO: 184978 - DNA, 1100 bp, Zea Mays
caagcctagccatatattgcacgccgctggacctgatgaaccacatgttgcaagtccaacatggtctgatacttcccttgatacacgtgacatggatcatgctattagtaaggaggagcttgaagatgttctcaacactccgcttcctgagcatccgaagctaattcgtggtcaattgaagaatggacttcggtatcttatcttaccaaataaagttccagcaaacaggttagaaaatcttttttctgctcacatctgttagtttttatatatggcaaaggacttcctctgtacaatttcacccttgatttccatacaatgattggaactttgatggttttctgtactttttaatttgattggagttacttgaaagttgacaactatgggtggagtctttaacatctgaactaatgtgaggtgtttatttgatttgttgaacatcagaactgtgtaatagtaaataaatcaagcgacaaatattatcctgatgcccatttcatgctaaatttcatgcaactgtgaagcaaccaaacattgttatgatatacgtgtagaatttgtatattattatggtttcatctagctattttgcaggtttgaggctcacatggaagttcatgttggatcaattgatgaggaggaggatgagcaaggaattgcccatatgattgaacatgtcgcgtttcttggcagtaaaaaacgtgaaaaacttttggggacaggtgcgaggtctaatgcgtatacagacttccaccatacggtgttccatatccactctccaactaaaacaaaggtctttacttttctgtccttatttctttgtggaacttatcagtgtctatttccaatttggaaataagcttatgataatttgtatttggtgaagcccaaatttgttttcttgtttagttgtccttggaaaaaatcatacgtaaatggactgaatgtatttgttgactgtgaaactataatttttagaacttatgatcctagttagatgtgttccattgtgatatttaatgtttacatataagcttgtcttctatctgcaggaatatggtgaagacttactcccttctgtgctggatgcattgaat

SEQ ID NO: 184979 - DNA, 756 bp, Zea Mays
gagcgccgggtgcccaagatcggcaccactcctgaagtaagtgtactgcaccgaactgcgctgccctggttttcttcctctctcactgaaggaggaacaggtgctgcattgctaacgccctgtctgatcttgatgcacgcctatgcctgatcactgtgatttttgtcgctgggatggcagaagcagctccggagggaggccgaactgcaggcacagcttgagtccacccatgaggacctgaagaaggccaaggatcaactggcattcatcctcggagagagggaccgtcttgtcggggagctcaacgaggccaagagagtcgctgatgagactcacgagaagctccaggatgccctcatggccaagaggtgggccgaggaggccactgagatcgagaagttccgcgcggatgagctggagcaggcaggcatcgatgaggcacagaggcgggaggaggagtggcagagggagattgagtgcgtgcatggccagcacgccgcggacttggagacgttggtcaacacaacggaggagctggagaggctcagacgtgatctttccatggtgaacgacgccaagaaagctgcacttggccatgcagatgatgcaatgaagatcgctgaggccaatgcggagaaggtggagatcctctcaaatgaagctgctcgcttgaaaggcttgcttgattcgagtgctgccagcgaagagagtaaaagccgtgaagctgagcttcttgttaagaatctgaggtccgag

SEQ ID NO: 184980 - DNA, 420 bp, Zea Mays
gctctctgatgatctggaagcttatcagacaaaagcagctagtcttgaagccgtggtggaagcagcaagcgagaaagaaaaggaatttatggagtcattgagccaaataactgaagaaaagaagaaaagtgaagagctagctgcaaaatatgactgaggtgcacagtagaggtatagaactccaatccgcagctgaatcaaggaatgcggaaattgaagctcaattgcaggaagctcttgaggcagtaggacagaaagaggctgagtcgagaaacttgaatgaaaagctggttgcacttgagtccgaaattgaaagttcgatgcatgtaaatgaagcgttgaaacaggaaatcaatgctaagctggtaatggtggatgagctgcaggagaagtgtagttttataagttctgagaaagaag

SEQ ID NO: 184981 - DNA, 370 bp, Zea Mays
tgttagtacaagtatcagcaacaggatcatcatcaggactggccgtgggagtagaacgaggacgacgaatgtaagtctgagtaacaggtggtttggaagagtaaggctgagatgttgtggaagtggaaggtggtgtgatgggaataagaacatctggggtagaaacagtaggtggtgatactgatgaagtttcagaaatgggaggaaggctcatgaaggaggtagactctgtggaatgaaaagaagaatgagtggaagagttgtaaaagaagggtcggttttcattaaagctcacatctcgagaaatacgcatgcgacgagaagatgaatcataacaccgatagcctttatgttcaggcctgtatccaag

SEQ ID NO: 184982 - DNA, 597 bp, Zea Mays
attgcccttggtacctgcagaaacgctcgttgaattgacattgtactgccaactcctccagggccgtgagcgttttgattaccccacggggcatgcttgttatcaaccctgaagcacgtaggcacaccaactgtgttagctgccctatgctcgatggcagttcctccatgaagaaattctccaccaggtccagtgtctgcagaaacttcagagctcctatttcttctggtagctcaggcatatatgtgtgttttaacccaaggtacctcagatgaattagattcccaatatgcctagcattgtgccagctcgtagtatatacattctctaaatctaggactcgcaagagcttaaagctcagaagaaacgagagctccttatcagcaccacacctgtagactgttaatgacctcaaatgttgcatgccctgcttataattgtgcagatgagcatccattgtactcttttggtgggctaacctacgcgtgctgcttatttctgacaacatgtcctcatcattatataagacagtcacgaagttttcttcgcgtgccaaagaacggaggagatcaagcaccatatcatgcacgcggcaac

SEQ ID NO: 184983 - DNA, 407 bp, Zea Mays
ggatgggggcgccatgtaaggaagggagcgcagatggttgggacctcgccgtgtaaggaacggatggcgcatgggattgccgtccattttcgtctcggtagaggatgggaatggtggacgacgccatcagtgggggagcagctccgatggtatgaagggagggtgccaggtatggaggatgggaagggggcaccatcagtggaggatgggaagggggcgccatgtaaggaagggatggcgtgttctatgaagatgggaatggtggacgacgccatcagtgggggagctgctccgatgggttgtggagcgttgtggggaggatgggcgtgggctgggacagtggggcccagaaggcatagagtaaagcgctggaggtccataaggcagagagagcggagcactagatg

SEQ ID NO: 184984 - DNA, 278 bp, Zea Mays
gggtgatgtgaggggctacgagaacgtcgttaaggtagaacggtccaggaagaaccgaggcacccacagaggtgatgggaagagtggaaccgtttccaacgacgatcgaggtggggtgtgaggaaggaggtgggtgggagtaagatagcatgtctgtggtgggagtggtgtgataagatgcaccagagtcgatgacccagtcagaggatggtgaagccaacgccatggtgttgtaggcggcgacgagggcgttggtgtcccaaccaccagccaacggg

SEQ ID NO: 184985 - DNA, 378 bp, Zea Mays
attcgacaacctcaacgctcgcaattttttcacctcccatggagttcttttacgcatgtcttgtccttacacttcccccaaaacggcaaggtcgaacgcataattcgctccatcaataatgtcgtccgcacgcttctcttccaagccagcatccctcccactttctgggctgctgctctcggtactgccacatatcttctaaatatctttcccacaaagacacttgcttccagcacaccccacttcgccttacttggcaaacacccctcgtacgaacatcttcgtgttttcggctgcaagtgctaccctaatctcacccccactgcaccccacaaactatctcctcgctccaccctatgcgtcttccttgggtattct

SEQ ID NO: 184986 - DNA, 402 bp, Zea Mays
cagtcaggagaagaggcgtgaatatgccatgttaccacatgttctcagacatgttccatgcctaggcagaggcccagtactgacgcgtggccaagtgcgcctgacctaagtcgtcggcctgacgtaagctatcgggcagagcccaacgtaaggctctgatatggggcccactaatatgggggatggatgggatgcttacttgcccatgtcagtggcaggtggcgtacttccccgcattaaatgcgtgcgacgcgtctagtctgcagcatatggtatccactatttccccacacgtttccaaggcaagggcattgactcaatgcgtcgctttggcacccttcattatgacctccattattcctcgtgcattactaaggaatgaagagacaggcaaaggagact

SEQ ID NO: 184987 - DNA, 372 bp, Zea Mays
aaagcatttcgataggcaagttcaaagatataatttctaaattaaataacttgctacaatcaccaaacataggtcagcccaagtttgaagatggtacctaaagcacagaccatgaattttccttttttagggggcacaacaatttttaaatgtctcatttacaacaaaagcaggacaacttgatctcatgtagatatcacataataccatgcacatgagatggtaaaatctatatatggaaagactaactcggcatggttgagattatttattatgaaaacggtttatgtagtttgcactatttaaagcgtcacataggaaagtcgagaagttgtcctatagaacttacatttcggataagaggaggtatac

SEQ ID NO: 184988 - DNA, 357 bp, Zea Mays
ctttttgtagacaaaaagggacgtgtccgaagctgacgcagtgaagccggatcgctgtacgaagctggagaagcgctggtgccaagcctgaggcgcctgcttgagtccgtacaaggacttttgcaggaggcacacgtgatcgggggcggccgagtcgacgaagccgggcgactgctcacagtagacggtctcattcaggtggtcgtggagaaaggcgttcttcacgtccagctgatggatcggccaggagcgagaagcggcgatgctgaggatgactcggatggtaggcggcttgacaaccgggctgaacgtctcgtcgtagtcgatgtcgtgccgctgggagaacccacgaacgac

SEQ ID NO: 184989 - DNA, 502 bp, Zea Mays
ggcgttttacgcacgcataaaaatatgtagtaatgtgcataaatcatgtatagaaggaatcttttgtgccacgaatcacgggaacaaatattaccatgtgcacaccgtttacgactgcataacgctgtgtaacatgatagtataaaccatgcaacatttaaatctccaccgctttgagataaggaaagacgtgctccacgttcgcgtaaataaaggcacagttacgggaggaaacaaattctaatttacagccgctcgtccacgttcgtatctttgatattggcggcggttaacggcggcggaagggagagcaccgggtggcgattaacggcgagaaaatgtccagcatcggcgctggcgatgacatgcaacctgtagcgtctgtgcatagatcaacatgtacgtctatttcaatggacatgcatcctgtagcgtctgcgatcaccagttacacagagggtgtatctgttactccccccgcgacattgagggcaccttgaca

SEQ ID NO: 184990 - DNA, 289 bp, Zea Mays
gacaaaaatgcagccgagcgtatcgccagacagtcggctcactacacactcattggggagacattatacagaaggggtgcatcaggcgtcctcatgaagtgcattctctcatctactgggaagcgacttctggatgaggtccatgccgggcaatgtggaatacacgcagcatccaagacactagtcgggaaggtcttcaggtcaggattctattggccaacaacgaagaatgacgcagccgagttagttcagaggtgcgaagcttgctagtacttgtcgaagcaacaac

SEQ ID NO: 184991 - DNA, 294 bp, Zea Mays
ggagatgttgggatagtaggcacacccgaaaacgcaaaggtgcgagtaggagggggttgtgcttgtgccgaaaaaggcggagggtgtggggtggtgaactgccatggatggaagacaattgaggaggtaggcgatagtgtgtaggacctcaacccagtagcaggcggggaaggaagcttggaataggaacataacatgttggtggtggtacaaatcatgtgctcagcccgaccgttctgtggggaggtgtagggacaggatagtcgcagttgaactttgtgagagaggaggaag

SEQ ID NO: 184992 - DNA, 820 bp, Zea Mays
tggattttggcatgagcgatcctgatttagttcccttgatcatccaggtttggaatacttatggcaatcctttgtataagtgttaatttttatatgtttctttattgagttgctactactacaaatttcattccaaatactgtgcacgaactatttatttttatactacctgtagtgtgtgtcacagctttctttatggcttcaaagctgggatgctcacatgtataataattaattggtgtattttgtgaattctgaaggaaattttgtcatttatgtttgccaaatgaatgtgtatcataattgtttaaacatgtatcattttggacttcatttgctattacctttttattgctgtgacttcagtccagtactgttgaattctactccattccaaattataagacgttttggcttttataatgcattgattttactatgtacctagacataagtgtataatgcatagcaaacctatgtctctagaaaagccaaaacgtcttataatttggaatggagggagtatttgtttttgagattgccattacctgatatacatggatcagcacgttctcttttttctgctcctgaccactgatatcttggaaatcaaagttcttgtgaagttcacatttaaaaatgtgtcccattgtaggaaaattatatcaattatcggcctaacaccatcggcaaggatgaaagtggagttaaaagaatgaatgctttagcccgggctgctgaatctatagcggacggtgatcttgttaatgtacagataagaagatatcgacagtggcagctgtcacaagctgcttgtttt

SEQ ID NO: 184993 - DNA, 588 bp, Zea Mays
cgctcaatctcgtctttaagcagttgagggtatcggtagggtcgtacagccactggttctgtaccagccagcaaccgtatgtgatggtcttggcgacgtgatggtggcagtccctgagggtcctgaaacaaatcagagaaagaggacagcagttcttccatacaatccctgttcttgtccatggatgcaaatcccaacactgagtccccaacccctgtcaattgtaccaaccttcccttcctccagaatgccattatgtgtgtgtcaaagttgcagaccaccagtcctagagatcgcagccactgcactcctaatacgagatcgaaaccatcaagaggcaaggaataacatgttgtggtgaatttctcctggccgatggtgagggttgctgtgatttgacccttgcttgaaatgcgttccattggcaacttttaccgataggcctggctgggacagcacttgcaatccgagacgtgccactgcagcttcactgaggaatgtgtgagtggatcctgaatccactagtgcagttaaattgatgccgttgattgtgactgggagcctgagagtatctgtgacgcctatccc

SEQ ID NO: 184994 - DNA, 637 bp, Zea Mays
ctgccgtgagcctcgaagtgttgggaataactgagaagttttcagttgctgcaggcgctcgaagcatcactactgattacgcgaagctagattgtgtaacatcaatcttaatgggtcttttatctaggaaccaatccttggctttttggaaggctttccttcctgtggtctacaatatatttaatgttcatggtgcaacactaatggcaagggagaatgaccgcttcttgaagcaaattgcttttcatcttttgcggcttgctgttttccgaaacgattcgattagaaaaagagctgttgttgggctgcagattcttgttagggtaagctgcttagctgaattgtagctttatctggtcttcaattgaatgacactgattagatgttcttgtggttctagaactcattcaactatttcaaaaacactacaaggttaagggtcatgttgacaattactttgtccgagttgatgtccgacgtgcaagtaactcaaatgaaattcgatggttctcttgaagaaagtggtgaagctcggcgccttaggaaatcactggaggaaatggctgatgtgagaagcaaggatctgttaaaagattgtggcctccctgttactgcattggaggcggcccctgaaggc

SEQ ID NO: 184995 - DNA, 678 bp, Zea Mays
tgagcttcaagcatgccaagtacataatttcgaatagatggcgttattgtatccaaaaagcagatgccaccaagaaagacatggaaggcacataacttgctataggtaatctgttttatagtttgattttgtaatgtcaggaacttgacaaaacaagttcagaaatcaacagacacaaagttaacgtaacttcaagtgagaagttggtgaaaaggttaaccaagggcattgaggagtccaagaaagatagagaaaactttctgctgaaacagagaagatgatgtctatgttcaaagagattgagaagaaagcgtttgttgttcaggaagagtataagaaaacacaggaggtatatgttatgtcgcattgcacttctggctgcccccccccccaaatctatttgcactttctgatgagggtttctttatttgtttttacttagatgatagacaaccataaagttgagcttgacaaaactaaggaagaatacaccaaacaaaaaaaagcaatggatgaactgagagccacagaggtatgtaatttggatcctgttaagtagtgttgtcataattctgttgtattgtttctttccacaaccttgtgtgtttggccataaaacaggttgacgctgagtacaaattgcaagatacaaaaaagcttgccaaggagtgggaaatg

SEQ ID NO: 184996 - DNA, 273 bp, Zea Mays
atcaggtccgaaggcaacctgctcctgaacgactcaaagcaacacgccgctgatgctccagaaccagacgctgctggagaagagctgtgggacttcgagagtagttcaaccatgcccatgtattacaaaaaatgcagtcggccctgctgatgataccgcctgaaatttgacccactgtaatactctactcaacttttattttctccttttctgctcaagaatactttgcttaattcagctaataatgtcatacatataccatgctgctcgctg

SEQ ID NO: 184997 - DNA, 1479 bp, Zea Mays
aagagtacagcgtgaccataaaagatgctgccaaattagatctttacagccttaggcagttcttggctggtaggcagagggaactgccacaggatactgtccaagccctcgatattgctatgcgagaatgcccaactgaaaagtactagttatgatgcatccatgcaaatttaatatccattgaattcatgtcgccctatatatatttgtttggcggactgactattgtatatgatccttctgcggttccatcagttctgactttttttcttttcaaactgtgacaggtatgtatccatctcaaggtcatttttctctcagtcatttggacatggtggtgatattggcagtggtgtggaatgctggagggggtactaccaaagtctacgtgctacacaaatgggattgtctttaaatattggtatagttgtggctaattcttttgccttattaaatcacacataccacactatctattctcctagacatttacttggcatgcagtagcatctatatgtactatctgtatgtccaccaaattaaagagtaacaagctcaatttaaagcttctgccgtgggcatgatgtatattacacattcgtggtgccctttgttactcttgtcatcaatgaataagttaggtcactgtacagtcttacaggactactgttctgtatcatgcaagtgtactttgtactatgtattaagaatacttgtatatattgtatatgccattgtgccacttcatcttgattttatatacaagtattaaagaactatagtattcttttcgtcccaaaatataagtattcctaaatttgtccttaggagcttctccaacaactgacttgggttttcgccatgggacatgagagccaaaaaagctatgagctagtgtaggaataagagcttttgcaacaattggtgttttagggcctgtttggaagggatccgtgtggctccagctctacattgtagtagtactataggtgtggtggggccaggagccctagaatgatggcttctccggctcctccactcttgtagttgtatttttctggagacagccatccagctctgtgccatagtgttgcatattgcacatgcgcaggaagtcggataaatttcaatgttaaccagtaggggtgataaaatttgtttattttcctttcagatatttcagcaactgcattttacaaggctcaaccgattttggagtttgcattggagtacctcaacatacgtgacacctcaaggcgtttgtctgaccaggatcgcttaaaagtattgaacatcatacttttattatatcctcattagttctaatgttatatggtctgattgaatcatattttgtcgtttctctttgtagctgaagaaagtcctcaaaggagtacgtgttgtggcaacacatcgtcgtgatatagccatacattacaagattactgggataacctcacttcccttgaatagtttaac

SEQ ID NO: 184998 - DNA, 550 bp, Zea Mays
gcaatccgaaacaacacatatatatcaaacacttaacgaaatcgactcctatttaacatgagttggctaatcacagtagaagacctagcgaaccattttagacatcgtaactcaagaacatgggttggggccgattgatcagtgtttctcaaccattgctcaacttgaattagttaacacacaagtcacctaaatagcacatttttggggtctatcgtggaggcatttacacatggcgtaaaactccataagactacatttgctactggcatcaacaatacctaccgacctattattcaccatacgaacgcaggttacccgccgcttactagtttttaacataatcctcatatagctcggaattccaactactcactaacaataaattacgcacgaccactaccacatcgacccggttaatttatttggacaccgcctagcgtaccactagtaccccacattttgattcaaggtcaataatacatcctttattcgattataccacagtgacctaagcgtcgtgttacccaatgtgtacatcttttcttgt

SEQ ID NO: 184999 - DNA, 565 bp, Zea Mays
ccgctatacacatgcacttgtatcggaagttcttatgcagcatacttacttttgtcaagtttttcttctccaccccatagcctttaacatatagataacccaatccattgtaagctgagtaatgttgctgcttggcagcaagtgccaaccacttgtacgcttcagtatagttcctttccactccagcacctctagcatagatctcacccagaagctccaatgcccgtgtctcgcctttctcaacagccttagaaaaccaatgaaatgcttttccataatcacggcggagcccacgtagtccatagtaatacagaagccctaatttgtacatgttggcagcgttgcctcgctgtgcctgatactctgtgatttggaaatcttcatcgtcctcacctcgggacttcctcaaggcctctttattttcttcagtcccactgtgaagacggattggttcaatcactggtggctcctttgatatcaaggagcttgttagggcagcttctgcaagttcagcgtatagtataacagcttcttcatacatctgaagattaaattgacaggattt

SEQ ID NO: 185000 - DNA, 286 bp, Zea Mays
tccctattcctctacattgcatcaacattgggctgctgcaacgccgaagcacctgaattcacaagatgacaacatagagttaggcactaacaacatatgcattgtggcacaacaattacaagggtaaaaaagacattcgacaacaaagtcaacacactggctggcaagtgacaaacacaactggattcaagggtaacaaggaaaaactgtgatactgatacagttcagtgacaagatcaataggttgacaattaactggcagcttcagtaacaacggaggaacacg

SEQ ID NO: 185001 - DNA, 387 bp, Zea Mays
catttcctttaagatttctgcccttcgtcagagcgttgtcaatgctagggcggtttctcctctcccatggccatcggattcgccatttgacatcacttcaaagtcttggctactttgacctaagcacttgctccagatatactgtgtggcaacttggcaagctgaccaatttgagggatcttcatctaacctgctctgcagttcgttccaggcatcgaattagcaacatccaatgccttgcctctgttctggggaaatgcaccagcctcgaatctctaactatccgtggcgaagcatcttcaaaccagagcatttcttttgatggcttaagcagcttgtcttctccaccgtacaacctcgtgagctttgtgctgtccccgaggattt

SEQ ID NO: 185002 - DNA, 478 bp, Zea Mays
tgcttggtgtgttgatgctggacagggttggaggtcatgtagacggtgttgatgttgtcacaatacactagtgttgtgcggcgaagaggagcatggagttccaggaggagctggcgcagtcatgtggcttatgtaactccattagctacaacacgatactcggcgtcagcactagacctggagacagtgttctgacgcttagaggaccaagagatgaggttgtcaccaaagaacgtagcatagctcgaggtggacctgcgtgtatccgggcaaccaacccaatcagcatcggtgtagaccacaagatcagtcgttatagatgatcgtggcaggaggccaagatcaagggtgccacgaatgtatcgcggaatccgtttcagtgcggcaatatgtggttcccggggagagtgcatgtgaagaaaaacttgctgaacaacataggcaatattaggccgagttaatgtcaaccaattcaaag

SEQ ID NO: 185003 - DNA, 346 bp, Zea Mays
atcagaaatcccatgctgaacctgttgaaaattcaagtagagaggcagcctccacaagaaagagtagcagcagaacaattgaaggaaaaacaagcaagagggagaaagaacagttggagaaagctaatgccaagaagccaaaatttactgaagaggacaactccaaatcattggagggtactgctgaagcctccacacagaagataaagggcagatcagttctagaaaaaacaagcaagaaggagaaagcgtataccaagaagctaaagcatactgaaaaggtctcggaagcactaaaaggtccttcagaagcctccttccctgcaccagctgggatggtagtccg

SEQ ID NO: 185004 - DNA, 483 bp, Zea Mays
cctgagacaagatatcgatcagcaaatagttctactaatcgaggccttagaagtggtgtagatcgtggtggacggaacaattctatgcactccagctctactggtaatagaatacgtggcatttttaccctcaaccttattttttttggcttattatttttctgaccaaatcttcatctcaatccaaaaatcagataacatgacctcaaggccaccagggtctggtactgcatcaggtacttccagtcagaggcaaacagttgcaaggtaaaggggcaaaaggacccttctgtgatacattcaaaggatctgtgctgtttgtttatgtatatttttttgtcagcacacttatgtttactttagaagtttaaagtgattttctgttttccttcacataattttgttgtggctcgtatgtctatttttttgttactgcttggtgttaatttctttggtttagtattgttctttaggtagttcatt

SEQ ID NO: 185005 - DNA, 397 bp, Zea Mays
acgactttgagattgtgtcacagctaaggcattgtacaccatgtccagggagcaatgagacaatgtagtcatttattttatcagttgtaaggttattaggacatacaatggcgcgtgtagctaagtatgtagggtccatatatctctctaacaaatttgggtagacctcggatatgagcgacgcagtggcatccccatccgtgcatatcaacaaatcttcaggaatcgtaacccatgtaggttcggactcgtctcctcttgccacggccggcagagcaccatcgccgatatccaagacccatttgccaaattgttccatgtctgcatgttccttcccatgtaaagaagggttggagagcctcatatttgttcgtagtttcaaaatagttgcatgttg

SEQ ID NO: 185006 - DNA, 405 bp, Zea Mays
cctagctggacagaaaggaccatcaaaacagagcccaccttatccatccatctctcctcccagccacacgcaccagttcgcagaactccatcaccgcacgactcttcgtcccttctccactgccacgctactgtctcttccttctccgtcgcggccagcctcatcccttccgtctgactgtcgctgcctctgccgctgccagcctcctctcaaccatgcctatcatatccgctgcattgcagctgcatttcccatctccatcaccgcccatagactgcctttgctgctcgacgtccacatctccctggcacccaccatacatgcctcctcccccgccgccacccactgttccaaccttctcccatgccgctcagcatccggatctgcacataagggcaccaggga

SEQ ID NO: 185007 - DNA, 403 bp, Zea Mays
aaccaagtcagatagttcactgttcatctatcaccaagggccagacactgcctatttgctgctgtatgttgatgatattgttctcactgcctcctctgcaaagtttctttagtatgtgattggggctctccagcgtgagtttgctatgacggacatgggtcagcttcaccattttttgggcatttctgtgacacgttctgccaatggtctgtttctctctcaacgacagtacactcaggatattttggagcgtgccgggatgagcgtgtgcaagccgtgtagcacacctgttgatctccactccaaattatttgcagatggacctcccgttgatgacgctactcagtaccgcagcctggcaggtgctctacagtatttgactttcacccgtccggacattgcc

SEQ ID NO: 185008 - DNA, 746 bp, Zea Mays
gttatctcataaatatccttaaccacttgcaggctccttactgctacggtggcttggcctgctcctgcagtgatttacattggtattattctgtccaccttaggtgcagcactgcagagtttgactggggctccaaggttgcttgcagcaattgctaatgatgacattcttcctgttcttaattacttcaaagtttctgagggatctgagccgcatgcggccactttattcacggccttcatctgtatttgctgtgttgttattggaaacttggatttgattacacccacgatcacaatgtttttccttctgtgctatgctggcgtgaacctgtcatgctttctgcttgatctccttgatgctcctagttggcgccccagatggaaatttcaccattggagcctttcacttgttggggcattgttctgtgttggtatggttcttaatacttttaccattttattttgttttatcacaatcttcagcatgaacagttgatacttgagttaggtccttggtttgagactttgtccacttctattatttttaatctaaccaccttctcttcacctacaatactcaattattatttatcatgttttacaatagcaaatatctaactgaaacagccatgaaagcatttataattataagtgttgacatgaatctttgtatcaatttcagtgattatgtttctgatctcctggtctttcactgttgtctcccttgcccttgcaagcctcatc

SEQ ID NO: 185009 - DNA, 426 bp, Zea Mays
tcgatgttgggatccggctgctcgatggatgcagatgtcttggaatgtggttttcgatgagtctcgtcctttttaccctcgttcttctactgttttctcaacatcttttgttgatccactttcttgcttgtttgttgctatggcctgtgtgccgatttcctgctcagcgcctcctgttgtaccttcttctgtgtattcttcggagtcttcggtcttctttggagtcttcggttgtggttctagactacaccgtgaagcctcgtgtgacacgggtctatacacgacatcgtctctcgaatgtttctgctatgccatcttctgatgtgctcaatcattctgatgcttcagcttctcttgttggatcatcttctcctattgagccatcctcacctagcgattcttcacctgagtcgcttcttcttcata

SEQ ID NO: 185010 - DNA, 428 bp, Zea Mays
gccacggtcacgaagatgataaccctgattaaaaacaacatgagagtcatcattgttagtacaagtatcaacaacaggatcatcgtcaggactggccgtgggagtagagcgaggacgacgaatgtaagtctgagtgacatgtggtttggaagagtaagactgagatggtggggaagtggaaggtgatgtgatgggaataagaaaatctggggtagaaacagtaggtggtgatactgatgaagtttcagaaattggaggaaagctcatgaaggaggtagactttgtggaataaaaagaagaattagtggaagagttgtaaaagaagggtcgattttcattaaagctcacatctcgagaaatacgcatgtgacgagaagatgaatcataacgccgatagcctttatgttcagggctgtatccaagaaaaa

SEQ ID NO: 185011 - DNA, 382 bp, Zea Mays
tgatgacactgacattcagtacacacctcctcagccacgagcgacacgttctcaagctcaacctctgaaatcttcgctccgtaccaatgagactaggcagattaggaaaggccagaagaagctcaagaagtcgcctaagaaagtctcccaagatgttgagcttgatgacaatggtttccccatcatcgactttgctgctctagaccgttttgatcctcctccacatcttgccgtggatgttgagagttatggtggaccagctgcctcaggttgatatggtggactcgtgtcactattcagacctgaatggcgtcgcaaagtggctgcaaagcaggcagctttgaggatggtggcagaaattcttgagaagaggattgctcac

SEQ ID NO: 185012 - DNA, 281 bp, Zea Mays
ggaagcccgtggctccggcggcggatcgcaagtcgaagaaggggacgctgatgcagatccagaacgagacaatatccgctgccaaggcgcttaaccccgtcaaggtcctgccccagcgcaacaggaagaagaaggcgcgtcccctccccttctccccggattttcatcctctcttcattcgcattccaggtctcatgctgtagtttatgcttctcgttcagcccgtctcctacgcacagctggcccggagcatccacgagctcgccgcgacgtgcgaccag

SEQ ID NO: 185013 - DNA, 663 bp, Zea Mays
ggcgaacattaatgcacctaaggaagttattgaagttgaaaattcagaacctgaagatggttggcagcctgttcaaagacctaaatcagctgggggttcaggaaaacagatgaaacattatcgcccaaccaccagaaaggtgtatgaccctgatagtcatgatccaacatatacttcacaatacaaggcaaggaattcctattcaaataaccggtattatttcttaaggaagagaacagttgtacctacaacgtacacagatcctcaacagcatgtgaaagttcagacatttggtgccaggtttggtcgcaagatttacaaggctgtgacctatcgggttaagccagcgactgcaacaacagaggtgctagatacttttaagagtacagagcagatgagtggtaaagcagaatcacaggtagcaaactcacaagcacacaatcctacctcaacagatcacaaaggaagtgagtcacatggaactttagttgcaagtagtggaaatgctccatcatacaaagatgttgcactagcacggcctggaacaattgccaagactcaaatacagaaacctagagacgatgtaccacagaaccaaccatcacttggtcagattattgcacaagaaatgaaagattctttggttgattcactccaagtgga

SEQ ID NO: 185014 - DNA, 1855 bp, Zea Mays
cggcggcggtgaacgcggtgttcgccaagctccgccagacagcgtcgtcggaatggaacatcagcggcgacccctgcaccggcatcgccacggacggcaccgtcatcgaagacaacggcaacttcaacccgggcatcaagtgcgagtgctccgaccagaacaacatcaccgtctgccacgtcaccaagctgtaagtgcttgtgctcctctctagacgcgcgccaggtgctcgatgaaatgctcgccttagccttggccgctcgcgttgggcctgtcgcatgccgtgaatgcgcatatctttccaccttttgcgaatgaacactggtctctgcaaaagccaaatacttgttggaggtttcgattcgtgcgtgttgttgggtttctatctgacgaacagcggtcatggctgaggctgacttgagatggcatgagctgatgcctgatgggtacttttgtgttgccaatgtaggaagatatacgcgctcaatgccgttggccccataccacaggaactgcagaatcttacgcgcttgatcaatctgtatgtgctcttagcctcttaactttcttgcatgaaattgtctgggaaccaaaacatctatctctatctcaagcgccctattgttaaaactgttcactcgtggttgattggaatgtatataacctgcctgatgcgtgtcgcataattttatgctcccattttctcgttgtccattatggatttcgcagattgtagatctcatactaccaccttagtatttctctagcatgacatttctgatagagattagtacagacttcctttgacgattgccgttaactgtcattgtgtctgatattcctcataagctttggcagtaacttaagatgatatgagttcacagtggtccaatatactcttcaggttattggctgcttaatgaaaaacgggccaagccagacaacagaaaaactcccagattcagatatgatatgaataataatacctcatggagtaatgatccgatctcctttccaatgatatctgatctgatgttgtttcagggatttaagcaagaattacttaacaggttctttgccatctttcctcgggaatttgactgctatgcagtacatgtgagatttacaacataaaatattaccccgttacatattttacttaacatcaaaacttaaactttccctctttgaaaatacaaggactttgggcaccaatgcattgtctggatctgttccaaaggagcttgggaaccttgtgaatcttgtatctctgtaagaatttttttgttaatatcatggcactattccatcagaatcacctctatatttcgaatcataaatactagagatatatgtttcatgccttcgttccttcaaataattagcttctgctaggaaaggtagctagaaaccatgcttcaagaataaatatttgagttttcaatttttttgaccaacctggattattttgctatttttcagaggctttggctcgaactacttaaatggcccccttccttgggagttgggaaacctggcaaaactggagcaattgtgcgtctagaatcttcactaattttgggcattccgtacattttattcttttcattttgagacaagccaattttacagctgttaacgacaggcttagtctaggattgttgcactccacacatttttctaaaacgaaaaattgcacataagattgtttagaacctaaatcagtttgatatggaatgcagttttgctacttcgacatagtggaaagggttagtttacctcttgctgattggcattagagacaataatatgggtaaaggatgcttttgttttgaagccttttggtccaagttag

SEQ ID NO: 185015 - DNA, 1276 bp, Zea Mays
atgtatatgtccttattttgctccctatattgctccattacttgtcttattgagaaaatgactttcatggttgacctttcagacataaaccaaattggtttaggggcatcgtggacgtagaagaaaatagcatgcaattaaggtaggaagggtcattgttaagccgccatggatgaagcatacattgtggttggcaggctcgagaatgcgtcgtgactggaggctgtgcaccgggttgtactaggtagagggccccaaccatataccaatgtttaaggaaacggttgagcgatcctcaacgatgattgcaacgcgtagaacatcgggggtagaaggtgctaggtgtagcctgctgttgtcggattagacaaattagatgtgaaacagatgtggttgtgctagacgaggttaggtcaagcagtgtgtggatgatagtagatgtacctacttagaggttaggcatgcctgaagttagtggtccggacgcaaggtacacgtgtcgtcaatgcatagcatacgatgatgtagatgctgcagtgagtgccatcttggatagaggcatgcttgtgagagtgtgtcctttggtggataccattggaagtggtgttgtgactcgaggaggcgacacaacaatagcagcgctattgtttggagtggatgcgtgtagtactttgctaacttcacatgagctaggaggaccgtgcataatcagttggttgatcaagtatgcatgatgtgggatgctaatggaagaaatcggtggtggtgtcctcatttatggtggcgatgatgaaccaacgataatcatggtaattagttccgtgccacatttcctacgatcgtacacttcttcaatactattggagttgagtgacactaattagtgcatgtatcatttttggacagggtcgttgtgggattgggatatagagggcaacattgctagaatcatgacacaattatgacatcatgctctagtgctatgtttgtcccgcttgagcctcaagttcgagccaagcatagttgtcatttggcaatgagtccaatgcacccgcacaagaggagtctggactcctgtgcgctcgtgtgacatgctagctgagacaacatccttgtgatatacaactgcaggccatggatgaaataagaagagaggtgagcaaaagaaacacaaggaaaagatggagagaaggaaagaacatataagaatgatgtcaatggactgaggaattcttttttgattcttgctttgtattacttaaactaagtagtgggg

SEQ ID NO: 185016 - DNA, 512 bp, Zea Mays
atgatttgtccctctttttcactaggagtactggagctgaaaaagctgatgtgctgtagcggataatcccctgttgtaacatgactgtgcattgtgcctccaattcatctttttgaagctgtgggtacctatatggcctaactgcaacgggtgttgttcctggcaaaaggtggatcctgtgatcacaccttcttgctggaggaaggtcacttggcgtagcaaacaccttctgaaattgcaggagcagacgatccatcatcggtttgatggttgcgatatttgtgctaattgttctcactgctgggtacacattaatggccttccggtctgatcccagtcctttccacacaatccgttgtccccttctccagaaagctaggcacaggttctcgaggtcccaaagtgaagctgatgtcgaaagaatcaattgggatggcgtaagcatccatcagaaagtcttcctgcccgatagtgaagctgatgatgttggagagcttacaacacatgatttt

SEQ ID NO: 185017 - DNA, 298 bp, Zea Mays
gctcggtgttgtaggtcacaacaccaaggtaacacatggtgcttagcgtggcgtcaaatgtgttggtgacctggtgccaatgtggacaatgccttgacgctgagctcgatcccgcagatctccgtgccgagttgttaccctatagattttggtgtacaaaatacaacaactattgttccgaaaagcatacaagtatacaacaccttcgttgtagtctagttagttaggatactcaagtcccaataatagcatttttttgctaatttttatagtcatttccgtcccctatgcaaatctc

SEQ ID NO: 185018 - DNA, 513 bp, Zea Mays
gccttaacacgtaggatgtcggacaatcctccccaaccttctgttcccccagcgacgagccccatccctgtgacctctagggcagcagctgccacaagcacgtcgcccgctgcgcccgtgtcacaggactccttcattgtgttccagcagcaggtgttggactcccagacattgatcatcaaccacctgtcggcgttgaccgcccggttggggcaatcgaggtgcaatccgcgtcggcctcgtccatgattgatccttcatcatcgtcccacgtcttcccctcgactgcgcaagattaacctatggccctcccgactatgggggcatccaaaccgcacccgatgcgacgtcctccctgtcacttagaggtcaagtaaccctttctatataaggagaaggattatatcaattgaaggtaagcagaagattagaaagaaatcctttctctcttgccgacagtgggcaaagccctgcgaccgacctccccagcgccccatccttaatcgttgcgcc

SEQ ID NO: 185019 - DNA, 535 bp, Zea Mays
gctgttcttgagacatttcacagaaggtgacagacggaaagcaatggtgtatctgaagccaaatcagcgggaagagtcacactgtactacgtttttcattggtaataacttttgacaaggtttccattccttcatcaccataggtttttccgatctttaaacaggcatgtaaattttccaggagtatccactggcggcttcatagcattgttcataggttactgtatcatggcacgcgttgctggaatgtacactcagcagtcaaacaaggtgtacatgtcaacttcttatcctgttcttaggtgagctctcaaaatgccaaatcagttaccgctgtgcagttcctgaaaaaagaaaaaccgttatgccattgctgacaatacatgatcccaaactgcagcatgttcagcctcttcttcctgcatctcttcatctatgggtgtaacatcttcatgtggagaaagacacgcataaaccacacattcatatttgaattcacgcctactaaagagctcaagtaccgagacgtgttctt

SEQ ID NO: 185020 - DNA, 350 bp, Zea Mays
gggcaaccgataggtgagctcattaagctttcacaacattattttaaggcagtttacatcctggcgaggatgcttcgtgatttcggcggactagcaagggtcctcttccgtgaggtgagtccctgcccttttcttttcttgtgctgttcttagatgcttgtgtgcccatgttccggtgcctatccattaacctgatgttctgtattatttgctttgttgtttcgtgttttccagtttagttgctatgaggcttgtgtgcggctatagaatattctagatggaaatagcagcggtgtgattggaagaacagacatttggcttgcacgattatcaaatgccactatagaata

SEQ ID NO: 185021 - DNA, 301 bp, Zea Mays
tttttctttgacaaggtataagctgtccaacagcccccggcccattagattgcttttcttgtcccaacaattccttatgatgagttaaggagctaattaaactacttaaaccgaaataaacaactttagttgattagttcctagttcctacaattattatagtagtcagcatttgcttaggatgtgtctcaagtctcaactgtttacgcaagatgacatattgctgacctttttttggcacatgacattttctagtagttttttaacaattagctgagcttagaatttatattgcatatca

SEQ ID NO: 185022 - DNA, 511 bp, Zea Mays
tggcttctaagtaaaggaaaaaggcattatgggactctttggtggcttgcattagcctgtatctaggcttctgcagtgtacttcgcctgtttggttgtggaaatctttatgcaggcttaaacaatgttcaaagtactagctagtacattgattaggcgatgtagatttacacaagccgatgaacaaaaaaagtggagaaattctcatctctttctaccagtactagaaacataagttctctactaaaacatggatgtgactgcatataacacaatgtaaggaaccaaacacaattgtattagtgcacaatgattacataaatcaatttacaatatctctgacaacaacgaatgaataattaaactaaatctagcgatggttagggtttaggggttggacctttctgacttttgtgcctccttgtgttcaccatcaaggtcgtctgcgatgacccaaatccagcgatggttagggattaggggttggcgagagaaatgtggatggggcgtgt

SEQ ID NO: 185023 - DNA, 464 bp, Zea Mays
gttcacctctctttgccaataaaaaaattgttgcctgttttgcccataaaaagacccccccccactttaaacaacccagtggttagcaagtgaaacccaaaaaaaaaacaaatcacatgcttgtgttggtattttctgacccttgagtgtttcacccttaaatttacacctacacaacttgtagacacccatagcttgacccctaaatcgactaaaacttccttgtgcacttgttgcgtcaaaaaaacaaattattattgttggtgtctagttgcgcaaaccctatcaaggccatgtttctttccataaatccttgccccaaaaacttcatagcatttctgttgatcatcctagctgatcctgtttgcatacctctcctttcacttggatctagtaatctttttccttgcgaatcatgttgtggctttatcatccaaatctctgatccttcattgattctgccc

SEQ ID NO: 185024 - DNA, 702 bp, Zea Mays
ctacctcccctcccgtccttcccctccccctatcctttctctctctcctctccctcctcttctttattgctttaacgttactcccactagccacccactcttcctcgaggccaccacaacacccccgggacacacacacagtcacacacacataaaaaaaaaaaaatcccccctcgcctcggattcgctcgcgcccccgcccgccgacgcaacagcgaggtacgaagcgcgggcggatgggcagtatctcagacgggccgccgaaccccgcccagctctgcaccccctcgtttttctcgatcgattcttgggtttctgacgggcgggaatgaatgcaggtcgttccgttccaggcttcggacggaggcggggtgacgtaaggaggtgcgcgggaggatccgttcgcgcccggaggaccgggatccggcgcccgtcgtcgtcgacgcccatgtcgggccacctcgatcgcttcgcgcggccatgtgagttccgaggctcctcctaatcctcctcctctgaccatctcgcggattcgaggctgctcgctgctgggttcggaatccctgctcgatcggccgcaataggcgtagggcgaccgcaacccgcggcgctgatacgggtaccccctccgtgggtttccatagtccggctggctagctgattgagagctcgctgggttgaattcgccgtggtctccttctc

SEQ ID NO: 185025 - DNA, 509 bp, Zea Mays
gctattcactgtgaacaaactagaatacttaccgagggatccctttgttcctctgctcacctccattactgagaaccatcatggagtgttcgctgctcattaagccgccacggaccagagagtcatcattgggagggcactgagcgtggcctgttacaccatgtaccgccgcaccgctaggtcccaggcttcgagcatcgcttgtggagaagatacactcggagccgcagcccagggattcctcgccgccggcgcgtggaggcctcgccgcgtcgccaggaagggaggagctgccgtccatggattcctcgccgttgtccagggattcctcgccgccggccatggagggatcgccgccgaccttggagggaccgccagccatggagggatcgccggccatggagtacacgccgccacaaactagggttcgtggcctgtcactcacgtcgagcggtggagagatggggaacagtggtggagagatgggaatcggcccagcctggagtctg

SEQ ID NO: 185026 - DNA, 577 bp, Zea Mays
acctcgggagcaggatttggtgcggttctgcaccagggagatggcgcaatagcctatttcagcagggctgtttctcctcaccatctgaaacttccggcttatgagcgtgaactaattgggttggtcaaagcagttcgccactggcggccttatgtttggggccgtattttcatcgtcagaacagattaagcttgaagtatctgttggaccagcgcctatcaaccattcctcaacacacgtgggtaagcaagctgtttggctatgacttcacagtcgaatacaagccaggcaagctgaatgggctgcagacgccttgtctaggcgcgagaagggtcccttgctgttgctaccatctctaccccaaccttcgagctgtttgaggccttgcgaacagaggcagctcaggatcctcagattgctaccctacaacagcaactagccgatggcacagccccagccggctggtcacaggcagatggtcttcttctcttctagggcatagtttttgtaccagatgcttctgccttgtggccacacatggtggctcatgcacataactcagaacatgaaggcatcc

SEQ ID NO: 185027 - DNA, 2239 bp, Zea Mays
cggaatctaagtccgagtcgccgctactagtcgctcccgaaaccctagcctcggcggtgatggcagcggcggcagtgaggctggttaaggagcgcgagaggaagaatcaggtggtgccaccggcatctccgttaatggaggagcccgtgtggaaggaggaaaagcagcgtaagaaaaggaaacacgtgggcgccgcactggtggttccatcgccgccgactcctgatgcggcccaaaacttgcggatggaagccaagatgatggctgagggggcgacggtgaggaagaagcagaggcggctgaaggcggggcaggagcaatccggcgagccaccattttcaattgatgtccatccacaaggaggggaagaagctactgatgatggtggcgttggcgtcatggtcactcagtgtgtcaagaggagcaaaagcaagaactcccgggttttgaagacgcagcagacactgccccaaggttttttccctcccatggccaatcccaattccattgatcaggaccccaattattcctcaccttttggtgcattctttgcccaattcgcctacaaacctgctaatatcgctgatcgcccagcgaggctgcctcctcgaggccacccatcatctgggtcttctctactcactggaaaagagacctccaaggctgcctggacagcaacctcaaacaccaagcaaccatgcccagcctcagaatcaacctcagattcacaagaagaggcaaggatcgaagggaaagaaaagcctgagaagaagatgacaagggagatggcagtgagggagtctacccgacatttggcaatactggaatccatgtctgcttcctcagtcccagtcgctcccgaaaccccaacctcggcggcgatgacagcagcgacagtgatgcaggataaggagtgcaagagggagaatcaggaggcactgccggcagctccattaattgaggaccctgtgccgaaggtagaaaagaggcacaagaaaagaaaagtggcacaaatcacgcagatggaaaacaaggtgatgacagagggtgcgacggtaaggaagaaacataggcggcagaaggtgaagcaggagcaatctggccaaacaccatttctcaatgatgtctattcaaaggcaggggaagaagctgctgctggtggcgtcatgggcagtcagtgtgtcaagaggatcgaccgcagcaagaattccaaggttttgaagaagcagcagacactgccccaaggctttttccctcccatagccaatcccgatttcattgatcaggaccccaattattgttctccttttggtgcattttttgcccaattcgcctacaaacctgagcgccggcaagatgggaatggttcgccacttcctagtaccactggtcgcacagcgaggctgcctcctcgaggccacccgttatctgggtcttctctgcttactgcaaaagaggtctccaaggctgcccggacaacaaccttgaacaccaagcaaccatgcccagcctcagaatcaacctcagattcacaagaagaggcaaggatcgaagggaaagaaaagcctgagaagaagatgacaagggagatggcagcgagggagtctccccgacatttggcaatactggaatccatgtctgcttcctcagtcccagtcgctcccgaaaccctaacctcggcgatgacagcagcgacagtgatgcaggataaggagcgcaagagggagaatcaggaggcgctgccggcagctccattaattgaggaccctgtgccgaaggtagaaaagaggcacaagaaaaggaaggatagggaggctgcaatgattataccatcggtgcccactgctgctgtggcacaaatcacgcagatggaaaagaaggtgatgacagagggtgcgacggtaaggaagaaacataggcggcggaaggtggagcaggagcaatctggcgaaacaccatttctcaatgatgtctattcaagggcaggggaagaagctgctgctggtggcgtcatgggcagacagtgtgtcaagaggatcaaccgcagcaagaattccaaggttttgaagaagcagcagacactgccccaaggctttttccctcccatagctaatcccgatttcattgatcaggaccccaattattgttcaccttttggtgcattttttgcccaattcgcctacaaacctgagcgccggcaagatgggaatggttcgccacttcctagtaccactggtcg

SEQ ID NO: 185028 - DNA, 689 bp, Zea Mays
gttgttgctgtgctgtcagtgctctttatggagtttttggcatttgttcgatgaactgtgctgcacagaatgttattggcttcttattggctttattgctccattagttctgtagactttctcccttttgtggggtgtaaagaatgttagattacatgattatctttttcatgacgtcaagaacaaggtttaggaagattaggagttttgtttcaatggaactacttgtttcgtggtgctttgatgtgaggtgtttgatcttcttatacattcatctggtgtggatgtttgacaattgaattaaaatgaattgttgaagttggtaagggttgttcttagtgcatattacctcttcataaaaagagtgttgttttaagacattgatcttgatgtatagctgcatccaaattcaatgatggcaaatcctagtgttgattgcacctatgacaatgccttgggaattcgttttatattgttttatgattgttgtcaaggtgtgtcattttctttggtaaattagtccgacttagaggttatttcttgaaaaactcttttcatgatctcgtcaaggctactagtctactatatgagtctatttagggtgtttgaccgagttttaccgttggtgaatgtcttgatttgtagaagtggctgaattcgaggacgaattcttttaaggggggtagaat

SEQ ID NO: 185029 - DNA, 339 bp, Zea Mays
atttctcagtggtgcctttaactgcaattttggttgtttgtttcatttccatcacattttagtaataatctaaaacagtgtgcatcttagtaataatctaaactgatgtgcagggcctatcttagagtcgcggtaggagccttccaaaagcaaattctccatcaccaatagcatcatagaggtaccacacgcagggagatatagcaagggaatgaacatgcaaattcttaagcatgccctctaggcacccagacaaaccgtagatgaaggtgatgattgctcgctcgctcgcttttattttttggttcttctctctgccatcgaatgtcatgatagatt

SEQ ID NO: 185030 - DNA, 361 bp, Zea Mays
tagggactattctcttaattagtatgtgatttggtcaagaggtgtggaaacccatattctcatattcccgttgttggtaggttaattgcgatgattcattgataaaaaagaactcagtttttaaagtcattgtggtcgaaagacctagttcttatatagttcactgctggatgctttcttgtatcattccataggcctgtttggatacacgaactatttactagctagctaaaaattagccttagtgcatccaagtaagaaaactaatagcttagtaataggtgagcttattctttagctaagttttcaactagttgttagccaactagctattcaaactcagctaatttgagctaatttt

SEQ ID NO: 185031 - DNA, 345 bp, Zea Mays
atttctatgaattacgtaatgtcatgccttaatattcatataggtggaacaacagctcctggaatcaatggtgtaccttgtagggtgagttaatttggcagagtcggagttgtggcgtgttatcttattttgttgattgatcttcatttttcattaatttgatgccaattttctatgcatatctacagagaaggaagccatctcaagaagccgcttgccatgtctcatgaactgcattctcgtgtgtctgaaccccaatctcttgtatctgcttcttgtcagcattctctgtttttagaaaactggttctactgaaccatttggacaatctgcttgtagtgttct

SEQ ID NO: 185032 - DNA, 1344 bp, Zea Mays
gttggcttaaatgttgtgagagagatctgcatgagaatacctttggtaggtaccttaatgtttggatggcttaaacaatactcttgtctgcaatggtactagacagatacccttaggcactggaactgaaatctattgcttttgttagctgtgtttcatatatgacataagcagaggggataatgaccatgttttcactaattattcttttctgtattaattactgatagactgaaaaggttgcaatgttgtgctcctaagtcctaacagaattaaacatgtaaatagctgaattggaataaagttgtgaacggttttagtttgtggttgtctgccattatcgtcattgtggtggatttttttattggtgctcttgctgatgcaaaacacacatgtaaacctgagatttttgtgcattctagaatatctggtcagatgtacagtttctttcttcaacttatctttatacttcatccactatggcaaacctgcagatgatgaatgaggatctgctccaagacctcgttttatacaaaaagtcccatgagaaagctgtttccattgctgctcgttcgctgatcacattgttcagagaggtcagataatttcttacaaattttccaatattttttctatatgttggaatcccctgtcgctaaacctctgttgattgaagttcagatctgtccttcattgttagtcaagaaagatcgtggccgtcctgtggatccaaaggctcggcccaaagcatttggagaagtcactgttgctagcaacgttcctggtgccgagttgctagatgaaaatatttcttcagaaggggaaagttcggacgatgagtctgatggttttcactccgatgatgagatggacttgacacctgcccctcctggaacagaagaaaatatggagggttcatctgttgcaaacaaacatgatgccgatggagataccaaagaggaagatgacgcatctgatgatgaagatggtacggatcaagatgactccaacagtgatagtgatgaactagacgatgactctgatgtggatgtgggtactgatatatctgatgaagacgaaggtgacgacggtgaactgaaagaaagcataaatggttcagaggatgaagctttagaccagaatgaagacagcgaagaggaagacaagtcaaaaggcagtggctctaaagcgcagaagaggaagttaaatgattatattggacagctaaattctgctgatgcaagccttcgagctctgaagaggttagcaactgccaagaaggctgaagaaccatctgatgaaactggtaaaattctatccgatgaagatttcaaacgcatcaaa

SEQ ID NO: 185033 - DNA, 276 bp, Zea Mays
aaaacttgaaagctaatttctggttagatcttgcagcaattgaggcttgcacataaggttgcagcttgagatatacttgatcccccaccttaaagaccagttcagagcacaacttatccgcttggcgcttcatccaggattgagcatagagaaggtgttgctgaatcaatttggaaataagctctcgatcctgcaaccactgtttcagattcgttatctcgacggtagtcactgaatccacaccaaaatgtcggggagcatggccgtaaagcacct

SEQ ID NO: 185034 - DNA, 1123 bp, Zea Mays
tggcattaaagtttcagtaaatgacatcatcataaaggctgtggcaattgcgttgcggaacgtccctgaagcaaatggtaatttcaaaataacaaaacaaacatcaaattccaaagtttttttaggcatggaactagaattgttcaattacttatttgtcagatgcacgagtcacaaatcctgttttgtgtacacataagaattccacaattacattttgtttcggaggaatttttgaaggatttgtctgatattgggatttgggaagttaattgtgtgctacccttaagtacatggcagcgttctctttagaaagctagcagtagtagtatcccaaggctgcctccatagcatgattctttctcattttggttgcacggctcatgctgattttgtacgccaagctggtaatttgaacatttatatgttgcactggaatactatgagctagttcctgctcaatccgttgaatcaaagctagttttacattagactaacatatggtatagaatccccataagctgaaatttgatcagctacacaatggggctgtgctgagtttgtgtttacaggttgctagaatttgtgccattatattaaaatataagataccaacctgtctgtgttttttgttcattgagcagtcagtttgggtggttagaccatggctcgttgtaagcttatgtcttgtacaacagtactagccttagactgtccaattggaaccccaggtccagcacccaagccctggccactcctatcgagggagacagtttaaatgtatattggcacacttagcaagcatagtgctagtggaaagcagccatgtgtattgatgtttgacatgttttggcaaatcctaactagaatcatgctagtaatagttttttttctgccctgtttacttaggaagccagctacatgacttttcttttgttctgtagtatagctggattgattgaaactgttcagtaagaacgctggtttctgtatgctttgtttgtttagaccagtatgtagctctcttcagtctccacttttgaagattttatgtattttgcatctattgccagcttactggaacaatgataaggaagaaactcaaaagtgcgattcagttgat

SEQ ID NO: 185035 - DNA, 318 bp, Zea Mays
ataaactgagaagcaacccaattaagccaccttttcggaaatgagctggaaatccaaccatgaaatgaacatgtacaatagacagaaatatatatagaccataatagaactaactactactctagacccgtggggaatgcaacaattcagaattaaaaatgaagacgaagtcgaaaacctatactatgaatctttataggaacctcggttttagtaggctacgtttaaatgaatggacatttcagaacagctgacttaagttcacggatcatagcactttgtcaatgaatttctaaacacgatctgtatatagcttct

SEQ ID NO: 185036 - DNA, 490 bp, Zea Mays
cattattaactcgagctacacggcaaacctgacatcgcttctcacggttcaggagctgacttcagggatacagggcctcgatagcttgatatctagttcgagtgcgattggctaccaagttggatctttctccagaaactacctcgtggacgagctcagtatcgcagagtcccgtctggttgcactaaacagcccatcggattatgcgagagcgctagagctaggttcaggaaacggtggcgtcgccgcaataatcgacgagctcccgtatgtcgagatcttcctgtcgaaatactgcaagttcaagacggttggtcaggttttcacaaaaagcggatggggatttgtaagtgggttgtgcttgctgtaacaaaaaacgcagacatttaacatcttttcagagcatctcgtgactgtcactgctgtgttctggtgcaggccttcccaagagactcccctctcgccgaggacttgtcgacggcaatcctgg

SEQ ID NO: 185037 - DNA, 400 bp, Zea Mays
ttgggtcaagagctaggggattgtctcaggaattgtctgaaaaaaatggacaacctacctcgtaatgacaatcattcctcctctgtcttcccacatattttattgtggcagagacatcgaaataatctacctgatggaggagacattaaagtattcgtggcataactgttctttctcgtcgaatgtctgtagtacgtacggtgttcaggttgtttcgataaggcatcttgttgttgttaatatttaattttatgatgatattttgtggctgagatttataattgacttgtactagatattggtatcatctggctggtgtggccacagcaagtaggaggcatgctgccaaaaaggcaaactttaggctaccgttctggtggtctccaaaaaatggaaccat

SEQ ID NO: 185038 - DNA, 285 bp, Zea Mays
aatcctaaatggtggctcttgaggactcaccttgacatagcaggagtaccccgtattcagggtaccatgcaatgacgtggctttctactcaagcattacatgcatgggctgagtttgttccagaaaacatgggatcgagcatatcccaactgacccgagccttgcatatacacacacgctaacatcgtgatcattagctaggttagcttattagattttgcccacttttagtgaccctagtgagaaggcgatcagtaggctacaacatgccatggtccacaaaat

SEQ ID NO: 185039 - DNA, 830 bp, Zea Mays
ggggaagacaaaggaggtctctgatcgttcatctctctaaggaaggcaggcttgcggcttctacaggttgggccatagacgactgttagggagaaggaagctcggcgatccttaagtgtcacacttgcagataagtggaactccccaacagttacattagacaggtctaagacgtcactatcccaaagcaaaaggatgcctccctgggttccactatttccttcagcaggcttgaatctgaaattgttgagctttggccctcctagagcatctgctgtgaacctatcgattgttgataatttagtctcttgcaaacagacaaggtggcaggacgtggcagagatcaattcacgcaccgcatcgcggcgtgcctgctgatttagccccctaacattccaagagaggatgctaaaatctgacataattcatggatgaaccccatactgctagcagcacacaattaacagttgttaaattaataagggccatcattgccttggaatagtattctgcaacaaggctggaagctagcagcagcgcaacatatccggagctattcgcaattgaagctgaacctaagatgcagtacaacatctcgaccaaaataaaacccacaaccagcagctcagcgcagccgattgcaaaagggactaaaactgagttgcagtacatcatctaaaaccaaaatacacccggacaggctggcaaggaatcagacagccaccagacgtgctgcagcattgctccttgcttctgcttgcagattgtccatctcatcctgtatttcttctatagcttcacctgcaattcccatcagtgccttgtcaacg

SEQ ID NO: 185040 - DNA, 332 bp, Zea Mays
tatttatttagcatctgtaaaacattcttagctcgttttccccgtagaattgatgtgttcatttctctattctgcatacttgttaatcaaaacgcagatatgtagctgaatgtaacattcatccatttgtgacatttgaagagttacaaattttaacgggaaacagtttggacaagtttctgttgctaaaagctgtgaagctataccattgttcgtataatttatgttaaaaccctaccctgaattactgaaagaatatccatttcatatagttgattgatgaaatttgtaacaatttgttttgcagttgcatgtgttcaatactctggcaa

SEQ ID NO: 185041 - DNA, 502 bp, Zea Mays
atgatacgaggttgcgcgctcttcgtttccttgaccatttgcttgtatgtttttgttattcccctttagtttattttcgttaataagtttaaaggttgctatctggtgtgcttctttgctgtctgaaaatcacctttgactagattgtttgagttatacctgtcaacacagcaggaaagagtcttgcctgcttgactagagaatgaaatggcacaatttggtacctaaaatggtcctgatttttaagataacattcctttcaggagagagataatatgcagaagacagagtttttgaaggcattatcagatatgtggaaggattttgattcccgagttcttcgatataaagtatgttcagtactgcaatccatccttgtcttcttccgaccaatgctacccccatgtgtccactctctgtgagcatcattttgttatgtaccacttcattgaagctcctgaaacctggatatgttaaattatacatctacccagatggccag

SEQ ID NO: 185042 - DNA, 696 bp, Zea Mays
atcagaaggtgatgtcggcattacacgatagcgcagttggaggtcattctggatttccggttacctacagaaggattaaatctcattttgcatggccaggcatgaagcgccacgtccgtgaatttgttcaagggtgtcaaatctgtcaacaagctaaaccggaaagggttaagtacccaggattactattaccacttccggttctgaaacaagcatggcaaacggttagtcttgattttatttccggacttcctccaacaagcaaaggaaattgtattctggtggttgtggacaagctatccaagtatgctcattttatggttttgaaacaccctttcactgctctgacggtggctaaaatatttttggaccacgtatacagactgcatgggttgccgacagctatgatttcagatcgcgatcctatttttaccagtcgcttgtggcaagaacttttcaggctcactggtactcaattgtgccttagcagctcatatcatccgcagtcggacggacaaacagagagggtcaatcagtgtcttgaaacctatcttcgctgttttgttcactcctgtccacgccaatggcccatgtggttatcgcttgcggagttttggtacaacacctgccatcattcatctcttggcaagtctccatttgaagtgctttacggtcatttgccaacacaagtgggac

SEQ ID NO: 185043 - DNA, 849 bp, Zea Mays
cttcaattccatcgtcaaagtccaagccaagaatagcattgccagatgctagggcttccttttcaaactgcttccaaagccgttctcttggcgactcggaatcactatctgagggttgcccaactgggctatgctctattccaagcatatccaggaattcattagcaacagaatctgttgaagcatccatgctgcgtgatctgcccttcctactggcagacatgtaactatcagtcacccctgtgcagctcaatcgccgagaatgcttatcttctacaactggtgattcaaattcctccggctcagcaactgagagctcgttcaaaatacattccaggtcctccagttcggcatctgctccaaactgaccctctgcttcaagagcagcggtaggcagtgaagcagctttgactattccatcctgtttgtcttccatgttctccctttgaacagcaacgtcactgacggccaccacctcagttttcactccaacagtctgatcttcagcgacatcaccacttacttgcaaaggcttgaacgatccctcttcgtcaattttgaaccctgaatcctcctcctggccagccgcattgctggtttccacatgtttgagcctttgcgggtcatctgaagcaacctcaactccatgctccacaacattgaactccaccgtgccccaatcgccatctggatgcaccgagtccccctttttaacctctaccgatgtgcagtgctttgcctccggagacccctcttccgtgcagtccggtgctgccagctcctccttcctcgcatcaggaaccccgtcagcaacagaagaaggcaccggcctggcagacctcaagctgg

SEQ ID NO: 185044 - DNA, 351 bp, Zea Mays
cttcgaggagagaggtgagaggccggcactgtatgttgttcagttcataccgagcacgttcagctggagaactgcaggccttactgtcgcacagcagctgatgcccctcagctcgtcggatcagtaccttcaggtctcgttctccgtatctgccaaggtaaaatctgcatggcacaaacactacttggaagctttttcatagaatcagcatttagtcagtcagttttgtttactgtgtgtagacgacaaacggtcagtttgcgacgttgaacgtgagaataccatcgtggacatctttgaatggcgcaaaggcaacactgaatggcaagcatctggaattagcatctccag

SEQ ID NO: 185045 - DNA, 878 bp, Zea Mays
caattcgtcccgtcaaatccctctgagctcttgcagccttcattctatgcatccattttggacggagtggagaaagagtgggtggaggagaatgtgacaatcttgcaggcacctttgcaaggttcataatcccttcaactccaggttgatctgagcatgaaaataattccctaccctcaagcaaaggaccatcagtgaatgtgttagaactaaacttacagaacccctgccctgtactccaatcggagtatctcaattctgacctagtagatggctgaaaggaatcaagagctccagtgttagcttttttactgtcatggaagccagaataagagagctgtctaacacaacgagggttctgaactttttcatcgccggaaccaatattcagcgcattcccatagaactgtccagcaggaagcgcattagttaatggtgacaacacccttttccttgcctgaacttcgtgatgtacaactgatgaatcacaattaccaatgactaaagatgaatgcattttgtgagataccattatatcagggcccccggtagaaccatcagttcctgaatcaaacccaacaaccctcattgcaggtatatgtagagtagatttgattttagtgcatgatctataatttggatctcttggtttaggattcaggctttggtagcccgcaggatcatcaacggcatgtctagttctgaactgactatttaatccattcgaagcagcacctggtgcaaattttctcttgaagtcgctgatggatgggttctgaaaccaacttccacttgagcttccctcgagaagtttacccgaatcgcaggggccatcgacactgaaactagaaccggcaggtgtactcacttcagtaggc

SEQ ID NO: 185046 - DNA, 273 bp, Zea Mays
gttgaccttccagacatgaatccaaattggttcatggtgatatgcgtcattcctcttaggcgatgctcaataactctctcccatagcttcatagtgtggctcatgagcttaatccctcgatagttggtacacctttgaatatctcccttgttcttgaagattggtactaatgtactcctctactcattgggcatcttgtttgatcgaaaaatatggttgaacaacttggttagccaaacgatagcaatatccccaaggcatttccacacctct

SEQ ID NO: 185047 - DNA, 621 bp, Zea Mays
ctgccagttaggctaacagcgtcacattgctgccttccagattcccatattgcccggcactcatcttctagcttctttgagaataccctgactgctggtcctttaaccattgagccaaaggaccgcaatgccttctgtagctgcacttcatgcattcttgtggggtaaaaggcaggcaaacctttcaggtatatctccttagcagctggaagcaccctttgacaccatgatgaagaaaatttcatgttcagcccattgttactttccaagcacgataatgcgatctcaatagcattagatcctacaggaagttggccattcttctcagtaggacttgtatgagtcttgctttcagactgacatctcagcacatttcttccactcaacagtgcagttagaatagaggtacttatggacaaccatttatcaaaagtagggaggtcaggtgcattaactggtttcccagatgcagctgatgctgcagctgctgcagcagcagcagccaccatgccaacacctgcaacagacccggcacttgcattgcttgaatatccccctttccctctcagcgcatcagactgccgaaatataaaatccttgatcaactgaaagtcatcatgg

SEQ ID NO: 185048 - DNA, 626 bp, Zea Mays
ggacactcggggtttcctgttacctatcgcaggatcaaacagatattttcctggccatccatgaaagcaataatcagagcctatgtgacatcctgtacaatatgccaacagtccaaaccagatcggaataaatatcctggacttttgcaaccattgtcagttcctggtcaggcttgggaggtgatcagtatggattttgtggaaggtcttcctcggtcgggcagtgctaacactattatggtggtggtggacacattttcgaagtatgctcactttattccattattacacccatttactgctttgaaggtggctcagctcttcattgatgcggtgtacaagttacatggtcttcctcaagctattgtgtcggaccgagatcgtattttcacaagtaagctttggcaggagctttttcgattggctggtaccacattgaagatgagttcctcatatcatccacaaaccgacggacaaacagaacgagtcaatcaatgtttggagactttccttcgcagttttgttcatgcgtgtccgtccaaatggtctggttggttgtcagtggcggagtattggtataacaccagttttcattcctcacttggacgttctccttttgaagtttt

SEQ ID NO: 185049 - DNA, 540 bp, Zea Mays
ctgcataccaatctcactaagatttaaagttagggggcgactttcagctgttcccaaggccttttcataaaatttcagcactgctgcctgcttttcttcttgtgtgatagccatagaggtttctgtatgcagcttagcaataaaattctttttctttctgaaacgggcttgatggtgaaaaaagaaggtatttgcatctccttccttgagataaaggattctagaatgcagtctagcaatggtacgttccaaagaagcaagaccaagcagatgtagtttaagcttcttttttagccattcttccctgtttgaaagatccctggaatctcttgcaatctccagtctatgtattatttccttagccatctcaatatgtaatttaatgttaccaacctttctttgcccccacttctgtaaatctttactgagccgttgcaacttgagaaaaaggcgctctactgcacttgtggactgtacatgagcttcccagttccgttgaacgacctcaaggaatcctggcacttttgcccaaaagctttc

SEQ ID NO: 185050 - DNA, 373 bp, Zea Mays
gactgctcaaccgattcaatgggcaattactgcgcgacggtcaggaagatcgaagataaattcgaaggcttggaattccaccacatagaaagagatcacaacgcaatagcatatactctatcgaaggtgggatcaagccggcatatttgtccaggaaatacaacagccaagcatcatgacgagccagcagaggaatgcaaggcagtggagcaggcagagccagacccgagtgactagagggagccaatcatcagacacataaaaaacgaggaggagccggatgacaaggccgccgccgagcgcattgtgaggcagtcggctcactatgttgtcatagaggaaggggccattggagtttccgtgaaatgcatgg

SEQ ID NO: 185051 - DNA, 292 bp, Zea Mays
atggaaacacggaaacgggactgagctagtgataagtccaaaggtaatcatagcactcgttgaggctgtagaaaaggttgagaacgagcgtgcgatcggagactggctccccgagatcacagacggaggcagtcatgcctttcatctggcggcaatactcagtgacagagaggtccccctggaccaaagtctaaaaggagacgtcgagttggagtgcacgagcctcacggttatcgaggaattgttcctcgacatcaacctaggtctggcagacagtgccgccaccctcacg

SEQ ID NO: 185052 - DNA, 385 bp, Zea Mays
cgtggcagccgtgctctggagcttctcctccataaatggcagcccacctctctccctttttcccccacacgccacttctcctctcctccccttctctggttaagcgcaggagcagggagctctctccccatggcgccccctttcttccacctccggccagcaggcatccctagctcgcccctctcttcccccacaacagcagcagccctgctcctcccctgggcttggctgttgttcacgtgaggttgaagaaccccctttgagtctatgacgagtgggcccaaggccatgggtaagaacacacaatgttgcagatttttgttcttccttcaaatattcatatctcaagttttagagctcctaaaattgtgaaacttgttttgtt

SEQ ID NO: 185053 - DNA, 568 bp, Zea Mays
cgagctggaagcagaggaggagcagcagccccaaccccaaccagccgtcgtggagcccgcaaggtcacctgttgcggcagtagcagctgctgcagacggtgcatcgtccgagatcgccaaggaagaggcggcggaagcgggaaaagacctgcccaccagctcgaacgaggcccacggtctgctgttgcagttgcagcagggtcacggcggccggcagcagccaccgtcgtcagtacatgtcgtcgtcacagccgccgatgcaactgcggcggtggagataaaggaggaggaagagaagaaggcagagcaggaagcaaccatgcagcgcgcacctgcgagtaggcggggaacgacggaggaagcagcggaggggaaggcggcgctgaacgcgcgggcagagtccttcatccggaagttccgggaggatctcaagctggagcgtctcaactccattatcaactacacccgcacgctccgccgcggcgttggcgcgccacagcccactgcgcagtagctctccgctcatcggtggtccatcgttttttattgtttgcttaatgtatagagt

SEQ ID NO: 185054 - DNA, 933 bp, Zea Mays
gggccggcagtacagccggcgccaaagacaccaagaagaggccagcacaggtggccagggcgccaagggacaggaggtgaccgaagggccataagtgtgaaagtctagatcattatggggtgtgaacatgagtttagcaggaagtttgaaagcctagaccattatgtggtctgaacatgagtcttggagactaacagccagcaggctctatctcctatatatatatgtaagcagtatgcaaggagggatcaagaaagaagtattatctaaacctctcacctgttctagccttcaatctcatcccccttgcttcggtgaccaggaaacagccctggcaccacatctacccaactacgaactacgtagtcagggacctcccagcttagggaccgaggcccttgacaacttggtatcaagatcccggcgatcctcttccacctccgaccaccactccactgctaacactccttcctctccaagttcatcatcagcgacacccatggctaatcccaccaacgccgacctggccaatctcatcgcacagctgaccaccagcctgaccaccctccaggccgaagtgggggagctgcgccgtgagcgcggtaccattccgtcgggctcgaggttcactgaccatcagggtgaacgacctccgcgttttcagaagttggattttccaaaatttgatggcaagtctgatccgctggccttcctcaaccgatgcgaatcctattttcatcaacagcggattgccgcagaggaacaagtctggatggcttcatataatctagaaggcggcgcccagatgtggtacatccagatccagaacgagggaggaacaccgtcctggcgccagttttcagaactcctcaacctccgttttgggccgcccatccgctccaaccctctcggcgagctcatggcctgcaaacg

SEQ ID NO: 185055 - DNA, 371 bp, Zea Mays
aagcggaagcttagaagatcagatctgcttaactgggtggagaagattgctgataggcttgccagctggaaggctaatctccttaatttggctggaagaacaactcttgttaattcagttttatctgctattccggtttatctgctaattgcctaaatgttcctagttgggtcctcaaagctatagataagattagaagggcttttctttggaaaggtcggaaggaggtcaatggaggtagctgtttggtggcatgggatatagtgacacgaccccggtgcctaggtggtcttggagtgccaaaccttcggttcatgggttgggtgctgcaactcagatggctttggttccgcaaaacagacccttctaaa

SEQ ID NO: 185056 - DNA, 578 bp, Zea Mays
tctcttggagttcttgcaaatccctaggcaccagcccttgtaatcttactgtgactccctcataactgaactccacccatttactatcccaagcacaaagcatcgggctaaacttctctaaccagtccattccaatcaccatatcataagctgtctcagggaggacaaaagcatcggcaacaaaagtgtggccacaacaccaccactctaactgaacaaccttcctgttataggtgatgatctgcccattggccaccttcacattgacaggatcaatctctttagtaacgcactgaactcggacaaaagccagttcactaatgaaggtattagagccgccagaatcaagtaattgaagcatcacttggtctttaatcaaagctctcagcctaacacattttgagttctcaatgccactcatagcatgtacagacagcatcatctcctcttcagtacttccactgccagtttcaaggaaattcaacacctcatcagatagcatagggccaccatcaccacccttattaaggacaatacaatttaactgtggtgccactgctattttacacttgtgccct

SEQ ID NO: 185057 - DNA, 820 bp, Zea Mays
agttgctctcccatcagaggcccactcattcaaaggcaactttcttgatgttgctgacacagagaaattatttgttgcgggcattcttgatgaattaaagatatgtttttcatgtggctatgaggtatttctttcttgactattttttttgtaaccttgattcagtgtttttgatgcaactcatgcttctgtagagtaaccacaaactaaaaaaaattctactagctaaggagagcagcctgtttgaatttcgggcagttggtggccaggtatcgatcttttttttgtttgattcttgcttcgtgaatcttattaatatatgtttttttccttttggaataaacaggttgaactctcaatgaaaggtggcaatttactgataggaactattttggggtcactagaaattgaagaccagtattactatccagggagtcctgtgccaaggttcttggcaaggtcttttattaatagcatgcaaactcaagaactcccgtctcttagccgaaagaacagtgcaggacctagaaacaccccattgatgaaaaatgacagtgaggaaaactttttcgaagcatcagatgattttgatgaatttgaaacacctatgcatcaaaagaggactatatcagactattttagcacccagaaatttttgcctactagcgttccttccctacagccgccaacatttaagcgcattcctgatttgataccagatactgaacttcaaactggcaaattcacattggaaggtagtggcactttcaatagttttgtgaaagctcagatagtgatttatgatcaacattctccccag

SEQ ID NO: 185058 - DNA, 476 bp, Zea Mays
gccgtcgaactgcgctcaggatgacgtcccagcctcgatgactgctctgtggggttcgatgggacctaacgaagaggtacatgggctaaccagggccgggcgtcaagcacggcgcggccaattgctcaccggagcaacgatgaccgcggaggacggcacatctccgtgggcggggatctctacgcaaccctcaatggtaagaaccccaccaaacgactcgtgtctgtttccccattgtgttgcgtggccggattggggtatggtgcgcccagggttggatcggtcgctcgccggtgactttcggtagtggtgtagtcatgagcgccgccgcttggtctggctcagggaagaagagaacatcgtggccgttgatggggttaatcaacggtgtggattgggggctggatatcgggccgcgggagccgttggatctccaaccgatggtggagattggattccaaggtacgccctctcgt

SEQ ID NO: 185059 - DNA, 475 bp, Zea Mays
gttggtcgtaaagaccgatgtagacttgaacttgaggttgactaggcctccagttggtcttccccacctccatacatttttttcaagtataacagagataacatcattaggtagcaatctattattaaaactatgaaaatgatcgattaggaatgagttcacctctaaatttaattgttgcattggagctcggatcattgcttaatggttggtcgatcagcgggtgcatccgaaggattgatatcctcatcagatagatattcttttgcttggtaattgcagtatgcttcaagcagttgctttgcaagaggggtctatgggtgttgggatattctgatcactaggggagtcaaattacattaccctttgatcaagcaattctgaacagcaacacattagcagatttattacaagtgtttccatttagtttcccaagtgacttttctgctctgcaggagcaatacaaatgttgcca

SEQ ID NO: 185060 - DNA, 362 bp, Zea Mays
agcgcccagggaactcgtaccatggaggttgggcctctggtgatcgcgcatgggtggcaatttcccgccgtcgctgctgggtcaccatccgccgtggccagggggctccatgcgatgatttctggtgaggcttcctctcccaggatcgatttcttctcctctacattgaccatagttgaatcgagctcttgtgcctgggagtcgaggcaaggcagtgcgacaatggcgccatggcggtgcacgctcgccgtcgtggcgtgggatactggatgaaagggagtaacggcttgtccgttggattcgagacatagggatgtgattggatctgggaaatgatggctccgggtcgttggatctttgta

SEQ ID NO: 185061 - DNA, 291 bp, Zea Mays
aatactttgactttttgagtgccttgattgcattgttagctattgattaaaagggatagtattttggctttattatgtttctctattatgtctttgctgaggtggatgctgtgtttttatggaatgtggttcagtgaggcacaggggaatgtttattaagtacagttttctttggggcagaggcggggttggggctacactgaggcggtgattatcttcactctatgatttcttttaaacttcagttgaacagtctatatcttgcttctatttcagggatacagctaaaat

SEQ ID NO: 185062 - DNA, 301 bp, Zea Mays
gaagaaccggtgaggtgaaagagggtttagagtttagggtcgattggtgggatgactgagcaacttggacggaagactgttgaggaggtaggtgacagtgttcagtgtctcaacccagtggcgggcgagaaaagcttggaagaggcggtaacacaacatgttagtggtggtgcgaatctgcactcagcccgtccgttctaagttctgaggggaggtgtgaggacactggacacaacatctgcagttgtatgctgtgggagagaaagaacgtatgagatgtggagttatcaaactcccaccc

SEQ ID NO: 185063 - DNA, 628 bp, Zea Mays
tacatactagctgcttgcttagagccctttagacagttttgtacagtacattttttgccatgcaaacattttccttgattctcatgcttattggtcatatctgcagtcaattcctcctgtaactcgcatggctatgggacgtggaacctgggtgaccgtcctatgcagaaagctgaaggattggtggcattgggtacacaatatatctcatattgcaaacaactttagatagatatgaataacagtattccatttggtttggacctaataagatcctaaactgcaggttgcagaaggtgatctgccaattgttgcatctcatgggttagcctcgcacataggacattcttgagtaaagcttgcactgcagcttcacattgataaaaatttccaatcgtttcatcttgcagaactgaaattgagacatacaaaacactagaaccagctattcgtttattaattttgaaagcgatatgtgatatccgtgttgaggtatgtactgattttattttaatttaacgatgaaccaaaagaactttggcagaatggatacttcagcctttccatctgtatactcttgtctcatttcttgaagtgtagtacagtcataattgtgtatatcaatttt

SEQ ID NO: 185064 - DNA, 423 bp, Zea Mays
gtcgtaagcaaagctatgacattggtcgtggcacagtgtcggagatgtcctccagtcagttgatatacctaccgcaggggcatgtatgttatgtcgtatttatgagtgtcatggctcatgtcgttggatacaacaaagttggtagccaatgtagccctatgtacatgataatacttcatggtacattggcatgcgcacacgtggctacaaggttgatgcacgtatggaatagtggtctcgagtatcatgtagcctaagtcgtgataaaagtgcaccagtcaagcattttgtgtcgcacatcacacatttaatgtgttgtacctaagacattttataagccagtgctttggacttgccagtaggccctagaccctagacatggggtccctactttggggtcgtaatgccctcaataggaccagg

SEQ ID NO: 185065 - DNA, 326 bp, Zea Mays
gaagaccagaaacctgagggctcgataccagctacaggggtccgcaccgttcagaaaccggtctactacgtcagtgaggtcctccacgaggcaaagaccaggtaccttgagatgcataagcttctctatgctgttcagaaaccgatctactacatcagtgaggttctccagctgtacttccagcctcgccacgccatcaagagccaggtcttggttgacttcatcgtggaatggacgcctaccctgagcgctcctgggggtctggatcccgaatcggaccccacacttgcggagcccaggggtccggtcttcaccgagccccactg

SEQ ID NO: 185066 - DNA, 319 bp, Zea Mays
ttattcaccatcatatggtctttatttcatctacaaatactatagcctaaaactttataggctagccacaaaccagctttcaaacaaccatcaaaacactgaaacttagtttcagttactgtttccaatctgaaaattcagaaatatagcagcaccacttagaaccactcttttgcctgggttccaaatgtttctaggggcaagttgcttaataaagtttatacttctatagctcctctacaagtttgatatagtgaccattgaccaaaacctcttggattccaaactacactagcccaaagcttgctccaaatgctga

SEQ ID NO: 185067 - DNA, 509 bp, Zea Mays
gttgagaaacaggacaatgtcagcgctcaacaaactaaccacagttcgagtaatggcaacttggaaaatggttcacactctaatggtgtgcatgagatctccagcagcagtgaaaccgtgacgaccattgcggacggactcaaactgatcacaaccatccgcgagggcaggcagcacatcttgccaagttggagtggctctcttgaccacgtttctggtggcagcacgagcacatctcaggttcatgaaattgaagttgagaaggaagtcagtaagggcgacgtcaaagttgaagagtatgatcttgagaagattctggacgagcaagaaacccatgacctctattgccccaactgcaaatcgtgcataactcgaagggtcatccttaaaaagagaaagagaacagtaaggcaagaaacaggcaaggaaccaccaaaaagaccacagcttgtagagcctcccgccaatgctccaagccaaacaatcaatcaagactcgccggaagtatt

SEQ ID NO: 185068 - DNA, 807 bp, Zea Mays
ctttttagtggatctgtagaggactttaattctctgaaggagtgcaatggtcaagttgcctgcactgagaatgaagaggatgtttcatggtgatgattgtgctaatgagttcaaaatcaggaccatgaaatccatgaaagtttcacactttcatgtcagcgagttagagcagtcagctatgtcgaacttatcagataaaactcctcaagatggtaagtaattatatgactggatgttcatagacttggctatatttcttggaatgtggtcgattgctattttgttttgcatgaagtttgttttccttttcttgcaaggacacctttaaattagctcaattttttgttggttatctttgatgccgtgtcactgggaatgcatttatcatttatgatacatttagaaagtctacaaacggtcacacaatgtttagcttgataatctcattaataattttcctcaaaaaaatctcattaatatttcacagttttttcttttaaaattgttaccagaaatttgctacaacaacaaagcctgttccgaacaatgtatttacatcatgcattgttagcaacatccctaggcatgtgctgatgtgtatattttatggattaacagcatctccttgttctgcagagccagacccaaccattcaacttgctgaccaggatattagggtaacagaagcttctggcttgcatgatctgattggaggaaaatccatgctcgaggtgcttcaacgccatctagtctcattaatcagtgatagctgataactcactgtgcacttatacttaatttatcttg

SEQ ID NO: 185069 - DNA, 309 bp, Zea Mays
caacatacactacagcaattttataaacaccatattcacaagtattttcgcacatcgaccaatctatacgaatcgtaagccactagtctataattcgcaaacaccatgcatttacttcccgaattacgaacgcatacatatttatcatacgaaccgagtatttcaatatttatcctaagacaactaactccattacacacttgtatctacttgacttacttgaagcgtctactcgaaatcgtgaacacaatcatacactatatgtgaagcctaatttattaaacgcacaatacgcatcgtcttgactag

SEQ ID NO: 185070 - DNA, 607 bp, Zea Mays
aaaatgctaaaatacagatgcttcatggaaccctccgtattcagaaacacttccggggtatgcattctcgtcagggatatcaacgactcaagaaagcggcaatgaatttgcaatcatgtaatatacttcattttctttttgttcaaaacatttctgaattctaatactatgaacatctatcatactcttcctattttagttatcggctgacaaatgctgtttattttatcttattttcttgactttccaaactgcagttatacgtggtgaaagagcaagaatacactttgataatcttgtcaagagatggagggcagctgttctaatacagaagtacactaggcgtcgacttgcagctaacatgtttaatgatcaactgaatcatatcattcttcttcagtctggtaattaatatgataaaaatgggcatattaacattaccctagagtactggatctatctaatcatgtgttgtcatatgttgctgcagtgatgcgtgggtgcctgactagaaggaaatacaagtgcctgcagaatgaaaaggagtcaaaggccagtcacaacatagttccaggggaaacaaggaagaataatgctgagtcaagaa

SEQ ID NO: 185071 - DNA, 359 bp, Zea Mays
gcgttttcagggtcggggatatggggccgatcgacggtgagcgtggaaggggaatacagcagccagacgtagcagcagccatctgtggagggtgcgccgtggtagcaggtagtggtggcagaggccggaggccagtcatcggctgcagtgtcggagcgtgacgtgaaatcaagagggggcgacgaacgatttggcttctggatgtagaatcggagatagatcgaagcgcgtggcggcgtgtttccgtttgtgaaaatataggagtgctgtatggtcgatggcgtgcgcgacggtggagcagcacggcgtagtggcgggaggaggccgtggccgcgccaaccattcacttgggactgtcg

SEQ ID NO: 185072 - DNA, 532 bp, Zea Mays
aattatcttcgcgaggtggattacacattgtaagaactaagaactaaatctgttttttcttcttcttattttaaagaggaccaggtctcctgcattcttggaaacaagagacgatctcagattatcactaacttttttatgagctataaatgtgctctgcttaacggacatcttaaggaccacagattcagagaactatggattcatataaaacgggtgagatcttacgacttcctttttaccttttcaaatacctcctatgtcaagccctttgcttcacttgtgtttgcttagtattactaacaaatcatgaagccctttgttaagtatgtgcttgcttagtgttactaagaagtcataaagccccaacgagtttctctagctgaatatgaagcagtcactatctgtccttgattgatcgaaactaatttgcatggttccttttgtgcacaacaacatgaaacataaatcttgaagattatgtcaccgtaagaagtaggtgttccttacatttagagagaactagaaaaaa

SEQ ID NO: 185073 - DNA, 1211 bp, Zea Mays
atcaaatatccacaacacctgggtttctgaatccgaggtaaaaatattagcaaaaaggaaactagaaaactacaaaacgaagtatggaacgagtttgataaacatttgcaaggaacagtggtgccagccacaacgagttattgctcttcgagcatctgtagatgaagtggaagaggctttaatcaaatggtgtggtctttcttatgatgaatgcacttgggaaagattagatgaacctacactgatgaaatatagccacttggtcactcagttcaagaattttgagtgccaggctttggataaagatgtggtaaaagattatgcaaacacaaggaaccgacatgagcttaatgtgttagctgatcagccaaaagaacttaagggcggcatgctcttccctcatcaactagaagcattgaactggctacgtaaatgctggcacaagtccaaaaatgttatccttgctgatgagatgggtcttggaaagacagtgtcagcttgtgcttttctatcatccttatgttgtgaatttaaaattaatttgccatgtcttgtcttggttcctctttctacaatgcccaattggatggctgaatttgcatcttgggctcctcatttaaatgttgtggaatatcatggttctgcaaggtcaagatctatcattcgccagtatgagtggcatgcgggcgattcaagccagattggcaaaacaaagagatcgtacaagttaaatgttttgcttaccacttacgaaatggtgcttgttgatgctgcatatcttcgttctgtctcatgggaagttcttgtagttgatgagggacatcgccttaagaattctagcagcaaactctttagtttacttaattcgttatcatttcagcacagagttttgttgactggaactcctttacagaacaacattggtgaaatgtacaacttattgaacttcttacagcctacttctttcccttctctgtcatcatttgaggagaaatttaatgaccttacaacagcagaaaaagtagaggagctgaagaaacttgtagctcctcacatgcttcggaggttgaaaaaagatgcaatgcaaaacatccctccaaagacagagcgaatggtacctgttgaactgacatcaatccaggctgaatactaccgtgctatgcttacaaagaactatcaagtactgcgcaacattggaaaaggtggcgctc

SEQ ID NO: 185074 - DNA, 1064 bp, Zea Mays
gaatttttcctgcgcctcctacggttaggagctgtggctggacagtgcctgcctacgctctggagttttagtgcagttttacaagttttcagtcaattttgatcaagctcaggggaagtaccaatttgggagtgctagctgctgctgcagcagcagctgcgggttccttggtggcagatgggttgctccaactctaaagtggacaatgaggagcctgtgaggcgctccaaggacaggaggcagctcatgaagcagctggtgcgccgccgccctgagcttgcagctgtgcacattgcgtacctgcacgccctccgtaacacaggagccactctccggcaatttgtggagctggagtctgcattgtcacagcagcctcccgtagaccttgtggtgccgccctcgcctactccacagcctcctcctcctcctcctcctgaactctcggtgacatcctcattgccaccctcgccatgccccccgccgcctgtcccttttagtccagtaacaaccataagaaagatggagaagagggatggtgagctcccaccaccaccaccacctctggttttgagtccgataagattaaggaagatggaggatgagttccatgggggtgattttactgatgatgacgacactgacagctgctcgactcctctaccaccacccctgccacccggcatagattgggaggacttggatccctacaatgtgtgccccttgagtttcccatctccatttgctgataggaatgataaagaagtggcctcgcatgtgaccatggacaatgatcctgaagtagacacagaattttatggagaggaggatgaaagcatgcttggcaataatgatgtcattgtggatagggtccatgtgaatccagccaagggtagggctctgggtgatggcaactcttcaacggtgagctgggtgacaaaggattcagactctatggcggtgccttggaggagtaagaagtcgcttgtagagattgttaaggagattgatgagtacttcttgaaagcagcagcaagtgggaatgacgttgtgatttttttggactc

SEQ ID NO: 185075 - DNA, 455 bp, Zea Mays
caccagtatctgtcggtcgttgagcttctgttgccttttgttttcttgtgatccgtgtcctccgaagatgatgttgacctctccgtcgacgcgcggaaatgctccacatcctccctcttcctgctgctgaggtcgtcgaggttcaccggtccctcctcatggtgggggacatggtagaggttggaagggtcggccattcccgacggaatgcttgaagtctctgcagttccgcaaggtgtggcgcatatccttgtgatacaggcactgggcattgaggatgtcgtccagtgtccgctcgcctccgcggggtgcacctcgggcacgagagacgagtggtccagcggcatggacctcttctcgaggcctcttctcccagcgcttgtcggtctgctggtttgcgtcacaccgtggtgcagatggagtaggcttcgctcccccgatgaggtcctgagccc

SEQ ID NO: 185076 - DNA, 468 bp, Zea Mays
gcgctggtgaaggaagaggctctaggcgccatgcttcacgccacggtgacctcgataaagtggtgaagagggtccaagtccttcatcgctaacttgcgttgcagggccgcgatcctgcggtgaaggagtacgacactggaggctgtgagcacaacgttgtcgacgtagagaaggtagacggtgtcgtcgccgcaccaaaggataaacatggacacgttagagttggccttgacgaagccgagggagacaaattaggtggcgaagggattgtaccaggctcgcagagcctgcttgaggccatacaaagagcgcttaagtttacacaccatacccggcgagtggagtcgacgaagctggcgggttggctgtagtatagtgttttggccagagtgtcatgaatgaaggcattcttgacgtctagctggtggaccagagggcgaggcagaggacggtccgaatagtggctgg

SEQ ID NO: 185077 - DNA, 1080 bp, Zea Mays
cttttgttgatcaatattattttgttgcaagagcatgccagctgaagtctggagcctttgttgcattcccaattgttgctgcgtttgattaggctgagactggaactgcgacatcatatgttgttgaggttgctgaagctgattctgctgagactgaggttgcatcaaacccattgatgtctgctgagcatgctgttgctgctgtggttgctgaattggcttttgttgctgtaacatatgcatacggacatttggcacggttccaagaagctgctgctgctgctgatttagacttgacacatttccctggtttgccaattgttgtggctggtgcaagggcatagattgctggttcatcatctgctgcgtttgatgcatattcaaaagattagttgactgaactggtagcctttgttgctgttgcatctccacagcaccactctgttgattcactaactgattttgctgtaaatttgactgatggcccattaattgttgtggctgctgttgcaaaggaatgttgggctgttgagttggttgagtttgctgcagagaagactgctggtgcatggactgtggatgttgctgctgccttaccacagacggtgtaggctgctggagtaacgattgcacaggttgttgtaccgaattcagtgcattctgttgaataccactctgtgtagctgactgcatcgccatggattgagtttgtggaatggcaatctgcccaggctgaaggccagatgacatttgcaccatgggctgctgtgaagattgcatctgtgttgactgcaacaaagtttgctgctgctgaatgtgtggttgcatacgtgaattctgctgcaatttctggttcatcaacaatttctgctgttgatacataaactgattatgtgcttgctgttgttgttgctgctgctgcctacctgccatttgtctttgtgcagcatacatatcttgtggagtaccttgtgctaaaccattgttcatggtattttgtggcatgccagacagattctgcagcgtcaatgtctggctgacactcgacaagttctgaccaacactaggaagagaaccttg

SEQ ID NO: 185078 - DNA, 460 bp, Zea Mays
accgtctcttcgttaagcgttccaagtgcgcttttggcgtggacaccgtcgcctacctcggccacaccatctcggcgtcgggcgtggccatggatccgaccaaggtgcaggccatctgtgattggccgcaaccgcgctcggccagggcggtgcgtggcttcctcgggctcgcaggctactacaggaaattcgtccacaactacggcatcatagcagcccccctcaccgctctcctgaaaaaggaggggttccgatggaacgacgacgcagcggcggccttcagtactctcaagggggccttgacatccgcactcgtactgtcgctccctgacttcaccaagcagttcgtcgtagagtgcaacgcttcgacgtacggcttcggcgcggtgctcgtccaggagggccaccccatcgctttcttcagtcagccggtggctccacgtcaccgctccctcgcagc

SEQ ID NO: 185079 - DNA, 284 bp, Zea Mays
cgttcataggcgcgtgccaggtgcatggcccgctgcaatgtagttggagtcagcagttcaacatcagtccgaagcggttcacccaagcctgcggtaaacatctgagcttgctggagctgtgtcatatcctcgcagcgacagagaatggacagaaactgacgttgatagtcttcaacggtgccggtgcgccgaaggtccttgagatcaaccataccgttggtccgtagaggtggtccaaaccgcatatgggtgaactcaacgaagcgggaccaagtgaggacgcc

SEQ ID NO: 185080 - DNA, 445 bp, Zea Mays
gggaaacatccagataatagactaaaatcgtccagaatgacaagatagtaaagacaacacgaaacactaggaatcagagaagtccaaactccaaacatcacaatgaagaagcttgaagggggcggaagtgcatgagttcgaactagcaagcaaaaggtagctggtatgtttgccaagctgataggagtggcaactggcaaacagagcaatctatacaagagatgactctgacattttttagggtagctaacgtgctagggcagggtgaccaagacgctggtgccacacgacggaggggacgcgtcacgggcggggcatcgagacatgctctcttgaaattgactgtattaacattcttataggaaatacgtagttcaagaacttcctatagtagacgataaattcaagatgcctgcttgttatggtgttctggattccattgtct

SEQ ID NO: 185081 - DNA, 1269 bp, Zea Mays
atacagtggactttttgaagagcttatctgaacttaatggaaatgatttgaagagccctaagaagcaagacctagagagaactgctgcatctgttctttttgactgggaggtactaatctagcagtcctctatttcattttagtgaactgtaaccctgtgcattaatgtttcatgtatcatatttggaatgtaggatatctaggtttcatgagtttgaattatgagatgattccttacaatttcaagtagaccaactttcttatgctgtaaagttttatttccaacagctaatctatttgtcctattatagcttttgggtatgaataaacatatggtagctcattttgttgttttgacaagacatatgtgtttccaattaacaagacaatgtaccatgttaggcttcaaccttttatcataaagcacaatatagtggagttctaataagagaagatggattacacagatcctcatgcttcaatttgtatcaaaaaatctattgtataaagttcagaaccattttgttttcaatgaacatttttatttcaccagtctcttttttccttgattcacctctattttttcttgtatttttcatggatacatgtagcttcagttctgataactgattacttgatttgtttcggtagcttgtttctatgtacttgaataactgaaataagtcactcaaaatggtgaataaatgattggtgtgctataatgatttcccttattgttcctttgtagacagaaatatatgtagcaagggcacctggacgtttggacgtcatgggtggcattgctgattattcagggagtcttgttttgcaggtatgttcaatctcaggccaaatagatttctgttacaaagtagtgctataagtttagctaatagctggatactctactcataaatatttgattatatgtgattcccatctttctcgaaatcagtttgctactgttcaatatgtaatggtatagcatgcaagaacctggattttcattgaatcctgatgtctactgtattttctgtattcttgatttcttttttggattccctcagatgacacaagtaaataaataaataaactggaaagaaacatagctgcagttcttttatcatgtatttggcagttgtgattcatattttggatgtaactactagatgcctcttcgggaagcttgccatgttgctgttcagagaaaccatcccagcaagcagaagctttggaaacatacaaaagcaagacagcttgttaacggag

SEQ ID NO: 185082 - DNA, 312 bp, Zea Mays
tggtcctctcagtcatgccacattggtctattgtgataacgtgagtgttgtctacttatcctccattccagttcaccaacaacggatgaagcatgttgagattgatctccattttgttcatgagtgtatcgccattggtgatatctaggtactccatgtgccaactactttgcggttcatcgacatcttcaccaatggtcttccacattgagtcttcttagactttagatccagtctggatatcttgtcttgtggctagagatgtcagactgcgaggggtgttaaagttaaccatacaaccctattgggcat

SEQ ID NO: 185083 - DNA, 366 bp, Zea Mays
cgccctctcgggcaaaaagggtgagatcacgagatcggatagtgttttgtcatgagcgatatggcacggggagcaggttgggaagtagcatacggccactacgcagtagaggcatgggccttgccgccccgagaatgaaccatcttttttggctgctgctttggtagataccactttctgctagtttatcttgctgctgctcgcttatttgttccgtgtggaatctggaaagctgtatgctctgttctgttttgccttttatgtgcttggttatgctgcaacgagcttttagtattgttcctctcggttcaactttcttgatttcaccttcctcgtgcttctatctgcggcagtgtggcatctctc

SEQ ID NO: 185084 - DNA, 513 bp, Zea Mays
atggtcgccaactctaaatggaaagaagccagagactggatgcagaattcttcccttgtcggacgcagattgcagatgtatcaaattcatcgctgtatagctgaagcacaaaggaaccattcccatgttatgtctgtttggggaatagttggcgttgggaaatcagctattgtcagaaatttttactgcgacaggatacttgagaatcagcaatttcaagaatacggttgggtggatttatcacactcccaacccttcaatttgaaggacttctcacagaacttgcttacgaattttcaatcagattctcttcaagccaatgaaactacaccctctcgtggtatactggggacagtccgaaaatgttgtgagtttctaagtacacgtcattgcctcgtggtcatagatggccttcagtccaaagaggaatgggatttgatacaatcatcattggtatctagatactctaaatctaatactattatcattgtgataacaactgaagcaagcatt

SEQ ID NO: 185085 - DNA, 439 bp, Zea Mays
gacgtcgagcacgagcgggactatagaacgaatgttctagacagagaccgcctacccgtgtaggttgagacttgagaagggtggaggcctgctgttgaagcagtgcgtcggtaaggcagggtccacccgcgctagaagtggcgggacatcaatcgctccatcgggagcgagatcctcaacccgaagtggtgcagccgtggtccgctcgtgggctgcatatgttcttgagcggcacgaaggcgctcgaaggccgcctcgatctctttcttgacgacagtagctttacggtcggccttgagggcgcgcgccaaggcagggtcctgagcctcttgttccgtgcgcgcgtgctcctcagcggtgtgatgggcatcaacatcagcaccaggagcggagggagatcttggcggctcagtcatcgattatggaggaagacatggca

SEQ ID NO: 185086 - DNA, 781 bp, Zea Mays
gaacttcccccgcggggccatagaggcagggacccgaaatcatctcggaaaagggccaggcctaatgttctctccacggtgctccaaaattatgtgtgttttatattactcaggcccacgaatgatatggcccagcatcatctaacccttacgtcttacgcccaaagctagcaccggccagacacgcagacaccacttccactttgtcatctcttcagtgctgcgctcgccttcacatcctggcacactccatcccctgtggctccagtatcctccacctgtccatctccacaccattggagatctcctctgcactcctatggactccgagcagcaatcactacagaggacgtgaagggcgttctgtgggtccgtccatgctgaggcgcagaatcttttccatagaaccaagtccatccattgattatttgcttatttgttctttccattcgctgcagtgcggtatgattgtgtgaattgaagatttccatgcttatttttcgaattcttgccaatatggtgtggattgccgagctgcaacattgttggcttgaacccttgaagtaattgttgatctattggctacaaaaaaatatgtgtttgatgttcaaatttgcttgttatgtacgttcatgctacacgtgttttctgttcttgctattcccaatccttgcactgctattgccactcatttgaagctctgtgggagctaccatggggatcaggtatctgtcgggaatgcggacaggatgagtttttaccctattatacatttcgaggt

SEQ ID NO: 185087 - DNA, 302 bp, Zea Mays
atcaactatatgttaagaaaacatctattagagacatcatatccaccacaccacatcttattttgatgttatagtagaagatatgagagttattaaaagtaagatatggctgatgccacactaagccataatggctcctccaccgctgttgtccggcaaaccatcacattctgtgacgcgggacgtcgagcaactcctgacttggggcactctggtcccatatgacaaaatccaccattcccattcagccattcctatcgtgcaagccatcacacactccggacgttgggcccacattgcag

SEQ ID NO: 185088 - DNA, 735 bp, Zea Mays
cacgagatagggcgactgaccaggtcccttccgagcaagtctgcgaggcggggcaaccgaccaggtccttgtcgagcaagtccgcgaggtggggcgaccgatctggtccctaccgagcaagtccacgaggcaggacgaccgactaggtacctaccaagcaagtctgcgaggtggaaacctaagtccagcatcgcgagtctgcgtcaactatgataagatgcgtcaacctaggccgcagccaggcatgtgaacggtaggtcgagggcacaccgaggggtcactatcgacatgactgcaccttctcaagtacgacccgtggtgcaccccactgccctgaggggtcagtcgaccctgttcattgagacctcagcaccagagcttctacagtgactcaaatacccaatagtgcgcagccgatactccataccgggtgtatgcctatgcatgatggtgagtgacataatgagtcccggtggttcaccattcagagtgagtccatgctagcttcccctacgaacacaaatattattgtcccctgcttccaaaatcacgacatttggtgcgtcaggtaggggaacttttagcgtgccaatagacattcatcactccgatgacccacacattgacattcgctaacggcgaagctttcgcgtcggggagccacatcatgttcggtaccctcgacttcctcaccaccgccaccggcgagctccgcctggccacctctgatgtgcc

SEQ ID NO: 185089 - DNA, 445 bp, Zea Mays
agatctctcctcagaacagcgataccgagcgcaagattcgcaccatcaccttcctcattaacgtcctcctgtttcaagcctccatgctcattactgggctgagggtctccgcactgccacctacgtcctgaaccgcctcccttccaaggtggttagccattccactcctttcttcgtcctctttggcaccgccccttcctatacacaccacaacgtctttgattgtgcctactatcctaacacctctgccaccactccacaaacttgcaccccaatccacttgctgccttttcctcgattactctgatcacaaggggtaccgttgcctcaatcttctcacccaccaaatcatctctcgacatgttgtcttctatgaggatgcttttccccttgttggctcctccccacctcccaacctccactctctcctccatgctgattttgt

SEQ ID NO: 185090 - DNA, 457 bp, Zea Mays
cgctgcctgaggccacggcgaggcatcgccggtgagcctactggatggcggtcctgtgctctagatcccaatccggggagcgctacacggagacaagatcccaacaacagatataggttcacgtaccaatggtgaggatgccgatattctccgaccacggcgctagtggttccgcggcggagcagcggcatgggtgagaaattctggtggccacgaggtccttctccgccccccgacgacaacgcaagcatcgaagctcgccgtcgaccaacgaaccgagtgcatccatcccaatacctcgcgcgtgaagaagatccgtaccgccggtcaccacggcatcttccttctctccttctctcttgccccagtcggtggtggtggccaacacagcagcggcatctggctttctctctccatctctctccgctgcttgctcggaggcctcacgagtctcgac

SEQ ID NO: 185091 - DNA, 535 bp, Zea Mays
gggcccgaagtaccttggctacaacttgccttggatcgtcggtgacagggaggcaactgggcggtgtcaaaggcggagcaggacccagtctcccccttcataggagacctggcggtggtgtttgtcatagtggagcttctgaacatcttgtgcttgctccagtctgtaccacacatcggccaagaactcttcccgttcttccatcgtcttggccacaacggccactcgcgtatctccaggctcgtacgacctgatggacggaggatcccgaccatagaccaccctaaagggcgtatctcgtagggacaactggtaggcagtgttgtacgtgtactcagcccatggtaaccatcggagccaatggtggggacgatcacctgtaaaacagcggaggtacattgtaataacacggttagcagcctccgtctggctatcagactgtggatggaataccgacgtcatgtgcagcttggcacccatcaggcgcatcaactccttccagaacgtcgaggtgtacacgggatcccgatcggac

SEQ ID NO: 185092 - DNA, 298 bp, Zea Mays
cgtgggtgcgtcggcggaggtggagaacggggaagtcgaaggaggcctggaccgggcggaggcggtggagttcggtgaggatccccgggcggagcggcgacgagaagcgcatgggcttgaacttgctgcgggcatcggtgcggactgcgagcgtgaactcgtcggtggcggtgagagcctcagcgtggtcgaactcggagcgggcatcgtaggagttggtgaggttgagcgtggtggggtcgagcgtgacgacgccggaagaggcgatgcaaaggacccggcggtaccttcccctcca

SEQ ID NO: 185093 - DNA, 390 bp, Zea Mays
gaactgcggtggcttgggttcctcgcttactggctcgctttttttgttacgccaaggctccggtcaaggggtggcgagctgccggagcgcgtcttcgcacatgctgcgaggcttagtcttggcgagcgcattgcccttggccaggggatggtggcaaatctatatgcggaaatggataagattgttacttgcactgtggccgatggtgtgtgtggccgtctagatgtctgcgtgccagtctggatgctgcaggtgtggatgtgggagcgctacaagaggctgtgcccgccggagctgaaggcaccgcagttccctgtctccaatgtcagggtattgtattggagccggaggaagaagaagagcacatctgaagaggctctaaagattttg

SEQ ID NO: 185094 - DNA, 384 bp, Zea Mays
gttccccaccctttatcacttcttcgcttgggtctccactcagtttggacgcatcgtccgagcggtccaatgtgacaccgggagggagtttgacaactccacctcccgttccttcttcctctcccacggcactcaactgaggatgtcgtgcccctacacctcttctcagaacagtcgagttgaacgcatgatccgcaccacgaacaacgtcatgtgttccctgctgttccagaccttccttcccccgctactaggccaaggggctggccgccgctacctatctgctcaaccgcctccccaccaaggcggttcctcaccccaccccttactttgctctctttggcacctctccctcctacgatcaccttcgtttttttggtgcac

SEQ ID NO: 185095 - DNA, 382 bp, Zea Mays
cttcgaccgtggctgctggtgacgattcgtttggctctggtgttttgtgtctgatgattctgggaattcgattgtgtggacagaggagtcttcggatgaggacttggattattttgcagcgttggatgtggctgcgggggagacttctccgcgtgtggtgggtgctgaggatcttacgggtgcgaggactgggtgtaggcggcgaagggcggtggcgaaacggagagtgagtaaattgtcgcgaagtgataggcatcatcgtggtgagatggagggtggttgtcttcgtgtggatgggactggcaaacgcgaattgaggataatgctgttcaactacagggagatgtgtatcatcccgaaggttgagccaatgtaatgtgtg

SEQ ID NO: 185096 - DNA, 397 bp, Zea Mays
caggcgtgcagtctacctgttcgacgagatgcctacgaaggtcacgaagccgtgggtgccggttaactggaccggggaagcatcgtcatcacgcgggcactcggtaggaggtgggggactcgaactcgagcccgccgctgaccgcctcagcgcgctgcccgacgtgctcctccaccacgtcatgtcgttcatgaaggcgtgggacgcggtacgcacgtgcgtgctctcgcggcggtggcgcgacctctgggcctctgcgccctgtgtggacatccgtgtggggaggtatagcgaaccgccccaggacttttccaagttcgtgtaccggctgctgcttgctagggaggcccttgcgccgataaacactctcaggctgcggtcaccaactgattacgac

SEQ ID NO: 185097 - DNA, 576 bp, Zea Mays
gtcgaaaacacaaatacagaaacacactcatcccttatctatgacacaacagcaggccctcctagtcttaaggccaaatgcccctaagccctctagccccggccataccccacagcgtagcatcctcctggatgtgctgcaggatatctctagtgctcggggaagctccctctgcaacgacaaacaaccatgcaacaatgttcaagtatccgatagtggagatgcaagagtaagaaaacagtattagactcccatcaaaatgacaaataacatcaggtaaacctatcacttagtgctcaggggccattctagcacttccacaatataacttttttcctaatacaaaaatgtctcatcttcctgttatagatacctttgtgggggcgccagtattcaaggagaagggccgctaagggaccgaatgccagcagggacagttaaggaaagacaatcagcaaataaggagaaaaggggcaggaaacaaccgtggctacaaatcagggatacttagtttccttagctagttggttgccaaataatagcagattagttctttaagatatctgcttagtttcc

SEQ ID NO: 185098 - DNA, 285 bp, Zea Mays
tgggccttgagtggtatagactccaatagttctttatggccctctggcagtctgtaaaggagagggtgagccagaggggaaggcattgctactggccttaacttctttgtacgtctgatggacgatttattggggaagagccgaagagggccagcctcagtactaacactactgtttctgtagtagtaggaacagtgctgcgtcgatatgcatctctctctcatggagatggagagccttggttgcgttctgtgttcttgtcctttgtgtgcgagagacagtgag

SEQ ID NO: 185099 - DNA, 369 bp, Zea Mays
attggctacggttacctggtgatgtacccaaatatattgtcgttcgaagtccttttgttttttcgattggtgatcggacttgcgtcgcccactgcccatcgaccacatgcatcttaaacattagcatcgacaacaccatcatcttcatcttcttcgactatgctgcatcgtgccctgcgacgtacctgaaacgcacgtgtgtgccatacctcaaggcctgcacgacgacctacaccaactcatcctcaccaccaccgatcgagaggctccaccttcgacattgccttcaccatcatcgtctctgcctcgcacgctctcgacctaatcaatcaattatgtgcgaccatcctcccatgacgtatgttgtct

SEQ ID NO: 185100 - DNA, 669 bp, Zea Mays
gaggccaagggggtcaggttctgcgtcaggccgccggacgtcatggagacggtgcacgaggtggccatttacatccaccgcttccacaacctcgatctgtttcagcaagggtgagaattgctcgttttgtccgcaatcccgatcttgtttcagccacggcgtgaatttttcgttcttctctatttgtgcgtgtcttatttctcgcaaaacgttttctcgggtttactttctttactgccttttagggagaacatgtttttagatagaacatataaaggtccgagctatatgtttgtattttctcgaggtgtttctgtccttgcctttctcgttcggtcggttgtttccaggcatttcttctcgcagctggggaattccgattttcctcatgattatgttcccctcaggccctcactgtaacttatgtgcgacagttgtaattgatgccgcgtgtggaacctttctggcacttatctgtcgagtgtaaacatttgccatttatttttgtttcttatgatatgtttttttggattatgcgcagatggtatcagatgaagattagtgcaatgtgggaggaaggtggcaacaaaacaccggcttcacctgccagggtcgtgcaatatgaaggtgtgcatctctatgggcactgaatagcgtgatccagtcttc

SEQ ID NO: 185101 - DNA, 469 bp, Zea Mays
tattacccaagggccagcgcatgtctccctgacatccctaagctcctggagaaaggaatgcttgagagggtcttggtgtggcccataaacacccgtgaaccaccactgagcaccaccttcctcttgcaacttgactgaaactgtgaaatcatgcaccaaactctcaataacagaatagactacctctctacaagccaccaaaacaccacctctggttccttgcgctggggagtaaacgaagtcactaaacccagcaccaagaatagacaggatgtcaaaagctgagatagagcctagcttagtttcctgcaaacagacaaccgctggtttgatgctaaggaccaaggacttaacaatgtctctcctagacctgtcattcaggccccttacattccagataagaaaaacaggctgcattataacagggtacactaaagaaacacgacctacaccccctccaatcaggttt

SEQ ID NO: 185102 - DNA, 278 bp, Zea Mays
tgatggtgctacattagttatggccgaagtacatgaaggcgtttgtagtacccaccaatcgcctcctaaggtgaagtggcttctaagaagatctagttactattggcctgacatgataggcgattgttttaagtactacaaaggttgtcaagtgtgtaaaaaatttggtgatctcccgttggtgcctttaatacagattttgttagtttgttacttcaaaaatcataaaatcataactggaaaggctaatacaaatgcaataaaaacttactaggatt

SEQ ID NO: 185103 - DNA, 468 bp, Zea Mays
gcttgaagttaataaatgaagtggaatcagagaagacttccttcactttaagatgccggtcaaatgaagaccaactagaacttctaaaaaagcaacttgaggccaatgaatcacacaagtctgaatatctaaaacgctacaaagctgctataaatgagaaacagaaagcctctgttgatcttagtagtaatcttgcaaacctgaggaccaagtgtagcacattagaagaacgatgtgtaagcatatctaaagaacttgatcatgtccgacatgaatgcactgattggagggtgaagtatgagcaatctgtttctcagcacaaggctgaacaagatagatttgtcgctcagttggcatctcttgagtctaggcatagctctgcagaaggaaagttgggagcagctcgggaacatgcagcatctgctcaagatgaggctgcagaatggaagaagaaatatgaaatggctg

SEQ ID NO: 185104 - DNA, 475 bp, Zea Mays
gttttgacatttttcagcagatagacaccaaggtgagctgtgaaggaatggttttgcttgtctcgttactctgctcatgcatacgcagtgtgaaaaaacctgagctaagaagggccagcctaattcttctgaagttctcctccacatacatagatgatgataggcgcttacagctagtgctcccctatgtgattgcgatgctttcagatccatctgccattgtccgttgtgctgctttggaaaccttatgtgatgttctttgtcttgtgcaagatttccctatcagtgatactgttatattccctgagtatgtcctcccaatgctctctttgctccctgatgatacggaagagagtgttagggtttgttatgctagtaacattcacaagctggctttaacagcttacaggttcctacttcgttctcgtagcatcgcgaatattcgacctctggatgaatcactggtagctcacag

SEQ ID NO: 185105 - DNA, 487 bp, Zea Mays
aaatttttaaaaatgcggattatgtgttggggaatgaatcgataggtgtctatgtgaaaagcgtattgttttatgcatgggatcgatgattgtgatagtcaatgcagatgagggtatgattagtccagttggagtcaccggtgtggttgatgtcttgtgcgtaatgtggggacacatatgtgggtgtgtgtcgtggtgtattttagtagtggtggcgtaagatatttgtttgaggtgtgcgggtatatgccgtaatatggttatactcgcgacgaggaaaggtacatgtattgtgtaacacgacgcttaggtcgctattatataatcgtgtgaagagtgctcgaagactgtatttgtcgaatatagttaactagatgctatgcacataataattggtaacgatgatttggtgtagaacgttagggagatgatcgcctctatggttgaaatgtttggtggtaggtcgtaattggttgtgttagcaacg

SEQ ID NO: 185106 - DNA, 431 bp, Zea Mays
ctgattgtgcaggagctgaaactcttggttgcttgcacagtcttgctggaggtctttgtagagttgaaaggttggtgttgagatcgtatagaccgatccactggtggtttccctgcgcgaaagagcgtctgctactgtatttagccggccagccctatattccaccttgaagtcgaaaccaaatagcttactaatccactgatgctgaggtacagttgagagccgttgatcgagcatatacttgaggctgaaatggtctgtacgtaccacaaacttgctgccccacaagtatggacgccaatggtgtactgaatgtaccagtccaatgagttctctctcgtatgcagcgagcttgacatgtcgggctgcaaaggggcggctggaaaaggcaattggtccctcatcttgatgcagtacgatgccaaaacccg

SEQ ID NO: 185107 - DNA, 494 bp, Zea Mays
ctcgagcatgtcaatcaacattgtgacgccggcattacgacaaagaagagatgtgtgcccatcctaaagaaggccaagtacagcgtgcagcaatcattcgatcttgtccatggtgatgtctgtgggcccatctctacacctactcccgatggacgtcgttacttcgtgctactcgttaacgaccacattcactatatgttggcggtgttgctctctatcaagggtcgtgcgggtgactcaatccgataagttcaaacaatggcaaaagcaaaatgcgaaaggaagctcgagtgattcacctccaccaagttcgcgaaacactgcagtgaccatgcatcttgcatcagcttattgtgccctacataccacaacagaacgatatggtggagtgtccaaaccagtcagtgttagcggtagcacacgcactgctgaaacggagggatctgtcggccaaattttaggggggagtcaatcattgcggcagtgtacccgct

SEQ ID NO: 185108 - DNA, 345 bp, Zea Mays
ttaagagaagagcctttgttcctggaagggatgatcctaggatagaagtgattggaagggatatagtgaagaaatgcaatggtgtgcctttgtctgcacaagctttgggtttcatgatgcggttcaaggaaggggtggctgcatgggaagcagtgagggacagtgaaatatgggagatagaagatcagaatattatgccatctttgaagcttagttattgtctcatgccttgtcacctgaagttgtgctttgcatactgtgtagttttctccaaaggagctgccatagacaaggacatgctgatacagcagtggattgcacttggattcattcaacccactagtg

SEQ ID NO: 185109 - DNA, 1843 bp, Zea Mays
cttagccttgtggtagggagaatatttatatggtcgagaattgacaggaacagaacctggtacaagaggaatatggtgatcaaaagacaagatggaggtaaagctatgggcaactcaaaaacatccttaaattcctccaacaacccttgtaattccttgcaatcaaccggattgtcagccacctgaacctcctctaacactgccaaaacccaaatttcatttcccttcagccacttctccacctgcatcttggacacctccttaacctctcgaacatcatccgaatcccctaccaactgtactaactgccccctgtccacaaaactaacaatccttcccttccaatcaaaattcatgggactatgactttgaagccaatcaaaacccaaaatcatatcataagctcccaagtccaaaactctcatatcatccgtgaacgagtgaccattagatcaccactccaaagcttccaccatgcgatcactttgcataagctccccattagccattttaaccttaaaaggttgacactccttcatcaacaaccccaaacgatccaccaattccctgttgacaaaagtggctgaacttccagaatcaatcaatatcaatagagtctgattgcccactaatgctcgcacccgcatacattctttactcgtagcaccactcatagcatgtagagacatataagaacactcttcctcttgctcctcttgttcaatctgatccaactattcctctgtcaatgtcatcccgagttcctcctttgttagtgagttcagttgcaactgcaccctcttcgaacacttcagttgatggcccagctcaaatttgtcaccacaactaaagcacagaccgttctgacgtcgatattccttcaccaaacgttctttagaaagctcagccataccggtacctcccctgacctccgttcttgatccagttgccacaaacttgctaggactggcccccttcaatgacttttgtcgttgcttatccataattctttgctgcaacctagcaaggaacacaacccttcccactgatgacggcacatgagactgcaccggagcttgtaatttgtgctttaaacctttaataaactaagccacataaaatgtctcatcaagagtatgattgtgcactgctgtcgcatagcgcgcatcctaaaatgttttcacatattcttccactgatactgcttgatacagatgcaacaacgcacacatggcttggggatattcttcctcaccaaatctctgtatcaccgcccaaggccccaacccatgctgtattttgaaaatctggaaccatttagatgcattcccttccatactcagagaagctatgataatccagatctgctcaggcacccgatacaaagtaaaataatctaaacacttgtctaaccagatccgtggctcctccatcaaacctaggaaacggttgacgaggcactgcagttgttggtaactccatctcctcgacacacctgttcccaaactcccgattacgaaacaaatttgcatcgtcatacctttgctgcggttctggtggcacaggtcgcggtactcctccccgaaacctgttttcccccaacaaatcagcagactcgagatcgtgggccatctgctccaaccgcaattccgcaaccaccttctccgtcctctccatctgctgcgcgatcaggatgtgctcctctgctgcttgctgtgccacagtcacagccagccccacctgagctaacaactaattttgcacttcctctactcccatcaccttctccgccagtcgatccatcttcgccatcatcttctcccagcgatctgcttcctcctcc

SEQ ID NO: 185110 - DNA, 291 bp, Zea Mays
caattcttagcatgatgcatgaataattatagaatcaaccttagttgattcaaccttctatacatcgcactcttcctatctggtcctagaaataaactcttcagggatacttagatgagaagagaagaaattttctagataagtgttgggacgaataatgattggctgcttgaaatggaatgagggcggtcaagaaaaagagcgattttggctagaaggtcggatcacaaaccgttgcctctttgcctggccctgattagacttctcacctccaaatcccttattcttccc

SEQ ID NO: 185111 - DNA, 311 bp, Zea Mays
tgacttttctgatacacaaatgatggaattgctacgcccatccctggaggaagcttttgtcattcaaaatcaacaggtacttattcagctgctcgactggaggaacacatttttttacttcaaccaatgtttgctttgagcatgctgttttattcagttgttgtggcacattttgagctgagctcaggcttatgtttcttcttttaaaagctttagtttgaatgctcataggttgctctagactacattggaaaacatggcgcaacagttggtgtcactcgggaaaagagaattaagtatgtcaagcaaag

SEQ ID NO: 185112 - DNA, 392 bp, Zea Mays
gtcgtcggcaacacgagatcgtttctgaaatccagcaattggggtgatatcaccgattcctcaaccaccattatcttcttccttctagagtagaccttgaagcaccgcgacttggtacttaaccagcaattcagcgatggtcccggcctcccaagcagattgaagaaggaactagagaattccacaatattgacatcagcaacctgtatgtctgcagagcacaaattggaatcaacaacagccagggcactcgggagaatgtcagcatcaactggatcagcggacccaggcgccgtcaactctacaaccgcaacaccaggaataaatggttcagcagacccatccaaggcattcgggagaattgtagcatcaactggttcacctggttcagc

SEQ ID NO: 185113 - DNA, 1951 bp, Zea Mays
tatgcctcatactttagtggtgatatgtcctcttgtttgagtttggacgacgagtcaagaaataccttacagaaatatataggagcagaaagaatcttgccttccatgtccaaggtacttgttatgtcttatcaattttgctttgaatttatgtggacatttatcgactgagtgcttcaataggttgatttttggatggccgatgaaactggtccttgtgggccatgtattggttttttccatgattgttcggacaacaatgatggtgttgattccgtaaggaacataacgaatgccaagcttgttgagatatgccgtcttgtgtttgttgaggttggttttctgttcttttaagatcttttgcatgcgaaacttctcagctgttaagttctattgctacacaatgtctctgctttactcatatctttccttcatttttagttcgatcggcaagcagatggcgtcttggagcctttccaagctaagcatgtcttaacaaggattaatctcgaatgtttagctgccattcttcaaaagaaagaaagccactatgacttagatgtatacgcttatgtaattcgtcaagtctactcggtaagttttccgtgtccacttcgagttacaatagctggctgtgtaatattattgatttccatggtcaatgacatttaataatatgcagcgtactggtaaaggtttcaaggattacacaggtaaggttggtgctgttgatacaaatggagttgatacgacataccgcctagtcgcagatcacatgagaatgatcgctgttactaatgcacccggttctcaacttggttagagcgttatgtttctgttggtcacgaatgttaatataattacgacatcaatgtatgggtttgtcatgagcacaagtacaattattggtcattttcaaggaacaatcagaccaatctgattgttggatgacttattacatgaatacattttttgtcattacattgttcttattatgttaaaattgtctttcatctttatgaataccagggttgggaaatgaaggtcgcgagtatttcctgaagtgtgctgataaacaggctgtgaagtatggctatcaagtacttaagataaatgaagaggattacgacatgtaagaacaatcacttttatttgaatctgtgctttattttacatgcatttgtacaaaaacagttttccctgtttacaagtcttatttttgaataatgtattctcacgcattataaactttgaatttcaataaaaacctttgtatggcaggatgtcttcttcaatgcaccggtgcaaataacagagcatccagttaggtcacttgtcagtcttcatgatttttagtatgagtcgtcgttagcaaattttgtatttttgctccctgctgtattgagttttctctttgtctttcctccagaagtaccttgccaggaacaccttgaaactacttatgcttggtgttgctgcatatatgtcattttgcaccctgctgtattgcgtttctgctttgtctttcctacaacagttatcttgccaagaattgtatgttaggctacttatggttggagttgctgcatgttgtcatctcacagtgtgcagttaccacttctatcttttgctgtgcgcttctttactaaaagtaaaaataacattcaagatgaaacctactcaggatattgattctatgactgggttagttcttgccagcctgtcatgcaacttctatttcgagtaggttaaacatactcacagtgggtatatagaaagaatacatgccatctatgattactgcatgtgagcttgtactcaaatgaatttttttacttggacagtgttgttgatgaaattcttctaaatgaacctgattgatgcaatgagcttgaaagagaaataatcgacagaatagtcaaagatgaagtgatgatctacaaaaagacta

SEQ ID NO: 185114 - DNA, 1277 bp, Zea Mays
cgaagcacagctcggatatatgaactataccactctcctgatgcaaagggcaccggcaaggattatctatgcaccgtgcgttgtggacttgctgttaaagaaccgcagccctatggcgaagaaagtatgtcccagcggactggcagtgctttaaacagtgccaagcgtgaacatgaggcaaaaagtgtaagcagtggtagtgatgaagatagttgggttgatgtcaatattccagaatctcctgcgggaaataaaacactaacatctcaagaaaggaatgtgattcgtacctgccaagtaaatactatggtatgcaattcattttttttattctgccgatgaaacattggttaatactcatttatcaccagaaatttatgcaggcaatggttttgttagataaaataaggatgtttttctttgttatgaggtcatctctagcaaccttatctgtctcacctcctatttcaaacttcgctttgtgaacagtgcagagactgctgtgcaaaacagtgttttgcacggtctactggagtttcttattgagttctttttaagatatctacaacctttttgttagtgatacttttagagaagtgggattgatgagcaggcggacttacaagttgcaactttggacgtagtaaaaacattgtccttatcttctgttattatatgtattgcaggcacactatgaagctactgccgagatgactgatgttaacccatgtgcatcccttactatacgtcttctatcacttcagtcaaatacgtcagtgcacattgaggaaatctacatatttgctgatcctgttgaatccaccaatgatgtttcagtaagaggtcctggaaacatgggaggcagttctttgctggcaatgcttgctcctggccttatgcaaatgtctaagtcaagaaatttgaaaattgatggtagttatttttctgacaaatcaagggatcaagatagcgtcacatgtgaaagggttacacaggaagcagggctgtgtagcacaaatgattcaaaatatacgtctgcagggatagaaagtggaatgggccctacaattggtgttacagtatctgatgaaaaaagtagccaaagcgagttccagttcaaggagcccaattctcttccactgcctgtacaaacattagatagcacacaagcgccttcagtgaaggatcggcgagaattaaacacaggtcatcccctcatgaatgaaaactttactccttataatcatattgagagaaagctggatactctgctgtca

SEQ ID NO: 185115 - DNA, 426 bp, Zea Mays
atggttgcgcacgcacggggaggccgacgcacgaagtgaacgctgggccacacgctgggctggcaatggatactgggccgaggagaggcgctggcaatggatactgggccgcactttgaagaggaggggcgctgggccgcacgaacgctaggacatatgcgctggtatggaatttatttgattagtaccatatcggccactgagagaggcggaacgtggcttataagcgttgttgtggatcatctgttgcttactctaactcctccaactctggtgccacaccaacgtatgttttttgcgcagggctgaatttggagggtgtgtacggcctatggggcccacatgtaggaggcgtatagacagaacaggtcccacggttcagaggcagaacggccgttggcagaacatgtcagaggcagaacggca

SEQ ID NO: 185116 - DNA, 338 bp, Zea Mays
ccccctcttcgggttcaggggatcgggcgccgcgtcaggaagcgggacccgcggctggtgtgcccgaactatctcgcggggatagtcccatgcgcgtgccccgaggtggacgagatggtcgccgctgccgaggtggaggacgtggcgacggagttccttgctggcgcgcggaagaagactaagactgctggtcgccgtggcaaagcggaagctgcaggtactgccggaggaactgtccgcgcggcggtggcggagatgaagtgccaagtgcctggctgtgaggcggacatacgggagctgaaagggtaccatcgccggcaccgtgtgtgtctgcgctg

SEQ ID NO: 185117 - DNA, 1689 bp, Zea Mays
tgcagctttgattttattctatatgcgggggggaatgtctgggccttggactggtgccctaggttgtgcgacaagcctgactcttctataaactgtgaggttgtggcctttataaccatgaactttgtagtgaagacaagtactgtgaacttgtaaacttgtctgaaacacaccatttaaccatcaagtattaagggataatttagttgaatgccaccctcaagtttgttattcagaaaaataccagttgttgcgacatggctggtaggtcctgagctcgctggtcaatgacacattgaggccccatgtcggtatttggtaccggcagtgcaccacaggatgtatcacaaggtgttttttgtggttgacgaaattgactgtagcttgatggttcgcgtggaaggtgacgtgacacgagaattatacaggttcaggccgccgaaagacgtaatacccatcgccctgtgtgttgtggtgattgtattgcttgagctcgagattgcattggtgtgcagacgattcaaggttctggtatgagatagctatgagatgggatctaccgatgaatcatgggggtccccaacctgccttatataggctgacggatttagggttacaagttagtttctttcctcatcacaagtgtgataagtcccgcgatctcggggatttgttcttgagtcgcccgtgagtcctcgcaccctccttaatggaaaaatccgtcgctctgccttgatctccaagccttcatgtcgtctttgggtttgagttggtcgatcggtccatgaaatcatctgtccgacctacttagacccttcaacagcccatgtacagaacccacgccatgaggacctaggggatatctatcccccacaccccatgcatagtatcatattgttatatctatgactgccatgccacaagaacatttatcgaaacaactctactctatccagtcagaaatattgtggtgttttgggattgtctgaagtgaactattctaaacttctgctactacttttactaaaatattgtccaaaaatgtactcatatcacttgcaaacattcaaactaacacattaattgtaggaaactaagcaaggtccggtattgttgctttcagttactcagtcatttcctaggtttccgaaatgatttactttctgtatatattttgcacaaatctttcatctggtacacaacaatttaagtctatacggtttcctagtattttggatttctcacccaggtgatttcttaaataatatactcacctctctcctctttaattgcttactatgccaccagaaaatcctatgtcgcacatgataaatgtgcttgttactacccaatacccattgggtttttaattaactgaagtgcgagcttttgggtggcatgtatctgtaaatcctatgcaactgttttcttgactatctttgttctctggatgattatatggttgcacctattttttttttgtccatagcagttcttctaatagcctgtttttgttttagtccttactgcaagattacaagtaacacaaaaaaggttaattggaagctcatgatcctatgtcatatactcatttattctctttgcagtatcttgctgtttctgcgcatcctcctggttcttcttaccataaacttggcatgcccttaaccgggagaggtatcattcaag

SEQ ID NO: 185118 - DNA, 308 bp, Zea Mays
ctttgatgtctgcaatccatcgtctgttcaatagggcctgctgcacagttcttctgttaataattctttttggaataatgctgaataatcttggagcaatatcagatacccttttgccatggatccatttatctatccagaacatggtgttggtcccattccccacctcagagatcaacaccttggagaagaaggaacgggccatgctaggaacttgaatggacaggctagaccaagggcgtcttgggtcagttttttgcaaccaaagccatcgcatgcggagggcccagcagagctcaggaaggcta

SEQ ID NO: 185119 - DNA, 522 bp, Zea Mays
atcgaactcgtgggaggtgacagtgggtgactgttgggcaaaggggaaggtggactcattgaaaacaacgtgacgggaaagatgacatggttcgagagaagatcaagacaccggtatcgtttgtggtgaggtgagtagccaagaaagacacacttagcagagcggtgatcaagtttgtggctagtggtggcgaataggttggtataacaagtgcaaccgaagacgcgaaggtgttcgtaggatggcactgttttgaagagggcgaagtgcggggtggagaaatgaagagtcttggtgggtagaatgttaagaagtgttgctgtgtggagagcttcaacccagaaggttggtggaatgttggcctgaaatagaagtgagcgaatggtgttattggtagtacgaatgatgcgctcagctttaccgttctgaggtgaggtgtaggggcaggacatacggaggacaccatgggtgaggaagaacgtgcaggagctggagttgtcgaactcaagtccgttgtcacat

SEQ ID NO: 185120 - DNA, 343 bp, Zea Mays
ccccatcatatgctccacccttgataaggcatccgccactacattctctgtgccctttttatacaccacctgaaactgcaagcccataagcttggtcatggctttcttctgcagatcagactgtaactgctgatctccaagataagtcagagatttgtgatctgttttaatcacaaaggcacccctctgcaaatattgtctccacatgtccactgctaggatcagagccaaaaactccttctcataaattgaaaggtgtttgttcttctcacccaatgccttgctgatgaaggctatgggcctgccttgttgcatcagaacagcccccagtcctatatttgaa

SEQ ID NO: 185121 - DNA, 538 bp, Zea Mays
tgcaactgcaagcatcatcctatgtcccaagaaaacgttgcacagcgaagaggagggcgcgaactggaaccacggaggtaaagacacaacaacctttggaggcaggcccgtggaggccaacgttggtgttgcttgcagcaagtgaatctcgtgcagtgcaacacctcatggtcccgcggccaccagtgcgcatagggtggtgtggctggagcagatggtggcgaggccagcagacccccttgtacgaaggagagtagtcgtggtagttgcccggtcgccgcagatgaaagccagtgccggacggagcgttgcagaggggcaccatgtcttgcaacctcttgtacgcggaggtgaacaacaaccatgttactcgggcgcgctggtgcagctatgacacccccgcaatggagcacccccatcgtctgcttcacccgccgacacgctaggaaatcgcgtgttgcaacctgcaggtggacagccgccgccgtctgtcgcgaagcaaccaccctctcctagacatcgctcttggggtcaaggg

SEQ ID NO: 185122 - DNA, 324 bp, Zea Mays
ggaagacttgggctcctccgtgatgcaagtgtttcatttggctggcatctctcaaccgagtttggacggctgatcggctggctcgtcgtggaatggatcacccggatagatgtcccctgtgtgaccagcaggatgagaaagtgcaacacattctggtggcttgtgtctttgcgagggatgtatggtctggaactccaagcaggttgggattgcaacatcttactcccacgtctgatgcagcagtgttccaggaatggtggggagaggcagaaagaaacgtgcctaagcaaaagaaaaatatattttaactctattgtgagttta

SEQ ID NO: 185123 - DNA, 715 bp, Zea Mays
ctcatcaaatacaacatgacgggaaataataatgcggcgcgtggagagatccagacagcgataccccttgtgagcagaagggtaccctaagaagacacatgcgacagaacgaggtgcaagcttatgcgaagacgtggcctgtaagttaggataacagagataaccgaagacgcgcaagtgctcataggaaggaggggtattgtacaaacgggtgtacggaacctcatggcgtatggaggaagaaggtctgcggttaagcaagtatgtggcagctgcgagggcctcaacccaatacttgggtggcatggactcatgaaggagcagggtacgcacagagttgttgagggtacggagaacacgttcggccttgccattctgtggtgaagtgtggggacaagaaaggtgaaaaacgatgctgtgggcagcaaggagatcatccatggcatggttaacaaattctgtcccattatcagcttggaagcatttaatagtgtagctaaattgtgtgcgaacataaggaataaaatcagcaatgtgctgacggacctcagacttgtgcttaaggggaaatgtccagcaaaaatgagtgaagtcatctagtagaaccaagtaatatgagcatccagatatactagtaaccggggatgtccagacatcacaatgaactatctcaaaaggggaaacagtgtgggaagtagatgtactaaaaggtaga

SEQ ID NO: 185124 - DNA, 391 bp, Zea Mays
ctcgcagttgagcgtctctgatgatgggcagaacctgcgctctccatagcacatggttcgtcttgttgagttttacggcaacaatttgccctagaaggggtgttcgcatagcggtttgggagctggacgccattgctcgaattggtgataaatggcggctagggttagggtagaggagaggctctgattaccatgtgagaatagcaaccaggattggttaagcgtttctacctgcagagtaggccgcatagacctgcagagtaggtttcaccatcaatttctctaaactgtaaatgaaatccctgctacgaatgttgatcattgagcacgacaattaatgagcaagctgcattagctcttgtagtgtctaagcttttggcaccagttacag

SEQ ID NO: 185125 - DNA, 327 bp, Zea Mays
caccagtgggtgtaaatggacgtgcaaaacactgtttcggcacggtagatgcactgtagacagagtggggtttgaaatagttggtggtataggctattcactggtgagtggtgaggatagcctacgagtaatggtatatccattctagtgagccatatatctatcaccggcacagcggcacttatttcatgccctctggttttgtaatgcataagattactctgtacatattttttcttatgtctctttaccgcctacttaagattgaattacatctgttttctacacatcgaagattgaattaaaatggcacttgtgtgatcagaa

SEQ ID NO: 185126 - DNA, 344 bp, Zea Mays
cggttttctaactcccaaactaactgagcgtgctgcactcaccggggaaccaagcagccccagttatctgctgagcaacgaacttgcatgaaatgaccgaggcagatctccatgcatccattttcgagtgtttgaccgtcattataacccttcaacctaataaactaatccaaaggtaaaaataccacaaagcatgtactcggacttgttccatgttaacatgaatcctaagacgcaacttcaaactgacatggttgcatgcatcccaggcatgcaacacgggttggcagcgtcatagatattccacctagcaccaggtccatgttacccgttggatgctcagg

SEQ ID NO: 185127 - DNA, 306 bp, Zea Mays
cagatgtcaacgagtggtaccagcaggcatatggggtacctttttcaacaaccgatgacgtcgaagaagaagaaacttattttgatgatccggagcagtttgtctcgcccccatatcacggggatccgggccaatcgtcctcttatcctccgccccaggacccgtctggcagtgctcctcctccggcccagtctggcgaggaacactttgcctccgacctggcgcaacacttcttcgctcctcatcatcctcctcctcactggtgatcattggattggcgcttctctctctctctttttggttctt

SEQ ID NO: 185128 - DNA, 353 bp, Zea Mays
ttggcattggaaaaagacaaggatagtcgtttactaacttcgcctctcaaatttcctgggaaacttgctgttgatgtgcaaaacaatcgattattcatatcagacagtaatcataatcgaattgtgcgtatctttgttcttattcttttaggtttctaccactatggcacatcagttagactcatttgcttatcatagaaaatttgattttgtttctttttactataaagccttatttgtctcttcttgttaaggtggtgaccaacttggaagggcagttcatataccaagttgggagttctgaggaaggattgcttgatggcccatttgatgctgccctatttaaccgccct

SEQ ID NO: 185129 - DNA, 571 bp, Zea Mays
caagtttctagtggcccattacatagagcgcagtgatcttggtgaggaaactttttccattgctattgtccatgcgaaaaccttgcacttgttttcagcatgtgctctccagattaggctggaccggaacagcccgaaggagcctctaaactagatatgatatgctgagcgagcggagtatgttccgtctgccatccatctccagagtatgcagtccctcgtgcctggtataaggtgggtgtcctaggttctgatccaaagtgagaagaactcttgtatctaggttgcagtggtgattcggcctcgcatcgcattgatccagtgattatcccgaagctccatgtagattggtccgtttttcgtcctagacatctcaaataggttacgaacaaagtggcgtggcccctctccatcaaggcaagtgtcatgccagaaacgacatttgtgggttgtggccatctccaacgacaagtcgacaacccttgttgaggcagtgaaaagtgctcaatcagtgtcgtcagtcagggtatccatgccaacccaaggtttggtatcatccacccattcctgc

SEQ ID NO: 185130 - DNA, 1081 bp, Zea Mays
tttcaagttgatgtcattgttttggatgaagtccattatttgagtgatatctcacgtggcactgtttgggaagaaactgtatgctattggattactctcatattgatcacttgtgtttatgttggccatttgacttgggcaattttaccatgtcttaggtcatatattgtccaaaggaagtccaacttatatgtctgtcagccactgttgcaaatcctgatgaattagctggctggataagtcaggtaatgacaaatttcatgtttatttttttgtgagttggtcttcttaccctcagtgatgttttctgtaccctcagtaattactcgtgttcaattatttgtgagcttgacttccaactataaattaggtgtattttttttactattggcctaggattttgtaataaattacagtgggactgtacaaacacatgcatgcacaaatgttttgttttaaacataatgatttacctttatttgctcagtattgcaagacattctcctattttctgaagtatgaaatcattcttatgtatctttccttgtagattcatggtaaaacagagcttgtaacatcgaacaaacgtccagttccgcttacttggcacttctcgaagaaatattcattacaaccgcttcttgatggaaaggggaaaaaaatgaataggtaccatacgcgctagtccattttaaaagataaggatgtggttttgatgcccatgagtttctgtgtaccatttcaaaagtgcattttttagagtggcccaaattttttcttggagacgtgcagaactttaaaatcaaattcgttcttgatattaaggacaaaaataaaacaagtgcatatggatctcatgagtcatggcacatgggttttcctttcacactggaattcatatttgaaaatgggggctgcattacaactttccttttcttctattcatacaggaaactgcggatgtctaactcccaaaacttagcatctccaaagagtgagttctattatgtgaaagggaagaggaggtttagaacaaataaaattgagcaaggtaatagcaggcctttggacatatcgaaac

SEQ ID NO: 185131 - DNA, 598 bp, Zea Mays
acaaagttccaggaattcagcgataactctgactgagattgccccttgcacatcggagagccaatggaaattagggagagcatctttgaccaaccgaccattggcaagacgcaaaggcaccaactcaaacaaagcaggagctatgtccttaatacatctcccctccaaccatctgtccttccagaaaagggtattagctccatcaccaagcttagtaataatggctgcaacaatcagatttttaaccaccttacaaacatgaatggggaagtctgcccaaggcctactggggtctgttttctgcagccacggccagcgagctctcaaagcccaacagaggttctttaactcactaatccccagaccacccaactccttgggacgggtaaccttaggccaagccaagaggcagtgaccaccacggaactctttcctacccctccagaggaaacccttcctcagcttatcgattgctttgatggcccaaacaggaaggtcaagtgccagagctgcataaatcatcttagacgtcatgacaaactgcacatgaataccaagccccttgggaagatcaagtttctttagctttgctccatgt

SEQ ID NO: 185132 - DNA, 346 bp, Zea Mays
tatagtggattttaggaggatgatatagggggaaccactgtacagagtacaaatataggaggagctgacgtggcacgttagtgggatatagagggtgcaatttagagggaaccgctgaaaatagtgttaccaaaatctgttttatatcatgtgcgaaaagaaaccgataagcataagaaacaatctaacacagttgatctctatatgaattaggtcattttgattacaaacattcataagcagaagacacacaaaacagtgcatcaacaaatacatgcactatagctctcaccactcactagggcttgggcacactcagggtctgtttggttgggttgtggctctg

SEQ ID NO: 185133 - DNA, 410 bp, Zea Mays
gcttcgcgtgcaattagtcataccttgactgtacgtcatgctgatggtttgtgcagatcgtgctagcgtagagggctgtggtagaatactaggatgtctgtcaatgtcatgtgagctttacattccctaagatgtggtattgttttcactgaatagactgatgcatgttaaacctgtaagatgcgcctttaccttgtcgatcagagtaagaggccaagtacatgcaacgagtatgagaatttcgagcactgcttattgcaactccccgcgtgtgcttttatcaatgatcaacatactcttttacaattcaatagattgtgcatgccatgtactgggagatgtgatcgcatggtattttgatgcaaaatgttagggaagcaactatccttctttgctatttaaggccgtcc

SEQ ID NO: 185134 - DNA, 578 bp, Zea Mays
aagattttttagcgtcatcgaggggaggaaatcacacctgataaggtgcatagactagggttcaaaccctacccagctggctcagtaaccagagggagccttgccaccgcactactagtgcgtctgcagaagagaagttagggtagaggtaggattcagaaggggacccagactcttggtaccatgtagagaattatgggaatacctcacacccattagggaggggtggctttcatctgtatagtcaagatacaactgggagtacatggcatacatgtgttagactatgtgtatatctaatagtctgtctcctcccttctatcatccccccatcccccttcacataccatcctccctggcgcccttggaccctcttttgtgcaaagcaagcagttactgaaatcgagtcactgctccaaatcaagccaccatccccaatcaggggacaagcaagcctgacactgtgcccgggtgctgagctgcatgcccaccaagctttgcacctagagcaacagtatgaaacaggagaagccgcgaggagcttgtggagacgtgtgctctaggatgccaagtcatcg

SEQ ID NO: 185135 - DNA, 368 bp, Zea Mays
tgggaaatacctccctgcagagcgtcggtctgcaggttgtgctgcagtggggcaccttcctgtccttgtagagtgccatgaacatactgttgggtctggtgggccagcagtgcatggtgtggggcgatggaggccggagcagcgtagatgacctgttactgctgggccggcggagccagcagggcctggtgctacgccaggagagcctgctattgttatggagtcggcgctcgtggaccggaccacatttgaatggccctagtccaggggttttggagggagggccataggccggaggtgcccccatgctgaagagtgactgggccgccgggaccagttgccggggttggaagaaggccctggcggcc

SEQ ID NO: 185136 - DNA, 413 bp, Zea Mays
gtttgcggccccatgtcgaggaggactcccccttcttcttgtcaccctggcaggcctcccactgctcccgattgagatgtagcttcccgccgatggtgataggcgcagagagggcctgtggttcgtcgtcgtcgaccaccttgagacgaccactcgcttcttcaatcgtcatcgtggagaggtctagcagagactcgattgagcgagcgatctgcttgtacttctcggggatgcaacgaaagagctactcaacggctctctcctcatcgtaggtgtcgtcgccgaactgcaccatcttctgcaacagagtgttgaggcgaagagcaaagtcatcaacatcctcacctggcttgaaggccaggttctcccactccttgcgaagtgtctacagtgtggtcttgtagacacggtcg

SEQ ID NO: 185137 - DNA, 407 bp, Zea Mays
gcttgggtcatgggagaaagaaagctaaggagatatatggcatggacatttaatctcagttggtggcttcaactaggactaaagagtattagtctgtggcctaattttagccaggaccaaagataaaaatactctatttctagctcacctacttgactaggaaatactcggttccaaaataattgtaaattgggaaggtgcataggggtgttttagatgagttggcgtgctgggtgctagctggagccaaaaatctcggaagcttaagcctaattgaggcccttagtgtggtcggtgaaagttatgatacaatcatgtaatagttctaaggggtgtgtgtgcttttcgggagattcttgcatagcaggttctgtctctcgttttgtaatacctttcgtctctctttc

SEQ ID NO: 185138 - DNA, 350 bp, Zea Mays
ctaggaataggattgggtagtaggggggtacgcatgtgccagtgaagaaatgggaaggagctagtgtggaggcagcaagaattagggttggagaggttccgcgagaggagaaatgatgatcccggcgaggcacatgccgccgacgatgatcgtccggaacggcggcgcggcgtacgggtcctcgtcggcactgtcgctcggccaggtaatctttgggcttggtgagatcagaagactgccttttagtttcatctctcttttctttgggaaaatcagaacacgttgttctcttgtttcttctgcgctctctttcttgctctggcctctgttgggtaaatttcttcgtttga

SEQ ID NO: 185139 - DNA, 656 bp, Zea Mays
gattactgctgttgccatgcatcatttgcacttcgagaggtttgtttttttgcatcatttattcccatcctgtttcagtaatctttttcctcagttctagattgtttgtgagaaattgtgaattttcttagtcaaatgcattcaattgtatggccctgtatttttctgtatggctgttttggcactaatgttttgctcttttatctctttataggctggatacgagactattatgatgaactccaatcctgagacagtctctactgactatgataccagtgatcgtttgtactttgagccactgacagttgaggatgtattaaatgtccttgatttagagcgcccagatggtataattgtgcaatttggagggcagactccattaaagcttgcgctgcctatccaacagtacatagaggagaacaaaatggtttctgcttcaggcactggtaatgtgaagatatggggaacatcaccagattccattgatgctgctgaggacagaaaaagatttaatgcaattcttgaggagcttggaattgaacagccaaagggagggattgcaagaagtgagtctgatgcattggcaattgcctcagaaataggctaccctgttgtggtccgtccgtcatatgttcttggtggacgggcaatgg

SEQ ID NO: 185140 - DNA, 1532 bp, Zea Mays
atggactccatgaagatttgaatcgtgtgaagcatagaccttacataaattcaggggatgctgatggaagatcagatgaagaagttgcagatgaatattgggcaaatcatattgccagaaataattcaatcattgttgatgtatgccaggttagttctaaacctgtgaatcacttgtcttactgttgtgatgctttggctttagataaatgctaatagccattgcaatttgggaccatcatgtttctcttgcttggtattgtaagcaccgctagcagtttcaggcatttactgtatgtaatgtaaagacccttctatgatcttcctgttgtgattagatgtgcagatgtgcactgttttcaagtcgtccgactaatcacgattagtcgggcaggtcgcctggtagtggccgatcagccggacgactcgactagagtatcacgtccaggtcgtccgactagtcgtcgattaggggcgattagtgtccgactagatggtaaatcgatcaggatttgtccaggcggctagggttttctagtgggctactgggcttctattttttcggcccatctacagtagtataaaggcaatgcgccaccaccccttgtcaccccttgaaacttttcctctcctctgctgagtccagaacacaggctgcggctctagaacaccagcagcagctccagaacactggcgacgtctccaaaacactagcgacgagatgagctcctcatctcaaggttccccccttctccccctttcctacctcattacacatggagctgaatatatgttatttttatgctgaaggattagctttgttagacgtactccctccctccctcccaaaatagatggccttataacattcaattttgttccaaagtacttgaccttctcactttccaatgcacctttctctttccccaatatacatttatatttctgctccttgacgggcattttggtcttttggctccagcgttggtttccgtgagagtttctaaaatgacatctaaatatgggacggagggagtatattttatctgtatatatgtactttccagtgtagggtgtttcttacgatgtgtataaactcttgtgtatcttccctacacatactacgatacattggaggtgcatacttgtcacaggacacataaatctgcatgttgcatgcaatttgacatattttgtcttatgatttagttctcttttcctaattattctaagacaaatgttttactgacatttccttttattatgtttttccaggggcagtacaagtccactttggtttgcccagtctgtgggaaggtttcagtgacttttgacccgttcatgtatctttccttgcccttacaatttgcctcaacccggagcgtgactgccgtggtgttttcttgtgatggtagtgttccaccaacaccattcactgtgaatgtaccaaaacaaggtaggtgcagagatctattacaagcccttggtgctgcatgctcacttaaaaatggggagaaacttctaattgctgag

SEQ ID NO: 185141 - DNA, 1938 bp, Zea Mays
ctcagaaatggagaacctcttaaagatggcatgggtgtacaataaattatctctgctatgtacttgcagatgacgagtcctcagaaatggagaatcttttaaagagggcaatgccatggcttggtgaggagatatgcataaaggatccacagacgcagaacaccataatgcctggtctgagcttggttcagtggatgaacatgaatatgcagcagaactcatttgcaaactcggctatgcagtccgagtacctacgatcgctaagcaaccccaacatgcaaaatcttggcgtggctgatctctcaaggcagttaaaccttcagaaccagattctgcaacagaacagcattcagtttagttctcctaaactgcctcaacaaatgcagctggccaatgagttgtcaaaggcatctcttccactgaatcagattggtgtgggcaccaaacctcaagaacagactcaagacccaaacaatctgcagaggcaacaacagtccatgaaccaactacttccattgagccaatctcaaaccaatcttgtccaggctcaggtccttatccagaatcaaatgcagcagcaaaagcaaccaacatccatggctcaaaatcagcagccagctgccagccagtcactgatcctgccccagcagcagcaacaacagcaacaacatcaacaacaaaagttggtacatcaacagcagcagattttactgcagcagcaacaattgcagcaacagcaacaattgcagcaacagcaacaaaatcagcaacagctaaataagatggctgcacaaatgccaaatctggcatcacatcagccgcaactgtctgatcagcagcttcaactgcaactgttacaaaaactgcaacagcagcagcagtcgttgctatcacaaccagctgttactcttgcacaattacccctaatccaagagcagcaaaagttgattattgatatgcagcagcagttgtcaaattctcaaccactttcccagcaacaaacaatgccccaacaaagtattcaagttccatcacgggcaacaccaccaccaacaacaaccgtgcaacaagagtcacagcaaaagcttccacaaaagcatgttgggttcactgacacatcacataccaccattcctccgactacatcagtcaacaccatttcagttgtaggaagtcctctgatggcaactggtgccacacattctgtagttactgatgaaattccttcctgctcaacatcaccttcaacagctaatggcaaccatattgtgcaaccagtcctcggaaggaaccaactatgcagcatgatcaactatgagaaggtgcctcagtctactcctatgtcgatcccaagctccctggaagctgtcacagcaacgccaagatcaatcaaggaattgcctaagttgaattctaatgtcaagcaaagtgtaatggcttcaaagctaccaaatgcagggcatgtagctcaaaatttgactaacaatgcacccccgacggactatccggaaacagcttcatcagcaacttcagtgtggctttcccaagcggacgggcttctacatcatagtttccccatgtctaactttaatcagcagcagcagatgttcaaagctgcggctcctgagactgatattcagggtgcagatcccagtaataacacactctttggaataaacggtgatggtcagctgggctttcccatgggagcagatgatttcttatcaaatggaattgatgcttccaagtatcagggtcatatttcaacagatattgatggtaactacaggatctcaaaggatggccagcaagaaatatcgtcatccatggtttcacagtcgtttggtgcatcagatatggcattcaattcaattgactctggtatgaatgatggtggtttcgtgaacagaacctcttggcctcctgctcctcccttaa

SEQ ID NO: 185142 - DNA, 315 bp, Zea Mays
aacttctctttgttacattgattgaacggacaagaaaacgaagcatcagcatcatactactgtccaatgtctaagctatcggttagcgcatcagtttcaatctttcaaagcgtcattggaagtcaaaggctaggtagcactagcacaagttgtttctagcatcgtccagatctgatgcatccgttaaacaggcgcacgagctcaaggccttcaccttggatcagggatgtgatcgacgacgcggtgcgacgtactcctcactagtaggagcattcactgtgatctcctgttgcttagcttagctgcaagaacgat

SEQ ID NO: 185143 - DNA, 783 bp, Zea Mays
ttttggcaggacaatgtttcttgctcttcagactcttgctgtggtgtttggagatattggaattggtccattgtatacatttgatgtcatgtttaacaagtaccctattcttggagaggaggatgtccttggagcactctcactagttctgtatactcttatattgatgccattagtgaagtatgttttggttgtcctttgggccaatgatgacggtgaaggtatatgggaggttgtgaattgagttaatcagattcaggctttttccgcaaaagtgtgtcagaggcttacatcttccattggttccatgattctgcaggtggtctatttgccttgtattctttgatttgtagaaatgcaaaagtgtgtctcattccaaaccaagtacagtctgagaagaggatgtcaagttttcgactcaagcttccaacaccagagcttgagagatccataaaagtaaaagagaaacttgaatcgtcactactgttgaagaaggtgcttctaggcttagtcttgtttgggacttctatgtttatatccaatggagttatcacaccagcaatgtcaggtttgctttttttcattctctccacacttcaacttaaatcactaaagttctgttagtggattaaccatgaagaatactatagacatcgaatgaatgtttttattttccatgtcattcaaacttatttcagtgctggagtgttttttccagccaaagtaattatttatccttgaatgtagtgttatctgctgtcagtggcttgaaagttgggctac

SEQ ID NO: 185144 - DNA, 704 bp, Zea Mays
gggaaagcctgggatacaccccttttgatctttcagatctagacagcatgatcaatgaaattgagcttaaaaatgttattatgggaatgcagtcagaaaaagcccctgggccagatggtttcataggctttttctacaaatattgcttcgaaatgatcagagaggacttgacaaacgcagttaatgatttctaccaccacaaatgtaagaacttgcaccttgtcaacgatgcaaacattattctgctgccaaagagagagcaggctgacaggatcgaattgtttaggccaattagtttaataaatagtttcatgaaaattatcaccaagatcttggcgaacaggcttgcaccgagaatgaatgagatcgtttcaatttcacaaaatgccttcatccaaaagcgttcaatccatgataattttctttatgttcaaagagttatcaggaaactgcataagaacaaccaaccagctttattcatcaaacttgacatatccaaagcttttgactccctcaactgggcatatctcctagatgttttaggagctctgggatttagcctcaaatggaggaattggattgcatcaatactgggcacatcatcttctaagatcatgatcaatgggcagtcgacagagacagttcagcatttacgcggtgtccggcaaggagaccctctctcaccttttctcttcatcctagca

SEQ ID NO: 185145 - DNA, 368 bp, Zea Mays
gtgagtacacctgttctagctctccctgatttcactgcacaatttactgtgtagacagatgcatgtgatagtggcctgggagcagtcttaatgcagaaaggccaacctattgcttttttgagtaaagctttggcagaaaagaataggtacttgtccatctatgagaaagaatttttagctctcattatggccgtggaaaaatggagaacatacttgcagcacaatgagtttattatcaagacagaccataagagtttgtgtttcttagaagggcaacaattacagtctgatttgcaaggaaaggctatgtccaagttgctgggtcttcagtttaagattgtgtataggcaaggcaaggaaaatttggc

SEQ ID NO: 185146 - DNA, 454 bp, Zea Mays
ggaggtctctgatgcgctcatctcgagatatgatcttgaggcggatgcgctcgatcttcgtcgtgttgcgccgagcgcctttgttgccctccttcccaacgtcgagctggctgatcgggtgttcaatggtggtcagtcactctacgcacctcccctccgtctgcacatcagaagatggtcccgtcatttcatggcctctggtggtagcgctttgccgcggctgctggacgttgagcttcttggtctcccgattcatctctgggagatccgtacggcggaacagcttctggatgaacactgtataatcctcgatttgcatgatgacactaaggatggtggggacctgtccgtgttcaagttacgggcctggtgtgctgatccagggggtcttccgtcgattattgacctgcatgtggaggagccgtcggtgctggagggggatgtgccttcgtcc

SEQ ID NO: 185147 - DNA, 851 bp, Zea Mays
actttgaagacccatttgcacgtgataggtacagcaccagcaggtaacagaacaacatcccatgtacttgtgcgatgaagggcttttaattcatcagtcatagcaagctgccactcaggtataccagaagcctctttataagatgatggttcagcaatgacaacactggcacgggaaaacccataacgttctggagctgcaatagtgccacgatcacgaagatgatacccctgattaaaaacaacatgagagtcatcattgttagtacaagtatcagcaacaggatcatcatcaggactggccgtgggagtagagcgaggacgacgaatgtaagtctgagtaacaggtggtttggaagagtaagaaggagatggtgtggaagcggaaggtggtgtgatgggaataagaacatctggagtagaaacagtaggtggtgatactgatgaagtttcagaaatgggaggaaggctcatgaatgaggtagactctgtggaattaaaagaagaatgagtggaagagttgtaaaagaagggtcggttttcattaaagctcacatctcgagaaatatgcatgcgacgagaagatgaatcataacaccgatagcctttatgttcagggctgtatccaagaaaaacacactcaacagattgagcaatcaatttagtacgttcacgaggtgataatagtacataacacatacatccaaaaactcgaaggtggtcatatcgtggaggagttccgaaaagaacttcaccaggtgttttgccagagtttggatgactgttgtctattgatgaggtaaaccacagtagaaactgcttcaccccaaaaatgtgaagggacaaaagaag

SEQ ID NO: 185148 - DNA, 348 bp, Zea Mays
cgccggcgcccacccgcgacccgcgcgccatcgccttcctccctgacctcgtgggcttccactgggtcgcctacgctgccggctccttccttgtcgtatcccacctcccctccccttgccgggacgacaacaacaacgacagttgctccccgttcttccgccaggtcatcgacctccgcgcccccgtgtccgcagttgcttggtgccgccgcgggagcggagaggtcgccgccgctacagacaattctatacacatattccagcctgcgcccgcctcttctccaggtctgcttctctggccaactcttcaaattctcatcgtcagttagcttagacggctgttgtggc

SEQ ID NO: 185149 - DNA, 488 bp, Zea Mays
gtcatgcaggtccaaaggggtcttagtcaaccctgtgccttgatgtggtaggctgctgtgcatcctcagtggcttaggtcttgaccagtgagtcatgctccatctccgtgctctgcctttctcatcctctctctctatttgtgttgccaagcagacctagcaactatcgcaatcccttacacaccttcattctccatcccctccttaaagtcaacgatgtccctggtagtgattagtgaaggccataagagcgaagctggtgttccacgaagtgtagtgctagaggttgaaatgcgggccccaccatcacgtggcactcactgatcaagaattgagccaagggtatatactgtgggttgtggcatgcaacgtcaaggcatggagcaggtcaggtcctgtttggaccaggacctatatgacactgaggatggacaagtttggggatcttgagagtttaggacctggatgacatcatatgacaaggtttg

SEQ ID NO: 185150 - DNA, 537 bp, Zea Mays
ccgcacgcgcaaacgtcctgtttcgtggcacaaatgttcgctgctggccaggctcccaatccactttctcttttccgttcccgcgcctttgcccagtccgcgcctctgtcggtcgttcaaatttagccactgttcgtcagcaacacgaggtcagtcagtctacgttccacatgccacaacctaaatatatttgctttacagtaattcaatctgcagggcaccgtctagaaaacaaatacgacccacacctgctactctggccacgtgacaggactgattgctgccgccgattacctacagcaaggagacgatggcgcaggatcgtcttcgtcggccacttgggatcccttggcggcgcatgcaagacagaaatagagccccagagacccatatttgaccagttcaacaggttttagggaaaaaatgggatctcttttcgtttgtgtagctcttgttgctgtcttcttgctgctaattgcatccaatgttaggttaattgtgcatatgatctcagtcgctatagggtctgattgtttg

SEQ ID NO: 185151 - DNA, 282 bp, Zea Mays
aaaatattgagtccgtctaactgaacaacaagcttttgtcagaagcctagggtttattttctcgtacatgtttggattgctctttggcttgttcaaccatatctttcggtcgaacaagatgtctgctgagtggagaagtatgttggtaccgatctacaagaataagggggatattcaaagctgcataaattaccgggaaattaagttgatgagccatattatgaagctatgagagagatattgtacatcgtttgagagaagaataacgaggatctctgaact

SEQ ID NO: 185152 - DNA, 1038 bp, Zea Mays
cgtttgctgcccttgtgtgatcaaaatctttgacgttgtcaccatcgttattaggttcatggtggggacagctcatcttgctttcacaaacatgactagtagatgccccctggctaccttcgattctagcagctgcaagctgtgcaagactttgtgttttacgaacaacttttgccctacctctagaagtttgcttaacagacttctgtacaggttcaacgttgaaagattcttgtaactttgtccctttcttcacccaccaaatatcctcctcgcctgattgaatcaatggaaacccttggaaaggagtggcgctgtcatccaatttctgccccttggacctcatacaatcctcgcatccacttttggcttccccagtctcaacttgtgtgagcgttgacgttactgattcttgaaagcttgttttgatttcacaaagttttgattccactaggggaggatatgtaaaacccaacagacttgacaaaagagctttaacatcttctacttgttctagcactcttccatgcttatcaccttctgatgcaactggaagatcactctgcttccgaatgcaggaacttgaagtgtactcacctctgccacttgcataaaatgaatgaccacatgaaagttctgagagaacaaggcgtcgctcactagagtatgttgacatcatctcatatagctgttgctcttctgcagtcctagtttcctcaagaacatcaaataaagaagacccaggaagctgcttcaaagttctgtgatgcctcctttttctttcaacatccagcattgtatcgttcttatcagtaattccactaataattagctgcctgacataaacctgagggaaaaatataccattgcggataagctccgcgataagaacatccacccgggtaaaacctgcaacgttgctaacttcatgctgatccaaccaacacacaataatatcatgcagtggaccagggctttcaaagatatcatttgtatccttcttctcatcaacattttttgcattacttctcagtccag

SEQ ID NO: 185153 - DNA, 448 bp, Zea Mays
gcagaaggctcaggctgattggttcggctagggcgcctcgggcgagtactgacaggtttctgaacatccaaagttgtatcaacctctggaaggggcacaactgccaaagtaccagcaggagcagcgtcagaagaatcctcagctagcagatcaagcatggcatttatatctgcatcactagggttcaggggcacctcaaaatggacttgccgttcgtcatcaggaatctccccaagcgaagcaaccaaagcactgacttcttcagcagagggtcgcactctaaggcccaaatttccatcagtcacaggtggatttgacacgaaaagggtgaaggctttgggaggaggcaggttccaggccgagtaagccaccggagcaccaacatttgacaccttacccctgaggatcatttcaagacggcttaccaagtctgcagaaggaattctcc

SEQ ID NO: 185154 - DNA, 446 bp, Zea Mays
gagattagctctgtttgtttagaagataagaagagataaagagggagtcggttggccctcctattttagtggagagattagcggtggttgagattaaagtgtcacctaagtttataaaggagctgctgtagtttgtattagggctcatcaaagaaagttttacctgaacggtggagcttccttggtcatcctggcgcaccttgcgccagctgacggaatcagctccccctctggccgatccccatatccactgagatcccttccccagtcccaagccttgctgcgatcaccactgcgtagccctaggcgcccacgacatatcagaaaaccacatgacttattccatcattctccccctaagtcttgtgcgtcgccttgtgggaaagttgagccatcccggacctggaacaaagctcaaagaacttgattctcccaaggggctttgt

SEQ ID NO: 185155 - DNA, 415 bp, Zea Mays
ccgacgcgccgaagatgtatccgaggaaaagacgtcggatatgacgatagctttggatcaggaagctgaggtgttagcggccgcatcaaaggaggagaaggttcagcaagacgaaaagaaaggtgcgatgatttcatttgccggatcgacttgcttctactatccggttgtttgcggacgagtttctgatgctgatttcgttatgtagctgctgtttcagatgtgaaatgtgatgacccaaaggaggaggacaaggtgcagcaagaggaaccaaaaggttagaggatttcagttacctgattgctttggttccgctgttcgatttcgagggggcagcgttttgatgctggttttgttatcacgtagatgttgcctcagatgtgaaaattgatgacccagagcaggaggaagttgc

SEQ ID NO: 185156 - DNA, 535 bp, Zea Mays
cgaatgtggaatcagaggtggcatgaccgcaggtggtctttttctgccaattccagggtgttaaactaccttgaggcagctgctgtgtttctcatcccacaggtgcttgcacttgtgctcttcatcaggatacttctccccactgccgctcggggtttgtcgtgcggtgcccgtttattggagaacagtgcctgatcgctcatcaggttggagaacgggacgggacaccggaccgcggaggccaccgggaagtacaagcaatatcgagttcctgttcctcacgaggcgacgacctcgcctgacggtgacggcaaccccagcagctggaggacgagtggagatgcgacgcgatgcctcgttggagacgcaccgtggcgtgctgaccttcaccgcctgctgccgccgcgccgtaccgtgattaatgaagcatgctactaatgattttgggggcactgtccgtccgactgttcccatgatacagttttggtaaataagacccgtacatgtagtacctctttcacgttcgtacacggtc

SEQ ID NO: 185157 - DNA, 349 bp, Zea Mays
gaaaatgagagaaaaaatctataatgaccagatagtactaacaactggttatgctgagaacagcgggtgtctaaaggtcataatggatgaggtcaaaggggcgagtagcacgggacatggaagaagagaagggtaagcgagtgtgacgcccgagctgacaggcatgaccaagtaaggtagcattactgctaggacaagggatggccgaggtgactgagagtctaaagaggatgtcgtgtctgggtggccgagacaatggtgccaagtggaggcaagggcgcagggtgtggtaacttgggcggaggaaggtgaggcaggaagcgaagatgatataaggccaagattgttt

SEQ ID NO: 185158 - DNA, 352 bp, Zea Mays
taaaaactcagtcgattaccatagcaatttgaaagcagtttcctcttgtttctcattgccttctgcaggtgccctcctagggagtggggcaaagccgccaaaaaaaccccagaattcaccagcttccgcatcagacatcattctaccgtcctctaagagaagtgaaaacaatcatatctagagattctaatttccaataccgcataagatgaatagatgctcaccaacagatgcaatttcacacttgccctcatgaaatgtgtctttgatgtactgcacaacttcaagagcttttgctcgctcttggatggatgagtttgagccactgaactggaaaattttggacttcgta

SEQ ID NO: 185159 - DNA, 376 bp, Zea Mays
tttggaattttgagtaacagtgacttaaatgcttttaatttttgctagaagctccggtgagagaaccatgttaccatttaaacaaatagactgacagatgactgaacagggataggtggactgtattaaggcaaatactgtcacgtttcgtgatgaaggcaaacatacattttaaagtaagaatagaagacaagtagtatacaacaatagtacggctgtgagatcttagtgttttgggaatatgaatgtgtgattgtgtgttatcaaatgttgcaacccatacatctagcttctacagttttcgaacaatgctcatactttcaggtattttgttgtgcatttgactcatggatcaatataaaaataaataagtaaa

SEQ ID NO: 185160 - DNA, 538 bp, Zea Mays
cttgtccagaacaccaagtctccagcacttgtccagcaagataacacttggcttggcacacagtagcacactagcacggtagcaccactgcagtctgcaccagcacacttcacaccactctccagcacttggaacacacggacacaccactacacatctacaggctacagcagtgaccagtctacagagggaaacaatctcatctctcatgtagagacacagccataccatacagccgctagtctgccaccaacgaaggagacacagggacagacagacaatcaccaataagccagacatgcaccacagtccacagctcactgttgtgttgcttaagacttggaagtggaagtaacctcagttctttttcctttgccaccatttccaaattcttcaattagctctgcaattaaaggagtggaaccatgcagctatcaattagaaatgattaaacatcaaatacatacaaaaaaatgatggaatactattatacctttttctataatggctaattcctcgatattctcttgtatgtcaa

SEQ ID NO: 185161 - DNA, 992 bp, Zea Mays
caactctgccaacgagtacttgtctcgagctctacgtctgtttctcgctgagcaaggcacccttcctcggtattcttgtactggcgctcatgctcagaatggtgttgctaagcgtaacatcgtcatcttcttgagactgctcgcgcattacttctgacatcctctgctcctcatttctgggttgaagttgtgtctacaactgtttaccttgtggacattcaaccttcagttgctctacatggtgtcactcctcttgagcgcctctttggtcggccaccgcaatatagtcaccttcgtgcttttggctgtattgcctttgtccttcttcaacctcgtgagaggaccaagctcattgcacagtctattcagtgtgtcttccttggccatgactctgagcgtaagggatatcattgttgggaccctgtcgttcgccacattcgagtatctcaggatgtgacctttgatgagtcacgtcatttctttcctcctgatttgtcctcttcttcctctccctctgagtctgttgatttcctccgcttggttccacctcctcctaccaccttgtctctgctaccctcccctattcctatttcatcatcgtcaaccccacctccctcgcctccaccactatcgccttctccacctccaccatcgcctcctctccatccatcacctccaccatcccctccgacacgtcctccaattcctttccactacactcgacgtccgcgtcctccaccatcccctccggcatcatctagcctgtctccacctgtacttggtgtgcctcctccgcgatatgaccttcgcgatagacgtaagctttgtcgtccggctcgtcttggttttgtcacttctgtttcccttctctctgagcctacctcctaccgtgatgcgttttctcatcctgagtggcagttcgctatggctgaggagattgctgctcttgagcgcactggcacttgggatcttgtcctgcttccttcttttgc

SEQ ID NO: 185162 - DNA, 277 bp, Zea Mays
tggctacctgcctgcctgcctccaccatcttgctgccattccgttcctattggccacactgtcctgatctgggcaaattcgagctttcatggcgctaatgttctgtaacccggggccccgacctttagcttagcctgaggaaccatctttagctttggtgagcaatctacagggacaggggctgcacacagccacaaaatcaacggcttttgctaggtgcccccgtcttgcaaggccgaaaaagcttggtttgcatatgttctacttcttccggatt

SEQ ID NO: 185163 - DNA, 414 bp, Zea Mays
acacaagcaaaaggataccttatccatcagatgccttcatcagctcctcagccatctcaacatccaaatatggccctacctcatgctcctccacagtattccaatgttccatcacatatacctatagttcatagttagtcacaacaacctttgcaaagtcctgcaataaataatcaacagttgcaaccacctttgccccaattgtcaaggccaccatctatgccgcctttacctcatcagatgcattcacaagtaccaaattcatttgggttgactcatgcaaatgctccgcagcacatgttacaacaaccaatgtttcatgtaagatatatcccaaatccatatggtcctgataactagatatcatgctctgcatactgatagatgatgtttggaattttgcagccggttgcg

SEQ ID NO: 185164 - DNA, 302 bp, Zea Mays
gttccgaatcctccgtcaatccttctatgttctctctcccatcctcacatcgtcgccgcctcgtactgcaccccatccccttctctctcgtagactcacgaggccgtagtccaccccctgccgtggtgggatatgttcgacctactgtcatccctgttgtccatgtcctcgaccccgtcaacgacacccgtgaactccacgacatcctctggcgcttgggtggaactccaattcctgtacccctgccctgcccggcacaaatcgtctatatatgaaagcgggttcaaaacgggctctatcac

SEQ ID NO: 185165 - DNA, 375 bp, Zea Mays
ggagtatgatgcagagcagtgtaaacaccatagttaaaacattgaggaattcgatggaggaaagtgacccgaatgccacggttgagttgtctaatgcagaagattttgtccagaaattgggccctgcactcctgccatgggaaagggaggaggaagatgatgaggcattcagcggtggcagggcggtgaggcgcagcaacacggagctggccgagaggtctattccagagcctgaactgcggaggcttagggacacggcgttgaggatgaaggagaggataaaggttgggccagggggtgttactcaagacatagtggagagcatccacaggaaatggaaggtggatgaggtggtcaagatgaggtttgaaggcc

SEQ ID NO: 185166 - DNA, 283 bp, Zea Mays
cttcgttattttcttgggattgaggttttctctactccagagggcttctatctctctcagttgaaatatattccggggcttcttgatcgggttatcttactgatcaccacactgttgagactcccatggagctcaacatttgtcttcgtgccactaatgatgtgcctcttttggatcctactcgataccatcacgttgttggtagcctggtctaccttggtgttactctcctagatattttatatcatgtgcatattctgagtcattttgtatctactccaac

SEQ ID NO: 185167 - DNA, 302 bp, Zea Mays
cacctgcgcatccacctgacattcctgcatttagaaagcccaagattttggcaccagcgcctagtcaatcgctgctacctccaccaacaaattcatgtatgatgagtataattttgtgccatttgtgttcataaatttaaaaaaacagctactgattgcttagcttttgtccattcatctttgatttgactttgctagactgcacgacgccctgctcagatcctctgaccaatagtcctccaggaatgacatgcctctgtgtgttgccaataaaagttgagcttcgctttggtatagcattg

SEQ ID NO: 185168 - DNA, 459 bp, Zea Mays
aacaccgtggtctagaacctgggatcagtagtccctcaccagcaacttcaacaccaaggccctcaatcctcccggcataatggattgggtcgtggattccgatgcctctagtcacatgactctcgacactggtaacatctctttattttgcccatcgtgcccttcttccattgttgttggcaatggatctactttatttgatcttcacctggcctgacatctcttaggctatctagcaagtgtctacatatgcttgaccctgggatgttcacctctcggcagttaagcgcatcctgcactacttgcatggggcatttggtcacgatcttctttgtccatccacgacctccgctccgctagtatgcacggatgttgattaggctggttgcctggacactcgtaagtctacttcatgttacactgtgttccttggtgtcaacctcgacccgtggtccaagt

SEQ ID NO: 185169 - DNA, 316 bp, Zea Mays
tgaagaacatgctcccgtctgcagcactgttcctaaacggtataaaagcacctgtactggtcttcaccaagcaagcacctcagacaccaacatctacacacaatcacagtcacaatggaggccggagggttagtcagggtcagggaggccggctgggccaggttcgacttgctaccccatggctaggagccggaggtcgtagcgcagctgctctgcacccagcatgagttgccttggtccgatcaaagcttcttccgtacagtgacaacaacatgccacatattcttttggcaatttgtattgcttttaaaaaaaa

SEQ ID NO: 185170 - DNA, 456 bp, Zea Mays
catgggccagcacctgactcagttcctgtgaaatcatgaatccaccaacggaggtcaaatacctgactgcagccagccagaatgtttacagccacacatgatgatcctatagctggctagaagaagaagaaatatttacagccatccagcataaccttagagctggtttgaagaggatgcaaccggtgcagctgcacaaatggtcagtatatgtttatcctttttaaaaaatcgccattcttattttctcagacaaatctgagttctagtctccacgctttgcatatgtacttcttatacattattatcaggcagacaagagattgtgctgtgtgtggccctctgattcccaaaaaaaaacaccactgagatgcagtccacttgccacaagcaaagaagcttccatttgtgcacattccaacctttgccaaatgctttttgtctcaattggctggc

SEQ ID NO: 185171 - DNA, 470 bp, Zea Mays
actaccctatctaaaacctctatgaactgcctcgcaacctacacttgttgtacctacatgtccatcgagatctcctgtgaaaagcttttcagtagtaggtatagctccaaccttgccatctaagtgttcctagaaaattctcttggcactctcatgctcttagcactctcatcctgtcctactttgagggcatacacattaattacgttcaagaccaaatcacccacgacaagcttgactaaaataatcctatgtatcttgccttgtcacatccaccataccattcttgaggctcttatcaatcaaaacttttactccatttctatttgtagcttccctgtgtaacaaagtttgaagccaacattgtccacctcctttgctttccgatcctttcattttgtctcttgggggcataagatatttacacgtctcttagtcgttgtctcaactgactccttaatttaccaaat

SEQ ID NO: 185172 - DNA, 875 bp, Zea Mays
atcggaaccaccctaagcttccttagcccattcggttctaccgaaagaatccccatcctctgtcgcgtccgccacctcctctgcggcttaccagccggactcctcaagcctcccgcttagccccctcgccggtgatggccgcggccccgccggtagccggagaagatattaaagacggcgttgaggtgtgcctgttcgatgaatcagcagatgggttctcgagaactgtgcgcgccatctcggagctcgtcgacatagagcccgaaacagacttccctgaggcggaagttgagcggctctcctcctcaataacgttcctcaggtgaaatcctttctcctggcttcctctgctctcgcactcagtcaccacaatggaatcgacaaatttcctgtgtcagcctaataggtgatcgtagacgtgatcctatactatagagacgtgcccgattttgatggagtgtattacatggaatatttcatacatatgtgggagaatttgtttaactcatagcttcggaatatatgttgtccacaagagtgactagttatcaaattgcgttattattcatgatttatttgcttggttaaaggtctacctgttccttcctcgaatatccacaagctctgcaaaaatgtgaaaagatgcaggagttacatacctgcatttgatttctcctttctttctaaatgccctgtttttcagatatatgtttttgttttttttatctgcaaatctaatttgcgcgcatttgatccttttcttcagagaatggaggcacttctcgtatgagccaaaaagtgtaacattcactaatggcaccgagtccacttcatatagagatgacatgcacagtgtaactttaccacagttttca

SEQ ID NO: 185173 - DNA, 310 bp, Zea Mays
ggaagactgactatctcgacatcccactcaaggacagcatcaagggatggcgcctggaatggttcatcgtggagaatcatgggaattctctccccccacggtcagggagacagccagatgttcgcactccgagctggaccgaatcccccacggaccaggaggtggctaaggcaggggctctgcttgctgaggttgggctactgaaagagaggggtttggctacagaggctgtggttgccgacttcattttcaagaacattcagccactgaaagacagagcataccccgcatatctgtatcgaggcctggc

SEQ ID NO: 185174 - DNA, 1021 bp, Zea Mays
caagaacttatattgggcttgtttcgctgcagcctgtgaatataacagacccccatctggtttcaacttttcatgatgattttaagaggtcatacctacattgtacacttcagttggagaacaaaagttcttggattgcagattgtaccttgaaaatacaagtttcaactgaacttgaagggaacatttgtttggtggaacaccttcaaagttatgcaataacagttcctcctcaatcagatatagagtacaccattccttctgtaagttagtttcttatttctcaagctactcgtgactgactactgaggcattacctatgctagttttcttcctttcatgataaatatcatgtacacagtcaattgatgtatttattgttctggttgcccaaatgatttaattgctgtgagcttgttgccacagcttactttatccacagtaaaaatgtcagcaactacatatgacagctatacaatctatgcttgttgcctgtcaaccatgctcatttacaggactatactaccagattttctcatgtgttagctaatgaaatcccctcgtcatgtcctacctcttaagcgtaaaatatcccatgttacttaaatcatggttgcacaattctcatctatatgaaggcaaaataactaggtataagcataatttatcttcaaatgttcttctgtggttgtactttctattaggaggcccttataaatcctcaaatatacaggttgattgactttgctatgtatgaagcataaacattttagttatccagcctttttagaaggctcaaatatttgacgttgttatatatgaaatatgaactttgtagttattcttctataagcccaacttgtggtggccaaatggcatgggaaagcaatccttatacaacattgagattagtgtggatgtaaaagggtttggagaatctgattcctggagccattattttggattccgcaagattgagagtacaattgatgattctacgggtgggaggtattaatgaaat

SEQ ID NO: 185175 - DNA, 451 bp, Zea Mays
ggcggatgggggtattgtggtagccatttgccaatatggtggagaattcacttctggccccaatggtaatttgacatacaaaggaggcgaggcgcatgctgttgatgttactcgtgacatgccactggagaacttcaaggatgaggtgtccaaggtgttccatgttgacgtcactgacatgtcattgaagtacttccttccgaataattacagaacgctaatcacaatatcatgtgatcgagatttacaaaggatggttgattttactaccagtgccacacaagtggaagttttcttgattagtagagtagaaaacaggtatgtttttttgcaccttattgctttgtgatctaagagtcaatgcattggctgacatggtacatgcttttctcgggctgaatacccaggagtattgttacttactctggagcttctgcaagtaagcctggat

SEQ ID NO: 185176 - DNA, 659 bp, Zea Mays
gacgatgaagcgctcgtggaagagagcgactgttcaacacccatggaggacagtgtgattgtagtagagacgacgaggggaagcacaacatcatttgtaataaaaaaatcgaaagaacacaaggatggggtagaggaggatgcgaagggcagacctgttcgttgaagacgacatgacaggcgatgatgacaatgagtggcaaggttgaggtagtggtatcctttatgcgatgagggatagccgatgaagatacaagccatgtatcagggagcaagtttattaggggcagtggcagagaggttaggaaagcacatgcggacaagaactcaaagataggtgaagtgaggtcgtgccatggagaatcttgaagggcatgtaattgtgggccatgtgattgtggatggtgggtgcctattgatgaggtaggtgtctgttgctagggcctcgacccaataaggggacgatatggaggcatgaaggaggaaggggcagatggaatttttaaacgtatggaggatgcattcaactttcccattttgagtggaggtgtatgggcaggaatacaagataggcgtaatagggtgccatgagaagcatggatggagtcagtggcattgttaaaattctctgtcattattcgtctgaaaacacttgatggg

SEQ ID NO: 185177 - DNA, 389 bp, Zea Mays
atcccagggcctatttctccactagcgtcggtacaccatcgacatcctcgagtgtgatggcatggctggctgtaagacctacatgactccggtgggcactgagggcaaggtctcctccgacgtagccccatggtggctgatcccactagcgactgaagtcttgccagggcgctgttgtacctcgtcttcacccagcccgacatcgcctacgtcgtctagtaggtgtgtctccatatgcatgccccgcgggagccacatctcaccactatgaagcggatcctgcaatacctctagggcactaccgactttggcctcctccttcgacgatcagcgaccaccgacctcgccgtctacaccgaagtcgactgggtcggctgtcctggcacgcg

SEQ ID NO: 185178 - DNA, 499 bp, Zea Mays
aggtgttggggatggggcgtttggcaacaacagaaatgcaagggccgtgaagccccttggggtcgatgtaagaagtcccaagagaaaagtgaatggcagcctcattgctattgttgttttgtctactgttatagcattgattatttgctgtctggctgcatggtcgctaatcctcagattcaggggtccgagccacacagctcggggatttccacatactgcacttccaaaattttctaggtcatctggtacgtgtaactaacctgctaattttctgataattgcaccttgatgtgatgtaattggactagctctttgattcgtagcagaataacagtaacttttctccaatgaagtagtgccactgttgaaattcatcatgaacttgtagtctataagcaagttttttttatttggtatcctttccaaggaaaattccattgcttatttgaaatgccagccaacagtgcttgcaatgacttttcagttaaaaggcttt

SEQ ID NO: 185179 - DNA, 340 bp, Zea Mays
ccggtgacgaggatcccacggccatggacgtcgccaggacgtagctgatgccggaggaggaggcacttcggctctgcacaggctgcgtccacttctagacttccttgcctcgcttgtcacctgcaggaaggtatgccagcgtcatccccaccccacccctccattgtcccttcgttatgaatatgcatcccctcacctccacaatgccgcagcgatgcccaccttgaaagaatttgggggatgaggagcccacgtcgcaacgttctagatagcgaacgaacgagggcaaaagagaggcacatacatgttctgcaaggtctgggctacaccacgtcttcac

SEQ ID NO: 185180 - DNA, 357 bp, Zea Mays
ggacgagcaaggccaaacgcgttccttcctacacaaagaatggagacgaactgcaactgcaactgctgcctggcttggctatggctggctaaccaaccaaccatgcgcgtggagtccttgcgacgcacgcattcatcatggttcactcccagttcggcgtgcactgcattgtgtttagtaccgtgagcctcccgtaaattccagatcttgtttagaatacagatcgtataagaaagatggatacaagagacaattctaaggtacaaactcccacttcaatcggcgaattccgagtcctcacgatcaataattctgaaaccagcagtgcaaggtacacagtccgcagacattgaaaca

SEQ ID NO: 185181 - DNA, 282 bp, Zea Mays
gttcttctacccgtgtctttactacctctgtgctgttcttagctttgtggtttctttgttgagtacaaaatcaaatggtgcatgaacaatcgattagtacttcacattagaaaattaactacatttcccaaaaatgtcttcaaataatatactgtatgcattgctggattttctgttggataaggttctacaaacttggcaagttggcattagggtactcatgcatggtggatactatttatttctttaatctgaagaatttcacatttttaaactaatggg

SEQ ID NO: 185182 - DNA, 363 bp, Zea Mays
gaagtgaatgacactcacttctttcgtctcgccgccaatgggaagtattcagcaaaggcagcctatgagggttttttccttgggttgacgacttttgaaccgtaccacagaaattggaaaacctgggctcctccaaagaccaagttcttcatgtggctggtcgctcaacgacggctttggacagctgacaggttgcaaaagagaggcatggatcaccctacaagctgccctttgtgtgataaggagcaggaaacacctgaccatctgctgattgggtgtgtgttcgcccaggatttcaggtttaaactactatctcaagttaatctccaaaacatggcctctcatcttgttgatgcatctttt

SEQ ID NO: 185183 - DNA, 369 bp, Zea Mays
gaataccaagaatatacctgaagtgacaggaccaaatgaaatgactctaaatggctctttgttgacagcaagcagcctttctaataaatctgcagatgcagtggtcacagtatctaatagacctgtaatagttcaaagccctgaaccttctttagacacacagtttgtgcataacccatcaggcaaatgtacctcagaatcaattctacaaaataacagcattcctgattctgcttcagttccttcaaaagaaaatgatcatatcgtgttaaaaggtgatatttgtgaagaaaccctcatggatactaaaactgctaatggttcttgggattgtagtgaactaaataatgattcctgtgggaaaacttc

SEQ ID NO: 185184 - DNA, 434 bp, Zea Mays
aaaaaccttggttacacgggaacatattaggtgcatatgagagtttggtgcacattaaattgtgatatttcaatttaggtctaatgtttctcgttgctctatatatatcgcaaagaataccttccactactctctagtctctaccacttgcaacctgctctgtgcatgaaggggtaggtgtgggagtacgttggatctgaaatgaatgatcacgatttaatacatacaacatgtgcaccaaacttccatgtgcaccaaactctcatgtgcacatgatatgttaccatggtacacatgcaaatttgaacaaagtgactgtttgttcaaatcccctttgttacatattctcagcatttcaattggtctttctgctcattattgaacaattaacagttctatagccttaagatttgaaaaatgttgttgcattctgt

SEQ ID NO: 185185 - DNA, 375 bp, Zea Mays
agattttgagaaatctactgtgtctgaagctgacatgcccatgatgatgaagctgggctactttggagaagctgagaggaaacttgtccgatttgccggagaagagaccacccgagcatggaagaatgatgaagtagtggttttcaagagcttttttagagcaggactgcgacttcctctgaatgagatgattggggaagtcttgagattttttcaaatatatctttatcagctgacccctaacgtcattgttaggcttagtgtcttcatctgggccctccgaagccaagggatgagcccagatgccgaagcattctgccgagtgcacgagttgcactaccagacgaaggccagggcagacggtcttcatgaaaa

SEQ ID NO: 185186 - DNA, 301 bp, Zea Mays
attgtccatgagagaagaggtaggccgattggttggagaaaagccatgagacgtggagcagaggagtctccaagcggcatgcggagcggggaagaacgtgctgatggaggcggacaacgtggagagaccatgcggaaggcaaccgtgcgcgcacgtgaaggaaggatacgtggaataagatggacctacaacagaggaagtaggcgcacatgcgagatggttggccccatggtcatggatttggtagcacgggagagaagatagggtagtggaaggagccggaaggggacctagattcttg

SEQ ID NO: 185187 - DNA, 289 bp, Zea Mays
cagatcttctactggctgatctagcatggctcggtgtggcagctttagcataggtggcgtggtcaagaacttcttcagtgcatcgagagcttcctgtgcttctgtggtccactagaatttgtccaccttcttgagcaatttgtagaatggtaagcctttttctcctagccttgatacgaacttgcttaaagctgccatgcacccagtaagcctttgcactttcttctgtgatcgtggtgcttccattctcatgatagcctcgattttttctgggttggcttcaattcct

SEQ ID NO: 185188 - DNA, 748 bp, Zea Mays
cacgacgtacgacggctcggtggatcccttgaactggctcaatcactgcaaccagttcttctgcagccaaaagacgttggcctccgaccagacgtggctagcatcctatcacctccggggcacggctcaaacatggtactacaccctcgtgcaagacgtcgggatgccgacatgggagcacttcaaggagctatgccatatgcaatttgggcaacctgttcgggattcgtgccttgcggaactcggtcggcttcaattccgttcgacggtgcaggaattcacggagcggttcaacgtcgttctgtgccacacgcgcaatcttgacgctgtctagaaggcggagctcttcgtgggaggccttccggaccaaatccgcgtcgacgtggcgatgcgcgcaccgcaagaccttccgacggcggtgtacttggctcgagcattcgagctgcgcgccaacagcatcatggcaatgctcccgtcaggcccccagcaaccggcgcgaccgttgcctctccagcccactgtagcacctggaggcgctgcacagccgaccacgacggccctgccgtcaatccaacagttctgtcgcctcacgccagcagagcagtaggagcgtcgccgtcaaaggttgtgcttcaactgtgacgagccattcatcagtggccatcagtgcaagcggcttttctacttggagtcggacgacttcgagtctgtggacgaggtcgtggaggagccactggatgccttccgc

SEQ ID NO: 185189 - DNA, 1609 bp, Zea Mays
gcaggcaccgtgtaactcatccaagagttcgtcgaccaccggaatgggaaacttgtccttgactgttttggtattgagggcccgatagtcaatgcagaaacgccaggctttatcagctttcttcacaagtaacactggagaagagtaggctgatgtgcactcccgaatgatgccttgctgcaacatgtcttcgcactggcgctcgatctcgtctttcaacaattgggggtatctgtagggccgaactgcaactggtggcgtccctggcagcagcctgatgtgatggtcgtgacgtcgaggtggcggaaggccacgtggttcagcgaagatgtcggcgtaggactgcagtaatgcctgtagtagttcgcggggttcggacagggctgcgcactgagtatgtggcgcacccagtcctacccaacgcaccttgcgtcccaggcgccagaactccatggataaggcgttgaagttccacaatatgggtcccgatgaccgaagccactggacccccaggacaatgtcgaagccggccagaggaagaccgtagcaggtgatgtggaaggtctcctcggcaatagtaattcggagcttggaatatatcccgctgctggcgacgttgtccccgtttgctaccttgacggagagacccggtcttggtgtgacttggaggcccagctgggtggccacagcttcccggatgaatgtgtgggtagagcctgtgtccaccagcgccaccaatgtccgatccttgaccctgacctggagcttcctggtgctgctgatgtcaatgcctgtgagggcatgaagagaaatgcccaggtcttctgctgctgcattttcctccatgtcgtcgtccatttccagtaagaataccccccttgcggtgcacttgtgatcagtcgagtacttctcgttgcagtggtaacattctccacttgcccgtttcgctgctaattcttctggtgttagacgtctgaaacgcgaccgatttggagcagccggcctggcccctggtcctgaaccagtccctttgatggcggacaggttccggtgactttgtctatctctgagtgctgcaatgttctcctccttgcgctcataagcacgggccagactcattgcggtctgcaggtttgtcggggccagcagctcgacatcggtgcggaggggatctccaagacctgctgtaaacatgttcacctgctgcataggagacaagtcatcacagcgacaaagcaagactgaaaactgtcgctgatatgcctccacggtgcctgtcctataaagggctttcagttctgccaggccattggatcggatgggtggtccaaacctcatgtggatgtagtcaacaaatcgtgcccacgacagaatgccatgatcacgttccagggcatagtaccccactcggctgctgctccctccaagtgtaatgatgctagccaaactttttcttctgccatggttcgcatccctcggaaataggtgttgcacttgttgatccatgtcaatggatctgattcgccgtcgaaggatggaaagttgggtcgcggtggacggctgccaccttcgtcgtcacgaccccgaccgcgaccatagccatctggtc

SEQ ID NO: 185190 - DNA, 422 bp, Zea Mays
atcagactcgatgcccgaagaaggtgcaaatgcagttaaatgccctatcgaaggaagatttggagatgacgttaacagaggaggtgttgacacacatagagcaggaggaaaagcaggaagaggagacttacttattgtcactgaatgccattagtggtaccactaatgaggagtgtatgggagttagagccttgttgcaaaatcagattatgttaatcttggtcgactcgggcagctcatctagttttgtcagtagccagtttgttgagagagtgggtctgaaggtggttccatgtgtgtcagctcaggtccgagtggccaatgggaatattttaagaagtaacactatggttaaggcgatggagtggtgggccaatggacatacatatgtgagtaatatgagggtgttggagttgggggcg

SEQ ID NO: 185191 - DNA, 739 bp, Zea Mays
tttcgaacctctaggaaggtagggaggggtcacctgcaccgatggtgaagcccaatgctggcgaagcactcatttagaccacgaatgacgttgaggacgagagtgtcgtcatggaccggctcgccgagatcgccgagaccgagagcgtcagccatctctttgagcttgcggcagtagtcggtgatggagaggtcgccttggcggaagttgcgaaactccgcgtcaaggaagagagcccgagtttcgtgattctcgaggaactgggacccgatggcgagccaatcgtcgcgagcagaggcgtcacatatgagcatggcagcaccaagctcggtggtgatggtgccgacgatccatgacttgacgacgcagtccatttgcacccaacgagaagaggatgcagatgtgtcagtgagcacgtgatctgtcagcgtgtacttgccgacaacaagcagggaggagtcgcgccacctagtgtagaaggaggagatgtcaagaacaacaggggtgagagccgagaggttctgaaccgccacggcctgtgcatggaggttgaggagggtggctgcctcgtggatgaggagggcagcgtgtgcatctcctgatgcatggagattagactgggtggaggtagcgtcgtcttcaggcgcggctcggcgtcaggaatgagtccaatggcggcacaagcctaggccgtgtgcgctagagcggtgcggatgcaggtgtcaatggcgttgcgctc

SEQ ID NO: 185192 - DNA, 314 bp, Zea Mays
cggtggtcgacgaactcttggatgagttacacggtgcctgcttcttcacaaagttggacctccgcagtggatatcaccaagtacgcatgcacccagatgatattgagaagacaacgttccacactcatcgaggtcacttcgagtttctagtcatgcccttcggcctcaccaacgcaccgtccacatttcaggccctcatgaatgatgtcctgaaacccttgatccggaagtttgtcttggtcttcttcgatgatattctggtattcagctcttcctgcgcagcgcacttacagcatgtcagggaagtatttaca

SEQ ID NO: 185193 - DNA, 504 bp, Zea Mays
aatcgatcagctacaaatgtggctgcataatggaattccttgttcattttgggaagcatttcgtctcatcattttttgacatcatgttttttcccccttatctcaggaactgtctgatattataccaagggatactcttctatggaagctcaaacttctcaaggcaggagcagcctatgcaaattctcgtctccatgccgtgcaagccgaggttctacttcttgccaggtccgtggctacagtatctgctatctatactccatagtttttgtagtccgatacgccgacttctagcctcgtgtttgggtccagagcacagatcaataatgttacctgtattcagtggtaaggacaatcttctaccaagcggagaagaagcggatcgactcttcaaggcactgaaaaactgcagagttcgatacttcaaggacaatggccatacactactgctggtacaaagcatcactcttaatagctctcctgttatccctatctcgctatctg

SEQ ID NO: 185194 - DNA, 719 bp, Zea Mays
caaaagaataacaatcgttcagtcaagaaaaaataaatatgggacatttgtacaagagcgccactgaaataatcagtaaattgttagtgttttaattgatgtttgtgtccattcaaggcacatattatggttaggggctggcagtactaattttaatgaaaagcgaaccggcatgcacaccaagtttagcagggtcacactaacggagtccaccggtcgtcgttgccaagctccacatgtaagtgaagagcagctctgacttccaacgatgaacctcagctcaaaccaaggttgccgatccctcacccatagcaaccacattgtcactagcaagaacaggcatattgtgtcattgttgccgagccacatcacatcccaacgacgcaacaactctggctttacaaacacgcccaaaccatgaggaccaaatggatgagagtaaaccggcgctgagcacagtgaacgccaatgtcgagctctggcaagacatgaacgtggagagtggaagtggattggtgctgcgaaagacagtgcagcttttctgttttttattgcagtatttaaaagatgctaagtctaaacatgaccttctgaactcacgccactcaacaggtggtggcggactaaacgcgtgtcatgcgcacggcgtgcgcagcgcgtagtccgctctttatgaactgggcatgcatcgagctcaaacggatagcaaacagaatgac

SEQ ID NO: 185195 - DNA, 330 bp, Zea Mays
gtcgcgctttccctgcctcaagataggagatagcagaacgccatctatggccatcatcgtctccacgtcaagcggcaaaccatcgctcccttcccttcccctatggccctatatctcatctccccaagttctcccctttctccaggtcccgcctcacaccacctcacctcatcactacctcacccacccagccccccaagaactacccatcaaccatggcgccgccgtcggtgtccgcctcccacctcctaatcaccgcctcgctcccaaagcccaagccttcctccctccgcccgccgcggctccctctcgccaagccccttcccgcat

SEQ ID NO: 185196 - DNA, 515 bp, Zea Mays
tggtcctacgccgtcttctggaaggccatcggtgctgcagaccccgtgtaagctgccgcctccactgtttcctcagattttctttggtttttttgtgttcgagctcgtcctcccgctgaatcttacaaaaaatctaagacttctgccattgtgctcatttttcttcgctggtatcctgctcgttctcgtaacaaaagttattttttggtctttgtgctcattcaaccattctttttccaaccgtcaagttttcgttgctaatctgttctgaaaattcgctcgaagtttcgaagatgggaatatctgagctaaaaaagccgaacaatttcctccaaatttcatactcctcatcgcctcatggttatggttcctctgtctcatttccccccctggaaatgcacaggcatttggtgcaggaggacggctactgtggccacacgtcatgtcctgtcggatctgagccttccgaatctctgcccagcgacgccgggtgctctgttcctgctgctaacacc

SEQ ID NO: 185197 - DNA, 599 bp, Zea Mays
ggcggtgtcagagcgaggaggcacccccttggtgagcttcttgaggatggggccattgctgaccttgtggaatgaagagaatgggaccgggcaagtccgaaggtgatcgtagcgctcgttgagggcgtggagaaggttgaggacgagcttgcagtcggagacgggctcctcaaggtcataaaggaggccaccatgctcttcatctagcggtagtactcggtggagtggcccctatagatgaatgtcttgaaggcagcatcgaggtggagagtatgagcctagcagttgccgaggaactgcttcttgatggcaacacaagactggcgagcagggccaccacagtcgcaaacaatgtcttgtagctcaataatgattgtcccgaggatccaggagacgaccacactatccatcctttgctaggaaggaatagtgagagacgccatgtcgttgaggagtggttgtcaagggtgtagggatgtagtgtgaggtgatgaggtcgcaccaacaggcgtaggtggaggaagccaggccgagttcgacggggatcacgaagcgaatgttctgaacacccgtcgtctagcatgggggttggtgatgat

SEQ ID NO: 185198 - DNA, 1074 bp, Zea Mays
ttcagttggcaatggattgtatttggacactgattccaaaatgtttgaggtttcattgtcacaagttttggatagcgcacttctcccagatattaactcagagctaatcagggcatctcagcaaggcgatgttgcaagtgctcttcttgtgaaagacaaagcttttcaatggggatatgacatttcaccagatagctgctctgagctattcaaggccttatgtgtgagccctgcttatgttatagatgtcattgaccttatggaggagatgccagatatactttacaaacttgatgctcaaaatctagatttggttgcccaaacattgagtaggaatggaatgtctgctcatgcaaaactggttttagaaaaaatgttgagagaagacttgtcaatcagtcacaatacatatacttatttaatgataggtttatgcgaagaaaggaacatagcagggttttgggaatgttggaatcttgcaacaaagtgcagatggtcacctgatagcaaggatatgatgggcctcatcagttacttgtgcaaatggggagtgattgaggaagccctgaaacttatgaactctttatttgactgctaccatgatctgttttttagtgcatattgtgcacttctcaaagagttgtgcaggacaggtcataccagcattggatgcgcaatgttggaggctctcaaagaaaagggtgtggctgtggatcgatcattattcttttatgtgatggagggcttcctaaaggagcaaagaactgctgaatcaattggaatgcatgacatgtggcttagcaaaagcaaagaacttgatgtttttacttaccgatctgtgttgccttcattaccatggctggacacagatcgagccaagaacttggtagaatctatgctgaccgtgaaacttactgaattctcatatcgcggttgcattgtgaatgaattaatgcaaacaaggaatataaaatgggccattccagtcttgcaagaatcagctcctgggaagctcagtgccactttgttaaattccttacttcaagcctatggttggctaaaaaattggagaaa

SEQ ID NO: 185199 - DNA, 335 bp, Zea Mays
aaattctagactggatgaccaacgtcacggagggtgtcggtggtggtctttatgcgctggtagcagttgatggaagtgtcgccctgctgcatggagtggaactcatggcagaggaagatgggctgaggatccttgttggctcgtaagaggttctcgatggtgacctagagatcatgcgtagtctggtcgttgccatccatggtgaggttgaggatggagtcatcgacggagccgaatatccaactacggacacaatagtttgcttgatcccattaagggtcagtgggattggcagcgcctgtgctgtcgatgtgtgatttgaggccgaatttgtt

SEQ ID NO: 185200 - DNA, 356 bp, Zea Mays
gcacaatagatgttctcactgatcttcctcttactgacttgtaagttgacatgcttaccacctactccagctacaagtttaagttcttaatgcaacgtttaacaatccttgcagaaatgtcgaaaacaaccaactcaccggttggatacccgataaactaaagggaatcaataatctccagtaagtacctttactgcaaccattgcagtgattattatttaagtatatgggatggatacaacaatctactcatcattttacaggacaagtggaaactcgtttaacaatggccctgctccaccacctccaccatcaccattatcacctccatcgacaaatacccctcctccctctcg

SEQ ID NO: 185201 - DNA, 371 bp, Zea Mays
ctgtcatccaccctaatattggaagcctggattctagagtaactctgttctttttagcagcacttgaagtgatacgacgaggtcactggaacttctacaggtaaacgtctttagaaaatcaagcagtaaatgggaacttttcgatttggtataaacatgaaagtcacactaaagaataataaacttttatgtcaggctggagaatgaacacctaaacaatgcaggcaagttcagagcggtgaaggttgttccacttccttttcaagaagtggaagaggaataacaaaacagggccaccactggagcatgttgtaggttttaagaatacaaacagttcgtatgtaacacaccaactaatgctagaaagcatg

SEQ ID NO: 185202 - DNA, 331 bp, Zea Mays
aaaaactccatgggtatatgtcccttcaaacacacaattggaacacatgatttcaattttcaactatcaattatcagacgaaataaaaataattatggaatcttgctaacaatgatacatgtttatttatatgctaatcttcagacaaggtactagtgccaaatattaaccaatggtaaagtagcggatggaatatggataatttgcttaaactcaaataaatgcaagatttgcttgatgaatgggctggaactattagtattagagttacatgatttgaagtgtacctgagaatgtagactttaccatacttccaactctacactgcaat

SEQ ID NO: 185203 - DNA, 841 bp, Zea Mays
agttggtgtgctattaattccttcctcaccattgtgtcccataaaagacatgacaggaatgaagaatcctattctatcagagttggatgtctgtgattttgatgcatcttcatcgccatgcttttcctccaggccgagcgcactgtctaacaggtcacactgcaaggtattagcagtattcccttttctcgcttcagtttggttatctttatcctcccttatttcatcgtctgctaactgaaactgcaacacctcattctcagccccttctttagatactgcaagatatttcccctcttcttcactggtatcattctgctccttctccaggctatcctctatcacactgccagcactagcaggaagaagctcctccatgcttccaccatgcataaccatagcagctgcctcactcagtacatcagacctgctggtctcatctaccacctcaccctccttctcagccgattcatctaagacttctccaccttgagcaataacccttcatgcgtatgagattcaaattgcatctccccatcccatgccacttttagacccactttactgaacaacggatcacccaacttccatggagcattaggaacaacaccctgctcgcaattgttgtgcgtctggtcacccttcccttccaggttcaccacatctccatgcttggcttcctcatcccaaatcacactctccagcggcatttcgttgaacaccagagagtccatactttcaatcagaactggaacgcagttgtggcaaccatggccatcgtcgctgttgtcaacaacccaaaccatgttgttgttccaactagcagagtcgtcaaaaccac

SEQ ID NO: 185204 - DNA, 766 bp, Zea Mays
cgcggcctgcagcgcctctccgtcgccgccaacggcttctacgggcccatcccgccgtccctcgcgcgcctgcagctcctcgtccacctcaacctctccaacaacgccttcaacggctccttcccgcctgcgctcgcgcggctccgcgcactccgggtgctcgacctctacaacaacaacctcaccagcgccacgttgccgctcgaggtcacgcacatgcccatgctccgtcacctgcacctcggcggcaacttcttctccggggagataccgccggagtacggccggtggcctaggctgcagtaccttgcggtctccgggaacgagctctccggcaagataccgcccgagctggggaacctcaccagcctcagggagctctacattggctactacaacagttacaccggtggccttccgccggagctggggaacctgaccgagctcgtccgcctcgacgccgccaactgtgggctctccggcgaaatcccgccggagctcgggaggctgcagaatctggacacgctcttcttgcaggtgaatggcctcaccggcagcataccgtcggagctgggctacctcaggagcctcagttctttggacctgtcgaacaatgcgctcaccggtgagatacctgcgagtttctccgagctcaagaacctgacgctgcttaacctgttccggaacaagttgcgcggcgacatccccggcttcgtcggcgacctgcccagcctcgaggtgctgcagctgtgggagaataacttca

SEQ ID NO: 185205 - DNA, 450 bp, Zea Mays
aagcaccagaactatcgcataatccacaaacttaaagatttcatacaaacttaaattgaaaacacatgaaacaatcatctattctgctggtggctgctgtctcgaaattttcagcttgcgaggtttgggcagttcttttgtttttttaattcttttactccgtcctttggatcgaacatcatttggtggatgtatatctacttgagatggaatttggcatccaatgaaatcctcatactcttgttgtttagtttgcactgtggtaggtacaatggtaccaagagaagcttctatgttcatcacacttgaaactaagaaatcaattccttcctttgaactcttcgtgtgctgaattaaatcttcaaccttgtttcgtaccatggctatctttttccttttctccgcttcattagcatctatgggcttctcatccaataggttgccctcctc

SEQ ID NO: 185206 - DNA, 493 bp, Zea Mays
tacaagccgcggctgcatcgtgtccgccgtcgctgtcgcatggggccctctcgtcaggcttatccctctcctcaacaacccgctcgttgccccgggatttccgagctccgtgaaccatggcgtgatccccgcgcggacttcctaacctcggtgcataagaacagatctgcacccgcccctcttccatccgctcaccctgttccaagccatggggcactgtgaatttctcgccgttgatgaatctctgccgccggtccgccctgcgccatggctggccctgttcccgccttcttcatcggtgaggcctcgctcgcgcttccctatggtcatcatgacgttttgctctaggatccactaggaatcgaacaccggaaccttggtgcctgctcatcggccatggcgccgccggccctggtgaacgccaccgccggtgtctgcgacatgagataggggatcagcgtcggtcgttggatcgtaaccaacggtcacgatt

SEQ ID NO: 185207 - DNA, 453 bp, Zea Mays
atgcaagatgcattttgagtacccttttgatctaggtcaggctcaatttgtgattgtattgcagtatttctatccatttcatttttaacactgccaaagttgggtatgcagttgtacattagtcaagtagccatgtctcataacatgaatacattgtttggcacttactttcattaattgcgtaacttttcccttgctgtcaggctctggaccgccatgcttgcgtctgccgcgggacgtccacgccgccatcgcccgtgagcagctccgacagcctcatcgtcgcgttgcacctgcacttgtgtcgcaggctcgggttaccgtcggtgctcacgccgaggaaggcatgatccatgcggagcagcccaaggcgcgatgccacctccgctgtcacgcatgatgagctgcttcgcctctggcaccgccttgttccttcgcgatctcacattggta

SEQ ID NO: 185208 - DNA, 310 bp, Zea Mays
tgcataccttggcaagaaggtgacgagcagcaagatccatgggccatggcgaccatcgcccttagcacgtcctcgcgtcctggcttgggcgcctccgcgcgccttgtgcggcttgccgcgtttgtggccgcttgttgaggaagaggactccccttcttgtcaccctggcaggcctcacactgctcccgagtgagatgtagctttccaccgatggtggtaggcctcgaaagagaccgtggttcgtcgtcgtcaacaaatttaaggtgacgtatcacctcttcgattgacatcgtagagaggtctaacagag

SEQ ID NO: 185209 - DNA, 672 bp, Zea Mays
aattgcagagaaagaagaagagtgtgaagaaaagctcaacggcggcgatgctaccgccaagataagcagtggtgaaggacccgtgtctcaaggtctcagtgaatctgggagactttgcaagccgaatgaagaaatgacgaggacactctccggccagggcaggagtgtgaggatcaacatcccggtcaccacgccttccaggactgtcaccgccatacgcgaactgctgttcggggacatgccgagccagtccaagaagactggcgcgcatggtaccgacggcagtgagaagctgagcatcaacaagaggaaggtgcaccaggcggagaagatgatcagaggtgctctggttgagctgtacaaaggactgggctacctcaagacgtaccggtatgcgtagttggttctgcctgcgacatggcttcttgtacttgaacgtacgtggatgcattactgacaaggagggcacgctcgttgcaggagcttgaacatgatggcctttgtgaagatcctcaagaaatttgacaaggtttctgctcctatctcttgctctcctttgatggtgccctatctcataagagcaacaatcctgatgacagaagctatatatttttccgtgtttcaggttacaggaaaggaagtgcagcaaatttacctcaaagcagtggagag

SEQ ID NO: 185210 - DNA, 344 bp, Zea Mays
tcattagattgaggtccatacacacaagtaagccaccaatgatgcccctcctctgaacagaactgcacagaaacactatgaacgtctgtcctggtagctccagtgacccccaaatgttgtctccaagcaataaggattccacccctcgcaccaatagaaggtagggccaacgaaccggtaaaatcagatcctaacatagagaggagagtacgctgagaaggttgtgccatcttagtttcttgaagacagattatatccgcaccataacaattgaggagctcacggacagaattatgtcgagccaaagagttgagacctcttacattccaaacaattattttttc

SEQ ID NO: 185211 - DNA, 551 bp, Zea Mays
gcaccgtatgtattgcattaatatatatattcattgaagtacttgcatgtgtcaaggttgatttggtgtcaggaaagctttgtccgaggtatataggactgtctactatcttagcccgagttggcagcttggcttagcacatgcaattgtcggagtctatgatcagtgtacaccatgtattctatgtctctatgttgagaaagtatttgcagaatccagatcaataaatcgagctagagtcgattcccatgtagcaagacctgactctagagtgtcgtctgctgcgtatcctagaatccttggagctcgaggagctgatgcggcagaagtaccccgaacttttcgttatggggtgagtttttgtcgtcgctgatctttcctttggtcgttctgatagaagcgtcagaattcgaggtcgaattcttttcaaggggggtagagtgtgacacccagtttgcaaagaagagaagttggagtttattctttccttgtttcttttttccttctttctttcgggtggtacgcttttggggttgggaatttttggggaa

SEQ ID NO: 185212 - DNA, 318 bp, Zea Mays
tgatcttcttgtaactctggacgaagctccaacctgagcgctgagagcaacacccttatcattctcctggttcttgcacttgcgcttcctgtcaacaaaaacagccacttgtacttcttcagactcggcagctctcagtgaatttctcctggaacgcctcaaagggacaactgcgcccacctctacagaaccggcttgagcagacttcccccttggcttggcaacaacaggcgaacaggtgacttgggacctcagttcacagtcttgagcctcagcacatagcgaatttctgctggactgcctcacaaggacatctgc

SEQ ID NO: 185213 - DNA, 377 bp, Zea Mays
gatcttcagcctttgttccaagcgcactttggaggtcggcgtccgtgcttttgtgtctgtcgccgctatctgctcgtcctgttgtgctgttcgtctctctgttgttggtcggctctgtgagcctgttttctgtcttctgctgcttaggctagactcttctgggtggcttgctaatctttgtcccttggtgttatgtttgtgtggtcatggctagttgtggtaagaaccttgttgtaatgtcgtggaatgtacgtggtcttggcgactcggataaatgtgttcttgttcgtgatgccattgtctcctcttccccagctattgcctgtctccaggaaacaaaactcagcgacgttactgtgttcaaggctgcctctttc

SEQ ID NO: 185214 - DNA, 447 bp, Zea Mays
tagtgacacgatggtgcgatcattggaatggtgggccaatgggcatacatatcaatgtgatatgagggtgttggggttgggagcatatgatgctattttgggctatgattggttgcgtcgccatagtcctatgcattgtgattgggatgataaggttattagctttgtggacaatggagtggaagttcagttggtgggcaatactgatcagcagcaggttgtgaaggaagtttctactatacaggtggcgaaatggctgcgagggaatgatatctgggtgtttgcattgttggaggaggtgattgaggagaacagcaatggggtccatccagaattgcaggtgttgttgggggaattcagtgacatttttgttacaccaactgaactgccgccatctcgaccgtttgaccatcatattcctttgctccctgggtccattccggtcaa

SEQ ID NO: 185215 - DNA, 747 bp, Zea Mays
ctgttccacgccatgccattattaaaaagcttgcaggagaggatattgcacatttagatgaccttattgcagttctttcaaaattgtctaggggaacacgagtgcctctagaatacgtcaaataccctgaccgtcacaggaacaaagtaagatttgagtagctatttatcacaataatcaatgccttatctcctgcacatcccagttcaaaatttgagttcagtttcataaataaactaaccatttttatttacgtgactagtctgtactggtgacaatagatcaacatgaatggtatgcgtcacctcagttatatactcgaaatgatgcaactggcttgtggactggaaaaccagctataccaccagaatctccgtttttagctctagctcatcatgctagtcatgtggacacaaactcaaacgctgtttcatctttatccgaatctagtcctatggatctcaagtgccagtatgattctgagaacctggcagacggatgcatcaaaatgcaaactgatgatgagattgttgtggatggatctcattctaacgaagattctgttattgagaaaaaaaggcgacgtgtggtcgaggagatagctgccgacggaactttaccatcttatggagatctagaggatgtaaaaggtggttctttgaggcatccttctaatgcagatggatctgaacttgctcgaacaatatcaagcaatgcatcattggcagaacaagtaattgaaccagc

SEQ ID NO: 185216 - DNA, 2462 bp, Zea Mays
gtgtccaaaccatagtacacattttggtccccggaggccggtaagtctatttttggcctcccgtgacacatgttttcatcgtcaaacaacgatttcatgcctcccgtccgccaaccatgatttggccattgagactgctaaggctgtttatggcctcccgtaagctatagcacacgttttcatggtcgagcgaccatttttaagtacgtgttccaccacccgcgttttggtccctagagcaccttaaagttgttcttggcttcccacaagctgtagggttaagggtttagggtttaggttttagggcctcccgtgacacatgcttttgtcatcgaacagcgatttcgtgcctcccgtccgccacccatgatttgaccattaagactggtaaggctgttttggcctcccgtgagctatagcacacgttttcatggcccagcgaccatttttatgtccgcgttccgccacacgtggttttgtccccggagcaccttaaagcggttcttggcctcccgcgagctatatcacacatttctgcggccaaacaaccaattttatgtatccgaccagccaccttcgttttagaccggggaggctgttatggcattttttgccacccgtgagctatagcacacgattttatggaaaccaagaccctaaatcctatccctaaaccctaaacctaaacatcgacactaaaggattttagtgtcgaaaccatagtaaaatgaaatttgagtctcctaaccatatcaactttgctgacatagtagaattttagtgtccaaaccatagtacacattttggtccccggaggccggtaaggctatttttggcctcccgtgacacatgttttcatcgtcaaacaacgatttcatgcctcccgtccgccacccatgatttgcgcactgagactgctaagactgtttatggcctcccgtaagctatatcacacgttttcatggtcgagcgaccatttttaagtacgtgttccaccacccgcgttttggtccccagagcaccttaaagttgttcttggcctcccacgagctgtagggtttaggttttagggcctcccatgacacatgtttttttcgtcgaacagcgatttcgtgcctcccatccgccacccatgatttgaccattgagactggtaaggctgttttggcctcccgtgagctatagcacacgttttcatggcccagcgaccatttttatgttcgcgttccgccacacgtgtttttgtccccggagcaccttaaagcggttcttggcctcccgcgagttgtaacacacattaccgtggccaaacagccaattttatgtatctgacttgccaccttcggtttagaccggggaggtcgttatggcatttttttgccacccgtgagctatagcacacgattttatggaaacctagaccctaaatcctatccctaaaccctaaacttaaacatcgacactaaaggagtttagtgtcgaaaccatggtaaactgaaatttgagtctcccaaccatatcaactttgctgacatagtagaattttagtgtccaaaccatagtacacattttggtccccggaggccagtaaggctatttttggcctcccgtgacacatgttttcatcgtcaaacaacgatttcatgcctcccgtccgccacccatgatttggccactaagattgctaaggttgtttatggcctcacgtaagctatagcacacgttttcatggtcgagcgaccatttttaagtacgtgttgcaccacccgcgttttggtcccagagcaccttaaagttgttcttggcctcccacgagctgtagcacatgtttccttggccaaagagccaatttcatgtatccgacctgccacctatgttttagaccggggaggccgttacgacattttttgacacaagtgagctatagcacacgtttttatggtaacctagaccccaaatcctatccctaaaccctaaccttaaacaccaacactaaaaggttttagtctccaaaccatagtaaaatgaagtttgagtctccaaaccatagtaagcttgcagacatagtagaattttagtgtccaaaccatagtacacgttttagtacccggaggcccgtaagtttgcacacatagtagaattttagtgtccaaaccatagtgcacgttttagtctccggaggcccgtaaggctatttttggcctcccgtgacacatgttttcgttgtcggacagcgatttcatgcctcccgtccgccacccatgatttggccactcagactggtaaggctatttatggcctcccgtaaactacaacacacgttttcatggtcgtgcgaccatttttatgtacgcgttccaccacccgcgttttggtccccagagcaccttaaaggtgttttggcctcccacgagctatagcacacgtttccgtggccaaatagccaatttcatgtatccgac

SEQ ID NO: 185217 - DNA, 335 bp, Zea Mays
tgattttacgtccgtgaaggctaatcggaagatggaatttcttgaatccttcactgcttcactgtgtcgtatgcagtttgcagtacagcgtgttcgctatcgggttaattttctggcatctccttcactctccaatataaatcaccaatgatttatgtcgggatatctgaagaacttttgttcatcactggccacagaaaaaacgagtggacttcttccactactactgatgtactacacctcgcctgtcatgttcaccggaagaaacgacagtaatacaccaacccatttgctggacttaactgaggtcagaaggtgaccatcgtgacactgct

SEQ ID NO: 185218 - DNA, 509 bp, Zea Mays
ggactacacccgatgagaaggtgtggcgggcatcactccatttggacggtgtggtagcagaatggttctacgctctggagcgggacacgggcgacgtcctcacttggtcccgcttcgttgagttcacccatatgcggtttggaccacctctacggaccaatggtatggctgatctcaaggacctttggcgcaccggcaccgtcgaagactatcaacatcagtttctgtccattctctgtcgctgcgaggatatgacacagctccagcaaactcagatgtttaccgcagacttgggtgaaccgcttcgaactgatgttgaactgctaactccaattacattgcagcgggccatgcacctggcaccgcctatgaacgtcgcatggatctgtcctcgaccccatcaaggacgccatatgctacatcaaaaccaacagcatctgcaactgcagcaaaaccctcgtcatcggctaccagcagaccacgtttgcgcaggctctcaccggaggagg

SEQ ID NO: 185219 - DNA, 569 bp, Zea Mays
gcaacaggcacatactcatctccagtaggaatgttagaccaatggaaatgaatccttccccctccacctccaccactaccagcatttccgaagccaccaacacttgagaggacagagctttcagctaaggacaaagtatgcacaaatagaagaattgtgcccccagaaccaccaccaggtcctccaacagagccattagtatagctaccaccatttgattctactgagccatagagggcaagacttggcaaagaatactcccatgagcccatcgctggagagcagttacaaaaacatttaaaaagacaatattaagacatgctatgagtcaaaaaaatgagaataggagcatatgcagtacctattatacccccaccagctgtggacaactcggtagagtcattcccactgccactgccaagttcacaaggtagatcagcattgccatagatagctccaccctcagcaaggtttcccttataaaaaccatccccgccttttccaccatgtccaccaccaccacatatacctctgcttaacattttcccttgccctactccagttcgaca

SEQ ID NO: 185220 - DNA, 624 bp, Zea Mays
gtgactttcttggtgtcttggtgctatctgatgcagctgttgttattggtgacacccttcttgatgaaattgccaaggatgaaagtttgagatctctacgaacaacagcctttttggacgcatcttctgcatcattagaaggtgactttcttggtgtcctggtgccatctgatgcagctgttgttgttggtgacacccttcttgatgaaattgccaaggaagaaagtttgagatctctacgaacaacggcctttttggacgcatcatctgcatcattagaaggtgactttcttggtgaccccccttgtgatgacattgacgaagagaccagccggtcaattttatcagcaagatcaatacttcttgacaaggtatttgcagcggagtacattgttgttcgcttaggtgaaaccccacgtaacggaactgatggaacagtagacctactgatcttgtcagtgagatccatgctcttggacattgtgcttgcagacaccctgccccccatcatagcaggccagcgatgatgatcaatcaccttggcatgtggattctctgattgctcaggggtagctctccctctcaacgggctcctcttcctatcagctggtgctgcatccctcg

SEQ ID NO: 185221 - DNA, 416 bp, Zea Mays
cttgggggtgattttggtggtggatgtttggttgatgcggaggcgggagtgggggtggtacgacttgtacctcctggtggtgttgatatgcgtggttgggtagatgctgggcggggccgtggttgtatggttgtgggtggtggtgttgatatgtgtgcgcgacaactcttgggttgtcggcgggttgtgcccgagacatcctatccctggtggccttcgtttccgggcaatccctcattgggtgcgtgcagtcttcgtcgtgaaacaggcagtaatatctgcgcggctgctgcgcccgtccccggccccgaccacgcgtgccattgccgtgtccctggggggatactcttgacggcgaggggcctcaccggcggggtgctggttggcaatgttatgcacttgctgctgactgcggc

SEQ ID NO: 185222 - DNA, 1220 bp, Zea Mays
cttcgacttttactcacggtgaaggaatcggctatggatgtccctacaaacctggatgctaggaggaggatatctttctttgctaattctctttttatgtcgatgccagatgctccaaaagtgcggcaaatgttgcccttctcgtaagttatactcactttaagatctatactataacattcctagctgccttttatgttttactagtgagtgataacagacttcgatttattatccatggagttattatgtttctattttacttagatattcaacactattttcagttaaataaagcttgttggctctcttttatatgtgatatctcttttgagaaagaaagctcatcctcacttagtgatcaacaaaacatattagctccagatggaaggtagtatcttgtagataaactagaagagagatgaaaatatctatacctgtacactttgcacacttaaacattttttgttgttcttttgatgaaactctacacctttattccatgaagttattgactacaagtgatttattgtgtcacagtacaatccaaagctttatgggccagtcttaaattatctacatgcattattgactaacatgcgatacagttctattcatatcctcaaatcatattgctttcttttgtgaacttttgttaactagagttactatacatgttctaattacccttgttttaattcctcttcactgggtggctattgcagtgtcttgactccttattataaagaagatgttcttttctcttcacaagcactagcagaacagaatgaggacggagtttccatccttttttatttgcaaaaaatctacccaggttctttgctgaaattttgattgtggctaggcacacctcaatatttccacattcttctgataatgaaaacaatgttttctatccaacatccttgcagatgaatggaaaaattttcttgaaagggtgcattgtgagagtgaagatcaactccacgagactgagcattctgaagagcagcttcgcctttgggcatcataccggggacaaactttgacaagaactggtacaatctttggcttctgtcatagctgctactatattttcttctctcaatgaaactactttgtatatagtacatgtttgataaattcattaatttaataattgtttattgttgtgctttttacagtaagagggatgatgtactacagacaagctttagtcc

SEQ ID NO: 185223 - DNA, 521 bp, Zea Mays
gagcgtgttctaccatggtttatagtgaaactgaatgatgcagaggcagtgtcttttcttcagaatatgcggttggcaggttgtctctgttatgttcctacttctctcttgaataataaaacagttttccgtacctttcctaattttttatatttaatgaatacgtcgcagcaccttcctctgaaactgcattggttactcttctctctggctgggcgtgcaaaggtcgtctggaggacacatccaaccctggaaagttcgtatgcatggcatcaggagcggtcacttgtgcgtcagatgggaatggtttcaaaacatgccagtcactctgtccatgttatgtaagtagcaatggagctttttcaaaaccagttaagagagcaagtcaaggagaatctagcacaaatactgacagaaatcatagctcacacaatgctgctactgaagcatcgcaatgtaacaacagagcctgttacattcccaggttaagagtagaaagtagctaccttggtgttcattca

SEQ ID NO: 185224 - DNA, 725 bp, Zea Mays
tgacagataaaagttcgccttctaactgcccatgcagcagtcaagtgtaacacctatcaattcttgaggatgagggaaaatgctcctaatgaataccagcaattggcaccttcacttgtaaacagttcaactctattaggaaaatactggattcgagcactcaaggattatgtttctataagttttggtttgcactcaaaaatcaatgtaagacagtcaaacaagcctcaacaattcatttctaaggatcatataatcatataatggtttatattctatcctctgttacagtacaagccattccttgatgggattcagtcattattagtcttgtccaaggtgcagaggtatcttgatgaagtttggttattaattcttaaagcaacagctcttgatgccgcgcctttggattttgatgagaataatcctaaaaatttactcgaacaaacatttatatctgggcattgtatggtcaaattggacagaactgaattccaatttctttgggggttatctatccttgtgctgttccattcctgccaatcaatgaagaataattctttgaagatcaaccttgactttaaacaagacaaaaactttggggaatttattgttcatggacttgatgacaaaagaccgtgtgatcaggtcttacgcgtgctttcgtccctcacaacagaagtctttttcagcaataattttatttcagtggatatttgccagca

SEQ ID NO: 185225 - DNA, 678 bp, Zea Mays
agttacccgaagggaaggattcgtgctccaaaggattggaattggttcctagaggaagcaaagaggacctctgacgatgaagctagcggcaagaggagatctagatcgaaagttctgggatggaacaagaagaagaaagatggagaaggcgaagatgaagactggactggtgagagtgaggatgaaaaagagtccacgggaagagttaccagtgtgaagagaccaaagtatgcgacaagatctaaaagctcagaaaaatatagtagggaaaactcgaagactggaagtggcagaagtatcgacgaagatgacggcactgaggatgagcaagatgagactctgggaggttttttagttaacgacgaggatgacgagcctgcagaagagctgagcgatgaagaggaggaatttgacgatgaggaagatgatgattgataaccacgtcaaaaaagaaccttctcagtgatgaactgatactgacaagtgacaagcagtatgtttatattcctttgaacttgtgtaaaaacaatgtgtggcaactgtgttagtgttgttaattctgaaaaatgacgtttttgtatatctgcattgcttatctcagcagtgaaccgaattttcgctcagctgtgctgccatgctgcgacatgggccacgaacgagcctgcatgaaagcaatcc

SEQ ID NO: 185226 - DNA, 300 bp, Zea Mays
caaaaagactcagtaattggtaatagtaagatcaatatttgttagaagagaataaaacaaaagctaaacgaacatttacacactttgcaagggccctaggactggcagtctccatctctgcattagtggctacctctactgccaaggcacaatcagtctccaatgtcgcacttcccttcatgctgtcttgtacccgcgtgtcgtgcgtcctgatcctagaaacagtaatattagcagatcatttgttagtacttggctgttcaatgtacttactacttttggctccaccttgaaatacta

SEQ ID NO: 185227 - DNA, 1214 bp, Zea Mays
tctgagtcagatccttgcatacacttggtaaacatactttgaaatgcttgagacgtatttagtgagcctaaatgagattgagcattcttcagaatatgccagtaggaaaaacaatgttgcgtattagggaaaacctgtttgactgcctgcataatagcttcatcctgatcagtgaatattgattttggtgatcgccctcccattgactccaagaatgatttaaatacccaggcataggaagttacagactcgtctaacaagaacgcgcagccaaaaacaacattttgccaatggtggtcaacaccaacaaatggggcgcatatcaagttatatttgtttgtgcggtaggttgtatcaaatataatggcatctccaaagcagccataatcatttctacttttaccatccctgtagaagaagttcgtcatgcgcccttcttgatcaacttggacgtcccaatagaacatgccttcctcattagttttatgcttgaaatagctgacaagactttggctatcccctgcctcaattactgttatactctgcatgcccacttgattgtaacattcccttatagtataccctgaattctcaactatatcacctgtcatatcagagaaaccattaattggatgtgcctctgtagatgctaatggatctataacacctgatttgccaacagcaagcgatttggctgatctcagcatgtgtctttctccaggttttgccaactggtgattatgtacaggaacaaagcgtataactgtccaccgccccttctcgtcaactctaaagcggatcattgctttgcaattagttcttgtgtctggtcgattaaaatttgcttctgtaacaggctcatcgtatttaagcccttcctttgagcagtagtaatcctttgttcgaatattcttggtaccaataaagtaagactgtttgcccttccgcacgctaaaaccgattcgatgcccataatcacagtacaacctgtacgcctcttcctcactatgaaccacacaaccaagaagctcttctgttacctccttacgactcaaagcatttccatagtcagccgtcttttctgcttcttcaccattctcccttctttgatggctttcttcttggggatcttgactgcagtccatttctactcagctagctccatcaatatttacaaagacagcatcagaagtggttccacacttccagtaaat

SEQ ID NO: 185228 - DNA, 278 bp, Zea Mays
gtatgctcagaatggagaagccaattgtgcagctaggatgttcctacagatgcattcgtcaggatttacgccaactgaattcacctttgttggggtactgaacgcatgcagtgacatgggcgcattagtggttgggaagcagacacattgtttgatggtgaagcttgggtttgaaacgcaggtttatgtgaagagtgcactggtggacatgtatgccaagtgtggttgtattggtgatgcaaaagatgggtttcatcaattatatgatgttgatgatg

SEQ ID NO: 185229 - DNA, 397 bp, Zea Mays
acaatcgatttagagcagcaagtaaaggatcatcaaggcccacgatttgttcaatggactggaaacttaatataggagaatttgatgcaatggtggctttttcttcctgtgagcttatgcgagtgtttgggtgtaagggggagaagtggaaaatgctggtaacatatcattttactcaaagttgagccttatgttcatttccccctcaattcgatcatattcatattgcttatcttgtacagatgaacaaaaaaccttctagtttgagaaaaataaatgccttgaagtggtgtcctgatgatcgttcacgcatagcagtcgctgccggcgatgggcaccttgtgaccattgacttcttagattttaaaggtcgacactttaaaagagtcgagaggtt

SEQ ID NO: 185230 - DNA, 784 bp, Zea Mays
aggggagcgaaagcgaaacgtattaaactcgcgtacatcatcaaccgcatgcgctgatgcgcactgccactgccccggagaaattcaaatcccaagccccacaagcaaattaccccagcatcaaatcagcggccggccggccggcagctctcggtcgatccactgcggtttccagtcccgaataatcccaattcccaatcgattcgaagcttccttccttcgaggagagggggaggtggaaggcgcgggggaagctctgcttagggttcggaggtggccggcgccgccgcggggcggggacggcagggggatggatccggagcagacgttcctgcgggtgcacgcgcgcttatcggggacgctttcccagctgctcacgccgcggatccgcctcgtcctcgagtacctctacctcgccggcgccgtcgcgctcttctgcctgctcgtcgtcatgcacacgaacttcgtgcagcaggtcagtcacggcccgtctccccagaattaccctcagtgggctgcttatcattctccatagctcctgttcctcctcctcctgccgctgtgatggattgggagcggatatgacgcttctcgtgggattttctgttgaaactatcaccgggcttggggtggggaatttgtgctagcttcggcgatctttcagcagtgctaccatgataccaattcaatgtaaattgtggaaacagagctaccatgctgccaatttaatgtgaatcgtggaaacagaactaccatcgctgctttgctaatcatttaatttgcg

SEQ ID NO: 185231 - DNA, 1351 bp, Zea Mays
gtaaagtggcagctcagtcatcttcattggtatggtgttgtgtgtcttcttatgacacatattttgcaaaaccaacaaataacaaattaacaagtcatgcccttgtggaccaatgccggtctacatgcacaaagccagaaaaaacatgatttaaaaataaccagttaatcaatactgcatatgatttgatccacttgtgtttgaccttgttaactatatgccatcaaatttaaatgtagttacaatggctcaaaagtattaagtgatatcaccaaaacctaatacagttgctactattattggcacctttcgactttattgtatcatctttgtttgtggctcttgtcgagtttaatctctagtctagcccaacttgggacagaatacttttgataatgagcatgtcacatcaatactatttataatgaatctattaatatcattctcatgcgtctttcagagtatttaccatgtaatacagtaatggcagaagttgcatgcattctaggatgtcattaatttattgtgtacatttctcttttatctggtaccaataaaattagttactactgagtgacttttgtttatcttgtactgtatgcttgtacatgtactgttgatctgtagaccacaacatgaccaattgttattcatgtttctcacaattgtaggcacggattcgtattctatctttgatagccaagctcttcactgtttcaagttatactgctactgctattcgtgattcaaaccttctgagcatatttgaagaggaaataaaagatagaagagatatgcttaaaaccctcagtgcgctagaggtcctatatgaggtaaaaagttttttttttctgttcatttgtgcatcctaatatttggctactcactaagagtttcattttgagtacttgatttatgtatttgttttttaaacggatttacatatgaaaaactgttttcaaggagaaggggctatatcccttaagtttgaagataataatgtttttttatggtgtctgtcgtgtaaaaactcgtgaaaccgtgattcatttgcaagagacttggattagtattatttcatattagaggcttgatgaaccaatgtttatcgcattgtggtaattgcagtttctttccttatatattgtaccatgtcaacaatcaacatgttacataatcctggcagtcataggtaattaggtattctgctacctaatgaatgatcacgatcaatgtcttcaagattctggagtttcttggagaagctatattttgctaactatttcttctatgacaccgcagcttgttgaacaccctcacagcaacattttcctgctgaagaccaacttgc

SEQ ID NO: 185232 - DNA, 456 bp, Zea Mays
tcgttttcctccagcgggcccaatggcatatgggatggatgtgaggcagtggccaagttctgaaagagcaaaagttcattactacacaattccaaacaaaaagtatccatgcgccaaacagcaagagctttcaatggatcacaattcacagcagaagctacttgggctgcgaagccgctgtcccagccagaactctgggcagggtatgcagcacaacgccgaaacgacactgcgcctcatgggaaaaacggtcacacttgggaccagcagcagcatgcactgtagaggcctgaacaacggaaccccagcttgttccagtaaacaaagccaagctgaagaccggggaacgcgtacgaaagttttcccacagctgtttcacggaggactggctctggctgatcccgctgctgcgtgtaggatatcagatggagagaggcaaccgtctggacacccgtc

SEQ ID NO: 185233 - DNA, 572 bp, Zea Mays
ggactcctgcgtaccttggcaagaaggcgacgagaggggtcccagatcctgatgactccatgctcgacctccacacgcgaaccgttctcatccagctgtcccaagctgatgatagagttcctcaacacggggatgtagtagactccggtgagcagcctgtgctcaccagatgcggcggtgaagacgactgagccgacgcccttgatctctacgccggaggcgtccccaaacttgacggagcctcggacgctagagtcaagctcggtgaagaactcccgtcggccggtcatgtgatgagtggcgccggtgtcgaggcaccatccttcgatcatgtctttgctggagccgtcgccgaggaaagcgcgtgctttcgactcatcaaggtggaggagtgccgctgcggccagtgccgctggagatagctcgatgcttgcatgtgctaggagcagagcctcctcctccgcctccgcctgtgcgacgttggcctggccacgtcgtggctatcgacagtccctggcccagtggccaagcttgctgcagttgtgacagctgtcgtctcgtgccggcttctt

SEQ ID NO: 185234 - DNA, 555 bp, Zea Mays
caggtgatgtgatcttcctttgtgattttttggtagtcgatttgtgtttcaattgttaagtcatggtagatgctggtatgatactatatgcttttaattgttcatgctttatgtgattttactctgatggttgctgatgatgtcatcacatttcatgattcattgttcatgatatggttacttttgtgatcgtagataccgaattcaatgttgtcttcatggtattttttgaccaaggcaaattcaacctatcgagaacattgccttattacaatgctatgatggaccaattgattttttagctttgggtttcataatatgcctgtttttatcattgcatacattttgtacaattttcctgatcaagccaaacttgagaatccatgataagctttgtagcttgcatatatttgggttccataatatgcctgttttatcattgcacgcaattcatagtttcatactgtctttctgttcaaactaagcttgagaattccctgatgagctttgtagcttatataggtgtcccaagtgtactgatatttttgttatgaa

SEQ ID NO: 185235 - DNA, 387 bp, Zea Mays
ttgggctcttccccatttgaggttctttatggacgtgcacctcgtcacttcggtctttctgtggaggattctgtgcagcacgctgatctcagttcttggctttcacaacgtgagctgatgctgcgcattatcaggaacaacttgctgcgtgcccagcagaggatgaaacatcagtctgacaagaagagaactgaacgcgtatttcaggtgggcgataaggtatatttgaaactccaaccgtatatccagtcctctgtcgctactcgggcaaatcataagctttcatacaagtattttggcccttacgaagtcttgcagaaggtgggtgcagttgcatacagacttcgtttaccagattcttcttcagttcatccggtgtttcatgtc

SEQ ID NO: 185236 - DNA, 891 bp, Zea Mays
ggcctattgcatatctgagcaagtcgttggggatcaagactcaaaagctatccatctatgaaaaagagtttcttgccttaattatggcagttgatcgttggagacattatcttcaaatgggagaatttgagattcggacagaccataaggctctcagcttcctggggactcaggaccttcagtccaacttacaacgtaaggctatgtcgaagcttatgggtatgcagttccgagttgtgtacaaacaaggtcgagaacacaaagttgatgatgccctgtccaggataggtcatgccatggctttgacagcactgagtgaggtccaacctctttggattcaggaggtcataaattcatatgtgacagatattgacgctcaacatcttttggcacggttatgtgtgcagagccccgatgaacatggttactcgttgtctcagggcatgatccgaaaaggcaatctgatttgggtaggcaacaactcggcactgaggactaaattggtggctgctgtgcatgacagcgcagtgggtggtcactcgggaattcatgctacttaccatcgtctgaagaagttatttctgtggaaaggcatgaaaggtgatgtggaagatttcattaaacagtgcccaacttgccagcgagcaaaaggggagcgagtccacccagttgggttgttacagcctctgccggtgccacagggagcctggcaagatattaccatggatttcatcgagaaattaccgaaatctgagggttacgacacaatcttggtggtcgtggatcggttctcgaagtatgcacattttttggccctcaaacatccgtttactgcaacacaggtggcgcagattctgttggaccaggttgtcaagcttcatggccttccca

SEQ ID NO: 185237 - DNA, 650 bp, Zea Mays
cggaatcgatggttgcccagcaggcaagatcggaaccaaactcggtcgcatgcgcatcgcagcccttccacatgcgggtgggtgaggtggacgacttacgatagacggggtcgggcatggattgattggtggaggccgtgcccccgtgctcatgctcggcgaggacagttgttatattatatcctccttcccttcttgtgcccttgcttggaccatatacctgaagtagcagcttcccttctccgtggaagaacaacagaagaaaagggggtaggtaatcttcggcgccggcggccgccggtccccgcgatggacgcggagaccggagatacccggtctcccctgctgccgcatccccctcccagccagacgcaggtaaccgaatccccaatcccctgcgccctcctcctcctgcttcgcatctctcgattcgatctatatccaaccctcgctacagttctcgtgttctgctgctgctttgcttggccgaacgaagaaagaaagctcgagacttgttgttttctttcaccaatacatgctttttctcctcgtttcagtcccacagcagtcagcatgatgattttctttttgtccctgcaggtttcctcagcgaatcagcactataacaaacccttcagctggaaggcccc

SEQ ID NO: 185238 - DNA, 336 bp, Zea Mays
gaatgacacatgtgaaggttggggcaaagaagcgaggatgccctgactgcctgaaggcagcaagaacaagaaagtggtgattgagatcgattagggctatggcatgctgatcgctgcatcattcgacatctgcatcagttgtaaactacattgtgtatgtgtatgtgtatggttcttttcttgcttgcagatgacttgggcactgtaagatggtcgagggttagagcttcacctcgatagttggtcaagaatcagagcttcaccattcatgaattttggtgactaggtttttctccttacttccatagcgaagtttaccatagtagtcagttcagg

SEQ ID NO: 185239 - DNA, 894 bp, Zea Mays
gtgaaactgatgacctaccagcatagtgaatatccaagaatggattggttccttctcttgctattctccttgaatttacaggagatctactgccatctgcttccaaatctgctgagctgagatgccaggctcttagagtcactgcaaatgtcacttctccacccggtttaatagggagcgcagatttccatgtgctatgagcaatcgaaataacagaatcctgattcttccctgacaatgcaacatttgcttcttcaactggcacggttccggcatttgtcagtgttatcagaacatcacgaatttctccttcataaagaagaatagaaccatctccacccacaacattggcaattaacaatggcagaggaggaacaacagaaatgctaggaaagttgacactcttgaacttgctagagccacagcatctgaaaggatcagaaaggacaagcccttgtgcagctccaaggagcaaacaatcgacctctttgaataggtgttctgtaataacaccaaagcaatgaacaatgcacccaggaattgatatttgtccgacttttgttggaataccagataataaaactaattttgaagtgttaggtggaagactaacgctaactggaaaggcatcaaaattcccagaatggacagagagatagatgctctccacaactatgtcgaagctgcaagggtttgctaactcaaccatgacttgaaccggctcccccacaatccaactaagctcttgcttggaagtcccagaagctcctgctttgctgaaaggagtataaatgaaaggtcctgaaggacctgcaccagcccaccactcctttttatgtggattccgttttactatatccctttgagaagggtgaagcgggaaagaatgcaacc

SEQ ID NO: 185240 - DNA, 281 bp, Zea Mays
agtatttttgtaatctgctgggggctgatttgcagaggccttttactattgatctaagtaattgtcacagggctgcgatggatctaagtgttttggagcagccttgttcagagaaggaggttagggacactattgcttgtctcccttctgataaggctcctgggcctgatggttttacaggaaaattttacaagacatgctgggacatcattaaagtcgacataatggctgctcttaattccctttaccatggaaatgcctataagcttgatttgctgaac

SEQ ID NO: 185241 - DNA, 368 bp, Zea Mays
agatttttgtagaagaggtccactgctgctgctttctcactatgctcagttagaatgtggctgccatcaactaacttggcaacaaaattcctcctcttgcggtgcctagcatgaatgtgaaaaaactttgtattcgcatcaccttctcctaaccatgtgatcctagatctcagccttgccatagtacgtttgaaagaagacagcaacaatgagtgttttttgaggcagttcttgaaccagttttcagctggggagagggctctttcgtcctgtgccatctcaaacctgtgaagcagttcttttgccaaggctaactgcaatctcacatggcccacctgtttgtcactccagccttgaagagatcttgc

SEQ ID NO: 185242 - DNA, 560 bp, Zea Mays
gttggaagaggcatgcatgagagtccccttgactatatcaagtaactggaacttcgaatcataattctgtcttccatctcacaaattggaagttcgtaattatttactatattttctgtgcagatacgccactttctggattgcaattcttggtgcaaaattttcattcacctattttcttcaggaaagcttagtttttcattgtcagccattcatagttattgacctctggaccctaaaacatggcttttattttgcagataaaacctcttgtagaaccaacaagaactataatcaatttcactggcctgcagtatgcttggcatgattttttctcgaagagtatgaatacattacttttttccacaaatgtcaccattatattttttacttgtccacaccctgtgattctataaattttcattattgtgtatttggaaattgttcctttcagaactttgagaagtgtctatctgtttccaaatatttatgattaaatgtgtgtaaccgagtcgttcttacaatgtttgcagataatcataatgctcttacaatccttt

SEQ ID NO: 185243 - DNA, 568 bp, Zea Mays
ttctgattcagattcttctggtcgccagggaacaaatttgagcaggcaatcatccattaccatccaggaactaaacttccaggctagagtgatgggaccaggaaaagggaaccaagatcggcatggcgaattgcaaatgaaggctaatgagttggagaaattatttgctgaacacaagttaatatcatcccgacgaggcaaacctacagatgtgcaggttgatagcacacgtacggtgagtgaggtaaagccgataacagttcttcatgagacaattcatacaaaacaagttgtaaaggagagtataacaaccaatgattttgatgccagtgagcttctgaagatggtgagtaatcaaggatttaacattagcacaccacaaaaacttggcattctaagcttagaagagtcgagagggaagttttatgagcattatatgcagaagagggatgcaaaactgaaggaagactggaaactgcagaggggggagaaggaagcaatgttaaaggctatgcatgagagcctagaacggagcaaggctgagatgcgagctaaattctctcagtct

SEQ ID NO: 185244 - DNA, 560 bp, Zea Mays
ccaagtactgtgacacacgctctgattcttcagagaggcgcctctcagcctgcttcagatactcaccacaagcacagcactcaatgagttgctgtgactcaccactatagaaactagcagagacctcaagaaatggcctttcaaaatcgtcctggtaaacagacagccctagatccatcaacattttagttgtagtcctcatcaagcctctgtttatcacatcaccggtcctttctatatgtatgagttcgacgagcatgtcagacaacctcccctgaatcgtaggagaccgaactatggtatccctccaaagctctatcccatgatcaaagacaggtgcctttttattagtgggaatatatgtcctgtccatatacatcaggatgtctctaatcattttcaatgccttgttatagtcattccattttcgttgcatctcttccaggaacaaaccaccttgagcagcctctatacatgtccgcatctcttcaagatgcgctttcatgttttctgtgaatttctcatagagctcaggagcaaacttgttcaataccaagtta

SEQ ID NO: 185245 - DNA, 888 bp, Zea Mays
actccaccgtaaagtcgaagtcaaagaacttgttgatccaatggtgttggggcacaatggacaatcgttggtcgagtagggacttcaggctatagtgttcaacgtggactaggaatttgtggtgccaaagatccggtcaccagtgtcgtacatcctgaactaggctgatgagttcatgctcgtacaccgctagcttgtgggggcgagcgacgtagggccgactgaagaaggcctggggcccgaccccttggtgtagaacgacgttgaaacttgtgcctgatgcgctattgatgacgaactgcttgtcgaagtttgacatctacaacattggaccagaggagagggtgtgcttaagcgccgcgaaggcctcgacagtctcagacgttcaggttaacgctcttctgcgtaataggcgagtggcgcgaccattgtgcctaaattctggatgaactttaggtaatagttggccaagtctaggaagccacacatagcttggggtgatcaaggtagtggccaagatgaaacgacatccactttgtcatgtccattgcgacgccatggacgaagatggcatgtctgagataggtgatctagggtgcaccaaaggtgtgtttggaccgcttgaggaagaagtcgtgggtgcgcatggcattgaagacaaggagcacatgctgcaaatgcttggaccacgatgagttgtagatcaagatgtcaaagaagtcaatcacaagtcttcggaggaagggctagaggacatcattcatgagcgcttggaacatagccagcccattgtagtggctggacgacatgacgaggaattagaagtgcccatggtgtgtgcagaacactgtcttttcaacgtcatgcagatgcattcggacctggtct

SEQ ID NO: 185246 - DNA, 441 bp, Zea Mays
aatagtcgatgatggtgaggaccccttgggtgatggtgcggaaggaggcttcaaggaagatggcacgagttttgcggctatcgaggaactgcgacacgagtccaagccagatattgtgggcgaggcaccatgctcaatgacggtctcagcgaggccgtcggagatggtgttgttgatccatgttagaacgacacaatccatgcgcacctagtcggggtcaaaatcgttggagaggatgtgcccccaagggagtactggccgacgacgaggaggaacgcctcgcaccggcgggtgtggaacgtcaaggtgacgttgaggacgaggacattagcacaagaatgttctgcacaacaacaacctgggcgttgagattcagtgcggtggcctcatgactaagaaggcgttgtggttgtgtggtgcatcgacgacgggggcattgtt

SEQ ID NO: 185247 - DNA, 440 bp, Zea Mays
ttccctttaatgaagaaacgatgttggcttctctgtgatgattgctcgttgataactcaaagttcttgaatcattcctcttcccacctttttcatggggttgattcccttgtaatagtaaaagaataactcgggcatcacatcaatgcttttagaggtagctgccgagcgacttgtagatggtgtcagggtttttagagataactgccgagtgacttgaagatgacgtcgacgtgttagaggtaactgccgagtgactgaacacgatgtcggagttttagaggtaactaccgagcgacttgagggcgacatcagcgttttagaggtaacgccgagtgacttgaagacgacgtcggcatgttagaggtaactgccgagtgactgaacacgatgtcagagttttagaggtaactaccgagcgacttgagggcgacgtcagcg

SEQ ID NO: 185248 - DNA, 502 bp, Zea Mays
cttaatctcttgaattcacaacctgttactactcaactcaatgtgcaggatgaccggaggctcttacaggcctaccccttggtttattctagaaggcgacgacactctagaagcccaccgccattgaccaaaactccacaagaaacccctgaagttgcagctgttaggaaactcatgaaggcttctaaggctattgaagcgctgctgcctcaaccagtcatccataagcaaaaaccaaagctccaagcaccttaggccttgttactttcttccaagcaacaagacaatcccctcctttagcattctttctgcctctccataagaatcctcgcctgattttatcaatggcatgaattattccctgaggaagatccagagccatagcatgataaattatagttgcagtgagcacagactgaaccagaacagctctcccagctgtagccattagatcagccttccagccaggtagaaggtcggctaccttgactacaagaaattg

SEQ ID NO: 185249 - DNA, 274 bp, Zea Mays
gtgaggctgggtatgggtcatgatggtggacaacaacttgacttcgatgatcagtgacttcgttgttgactacatccacttcgagggagtaactcttcttcaccgggctcacctaccctagcacctggtttgtccaccaacaccgtcagccacgcctcattgtcctgcaccgacgcccacaccttcggggtcgacgtcaacaactttggtccgcgatgaacatcacacgttgtttgccactccactatccaatgatgagggttgcatcgacgcc

SEQ ID NO: 185250 - DNA, 402 bp, Zea Mays
gttgattcctcgctcccgcacactgcctcctcgtcggatttcgtggtgcggatgccgctttttggacgcagctgatcagttgttgctttttgttccgttctagcgctcctgccttgtcccggttcttctctctctttctcgctcactgcctgtcttcaaaagtttcgaactttgaaatctcctgttactatgacgatgtgattacggaatatgacgagttattatgactctggatttgcaggaagggacggtgtgaatgaaaggcgctcaggataaaaggcacagaaagaagcaggacctccaggttctcgggcccttcccgggatgcctggggaggatgatcaacatgttagacctcagcaatggcgtggttgctaccaagatgctcactgagaaggcgca

SEQ ID NO: 185251 - DNA, 634 bp, Zea Mays
gatgagaagaggaatatctggagggcaaaagaagagagccacagttggtaagcatttctataagggctgatggtagaagacaaatacagccatatataggttttatgtagctgccaccagaaggacacatttcaatctgaaagaaaacgactactgacatttcaccacctcaagaatgtaaaatatagggtaggaatcttcatgatagcgaagaatgactagctctaaaatagaatgtttataactctcaagtaagatggaagtaacaaccagaaattagaatgacgaacagagtaaggagatacttaactggaacctaacctaagttggcatacgctaaagtgaagttgtttaatgcaggggagatgctagttggtctggcaagatgcttctttatggatgatatatcaacaggtcttgatagctccacggcatttgagatcatgaagtttctccaacagatggcccatttgatggatctcacaatggtaatttccttgttgcaaccaccgcctgagacattggaattatttgacgacattatacttttatgtgaggggcaaattgtgtatcatggtccccgagaaaatgctacggacttgttcgaaaccatgggattcaaatgccctgacag

SEQ ID NO: 185252 - DNA, 449 bp, Zea Mays
ttccagtggtgttggtccggggtgttgggctgcagctccagtccatcaatcaaatcccagacgagcagataatcagtaatgacctgaactgttagtgctccttgaatatcattcacccaactcctgttagcaagtgcctggctcactgtacgccgctttaccgccttgaagaggttagacgccaattcagctagtgttttaccttggatccagcggtcagtccaaaatttcatggatctccccttcccaaccgtggtatacactggcatatcgaagagtgcacgagccttcatggggaccatgactgacagtccagcccaaggtctagaagtgtctgtcttttgtaaccataaccaccggatgcgcagggaccaccctaaacgttccaagtcaagcaccactaggcctccataccgaaggggtcgctgcacattcgtccaggatactag

SEQ ID NO: 185253 - DNA, 272 bp, Zea Mays
gtccaaaggtcacaatggattaactgaaaatttcgtgtggcacgtgatgaagacacatgaaatggaagacgggtgtggccacctaactaacacgcatgacataaaggatcactagcagttttattacatgaaatcccggaatctgctagtttggatagggcttcatgaccggggtgcccgaggcgctgatgccaaagtgacgaggatgtggtggcatggaaggtggaggtcggcagccgtagaggatagagcgggtcggagctgacacagcg

SEQ ID NO: 185254 - DNA, 746 bp, Zea Mays
tggtggaggaaagaatggaaaagaagcatgccatgcaattgcagctttatgtgaaatatgttctattgattctttgatatccaatttcattcttccgttgcaggttagctagctgatcttattagttatcatttcttatcttgagacagcatgacatttgctgcaaatcggatgttttggtgtgatgcatgctcacagcgcaaaattcttgtgttgtgtgctgttaaaataaaagctacaggatgtatcacaaaatgtgctgattcgattggggctacaattttccccttttctttctccttttgttgagggaaagtatgggttttgctgaattcagtgtcaatctgcatgatcaagttgattttttgttgacttggattatatagttttaaaattttgctcttagcaaaatagctgttgcattcagttgttcttgtgattgagtgcttttttctaccatgatcattcatctgtagtgtgtccctttagatatatttgagggctttaaaggtgcttagcaactttgtgctgacattcagtcatgtggtgtgagggcattgctactaggttttttctggtggcttttgtcagcataccgattatgcttagctaactgcagttgtctacaaagcgtttccatgtgtcgtgtatctgataaatcccttactccatggtagggagatcacatatcatgtgcagaggggcgcattcactgttcattgaatatcaatactgagacagggcgc

SEQ ID NO: 185255 - DNA, 641 bp, Zea Mays
gccgaatcagctgcgcaaaaatgtggcacaagtagtgagcatacggcagctggcgtcgagcacgcagaccatccaatacagtgtcctcgatctcacaaataaggaaatccacgacgtcaaactcggagtgagagaccagggcaccaaggagctagagctggatatgtgtggtatcctccctgtaccccatacacggcagaagagtccgtctcataagctcaaataggaactttgctgctgtagtgaaatctgccggtgagcgtcgcgacccatctgagaagggcgggcggaacagagccgcgacgtgagctgtacccggagccacaccgtcgtgagggcgacaaggaggatcagaggtgtcgtagcataagctgtgaagtcgagtcgacgactcatgaaatccaaagagctggcgaatcaggctggcagtaatagtgacatcctctcgctcaaaacgaaacctcatccagtgatgatttgggtctatccatacagtcgcgtagaaaactcggacccactcctcaacatacctgccgctggtagtcaaaagagtcataaggctaggcagatatgtgaggtgcacctcagagtcagcaccgacggctaatagaaaagctagaaggtccaaaagccggtgcgca

SEQ ID NO: 185256 - DNA, 290 bp, Zea Mays
cagtatcacgttccacgagaaggctgatgctaattaccacttgggaaaagttagttctgagattcttagatctggtaacgtggtgagaagcataagctcttcaacaggatcaaataaaccagcacaagccatcgattgtgtatctgctgcattcaggaacatgcacagccgccgtgacgattatgtcggccttcctatcaattcacgaggtgaattcgtcaaggttcatcctggtggcacccctaattctgttgacatttttacgaggcagtgtttgggggagaattcct

SEQ ID NO: 185257 - DNA, 525 bp, Zea Mays
ctcatcctccccaccccacccatccttcctctattgttgtggggaacggttccaccctcccggtcacctcaataggtgcatcggttcttccggggcctttctaccttatgtcctcgttgcaccccatgattcatccttgtcggtaccccaaatatagggtaccaactcctgctgggtcaaggcgggacacccctatggctacccgtagccacggatgacgagccgtctaccccgacacagtgcccggacccgtccggcagggcaactagcctccgagccgatgttacctcgagccccctcagtggggattgctcagcaattacagcctggagccggacccccatgggacgatcccggacccccacatgtgccatcccgaacatccggtcaggggaggtccggtgccgccacgtgtccgagccattacggatgggacccagacctccacaattaccatcagaacccctagccagcggagatctagggctgccacgtatgcatgcgctctcagccacttgctctccg

SEQ ID NO: 185258 - DNA, 392 bp, Zea Mays
atgctatgtttatcatcgacgtttccttccaaaagatcatctatggaggagaaataaaacttttgatggtcatagtgaacaacgtgagaagccagaggaatttaccatagatgagttgatgcaacaattggagagggtaaaagatgtaagaccaggaaaacatactaaaagcaaaaagagaaagagggaagtagaaggtcaatgttggaaacgaagatcatgtctatgggatttgccatattggtcaagtttgaagttgcgccacaatcttgatgtaatgcacattgaaaaaaatatatgtgagtactttcttggtacatttcttggcattgttggaaagacaaaggacaccattaatgctaggcttgatttggaggacatgggcataagga

SEQ ID NO: 185259 - DNA, 698 bp, Zea Mays
cccatcccagttctttgagactagaaatcccaagtccgcggatttcaagaggtctacaaactctgccccaagctactaaacagtgtcctcctctgacatctttccttccacgctagagaaatccttttctgatcttgtcaatagctttgagcgagcctgtgggtatgtcgactgccatggctaaatagatgagcatgtcggtcatcacatactaaacctgcactcttctgtcgacccttgtcattatatccgctttccacccagatagttgatcagccactctgtcaataatgggctgcacctgatttttgggcagcttttttagagacagaggcagaccaaggtatttgcaggggaaagaagcgagctcacatggaagccaattatgaagagtcatcaactcttcctgaccacatcgaatgggataaacactgctcttctgaatattagtttttaagcccgaagcttctccaaacaaatttaagatacttcgaacagtatggatttcattctctggctagccgttttttgtcggcagcggtgggcggcacgacacccgaaggggtgctggaggggtgcgcggggctggttaattcagtgtgtgatggcttccagcctggactggctcttcaatttccgtcccagcttcatgggccgctggatgttgttgggccggttttctccaatgcttcacagtg

SEQ ID NO: 185260 - DNA, 579 bp, Zea Mays
caccaaagtgggctgtagattgagcaccaaagtgggctcgtagacgggttggccaacgccgcgcagggcgtcaacgacagtcttcatgcagaggcaatattcgtcgatggacgagtcaccctgagtcattgaatgaaatttgtggctgagaaagatagcacatgatgctttgttttgaacaactcgtcgatggcgacccacagttgcttggccgtctggtgaggtcgaagacgacatccgagatagagccaaacaatcagttgtggatgcaacaatctgtctgctgccacaagggatcagtgggacgggcaggagcagagccatcgatgtgtgctagcaaatcgaatttgccgcacatggtgctaaagaacgatgattggttgaagttggaattcgttaggttgagggtcataggaatgtgtgtacgggtgaggaagacgggcccatagttcttgctagagcctccattcgttgcgggcgcgccgagcaggggagaggtcgcaaccgtggtcgaagaatgggtagaggtgattcacgtggctggaaggagttgcaaggtatgaagtatatgaatatgca

SEQ ID NO: 185261 - DNA, 558 bp, Zea Mays
gtgaatggtacatggactccggcgccaccgctcatatggcttccacctccggtatcctaacttattgccatcccccttcctcttccactccttcttcaattattgtcggcgatgggacctccttgcccgttgtctccacgggatccacacatatgggtccgatccaccttaataatgtgcttgtctcaccatctattatcaaaaatcttgtctctgttcgtcaattcacaattgataataattgctctgttgaatttgaccccgctggtttttccgtgaaggatctcaggacacggagcgtgatcgccaggtgcaatagctcaggcgacctctatccactctccatcccgttgtcctccaccactaccccccaagtcttcctcaccagcgcctcttcacagctttggcatcaccgtcttggtcacatcagccacgacgcccttcgtcatttaactagttcatcctctatttcatgtaataaaggctctactgcccccgatatctgtcacgcatgtcaacttggtcgtcatgttcgccttcctttttccatttcccagt

SEQ ID NO: 185262 - DNA, 562 bp, Zea Mays
ctttgagcaaggacgtatagctgcatacagactatatgaaatgataagccgttcaacatctactgtgaaccaggatggtagtaccttgtcttcagttcaaggcaacatcgagttccgcaatgtctacttcagctacttgtcccgccctgaaatccccatcttaagtggattctacctcactgtacctgctagaaaaactgttgctcttgttggcagaaatggttcaggaaaaagcagcataattcctctaatggaacgcttctatgacccaaccttaggtattatcgttggcatctattagtacctaatattttatttttttacatcaattatggcttatgtttacctgtgggactatacttatatgttacaggtgaagtgcttttggatggggagaacataaagaatttgaagctagagtggttaagaagccaaataggacttgtgactcaagaaccagctttgttgagcttgagcatcatggaaaatattgcatatggtagatgtgccacaactgaccaaattgaagaggcagctaaaacagctcacgtgcatgctttca

SEQ ID NO: 185263 - DNA, 411 bp, Zea Mays
aaatatcacagggttcaaaggcgataatagacaagggcataagggaaaagacgaaggcacagaagagccagtggtataagtacaacaaagaatggagttatgtcaaggcttacacgtggtgaagaagaggatattgccaagggtgagataagtaaaacaccgctctcaaattaggataagagattggagattttagataacatacataatgtaatcaccaaggtatggtcgagagatgggaaaggtaaaggcaacactaaacagaagcacaacaaaggatggagttgagaactcgcaagcgacaaagaggaggatacgaccaagggaaaaataggtaaaatttaactcacagattgagatggaaaagaggagacattaagggcaggtataagataaacatcaatgtaagat

SEQ ID NO: 185264 - DNA, 5734 bp, Zea Mays
tgtgcctcacacccaggagaaccagggtcaaccatttgtttcaaaacattttaatgttattgatcctttacgtacaaacaacaatcttggaagaagtgtcagtaaaggtaactataaagtaggaacatcctttaagattgaccttaccggtgaattgaacagagtaaatgttctttggtagtttggcttcacttatttccacacaattgattgcgtgttgttttttatttaatgatttctactgtcattctgtggtatttgtaatgctaggtgattatatcatgcactgtatatgtgataatcgattactagtttgctacctcaatgtttggttgttccagtttttttgcttttgtttggggattttttgtggcagtattcttttgctgtcacagtagctgtttgattgttagcataattatgaaactatattttgaaatttaatcaacttttgttatgacatattttctattagcagaagtatctggtcaaaactcaaaagtccacataattgcaactttcgagcttgtggcctggtggaatgtcgctattctccagatatacacatatacattttctagtaaaccaacctaatactggcaataagaatttcattcttttcttatgctgcaacatgtcctctgtagctatagtttactttgttctctggtctattctgttctatctagctatgacaagatgtcgggtacttaaaatagcaatctcatgttgacgcatgtatgttgggtgaaccctccgtgttcattttagcatggcctcatcttaggtttggtacggttttattttgctgttacaaactattgtaatttcattgctttcaagtatagaaattcggttcgtccgtggcggaaaaaatgtcgaagctatatgttctaccagtccttgttccaggttaatcattatgagtatatcatttgaatgttgtgtcagaggaggtattgctgcagaattaggtgcatatattcatgtgtaggggagtatatatatgatcgtagaggtgggcggctagggaaaccctatgcgccaatgagctagacccaacctcacgcacgagattggtcgggcccaatatatataaaccctaatacacatataggcaacaattagtattctaacacccccgcagtcaaaaatctagtcacaagagatgttgagctagatcgaagctccgaaaacatcgttgaggggaggccattcgtgaaaatattggcaaattgtgatgatgttgacaacaccctcctaacgcacaacgcacaaatccagcatgcccatcattgcttcattggcgagcatgacaacatgctaggctgcgtgccagcgtctgcctcctccggatgttggtttgtgcgacgacgaccgactttcccagtttccctaccctattctcggtgcggcaacagagactaagcgaccagcttgagttatgatctagtttactaattgtattatgtgtatgttcaattatatgctatgaaactacttctataggacatcgattcgctcgacgatgctatatggtgctgaatgttggtcgacaaaaaggcgacatgtccaacaactgagtgtagcagagatgcgcatgttacattggtttggtcggcacacaagaagggatagagtccgaaacgtagatattcaggatagccgatagggtcgtggtggcaccaattgaggagaaattgattcaacatcggttgagatggtttggacatgtctaaaggagacctcttgaggcgccggtgcgtagagggattttggagcgggtcgataatgtaaaaagaggtaggggtcgacctaaaataacttgggacaagggagttaagagagcttaaggagtggaatatctccaaggaattagctaaggataggtgctcttggagactagcaatcaatgtgcccgaaccatgatctttgccttttttcccttaactctaccgtctttcttttaccctttcggtttttttctatccttgtttcttgtgggtttcatctctagcctaccccaacttgctatgttgttgttgttgtatgaaactacttctatgtgatactataatcaactatacatgccaaaaggctactaagataggttttaaaccgatttttttgtgttctagtaaaatttgaatgcccattctctaaatccagggcacgtccctgctggatggaggtgcagaaggtggcgttgagatggagggtgtgggtctcatgattcctgagagagcgagctagaggtggcacgtcgtgccattgtgctctgctccctaatgatccaacacaactcaggggagatggtgctggagatctagcagatgatgatgatgtccatccgatcgcaacatgaatcagtgtttgacggagggttagacaagacgcggccgacgagggtgttccgtgtgagagcaagtagcacctgatcataccagcaggattaattgtcggaggaggatgatcgtcaccaacaatcagacgccgggaacatcggttgcatggctgtggagattggcgatggtggcaacctcgtaagttgcaagacgtcctgtggggacgccctagggtgggggccggtggtcgtggggtgttgtaggcccaaaccttatcgggtggcgacagcctttgcttgagggagcagcagcggcctttctcctattcgagaagggtggctgcctagacgtgagcgtgtgctttggcagcctttttttggcaacctgagctgtgacgagcatgtcgtcgatcttcttgtggaaggccacaacctcatcaacatgggcatggggcacgatcctcgacagttgacgaggtccttgccatgggtgcagaggtggggtgaaatgcgtgtgcgttgctgtggcgacacagcacaagggtggcagcgtccctagaggggtggttgccaggggaggagcagaaatgagattggacttggatgctaagttagaggcagttttgcgacagaaatagatgcatctattatgtgttcgggaacacatatatagtcgtagaggtgggtggctagggaaacactaggcaccaatgggctggtcccagcctcatgcaggagatgggccaggcccaatatgtataaatcataatacacatatctgcagcaattagtattctaacattgtgatccaatcttgttagtgccaacttgacaaaaatcttttggcctaaataatctctgctcagccagcaattttaagctccgtgcatccctccttggtagatttcattaactagaaatttcttgtctaattggtatgaggtccaaacaagccttaaacaactaggtgcacttacttcattttgggtttgttacaatttatgtcaatactgacagcatcttgtaaggatgtgacccatagtagattctccttgagcagttttgtgattgtcacacttacactagtagagaacagatctttgattcaacacattagtcatagctagagttgggcccatgactaatgtgagcattagttctgggtccaagtttcatgtgcattggacgacctttagtccggtgggctaaagggtctacattagtcttggttggtgttaccaacctggattaaagagctttgagccattagttccggttgataacatcaacctagactaaaagggtcattcacgaattagttcaaaaggaaagtatcccattcccatccaaagtcacatgtgctgtaagatcttgggtgagtcccatgaatcgcatgggtgggagtttgtgccaattttttttaaggccttgcagagacgcagaccctttagtccctgttcaggcatccgggactaacagaccatgccctttagtcccagatccctagtcctggttggaaatcaggactatagccagtttttgtactggtgttatattcactcttgcatgtatattggccttttgagtatgctaattaagggcagcatacttgattatttaatacttaaatatgacaattcttccttgtgctctttacatgcaaaagaactcttgtcattactttgtcttcttatccttttgttgctaactacgtccagtcttttaagaagatgcgttcagtgaaaagttgcggttttgcaggaaatttctttagaatacgcagtgcttttgcgtatggggcgaaaaggctcggaaagttacttgaatgtccaaaagaagctttaattcctgaattaaaccagttcttcacaaatacatggataagacatgggagtggaagtcgtcctgatgtgcctatcccaagtctggttgatgtgcggcctatgaaggttgtttcttctgtagtgtcaagcagccagagaagtttagcggcattcaagaaaaaagttgaaaatcctaaacttcatgttaatcaggataatcttcgtccgaatcaagataatctcactggagttggtgacatacattaccgtaatctaccaagaacagttaatccttcagtttctcatgttcagcaccaaaaaagttatacaccacaaggcaatgctaaggtctctgaacagcttgaaagaaataactcagacggattgatgcaaagtgcaagggataagagagtgccaaatggtctctttgtcaatgacagaaatgggcagaacaggtccagatttgcaaggacccgatcaagtcctgaactcacagactcgtctactgaaggatttcgtggtaggcggactaatgcagttggtatggaaaaatcttttggtgttgattacagcagaagaaacatcttgattccagaagtgtctagcaaccacagcactaagtcttcacaagatgaatcagtgtcttccatgaatggttcatctcaccctagtgcattggcagcttctgactcaaatagcgtttcaagcagctttcgtgatgataatggttttgtgatgaatgaagaactcccttctgtttctgaatcatcggatatgcaccacgatgaacaagttctggctaatttaatggaatccatgaagttgcatggattcaacggacagattcaattgccaatgcaaataccttctcatttgtctgtagcgcatccccctttactggctccaacaacttattcacaaaagcatttggctggggttccaccagctaacttaattgggacaccatggttgcccaatatgcagttcctgcatggatttgttccacctatggcccattacatacacaatccaaattttgcaccaaacatcgaggatggtactgagactgaaaaacctaatacatcagatgtgaatcatgatgctggcaaaacttggcaagagtatggtgttgggttttctagacattttgatcctgaagcaagagatcctcacttctatggtattgatggcaaggagcattcctctttgcctaatggtgtaccaggtgctcccttggaaaggcagatgaaattcacagttgagaataatgttgtaggtgatgaaacttatactggcatgttccaaattcatacaggtagagaacctgctgtagattattctaagaggagtggttatgggaatgttccgtcttcacatgccagttcatccaaaggcaaaactctggattcgagttcatgggatgaaatgactgtaaatacaacaataccaccaagagaaaattggggaaaaagacctgcctttgtggcacctgccacgactacacatggcaatactgggtggcagatgggaaatatcactgagcatctcgcagctgaagttaatgatg

SEQ ID NO: 185265 - DNA, 502 bp, Zea Mays
gtctcgttcacgtcgacctcgccaacaacagctacacccgctggcgcgatgagttcctcctcatcgttggcaaatactccctaaacagccacatcctcgacgacactccctcgcctcacttccccgactgggcatgcatggactgcgttgtcaagtcctagatctccagttccatctccccagaccttgctgaaatggccatggaacaaggcgccactgccgcaacaattggctgactctcgagaaccagtttctcgggaatcaggagactcacgccctccacctcgacacacaattctttcacttcatcctaggtgatctacctgtcgctgattactgtcgccgcttcaaaaccatggcagatgccctcggtgatcatggcgaaccagtctccgaccggatgttggtcctcaacgttctgcgtggcctcagcaaccgtttcttcaacatcggctgtcatcttcgcctcggtcgcccctttccgacgttccacgacgtctgg

SEQ ID NO: 185266 - DNA, 604 bp, Zea Mays
tttgtcttagtactcacatgggagacttttcatcttattttatggtataattggagtttctccatcttaattcagcttctctatgagttatgtcttgatcctttaacttgcggacctgttatggatctcttgagtacaaagaagtaccagttcttttctaaggtttaatttcttctgtgttcttttgcatcattataactacatttatttggaactcatattttccttgcccactaatgtcagcatgttggaaccattggagtgacaccgcttccaaaaaggaacagtaaccaatctcttcgaatcagcatgctccatgaggtatacatcgagttttcttctttcgtcaaagtcctaatcgcttaggatacatcgaaattctgctattataaattgcatttgtacagcattttttgatgcatggctgtttttaggctctattgcttatgatggtctcctgtcatatttaactatgttggttgttgggtaattttcattctgtgtaaacattgatttgtttattttcagagggcatggttgctaaagatgttagcactggcattacatatatccgatatatcatcatctgtatacagggaagcct

SEQ ID NO: 185267 - DNA, 412 bp, Zea Mays
ggactccgtgttcacctcggcgttctggaaggagttaatgcgcctcacaggcaccaagctgcacatgacgtccgccttccacccgcagtccgatggccagatggaggcggccaacaaagtcatcgtcatgtacctccggtgcttcactggggaccggccccgtcagtggctacgttggctaccgtgggcggagtacgtctacaacacggcataccaatgatcactcagggacactcctttcaaggtggtttacggcagggatcctccatccgctcttatgagcctggcgatacccgggtggcggcggtggccaagacaatggctgaacgcgaggagctcctagcggatgttcactaccgcctggaacaagcccaggccgtccagaagaagttctacgaccgcctgcaccgac

SEQ ID NO: 185268 - DNA, 668 bp, Zea Mays
cgcaaaacggtctggacacaaggcctccttccatcaaacacacaagcattacgatgcttccaaatctcctaggccaccaatgtgattagggagttaagacctttccacaactcttttggaacaacctttctaactctgcaccaccatctaacgaagctgccgcagtcaggctggggtgcaaggacaagcagccccaacctttggaagattgaggcccaaatctccatagataatacacagctgataagaatgtgttggatggtctccacggcttggtcgcagagagggcaagcactaggatgtggcagccctctcttagctaacctgtcagcagtccaatatcggttcttcacagccaaccagatgaagagcttgcattttgagggcacccatgtcttccaaatgtatctccaagggccaaatttaattgtcccagtgaagaaggcctcatatgctgatttactagagtaaatcccatgattggataggcgccaagagagttgatcaggggtgccaagttggagcttcacgttaccaaggagattccatagctgtaggtattccactaacacttgcacagacaatgcacccctgatatcatggacccaattccgatcctgtaacgcttgtgccactgttctttgcttcctggccttagaccatctcca

SEQ ID NO: 185269 - DNA, 390 bp, Zea Mays
gatggtcataggagggagtggtgccaaaaagagcaaagcggggtgtgggggcgctaatcgtcgtagtagggagttgattaaggaggtgagtagcagtgtgaatgctcttagcccagtaacaagtaggaacaaatgcctaaaagagcaaagagcgcaatatgttgtcgctagtgcgaatcatgcactcagtcttgtccttctaagaagtataggggtatgacatctggagctagacatcatgaggggaggaaaagaactggaaggagttatcaaactcacagtccttgtcatactagacggtcttaatagtacaaccgaactgagtggaaacccaagcgaataagtgcagaagagataaaagtatcagacttggaacgcaaggaaaaagtc

SEQ ID NO: 185270 - DNA, 276 bp, Zea Mays
cttaagaccaggtaatagagtgtaatatataggaagttggggatcaacgaaggttaattctgtaattattgggttatgcatgcatcatgattaaaattatacttataaatcttcccctcttatggagatatggcacatacaaggaaaatcgcgcgcaagtccactggaccttttggcgtgcctcgtcatcagttagcccccagacatgaaggaagcagtagcagcaacaactatccaattggagacttggaagccaaagtggaacaacttcggacg

SEQ ID NO: 185271 - DNA, 416 bp, Zea Mays
ttgcccacggcgagctggcggccggaggtgaagaagaagcctggcgcgcgtggttacgtgtcctagggcgtggcagtaactccggtgatcaccggacatgcaccgcatgattcaccgcgacgagagctagcgctaaggcacgtggtgcgcgacggtgacagcataacggcggtgagagttatccgagcgaccgacggctgggaggaaagtacggcatgcttagccgtgaccgagctcgagtggaccagacgctgggatatttactggtttgtgcttatccaaggccacggcgcacgaatcgcagcacgcaatcgatcaacggcgacggccaccggcggcgagatcttttggcgctggcggtctgatcttcaacagagcactgtaccatggtgaacaccccattcagagcgactgac

SEQ ID NO: 185272 - DNA, 724 bp, Zea Mays
gcccgctgccggaggctgcgccgggtgcgcctctccagcaacaggatcgccggggacgtgcccgacgccgtctggggcctgccgcacatgtcgcttctcgagctcaacgacaaccagctcacgggagagatctccccggcaatcgccggcgccgccaacctgaccaaactagtgctgtccaacaaccggctgaccgggagcatcccgtcggagatcgggtcggtgtccaacctttacgagctgtcggccgacggcaacatgctgtctggcccgctgccgggctctcttggcggcttagctgagctgggccgccttgtgttgcggaacaattcgctgtctgggcagttgctccaggggatccaaatccagtcgtggaagaagctgagcgagctcagcctcgcggacaatggcttcaccggatccataccgccggagctcggtgacctgccggtgctcaactaccttgacctctccggcaacgagcttagcggcgaggtgccgatgcagctggagaacctgaagctgaaccagttcaatgtgtccaacaaccagctgcgtggcccgctgccgccgcagtatgccacggagacgtaccgcagcagcttcttgggcaaccctgggctttgtggagagatcgccggtctatgtgccgactcggaggggggaaggctgtcaagaaggtaccgtggctcaggctttgcctggatgatgcgctccatcttca

SEQ ID NO: 185273 - DNA, 917 bp, Zea Mays
agcaagctgagcttgtgcatcctcagcctgtttgtatgatccagtggagatcctgttcgttatacccccatgatctgtctgagatcaggagagagatcctcatgacttgctgctttgatgggactgtccggctatggagtaaggatgaggtgtctaggtcgaagaagcagcgtggtttgctaatatcattcagtgtcattgcagtaatagaggtgaacaacactctgaatggagtcctcggagttgatattattgtgagatggtccatggaatctggcagcgttgtgtcaagggacgaacaaggtagattcaagttgttttcaggtgatttgagggagagccaggttggtaaatgtgagtggcttgtaagtcttggccccgggccttgcattagcttttgggctatccattgtttggatgatgtatttccgccaaggtacccacggattactttatggaaacagagcaaacttcagggctggggggattcctatgttaaatcaggtcctctaaaatctatggaacagtcaatttttgttgaggctgtcatctcaagaaggctatgctctggtccacctgcaacatgttttttgcttcatttgctggtggatgattcgtttgcttggtcaaccgtatccaccaaactgttagctgattctgggaaccatgctttaagtgattctgctaaaaatatcttgtgttgtttgactaaacctgtcaaacaagatggacataagggtagcatcagacaagtgtctgtccatccatatagctgcgaaatagagttagctgtctccatggattcaaacagaatgatatttttctggtctctgtcaactttctcaactctcataccgacaatgcatgcacctatgtatcctctatggaagctgttgtgcaaatttgatttgcgtaac

SEQ ID NO: 185274 - DNA, 562 bp, Zea Mays
ggtacgatcgtcccggctggtgttagcgaccaggcgggactggcaacgattctccagcaggcactcactgctctgcaaggtatgaatgctgagatggctgttggggagcccagggccgtcgatcacaagcaggtgagtgcaaatgctggaccactccttccttcagcgtcggcaaagggagagaagaagaatactgtgaacaaggagaaggaaggtaccaaggaggagggcaagctgaatagcaaggggtactgccatagatgttacgggaaaggccacgtgatgagcgagtgtacagcggagttattctgcgaagtatgtggtactgacacccatatcaagctgaaatgtccggtgttcaacgctcctaaggtgcatgctatcccagctggttttgccataaaaaatggcggtttctttcacatcccctccaacaagaagctcactaagggtagcaatgagaacaggttggcaataatacaagtggtggaggggtgtattagcctggacaatgtgattcgagagctggaaaggctgctacccggacttggtccatggtacg

SEQ ID NO: 185275 - DNA, 330 bp, Zea Mays
gtgaacagatgggagcagtaaaattgtgcggtaaatgaggaaatgttacattttacatgtatttccagcgacgcggaaacagttttacatcgcgagatctttccatttcttggattcgtttttgtctatgcttggcgatggcagctggggacgataggaaatagttacattccgttatcagtgggggacgccttttgtgttggatgcgggaatgccgtgtcatttcctttcttttggacatttttgttagtttcagtggaccgtggaacctatgaatagtaggcattggcaacaagcttttggtaagaatgtgccaaagtttggtctttt

SEQ ID NO: 185276 - DNA, 496 bp, Zea Mays
gtatcagtggattcgatcgggaaggcactgcaacgacggatccagccatgaagacgacgatctagccaaggagacgatggatccaaccgggaaggccacaacaacggtggatccggctgggaaggccgcgacagcgatggatccaacgttggcggcgatgaaaaagggggcatcgagatgggtccagatgtgcaggggcctacgtcgggcctggtagggggttttgacgccggtgatcggagaagattaaaggagaggcgcggggtgctgttgtagggttaggaggatatgtccggcggtgccgctgcagaggcgacaccggctgaagtagaggccgccacgcgtgtcggaagaagggctggcactgggaggacgacaacgacaccggaggagaggggttggccacacgcgcgccgccggaggtgaagggagccgcggtcgggggcgtttgctacagtggcggcgaggccacccacgttttctgtggtggcgacgg

SEQ ID NO: 185277 - DNA, 293 bp, Zea Mays
ctgaggagcaagtagaggaccacaatatccatccaacgtcgggaggggatatcagggaacacagtgtgggtgagggtatggtcgtcgagcgtgtagcgttacagggtgaggaggacgaggttgcgccagtgggtgcaggaggaggaagctaggtcaaggagaacagaaaccatggactagatgttctagacaccagccgcatatgcatggaggttggcgatgatggcagtctcgtatgccgggggagtctcaaccatcggtgaagttggaggtgaatcaatatatgaaggacc

SEQ ID NO: 185278 - DNA, 798 bp, Zea Mays
agcaataataacgtcttctggtcagttatacacatatggggatggaacatttggtgttcttggtcatggagatacacaaggaactacccggcctaaagaagtagagtctttgaaaggctcaagagtgaaatgtgtggcatgtgggccatggcacacagctgccattgtggaagtgatcagtgatttcaagagcaattcaccaagaagcaagctgttcacatggggcgatgcagatcgggggaagctgggtcatgctgacaaaaagatgaagcttataccaacatgtgttgattcactcacagactatgattttattcaggtgtcctgcgggacggcactcactgttgctctctctgttactggtgtggtctttactagtggcagttcgatgcatgggcaattagggaacccccatgcagatggtaaaactgtttctgctgttgaaggactacttaagagcgagtttgtcagacatatatcatcaggttcttcccatgtagcagtggtgactacaaatgggaaagtgtttacatggggtaaaggcaaggaagggcagcttggtttaggtgacttccttaataggagcactccaactttagtagatgcattggaaggtaggcatgtggaaagcctatcttgtggttacaactacactgcagcagtatgtctgcataaagtaatctcaaggaaggacctctctgtatgtagtggttgcaagatggcttttggtttcactagaaagaagcacaactgttaccattgtggatccatgttctgtaattcctgtagtagtaacaa

SEQ ID NO: 185279 - DNA, 547 bp, Zea Mays
aatccattcctgatataatgagcattgttgacggtgaggtttacagaagggatcctggtagagagctggctaaacctgtaggaagaagagcaggagataagcctggtcctagagtgaaaaagatcttccgaaaggaagaaggaaaagaatcatctgccttggttcaaaagctacagaaagagattaaggaagtagttagagatacaggcacaaatatacttgagaaggatgaatcttttgatgaaaaactgttgactgcgttccgggcagctatagggaaatcagtggatggaccagccaaaagtactaacaccaatcaattaataagaacaaggaggtcattgcttcagaagggcaagaaacgtgagaatttgaccaaaaagttgtatggaacatctacaggaagaagaagaagcgattggcatcgtgattgggaagttgaattctggaaataccgttgctccccaggaataaatcctgaaaagattgagacattgcaatcagtacttcagctactaaagaaatcctctgaaatggacaaggaaag

SEQ ID NO: 185280 - DNA, 393 bp, Zea Mays
tagaataaaggacgccaatagaagccgcattatgagaagggtcaggcaccgaaggaactggataatccaagctaagggcaacacccattgggatctcaactccagatgcacccattgggccttcagcacttggaacatccattggatcttcagtgccatggccactgacctctaaggtgcctaggctggctggaccaatgagcatataagaactcgtcaccgcgacatcatcagcctggggcattggtgaccccacatgaacatccatcgaagcagtagagggggagccgaccgaaggaccctcaggagctagagcaccccgagggttgaagagacctagcagactggcaggcttacctctggctcggccagtaaggcagcatagggcacatc

SEQ ID NO: 185281 - DNA, 404 bp, Zea Mays
ctgaattagtaacacaaacaaattacttcacattatgatggcttgatttgatcttatcctctttgaacaaacgcaagttgcagtacaattcattacttggtttgaacacattatccccaacaattatatggacattcaaattatgcaaatgctatctgaatcattacatagagaacttgataggacaatgggtccacattagttattcggttcctttatttagaccactttattttggcctcatttgtttcagcttgaatccagattctgcccgtcagaagccgctgcggactaccaaacccctagcttttcagcctgctttcgtgacatcgctttggcaaaaatcgtccaaatttaatgtgaacacagaatcgaccgagtcatcgcaataggaggaatccatc

SEQ ID NO: 185282 - DNA, 345 bp, Zea Mays
aggtaaattatttgcggaggtttatttctaacctggctgggaagattgatgccttcacccctatccttcggcttaagaatgatgccgaattcacttggggggcagaacaacaggaagcatttaatctcattagaaaatatttgtcttcgactcccgtattaaaagcacctcaagtaggagtaccattcatattatacattgcagctgaagacaaggttattagggctgttttgacacaagagactggaggaaatgagcatgtggtgacctatctaagtcggaggttggtggatgctgaaacaaggtacactttcattgagaaattatgcttatgcttgttttatg

SEQ ID NO: 185283 - DNA, 629 bp, Zea Mays
ctctggatcaccattgagaatgtgttcttctcccctcggacctagcccttcacgactcgggccttacccgttacaagggaggatctcgaaacagggtgacaaagttgaaacataatccatgtttcatgaatgcgattagaaatcggatcccgcctcgggtgctacttataattaatccttcaatagtagtgcttattctagccgatcctagtttggagcatctcctgagtttggatgaggtccggacctctgagtattcattccgaagtactcggtaagctgttctagggtggtggggtgtgttggcttagggtgcaggaccaggctaagcggcgtatgggtcattgtagagaccccaatgctgaggtctctatggctgggattgtccgaccccactggtcagcggggacacatatctggcgtcgtgcttgatagacccttcgataccgcttccacggtctagacgtggctcaataatgtcccatcgtgccgacgtggcttgatagtaccgggttggctcttcctttcagcaggttgtcgtcttgctgggttgctcggcagtctcgcctcgctggattgctcggcggacaggttggtcggcagtcccgccttgctgggttgctcggtag

SEQ ID NO: 185284 - DNA, 279 bp, Zea Mays
gtggccgtgagacgcgggtacggctcgatgggtaggcctgcgcgccgtgcggcctcttccccaatgaagttgtgcgtggatcccgtgtcgacgagtgcgatgaagtccgctgcgcccacccgtacacacagctggatggtgctgctagccggtgcaccgacgaccgcgtgtaaagagaacacgggggcctcgtccgtcgtttcctcctcagcaaactccacgccaccgatataaaatatccggcggcaaacccggttgtggcctcgtgtataaggctga

SEQ ID NO: 185285 - DNA, 447 bp, Zea Mays
gatgacacaccgaatctaaagttcagcccactgaaatttgatgagtttgattgaaaagcagcagcctcaacaaaatcatggggagttctgtaggtattctcattacagttttgcccaatattagtgaaagaatgttgtgatgcattgctttgatctccttcaaaactagaaacgctgctaccaaaattgctctcagatgcatctagtttcggtcctctaccttcatctccaaacatcagtaggtctgcatcagtaaccaagtgctcggctgcagaaactacatcatcctcagcacaactggtgttcccgttcgagataacagtatcacctatgtgaacgggctgatcagaagccacatatgcctctgttggcacatgttcagattctgcaggatatggcgaacaatccattggtgaacagtcacctgctaaatctgatgcttctcca

SEQ ID NO: 185286 - DNA, 399 bp, Zea Mays
atttgcacttacccgcgttacaacatcttgaagagtatgtattagcgtttgaagaaggctaagtcctcagatgcaaacgtgtaaatgagatctattatatcataatctaaccatatgtaacatttagtatttaaatctttccaccgtcagctcatatagttttataaacaaacctaacaaatcatgattgcatctatagttggatcatgatctaatggatcagaaaattcgcttgcacctaaggactacttgcacaccagtcgtttggattgctaagatacacttaagaattctggtttaaaacactaccttatggtgtgtatggttgcgggagagtcgggatagtcatatctcccggtgtcctctctcggtcctccaattttaagggacatcactgag

SEQ ID NO: 185287 - DNA, 318 bp, Zea Mays
ttttatctagtgaaatgaacggtggatgttactaccatgatacatgagaggctctggtatcttttactggcttttatatatcttgccaagcaaaggtcatcctgagaggctaaggtatacgtataaaactatactgttgcaattgttctttagtgactccagagacctagccatccagatctaaatggctttctgttcatagctaaaatgcatagcaccattattcattttcaacactatcattttatttctccgagctattcatgtactgcttggatgccagtcttcttgactctaaggttatctccatcagtttac

SEQ ID NO: 185288 - DNA, 439 bp, Zea Mays
attttaaatatgatgccgtagctcgtaaatgtttttactactttgcaccttttcagttgctaacttatgattccggcaggtatcagaatttggcaacatgtgtgcttcgtcgtttactaagtctcccacatacaagcaaaggaatgctcacccgatgatgccaccaatgcagtcgtagaactcctcgacgttgtcgaggaacttgagcagtctaggtagcacctccatttcctcccttctctccttggcagccaccactccctccgaggtccacttcccgaccaaaccggccaggctatacagcgcatcccgcagggcactcccaccactgaccccgttgcggtggtggtgctcgtgatggccgccgtcgccgccgtaccaatcgagctcatggccgagcacgtgctcctgtcctgccgcgacgaggcatttcagcagg

SEQ ID NO: 185289 - DNA, 499 bp, Zea Mays
acatgttctgcctagcgacatgacacgtgtaatgacagttaaaattctaaaaacaaatatgtaatacattttttatttatttgagatttctacaatcactgtttttataggcactattaatgcttaaaattctatttcatcttaaatcaccatgtacctaaaacttcttttcatggagttcttggttttaatatggtatgcaggagctatggtcattgttggagttcatgatgcctgatatatttgctactggggatgttgatctgaagaagctgctgaatgcagaagatcgcgaactaatttcacagataaagtccattttagggccatttattcttagacgtttgaagtcagatgtaatgcagcagcttgttcctaaaatccaacatgtgcgtgactctttttacacactggcaattagttgtgtctctattttttcagcataaattcatctcgcttgcaggttaagtttgttgtcatgggcacagagcagtctgaa

SEQ ID NO: 185290 - DNA, 619 bp, Zea Mays
ttcgggcatatggaatacttgaaagttttgtactttatgaatttatctaatatattatctcttctaaactattttcccacagagaagaatcaacaagcccaaatttttggtcagggatttgtctacataaccttgctagaatatccagggaaacaacaacaacgcgacgagttctggaagctatatttcgttattttgataataacaatctatggtcaccttctaaaggatttgcgctgtgtgtcctgctggatatgcagattgtgatggagaaatctggtattcgttgtttccccaatcttcttatttgattagtatacattttgcacttgtctgtgatatttatataatctatacatgcattcttgtcttcaaccattgctgattctgacggatatttacatccttgtatgccaggacagaatgctcatatattgttgtctatgttagtcaagcatcttgaacacaagaatgtattgaaacaaccagatatgaatctagatatcattgaagttacttcacgccttgctgaacactccaaagctcagtcttctatagcactaatgtcttcaataagtgatatggtcaggcatatgggtaaaagcatgcaatccttggc

SEQ ID NO: 185291 - DNA, 623 bp, Zea Mays
gctatgcttgccggtatctcgccgacgagattgttgtcgtgcaaaatgaggagccttagcttcgtcaagcttccgaagcttcctgggatggtcccagtcagcatgttctcggacaggtcaacctctaccaaacctgccgctcctatcgtcccgttgttgatgacgatgtcgccggagaggttgttggtgtacaggtacagattcgtcagcttctggaggttccatatcccggacggtatgtttccggtgagtccattcatggacaggtcgagccactccatctccgccagctccgcgacatagctcgggatctcgccggtgaggttgcacttggccagccagacggtcgttagcttggtcaagttcttgaacgactccggcagcgtgccggcactgaagggagtcctctcgagcttgagcgtccgaaggttaaccagctggccgagctccggcgggatggtgccggtgagctggcttccgccgagagcgaggtacgtgaggttggtgagcctggacaccgccgccggtatcgcgccggtgaagttgttgtggtccagggcgaggtaggtcaggttggcgccgagccggtcgatgtcggccgggaggtccccggcgagctggtt

SEQ ID NO: 185292 - DNA, 1119 bp, Zea Mays
accggaaagtttccaagaagagccttaaggcagcatccaaattcatatccttgaagtcaaaggttctagcaaattcatgaaggacctggatagagaactcatcatgattacccaggtagtccccaagaagattcttgtccaatccaggtgtgtacctgaagaacagagcaacattgtgtggatcaagtttttcaggcaaaagatgaacagcttgtaggtactcaaaacccttctttttgtccctattaaaatgttcaacgccaatcattagctttgtcttgatgcttttttgctggtgaacaaatttaacccactggtcaggatcattactgctctcacatttcaactgccagaaaggaaaatattcacttatttctggaactgtttgatcatgatgttgaggtgcattatcagtccgctgtgccattgcctgaatgacagcaaccaaaccatccaaagcaagcacatttaaagctgacaaaggactattcacaggaaatgcgctcttagacagaaggttagctaactcttcaaaaatatttgagcactgtagatcacagtccatatttgcatacatctcagccataaactctttctgccagcaaaaatcaattagagcctctagggcaacttcttgctgctgataacttgctccatatctactctgtgctaatcttaggataacacatgagaagaaagcctctatttgcagcttaagttcatggcgcagatggtaaaagagagtaaaaacaatgctgcacacagtcgacaggatcagagggctcattgacaagccaaaatgcattagattgcggaacaattcatcctgtacaaatgctaaaagtttttgatgtctgtgtatagacgaagccgaaaactcaatagccgaattaatcaaccccagagcaaagagcggcacatcctcatcaaagtcaattggactcatccttgggttcaactcaatgtcttctgctatgttcaagagggagcacaagaattgcaatatctctaccatacaaggaaccccaaagggctccatcaagtctttgtcttgcataacaccagaaccgtctcccacttcatcgccagagctgttcaaacatacgtagtcactcttcc

SEQ ID NO: 185293 - DNA, 413 bp, Zea Mays
gacagctaggaggagcgagtgcaggaagcaaggtagcgatagatgacggtgacggcaagcgacacccattgtcgtgttgcaacggcgcgatgggactctaatgagtcagcgagggacaggtgacgccacggtcccaccaacaacttgcccatctactggtgcggactaggagtcaaaatatcaacattgtctataggatcctgacgagacgacgagctgatgagtgatgagaaggcaaggtgcgctgcagcaggcgggttaggtcaccgacttactggtcagtcgatgatcgaagaagcgagtgagccacaactgggcttgcgctagggaagagaatcaaatggctcaggtgaagagtggactgagcagtgaagcgtcgacagaaaaatagatcaaaacctagtttttattag

SEQ ID NO: 185294 - DNA, 1118 bp, Zea Mays
ggaaaattctctcaagcccttgtactgagagtttcattcatgtgcttgggtgtaagagattgcaatttcggaatgtcactatagtggtaatattcggcgttttagttttcattttttctcgctttttaataaccacacctatatggctttttggtcttttgacaatgcaataccttgctgcagaatggtgaatatttggattcctgtatctctctcggtgatgatagctgttattcagcatcaaggaatgaccatgtctacttagtaagagaagatgatgggtccttgtcaacccccagcaaggaaattagaggagacagtgttaaaaatgggagtgctgatatatcaaccgaatttattatggaactacaggtattgctttaaacttccagttgttgttgagacatttaattcataactgtgtcaaacacaaaattttcatcttctactgcatcatgataccatattctgtgtaagctaccaatgtgattgattcaaataaaataagctcatgaaagctattaaccttggtgattcatgatagttcaggaatctctccaacttttcattttgaatgtaattgttgaaatatcagcaggtccccccccccctcatcatatgcttaagattttacatggtttggttgactcacttagtgaattcaagtagcctggtgccctggtgcaatattgatagaaaagattgcagcccactctacaacacatcttaggtgtgtggaagctgagacatggcaggggatgtttaagagtctgttgcccaagtgcccaacttttctcataaacttaaacttttggatcaattggccggtgtagtcaaactaacagtagcattcctatgtctgcaatgttttccaaaacttcaccagctgggttcactggtaactagtgcaggttttatccagcaggttacaacttacaaaactgtgaagtcactcccatcatgtaacttttgaaattgctgcacatatgattgtcatttcataattctatggttgaactgtattgtatgattgttttaggctattggaccagagcttactttctatagtacatcaaggaatgctggtgaaaacttagcactgtcaacaaaggttattc

SEQ ID NO: 185295 - DNA, 362 bp, Zea Mays
aagcactgttacttcttacttatttgactcgggatgcagaggttaaacctgtctaatactagatgttgatttgttatgtcattggcatttttttgaacactctattttgtaattaaattgactttaattctcttcattccaggaaattcaaaaaattgttgtatttgagggtgtgtttgagaagatatttagcattatcagagaggagggctattctgacggaggtgtagttgttcaggtgaaaaattatttattggtgtcctatatctgaaattggctgtgaagggcctgtttgggaacatagtattttcttagttccaagacaataccgtggtatttgagcataccatggtattttagac

SEQ ID NO: 185296 - DNA, 379 bp, Zea Mays
ccatgatcccctcccctagcattaatttgtttgcagaaagatgagatgtgcgcgctgtactagttgggtacacatggaagcgcgcgccactgtgactgtgagtctcaggacggacgatgatcactctccattaattcaatagggaccatggtttgctttgtcttgtctctaacgaatgcatccacggaaggacggaccaaccacttgcattcgacagcatgcgcatgcgatctcgtcgggtactgaagtagcgtccacgcctcctgcccccgcaatcacttccacctccctgctctgctttgctgtttgcatcgcatcgcgtcgcctttgctgaatcccagcgacggacgggccgccacgggcactgtacggtgccgac

SEQ ID NO: 185297 - DNA, 733 bp, Zea Mays
tcagcaacagtggccctctggacatgttcagggatttctctcagataaaataaacacgtcgacatatcaatctgcccagagatcagatcctaagctgccttcatctaagaaaaaggcactggccttctcatccagtttctcacgaagagctcggtctccgcatccaagcaacatccttaaaagtcctgtacctattgcggctgatactggagatgcagaaatgttgaataaagcaccactgtcgctgccacttaagcggaactttgtggatgtgaaggatattagttttgcatcagcatcgaagcgccttgcaataactgatcaaatataccaatcctctgcattccaaactcctgctcctactcgcaaaggtctgtcggtatcagttgattctcctacttcatctcattgcggttggacaaacttcaacaatgcttttactgaaaacttggacaattctcaaggcacaccaggagcattgaccaccacagcacttcctggtgtaaatgaccaacaatcaggaaatttggagcgtatgacacttgactcactggttgtacaatacctgaaacatcaacaccgccaatgtcctgccccagttacaactttgccaccactttctcttttgcaccctcatgtttgccctgagcctagtcgcagccttagtgcaccggcaaacatagctgctcgagtgggaagccgtgagataagtaggcaatttagtgggatccag

SEQ ID NO: 185298 - DNA, 508 bp, Zea Mays
ctcttgtccaggattgacatcttcttccttgatttttttcgatatttcctccccgcggattggtctattcaaagggagaaaattcgtcgggttgatgtcagaaaaggggaagaggagacagacgacgggtggagagcgagagaagtggggaaggcgagcagagcaacaaatcaagtctgtttcatttcagcaatcagcaccaacccccgtccaatcgctgcggctggatgattgggcagtgtcagcctcgcgttcgttcatttaatgtttctggtagcggtcaatgcgggatggttgggtggcggattggtattttgggactccatgtactacttcctgtcttcctccaccttcccggagaagcagcagaggaagggagggtgaaagaagaaatggtcgcaaagaggtggagggaaggaaagggtcaatgctgctcggtgtccctcaacctcaacacgggcgcccctactttacttgcttgttcccggtgtccctatcactctcagag

SEQ ID NO: 185299 - DNA, 408 bp, Zea Mays
caagaagcttgccatgcctatatatgaaggttgtcacttggcgggcatgggaaatgcatttcttgaactctccaattttcccaatgtcctcaaacatgaggtccaaacagtgagcagcacatggagtccaaaacaagtgagggatctttctttctaaaagtcttctagcagccttgaagttagccccattatctgtaacaatctgcactaccttgtctctaccaatggcatcaattcttttctcacgtagtgcagctaacatctgagcatctgctgtctcatttgaggcattgacagactccaagaaaaatatgccagctggactattgacaaggaaattgatcaagtgccgacccctcctatctgtccaaccatcagacataagtgtgcaaccaaattcagtccaag

SEQ ID NO: 185300 - DNA, 700 bp, Zea Mays
ctctatgattcaattgcttggaaagaaagaaaaaacactccatggtccaaatcccccaaccccaattcaagaaaggccatgcatacaccgatacacgtgcttgtcattccacatactatctgtgttgctttcagaatgtaaaggtcagctaagagttgcgcttaattccctcaagcggtacatatgccctgtaccatgttttcaggccttcactatcaaggtgaggcctaaacaatcgttctcttacaaagatacacatagtagccacatttgacctaagttcattctgtatttcggatacacttaagtgctttgtcatatgatattttacatgctgatgtttccatgcacgcatgcacccatcaccatcagcttttatttataactattgcctgtactctcattggtgaaaagttctctacatttgcatattcctcaaatttaagcggatagaatattggttatgtatttagataatgttttttttggtttaaaacagagggacctcctcacaagaaaattgtccagaacttcacggagagcagtagttccaaaaataaaaaacacagatggtcatcagaggaaagttgtttagactataatatttatcattcacattgtattttatacttattcaaaatagaaacaaattaattttccttccaggaagatgaggcactaaagcaaatggtaaaaaaat

SEQ ID NO: 185301 - DNA, 333 bp, Zea Mays
gaggtgggctggaggtcggccatggggagaagcagcgccgtagaggaggcgcgctggggtggagggcaggaatcaggacctaggcggctgataccatgtgagagagttggaagcgtgtgtttgtatattgatgatgatagacagtacatgtacaagtatatataggggaggaaggtgagaggtaaaaggaagccatctacacctaaggaaagatctagaatacaatcagatcctcaatcatagtgattgagatcctcccctaatcctctctatctatatcagagacaacacttccatatagggcggccggcatatctgccaggcgtcagccag

SEQ ID NO: 185302 - DNA, 515 bp, Zea Mays
gggtccttcagcacgatgactctcgctctgcccacctcggtctcggactaggtggctgactccgatgcttcctaccacaccacccctgacgccggtactttatctgccactcatcctcctcatccctctctcccttcatcgtcatcggatgagtcggtcaaccacgtcacctcaataggtgatacggtccttcccggctcctttcgcctcaacaacgttcttgttgcccccaacatcattcagactcctttctattcgtcaatttactactgataactcttgttctatggagtttgatctcttttgcttgtatgtgaaggatcttgctaccaggacacttcccgcgcgttgtgacaactccgggccgctctacacccttcgcctgcctgcctgcctcctcttcatcgacctccaccccgcatgctttgaccgctgctgcctccatcacttggcaccgccaccttagccatctcgggcgtgatgtgatgtcgaagttgtctagcagttctatcatc

SEQ ID NO: 185303 - DNA, 383 bp, Zea Mays
ggcttttgctttaagatagtggcggaactctagttcctcccctgagagttgtctgtcttcttgtgcccgctcaagatgtagcagagttacttgcaccattgccaactgcagcgggatgttacctatattttgcctccgccaaatcttaagtgccttagtcgtccgacgcgttttgacatggaaacgtagaatggcgtcgtctgaatgaactggttggtcccaagtgcttcgcactatttccttgaagccgggcatggaggtccaatatgattcaaaacgaaaacccttgtagaaatccaaggtaacatcccccttaggagcaaaggggcatgatctgaagtcatggacgccaaagcctggagatcggaattggggaaaaggtc

SEQ ID NO: 185304 - DNA, 1304 bp, Zea Mays
gatggaggacatcgactgcaaccatgacattcggattcatgaagatttgggccatgtatgccgtgtgtgtggtatgattgtgagaagagctgattcaataattgattaccagtggaaaaaggtttgtaatttgtttaagatatatatgaggcttttccagctctgggtcatttcgcaataaagttttttatgcacgcaccgagttggggtgttttttttggcaaaatgcctggtagtttttttattcttcagttctacttcatgcaccttatagtttatgttttggacatctgtgctgttacatgatatgcactagttccatactcattcacatccacatactccttacagttttaacctttgaacactttgttagtttgttagcttatcttcttattctacttgatatgcacaagttctatactctgccttggtaatttcgttatcctcaccttgtatgcacatgtaaagcttgtgatatataaactattgagaatatcaaaacaattatcgttatcaatgccagctaatatcaaacagtagaaaattattgggacttaactctcgcaaatctgtattttttcgttgtttttaaaataaatgtttgcttgtaggttaactttgaaattagggcatttttctggaagcctgatattataggacgacatgtgtttttatttttctcccctgaataacttgctaactaagggtgtgtgttttgctgttatctccttgatttggttattactgtgtactatttagcaatcggggatattttaccctttgtctcttgtttgggtaatggttgttactgtgtaagatatagtggctgtccttttgtcgatgttatggctttactgtcaagatgtacatgagctatgccataatatataacattcttgtatgggctcaggagcaactgtttggcaacttcataaagtaacttcaattttatattataatcatgaagttcaaacttcaagcgtgtaaagtcttaatagtattggagaaagcgagtgattttcatgactactttttttcaggcttcaaggagaagaatgaatggctatggaggaaattcaaaggatgctgatgagatagactgtggtactgtcaaactgtctgaagatttcatagttgcagatattgctattcatcctagacacgctcaggcaatgaaaccacatcaggtggaaggtttcaactttttggttaagaatttgattggagacaagcctggaggttgcattcttgctcatgccccaggttcagggaaaacatttttgcttataagcttcattcag

SEQ ID NO: 185305 - DNA, 465 bp, Zea Mays
accagctggtggtgctcgccccggctctcgagtgggcgcgcggccgcgacgacggtgcagcctacgcctgcagcagcaacgacgaggatgaggaggtggcggttgtggactacggggaggaaggcgacgtggaagtggacgaccgcgccgagcgcttcatcgagcggttctaccaggagatgaggctgcagaggcagcgctctctggtccagcgcctgctctagagacattcgtccgttgctgctgcttcaattccttggtcgatcgggcagaaccagtcgtggttgtcgctgctatcttagctgcacttcggttaaatctctccgtatcttgcatttgcgtcgttccatgtttttttgcttctcatgtggcaattctcttgtctgtggaaggagacattcgtctcccctgctgttgtactgttacttctagtccttacctatataatccatccttgtgttgcaa

SEQ ID NO: 185306 - DNA, 408 bp, Zea Mays
gaaattggggctagcctaaccatttcccctaacttaattgcacaaataaccaacccccgagctctggccacggtgaccgagagcagagcggcaagatcgccgtgttcccggcgaccagagagctcgtagtttaattcaatggcccggaaagcatccaaggcatgtgagaaagcttaaacgaggaagcaggggatgggagctgaccggagttgggctggcgacggtgagctcggtttcacggtggcgaaagcttgaattgggggaaactccaaattcgagcagatgagtggacgattgtggccaattagcggtggctagctagcagactaccccacggagctggacacgggctcaatttataggaaggatgggcggtggtcgcgaatttggtcgagacacgcggcggtc

SEQ ID NO: 185307 - DNA, 524 bp, Zea Mays
gtttttcttttccaatagaaagagttagttccacttgttatgttggttttaccaatgactgtcatatagcgaagtctgagtttattgaaactaagtgctgatgctcggccatgatactgtgcagtaataaaattgaattaaatccttccatctctcacccctctccaacctgtctatccgtccttcgacccaccatctttcactattacctttctagcattgagtttgggcttgcaaaaccttcgccgcaccattcatgtcatggcctggctgcctgagaccgtgtgcattgtggcacacctatggacatgtggttcgacttccacctttcttaaactcggagcaggtgcacacaatagccacccatttgagttgagcgctgaacctctctatggccagtatagtggccatgtgcaattctgctcaggtgaacagtgcgcgtgcattcctgttcacaacgggctcaaggtgggtatgttgcccgtttgttggttagagattagaccagattgcgctgttttcta

SEQ ID NO: 185308 - DNA, 546 bp, Zea Mays
catggatggaggtattccatcaaggctgcagctgacagccacccccttgatgtccctcacccaagcattattgtccaaagtatcctgcaacattcatcatactagaaaattattgctaaaaatgcaatacatgtttgttgtgtttgttaggttgagcacttgagacattagagatgatgagtttaagagttttacttttggtacatcaacaagatgctttcagtgtagtggatagttcattttcctcttactgtttataattggtgtgtttgagccatggtatttgagaaatttagggagaagggttggagccttgtgataagggtgtttttttggatatatgcaggtgggccaaatataccagaaatttgagtgcaaagatcgatcagatggtggaattgtgaggaatgttgtaaggtggagcatcgagaacttgctggaggtaaccattctatggccgttgtacctattgggggtgtccattttcctgatgcctgaagactctcatttctttcctttcatatctcccatattaattagaagggt

SEQ ID NO: 185309 - DNA, 353 bp, Zea Mays
gggcgtcactggcacatggatgagcgtgtgtgggcgcagctggcgcacaggcgccgtgatggccaggtgcatccacgtcctagcggccaatgatagttgagcaagcgagagagcgtctgggcaaagagccacaaagtgaggggtcgtgactagtaggagccacatcagaaaagccaagaccccacagcgcagcgagaggagccgcaatcaggagcatgacaacggcgaggtaaaccctagcatgaaaatcttgctctgtgtaccatgttggatactgcttgcattgaaaagaatggctacagcccaatatgtatatgtaaaataatgcaaaaagacccttatacaaaagaaat

SEQ ID NO: 185310 - DNA, 487 bp, Zea Mays
caaaaattatatgctgtggtggaaaagagtttctaccattgtgtccggtttgaataggaaagggttggactccttgtttattctgggggcttggatgatttggaaactcagaaatagagtggtgtttgatgatgtgacacctagtctctccctgctgctggaatctgttcatgaggaaagggagaaatggcaagttgctggagcaaggggcctgtcttttttagctggctctagtactgctcttggaggattgtagttgttttagcagtgtgtttatggatcgttttatgtatgcgtgtctctggcctccgtaaggagtgctttgtatctgggtcctcttgggcccctcccatcctttcttaatataatggggtgtagttctcctgcgcttttcgagaaaaaaacaaacagatcatgattatcactaaagagaatgctctaacagagcagtggtgtaaggtaggtaggtagctatcatggaagatct

SEQ ID NO: 185311 - DNA, 724 bp, Zea Mays
caaacttaggaaaactaagtttgggtaaagtatgactgttcaatgtggttctcatggtcggcaagtcctatcgtgggtggactggatacctggtcgaggagggcgaggtggagactattctaacaagctagaatcagaagactgactaataccatcctctgacagctgctcggccatctgttggagactaagctgagccacgactcttccagtttctgcaatctacttgcccatcaactgttgaccagtggttacctgtgtaatagcaccggaattaatatccaactgaaccatcatccgttgctgattggtgttgatctgaccgatctgatcgaacatgagatccatattctcgagaacacggtgccagttggccgcgttctggttagtgttcactgccatggcgtccaacagaaactgtgtctgcatggatggtcgagggggcgccgtgattgattacccacaagcttaccgtgcgggctggaattacagggaaaaacaggtccttgcgggtagcaaagcactcgatcacacaaacctaggccagtgctcagatcaaagccgacggaatcgtgtagtcaaggaagaggactggaacgaacagatggtgtgcataagggtgtagcaccgccaagattttgccgagatctgatcccctgacgccgaccgcgaaaccgaagcaatcgccgattgcaaacaaaggattcgatgcgccgatctacca

SEQ ID NO: 185312 - DNA, 301 bp, Zea Mays
cggctcagcttcagcctctcctccatcggagtgagagctgggttgcaattagtgagcccagccagctcaacaatgcgcttggcgtaggcggtatggcgaagtgtgatcccagagtcactctggtgcacctcaatccctaggtagaaggagagatgccccaggtcactcatctggaagatagccttcatctcttccttaaacgtcgtcacctctgcatccttgacgctggtgatcaccaaatcgtcgacgtagacacctaccagcagggcattttctccattgccccgccgatagatggccg

SEQ ID NO: 185313 - DNA, 575 bp, Zea Mays
cttgcaactgcgagctagcatggctgaagtctcaatatgtgcttcactcactcctcagcatcatttggctcacttgccttaatctatcattgaacttctggatgacgatgaggacttaattaggcatttataacatttaattttattgtgatatcgatattgtatagagataagggttattgacaggctgcatattgtgctgagaccagttctccaaaggcaacgtatcttatgcatatgggtatggctgtgcacgtatgcacatctttaatcccatcccttcaatcaagatccagtggctactgtcgttttaacattttaaccctcctgtggcttcctctgtgataagaatccttttttgcaaagccccctttctccatcccttcctccaaacagctgcacgagacttctggaacccgacagctgacatggtccttgcaccgcacccagtcaacgcctccgttcttgccgacttccgccaaagaactcgctgaatgtcggttccccaccgatgtcgccattgtctagaggtccagactggcgcagcacctcggccagctgcccagcttcagttt

SEQ ID NO: 185314 - DNA, 310 bp, Zea Mays
aaacgttgttaggtcatcgctaccctgataaacaaattgaacaaataaaatcatactccagtatatgcatgcgtatataccaaattgtttaagaccacgtcaaaattatactggtgtgtgtatcgttgaatataatcacgcatttcacccttatgagatactggggtacgttcattaataaataaaattaggctaagctagtgtgttggtataagctaatcgtgcttaataagtaaatcaaaatcgagtatgcaaaatattcgtctaaagagataatggcaaatatgattacacttgcaaaatgttttgc

SEQ ID NO: 185315 - DNA, 1156 bp, Zea Mays
cgtagttagaattcagaaagaagaggttctttcatgccagaagattttcacaatccccttccttgcagaaagcaatacagaagggccacctgacagcattcatacgataccattagcttctaaatgcagcaggtgttttgtgaacaacagtttcctagtagtatgtatatggaagaagaccttcaaaggtttctcatggaaagtagtattgcattcagaaaatcaatatgtcaatgggagatgcttgtgtggttttgctcctagctctctttccaccacaaaccaaggggcacatgcatgcttcagcaatgaaatgttttcagcagtggtttatgaaggttcttcagtctttccttctggcctggagggagaatataccacgtgcatttctgtaatgccgctgaataatactgtactgcctatacaacaacatgacccttacagaactgttccaggctatcatattgctactggttgctctgatggcactgtaaaactttggaagatgacttgtgcagaggactctttgcagactaagaaagaaagacacatctgggagctagtaggcatgtttggtgctcatcaaggaccaattgacatagtttcattgtcaggctgtggtagagttattactgttggcagaaatttgaagaaaaatagcacctccattcatatctgggaagcaacaaaaatcaggggagacgggaattttctgctaggagatacactaatgttgcaagaccatattgttggtttagatggactatccttaggtgatggacgatttctacttgcagtttatctagctaatgagttacgtatatattctcataagcacccgtccttccagaatgtactacacactaagaattcaaaagaagagcatctttggagctgtattgtattatcccattctcatcatgatattgttggctttctttggggaccaaaggcaactgttgtgcttgttcatgagaaccatctttcactcttcagttcatggctagtaactggagataatgagtacatgacccagatacattcttgtcctgtagttcatgagatgttgccatgtactaacaattttaacgaagctacttttggtaaactcaagttaccagaaaatttcaacagtggaaacattgatagcaataat

SEQ ID NO: 185316 - DNA, 474 bp, Zea Mays
gcgatgcaagcacgtcggcgagggtaggtttggtcatggtggctggtgatgttgcggaggcagtggaagattgtggtgatggcggcggctaaaaatggcggctgttggaggctgcggaagaggtgttgagttgggatggtgaggatcgtctagatcacgataccaggttgtcaagggcgttaaacccttggctggctggaccgcggctacggagctcgtaaccgtcggccgtcttctccggtgaggttattcccctctaccgtaggcttagagaataagagagatgaggctaacaatctgcttgccttaattgtcctggttacaagaatatatagggccatagcccaactaactggagtaacaaactcctgaaattatggaactgataactcttaaagggaaactaataatatccttctgccttatctactcgatcagctcgagccagctgtgcgtgtgtcccccctggccgcg

SEQ ID NO: 185317 - DNA, 683 bp, Zea Mays
tcactgaatatgtcttggtaattggtatcattttttgccttcgtctattacaccgttttggtctatattggccgattgcgattatgaaatcgtgattcttaactagcaaattgcaaagaccgttatactcatgcatctgatttgacgagaggtggggataattgacatttttctctctcttgtcgttatcttctcacaccagctaagatagtgtccatcttccttccctctttttccttgttcatctgccgcagcgttgttgcctcctggtcctggaagcgaaggttgagccacatagttgctgctaaggtcgatccacacaggtccgcggtcccagaagtgctcatttgttacctgttgcggtggggtgagtggttgctgccatgttgggcatctccggcggcagcggtggaggcagatgcacagcggtggttgcgagcagtggtaacatgagcttctctgctggtgtcgacatgcggcacatgaccttgacactagcctgcctgagttgctctggttctactcagcgccactcgtgtctgcacttgtgctagtgattgctccacgttgctggtggcttcactgatcaaagcggtgcatacccctccacctcttcacccttcttgaatctgccaatgcaagctgcatgtgcgtagggaggttgtggctgcgcgtgaggcagt

SEQ ID NO: 185318 - DNA, 287 bp, Zea Mays
atgtatcatgtctttcatttatcatgaaacatctctaatatcattgaataacttgaatagtgcaaatggaacttggatgagatgggtccaaagaaacaacaatactacagtagcacaatcttatcatttaaaccatcatcatccatccattatgtgcatactctccactgccttcacagacagaaagaggaaggatatatcatatattggcctggcactaaccataccggcattgtcacaacagtgaatgtgcagaaggattgtgaaatggaagagagaggctgtgc

SEQ ID NO: 185319 - DNA, 516 bp, Zea Mays
atcatgttggagtcgatagggcagtatggtcctggctaccgtggcccatcgtaccacgacattagggttccgtggcttgaaagggctgtcgagaggacatcattaatgacggcgaagcatgaagaatcgtggaaggagtatggctgctcattgatgtcagattcatggacagatgttagaggacgtcatctaatcaactttttggcaaacagtccagcagggacacactttttgtgctctattgatgcatcaagtgagatagctaatgccaacatgttggcagatttgctagaaaatcagattgacaaaattggcagagaaaatgtagtgcaattagtaactgacaatggagcaaacttcaaagctgctggcaggcttcttatggagaggattccacatttgttttggacaccgtgtgctgcccattgtttggatttgctgctggaggacattgggaagattaagtacttcaacacttgcatcaaccaagcaaagagggtgtgtcggttcctatac

SEQ ID NO: 185320 - DNA, 498 bp, Zea Mays
agcgagctgagaaccaatgcagaatggccacagctttctgagacgacattttgatattggatcctaaagcatcttctggaagctcccattaggaagccctttatgacatggcagaatgaagggaggatatttccacccttatctccaaaagatccataacccatataatccttacaggattatagcaagttcacttcatcattttttaattgcaaaataacacggttttaggactattgtcaccatagcgagctgagagccaatgaagaatgggcctagctttctgagatgacattttgatattggatcctcaagcattacatcagagctcccataaggaagcccatggagacatggcagaatgatgggaggatatttttcagccttatctccaggatccataccccatctaatcctaacagcactaaagaaaattagaggtaataaaggaacttataaagtgaagaccaagctttctgaaatattttgatgtttgat

SEQ ID NO: 185321 - DNA, 1579 bp, Zea Mays
cttctctagaccccactcatgtgggagctccgtcattgggtctgtactttttttactgtatcaaaaactgcaatgctgttgatttctgcagcatatgccttactggagggaaagaagtgaacaaagaaatcatgagtaatgtacaagacttggccaaggcattttcagaatacaaagatgaagtcctggtatgcttttggtttttcctttaggagaatctgttgtctttagaaaaaaacatgacattaacttatgttgtttattaattgttgaaactagaagtatctaataattggatatttctgctgcttagttacctaactgtaccattctgggatacaaccattggatggagcttttcttcttagacctgaatatattttcacttttttggtccatttatgttgtccacgtttttttattcttgaatgcaggggtgccaaactgtgctttattttatcccaaaatagctgcttaagtgtgtgtgtgtgtgtgtgtgtgtgtgtgttctcaaaaatcatataagtgtttgtatactcttaacagctaacactcgcactcgttttttcttgaagttgaaatcgaagttagtgttaagatgcactactcaagttttagtaccatattgattttggtcaagattagagactaatagacactggttttaaaattattgtattattattttttaatacttcagatttagttatttgatagtttttatctagacttggggtcctcatttacttttattattgatctgtggcctgcacatcaatacatcaaccgagtccctaatgtctgacaatatgattttcaactggcttttctcaatcctcgtagttgagctttatgccctcatgttccggttcctaggttcaaaaggggtgaagcaaatgtagtgcctgtatggtttatagtttcagtgtttctggaaaaggaaaaattttgtgatactgtttataaaagacttaagctaaaatatatgcatgtttctatggggtatgatttgtgaaacatttcctgagatgcacatgcacatataattatgggttactgtattcttctgattctgtagtgtccaatggttcactgtatctgtgtgaacaggtgaaacgtgaagagctgcttgagtatgcccaaagtatcatttcaggactgaagagaaatgctgacattgtgaggtgatagaatagaacctgctaattacctgttaatatattatattgagaagttgcagcttcttctggtaggttaattacaaatatttttttgcagtacttgccttgattttcttggaaactaatcacaaaaaaggaacaaactgtacaaactaaacaataaccatacctgaaggcctctaccaaatctctgaaatatcaaatattgtggactgcacacaaaataattgtgtattctgctacagtagaaggcccaaacacttcgatatatgcttttgtctatggtttctgggtacattagcttattctggagcttatattttatttcaggatagatgctgaaaccctagaattgcagagaaaactagacgagaagcagaaatcacgaggtcaatcac

SEQ ID NO: 185322 - DNA, 375 bp, Zea Mays
tcattggcacaagagatttgattcaagaacatatagccttcagggtgtggccgcttgtggaaagctgggaaatgccgaaggagaccaccattgattctagtgatggtggtctggtccgactgaaatataccttcagatttagggagaagtttgatgagccaaacgacgattggctgaagtgtattgaagctaccagcgatgagctgcttggagcttactccaaggccaaagataatgctctgtccacagccttcggaggtcgggggaagaaaagactgaacagggtttttgatgcgattggcttcatataccctgattatcggtacccgctgcgagggcaagagaagaagaggaaggttgctgcttcggtcgtcc

SEQ ID NO: 185323 - DNA, 412 bp, Zea Mays
aagaaatggaaaaaagaaagcttaaacctactatagtaacctacacagctctcattattggataccttaaaatgggggatgagaaggaagcttgtatgatgtacgagagtatgcgtcatgtaggcattgctccagatggaaagctgtgttgcattttgggcattggcaatgacaggggtgattgtgatgattctcagaaagcgaagggtgtaacataattacataattttcacagagatttattaacttgatgaagggacttctctatgatggctgaatggctctgagctctccagtgcaggacacactgtttgctccatttgtttcctccacttccacactgccatcctatggacaaggaatggaaagcagtaacctgaaatgtggcagttaaatccgtggacaactgctg

SEQ ID NO: 185324 - DNA, 484 bp, Zea Mays
gtgaaggcgtagccaaacccaatcgccaacggtgaaacgaaggttgcggtggttcttgtcgtagaagcgtttgtagacaacctgagcctgttctaggcgactgcgggcatctgccagaaattcatcgcgctcggtcatgctcttggcgacagcagcaactcgtgtctcgcgctgttcataagaccgaatggttggacggtctcgaccataaacgatcctgaacggtgtggtcttgagtgcggtttgataagcggtgttatagataaactccgcccaaggtaaccaacgaagccattgacgcgacctatcacatgtgaaacatcttaggtacattatgctgaccttgttggcggcttcagtctgctcatcagactgtgggtgaaatgctgaagacatatgcaacttgatgccagccaatcgcatgagctccttccagaacagagatgtaaacactgggtcccgatcagaaacgatggattgagga

SEQ ID NO: 185325 - DNA, 315 bp, Zea Mays
gcggcgtctcagcctctcctcccgttcgccctcgcttgcttccttttattcccttgcttcctgattggcggtttggtggtgttggcccctgcctcgcctttgatgcggcggccgccccgtgaccttgtttccatttttgggcggcggccaggccagggttcggttcggataaggcggcctcccaatttcgacggagggagccgttgcggggagcttgtagtggtagtgggttcgggactctggaatcgagttcttccgcttgttggatcggcgggagatgggatcctgttcatcggagcagcgtactgatggccc

SEQ ID NO: 185326 - DNA, 363 bp, Zea Mays
cacggtagcgacatctccttacactcacttcctcccttggctatggtttgtttgagaactaacgagccgatctttcttctgtggctcaattttgctaggatatggagccgagtgcagcatatccatgggaggtaaaccttcaagtttcacttccatgttctttccatcagtgatgaactcatggcatcgattgcatactcacaaacttccataaaaaatacagacacggccgctcgattagtacaccatggatacgttgttcacggaatcgaccacgagggccacgacaaatcttcaggctcgaaaggctacctgtcgagcttcggcgacgtcgtcagagactgctcggaccatttcaagagt

SEQ ID NO: 185327 - DNA, 348 bp, Zea Mays
aaaaaaatagaatctaatgtattggtcctcttcatcttgcaactctattcaaatcgagaaatactttatgtcaatgcctgtcagttaggcaatcatgttcgtcttccttttcatgcttctacttctagggccaccaagccttttcagttaatacactgcgatatttggacgtcccctgttatcggtgtttccggtcacaaatactatcttgttattttggatgattactctcattacttatggactttccccttgtggcttaaatctgacaacttttaagctgaacaaatataattggttttagttccaccgagtctaaaacctttggattctagagtcccttgccac

SEQ ID NO: 185328 - DNA, 1561 bp, Zea Mays
atctcaattcttgaaggaaggcaattttgtcctggttgagctggggaccatacacacaagtcagccaccactccacatcatcagcaggatgaaaaagaattgacattgaattatcatccactctagaaacaccagaccaatttatatgatctttccaagcaaccaaaatgccaccactagcaccaatagaagggcgaaaaacaaagttggcaaaatctggtccaagcatccggataaccaaaaaacgagaaatatcctgcattttagtttcctgtaaacaaaccacatccactccagatgagacgacctcagcccttacagcatcctggcgagccgaggcattaagccccctaacattccaaatgagaatttttgaaggatccataaaacactagcttaagacgaccaacaaacccgcaacccaaggaagagaaccttcctcaaagtgtagcctccacaaccaacgtctcttctggtagagaccaaccgaaaagagaggcaagagcttggatctgcacttgggaaagagatttgctgaaaatgcgactatattcatccagcgcctcttgactcagagaatccccatcacggatcactcccagtgtcttcataatggtcttcttgcttttcttgatagaagaaaggcgttggtgacactcaaccccgacgccagcaacacgcctgctgcgcctaggagtagccacccgccccctaggcagttttttctttctaagggggttgggggcagggttctccaacacagcatcgacctctttggtaatactggacaagaaatcggacacccttgaggttgaaacatcaacagcagaagccggtgtttgagacggagagctccccaaggctgtttcctcaaccctcctcgctcctcggcgtcaccgaaagtatacttgaataggttttgggcggaagagcaaaggaggggaggtggcagccacaggagactccctgggaggcaacacctcgcatgcagccacagagcccatatttccagccaaaacaaaatcctgctgacttccaatctgattgtgatcctcatgacatccgttcatctgcccattgccaggacatttaagcacagaaatctgcccacccccctgctgacttccaatctgacagaaattctcaggacacccaatcatctgcccactgccagggcactcatgaacagaaaactgtccacccccttgcaagctggagcactcggcagacctgctacagaccgtaacttgttgctggaccactgttgataccagcgggtcagagacagcgcgggaagaagccacaggactatgattttgaatctggacatcaacttctctggtctccatgttgctgaattccaccagctcagcctcaacgactaagacctgagaacaatcatacgtttgattcccatttcctactcttgggcctatccggtcgtgaactgaacgacgctccgatctctgacccctagcatgatgcccctgaacaaactcatgggaaggcgagatgagacgccttctacgaggagagggatcctcatcatcaagatcctcag

SEQ ID NO: 185329 - DNA, 593 bp, Zea Mays
ggggggagaaaccccattacaacacacacaccactagagactaactacggatcaccgactaaaacatggaagaaacacgacccacaccgctgttttaagccagcaactcatcgacttggaggaaggacaaggccttggcaccagtcatggactagagcaccgcctcttccctagccatcctaatggccatgaccaagctgggattacaaccatcaaaaacacacctattcctatgcttccaaatggtccaagcacctagaatcactaaagaattgaaaccttctctcacaagatccgatgcccgggagctgctagacttccaccacgactcaaaggattcctcatgagttggatacagatcccgcagccccactgaattaagaaaatcaaaccagaactgcttagcaaaaacacacttgaccagcaaatgatttatggtttcagcctcttggtcgcacaaggggcactgctctggtcggtctagccctctttttctgagcctgtcagcagtccagcacctattatgttccacaagcagggccgttcctgacatttaaggggcccgggacaagattataaacagaggccctaac

SEQ ID NO: 185330 - DNA, 472 bp, Zea Mays
ccgcattgtttttcgctcaattgtcctcaaacaagcttctcgacaacaatgctatgggcatccaagtcaaacagcggggagcactagaagctcagcgtaacagtttttagcgccaaaaaaagctactacatgcaagcaatttgaactaatcttgcctgatgcgtttagcagacgctaagcattcgaaaatagcaagtgcaaccaggtctccggtcctccccgagctggaactatcaaccatccatacaccatgcaacgccggacctcagattgcaggcagaggtgtcaattcaccagaacctataacttcgcactacaccacaggctactctagaacttctgaagccatggccaccagggtgctagtatactcgtactaatacacggtacccttcgtcccacgagcaggcagcgaaaagctggcgcgccccgacgggcaagctccagcggcgcgagctcggacgacgccgac

SEQ ID NO: 185331 - DNA, 504 bp, Zea Mays
atcttgttcaagtttgcccattttgtgcattcttaagcacatctcgttaattaagtcctcaaaggctaatgggatggcaaattctgtatcgtagcaatgttttgttggctctgtacaatgttaatgtccatgcactgtgcctgatttgtaattttcgcatttacttttcttttagtgtcagaattctatcagggtgacctgaaaactgtgttggtatccaactggtatttggtatgttctaaattatcttctcaaaccagactccatgaaaatcgtacacagtcatacccttgttgcggtaatatgttaatattacttctctctgtgtttgtccccaaatcacaactgaaccttcttattcaaagtttcattagctttatcgaagttacattatatttactgctattgaatttatttcgctctcaactgttgctctcttagactgccaccccagctgctcatgactgtagatgagtattgccatctgctgccattacttattat

SEQ ID NO: 185332 - DNA, 373 bp, Zea Mays
caagaggatcgtaacattgaggtccccgtccggagaggaggtagtggcggagctaagaatgcctaaaacagcgaaaggtgattgtcaccagctttcggttgatagcaaggaggccaacccactcgaggctatcagggttgtgtcggactttccagatgtgtttctcgaggaactaacgggcatgccacccgagagaaaagtcgaatttgccatagagcttatccctggtaccgcccccatttctaaaagagcctatcgagtgtctggaccagaattggtggaactcaagaagcagatagatgagctgttagaaaagggttacatcagaccaagtacctcaccttaggtcgctccagtattgtttgtagagaag

SEQ ID NO: 185333 - DNA, 492 bp, Zea Mays
gtaaacaactgcaatttgcaaatctcaacagtgattacgaattaaaagttctctgaccaaactatagagtaacggccaatgatactacaaaatgaaaatgaaaatgtacgtacatggacgtcttgtgttggacggtaggcctaatttctgacaggtaggctcgcacacttctaaaaatgctgctcccaccatgcgcttaaggccgaagagccgcccactggcctcctgaggcctgagcactgctcgactgaggcttgaccaccgcccatcgcgccgccgagcaccagcttctgaaaatgctgctcccaccgtgcgcttaaggccgaagagccgcccactggcctcctgaggcctgagcactgctcgactgaggcttgaccaccgcccatcgcgccgccgagcaccagcttgaccaaacaaactcaattcactaagtaaacaaggggacaggcacgggtggagccttaccttagagtcatgaatcctagcagg

SEQ ID NO: 185334 - DNA, 308 bp, Zea Mays
ggtacttcggttcctgctgctgaagaagtgcctgtgcctgaatttactgacgctgaccccgatgggtgtgctccatctgttgctgatcccaatgggggtgctccatctgctgctgatcccaatgggtgtgctccctctgttgctgattccaatgttggtgttgcctgtgttgctggtgaagacgacggggaggaagaggacgaggtccctctgactcgaaagaacagtcggcagttcgtcgccagtggtgaaagtagtggagttccttctcctgctttgtctactctcattggtctgcaagaattgtc

SEQ ID NO: 185335 - DNA, 338 bp, Zea Mays
accgtccaaacatcgaacatgaaaccaattctctgtccatcctccccatctattcttcacacatgggacgatctctgtcaccctactcttcgtcttcctagttttcaccataaacttgcagcttccgaactagtcaacacgaccatcagtagccctttcttttgccagtgaaggcagtattgcttggcaaagacctctactgacggagtccctccataggtagttactacccacacaaactggctcaaatccatgattgtgttcgacgtcagctggtgaatttgcaccttatacttgtccaaaacatcaaccaccagtcgatgatagggaaactgaag

SEQ ID NO: 185336 - DNA, 516 bp, Zea Mays
ggcctggctactcgacacatcatgggacagtaattcacctcctatcgttttcgccctggtaccttctgcatgcggcactttattatgcacgaatccacgtaccgggcgccgggttgggctagtctggcatcgcctccaccgtagggagttggcggcaccgctgtcgggctaggtaggcggtaggcgtgcaccgtggaccattgattgtgagatcgatgactgtggttagatcccatgataacctttcgactaaggaaatggtgtccactagatcgtcgacagaggggtagtaatggacctgtgttcataaaatcgtaactattggatctatatccaacactctagaatagattatgtctgagcgtgatctgcggccgtccaaatctaatccaacggccagcatgcgcagatacccttcggtggccgattttctaaagtcccccggaaaaggagtaaacaacccgcagtctagctcggctaaggttgagcctgtgatattttgcgagttaaaccccg

SEQ ID NO: 185337 - DNA, 274 bp, Zea Mays
aaactgggttccaacatggtactgagggtgttcaaattcatgaggaggaaaggcaccgggtggcataccattggtcgggagaaggttatggggatagaaacccccaaaaccctgctcccggttgtagttgtcgaactggtgcccgtacgggccgtcggcgtgtggagcagcagcgtggaattggtccggcgctgtccactggtgtccttggttgcccggtggttgctgcgggtcagggaaaacgccgcgctcgagcaactgggacaccctggcc

SEQ ID NO: 185338 - DNA, 322 bp, Zea Mays
caaatacatgctcaacaacatttcgaagacttgagtgcaaatggttgaacatctcttgctcgccactaggagctgggcctcttctccactctggaacgtggtacctttgacctttatatggtaataagtatccaggtctattcggatatccagcatcaacaacataatatttccctaaaagatttaaaacgtcaacatagtttctaaagtatgagataaataatgaaaggtagaagatgcaattacccagaggtgaatgtgggaagatatcttcatctatttgtagagcattatagagaacacttgtatcatgcatggaacc

SEQ ID NO: 185339 - DNA, 627 bp, Zea Mays
agttcacaaagtgagcaacaacagaaatgtaatcctctttagcctttccagaccaaatgtcagaggtaagggcaacagaggataccccagttttaaagacctcaattaacttctctacacgcccattatagtgtttcacaaagtctctagcagttgtttgcctagaagatttaacaaatctagggttatgggcacgagctatgtactcctgaaaagcatcagactcaccaaacgacaatggaagatcctctctagcaattaatcggacaagttcagtgcgtgcaacttcactagagtactcccaacgcaacagagaaccatctggattgtacttaagtatagactgagtgccagtgcgctctttcttaaccttacaactatccttgtgcctaagcaagtgcccagtcccagcagatgatttagcagagaattgttgtttgcagtgatgacaaatggcatgagttcttaccctcttaccattctcaaagttgaacacctgttcaaagtcctcccagactggagaactggaggccctcttcctcgttcgcccctggttatccgtgcttgcctcggtacgggtcgcactgctggagcccgttcccccaacatcgccggaaggagccgctg

SEQ ID NO: 185340 - DNA, 2463 bp, Zea Mays
caacattatgaaaagaagttaactgacttggagcaagaaaagaaagctcttcaggtttatactagcataccttgctgacactatgctcttcttttcctgacacgctagtaacaccattcttgtttgtagaaagaaatagagaatcttcgccatgcattaaccaacatatcttcttctatggatgataatgctcaaaaagttaaagaaaactatcttcagaagctgaatgcacttgagtcccaggtttgtacattcaactaagtgtttgttgcattgcattcctcatcatatactaacaacacaccatttgcaggtccatgagctcaagaaaaagcaggaagctcaacaacagcttctaaggcagaaacagaggagtgatgaggcagcaaagcgcttacaagaagatattcagcgtataaaatctcagaaggtgttttctcctccaaatgtttctgaatgtgatttaaattttttttcctgacatatgttcctttcattcgatgtaggttcaacttcaacaaaagatcaagcaagagtctgaacagtttaggtcttggaaggctgcccgtgaaaaggaagtacttcaggtaattgttcttactggtcgttgatcatctttatgaacttctttctcaaagaccttattgtgatagtgctgcatttccattaattagctcaagaaggaagggagacgaaatgaatatgagatgcacaagctcttggccttaaatcagaggcagaagatggtaagtttcctcattttttcccctttcaggtttacgataacatgattgtcgcctacaccattctgcttgaaattgtaggtcttacagaggaaaactgaggaagcagctgctgctacaaaaagattgaaggagttgctggaagcaaagaagtcatcacgtgaaacatatggtaggaagctatggccaatggattaatattctttaccattaagtttcatgtgtgctcattattcatagctgatcatatttttactacttgttttggttacctgatttttcaggcagtgcaaatggttcggggatgcaggtatccttcgagaaacctttgttagggaatgggaaaactattccccatctgccttttatgctgtgtctgaaacattatttttatgtgtcactaggccttaatacgagctattgacgatgaactagaagtcactgtaagagcacacgaattacgctcatattacgagcgacaaatgcaagagtaagtctttgttgtgctttgataatttgtagatgctgaccttctagtgcttttgttattttgtggtgcgctatatatgcatgtatgtgcattattttgggcatttttatgatgagacatagatttgtagttattcaatgaaaatatgaactcaaaataatttgctattgtgctcccttgtggttagaccactagagctttgggccaatccataggacagtgcctttaaatgttgaataggttctgttccttctgccaagttgtttatattacaactccattgatttcccaacacaattctgtgaagagaaataatgggattgtagtaagattttgcattgaccataatctataacactatataatccaccagtttaaattttgcaaaatccacccaactaaatcaccccacacatctataacccccgctaaatccaccatacaaattgcactcaaacttaacacaccattgaaaccaacggttcagatcgctggataaccctctcccttacttaaatctaattgacatcatccctccctttccccctcccccgtgtcccgccgccccctccgcctcacgtatccgtcgcccttaactcctcctcttgcaccgccgctgtcgtcgacctcttccctctactatccgggattgttgcgttagcacgggctatatgctagtatgttaaaaatatttacgaaactgtggcatcattaactgtctccaaaattcctgatttgatatacctatatcgattattcactccttttctttctaacctcagcagcataatatatgaactgtagttgaaatatgctggattctgtatccgtgttccacggcattagcttttgcacaactgccctgtttgaaatttcttttttcctccttgaaataggagagcagcaatatccaaggaaatagcaaaactaaaggaggaatcaaagcacaagatcaggtttggtgatttacatccctttttatttttataaggattaattgatctgttatagtgtctctgaattgttccttactagttgttatttctgtagtgattgtcctcaagctatgtcacctagtgctagaagttctaggatatcagcattagagaatatgttgtcctcctcatctagtgctatggtatctatggcttctcaactgtcagaagcagaggagcgggagcgtgtattcaatggtaaaggtagatggtaccatgtcaggtccctcccaga

SEQ ID NO: 185341 - DNA, 487 bp, Zea Mays
ccatggagtgtttgccgcttgtaatggaaccagagtcggccttctaccctgatccagttgttgtgttggattttcagtccctctatccttcgatgataatagcatataacctttgttattctacatgcttgggaaaagttttcccatcaaagtcagatgtacttggtgtcagctcatattcagcagatccacatacacttgtagatctgaaaaatcagctgctgcttactccaaatggggtcctgtatgttcaacctgaggtgattttctaaatttttgagcaatatctgatgttcttcacattgctagtggaaagttgtgatgtaccaactaactgagctatatacctcccatagaaagttgttcctatattacattttacctgcttgcctctgcggttggtagattgactttcgtgattccccttgattaccatccagatgaattactatctatattcttgagaatattatttaccactacatgt

SEQ ID NO: 185342 - DNA, 670 bp, Zea Mays
cacccctagtaccaatagagccaaagacacaagatatacaggtactgctttctatcaaaacatctcaattataaatcttaatccgcaaaaacaaaactaacatgtacattgctatgtaagacctctggttcagaagcagcatcaccacatgaattacaacttatggagattgatcagactaggttagtgggtctactttttatatctttcttttcatatcatccagaaaatatacaatgttttgttataacatcttttaatctgatatgttatagttgctttgacaacgtcagagtatcatacaagagaaatttcaatgcaattgatgactccgacaaggtaactacttttcaacacatccgataatacccatatagatatcaatatatgtacttaatatttttaattaacctatattgctccttcttttacaggaagaaacacatggtgctgaccaactttcagtctttgcaaaaagaccaaagatgaagaacaattagataccttctacatagctactcttttgagaccttgcatctattgttcaatggaaatagatcggttgtggttctacttacgagaacaacaaaatttggcttctcgcaaccaaaactcttttgcagtatgtataaacatatgactgtttgcaagcaacgtagcagcagttctg

SEQ ID NO: 185343 - DNA, 423 bp, Zea Mays
ggcatgcaaagctcaacttgttcaccgtggtgcatgcggctgcgagaagaatacaggagatggtgccggcatcatggtcgctctaccacatgacttcttcaaagaggtgagtttctttgcaacaaaaagaaatagaagaacaaatctgttcttttcaacatttattcaattgctttggtgttcttgtaggtcgcaaaggatgctgggttttgagctacccccaccaggcgagtatgctgttggaatgttttttatgccaacagatgaaaagcgtcgtgagaaaggcaaagctgagtttaagaaggttggtgtaacactgttaataaaattgatagcctatgatgcaggattttcatgttaagctcatttctctgattaataatcttgtccttgcaggttgcagaatcactgggacatgtaata

SEQ ID NO: 185344 - DNA, 287 bp, Zea Mays
atttcttcagctgagatacatggaatacatcatgtacatctgacagatgatcgggtaactccaattgatatgcaacttctcccactcgctttaagatcaaatagggtccaatgaagcgaggggacaactttcccttaactttaaatctcctcataccccggagtggtgacaccttcaaatatacatgatcaccctccttaaactctagtagtcttctcctattatcagcatagctcttttgccttgattgtgcaattctcaaattctcccttatcattcgaacttgt

SEQ ID NO: 185345 - DNA, 296 bp, Zea Mays
gacggacgctggcgcggccgtggccatggtcgtgttctgcagccgcgctggggcggggaacgcgcacaggcagaggagcagcagcaccgcgttcagcatcagtgcatgcaacaagacaacgacgatcgcagagcctcagatgaaacacgatgggtggcgcctcgctaggttcctcccgcccaaccccgtcagtacttggataatgttccttagtgcatagtggttgatgacagtgcagcatgagtgaaggcctggagggagacacgaaggccagcttctcgggcttgcatgcttgc

SEQ ID NO: 185346 - DNA, 353 bp, Zea Mays
agataggaagaacactgttagatcacgcgggggtcaatctgcgtccaaaaactcagcaagaatatgtccacaaatcatgcaagggttatgctacaaacaggttggccatagtgagaaataaaaaatgccatcttccttgtaaaggaaaactggttttaaactacctgtcttcagttgaccatacttcattgcaatgtaccttagaaaagatcattttccctgctccgccaatcctccatgtctaatattatctattgctcatatagaagattactagacaatttcatctgccatcggccatttaaacaagcagctattttgaggcctaccatttagtggtttacgtacttcgc

SEQ ID NO: 185347 - DNA, 315 bp, Zea Mays
gtcaaagcatcgaaagcatcgggtggaacgtcgacacgctgcagcaagatgggaggaagaaaaacagttgaagcacctgcctcggagatccacaagggaccctcgacgaggaagatgcacacgctgggtcttcttcctgcgctcaaccacctgccagccaagctcgtcccgaagtgattccactagctgcttctgctccaccacaccagccttctccttcttgtctttcacaccctctggggcacttgaactagtcgtgacaagagaatggaggcgcctggatcctgatacgagggcctctttaaaggagcaaaa

SEQ ID NO: 185348 - DNA, 367 bp, Zea Mays
gagccaataccagcagtggtggttcccatggtggtgctggctgccacaaccgcaaccgtcgccatggacggggctgcggtggcggccgtagtggtgctccctggccgtccttcttcaatccatggacgaccaccatccaaatgtggcctgacaccctctctggtggatagcagccgcgctcgaggcaactccctctgcgccccttcctcaggccttactgacggccctggactttatggtccccctgctggccttcttgggcgtcctcttcaacacgcacccttcacctctaccgcaccaggtggcgcctcctccccaagcagcatatccaaaccaggatccgattccttccaactggactccttgg

SEQ ID NO: 185349 - DNA, 331 bp, Zea Mays
tgtgcgcacgtctcgcggcatccgggcccacgaaaagatcgtgttcccgcaatctaggcagtttacgtaatccgggcccacgaatcaaggaactgagccgtcgttttctcagcacagctctcccgtaactatcgctcccgccgaaccctagccaaatccgccgccgtatgctgcttctcctcggcacccggcgaaccctagactaaccgccgccgtcgcattaagattctcccccgcagttcccccgccgtcgcattctccttcacccccgcagagacccgccctcgccttctccgccgcacgccctcgccttctccgccgcacacaggcc

SEQ ID NO: 185350 - DNA, 406 bp, Zea Mays
gtccaggcgggacactgaggatggggcactgctggccatctctggcccgcgcttcgacttcattgaccgcctacgccaggcacagctcgaggacccgaccctggtggccatgcacgccgagattaccgcagggacccggcctgcgacctggaccatcgtcgacggtatgatgctgttcgggggcaggttgtacatcccgccagcctcaccactgctatcagagatactacgagcgatccatgaggacagcccgagggcgttcagcgcaccctgcagcgtctccgacgtgatttccatttccctaacatgaaggagttggtgcaggactgggtgcggtcatgtgcagtatgccagcgatacaaatccgagcacctccacccggcgggcctcttgatgccactaccgg

SEQ ID NO: 185351 - DNA, 790 bp, Zea Mays
gctacatggacggcttggacgtggtgtcctggaacgccatgatcggcgggttcgctagtgccgggatggacgaggagtcgtgggcctgcttccgggagatgcactcgagaggtgttcgagggaatgcccgcacagctgtggtggtgctgggatcttgtgacatggagtccggcaggcaggtccatgggactatagtgagtagtcatggtggttcttcaaacgccattttgtggaacgcgttgatgagcatgtattcgcgtgccggctgtgtcactgatgcagagagggtgttcctggagattgtaaagaaggatgttgtgtcatggaatgtgatgatcggagcgtttgcgaagaatggatatggagaaagggcccttgaatttgtggacatggtgttgcagtgtggtatgaagccagactctgtgacattcacggccgttctcatggcatgctgccattgtggcttggttgatgaagggcttgtactattccagcgctttgtgtcagttgttgggctcgttccaactatggagcagtgtgcttgcattgtggacttgcttgcacgtgctgggaggtttctggaggccttggaatttatcggccagatgtcagtgagaccaaatacagttgtctggggtgctttgctgtctgcaagtaagatgcatcacaacgtggaatttgcaaagattgcatttgaacaactggttcaggtggagcctgagaatgctgggaattttgtgacaatgtcaaacatatatgcaaaggctgggatggtagaagatgcaaagag

SEQ ID NO: 185352 - DNA, 747 bp, Zea Mays
cacaccaccacagctgtcatcacttccagtatcatcttgctccaatcagaatctagggtcaccagttaaagtccagcttagctcatctcagtcatcttctagctctgcaacagctaacaagtcaagattgaggtggacacttgagcttcatgagcgttttgtggaggccgtgaaaaagcttgaaggtcctgaaagtaagttggtcattctgctttatctctcacatgttttcaggttatcttaataaatagtttgttcatatatttacagaagcaactcccaaaggtgtgctgaaactaatgaaggtagaaggtctaacaatttatcatgtgaagagccatctgcaggtatacaattgtgtccgctgaaaaattaattctcccttctatgttttcattaacttacattttctcgcatatactcttcgtatagaagtatcggcttgcaaaatatattcctgagcctaaagacggtaagcttaaattacctactcactgtatacttctttataatagcactttttttctgaaaagaacaaacatcctaaatgctgactagataagaaggcttcctcggaggataaaaaagcacaattaggaaagggcagcattgattcaagcaaaaacaagtgagtcctcattacctacgcaggggaacatgcacacaagcatcatgatcttaaagttttacatccctttccttcacatgtttcttaggaatttacaagtggcagaagctctaaggatg

SEQ ID NO: 185353 - DNA, 509 bp, Zea Mays
cttgcaccaagttatgtaggcaggttatacttcaatgcttctctgtaaattactttgtctgtttcccatacccctatgaactacgaaacattgctaacgccttttctttttcttttccatacaggataataaaagcatggattccaaatcttcatccttagttcaactagaagtggggttggtggatatatttgttaatctgtgccgatttgagtggcagacaggacatcgggaactagcaactgggctatttcaggcgcagatggagtttagcttatttgcccctcctttgtatctgacaacaagcagtaagcaaaggctctttgaacacttctggaacagtggtggtgccagaattggggaagatggagctcttggatggtctgaatggttagcaaaagacgaggagagtagacaaaagttgtctatgcaagaaaattcacaagagactgaaacaggaggctggagtggttggtttgatccttctctgggtaatactgagacaaatg

SEQ ID NO: 185354 - DNA, 516 bp, Zea Mays
gtaaaacaaatccgaccaccgtactagcttgtcgcggtggaacccgataggctccccggtgaccgccgcctcccggccgtgcgccgcgtggctcaacctttccaccgcgtcgccgtaactccccactgctgtctaatcaacgccggtgaggttgccacggcatgggacaccaattcacgtgcgccagtattcttctccacctccgaccgccgcgcgtctcatccaaattcgcggccaccgcccgttctccctataaattgagcccgtgactagctccgcaaggtcatcagctacccagccaccaagaattgctagcaatcgatcaccagtgtacccgaattccttgtttcccccaaatcttttcgccaccaccgtaaagcaccactccaccgtggccagtccgttctggtaaggcaccatccaattcgcgcgttgttctcatgtccctgtatgctggtgatgctctccaaaccgtccaattaaactagaagcccaccaatcactgggaacacgaac

SEQ ID NO: 185355 - DNA, 301 bp, Zea Mays
atcttgctggcgagatccctgaaggcttggccaactgctccaacctcgcgtacctgagcgtagaggtcaatcagcttcatggcgggatccctagcggtctgggcttgctgtctcggctacaagtcctgtatgtcggcgagaacagtctgacagggcatgtaccgccatcgctcggcaatctctcggcgctgcagaggctggcactgtatcagaacaagctggaaggagccatcccagagggcctttcccgtctgaggtatctccggtacatccaggcggcgaggaacagcctctccggcac

SEQ ID NO: 185356 - DNA, 407 bp, Zea Mays
cttcatcaatcgctgcgaatcctacttccatcagcagcgcatcatggagaaggtctggatggcttcataccatcttgaatacgtggcacaactctggtatatccagctgcaggaggacgagggcactcctcgatggagccgattcaaagatatcctccacctgcgtttcgggccgcctatccgctccgcgccactcttcgagctcgtcgagtgccggcgcacgggatccgttgaggagtaccaaaactgcttccaagcactgctgacccgcgccggtccattggaggaggtgcaacgtgtccagctcttcatgggtggcgtcctaccgccgctcagccacgcggtacacatccacaatccgcagtcgcttccggcggcaatgagtctggcgtgccaagtggagctga

SEQ ID NO: 185357 - DNA, 363 bp, Zea Mays
ccgcgctgcgtgcaattctgtcctttctggttgctgccgcgggctaggttcgctggcagatgcagagcgggtgctggagactatgtcggcggttggtgtctcgccagatgtagagagctttgggtgcctcgccttcctgtatgcttggagaggtgttcccagtcgggttgatgaactggatacattgtttgatgctctgggcttcagcaagaaggggtttttcaagaacctggttagtgggtacctcaaatctggtgacttcgagtcggtttcaccaatcattcttcgtgcagtgaaggaccgcagagttggggatgacaatggacttgatgaggaaacctatactgaggttgctcagtgctt

SEQ ID NO: 185358 - DNA, 711 bp, Zea Mays
gtccaggggggttttcgcgaaaattgcacagggaggtggggagaggtggaaggagtatttcgcaaaattgccggctgtcgttggatgggagatggatggccgagatttaatatgcgcatgtgagtacggtaccggtttgagcacacgatacgttgccgtccttaatacatttcccatccaaccatctatccttccagaagagggtattggctccatcaccgagcttagtaataatggctgcagcgatcagatttttaaccaccttacatacacgagtggggaagtccgtccaaggcctactggggtctgttttctgcagccatggccaacgagctctcagagcccaacataggttctttagctcactaatcccaagaccacccagctccttggacgggtaaccttaggccaagccaagaggcaatgaccaccacggaactctttcctgcccctccaaaggaagcccttcctcaacttatcaatagctttgatggcccaaacaggaatgtcgagtgccaaagctgcataaatcatctttgccgtcatgacaaactgcatatgaatagctctaccagccctgggcataagttcagctttccatcctggcagaaggctagctactctatcaacgatggcctgaacctggtcccttgtgagtttcttgggagacaaaggcagaccaaggtacttacatggaaaatctgaaatatt

SEQ ID NO: 185359 - DNA, 549 bp, Zea Mays
gtgacaccatctactgtccttagatccacataggaagtggcgccagtcacatggtttaggagaacacgaagatagtagcgctccccctcggccggatgagcagagactattctaccgacttgtccacccgtatctcgtttcctcttttgccatatttttcccttaccactctgccaagtgtaccattcagggaagtcacgatacaggatgccacgagcctccttgtgtagactattcgcctcaaaatatgctgtgagcattgacctatcaacacctggacggttgacgactcgctcgaccatttgccgctcgtgaaacgccaccatgtgcatgtttggaagatggagttgcagctgcatcacaggtggagatatctgactaagctcaaagccatatatcctccataaggcttctggaggagtcacccaccttgcatctctgtactgcttgatctcatctacatcatcatctgccttgctcgcatctctcataacaacagaagcacgatcatggcctttgtatatgtacttgaacaggtatttaacagcc

SEQ ID NO: 185360 - DNA, 395 bp, Zea Mays
gctactgacccgttccctttggacctgttggatacgtgagccattgaaatggattgaccgagggggtattgtgctgctgcatactattttgggtctgagcaagcataatttgtcgatcaaacaaccattataattttttgctataattactgaaaattcaaatggagatgaaacccaatagaaaaccgttgggcgcgtaaccctcttagcgacgcgccatttcagaacctgggtatggtgttaaatgggcaagggctaggccgccacccccttggtggcgtgccgtgtcgtgatctggatgcggtgtcaagtgagcaaggatcaggtcgtcgcttccttagtggcgctctacattggcgcccaggtgtagtgacaaatgtgcaagggtcttcaca

SEQ ID NO: 185361 - DNA, 994 bp, Zea Mays
ctcgcgacatgctgagctctccactgaagataagcacaagatatccacaaagagaagacttgggatgtttaatggtggcaggagaagctacccgattcttggagggaggctccacttcgtaaagtttgagactgggaagctaaatgaatgtttggacttcatttcttccaaacaactacatcgtggtggtatgcaaatattagtttttattgtaaacaattagaatgttgtcttcgtcctagttatttccatcaccttgttgacatagtttcacatttgcgtgggaagggcttacctcggtttatcccgtcactatgtgagagcctccagcactggttctgccctgttgacatagttttggtgttccttcaatattgcttctgtgtacctacgaatcatgcttcacctgtattttcttagcattgaatagcagttatatatacgctgcaggaattgattcaccttcatggcgctctggggctcagtctgatgacattgtaattaaggtaaaaactaaagagacaacatgatcgatatgtctgaagactccatataactatataagtattaagtaaatgtttggattcaggacacctcaacagtccttaaataagaaaaaaataacaacaaatagaaaaaggggaaaagcctacagatcctctcatccattgaaaggaaaaagaggaagatgctgaattaatagtcttcacagaagtctttttttatgattgagtatctgtttaatgatgcattaataattctttcgtttatagatcagcattacatacttgatttttgcaagcacatattagttgtccttatttggttttatggcctattttgttgctgagtgtaatattttgtggaaaggcaacaggtggtggagcattcaagtatgcagatgtcttcaaggaaagattgggagtcagccttgaaaaggaagatgaaatggactgtcttgtggctggagcaaactttttgcttaaggttccaa

SEQ ID NO: 185362 - DNA, 771 bp, Zea Mays
ctacctccacctcttcggcaaagccatcaactcgcttcatgcccatgggcggcatacccacgacctcttccacgatatcaaccaggcaattgcatatgcgctcttcattcctcttcttacccaccctgttagctacttatacctgagaacaacataaacaacgttttttctacctcctaatcgttccttcttctttgagctgttccctaatagcagttgtttcctctgcagcacgctttgtacttcctctatatagccattggcgttttctttgccgcatggataggtaagacgagtttatacatgtttggttgtcgcatgatatgttaacaagagtggaagtaaatctaccaaatctctcacatctacagaggtttcgtgctggattttgaccggggaaagacagacggcagtgattagatcaaagtatgttcaagtcctcttaaaccaggacatgagtttctttgatacatacggcaacaacggtgatattgtcagtcaagtactgagtgatgtcttgctcattcagtcagctctgagtgagaaagttagttcttgtgccaaaccttccatgctcatttgtgtctgtcacatatatatggttactgagtgatttgtcgtttttaggttggaaactacattcacaacatggctacatttttcggtggtcttgtcattggtctggtcaactgttggcaaatagctttattgacattagcaactgggcccttcatcgttgctgcaggaggaatatcaaatatatttctccat

SEQ ID NO: 185363 - DNA, 319 bp, Zea Mays
tgaccattggttgttttgctcccgcagatccttcattagggatgaagttcttgtaatggtggcaactatagcttttgggatgggtattgataagcctgatgttagatgtgtaatacactatggatgtccaaagagcctagagtcttactaccaggaaagtgggcgttgtggaagagatggactgccttcaatctgctggctatattaccaaagaagtgatattacaaaagctgatttctattgttctgaggcaaaaaatgtaggtcatttttttgcatgctggatgttttctcacaccatccatgcagcgtagtgcttc

SEQ ID NO: 185364 - DNA, 577 bp, Zea Mays
gccagatttctttgtctgacttgtggaagcctcttacaactattgtacaaggctgctgtattgaagatgtctgagttccttgacctagagctacaagatgggataaggatgccctggaatgttattccaggcacaaaacaggagactgtgaactgtgtgattcctgtttccgctatctacacacctttgaaaccaatttctgatatccctgttcttccatattcacctcttcgctgtcgcatgtgtcgttccatcctcaaccctttctccattgttgactatgttgctaagatttgggtctgttcattctgctttcaacgcaaccagttccctcaacactactcttcgatctcagaaaataatctccctgcggaactctttcctcagtacaccaccgtcgagtacatatcttcaactgaaactggtcctatagttccaccggttttcatttttgttgtagatacttgcatgattgaagaagaaattggttatttgaagtctgcactggcacaagctgttgagctattgccagataattctcttgttggattcattacgttcgggacgtatgtgcagg

SEQ ID NO: 185365 - DNA, 460 bp, Zea Mays
ttttatttatttattttcgttttggtttgttttgctagtttgctagtttgttgacatcctctttggaaaacttgacgccagtctatcttaacttatacaaagcttaagcactacgatgcttataagttaatgtaactccatttgcagcttcagttgtttcatgccatgcattccatccttctattgtagatacacggagattttgttctcatcagtggtgatacagtcagtaacatgagcttgaaggacgctctccaggaacatatggatcggaagaaaaaggacccacttgctgttatgactatggttataaagcattcaaaaccttctatcttgacgcaccaaacccgtcttggtaatgatgaaattgttatggcgatagatcctgagacaaaggagttactttattatgaagacagggcagataactcacacttgcatgttacaattgataaggata

SEQ ID NO: 185366 - DNA, 408 bp, Zea Mays
agctaaatggttatggttagaaaaaactgatcctaacaagtcgtggtttggtttggacttgcctattcaacaacttgtcaagagattctttacttcttctattgttaccctggttggtaatgggtataatacattattttggacagatcggtggttggatgggttttgtatccaagattttgcccctgctgttgtggctaatgttgggaaacgagctatttcttctagaacggtggcccatgctcttcaaaactggcagtggatcagtggcattgagacccctcttaatttgcctgggctgcaacaatatcttaacctttgggatgcattaaggggagtggtgcttactcaggaggttgatcgacatgtgtggattcattcttcctctggtcagttctcttcgaagtc

SEQ ID NO: 185367 - DNA, 397 bp, Zea Mays
tgtttactacagatgttgcagaagagggtatacatattccagactgctcgtgtgtaataagatttgatttgccgagaactacccgcagctatgtccaatcacgtggacgagcccgacagagggactctcagtacatactaatgattgaacagtaaaccctttactttgtagtgttgtctaaactctaaactacttatgcttgtgatggtactatgattgccatggcaatgacatgattacaagaagccatattgtcaatgttctttgcaggggaaatgtgaaacaagatgatttgatatctgggattatgagaagtaaggcctcgatgactgggattgcttcaaaccgagagcctgaggattcacaccccagtttcttacccactgaagaaataaat

SEQ ID NO: 185368 - DNA, 371 bp, Zea Mays
gcgtcttcatcaactttgttagacgcaccggtgcagaccacatccatcctaggctgctcgttgtctgccattcaagctggttccatcgataaagggatatactgttagtctgatatactggttccatcaataagggaacttggagaaaaggtgattcaaaagaaatcgagcccaaacccgccttcgtgtccctcctttactccccaaacagaaagcccaaacccgcctccggggcaggatcgggccgggaagcacgaagaagatagaagtgcacttcccaatgcagttagacagagaaggcatggctgtgatgttataatgctgaaggaccccaagaagagattatgccctgtcatccaccactgcccgtt

SEQ ID NO: 185369 - DNA, 536 bp, Zea Mays
tttcggttgaggagcgggaggcgcctggtcaccctccagatttgggatcagttgatgccctggctctcccggaaatttcggttgcagagctggaggcgcctggtcaccctccagtgttagcgttggatctggcagaggatttgggggtcagttgtcaggaggactggtcttcgcatgttgttatctcgccggctgggccttgcttggacaatcctttggtgggggaccttatgtccggcttggcggaggctgtcactgctgggcagcatggttccaggttctcctatttgctgaccgatggtgtttctgctaatgtggaggaggcagtcactgctgggcagcatggttccggggtctcccaattggtggctgttggttctcctgctgttgtctctgccagggtgcggaggtttgagtcttgtcagtctccccgggctgatagatggagatcaaagccacccgtgttcaaagtttattctagaagaagattatctcaggctcaggtggtccaggaagaccttttactgcaatctgtg

SEQ ID NO: 185370 - DNA, 405 bp, Zea Mays
tggggatagagatctagaatctcttgcaatttccagcttatgaagaatttctttagccatcaacatctgtttttttatgttgcccacctttttctgactccaggaatgcagatgtttggacagcctcattagtttcccagcaaaacgctgtagagggcagcagccctccaaaggttgcaaccaagactgctgcacttcatccataaaaccctccattcttgtccaaaaactttcaaaatgaaaccttctttttccttgtacgagttcatgcaaaccaagcaaaaggggacagtgatcagaaatcaaggaagctgagctttgaaggacagagtttggatataaggtttcccaatctgcagtatggaacaccctgtccaaacggaccaaggtgggggaagatctctc

SEQ ID NO: 185371 - DNA, 465 bp, Zea Mays
agatatggaatgcatgcagagcattgcttcctgctgccactgccagccagtgtgtattttgtttgacactgtccacagtccacttcacccatcgccactgagatagtacgtgctataaacgtagtagtagtatatggtgatttgccgtgtgtttcgacttattcagtaaagaccgaaaaacattcggcaaactctttgttacatgcgctatcggccgtagccctaaaccgcgacagtgaccttgaggatatcaccgtgaaattagagggccggggcagtgatagatgtttgatgtcattattattgctggatttgaacaatcaggcggtgttagaaaaacctcaccactgtgccagcttttctctttgcagaagtaacaaggggttagaaaccacaaaccggtagtgctagtctaatcttgatctcatcaggtagctgcattgcttgtgaacgaggaagggagcg

SEQ ID NO: 185372 - DNA, 936 bp, Zea Mays
ggtaaagaggagtccgcgaagcgggaagatgtgctatccgagattggtctggtaatccctcgcttcctgtttacccgctgtttacatgtttgtttaccctacccaacaagttgacatctcatacttgactgaagttgtgggttgaatttaagaagggaacatgtgatatatactacaccatttctcgaagttgtgagtcattttagttttatcctaagtcaaacttcttgagctttgactaagtttatttataggaaaatgcacagacatctgcaacatcaaacaatattcatttagataaaaccatgaataaatgttggtagtgtatttatttgatatagtatatgttaatatattttctacacttggttaaagttagacaattttgactaagaaaaaatataaaacgacttacaatttgaaatggaggtagtaatttccaattgagctttgtatggtgtgtactgccttgtagcattttgctaagtcagcgttgtgtacaagtacttgtatggtttttgttttgacatttttgaacaggaaagaatgctgatggttatcaacatatttatctgtccattgctgacataatctttagtacctatgtagttttgttctccattgcttatttgcataaacaatatgcctattttttttgtctttttttcttaatctatctttgcttgaaatgctgcataatacattaacatacacatatactttcttttgaattcacagatagtcaaggaatgggtgaagcagttgactcgtaagaaaggatatgctgagcaattggttgaacaagcaaatgcaatcctttttacttttgggtcttacagattgggggtatcggcttctttggttcttttatcatataacaacttttcttgacattcagatattgaaatagcacaactcattgtatctatagtctta

SEQ ID NO: 185373 - DNA, 736 bp, Zea Mays
cagaagagaaggcttaagcgcagtcgaggagatcaaagtgcgccagcccctggccaaatataaatgtggttgggccacgttgggccatgtaatatgggcctcaatactgatacacttgtgtgaccgcgtccatatataaatggcgtgtatctgtacaggagagggtatcgaagaacaaaaataacaattctattatcgccttccctgctatcttcttcttccccatgtcatatcttcccgttctccacacctctagcgactgttagttcgtgccctagccgacagagttgctaacagagaagaggggtgaggtctgtcaagaatgccgccatgtcaagtcggattccgcgccgccatggagacaaacggggaggggtcacggaaactgcggtggcgcgaggagtagcatgcttcggggcgacgacacgagaaggagagaggagtatgttaggacacccgaaggagagactactagggaatggcaggtgacacagacgcctcagctgagagatcgagaacctcgaagaagagaggagtaggagaaacaacagtaccatgcgtgccgatccgagcagggagaggggcagcgcggagaggaagatggcgggatggggccgacgtttgctgcggtggtgcggggaggaatagtatgcggaagggggcggtagaacttctcaaaggatgcaaatgcactagaacttctcaatcactcactagaatgcgatctcaagcaaca

SEQ ID NO: 185374 - DNA, 434 bp, Zea Mays
gagtgggtgagggccggggcgaggaggtgagccacgagtctgcaacggcgcaagcacatgcctgagatgggggcacactgtgtgatctgtttgtcgcgttcctggagaaacagtgattctagctatgagggatgctcgacggagaagagaccggatgatcggtgaacaaccagaggttgaagaaaagggtagaaaagacattcccccaccttgaactctaataatcggtgcgatgtgttatggcaaatatacactcattcataagggtactaggcatatttcaacattggcggtgtggattggccaattccattgaagtcggatgtcctgcagcaaaatttgcctaacagtatgacatatttctagctatcatgtcattacttgagctgtctggagaaaagtacaattacctagggctgtctgactaggtgcta

SEQ ID NO: 185375 - DNA, 325 bp, Zea Mays
gtgtgtgtaagcttcctttcttttcttttactaggtttcaaaattcatggcatgctaatgtctgtttttagtgtcacatacttgataagttgtttgtgttgcatacctgaatgactcatgctcggaaatgtttgttaatactattatgcttatcatttctcttccctcaattcagttgcagatagaaaagacaacactgacgatcaaatggaaccatcgattttggcacttgatcgcaacaacacatgtgtaagctctactttattatggactcttaattcagtctgaaggcatgtacatatcttagaagataaacgaaggaatg

SEQ ID NO: 185376 - DNA, 342 bp, Zea Mays
aaacagttcgacaaccaagacttccgagaattctgcagctccatcggcacaaagccagtcttcgcctctgttaccacccacaatccaactgcgtcgtcgaacgcgccaacgacaagattttcagcgccattaagaaaatgctccttgacgacaaaaagggcaaatgggcggaccaattatccgaagtcatatgggcgctgaatacgacatagtgccgagcaaccgggttcacaccctttcgcctgatgtatggatccgaagcaatgacaccgcaagagttaaagcaccggtccccccgaacaaacaaatcagccgtccccgacgtcgacgaaccgacctcca

SEQ ID NO: 185377 - DNA, 348 bp, Zea Mays
gctattatggatagaaaccaggatagttatggtaggagagatcctgattggtgtaggggatcaatctggatcagcccacactaggaaggcctgatactgattgatagaggagatcaatctggcactatttctataagccactcatgatctcctctccctataaatactgtaaccggctggctcttcattcatcaatacacaatagcctacaccacatatctctctcacatggtatcacgagttcgggacactcccgttcctcccaccttccgctgaaatctgcagcctgctgcacctgcgcgctgcacgtctgcagctgctgcacctgcgcgctgctccatggccggc

SEQ ID NO: 185378 - DNA, 502 bp, Zea Mays
tggaaggagctaaagtgtgctacggtaacacgaagtacaaggagagagccaagggaggcaccccctcagagcctccaggatggaagttggggctatcacgagcatgcaagctgacatctggtatgggtgatggagatggcaaggccttgattgttatggagacaatctcagcacagcagaacacaaacgatcctagagtgtggcgaccctctagagagtggacgaaggccggagggtggtagagctcgacgcaatcacagagaaccggattcatgtctttatcaaaggccacgaacatgccctagagaaattgctcgtcgcgaagggatacacgcacatagtagagaggcatgtgaaccatggcatggcgaaggacgagcatcaagggaggtggcacgaggagtgttgactccgcgacgagctcggcgccagcgaagcaagagaggaaggcctcggcagaggaggcatcagaggaagccaaggatgcagtgcgagccgaaga

SEQ ID NO: 185379 - DNA, 734 bp, Zea Mays
gaaggaagtcttcaccaggatcgcctccaagcatccgaattcaacagttggtaacaatctgctcggccatctctagaacgtttcctcaagatccacgagaatgtttctgatgctacatcacgcgtgcaggtgtgttctactgcggcgcaccgacgcttgccaaggagctgaaggctctggcgcacgagatgagccacaggacgggcactcgcttccatttccacaaggagtacttctgagtttcgacggatagaatgggcagtcgatgctcgttctaacgtgatctggtcttttctgatctgatctcgatagcgttaggtaccggtaaagaagacagaattttgcacagatgcaagacaaaccaagctgacctctcctcctgatctggaactgtacatagcataaaagaagcaccacagggttagcttagtatacgtagcacaattcaaataaatatattgacaaagaaaagagagacagagaaagggcaggatagaggctgttgttgttaactcgaagatattgatgataggcatggcggtatacgtgtatacattatagttaggtgctaggtggtagttatatatatactgtatatgatatgggtcgatgaatatacgaggagccacatgctgctgccattctcaaatgtggacgtgcattcttcaggcgtgttcgtgactgtttggctggtggttgcccatgtgaggggttgctaaaaatgatttcatgcc

SEQ ID NO: 185380 - DNA, 424 bp, Zea Mays
cgtccgactaattgcgattagtcagccttatcgctagtccaagctcaattagggtctccgactcgactagagcgattagtcgtcctagtcgccgactaatcgcgattagtcgtccgactaggggttatggtcgactagttatgcctgttttgggcccactaatccggcctctattatgtgggtcaacccaccatctatacacagcacaaatattgttttgccctatgcccctgcttgtaccaatacggtacgcactgttgcgcgtgcgcccttccccaacgtcgccaccccttctccatcaccgccgccctcctctcctgccgccctgttgcgctatggcagccctatgctcgagtagcaactgtgccgcctccatcgcgtggcggctgtagtctgcagaggccccccctccagcgtgctcccg

SEQ ID NO: 185381 - DNA, 1190 bp, Zea Mays
aaagacaggcgaacttattttccttggaagaaaggaccgaattgttaaaatttatgggcaccgtttctcacttgaggaggtagaatccacattgagggatcatcctgatgtcagtgacgctgctgttacttttcaaagtaatggatctctggattttaaggcatacttggtgctgaggagtaataataaatttcttaaatgtactcagggttatagtggattacattcttcccgagatatcattgcaccacttcgaaactggctcatcatgaagtttccactagctatggtcccaaggctttttatccccatgaaatcattacctttgactttgtcaggaaagattgactatgtcaagttatctagcttggtttgtgcatttgagccttgtgaaattcatccagaaagcagtccagctgatcctcatatgcaagttatcaaaaaggtatgtacttatccttgattactattttattattaccctctctcctgaggaacctatttaattctgctgtttagttccagttaattgtttttgtgcatattgtttgttaatgagttagtgatattattcttattctgaaataggcattttctgatgccctactggttcatgaagtgtctgagtatgatgatttcttctccttgggtggtaactcaattactgcagcacatgtggcccacaaattggagattgacatgagattactttatatttataccaccccttctaaactttttcatggtttacttggggaacacagtcatgtaattcctccaactcctgaatttcacaacagaaagaagttgagaaaatatgcaagcatatcagattcctttggcccagtttctgaatatttggacagtaactttcatgaccaagggcagataagtaaagagggtgcatacgatcactttgcagggaatcatgtaagtgatatagatggccagcttagcaaaagtaggacttacaatacataccaagcaaaaaacctgtgccctgatacatgctcaaatgatgaaattttcagtggcagaccatggatactaaattttcacttacaaaaggtgtggtctattggccgttgcaatagatttatgcatggttctgaagggatggtacaccttgaagatatttgttcatatgttccatataacaaaaagggttacctcgtgaaaatttggagcat

SEQ ID NO: 185382 - DNA, 1107 bp, Zea Mays
cttaaagttccatctttcttggttgagttcattactccaattatcaaggtatataacagttggggtttatctttgggcatatttttatgcatttttaacttttattcttgatcctttagtaatgagcaccgcaggcattttttccctgacagatttgtaatttttgtaaaacatgtgtttgactgccatgatgatacttgaattcatactcatttgtccaggcaaccagaggccaaactactaagtcattctacacgttgccagagtatgaagaatggagaaataatttaggagcaagtgcaagttcatggactataaaatactacaaggtctgcttgtccccgcttgttcctattgtttactcttctgtgggcatttgctgaggatgtcatcattattatgttgtcaatcatttaaacggatcattattggtacaggggttaggaacaagcacagccaaagaaggccgaaagtacttcgaagatattactgaacataaaaaagattttctctgggtagatgaccaagatggcaatcatattgaattagcattcagcaagaaacggattgctgataggaaacagtggcttacaaattttcaggtttagcacttgcatcttttcccagtttgtcatgtttttttatgctggatccacactaaacggcgcaaactgattttcagcctgggacatacattgaccaacgtgacaaacatgtcaagtatagcgatttcatcaacaaagagctgatactcttctcaatggcagacctgcagcgatcaataccttcaatggttgacggccttaaaccaggccagaggaaaattctgttttgctcattcaagaggaattttgttaaggaagctaaggtgcgcctttttttaccttctttacattatagattatccagagtttatttatttatttttgctgctatttctattgaacacaggtggctcagttctctggttatgtgtcagaacactcagcataccatcatggtgagcagagtttagcaggtacaattattggaatggctcagaactttgttggcagcaataacatcaaccttatgtaccctagtggtcagtttggcaccagagctcag

SEQ ID NO: 185383 - DNA, 457 bp, Zea Mays
caggatatgctgaaaagaatctgaggtacgatttgtccagaactgacaatggcaatcaagatgttaccgtgcatccaaaaccaatggaagtttctggtaaagatgcttacggagtaaagacatctaatccactatttcgatcccaatgtgccaaaaagtatagatcaaatgatgttgaagatgatgatttacccatttcagtgaataatgttaacattgcgccaaatgagcatgctgaggtggttcccacaatgtctactgccatgactcgtgaatcaaatttacaagatgttccaagagaaagcacctctgatgatttagctccgaaagtggtttgttgccaacaaaagcttttggaaaacacaggagatgattcctgtaaaactttagaggtggttcaagattcaggcgatatattgtctgcgactccacgtggtcttcagatggcacacaatct

SEQ ID NO: 185384 - DNA, 760 bp, Zea Mays
acaaggcgtacagcttgagcacaagcaacacttgatcacaccaacaggagtaattgtcagaggacgcgagaacgaccatcaccaacgatacgaagtcgggaccaacagctgcctagacatggttggcgacgatggcaacctcataagatgcagtagggtcgtcctgtggggaatgccctagggtgggggccgacggctgtggagtgctatagcccaaaccctaccaggcagcgacggccttctcctgttcgagaagggtggctgtctggagatgaggatgtgtgttggtagcctccttgttcgtagcttgagccatggtgagcatgtcgtcaatcttcttgcgaaaggccacaacctcctcgatgtggccacgctccacggcagtcgatgaggtacctgccatggtaaaggagatgtgtgcgttgttgcggcaacgcagcacaagggaggtggtggccctagattggcggcaaccagggaaggagcaaaagtgagattacactcgtgataccttgttagagaaggcattaccacttagaaattccttaaatctcatactagaggtggacattgacatctttagcatgacaggcatcatggttcttaaggcgtcgcctaggcgtccaggcgccaaaaaatctatggtgtcggttgtcgccttgccaaaaccacagcaaaatgggagagggaagggaagaagaaagagggtaaggcagatccggcgccggtggagcgtcggcggcacgagcacgcgagcgcg

SEQ ID NO: 185385 - DNA, 359 bp, Zea Mays
ccgcaattgaatcaagaggcagcagcctccctctctcgtgacatcgccggtggtaccaatttgggcgccattgagggtgactacgccacctcgcctgtgccctcgcactcgcaggtaattgcggtggtgccaatttgggcggcagtgcagctggtgacgcctccctcgtagctccacccacaggttactgtcttgctcagatctgccctcattatagaagcaacatcgacttgcgtgcccacgacacaagctcgtgtcagtgctactgccaccatccctccacagcacagccacgctgcctgcctcatgtgtcactactgcgtcctatcctgccacaccggatagaacttctacaaggt

SEQ ID NO: 185386 - DNA, 461 bp, Zea Mays
aaacatttaactgcagtccatacccaagccattcaaaagatgtccttgttgcagatgctagttccttgaggaacacagatattgtcagtagatcccagaataaaccttctgaaataaatgttgtccacactctttgttctgagcctacagaaacatcactacaattttcaccaatacgtgagccagcaacaaccatatttagctcagagcaggataacatgtcaactgaacggttggaagtgccaaagcttgtgtcatcttgtccagtagtagataacagcaaggaggctaaaagtactggagaggagaatgcagcgcagcaaagcaataatgaattatcttctgtaatcaaatctccacaacctgcctcatcaggtatgatatggtcgtttgcataatcagatagctattgcaatcagaatacatattctcttatgttgtggtcatttgcattagatggc

SEQ ID NO: 185387 - DNA, 805 bp, Zea Mays
gctcctctttacattctgatgctcaatacattagtcaaagtttggcacgcataatgagggcactatttgagatttgtctgcgtcggggatggtctgagatgtcatccttattgttgcaatattgcaaggccgtggaccgcaagatatggccccatcttcatccacttaggcagtttgataaggatctttctcctcaggtttgctgtcaattatcattacttgtgtttcccttgtttttgaaatgtaatccttcctctttgaattaggtattgtggaaactcgaggaaagaaatgttgatctggatcatctttatgagatggaggaaaatgaaattggagctctgatccggttttctcatcagggaaaggtatgccttggcttaacaggtgttttttaattgttcaatatttttttctacttgttactaatgtgattaacatcctcttggtgaagttggtcaagcaatacgttggatacttcccgtatgtcaacctatctgcaaccgtgagcccaatcactaggacagttcttaaagtaagagtttgttccagttaagtattgtgtgccaattagaattttctatgatatgctcttatgcaaccacttattgtatttctgtaggtggacctgcatataactcctgaatttgtgtggaaagatcgttatcatggcatgtcagaacgatggtggatcattgttgaggtgtgtgattacatgtattgtacttatatcagaaagatggtgcaaaatttatttcacctgtctttcactaaatttattatcttgttgccatgccttttttga

SEQ ID NO: 185388 - DNA, 1286 bp, Zea Mays
cttatattggaaaattgtacaaatagacacttctctagtttttttgaggtcagcactttatgcgtgtcctgtttatctgcagtcatatttgtttttctcctttgtatttattttatataagataacagcataactttctggtttccttcatttccagtagtgtactgctaatttatgtatctttttgttacagcagcatctgtctgcccttctagcatcaacagatgcggatattgttgaagcaagcttgcagacattaatggcatttgtagacaagtcagttgggaaaagctcaatacgcagtgcatctctcgcttcaaagttatttgccttatctcaaggctggggtggaaaagaaggtggtcttggattagtagcatgttctctacccagtgtatctgatccagtttccactgaggttggatccacactccattttgagttctatcgtgctgctgataaatcagagaaatcccagtgtctagagaaagagaacaagttggaagtaattcatttatcgaatgtcaattcgtgcaaggaggcagatcttgaaatattggacaggttggtcaaggattacagtgtgccacaagctttaaggtttcttcttcttacaagactgagatttgcaagggcttttgactctttaacatgtcgacaccagtatatctgtatccgcttgtatgcttttattgttcttgtccaagcaggccatgatctggaagttgtatcaacatttttgaacaatgaaccagaattcattgatgagctgttatcactacttagctatgaggatgagatacccgaaaagattcggatactgggagtcctttcattagtcgcactgtgccaagatcgacctcaccagcctactgtattgtcctcggtaacttctggtggtcatcggggtatccttcctattctcatgcagaatacagtggattctatcatcaatggttctatgaaatggtccataatatttgctgaagcacttctttcgcttgtatctatgctggtatcatcaacaccaggttctctagctctacaagaagcaggttttataccaactattttgcctcttctcaaagacacaaacacgcaacatttacatctagttagtaaggcagtgcatgttattgagagcttcctggattatcacaatccttcttcagcagtgttcagagatctaggtggactagatgacactattgctcgtcttaagctagaagtatctcaagttgaggttgattcaaaactaattgaccattctaccaatgaaggaaacg

SEQ ID NO: 185389 - DNA, 376 bp, Zea Mays
ctcgtcgggcgtcaatctagtcatgtgtctgccagtaggtggacgggttgtagccggatagctaggggcaactggcgtggcgggaagtcttggaggggatggtgtagcgcgggccaatgaacgatgtgtggatggtgctggtgcccgagccgccacagtattgcgacgggtgtaggtgtgagctagggtcgttgcctcctctagggtggcgggtgtgtcaagcttgatgacggtcttcaatggtttgcccaggcctacgatgaagatggagatatgttgcaacttggagaggtcgtcgtagtgggtgaggtgttagtagaacgcattgatgtactcgtcgagggacccctgaaggcggaggtgtgcgttggcgagc

SEQ ID NO: 185390 - DNA, 426 bp, Zea Mays
ctcagctccatcaggttatttctaaggaagcctgtaacgatggaaaatcatcagatttagcaggtgactattcaccaatggattgttcgccatatcctgcagaagctgaacatgtgccaacagaggcatatgtggcttctggtcagcccgttcacattggtgatagtgttatctcaaactggaacaccagctgtgctgaagatgatgtagtttctgcaaccgagcacttgattattgatgtaaacctaccaatgtttggagatgaaggtagaggaccgaaactagatgcatctgagagcaattttggtagcagcttttctagttttcaaggagatcaaagtaatggaccacagcattctttcactaatattgggcaagactgtaacgataatacctacagaactccccatgattttgttgagcctc

SEQ ID NO: 185391 - DNA, 329 bp, Zea Mays
ttgtgccacattcagtcttctgtagccactatacttggggttggtgaggctggtggaaggtttcagttcttctatacgtggaactaacctataggaggccagactgctagagcggtagagccagaaagtaatagttggtgacttggcggggacatttatgttatgctacctaattattaatctgtggaaaaggggaagcttttggagtagagcttattttttgttcgggttactatttcctctaattgtgtgaaaactgaaaagtatggttcgtgtctgaaaagcaatagttggtcgaggcatatttttgtatggttccactgtactac

SEQ ID NO: 185392 - DNA, 567 bp, Zea Mays
gacgccttcgtcgccggttcgcgcggccgcccagccctcagcttcctttgccctaagatatcgctattctccccgccctcgcactcctggttccgctggctcgtcggtgcgcctcgcgttctccctcccttcaccgtcgctgctgtcttacgtcccattcacggcgaccatgacgccattgatcttcccagggaagcaggcaagtctcaccaacccacttttcccaacaactcatgattccgcctgagtcctgacgatgtccctatacttctatgccttccgcagacgaaatccgggggttgctgccacgcggtttcgacatcataggggtgctgctcgtggggggagagggttctgatgcggacgtcactcgcgcactggagcaggctcgggcgctgagggagctgctgtttggtgtggcagcgagccatggcttggtaggaggccacatggatgcagccactggggagattcgatttgttgtatctgagagtggatggacgaactcggtggaaggatctgtggttacatgggaggatgagcccgggaggttgttgtgggagaagg

SEQ ID NO: 185393 - DNA, 932 bp, Zea Mays
agaagaagaaaaaagagaggaagtacgaacctgtactatgcagatgtggtgttgaagctaagtatggactagttccttcagagcttggagtaggatatttttgtggtcatatggtagactacgaagaggttggtaattgtatttaatgtcatgagatatattgttgcctccgtactaatgttttgtttcgtatgcgtaggagaccaggaaatgcacttgggagtactacgatgataaagatgaagtgaagcatgagataaggtcgaacaaactcatgggagagaagatgcagtgtggatctcagctcattgattcgtacattaaacagtgcggacagaagatacgtaggtttgccgaagaacttggctgtaatagcccgatgcgtgttgagcggagaaaaaggaaggtggcttacgagaagagggcacaggaggctagggaaatgccggcggccagagccgaggaggaaatgctggacaatcttgctggtcatctgtgtaccagtgagtgacacaaagacgtgttgtttttgctcccaaattgtatttgtgctgtcgttgctagctacttgtctttgttaacttgcagagattggatgcaccgggaagcacatcgtagaggaggcccgtgcaagatacgtggagcagaaaatggcagaggtggagttgctggcggaggaggaaggcgacacttcaagattgagtgagcttctggagctagctgagactggattacatgtggaggaggaggaatttatgtctcaggctgccgatcaagcagaggccgctcattacaagcgaaaggcagatgaggcaagtgcaggtgtaatgttgttggcccaggaggaggagaacgagttaatatcccaggctgcagatgtggtggaagcagcatactacaagagaaaggccgaggagggaaatgcaggacaa

SEQ ID NO: 185394 - DNA, 1241 bp, Zea Mays
gttcaatatttcctttgtttttcaactatgccaaccaccgatgattttttatgcacgtgaatttgcaggtatggagcagatattgctcgtggaatagcagaactccatgcagcgggtattgtttgtatgagcataaagccgtcaaacattcttttggatgcacatggacatgcattcgtttcggattacggtctttcagcaattctgaagaaccttactagtaggagagtacctgatgactccagtgctggcattgatgctacactgcttagccccaattatacagctcctgaggcatggggaccactgaagaagtcactgaatatgttttgggatagtgcaaacggtatatcaccagagtcagatgcatggagttttggttgcacgcttgtggaaatgtgtactggtgctgttccgtaagtagcatgatattcaatttgttgtccttaatgttttgtgaatggtgttgttatatgctcattgaaatgcagatgggctggactgagtgcagaggaaatatgtaagtctgttgtaaaagaaaagaagccaccgcctcaatattcaagagtagtaggtgtaggacttcctggggagctgtggaagatgattggtgaatgcttgcaattccgagcttcaagaagaccatccttccaggacatgctgaaaacttttcttcggcatcttctggacataccacggagcccacctgctagtcccgaaatgtaatttcatctaattttgtattactttatgttaaagcataatacatggaagcttaaagctttggagaacttttacctgaaggtgtagaatcaaatactgaattatctttcagctaaccattcctgaagattcctttacctggaggtgtagcagcacatgttgagatatcttcgagctaaccattcttgaaactatttgcatattgtttccccgactgatttttgacctagttacttgcttatgcagtgattttgcaaatgaaaacttgcccaatggcatgcaacctccaacaacctccatcttagagatggttcatgataatccaaatgccttgcatcatcttgtatgcgaaggagatgctgctggtgttaggtttgtctctggcaactcttgtatggttgcatgtatatcatataatatttcgcactaaaccttttgcaaataccagggatctacttgcaaaagctgcatcagagagaaacgatagtttaatccgttctctcttagaagcacaaaat

SEQ ID NO: 185395 - DNA, 290 bp, Zea Mays
gttgatatatatatagaaaaaccagataaatagtcacatggttggctattgtcaaggcaacagatgaggcatactcttctgtatatcttacgtatagcacaaatgcatcactactgtttctcattatatttgcgatagtaatcatatacagacatgaacctttaattatctaccatcctctctacgtgtgaaaacttcaatcctacgaccaacgggtgcttcatccatccggcatccgccgagtagctagcaagtagactttgatgttggcaccacacagtagcaaaagc

SEQ ID NO: 185396 - DNA, 409 bp, Zea Mays
gtgacgtgtcacttgtcagttcagatatgtttgagtcattactttcttcctagactatcttacttcatacttaccgttgtcatctgtacttttctcatgtaatagtatatccccccctttcagttcatggatagagcaatgcaataccttcttcatgctgtctgatggccagtcgtgggctatgctgcaaaatctcagggtacatgctattactttagatttgcaatgtagcagatgacacagtgagctttggcctttcgaagattacgtgctagtccttattcttttgaaactgtatctttttaggacaatgggcagtctgttgcatttgattgccctgagatggataaagttgttgatgaggttaaaaacgttgaagagtggctcaatcagtgccactgtactctac

SEQ ID NO: 185397 - DNA, 618 bp, Zea Mays
cacttgaagcatcaacagactctaagaagtaagtcccctcaggactgttcacaagaaagttgatcaactgatgtcccctcatgtcagtccatccatctaacataagtgtgcaaccataagtcttccaagctaactcttgatgagctctcaagttagtcacatctttcacacactcagcaagtaaaggctctttaacatcatgaatactaggaggaacatatccagtaccatattgagcagtggcctcacaagcaatgtgaaactgtctagaattaatggcattaaaatgtacactacactcatagaaccacatagcccattgcttgttgacataatctctgtcagccttagacttagtgcatgtttccatggtggtttggtggtgtgaccttgaggatcgcctctcatccacaacttgttcgggagttcttcgaagcaaggttgtgattttccctttttctttttccttgtttgatgtctgtggctgtgcagctgttctaaactgaaatgcagctctcttccttttggcagctgtccccgagctaggttgttgcatagatgtggtggaatcctcttccccttgctgcccctgaccatcatgatcatcatcatcaagga

SEQ ID NO: 185398 - DNA, 315 bp, Zea Mays
ctcgatgacgaactcagtggagaagatgttagtgagtttggcgccgtatccgttcctcccgccggtggtcttcttctcgttgtcgttgtagttgctactggtgaggaggtggcccaatatcatctctggcacgtagacgccctcctcctggtggacctcgacggggatcccgtcgccgttgttgtatacggagatgcagcagctgtcgacgtcaatctcgacgcggagcgcgtccatcttgggatcccgctgcttgttgtcggcggcgttgacgaggatctcgtcgaagatcttgtagagtccagggacgtaggt

SEQ ID NO: 185399 - DNA, 308 bp, Zea Mays
ccaaagtgccaagggagatggatgataccttagctaccataaggatgaaattgaagaagcggaagaaaggcaaggatagtaatgattttgatgcagtggctgaatgtggacccgaggttccggcattggttcaacaggaaggtgaacgggctgttgttgatataggtgatggtgttgctgatgagaagagcaatttgaatgtcgtgaaactggagggtagtgatgtttctgggaattgtgcacagggtttggatgatttggggttgaaagactccttggcagtgctgtttacaagacctggtcggaag

SEQ ID NO: 185400 - DNA, 350 bp, Zea Mays
tgaatggactggttgagcttctttaaaaccaggtggagtatcctcccttggaccattaccaaatactggaggtttggatggttcaagtccaaagagcccagcatttgtccagagtttaacagatggtacaacagtagacgtggtagaggcatttgctggaacaccttgagttgcacatctgtcatcgattagttcggtaacaggctcactccacgaactagacacttcactggcaccagcagacatagtagaggtatttgtaggaacatcttgagttgcacatatattatctgatggtttgttaagaggctcactacataacttagacacttcagtcacaccacaatcac

SEQ ID NO: 185401 - DNA, 525 bp, Zea Mays
ccttcaaaccgacgaggtcgtccaccgccacggtggaggccacagccccaccgatgatcatcacggtgagcagcaacagcagcagctcttcgactacttctattacgatgccaccgccagcgacgatgcaagtagcaagcctaccatagacatcaacctcgacaacatgcaacaattcgattttgacgatagttgtgccgccgccgagaaagtggatctggctccggcagctggggatggggaaataaggcatcatcagcacctcgacatgaattgccaaattgaccacaaagattatttcgagataaaggcggcgtcactcgtcgacgcctttgacatccggcaggacctgcagccggtggcagacgtgaacgccgaggttgacattgacatcaagacggtggatatgaatgccggcattggcatcgacatgaaggcgatggacatgaacgccaatgtagacgtcaatgccgacctacagggggatgatgccgctgtcaacgtctccacctgtgaagctgaagc

SEQ ID NO: 185402 - DNA, 547 bp, Zea Mays
cgcagtggaggtgaaaaccgtgaagtgttcgcccgcctccctgaagccacagactcctctatttatagcctcaaggagggctgccatgagtgccggggttggccgggtatggtgaggaggcgaggttgagcacctgtagacggtatggcctgtggtatgaggcttgtacttgctgttgacttatgcctggtggagacgtctggttcctgtatttgcatctttgactacgcagagagtcgaggctagggccgagggctcggtcacatacccgagcctacctgatggggaagttgcacatgtcgtagtggttggtgtagtgctgagcatggcaaaaagcccatgggtaatatgtcagctcccccgttttcggtgacgtcgggcgcccttttgttgataataacgaggtcgatgccgtgctcgggcgaggcgaaagtctgcccgaggccgtgactgagcccgcaccgggattcgtagacgtgcgcgacacagttgaaggagtggtctcctgcggtattcgcggggagtaagtagccgaggctgggctcgg

SEQ ID NO: 185403 - DNA, 513 bp, Zea Mays
gttagggtttcactgttcaacatcctccaccacagcccctcgccggacttcactctgaacccggtgaacacctccacgaaccaccctttcccgacgccaggtcctgctgatcacgtcgttttggtttcctagactgggtggtcaaagttccagagatggagtaacgccagtcctgtctcctcgttttccggcggctcctgcgtggtacctcactcctacaaagaggtcatgctcttcaatggtgggagtgtagcctctcctctgctgagtgttgccgcttcccctacgaagagaggtgccattcaatcgcgatcggtgaagacgttcgatgtgcgtctggtagtgcagagtcgggtatatgtgttgcctaaccgttctgaaggtggttggcaggtggtgcgaaggagagctagacgagctgcacccgttcctcgtgatggtcccttgaggatctccgaggcaggtgcttcagttgtctctctccctcccactttgctgagacctgcaagcggc

SEQ ID NO: 185404 - DNA, 299 bp, Zea Mays
gtcatggcaaactccgacgataggcgggaggtgacgtgctggagaagagctggtgatgatgcggtgatgatgatgtcgtcgacgtagaggaggagataggccatggcgtcgcccgtcttgtagatgaacagggaggcatccgttttggaggtggtgaagccaatgcttcggatgaagctggagaagcgctgattccaggctcgcggtgcctgcttaagcccatacagggacttctgcaacaggcagacagagttaggtgcagcggggtcgacgaatcctttcggctgctcgcagtaaac

SEQ ID NO: 185405 - DNA, 525 bp, Zea Mays
aaacaattcgatcatcacatatctcctcaccataaaaacaaaccatttaactttatataaaaagcaggatcatagttacaaatcagaaatgtcaactgtgaaatgatggcacaaccacaagttgaccgagtacaatatttagaattatttttgttagaaaaaattagttgttgaagtctgaaaatggaagctgtgaagtccaagctctaatctctaagactcctttcgaagcctggcatggaaagaaacctagtgtcagtcatttgagaatttttggtcctgtgtttggtgtaattgattaaagagctaaagtatgcataccttggtaaattgtgaagaataaatattcaagccatgccatgagaatgtcattgactattaaagattcaagccatgcatacactgttgatctacttactgaaggtggagagctgttctatacttctacatagcgtggtcgcaatttcatatatctagttagaggatgtttcattcaaataatctggtagacctccttgtatcaaa

SEQ ID NO: 185406 - DNA, 297 bp, Zea Mays
cctgtaaatatcttggtgtgcctctttctccgtgcaagcttacaagggatcaaattcagccatttgttgatcggattgcagaccgtctccctggttggaaagctgacttgttatctcgggaaggtagaagaatcctagtgcaatctgttttgacctctatgttggtgtatttgctaatggctgttgagtttccaccgtgggcaatcgaagaggttgacaagatcatgaggaggttttgtggagaggaaggaaacatttcagcggtgtccattgtaggcttgcttggccaaagtcctg

SEQ ID NO: 185407 - DNA, 567 bp, Zea Mays
gctagatgcactgaccacggtgacccatctcgatcgatcggcggcttcgctagctagctgggacacagcccccatataaatcatccactcctccgtagcaagcacatcctgaagctgcctttcttttccaataagctaagcagcaggtgcaaagggaattcgagatccagagagctagctgatcgatggatccgaaagttggcgttgctctgaccctctccctcgtcggcgggctaagcacctcccttggtatgtatatatgcagcagcactttgcttcctctcgctgctcatggtcgctagaattctttctagtcgtacactactatttaactctcatagcttcttccttttcacaatattatccgatcgagagctagctatagatagcttctgttgtatatatatatgcacctcttatatatattagcttcgatgatctagctaggataaatttcatggtatatatataaccacatgtacatacataaggaaccaccactgaattctacccaacaaatgttcactaggtgcactgttggctatcctcaaccatgcgccaaacaac

SEQ ID NO: 185408 - DNA, 672 bp, Zea Mays
tttttttgctgacaaccaataaaatttctgtgctaaattttagatttcctctactatgctgttaagctaattgtccatgttttcttactgctcgaatgaatagaaatctggaattatgctattattaaaactgggtttcaacactttaccattaatcgaacgggtttcgcttgaataccattacgaaacttgacataaatgttgtaatgccgtttcattattttataaagctaaaaaggaaataagagagatggagagacaattttgctctcttccccgcagcgcacggtggtctgggtgtggccgtgtgggtgtggtgtctgtagtctgtactcgtactcgtagatagaggcttttcaagtgccacctacgcaagtgcaattcaagaatgaatcgatggagagaaatttggcaaaatgggtcgctctagcttgccgctctgtaaaacacaccgcttctagctgtactcgtaaaaacgggtcgctcaagtctgatcgctcgtcagaaggggtcacggatacttttggggcacctggcaagtgggcccgcgaaggcttgtcccgattatgcccttacggtataatcgcatgccgtctgtttcccttcctcttctctggacgccgaggactccttctctgtcttcgcacgcagcttcctcctcctctgtccaag

SEQ ID NO: 185409 - DNA, 469 bp, Zea Mays
caacctgggaaatttgatgtgtgtgtgactagttttgaaatggcaatcaaagaaaaatctgcgttgaggcgcttcagctggcgctacataatcattgatgaagctcaccggataaaaaatgaaaattctcttctatcaaagactatgaggatttacaacactaattatcgtctcctcatcacaggcactccactccaggtaggcttctcttgccactatttgtttttatataatgcgtgcacctggaacaatgatttaggtaccacttcagtaaccgtgttgtgccatatttattttttggtttaatctgatcctagtctgatttgctgctacatggcagaataatctccatgagctctgggctctcctcaatttcttgctacctgaaatatttagctctgcggagacctttgatgaatggtttcaaatatctggggaaaatgatcaacaggaggtggtgcagcagctt

SEQ ID NO: 185410 - DNA, 2724 bp, Zea Mays
ccagaggtcgccgccgtggggctgcacaattacgtcgcgggccacgacgaccccaccaacctggacaacggcgaggtggaggcaatcgcgaagaagtgagtagctctcgtgtcttgttgcagcattgagtttattggtgaaatggttcgagctactgctgtgttgcctcctggtagtcttgttgcagcattgacgttattcttatatttggtagtgagctacctggatccaatgaagtgccccttagttgaggtttttattttgctcatgaactaaatattagtacttgcagacataatatagtactgtgattagctcagccttttattgtgatacgcacttgtctccccactccatttccaataattcttgcacgcttgtttatttggttcccccatagtcccattgattgttggaatgcaagtaaattttggtttagctagttacatgtatgttaaaagaagttatatacaatttccatatttgtaagtttttttttggtttcttgggaatctaaattgcataatcagttcccgttatctcttttggaggctaattattgatgttgctgttgctcctcttcatatattcttataatgtgcaattttaattttagatatggagttagcacacaggatgacgccttcaaagcagagctctgtgacttgtatgccaggtgtgcttctcggtgctcttgttttttccccagctggcacatgtgcttgtgtgcattaagttttcttaaattcttaaggtgtcacctcacctcacgctttagtcgcttataagcgtaaggtggtagtaaatctcaatcgccccgcttcgtcctaccaacttgataaccatgggcataactagtgttgtgctactcactactcactacctgttgccccctgcatactacactagttggaggcacgaaggtttctgcaaacaattgcaggaaaaaggaataaccataatcctctagatgtaatcatactattgactatatattaagaagcaattggtctctgtttttttaatctatattaagggacccaggcaagcaaataaattattgctattaggcgcagtcagccggccactcagtttatttggtgttttgggtttgtatatttggtgagcaaaatttcagttttctgaatagaaaacccagagtttttgcctcaaaccagaacatacactttgttgttcggtgtcttcttgtgtttactgaagaaacggcatggtaaccagggacagatcgcaaggggtaggaacagtggctagtttggcggacttcatcaccacggctggcagcttgccgagccacgatgaccgaggtagtcctgccgaactccagggagacttcattcctcgatgatctcctaatacaaactagggtctgcctttatagtatgaggcagccacaaaaataggaactgaataacttattttggaagtaaactaatgcatatctccctagaataaaactttccaactaactcgatttctagccacgttgttggtcactttcctgttttccgcctgctgccccttgattactttcctgtcttgcgcctgctacttcttgggctggatcctggcgccgacgcttttgatattggcagcccacaaaagcgtcagtaacagcttgtcattgtcagtgcactacaatgttatcaagtcatctagttgatcttagtcgccatgggaccaaccaggtgactagttggtcctagtcgtcctatatatatcaggactaaactaatataccaaatatgtactgatgtactatatgtctggagtataaatcaagcaggaagataactctagggtggtggctgcatgtaggcctgcaaattgggttaaacaatacgggccttagtgaattatgctatcccagttgcagcctatgtcctaagctgtttggcaattccattatgtttctggtcatccacctcttagtcagatgactaatcggatgacaagaaaactacttgacctaaatgagtcgtagcccctagtcaagtccaggatactgattgggatgactaatcggatgggttgataacactggtgcactagctgaggctagcataccagtgagtggtggttgtcaagtcatgcgctcgtcacggccacctgcatgtccatgtgccatcatgcccatgttgtggcagctagctttcttgtttgcctgggtcagttaggggaaggagcggggagggataagtggatagtaacacaatgtggggtcagctggtccggttagggaacaaactgttgttctctgtacagggcaattcacatgcctagtgagctacctactaacgaaccatcaatccaacatattcctcataaattgccttctgtggccagagctaatatgcacaacacaagcaaataccaagcttgtttggtggtgttggttgtggaatttgtatttgtgcatttgggtggtgtctccaacttttaatgacagcctttcagtttcgtggatggatgtcaacaatcttgcctgggtacaactgaactcatgtatacaatactcatgtagtcatgtattagcatctagatcagatgggcagttatttggtcatccttttcctgaccatgcttttatgcaggtatctttactcagtacttcctccaggagatgaagatctcaaaggtacagaggttcaggcaattataaaatttaaaagtgctcttgggcttgatgatgtagatgctgctaac

SEQ ID NO: 185411 - DNA, 305 bp, Zea Mays
gggaggctgggggagcaggagccatgagggccatcgggtcaccgactgaagctgtgtttggggacctgtagttggaaaaacaaatagtggctgacaattggttgccacgaaatcaaggtcatggagaaaatccaactcaggaagggaggcggtgggtggttcggaagtaggcgagaaagggaaatccatcttgtcgaagatgacatgacgggagatcaagagacgatgagtggtgaggttaggacaccagtaccctttgtgatcaggggagtacccgagggagacacaacgagcagagcgaggag

SEQ ID NO: 185412 - DNA, 584 bp, Zea Mays
gaaggctgctgtctgagtccgattcccgtgataaatggaggcctcgtcaccggcaggaaagtcattctgttggaacagctacgtaccgtgctgctccaggctttggatccgagaaaggacgtgttaaggactcgtctaatgttggttttgccgctggaagaggcaggggaaacccaaactcagttgcatccttcaaccggccatcatctgcaggatcaatcggtgctccagctgtgcatgggaaatttgcaaaaactgcagttagtttccgctacccaagagggaagcttcttgatatatacaggcagaaaaatatgatgtcgtcgtttgatgatgcccacatgaaactggacgaaattccttctatcacactctctattgctgcaaaacctctagcatttgttgcaccagatactgttgaagaggtaatacctaggctatattttcctactaactttaagctctaatctcatttcccccctctttatctaccttcttgactacttgttcaggctctcctggaagatattagaaagggtaaagtcattagcagtgaaggaatcaatgggactggaaacaaggag

SEQ ID NO: 185413 - DNA, 527 bp, Zea Mays
tcagtccctgttgatatcaccatcgccgacgatgttcatcgcatcgccgccatccgcgcgtgtcctacatatttgttgctgttcccgaggcagcgggatacatctgttcttcctggtgcttgggtttgacgcctctcctacagaaaagatccatctgctcctgtcctcctgttaatgccgatctgaagtccttcttggttcctgctatcataattcgagtcacattcatgattcgcatgcaaactgaagtccaatcaacggaggcatcctgtcctcacgaggagcaagtaggcaattgcagaggccgtgttacgtacggttcaaggaagtgctaccatagtccgagtcgtttctttactcaaagaaaaataccagagataaagaagaagcagcatgtcttccgcatcggacttggatcaaaccagccgtcactcagatctggtccaaactaatcggcaacatacagagctaagtttctctaatatttattttgtgcatttatttaattattattgtcttttcaaaaa

SEQ ID NO: 185414 - DNA, 1499 bp, Zea Mays
tgaatgtttagctgccattcttcaaaagaaagaaagccactatgacttagatgtatacgcttatgtaattcgtcaagtctactgggtaagttttccgtgtccacttcaaattacaatagctggctgtgtaatattattgatttccatggtcaatgacatttaataatatgaagcgtactggtaaaggtttcaaggattacacaggtaaggttggtgctgctgatacagatggagttgatacggcataccgcctagtcgcagatcacatgagaatgatcgctgttactaatgcacccggttctcaacttggttagagcgttatgtttctgttggtcacgaatgttaatatagttacgacatcaatgtatgggtttgtcatgagcacgagtacaattattggtcattttcaaggaacaatcagaccaatctgattgttggatgacttattacatgaatacatttttttgtcattacattgttcttattgtgttaaaattggctttcatctttatgaataccagggttaggaaatgaaggtcgcgagtatttcctgaagtgtgctgataaacaggctgtgaagtatggctatcaagtacttaagataaatgaagaggattacgacatgtaagaacaatcacttttatttgaatctgtgctttattttacatgtatttgtacaaaaacagttttccctgtttacaagtcatatttttggataatgtattctcacgcattataaactttgaatttcaataaaaacctttgtatggcaggatgtcttcttcaatgcaccggtgcaaataacagagcatccagttaggtcacctgtcagtcttcatgattttcagtatgagtcgtcgttagcaaattttgtatttttgctccctgctgtattgagttttcgctttgtctttcctccagaagtatcttgccaggaacaccttgaaactacttatgcttggtgttgctgcatatatgtcattttgcaccctgctgtattgtgtttctgctttgtctttcctacaacagttatcttgccaagaattgtatgttaggctacttatggttggagttgctgcatgctgtcatctcacagtgtgcagttaccacttctatcttttgctgtgcacttctttactgaaagtaaaaataacattcaagatgaaacctgctcaggatattgattctatgactgggttagttcttgccagcctgtcatgcaacttctattccgagtaggttaaacatactcacagtgggtatatagaaagaatacatgccatctatgattactgcatgtgagcttgtactcaaatgattttttttccttgaacagtgttgttgatgcaattcttctaaatgaacctgatttatgtaccgagcttgaaagagaaataatcgacagaatagtcaaagatgaagtgatgatctacaaaaagactaaagcagaggtaatattggtttcaaggtgatccactgaagtttgtatagttaaaatt

SEQ ID NO: 185415 - DNA, 511 bp, Zea Mays
ctgatgttgatggggttggaagacatatagacagtactgatgttgtcagagtagaccagagtggtgcggcgcagaggagcttgcagttcttggagtaactggcgcaaccaggtggcgtcagcgacggctttcgccacacctcagtattcagcctcggcgctggatggggagaccgtgtttaacgctcaaaggactaggagatgagactgtcacccaagaacacggcgaagcccgaggtagacttgtgtgtatcaggacaacttgcccaatcaacatcgtagtaaacctctagctcggtctgtgtacaaggtcggatcaacaagccgagacgtagagtgtcatgaacgtaacgaacgatgcgcttcagagcagctagatgaggctcacgaggatcatgcatatgaagacagatctgctgaactacataggcgatggcagacctggtgaagatgaggtaatggagagccctgccaggctatggaaatccacagggtcagccactggatcacca

SEQ ID NO: 185416 - DNA, 1348 bp, Zea Mays
actcgtgcgatctcctgtggcgacaactgggcgatcgacgccgccgctgctgtcgccgtcctatacgagaggtgcgcaggcgttcgttggtcccttcgccaggcttttgtctacccttcgccgacgacgagcacaagtatgcgcacccatctcttcccttcctgctttgcaaaacctagtcccgaaacctaacttaagctatttatattcggatctcatctaattgcaagtgtatacatctattattcctactagcttctttttttttgcaaaaaaatatttggtgtacatgtttacacaatacaccgatgtcctgcgtcagcccctgagaattatatgtagtctcattcgtgtgctgacattttcgcagtgcctaacattttaaatgaatctttacaatgtccacatctacaacttaaattggtgatatgagaattgggatagccaaaaataaaaaaataaaaaaataaaaacagcgtcaaactctgattttacggccaagagaccgcaacgctacaattgcgcttaaggaattttacgaaaatctactgcccactgttcttaggtcatagctggaaaaccccccatgcatccggggctcctggcttgtggtccacaaatttattatgttgcttgtgtcctgggtggactataagcgttgaggttataagatggcatttgaagtagaaggatttgaacctctagagcagagttgctggtcttccttgcacttgagctgattgaactgtaattggccgagggttttctgtgttgcctctgttttgactgtttttctcttattcatggtgaccagtttatttgcaggccagatttctttgtctgacttgtggaagcctcttacaactattgtacaaggctgctgtattgaagatgtctgagttccttgacctagagctacaagatgggataaggatgccctggaatgttattccaggcacaaaacaggagactgtgaactgtgtgattcctgtttccgctatctacacacctttgaaaccaatttctgatatccctgttcttccatattcacctcttcgctgtcgcatgtgtcgttccatcctcaaccctttctccattgttgactatgttgctaagatttgggtctgttcattctgctttcaacgcaaccagttccctcaacactactcttcgatctcagaaaataatctccctgcggaactctttcctcagtacaccaccgtcgagtacatatcttcaactgaaactggtcctatagttccaccggttttcatttttgttgtagatacttgcatgattgaagaagaaattggttatttgaagtctgcactggcacaagctgttgagc

SEQ ID NO: 185417 - DNA, 658 bp, Zea Mays
gggatgacagaagactgagctagctgagtgaggaccgcagatcctggatgtccaagtcgttgatgccacaacgaagaggtggtagcatggagagaagatgtcgtgctcctaagtgggtagagtgggtcggagctatcacaccgaaggatcacgcgccgagtgggaagatccttcacagagcagccaagagggtcaaattccatagaacaattattgtcagtggtgaactggcgaacagaaattaaatctttaatgagagaaggtgaaacaaggacattgttaagacaaaagttatgagaaagttgagtggtgccagtggaagtgacaggaagaaggttgccattgccaacaacaatgttagagggtagatgatgagaagaagagaggtgggaaagtataccagcgtcgaaagtcatgtgactggaggcacctgtgtcgaagaaccactcttgctgctggggatgttgaagagtggtggtttggaaattggtggcgagttgttggatatcccaaccaggagggggtggagcagcgccagtgtagtcaggggccggcccatatgcttgaggggggggggccaggagcctgcccactggctgggaggaccagcaagaaaggcctaaggcggttgagttggagcaggaggccctaaggtcgg

SEQ ID NO: 185418 - DNA, 392 bp, Zea Mays
gacaagggtatgcagaccacttgctcaaggaggtctgggtattcatgacttggaaattatgggttgggctctaaatattagatggctttggcttaagaagactcaaccgaataggccttgggctgaatttgaggttaggacacaccctatggctgcagccttatttgcagcatcaatgtgttctgtagttggtaacggcacctccactatgttctggtcggataattggcttaatgggatgtccctgactcagattgctccagctttgtctacccgtatctctataagaattaagaaaaaaaaacagtccagcaggctttggcacctccactatgttctggtcggataattggcttaatgggatgtccctgactcagattgctccagctttg

SEQ ID NO: 185419 - DNA, 303 bp, Zea Mays
ggtaacagcactggcagcaaggcaaggaccaaatccacagcaagcagtcgtccctttgccttgccccttgccatggccacaacataccctgcaaatccctcccttccatctgcctccaatgcccgcaccacctcgactatcgcttccaccgccagtgccctggcctccgccttgtccggtgcctttacggccaagtacctaggaaggtaccccactgccttcctaactgcttcctctccttcctcggcgcccaaaggcaccaagttcctcacaatgaactgcaccgcagccacccgtgctgcg

SEQ ID NO: 185420 - DNA, 310 bp, Zea Mays
gtgatatggtacatatatcctttgtctcacaatctgaacctttcttcctgcaaagtggaactgttaagtgccaaataccagaatgcagtgtcctaataaagttggtcaatataaacataacgttggcaacccaacaagaaatcgtgaatatataaagctgctctcatgaaaaggttaaacatatataagtgaaaaagaaataattttatttttctttataagcatgtatatcagcagggagaaaatcaattgaaaagaaattaacactagaattcaaataaaggttctcaagaattcatgcaatgaagaa

SEQ ID NO: 185421 - DNA, 508 bp, Zea Mays
gagaaagcttacaggggaagtaaaaggtaggtagcccgaggctgtgtgacgtttcctttagaaacctccattgctggctccccatcctcttcctgcttcatggtttcacctgctgccttctccttcctcgattgccgcagctgctatgggaataccatctttctacaaatgggtcgtcagcaagtacccaagcatcatctcccctgtgaaggacgaaccagaggagtgccctgatggcatcatctacgacaacctctacctcgacatgaattgcatcatccattgctgcttccacccacaggaccagctaacgcatgcagacatagatgtatccacacacctcaatccatgcgaatctggacggtataaatgtatgtgttgactgactgacacaccgttgcaggtgcgccctccgacgacggccaatgaggtgttcgagtccatgttcgagtacatggaccgcttgttccgcatcgtcaggccaacaagtctgctgtacttggcagta

SEQ ID NO: 185422 - DNA, 840 bp, Zea Mays
gggcatcactgtaactctgctgaatttggaaaggcaatacaaagaactcggaaggcggcactcagatctgcagaaggagaaggacttggtgcttgatgaagtgatcaagatacaggaacagataaggcttgagaggaaggagcatgaagattgtacacagtcaagcaacattagatttgatgctctacagaagaagattagtctattgctagaagagggcaggagtagagaggtgcagcttggtgaggaggagctcaagattgtcaaagctgagatagagatatttgtcttgcagcagtgtttgaatgacatgacagaagtaaattctgaaatcgcagaacaactgcgaaagaataaagaaatatgcaaggtccaggagggaaaaatctacagcttatcacagcataatcagaaactaactgaagggattgattcagtagtgagagtattgcatctggatcataagtatgaatccttaggccaaatgaagcttgaaatcattgtgcagctcatcttaaatgagatcagctgcctgctgaataacatatctgatgcccaggatgtgaagcagaaggagcttgttgagaaatcacttgtagttacacttctggagcatttcgggcaagaggtggctgacttgaggtcagagcggaatgtcttgaggcaagatcagcagataaagattgaggaactgctccagctgcagagagaaaaggaggaacttatgaagataagtgatgaattcttggaagaggtggaggctcgtaatcacaaagtggatgagctaaaggctgaggcgaagttcttggttgtaaggttctccgaactgcaagagtctag

SEQ ID NO: 185423 - DNA, 533 bp, Zea Mays
cttttctacagttcttgtttggaattctcatggtggtttatctgcctagcttggatccatatccgggttataccccgatcaggaatgaagtgttggttgataatactgattatgaacctcttcccggcggtgagcagatttgccctgagagacatgccaacatatttgccagtaagtgaatagaatttgtatacggacagaattaaatttctaccactgttcaaataatgacaggttttgctatcttgtgactttgctaggaatattcttttcatggatgactcctttaatgcaacaaggatttagaaggcccattacagataaggatatctggaaattggatagctgggatgagactgaaactttgtatagccagtatgttttctcattttccttgttgaaatgctaaatacttgagcttgcaaaccttaacgtggcaatcctatctcaggttccagaaacgctggaatgatgagcttcaaaaaccaaacccttggctgttacgagctcttcatagtagtctttggggaagg

SEQ ID NO: 185424 - DNA, 675 bp, Zea Mays
gaaatatcaaagcttcccaactctccactgtttgtagctcaagggacctataactacccagtaactcattctgcagttgcccgataagaatatctttggattctaaatctgacaggtaaattttgtaaccatccaaagaaaatagttatatggaatgtctggggtttgaattctccatccaagcaacaatctgtacgaactttcgttgattccgttggagcagacattgtatgcctgcaagaaaccaacatacagaatatttctagaggaactgtctttgctattcttggagtgacttttgaagaattcctctttttaccttcctctggggctagcggtggtattcttttagcctggaaaaggcatgtgcaagcaacagggcataacagagtgggctcttattctgtccaattccagcagtcaaatggccaaccttggtggttatccggtgtctatgggcttcgggacattgatgacaagattccattcctccaaaagcaattgctatggtaaaaaaggtttcattttgagtatttttggccaaaattggagggattccaggaagcgtgggcatcgggtggtggtagctcctaccccttcctgactcttgagatgaagttgaaagccactgcacgtgcccttcagaggtggagtgataaaagatgccgaggtaag

SEQ ID NO: 185425 - DNA, 399 bp, Zea Mays
gaaaatataaaggcatctaggcactatgcagcagatcatgaataaaaaagtagtccctaatctataactaataataaagaggcaaaatttcagcctattttttgtctatccatttttaggcccgtctctctctaactacaagacaatagagactttctttgtccagacttcatctagaccaatatggagtaggaatcctaatcaaaataggttcctcagatcatgagtactctaaaattgaacccatatataataatcaaatagaaaaggtaagagtcgttctgctatttattttgctcgactttatttagttctctatcaagagggagacaaaaaaatcatgtccatgtgttccttattttatattctccgtccgtttacaaagcaagcgaactccca

SEQ ID NO: 185426 - DNA, 306 bp, Zea Mays
cggcaagaccaggctgctggagaggagggcgagctgcttggacacaatccccacctgtgataagatatgcgataagaaactgccatgtggggtgcacaagtgcaaggtcaattgccatgagggagaatgcccaccttgtttggtgctcgttgagcagaagtgccgttgtggctcatcaggtcagatggtggagtgtcacaagttctcaatggaagagtttcgctgcaagaagccttgtggcctcaagaagaactgtgggagacatcggtgcagtgagatctgttgtccactgtctaggaaagttgc

SEQ ID NO: 185427 - DNA, 339 bp, Zea Mays
ggctgcagccgaggcgctggtggtggagctccggcaagtgcagaaggcgtacgagaagagcgcgcggaatggggagagggatgctggtgatggggatacgcagatggaggctgagaaggacgacgggctggataactgcgccccatcagtgcgttacgccatccggcggcttattcgtggcatctcttcttctagagaggtagaaatgtttttccatgagttcaggacaagcttagtttgagttggctgatgtcacgatctgctttactctattaacttcggaaatttgtttgcagtatgcaaggcaaggatttgctttgggtcttgccgctgtcctcg

SEQ ID NO: 185428 - DNA, 427 bp, Zea Mays
cttgaccacagtctggtatgacgtattgtaacaaaattcagcccatggaagccattgtaaccaagtttttggccgatcacctgccaagcagcgtaagtacatcacaataattctgttaaccacttccgactgtccatcagtctgggggtgaaacgcggaactcagtaacaacttgaccccaacaaggtgaaaaagctcggaccagaaggcactagtaaacactgtatctctatcacttacaattgagcacagaataccatgaaggcgcacaatcccttcgaaaaatgccctagccacggtcactgcggtatatggatggtcaagaggaataaagtgggcgaacttagagaacctgtcgaccactgttaataccactgtcttgccaccaaccttaggaaatccttcaacaaagtccatggagatgtcg

SEQ ID NO: 185429 - DNA, 983 bp, Zea Mays
gtcataccattcacttcaaaggtgtgtattctcgctaactttttttttgtaaaagatttctcgaaaggaaataatcttattaaactaatccaaagaaattccaattattaatttggattttgggcgcatatcatgtgtcatgactattggctgctctgcagattcttgaaccttgccagtcaagtatcgcatatcgtcctccaaatccctggaccattggaattctaagtctacttgctgaaatttataatcttccaaacctgaagatgaatctgaaatttgatatcgaggtcctcaacatttccttttttgatagttcctttattggcatgtatctgccctagctactcatgctcatgctaactgttcttttgggatttcaggttctgtttaagaatcttacagttgacatgaaggatgtgaaaccaacttccctgcttaaagatcgtctgcgcgaggtcgaaggaaatccggatttttcaaataaagatgttactacctctcaaacccctgtggttccagaagttcttccagggactattccttcatcaactcatgttgaactgcagcctgagatcaatattacatcccgagctatgagtcttccaaatatactcaatcaggtttggctttgaacttctatatcaattatgatgtggtaacacttctgccattatagttggaatatcttttgtttgcagtatgtggctcctgtccgtctacccacaaacagcacggtagaagctgacaaagttgctctgatgatgcctgagcaagtgtcctccttgacccaggttttgccagcacaaacacaatcaccatcaccatctccattctctgttaatcaggttaccttaatgttttaactgcttttatttatctaaacaactagatcgtgttatatgatttgctttccatttgcgatatgtagcttatggcagctattccacgtgatgagatatgcttcaaaataaacccaaagc

SEQ ID NO: 185430 - DNA, 561 bp, Zea Mays
attacaagtgacattgctcaaccaagagttgtcttgtgtttagctcacaacggcaaagtcgcttgggacatcaaatggaagcctcctttactaagtcaacctgaacagaaatcacgacttggttttcttgcagtattgttggggaatggcgctcttgaagtgtaagttgtgcaacccattgctatgctagaacctttatttaggaaatcatcagtcacatacttcattgtttgtacacaggtgggaagttccatcaccatgtatgatccagaaaatatattccccctctaaggtggagggttctgaccctcgttttctaaagctccaacctgtatttaggtgtgtcaaagtgaagtgcaggaacaggcaaaggtactgtggcttcaaagttttagcatgtgattgatacttttgcttatagaactagatttaagttttttactttctgctatattcctcagcatgaatattctttttgaagccatgacctctttataatggtaaacagcattcccttgacagttgattggtcaccttctcctcctcatgatatgatattgg

SEQ ID NO: 185431 - DNA, 329 bp, Zea Mays
ccgcgacgccgccgcgcagctcctgaacgggcttctcctcgccttctccgaagaggtaactgacctattcactcgtggtgcctctgattcacacattgctctgtcgatttgtgacatttgttgcggtttaggggccattgagagaggtgttcatggatattaagtgggaggtggaggaaggggaattgctgaaggattgcctggaagtgggagctaaggacttaaagggtttgcttgtcattgccaaagacctcttcgctggtgtttcaaggacttctacgcagcatagcgagctctgaggtttggtgactttaagttgccttttctga

SEQ ID NO: 185432 - DNA, 513 bp, Zea Mays
ggaatggctcgtcggaggaggggtcctgtggaccaggccacacgccgctggtagatgcgggcgggatcggcgaagtgaatgtaagggggtcggagaggtggggcaacgcgtggcatggttagaggcaacgtggtgacgcatggtgtgggtggaggctacaaggccgcaggtggcacggtcgaaggcgaaggagccatgcatggcacagaagaggtcgctgggaccggtggtaggggaaggggactaggggaggtacttagacgagatcgacatcgagaagagagttgaggtcgagatgtggggaggagccagcaaggggaaaccatcctcatcgaaaacatgtcgagagatgatggtgcaacgagtgagaaggtcggggcaccgtaccccttgtggtcacaggagtacccgaggaaaaaggtagcgtgctgatcggggcgaaagtttgtggggaacgatggcagaggtattaggataggtgcgaatcatgcgatcagtcttgccgttttgagg

SEQ ID NO: 185433 - DNA, 689 bp, Zea Mays
attcctgcacgatcaagtagttccaccatgtattgcttctgagagagaagaccatcacttgagggctgaacatgcataccaaggaagtgatgtagcacaccgagatccttcatggagaactcttgttgtaggaccgaaatgatccgacgcagaagggcaggtgaggaagcggtgaggacgatgtcatcaacatatagcagcaaataggcagtatcggatccacgccggaagacaaagagtgatgtgtcagacttggcctcaacaaatccaagggatagcaagtatgtggcaaaccgattgaaccatgcacgaggagcctgcttcaatccgtagagggacttgttcagatgacaaacgaggtcggggtgtgcagggtcttcaaatccggacggctgaacgcagtacactgtctcagacagagttccatgcagaagacattcttcacatcaagctggtgtacaggccatttctggtatagagccagggagagaactgtgtgaaccatagctggctttaccactggactgaatgtctcagaaaaatccacacctgggcgttgggtgaatcctcgaagaacccaacgcgccttgtaccgctccagtgtcccgtcggcattgaacttgtgtttgaagacccatttgcctgtcaccacgttggcatgaggtggtcgaggcacgagatcccaagtg

SEQ ID NO: 185434 - DNA, 683 bp, Zea Mays
tggtggtgcatcacgctggagctgtccataccaggttcgggcgacccctgtcatgtgatatgaggccagccagaccttctcttatatcgtgcgttggccgtcgaagaactggtcacaccggtttaaccactggatggggtcctcgccatcaaacgtggcaaattctagtcggtggaaacggggaacgccgaccatggatggtgggaatgggttgctaggcatgtgctgtggaatgtttggcatttgtggcagaggtgatggcgagtgcggcaagggcagtaggtggattggcaggggtgtggtggtggttgtgtatgcggcggcggaggtgtggatgggctgcgggggtaaggatccctcagggactagtgtggttggcggcaggccgccgtaccctggcatgccgtaggggcagccagatggaggtgtatcagctgaggttcctggatttttttccatggccgtgacgcgagatgagatggaggacatatgggagttgaactcccccagctggcgctgcatgtcagcgagcatcgtggtgatcgactccaacgatggcgacaccgtggcggaggccaaactatcgccggtgttggaccctggcatctccgataccaggttggtatgatctctactccttaggttgtatgagtggtaggggtagagcgcaggctggaagaacg

SEQ ID NO: 185435 - DNA, 535 bp, Zea Mays
gctcgtcagtttggtttaatctgccatttgccatagctctgattgttttgttccgctacatatcgcttgattatggccttcgtagaaagagcgtaactagaacagatcatgccagtcattcactcgtcaaaacaaaaggtactgaggtaaagaaagtcattcatcagactgaaacggatggaaaaatagattggaggagcaaggttaactcgcctccagttgaagcagcattcgaacagttcacaaggcaccttatctcagaatgggtaacagatctgtggtactcgcgcgtaacacctgacaaggaaggtccagaggaactcatcgatgtagtcaatactgtccttggggagatttcagttcgggcaagaaatgttaaccttatcaatctgctgatcaggtagaaaatcttgtttttgtgcaataaataaaaacatagatgacacaatgttttcagaacattagacttctaatactaaagcattccctgtgttttccagggatttggtcgatcttatatgcaataatttggaac

SEQ ID NO: 185436 - DNA, 302 bp, Zea Mays
tgctgatgaagctgtaaaaggtttgaggtgtatttggatttcccatattcatgctgatcaccacactgggttggccagaattcttgctctaaggtcgaaattgttaaagggggtgcctcataaacccttgcttgtgattggaccaagaccacttgagagattcctaaatgcatattctacactcgaacatcttgacatgcagttcttagactgcaggcatactttgaagtctagtgttgaggcctttctcagtgaaaatgatactgacccagccacacctcaactggagaccaccatgtttg

SEQ ID NO: 185437 - DNA, 550 bp, Zea Mays
aaaacaatcatctaggagtatttatattttacaaagaaaaaactgtgctaccactaagaacacatagtaatgtcacatcagaggttgcctctttgcgtacaagctgatagcagccacaggccaatctgagccttgcaattattaacgagggccctttaaatacctgtctgtttgcaaaagttgccgaccgaccgtcctcctatgattcaaaacttggaataataatggagtaacccctgaatatctctctccctatgtattaatgtatagtatgtaggcctaccgctagcacagcatgaaagcgatcccctgacctgcctgagaaaggattgacacattgttatttgcttgttgccgaggtctccaaaaaatctgatgctaataccgtgccagctcgcaaggcaactgccactcatcataatttggagctttggcactcgtgtaaaatgagcaggtaggcacggcgagcaaggtcgcatcggagcaaagaatctggtgctaaaggggaaaacgacaggaagatagaggaggctcttgttctcttgcaaat

SEQ ID NO: 185438 - DNA, 638 bp, Zea Mays
cagctttccggcgatggcgggctgggcacggactggatgaacttctttgccgagccggaccccacgtcgccgtcgtccttcctgccggactttggacactgcgacatcctcagagctaccggcggcatcaatggctaccctaaccccaaaggcggcgcaagtgtggccgacatcgcagataagattgtcaagcaggttcggaacctcctcgcttaattattctgctgtttccggtgcacattactcgcgtcgcttgacgccgagtcaccgtcgcgtagaactgtagatctctgggaaaaaaaaaccggaaacgccgagagcgcatgctgctgcaggtgatcttctctgctctaatctaacagatcagggagccgcatgatctttggttccctcatcctgaacttcttcaatgatgcagacatttatttatcacaacttaactagtgacgtttttatttcagtgataattctcgtgattctcggatctacgttgtagatcatgcgctgttggacgtttttgatttgttttgtttttgcttttgggttttacagtggttgttgcccttatagtttcattgttctcacctttgtgcatgcaggtcgagtaccaattcagtgacacgaacttggttgcgaac

SEQ ID NO: 185439 - DNA, 332 bp, Zea Mays
gtcgctgggccatgaaatcgtgtgctatagctcacgggaggccaaaacagccttactagtctaaatggtcaaatcatgggtggcggacgggaggcacgaaatcgctattcgacgacaaaaacatgtgtcatgggaggccctaaaacctaaaccctaaaccctacagctcgtgggaggccaagaacaactttaaggtgctctggggaccaaaacgcgggtggtggaacacgtacttaaaaatggtcgctcgaccataaaaacgtgtgctatagcttacgggaggccataaacagccttagcagtctcagtggccaaatcatgggtggcggacg

SEQ ID NO: 185440 - DNA, 307 bp, Zea Mays
ttgttcctccagttactaggaagtatgaagttatcgaggagtaccttattgtagcagatttggaggaagtacagcgaaaaatgagagttgctttacctgatgactattctgagaagttgctgtcacagaagaatggcaccgaaaacttggaacttccagaggttaaggattatcaaccccgaaaagtagcaggagatgaaattcttgagcaagaagtatatggcatagatccatacacacacaatctactgagtgacattatgcctgctgatcttgagttgtcacctactgacaagcatatctttat

SEQ ID NO: 185441 - DNA, 875 bp, Zea Mays
gccaggacatgagacaagaaggcacaagttctgaggtgagctcactagatgaaacttactataaagctacatgttgttgtgtccacacatgaaaacactagaccatgcatatcgccataatattttctataaatccactctttgatagtttgacacatcgaaaagcgagatgtgtggttgatggtggtgagtatgcattacatgcttgtgttccacaaccaaagactacccaacgtgcaacgtagtaacggtggtccctgcactgaaactggcatattttacaaccttgtttttctagtatttggttgggtccaaccattcttcgttcttatatcaaactacatagctgaagaacatgatcaatctctctttaatttcttgattaattaggctgtgatcatgtggaaatatggaggtcgtcgttaataaccaccctggtaatgttctgcaggtgataaccccagggtcaagcgagcttttgcttgacgtccacccgctgacactccactttcccttccatgcccacaagttgatcccgtgcacgctgcacctaacaaataaaacagatgaacatgtggcttttaatcttagtatagaagacggaatggagtcttggcagcagatctttgtaaggatgcccctaagtggaattgtgccaccaaaatccacttacactcttgttgtcacaatgagggagctgacgtatctaccaacacaaaactttaatttgaccctgcagtctaatatatgcgaagataggtacatctattcatttatgagcctatcagaatctgatcagttttttgaggatttaaaggagataaggaatgtggcgccgcctcaggtgaaactgaaagcagttttttctctgcaag

SEQ ID NO: 185442 - DNA, 619 bp, Zea Mays
ttttgttttccatgttcgcttatttgtcttgtaaaaatagacaagctaccagcatcaggtttatacaactcatacccccgtgcgcgtgcgtcttcattctcctgaacctttttgttacttttatcttcaacggggatgtgccttaaaacctttttgagaactggatgtccatgttgttaaatttactctctccaatcatatttaagaggagtacttgacagcactgatttcaaagcatttctcacatctgatggtggcaagcggcgtatcctatgaatttcagaatataatccagctctagccaatgaggacctcagcgccaagatactcaatacacaatcacagaatccataaagtcgacgtcggtagcccttaagttgttgtgggctacacacaaaaggtctgcagggagattctgacaacttattggtcaagtaggtaaaaaatgacggcagaccaaccccttttattctatatagctcaataatattgtgaatgtaactgaagtagttattgaatttcgccttttcagagaacttgtcacaatagagtgcgcggatttcagcacggaccccatcaatgacaactattgtactaacgtcaaactgtccattccaac

SEQ ID NO: 185443 - DNA, 652 bp, Zea Mays
tttgactcgcttggttgctctgtgaaggatcttcctactcggcgcgagatcctcagatgtgatagctctaggcccctatacccccttcggctaccggctaccacccttcatgcatcaacatctactacgtccctgtggcaccggcgtcttggggaccctggtcacgttgtcttatcacatctagcccagtcatccgtcatttcttgtaataagagtgccactgctcctttatgtcatgcttgtcaattaggacatcatgttcgtcttccttttcatacatccacctccagggctactaaaatttttcaattaatacattgtgatttgtggacctctcctttgactagtgtctcgtcataaatactatcttgccattttagatgattactcccattttctgtggacattccctttgcgcctcacatccgacaccttttccaccctcactactttctttgcctatgtccgcacccagttcggaatcaccattcagggtattcagtgtgacaacggccgtgagtttgacaacctacgtgcccgcacatttttctcctcacacggcattcaccttcgtatgtcatgcccctacacctccacccaaaatggcaaagccgaacgcattatacgatccataaacaatgtcatttgttcc

SEQ ID NO: 185444 - DNA, 627 bp, Zea Mays
gaaggagtccgcgccaaatcagagcccgaaatccgtgccaaatccacgctggatgaggtggtggggagaccccccaatctgcgtcccttctacatgcctacacatcctccatagaaggcgccctcctactaaccactaaaaaaccccttccacacgctgacaactccatatatattagtccaaagggagagcacgattaaggccacgcctaccagcttcaccctcctcgcatttgtaagtccaatttttagatttatgatttcagatgttgagttgattttgcaaactggtaagtgttttgtttcatacggcaactctgcacatggacagaatcacagctctgttagcgttgttttatcaaggtacgtccaattccttctatttagttgactgtgattcaatatgcttgttgttcggttttacttgcgacatgctgttggggcatgtgtttgggatggatgacgtttggactagatagtttcagtcagtagccatctaaacaagcccttacagtattcgctatttcatattgaattttcctcatattgtagagaaaatcgcagctaatctgttcactgtggatgagttgccccatggtttgttcttaatcagaagaatggacgtgtg

SEQ ID NO: 185445 - DNA, 577 bp, Zea Mays
gttcaaactctttcatccagttcacatggtctggtatctgtagatgatgaagaagttcaggtagtcttgaagtgcatggtgcccaatgtatgctctcgagcaatgataaatagggggttgctgcattctgatgatcttgtgaagcatggttctctgaggcttgtttttgaatcagttaacctgctttgttatatcactgaatccatcaattgcatggtatcaaaagggagactgaagtcagaattcattggctcagagaaagtaaccatgaaaatagatggtttcccagtattaagctgttctgatgctacagatgcatccttagttgatgaggttcaccagggagatgaaatgcaggtcaagaggtggacatctctaagagaatacatccaagatgaagttcatggagctatgcctgatcctcaagtctttctcaagttactctcttctaccagccaaaaacatcaaagttattctcagagcatacaaaagaataatgctcaactttctgagcctcctcaaaagaaacgaagatgcagtccttcctgtgaagttgatgatattattattggtggca

SEQ ID NO: 185446 - DNA, 529 bp, Zea Mays
cagcaagcaatatttcgttaagtataaaaatcttgctcatgtacataaccagtgggtttcagaaagtgatatagttgatagcaccccgcaaggttctgatcttatctccaaagttagcaagaagattcataaagaaaaggtgattactcgtgtgatgaattccattgcttatctttttcacaggattttaggctctgcaaaagtatgcatgctgatggattcttttctgattttgatttcttagacaataaggtggaagcaggaatgggctgaaccacaccgtctgttgaagagaagattgcttatgcctcaaaaagaagccgaagttttttttaattcactaggtgataaatttgtatactgtaatgtcgagtggctagtgaaatggaaggatctgggctatgaacatgctacatgggaactcgagtcctcatcctttttatgtactcctgaggccgaggagcttaaaaggagctatgaggaccgctttaaaactgcaagaaaagcatctgatccttcaaaagtagac

SEQ ID NO: 185447 - DNA, 508 bp, Zea Mays
ggaaaggaaaggaaaggaatgcaaggaaggagagacacaatcggcggcaacagcgattgatttcgtccgccgcacctctcctctctctccgccgccgtcgccgccgccaacaagggcgaaaccttccgatttcttccacttctgctgttagggttccgcctccacctgctctgctctggtgagttgttatcttccctccgtttctctttcttctctttttcccccctttctggtgatgatgcatgcacacatgatgagattgctctgccgattgtcagtcctctctccctcagccgcaaccgcaaccccgccaagggacaacgcaaatccttcctcttatcagcttcagtcactactacacctacctgtaccacactgttcgtcctcctcggttcttttgctcctaatccttgccactacccgatctatcccttcacttccgccgcgcacctgcatgtgcctttgtgtttatgtctagattcatcgcaccggacccatcttgtgcgat

SEQ ID NO: 185448 - DNA, 335 bp, Zea Mays
tttgtatgaagacgaggagtttgtccagaggcaacttgcagcactagttgcctctaaggtatttttctacttgggcgagctaaatgatgctctgtcatatgcacttggcgctggacccttgtttgatgtttctgacgactctgattatgctcaaacactgttaggtgaggaactgcctggtgcctgcatcatggccagttaattattgccagcattaaaagtactatgttaacattatttcttgtttattttttcagcaaaagctttggatgaatatactgccatccaatcaaggggcactggggaagaaaaaacgatcgaccctaggctggagg

SEQ ID NO: 185449 - DNA, 524 bp, Zea Mays
ggaccttatgggttcacaggaagatttttcaaggcttgctggcctgctattaaggaaagtgtgatgcaggtgcttgcagctatttgggataggaaatttggccactttagcaagttgaattcagctcttgttacccttattccaaaaaggaggaagctaaccaagtcaaagattttagacctattagtttagtgcatagcatggccaagctagtcactaaaattctagctaacagactgggggataagctacaaactatggtctctcaaatgcagagtgcatttattaaaggccggttcatccaagacaattttatgattgtgcagcaaactgccagactcctccatcagcaaagacaggcaagaatccttttgaaatttttgactcagtatcctggccattcctcctcgaagtgcttcaaaaactggggtttgggcagatttggacagatgttctgagtggactgctttctacctcgtccacacaagtgatgcttaatggactagatggtgaaaaaattcaac

SEQ ID NO: 185450 - DNA, 455 bp, Zea Mays
tcatttgcaatttgaatggctccagtgctatcacacagaagaggtgtaggagtatcacaagagacaccaagatcaaccaataaccatcgtagccatataatctcgacagtagtggtagcaagagctcgaagttctgcttctgcactagatcttgatacaacaacttgcttctttgatttccatgcaataggagaggaactaaggaaaatacaataacctgtaatagagcagcgatcagtgcgatcacttgcccaagtggcatcagagtaggcatgaagccgaagaggaatattacaatcaagcctcgagatgtggttccccgtaagtatcttaatacacgaagcaagtgaccataatggtctgaagtaggcgcagaaacaagctgactcaatatatgaacatcatgtgcaatatccggtcgagtgatagtgagatagactagactgccgactata

SEQ ID NO: 185451 - DNA, 661 bp, Zea Mays
ctccatggccatggagcttcttcagcttcctccttctttcatatatataccaggaccaccagctagctggctgtctacaaaacaagcaggaaagctgctaaggctagctgcatatatacgaggaaaccagcgcaagatccttgcatactactcccacaccacacatagataggactaggactaggagtcgtccgatccatcctggagcactctatatatacacacacacctagggtttaatttgcttgctttattatctgctgcttcttcattcattccccactccccagtggtcgtcgatctgatttgcctgctttatttcttcttcttcttcacaccgagctagctagctatcttgctttaatttgcctagaacgaatagatccaccgtactagcttcttgctcgatctgcagcttctcgcttgtgagccaagagcccggccagcagtgtcggccgtgcagtggcactctctccatcaacaatcaaccctctctccgtcgacatgtggaaaggtaggtagagatagatggtgtgtgtaatccggttccttggttcttgtgtttccgatctcctctaattaatcgatctctctacctggccagctcacttcacccatgcttgcatctagctgttccaatctgatgcatgatatagatgat

SEQ ID NO: 185452 - DNA, 339 bp, Zea Mays
cggttctattccgttacaccggttagtggacgagctggactgatccagtgggtggaaaatgtaagcagcatatacaatgtgtacaaatcatggcaaaagcgttcacagttggcacatgcacatgcagaggcacaagtatcttcagttagcactggtaacattcacaaccctgttgcacctgttccccgtccaagtgacatgttctatggaaagattataccagcactgaaagaaaaagggataaaaagggtagtctcacgaagagattggccattagacgttaaaagaaaagttctattggagcttatgaatgagactccgaaacagattctgtggcaa

SEQ ID NO: 185453 - DNA, 557 bp, Zea Mays
caacgttaatcacaataatttagtgcaaaggttgttaagcctacatgctttcgagctatttctaggccaataacatccgtccgtcagttttaatcgtgaaactttatctaatttataaatagtgttaagggtcaaatatacttcttgcagtaatactgatttgatccataagttggttgtttgcttttcaatggtcaaacaaaaaattagacatacagaaaagcaagccactttatctccagaggaagtagaattatgatcaaacaaccaggttctgcacaatagtctgcactgtatagttcacatggggtgctgatcaacaacagtatgatctgaacctatagcctaatttactcgcaatagaatgtagaccagcatcttatgccataaactagagcagcatactctgcagaacaaagcaaacgtcacggtgttatactgttactacagattcaccgaaccaaatccatgctccatcaaacatgaaacagttcctagcttccatttttttcagttttagcagctaaacagctcgatttgcaccacagcaaccacat

SEQ ID NO: 185454 - DNA, 373 bp, Zea Mays
ttcttattcaaccgaatacctaatgcattaattcggtgcttgtgacaagcattcatgcaaattcgtggatattaattcagaacctggtggcatattaatcttggatacttggtcaactgcaaacttgaagattcattttcatgcaatcaatggagagcctagcgcaattagaggtgttgtgtgaaaagctttataattctagagactcggctgagcgagcgcatgcagaaagcaccctcaagtgcttctcagagaacagcgagtacatttcgcagtgccaatacatattggacaatgcctcaactccatatgccctgatgctggcgagttcaagcttgctgaagcaagtttctgaccgcagtctttctttgat

SEQ ID NO: 185455 - DNA, 734 bp, Zea Mays
gcacggattgaaaccccgaaaaggtatagctagacctaaacacaaccgttcatcggaaaaccaacggcagaggcaccccatccatggatctaatcttggccaccctatgaaaaatatacggcgctggtatttcttttcttccccgaggtcgtacgcggcggcaaagcatgcatccatggcggcgagctactggcgtgtagcaatctgaggcccaggtgccaaggttcaagattcgaatggtcctacgcctagaggagataaatgcaaacctaggaaagaacttttaccgtgatacgaagcgcgcagtccccgccaccgagcaacactgtggtggctcacattgccggcgagaaattccttgtggctccgttgtctccgcaagcgcaacaagtccatgcatacgattccctcgatcccttaaagcctatgtctcctgttgttggggcccgaacgatggcgtgaccgcgtgactggaatacatcacgtcggtccgcccacccgcagtcatccttctgctctcacatggcgccgggattcttgctcacggttctagggaatgtgtggggggaaaggtgctcggcgcccggttttatagccagagaacccagaggcgctccggttggcggaatcccaacagaaccagcgagattttcgccatgaatttctgttgaggaccgagcgccactagtttaaaaaatgattcgttctttttatttctttcttcttcattcccg

SEQ ID NO: 185456 - DNA, 549 bp, Zea Mays
aaggtgagctttggggttctgttagtgctaagaatgataaaatccctggagaaagtaaagattttcttatagtggcttgcaaggactctgcctgcaggcggggtgatggtgaaggtactaatgtgctgtctattggtgctgctggctgttctgtgacccacatcaggaacccaaagctaaaagagaattacacttctgttgatgttcgttctggcacaattgtagcacctggtggccgtatggattggatcaatgcgatatgcctgctgttcagttcaggctcagatagaactgaaaagtcagatgatagtaacacaccaaatagctatcagtctggtgaaccttattcatcatctttatttatcgagttggctgatgttgctgttagctatgaacctcattttaaacattccactctcagtgctggagcagccgaccgcaagtttttctcatgccttttagctgcatcatcatttaaactccataataaatctgcatcagcctctgcagctactgattttgatatccaattacgtgatcttggagtcc

SEQ ID NO: 185457 - DNA, 284 bp, Zea Mays
gggggagaaagattcctgggccacgctcgccacaccatcccgcactacctttttacaccgagaccagaacatcaccaataactccgccgcgacgaaccaagtgtagccggagagagagagcgccgccatccacatctgccgctggtccgaccttgggtagcaggtcgggaaggagcgcgaacccgggaattactgattcatcgattgcgtaggctctggggtgagcaggttctcggcaattgctcaccggaacaacgctcggccgcaagatccgccatccacca

SEQ ID NO: 185458 - DNA, 930 bp, Zea Mays
aggaagcagactcggccggttcgcccctccagtggacgagaacttgacgcacgcctcgcgccaagcgtgcctgagtaacctgcatcggctcagggaccacggcgccgttgtggatgattggtaaggcaggcggggacgctggtggaacgccgacaaacttcttgaggacacccacgtggaacacatcatggaggcgcgcccctggcggcaaggccaggcgaacggcgacgtcgttgatgagctcaacgacgcggtagggccccacaaagcgaggcttgagcttgcccgtggtggtcctgggcattgaagaagctgcccgctgccgaagacgaaggagggcccaatcccctggctggtaggagacttgacggtggtgccgatcgtagtaaagcttctgggtcgcctgggcctgctctaggcggtaccagacctcctccaggaaggcctcccgagcctccatgtcccgggcgacggctgccaccctcgtctcccccggctcataagagcggatggaaggtggctctcggccatacaccacccgaaacggtgtgtcccgaagcgaagtctgtacgcggtgttgtaggtgtactcagcccacggcaaccagcgcagccattggcgggggcgatctccagtgaagcagcgcaggtacatcactatgactcggttggcggcttccgtctggccgttcgactggggatgaaaagcggacgtcatgtgaagcttagtacccataagcctcatgagctcctgccagaacgtcgaggtgaacacggggtcgcggtcggagacgacggactgcggaacgccgtggaggcgcacaatgtcggtgaagaatgcctgtgccaccgtctctgccgtgtacgggtgcgcgagtggaatgaagtggcagtacttgctgaagcggtcaacgacggacaggatcaccgt

SEQ ID NO: 185459 - DNA, 491 bp, Zea Mays
gcaggttttcaacgaggtgaactcgagggagatggagagggtgaacgtgttccgaggcatcctggacaacaacgtgttcgtcatggtcctcggcagcaccgtcgtgttccagttcgtgatcgtgcagtgcctcggtagcttcgccaacacgacccctctcagcctcgcgcagtgggtcgcctgcgtcgccatcgggttcgtaggcatgcctatcgccgtggcggtgaagatggtgccggtggagtaggccggccttcagtggaggcagccaggcagttttggccgttgttgcttgccctcgtcatacagacatcttcctcgcttatgatctagacttctctggaggtcgagccgccatggcgatcggctcgattctgaaaagtgttgggtagaatcttgtagctttgaaagtttcagtttcagttttttttttgttcccagacgttcttcatttggaagtagtaactgttggcttgaaatgtttattacag

SEQ ID NO: 185460 - DNA, 551 bp, Zea Mays
atgtacaatcaagtatggcctacaaccaccatctgtgtcaaaccgcggaacaacatggagaactattgaatccaagatgaggggtctgctaataggaggccattctgaaccacctccttgtcttgttatatagtgcagatatctcaaatgtgaaggctggggattcaagggaaagaactgctgtataaagtccctgcgagcctgcttgtagaccatttctagtgtcctctgctcgccagtatatattttgcgatacaaaagcagtccggccaacatgaatgcaagcactggccaaccccctctctcgcaatgcatcaaaagcatgttatgttgtccttccactgatagccaattttcacatgatttcaagaaatggtggatcatctcgagctgaagcaacggacatccttcatactgttgtgggtagtccattactgtcatgtcatactcagataaaatatctgatatccggcttcttttgtccccagaccaaaaattggatgccataagtgatgtgtccggaaaaaattcctgcaattgcgcgacaatgc

SEQ ID NO: 185461 - DNA, 383 bp, Zea Mays
aaaaaataaatatttgagtcggctaaaacaatatcattataggtcttctcattagattgctctagttctcctaactattgtcctactcttcggactagtcctcacatctgttaacaactacaacgacccaatgcccaatgctcatatgactcttctaactaagaggaccatgtcacctgctcgcggtgctcgcttgcgcaatgaccgcatgatgcattagacattgtttgtatatgtataaatattacacttgagatcaatataaagtgttgttgatccaatcactcttacaacatcaattcgcctggtcccattcttcctgacgtcgctcgagccagtccgcctcgatgccaccacccctcatcaatgcgcaacatcagccc

SEQ ID NO: 185462 - DNA, 367 bp, Zea Mays
acaagggccccgcgcaggaccgagctgcacccatgtcttacacttttggtagtgtggcttgatcaattcacgagcaatgcaactcaagaaaattatgtttgcaatatgtcttttaattcctttccttccagataaagtgtttgggccagcttgccaaacagacgtcgtctatgaagagggagctaaggatgttgcaatgtctgcactgacaggcattaatggtattgttaatgctcagtttgtatattcgtggtagtggagtgatcatctgcatgtgaccccttccttaccttgtgtttgttttgcagccaccatttttgcatatgggcaaaccagcagtggtaaaacattcacgatgaggggcgtt

SEQ ID NO: 185463 - DNA, 407 bp, Zea Mays
gcaataaacatatacggcctcggtctcagctattcttcagcaacatcatcgtctgcgatatttaacctcctgccagctgtggctttctttctggctgttcttttggggtgagctagcatccctcttcatttccatgcttccgttatttcgttgtaatagctaggattggaatcctgtgctttgcctcaggagatgcctgttggcacatgccaagatctcgtaggagtttttgcttcagtccctttttgacagtagctttacaaatttttcgtaggatggagacactgaacttgaagcggttccacgggatcgcaaaggctgcaggcgtgttgttcagcactgctggcgtgactgtgctggcgttctaccaaggccccgcattcagatcgttcatccaccacaccgct

SEQ ID NO: 185464 - DNA, 706 bp, Zea Mays
tcacgcggctatccaagggactgtggtgagcagtcaggggcagccacaggtggtttgccaggtgaacagtcctttgttgcagcagtacctagagaagaagaaaaaactggtgacagttcaaaaggaactgagaccgtgttaggtgaaacatccaggaaatcaagggcagcacgcgtgggaggggaagaagcctcgtaaaagggaaaagaggcttcatcaaagatcacgtggcgcgagatgattatgcgattggattgacgatcgagacaaaggtagcccttgtggtgaggggaatacccgagaaaaacgcagagggtggagcgaggggaaagttcgtggggggctgtggctgaaaggttgggataacaagtgcaacaaaaacatggagatgctcatatgaaggatgtttacaaaatagatagaagtgaggcgtggaatagttgagggttttggtggtaggatgtttatgagataggtgacagtgcctagagctgcggcccaaaaggcgaggggaacactagcgtggaaaataagggaacgaacggcattgtttatggatcgtataatgcgttcggctttgccattctgggcggaggtgtaggggcatgacatacgaaggtgaatgtcgtgcaaggagaaaaatgtgcgggcacgtaggttgtcgaactcacggtcgttgttgcactgaataccctggatggtgatc

SEQ ID NO: 185465 - DNA, 590 bp, Zea Mays
ggaaggggtgtacaagaagaaacagacctcgccggatgaggcggcaaggaagcgtgagaggatgtctatgcgagagggttgcaatgctatgatggaggtggttagggaggcggaccattgggttgtctccaaacttgagaaggctcacaaccatgagctcggcacttgtagcgccaaggttgggtaccttcgtgcgagaagttctcttggtggctctgataaggccacaatggtggggcctgacgagatggcgtttcttaggcagaatgtcctgggggaaggaggagacgcccagggccttcttgattatctcaagaagatgcaagccaatgacccggcgttctgccatgctatacaggttgacaagaatggctgtgtggtgaatgttttctgggctgatgctagggccaaagcagcttatcggcatttcggggatgctataacgttcgacacgacgtacaagaagaacaagcatatgatgccctttgttactttctcgggagtcaaccatcatctgcagactgttatttttggatgtgcattgcttatggaagagactgagttctcgtttatatggctatttgaaacat

SEQ ID NO: 185466 - DNA, 279 bp, Zea Mays
cagcaccaccgcgctagtcatccacttcgtcgtcccccagcacacacacacccttcctccgctgcctcagctatggcagcgccgagctggatccggctccggcaggcgcgtgcaaccctcctcatcctgctgctcctcgccctcaacatctccctttcctccgccgccaacttcgagggcttcgactccgacgaccttccctccgcggccggtggcctcgatgctgacgatgacgaggaaggtctcgacggcgtcgacctcccgccccctccgcccatc

SEQ ID NO: 185467 - DNA, 481 bp, Zea Mays
tttctggaatgcgctagtgctctactgatgggttgaatgaacttgagatgtattacaatagctgtgtgtcgtgtcggtcatccaaaaagggcgaaaggtggtgtgtgatggtaattgggaaatggtcacgtcattagccaactcatgtcaagtaggagtcgatggcgtaagtgattgtgatataaataggtgtggtgtctcggactgcgttaataataggcaagccgatgtgtatgtcgtatggcgggctatgccatccctttggttaatcgactagttagatggcgttggttaagctcgtagttacggtgaattacttgttgtggtctaaatgcgtatggttatggtcgcaggtaaaaattagtagtgctcatgtggtgtctaagttaaaatgcggactaatgggtgaaaggcgcttcgatataaatatgtgccggatttgatgattgtggtgaatgcgtttgttaaatgaatgtggtaa

SEQ ID NO: 185468 - DNA, 549 bp, Zea Mays
cgcctatattggagtcctttctaacacaaatttgggcgtatttttccttaaataaatgatttttcttaactgctactcttaaagctagaaaggatgtatgctgggatgttagagcaacaatatttctctatgttcgtgtgtgatgaacactgataattccttgctgcatttggattacatgaaacttttacagacccgggatgaataggtgtgagattagtgaagaggagactacgaatgctctgaatgcactttatgtccctgcccctgcaaatggtattcctgcagttggtcatcctcatgttgcttcaacaggactagtaacatccagcactcccaacatgaatggacatattgagcagaatagaaaaagaaaaaatattccaagtgatggaaattttgtggctgagggttctcacctaacacaggtttcaggtcatccaatgagcaaccaacatgctcctagtaaaactaaaacttatactgatggtatccagtattcggctgagaggcattctgtaagcaaatcagttgacccaataattgaaa

SEQ ID NO: 185469 - DNA, 558 bp, Zea Mays
gggacaagcgatgatgaagatgaaactatatggcaatatgttagtgatgatgaaagtccaacaattcttgtcgaggatgatgatgatgatagcgatgccgagtaaagactagagtaagttgtctctagttgaatatatttttttcacctttcacatgctatatttattctatacataccttctaaaattatgctttttgattgtctttactgtagaagttgatggtggaagcgttgctgacctatatggatcttggtcatgaaaatggtgacccacatggatattgggtcactatgataggatggtggcaattagtgtgtgctaggatattaaattttattctagattttgggatgtcctaggtcttttagctcggacaaagtctatgcttgtgtcaaatatttttatctttctctatatgtctacagacgaagaaattataatatgtcagaactataatatgaatgagcaccaattcattgattttattcagaaatcatagtatccctttttcctgggcatatgtttcacttaatattgttttagtgtaggctgagt

SEQ ID NO: 185470 - DNA, 1409 bp, Zea Mays
ccaccgacgagttcaagaccctgcggcggaaggaggagacttccgggcggagggcggcgccgcaggctggggacgggttccaagtggtgtgcgggaagaagaaaaagaaggtgggcgatggtggcgaggaacgcgtcggcagagttgaggctttcggaggttttggctctgtgaggatggtcaccaaggacaaggcggccgcgccgggggtgaaggcgaaggtgcccttccacatccgcaccatcccaaggccccaggatgtgtattgtattgtggtggacaactccagcaagccgttcgagcatatcttgcttgatcgcagcgaggatggcactcgggtcgtgcacccattggttagtgtttctctgcacatttttttgttaatctcacttctcacatcaaagcaatgccactttgttaacatatgattctcatccactgagtcacaaataatccttgggcttactgtttctattttgtgttcgatatgactaatttgtcgttgatgttcgcgttctcgttcaccacactcacgttgaagttgaacgctttgaacacagaatgaacaccgctaattggtgctgcaaaaagcgcagcttttctggttctaccttctcttttattcgatgattacagaattttgagcgtttgtttcgctgccatcccagcgcccttcacacccacgagtgcgcgccacgcacaagccgcacgccgtcctgggcgccgactctgtccagcctcctgctcgagcgctgaacctctaactgaatgcatgcacagctaactgctaactgacaaatggaaatatgcagcagcaacactagattacccaacataatttcaagacagattaaagatgaactgctaactgacaaatggaaatatgcaacagcaacactagattacccaacataatttaaagacagattaaagatgaagagaagcacttttctgtttggtagcatgtacggggatcaatgggatttacatgtgtctagtgatggatcatatgaaaatgcgtatcatccgtatagttgagaagcaatgcaacattagtacgaatcaattatgctttggttttatggaaatcctttggatttcaaaatagtgtgtgtgttttttttttgtgtgcggatcactcaattccattcttggcgacttgataggatgcaaatttcactcatgcagaaaatctcttcagcatggcatcataattttagcatcagcactagagaagtatatgctgttgtccatgttctgcatttatatatcaaatatacaaaacaatttatctgcatgcatgccctgtttttgcaggaaaaactccctgttgaacaaataatcagcagaaatgttcctgataatgagccagttaagccaccggctttagacaacactccttttacatt

SEQ ID NO: 185471 - DNA, 354 bp, Zea Mays
gttttgatcgctattggcagccatttccagacgacaagcatgctgtcagtagcacccaaaatgttacatcagccgacttctggaatcttccccctcctgatgtgtttaacacagctttcatagcagaacaagatgcaccgcttgtgttacaatggcctccagtgcctctccaaaatgatagctattatgtcgccctctactttgctgatacattgcctgataattcaaggacctttgacgtgtatataaatgattacctctttttcaaagatctaaatgtcacatcagctggtctttctgtctttgcaacacaatggattctctcaggcttgaccacaattatattgaaatctg

SEQ ID NO: 185472 - DNA, 355 bp, Zea Mays
tgactgggtatcctccaacggataaaacaacgattgaggaagagagttcatggatacacagccacttaaccggtgatggatttctgtccttttttggcaatgagcacataaacaaggatattgaccagaaggacattgtcaatgtcgtgaccatgttgcatgccaacaaatttgaagtatgcaaaattatgcaaatttgtttctcaatgttatgcttgctcgtctgacttgttcttgttacttgtcagattccgttcatcgcaatgtacagaaaagagagctgtccaaccctattaagttttgattctgatgaggataacgaggatattgaatctgatgcacgcaaattgaggtg

SEQ ID NO: 185473 - DNA, 585 bp, Zea Mays
gagctctggcgatgtcggaggaggaccgagcccacgtagttgcagccttgtaggagcagcagggagggatgaggcggggttggaggtagcttgcaccctgatcgacgcgccgacgacaggaacgatatccggcacgggtgctgtagacaaagggtcggccgacaagtcgcctgcggacaaactggcggtgggaaggctagtagtgagggcactggtggacggatcctgtagacaaagggtcggttgataggtcacctgtggacaaactggcggtgggaaggctagtagtgcggtggggagggggacgagggggtggtgaattcacacgccggaaccgccactgtcacccagggacagtggagggtggcgctgggtggcatcgggtcggcggctggcacttggtggtcgcgtggccacaagcacggagggggaaggggcaccgacgttgggagaagaggcgccggcgtgggtggagaggtagtcggggccgtggccggggaggggaggatgtgttgggagaagaggcaccggcgtgggggagaggtagtcagggccgtggccggggaggggaggcgctagcggctg

SEQ ID NO: 185474 - DNA, 332 bp, Zea Mays
catcttcgggagcccattctgctccaagcaagccgtcgcctcatgcggcggatggacggacatactcgactcctccagctgcacgaaccatatcctggaaaccggcaccgccgctctgatcaccgtcgctctcgcgctgcacctcctcgtcgtcaggattactacgaagaccagagcgtccgcacgccgcccccctgtcgcgcccggcctgccgctgcagctggccggcgcggcgttcaccgcctgcttgggcctcgtctacctcggcctcgcgtcgtggatgctggggagcaacttcactcagcacgcttccgcttacctcccacactggt

SEQ ID NO: 185475 - DNA, 1048 bp, Zea Mays
cctgcccggttgcttaacattcctttgtcgaatgtggagcgtctgcggtctacgctttctgcagtttcactgacggagctcattgaattagttccgcagctggtgagcagatcatcgacatcggcagatgcacatcctgacaagaagaagcttttctcagtgcaagacttcttcagatatgcggaaattgaaggtaacataatttttcattttccagcagagaagtgtccacatttctacttcttcagtatgtaggctcatggtctgcaattgccaatcatgcattcattttaatatatggcacggaaatcaccaaattagatcagtcactattagtcctctacagaaggctcaaatgccagttttagagtcaaaagtaattatattttgtacaatttaatcactagacttcttccaatattcagattcaggatatgccattcggatctacaatttacagcataaaatctgttctgatgttatccattattttaccaccgtatctagaaaatttgggtgaactactatcaaagatatgcctaccagacattttaattgatccatgcaacaacaaggggtaccatcctgttatttttcctgctagtgcattttgagtcaagctcactctatccattatacgatcttcaaactacagttctaattggtacctcagcaattcagcattctgcttaacataatgcaatgatacttttgaaaaggttgctcttttatgtattagttagatcataaggtgatatttgtaactgatgttctgctgctgcaggaaagcgattctttgaagagttagacagagatggtgatggccaagtcactctagaagatctcgaaattgcaacgaggaagaggcggttgccaaggaggtatgctcgagaattgttcaggcgtacaagaagcaacttcttttcgaaatcaattgggtggaagcaatttttatccttgatggaacagaaggaagcaaccattctccgagcatataccacgttgtgtttgagcaagtctggaacacttcacaagaatcaaattttga

SEQ ID NO: 185476 - DNA, 545 bp, Zea Mays
cttgtggggtgatgaattccctgctgcgcaagcttgccactctactggagaaggaatacatgctactgaaagatgtgaagcacaacattaccttcttaagaaatgagcttgctagcatgaacttgctcctcttcaagctggcagacatagaagatctcgacgtgcaagtaaaggagtggaggaataaggtacgagagctcgcctatgatatcgaggattgcattgataactttatggttaatgataggcccaacagaagccttattcggaagactataggtaggataaagaagttatggtttcaacatgatattggcaaacagatccaagaactcagaacccgtgttgtggaggagagcgatcgccgttatagatacaagctggacgattcaaccttcaggcctgaaatgatggaaatcgaccatcgtctcaaggcgctctatgttgacacaaacaagcttgagggcattgatagcccagtggaacaaatcatacagtggcttacaggaaatgggaaacacgatcaagaactaaacataatggcc

SEQ ID NO: 185477 - DNA, 728 bp, Zea Mays
actttaagggcgctgcgcgggttcctcgggctcacaggatattaccggaagttcattgcaagctatggcaacattgctgcaccactaactgccctattgaagaaggaagcattccagtggtcgaaagcatcaacagaggcattcctcgcagtctcgcactcaaacaggcactcatgaccgctcccttgctgcagatgccggatttcagcaaaagatttgtggttgactgcgacgtgtcaggttcagggtttggggcagttctccaccaaggtgcaggagcagtggcatatttcagtagagttgtggcaccacatcaccagaaacttccggcatatgagagagaactgattgggcttgtcaaagcagtccgcaattggcggccatatttgtggggacgagcgttcacagtgagaactgatcacttcagtttgaaatacatactggaccagcgcttatccaccataccacagcacacatgggtcagcaaactatttgggtatgacatggaggtggagtataggccagggaagatgaacggcgcggctgacgccttatcaagaagggatgaggaaccaacagcagcagtgaatctgctgtccaccccaactctggaagtctttgatacactcaggaaggaagcattgacagatccgcaagtccaggaactaaagacgcagttggcagcaggaactgcaggagaagggtgggctgaaagagatggattgttg

SEQ ID NO: 185478 - DNA, 791 bp, Zea Mays
ccccccctcctgtagatctgcgtcaatttcctcctccactcgcgcgctttttcctccagtcgccgcggcaattaatcaccaccaacactactactagtagtatcgtatcgcctggttagtggttactgtttgattcctcgtccccccgtcttcctctgttttcgcctgttttaacgccaaaaaccaaacggaattagattctcttatatctagatttcattaattgattaacggcccaacccgtggattttgcttccaattgcaacaattcggcagaaaacctccctagacagccgtggattgcttcttgtacgtgccagctttttcctacccaactcgttaatttcgtcagtttgccgcctcctgatgaatttctgctccgtcaatgcaggaaaagtaggagtcctttttttatccgtcagggaaaactcgtcaaatccggtccctattaggaattagggccacgttccccctctcccatacggctattggttttcaccgctagggtgcttgttttcgcctcgttttcgttttgtgctggtagtatatatgaggttgcagagatactcctgccgaaccgctagtacaagtcaagttacggttcgttgtccgattcttgacgtgtgagcgtttttgtgcgccacctccaccgccctttttccacaaattccttctccttcggcttcaccaccatggtcgtcacgcatgtgcgtaattgcctactttgaccgcgtctgcggtctgctaggaagatttctcttcttttctttcttcgcggagtaggggtacac

SEQ ID NO: 185479 - DNA, 960 bp, Zea Mays
tgctgctctcatgaagttgccagaaaatggtttgttctactctatattttctgttgtagaatagcttttatgcgtcattcaaagtatgctaaatttttccttaattttctcatgttctctagaacacagcaggcaattgcacaatgctaccagcgatgtgttatccaagcttcatgtggtgatgcgtacagtagataatcttcacttgaaacacaggcagttagcagcgaactatcaaaaacaaagagattcgagtgcctggaacagagctgaacagaaacgtctgaaaggtattttgtatttgttttgtggatggtatttttgagggtgctccatctttaatagtacttttgttcttaactgaaagtattttagcaatatttaaagttttgttctgtgccctagatcatcaaacaagtaaatactaatctccgttaaaatggtgaatgccttgtggcaataatattttcattatgttgtgaaactgtaaatcgattgtttcttgctgtggcactaccaacacatggtattaccaatactattctttattctattatgtgtacctagctgtcgtgtaatggtaaactaacccagtatttatgtacttctcaagaggagttgactagtgttgttgccaagttggaaggaagcaaacaaaaactggcagtactgaaagcacagggagacaataaacaagcaacaccgatcctggttcctacgctgggaaacaaaaatatgactgcagaaaaggtgagagataaacaaacagaactgcaagatcttgaagctactcacaaggagttaatggtaatgtcaagttcttgttttagagctccaaactattggctaggatgctagatgtgtatggacttttaagattgacacatacaaatatgagcaggaattgatttcaaagcgtctggaggaaattagaaggctgcatacagagagaattgaaat

SEQ ID NO: 185480 - DNA, 464 bp, Zea Mays
ctctggtgctattactaccaagaccacgaaagaaatattgaagccagctgctaatgcattcctcagtaaccatacacagtccgcgccaccaagaggtatctcagctgacaataatcaactaaatttacaaaatccccagccagtagtttttgagagtgctcccaatagtttgatgtcaagtccttcgagaagtccaagaccaatatgtcctgatcatattctgacttcagcattttgggcagtgaagcctcatgctgatgtaactttccttggatctggtcagtgctccagtccaggttcaggacaaacatctggacataattcagtgggtggtgatatgctatcccagctttttttgcagcccaccagaggtagtccagagtgttcaccagttcctagcccaagaatgacaagtcctggtcctagttctcgtgtgcacagtggaagtgtttccccattgcatc

SEQ ID NO: 185481 - DNA, 653 bp, Zea Mays
gtgatttctgcattaaaagcgcttccatagttttctgtactgtatctagctccacaaaaataaccgctaacaaaaaggtagagtttcttgtggttgatgaggctgcccagctgaaagaatgtgaaacactgatccctttgcgtctgtggaccttaaagcatgctgttctaattggtgatgagtgccaattaccagcaacagtcaaaagcaaggttggttcttgatgtactttttcatgcttttatcagagctattgatctgacaaccatcggatttccaatttgcctgttaacattcatattgtgccatttgatttccgagctcattttaggtttgcactgatgcattatttggaagaagcctctttgaaaggttgagttcacttggacacgaaaagcatctacttaatatgcaatacagaatgcatccttccattagtattttcccgaacactagcttttatgaagggaggatctcagatgccactaatgtcatggaaaaagaacaccgaaggatgtatcttccaggttctatgtttggtccttactcatttataaatattgaagatggaagggaggaacgtgatgaacttggccatagcaaaagaaactttgtagaagctgctgtcattgaagaaatattataccgtctcc

SEQ ID NO: 185482 - DNA, 465 bp, Zea Mays
gtttccagtggagtccggaggcagacgaagcatttgaggcactaaaaagagctctctctatagcccctgtcttgcaactcccaaattctgccaactcattcattgttaattgtgatgcgtccggctcaggttttggtgtcgtactgcatcaagatgagggaccaattgcctttttcagccgcccctttgcagcccgacatgtcaagctcgttgcatacgagagaactcattggactggtacaagcagtacgccattggcatccatacttgtggggcaggaagtttgtggtacgtacaaaccatttcagcctcaagtatatgctcgatcaacggctctcaactgtacctcagcatttgtggattagtaagctatttggtttcgacttcaaggtggaatatagggctggccagctaaatacagtagcagacgctctttcgcgcagagaaaccaccagtggatcggtc

SEQ ID NO: 185483 - DNA, 429 bp, Zea Mays
caacattggtgttgtcattgcgctttgggctcctattattcttgtatgcttcttgcccttttttgttgtcttgaatggtaggctctgttgctcctattttgacttaccctagttgagtgctttaggtctatttcatggatactcaaatttggtatgcaattttctcaacgctaattggtggtgtctatggggcttgtcgccgtcttggtgaggttagtaaagcttgccaataaattactttattattttgtagactggggttggttgtgcttgtttcattgtgtgacgttatatttttagttattctcctatgcaatcttcagcaacaaatgaaatatttgctttcctatctggccttttttcccagtctcagtatgcagtcaggttctgcatcgaaatcttgtagcataatagattagctcagtcatg

SEQ ID NO: 185484 - DNA, 1927 bp, Zea Mays
cgcgccgtgcgcgctcccgcacgcgtcgggactatcgtttcgcagccggttgagcgggtccaaggttcgttctcatctgttgctttggatcgacagctgaagtgaattgtcagattaggaatcatgatgccgatttccttagttttggattgagacattgagtgcgataaggactaaagaggtgcttagtgccttacttccatggctaccttttctttgcttgcatgccaatcgtgtgtgatggatgcaacgggcatatcgtcagttcagaacaataaatgcacatattcggattggaatatctgtcctcggcagtacaacattaagtggtagaaccgtgccttttcttatcataaaacaaattaaggttctccccatctctggaatctacagaaggagcaatcacatttgtttttgaatatctggtagcctaatcgttcaatgaacatcaaaattcgaacttagtgagaggtcttgtgcagtagtaccaagtatcatatcattgtaacaagcatcaatttgccaggatagttttcatatctcatcagtatcttgatggtgcagctcaaccattcttgttgtattgatagtgttatttagtttctagggctgtcatatgttcgttccaaattccgatgcacttactcctgtattttttagaaagattagaaggagtgtttttgctaaaaaattaaggaaacaacaaggttacattgtgctccagaatataatctgatctcatgtccatgtcatctttgtgtccttttaagggccctgtagaatgtggacatccttttgctaaatcaattctttgataattttcaggtcaagcctagccatatattgcacgccgctggacctgatgaaccacatgttgcaagtccaacatggtctgatacttcccttgatacacgtgacatggatcatgctattagtaaggaggagcttgaagatgttctcaacactccgcttcctgagcatccgaagctaattcgtggtcaattgaagaatggacttcggtatcttatcttaccaaataaagttccagcaaacaggttagaaaatcttttttctgctcacatctgttagtttttatatatggcaaaggacttcctctgtacaatttcacccttgatttccatacaatgattggaactttgatggttttctgtactttttaatttgattggagttacttgaaagttgacaactatgggtggagtctttaacatctgaactaatgtgaggtgtttatttgatttgttgaacatcagaactgtgtaatagtaaataaatcaagcgacaaatattatcctgatgcccatttcatgctaaatttcatgcaactgtgaagcaaccaaacattgttatgatatacgtgtagaatttgtatattattatggtttcatctagctattttgcaggtttgaggctcacatggaagttcatgttggatcaattgatgaggaggaggatgagcaaggaattgcccatatgattgaacatgtcgcgtttcttggcagtaaaaaacgtgaaaaacttttggggacaggtgcgaggtctaatgcgtatacagacttccaccatacggtgttccatatccactctccaactaaaacaaaggtctttacttttctgtccttatttctttgtggaacttatcagtgtctatttccaatttggaaataagcttatgataatttgtatttggtgaagcccaaatttgttttcttgtttagttgtccttggaaaaaatcatacgtaaatggactgaatgtatttgttgactgtgaaactataatttttagaacttatgatcctagttagatgtgttccattgtgatatttaatgtttacatataagcttgtcttctatctgcaggaatatggtgaagacttactcccttctgtgctggatgcattgaat

SEQ ID NO: 185485 - DNA, 317 bp, Zea Mays
ctcgtggcatggatccgtcttccctttctatcagtgtattgtgctaaaaacgcaaatgtgaaattctgaaaacctgttggtgtcatggtcactaaggacgacaaccacatggtgccaatcaaaattgaggaaacccacatgaccctactgaaatgtgttgctgtatataccccatccctgttgcctctgcctcaaataaacgctcaataactctaggaccaagacagttgtctaatctgtccaaaactaactccataccgtatggtgtccatcaccattcacgtcttgaagaggcacagtgtattctcattaacgtc

SEQ ID NO: 185486 - DNA, 424 bp, Zea Mays
cacattagaggtcacataaaataatgatcacaatattataacacaccatttcatagcaagtctttggttgatgtattgtttgttgattgttttgctagaagcagtgatcgacgtcctagaaaccctagctccggaagaagggtaggagctcgacctcctagaaatagaaccttcgtgtcatgagaacttcgaagaaggcaagttcattctacccttgatgcataaattacctatgctttctaccatcatctaagccggatcatgggaatggattcatgcatatgtgagacgaggttaatcctgcattaaattcacatttggtctcaaggaaaactatgggatattgttggtgttttcaaaagaaaatgtttttttaaatgggtatgatgaaggcttatcacccttatcaccttgagtgggatga

SEQ ID NO: 185487 - DNA, 1485 bp, Zea Mays
ctttgaagcccactggaggaaccccctttactcccactgcttttcttgttcctgcagtgtgtctgctatgcaaactctcatgtttcaaagctagttgagcggccatagccactgttttaggaaattgcatctccaccccaaccttcaactcatgtttgagacccaaaacaaattgtgtcaccaagaaggtctcactcacagccttgtcaaacaacctaatgcaatagacaagtttctcaaattgtgtcttatattccaacacagtccccgtctgccttagtgttaacaattccaacatcctgtctgaatgtgtagtaagatcaaattcattccgaatctccaacttgaactgaatccaatctacgaacccgacagaatctcgaaatgattggtaccagtgagcagcacgacccttaagatggagagaggcagcgcttactctgaactcctctggaatctggtatagcaggaagtaggcttcacaattatctatccataccctagcttcttccccttcaaataccgggaaatcccacttgggtagccaagtccttcggtgatgttgatccgactctattcctcttctgttaacttcttcttgtccaaatcttgcctcctcacctgacgaatggttccctgaacctcctgtcggatgagacacatgaggggcggtctgggatgtctggaaactgggtggtattgcctgtggatgagctcccatcaacccgtcaccagttcctcccctctgcgcgacgctccctcctcggtttgcattcgccaccacatttgatagtcgcgcttgatcttgggatacctgtgccagagacttcatggagagatccatttttgcctgcacgtactgtgtgatcttctcatgctccatctgtcgcttctccatctcggacatcttggtcgacagcgtgtccaacccatccatcttcttcgacagctccatgagagtggcagtcgacgcctcccatgcttgctggaacttctcagtcagccttttctccacctcttccatggctgcaaccacgtgacgcgcctgaacagatggccgacttggcgccgtgatgtcttccctgagatgtcgctcgacgacgatcgaagtgtcgccggaaaatgcctctgataccagtttgtgatatccggtggattatcgccagagatcaccggagagaagagagaagaaagggaaagaacacaggcaagagaagcagacagaggtatgaatatttggtttctgttcttccatcccttcttcagcgcagatatttgcctcttatacgtgtggctgacccgcccacgaatacacggccacaatacggcccaataccagagattaacaaagtctaacaattgagattacaaggccaaatccggcccaacaggatccactaaaaccaaaccttgtccgcatacctctcctaccgccaactcagtcatccgcgacggtgtttgcctgatcctgatgcagcaccgatg

SEQ ID NO: 185488 - DNA, 281 bp, Zea Mays
tttgctcaaaaagaacaaaatcacaccacaaatgggattgtacgtgcttatgttgtcaaggtggataaggaatgggtctggttaactgtatcaagaaatgttatggctcatttatttttacttgatagttcttccgagcccagcgaactgaaagaattccagcagcgctttagtgttggccaagcagtgaaaggtcgtgttatcagtgtgaaccaggagaaaaggttacttcggttgaaggcacttgataaccaatgcacacaaccgaatatagatgaaac

SEQ ID NO: 185489 - DNA, 537 bp, Zea Mays
attaccaggaatttctttccagttggtaagttaaaagaaaatctcaatattataagtagaacaatggcaaattgaatttgtaattttctcttcagctagaaagagttgagccatggatagcatctatggccccacaaccccaaatggaacacaatggcactgaacaatgtgtcaatgatcagtcactgcgcagcagccacggatgtgtaaatatagagaagcctgtgttccatacagacaatgctggggttcagcaagagaccatggcagatgtagtcaatgaaagtgaaacaggaaatctccaaaaggatccacctgcaccaacttttatttttcaccaaccgtgtatgcctgaaagcaggtcttacgtccctccgcaagaagatactatagatgctgttggtctaggcgctaggtcctcagaaaggagtcctattgtggaggggaacatgtccgttggatctgtgcttgcttcagatggctgtgatgtacctttgcagggaagcattactgagccctttttccagcaggataaac

SEQ ID NO: 185490 - DNA, 457 bp, Zea Mays
ccttggtcttcgtcgttcaccgccgtcgccgccgtgtcgcctacaacactggctccttcatcttcttcgactgtgctccttctcatcgacatcggcctcgacaacactggcgcagctagcggcgtgttaggggatgcccgcatgttgtttttgcacctcttcgccgacacgtcgatctctgtcggctcatcgtcgccgctattgttcgggaggttctgccatcgtcatcgccatcattgtcttcgccttgcacgctgtcggtcaggccaaccgattgcactcgacaacaccctctcgtgacgtctatcgtctgtcgcgagtttcttaaccatgcacgagggttgtcgctgtgtcgcctctttgggcagcaacgttgccgtttgtcgtcgaccctcgccgttgcatctacatcgtcgttgactccgccggtgcgcgtcttctgtgcacggtctgcaag

SEQ ID NO: 185491 - DNA, 415 bp, Zea Mays
ctggtaagaactttcttctgttgagctcttaacgcgtgataatgcattcaaatggttcaaactatgaagtttctgaagtatttaacttatttccctagctgtcaagggcgtcgagcccctgggtggccggaccgccgctacgcagctcgtagccgtcgtccgtcttctccggtgaggttattcccctcaaccgtaggcttaacagagagggagagatttgggatataattcctgcttacccctttcaggtccggttacaggtttataaagcctttcggccacacatgcatggagctaatcgctccttaattctaggcacacgcatggagctgaccactccttattcctaggcatgtaaactaacctttcaactaacatgggctgattgctccttaattctaggcatgcagcaaac

SEQ ID NO: 185492 - DNA, 397 bp, Zea Mays
gctggcacgttgttttggcaagacagatggattcagggtcactcactttcagttttggcaccatccctatgcaggctggtcccttctaagttcaagcggggtagaacggtgcaggaggctttggttgatggtcgttgggtcagagatatcaggggtgttctggatgctcaagttctcacggagtaccttcaactctgggatgtcctggaaacggttagtcttgcgccgggggttagtgaccagcacctctggaccccctcaacctcaggacagtactcttcgagatcggcttaccagaggttctttataggctccattgcttttgaacttgcccataggatttggaagtcctgggcccctccgaagtgcaagtttttcctttggttagcgagtctaa

SEQ ID NO: 185493 - DNA, 378 bp, Zea Mays
gtggaaacagatttccagtgttatgcatcgagccacagttcacagcaccgggagacaacaccatgatagcatcatcatccgagtcactcaaaactactatatcctgccctgtcgatgctggaggaccattttcgtctgcggatgaagagtcaagatcatggacatgggtcatgggataaccatttgttgctggctctaaattataaccttcatctgcaatgtttgtatcatcaatattgcttgagtgagtgatgcagtttttgttttcatcgtgtcctgaatggtcatggtcgttaccagaagacggcaccagatcagcatccactctcttgctaatttcccactggccattgctttttttcctaagtcccaacttaa

SEQ ID NO: 185494 - DNA, 720 bp, Zea Mays
caccataaaatggctagaaatgagaacttgcaaagtggtaaatatcaagatggtgagaagcaacagaaagtaaaagattctattaggcaatcaaggagatctatcgctacagtgctacttgagggacaaaataatgatgaaggaaaaaagttcaaaaatcctacgaggaggacaacacacaaatctcatgcccttaatgcagttgaagaggtcagcatggatcacattgaagttggtgaagaaggcttgaaattgaggaagcgcagtaggtttttgctggaaatatcatcttcagctaatgtttcctggaagcatcagaatgcacagatctctaatgaaaaagataacacagaaggatcgcagcaggcatcaaattgcacaacttcaaagagaaggtcttcaaagaagagacgaacaactgctccagaagaagtgatgcctttcaaggtggcaaatgatgacatagttatcatggaagaaacaaaggacacacttgaatataataatgagtctagtagtaaagttcaagaaatttgtcaggttaatgctgcaagagaagagttctcttcaggtccattgcttgtaacagtagctcctagtgacgaaatttgcacagtgcagagtgtagctgtggtgatacctgggtcagaatctggtgacgatgcaaatcaaagttctgataagagtaagcaacctcaggaacattctgtcactcaaact

SEQ ID NO: 185495 - DNA, 941 bp, Zea Mays
agtgatctttgtgttcaaattcctgaacccaaacttcgcctctgcttgttgagaaccctagagtttttattttcattgatgtgctcatactatactattatgagcttttcttcaggagataaggtacatctactttttttctgtccactttattgttgaatcttcatacctcactgatcaacaatcatgatttttttttggtaaaaaagctgcctaggctcagtgcgttagtgcaaacaaatatgagaaactacaaatttcatttttctgctttgttgaacatataaactacatagttgcattggaaaaccaaaaggtgacaagaataatcaaacctaccagaagcctagagctgaataagcttcttacactcccggttcaaagtataagatgtttaggacatccacatggtctaaaaggcgacacctttactagaaatttaaatgaaaatatggcatttcatagaaagtagaaattatgaaggtacttttcatggtgaatagaaacacctatcttagtcaaactatgtaattctgcaaatattgatggttaaagttttaaaagcttgaccagcaggaattctaaagcgacatattttgaattggagtggaaaagatgtcaaatgctatcagttctaaactctttgtttggtggaacggggcaaatctgttttcagtatgaaataaatctgagttaatactacctatcctcctatccaataacctatatatacatatatatgtggacctgatgttatctatacttagtctaattttcaatataaggttttgttcttattcatgaaattggttttctctccagaatattgactccaagggccaagatgaagcatataaggatggcacatctcagaatagcagcgaaactttagttaatttaggaagaggtcattcaagtgcagcagtcactcaggatggttc

SEQ ID NO: 185496 - DNA, 315 bp, Zea Mays
ggtctatccggttaacattcggtggaaggctgctgctggcactgaaaattcagctccccgcccccctccatcctcagtgatcactcctgcagaacctcgtcgacatttgcactcccgttctccgccggcatacagaggacagcgtagtggaacttcctttggtcatgctcaaggcacagatctttacgttcagggttcgtcctcctgccatggctttcgtgaagctagctgcagggatcctcaggttgtgcagaaaatgactcttgagccaccccatggctcggttatagctccgacgtcctccattcttggacc

SEQ ID NO: 185497 - DNA, 673 bp, Zea Mays
agtatagcattaaatggttcagaagaagaaaaaacagctgctgcaaagattctttgtggtgcatcacttgttcgtggctggaacattcaggtatcttaatttacagttgtacaccttattgtatgaaggctgaagagattctatattgtcaacatatagctgtctggattttttgtttcttctgcaaaaaggcgaatcaatctgactggggttgtgcatttgcttatattttttcattcccaccaaaaggccacttccattatttgctttgaaatgtttttaatggagcttaggaaaattcaaatcttaagctattagcatagctgaaagttcactatcatttgttagtctaatgcacgtgaggatagtcccaaaaattgtcagaaatgtatggacgtagggaattgacatgttgtcatataccagcattttggggacacagctagtcacctaaaaactgtagaaaaccttacaaacaaatttcaatgttgtatgcctttttaacatgtgtggctatatgctcatgcacattgtgtcaggaacatgtggtcggtatggtggtcaagctattatcagcttctttaccctcagattctgcaacttcaactcctgggagcatgagcaactaccttgctcatatgtctacattaaacgaaatcttactcggtgtgtc

SEQ ID NO: 185498 - DNA, 484 bp, Zea Mays
ttcaatgtggggtgcaggtggaggcaccgggacgacatccatcataaggaagtgctacagtgatccagagatcatccaaaatttcatatgccgagcctgggtcaacctcagccatccattcaacccccatgagtttgtgcggtctttgatggctcacttttatgcaaacagttgccaagaaagacaaggagggatcatcggtgttgatgtcctaactagcatggatgcgactgccacccagggggatctcctcagcgagttcgttcagctagttgacaagaacaggtaccttgttgtcttggaagacctgcccaccatggcagagtgggactctatcaggacgttccttcccgacagaaagaatggcagctggatcatcgtgtcctcgcagaaatatgaaattgcaagtttatgtgtcggacatccctaccaaatattggacctgaagcagtcctcgcccactgagcactccgtatgtgccttc

SEQ ID NO: 185499 - DNA, 418 bp, Zea Mays
gacttgacatgtaaggcagatcccgctcctaagaacgatgataaagctgttgaaatgcaagacggttttaatgcacaattatctgatgtttctgaggatcttgaaggcaaagactcgggtggcgaagatgaggataccttggataatcagatgggtgatactggtgatgcaagtgaagtggttggcaagaaatcatgggataaggatgaagatgatgatcctaagacatctattgagaaatatgagtcaggctcatcagccaagggaacacaacaggatgatagggaaatgagagctaaggatgatggttctattgaggaggaagatccgatggaaatggattctgaggaaggaaagaataataatcttgaacatgatcctagtacccatgatgaaaccgaactgaatactgatgaag

SEQ ID NO: 185500 - DNA, 617 bp, Zea Mays
gttgaaaaagattttgtcaaggataacttgtggcctgagcttatccctcagttgaaactagtgatccagagcagcaacctaattagtccaggccagcatcctgagtggaatactattaatgcactcacagtacttcaatctgttgtaagacccttccaggtacatctcttgctttctatgcttctggcatttttttaaaaccaccttttttaccctcggttttatctctagaagcatgaaatatgattgtgactttgacgtctatacagtgtgccctttgattatccaacagcagcaacaacaataaagccttttagtcccaagcaagttggggtaccaatttcttgtttcctgcgaatgaaactaaaagctgattcctttctttttggagtttactattttgtccttattttctggtatatctgttcgatatgctatactcataacttagcatttcaatttacttgtaagtttattatgctgctatcagacttgtactgtccacactaatttgtttagttctattcactgatgttccagaatccagatttcagccatagtattttaatatgttccatatttaatttttgtcatcttacagtatttcttgaatccaa

SEQ ID NO: 185501 - DNA, 833 bp, Zea Mays
attgaatccaacctattttgaaagggtagacatagagatgaactagacatcggtagtctagaactctcaccacaatcaaacgaaaaaaggggatctaggagatcatggtgctcagttgagatctgagcttctaatcttcttcacctttgtgttcatcaatccatcatacacaagaacatagggtattacatatagcgtgacccgaacctctacaaactgcatgtgttctagtaaccaggctacacttagcatcaacatacatctaacctacgcccctacctctacccacaaactttttcctcttcttttggtatgtgcggtacgccggtgtcatatcgtgacaacaataagcaacaataacttgaagctgagcactaactgcttggcagcaataatccgaagctgagcactaactgcttggtgagttaaagtttacattactagcaacacaaactttttatctttatcatcatcatatataagtacagcacttgttaagttaccatctttcgtgtgctactaacatctttctgcttcatgatgcagaacatttgcaaacatgaactccttaaaagatgtaacccttccagctacagtatcagaatgttgcaacagtgaaccatttatctagcatacagatgcatttatcccaacagaaaagaaatggaacctatatatccattaagcagcagatgcagcctcaacattcttgtctcaacacacaagcgtacctcaaaccagagacaggatgcctttgccgcagctggccaagctcccttgcggccacagatgggggcctcctctcctctggtaaaccgctgttgcgcagaaac

SEQ ID NO: 185502 - DNA, 310 bp, Zea Mays
ctggtttgacattccccctcccttgaggcgctgcttgtccccaagccggcgcgcacgggaaacgctccttcaatgcggttgtgtcctcccaggtggccagagccggatccaggtcggaccaggtgactttcacttgcgccaccgtcagtcctccacgttgaatcatccggcgctgcaggatctgcatgggcacctgcattgaatctgttgtcgattgtagattctggacggccacttgctgacggccgagggcagccttaagctgggacacatggaatagtgggtggatctgggaggatgctggcagctg

SEQ ID NO: 185503 - DNA, 726 bp, Zea Mays
aagttctaagcctgggcatttatctgcttcccaacagagagtgtacgaggtacagcagcagaacataaacttctgaattaaaattttgcatattgtttctgcattggatacatgactgtctgcatctaattctgttcttttcaggactttgttcatgtatggcatccccacaatcaaaatgtgggagctacaggttctggtctgtctggtgttgctactgtctcgagtactcttggtgtacttcgagcttacagtccaaattcgacatcagcatcctccagtaatttgtcaactgtccatatgggtggactaacatgtataactcagccgacagaactggggtctgaggatactgttatcgcacaatttttgaggtacacatgttttgactatcttttacagatgtgtcattcttttttctgttgcttgttttggactgattatattcttgcgccttccatagtaatcctgcccaagttggaccaagcgagtctcctgtcctatttagtggaacagttggtgctgcatctacattttctccattggcatctaatgaccttcctgttagtgtaaacgactgtctcaaccaatgtatttttcctgttgacctcatgactatgttgccatatattatcttctaagacctttctaaccttctgccaggaaataagtgctatggtgccccctccatcaacatctgctgatcgtctgggatctattttacct

SEQ ID NO: 185504 - DNA, 286 bp, Zea Mays
atcctgatgaatattgtaatctgaaaggaaaggttcatattcatgatatagatgtaaagtggcggatgtatgctggagatgactggttattacctcagaaagatttgactagcttaacatgcacagatggaagaaataggagctcttcactggaatttactgtgagagggctcaatatccaagttgacatgtatccaaatggggatgtttctatatctaggctatctgtagctgctgaggacataactctttgtgatcaaagtatccatgctccatggaaactggt

SEQ ID NO: 185505 - DNA, 281 bp, Zea Mays
gcgacaccttgatgtgcaaaaagaatcgggcaacattattgttggcatgcctcatggtataggatatctgacagatctccaaactctcacaatgttcaacattgggaatgatatgttgcattgttcgatttcagagttgaacaatctgaatggactaaggggacatgttcatgtaactaggcttgagaatattatgacagccaatgatgccagagaagcaaatatgatgggtaaacacttgctagaggctttgacactggagtggtcttaccaggatgaag

SEQ ID NO: 185506 - DNA, 4623 bp, Zea Mays
atgattgtacactgctagtctgcactattcctgcgacacgtggagatccaccacataagccatcagttccatctggcccgaaaattcaatctaatgagtcaaagaatgtagtccaagcgagaactttccaagatcttctgaaagatgaatatgatgcaaaactatttgattactatgcaacctcacagcttgtgttggcctctttggatggaacagtgaagccaattggccctccagctatatatacatctgttgatccatcaccggatgataaatacataatgctttcttctatccaccgcccatattcctacattgtaccttgtgggaggtttccaaagaaagttgagttgtggactgtagatggaaagtttattagggaactttgtgatttgcccctggctgaggacattccaattacgatgagcagtgtacgcaagggtaagcgctcaattaattggaggccagacaaaccttcgatgctgtactggtatgtagagcaccattctaagcctaacttgctaaaatttgcattggtactttttctgtttatttaaagatgaactcctcctgcaacatctactgcgcctcaagccctcaacataagcttacaaaccgataatagaaaaatatagttcactttagtagctgtgtggaaatagaaagacttaaagccatccaagttagttaaatctcaattttaatgctagaaatgtaataccgtacaggaacattgtaatgggactagaatgacaatcctccttttatgtttatttatggttatggtctcaacttggatgatttgaactaaaatattttagcgcccatccattcaaacgtatcctcatggtttaccttccaaattaaacattttttgaaacttaagcgccaaatttagcgacccagaaacaaaacatcaatgccaatgctatcgatttttctataaaagatcttttccttgtccaaaatatgggtaagtgcccatattagtatcggatatgtttatgtgcaaacaaaatatgtgttcgttaaaaattgatagaatctaccatctatgactttgagattgactatcttaaagaaaattggtttgatggaacagtttatgttcttttgttggttccacgaagcctgacctagtgaccttacatcaaagaatagtgccaggtgtcactaagcaaaaaagaatagtttcaatatagtaagttctatttctatagcagtataatttcaaacagtaacatctgcattctgcagtagtatagttgcattttcatagcccttgatgggacacttcttgattgaaacttgggcactcctcttcaggggtctgaactgccggttgaaagtgaaacataatggtagtttcatagtttgcctatcagcatatgagatgaaaatgtttgctttcttggtaaccataacttttcctttatcctttttacttagttctgactatatttgattagctccatatattaaccaatttcacataaaacggagttatgataaatatgacttgatgccaatgcatgtttttctttttgcaacattccaattgtaccactagtctctctgattccaaatttagaccgtttttagatttgtcctaagtcaacatatttagctttgaccaccaatagctaaaaatctaaatagatttacagcataagagcatctttaagtgtctttctaaatttcactctctaaattgtcatttggagagtcatttgcataaaagtcgctttctatatcttttcactctccaatagcttttctatatcttattgtactctagagctattctcgttttctaactttggctagcaagaaatcctgaataggagatggctatatttggataatcatttaaagaagctgttggaggatattttttttaccaaaatctctattcctagcaattaggaaggatatagactctcttggagttgcttgaaggtatgcctcaccaaacattctgggtctcttgaaaacagtggctgatgaatgtagtctttggtgcatgggtgcctctaatcttcaggagcttctcattaggtcgccctacccagacctgtaggctgtggttggtaggttgctacccccttggtcatgctttcatctagttccaggagagcttatttcttgtttctagctggtgtgtgtgttgtgtttctggctggggctgttttaccctcaccccttgacctctttttctctcttaatgaaaggacacacagctctcctgtattgtttgaggaaaaaaaggttgatgctactagattcatcatggcgatgcacagtagctcaagccatggttttgggtgtctgatataaaaggagcactgactgttcctgtcctaggagagtatctatttatttgggaattgattgatgatcgaaccctgcaactaggagtaatggaccagcactgttggatgcttacatattcaggaacatacggcagtaaatctgcatataatgtcatcctcatccggctgcctgccccgtttgcccccttcgcgatcaagctggagaatccatccaacaactccttgtgtcctgtgtctgtgcttggcaggttttgagtgaggtccttcagaagctggggctgatcctccttgtgcctctgaccatcaccaagtgtttctcacattggtggtatcggaacttgcctggggaaatcaggaaagggctaaactcagtcatcattctagtggcatgggaaatatggaaacaccaaaatgactgtttaatggggcaaggacaaatgtcaggacaaccttagaggcagttcctgatgagtgtgtcttctggtgctcagtcggtgtgaaagatcttcaagaaatttggtcaggacgcttaatgtggccatgtgatttttagtcctgggtcactggttgccttttgtgttttttggtgcagtttcttcctttgttcttgtgtgtgtttggatgtgtttatgtgtagtatgtgtttgggtgtgcctttttggtgggagagtttcttactttctttaccacccttgttctgttttcccctcatctcgtattaatgaaatgatacacatatctcctgcgtgttcgagaattcatgacaagtaatttcataatatacaagtatctctatcaggttataaacctatgcattttttatagcaaccttcttttatctcctagtggaagtaagtgggttgccttgtacaggattttgtttgccccctcctttgtctatttaatataaggatgctcagctctcttccatgttcgagggaaaaaagaattcgcaagtgaaagtttagtcttgtagaccgtgtcaaactgtcaatgtcctaactcttgaatgacttacattaagaattagaggagtgctattttgttttgttgtttttagtggtactaacatattttaaaaaacatcctttgaaatcaatataaaatcactaatcgtcggtccagtacaattaagcatactcatgttagaattgaattgacatttgttttttcttttttaatttgattagagatgctcaaagtattgatactgcctcgatgaagtgtgatatggactaacagttcattcgggtctttttaatcatcagatctcttatgcataaaccatgttattagggtatctgctgtatctttagatgctctatgatatttgtgaagaacatttacttgcgaattaagtataactttcacttatcaaagctgtaagtgtttccatgagctactcctttgttctagctcatctttactttattcttctgatcagggtggagacacaagatggtggagatgcaaaagtagaagtctcccctcgtgacatagtttacatggaaaatgctgagcctataaatggtgaacacccagagattctgcataaacttgaccttcgctatgcgtatgtccctcaaattatccattagctactttagatggatcattgagcttttcttcattgcagatgttacaatatttctactttctagcatgaaacctaaacaaataagaataccaataaagtttcaattctaaaaataataaggacaggcctggtgcagtggtgaaaaagctgtctcaccgagtcaccaggtctgggttcgaagcagcctctctacatggggcaaggcttgcctccgtttatccgttccctagaccccataacgtgggaccatatggcactgggcctgcccccctatctatctaaaaacaacaaggagtccagtacttcaagttgcttgtgtctctggtgcctggatgtaaacaagattgcatgttctttacactgtccatttgctacactttgttaaaagctaactcttctgatcttcttgtcttctggattttcattctgtcggaacagtggcacctcttggtgtgatgaatctcttgctttagtgtatgaatcttggtttaaaactcggaaaatcagaacatgggtgctctctcctgataaaaaagatgtcagcccacgcgttttattcgaccggtcttcagaagatgtatactctgaccctggctcaccaatgatgcgaagaactgtgatgggaacatatgtcatcgcaaagatcaagaaagaagacggaaatatttatgtcttgttgaatgggatgggtgc

SEQ ID NO: 185507 - DNA, 458 bp, Zea Mays
ggtggtttggcgacacaagcagaagctgatggctatgtggatacatacaaggtttgatgggttctctaggggttcgttcagtgtcctattgttgagtatgatgagtctttcagtcccgtaatgaagttggctactatccacaccgttttgtccctgtaccagtcacattcttgaccgggtccatcggttggacgtcaagaacgcgtttctccatggcactcgaactaaaatggtgccaacccactagttttgtggattccactcatcctgacattctacaaactcaacaactcactctatggtttgaaacaggccgtgtatggtacaatcggtttgctccttacttgctcttttgggtttctttgaggccaagtccaataccccgttgctcatttaccagagcgatagtgatacggtgtacctactcttgtatgttgatgacattgtcctcactgtct

SEQ ID NO: 185508 - DNA, 374 bp, Zea Mays
caacagtttttaagtctgcaagagccttaaattgttcaataacctagtgaagatgaacatataatcacataaataattaaatagaaaggcacttaatgcagggccggactacaatggttacacaatgatcaaacagaactatctcgacctacaaacatgttgccacgcaagagcgcagaaatttaaggacacggtaaatgttgtggtcgttggaggcaaggctgtgaggaagcgattggtgagagacccatcaaccaaagtacagcctcgtactatgagaccactgcatttgctctagggccccaacatccgagcaccccgcagagaacctgcgggtatttcgaagctaaaaagagagcttcccccaagtggca

SEQ ID NO: 185509 - DNA, 551 bp, Zea Mays
aaacaacgatatggttaatggtacagatgattctatgctgtatactcttccccaggaagagttgtttgaactatttctaactctgagcggacaacttttcacttatatggaatgcatttttgaaatttcataggcaagtgttctattgattttatcatgtacttacagtgaccatacatgctatgtttgctatgtccaacaatgttctcttgatctatttagggtaaataaaacaaagatattggagtacttgcacgatgcttgggctattgacaggaaggcagaatggtcaatatggactgttcactcaaaaattgagatccctcatcgctatttgcggagtatgaatgatgaatcatctcaccgtcattcacttcttagagtttctggatcaaggaagttccatgacgatgtaattgccctcgccaagttctattcataactagtgttatcactcctatttctatttaacaatcactatatgtgtgcagcctgcacagaactctgcttcacgggctgaactacaccggaaaagcatagcacaaatgaag

SEQ ID NO: 185510 - DNA, 587 bp, Zea Mays
ttaccatcgcactccccatggtgcggatcatctcgagcagagccaggctgcagatacagataataagcatataaatcatctgtccacagatgacaatgttccctccagtgcttcaggccacaaacatggtgctatcagccgccatccatctacatcttctgttgatgatcgctccatcaagtccggtgatgattctgatggggccgagagtaccagtggcagaagcagtaatacagagatctcatttatgaataatgataccatctggataccacctcaagcggcagataaggaggatgaggcccagagttttgctacgagcattgcttatgacgacgacgatgacgattatagtgatggtataaagtggggccagtcaagtttcccatcccctggtaagcagcatgacgccgacactagcaatcatagggaggaacgagaaaaggcaatgctagaagctatgaatggccagctgaaggtacttgtcagtcggtttctcgcatctgctggcattccatcttccaacgaagagggtagcgatagctggcttgatattgtcacctccctgtcatgggaagcagcactac

SEQ ID NO: 185511 - DNA, 1178 bp, Zea Mays
tttctgtccgctcgcacgcgcggtccgcaatacgcccagccgccaccgtttcgccattgccgcagcgaattgccaaacttcacttctgtaagatttaaaatttaagtcaattacttttgcagatattttgacagctctggcttcagtggtccattcccttcaacattctcgaagcttaagaacttgaagatcctgtaggctcaatacagcagcaacaagttatttccaatgtaacatcacacacttagcgtaatgtattttcttgtgcatgcagctgggcatcggacaacgacttcacaggaaaaatacctgatttcattgggaacctgactcagttggaagttctgtaagactactgttaattccttcacacaatcattcggtacaattattcatgaaccaatatttcttggaaactgtgcaataggactttgtgcatttgttcttttcttatgcataagcacactaactcttttctcttttcactcctaataaaaatgtaacacattttcatgtgatcagatcaaactggccgataaaaagtcttgatactgtgtgcttaataacattttcaaatggcaaattaatcttttagcaattggcttaatacgaacaaaaacttatgaacttttaggagatttcaaggaaattcttttgaaggcccaatcccaaaaagtctgtccaatctaaccaaattgacaaccttgtaagtacttctttcgttgttgtccctgttcctttgatagttgacaaggtcaaacttgtcatgggaactgatttgttagagatcttgatgtgcagacggatcggtgatgttgtgaatgggagctcttcattgtcctttatcagtaacttgacatctttggatgtcctgtatgcgacatactttcgctgtaaaggtactgtttcatatcttggcagtgtagatggtactgacattggttatctttctacaggatattaagaaattgcaggatatctgatactcttgcaacagtaaatttttctaatctagctggattgaccttattgtaagtatttcattatatgccattctacaaatatctgttgctattgcttttctttcaaaaaaatcaataggagcatcttttcaagtaatatttatgtctcatggcacagggacttgagctttaacaatctcacaggccaaattccac

SEQ ID NO: 185512 - DNA, 411 bp, Zea Mays
tgcttctgcactactgctcgaattctcatattctgcaacccaacagtacccgataaagcatgtgttgaaacctggtaacacaacccctattgatcatcctcctgctcaagctgttgcaacaactcatctgttaaaaccatctctacattctcagtgataacagcattgagttgggcaggccctcgtttagtgcatttagtaatgtgtcccggctcaaacttttcacaacatgtgtagcacaatccatcacctgtcgttctttggacagatcaccctgcttcccttctcccttaaatcctatcatggtatgtttgttattgaatggctgacgctgccccttaacttttgcctgctccaaaatatcatactgagtctgggctaacacaattgcacgatcaacagtagtaggca

SEQ ID NO: 185513 - DNA, 272 bp, Zea Mays
aagactgacgcgtcaaggccatgggctggtctccctatccgagtgcaccgtaatgcaaaggccctcgttgatgtggctattacctcagtggtaggcagtggtgaatctgtgaagttctggtctgatcattggctccttggtaaaactgtggctgaacactgtccaaccctgatccaaatgatttctagaagggatttaaagcgaagaacaatagccgaggggctcacaaatcatcaatgggtgtcagatattcggggaggattgtctgtaac

SEQ ID NO: 185514 - DNA, 527 bp, Zea Mays
gcaaaccgtgcccagatatgcaacaacagcgtcctgctctcaaagctcacagcgcccctattctcccatgctttcctcgacaccgcggagcacggcagaggatgggttgttggcatgttagccacgtcgctgaggatcataaccaggctgcttattagggctcctggagaggccagcagagggctgcgtgacgggatcacaagcaacgcacaggcggtctctaacctgtccagggttctggaggaggaggacgacgccaagtttggcccggaactgaaagcagctgccgttgacatcctagcagaactagcgttgccttcatcagacaggtcttccacctcgaggttgggcaaggctgacatcgtcagggggctgtggtgcatcttccttgttcaagtggacgatggcgttgacggcagcaacactcagggagaggaacagcgacagcaggatagcacactgaggaagaaagctagcgaagcactggcacagatgctgtctgcagaactgcgtcatgttgctggccg

SEQ ID NO: 185515 - DNA, 551 bp, Zea Mays
gctccggcgaggaattcagacgacgtccgaggcagtcccagtgccgatccaccagtaacacgttccacgagcccaggcggatcaccccgacgaccgtccgacacaggaacgacggcgaaggaacgagtcagcggcggcggtgagctgtcaccgtgcggaggtgcaataagaacctaacggcggtgatctctcggtgtcgggtggtaccgggtctggcggatggggcgagcatgaagggggtcgatgggttaccaatatgtagccgccaggggaaggtcggttgtgggtgcccctcaacggatttccatgatttgcgctaggggtgagcttgtccgagcggcgcggcgaagaaagaggagggatagaggtgacagatgggtcccaccattcagtgactcaacgtcacgcgtgagagggactgagcagaggggcccggtcgtcagcgctaagagcaggatttgggccgcgtggtgtgtttttcctggtgggccgaattcatgcaggttggcccgcgaatggcattctcctttatcctttttctgatttatctt

SEQ ID NO: 185516 - DNA, 612 bp, Zea Mays
tgcagatacagggcgtcaccaggctggttcaggccagcaacgaggaagagggcctgaggatatacctggccttcgcccagccggtgctcaactcgtcggagcagatcctgcgcgcgcttacagcgactgacgccgtcgccgtgcacctcacacccaccaacagaagcaccctcggcaaccgccgcttcggctacgttgtaactcctctctctctctccatgttcttcgaatcactcactgatcgcgactgctacgacagcttgttttgtttctctgacatatataactactaggtgaagaagatgtctgacgccgccgccattgtgagcgttgcctgcgacacaagctctattatcagcaggcaagggactccggtggttccagcagagccattcacgtttctttatggttagttagtccccctctgtctgctgactagcatttttcagacctactactctcacttgttgagttcttgcttggtagatacacagagaccttgggttaagctcggcacatcgactcggcggaccagctcacgcgacatcctcgtcctcatcaagtttgcaaagcctgtgttcaacttcagctcctcggcagtgcaggtgtctg

SEQ ID NO: 185517 - DNA, 546 bp, Zea Mays
tattggtcgaggacatctcagagttctggccatatgcttttcagatatttgcacaactcgtcaatttgagccgaccacctctctcgcagaactatatgcagctatttggtgttctcctcagtaatgccacctgggaccggccaccatgtgttcctgccttggttcgcttgctgcgagcattccttaggaaaattccaaatgagctaaaccaagagggcaggcttccaaatatcttggcaatatcccgtagtctcctctcacgcagcagcactgaagattctgctttctacatgctgaacacaatagtggaaaacgttggttttgacatactgaacccatatataactgagatatggagtgctttgtttactcggttacagactagacaggcagtgaaatatgtgaactctcttgtggttttcatgtcgctagtgctggtcaaatatggatcaagtgttcttgtcagttccgttgattcaattcagccaaatcttttcacccaaatccttcagcgattttggattcccaacctcaaattgatcaaag

SEQ ID NO: 185518 - DNA, 4320 bp, Zea Mays
atactgggtagcaattggtgtggagaggaaaggttcaagttgattttaaccaaggcagcacgacggcagcgacgacgacatacaacaacacgacggtaggggtgatgatggcagcgccatcgggtggtggatgcagtggctgtcttgactgcctgcatgatattgtgcatgcactatcgatgggatcatgcctgacagtagagcagcggcctgccatggctacgggaggtgcgcacaaagggagagatgtaaaagagaggaaggaaaaggtggagggtaggataataggaaatggagtgggtaatttggcttgcatgttcacgcgacaggggaagaagggtaccaaccaggatgccatggttgtttgggaggtatgttcccatcgaccttgattatatttctttacattgctaaagggttcacctcttttacactctgttctttttaaatttctaatgtttattatcattcagatcgtctatctataagaatcaataagaaatacatgcatataataaggcatattgaactagaaaagaaagactaaaaatcaaattttgctgagctatccacccttttaatatctaaggtgacattatatattgaaacaattcagtttttgtacgtgatgtatcttggtggaaacaatcaatgacgtagagtattggccaccgatcttcattattcctaaaactgtgcatagcctcttgttcctcctctacccttggatgcacccctaacctattcttgtccattcagcatgctaccaccctcccttcttttggcctccctcaactatcaccttttgatgtgtttttcttcctccttgcacatccatagatcaaatagttaattttggatttctcattgcgttctcatggaatatttctttcatttttcttattttctaaaaatataatataatgcaccaatcaaaattataaaaaggacaattcaaaggatggtttagcgatggagcaagcaacatctccatcagggatggaggcagcagtagggcgggcgctcgagccccctcctgttcctgagaccatggagtcccactgaagtctccactaaaatttaaaatgtacacaatataatataaaaggggcttctatattgtagtgatttagtttaggctctcctaaactttctcttggctccgtctttgatctccatacagtttcaattaaaattagaggtttggatattacaaacaatatattgatttataaaaaaacatcttgtgatttgaccacctcaaaatagtatcactgcttattattaatgtagtaaacgaagattgtgctttgggagatgtatgcaataaaaatatttaaatatcgattcattattgactgcagtgagttgtatataaacatttgaagtcaaaacaactatgtttctttgttgatctacaaatatggtatatataaattagagcatgtttggcatggctctggctcttttaattatgctccggctctggcttctcttcaagagcaccttatctataggagctagtgttttttaacaaaatcgtttgataaaacagctcctcttgacacaagagaagggcaatatggagagtgggggaggagccgctaggagctagttttttttgctctggcttctctctataaaaacgactctggctcctcagtgctctttgttgagagctatttttagaccatttggaagggctcctacaggaactggagccggtttggaagccctctcaaacacgcccttagttgtcaaagttgtattttgtagattctgtgatgtccaaaacaaacttcctctgaccagatcaagtacattttgcctaagttttgacaatgaaactgttgagatttaaatagcagaacgtgacacgagaaaactgcggagagagtggcagaggggccctttctccctcaagccatcacaatgcgcaattgggtctaggagcaaggttttggtgtcgtgcacaaaaattccaccgtgcagcgcgttatccttcggtagtgtgtggtggtgatacaagtttgacgagttttgtgggtttgtttgttcctgccatttgcctgtctgcattggctaaaaaccttggcaagcataggttagatccaacaatggcgaccctttaggcaccactctcttcttggaagcattgccaaatttcccttgaaatatggggaaactctgccttcattgttaggtgcgctagggctacctgtgcgtaggtagctgatgcccgaagatgtggatcaagtagatgagagatgatgaggatggttggttccattggttgtatgttcttgtcatgtttgtgttggttgcttccggttggtcagtcaagatgttgtttggaggcttttcgatggttttcttcagtgatctttttgtttctaaggtctttgaacctatttaaccttataaacttagtcaattatcttctagctacgatgaatagtagatctgccccatttctgaagtttcatataaaaacataatggatatatgttctaggttcaacaattctatatagggggcattagtctagattttagaatcattataacgctgtatcccaaaagacaagtagaaccacatgctaaacacaataagaacatgtctcaaattattgaccaatcctaaacaataaagaccattcatgggatacaaaagtctgcatagctactgcattcgaattgtgggaatcatgcattaataggtacattgaataatcggtttgatgcaagtgtgtctagtgcgagagtaagtcatgtaaaagggtttttgtttagacatcccaaaagaaagttcattcttttaagccaatttatgcttcaaataacacccacaattgtcaatagattcacactaatagtttatcacatcgattcaggtgaatgggattttcccccatatttctaggtggtgtaaattgtaacacaatatgagcagtgtgtcgaataaacataacataatggtagtcaagaaagagacattgaatggattaattctaggtacaaaagcatcaatgtttactttcattataattcattagcactagattatgttccctttcattacaaatttggcttattttcacttccattttgacatgctcaaataaatgttgtgtcaaaacgtatttcataagaaaattaataaaacatatttaatgatgtagatgttgatgcatttttctaaaaattgggtcaaatttagcaagactcgtcctatctttagtagtgtaagaatatattaatcttcataggtatcttaaataaaaaatatgtgtagagttctagatcttgtcgaatactacaacatagttatagagcatttgtccatccatggttgtttgactatttttttttaaaatagcatttaaagttttgcatacttgaaacatataaatgggtctctagaccatctaaaaaaatagttgccaccttgcacaatttcaagataaagtttgtcttcatcctttttatttataaaaattataaattccatgctgcacctatttctaaggtggtccatattaccgtacctaaggtaattttaaatgcttgtttttctaggggtgcttggtaaaccaacccttggaatcactttccgttgagggtttgtctcaatatccatttatatgagcagctgaaattaaaactgcgtctaaaacaagtgcacctctaaaaactacttcgtgtaatactccattcttgtttttctaccacattaggtttgttctaagtaaaacattactatctttgaccttcattttgaaaaatacttaacgttatggattttatatattgaaaatactttttatagtcactcttaaaacctaaatcttatattataaatatatatatatatatatgtatatatttaaattaagtcacttttaagacgtaaatcttatattacaaacctatatatatgtatatatttaaattaatatctaataatataaacatttgactgaggataaacctaacatgatatgtaaataaaaacggagggagaagtgataaaaggatgacatataagcttgaaatctaataaaaatagagattgaaaattttccattaaggcagactccatctttctttgacaatggcgccctttaaactaataagtacatttgtctcttttctatcttgtatatttgtattctatttatatatgaccataacttgcattgtgttcagaattttaatggaaggtcagacacgattttttgtggagtttttgatggccacggtccgcatggccatattgtagcaaggaaagttagagatactctcccttcgaagctgcgtg

SEQ ID NO: 185519 - DNA, 511 bp, Zea Mays
tggttagagttaagcttgacagttgctggttagcgcgtgcgtgtgtgcgtcgtgttgtgtgcgtgttcgagcctggtgtgtgtcatgggcgcagctgtgtcgcggctgatgagcttggggctggggatgccagcttggatcggctagggcggcatggtaggttgagcgtgcacatgcagggagtgcgatccgagttagttggagtggtggcgcaggaatcgctgaccgttgggcgcgtgcgggtcgtgcggacgaacgcgtcctgcgggcacgacgcagcgcacaggcgcggacatggtggggagccgggtggtggaagggagctctgccacggctatatgtaccaccactctctgctgtaatcgtgctcggggtgtccaggaaataaaggccaacatacaggcgagggagagcttctcgccggggcgttcgtcggccatatccactgttcatctccttcctctcagtgttctctgctttctagggtgtgagcgctctttcttgagtgaga

SEQ ID NO: 185520 - DNA, 643 bp, Zea Mays
gtaggtttggcacaactatagttttgatagtcatgttatagagaactatggaattaaagttgctggatttcatgctgatacaatgcatcttgcacgactttgggattcttcaagaagaacagatggaggatattctcttgagggacttacaaatgatcatagggtcatgggtgttgttccaaaggaattacaaaagattgggaagagatcaatgaaaaccatctttggtcggaaaaaaataaagaaggatgggtcagaagggaagattactgcaattgagcctgttgaaattttacaaagagaagacagagaattgtggatctgctattcttcgttagattccatgagtaccttgaggctttatgagagcttgaaaagcaagcttgaaaggaagccctggacttttgacggttaccccagacccggaggttcattgtacgatttctacgaggagtattggtgtcctttcggtgctattcttgtaaaaatggaaacagctggaatgcttgttgaccgtgcttacctttcagagattgaaaaggttgctgttgcacagcgcgaatcagctgcagataaatttcggaagtgggcatctaagtattgccctgatgcaaaatacatgaatgttaatagtgacactcag

SEQ ID NO: 185521 - DNA, 411 bp, Zea Mays
gggtccctaaaggtccggacctcaaccaaacttaagggttggttcctaaaactctgcttggcaagctccagctacatgattcaaaaggttgagcacaacaaagtaggagccccgagggtacaatactaagcgatgaccttgagttgtgttcagggtcgatttctagcttgatcacggcttcagaagtgcatcaccaccgggggtacaccagtaacgggcgaggtggctaaccacccctcacaccacctgcacccaatacgatgaatgggctgtttcacgtcccatcaagccaccgacgtcgaacggcgtcatgatggccacctcttttaccgcgccaccacagtaacaacctcatatcgaccaggtaaaaaaccgaagctcaccccaacttctcacgtagagcggggggtg

SEQ ID NO: 185522 - DNA, 303 bp, Zea Mays
gatgatgttccgagtcatgttcaatacagcctttatcagatctaacattctgatgttaaaccgtgatgaaatcgatatattgtgggatgccaaagatcgattcccgaaggaattcagagctgaggtatgtatttgttgcagtgaatcagtgtttttttatctagaagttatgcaaaagtcgataatttgttttgtcttctggttaaaggttcttctttcagaaatggacactgccaatcagttaggtcccatggaggtggcaggtataggagagaaggggggtttaccagttgaagcatttgc

SEQ ID NO: 185523 - DNA, 599 bp, Zea Mays
gaacttcattcataaactgatggtcgacgagaatcttgttacttctcaagaggctaaacagcaggctatgtttcagttttataaggatctgattggtaaagcgtctgagcgaaattttagtcttaaccttgctaattttcacaaaggcaatttggagctctcacattttgataatcccatttctttggaggaaattaattctgctgttttaagtcttcctaatgataaagcccctggacctgacgggtacacagggcgtttttataaatgttgttgggacataatcaaatgggacctactggctgcagtcttattcctccaacaaggttctcttggaaggctcgatttgttgaattcagcatatattactctcattccaaaacatgttgaggctattcttccgggtgattttagaccaatcagcctagttcacagttttgcgaaacttctcactaaaattctagctaacaggttagctcctgaactggataaaatggttagcacaaatcaaagtgccttcattcggggaagatgtattcatgataactttattatggttagtcaaactgccaagatgttgcaccagaaaaaaatccctg

SEQ ID NO: 185524 - DNA, 586 bp, Zea Mays
aaccgcggggaagggccgaggaaacaagattcgcgagggggagaaaaggaaaggagagtaggagacaacacgaggcgccgaatcgaaacagggaaagccaaggcccctcccccgcgtacgcgtcactgtgcggcgcctcccccttcctcgctccgctttctgctctgttcgtgtgtgagtcgttgacgaaaccccaagtccatgtgggaggttttgacttgatccaaccaagaacgcgcatttcagccgtaaaatactcgtaccggtttccaggtccggtcgcgtcttgctctcttccgtccctcatttgccttcccgtccctgctattcgcgtgtgggcctttgcttacccattcttgcttccgctgtctttgctgcgtgtaaatctgatccagtacttgtgtgtccgcgtcactggggattctttactttaagttggatttggcaatgtcaatggaaggagcgatatctgatctgaattggtgacatttcttgctgctgctttggtcctggggtgggcggattggagagcgaccactgtcttgccggttgcttttggggtagctactgttcttgtgaatttctg

SEQ ID NO: 185525 - DNA, 303 bp, Zea Mays
tatatctgattgttttgtttgtagtagtggtaacctctatgcttgcattctgttgcagtttgtccacaaacaaagatgtggttcctaatggatcagttggagcacaacaatcatcatctggttttcagcacaattggtttggggtgccaggtcagatgtcaatggctgatatagtgaaaatgggaagacctcaagtgaggtcttctggcaagcctatggctgcaggagacacatcatatgctggtcaaaccccatctttatctagctctataaaccagaactcaaaacaatcggcaagcacag

SEQ ID NO: 185526 - DNA, 563 bp, Zea Mays
cgattgctagctgattaagcatttgccgagaaagaacggagtctcgttcgtgctcttgcttgtatcgatgtcgccggcatggttgttgtcactatagtcgatgaagtgtgcagcaccacgacaccttgggtagtgcaagccatagtcagaggtactcgcgacgtagattatgatccttttgatggtttgtcggtgctctgtcgtcagttgctacatgaactgacttccataaactatggcaaatgctaagtccggacgcatgtggatgaggtagcgaaggctggccacaatgtgctgccattgcattgcgcccacctctgtcgtgctatcacgactcaacttcagcctctcctccatgggagtgtaagctaggttgcagtcggtgagcctgcccaactcattgatgcgcttggcgtaggcggtctggcgaagtgagacgctggagctgtcctggtgacctcgatcttcaggtaggtggtggctccaagtcgctcatttggaatgaggctttcatctcagccttgaacgtttccacctcttctttcttggtgctagcaatcacc

SEQ ID NO: 185527 - DNA, 405 bp, Zea Mays
tgccgggtccgttccgtcaagaaatctgagatggacaaccccgttgcaatacagacgatcaagggttaccttttggtggccagccatgataaaattcttgtcttcaacacatcgtctcagtattatgggagagtcggtgcgcctcggccgctgtttgccacaagcatcaaggacatcaaatctgtgtttgcgggttctggtggcgtgctgcccaccgagccagctgggaagcctgttatcgcggcagaccgggagaagctggtgatcttgggtcttggggatggccacattgctatctataggtctaacttcccggtgtacaagccagagagcaatgctgttgtatggagtggaccagcgctgcttttcctcctgttcttgatcggcatttggcaagtatacgtg

SEQ ID NO: 185528 - DNA, 538 bp, Zea Mays
cttcgattcaaaaatgtcaaaattgaggtattaaacatgtaatttacttctatgctttatctgaactacttctactataaagttggtaatgttttcttctatagtgcaccattatattgatgctggacttacacctttattgttctttatactgtgcatactagaatggtgcactgcttagaagatgtgtatacttgaacatgggaagcagttactcaatttcttctgaagatgatgtagaggtttctgtgttagaaagttctttcacgaatgatgaagactgtttaaaccttgaagaacataaaaagagaaatctgcagaatgccattgatggtcccacaaaccaaatactgaactttacatttgaggctcaggtacaactagatctcagttgtgtaattcctgtagttgattttcttttcaaatctatatgagcagcttttatgtgacagaagaattgaaccggtatgaggtgggttttggttgtgtaaccagtggcatggtgggtattgaaacccaattccaggaggatttctga

SEQ ID NO: 185529 - DNA, 817 bp, Zea Mays
acccttcaattgcacactagacatgggagtacaagcttttaatttaggagttacgccttgtaactgcactttcttacccttgtacacgaactccatccattttgcagcccagtctatagacataggactaagatcctccaaccagtccatccctagtataagatcataaccgtccaatggcaagaacttgaaatcagtataaaaagttattccctcacatagccattgacagcttggtacccatttttcacaccacaaatagtacccgtcagcaactttgactttaacaggtctgaccaaattctgcacccctttcactacttccatcagatgggtacccataaaactagccgagctaccagaatccaccaatacgagcacctgttgacagtgaatcgaggcccataaccgaatagtcctgttgttttcactaccatttactgccgccgtagacaacgccaacactgcctcctcgttctcagtttcataatgctcatcctttggatcagtgtccccttcctcctttccctgatcagtcacagcccacatctcctccaccacatgaagaggaacactgttagagcaatggtgattataattccacttttcaccacatttaaaacataagcccttggctcttctgtaggacttcaaggcagcaagtttctgatcctccgtccttccaccgctcccagacggcctacgacgatcttccgacaagggatggatccgacttgtggtaactgatacttgatgtccagccatggtcgcagtcttcatggagggattggagggtctagtataaccacccaattcc

SEQ ID NO: 185530 - DNA, 730 bp, Zea Mays
caaagatggcccataatttctatgatgagactgcactcccaaagctggtaagccttgttttagctattttgttaattttctttaaaattttgagtcacttatagcaacattcgctactttagctatcttgtcctgatttgttctttaattaccctatataaactcttgttatggtacatgatgttgagttagtttacttaatagtatcagagtagtcattctcaagcatatatgatcttgggatgttttattcccacagtacttaattcattttttttcttggaatacatttcgtacaggtggctgatttcgcgtcccttgagctttctcctgtggatggaagaaccatgaccgatttcatgcatacaaggggacttaatatgtcctctttaggtcgtgtggtgggtgtaaattttatgcctaaatgcttttcgtactatgtttggacaaagttgcataataatctgacattgtttctttatattaatcaggtagagctagcagagaagctcccacacatccagtctatatgcattcatgaaatggttattagatcctttaagcacatcgtccgagctgttattgctgctgttgatgacatgcaaaatatttctgcagctatagctgaaactctaaacatattacttggatctcccagacttgaaaatggtgctgacacagatgcccatattgacaataatttgcgtttgaaatgggtagagagcttcct

SEQ ID NO: 185531 - DNA, 463 bp, Zea Mays
aggcaatctagcctattagcaaagggtctttatacctttttatgccttgatatatggagtttcttcaacgatttcctcattagtgtttgggtccacgctgaagtagatgacaacacgtatagttccgggtgcgagttggtctgaaggcctcggggtctcgttcaaatccacatctagtgactcaaagaatgttacatctggccgctcttgttctattacttcaattgcatcattaatctccttgccaatcaactcgggccaactggtcttgtcctgcgtagccatgatcacgtactatccttagcttttctctcttttgaaactgttataatatcaataagaatcaataatcgagcaacgtcagtgtaatgaatagaaacataatatgttgttttgtgctaatgctatcatactttcatagtaagcatgtcttaatcgaatgcactacataactaccgagctg

SEQ ID NO: 185532 - DNA, 503 bp, Zea Mays
tccactacactctgaatcgatccaactactatcatcatgtaaatgtgaacttccaaaacattttgcctctgtcatggttgctgattctcagaataaatcaagtctgtcatggcattcagtaatggatacacagaaacaaagtgttgtcacgaaatttaaggtactgattcaaatcttccattctttcatcttcacagtaaatattgtcaaaaatggttctctagatctctatgcttttggtctatataagttgtatacagtttcttggtagttcttttgattctttgttcataataataccttaatgccttatcattcttatataaagttgtattacatttagccatcccaatgctctgctgtgtattcaggctcaactgttcaagctgatgcagcagttggagagtacaaccccacattttattcgatgcattcaaccaaatagcaaacaacttcccaggttattcgagcatgatcttatcttgcaccagcttaaatgctgt

SEQ ID NO: 185533 - DNA, 464 bp, Zea Mays
gggcagtaaagtgaaatatgagctagacaagaagaccggaatgatcaaggtaaagacgattatctgttaacatttaaggtcacgggaaagatacaaaaaaaaaaaagagttaccattttttatttattcctgacggcactgaaaatgtgacaattatgcttccctaggttgacagggtgctatactcatcagtggtctacccacacaactacggtttcattccacgaacattgtgtgaagacggagatccaatggatgtgctggtgttgatgcaggtcagcatgttcttacgacttgtttgtttcatcgatctagcccacttaattagtgtacttagatatatataggttaagccttcatcttctggggttaattattcactgactggcttacaaccaaataggaaccggtgatacctggctgttttcttcgggcaagggccatcggccttatgcccatgattg

SEQ ID NO: 185534 - DNA, 289 bp, Zea Mays
ccctgcgccagcaccgactctttgtcaagaggtccaagtgctcctttggtgttgactccgtcgcctacctcggccacgtcatttcagcggctggcgtcgctatggaccccgtgaaggttcaggccatccacgactggccccaacctcgttcggcgcgagctgtgcgtggcttcctcggtttggcaggctactatcgcaagttcgtccacaattacggcgccattgcagcacccctcacggcactcctgaagaaagaggggttcatgtggtccgacgaggcaaccgccgc

SEQ ID NO: 185535 - DNA, 364 bp, Zea Mays
catgtcaatcaacgcagcatcactccatggactagacacacatccacacttgatcacaaacgcatgaacctgctcgctcaccttcctatccgcagcaatagcacaagcattcagcacgcctgtcaccgtgacatctgagatctccagcccatcctccaccatttgcctaaacaaacccagccctcggagccccgccttcttggcaaaagtggcgcgcacgccttccttgttccgacaaaacccagtgagaaccgcattgtatgtaacgaagttcctctgcggcatccgctcaaacacatccagtgccatgtcaacgagaccaaactccatgtacccattcagcaaaccagtccacgaaatcacg

SEQ ID NO: 185536 - DNA, 380 bp, Zea Mays
ccatagtcgctatgacaatttctacatggccccagacacagggtaagttgaactgaagagctctgctccaaagaagctttgttaactacgttgtgttctttgttaacctcctgcccattttggcaccgggaggaaagttgcttgtatgctttgcaggatagctaaggaaaaggacattcttgcactgggacgacaacaaaggaagcgcacggagctgggcaattctcagtttagatgctcaagttgggactttggtgggtttaggttatggtcgttaaaatgcctcgtatttgctaggcagaactgttctttggatgttgttggctgtggtgattgagaaggaataaatgtcatgtaatataaagagtactatgtaacgc

SEQ ID NO: 185537 - DNA, 829 bp, Zea Mays
gagatggagagcaggtgaggtctgcggaggtccttacaactctgtaagatctgtttttgtcggattggtcgttctacttcttgtgtcctcatgaatccctcggctattcttatttggaacgtgcgtggccttaataagattgatcgccgtaatgttgtcagggatgtcatcctctccagtaatgctgatattgtttgtttgcaagagacgaaggtcgctattttgacccagcaggtgctcctttcagtttttgggactgtctatgataacttcgtggctctacctgctgttggcactagaggtggagttctggttgcttggaaggggggttcttgtcaggccgtcgcttcaagggttgataatttctcagtttctgttcttttcgctgagcatgaaggtcgtaattggtggctaactggagtctatggtcctcaaggcgatgatgaaaaagtgttgttcctgcaggagcttagaaatattagggctctttgcaatgggccctggcttgtggcaggtgattttaacttaatttaccaagccgctgacaagaataatgccaatctggatagggctatgatggggagattccggcgctttttggatgataatgatctattggaacttccgttgttgggtcggaaatatacttggtccaatgaaaggcgatctcctactctagtgaggttggaccgtgccttttgttgtgatggctggaatgacatttttcctgatgcagtcttgcaaagtttggcggctggggtctctgatcattgtccgctcctgcttggtttgaatgtggccaacaagggtaaacgcagattccattttg

SEQ ID NO: 185538 - DNA, 580 bp, Zea Mays
gtctaggagtaggaacgtgcctctgtggatgttcttgcctgttaactcgcggaagccaagcgttaactggaggtggttgctgtcgagaacacgcccttcgcccccggcgatgtcgatgcctccatcacttatgaagcctctgtcatggccaaccttcacgcttaggcgattggtgtctagaacatcttgttgctagccacagtcgttcttgacccgaccacctccaactacgctcgctggcgcgaccttgtcctcaccttgcagcgctatgcccttgacgaccatgtgctcactgacgactgcctgcttgtgccctccttgcgtcatgtgcacaatgtggttctgtcttggctcctcggcactgtcactatcgagttgcaggacatcgtctgtcagtatggtgggcattgctcgccaggcctgggttgccatcgaggactagttcctcgacaaccatgaggcttgtgcccttcacctcgccgtcgccttacatatcttcgtctaggtcgacctctctgtcactaagtattgtcgccagatgaagggtatggcagatgctctctgtgacctcggggagacg

SEQ ID NO: 185539 - DNA, 1126 bp, Zea Mays
aaaacaagtcctctgctgatgaggatcttggcagagggcctgccttgactgggaagaaaaggagggactgcaggggttctgcggatgaggacagaaacgtgacaaaaagggtgttgagatccgacgcaatgaagctgcgggctgaggctgaggcagcttgtgtggtagctgtggaggttagtaaaactgacagtttggagaggaaacgctgtgaggctattgtggaggctgagccttgtaatagcaggctgctgatggaagttacttgcaatggtgaggaagccaacgaattggttaacttggactccagtgacgtctcggaagagtcagctaggtgttctgagaataatatgggaatgcctagtgttcctgcaacagattcttctcaagataacggtttaggcacgcaaagtagccttgcagaatcagatattaagacaatgaagtcagatgagaagatgtctactgcaactctttcagagtgcaatgactccagagctggaatgaacagtttgagtgttgatgaggctcaagatgacaaagtgagacatgggccttgtcagggtgaggtcatagactcagcaatggctaatgatgctggcacaagtacaaatttaatcaaaatcagccctaccagcggatcagaatctgttaagcaggagaataatgtggttggtaccgaggaagtgatactccacagtagcgatacgaaagttgagaagcattctcacattgacgatgtttgtacagaaactgagatttctttgactgataatggaatatgcgcagtagataaccacaccgatctaactgggtgcactaagcaggaggagaggggcagccccatgaatgaagccaatgatgtttcatcacatgacattgtatttacaaggagaggtagaaaatcatgtgaggcaaagcagaggacatgtgaagaggaggcacggtttgagaagcgaatcacaaggtcagctacagttaggcagagagaagtttctgcgagctcacacaaaacttccacaaatgaggctgcactagaaggcagagggaggaagggagatattgttgctcactatacaaggaaagtaagcagtgcagtatctccaaaaggtcaccatgctgagct

SEQ ID NO: 185540 - DNA, 2023 bp, Zea Mays
gatctccacaccaaaactctgcagcatgataatgacagaatagctgaagagactgataaaggtacaaccgaattaatcctgcccagactgacctagaaattaagttaaacgatgaacttgctgatccgggtatggactgtgtttaatttaccaattttaaacatactgagttctaagtcaaattgttggctacgtgtaattctaatcattagctttgtccattattgtcatgttatatactgaaaggaagactttgtcgttccaaaatcaccaaatggtttatcaattagtttcactgttgcagaccatgaagagcaaagcaatgtgtccggagaacggagagttagcttggaagcaaatgccaacgagcctgaggaaaagaacctagctaacgtcatatcaactgatctccacaccaaaactctgcagcatgataatgacagaatagctgaagagactgataaaggtacaaccgaattaatcctgtatccataataaaaactccgcaacattgatgagtgaagataatatgtatgctgaacatctaaatccacctgtgccaactgattattcactattttttttctaaagatcttgcttagtaatcttgcttcaagattttcaattcactaaattaaacttgctaaatctccagatgtttcgtctttggttttccctattgaagagcatgaagaaaaatatgcagtgagccctatagctgttgaaaagagcgtcagtcgggaagccagtgcatgtgaatctgcaggaaaacccctaactgtcatcttttctaacgatctccacaccaaacatctgcaacatgattgtgatgtgctaattaaggagactggtgaaggtaatattgcattaatatttgttccacaacttgttactgatctgcggagatggtgatgaaaacttgtgctgtttgcactgtgtttaatttaccaattttaaacatactgagttctaagtcaagttgttggctacttgtaattctatatatttttaataggctttatgtttgttgtatctgcaacagttaggcatatgtttcattgtcatttgttgtcttttaagtatctgacatttattttttaaatgtattctttccctttctcagatgttttagctcaggagaattgtaatgaccagcctgttccggcccagactgacctagaaatgaagttaaacgatgaacttgctgatccgggtatggactgtgtttaatttaccaattttaaacatactgagttctaagtcaaattgttggctacgtgtaattctaattatttttaataggctttattgttgttctatctgcaacagctaggcatatgtttcattgtcatttgttgtcttttaagtatctgacatttattttttaaatgtattatttccttttcacagaagttttagctcaggagaattgtaatgaccagcctgttcttgctcagactgacctagaaactaagttaaacgatgaacttgctgatctggctatggaatcaggttgtagcattactgaaaggaatgaagggcttgttgctcataatcttgatcaagaaggtaagcatccatttctatgatagctggataaatggataatgattgtctcagtttcagttgcactatcagatgaagtgttgtttgcgaataacgcataaatgtgtctcaggtttccttgaagcaacaccagagtgcaaacaggaatgtggtttgcctgaggagacagtaatttcctcaaaagaaacaggatctctgctgtgtgcagatcaatcaccaattggtctggaatctttattttcgcaagaaagcatagttgaatcagtggggcattgtgcacttgcttcagcaacaactcataccgaaaatggctttgatgattcaaaagattgccataacaagtctgcacttgaaaatgttcatgtgccagaaccttgttcacacaatgatactaaaggaggcatttttaaaaatgttgattgtatgcatacatcccagcgagatgatagaatggaag

SEQ ID NO: 185541 - DNA, 776 bp, Zea Mays
caactatgatagtcccagttgccatcacatccataccaaaatttaagcatgatagtttgctttcatcccctaacacttggggtaaatatcactggctcgcaggccggcgcacacacacgagtacttctagcatccagaagcttagagtagcagccgcggtcttcggtcctccataggcatccttgagcatagacccgcaacctagtcgtaccacccgtcgttggcgaagtcgtactccggctcgtcctctcctgaacctgccgataagcgtgcaggccaccttaacatcccgagcatttagtcagcggtggaatctagtagtttaggtggctgttggttttctagcaggcatgcgacattatctaaaatactgctgtagtatattagatacaagtcaggaggtccggtctcacaccaccggttcctggcttaactcaccaaacacacacacacacacacacacatcaccaaataagtcccttggatcgtccttgaccgtggacacgactatacatatagatttacactttgcagaggttgtacaactgtacccatacgaagcggaggcatggccgagcctcgacacaacaccatccagtaaatcccccgctcacggcaccaaacctacttttctgagccaagatctgtgggaagtactccctcccacacaacagaactgtgaactcccccatccagggccctcgggaggagtctatcggatgcggacagggcgcaccatcagcgtcgttcctaacacttatcgccttatgccacag

SEQ ID NO: 185542 - DNA, 325 bp, Zea Mays
atgtccatagtcaccaatgcgtagtgggatcctaaggtgtgataacaatggaaagagaaagacaaaaacttgaaagggtgaactaaagatttaagcttgaatatgagtgcatgaaaaatagttatctatgtgtccaaaccttaaatggtgggttatattgggctttttgactctaccctaccctagcttgcttgggaataaaagctttgttattgttgttgctgagatagacaggctagctgcaggcaagagctaggtgtttggttgcatgacttaggctaacctgttctgcgaagcacaggtttggttgcccactgagtttaat

SEQ ID NO: 185543 - DNA, 645 bp, Zea Mays
gccattcttctgtgaaagcaacttctcagaatagtcatcaggtaaagaaactctcatttttcgttgtacttcctccacatctgctacaataaggtactcctcaataacttcatacttcctagtaactggaggaacaaggctggcctttgtcatgcgggcacctaatatacgatcatcgatcacagactccccatgttcagttaactttaggcaatttccttttaaatcccaggctccagaatttacatcaaagtcactctcagtatcagaaacagtagtttcactctcagtttcatcaccttcagagtagccatcatcatcagatgtttcactaccagagcagacatcctttttctttaatttagacaggcttcttttgatttcaaggtcaaatgcgcgagatgaattatctgctccagcagccaccaaatttgctcttgttttgttttgcttctttttgagtttagtatcgaatgaatattgactaatgtccaggctgtcctgggctgctgctccgtttctctcagaaatgtaccttgggttccctagtctctttgctagttgtatgaaggagacaacaatttgctttacatcatccaaatcattgccatctttatatctgaggtagaataggaaatgttagaa

SEQ ID NO: 185544 - DNA, 558 bp, Zea Mays
ccatcatcggcaatttgctcgagataatacaccagcctaaacttgtgttaaacagcctaatggtacacttgacaacgatgataaaatgacagaaaaacgaattaatcacattggaaaaagaacagattcaagaccacagtctgcctcagtggtagtgacaatttgtggatcgtcatggaacaattccgataatacgtgcattttttatgcatcatcggcagccaacgaacatgacaagaagcaagaccccgaaagaaagatacacagagaaaggagatttagttttggaaaagctaaagcattagagggacggccattgaaggcgagttttggatttggaaaagctaaagcatcagagagattcccattatagacttggtctatcatgcccggaaaagggttctgatgtccctgtcttgttctcatcacctgcttgcatccaatctcaatccaaatcgacaagaagaaaaacgataaactcaagcaaccaaagatctcagagcataaaagaaagaagagcaaagaccagcccgcagcacgaatagaaggatgcaaaca

SEQ ID NO: 185545 - DNA, 640 bp, Zea Mays
atcactatttagagcttgtgaatgccaggatgaagctttacggtcagaggcttttttcattggtggccgccccaacttactgcacagatggttaaaagatcgaatcaagtttcatatgcaacgccatgatccccaatgccaccaaaggatgacaattaagtacctctcgttcttttcagatccaggtcttccaccttttgttggctttcttgtttctgcagtgtccagtttttcttttggtatgggagaacaccccttgacatgcatagctccccttccactcctcccttgacgacgaatactgccatcttcaagctcctctttcaaaggaatcctatttttatttgatgaaaatatcaatcccattgcattatgggctgcatttgcaccctcgttcccgacttcaccactatgcatggctttctccttggacttgctttcattcacagccgatccctcactttctgacaacccagcaggagatgagatgttatccattttggttgttgatgtgttctttgtcagcaagacactgccagactctataggtgccgatctagtggcagtgtcaagtggtgatccttcagataacgcttcatcaaaatttgacactggagaaacaacatttgctcttcttgtc

SEQ ID NO: 185546 - DNA, 472 bp, Zea Mays
gttaatctgaccgctaatatgttttttaggaagggaaacataaaaactaaggtccaacagatatcgtaaatctgccccaaattttagcgacgctaatccttcgtgacgagctacgcatatcttcgcggccgtgatgcgcccccaatctccccttgcgtcttctcctgcgcgccatcaaactattctcgcgtgtttcccttttccacaagcctctcccccagtcggaggtcctatgtgcgatggtcgcggcttgaggttgcggcggtggcggcctaatgaatttgagatgcagccaccgaggtcagttggcccggtccggcaggggcaaggatgacgcgactacgagcagatgtatcatgtcccgtccatcggcgtccagcacacccgatggatcagcagcgacgagcagatgcatcctctcatggtctcatggaaggttaggtaccagaccgtcctcatctggcagcccttg

SEQ ID NO: 185547 - DNA, 650 bp, Zea Mays
aatcacagtggtcagaacagttgaaaagaaggatctggctttacttgggacctgaattgggaggtcagcccatggccggatagagttagttttcttcaaccatagccatctcattcaaagagcccagcaaagctctgggaaactagagattcccaagactcccagttgcttaggcctgcatacttttctctatgcaaccaaacagtatcctcgttttgcttcctttcttcctctccataataagtcttttctaattttgtcaattgcatctgtggcccatttggggaaatcaattgccattgctgtatatactgacataccagtgagaacatgctgaactaaaactcttctgccttgcctgctcatcagatcagcctttcagtttgggagtttatcagcaatcctttccactatgggcaagaactgttgcttgcttaacttatgcaaggggagagggaggcccaaatatttgcaaggaaaggaagcaatttcacaaggcaaactgttttggacctctaggatggtctgctgagagcatctgatagggtaaatattggacttctgtgcgttgttgtgaaggccagagacatccccaaagagcttaaggatgtcaagagtagtggaaatgtcttcctaagtagggtgcagaa

SEQ ID NO: 185548 - DNA, 284 bp, Zea Mays
caaaaaatggcgaaaggtggtgtgtgatggtaattgggaaatagtcacgtcattagccaactcatgttaggtaggagttgattgtgttaagtgattgttatatatgttgtgtctcgaattatgataataatagtcaagccgacgtgtatgctgtctagtgggttgtgtcgttgctctagctagccgactcgttatatgactttagttaagcttgtagtcacggtaaattgcttgttgtggtctaaatatgtatagttgtggtcgcgggtaaaagagtagtagtg

SEQ ID NO: 185549 - DNA, 346 bp, Zea Mays
attgtgggtggtagggtgaacggaagccaaaccgagcactttgtattgggcacgctggggacaacggtgattgtgggtggtaggttgaacggatgccaaaccgagcactttggattgggcacgctggggacagcggtgattgtgggtggtagggtgaacggatgccaaaccgagcactttggattgggcacgctggggacagcggtgattgtgggtggtagggtgaacggatgccaaaccgagcactttggattgggcacgctggggacaacggtcaatctcaaggcccaggggctgaggtagatgaggatctctccttgtaaaaatggtgttcggtggttttctt

SEQ ID NO: 185550 - DNA, 394 bp, Zea Mays
ctattgggctatcaatttggcctattaaggttagcataggaacacccaaaaacgcacagtaggaggcacactggaatcctcccaggcactggccataaattcctcctgcaagcgactcctatcattcttgtgtggttcctctccacccacgcgtgatggcgattcctctccttccatgtgtcattccttcctcacactccattccttgtctcatgcgcatcttcatcctctccaatgaaactgtcaagccactgacaccctctgccagttcaaatcaacgctgctcttcgtgatgagctcctcctccatcttatctcctccatcttctctcctcactctgcaacctctctactagtctgcatgcttgctatgtattagagtgtgtgttcctata

SEQ ID NO: 185551 - DNA, 500 bp, Zea Mays
gcagtcgcaggccgcagctcgttgatggtggttagggtttcgccgcccgcacgctcgacctgctgaagaatcgcccccctgttgaagaggtctgcgcctcgccctataaggctccggggaagaggagatagacatcagtggaccccggcgcgcggctgatggcggagcaggagcggagggacgcggaggctgggggcgatgccgcgggcgcagcggtggcgtctcacaccagcagcatgcaggtgaggtctccgcaccctacttctcggctgtcctgtacgattttgggagctttatgatgcgtagatccgctcgctgctatttgattggctaaacctgcgtccgttgcgtgccttcattttagtttgttagtgcgtagtaggttctggaagggagctgtcggaattttgcatggaggcggtggggaatttctgtgggccaaccgtgccttagatccgagttagctgccgttggagctggtaaattattgttctgagagg

SEQ ID NO: 185552 - DNA, 414 bp, Zea Mays
tcacccgctggactcgcttcttcaagtcgactgtagttgctctttcatggactgtggaggttgagctcaaagggaccctagctcatgtgtggaggttggaaacgatggcccttattctcggtaatgagtgctcgatcgggggatcaatcctaatgttgctgacttacgtgacactctccggcttcgagcatggtgttcacgtccttagctcattttggaggtggtggaactacttgtcgtggagccatgcgtcactgtggttaaagaatcgctagtggtgcgcacactgtcctactctatcagcatcgtcacctccttgccaccatagtcgtcgtctcatcgagtcgggaaggtcctccatctccgggtggtagtggacgatgacacaggaggtggcggtgccggctcgaacat

SEQ ID NO: 185553 - DNA, 397 bp, Zea Mays
agagactatgctttagaaatgtggagattgcttgatccagattcaagattgattaattctgttcaactccatgatcggatggtgtgtgtaaaatctggtatgtaattcatcttgtttttgaacaagtacaaaaagagcattagcctaatgtggcctaaatgttgtcatactcaaaagttgacaaactgtgaaaaatacaattcaaatttttagtttcattctactgaaattaatgccaaatttcctatttataggtttaaaaaagtccttgctaaatgtcttccatgatggttcttgccatcctggtatggcattagtaattgatgatcgcctgaaagtttgggatgagaaggatcaattacgagttcatgtggttcctgcatttactccatattat

SEQ ID NO: 185554 - DNA, 345 bp, Zea Mays
ctgaggactcttcttggtttagctgacactgatatggatgctttacaagatacttggaatgctgttttagaatgtgtctcaagactcgagtatatcacttcgaacccttcaatttctgcaactgtaatgctgggatcaaatcaaatatcgagggattctgtagtccaatcgctgaaagagttggctggaaagcctgctgaacaaatctttgtaaacagtgtaaaactgccaagtgattcaattgttgaattcttcaccgccctatgtggtgtttctgctgaagaactaaaacaaacacctgctcgtgtctttagcttgcagaagcttgtagagataagctattat

SEQ ID NO: 185555 - DNA, 346 bp, Zea Mays
tccggcttcacgtcacagtggacgacccactcgaggcactcatggtgtaggtaggcgaggcctctcgccgtgcccagtgcgatcttgtatctctggctccagccaagcaggctttcggcgcttctctcgccaaagaggtacttgtccagcgactcattctccacgtactcgtacaccaacagcctcttggtcccctccgagcagaacccccacatcctgaccaggtttatgtggttgatccttccaatcagggtcacttctgcccagaactcctcctctccctgacgaacatccgtaagcttcttcaccgccactaccttcttgtcctcaagcactcccctgtaga

SEQ ID NO: 185556 - DNA, 430 bp, Zea Mays
cacgggcctaataacgggcccacaaggcatgcacactacattggctctgtggaccagcgactctcaggtgagccacgcgcccacttgcacgtgccatgtcatctttcaattcagtacccaaccgacaaaccaaatgcccaaccaagttaaccagccataccaccaaaccgtttcgagtttgtaatccactaacaggcaatggacatgtaatgactaacgagtccacaaggcgtgcacattgcattggctctatggacccatgattcccccgtgagccacgtgcgccatgtcatctttctgtacccaaccagctatacgcccaaccaagtgaatcagctagcccaccaaatcgtttcggattcgtaatccattaatgggtcgtggacacagtaatgagtccacaaagcgtatgcactgccttggctctgtg

SEQ ID NO: 185557 - DNA, 639 bp, Zea Mays
cggtattgattctctgaaactttcagcccagttgttaagcctgctacagtgcagacagtcctctcattggctctatcacatggatggcctatccaccagcttgatgtcaataatgccttcttcatgggcatctgcctgaaattgttcattgtgctcagcctgcgggatttgaggactccacacattgaggactccacacatcctaactatgtttgccgactcaatcgctagttgtatggtcttaagcaggctcctcgtgcttgctacattcgttttgcttctcatctactgcaacttggatttgtcgaggccaagtagaatatgtccctttttgtttatcgcaaagggaccgacatgatgtatctgcttctttatgtggatgatattgtgctcacagcgtcttccacaaatctcttgcgacggaccattcatgccttgtagcaagaattctctatgaaggaccttggcaagctccatcattttctcggtatgcatgtttagcactcagcttcaagcctctttctttcacaacgccagaacatgattgagatattagaccgagatggtatgagtgactgcaaaccatgtgctactcatgttgatgtgaatccaaagctccctactgctggtgatcctatc

SEQ ID NO: 185558 - DNA, 1369 bp, Zea Mays
gtccatgggatgctccatctctcagctgcgggtaagtgcgtttgcacggtgatgaccacgtgcctaaatgtactgtatgtaacctccatacattcactgtaatgctgccctatgtcaaattggcaatggcctactgcaagcagcactccctttagcacgctcaggtgtactgccaaaacgcagccttttgaatgtgccttatattaccgttcatttatgctgtttttccgtgttgtttctttgggattttgctttcagtccttcgcgctggaaggatacatctgtttgctggtgccatcagaatgaactgccgctttcagtgacatgcatgcgatgcatgcttttgcttttcttcaatggtgaatgctgagccatgctcgatgggtggaattatggattacggtgttggtgtgggcaccaaatcttcaccacgcagtatggccattgagaaagctcaggaggagctcaggcaggagtctgatgttcgcgatgaatggaggagagaattggaatttctagagaaagtatgcccgcaccaggttatctcttagattatatttctgccttcactgtacctacttactcctatttattgcagggaggcaacccattggatttcaattttgcacatctggaaacggtcggtgtacactctgcttctctcacaaatcaagtagaagcacaaactgtgataaggtaatggttgcttccttgcatcgatcaaaaccataatgccactctggagtcatttgtttgccttcatttgcagtgacgcgaaaggtagtttttctgcatcacctcttggagattcggtcgagagtaccgacaaaccaggaggttccatgtgccgcgaaaccaacacagcagacaatcttatgcttttgggtggaggtaaaaatgacattgcagaagaaaaggttgtaaaaagaggaaccaaaagattaaatgcagcacaacccaaacattcattgcccagtgacggtcacaaaaacacaaaaaagcctgctgcttctggtttgtcacacctcggtgtcaaaagccaggcatatgttcggcgcaacaggtcaaagccaagtagggagagcgggaatgtcacatctattagatcttctatgatccctgctaaagtctatgagccaaatgatgaaaaggttacagcacagaaaaacaatgcagacgatcatggtgtattgtccgtttctagtataaaacagtctggacctaaccgtgacattgcaccaaagagtatagcttctgatgaccatgcagcaatggagctggatggcattcaaacaattctcgaaagtgaatgtgtggtgaacgacaaagtaaacaaagctggcaataataacaaagctaaacagttgtc

SEQ ID NO: 185559 - DNA, 381 bp, Zea Mays
gaaaaagagaagaaactagagatgtatgaacctagctggacagaaaggaccatcaaaacagagcccaccttatccatccatctctcctcccagccacacgcaccagttcgcagaactccatcaccgcacgactcttcgtcccttctccactgccacgctactgtctcttccttctccgtcgcggccagcctcatcccttccgtctgactgtcgctgcctctgccgctgccagcctcctctcaaccatgcctatcatatccgctgcattgcagctgcatttcccatctccatcaccgcccatagactgcctttgctgctcgacgtccacatctccctggcacccaccatacatgcctcctcccccgccgccacccactgttc

SEQ ID NO: 185560 - DNA, 3135 bp, Zea Mays
gccgaatccagccgcgacggcaaggcgccgcacgccgcctggaggaactacgacgacatcaacgagtacttctggcgccgtgacgtgttcgaccgcctcggctggcccatggagcagtcacgccagttcttccgcaccccgccggaccgcagccgcgtacgcaagacgggcttcgtcgaggtccgctcgttctggaacatttataggagcttcgacaggctgtgggtcatgctgcttctctacctgcaagctgcagcaatcgtggcgtgggagggcgccaagtggccgtgggatgatctgctctcttcccgtggctcagagtccaaggacacacaggtgcgcgtgctcaccgttttcatcacctgggctgcgctccggttcctccagtctctgctggacatcggcacacagttccgccgcgcatttagggatggccgaatgcttgctgtgcgcatggtgctcaaggccgttgttgcagccgcttgggttgttgcgttcgctgtcctatacatgagggtctggaaccagaggacagacaatgggcagtggtcgtcagcagctgattcacggatgaggagcttcctctatgcagctgcagcgtttgttatccctgaggtccttgccatcgtgctcttcattgtgccttgggtgcgaaacgcattggagaagacaaattggaagatctgttacgccctgacctggtggttccagagccgcagctttgttggccgaggactacgtgagggcacatttgacaatgtcaagtactccatcttttgggtgcttttgctcgccgtgaagtttgccttcagctattttctccaaatcaggccacttgtaaaacccacaaaagagatatacaatctgaatggaatccagtacacttggcatgagttctttggccaaagcaatcgttttgcggtgtttgtgctctggttaccagtggtgttgatctacctcatggatatccagatttggtatgctatattttcttctctgtcgggtgcatttgtggggctttttgcacatttgggagagatcagggacatgaaacagctgcgacttaggttccagttctttgcaagtgccatgtcattcaacatcatgccagaggagcagcaggtgaatgagagcttcttgcccagccgttttcgcaatttctggcagcgattacagctaaggtatggtttcagcagatcctttcggaagattgagtcaaatcaggtggaggcacggcggtttgcacttgtttggaatgagataataagcaagttccgggaggaagacattgttagtgatcgtgaggttgagcttcttgagctgccacctgagctgtggaatgtgcgtgtaatccgttggccttgtttcttgctctgtaatgagctgtcacttgcacttggtcaggcaaaagaagttacaggatctgatcgtaggctatggaggaagatatgtaagaatgattatcgtcgttgtgcagtgattgaggtctatgatagtgcaaaacacatgctgcttgagatcataaaggaggggactgaggagcatggtattgttacacaactgttcagcgattttgatggatccatgaagatggagaagttcactgtggagtataagatgactgagctgcacaatatccatacaaggcttgtagctctattggtcctcatcctcaaacccaccaaagatgttaccaagatagttaatgctttgcagactctctatgatgttgttgttcgtgatttccaagctgagaagaggagcatggaacaactgagaagtgaaggtcttgcacagtcaaggcccaccaggcttctctttgtggatgcagttgtgcttcctgaagaggacaatgctaccttctataagcaagtgaggcgcatgcacaccatcctgacctccagagactctatgattaatgtcccacagaaccttgaagctcgtcggaggattgcctttttcagcaattcattgtttatgaacataccaagggcaacccaggttgagaagatgatgtctttcagtgtcttgacgccttattataaggaggaggtgttgtacagcaaggaccaactctataaagagaatgaagatggcatctcaatattatactatctaaaacagatttacccagatgagtgggagtacttcgtagagcgaatgaaacgtgaggggatgtctgatattaatgagctgtacagtgagaaggaaaggctgagggatcttcggcactgggtctcatataggggacagacattatcacgtactgtgagaggaatgatgtactattatgaagctctcaagatgctgacctttttggattctgcctctgaacatgatttaaagactggatcaagggagttagctactatgggttcctcaagaattggatcctcaaggcatgacggagttgctggtgggtcagggtattacagcagggcatcttcctctcatgcattgagtagagcaagcagtagtgtgagctccttgtttaaaggaagcgaatatgggactgtcctcatgaaatacacatatgtagttgcatgccaggtatatggacagcagaaagctaagaatgaccccaatgcttttgaaatattggagctaatgaaaaattatgaagcattacgtgttgcttatgttgatgaaaggcagatcaatggcaacgaaaaagagttcttctctgttctcgtgaaatatgaccaacaattgcagcgggaggttgaaatctatcgggttaagttgcctggagagttgaagattggcgaaggaaagccagaaaatcagaatcatgcactcatcttcacaaggggcgatgcagttcaaactattgatatgaaccaagacaactactttgaagaagctctaaagatgagaaacctactagaagagttcaatcgttattatggaattcgcaagcctaaaattcttggggttcgggaacacgtcttcacgggttcagtttcttctcttgcttggttcatgtctgcccaggagacaagttttgtcactctggggcagcgtgttctggctgatccacttaaagtcagaatgcattatggccacccagatgtttttgatcgtctttggtttttgggccgaggtggtatcagtaaagcatcaagaataatcaac

SEQ ID NO: 185561 - DNA, 1520 bp, Zea Mays
aggtcatcgacctccgcgcccccgtgtccgcagttgcttggtgccgccgcgggagcggagaggtcgccgccgctacagacaattctatacacatattccagcctgcgcccgcctcttctccaggtctgcttctctggccaactcttcaaattctcatcgtcagttagcttagacggctgttgtggctcggttcagtgtttggagattggaacctgcaggttcgtttggatggctcctgagatggtctatcaccgagacgttcgccatcgttgctgtatcctggaccggctgcggcaatggcattgtggcagttggcgcaggtgtttccatgtgggcaagattggagtcctcctggcagctcgcttggaggtctacaccgcaggtgccgcaagcccttgtctccactacctgttccatgcaaggtcctgtcgcgacagtggcagctcttgctccagccgagggcagtgtgcctgttcttgtgtttctgaacgatgccaggagggggctggagcaagctgagcttgtgcatcctcagcctgtttgtatgatccagtggagatcctgttcgttatacccccatgatctgtctgagatcaggagagagatcctcatgacttgctgctttgatgggactgtccggctatggagtaaggatgaggtgtctaggtcgaagaagcagcgtggtttgctaatatcattcagtgtcattgcagtaatagaggtgaacaacactctgaatggagtcctcggagttgatattattgtgagatggtccatggaatctggcagcgttgtgtcaagggacgaacaaggtagattcaagttgttttcaggtgatttgagggagagccaggttggtaaatgtgagtggcttgtaagtcttggccccgggccttgcattagcttttgggctatccattgtttggatgatgtatttccgccaaggtacccacggattactttatggaaacagagcaaacttcagggctggggggattcctatgttaaatcaggtcctctaaaatctatggaacagtcaatttttgttgaggctgtcatctcaagaaggctatgctctggtccacctgcaacatgttttttgcttcatttgctggtggatgattcgtttgcttggtcaaccgtatccaccaaactgttagctgattctgggaaccatgctttaagtgattctgctaaaaatatcttgtgttgtttgactaaacctgtcaaacaagatggacataagggtagcatcagacaagtgtctgtccatccatatagctgcgaaatagagttagctgtctccatggattcaaacagaatgatatttttctggtctctgtcaactttctcaactctcataccgacaatgcatgcacctatgtatcctctatggaagctgttgtgcaaatttgatttgcgtaacatttctgaagatttcgagtactcatgtttgtgttgggcaccttctgttactcgtgataatagatttcttgttcttggatgggaaagtggagtcg

SEQ ID NO: 185562 - DNA, 272 bp, Zea Mays
cgattcccgagaaactgattctcgagagtcagccaagtggtgcgggcagtggcgtcgcgttccatggccatttcagcaaggtccagggagatggagccggagatccaggacttgacaacgcagtccatgcgtgcccagtcggggaaggcgcgggagtgtcgtcgaggatgtggctgtccagggagtatttgccagtgacgagaaggaactcatcgcgccagcgggtgtagttgttgttggcgaggtcgaggacgacgtgaacgagactccgg

SEQ ID NO: 185563 - DNA, 542 bp, Zea Mays
gcatcatatggtgtaaattattatcatggctgcctctacaatcctctgtctgacagtagtcattgcaggaactggatgatatatgccgtgagagcaactggattcttccaagatacagagtacttccttcagttaccggtggtatgtggatgataatcaccgatttttcaagttcctgcatgtcgcagcatggagtccttggaccatacatagcaggcgacagttatcatatggtgttcgatcttttacagtttgtactcctatattggcagatatgtaccaggccagtgtccaccttatgggcccagacttcaacttgagtgtagatggtgatgtgagggttacccctcacgaggcacgagactcagcagcgtccaacatgctgtctcagcttcagcagaaggcaagggaaggctaggagagcggcatgtctccacagaacccttaatgctgcatccttgtgggtatcgacttgcatgcgacaggaaagaacagccatcacagctcagaaatgaacatgctggttgtcaaaacaaaattct

SEQ ID NO: 185564 - DNA, 650 bp, Zea Mays
gtctggagtgagcctgccgatccctgtggaagtgcaactgactggtattcctttacatgcatgggagttatcaacagttcagcagctactgaatcagtgtgtttgggtgcatgaagtccatcttgataccctggagctccggaatcttgacgtctttcgttgttctggatggtgctttgacccggcaaccatccctgcttccagagacctttggattgtggaacctacgggagttaacactgaagatggaaggcttggccttgtgtatcagatttctattagtttctcgacgttgaggagtgatcggttgatcccttctcaagattccggagtagatggtggtttttcaagacagaggaggcgtcatcgttcccgctctcctcctcatggcggtgatgataacgaaggcagggaagacggtggggaacctcggggaaggagatcaatcttcgaccgtttgggctcaaagtccgaagcatcgcatcgggaccgaggtggcacctgccccccacacctttcatcctctccggctgtggacgtggtagtctcccagactccgtctgaagccgggtggggaatgacttctgatgatttggctgcgacagggactgattctgttgatatgtctcctatgatggccattgctccgg

SEQ ID NO: 185565 - DNA, 388 bp, Zea Mays
aggacaaattagtgccttgcctcactctttcttggttgtattcctgtcgttttggttatggatccttcaaaaatcttgatatggaatgtaagggggttgaactcgctggtgcgccaagattctgtgcatgagatggtggactcctctagggtggatgtggtctgttttcaggaaactacaatgcagtccttctcaattcacaccattctttccctgctcggatcagacttcagttcatacatttgtctaccttctgctggggctagtggaggtatccttgtggcttggagaagacatgttggggtttcaggccagaaaagacaagacactcacagtgtttcagttcagttttgcagtgaagatataagtgcgtggtggcttacttgtg

SEQ ID NO: 185566 - DNA, 360 bp, Zea Mays
aaaacttaaatggtatggttagagatgtacctattagtgagaagctttcgataggagacctcaatgggcatgtaggtacaaaaagtgcaagtttcaagacggttcatggaggttttgggtatggtagtagaaatcaggggggagaaaaagtgttggacttcatagtagcttatgacctattgatatccaacaccttctttaggaagagagacttatttagtgacctatagtaatggatagcgtcagattgactttgtccttacaagaagagaggataaacgaacatgcttggattgtaaggtgatacctagagagtatattgtctcttaacataagtttgtggtgacggtcttatgtttt

SEQ ID NO: 185567 - DNA, 1357 bp, Zea Mays
cctccagagaatattcactgggctgcattagtgattggtgggtccttcctaattgaaggtgttgctcccttgctgctacctcactcacccctctttttcttagggtgtctattttagctataatttacttgagaaatcctgttgtctgttaggtgcttcactgcttgttgctataaacgctgttaggaaaggtgcagaagcagagggaatgggtatttgggactatatctggcgtggtcatgatccaacttctgttgctgttatgactgaagtcagtaatatgactacctaactgctttttatgtagttcaatcacagcatcatactcattttcatttctgccatttgtaatggtcgactttaatgaaaattattatctcatggttttcttaattgatttcttgttcatttacttttcaacacctagtacttttctgtattgattttattctcaatttttcacatccgatattggtctgcaggatggtgcggctgttacaggccttgctattgctgcaacatctttggtagctgttcaaatgacaggaaatgctatgtatgatccaattggttcaatcattgttggcaatttactagggctggtatgctattcattgtatgtttgtgcttcatacatcttacacgtggcttatagttctgttttataaatgaataattgatgtaaatctaaagttgactgcgttgtatttgcttgtgtgttaagttacttaggtgtctcaacatatacagttgtgaaacaaatttactgaataatttttatgctttagcagcgaagcaaaaaaccacgtctttcacaatttggaccatctctaattgccacactgaaacttgttacatggcatataatagaaggtgggttatgacttgttttgggtttgcacatcagggatgtgcaattgtcaagttgtgctaatgtggcctctgcatgaggcagttgttaggtggtattatacttaatgtttgaaggggtgtttggttcttgagttttgaaagaaataaattgtgattttttagagcataaccaaaaaaaggtttgtgttatagtaaataataataccacattgtctacccatatgagttataactagcccggaaggcctaatgcgatacaatgaatatttcaccaattctattcttatacatagtatcacgagtctaggtttagttcctaaccctagttgccgctgcttccacatcgtgtgcccctggggagagactgatctccgccaagggcaatgtcaccgtttaggcacattatctgctgcccttgttctcgttctcgcgtgggtcacaacaatagattgtgtacctctccaccaacattctttgttcaaat

SEQ ID NO: 185568 - DNA, 273 bp, Zea Mays
ggcgcaatccatgcgcaattcccgttcccaccgtatcggcctcgctcgcgcaatccatgtggcctaaccttcaatcaaggctccgggcaaggtttccatcgttggcgaagcaccaacctccatccttctccacgctctcctggaagactatcatccatggtttacggagaaatcacgcctccccagacgtccaccaggggctacaccatgaccccgccccctctcccacaccgccggccagcctccatcgtcgatggaagggcgcgatctccg

SEQ ID NO: 185569 - DNA, 1010 bp, Zea Mays
atctttgtacgccgacaatgtcgcccttttcattaagccattggtagcagatttgtctctagctaaggagattttgtccatgtttggtgaagcctcaggccttaaaactaattttcagaagagtggtatctacccaatcaggtgctcagcagaacagctggactattgatcagactcttcctggttcggtttcccatttcccttgtacttattcagttatttgggcttgttgctttctgataagaaactgagaaacactcttttttggactgatagatggttgttggctgctgcatcaacaatcttcctcctaaagttattgaagttgttccagttcactctagattgagaagaaaagtcgacgagactatggtgcacaataactggacagccgacatccaaggcaacctttatctcattggctggatggagtatttttcaactatcagcttacagggcctttttccatggttccaccccctttgagccttggaaacagctttggaaggcttgggtgtctccgaaatgcaacgtgtttctttggttggccattaggaaccgttgttggacagccgattggttgaagagagcctccctcatccagatcgttgtgttctttgtgatcaagagaaagaggacatccagcacatcctcacttcttgtgtgtttcccaggacttctggtttaaagtcttaacccctttaggccttgcctcaaaaacaccggagtggctagaaagatcctttgcggagtgatggacgaaagcgtgcacaaatctccaaaaagatactaagaaggggcttaactcgtttatcatctcgggagcctggacttttttttgaaacaccggaattcttgtgtctttgagggtgtacagccgtgtgttaccactgttgtttaagctttctctgaagaacaccacctttggtgtgcggccagagctgttaagctccatgagctaggtcaaagcactggtgtgtcctgggaggtttagtgtgtgttttcgtggt

SEQ ID NO: 185570 - DNA, 530 bp, Zea Mays
ccggtgagctggttatggcttaagttcatctgcgacatgccactgagcgacgcaatgctctgtgggattgccccagacagctggttcgccgacaggtccagctcctgcagaaggggcatcgcagcggtgaaccccggtggtatgtcgccggagaacaagttgttgctggcgtggaaccgcttgagattagtagccgatgcaggaatcggtccggtgaactggttgttgtcgatgctaagcctcgacaggttccagtacagcttctccggcaggctcccgcccaaccgtccattgttctccaacgacacggtcagaagcttcggcaccgtccatagagcggccggcacctcgccggacagctggttacctccgaggaacaaccatatgagactcgagcagttggcaagaccggtcggtattgagccgttcaagcggttaccgggggcggtgagcacccacagctggttgtgctcacagatccccgccggtattggcccggaaaagttgttgtcgtcgatctggatatctct

SEQ ID NO: 185571 - DNA, 721 bp, Zea Mays
acgagatgaaagcagacatatccatcaatgcgacagaggatagaagcattaacagttttctatttctgatgcccatcaacatcggcacaccacctgttatgaaccttgtcgggatcgacacaggatcgacactttcttgggtatagtgccagccatgccagccacattgccataaacaagccgccaaggcgggtcagatctttgaccctagtagatcaaccacatttcatcgtgcgggctggatatcaagagaatgccttgtagtcaaggattcccttggtctcgagtttgctaactgcatggagaaggagaatacttgtttgtactcagttacctacgggggcaggtggtcgtacacggctggcaaagtggtttgtgacaaacttaccattgggacaaacaccaggttcagcttcatgttcggctgtagcctggacgtggagtacaagaactacgaagaagcggggattgttggttttggctactcaggcatctcattcttcgagcaagtttcaagtcagatcaactataaagatttcagctactgtctgcccatcaatgagacagccataggatacatgaatcttagtgactaccgtggccagggcgcagatgttctttacactccgctattccggaccacctctaaaccgacctattcactgacggtagaagagatcgtggccaacggccaaaacctagggttggcaccttcacagat

SEQ ID NO: 185572 - DNA, 764 bp, Zea Mays
ctacggctgtatgccaaggtccacatgaaattgatgaaacatgtatgccctctaatggtccattcacgtgctttggtacccagtgactgatatcatttccatgacctaaaagcccaaatttaaatgtgccatccccccatgtgtaaagatctccagatagtgtaacagcacaagtgtgatattcaccacatgctacaagctcaatgttcatatgagaaagagcatcaataagttttggctgagacacatcacaatcaacaccatgaccaagccgtccccctgattcctcaccccatgagtatatctcgccttgtttagtaacaagtgcagcatgccttcctccacaagatatgttctgcacatcaagtcgcacggcaaattctaacggttttggtacaaggcagtccatttttgcacctgaggagcttccaactcttgaaccaccaccaccaagaattccttccccggttccttctccccatataaaaacatcgcctaaagcatcaccatcgtcatgaccagaaccatgactagatgaactaactgcacttgaataactggctcggaaagcatccattggaacgcctctagggtgcccatttgtgttatccgagtgtccagaagacatagaatggacagatccagcattagaatctgatggaaagaaaccacggggaggaactgcatacagcatgacatcagaaaatgccttctccaatccattctttggtgggcttccatatggagtacggagtcgataattg

SEQ ID NO: 185573 - DNA, 850 bp, Zea Mays
caacaacagccggcccctttgccagatctgtggcaaaataggccacactgcggtacgctgctggtaccgtcatgatgactcctacaacgaagatccaccgatggccaatgtcgcctctacgttgccttcatacaagcttgacaactggtacggggacacaggcgccacagaccacatcaccaacgaacttgatcgccttgcggtccgagaacgctacaacggcaatgaacaagtccaagtgggcaatggtgcaggtttgaaaatttcacatatcggtcactctactattaatactgctgcacgtcctttatttcttcgtaatattcttcacgttctggggattaccaaaaatctattatccattcatcgtttcactcgtgataatgactgttattttgaatatcacccttggaattttttcataaaggaccggcaaacgaggagatgccttctggaagggcaatgtgaaggtggtctctatcccctgacgatctctagcgcacaagacctgacgcatgcattggctgcccgcaaaataaatcgtgatcaatggcatgctcgcttaggtcatccagcttcgcaaacagtccagtccatcttacgtattaataatattatgtgttctagtgagtctttttcatcagtttgtaatgcttgtcagatggctaaaagccaccaacttccatattctaggtctatgaataatgcttcagctcctcttgaattaattcactccgatgtttggggtcctgccgctacatctgttggtggttatcgttattatattagttttcttgatgatttcagtaaattctcttggatttatcttcttcatgatcgttctgaggct

SEQ ID NO: 185574 - DNA, 510 bp, Zea Mays
gtcgtcggccatggttagggggtggggctgagacagtggctggctgtgatggataggtaagcggaagtgaaacctaggtcttgtgataccatgatagaggatatactgccatatgttttgtgtgtcattgattgaggagaacaatacacatatataggcagagcgccttgaggtgtcgggaaccccttccctatggttggccagtgcaactacggctgggaaggtgataggtgcatcttaggctgggccttagacacacaggaatggcccagcccacaccagcggacagaacagacatattgtaacagattcaaccagtccctccgaaggagtaccagccaacgtagccttaggcttcctggttctcgaccgatgacgacaatgtttgctcctcgtctcagaagcagaagtcaccattgctgccattgttgaatgagaaacttgttccgtgggagggctgagccgctgccaaaatgccaattgacgtggtgcggtctgaagaggtccact

SEQ ID NO: 185575 - DNA, 419 bp, Zea Mays
ctacggaccccatcgtgttcgaggcgttcggcaagggcggcttccacgccagctccgaggtgctgctggagaccgccggcgggaaggggcgctggacgtactacaagctgctcggcgtctacctcaggaagcagcataggagaaaccaagttttctggaactactgatgctaatcagttcagcgactagggtagtgcttacattgtaatttttagtgattaaaatgtgcttgccattgccagcaactccatatatctaggagcttgcaacagacataccaagactggaagatgatttatactcgcatcaatagttctgtgcactgattctgaaatggtggtggctaggcccatgaggccgaactcgttgtccatgtgcacctcgtcggtgatgtcgaggaacgggtacgccggcagaag

SEQ ID NO: 185576 - DNA, 363 bp, Zea Mays
gctttctcgaatggttgatgctaggattactctatcaaatttatcagatgaatatgttgaaaatccacagaaggatttccccgttggaatgcttgtacacggaaggtgagatcttttaattttcaaatggtcatgtaaattacagatatgttctctcgcgaaactaacaaaactctgcaggatcctgtctacagacccatcatcagggagagttgaggcatcacttaggaagaccactggttcaaaattggaaaagctggatgatattagttatagtgacttgcatgttggggatatcgttgatggccaagttaagcgggtggaatcctttggattattcgttacaattcggagaagtgaatt

SEQ ID NO: 185577 - DNA, 607 bp, Zea Mays
caaggatgggggcggacgtgacggcggccatgagtgctgtgaatgtcgcggccctcgcgtcgtcccaggagaagccctccttgagtagggccgtcagtggtgcagcgatcgccccgtagttatggacaaacttgcggtagtgcccgacgaggccgaggaaaccgcgcacaacccgttgcgaacctggagtcggccaatcatggatcacctgcaccttggctgggtccatggccacacccaccgcagatctgacatggccgaggtaggcgacggaggaagcaccaaaagagcacttggtgcgcttgacgaagagttggtggcagcgtagttcgtcgaggacggctcgaaggtggcgaaggtgatcagcccatgtcttgctgtaaatcagaatattgttaaaaaaataccaggatgaagcggcgcaggaacgggcggagcacgtcgttcatcaaggtctggaatgtcgccggggcgttgcacagcccgaatgccatcaacaggaactcatacaggacgccgtggctgcggaacgccgtcttgtgcatgtcctccagccgcatacgcacctggtggtacccggaccgaaggtccagcttggtgaagaact

SEQ ID NO: 185578 - DNA, 382 bp, Zea Mays
ctgcaaaccctgtacaacccctgttgatatcaaccccaaactctcagctgatggtgaccctgtctcagatcccacggaatttcgcagtcttgcaggcgcattacagtacctcactttcacccgtccggatattgcgtatgcggttcaacaagtctgtctccacatgcacgatcctcgggaaccccatttggcagccctcaagcgtatcctgcggtatgtccgaggcactcttcagttgggccttcacctcagcccctcttcgcagatggaacttgtggtttactctgatgcttattgggctggttgtccaggcactaggaggtctacttctggttatgttgtcttcctcggagttaacctcgtctcttggtcctccaagcgc

SEQ ID NO: 185579 - DNA, 738 bp, Zea Mays
ctttttgcttgtgttatgtgcctcttgtggatcgcgagcgctctaagttgaatgcacagtctactaagtgcatcttccttgggtacagtgttgagcataagggttatgttgttgggattcggttgctcgtcggaagaggatttctcggaatgttgtctttattgagattcgtcctttctatcctagtccgtctacatgtctgatctttggttgatcctctgtcttccctttcctgtctatgaacgactctgctacagcattgtgtctgtctcccacctaccactattgtgccttctcctcaatgtgccctcgtctgttgcgcctcctcctatgcccctctatgacttattcatagacttttgttctgattcctgactacattgtcaaacctcctgcgacaaaggtctatacacgaagacgtccttttgactactccatcggcttcctctggtgtgtcctcttctcttgatgtttcagcctctctgttgattcatcttcttcggctaggccatattcttctggtgatagctctcctaatttcattactcattgtggtcttcgtactcgtcaacctgtagatttctatggtttcggcctcattacatggcaaggttttaccggatctgttctttctgagccaacttcctatcgtgatgttattcttcatcctgaatggcaactttcaactaagctatctgttctacctactaagctatttatcttaacaatgtgccctaa

SEQ ID NO: 185580 - DNA, 516 bp, Zea Mays
cagggcctcttgctccaactcaaccgcctcaggcctttcttgctggtcctcccggccagtgggcaggctcctggccccccctcaggcatatgggccggcccctgactacactggcgctgctccaccccctcctggttgggatctccaacaactcgtcaccaattcccaaaccaccactcttcaacatccccagtagcaagagtggttcttcgacacaggtgcctccagtcacatgacttccgacgctggtatactttcccacctctcctcttatcatcatctaccctctaacattgttgttggcaatggcaaccttcttcctgtcacttccactggcaccactcaactttctcacaattttcgtcttaacaatgtccttgtttcaccgtctctcattaaagatttaatttctgttcgccaattcaccactgacaataattgttctgtggaatttgaccctcttggctgctctgtgaaggatcttcccactcggcgcatgatccttcggtgtgatag

SEQ ID NO: 185581 - DNA, 825 bp, Zea Mays
ctctcctccacatccctatccttgccctcttcttcttcgtcgccttttacccacccatccgtcgcggcggtgttcgtggtgttcaagttattgtttgtgtcagtgttcctttcctcctcccggttcggtcatcggtgctggtattcttcgccacggagatccggccacacatcgattcgccttctttttcctcgctccgcgacgcggggtacaatatcgactggactgcgaggcatttggtgcgggcaggcgctacgaggtggggcgacaaaagttgtgaagtttatgcgccttgctttgcagaaggtgctcggatctaggtttccaggccgtcgatcgccgccatggacgccggcagggacggggacggtgccgggaaggcgccgccgaagggccccgccgatgccacgaccgtgcctccggcgccagtggcggcttctgcgcctgggtcgagcgcggggacctcagggtcgggggagaagccggtgaagcgggtgatgaaaaccccctaccagctcgaggttctggagtacacctatgcgggtttgtggaatgaggattttgatgaatccattcaaatgtttttttttgtgttcttcctccccgctggtttttttgggtgcttttatcgattgagcatttctgggtggtttgctgcagtggagcattatccgtccgaagctaagcggctggagctgtcagcgaagatagggctttcggacaggcagctgcaaatgtggttctgccaccgccgcctcaaggaccgcaagccaccatcgaagcggcaacggcgggatgaagagtccgcactagcaccagtgatgc

SEQ ID NO: 185582 - DNA, 732 bp, Zea Mays
gcactgggcgttaaaaaccagggattatctacatatgagaatgagtatctagcgatcttcatgtctgttacccagtggagagtttatttgcagttaactgagtttcacatttacacagatcatcaaagtctcacacagctgaatgagcaacatctccatacggtattgcaacataaattatacaccaaacttgcggggctgcagtaccgtattatttataaaaagagcacagataatctggcagccgacgcattatccagagtaccaacttcagcacagctcagtaatatttctcaatgcactcctacttggctgtaggaggtactccatggatatcagaatgatgagcaagcacaacaactgcaaattgagctggctgtaacaccaacatgtccaactttgtcgttctctctcacacaaggaattatccattataagggcagagtgtggctaggaaacaatagtgttgtgcagtccaaggttatttaaacaatgcacgattcagcgcttgggggcattcgggttttccggtaacatatcgtcgcattaaacaactgttttactagaagggcatgaaacaggacattcatcggtacgtccaatcttgcagcacctgtcaacaggccaaactggacagatctcgctacccaggactgttggcacctcttcccattccgcctcatgcgtggcattctatttctatggactttatagaaggattgcccaagtctg

SEQ ID NO: 185583 - DNA, 330 bp, Zea Mays
ttgtgtttgatgagacatatttccctttctttgcctcaccccatccaactcaccttgattttttattggagttagactctctgttcccaccattggggccccaccctttgcatgtacatctccatcggcacccctgatgcctgcaccactggtaccacttgggttttagcctcatgtggcctcagctctcgcgttgcgtgctcccctggtcctgcttggcttccaaacccgagtggccacgatgccttgctcctctgtgccacgcgtggccacgatactacccctctctgacatcgctctctcctatgccacacacgtcttggagatcat

SEQ ID NO: 185584 - DNA, 1676 bp, Zea Mays
cggactcacggtctcctcttcaccggcggtcaagctaagcctagtgctattctgtggatgtaacggtgctgtaaaagggtttataaaccccataggaggtcagccagctgagtatccagtttaaagttcagagttgaaactcacagcaccaagcaaaaaggaagcagatcaagggtagccgagcgagcagaggtaccccggtctctctttctccttccgtacataattatccaattcagtttgttacttgttaagagaattcgatagtaagtttgtagtaagcttggtcactccttgaactcaacgtagtactttctccgtaatacgccgccaagagatcattctttattttttgcaggttgtcaattacgtgccttaatatgagtcattggaagcagccgtcgaaactcgccatgcttgtagtactgctgctgctgctatgtcatgcagtggacaaagtccattgctcgacgcaccataacaacagccaagattttcattccctgcttgagtttcacaagggcatcaccagtgatccgaacgaagccttgagcaattggaaccccagcatccacttctgccattggcatggtgtgaactgcagtttcactcgaccatatcgagtcacggagctcaatctcaccggccaaaacttggctggccaaatcagctcctctcttggaaacctgaccttccttcatacccttgatcttagctacaatagcttcagtggccccctacctcttcttaacaagctccgaaacctggacgtactctttctgggaagcaaccatttgggggatgttattcccgattggcttacaaactcttccaacttagttgatctagatctctctgaaaacaatctcaccggccatattccttcaaacataggcttcctaacgaagctagaaggtatagccctttacaataataatctcaccggtgtcatcccaccaaccttgggaaacatctccacactagaggtagttgatttttcagcgaatcaactaagcggaagcattcctaataaagtttggcaaatctcaaacataacaatgttaaatctaggacaaaataacctatcaggtggaatcccagatactctctctaacttctcttctcttacagcattaggcttgaacaacaataagctaggcagcgcattgccatcaaacattggcgatgtgttccgtcatctaaatgaactatacttagataacaacatttttgtgggtacaattccaacttccctaggtaatccttcgagtctagaagccctagacctatcaaacaatcatttcagtggcaaaatcccaagttcttttggaagactttcaaagttacagattttaaaccttgagctaaacatgcttgaagcaagggatagtgaaggctggcaattctttgatgccctggcaaactgtagttccctgaatatactttcagtgtctcaaaatcttctacatggacctataccaaattcgatttcaaatctgtccaccactcttcaatacctaatgatggcttcgaacaacctatcaggaaccgttcccccaactattggaaaatttagtggcttgattaaattatcacttgcaaacaacaaccttacaggtaccattgaggaatgggtcggaaacatgacaaaactacaaatcttaggactacaatcg

SEQ ID NO: 185585 - DNA, 371 bp, Zea Mays
ggagtatattggctctgtggattgaggtctatttaaatggcagccagtactcagattcctatgccgcttccttcctaatcccttcctcttctcctaatccctcagcttcctacgcggccagtcgattcagcttcaaccagcaccggttcagcgccgttcacgcggccagtcgattactcttccgcttcctcttccacgagcggtcgatcgattcctcttccccttcctcttccacgggtggtcagctaattcctcttccccttcctcttccacggacgattggaagagcttgccgtcgacagtggctctgcgcagcgtcccagcgcggacggacgtcgcagcgcggcggccgaacgacgcagcgtcccaac

SEQ ID NO: 185586 - DNA, 469 bp, Zea Mays
gaatggcatatgcgtccattataaactcttctacgccgatgttgttggggaacctggagcatgtgaccttgccaccgttggccaccatggcctggagacattggttggggctgtactcaagtttcagagctctcgcggtgcctaggttgatgaagttgtgagtagaaccagtgtccagtagtgttgtaagagcctgacccatgatagatacctcaatctgcattgtgccctcagattgaatgtcagcgagatcactggttctgggtactcaacatcggtctccacggattcgtcctcctaaaaatcagtgacctctagataaaatagttgagggcatcagtgtactcggacatacttctcgtcacgattgtaacacagcccctaacgtcggcgctcgaccatctcgaccgggggaagttgcttgaatggtcactgtggcgttgtgttagctgatgttagaagtgttggc

SEQ ID NO: 185587 - DNA, 387 bp, Zea Mays
gcgtgggttgtctctacctcctcgcccacaccgatattgtccggatttgcctttgccccgagctaatgtgtgcgtgggttgtctctacctcctcgcccacaccgatgttgtccggatttgccattgcctttgccccgagctcagtggggaaggatttgccattgcctttgccccgagctcagtgaggaagagagtgacgttacaacctttgtggcctcacctctcgcgcgccctcacaccaaccccaacccgtgtttgctccgatccgccattcctatgtcctcgccctgacacgcactcaccttagccacatagccttgcgtcaccataccctcgcctccccggatcccacccacacaccatcatcgtcctgtgcgcatcacaacg

SEQ ID NO: 185588 - DNA, 737 bp, Zea Mays
cagaaactgagttccgtgacgttagtttgcagcggaatcgtctaccacggaagtcagaagatgtagggaaaaaggttacagctggttctgattcagattgctctggtcgtcagggaaaaaatttgagcaggcaatcatccattaccgatcaggaactaaacttgcaggctagagtgacaagaccaggaaaagggaaccaagatcggcatggtgaattgcaaatgaaggccaatgagttggagaaattatttgctgaacacaagttaacatcctcccgacgaggtaaacctacagatgtgcaggttgaaagcacacctatggtgagtgaggtaaagccgacaatggttcttcatgagacaattcatacaaaacaagttgtaaaggagagtataactgtcaatgattttgatgccggtgagcttctgaagatggtgaataatcaagaatttaacattagcacaccacaaaaacttggcattctaagtttagaagagtcgagagggaagttttatgagcattatatgcagaagagggatgcaaaactgaaggaaggctggaagctgcagagagaggagaaggaagcaatgttaaaggctatgcatgacagcctagaacggagcaaggctgagttgcttacaaaattctctcggtctgcagatgtccctgactcaacttatgtttcccattgttctcagaagattcctccttcgcgatcagcaagaaaaaataaagatcag

SEQ ID NO: 185589 - DNA, 410 bp, Zea Mays
cagataaaatgaagggatcgaaggatggtgcatcaaaaggacacattagtggcaagaacaaaaacattaaggaggaaccttcgcttgatcatggattttctcgtaaaaacagatgtgattctgatgagtacaatggtaaacctcatgccagttcatgtcagttgcaaaacattcccaacaaaacttcgccactggagagggacaaagggaaagtattgcatatggaagatgaaccatctcagtacaaaagcaaggaaaatggagacctgtttagtgcagattccatggctgtcatggtaggaaatgttgatagaaattctttagggatgatgaaagggaagaagaaagtttcttctttgcaagccaccctgtctgggaagttcaagttcaaggcaaaaaaacaattgaat

SEQ ID NO: 185590 - DNA, 351 bp, Zea Mays
tggggactcaacagggctcagcacagatagcctggctgatgcaggctaccttggtgctgctgcactaggggaggctgtgtgtggaatggcggtggcttatattacaccgagtgattacttgttttggtttcggtcacacacagctaaagagatcaaatggggtggcgcaaagcatcaccctgaggataaggatgatggtcagaggatgcacccacggtcgtcattcaaggcatttcttgaagtggttaaaagcagaagcctgccatgggagaatgcagaaatggacgcaatacattccttgcagctcatattgcgtgactccttcagggatgctgcagagggcaccaacaa

SEQ ID NO: 185591 - DNA, 327 bp, Zea Mays
atgacgcggttggccgactcggactggccgtcagactgagggtggaacgccgtcgtcatgtgtagctttgtacccatcaggcgcatgagttcgcgccaaaatgcggaggtgaagaccgtgtcccgatcagagacgatggactgagggacaccatgtagacgaacgatgtcggtgaagaaagcctgggcgacggattcagcggagtacgggtgtgccaggggaatgaagtggcagtacttgctgaaccgatccaccacggtaaggattaccgacttgccgcggacgcgagggagggcctccacaaaatccatcgcgatgtccgtccag

SEQ ID NO: 185592 - DNA, 689 bp, Zea Mays
gcaatcttatcaacccaaacaatgaggtcacttcttcgcagtttcttgttggagatcggcaagcccaaataagtgcatgggaaggcagcaggcacacactgcagggtgctgcagcattcatgcacaacagacgcagcacaacagatagggattgcacaacttttattcatgttggcaatcagcccagatgcctctccaaagcagtcaaagatcaacttggtacaagctagatcatcatccagaggcttgacaaagagaactacatcatctacgtacatggagagcatggacctgacatttgcagcccccaagctatgcagcagccctctagattccgcatgcctaaataagctgccaagcacgtccatcacaatgataaaaagcataggggacaaaggatccccctgacgcaaacctcgccgatgccaaatatgatcaccagggaccccattgagaagaacttgcgtagaggaagaggccaataggttagagattaagttgcaccatttcagaccaaagccaagatgggacagcacctctaagagaaaagcccaagagactgaatcgaaagcttttgtaatgtcaagctttaaaaataggctagagaccttccgccgatgaagggacttgatcgagtgctgaacaaacatatagttatcgtggatagaccttcccctcacaaaagcact

SEQ ID NO: 185593 - DNA, 352 bp, Zea Mays
cactgctgcaagaggaccagccaaagtggagggcgacgacggcagtacggtggagagcttcggcgacacttaccactgctgcaagaggaccagccaaagtggagggcgacgacggcagtacggtggagagcttcggcgacaggatgcagtcagcggcgcaatccctgctattgtgggcatggagaacggatagcacgggcgtgggttggaccaaggtggcgggtgatgagcttggtgggcgaggagcttggcggaggcgaggagcttggctgccgccatggggccacggtcgcggtctccagggagagagaagaaaatgaaaagagtcaagcgtatctcccgtgaaaaagtg

SEQ ID NO: 185594 - DNA, 325 bp, Zea Mays
gtgccccttgagtttcccatctccatttgctgataggaatgataaagaagtggcctcgcatgtgaccatggacaatgatcctgaagtagacacagaattttatggagaggaggatgaaagcatgcttggcaataatgatgtcattgtggatagggtccatgtgaatccagccaagggtagggctctgggtgatggcaactcttcaacggtgagctgggtgacaaaggattcagactctatggcggtgccttggaggagtaagaagtcgcttgtagagattgttaaggagattgatgagtacttcttgaaagcagcagcaagtggg

SEQ ID NO: 185595 - DNA, 274 bp, Zea Mays
tccatatgtgttaggctgaaaaaaggaacaaaaatgcagttcagacagagtcctcttagtagactaatatggctagcttaatgctgcaaatatgtaacatgtgttgatggcaaggttcaagaaagcgcgattaggcgtgcgattaggcgcggttaagcgctgagcagagggtcaacgcatcgcttacctactaagcgggcaattaagcgctggccctgcttaatcgtgcccatccggcatgtttaagggagaagaggagggagaggaagaggag

SEQ ID NO: 185596 - DNA, 1162 bp, Zea Mays
gttttgaagttcatggttgaggtttgctgggctcctatgcttgcagcattcagtgttccacttgaccagagtgatgatgaaattgttgtatcccagtgccttgaaggatttcgctctgcaatccatgttactgcagccatgtcaatgaagactcaaagagatgcatttatcacttcacttgccaagtttacatcacttcactctgctgctgatattaagcagaaaaatgttgaagccattaaggtttgctctgtttattaagacataactgttaagccatctgctcttcacttggttggaccattctcaatcttcttaatgcttgttgaaaagatcataacaaatattaaatcgaaccatgatgcttagaagtttgcttccttttcaagtttaaaattcaacccatttatacgacatgtgggtccaggctaaatttggagaagtacttttgataccttgattgatgtagtgagtagtgatactcatataagactggagttggttccgagttagagctgcttggtttaataatgggatgaactgaacatttagtaatattgcattatcacattgagcaaaatattctaatcaaggagcaaatttcccaattccctgtttgcggattctatccttcatccattcttgtcatttgaatgccttattgtagattgagtgatatgcatgccttatgtcgtgctgctagttgcagtcttccatattttagtttgagaatcatgataaaatcttttatcattcttatgttctcttcttatggtggtggattgcctcacaggcaattctattaattgcagatgaagatggaaattacttgcaagaagcatgggagcatatattgacatgtgtttctcgttttgaaaatctacatcttgttggagagggagcacctccagatgccactttctttgcgctgcagcagccggaccttgataaatcaaaacaggctaagtcatcgattcttcctgttctgaaaaagaaggctcctaatgctacttcagcttctaaaagaggctcttatgatagcgctggtgtcggtggcaaagcttctggtgtggatcaaatgaataatgaggtgacaagcctcttggagcaagttgggatggctgaaatgaaccgtgtatttgtaagaagtcaaaaactcaac

SEQ ID NO: 185597 - DNA, 525 bp, Zea Mays
ttggttacgaggaggtcaccctttgcttaatgttggggatctggccatggaagccagccagagtcttggattgttgctagagcagctcaagtctcctaaagtaaagtcactcagtacttccatgatcattgtcttcgttactaggtttgcctcttatttcacttttgttctattatctttttgtacattacagtttgtaccagctatggagcaattaagttttctgtggatgctgtgtcatctattcagttagtatgttgaagtattgcatgctattttgatctttatgtatcatgagttttcttctttttcttcccccttcttactgtgttatttctttcttctaacataaactgtttccagtctctcagctattgcccaaagaaggccttcattttatggacgcatattgccagttttactttccttggatccagcaagttctattattaaattgagagtcccgggcgcattccatgccttgaagagtgccttctctgcatgcctgaaatgcacacattcaag

SEQ ID NO: 185598 - DNA, 330 bp, Zea Mays
taacctctagatgttgaaccgctgatagtttgtcactttagagccagtatctggtgctcagtcagtttaattattgctactagtctttcctggcctatggtcgaaaaaggtttcccatccatggttagtcaattttgtccccatatcaatcagtgctaccttttgttaccttcgacatatcatattgctcaaccgtggaaataatgtagcaatgtgttaatctaatccttctgttgtttcattttggtttcttgtacattgtcaaattgcatgttttttttgtgtactcctttgttgactactaatagctaatctaccttttaacgagct

SEQ ID NO: 185599 - DNA, 453 bp, Zea Mays
ccatgttggcccaaggcatcgtacgccgcagcgactcggcgttctcctcaccggttctgctggtcaagaagcaggacggggcttggtggttttgcgtggactaccgcgcccttaatgccctcaccgtcaaagatgccttccccatccccatcgtcgacgagctccttgacgagctgcatggtgcgcagttcttcacgaagctggaccttcgctccggttatcaccaagtccggatgcggccggctgacgtgcacaagacggcgttccgcacccacgacggcttctacgagttcctggtgatgccgttcggattatgcaacgcccaggcaaccttccaggcgctcatgaacgacgtgctccggccattcctccgtcggttcgttcttgtcttttttgatgacattttgatttatagcaagacctgggcagatcacttgcgccacatccgcgccg

SEQ ID NO: 185600 - DNA, 386 bp, Zea Mays
cccgccggcctccggcggcgtcgccgacgctctattctggggcggcggtgtagccatcctcacggaagacaaccgcgtcgtggtggccactgacatcgaggtcgacgatcctcacccccgtcacctcgccgacccaggcatcggtgatgaggaacatgttctgtgtatggccgtggtggaggcacagtttgtcatgtcagggagcccagaagtgctgcttgctgttggcgaccgggtcattgcggttgacgaggatggcgtacaagtgcttggggaagagctggagattggacccgtgcagaagatggcagtttcacccaatggcaagctcctcgcagcatttgcacatgatggtcgccttctcgttattcccaccgatttctcta

SEQ ID NO: 185601 - DNA, 508 bp, Zea Mays
gggttcgtggccactaaatttggcatggccgtgacttggtgcccgttcccgtctcaccaaacctcccgcacttaacaaacgctagtaggagtactgattagtggaaacgccttgggtcccttaccacatgtaggcagtgcggaggccgcagcacaacgctgtccaacgatttgcggtgttatctggggacgcgctgagttgtaaaggggggcaaagggaccatggcataggggcgcggggtgtggtgccgacggcatctcattcttctcgtcttgggatcgaatccgattaaagagcctgtctatactctagtcttatcttgctagtgatgaaaggcaaaagagaaacaactccagacggaaagaaagaaagaaatgcgtactactcgcgcctagacggaaagtaagaaagaagagcctgtgtggcattgtactaggcgccacactcgcccctagaaacttgacggccgcgtcgtgtgagtgtgtgcccgtgcgtgggacttgtgact

SEQ ID NO: 185602 - DNA, 531 bp, Zea Mays
ctttctttcaggctggttatgagaagcaaaatattaggacccttattttagctggttgttcgaatcttagttcgcatgcccttggcagagtacttgagcagcttccacaaatatcttatgttgacatccatggttgcggtcatctaggggatctgaaaaataaatttcagcatgtaaaatggatcaggagctcattgaatccagaggagtcatatcggaaaattaaaaccttgaagcagataggtgatgggaacaactacgcatccaaagttgcaaggaacttcaccaatcatctggatggttctgatgagcttgatgggtattttgctgatatttcaaatagagagaatgctaacctttcatttggacaaggtttctataaacgatcaaaattgcttgatgctagaaagtcctctgcggttttgtcgagggatgcagaaatgaggcggttgatgcagagacaggcagagaccagttacagaaagatggaagagttcatcataaacagactgagagaaattatgaggagca

SEQ ID NO: 185603 - DNA, 983 bp, Zea Mays
atcaaatctcttatggggtataggtgagaaaatagtttactcccattgcctttgaagtagcgattcgccatacatgcaaatctaattccactaaagttgtctatccaaataaatgtacacaagcttgtcctatagatcttatagtgttatgaacccgaatgtccagctggatggcaatggcggagcgtgacataaaatcaagaggggaccaattctataaactcatgctacacctagctagctgttactgcctttcaggttgtgctttgttcacgcacaagagaagtcagcaagtaagatgaagtgcttgtggcttgtttgatgacattgtgtatgagctcctaagttagtcaatacaatgctttaataacagcaaaaagtttaacagctgcattgagcagcaaatgcaggagagcagtaggtgtcggacatattgtctttcttagtaattgttgtacgcaaatcaagcaactgacatggggatccaaataatatataacacctaaaactgatatggggagctgaaaattgttctctcattgttaccataggtgattaatctctcgttccctcttgcaggcatatgcaagatttgagatgcattgtttttgtcgaaagagttattacaagcattgtgttggaggcccttctgtcaactattaatcaaatgtctggatggagtgttagatacatggcatcagggcgtaattgtggtttgcaacatcagagtaggaataagcatgtggaaatcgttgattcatttcggagtggaaaggtctgctgcttatgttgccctgctgttgttgtgtccgataaatatttgtactgatgataaaatgatacattgtaggtgcatctgattattgccacacaaattttggaggagggactagatgtgccaagttgtaacttgataatccgttttgatcaggcagcaactgtacgcagctttatacagtcacgtggtcgagctaggatgcaac

SEQ ID NO: 185604 - DNA, 611 bp, Zea Mays
ccatcaacggggggacctcctccgtgcatgcctccgccctagccgacctgacacttctcgacccaatgtattcccccaacccactctccctttgcgcctccagcacctcatcgaccgctacttccctgccaccaccctctattccttcctagaacccatggcttggagggtgggatcaacagttgcttgctagctccttcagcacgatgaccctgaccccctgccctaaccaactgggttgctgacccaggtgcttccaaccacaccactccagatgcttgtatacttcttcccacccacctctcccatcgcatccttcatctatcaatggacaatgggaacattgtcccggtcacacctttatagatgattcggtccttcccgggccctttcatcttcacaatgttcttgtcgcccccatataaattttttacccataagtcaatttaccactgataactcttgctctattttgtttgatccttttggcttgtctatgaaggaactcgctacccgaagcattctcgtctgttgtgatagctctaggcccctttacaccatgcgactgcttgtgtccccttctccacctactgcttccactacttcatctt

SEQ ID NO: 185605 - DNA, 395 bp, Zea Mays
tgaacatgcaaatcatgtgggttgtgaatacccaatgacaccagggtgttacaattctgcaccagagcaccccatatctttacttgttgaacaggcaattagtttgatagaaactgcagctggagcaccaggctttgagtcccgcgaaggtgatgatccctctgcagttctagcatcagagctggtggttctttgtaaatgtgattctggaaaggacactgcacctttgattggcaagcttactgaaatatggtggtctttaaggaaaaggagggtatcactcttcggacatgcggcacatgcttattttcagtatctttcccattcatcaactgagcttcaatcttcatatcaccatgatgctttgaaagggaaaacaagaagctacactatgc

SEQ ID NO: 185606 - DNA, 452 bp, Zea Mays
gctaaaaggagcaaacagtgaagaattgaagaaagtcaaacaagtaatgcattttacggtctttgcagcatatcacttgatccttgaaacatctttctttgaagatcaaagggtttttctaaatgataaaagtacccccaaagaaatttctgttactgctacagaaggggcatcaccaactgcttatgatgttgctgctcttagtggtgctatccctagctttccttcacatggtgaccctccagcacttagactattccatgccacttctaatagctatgctgatgtgaacaaacctttgacatatccagaaaatggggatgcattcagttcagtatccagcagctctgcaaatgaccttgaacaaggtacaagtatcaggcccaataatgctgagaggttaacatcactagtccaagggccactaagaaaactgttcactgacatgttac

SEQ ID NO: 185607 - DNA, 815 bp, Zea Mays
gttgtccagtagactacaacactatcactgatctcttccttcaggtatcttttgtattattagcatataaattcttttctgtagtagtatataaaattctttgttgtctgggaactctccatgcagttcttttagtcttcactatgtaatttggttttttgctttggcttacattcttcaacagagaaatatgatacgggaggctacagcttttctgctggatgttctgaagccaaacttgccggatcatgcttttcttcaaaccaaggttagtatttgattgttcatttcaatatgaacatttgccttagacctgcatgctgcttaactactcaatgtcttctgcttggattgtcttgtaggttttggagatcaacttagtgacttacccaaatgttgcagatgccattcttgcgaatggtatgttcagtcattatgaccgtcctcgtattgctcagctctgtgaaaaggctggattatacttgcgtgccctccaggtcggtaacctttgcattgttttggctgatctcttctctttaatctctgtgttaaaccaatatcgtattttctgatgcagcattattcagagttgcctgatatcaagcgtgtcattgtaaatactcatgccattgagccccaggtttgtggtgttcagttatgttcttgaaatgtatctgttgttttcttgtttattaacaacttccttgcacaggcacttgttgagttctttggcaccctttcaagggagtgggcactagagtgcatgaaggaccttctactggtaaatctgaggggaaatcttcagattgttgtgc

SEQ ID NO: 185608 - DNA, 471 bp, Zea Mays
gcatttccccaccgcatttgattgaatatacaagcttgccgttttctctgcaggatcaccgtggaaccctgagtctgtcgcgggttttggcatgctatagccgccagcctgcagcagcgatcgtctcggtcttgggcccccgggctagccatgtcgtggggacggttcagcttcactcctcagcaggggcccacgctgacgcggcgaacgcgggtgttccctgcgcacaagcccgcacctcgcaacgtggtggtcatcgatgaggacgatgatggtgatgttatcattatggagcgcgcagctgcgcgaggttcaccttctgcggcggcggcaccaggatctgaagcgaggaaagggggcggcttctctggtgatgtgatcaacatagatgatgatgaagatgagaaagatggtaccagaggggataaagcaggtcctagcatgtcctgtgcctctgggtctccagtagcg

SEQ ID NO: 185609 - DNA, 379 bp, Zea Mays
ggaaagggacgctgatccgatcgcaagagacgaatcgtgcagttggatcacggagcgcggtcgagtgacgaagttgtcgcattgtgccgagcattaacgaatcgagctcgatcgagagtccgcagctagtggcggcgtttggtgccagcgcgcgaccagggccatggccggcgccgcgttccgggctgtggttttctccctcctcggcgccgccactttcttcgtgggttcctcttcggcgtcgtggcatgcgcaggtgttcgtggtcggcggcgagccgagggggtggaggaagccaacggcgcccaacgaggagagctacaaccactgggccgccaggaaccgcttccacgtcggggacttcctccgtgagtgcatg

SEQ ID NO: 185610 - DNA, 495 bp, Zea Mays
tattgtcttccatcaatctaatgtgactgaatgtgaacaaatagaaccaacatctgtggggcatgaccttttcatcagagaccaaatggataaccataatcatggatcgtcccaatataatgaaactatctctgaaactgtgaccagtgacagttctcatcaaccaggatcaactacatatcaaaaccctaaacttgaaactactgagggtactgggatatcagtactattagtccctaagtcaaacagcaataaatggcctattgtagaagggagggccctggctgctacaaatatgttgtgttcagaaccctattatgcaagagatggtgtcagtatgatgaagcgtagctttggactggacagcacttcagctgcttcttccagtgatcttggatcttcaaggcaatcaatcatatgttttgagcgccttaggagtggtaagaggggtgacttcgagaagtctcagataagcagcactatgagtcgtcaaag

SEQ ID NO: 185611 - DNA, 626 bp, Zea Mays
ccgcaatgcagataggctgaaggaggagcatgttaccaagttagctcatgaactcaacagcctcattagcttgaggagttcctctgatagcattagtcttagcctgtaccaaaaaattattagtagctgtacggcattcctctctggagccacagttgtagaaaaggcaccttctggccaataggtggtgttacagaaattataataaccacagttagtaaattctagtactccaaatcataattaccacgactgatggagtgtattgcattcaacgtttggttatcggtacaaagttagaaatggaaaattttcacgtaaggaattagttctttttttagtataatacaaaggctgatttgggagcataagcgataaagcttgctttgtttgattaattttatactggttactttcaaattcacaagtcataataccatgagcatcatttattgatctgtgactgtgactggcagttataaacaaagtttgttgcctattgcctctgggtgcagcatttgatattgtactgtgcctacttactagaagtgtttgattgtgatagaaaatacagtataacaggatgccgaaaacaacaaaggtcggtcctattatgcagccgttgc

SEQ ID NO: 185612 - DNA, 571 bp, Zea Mays
gcagaagcagctccggagggaggccgaactgcaggcacagcttgagtccacccatgaggacctgaagaaggccaaggatcaactggcattcatcctcggagagagggaccgtcttgtcggggagctcaacgaggccaagagagtcgctgatgagactcacgagaagctccaggatgccctcatggccaagaggtgggccgaggaggccactgagatcgagaagttccgcgcggatgagctggagcaggcaggcatcgatgaggcacagaggcgggaggaggagtggcagagggagattgagtgcgtgcatggccagcacgccgcggacttggagacgttggtcaacacaacggaggagctggagaggctcagacgtgatctttccatggtgaacgacgccaagaaagctgcacttggccatgcagatgatgcaatgaagatcgctgaggccaatgcggagaaggtggagatcctctcaaatgaagctgctcgcttgaaaggcttgcttgattcgagtgctgccagcgaagagagtaaaagccgtgaagctgagcttcttgttaagaatctg

SEQ ID NO: 185613 - DNA, 312 bp, Zea Mays
cgacggcgcggagggtgaattgttggacgaggagcaggagacagacgaggaggaagaaaaagagatgctggatctgcaggatcacatggccattgacgacgacgagcaaactgctccgcaccaaggcaaggatccgtagtccccagtccccaccaccactgtcgtagtagcgtcttcgcaagattcacttgtcggttgaactaataatgacactgtgctcttcaattgctgccgtattgcagtggacgacgacgacgagcaagatcttgagccaccgacaaaaggtgcacgaacacctctgccaatttcgtc

SEQ ID NO: 185614 - DNA, 623 bp, Zea Mays
gtctggtagtaattctggaggagcaggatcctccaatgtaaatcaagggaatgatcggtcgcctgctgaagttttgactgcatcagagaagcaagttgcataccatacatgtgttgctctacggcaatactttagagctcatctccttcagcttgttgattccattcggccaagcaaaagtatccgtagtattgcccggaacacttctagtgcaagagctggctgcaaaccttttgacatcagcaatgaagctatggatgccatcttttgtcagatccaacgggacagaaagttaggccttgctcttgtgagagcttgctggcttgcgttggataaatttgttgcctcaaatggtcacatgactatgctggagttgtgtaaggtaaaacacacagcacacatgcattgttggaatgtgtggggcttgttaatgacctgattcgattcacagtttcaggcacatggtgatcggtatttgcgtgacttaactcaatatgcaattggagttcttcacatcataacacttatgccacagccacatgtccgcaaatcaatagtgcaggggacattaagcaacaatcgtgctggcatggctgtcttattagacacggtgaaaagtctcg

SEQ ID NO: 185615 - DNA, 680 bp, Zea Mays
cgagcattaggatttgttgccgacaaggatatactggagcatatatgttatgacttttctgatacacaaatgatggaattgctacgtccatccctggaggaagcttttgtcattcaaaatcaacaggtacttgttcacctgcttgtttggtggaacttgttttttatttcaaccattgcttgctttgagcatgctgttctattcagttgttacttgtggcacattttgagatgtgctctggcttatgtttcttcttttaaaagctctagtttgactgctcataggttgctctggactacattggaaagcgtggcgcaacagttggtgtcactcgagaaaagagaattaagtatgtcaagcaaatagttgatattacatattaggtatttaggtttgagttgttccactcatgcttacatctttctgtatttcagatacgcaaaggaaatacttcagaaggaaatgttgcctcatgttggtgttggggaattctgtgaaactaagaaggcatactattttgggtatgttctccttgtcaagccttgtggacttgtagctggcatctgcaaaaattaaagttctgttgaaagtagcaaggttgatctaccctttattttgcaggtatattattcaccgcctactgatgtgcgctcttagtcgaagagctgaggatgaccgag

SEQ ID NO: 185616 - DNA, 451 bp, Zea Mays
aatacatatcacctttggaattcaacctccctctagcacccacgacttgtttggttcttggcttgctggttttcggccagcatttagaaatcagatttgtgtaggtttttctgctatttgttgggctatatggttgaatagaaatgatatggtgttcaattgcgccaaggctaacactttcatgcaggttattttcagggcgacatattgggcacgttcttggtcgctgctgcttagagacgaggacgcgaggaccgatctgaacagggcatgtcgcttattggagtcggtcgttatggaggtgttcgctaagtttgggtggaagttctcaaatagaattgcggcttagtcgtctagctgtcttgggtaaacttggttttttgagtctgtttgtgagcctaagcgcttgttggatgtatcgatacgctgtgtacgctgtcttggatggtgt

SEQ ID NO: 185617 - DNA, 328 bp, Zea Mays
ggacacttttcccaccctgtctcacttcttcgcttgggtctccactcagttcggtagcaccatccggagcatccagtgtgacaacggccacgagttctataacaatgtgtcccgaaattttttcctctctcgcagagtccacctccgtatgccgtgtccctacacgtctcctcagaatggtagggctgagcgcatgattcgcacagcgaacgatgtcacgcgctccctgctctttcaggcttcccttcctcctcactactgggctgaggccctcaccactgccacctacctactcaaccgtctgccaaccaagacggttgcccaccgc

SEQ ID NO: 185618 - DNA, 328 bp, Zea Mays
gaatactcagcaaaagaccccgcgctcatgcaatacctcacagccgtccgcagcctcgagagacaattcaaggacttcaccctgcagcatgtcgaccgcgccaagaacgaagaggtcgacgcgttggccaaagtagcgaccaagggcgaagccttgccgtccgacgtgttctaccacgtcatcggcacgccagttgtccgcaaccctgaaggcctacaaataacccaggacaccgaaggccaccacatcgtcaacctcatcatggccgaagactggagggccccactaactttgtacctgcagggccactaccatccaagcgatcgca

SEQ ID NO: 185619 - DNA, 374 bp, Zea Mays
cttcttcctccccctattccattgtgttagcgtgattttgtgcagcgaaacagtctgaggagagactgaggtttgccgtgcagtgatcttgcaaagtgtaaggatcgcatttcagagtctcctcaccgtatatcctactctttggcatgctagctgatcttccatccatcatagctgttctgcatcctgtgttccgatttgttctctcgtatttctagtgaaatgatttccaagatgaagtgcaaccaggttctccagcttccaaactgtcactggtggcttagctagatttaggagacatggacatcagggttttagaacgatgagcatcccaattgctcgtccatcctgttgcactgtggattggatagacc

SEQ ID NO: 185620 - DNA, 348 bp, Zea Mays
tctgtaccacatcaggggcaatgtcatggatagtattcccatacacccatctatccgaccagaagagagtagtagccccatttcctatcacggtaaacacagacaactcaaagaactgtctaacctgccgctgcactgggagggacatcccatgccagggcctgttcgggtccgtcttttccagccataaccattttgactgtaaagcccagcttttaaattgcaagttagggacaccaagaccaccatagcttagaggcctcgtaattatttcccaggatacaagacaacttccactagtaacctcttttctccctttccaaagaaacccccgttgaattttgtcaa

SEQ ID NO: 185621 - DNA, 672 bp, Zea Mays
cagcactccggatgttgtaaaccccttctagtaagtttatccgttgtccaacacctgatatattccaccagccaaatgaaaagacggcatttgttaggagcccaacttttccagattctagtagtcggcttcccaccgctgtgccgcccaccttcccaagcgccgtcgccacgggcgcgccccaggctgaccttccgagcgccaccgccactggggacgtgcccctgtccaccattgtgccgcccaccttcctacagttgactcttgctctccctggcttcgacctggccgccaccggccagtgcctgaccgtgttatcgtctgtggtggtggtggcctagagactctccttggtcctccatctacaactcgtggaccggctgcatcaccatgtggcctagccagtccccgggtgtccctcctccgtgacttcctccgccctagccagctcacttggcgataactagttcaaggtatcccttcgtccaccctacccctgcaccgctagctcctcaaccatcactttgtccactgccaaaccactccactccgtcctggaccccgtggcccaaggggtgggatcaacagtcccttgctagctacctcacgatgaccctcactgctcctgctgtcaccgactgggttgctgattctagtgcctcctaccacacc

SEQ ID NO: 185622 - DNA, 289 bp, Zea Mays
ggttctcctgctgttgtctctgccagggtgcggaggtttgagtcttgtcagtcttcccgggctgatagatggagatcaaagccacccgtgttcaaagtttattctagaagaagattatctcaggctcaggtggtccaggaagaccttttactgcaatctgtggtggaaatggttccacctttggaggagttcaagtctgcggttactaagccttctgatggcttgttaccaccccctccccaccgaaggaccaaaagcaggagaaaggtaatgccaagtgattttcggc

SEQ ID NO: 185623 - DNA, 378 bp, Zea Mays
catgcaatgtgaagtttaatgggaagaagtgccttgctttatttgatgctgaactaattctctcttagcattccataataagtaagatttgcatcctatcatgttttacaaacatctgtgatatgggtgctagcgttaccaaacgaagtgatggctgcatacatgttgcatctgtgtccatctatgacggaattggtagattgacaggcacatccgaccaaaatcttcaggctgcatacaatacatctgtgcccaacaacacatctgtagtattgtgctgctttgatgctgtattggtgtatctgaaatgtagttaaactagtgacttagcaccgttgttgaattgttgtaccaggccaattgtagatagacaagtgt

SEQ ID NO: 185624 - DNA, 394 bp, Zea Mays
ttaacctgaaccaaattgtgggcaggttgtaaccccttgtcaagctctgctggggaaaccatgcttccagattgtttgaggttctggtttgtgcttggcaaagatgggtactgtccagcataacctctgtcagctgtgaccacaggtttgctagaagcctttccctgagggcggcccattttcacaatgtcaaccatcgacaactgaccaggtgtcccagaccaaccaccatgctgaaacccacacgatgattgcaatgatacagctagtccatcagtaaccatatgtttgtttgcagaggaactgaagaatacgaaagaggttattaacatcagcaatcaacaaaaaataataataataaataaatgatctgaaaatattaacagttgagaat

SEQ ID NO: 185625 - DNA, 784 bp, Zea Mays
aggggacctatagcatccaaatattttccttggctgttttgctgtcgagcatgttcatctacaaccaggtacatttctaaatgaacgaattagtcacatttggaagtttgaataaggagggtattgtagactacttagggtgcttcagtttttttgtctgaaggacgctaacctacgagcgtgctgctatttcttctagatgggaggtatagatgaatctgcgttggatcgtctctcgctggtcacagagatgacaaagcacatacgtgtccgggcctcaggtggaaggtccactgcatccgaacttgggcagttctcgcctgtctttgtttggttgttgcgagtaatatatttcatcccttttctcctatactaattatgtatactgaacgttgaacgctttgactgttccctagctgcacatcatcttataaaccgtcaaacataaacctcaggccctgttatgcatcagacacctttggtgtgcgacgagccgatgacaccgtgcttcctttactacaggacttttatctggatttggcagaagacaacagaaaaattactccacgggattacctagagctagcattgaggcctgttcaaggtggaggaagggacatatctgcaaagaatgcggtatggtagattttcatgggtgaacgtagctttgtacttgtgcttggtaactagacgtatggactatacttatacttcttttgttgttctggaagatacgggactccatccgtgcactttttccggacagggaatgttttacacttgt

SEQ ID NO: 185626 - DNA, 1631 bp, Zea Mays
aggtttctcatcaccatcaaccactctaagtacaatgaggagaggggctgaagctctaagacaatcttcaactttattccaaaactccacagagagcacaatatcacaagcctccttacctgcagcagtttttgccaacttgttttcattccattcttcactaagaaatagggccttcaaaggatccttgtgcttgtacaaacttttcaaagtaaggaaagcagtggcaaatctagtggctgcaactctcacaagatctgccccacctgtcttctctctcattaaactaagaattctaccgtgcctatagatgaaagttgtgacacgtcttgcacgtacaatgggcttcttaaattccttcaagtttcctatgtcttctagcataagatctaagcaatgtgcaacgcatgggctcacaaggaagttgatcaaatgcctgcccctcctatcagaccatccatctgacataagcgtgcaaccataatgcttccatgccctcttgtgttcctccctcatagttgtcaatttcacagcatccttaagcaatggctgcccaagttgatatggaggcttatagcctgaaccaaactgggcagttgcctcaactgcaacctgaaattgtcttgctgctgctgcattaaatggcacaccgcattcataaaaccacaaagcccattgcatatccacataattcttctcctctttggacttcatcttggatgcaattgtgggttgagaacaccctttacgcctttcatcaactacatcttcaggtgatttccgaagcatctccacaattgacttttgcttgcttgcttgatttgccttggtcttgattgatgttgtatccttgtacagataggttgcacgcctatgtttggctgcagtccctgaacttggttgtaccttagagccttgggattctataggtgcatcttgttgaacttgaacagattcagctgctgcatccaccaccattacatcctcttcctcctcttgctgctcattatcatctaggaaaatagctcttttccttcttttggattccaagtaatccctcatctcctttctaattgcagtagtggtctttgaacatatctttgtatttccatagccacctgctagatgctgctttagcctttttatccctccgaaaactatggtgtcacaaagggtgcatgtcacttgatctctatttgccaaatatgcccaataaccatacttccaacctggatcatttgagctagccttccttgctttgtctgtctttggatcatttggcattgttgactgaagatgggctagccattgattgatgaaggtggcagggtgctgttggcctgaggaagcaacagagcagtcagcagatgaactgaggaagcagaggaagaggaagagcataggaagaggaagagcagaggaagaggaagagcaggcgagcagcaacagagcagtcagcagatgaactgaggagtgaggaagcagaggaagaggaagaggaagagcagagtggcacaccggatggaggagccggtcgctggatggaggagcggcggcgcgacgcaccggttggagaggcggcacgcctattggaggagaggcggcgcgtaggttggatgagaggcggcgcg

SEQ ID NO: 185627 - DNA, 747 bp, Zea Mays
tgagcggcggagcctgcactgaagactgaagctgcttgagtcacgcctgttccgacgatttttgcagaaatcgcccagcctacgggactgattgggcttgaagttgtggcgcgtacgagagatgcctcatgccagagcttctgttattagagactgaagttctgcaagcgcgtgctgctgctctggagttttagcagctgtgttgagtggttgggagccatggagtcacggatggatcagtacgaggttttggagcagattggtcgcggcgcctttggtgctgccatcctcgtcaaccacaagacagagaaaaagaagtacggttcaatttagttactgagcctgtttccccgtgaatttgcctagccgacagtcttttgctttgctactgcaggtatgtgttgaagaaaatacgtcttgcaaggcagacagagcgatgccgcaagtctgctcaccaggaggtcagcagaacagaaatttacacgccctttttcatttgtttgtttgtcattttgcactgtcttcggtgaactgatagagcaaatggaaattgcagatggctcttattgctcgcttgcaacatccttacatcgttgagttcaaggaggcatgggttgagaaggttggttcttcatgaacatgcttctgtatttgccttttatttggttccgtcctctgttacctcaacgcatgagttttgatagggctgctatgtttgcattgtgacgggatactgtgaaggtggcg

SEQ ID NO: 185628 - DNA, 514 bp, Zea Mays
aagatttccacttttttctgatacgtgcaaaaaatgtcatattgcaggtacaatgttttaggactagcagctactcttggggaagcattctttcgatgcatagagggttcttctgtcacccttgctattatggagaatgtgcaagttatggagtttcggcatctgcgccaacttatccaccttgttattattccatttgttaaatattgccctgccgatttatggctgtggctagtgaaccttttgcagccgttatttgtccactgtcagcaagctcttaattattcatggtccagtcttcttcatgagggtcgggctaaggttcctgacagcattggtaatctttctgggtcagaactgaaggtagaggtaatggaagaaaagttgctacgtgacttgactcgtgaagtatgttctgtcctttgggctttatcatcaccaggcttaaataatggacttccatccttggaacaacttggaccttccaaccggatggattctgttttgaagaatc

SEQ ID NO: 185629 - DNA, 591 bp, Zea Mays
gagacacagcatgttagtagttagcatctaatggatgcagccggagtttggtacccaggaaatgattcagtacggcagagataagataaatttgtgtaaggaaccacttttgaggataacggacagagagtgtatctgaccttattacgtcccaggcaggcttaactttcatcatccttcagagcaggccgtcttgctgaaagtaaaagaagagactgatgagtgatgacacgtggaggagaacttggaatctgaataataataatgcgtatactcttcatcatttgaggacgagacttgtttgggccaccgatgggcttccatttctcgtatgtgcgtgcgtgacattaaacggcaacctcttctgatgcagacatgctcgctgctgccaactgctgcctcggtctatattccaatctatcatagaagacgagcctttattgtgcatgcagactccagaagtccagagcgatacttctgaaatagtagtccttttcgtagaacatgccctcgatccgttgatggtgccttaaaatacgtacctgaatagctccaaaaaaaccacacacacacacacactgaacagttcac

SEQ ID NO: 185630 - DNA, 1088 bp, Zea Mays
caaccactgaggctgtctatgatgttgcagcccggcctgttgtaaaaggtgctatggagggcataaatggtatgccaattttatcttatttaggccatcataagtttttcttatggtatgctgcaatgccttatttatctgaaaacacttcttgtggtgattttttgtttactataccatactgtatcatatattgtgggaattatatgttcacatgtaattttactctcatcattatgaactaatgctgcacattgtcttcctaactattcatttctaccgttgattgaggcacacacatttgttatgaattaatgtttacttttataacgagttgttaacttatcaatgcatctgtgctgtttctaaatccaattttgtaccaacttgcaggtacagtttttgcctatggtgtaacaagtagtgggaagacccacacaatgcacgtaagttctcatattcaaaatctgttggaagaactaccaagctagtttcataggaatgcggaaaaccatagctatatgagtatgtaatttgtatgtccacgttttctgctgggatccatactcccgaatcctctccacatcacattgcatccaatgtactccatccattataaattgtaagtcgttctagcttttctagatacatagacttacacaatctgcctagatacatagtaaaagctatgaatctagaaaattcagaacaacataatatggaatggtgggagtagtttcacattctagatattttctacaattgctactgcaagctatagcaaatatgatttctgaatgcaacaaggacatattcattttcacgaataatctttgtaaatatatagttgtttgattttttgaaggcatcattattttttatcccattgtttccctaatcttttttcagggcgagcacaattgtcctggaataatcccactagccatcaaggatgtcttcagcatgatccaagatgtatgacaataaatactttagttgaatattacttagtgttagcgtaactgtgtaatctctcccttgtaatggaccttggctcagttattcacctatattaatacaatcctgac

SEQ ID NO: 185631 - DNA, 498 bp, Zea Mays
cggcgagcggcggctaggttatggaggtggaggctggatggggattggggactaccgggctggggtaaggtttggccgtttgggaacttcggttggggagggctgaggctgatccgctgatgggctgttgatgggcagggcagatgggctgccggctgcgacgtccacatgtgtccgcttgttttgttgggctgtttgggtaccgggtagttcgggtaccgagtgctgctacccgaattacccaaactaaattcgggtaataacatttactatccgaaccggacttcgggtactgcatattcgggtaattcgggtccgggtccgggtaacgggtagcgggtaatatgcctagtcttacccccacgggaggggatgcccataccatagtggttgtaacagcgcttcggtatgggtaaaaagcctgcttacgggatgcgtcagcgtccctgtgctgtgtgacgttggggtccttcgatgcggatatcaaagtcagagccc

SEQ ID NO: 185632 - DNA, 404 bp, Zea Mays
aatcatgcacgatacacactagcatatctaccatgtttaaccaagattgcatgtaactacagaatcatgcatttctactactagacgcgcaacacagtggaaggacacattgatgtagtggaagtcatcgaatgtccttacgtaccaacaacaacacatttgaccatcctcctcaagttcattattgatcaacaccacagtaacaacagtgtcaccatggtatatccatacgtgtgaagatgaaatatcgtaatgtcggtgcgctaacaccatgcatatcgagagaagcggtgtcgacgtatcgagcgtctgcaaccataggaagagacagcggtagctaatatgattctctcaagcatgccagacctttggtacatatagacccttactaatgtgtttttacc

SEQ ID NO: 185633 - DNA, 297 bp, Zea Mays
agaacaaagtattttgacatctttgagttcatcaagaaaagttaatttatcattgtcctcttgggagccatacaccctagtgagccatcagtttcacccttctcattcaatgaactgaacagaggcagaataattgtccacccgagagcatatggcttgaattgcgacactcttccaggcaataactaatcctccacgagttccattagtcgataatagaacaaacttatcaaactcggatccaaaaactgaattaaagagaaatcgattcataacaaccacttatatcagctctag

SEQ ID NO: 185634 - DNA, 547 bp, Zea Mays
ttggatctggtgcgggtgcagatgtcatttgatccagtatatagggggcaccttgacgtgcttgacaagatagggaaggaggaggaggacctcatggcggagcaacgaaaagatttgattgtattgttccggagcatttgtcgtgtcgcaccagctgccgctcagctgttcataagagggctgattatgacagctctctcgtctgcagaagctagtgtggaggatgttgaggttgctcttaccctgttcttccggcttggagaagctgtgggtgaagaggagattcggagtggggcagggctcctaggagagcttgtgcccatgctcctttcagcgaggttcttgtgtcacacacatcgcttagttgcattggtgtatctggagacagttacccgctacatgaagtttgtacaggagcatgtgcagtatgtaccacacctgcttggtgtgttcttggataaccgtggaatacaccatcagaatgcccacgtgagccgtcgtgcaggatacttattcatgagggcagtcaagtcattgaaggcaaatc

SEQ ID NO: 185635 - DNA, 592 bp, Zea Mays
gctgggagtacctgttcaagctatattggctagatctgaaagggaagctttcattaacattggaagaactcactactgccaagaatagatggaatgttcctagcacttctgctaggaaagaaaaagaggagtcgtctgatgacctgtatgatgctaataatgatgatgatgctggttctgactgctcctcaggaaaacgaaggcgaactaattcaaggaaaaagggtcaaaaacgccgaaaggtaaatagagattgtagcattcttgaaaaaaaggtcgagcttccacttagaaatactgagagcattccggtggaagtgccaaatgaacgggtgccatatccggtacacacaaaagtaccaaatggacgagtacccatgccagtagacacaaaagtaccaaatgaaccagtgtccttggcagcaaacacaaaatgggcatcaccagagctattggagtttataggacacatgagaaatggcgatcaatctttcatttctcaatttgatgttcagactcttctgcttgattatatcaagaagaataaccttcgtgatcctcaaaggaaaagccagattatttgtgactcgag

SEQ ID NO: 185636 - DNA, 519 bp, Zea Mays
gctttgcacccgttacttcctgcctatatatccgacagcgaaagacgatcgattctgaaccttggtcggtgcgcctcttgttcgacccaggaagcggcgaacgccctgcacatactgcccagtaggaagcggatcatgcccattcttcacgacgtcagcggaatcatcaagcctcgcaggtagttgagtaaaacaatttgttctttttgtcctcaagcaagtcaaactattttccatctatatcgtgttggtttggtttgtgttggtggctcgattagtagtcttctaatgagcgagtgagagagttttatttcttttttaaaaaataaaaaataaaaaatgttgagcgagagagatttggtagtctgggactacaaggaatcaggattcgatttctttgcttcttcgaccagtcaacctcacgttctttacgtttatgcaggatgacacttctgttaggtccgcctggatcaggcaagaccactttgttgctcgccttggccggaaggcttgacaaag

SEQ ID NO: 185637 - DNA, 389 bp, Zea Mays
aaaagtattgcatgttatcggtggtgttttttatgcaactgaaatgtaatacttatttcaagcacggtataccataccatccttgcatgttaacatatgctattgctacgagtctttgctgcattttccattcattacaattgcactattcatctacttttagccttaaatttatactattagtcaagagcacccaaacttccctaaaaacagtgctgtatgcagtttcactggtggaacaaagggaacctatgaaagaatctgccatctgccattatgcttttccctgtctttagtgaacaatcctggcctggtctttgtcttttctgaggaagcaccacattacgtgaattacattgtttatatgtatacttcctctgattgaaaat

SEQ ID NO: 185638 - DNA, 745 bp, Zea Mays
gtgcactcagactttggaacttgttagctctctggaacctagagttgaagaggcatttttcaaccaggttgcagtgctgcatcaagctagcctgattttgcttgcgaatgctaaaaagaattctatttatgccgtgcatgttgagtatggcccagatcctgcctctactcgattagactatatagctgatttcacagttgcaatgcctattttaagcctaactggaacacacgaaagccaacctgatggtgaacaagttgttcaagtctattgtgttcaaactatggccattcagcaatatggtctagagttatcactctgttcgcctcctacagctgatagtactgggtttggtagagatcctgctatttcccgtgtttatgaggcagctctggaaatggcaggaacagagccatctataggaactagttgcacagactcttactctgtcactgctttgagtaaacaaccaaatgttgaccagtctgcaggtaatgcagttgcattttcttatttaactctttcagttaattcagaactagttatttcttgtgattcatctgcagagcttgatctgaaaccatcagctccaccgcttgcatactcagaaggtgatagttccatgcctcttccatttacagctcttgcacctaagattgaggttcctggatcaggaccagcacctggaactcgtgatatagagcaatcagcttttaactatacgaatacgacaaacagaaacatg

SEQ ID NO: 185639 - DNA, 404 bp, Zea Mays
ccaggttagatcagaggagaacaccttatgatttgatttgggaggacagtgagtgtctttctggcaaggtaataacttacattcattgtattgaatttcttttgtctgttcttctctagttgtttgacctaatacctttcttgaaattggcagtccttctatttgcctggttctgtggatcttaatgataaaatagttgaagggtggaatgcatctgcgccacccctctatttgtggagtcatcctggttggacaaagaagcacatgcaagtggctgaagagcatggtcatacttgtatggggaagatagcttgccatgttgaagagagtaatctatcagatgacctgtccgtgaggaaacaatctgatgctacaaacaaactgaactcgagatcagggaaaga

SEQ ID NO: 185640 - DNA, 443 bp, Zea Mays
ggcgtgcctgtcagcttctaagcaagatgtacaggttatatccccctttagaattgctgcagtaatgtctaagaatggaacttctatgcaaaactttacaaataaatctagccctgtcagtgcaaatggtcatgataatggagcagctggagaaagtggctatcaggatgttgaacccaatggtgaagcatctccttcaggacatgatattttggagactcaatctctccttcagatggaggatcataagcagcagatcgaacatgtgttgcgaagatttagagaatcaaatttttttgtccggattgcggaatcagtggaacctctatggtccaagaaaagtgtaacttcaactacgatggcagatgaacgatcagataaccagggaaatagtaagagctcaaggagtaatgtttataataccatttctgataaaggggttt

SEQ ID NO: 185641 - DNA, 285 bp, Zea Mays
catgggagcatgttgataatgccatcggtgcatctacacaacttcaaggccgctactttcctaggagagctcatggtactcaagtgccaattcttgaggatgatgaagatggtcttgatgtgggtgatgagaatgaagacgatgacaattttgtgcttgacgaccttgacatggatgatgaagaaacaaacaacagtggtggccgtggtgatgagcaagacaaggatgatgttggtttagatgatttggatgatggttattgagtgcttgagtaacacttgtgtg

SEQ ID NO: 185642 - DNA, 335 bp, Zea Mays
ctattggtggccaggatctgaagaatgcaaaatcattgattgaatggatagcgtgggcagagcctcagtatgattttaatccgatgattgatgaatggtgcaaggaggctccaaaggaacttgatttcaaccatgaagcaggtattttccttgctcaggttcatactcatattgccatatgcttctctgcacgattttccatgtcctgtccctctttttaaatagagtcaaagcctagtggctcatgaagaggttgtcttgataatgtgtggtataaattcttcaattttagagaatactagggctgtctccaggaatcttagtcgcaaaagtga

SEQ ID NO: 185643 - DNA, 444 bp, Zea Mays
cggcgcgttttttttccccgtccgttccgtggcacgcacttgatcgatttcattgcttgggcgaggttagttgggcgttgctggttgcgacacgtcgcgtagctttttttttgggagggtgacgattttctgttttggcccgtcgcgcgagggcaaaggtgatggtaacccgcgtcgctttttactttggacacgccgttgtcgcgtccggtgctccccgccactgcttgccttagctcctccttccaggaacgatgccactcgagattgtgctatatttggtcatgcagtctgaacagcttcggagaattactgttgccatgacgatgccactcgagattgtagcagcgcgccagcgtgcgtgaaggccggagtgccgtgggacgtggggtacagccggtacagggagtgatggtggtgtcggtgccgccggagtcaaaccgg

SEQ ID NO: 185644 - DNA, 579 bp, Zea Mays
attttgatgaccttggaaagttaggacaggggttctcatctgttgatgaactagaggaagtcgatattggagacggaaaggtgccaagaccaacatttgtaagtgctaaattaatagccgatcagaggcaaaaggtatgtgatttacttagagaatttagagactgttttgcatgggattatactgagatgccagggctgagtagggagttggttgagcataggctaccaattaagcatgggtttaggccacataagcagccacctagacgatttaaccacgacatccatgacagagttaaggaagaagttgatcggctgttgaaagcaaatttcataaggccatgcaggtatgcggaatggatctccaatatagtgccggttgagaagaagaatacaaggaagatcaggatttgtgtggattttagggatctaaacagggccaccccgaaagatgaatacccaatgcctatagccgatgaacttgttaatcaggcttcagggaataaaatcattagttttttggacggtaatgcagggtataaccagatttttatggccgaagaggatgtatctaaga

SEQ ID NO: 185645 - DNA, 540 bp, Zea Mays
cagggaccactgctgcaggtgtgaatggattatttgcttttcgttcggacttgttggggtttcatccgaattaactaacgaggcagaccacaaagaggtaacaatcgatgcctgagtttcttgatttggtttggttcaaaaacgaatttcatgaacagtctcctattacttttttttcagtggaaaagggggcactccgtactctatctaattcagggagatttgcatgagctgatccaaaacagaggatggccctgttcgatcggaaccagaggcagaggtcgtcgttctgctccacggcgaccttcgtcgtgttcgtcgcgctctgcctcctcggcatgtggatgatatcctcccccgagaacgtcccgtcggccatttccttgtcctcggagaaggtcgtcaagtccgacgtcaaagaggaggacagctccattgacgccaccaataccgtcaagcaggacagtgccaacgtcgtctcagaggcgaccacggacggtggcgctgccacggagagcgccgaggatgtcgacctcccgg

SEQ ID NO: 185646 - DNA, 371 bp, Zea Mays
aagaatttttatgccattattggctcttacaacttctcgagcttgacggtatccttgctccaattgagcagcaagaccaggaccaccacctccaacacctaatgttattcttcgatcaccgactactccagatgtcacaacaggtgtgttaggagttccttgatgcaaggtattgttcctttcagcagggttgccatcaccagatctttcacgatattcaccctgatttgctagtagattcctatctgaaatacttttttcgaagttcctatctctgctttctgaagcaagtgcttgcgcggctgcaggttgctgattggcagttgacaatggtttgttgctgatagaaggaggcgggcatacaagattga

SEQ ID NO: 185647 - DNA, 494 bp, Zea Mays
accttttcatgaaggccagctcccaaactctttaagctaaggaaagcatcctctgacattaacttgctaatatcagccccgttatttgcttcatcagcagctatcatatctgatacttgtgtaccattcattgatgaatagttattgctacattcttccttctcagaactggaaccttcattgttgcattctttctttttaagtttccttaattgttcaaaatgctttccaagacctctgacagctggttctttgtcagtcttcatcgcattccccttaccattctcagacgctggagtatcctttttctgcaattgttgcagccaggaggaccccagttcccatctaataattctagaatttatgctaggcatgctatccagctttaccaagctgtccttgagtattttacgtgccaatttctttgcaggattactagcatgagactttgggctatggtgctggttaccaacaacagtttctggatggataac

SEQ ID NO: 185648 - DNA, 708 bp, Zea Mays
agctacaagccaattgtggtagacgaaacgagacggaaaacttatgatgcatctgaagaacagcctctgatgaaatctgatccagtttttgatgttttctctgcggaaccaaaagagctcgtgaatgtgggttaatgcatctatgattcaatcaaatactgacctatctgtgattattggtccattttttcttacttagattagctcactggctgagtgtgctttgcaggttgggctcgatgctgaacactcatatgcatatgtaaggagtctggctcgttttgctggttcgcttggtactcaaggctggagaattgcttctgaccgcattcggcaagcattacctgctgatgtaaactatggtcgtggttgggttggagaatatgagcctccattaccgtctattcttgttgtgaatgatcaacctagatacccgaagagctctgagacaaatagacgaaggaatgctcctctgcctagggataatgaaaggttcagatcaacagaaactaataatccaaaggatatgagacgggtagccacttgcaataatgtagttggagtggctggaccactagagagtccagaaattaagccaagattatttggtgttaccactgagcctcaacacaggagcacagacgcgttatcactgcacgagaaccacagagtgtctggtaatgtcgcaaagaccaaaagaacaacgaa

SEQ ID NO: 185649 - DNA, 352 bp, Zea Mays
tacttattaagactttaaggagtaggctaatgttctgctgttctgtcattccgccgttctacaatcttagtcgtccgttctaccattctgctatgagccgtttgatcccgtccaccagccccggtcgtgaagtccccgatcccgcccaccagccccgaccctcccactttcgtgcacgccgtattccctcgtccctcccaccggtttgcagcagccgccacatcacgcgacgttgttccacagccgccgccaacctcgatgccccctctccaccccagcgataggaggacgtgcaggtctttgggtgaacgcctggctccgtgccaactgagacctccgtgcctgcttccac

SEQ ID NO: 185650 - DNA, 548 bp, Zea Mays
tatctaccagttcgagcttgcgagggagttcagacagctttctgagttggagatttggatgttaaacagactcaagaagcattctttggcattggcgtcgctcattcgtacagttgctagactccgctctagggtgtcttggttgagacatggtgatgccaacaccaaggttttccatgcatgtgctcgttataggaagaagaagaacttcatcgccaagttgtctaatggtgaagggctggttactagtcatgatgataaagtggaggtgctgctcaattattttacggagctgattggtagcagcagcgacagggagtcttctattgatcttgaggcccttgggatccaacaccatcttctggatcaccttgtcagctcatgttcggaagaagaagtttgggataccatcaagctgatgccctctgacaaagcgccggggcccgatggcttcacgagaagattttataaggtgtgttggccgatcattaagaaggacatcatggcggctgttgcagcagtttggaggaaggactttcggaattttc

SEQ ID NO: 185651 - DNA, 319 bp, Zea Mays
gatttttttgggtcccaatactgatgtaccacgtcaggtttataatgacggatgcagtgatgtcaaagaagatcgatttgcttccaaaccctggacaattgatattattgaggatgcctctgtcaaagaaagatcaaatttaaaagattggcaacttgattccaagttggagggcacagaaatagtggaatctggcctttacttcaataaggatattggtaacattttacatagtggatctattggtgaaataactccatctggttctggtttatcaaaagattcatctgtggactatagaggggaggttttagatggc

SEQ ID NO: 185652 - DNA, 1148 bp, Zea Mays
tttgacaagatactgatatactcaaagcaggttcgttatttggttttattgattctgttttcagttgttgtaactcatttgagcttcaaattttatttctacaacttggttccaggttgggtacactccagattatctcttcctcctccagaccatcttgcgtacagatccacaggtgattgattgtttaaacataatcggtcatttgtaagacacatattcgattgtggcttcattaaccttatgagtccttttctcactgtctataataccagggagctgtgaactttgctcttatgatgtcacaaatggagggaggctgcccagtagattataatacaataactgatcttttccttcaggtatgcttatattcataatcataggtaactgtcttgttgtctatttacattccttggttttatgagtccttatggatttttgctttatgcatctgttaacagagaaatatgatacgggaggcaacagcttttctgttggatgttctgaaaccaaacttgccagagcatgcttttcttcaaaccaaggttttcatcttcaccgtttgaacacgaatggttgcgcttggatgtgtacattatccttttctcagcagtttctgtctatgaattgtaggttttggagataaacttagtgacttacccgaatgttgctgatgccattcttgctaatggtatgttcagtcattatgatcgccctcgtattgctcagctgtgtgaaaaggctgggttgtacttgcgagccctccaggtcagtaccttcacattggtgcagctgatatctctgcttcgtattcctgtttaactaaccttacattttgtaatgcagcattactcagagttgcctgatatcaagcgtgccattgtaaatacccatgtcattgaaccacaggtttgtcgacttcagttattttcagatatctttttttttatgttttgcccattaacaacttccttggacaggcacttgttgagttctttggcacattgtcaagagagtgggctttggaatgcatgaaagaccttctactggttaatctgaggggaaatcttcagattgttgtgcaggtattcctgttcagtttcttatgccccctccccctctgtaccaacccattggcatttctt

SEQ ID NO: 185653 - DNA, 425 bp, Zea Mays
cgcaagggtactgaaaacagggtggccgatgctctctctcggcgagctactactgagctcaatgctgtttctgtggacgttccctagtggttaaccgaagtgcaagacagttacttgaatgaccctgctgctcaaaagttgttgtctcagttatcggtgggtccctcttcgggttctgactttgtcctcaaggatggcctgctgcgttacaaagggcacatctggattggtgctaatatacaactgcggcacaagttagtctcagccatgcacaattcagcaatgggtggtcactctagagtaccagctacctacaaccgacttaaggacttattcgcttggaaagggatgaaggcctacgtatctgagtttgtccagcagtgccaagtctgcctccaagcaaaaccagaccgagcggcgtacct

SEQ ID NO: 185654 - DNA, 648 bp, Zea Mays
tttggaagcactatgtgttgtgaggggaataattcaaaatctgagatgcaaagtatctgaaaaagttctaaatgcactgaacccattacttgcaattgttggattggaactgcgactatgtatctgtgatatttatgctgggttgtcattgaatgatccttcgatgttgtttctggtaattatcactctatttgtgatgtcaattatgtaaacttcgccatgttgcctgttcctgtttcacagtttcttgtggcaatttgcatttttaacaggctgggttaataggagatctgaatgcagtttcagcttcagaacttggtgaactagattatgacacaagacttaacacctatgataaggttaggccacaattgtttcttggcttgacagaagagcatgtgggcgccatattatctcattgtgtgtatgatatgtcatctgaagaattaattttgcggcaaagtgcatctagggctctgcagtcgttcctggacttttccgcctcagttatgaataatgatgtgtccaaatactctattgatgataaatttagagagaataataccagaagcatttgcacgatgggctgtattcagaagatattggaaaaaacttatctgcacaatatgggagtagcaatgactaaag

SEQ ID NO: 185655 - DNA, 308 bp, Zea Mays
ctgaggcttcaccgcatccccgccgcctcccaagcactcctgagttcgcactcaaggtgagcaacctccctatgcacttaattcatccgttactgccatagtgtccacgcaattcttcgctggagttgatccgcaccaccgtaagttcgtctcgctgtgttccatgccctctggtgcctccatgccgatattgcgccaggactgagttcgccaggtcaccttgatcgcgcctgagcttttccccgaacccctagagccctgccatgctcgttcctctcgtctctggcgatctcaccgccaaggggcag

SEQ ID NO: 185656 - DNA, 356 bp, Zea Mays
aaagaaaaaatttcatagccaaaattcaagacggggagcagctagtgaccagtcatagcgataaggcagaggtgcttcggtccttctattcagatctaattggtacagcgcagcaaaggtccagaactgtcaaccttgacaccttaggactgcagcacattgaccttcaggggctcgagcagccaatctcggaggaggaggtgtggaataccatcaaacagcttcctccggacaaagccccggggcctgatgggttcacaggtcgtttctataaggcctgctggtcaatcatcaaaaaagacattatggctgctatcctggctgtctggaacaaggacttctggaacttcagatac

SEQ ID NO: 185657 - DNA, 281 bp, Zea Mays
cttgcagaagttcgcgatggaaaggtcacgttggacgatggtgcggagtttggcgtcgaggatgagagcgcgggcctctcgatttcgagggattggctctcgatggcgagccaggtgtcgtgagcggtgatgccgcagtccccgtggcgtctaacaatgtcttggaggtcgtcagagagagtgttgtagagccaggagcggacggcgcagggcgagtccgggacaggaaggccccggaggacgtggtcctactaagagtacttgccgagggtgagtaggaa

SEQ ID NO: 185658 - DNA, 591 bp, Zea Mays
ccgctgcgccccagctcgcgcggaggctgtccgcctccgctgtatctacctcgccctctcccgtgccctatggtgagaacagaactgcttctgcttgaacctatctgtagcggaaatggttgtgaagtgtgctattttacttgcaattgcggaagcaaatggacgcaatgtgttgaatcacttcgaactgcatagctggtttggaatgaaaatgatggttagtctatggtggggtttccttttgtgtactgttttaggtctcatgattgatattttttcgctcataaatcacacaatttctctgtgatttttgctcaaagtgttgacatgaggctgctggagctgataataatatgctatttgaaaagcaaccatcattcaaaccgcatccttttgctatttgaaaaaaatcaaggtcatatgcttatcaaatgtgtgacctctttcttctgacataatcagatacagatgacgtacatgagtatgccacaaagctcggatttgaaaaggtctctgaacagactatagatgagtgcaaatcaattgctgttctttacaagcacaagaagacgggtgctgaagtaatgtctg

SEQ ID NO: 185659 - DNA, 623 bp, Zea Mays
gaaagcctcaagcagttccaggagcagaacctccctggattcttgctctctctctcaagtgagttggccaatgaagagaaacctgaggagagccgcaggttagctggcttgattcttaagaatgcactggatgcaaaggagcagcacaggaagaatgagcttttccagagatggctggcactggatgctggtgccaaagcacaaattaaaggattgctgctgcaaactctcacatctcctgttgcaagtgccagatccactgcttcccaagttattgccaaggttgccggtattgagattccgcagaagcaatggccagaacttataggatcattgcttgcaaacatacatcaggtccagccaaatgtcaagcaagcgacgcttgagacacttggctatttatgtgaggaagtttctccagatgctgttgaccaagaccaagtcaataaaatacttacagctgttgttcagggtatgaatgcttctgaggcaaactctgatgtcaggcttgcagctacacgggcattgtataatgctttgggctttgctcaggttaatttctcgaatgacatggagcgtgactatatcatgagagtagtttgtgaagcgacacagtctccaga

SEQ ID NO: 185660 - DNA, 1103 bp, Zea Mays
ccatggatccaagacctcatttatagctaaagtaagttccctgctcttgaaatatttcatgactagttcatgtaatttgccacgtgtataacccgcgaactgggggtgtaactcatggaagctacttgatccttggttcacaccaaaattatattggtctgggtgcgtaaaagcagcaattaagtttgagcttggtgctgcactgggaacagagcttccaggttttaaatccttaagaactggaaaccatgtgttatcgatcttacggaacacgctactttgttcaatgatagtgtcctttttaactaattcttgcaattcggaataagaaaatgggccttgatcatgcccagtgccatcaaggtagtaccagtcaccccgattaactgacagctcatcaacagtgcatacatggtccttcggaatgtttggaacagacttggacttgtgaaaactttgtgaatcatggtcatggtgcttcctgaaatgcgacgaaccatcatggatagaacttctctcagccccaattgaatgggagcgtgaagatctcgacggtggtcgatcagttcctctgggttttgtacggggttcgacagatgattggtctttaataacatgataatttatactaaccacttgaagcatcaccttcacttcgctaggaggctgtctggtctgacctggcctcccaggcacaacagtgtttttagtggtgtcattaacaccgtcaatatcttcttctgtcgatgagaatgcccacaatggcaagtcatgctttttaccacgtacagggtagtacaactcatccttgcagggccggcgtggatcctcatagctaccttttggtatctgacatagaggatacccttcattgagaacaagttttttcctgaatggagtatcttggcccaattcgtcatttctcctccagtcaccacctttgcaagaccatctcccagaaaaccattcgctagactcgacataatgatggaagttgtccacagaaacaaggccataagcatctgttgttctattttctaagaattctgtgcctccaatgatttcatcgtctccttcgatgtgcacatggaacctagtaaaat

SEQ ID NO: 185661 - DNA, 773 bp, Zea Mays
aagtagccatggatttgtataggtcgagagtggagctcgggatcaacccaaacaaagatgtctaccataatctgatcaaggcactgtgccatggtggggagacagaggaagcatgcctggtatttgaggaaactatggaaggagggtacttcccggggcgtcggacatttaccatgctttcaaacgtgctgtgtcaggaggggaagctggacagggtgcgggagctgctaaatagggcagtcaagcaggaagcctgggcagttgactctgttttggccaagtacctcgcggcactatgcaagagtgggaacatggaggcggcatgcgaactgcctcatgtagcaagcagcaagagccatgtgggcttatatcgctatgagtcaacatacaagaacctgattcgagcattggtattgactaagagggtggacgcgctgccaaggcttatactgcaaatgcaagaaatggggcacatcccaagccggagcctctatgtgtcagttgtctgttctttgtgtgaaatgaataggtatgccgaggttcttgatctgttagacaaccagttaatgcggaatgagatccatcccgttgtgtgctacaaccacttcatttctggtgctggtcatgctaagagggcagacatggccaaggcgatatatgaccgaatggaggcttcagggattgaaccatcaataacaagcaacgtgcttcttctcattagttatgtaaggagcaaaaatctcgggggtgcacttaatttttttaacctcgtt

SEQ ID NO: 185662 - DNA, 315 bp, Zea Mays
ctcagttgtgcatgagttcagcgtatcacccccaatctgatggtcagacggaacgggtgaatcaatgcattgagacgtatttgcgatgttttgtgcacgcatgtccaaacaaatggttttagtggcttccagtggcggaattctggtacaacactaactttcactccgccatagccagatcacctttcgaagtgttatatggacatacacctagacattttggactccagatcggttcagcagttgcagcccctgatttggcgacatggctccaagagagggaagtggtgtccaatatggtgaaacaacatttgt

SEQ ID NO: 185663 - DNA, 291 bp, Zea Mays
tccaactttttagcaactgtatggtggaaaaaagttgtcttacaaccttaacctatgtttggacagttcactcacgcaatttggctaaattttccatagtctttattttattttgagaaacgatgtggtatatttttgtgtggtgttttacttgagtggacataaacaccatctaaggatgccatgaatagacggaattattggaaaccaggtatcacaaaaggtcattagctagcccaataacgtcttcatccactagttgcactctaataccctctcgtgcgaatacaa

SEQ ID NO: 185664 - DNA, 278 bp, Zea Mays
aaatgaatcagatcatactgacgaggctataccaatagatctgcaagataatagctgtacaagagcaagtcggcgaactgaggttgctgtgcccttgcggcggttgagaaatcttgactcatcgtgcgagccatctgaaaagaagtgcaaatttgttgtcaagttaggtgcctcggcagatattcggcggccagaggatatagcatctaactctagctcagtttcagatccgatggcttcaaagacttgtcctgtgtgcaaagtatttgcttccactt

SEQ ID NO: 185665 - DNA, 730 bp, Zea Mays
ctcaagagaaaagaagcaaatcgaaatcttcaaggcagaaacacttggttattgacgacaaagaggctaaaaaagggaaaaaacatgaccacaaaattgacgtggcagatgagaggtccaattttctaggttatgaagtgtatgctggaaagctgattcttcaaaagaaaaatagaagtgcgagtgataataatcagttaccgtcaaacggaaaagctgatgcaattgatgctagactcacaagtaaagctctgatctggggcagctctgtactcctactggaggatgttgtctctgtaagtcagataataacatgtgtctgtattattaattagatctttttcatcactttactgatattttgtctctgcttatattttggcaggtatcatataattctggagtcaaacattttacattgcatgcatactcaactaaaaagtctttatttaaaaagacatgcagagttcagaaagatttctgctttatagcctctacccttgacgaggccattttgtgggtgacatgctttgctgaacaaagtatatatgttaacttactacctcgccttggagcatctagtatcaatcaagactcagaaaatcccctcagtgagtctttatttgaccagccaccgattaaatgcaaatctccgcaaagagtacttgttatattgaaccctcgatctggacatggtagatcaagtaaagttttccatgagaaagctgaa

SEQ ID NO: 185666 - DNA, 415 bp, Zea Mays
tcaatgcaatgaacaaaagctatgggctggagcctgaaaaggagcactacggttgtgttgttgatttgttagccagagctggtagaatacatgaggctgaggagttgattggaagaattgctgctgaggaaagagatggtgtggtttggacatccttgcttagggcatgtgctgctcgaggggcagaggaaactggaaagatagctgcagagaggatgatggaggcagagccatggggttcaggagcacatgtggtgatggccaacctctatgcaagcaaggggctgtggtgtgaggcagcacaggaacgccatttgatgaagcagaaaggtgttctaaaaggtgcagggtggtcatcagtcgaagttggaggggacgacaggggggttggagtgtttgtttcaggagatcggac

SEQ ID NO: 185667 - DNA, 1422 bp, Zea Mays
ctgaactggagactgagaaccgtaagatgaaactagagcttgaagaataccgtgctgaagctgcacacttgaagaaccagcaggcaacaattaggcgacttgaagagcgtaatcgccaactggaacagcaggtcttttctgtacttctgtcaccatttagttatatgctctactattaatttatcgtacatgtctttgttttttttacttttatatgacattggtgttacaaataagagtttcttcttgtcctatttctttgtcaatcataagagttgacattatccatataataattccaattaaaatactagatctctacccattttaatgtgttgtaattttttttgagcatcacattattatctacattttattttgtagaaatatgtttctatgtgagtgttgtctaaatgtagtatagagggtagaagattcctttatctaccaatagcaagcatgcagtcaggagtcaaaatttttataaacaacaggggtccaaacttatataaaaaagcgttccagataaattataataaccaattcgatctctcaagctttgtaccttttcgctttattaccatttgtatcattttagatggaggagaaagtaagggagatggttgaaatgaagcagcgaagcatggctgaggatagtcagaaaactctagaagccctgaaagataggtatgcaaaatcatctgtagtactacctttggatcaaaccaggtgctgttttagagttggccacaagaactaagaagttcaatcatacggccattttactctcattttattattacccagttgtgtcttctaattggtgcgtgcatgactgcttacgtgcaacagcacgggaaacgagatatgcatgtggataatttagttaaattatgaaattaagtaggggtaagattggaaatttggctaaatttccctagaaactgtagaatgacatgtatttcgaaggtagtagaagaggctatactacatctatgaaaaaaatcgctctgttagagtgttagtctgttatcacctgaactgccatatagaattcttgcctgacatcaaaggctaattcatgtaccatgactcatactgtatattttgaccttcggcttgccatacttgtagggaacggtcattgcaggaccaactaaggcaagctacagaaagtgtaaagaatatgcaaaagctacatgaatcggcgcaaagccaattgtttgagcttcgcactcaatcaggtctctttccaaccagtgtgatcatgatcatctttgtgacttatattttaaaggttatagtgaattgaagcatttcatttttttccccagaggaggatcgagctgcaaaggaggttgaagtcagccttctgatggatgaagttgaaagggctcaagcacgattagtcagtcttgagag

SEQ ID NO: 185668 - DNA, 497 bp, Zea Mays
aaccatcaacttcaaagtcatggatcatatgggattctggaagctttgatgcagatgaatcggagtggcattgccccttacaagcctcaggtgcacttgatttattctctgcagtcacattttcaggggttgcacatgcagaatgtccagctgctactttcctctcctgtgaaatcaagttacaggctcccaaaccaggctcttggatttcattgctaacacaaactctagaatcatactttgagttcgacgttagaagctctggctgtagagaatccaagtgatagttcccattctgaaatccaacaccacatccaaataccaccccgtttgctttcttcgtgtcctgtttatcagtcagtgagccaagaatcccagttacaaactcgaggtttgcatctgattcaacaagcctcggttcaatcaacctggagtcgtgatgtccctccacagcttcagaactgcccggcttcttctccgttttgggtggatcacac

SEQ ID NO: 185669 - DNA, 2421 bp, Zea Mays
gtttgctagaatgctaacaaattaaattggttttgccatatgcaatacacatcataacggcctccctggtctaaatcgaaggtggcaggtcggatacatgaaattggctatttggccacggaaacgtgtgctatagctcgtgggaggccaaaacacctttaaggtgctctggggaccaaaacgcgggtggtggaacgcgtacataaaaatggtcgcacgaccatgaaaacgtgtgttgtagtttacgggaggccataaatagccttaccagtctgagtggccaaatcatgggtggcggacgggaggcatgaaatcgctgtccgacaacgaaaacatgtgtcacgggaggccaaaaatagccttacgggcctccggagactaaaacgtgcactatggtttggacactaaaattctactatgtgtgcaaacttacgggcctccgggtactaaaacgtgtactatggtttggacactaaaattctactatgtctgcaagcttactatggtttggagactcaaacttcattttactatggtttggagactaaaaccttttagtgttggtgtttaaggttagggtttagggataggatttggggtctaggttaccataaaaacgtgtgctatagctcacttgtgtcaaaaaatgtcgtaacggcctccccggtctaaaacataggtggcaggtcggatacatgaaattggctctttggccaaggaaacatgtgctacagctcgtgggaggccaagaacaactttaaggtgctctgggaccaaaacgcgggtggtgcaacacgtacttaaaaatggtcgctcgaccatgaaaacgtgtgctatagcttacgtgaggccataaacaaccttagcaatcttagtggccaaatcatgggtggcggacgggaggcatgaaatcgttgtttgacgatgaaaacatgtgtcacgggaggccaaaaatagccttactggcctccggggaccaaaatgtgtactatggtttggacactaaaattctactatgtcagcaaagttgatatggttgggagactcaaatttcagtttaccatggtttcgacactaaactcctttagtgtcgatgtttaagtttagggtttagggataggatttagggtctaggtttccataaaatcgtgtgctatagctcacgggtggcaaaaaaatgccataacgacctccccggtctaaaccgaaggtggcaagtcagatacataaaattggctgtttggccacggtaatgtgtgttacaactcgcgggaggccaagaaccgctttaaggtgctccggggacaaaaacacgtgtggcggaacgcgaacataaaaatggtcgctgggccatgaaaacgtgtgctatagctcacgggaggccaaaacagccttaccagtctcaatggtcaaatcatgggtggcggatgggaggcacgaaatcgctgttcgacgaaaaaaacatgtgtcatgggaggccctaaaacctaaaccctacagctcgtgggaggccaagaacaactttaaggtgctctggggaccaaaacgcgggtggtggaacacgtacttaaaaatggtcgctcgaccatgaaaacgtgtgatatagcttacgggaggccataaacagtcttagcagtctcagtgcgcaaatcatgggtggcggacgggaggcatgaaatcgttgtttgacgatgaaaacatgtgtcacgggaggccaaaaatagccttaccggcctccggggaccaaaatgtgtactatggtttggacactaaaattctactatgtcagcaaagttgatatggttaggagactcaaatttcattttactatggtttcgacactaaaatcctttagtgtcgatgtttaggtttagggtttagggataggatttagggtcttggtttccataaaatcgtgtgctatagctcacgggtggcaaaaaatgccataacagcctccccggtctaaaacgaaggtggctggtcggatacataaaattggttgtttggccgcagaaatgtgtgatatagctcgcgggaggccaagaaccgctttaaggtgctccggggacaaaaccacgtgtggcggaacgcggacataaaaatggtcgctgggccatgaaaacgtgtgctatagctcacgggaggccaaaacagccttaccagtcttaatggtcaaatcatgggtggcggacgggaggcacgaaatcgctgttcgatgacaaaagcatgtgtcacgggaggccctaaaacctaaaccctaaacccttaaccctacagcttgtgggaagccaagaacaactttaaggtgctctagggaccaaaacgcgggtggtggaacacgtacttaaaaatggtcgctcgaccatgaaaacgtgtgctatagcttacgggaggccataaacagccttagcagtctca

SEQ ID NO: 185670 - DNA, 811 bp, Zea Mays
cgaaggttggcttgttgttggagtttgcggaaactacttttctccatcaaactagggtgtagtctgaattgttcgggcttcccttgcatccttgttgaaaaccctcatgatctctctgtgtttctgttgttcttgtcaacgctgtcgaaagtcattgtgtgctctaatatattcatccatcttctgaaacagcttcttcaaggtttgcggaggctttcaggtgaagtattatgagcatgggtcaactttgagctccttgattgttgacttaatgacaattttaactagtactccttgtgcatgtactttgacttagacaaaccttcacatataactttgaagggattcatctacttcttgaaaacatggaacaatgcatgtgccatgactaggtttgtttgaaagccttggaaacttgcaatcgattgtttcttaagttgttcccatgtggttatcgatctggacaaagggatgagtactaggtttgagctatgccttttgttgacggagggatgagtaccaggtttgagctatgccttttgcggccataatatgatttggctaacattgttgtgtttctgccgaattatgcaatggttgcttcgtaactcatgaggaattgctttgatttcgactgcccatcattcagaggaagcatggacagtttatatgcagcttgccatggggctacctgcaaatcccttgagaacgaagatgcactatcatagatgaaattacatttttacctttccctatttcatagtcaccctttgcaattaagggagtacaataatgtcattttactgcgtag

SEQ ID NO: 185671 - DNA, 428 bp, Zea Mays
gtctcctcagtggcagtatatatctgagccagtacaaagaagccgtagaaagataaataacatggaacaacaattgaaaaacacagacaaacagttgaaaataactactgaagaaactgatgaagccagagtaaagcgtagaagaattggtgaaatcatggattcatctgcaatagactcacctggcaaaaacaaggacaccatattgccaggaaacaataccccacctagttctcatcaaatatcagttgaagatacatggcaggaactaggtattacatctgtaactgaattgatgtgttttagtttatatgtggatactgcattttgctaacacagttcattatgtagagcgaagcaatcttcatgccacacaaaaaggtctacacgttcaactcaagccagagatttcgaagttatataagttg

SEQ ID NO: 185672 - DNA, 343 bp, Zea Mays
tcacgaacgattgtgcatttatccggatcgcctaacccacggacgttccacgatagcacattacaacttttacaaactagactcatgaccaaacaaacagaacaccaaaggagcacacgacgacaacggtagaggggcacacacaacactgacctaaggagcacaaagataggcacgacctgacagcagacttagagagacaacaggttgacattacagaccatagaccgacaacagatcgactacagttgtgatgacagagagccccgccactgacagccaaggggagagaagcgatcattccgccataggaggcaccactccaatggagtttgcggcgttg

SEQ ID NO: 185673 - DNA, 699 bp, Zea Mays
tccatgaagaaggaatggttgaagggtcgtagcaccacccagaacaccgaaaaacatcaaggcttcttgattccagagtatcagcatgcacctcctgaacccaagcaaaagggttaagaatctggttgaccgtagaaagctcccatgcatgcagcggaatgccactaagctcaaaatcaaccggagtgataaggttggatcctaaagaaccaagtagcttggaccatctcttacacagcaaagaaaaggagcctgatctgataatgtgcctcctatccgttagaaaaatagcctggtgctcatagggtagcataagcaagaactcagatggggaggactgccttagaattaacgaaacagccccaacttcaagcttcagagcgatctcctccaaaatgtcagcagtggtcacaggaagatcgctaataaccgaaatagagaccgcattccccaggtcatctaccgccttggaaaaatgattgttccatccaataatacatgatccatgcttaacaccagaatactgatccaaaagggtctcgtcacctcccggttgatcaatgtgatcggggccaggatcagaaccaccccggatcgaggaccgacgcttgcgatgacgcctacgacgatgacggggagggagggtccctagcaagcctggatcgtccatatgagacggctccaccggagacgaagaaa

SEQ ID NO: 185674 - DNA, 1666 bp, Zea Mays
ttctggttcatgggtttggggcaaacaggtgtgtgccatacactgataaacccgtgtttcagtgtttctgtaccatttctgtctccaaatctgctagcaactgcatttcttgatagcaaagttttccttagctaccggtgcactttccgttggactgctaaggtacacaaatgcatctttttcaaaaacaacaacaacaacaacaaccaggtatgcactatgcagaaatgtagaattggccagcgaaagtagttcgttaaggtctcggttggatgcatgtatccacctcaaaactgcatgtgttggagttgattagagtggaacttagtttaatttacacttcaattcacttcgacacgtgggttgaggtaatcacacggccatcaaaacaagccctaacttagtaggtacttgagaactagttcatttgataaaccagctgttgagctttaagagaatatctgtttacctattacatcgaacattttctgattattttgcttcaaagctactttgaacccatatgagactaaagaaacgctaggcccttactaaccacacatatgtctctcttaaatttattagctacctttcttgcagtgatcgacatattccttttttttcagtgaccattggcggaaaaatatgtctgttctagccatggcacacagggtatatgctatagatctaattggttatggctattctgataagcctaacccacgtgagatcgaagagaacttttatacttttgagacatggggagaacagctgaattcattttgtgctgaagttgtccagagtgaagttttcttcatatgcaattcaattggaggtatgccagatgcacacatgatttgacaactattgccaatgctacacagttatgctgttactcagaatagtgttcgactatttatttattattacaagggacctatatggctagttaaatatacaccctctttatattttcgatttcaaaaggttataaacaacatcaagtgattatattagaatcatatttaggacccaccagtcactatggtgaggtccagatctttttttgtttgtcagaacttctggcatgattctctttttattgcacctttactgtcattatctttagtcatatattacattattcatttgataatacatttgaggtactgatgtggcagacttagcatagcaacgctggttacttggtacaatctgttgaaagacacatttccaatattgaaatgctggatgccccagcttggtttttttattttatttgttactgaaatgagtaaaatcatgaatctgattaataaggctgatgtcgttattatttgatatgatttgagtatcttaaacctttgtgttgttcttactatgctgtaggagttgttggtctgcaggcagctgttatggaacctaaaacatgtaagggaattgttttattggatatttcactaaggatgcttcatatcaaaaagcagccatggtttggaaagcctttcatcaaatcttttcaaagtctcctaaggtaacttgtattttgtactcccatcacaattttttggtgctaggtagttgcttgttataatgcatttactggtttctaggaacactattgttgggaagctattttttaatgctgttgctacaccagaatctg

SEQ ID NO: 185675 - DNA, 303 bp, Zea Mays
atggtcacttggatgacaacaagcacagttcctgttggaactgcgacttctgaggtggtatgtgtggtgaggggaaggttgaggctcaggaccacggagcttgggcaccgtggctgctagctggaagagtcgaagggacgaggaactgttcacgcagcgtggcgaacagtagttgtaggtgaatagtgacgcgaatgaacagtaccttggatgaaccgtatgcggcgagcagtatatgggtttggggaagcacgggcaagatacttgcctgcttactctttcattgatcgaagggtacattag

SEQ ID NO: 185676 - DNA, 618 bp, Zea Mays
aaaagcccttcactaaacaatttgtatgtcaggaaattttagtgttgtcgaacataattttatatttttctaattactgaaactgtgtatttattttatctatagtaattttttatttttaccattttgtagagatttttcttacaaccagctctctggtagctttccttcttgggctacccagaataatttgcaattgtaagttgaaagtacaaaaatttccttgaagggcaaaaatatatatatgctcaaggttttatcactcggttgtttgacaagttgattttttttaaaaggaacttggtggccaacaacttcattcttggtagcagcaacaacaggtacttttaaatatatagccttccgagagttgtattttttaattgagagcattaaccttcttattttcttgaaatgagcagcattctgccttcaggcctaaactgtctccaacaagatattccttgtttccgtggctctccggaatgtatgtttctgactctttaccaccttcagcagttcacatgatctcaggggatgcaatatggttaatatttatagttcttcattgcagattcctccattgccgtagactgtggaagtaacaaatcatttagg

SEQ ID NO: 185677 - DNA, 544 bp, Zea Mays
caacaccagcaggtaacggaacaacatcccatgtacatgtgcgatgaagagcatttaattcatcagtcatagcaagctgccactcaggtataccagaagcctctttataagatgatggttcagcaatgactgcaccagcacggggaaacccataatgttctggagctgcaatattgccacgatcacgaagatgatacccctgattcaaaacaacatgagagtcatcattgttagtacaagtatcagtaacaggatcatcatcaggactggccgtgggagtagagcgaggacgacgaatgtaagtctgagtgacaggtggtttggaagcgtaagactgagatggtgtggaagtggaaggtggtgtgatgggaataagaacatctggggtagaaacaataggtggtgatactgatgaagtttcagaaatgggaggaaggctcatgaaggaggtagactctgtggaataaaaagaagaatgagtggaagagttgtaaaagaagggtcggttttcattaaagctcacatctcgagaaatacgcatgcg

SEQ ID NO: 185678 - DNA, 574 bp, Zea Mays
cacgcagtccctcgccagctccttctccacgatgacgttggccccgcccacctcggtctctgattgggtggcggattccagtgcctcctaccacaccaccccggacgcatgtattctgtcttccacctcccccacccacccctctcttccctcttccatcattgtcggaaacgggtccgcccttcccgtcacctcagtaggtgacgcggtccttcccggtcctttccgtttaaccaacgtccttgttgccccccacatcattcaaaatcttctttccgtccgtcagttcactactaacaactcttgttccatggagtttgacccgtttggtctttctgtgaaggatcttgccaccaggacccttctcgctcggtgtgacagcctcgggcccctctacacgcttcgcctgcctgctcccactacttcgacctctgccccacatgttcttgcagcggtcgcctcttctgcgatttggcatcgtcgtctcggccaccccgggtgtgatgtgatgtccaagctctccagtagtacttctgtttctggttgtaggggatcttttgagcacctctgtcat

SEQ ID NO: 185679 - DNA, 325 bp, Zea Mays
caagagcagacccctgatttgaagtggtggaacctgcagcaatctcgcattacaatctccctatcctcaatttcagagaccattttcatcactgtgtggccgtccccggacacccgcaggttcttgaaaatgtgaaggggtgccgctggtggtgtagctatcaaaccaaatgcgagggctaggcgctcactgtgcattgccagcatagcttctttctggtcttctgccacatcatgaggcacaaagcttgtatcaggacaataaccttcttgctttaacttagctgtcattgccctgagctttgcatatatttgttctgataaag

SEQ ID NO: 185680 - DNA, 285 bp, Zea Mays
tgctggatcggttctgtgtgcttggcgcaagttgtcgatgaaggagaactgaggtgccgccatcgtgaatgctgaagcctcttccatgtcgcagcaggagggcatcggcgatgatgttggtgctgcccggtttgtactgaaccttgaagtcgaatcccagtagcttcccacccaatgatgttgagggatggttgccaggcgttggtcgaggaggaacttgaggctgtagtggtcggtgcggacgcagaaatgcctgccacacaggtatggcctccaatggcgaac

SEQ ID NO: 185681 - DNA, 640 bp, Zea Mays
acataattctatagagcaacccactaaaacagaagctcttaatttgcaccatgttctcctccggaatccaaattgctatattgttaaagatctaagtgcagattcatctatccagaatgaccaatcttctgatcaattaaatcaccgcaagagtctttctggatgggatgtacttcgcactttgtcaagaccaagtaactattgtatgtctactccccattttgaaaggatatggtgggataaaggaaacgataccaagaagccattttctatatggagaccgttacctcgttttggttttgcttcggttggtgactgtataactgaagggtaacaatttcattatgtacacatacaaatgctaaatactgttctttgtgatatgtttttacttggccctttgcatatttcaggtttgaaccacccactcttggcattcttttcaagtgtgacacagttgtttctgagaagcctgtacagtttactaaagtgacacaaattgacagaaaaggccttgaggaaatattcttctggtatccagtgccacctcccggttacgcttctcttggatgtatcgtaacaaaaacagatgaaatgccaagcaaggattccatttgctgccctaaactgagtctagtga

SEQ ID NO: 185682 - DNA, 284 bp, Zea Mays
ttcttatttgctttataatttgtattggatggttttgaattacttggatttatcatgacaatacattgttgtagcactcaaaacactgctagatttatcttctagcctgtggtcaagtcgtcacagcgagtggctctatcgttcatctactgcttgcccagtgcccagttgacacccgtccttcctgcgttgctattgtcgatcgacgaattcttcatgagatcttctatctggtcgcaaggtggaacttttggttccgatgctaccgcaacgtcagcatcgca

SEQ ID NO: 185683 - DNA, 287 bp, Zea Mays
ctagagacttgaattattctaacacttcaccgttgattagagttaaattagtcaaattaggaccatcaagttgactcataaattttatccgagtcatttcgtgctctagatttaccatactcaattaaccacacgctctccacgatgatcaacatcgaagcgcttttcacccaataatttgcattttaacttagacctcccatgagcactactacttttcatccgcgaccataaccatacacatttagaccacaacaagcaatttaccgtgattacgcgcttgacca

SEQ ID NO: 185684 - DNA, 1029 bp, Zea Mays
ggctcattccatacaggagctggcacgaaagaagtttcaggaactgagggatgagggcataccaacagaaaacccgattaagattggacagaaaattagaccaaatttctgcactggagcactggttaagaaacctgttttgaggtatccagatgatgatatagatttgtcccacaaagagaaagttaagagacccaattcaaataatgtggatgatgacatgagcttcaaaaatcaagttaaaaaaaccatgtccaagaattcacaggatcgaagttgcttattacagaaagagcgaattaagaaacccattcccaggaattcagaggacaatttaagttcctcattccacaaagagcgacctaagaaactgatctccagacattcgaaggacgacccagactccccatctggcaaagagcaagttaggaaagtcatttcaaaaaatttagaaaatgatgaaagctccccgttccacaaacatcaagtcaagaagtccactccacagagttcaaaggacgacttcttatcccagaaaaaacacattaagccaattggcagaaatggagaagatccaggtttttcatcccgcaaaaagcccattgaggatccagttcgcacaaatgttgaagatgcaggcttctcatctacgaaaaggctgtctgagaagcccatcagtgtaaacggagaagaggatcgtgaccattgtcatcaggagtcatctaaggaaccgagttgcggagttgagcaggatggtcaaggttactcatgcgatgaagaggctgtgaaaaagccagtttgtatggatagccacgatgcccaaggttcagatatctctgctgccactattgcttctgtgggagatggctctaatggtttaagcatgtcacagcctaatgccactgaacctactggttgtcctcttaccaatggggttatagacaaagacatcagctctccactagatgaaataagatctgagaagactgacgatattttgggtactgtatttttttttctggcatttcc

SEQ ID NO: 185685 - DNA, 474 bp, Zea Mays
ctttctctctgccgtgaggtcctctcaaggcaaccatcatgtttgatttccaccgaatggcatccggcaatacagtgctgtcccttataaactttactatttgctcttccaagtcccagcgtttactcttgttaaaacctatcaacaatgatgttattgtaaccaaatcaacactgaagccttgctgctccatctccttcaccaactctacagcctctgcaacttggtccccaatcccctccttgcagaactccctcaccatgatactataagcaattccatccaacagttgccctttcctccttagctcgtaaaaaagccgacatgctgcttctgccctcccattattaaacagcccatctatcacagtgttgtgtgtgcttgctgagcattggattccatcagccaccattgtctcaaaaaaactgcatgcctcatcaagcttcttcactttaaacagcccatcaagaagtg

SEQ ID NO: 185686 - DNA, 325 bp, Zea Mays
gttcgacggaatttcccaccgggatgtcgtctcttggaactcgatggtgaaggcatacgaacgggcagggatggtggccgaggttgaagggatgttgcggtcgatggtcaccgagggcgcagtggcacccaatggggtgactctggcggttgtgctcacagcttgcagggacgctggcaatttggtgcttgggaggtgggtggaggagtgggtgaggtctgcggggatggaggtggactcgctcattgggtcagcacttgtggggatgtatgagaagtgtggagagatggcagaggcacggcgtgtgtttgatggcatcagacac

SEQ ID NO: 185687 - DNA, 388 bp, Zea Mays
caggcccctcttgtgttgaatgtattccccaggtactccattaagcaaaatttgggtagaggaggtcataagcagcccactaatcacatctctccatatggggctgaatcccaccttttccaatacttcaagtaagaatgaccaagacaccgaatcgaaggccttggatatgtccagcttgagaagaattctaggctgtttttgagcgtgcagtaatcttgcagtctgctgaactaacatgaaattgtcttggatgaatcggcccttgataaacgcactttggttcctagaaatcaacttgtccatataaccactaagtctgtttgccatgatcttcgtgattaactttgcgaagctgtggatcaagctaataggccgaaagtccttg

SEQ ID NO: 185688 - DNA, 609 bp, Zea Mays
aagaatttgaaaatcagaatatctcagagaagggcctatcagatgcttaccaaaatgtcttaaataggcttgcccagctacagaaacttgggaaggttggtaaaggtactgacaggaggaagcgattgaaaggaggactggagctggagccatgcatggacacagtgaataatggttggagaaaggacatgctgcttgaggatgtggtggatattgacgttggctatgatgcacctccaccatcgtttactgctggtttggagttgcagaagcagaggagagcacgtattgaagctgctaagcagcgaattgatgcaactaggaaggctcctgctgctccagctgcaaaagcaaataactcagaagacgttgtaagaaaaaaattgaccatgaagaatcgagggggaaagaagaaggatgatatcgatcatatccttcccagtgacaatatgacaggttgttcaggtgctaggaaaaagagacgaagaggttcctgtgacagtattgattgggaagattgcatcattgagctcctgctactgcatggtgcaaatgaagctgagattgaacaaggccagtacagaagattgttggagttgcatgtattca

SEQ ID NO: 185689 - DNA, 373 bp, Zea Mays
taaattgttaaacgatgatgccttaataggaaaaaacatatgataatcagtcgcaaggccttacattctatgcatgccaacacatgtcaaaatggacatcatttttcttacctgtatttctgcctgtagttgttgaacttataggttcttcagaccataacactgagtaaatatgttgttcaacttgtgtaagtgtttgtccagtttgaggatacctgttgaggatacctgcagtgtctggctaaagcaagactaatgttgcattcatttgtgtattcaccgcttactgacacgtgggggaaattgagctccaagcctccaactgagatccctcaatgcaacaaacaaaagttacgggctggaacctgaaaag

SEQ ID NO: 185690 - DNA, 719 bp, Zea Mays
catcctccctgtattccatcatggttcaagtctgtgtgcccatatgcacttccaggagattgaatgaaaacagaatgcttattctggcagtgtgtttggctattcacagtacaagcatccttcggcggaaccgaactagttgacagcgacaagctatcatctggagagtacacactttccctttctggaacagaatacttattatactgaacagttattcctgaagaactaaccacactatgaccagcaggggagaaagcattggtctgatccacactagggttgttccttgtatgtccagtgccaaccagcgttgccttgctgcttgtatgtgatgcagcctgagtgaaatctttctgctgttttgaaagcacttcagtcaacagcaaagatctctcctcactctcaaatgtaagccatactctcagatcacgtgggaagtaacttgtccactttgatagttgcaaaagagtaaatggaccctgaacattcccagaaggatccttgtagtgccagactttctccggctccgtgtcatttgacattgttactccagaagatgaaaatgatccagcttcatacatagttctgtttgctgtgctgttctccaaacttcttgctcctgatccacatattgtactttctgttgacaagttttttggatggtggctacaatcagaaactttttgaggatggttctgcatagtgctaagatatct

SEQ ID NO: 185691 - DNA, 467 bp, Zea Mays
cggagctggtgcggattctggtgaaagcaaaggatcgtttctgcaagactctgaagctggagaaaaggatgtctaccttagccactcctgcatccacgacgagatactacatcaacggcgacgagctgggaggaaggagtactctgtcatgccacaagtgtaccatgagtctcgggaggatgcggagcgtgtaagaggacgacacttgttgggcatgtcatcttggcgtgctccgcacgagaatgccaggaagccaatacgaatatacctcaattatgatgccgtcgggcattcgcccgaccgtgattgtaaaaatgttggcgacatcgtgaaggtcagtttgtcacattagcttttctcattgcaccaccagctattttatctgtgtagtagaattgaaactgttgtttctatttggtagcttggcgaacctcctgtatcatcagcaccaggaacacctatatgcg

SEQ ID NO: 185692 - DNA, 511 bp, Zea Mays
cgtcttggcaacacctggacaaatttgcacaccggctcaccgaatcgctcatcggggccccttccctcactgtcatccgctccctgccgtggccaacagtgttcctgccgtttcttccaaaaaggtaccccctcaggtgttcgcattgttcttctccgcgtgaatcgatgatcgagtcggtggttggggcttggggtgtggaggtcggtgaccaccggtgggctccttgccaccgcggggttgatggcgtcgttcctgttcggcgttggggatcgcgggggtggaggacgagcgctgcgtcgtcagattttagtgtaacggctcggattaccccttgggataccgcttcggtgggattgatcacggtcgtccgattctaatcctgcgtgggttatgctttggcgccgttttaaaatcacgaccgtccgatcgggatcggacagtccgggttatgtaccggttcggttatgatgcctgtctaatctgagacgctaaaaccagatcgcacggc

SEQ ID NO: 185693 - DNA, 985 bp, Zea Mays
agaatgtctgcaaaatctcgtgaaggagctttacttggatttgagtgcctgtgtgagaagcttggcaaactatttgagccgtaagtgaggcatctcttcacttaactgttgctctgattccaattgattcgttatattttctttcttgtaggtatgtcattcaaatgcttccgttcctacttgtgtgtttctctgatcaagtcctagcagtgcgcgaagctgctgagtgtgctgctcgggcaatgatgtctcagctcactggtcctggtgtgaagcttgttcttccgtcacttcttaaggtatcaatatatcttatttgatgctatcaaatcataacatttattgtgtccaaatgttctggagaatacaagtgtccagttcatctagttatatattgaaatctgacaaccacttaacttctgctgaatatttaggccattggcaccacaaactactagtttgttttcattaacttgaaagagcagaacatcttgaggtccatctattacatttttttttaaaaaaatctacacattctggaaatttgttggcttattttcatttgtgctgttcgtacctttatgttagttgtttaaatgaagataaaataggtattcagatactttacaaaattttaagctagtcacattcactttcaaaaagtgtcatacggtgaatttacttagcttgtctaatacaagtttccttgaagcgcatatttggatgaagatcattaatgttggatagattagaataatgggccaaccctagagagggttggctatatagagttcatacacgggcctcatgggcctagccacatgggcctaatccatatactctaacaattaacatggtttttccagggtctagaagataaagcatggcgtactaagcaaagcagcgttcaacttcttggtgccatggcatattgtgctcctcagcagctatctcagtgtcttccaaagattgttccaaagttatc

SEQ ID NO: 185694 - DNA, 338 bp, Zea Mays
gtatgaaacacccgactaaatatgatcttgggaagcatgactagatcataccaaagttcctagtagaagcgacagcacagatccaatcttgagataagatgcatgcttctactcagctagacataccttaaatatgggttccacttttccatgaaaaactttgctagatctaccatgtccagatcgaggattcaagatgacaagtatctttggtggagaccgacatttaacataaggatcaaacatggcatcaaactgaatgagttcagaagaatgcttcttgctagatgccatggggtgaggcaacaggtttacgtaacattgctggtccgcaaaac

SEQ ID NO: 185695 - DNA, 712 bp, Zea Mays
atgaagcatttgtggatcttaattttttagaaactctggtctgcagcaaaatatgacgtggccatatcaacatcagcttcatctgggcttaattatattgtggttgaaacaataaattcggcgcaagcttgtattgagttgttacgtagaaggaaccgtgaggaaactgtaacttgtttaatcctggtaacactttttttttctgtgcttatttgttttcatttttttacctgttaatttcattttgtaattggaaccttatgttacaggaaaaacaaacacacctccttcacaaaattaaggagaaagtaaaaacacctgaaggagttccacgcctttttgatctagtaaaggttaaagatgagaagctgaagttagccttcttccatgtcttggggaatactgttgttgcaaatgatcttgatcaggttgatccttgatttgtttggtcttaaactttttcctactaacgtagttgcttgtagttgtaatttgtgctgtgattaatggtatctcagcacctgtctttgtcaggcttcacgaattgcatacactgcagcaaaggagttccgtcgggtagttaccctcggcggtgaattatttgagaagtctggtaccatgagtggtggcggtaaaagggtacaacgaggcatgatgggaacagccatccgagaaagcttttcagaagaggctattaaaaatgctgaaaatg

SEQ ID NO: 185696 - DNA, 417 bp, Zea Mays
cacaaggtatggtgtgagtggcaaggagctgctcaaagcaaacatagaccgggagatccttctcatgaagaggaactcttttgtctacatgttcagaaccttccaggtaactcacaagaccaaacggtgtgatcgattggcacgtaggaaaagaataggtgaaacatgactgactctttggtgctctggcattacagctgatgctcatgtcaatcattgcaatgactctcttcttccgtaccaagatgaagcatggcacggtgaatgacgggggtctctacatgggcgcactcttctttggtgtgcttatgatcatgttcaatggcttctctgagctggcactaactgtcttcaagctgcctgtattcttcaagcagagggatctccttttctttccagcatggtcctatactatac

SEQ ID NO: 185697 - DNA, 333 bp, Zea Mays
aaaagctctcactatctatgttattgagtctttctggtatgaacttgtcaagtttgaacacttcgggagtattcaggccttcaaactcaagtatcaacaggttgaactatttcttgtgtactgttgcatcccatgttgatctttttgataaagtgatactttcatactgctaacacagaatctactttctgcctaccttatgcattattgagtgagatggcctctcttttgtttcttctttcttttgacaagtacgtggagagtgctgaaccaatgttaaatgcgagtgtgcctaacatgagaaagaaggcagaacaaagaggtctagagaag

SEQ ID NO: 185698 - DNA, 987 bp, Zea Mays
gcacatgccaagcgccatgatgtaaatgggcgagtagcacactctctggagtaggcaacaaccgaccatcctaaatagtggcccttgtggtggggtcatcagagggtccccctaagctctacatggaacacgtcattgacgtgtgccttctggaagctaaaggctgtaggccacctgcccaacacgctccaactcctgaacggggcctgcatagcgaggaccaagcttacccttggactagggctctagtgagtgcgtcgggcaatggagacggcgaagccacacctagtcgcccaccctgaacttgagctcacgatgttggtcgtcataggaagttaggaacacttggtgtactgctgggcttggataagcgccgatgaacctccatgaggaaggcatcgctgtcacgtaggatggagcccaccacctccatttgagtagcctctgccatgtgtggtaaaaaaggggacatgggatggccaacaccgcctggaaggggatggcgcggagcgtcgtgtgggatgaggtattgcagcaatattctacccacggaagctagtcgacccatgcacgtagtcggttccttgtggcatagcggaggtacatgactatcatcttgttgatgacctctaattggccatgtggtcgcttgggatatagaagtcctcgcgcaggtactgaagggtcttttaggtcccttcgtggttagtggaatgggacagtgcagccacctggtggtccaaatcgtgctatgtcgacatgaagatgcgcttgacgtggaggacatcgtcggtggttaccagatcggggcaagaggtgccttgggggccagcatgtgagatgtcaataggtgccttaggggtcgatgcttgagggtgtctcgggggctaatgtttcgggtgcctcgagggctggggcaagaggtgccctaggggtcggcgcacgaggtgccttgggggccaacgtgcggggtgccctgggacctaa

SEQ ID NO: 185699 - DNA, 390 bp, Zea Mays
cgctatattgccatttggaagctgggcagtggtaaaacccagagctcaaactgtattctgtcgatggagcacccagcaatgtttgtggactgtaaatgttcagacaaaggagaaatacacattctggctatttctgagattggtgtctgctatttctggtctgcaaatgttgtggatgacctgcgtaataagaagcccaccaagatcatattatctgagtcatctgtgtcaacaactcatcaagcattatcgatatttgctgcaaaacttcaaggagtggatgggcctaattctgcccatgtcctactggcttatgggtctgtagtgaaaccatcttttgataaacttttggtttgttatggtacagatattagtttgggcatttctcaa

SEQ ID NO: 185700 - DNA, 638 bp, Zea Mays
attatatcatagtatggaatttgatgccatccacaataatcttgcttagttatatgatagattaggctatgagccatgattagatttagtcatataacaaaacaccaaattgttgtgcaggttcctcatgttatttcttctgatcaacacacatccctttactgacttgtatctttttttatgtagatgcaaggaaaaacttctgctcctttgctgtgggtataccagaagagagatctatttggctttatcaggccaaaaagctgatttcactgtgctcttccattcttgccaggtacgaccattcctgttgcaaggatggaagcatagtcgacatgactgctattgctatgagattggctgtctctctaactgattgcaaaacatggaaaagtttgaacagtgagaacactagcgctgcagatgcttctgtacagagtttgattgaatttattggtacgtgccagagtggcatgtataattgtgttaggcaatatataaagtctcttggtcctcatgttacttcagcgaagaaaagttctgcaactgcaacagatgatgattttcttattactgctagtgcagtcactttagccttgcgcccattcgattctaagaaagcaaagggcggtgttgat

SEQ ID NO: 185701 - DNA, 426 bp, Zea Mays
ataataggaagtaacaggtgcatacgattataatgaaaaatgcacaattgcacactcaatcttgtgcctaggatccaagtgggatcatccctattatccatcttttcatctgactaaatgctaaatctgattgtctttaagtcagcccaagataggcgagggaatttcaaaccgcacttggtccacaaagatcagatatgaggcatgagattgagtatgctcaactgctcataggttcactaatataatattttgcaccttatatttccttgctaaataaaatgtgatagtcatttgtccgaaatactgaataaaggactccagatagcatgactcttctgtcacaatcaccattatgtatatgcgaacacttcagggacatttcatgtgtaaagagaaattgtgattgtattttcaagatgtgaa

SEQ ID NO: 185702 - DNA, 412 bp, Zea Mays
agggaataaaaatgctttgaccattctgagcctatgggcaccagtcttagctgtaagttccggttttgacttcaaagttcctttgatataagaaaaatgactgcaactgataaattatgttctttcatttgtgtttacaattttacagatatacctgatggacatccacatttggtacactcttttatcagcacttgttggtggcgttatgggtgccagagatcgccttggagaggtgtatatttactcttttatgtcctggtcctgtttttggatccaagttcttatcaactatgcatacatttcttctgatgtgcaagctagattattgttctgacattctctaatgtaatgcagattcggtcaattgaaatgcttcataaacgttttgagagctttccagaagcgtttg

SEQ ID NO: 185703 - DNA, 581 bp, Zea Mays
gtttacatctatatcacgtgcttttggagatggttcaaaattactgccagaagaccacgtgttgactggctttgctggtggttctaagaaaccacgaagtcaagtttcatactcagtttctcctaaaagtgaggaacttggcataaaaaacaaaggtcatttccgcaagatacaatctcatgttagtgcaaagataaatgatgcaaagaaacttcctgatagttctagaagtgggcatagcagcccggagtcattgacttgcgttgcaaatgttcttgttacagtgggtgatagaggttggagggagtatgatacccagatcacaatggattccgatggtcagagtgaaaggaggatatgcgtgaaacttgctgaagggaccaagtatgctcacaaggtctgtcaagttttgcagcctggggccacaaaccgctatacacatgccatgatgtggaaaggtggtgctgaatggtgcctggaatttcctgacagaagccagtggttgattttcaagcaaatgcacgatgagtgctatagccataacatcagagctgcttctgtgagaaacattccaatccctg

SEQ ID NO: 185704 - DNA, 818 bp, Zea Mays
gaaccatcgaaatctaagtctattgcacgtgtttctggtgataattctgctgctggtaattctgcatctactggtgacttatcaacagaaaagaagaaaggggtatcggtatttgtcactgatgaaatatacagtacaattttggatgtttctttcaagagaatgctgaagaacaatggaagtgcaacttctgggttgttagaaatatggagtgaagagcttgaggggaagagcgacttctgcaactaccgcaccaaattggtatgttttcttttctcctgacttctaaaaaaaagagttgcctttggtccttgttaatcttaaaagatcatttgtgtttctcttgtccatcaatataatttcttgtcatcttgtcttcagtggtcttgattcttaaagttttgttgcatgatgtgaaactacacaaaattaggaggatgtctagtttattcatagtacatttttgtccttcaattactgattctttaccttgatacatacaacatgattttccttcaattttttcaatttgattgtgtgatttgttatagaagtggaactttttgtattgtaaatagttgggaggatcccaactatatatgtataaataagttataaaaggctatttacagtattttttggaccaatgatggataatggctggcctcttattgtccacaactcagttaacgatgttttatgcatcttcttgcagttggatctcattaaagtcattgcttctcaaagatctgtgattgctgcagcaattgtagttcagagaataaatgttgtctttggagatgctaatcaagcaacta

SEQ ID NO: 185705 - DNA, 4205 bp, Zea Mays
attgtgatgtgctaattaaggagactggtgaaggtaatattgcattaatacttgttccacaacttgttactgatctgtggagatggtgatgaaaacttgtgctgtttgcactgtgtttaatttaccaattttaaacatactgagttctaagtcaagttgttggctacttgtaattctaattatttttaataggctttatgtttgttctatctggaacagctaggcatatgtttcattgtcatttgttgtcttttaagtatcttacatttttttgaatgtattctttccctttctcagaagttttagctcaggagaattgtaatgaccagcctgttcctgcccagactgaccaagaaattaagttaaacgatgaacttgctgatccgggtatggactgtgtttaatttaccaattttaaacatactgagttctaagtcaagttgttggttactttcattctaattatttttaataggctttatgtttgttctatctgcaacagctaggcacatgtttcattgtcatttattgtcttttaagtatctgacatttattttttaaatgtattctttccctttatcagatgttttagctcaggagaattgtaatgaccagcccgttcctgcccagactgacctagaaattaagttacacgatgaacttgctgatccgggtatgtactgtgtttaatttaccaattttcaacatactgagttctaagtcaaattattggctacgtgtaattctaattattagatttgtgcattattgtcatgttatatactgaaaggaagactttgtcgttccaaaatcaccaaatggtttatcaattagtttcactgttgcagaccatgaagagcaaagccctgtatccggagaacggagagttagcttggaagcaaatgccaacgagcctgaggaaaagaacctagctaacgtcatatcaattgatctccacaccaaaagtctgcagcatgataatggcagaatagctgaagagactgataaaggtacaactgaattaatcctgtatccccaataaaagctctgcaacattgatgagtgaagataatatgtatgctgaacatctaaatccacctgtgccagctctcattcactgtttttttctaaagatcttgcttcaagattttcaattcactaaattaaacttgctaaatctccagatgttttgtcttttgttttccctattgaagagcatgaagaaaaatatgcagttagccctatagccgttgaaaagagcttccgtcaggaagcaagtgcaattgaatctgcaggaaaacccctaactgtcatcttttctaacgatctccacaccaaacatctgcaacatgattgtgatgtgctaattaaggagactggtgaaggtaatattgcattaatacttgttccacaacttgttactgatctgcggagatggtgatgaaaacttgtgctgtttgcactgtgttgacattttttaaatgtattctttccctttctcagaagttttagctcaggagaattgtaatgaccagcctgttcctgcccagaccgacctagaaattaagttaaatgatgaacttgctgatccgggtatggaccgtgtttaatttaccaattttaaacataccgagttctaagtcaagttgttggctacttgtaattctaattgtttttaataggctttatatttattctatctgcaaaagctaggcatatgtttcattgtcatttgatgtcttttaagtatctgacatttattttttaaatgtattctttccctttatcagatgttttagctcaggagaattgtaatgaccagcctgttcctgccaacgagcctgaggaaaagaacctagctaacgtcatatcaactgatctccacaccaaaactctgcagcatgataatgacagaatagctgaagagactgataaaggtacaaccgaattaatcctgcccagactgacctagaaattaagttaaacgatgaacttgctgatccgggtatggactgtgtttaatttaccaattttaaacatactgcagagttttggtttatcaattagtttcactgttgcagaccatgaagagcaaagcaatgtgttcggagaacggagagttagcttggaagcaaatgccaacgagcctgaggaaaagaacctagctaacgtcatatcaactgatctccacaccaaaactctgcagcatgataatgacagaatagctgaagagactgataaaggtacaaccgaattaatcctgcccagactgacctagaaattaagttaaacgatgaacttgctgatccgggtatggactgtgtttaatttaccaattttaaacatactgagttctaagtcaaattgttggctacgtgtaattctaatcattagctttgtccattattgtcatgttatatactgaaaggaagactttgtcgttccaaaatcaccaaatggtttatcaattagtttcactgttgcagaccatgaagagcaaagcaatgtgtccggagaacggagagttagcttggaagcaaatgccaacgagcctgaggaaaagaacctagctaacgtcatatcaactgatctccacaccaaaactctgcagcatgataatgacagaatagctgaagagactgataaaggtacaaccgaattaatcctgtatccataataaaaactccgcaacattgatgagtgaagataatatgtatgctgaacatctaaatccacctgtgccaactgattattcactattttttttctaaagatcttgcttagtaatcttgcttcaagattttcaattcactaaattaaacttgctaaatctccagatgtttcgtctttggttttccctattgaagagcatgaagaaaaatatgcagtgagccctatagctgttgaaaagagcgtcagtcgggaagccagtgcatgtgaatctgcaggaaaacccctaactgtcatcttttctaacgatctccacaccaaacatctgcaacatgattgtgatgtgctaattaaggagactggtgaaggtaatattgcattaatatttgttccacaacttgttactgatctgcggagatggtgatgaaaacttgtgctgtttgcactgtgtttaatttaccaattttaaacatactgagttctaagtcaagttgttggctacttgtaattctatatatttttaataggctttatgtttgttgtatctgcaacagttaggcatatgtttcattgtcatttgttgtcttttaagtatctgacatttattttttaaatgtattctttccctttctcagatgttttagctcaggagaattgtaatgaccagcctgttccggcccagactgacctagaaatgaagttaaacgatgaacttgctgatccgggtatggactgtgtttaatttaccaattttaaacatactgagttctaagtcaaattgttggctacgtgtaattctaattatttttaataggctttattgttgttctatctgcaacagctaggcatatgtttcattgtcatttgttgtcttttaagtatctgacatttattttttaaatgtattatttccttttcacagaagttttagctcaggagaattgtaatgaccagcctgttcttgctcagactgacctagaaactaagttaaacgatgaacttgctgatctggctatggaatcaggttgtagcattactgaaaggaatgaagggcttgttgctcataatcttgatcaagaaggtaagcatccatttctatgatagctggataaatggataatgattgtctcagtttcagttgcactatcagatgaagtgttgtttgcgaataacgcataaatgtgtctcaggtttccttgaagcaacaccagagtgcaaacaggaatgtggtttgcctgaggagacagtaatttcctcaaaagaaacaggatctctgctgtgtgcagatcaatcaccaattggtctggaatctttattttcgcaagaaagcatagttgaatcagtggggcattgtgcacttgcttcagcaacaactcataccgaaaatggctttgatgattcaaaagattgccataacaagtctgcacttgaaaatgttcatgtgccagaaccttgttcacacaatgatactaaaggaggcatttttaaaaatgttgattgtatgcatacatcccagcgagatgatagaatggaag

SEQ ID NO: 185706 - DNA, 496 bp, Zea Mays
ttttgttcattgttttaccactgacaactcttgttttatggagtatgacctctttggtttatccgtaaagaatttggctaccaggacccttattacccgatgtgatatctcgggccattgtacactcttcggttccccccatcctccaccgccacgtcctccccgcatgctttggctgcgaccacttcgccaccacctgacatcatcgtctcggccatctagggtccgatattatgaccaatttgtctagtagctctatcatatcttgtagcagtagccattttgatagtttgtgtcatgcttgtcagttaggccgccatgctcgtctccctttctccaattcctcctctcgggttgcttaagcttttgatcttgtacattgtgatctatggacatcacctatttttagcctctcggggtataaatattacttgttgattctggatgatttcactcattttcttcggacttttccattgcggttgaaatccaacac

SEQ ID NO: 185707 - DNA, 575 bp, Zea Mays
attggtgctgggtcttcttcttcggacggcatgtcctcatcataatccaagacctccagatagaagagacgctgacaacgatgccccggacatattgctcatcacaattgtaacagaggccttgcttgcgtcgctcggccatttccgtgggtgtcaggcgtttgaatctttgtgtcgactgctggggggttttgagctggttaactgctctgaaactgatgttcccgtagctgcagggtgaggtgtggaccgtggctgcctctgtcctgctggcatgtgaccccatggcaagctctgtgatcagcgctcgtatgcccgtgctgttgcgagtgccgtattgagatctggcggattgagcagctccacatcgatgtgaatcaggtcagggagtcccgcagtaaacagctgcacctgctgttctggtgctaagggagccacatggcagagcagcgccatgaagcgatcttggtagtcttccaccgtcgtccgaaaagatagccgggccaactcgccgagggcattctgtcggaggggaggaccaaaccgctggtggcacagattcttgaaacgtggcc

SEQ ID NO: 185708 - DNA, 610 bp, Zea Mays
ttgggatcctatttgagctccaggtagttactcttactcctgatgttggtatttcttaaggtggcataccttaatattaaatttctcaacatggcatgcattgatattaaattttctttatattcatagtgaggatccagatatccatttcaaatacatagaagcagctgcaagaactggacagatcaaagaagttgagcgtgtaaccagagagtctaatttctatgatgcggagaagacaaagaactttttgatggaagcaaagctacctgatgcccgcccactgattaatgtttgtgaccgctttggatttgttccagatctgactcactatctatatacaaacaatatgcttcggtatattgagggctatgtacaaaaagtatgtacatccttgaagtcactgttattttgggcgtcattcttcatctggtatttcaagcatttgtttgattgtttccttttgtcttgtatgtaggtcaatcctggtaatgctcccttggtagttgggcaacttctggatgatgaatgcccggaagatttcatcaagggtttgattctctctgttcgttctctgcttcctgttgagccactagttgatgaatgcgag

SEQ ID NO: 185709 - DNA, 424 bp, Zea Mays
gaaaaggaaaaactttggatttgtgttgaacctctgcattagagtctgcctctcttctgggggagtagaaccatctaatcgcaaatatgtatacccatataaatttatgaactcttccaagacgtcaagcatcttagtcatctgagtaaatatcaaggccctgtggccttctgatttcaaacgccttaacagaatagcaagttcctgcaacttcccacagtcaaactggatcaaacgcctatcaggaaagtagacttgacgacgaacgatagcagaccttataggagacagaatgggagaaaacttgtacatgcatttttctctatatgctggatcaataaaaacaggagactttcctttgctgcaccagcaaacagggggaggagctcgagcagctggaattgcgaatgtaaatgattcaaca

SEQ ID NO: 185710 - DNA, 542 bp, Zea Mays
gcagtctttgcaagaaaaacaccctgccagggccggctcaattcatgtcccgaaaccagcccactctggccgcgaatctcagcgctccggacaggaatccaacggccttggtcgacggcagccttacgcgcggcttcgcggagttgcgaggcggctcggctctacaccctcgcgctcgccgctctcggtctcgcctcttcttcgctcacacgattcgccgcgaggagtttccccttccgctgcgtgcatcccgcgagagctcgaaaacctagccgcaaaatcgatggctcggcgcggccacgacgacgacgacgacgaggtcgatgaggaggaagaggaggatgcctatgacctggacgacgacgaggatgaggatgaggaggacgactacgaggaggagacgaggcgcgggaaggcctcccgcggcggcggcggcgccaagagcggcggcgggcggaagcggtcgcgggaagacaactttatcgacgactcggccatcgaggacgaggacgatgaggatgacgacggcggtggccgaccga

SEQ ID NO: 185711 - DNA, 654 bp, Zea Mays
agaaaatgcatttccaaaagctttaacatctcaaagtgagcaacccgtgctttcctgaacaagcgatgaagtctcaagtcacaaataatttggcttttcctctgaggatcgcgaaggttattcttcttgatataatcaagcagaagagtctgaacatcaaactgagaaatgaaagattgatcgccatctctcatatgtcctacaaactccagtagctctggtgatgcccattttgtgtttgctggcaagggcactgattcatttggtacttttgtgtctactggcaagggtacccatccatttggtacttttgtgtctactggcaatggcactcgttcatttgtcacttctgtgggaacgctctcagtatttgtaattggaagctcgaccttttttgcaggaacactacaatctttatttaccttccggcatttttgaccctttttccttgaattagttcgccttcgttttcctgaggagcagtcagtaccagcatcatcatcattattagcgtcatacaggtcatcagacgactcatctttttctttcctagcagaagtgctaggaacattccatctagtcttggcaatagtaagttcttccaatgttaatgaaagcttccctttcagatctaaccaatatagcttgaacagg

SEQ ID NO: 185712 - DNA, 397 bp, Zea Mays
aaatcgatcgccaacgggcatgatctgatggctccctcatcatagcctctgctgctgcaccgcagcaaaatggccctggtttagtttagtcctcaagatcccgcctttctggtgctctgtttggctagtgtcgtgccgccgcgcgaggacccggagattcgattccggtccggtgtatctctaggctgcttggtttgggttaggatttagtgggcagggttgtgcagctggtgtctcgtggaggaagaatttcgtgggaggattttgaccgggtttgggcaaagagcgcgccgttcgggaggaggtgattctcgcgtggttgcgtgctttgctgggagtctgctgcggccaccgccggtatggcgacgcacttcacgccgtcgcaggcgcacgcggc

SEQ ID NO: 185713 - DNA, 407 bp, Zea Mays
gttgtgggcacgcatcgtcgccggtgagcagattggagaaggatgaaggacgagggcaggatctcggatccgacggcggtgggggttaggcattgaggaggaggcagaggtactccgctaaggtgaggctggcgatgcggtggaggagctgtgttaggttgaattgaggaggatgaactcggcgtaggtgcggaaggatggttgggcggcatcgtgcgcagttggaatcgagagaaaatcgacagacgtaggaggcttcgagcggaggggtcagatcggatggtgtagatctacggaaggcagaacaagggagaggcaggctaccccttgtagccttaataagtagtagagatagagataccctaataaatgcacattttaataagtttactgaatctatattgcac

SEQ ID NO: 185714 - DNA, 292 bp, Zea Mays
aaatgatttctgcattaattttgcttgttaacattgcagctgttgaaacaatggatatcacaaaaatactaactcttcaaggtggagaagcagtgtacccattaccccgaattaaaaatttggcagtgcatcccaaattcaatttggctgcagtaatttttgcggttagaccatgctaactatgaacctaaatatttttggtacttaatgacaagggtttcagaaacacttgacatattcaatttgtaggatatgtctgggacagaagctgcaaagaacaaagctgcataca

SEQ ID NO: 185715 - DNA, 785 bp, Zea Mays
atgggcgtcattccacaggcaaccatcaggatcatgacatcgcaggtgcaggtacaggtgcatgacattgaatctgatctccttaagtgctagaaagcaagctacagtgtccaggttgagcgtgaagcaggatacaaagctctagccattgccaagatcatgtggatacagaaattgttgactgcattgggcatagaacatccacagatggctcgtctatggagtgataacctgggggctaggtatttgttgtcaaatcctatcttccatgctcgggctgggcagatcgagccctcagggtggagctgtagagagtggtagcagcgccaaagcgaggagacaccaccttagtgagctcctcgaggatgaggtaatcgcggaccttatggaaacacggaaacgggactgagctagtgataagtccaaaggtaatcatagcactcgttgaggctgtagaaaaggttgagaacgagcgtgcgatcggagactggctccccgagatcacagacggaggcagtcatgcctttcatctggcggcaatactcagtgacagagaggtccccctggaccaaagtctaaaaggagacgtcgagttggagtgcacgagcctcacggttatcgaggaattgttcctcgacatcaacctaggtctggcagacagtgccgccaccctcacgaatgacatcttgtagctcaagagtgactgtcctgaggatccaagagaggatcacactatccatccatcgagtgtttacaagtcgtccgactaatcgtgattaatcgcg

SEQ ID NO: 185716 - DNA, 282 bp, Zea Mays
caagaaggtgatcaagtccggaacgatggtatacatgatacggtaggggtagcactaattgaagaaaatcgtgtccaacaacatttgagatggtttgaacatgtccaacaaagacctccagaggcacccgtgttgtccaacaacaattctactgcaacaacattttctgtgttgctcttttagcacccacatacacatattatatttccataatatcttgcaagaaggtcctttacacttgttctatttacaccaacatcaacgcaacatatgtgtttccac

SEQ ID NO: 185717 - DNA, 2148 bp, Zea Mays
ttcctgtttcctccttgaatatgttcagaatatcactgtgcatagcttttgagccagtgtacaacgtagcatggatatcgcctgccaaaagaaaaagttcagcaagctggttcactggagcaagcattgttgagcctttgaactgatcaaatgtcatatcaaatctcttccagggcttctgtggagcctcctggcatggatgttcccatgtggtagtacgtgtattatgatcaatataaaatgatttccctgttacagagtcaaagcgctcctcccatccagggggcaaagaacgagtgtttctaccatcatattcagaatatctacttgacaacccaaacattgcatctatgtcaagcgagatgctcaatcgactacactgttcaacaaaaacttgaagtgcaccaaagtaactagcagcattggttcgatcaagagagtctgcacagttgaatcgtatcaccccattttgaatagattccatgcaaaacccaccatttacatcgtcattgcagataactgatcctttacattcattaagctgctgtcttgcatcatagtaattcccttcactgaagccaatgaccattgtaggtggtttaagatgcctccataggccctcaactgtctgctgctgcccttttaacttcacagtggcatgccagtcataatttattaactgaatccacgtgcttcccagctttccagtagagttcatgtaccgtatagattctttgaaatgatcaacaagaactgactctgtttttccttcgccgtatcttagcaagttaacacaaataatgggaacccttccagaacttttttgcctggacacgttcgcttcagatgatttattcccatatcttttacccaaccgttggtagtactgtaagcttccgttgtaaggatcgttggcaacgtaaatttcagcctccactgacaccgcgttttttatttctgcgccccaccatattggaatagttccacggcgccagatatacgagctaaaagggatgcgctgtccgcccttccgtggaacccaaacgagttgctcgcactctacctcattgcctgtgcctgaacatgcgttcagtccacgggccaaatagcgagttccaggatgcaaccgacttcggcgtgcaataagggcgactaacccaccttgctgcccagcacctccaaagttccggcactcagcgaacccctgcagaagaatgacacagtgtcctggcaaaccaatgtccttaaagggctttgacagccactcgttccaaacaaattcctcatctggttcccgtagtgtaataggactcgggaagggcctggtaacatcccttgtctcgcaaaagaagaacttgccatcaatgtctagattggccagctcacgtatgttcttctgttctccagtcccctggggctgaggattctgcagctggatctttatccactggctctctgccaatgtgtatatgcacccgcctcccggcagattggggaccgacgcgctcaactgtgtcgcgaccaagagcagagcatggcttcctaacaccgcgtatcccagcactgccttggcatatgtagtgctcttggatagaacccttgatccgttggtgatgtggttcagcgccgccgcctccgaatcaaagacgtcctccccatgcttccccaggtagcgcagggcgccggtggtcggatcgacgtatacgacctgggtgtctctcctcgtcgacaagctgatcacaatgtacacttctgtcgtctcaaggacgaccaccaccaccgatgtgtccttgggcctagggagcgacttgctgtggaacatctggggatttctggagagatggactgagcggacctgggtgtgcgcacattaatttgtgccaaaaaaagaaagaattgaagctgttagggcgcacgtatatacgcttcgttagatcagatccagagacaacagacaaatagtaattggatcagatccaggttcaagtagacagatcgcttaagttagggtttcgggtgatcggtttcgcacagcaggtagggaagagaaggacctggtgggtgctcgtcgccggcgaagacctgggcgagcaggctgcgggccgcgggcgcttgaagtatgtccctcgtcttccgcctcactttttc

SEQ ID NO: 185718 - DNA, 488 bp, Zea Mays
cttatcagtaaagagaaagtattagcagtctataaataattattggtaacacaaggaatcaaggatacattcaaatggtcttataagttataatgaatacacaccgtgctctttaccactgattgtagttgcttgtcatcccaacaagcaccacatgttttatcccactagttgcaaaagggattaatgattcacattcttttaagtatgctgcctcatcaataactaagatgtggaatttctgattttccaaccaactagacttatagagagtgcaaaacacaagtcttgcatcttttgttttgattgttttgaagaaacaattttgctcttaaatatttctgacatttttccattatcagctttcttcttcatgcggtcctcattaagtacattgtaaagcgtcgggatggtttgccccaactagctgaggctgtagctgtgatgcctgtgagctacaaaaaattaaaaaggaagaagtcatcggt

SEQ ID NO: 185719 - DNA, 427 bp, Zea Mays
aacaacaccttctcctctaacaccaactgagggggttgacccatggctgcgcttgggttctatcaccccatggtcagcctgccctcctaggacacccatttgctagcctctgctttcagcacggagacgctgcagcagcgccgacctccgagtggtacttcgactcgggtgctacttcccacatgacttcttccaacaatgtttcacatacctcttccccgcgggcgactgaaccatctccaacatcagcaccaccgtcatcgcctccatcgtcgctacccaagggtgcaattgatgtccagttagtgaccaacttgcactcgatggcgacacgggccaagctcggcttttgcattccagccctgatccatgctttgcacctctcctcgatgcccaagacctatcatggtggccttgcttacccgag

SEQ ID NO: 185720 - DNA, 488 bp, Zea Mays
ctgacgaagccagtctgttgagatccaaaaatatgaatcatctcctgggcctgcaggtgcttctgtcagaacagattttacttcttgacgcctctctgttatatatgccaaatggctgtccttcttgctttggtattccacacacaattttgtatatgatgcatttagttcattaatttcatctagaagatggtgtggaagtaaatcattatttatctccacaattttattgctttcagtgggattgacatccttagtgatacatttgtacatcagcatataagcatcggtagatgaaaacatctcccccatggtagaactaggcgctgcctcatggtggccattattattattgtttgtgacagaaccttctgtggaggtattttgggacttctgatcatctttgtttgatgcctttcctggtttttcaccaaaaggatgcaaaccaagtttggatacagtctcatcatcaaactcccaccattgcc

SEQ ID NO: 185721 - DNA, 320 bp, Zea Mays
cagtttgggggctttcagtgatggcagcaggaacgttgaggatgatagagatgatgatgatgacgaagaagaagagaggaaatgggaggaagagcagttcaggaaggggcttggtaggaggatggacgatgctttctactcagaggtcagcaaatggggtaccagctgctatgcaggtccagccacagccatttggatacccagtgagtacccattaccagccctcccttagcggtgttgtgcctgcggcatcagtttttgcatctggaactgcagagttcttgtccatcgctcagcaagcggatgttgcaaataaagcc

SEQ ID NO: 185722 - DNA, 387 bp, Zea Mays
ctggatatggtggactgccaccggctatgacagcggccgatggccaccttccaccaccacccaccaccatatccgcaccagcacacaccaccacctcacttccaccgcacctgctgccgttaccacattcaccgtctcccattccatcctttcccccactaccgcacaccatacccagtgctttctctccaccaccatctgctgctgttcctcgcttccaccgcttggagtttgcaacctttgatggcaaggaagatccaatgcactggttgactcgatgtgaacaattcttcgagggacaacgcacgttggaagaggagaaagtctggttggcttcatatcacatgctcggtgctgcacggacttggtacagccagctcctgcgtg

SEQ ID NO: 185723 - DNA, 731 bp, Zea Mays
ggagggagaatataccacgtgcatttctgtaatgccgctgaataatactgtactgcctatacaacaacatgacccttacagaactgttccaggctatcatattgctactggttgctctgatggcactgtaaaactttggaagatgacttgtgcagaggactctttgcagactaagaaagaaagacacatctgggagctagtaggcatgtttggtgctcatcaaggaccaattgacatagtttcattgtcaggctgtggtagagttattactgttggcagaaatttgaagaaaaatagcacctccattcatatctgggaagcaacaaaaatcaggggagacgggaattttctgctaggagatacactaatgttgcaagaccatattgttggtttagatggactatccttaggtgatggacgatttctacttgcagtttatctagctaatgagttacgtatatattctcataagcacccgtccttccagaatgtactacacactaagaattcaaaagaagagcatctttggagctgtattgtattatcccattctcatcatgatattgttggctttctttggggaccaaaggcaactgttgtgcttgttcatgagaaccatctttcactcttcagttcatggctagtaactggagataatgagtacatgacccagatacattcttgtcctgtagttcatgagatgttgccatgtactaacaattttaacgaag

SEQ ID NO: 185724 - DNA, 307 bp, Zea Mays
agggaaaaagttggcgaatggattaagctacggtctagtgtttagtgggattgctgctgatctagctcagatagagaaggaaatagagcatgtttcgaagttgaagaatctctggttgaactcagtccatgagcttcttcatactcaagttagcagtgctgaacagcaattccctcaatacagtttgccccaaattctaaaagatgaaaacctggtggggttaaaggaagaaagagagcagttaaaggaatggttgattcccaatgcacctgtcaacatgacaaatataccagctctcaaggtggta

SEQ ID NO: 185725 - DNA, 528 bp, Zea Mays
ctcagtgcaaagggcctcgtagggaagattaggcaatcagcctgaaagtttcagacatatgcttgtcatgtttctcagtaaccataggtccattaatatgaacagaacaggcagtacacagtttcgaatgtgtaacgacaatttggaagttacaacaaaacatgtttttaaggggaaagcatagaagagacatcaacagagaacatctcaacaaccaggaacaccaaagggaataatcgtgtcccaacatttcataataacatgtactacatgaaaaaacaattccctgtcggtatgtagctgaaatcactgtcagttattgaagtaggagcaacaaaccagcaaaccaaccagtagggatacttggtgcattttacctgttcgtgttatgaactgggatgataatcatgcatcatagccacttgataacaggaacaggcaccatggccagaaaaacacatcaaaatcaaaatcaatacaaagtacacaatgcaaatatacaattccatgtaattggcatcaaatacc

SEQ ID NO: 185726 - DNA, 447 bp, Zea Mays
ctgcaactacaggaaaatgatgaccttcgaagttccaaggttgagatggaaaattttatttctgagattcaggcagagaagagtcagcttgaggaacgcctgtccgtgtcgcttaaagaaagcagcatcacatctaaatgcttggatgaagtgcggaaagatatccttgtgctttccagcagtatagattcccatgtttcagctaataaggttcttgagaggaacataattgagctagagagctgcaaagctgaactagagttgcatgtatcagagctggaacaggaaaacatagagttgtcagaacggatatctggactggaagcacaattgacttatctgacaaatgaaaaggagtcaagcgagctacagattcatgactccagatcgctcatcattaatctcaaagataaagtagagcggcagcaatccgagatggaaactcaa

SEQ ID NO: 185727 - DNA, 711 bp, Zea Mays
aggtgagggagtgcagtccggggacgggagggagaccaatcggagctgatggaggcagcggcggcgctgccgccggagagggatacgtcagcggactggggagatggcgtggtaccgctaggtttccgggtgaaggcatcctctcgcgagtcgccgtcacagaaggcggggaacgtgctggaggccgacctgcgctcccactgggccaccgccaccaacaccaaggaatggatcctccttgagctccaggttcccgtttccatatgcttctagagcttattcttctccctcttctcccattgtagttggggatcgaattcgaattgagtagtcactccccagctgcttgcaggaaccgtgcctcctctcccacatccgcatctacaacaaatccgtcctcgagtgggagctcactgccggactgcgatacaagcccgatgcattcgtcaagttgcgcccccgctgcgaggcccccaagcgcgacgtcgtctaccccgccaaccacaccccttgccgctaccttcgcatttcctgcctgcgcggcaaccccatcgccatcttcttcatccaactctttggcatccccgtgcctggcctcgaacctgagctccagccactgctcagctatttactcccgcaaatcacatcctccaaacaacccctttctcacaacatgcacctccaggttctcttctcttactacttcgtttc

SEQ ID NO: 185728 - DNA, 298 bp, Zea Mays
aaagtgcacagggcgtgatagcttctctgctacagagaacttcgaaaaggatggcatttcatctcttagcgaggcagtgactgcggtccgtgttagaattgaatgtggcctcctaacagaggcatttatgtatcataggagctactgctctaaggtgaaagagcaacactcagcaaatatgacacacacggaggatgcattcgaaggctcttggatttatcatgttgagatgatgatggtcgaattttgtactatctgcattgaaagaaatttagttgataaaatgattgatctgccc

SEQ ID NO: 185729 - DNA, 598 bp, Zea Mays
tttctatctgcccatgtgatccttttagccctttatgtcaaatactgcattcttccttcactcttccattgagtacggattaaaagttgcagtcagcttgacacaaaatattgctgctgcaagtgatagtatgaaattttaatagacataagtgttacaagtttgtggacaaatataggacctacaactaataaaaattgcttacctttgttgtgtctgtttattctcgtatttaaatcaattactcatataaatgctttgtaatctttatctgattgtgataaacctatgccccattcatactttttatcctttgggttgcacctttatgcatatttgacatttgtttagttaaaaccttagctcgagtcatgtgttaacatggaaatcaattatactcatcgcttctggcatatatgtacacgaggtctgcatagtggcacacattatgcagtgtaccttgtttgttttttatattaacaattctagaagttggttatgccaaaggtaggtaatttagcaacagatttaggaatttatttcatatgcgaactagattatttctcatgaaggcataggtgagtcatttagatgaaga

SEQ ID NO: 185730 - DNA, 693 bp, Zea Mays
gtctctgacaattgtgttgtctcagaggacaaaacattgatgagtgaaggtgaggtcaacatttggtggtaatggcatactagttgttaatttattctctgcatagccaaatctataggctttaattatgtttaagttatatggcatcacaattgtattattattttttgatcttctttggatgctggaaagctggcatattaataccctattgattttgtgatgttgtaattagctttgtccattattgtcatgttatatactcaaagggagactttgttggtccaaaatcaccaaatggtttatcaattagtttcattgtcgcagaccgtgaagagcaaagccctgtgtccggagaacagagagttagcttggaagcaaatgccaatgagcctgaggaaaagaacctagctaacgtcacatcaactgatctccacaccaaaagtctgcagcatgatattgacagaatagctaaagagactgataaaggtacaactgaattaatcctgtatccataataaaaactctgcaacattgatgagtgaagataatatgtatgctgaacatctaaatccacctgtgccagctgattattcactgttttttttctaaagatcttgcttagtaatcttgcttcaagattttcaattcactaaattaaacttgctaaatctccagatgttttgtctttgg

SEQ ID NO: 185731 - DNA, 811 bp, Zea Mays
attttttaatggtaaaatcaaactagacattgttcccatcataattttctacttctgtatcactatgtgttacttgttgcttcaatttttttttaaaatttaactctattatgtttgattcacagcgttttgtatttgaagcttgccaagatttaactcttgtcattctgatgatagctgctgccatatcactaacattgggtatgactacagaggtattgtttttgagtttttttatcactcatgttgtttgaactaaaaatcatgctgtcctttattatacatattaccttacattttcttctctttaccactattcattcagggtgttgatgaaggatggtatgatggcggaagtatctttttagccgtttttcttgtgatacttgttactggtaatgggtttggattacacgtaaacttgttttcagcagcaatgttctattgttaatatttatcatcgtcatatctccagcaacaagtgattataggcaatctctacagtttcgacatctgaatgaggagaaacagaacatacaagtggaggtgagtgcggctatgccacgtgaactcccattcattggttatatttctgatttgctatctctattggttaggttgttagaggtggtaaaagatttggagcttcaatctttgaccttgttgttggtgatgtagttcctctcaaaattggtgatcaagtaagatggtatattaatttttcgactgctatttcatttttatgtgtagaaccatctgtttatcccattttcgcctccaggttcctgctgatggtgtcctgatatctggc

SEQ ID NO: 185732 - DNA, 351 bp, Zea Mays
acaacctccggccgcaaatcgtgctgagctaaccgtctccacgcgagccgccctgctacgtataagtcagttccccatacctttggaccgatccaaccaagccaccgaatcgctggatttcgtcgtggggggaagctcggtggaggtgtgtgcgccgcctcggtgaattcgcattggcgcccgcgtcgggttccttggacggggcagggagcttcgtttcgtcttcctgtggctgttgatcgccttcgagggagaaggggaccactcgcttggtggtaattcctcaccggaatttcatcgccgtcacataatcgcactgctccgtgagcagtcgactctactgctcggcgt

SEQ ID NO: 185733 - DNA, 314 bp, Zea Mays
gtcaaggtcgatttgctatccaacaattttgcattatttctggctacctattggtcttgctgccacaccggagttgccatcttagcttttgtcgtcctgtccccttcctatcagggcaatatgacttgctccccttcctgtcaagctacatgcttcgaccagctgaggcactgaaatgaaactaaattattgttgcaaacctctctgccatcttgtgcgtgcactatgcaaaatcacaaggcgggcttagtttctctaacactgataatgcttatttgatcagttgaagcttgcattcatttccatgaacaaac

SEQ ID NO: 185734 - DNA, 2920 bp, Zea Mays
gaatctgcaggaaaacccctaactgtcatcttttctaacgatctccacaccaaacatctgcaacatgattgtgatgtgctaattaaggagactggtgaaggtaatattgcattaatacttgttccacaacttgttactgatctgcggagatggtgatgaaaacttgtgctgtttgcactgtgttgacattttttaaatgtattctttccctttctcagaagttttagctcaggagaattgtaatgaccagcctgttcctgcccagaccgacctagaaattaagttaaatgatgaacttgctgatccgggtatggaccgtgtttaatttaccaattttaaacataccgagttctaagtcaagttgttggctacttgtaattctaattgtttttaataggctttatatttattctatctgcaaaagctaggcatatgtttcattgtcatttgatgtcttttaagtatctgacatttattttttaaatgtattctttccctttatcagatgttttagctcaggagaattgtaatgaccagcctgttcctgccaacgagcctgaggaaaagaacctagctaacgtcatatcaactgatctccacaccaaaactctgcagcatgataatgacagaatagctgaagagactgataaaggtacaaccgaattaatcctgcccagactgacctagaaattaagttaaacgatgaacttgctgatccgggtatggactgtgtttaatttaccaattttaaacatactgcagagttttggtttatcaattagtttcactgttgcagaccatgaagagcaaagcaatgtgttcggagaacggagagttagcttggaagcaaatgccaacgagcctgaggaaaagaacctagctaacgtcatatcaactgatctccacaccaaaactctgcagcatgataatgacagaatagctgaagagactgataaaggtacaaccgaattaatcctgcccagactgacctagaaattaagttaaacgatgaacttgctgatccgggtatggactgtgtttaatttaccaattttaaacatactgagttctaagtcaaattgttggctacgtgtaattctaatcattagctttgtccattattgtcatgttatatactgaaaggaagactttgtcgttccaaaatcaccaaatggtttatcaattagtttcactgttgcagaccatgaagagcaaagcaatgtgtccggagaacggagagttagcttggaagcaaatgccaacgagcctgaggaaaagaacctagctaacgtcatatcaactgatctccacaccaaaactctgcagcatgataatgacagaatagctgaagagactgataaaggtacaaccgaattaatcctgtatccataataaaaactccgcaacattgatgagtgaagataatatgtatgctgaacatctaaatccacctgtgccaactgattattcactattttttttctaaagatcttgcttagtaatcttgcttcaagattttcaattcactaaattaaacttgctaaatctccagatgtttcgtctttggttttccctattgaagagcatgaagaaaaatatgcagtgagccctatagctgttgaaaagagcgtcagtcgggaagccagtgcatgtgaatctgcaggaaaacccctaactgtcatcttttctaacgatctccacaccaaacatctgcaacatgattgtgatgtgctaattaaggagactggtgaaggtaatattgcattaatatttgttccacaacttgttactgatctgcggagatggtgatgaaaacttgtgctgtttgcactgtgtttaatttaccaattttaaacatactgagttctaagtcaagttgttggctacttgtaattctatatatttttaataggctttatgtttgttgtatctgcaacagttaggcatatgtttcattgtcatttgttgtcttttaagtatctgacatttattttttaaatgtattctttccctttctcagatgttttagctcaggagaattgtaatgaccagcctgttccggcccagactgacctagaaatgaagttaaacgatgaacttgctgatccgggtatggactgtgtttaatttaccaattttaaacatactgagttctaagtcaaattgttggctacgtgtaattctaattatttttaataggctttattgttgttctatctgcaacagctaggcatatgtttcattgtcatttgttgtcttttaagtatctgacatttattttttaaatgtattatttccttttcacagaagttttagctcaggagaattgtaatgaccagcctgttcttgctcagactgacctagaaactaagttaaacgatgaacttgctgatctggctatggaatcaggttgtagcattactgaaaggaatgaagggcttgttgctcataatcttgatcaagaaggtaagcatccatttctatgatagctggataaatggataatgattgtctcagtttcagttgcactatcagatgaagtgttgtttgcgaataacgcataaatgtgtctcaggtttccttgaagcaacaccagagtgcaaacaggaatgtggtttgcctgaggagacagtaatttcctcaaaagaaacaggatctctgctgtgtgcagatcaatcaccaattggtctggaatctttattttcgcaagaaagcatagttgaatcagtggggcattgtgcacttgcttcagcaacaactcataccgaaaatggctttgatgattcaaaagattgccataacaagtctgcacttgaaaatgttcatgtgccagaaccttgttcacacaatgatactaaaggaggcatttttaaaaatgttgattgtatgcatacatcccagcgagatgatagaatggaag

SEQ ID NO: 185735 - DNA, 390 bp, Zea Mays
tgatagggagtctaaagtaaggtaccatgttgcaataaccttggagttactatttctgggaaggctcatcaaccccatgaatttctatgttgttgctcaggttctgctagacaagcttagtgatccagatagtaatgtaaaggatgcattcttaaggttattttcaatcaccttgcctatcacaacatatgcgtttggcttgtttgcagatgaacataattatcgtaattcctcagatattgttaacatgtccaaccattgcatgaactggaggcatgtgcttgctgtgaagcaacagcctaggaaactccactggcagcagcttgtttctgttttgagttacctttctctcagattgaagttacctctttcgtcttgggtgcaacggct

SEQ ID NO: 185736 - DNA, 279 bp, Zea Mays
cagactcaatggagatgccacaccttctgaagaggagaaaatagcagaggatcgtgtcaaagtggatggaaatgtagatgctgtaattaaggaagtcgaaactgacttggtaggatgccatgcacatcagaaagaatttcagtgcacgctccaagatctatcagaaatagcctgcagtattgatttagtacataatacatcttctccacaaggagagaataagaagcctgtctcccctttaaatggcatgggccattatgttgataacaatagttgtaa

SEQ ID NO: 185737 - DNA, 316 bp, Zea Mays
gtaatatctcccttttccacccctctcattcaactacatctatcattgttggtaatggctccatcctccccgtcaccatagcaggtgactcagttcttcccaggccattctaactaaacaatattctcctcacctcggatatcattcatactcttctttctatttgccactttactactgataatattattccgtgatcaccagattcgatagcttcagccctctacacactacgcctcccaaggtctcttgcctcgtgtgctgccccttcttgccccatgtttgttgttgcatctaactggcatcaacgtcttgg

SEQ ID NO: 185738 - DNA, 451 bp, Zea Mays
gtttacagtcgatctttggaggaccatgtggagcatctgtcggcagtacttcacttgctgcagaaggataactggaaggtcaaactgtcaaagtgtacctttgctacccgttctatcagttatctcggccatgtcatcagtgcagcaggtgtccaaactgatcctaacaaggtcactgcagtggttaactggcctaggccttccaatgtcaaagaactccgtagcttcctcggtccagccggatactacaggaaatttgtacctcactttggtataatatctcagccactaactcttctcctcaagaagaacaccaaattcatttggacacaagatcaagagactgcatttcggtgcctgaaatcaaggttgagccaggcaccagttttggccttacccgatttctccaaatctttcgtattggagactgacgcctgtgaccagggaatag

SEQ ID NO: 185739 - DNA, 869 bp, Zea Mays
cggaggctcacgcccgtagacgatcttgaaaggcgtgtcgcggagagagctctggtaggcggtgttgaagacgtactccgcccatgggagccattggagccactggcgaggccgattgctcgttaggcaccgcaggtacatgatgattaccctgttcgccgactcggactgaccgtctgactgagggtggaaagccgacgtcatgtggagactggtccccatcaaccgcatgatctccttccagaacttggaggtgaacacgacgtcgcggtccgacaccaaggactgcggcaccccatgaaggcgtacaatctctgcgaagaatgcctgagccacggactctgctgagtaggggtgtgccagtggaataaagtggcagtacttgctgaatctgtccaccaccgtcaagatgacggacttgccgcgcactcggggcagggcttcgacgaagtccagcgccacatctgtccagactccctgcggaattggtaggggaaggaggagtccggccgggtgtaggtgctctgacttgtggcgctggcaggtagggcactcccggacataatcttggaccacctgcttcatgttagggaaatggaagtcacgtcgaaggcggtgtagcgtgcgctggaccccttcgtggccctcggcatgcacaactgcgagcagttcacggagcagcggtgaagaagggggtaggtagagccggcccgcgtactggaccatcctgtcaaccacctcccacggcgcgcgcttggtgccggcctgcacttcgccacgaatggcagtgagtgctggatcggtgagctgtgcctgacgaagacggtccaggacgtcgaaatgcggtgccgagagggccagcagcgccc

SEQ ID NO: 185740 - DNA, 1686 bp, Zea Mays
gatgggtgacacaggtggtggaaggaggcgcagcaagggctggcgatcaacgtgcctggtctgccctacgcggccgcgcctgctggacctacctcctacggcatgagggtgctcagcatgttcctctccgaccaaacatacaccctccgccgcgccgacgagctcttgcagcagaccgcctccttcgccgccaggagctacgcgctcctcccggccgacctgttctcaaaggcacgggaatggtgagacgaccgtctccctgtttttcttgtgttccttctcattactcttcttcctttgaatggctgtatgataggcaatgcctcgaattccccacgagtttcatgtctgagcgggcgtagtactcagcaatgcgtaggatgatcagctcatattgacctacatgcctaatgacaggcctaggtgattttaggtagtcagctgcctgcaattctgcacaccacgatggtaaccctgatatacgatttcgtacatcgaatatgacattcctaggttttcaaggcgttagacttgctgctgggtacaagtgaggaggatgatctagggtaactgttcattttcacggcggcgccggttgccgacgattggttaacgtgcatgttgttcgcgcggcaacgagagctgttttccggttggatggatgtgaatccctacatgttagtgttcggttattccgacattctagtaacggctgcatttaaggagtttccaaaaggagcccatagtgcaacgctggaagccttcttcctttgctgagctgtgcaataaagcactggttctttcctcacgtgtcagtactttgaacgccgatgtggtcaacgcaaatgcaaagcttgtggtgtattaataggctgtagttgctccaactccaaagtttaagttgccttgaaggggtgcatcaaaggctcaagcaactcagagcaagaaatctggcgttgccctgtggccttcaccaggatggatggctgctgacagtaagaaatattgtgctacctcgcggaacattttgaagtctaggacaactgaaacatatctttctgactggaagaaaccctttggattttagtaacatcttattaatgcagtgttgcattgtatagttatcttaaggctagcggtctttaaactatatatgatcagctgcctgagtttagttctcatttatttcttttacttacatgatgatttgactattttcttatttttttccttgcaggtatattgtgcctgccaagtctgcagtcaaaaacgtgtcaccagctggagagggctcagtaaatatttaccccataatgctaagagtttcagccagcagagatacatatacactaaccgtgaagatcggcaaaaaggtgcacacaaagtacttgtattcttgtagtttgcaagagttctctctttttttttaaagaaagtttgtttacttaatgatcttaaccattcccttttaagcaatgtatcttaactttgtgttttcccctcattttgatacactcaggacaactcaactgagaactttaagagagcatgcaagatcctgactgcagactctgagccggtattcctatgagaattcttttgcccacttactagtaatggtaaatagccgaagttatttttcttgtattgcatgtttgcaggttcacatatgggatttctctgggc

SEQ ID NO: 185741 - DNA, 515 bp, Zea Mays
gccaagagggtgaatttgcaaagaggctagtttgggagttgcctgattcttctcttgatagacaactagcacctggccaatctgccaggaggaaattagcactgggagagagtgcaagtaggcgtgtaagggataatcaactgcctgaacccactgggcagttctcacgaggtttaaatacatccaatgcttcttcgggacatacacgcagagacactttccgtcagcggaaacctaacacaagtagaccaccttcaatgcatgtagatgactatgttgcaagagagagaaacatagatggtgcaagtagtgcgtcaaatattgtgaactctaccccacgaggaacacttagtggaaggcctccatccattcatgttgatgaatttatggcaaggcagagagaacgtcaaaatcatgcgccagccccaactggagatgcacctcaagctaaaagtcagacaacaagtttagatgacagtcttcgtactaagccagagaacttgcgtcaacccaag

SEQ ID NO: 185742 - DNA, 604 bp, Zea Mays
ccgttaccgtcaataattgaagagggaaagggatgatgtgaaggaaaggaatgggagaaagtaccaacatcagaggacatatgtgtggtggcaccgaagtcaaagaaccactcgttttggcgaggtggttgaagcgtcatggcgctgatgttggagagtagcgcctgctgatcccaggatggagtggtgggagtcggaaatcctggcggcggtggtgcagaccatggttgctgtggcgccccaggccagggaccttggatgccagcgatcagggactggggcagaggagtggccggctgttggtgtggcgccgagggagcagctgacatccgtggtccgggccacatctgaatagatccggaccaaggattatagaagctaggccaggtgttagtcgatgtagacccttgcccatgctgtttggcgggaggaccggagcgacgctcgcctctcttgtcgccacgcgtctcgcgcttggggttgttggggggatgatgtggaggcggtggctccggcttgctggtcaggggcttgtcggtcgtagcggcgagaagagcagaagctggaactgtggagtgatgcgcaagggtgagctcctcaagca

SEQ ID NO: 185743 - DNA, 681 bp, Zea Mays
accagcattctcacagcatcttgcctgatcgaagagttaagtcctctcacattccagaaaagtattttggaaggatccattggaaaaactaacagaaaacgccaactggacagacctaagaccttaagtcttcaggtgtacccccgattaaaaaggaggcacacacgcccgccgctgagctctactactagtaccactgctccgctcatctctcctgcggcggtggaagattaggaattgagcccgcggcaagctcggggagttactgtgaatccatctgattcccacccacctgcgcagacgcagctgcattccgcgatcccaggcggcgggaggcggttcttgatgctggagatgctcgctccgcgtcgttctcggcagcagcgacggcgggtaggtggaggcagagggccccggtgagaacagaagtgtcagtggtgctggtgttcccttaccttcgccgcttcgcgagtgctgttctttccttcagttgtcggcggcaatggcgccgggcctgaggctggcctacccgtgggggagggatgtccggcggggtacgccggtggtggtgaccatggagaaccccaactactcggtggtggagattgacgggcccgaggcggaggcgctccaggccggcgtgcctcccatggacaaaagaatagtaccctgtcagttgcc

SEQ ID NO: 185744 - DNA, 358 bp, Zea Mays
aaaagttatccatgtgagatttgagaaggcaaaggaagaggtaaattcagatttggcagtttttgcaggagacttggttagcgtaatggaaaagtatgcagactctcatcctgagtggaaagatgccctggaggacttgctaatacttgcacgtacctgctgtgtcatgacacctggggaattctggcttcagtgtgaaggtatagtgcaagatttggatgaccatcgtcaggaactctcaatgggtgtgctgaagaaactatacacccggatgctttttatccttacaagatgcacaaggctgctccagttccacaaagaaagtggttttgctgaggatgaagttgttattgatcag

SEQ ID NO: 185745 - DNA, 596 bp, Zea Mays
caacatatcatggcaggacatgaaatgtacgattcaattccattttcttttttaatgaagtccattctgtgtgtagatttcctatgtcagtttgaactgattgacactgcatgcaattatgcaaacccagagttaactactgtgttgctgaatacaagcgaggtgaaacgactatgttcgtatatgttagtgagtagtgactgctggttctcagggtttagttttccataatgatatgggaaaaatacattgtatgcaactgtttaagttgtattttcagcttgtgccacagttttttttggctgattggccttatgccttttttcttctgtttttttattcacacagtaaaaacatggaaattcctatcttgaaaggtagtgcaaggatatcatcacacctcaattttgtatgccctcagcttttcccatcctctgggttttggtcggaacaaccttcaaatgatgtcatggaaaatgataaggtaggttctagtagcttatatgataccttgaaggttgaattactttttatagatttttttgttttcctttcagagtgtttcatcggaagcctgtggaagtgtgtctgcgcaa

SEQ ID NO: 185746 - DNA, 295 bp, Zea Mays
ggaggccgatgaggagatacaggaagccgacagcgataagatttgcaatgatgaaaaggatgggaaggaggcgagagaggtggaagtggagaaggaggtggcggagttggagaaggccgatgaggatatgcaggaagccaacagcgacaagttttgcaatgatgaaaaggacgggaacgagacaagagaggtggaagtggaggacgaggtggcagaactggagaagaaggccgatttggagatgcaagaagttgactacgataaaatttgcaatgatgaaaaggacgagaagggg

SEQ ID NO: 185747 - DNA, 444 bp, Zea Mays
gacaggatgcctaccaagaacagcagggaacataagtcgctccaatctgaggatgcattggtgagccaatactttcaagaatcctcctctcctaagatggcaaaatcaccatcactacaaaggacacatggtatgcttcaattttggcgatcagatgccaacagaaactctcatgattcaccaaaggatctaagtccaccttctgaacaaactatggacaatggaatacctatggttgcaattgaaactgaaaggacaccgtccattaagagacagaatagttttgaaatgaaattacctgatcttcctaaagttgatgtacatcctatacagcggcagtcatctaagaattcagaacctgactcacccatatctcctcttttgacttctgatcctaagaacgagcggtcacattcacaaacttttagcagaccgcagagtgaa

SEQ ID NO: 185748 - DNA, 665 bp, Zea Mays
ttcaacagtgcgcggaagcggatgtcagtgatagttaaggacgaggagggcaaactgtttctgttcaccaaaggagctgacaagtatgtactacctccagtaatctctaacctaacctgacctgctgtatgcgtgccatgccatgccttgccttcgtcgtccctacctcatctcgacatgtctgtgcagcgtgatgttcgagaggctgtcaggatcggggagcgcgcacagagacgtgacccagcagcacataaacgagtatgccgacgctggcctgagaacgctggtgctcgcgtaccgcgagctgaaggcggatgagtatgcgcacttcgacaggcagttcgcggcggctaagaactccgtcagcgctgacagggacgaaaagatcgacgaggctgcggacctggtggagagggaccttctcctcctcggcgctaccgctgtcgaggacaagctgcagaacggggtgcctgagtgcatcgacaagctcgcccaggccggcatcaagatttgggtgctgactggcgacaagatggagaccgccatcaatatcgggtacgcctgtagtctgttaaggcaagggatgaagcaaatcaccatcactctggagacagcagacatcgctgcgttggagaaaggcagcgacaaggccgccttaaccaagg

SEQ ID NO: 185749 - DNA, 956 bp, Zea Mays
ttgagaaagaagcccggaggagttggagttgttaattttgagtccatgggtttgtttggaagcaaggagattggaggagaattgcagggattaaaatcttctcgatattcaaattaaatagcgagtggattttagcccttacagggctagtttggtgaatagcaagggatttcttatccatggatcctctctaattctcttgttaccaaattggctctcggtctcctttaatcctctcgctcccaaacaagcactaatggttcctagaagcatctacaatacaaccattttagaatacacatggaagtcgtttgagacttacaggaaaagcataaatatggccataggaggggcaagggaattaaatccatgttatttagatttgtttatgtattctaagtctgttctaaaaaaatatgaaatctcaacgtaaaaggtatagtaggtgaatagattcttaaaaatctacatagtcctctagttcaacccataatcttttgtcccctaatatttttcacattcttagcatccaaattttccaaaatattatccacatggcaatttataggatgaatcgttgtcttttctatttggaggcctctcatttcactcccacacgatggcaccttccaaggacgactagggctaccactgtgtccctgcgccacactccggctcaaccatctataatcgccgcacctcttgcctatctccccttcaatgctgcttcatcgtccaacatccatgttcttcttttccatctaacggtaccctccttagcacatcccgcctcacacttcaatgttcggtggagtgggtatgactacaaccacgacgcttgcgcctagtcgggcgtaggatctccatggcaggacgtaccccctgccggtgatgacatgttgttgaatcggttcgtctcaatgggcagagcggcatccctcctgctaggttgtcac

SEQ ID NO: 185750 - DNA, 420 bp, Zea Mays
ggagaaagttctggaggaagaggggagtggctccgaaggctccaaggagttccttcccactgggagcttggaagcagaggtagaagagaagggtgattcggaagcggttgctgatgcgaccaagcaaactgcaggtgggaatgtgggtgcggaactgggagaggataaacaggcagaagtgggaggtgaagagaatgctgaggctataaagctggtggaggcaagtcctctggatgctctagctgcggaggattccagtgggcatgagcaaggtaatgatgccaatttggcggaaactgaccaagttgggaatcagattgaggctgtctatgaggaaaatgaggatgaccaaactggaggtgataatcatgttcaatcaggtcagggtatggatcttattgcgattgctttagaggaaag

SEQ ID NO: 185751 - DNA, 548 bp, Zea Mays
gcttttcttgataccgcctccgaggtagacatcacagagggtactaaacatcttgcatcctttggttcagttaggcatgagaatgatgtgtatcccatgaatggtggtttccggcggcaaccacaaaggaggttagacagaggaaccagtactgtaagccaactgtttaaaggtcaggaagatggtgctgctctcatgaagtacacctacgttgtcacttgccagatatatggaaagcagaaaattgctaaagatcaacgcgcagaagatattttaactctaatgaagaaaaatgaggcacttcgtgttgcttatgttgacgaggtccatcaacgaggctatactgaatactattctgtcctggtaaagtttgaccagagcttacagagggaggttgagatataccggattaggttaccaggtgaactgaagcttggggaaggaaaacctgaaaaccagaaccatgccatcatattcacaagaggtgatgcagttcagacgattgacatgaaccaggataatttttttgaagaggccctcaaaatgcg

SEQ ID NO: 185752 - DNA, 744 bp, Zea Mays
gttggatatgttggtgctgggaggaagaactgtcacagggcatgcttgaagaatggtgtggtctgctctttcgacgatagtggtgtcagggtgtctatgctgtgttcatctcttccatctgaagatgtaagtttcagcagcaaaatgtcattagttaattcaacaggctttgcacagaagaagaaagggagtaaggtatggcgaagatcccagggtggtaagaaattggtaaggcatagagctccgaagcatggcctgggaaaggacagacatggtcacagatcttcagttaaggatgatgataccgatgcagttttgtctggtataagcaaggagtccagcattgaagagtgcaattctgctctgatccgtcttgagaagctcagcgatgagaaggctcttaagttctttgagtggatgaaggttagtggcaagctaaagggaaacactcatgcatatcacctagctcttaaagccattgcctggaaggaggactggaagatggctgaacttttgcttcatgaaatggttgctgattcggactgcgcattggatgctcgagcatttaacggactgatatatgtttgtgctaaaaggaggcttgatgcttgggcaacaaagtggtttcacatgatgcttgagagagaagtgcagccaaacttgtctaccgttggtatgcttatgggcctttaccagaagactgggaaactatctgaagctgaattcacttttgagaaaatgagg

SEQ ID NO: 185753 - DNA, 331 bp, Zea Mays
gagctatctggcccaataccctctatactgggcaacttgacatacactgagaaattgtaagctctttttttatttgttactcatttgtttcatagctgattcatcagtgatgattttacctgtgccgttgaactgacaaaagaatctagctttcattgaactttttaatcataagtaaggcccattcacagtattttgtgatggtagatacctgcaaggcaataggttaactggattgataccgccagagcttggtaatatgtcgacactgcattacctgtaagggtgtagattttatgttactttgcttcttgttagtttagtgttctcc

SEQ ID NO: 185754 - DNA, 326 bp, Zea Mays
ctagcactcactgatgaacagaaaatcaaaatttctattgctcgtgctgtgctttcgaatccatccattcttttgcttgatgaggtcaccggaggacttgattttgaagctgagaaggctgtacaagaagcattagatgttctgatgttgggaaggtcaaccattataattgctagacgtctttgcctcattaaaaatgctgattatatagctgtaatggaggagggccatcttgttgaaatggggacacatgatgaacttctaaacttggatggcctttatgctgaacttttaaggtgtgaggaagcaacaaaacttcccaaaag

SEQ ID NO: 185755 - DNA, 384 bp, Zea Mays
gagaaacttgagagcagaatcagatcgaatgcatgctttggcatgtatttgtcggactgctctttgtgttgatctttttgcaaaggagagtgtccgaagaggtcagaagcctgttcctggaacagatgtgatatcgctctttgaagatgtgagggtgaaggaagatctaaacagcgtaacaagcaaaaacttgttcagagaagagctagtggcttccctagtcgaaagttgtttccagctatctcttccactaccagagttgaagaattctgggacagagagcagagttataggagcgttagcctatggaactggttatggtgcccttaactggacagaacctgctttggatgtggtggaagtttgcaggccatgtgttctttg

SEQ ID NO: 185756 - DNA, 587 bp, Zea Mays
gctcaattaagagcccttcagggtcattgcaggaggaggatcgagggcagcttcttgaggcaaagctcctggctgccaggcagaagaggtattcagaagaggaatccagtagggtacattactctgttgtatttgggaaaaaggtctgaagaaacccgtgtcctttgtaggttgaccctcttggaaaaggaacagagccggttggctaagctggacaaactgcgacaggctgttaagagtgatgcagagatgaggttcgagagggaaagggaagaactcggaatgaaagttgaatcacgggttcaaaaggctgagaacaatcgtatgcaactaatgcatgatcgtttgaagaggcaggctgcattagaggagaggacaaaaaggtactttatgcaaagattgacttgggaaaacaagtacagggagcgtgtacaatctgcaatacagaagtgtaatgctgctgagaagagacgattggggctgcttgaatctgagaaaagacgggcacagagtaggctcttgcaggttcaacttgctgtgaagactgcctctaaccagagagaaactgagaggagcaagttaaatga

SEQ ID NO: 185757 - DNA, 986 bp, Zea Mays
gcgtctgcgtcaagaagtcctccttcaccaaggccggcctctgccgccgcctcgtcctcgtctgcaacaagtggggcaacggcaaggaggacgcctgctaccaggccaggcccacggccaagaccaactgccaggccaccgtcgtcgccagactcctgggggacgacttgctgcacctcacggatgtgaacctggagcacaaccacgcgctcaacccatccgccgcacgcttcctcaggtgctacaagacgctgcctagcgggttgagcaaagatctcgtggtgagggctgccagaggggaatgctcggtggcgggtgacatcgatgtcccgatatttgatgaatgggggcggcttaagaccgggcaagctgatgtcctggccatcaacgctttcttcacccagatgcaggcaaagcttccaaactccttctatgtcatggacttctatgtggagggccatctgaggagtgttctctgggctgattccagatccagggcagcgtatcagtatttcagcgacgctgtttggattgatacggcatgcttaaggaacaagtatcatgtcccgcttgtttcgtttctgggtgtcaatcatcatggtcagcttgtattgctaggctgtggattgctgtcagatgagagcacagagagcttcttgtggctgttcaagtcatggttaacttgtatgaagggacagcctccaaatgccatagttaccgatgaatgtgtggcgataaaagccgcagttcgagaagtgtttccgaagacacgccatagaataagtgattggcatgtagtgagaagtatttcagaaaaaataggtgacttgccagaatatgaagcgatgagaaccaatttggttactgtaatatatgattctttaaacgacaatgagtttgaggcaaggtggaagaactggattgatagatttagccttcaggataatgaatggatcacctttctgtatgagaatcggcacttgtgg

SEQ ID NO: 185758 - DNA, 297 bp, Zea Mays
gaattcagagcacgccacagttcaatatttcttcaagagtaagactagaactattagtttatatgctagaatgtttatttatggtcactccctccgatcctattttgttgtcattttagccattcacatggaataaggattgaacttcttaggctttcacatactttgctcctatgaattaccttatatcatagactccctaacagtctcctctaacaccactgccattctacagagaagcaattaataggggcattttatggaaagtgttgccttgaaaaaaatgagcagcattta

SEQ ID NO: 185759 - DNA, 372 bp, Zea Mays
gtggccaggcaaggccccgggtgcatccttgcctcgtcctcccacattggccctcctgacggcgccccctacggcgtgcccccaatgactccggctccgccccagctcctacctccggggatccccaccccgacaccttggtccccactggctggaggatgggactcagcctccatcgtcgtcgccttcagtaccccatggcgatgacacaaccacccccctccgacagggtggtcgactccagtgcgtcctaccacaccacctccatcgcgggcacgttatctcgctctcatccccccattcctcccacccctcctcgatcgtcgtcgagaacagttccactctgccggtcacctcagtaggtgcctcggt

SEQ ID NO: 185760 - DNA, 367 bp, Zea Mays
gagatgtgctacagcagatagaggattttttgtattccctttatacgtggcagaattttgtttttcctttctggagggtttgtccttcatcttcgtcgtccttcttgttcccgtccgtcgtccgcatctccctgctcatgggatttcggtaggtcctgtccgcccgcctgctctcacgatgccttccatctcctgcttgaggtggcagcgtttgcagagcggcgctgcagctagcgactcatgagctccggtgatgcagtagcggcgtgcggcagcagagcggtcggtgctctcacggcgactagaagaggaacaaagaggattgagaaaaaatggtgggaggatcccctctatttgagggattgag

SEQ ID NO: 185761 - DNA, 407 bp, Zea Mays
gtagagtccacatagtttgtcttgatgttacagaaatattatcaggttaggttgagaaaggaacatgaagagaaggagtacaagaaaaaggagaaggctgaggctcatatgttcactgcattgaaggtttggcttgattttgtctcttacataatctgatcggactatttctcagtttttactaaaatgaaacaatcactcaggtggcccgagactttgatattaaagagcaaattggaagacacatgcactttgatcttgtggactttgacagagttaatagcttccgtgcacctaagaacatgtcaatcaacgaagtcaaggtacatcgctggtccttattgtttgatatgattatgattattgaccttgtatgcgttggagtagtgagtagtgagttacttcct

SEQ ID NO: 185762 - DNA, 544 bp, Zea Mays
cgttgcacattgagaagcttcttcgggccaagatggatttcagtttcatgtttgtcttcctcactttgtttacccattggtttttttggatttcctttgtttaatgatatgcctttttatattaaaacaggtatgcttcaaaagaaaaagatatatgggctcgatctgtcattaaagaccttacaattgaagctggttctggtcttcttgttcttgaacctgtagatgtttcatggaaatatacttcagtcaatgaaaagacaaacatagtgttggtgtcgacagatgtttgcatccatctttctctgagtgttgcttctcttatgcttaaactgcaaaaccaaactcttgcagcattgcagtttggtaatattagcccactaatttcttgcacaaactttaagcgaatttggagctcaccaaaaggtatgtgcatgtgacatactacactttttttgttccttattctggttcttgtagtagggcatcatatgctagtctattatactgattcaatactgcaggtgacctacctggttacaac

SEQ ID NO: 185763 - DNA, 346 bp, Zea Mays
tcatgctgctcccacccaaaacgatcatgaataagcccacaaaattcgtcccaagacatgtgacgcagcctgcgctcaaccgactgcaaccatcagtgagccttgccctcaaagtgcatggacgccactttgacccacatgtggtaatctgtatcatacatctcaaaataattatctgactgcacacgccatagttgggggtgcgatccgtcgaaacgggaaaaactgatctgcggcaaacgcccaccccccgatctccgagtatcgtgcatgggttcatatggataatagtgctccgggagaaaaccagagagacgggtagggtgaggtgggtgtgtacccttga

SEQ ID NO: 185764 - DNA, 626 bp, Zea Mays
cataatgttagctttagcaactcatgaagtacacttctctatattgagagaggtaagccttgcttagcgagtttgaaattaattactttctttgttaaaatatttggtcatctaatttctgctatctttgtcactttttaaatctgttaagaaaaccattagtttcaccttgtagtcttctagtagagtttgtttttgttcagacaatcttgtacactctgtaacattagtgtgagtgggtgtggatgtgtatctgtaaggatttattacatttttttccttaatacgatgatacacaactctccttcatattcacttcattttaacatttttcttgtaaaatcttcagtttaagattatgagttttatgtttgcaggtagtttttacacctgggcagcaggacaaatgcttcttatgtggtcaggtggggcatctagccgctaattgtgaaggaaaggcaaagagaaaagctggggaatacgatgagaaaggtgaagctattgttccaaagaaaccataccaggtaatgtattagagatatgtatagtccaacacatgtatatcatcttacttgtattccaagttgtacttgagtatatatatgaaagccaccttgctaaattgc

SEQ ID NO: 185765 - DNA, 447 bp, Zea Mays
ctcttttacagtaggcagctcaggaccagttccaccagttgatttgcagggctgatccttcaaattggtagtaacatttgtcggttgcacgtgttgtgaatttgacaaggcagataccccagggttcaacttcgcttcagcatctgtgcccccaggcttatcagtcaaaatttttgatgatgaaagagtgggcactggattttttggactgttctcacttgaaccacctcgtttggtaccagcatttgaaatttcttggaaacctgcttttcctgaccaggaaacagattgacctgaaactaaaggtttcacatcatttgacttcatctcagcatcaacacgcttcttccagttctcaacaagacacttagctttcttctgaatctccagatttttatggctacgaagatgattgacagatttcccaatgctacaactttgcaatgc

SEQ ID NO: 185766 - DNA, 1590 bp, Zea Mays
cacgggcgccgccgccaccaccggcaacgccgatatgatctcctccttatccgtctactcgccactctacattcttcagctctggatgtgggagcgcttccctgccctcaggccagcaaaggtgaacccactcgttgatggcgatccgcttgccgctcggtggcatgatctgagcaggaagctgaacccggcgcagatacgtgaggccctcagcacaggatgcaactttgtgtggcagccttatgtcagctccatggagcacactgggtgggttcacagcagtgatctagccgaggatgatgaactggcatcgctcgcacaatttttgcacccctgtgagctcgtagggatggattgcattgagcagtacctcccgcaccgtgttgccagacagtttggactggaccaagatgtgcctgcagatgttcaccgtgccaaccaggattgggcgattgcttggcagacctaccagctggaaggtaagaatgtggctttcttcatccctcactctgagcctgggatcacaacacggtatgcacagtggtggaggcagcaacttctgccttctggcattgatgctgctacagcaagtgctccagtagagtggaagacttccaagcgcaaggtgaaaaagacaccagcggccatggaagctgaagctgagaaggagcgtaagatgaagaaggcccgggtctctcctacttatactgataaaaagcgcaaacttgaagagttgtatgatgctaagttgtcggattggcttccaactgcaaggaatgagattagtgacaccactagtgatatggaatcggaggaggccttattgcctaatgttggaactacaaatgatgatattgtgctactcatgccaaggaagcagacaacgactgcacctgtaagggcattgatggataatgacatgatcctggctctaggagagagaggaaactttatggttgatgagcctccagacatccaaagtgaacctgaagctgttgtccctgcaacgctggatgaggaaatagttaaaattcctgaggttatttctcttgatattccagataagccagaagaaggagccactgcagtaatggaggagcagaaggaagctactagtgtatctgatagatctgaagaagctagtgctctggtcataggagaggtagaagaaaaggttgccatagagggagctatttgtgttacagggatgaatccatcgggaaacaactcagcaactgtaatggaggcagatgaaagaaatgcagttccaaaagaatttggaagggctgccaaggaagtaattgaagctgtgccccagagccaacatgaagttaatgcaggtgttataaacaattctcatgatgtggtggctttacctgaggaggcccatccagttcagcccacaaataattctggtggatgtcccgtggtatcttgcataatggaagacagtaaagttgctggagattcgggcaaaattgattatgaatatttttgtgattttgttgaggaacagagggagattccttgtgtacaagagatttctggagaaaacagtcgaatgggtgagaaagagagagaagaaacctc

SEQ ID NO: 185767 - DNA, 313 bp, Zea Mays
tccgtgacgacgaatcgatggctcgatgatgattattcttgctttaaccacaccgaactaaaggctattggaagggtgctttcttccttcctccatttgcgccaggctcctctttcttggtgtttcctcatgaaaccttgctttcttgttgaagaatgcagttcctgttttcttccgcgagagtgcgaggtagaaggattcggtaagatttggtagcgtagcaaggggggaaagctggaggcctcgtccgctggttcttggcttgtagaaaaacctggcctttctctgagagcctttgccctgtatttgcaat

SEQ ID NO: 185768 - DNA, 450 bp, Zea Mays
gcggaggaagatcgagcactgatggctcgacaaatggaggaaaacgagagaaccattgcacagctgcgactggagttgcaggcgaaggacttggaaggtaacgaaacaaactctgagcgagagatgtgtgctcctcgatgggatgatcggggtggaggaatggagcgtggaagagatcgtagggagcagtggggtggaggaagagagggtaggacaggcccatttccgaagtggacattccccaaatttcagggcagtgatccaggaatatggtttgatcgatgtgtagattacttcaatgtctattaggtgccggagtgaatgtgggcgagttcggcttttatgcacatgaggggaatgcgtcaaggtggctgcaggtgtataagttgaaacatggattgtgtgattgggggcagtttacacaggcagttagggagaagttcggagtag

SEQ ID NO: 185769 - DNA, 300 bp, Zea Mays
tggagattcacggctgggtagagtccttgcaggatgctttgacacagttcactgcccctgaagatttagatggtgataatatgtataaatgtggaaggtagtgttgcaactggtggctagaatcttgttaccgtcatttcagttggaccgcaataaactgaagctattgaaattttgaatcttttaatgcagttgtgctgcctatgttaaagccaggaagcaactgagcgtgcatgaggtgccaaacatattaacagttgttcttaaaagatttcaggtaattgtttttgtattgaattt

SEQ ID NO: 185770 - DNA, 413 bp, Zea Mays
tagcttttcaggaagttaacaagggacgtgagatcttatgtgcaaaaggttttctgctgtctaaactgtgaaattttctattttccccacccattcgatccttgtggttattaactcttccttttccttgatcctagtgtgtagataatggaaaggaagttaatttgcaatttgctataaaagcaaaaactattaccagtggtttgaagtactcccttgctactggaaactggggacaggctaaccaagctggaaccagagcaggggtttctcaggtgcctatttttttttggttttatcctcatctttagggcactacatccgacttcattcaatgattttttttgctgatctatgttccattatctttcttacaaaggtgctcaatcgcctgacctatgcttctacacttt

SEQ ID NO: 185771 - DNA, 740 bp, Zea Mays
gtccaaaagccattttaggcttaaatgctgtctgggggaggccaaaggacgcccaatcccttcagatacatcctgggtagacgtgagcagtcagcagtgctttaaatgctgtctgggaggccaaaagacattttggacgtgagcagtcagtagcaccagccttctcccccattttagacgtgagcagtcagcagcatcagccttctccgccattttagtcgcgaaaaacagcagctgagaagtccaaccgaagatgagcagctcttctgaaggtacggatgttgtgctgcagctgcttttgcctgttcttcactctttgttctctgatctctccctccctctgttcttcattcctctttgttcagcaaggtctggactctggaggcagagatactattaagatgtttgacgtcgcagatatgcatggacatcatggtgttggacgtcgtgctgctgttgttcaagtcatcttcccgcagtcccaaattgcctgagggaaggcgtcctctgtggctgaaactggcagcacagatcatgttccgtcggcctcgtcaactgctgcagactcaagcacgcttgctgacaaggcaatagcaggtctgcctccagaccttgttgaacaagctaacaattcgaagcggaaggctaagtcacaggaccctggctggaagttcggttggtggcctgatccgtctaagaaggagttcgtgcaatgtatcttttgcatgaaagtggtgccc

SEQ ID NO: 185772 - DNA, 466 bp, Zea Mays
gagaaagtcatgggaggcgtgggaggaggcatctgaggtggctgcaaagggaaaagtgggtctcgtcgaatatgacatggcgagagatgatgatgcgacgtgtcgataggtcgaggcagcggtaacctttgtgcgaggggggatatccgaggaagacgcatgccgtggagcgagggacgagcttatgtttggaggttgcttgcatgttggggtaacagaggcacccaaaaacacgcagatggttataggttggcggttgattatgcagacgagtgtatggaatgtcatgctgaatggaggaggatgggcgcctattatggaggtagcaggtcgtcaggagtccctcggcccaatatgcgaggggtagggaggcatggagaagcatggtgcgaatggaattgttgagtgtgtggatgatgcgttcggctttgccattttggggtgatgtgtagggacaggaggagcg

SEQ ID NO: 185773 - DNA, 402 bp, Zea Mays
aagagcactctggcgacacaaggtgcttgggagatgtcctattgattggcaacaaagagcgcatgtgtgttgatggtgacctcaaacaaatatatttatatgaccgtgtaaggaggctttttggctgctttgcaccattgaccggatggaaacatcacctatcttccctgtctgattttcttgagaatggctactcacagtacctccaacatctacaagacagtcaggaaggtgatacgccttcctttttctcttacgccagaaaaagatttgccgttatttatatggagctcagaagatgtttcaatgatttgttgttacatgtcccaaaatccagtattctggaagtgaattacaacagtatccttttacttcttgaaatgcttgaagagttcaaccaca

SEQ ID NO: 185774 - DNA, 467 bp, Zea Mays
gtaagcgtgagcatataacactgtcttaagtcattgctgacttaagccgattgctccgttagtagggtatagtggtcaccccgagttaagtaagcgtgagcatgtcgcaccgccttaagtcattgctgacttaagctgattgctccgttagtagggtatagtggccaccctgagttaagtaagcgcgagcatgtcgcactgccttaagtcgttgtcgacttaagccgattgctccgttagtagggtatagtggtcaccccgagttaagtaagcgtgagcatgtcgcaccgccttaagtcattgccgacttaagtcgattgctctgttagtagggtatagtggtcaccccgagttaagtaagcgtgagcatgtcacaccgccttaagtcattgccgacttaagccgattgctccgttagtagggtatagtggtcaccctgagttaagtaagcatgcaggttgacagtg

SEQ ID NO: 185775 - DNA, 1204 bp, Zea Mays
gccccaggtacggtcagcaactgttaaccttgccactgagatggcagtcgtctgggcagtgcccgaggatagtgttgttcaggattggaaggagcagctgggtgagaagcttgccaatcagttgacgacatgtggctataaatccaatcttcgaggtaaacgctgcaataattgctcaagtactgtcaaagggctaaacttgcacattttagttgggagtgatggggcagttgaataatggatacattgttagtttggaacttcgaataaagagctaaaataatggatgtttttttaacactgctccctcgtgtccctgggtgcactgtaatttttaacctgtacttacgctcttttcctatcttaattgaaaggcagagctccattttgtttcaaaaaaaataaagaactaaaataataccttttcttttcaatagaaaatgtcgacgaccataactcaaatagttaaatctcttaaccaactggatgttcttctggatattttaaatggaaagatgaagcagtgctttagaattcatgttgcttatcagtcaatcttgtcttgagagttgagataaatgaatgcaaagtcttctttgctcacatggtacacttgagcacagacaacatgttgcaaatatataatatccactttccccttctgtcaaatatgaaaccccctccaaaattttgctgctgcttgtatgttcagtcctcatgctcatgcaaatgtctatttgatctgcagattcttcaaaggttggttcacaaacagttttcgaaagaaagatgcaagacaaacttgaacagctgaaacaaagtggtaattttttttttgttgacacaagtaaccatcagcttacaagcttctcccaatccatgatgtttttaaaaggaaaatttgcaaacatgccactgttcactagtcgttacccctgtttgctattttaccatggcatgtctcaatgacaagcgggccctggtgccagctgccattgagacatccagcagtgcaaaaacagaaaactggggtttggcccattggtatgtttgcaaactcccattttttattatacagagtgttaacttaattgctgacatgatgccctgattattcttctaggtagagaacttgctgtatcatgggcattatgtgcggtttgccttgtgggacacatttctcacctttttggagttaatatgc

SEQ ID NO: 185776 - DNA, 540 bp, Zea Mays
cggccccgtcccggccgggctcttcgaccttccccaggcgaacatgctcgagctcaccgacaacatgctcaccggcgagctcccggacgtgatcgctggagacaagatcggcatgctcatgctggggaacaatcgcatcggagggcgcatccccgccgctatcggcaacctccccgcgctgcagacgctgtccctggagtcgaacaacttctctggcccgctgcctccggagatcggcaggctcaggaacctcaccaggctcaacgccagcggcaacgcgctcacgggaggcatcccgagggagctcatgggctgcgcctccctgggcgccgtcgacctcagccggaacggcctcaccggcgagataccggacaccgtgacgtcgctcaagatcctgtgcacgctcaacgtgtcgaggaacaggctgtcgggcgagctgccggcggcgatggccaacatgacgagcctgacgacgctggacgtgtcctacaaccagctgtcgggccccgtgccgatgcagggccagttcctggtgttcaa

SEQ ID NO: 185777 - DNA, 366 bp, Zea Mays
ttgactgaaaaacttaaatcaggtcgtgtcaagcgctgtaagacaccccacaatgctcctgtagcttattgcatgattgcatcttcgggttcaagcaacttgccttcaccaatcctcaatttctccagggaattctggtatctgttgttaaggaaattcggtctgcattctttggctcctcaaccagatgttggctcatatctaggctggtgggaatcggtggggaatattgctaatgggctcacaaaaaaaggccttgattcccttatcattctgggagcctggaccttgtggaaacatagaaacaaatgcgtttttgatggctgcaaccctagtgttaccatgagtcttagagctgctgatgag

SEQ ID NO: 185778 - DNA, 747 bp, Zea Mays
cgaaatccaaatattttgagtcaaagcatcaagaaccgttcggctgttggctcttcgtttgggaaccagccggaatagcagcggtgcaaggtccgcgatacactgtccatggagccatttatctgtccaaaaaaatgtattggctccattcccaatctcgctacaaatagcgattgagaagaaggactgcaccatatttggggcatgaactggaagtgaatcccaaggcttatcaggctcagttttttgaagccaaagccatctcatgcgcaatgcctagctaagcttctgaagatcagtgatgcccagaccaccaagctcctggggtcgacaaactttttgtccaagcaagcagactatgactaccgttgagctatttccttcctctccacaaaaatctcctcctgatcttatctatttctttgaaagcccacggcggaagctctacagccattagcaaatataccaacatggaggtcagaactgattgcaccagaattctcctaccttcccgagataacaggtcggccttccaaccaggtagacggtccgcaatccggtcaacaaacagctgaatttggtcccttgtcaacttaagcagggaaagaggtacacctagatatctaaaggggaattctttcagctcacatggaagaacgttctgaaccactgccacatccgtttctgtgcattggattgggaaaacattactcttaagcaggttggcctttaaaccagaggcatcac

SEQ ID NO: 185779 - DNA, 876 bp, Zea Mays
taaaacaaattcgacaagaaggaacacagaaaggtttgagtaggaatatagcaccatcatgggaagatgtactgcactccagttcaggtttaccaacttcatccatataccaggtgaggaaatcgtactagggattcttcttccttgtagaacacatactgatgcatgtggaattgtgaaaacaatctatgatagtcttttgaaagaatctttggtggaatgccttgaagtgttcctcattcaatatatttttaaaacattgttactttcactactctttaggaaaatttgaagttgacatgcatttgatatttgttatggatttggtgtttgaagataatcttttatagtacatttttaaaaatgtacttaattgtcttgtcctctccatatcaaaattatactccttgtgttcaattgttcataaatctctttgcatgcttatactctcactgaactgtatcagtgacttgcgtttttgtacagcaatctgatgtcaagtatcagaaaaaatcagaataccagccaccggaaatcctggacagcagtgatttgcgcatacaactttctgctactaaaaggtttcttttaggaccagaagccagcattgactcaccatctttgaactctgtgctgagaaacagagtcaacagtgtaactgataccatttcagcttatgacagtagatttgaaagctctctgaacccagattggcaaacaaaaacagcattaacatttcaaagcaattctcagggctctgaaataacggagttgtttgaccatgatcattttgaaccctactccagagaagatacaacaatttccttaggacagacaaacaagtttaacattcgtgaggtctctccagaatgggca

SEQ ID NO: 185780 - DNA, 316 bp, Zea Mays
ggctgattagcggtggttagctagcgaactaccccacggagctggacacgggctcaatttataggaaggatgggcggtggtcgcgaatttggacgagacacgcggcggtcggaggtgaagaagaagcactggccgcgtgagttcgtggccaacagcgtggcagtaactctggtgagccacggagacttcagaggaggtcacggcgacatggtaaaagaggtaagccacgcggcgcatggccgggaggcggcggtcgacggtgaacatatccacatccgccgcggtaacgatggtacggtggccggagttgtttaat

SEQ ID NO: 185781 - DNA, 410 bp, Zea Mays
ccaggctccgacaacctttcttgaggcggttatcaagggacccatcaaggcaacctgtcccccggcggtgcagaaattcccggaggttcacggcttaaagctagaggctttacgtcagtcctctgctccagaagctgagcgctgtcctgctactcaatacagcagggacgaagaagggtggcagctcgtggaacgcaggcggtctcggcaggttgagcgtgagcctcgtcgtaggccccctgtggatctccgaggcaagtgctataagtgcctgtcgacctctcacttcgtggcggcgtgccgtagaccccctcgctgttttgggtgcctacatcttggccatcgcgtggcacagtgtcctacacacttcaagaaagagaagaagccgctcaaggagagactgggttcgc

SEQ ID NO: 185782 - DNA, 311 bp, Zea Mays
tcctcgccgttagtggcactgtctgaatagccaggccaggaccctacggaagagaatcttctacctttctgtcaatgccttgggggaggtcttaccccaggggttgggttttgttttgaatatgcgatgacgccaacgggaaaatttcattagcagtcttgtcctgcattttcatttaggtcctggtactctcaaaatgcattgtcctgcgttctcatttcagttccggcacactcaaatacattttttgccaccctaaatttgttgctaattgtaccacatgacgtctaagtccttagaactttcattaa

SEQ ID NO: 185783 - DNA, 308 bp, Zea Mays
attccccagagagccagaagaccaatgaacggcctgttcctctctagtctctcttccgtttccggtggtatcatcgtctcagagtttatcttctccatatcgcttgcctgttctcgttgcctcgtaagctcttgagttacaccatcgtttgcgttcacctctgggatgttaaaaatctggtttcttttactggcatggcggccgttcgtgtatacatgctcctctatctagccacgggatgcagtgatgatacacatctatacgctgcgttaagaacaagaacatgcagttgcatggccacctattat

SEQ ID NO: 185784 - DNA, 304 bp, Zea Mays
cttttctcttcacaagcactagcagaacagaatgaggacggagtttccatccttttttatttgcaaaaaatctacccaggttctttgctgaaattttgattgtggctaggcacacctcaatatttccacattcttctgataatgaaaacaatgttttctatccaacatccttgcagatgaatggaaaaattttcttgaaagggtgcattgtgagagtgaagatcaactccacgagactgagcattctgaagagcagcttcgcctttgggcatcataccggggacaaactttgacaagaactggt

SEQ ID NO: 185785 - DNA, 338 bp, Zea Mays
tgggagtaggtcaaggtcatgccgcaatgaagtggcatcaattgctttctcgtatcgtgggggttgaaagggagacccaaacaaaatattgtcacgtacctgtggggtcacagttagatctctgcagaagttatatagggtttgatttaacacaacaaagcagcagagaatctcacagtagcattgaagatccaggaaacttgaggaacgtaagccaccgatccacgaatgaccactgaggtacctgatccagatactggtggtatttctccaagcattgcagatatgagagaagttttaccctcaccagtgcttcctactattgcaactaaacttcc

SEQ ID NO: 185786 - DNA, 842 bp, Zea Mays
gtttgtagctgggaatttaagtacattctcaactccggaaatgtcagatgttgcaagaaagttgttttcagaatctcaaattaagcgctgcagaaactacttgaaaatgcctgcactgattattgatgagaaagagaaggaacacctgaggtttctgaccaagaatggactggttgtggatcctgttttagttgagaaggaacggatcatgataaatccgtggactcaagacgaaaaggaaatttttatggagatgcttgctaaatttggcaaggatttctccaaaatttccagtttcatcacacataaaactactgcagactgtgtggagttctactacaagcatcataaatcagacagcttccgagaagtgaagaaactgttggaccttcatcaacagctgcctgccagcaattaccttggagcgaaatcaggacagaaatggaatcctgagtcaaatgctgcttctcttgatatgcttggggtagcatcagctgaagcagcccatgaccttgaatatgcaaacaaagtggagaaaatttctgtgaaatccctcatccggactgcatatgggtccaatgtttcatttgtgaccaaaaaatcttctgataaggagtgcattgacaatgtgcctttgcatgagagagaatctgtagcagctgatgtactagcaggcatatgcggcactccttctcctgatggaatgggctcatgcattactagttctgctgatcctggcctgaagatcagcatgaaaagagtggagcatgtcttatcccaagaaaatgacaaaaatgttaatgaggaagaatctctctctgatcaagagtgtgaatttgatc

SEQ ID NO: 185787 - DNA, 568 bp, Zea Mays
tcatagtggtcacagtttggaaatgcagaaggataggaacagtaaatcccatgaaaacgagtcatgtaaacgagaacaaggcaataatatattgtcaatatgttttgttgatgagaccagtataatgaaagatgatcaagtaggcagagagaatgttgcagcttccaaaaagggtgaagatgcgacatatgatttacctgcagaaaaggatgataccaaactaccagtcactagagctgatgcaatgaccaggaccaatcaagagcatacagatgagagcaaacagcatgggaaaataaagcaaataacagataaagactacaatgatgctggatatgagttcttgatcaagtgggttggaaaatcaaatatccacaacacctgggtttctgaatccgaggtaaaaatattagcaaaaaggaaactagaaaactacaaaacgaagtatggaacgagtttgataaacatttgcaaggaacagtggtgccagccacaacgagttattgctcttcgagcatctgtagatgaagtggaagaggctttaatcaaatggtgtggtctttcttat

SEQ ID NO: 185788 - DNA, 350 bp, Zea Mays
gtgcggcagtggtacaccgacacctcctctcagtggacgctcgattacccgcccttcttcgcttacttctcccgcctcctctccctccctgcgccgctcgtcgacgccaccctcgtttcaatccccgtgcgtgacgcgacgcccttcgcgcatctcatctacctccgcctcactgttgctttctccgacctcctcctcctcggatccgtcctcttactggcgagggacgcgcagcggaaacagcggccgttcctcgctctcgctcttgtcgtatggtcgccggcgctgttagctgtcgaccacgtccactttcagtacaatggattcctcattgggttgctgctgctttc

SEQ ID NO: 185789 - DNA, 415 bp, Zea Mays
catcagactgcgacgcagcgcataaaccaaacagaagtctagacgaagctgacaatagcaagaaggacccaagtcacacatcagccaaacagcacccagaagccgacaattactccaaatccatcttctggtcgttatcatcagcaggcccttgaagctcacccctaggattcctcgcattagcagctttcagcagaagtttggccccgtcctgaagtaaatcttgcagctctttcttgctcagacctgcccagttaaagattaaagcacaagcatgacacacaatttcgacaggagagctgaccacaatgttttgaaagcaaacattattcctggctttccagattgcccaacagatggcagcagcaccaacagtgctaatttctttggcctcacccaaattattatcaagtca

SEQ ID NO: 185790 - DNA, 494 bp, Zea Mays
gtcagctgaagaagggcgaacgtatggggggcggttcaggtgaaccactcttttgtgtgtatcatcactgacgctgacactggctagagcgcgtcctgtgcaagctagctagttggtagacgcggctagtacacaccacacgccaccaatatttgcatgctagtgcaagtcagctagctagctagctagctcacggcggtggccaatactctagacctcaattactgccacacgaagcggtagctagatagagtacgtgcgaccacttcgaaacgtatctgtccggagcggtagaaatctgtagcgtacgtcagcgtcgtctcggagacggagaagtagcgtgtagctactattatactacgcgtactagatgccatccgtgttcgctttggccaatcggggcaaggccgtttttctgccatacatcacgtcgtcatcgccgtcaccaccattcgtgacttgtgtagtaggtagtagtatacccggaggccgga

SEQ ID NO: 185791 - DNA, 478 bp, Zea Mays
cttggttagttcagacgaatagttcaacctacagattcttgcaagaaataagtagcagcatgccaccatacagcccatgcatagctcaggctgctctacctctccagaccgtatatgtaagcagcagcctttgcaatcttgatttggcaaacctgcacacgcatggttttcaaactgtgctagcaaaattctaatacgctggtactggtaggctaggtacgacctaaagaagtaaacatgcttgagggctcgataaaattgccataatgttattcctacaaagaaattgccaaacttgcacaatggtctccaaatttgcacatgttaatggtctccaaatttgcacatgtggcctgccgagtgttcactccatgttaccatggagaaagagcagtttgccaatgtagctagctgacttcacaggacacggtcgtctttggtgtcaaacattatcaacaagaagatccgacaacccaac

SEQ ID NO: 185792 - DNA, 426 bp, Zea Mays
agcccttcgtcggattcgttggatgttgggagcccttcttcgttcaaggatatcctgctcgcgggaacggtctcggcctcagtctcggtgacgtctggggacatagtttcccatggcgcccaggctaggaccttgcaggcctccgtgcagaattcctctggtgatggtggacggtttgtccgtcggtcttccccactgcgctctttggttcagcccaggcttcagaagcctctggtggatcgtgatggtttcacactcgtggagagtcgccgcacacagaagcagagacgccgcctggagaagtcgtttggtgttcaagctctggagacctttaaaggacggtgcttcaagtgcctctcacctcatcaccgggttgccctctgccgttccatcatccgctgcctcctttgccatacacctgggcat

SEQ ID NO: 185793 - DNA, 1091 bp, Zea Mays
gcagcagccaaagcttgctgctctcccaacttcacaaaattccatggtaataatctttggtacagtaatgttaaatcttaatgaagccaaaagctcactcttatactgcctaaatttgtgccctaccataacagtaagctataaacattcttgaacatgataaaatctgatgatattcgcaccatatcattaattcattatgcttgctatttgaatggaactagttgtaaaagtgtttgcaacaattctaaagttctaaccttcactctgatttgcataaatttttgtgtcaggtcatgcataatggaccgctttatcctcggccagacaattttggtggtcataacatggcacctccgcattcagtaccaaatccatataatcttggtccattgcctattggaacttcagtgaggccaccgtcaagtatgtttgctcctccagattttccaagcgtatcttcagctgatgcataccgtcaacaccatgaagtcactgccatggtaaggagttgattgcatggacatattttgttgcaaaactaagacagttcaaaatttctccagaggctgtgtgccattatacttcttaaacattatagaaatgctgttccacatgtggtttgtaacgtactctgtatctctgcataatttaataacccatgtgcataatagtggtactggttgatatctaacatttacatgtatttttttgtggcacacatatcagacattttaagaatgatatatacatctctggccaattgccactaaagaaaaccagacagaggtactttctaatttgttttgcacagagaaatacattcgagataccaaaatctcataaagcctgagagatgcacttctgcagttggccatactttactatgccctattcccttgtgtatagcttggtaacagggtattttagaatatttctctaggtgtacaagctcattttcttctttagttaggctgctatctgttcattattcttttgtactgctatctgttgattacttatttttcgacttttattttttaaaaaatattcagggtgagaacgttcctgctccgtttatgacatttgag

SEQ ID NO: 185794 - DNA, 449 bp, Zea Mays
gtctgttttggtgggttacagtaatccacaagatttagttgagaaacaaagagcccctggggaatcttctgcagagttgattagtgccttgaaagaaatcgatttcccagaaattactgcaaagtttccatgcataaaagttggtgatgcatcacctgttgaactgtatgaggattctactaacatgaagtttaaagaagctgcactttctgaaaagctcacaaatttcatccaaggctcagctcgaaatttggagtcagcttatgaattccataatgactgtcatccattgaatcaaacacccacaactgcaggtgatctttcaatcagtgaagagatccctctcattgaaccaatagttgatacgaagtcccccgagtcattgtcagatgctataacctctgacaatagtatactggataaaagtataaggtgcttgcctggaacaa

SEQ ID NO: 185795 - DNA, 1563 bp, Zea Mays
gcttcggcaaacggggaggaggaggagtgtttgcttctctgtcttgatcggggaggcgccatggcggacacccgcaaattcgtgctgcccggccaacccccaggtacggctcgctcctcctgtctgcttctcctccggggttggggttttgcgcgctccccacgggagagcacggagaattcgatggttttacggccacagatgcgttttcgtttcaagacggagagaaaagcaactgcacgtgccgtgtcgatcgaggacgagtcatcttaaatgctttattaagtacatctggaaaaagggccgtgcgtcccatgttcttgcagttgcacttgcagtccccgcgaaatttcaccctcttttttttatatctacaaaaaaaaaaaccccggtccattcccggcctttgcaaattcgctctatcgccccgcggaatttcgagctggatgacgggatgagtttctctttcatcggccacgtattttgtttttcgaaagaaagcgactggggctagtctctctctggcgttttgctgacttttccgaccaataattcagagcagacaaaaaggggtttcggtaccaagaacgaggagtcgaggaccgtatgcgagtggtggtggtcgcctggtcggagcagttgttggcgttgactaaccggggactaactaactaacctcgtcgtgaatgaatctgcagacatctcgcagatactgcaggaggctcagaaccggtggctgcggcccaccgagatctgcgagatactgtccaactacaagctcttctccatcgccgccgagccgcccaacatgccgaggagtacggtttctctccctatgttttttgtgctctctttaggtgcatgctgtggcttctgaacactggcctcataaatatgcttattaaattccattagcaatcgtgatgtatttatgctgtgggctatggaagagttgttgtctgctggcagcttggcatgggcatttcggctgtgtatatttctttggagtagctagtgatacagcttatggtaaatttttcgcttgctttgcgggctcgacaggtcttcctctgcttgctatgaagccatcgaaaacatgttctcattctgaaacagaaatctggcacaacttgatgtgttgggggatctggtgggtaaattttatggtaaatagtttgtgattttcgctaggcaacacaaccacatggcggttttcctttcgagtcattgctgatgatacgtcagccacgcccagtgtcctctttcattagttttttaagaagaaacgtagttttgtttcggttagcacaaatagtacaacagttacattatagccctacagtttgattgctcgatttggtcaaagctattcttatagtagtattagctctacagtttgattgcttcatttggtcaaagctattcttatagttcggaatgctggccctctcattggcactgattctcattacttaacttccatctgatcgcaataggtggctctctttttctatttgatcgcaaagtactgaggtacttcagaaaggatggacacaactggag

SEQ ID NO: 185796 - DNA, 2750 bp, Zea Mays
ttccgctgcattttcaggagtagagagaaccaagggaggcactgcaacaaggtacggcgcctacttgctgctatctttgcacaccgttcttcttgacgatgcgtttgagactcgtcgttcttgagctcggtcgtattggttttcggtacagcgagttctaggatcgatccatcgggttaattgactcacgcgtttttcactagactagattgatgttcatacgttcctttcacttcattttccccgttaacatcacgaaacattacgtatatatgcaaggaattttcaaaccaaaattcagataggcgaccggttgcgctccttttctctttagttactatgctatgaagtgcagcaatatacccccttcattctatactactagttacctatatattatataggtaaaccttatttaaactatcatataattcatgctatcgctacgattctagagaggaaaggagagagatcgatgatgacggtggcacgagtgagggaagggagagggggtgggggcggtagggtcatgaggggaggctagggcggtaggatcgtgggatgagggaaagtgacgagggatgatctaaataatattgttgaatgtatttgagtaagagagatatagttatatagcaatctaaaccgttgattttcatgatgtgttaaatctgagtgcgatttgtttggtggatttagtggaggttatgggtgtgggggtgatttggttgggtacttgggtgggttttgtaaagtttaaataggtggattatatagtaatatagaataagatagtgttccaaatctttactatgatatgtactccatttaaactaatcgtgtagccgatctcaagcttctaccatataacttgcataaatatttcatatggcaaatgagaaaccataattctacccgcaccgtcttccatgagatggctcgaccggcaccaaaccctacacactgccacctcttcccatccccacactactaccaccatactaagtagccgaaagtcccgaacgacatgtgaggatagtggtattgaagtcctcgcgtccttgtgactttaggctctcgtgggcgtagcgggtgtcaggtggtggtgctaggaggggtgcccaccagctccgacgtctctcctctccttattcaatcaactacagtctcgaattaaacctaactaatctaaacttaccaaatcaaaaaccaatgtacctcaatcgatgacaaccctattatgctaattgtagccctgcctgcattggctatggtcttgcttgcatcattgtttgcctgtgcgggcatatcactagtgtacaggtatacatattcaagtggaccaccactggacttgtgtcgtcctggcccattgtccaccatggtcgtgccgacccggtccaatcactatgttatgattgggcgttaggtgtggcacggtccgattttattttttcccctattttactcttgtttgttcttacatttatgtaccgtttgtttttctgattgttttgtgaaaactaaaagtatataattgttacgatggattaggtttaaaaatgcatagtttatggatttagagtaacacgcatgctataaacacacgaagtcagttttttcgcatattaacaaatctatggatagagaaattaatccataatatagagtaaagacttatctagatttcgaattctttgcttacttgaaattcgggtagggtgtatagtatgtacttggttgtcatggtaacagctagtttccagattagatgattgtgttttttttttcaccttttgatctgatttgtcatacatcactatgcactatgcagtagactgtctcgtgggtaaacattagaataccgattttatttgtagttcagtattgatctctctacctaaaaaaatatttcttgttttttgaggaataaaaatatttaatcaaaactgtagaaaaagtgctacataatacaaaaataataccattaatgtatttttacaataaatagatgttaatattataattttggtcaaacttgagcttgtttgaccagcacgaatcctataattacattcttttgaataaggtggtaattccgggagacttcaaataaacttgtcagtaaaccttgtttgatagcagcaactctgtaatcagtaactttttaactcttctgtttcagaatatgtttgatagctacacttcgtagaggaagaagtatccgggaagaatggatgagaccggggatgctcctctgaggtcctgcatgttccttgtcggtgacgagaaagagcggcttataattgaagcaaccaataagatctcttttgaagatgcaaagcttgatgagatggccatcgcagaaaactacaacctttgcaaaattgttgcctcaaaggagaagatgatcaaagagctgaaagaatcaaaagcgcattcagaccaggagttgaccgatgcaactgcaaggcttgaattttcacaaaaacaatgcgcctccctcagatatgaggtgcgcatgcttcaggaggagcttgagattcggagcaaagagcgagagtacgacctcaaatcaatggatgctggtcggaagaagcagcaggagagcatgaagaagataactgcactagaagcagaatgccagaggctacgggccatggtccagaagcgtctgccaggccctgcggcgttggcaaagatgaaagatgaggtcaagcgacacggttctagttctgctgagaatggaa

SEQ ID NO: 185797 - DNA, 826 bp, Zea Mays
ctgagcacataatcaaccttgcccgtgctgtttacattagaagataccctgttcttctacaagggccaacatcaagtggcaaaactagccttgtgaggtatcttgctgcaaaaactggacatgagtttgtccgaatcaacaaccatgagcatactgatctccaagaatatctgggtacttatgtgacagatagtcaagggaagcttcagtttcaggagggtgctttggtgaaggctgtgcgggaggggcactggattgttttggatgagctaaatcttgcaccgtctgatgtcctggaagctttaaataggctgttagatgacaacagggaacttttcattccagagctgcaagagactataccagcacaccctaattttatgctcttcgctacacaaaacccacctatgctttatggggggcgtaaaatgctgtcccgggcgttccgcaatcgttttgttgaagtgcatgttgatgaaataccagaagatgagctagccacaattttggagcagcgatgtagaattgctcccagttatgcgaaaaggatggttgaggttatgaaagaattgcaaacacatagacaaaatagtagagtgtttgctggcaaacatggtttcataacacctagggatctatttcgttgggccaatcggtacaggacatttgaagggaagtcatacgaagatctggcgaaagatggttatttactgctggcagagagattaagggatgtcaatgagaaagttgttgttaaagaagctttggagcgtcacctacgtgtaaaactcaatatagctgatttgtataactcggtaacgattcc

SEQ ID NO: 185798 - DNA, 1129 bp, Zea Mays
cccccgtgaacttcttcaagtaattggtaagtttgtagtctgtactgaggtcacctttgagcataattatgtacccaacttcaaccctgccttataattaacttgattagatttttgtgaaaaatgaaaagatgtctcttgaaaggatactactgttgtcaggggttcattatgttgatgacgttgttttttgcatccatgcgcccttttttttgttgaagattaggattagaaagtaaagagaacttcttagcttgaactttcttgtaaattgtttttaatgtatgtcatttacaattactttgcttgtatttttgtggcagatctacaggttttctcctaattgcaatatctattccatttacaatttctgttaaagtttgtgtactgatttccattctgataattagaattagtttgtttgtattttgtttgcgggttcacaattttcttttaatgatcacattaactattctatttacaatatttgttaaatgattatgtaatgatctttgtgttttacttatctacttctgttcaggcaaagacatgagaatcattgtgtttgcttttatccccagaacacagcaggtaccttatttcaattatgtatggagttgtttcttttagcatatttattttcatgcatgctgaatcttttagattttacttgtgattcttgtcttttcagaaaaatgaagtgtttgatgctttgaggagatacactaaacctgctaatttgtgggatctatatgcattttcttgtgatccatccaccattaagcatgattctgagccaaagtggcgtctcttgagggaatactttcgtctttttaggagaagtttaccgctacagggagtcgaggaagtttctttgtgtaatgaatggtggaggctaactagagttaattctagttattcattgtgttcaacttacccctctgaactcattgtaccaagaagcataaggtacttccatgttcttgacaataacatgtggtagttttgttctcttaaacacatttatgaattatgaggaattgacaataacatgtggtaaattgatactaccatttgtctactacattagtgatgaagatttatttcaagcctccccatttcgatcagg

SEQ ID NO: 185799 - DNA, 765 bp, Zea Mays
ccttctcaacacagcctggccagattgaaagctctttgacattggacctgaaggaggtgcaggtccacgcccctgaggaccaaacagtttagcattactgccagggggtgctggcgggggtacaatgttaccagaagctccattgcgtcctccatgggagggtggtggcggaacaggaggtgatggcatcgatttgcccatggggctggatgattgttttgatgaatagcatggtggagggggtggacgtggactggagctcgttccaggtggtggaggtggaggcaatgctgaagctctaataggtgatgatgttggggcaggcggtggagggggtgcagcaggcctaacaggagatgaagtagatgcaaatagaggcagatgtgatgcagcaggtctaatggtagatgaagtagaagcaagtagtggaggtggtggtggtggtggtggtggtgcaggaggtttactgagagagcacctagaaggcggtggggaaggtggggattgaggtgtccctgacagtataagagatgaactcaaagcaggtggttggggggtcagcggttgtggtgcatgagaccttacaggaaaaaggcctaggcataggtggaggtgggggtggcacaggtggaggttgtggtgcagctggcgctggagatctgaaagaagttggagatggaggcagatgataaatcctagaactgaaaactgatgatggtgggggcagtgggggtgggggtggagcagaagttggcaacaattcaa

SEQ ID NO: 185800 - DNA, 366 bp, Zea Mays
attcccgctcattcccatcctgcttcacacacgccaagaatccaccacaatcccatccatcacagccacacaccacatacacacaccaagtcgcatgaatagtatatgtatagggtagtagcatgatatcaagtaggagcaatgatatcaacaaaggcttatcaatcaaacggcatgaatatcaaaaggcgagacattcatgaaggctaggaatgagatctcgggtttttaggggtctcactcccatttgtcgctcggaactttggcctagcactactgcatataatcatgtctataggaagggcgaggatgttagggtgacctattgtagtgaagtcctcctcgagctcggggacatactccgag

SEQ ID NO: 185801 - DNA, 368 bp, Zea Mays
tgttgtcaagcatcgcccggatggcatgtttcttcagcagcagcagtacacctcagatgtgttggagcgtgttggcatgcaagatttaagccgtgtgcgacaccggtggacaaacaggcgaaggtttccggtgatggccctcctgtcagtgacactgaccccactacctaccggagacttacaggtgtcatccagtaccccaccttcaccaagcccgacatcacctatacagtctagcaggtatacctctacatgcatgatccataggagccacacttacagttgtcaagcagatcctccagtaccatcatagtacgtatactcgactacgggcttcttcgacgctcctccatccacgagctaatcat

SEQ ID NO: 185802 - DNA, 572 bp, Zea Mays
cttcgggatataaatatgaaaaactgcaccagtgttgatcaagcctaccccgagagaaagcggacctatgtcatcgatggtgtgcggaaaactggatggtttgtttcagacttcaccattgctgagcttcagtctgtttctcgtgagtacaacaataccactgcaagccttccattaaagcgataaggtcattgcataagctctcagctcagcagtgtagtaagtactaactaattaatagctaggaaaaataccaactacatgcacacatgccactagacgctccaccaagtccatagtcttgaatatcataacagaatatcatgttctgtttcgtttattttgttacatgtaactagttttaaattatggacatcttgagttgtttgcgttcacattattattactactactaccatttttatacttgattgctcaaagcatttctacaattatgagctttctatgtccaaatttattttaatgatgtaagctatacttattatcttaactgattatctacttattgagcagtaacacaagcaatttggcctcgcactaggagattcgat

SEQ ID NO: 185803 - DNA, 685 bp, Zea Mays
aggaaacacgtgggcgccgcactggtggttccatcgccgccgactcctgatgcggcccaaaacttgcggatggaagccaagatgatggctgagggggcgacggtgaggaagaagcagaggcggctgaaggcggggcaggagcaatccggcgagccaccattttcaattgatgtccatccacaaggaggggaagaagctactgatgatggtggcgttggcgtcatggtcactcagtgtgtcaagaggagcaaaagcaagaactcccgggttttgaagacgcagcagacactgccccaaggttttttccctcccatggccaatcccaattccattgatcaggaccccaattattcctcaccttttggtgcattctttgcccaattcgcctacaaacctgctaatatcgctgatcgcccagcgaggctgcctcctcgaggccacccatcatctgggtcttctctactcactggaaaagagacctccaaggctgcctggacagcaacctcaaacaccaagcaaccatgcccagcctcagaatcaacctcagattcacaagaagaggcaaggatcgaagggaaagaaaagcctgagaagaagatgacaagggagatggcagtgagggagtctacccgacatttggcaatactggaatccatgtctgcttcctcagtcccagtcgctcccg

SEQ ID NO: 185804 - DNA, 491 bp, Zea Mays
ttaaaaacctcgtacaactctacaaaaaaaaccacacactattgactaggtgcacttgtacaagggaaggactggaccctacaacaagcagactggagaccaaatcaccgattagtatgctgaggtaaaaggatatcagataaaccctaagccccaaccctacaccaaagatgagactcatccatcacccaattgatgaccttgctagccctaggctattctccgttgaagacacatcgattgcaatgaatccaaatggcccaagcccctaacatgataagggagttcagacccttgcgcaacttcttattggaagggccaataagggtcaagcttacttcctcccaccagtcatcaaaggaagtagaattgagactaggagtgagatgctgcaaaccgacagctttcaggatattaaaccaaacttcccttgagaatacacagaatactagcaaatgattcatagtttcttcctcctggtcacataacag

SEQ ID NO: 185805 - DNA, 445 bp, Zea Mays
gaatgaaatttgtggctgagaaagatagcacatgatgctttgttttgaacaactcgtcgatggcgacccacagttgcttggccgtctggtgaggtcgaagacgacatccgagatagagccaaacaatcagttgtggatgcaacaatctgtctgctgccacaagggatcagtgggacgggcaggagcagagccatcgatgtgtgctagcaaatcgaatttgccgcacatggtgctaaagaacgatgattggttgaagttggaattcgttaggttgagggtcataggaatgtgtgtacgggtgaggaagacgggcccatagttcttgctagagcctccattcgttgcgggcgcgccgagcaggggagaggtcgcaaccgtggtcgaagaatgggtagaggtgattcacgtggctggaaggagttgcaaggtatgaagtatatgaata

SEQ ID NO: 185806 - DNA, 918 bp, Zea Mays
gaagaagagagctgtcatctagaaggttttgttttggaacctaacttggaggtggtttgcgcccttgaagtgccaaagaattttaaatccaacaagctgttgaggaatgctgaaagtaaggaaaatgagcatgttggtgttggtagtcctactggaaggattgctgttgaggccgcatctgatgttgtattaaacatgagtgctgaagaagagagcagagaatttaagaagtcaaaaatcatgacaaaacaatcactgactactggttcagagaaaagggataataaaattgtccatggaaagcctgacaagcaattgactggaaaatcatctgcagggttttctctcaatcagaaatctctgacaggtagcgggcagcacaagatggacagtagtgctgatacacgtccggcaaagaaggcaagacttatggacagggctggtgaaacagataagacagttgccaagagtgagacgaagttaaacatcaattatgaaaatcataatgctgtgaaacatgagcaatctactgctgtggaaacatgtaaaaacacaattcttaagactggtatcggtgatgatagggcacggaagtcaggtggtgctgtatcacccatatcaaagcttcattctgagatcatggaaccagcatctggttcttctgtaactcagtctactgttgctgattctcttaaaaagggttccagcaggaaggaggatgtctcacgtgttgataggaaattggttaaacctaagagaagagcgtgtcgttttgatgatgacgaggatgaaggacagcaaacaccacttcatagaacttctgccaaatctctctctacgcatatagtcccaactgagaaaccaggtagtcggggaaattttgcttcgcatgttggcaacgcttctggaaaaaaacca

SEQ ID NO: 185807 - DNA, 464 bp, Zea Mays
cgggaaacttctcggcttcgacttcgaggtggaatacaagccgggcgcccagaacaccgtcgcggacgcgctgtcccgccgggacacacctgacggcgtagtgctcaccatctcggccccgcgtttcgactacatcgagcggctacgtcaggcatacgctctcgatcctgccctcgtcgccatccgggatgagctggccgcgggtacccgtacagccccgtggggcctcgtcgacgggctggtcacttatgatggccggctgtacgtccctcctgcctcgccactactgctggagatcgtggccgcggtgcacggggatgggcatgagggcatgcagcgcactctccaccgactccggcgcgacttccacttccccgacatgcgccgcgtcgtccaggacttcgtccgcgcctgccctacgtgccaacgcttcaagacggagcatctgcaaccggccggtcttc

SEQ ID NO: 185808 - DNA, 416 bp, Zea Mays
gaaaatggtacttttcaatatgatgaggatgatgacaatgatgtttgtgatgggaaggtctttggacatattaaccatgattattgtgacggcgaagatgatgatgatgtgttagggatcaaaggaaaacatagtatatctcacaaagagttcttgaggagtgctttacatgggcatttcagggctctcgtctcacaattgctcgaaggacatggcattgatcctgtggatggctggccagacatagtatcctcattagcttggcaagcagctacctttgtcaggccagacacgagcaaaggtggtagcatggatcccacagactatgtcaaagtcaaatgcgtagcatcaggaaatccaaatgataggtatgcccttcgactacaacttgtactgaagaattacatgaaatttcc

SEQ ID NO: 185809 - DNA, 533 bp, Zea Mays
ctgaaacaaagagcaataatgacagaggcgaacatagacacaacatgtattttgaaattaaggatacattttcgtgtgttacaaaggaaaaggacgcacccttaaatatacgacttgtcaaaccaacgaaaaaggaaaaccagtggctcttgtctgcatgtattcgtcagcattgaaatcgtcagcgtgggagccccataatgcaacggatgctgtttcactgcacccaaatcatttaagatcagattatgatttgcacccaaatcataatgtacctgaacagaccgtgttgtctttgtccctttctctcaatgtttggaatggcaccaaactgcatgcatacctagggaaatccaagggtaacggtgatatctcagtaacattagtataccttgccattatgggtttgtccatagcatgatatgtatctcgtgcttgagcaacgacacggaaatatcttatgtaatattctcgtattttcggcatgaaagcaggaatccactcttgctgaatctcagcatccattccattgt

SEQ ID NO: 185810 - DNA, 1023 bp, Zea Mays
tcctggttaatgaaatgtgcttgcaataccttcaccagttcaatcgagacatacaacgagattggaatcagatacccataaagaatgagagccgtgattagatggaatatcccagaaagagcagggcgtgatggatcatctaacttattgcttttctgtggctgcaagtaccaccagcggggcaaatctaacttgatcctcacagcaaatccaattgaactaatgagtgatatcaacacgagcacagtaaacaggatgtatatgatcaaatccatcttcctctcaatcctgctcctcttggatggcgactcagttgagttctgcatgactttactgtcatgaccggtaaaaatgaccactccatagacaaaggctgtattccttagttttgagtcccgcagaagtatctgagacggatcaagggcgtaaacctgcctctcatactcaaagttaccagtgaatgtgtacaagctcgggttgggatcctcacagcgtatcactgcctggaaatctttaaaggactcgtcttcttccaacggcagcgtaacctcaagtgacctcttcaccttaaggtttgtctcgccatcgaggttcattgtctcgacatagcaaatgccatcctcatagcttgaggacagtagcagtaaatcagcagggaagaactggtccttctcaaccctgaccacatcgcctacgcaaaggtcctcccagtgccggtagtcgaattcgccatcactcttgtgcacgctgacattgcggttgttcaccttcatgtcctgcatgaagcggcgccagtcctccaacccctccttcatcatgctgaggccaacgacaaatgccagcggagcaatcatgctgacggcagagaaggggcacaccggggtgagagagaggatggcggtgaggaggaagtagaggttggcaacgcgtcggaactgctcgaagatggccttggggaagaaggtgacgacgttgtacttggtggtggtgatgtagttggtgatgtacttgagcggcttctgc

SEQ ID NO: 185811 - DNA, 541 bp, Zea Mays
tgcagccttccccgtgcgtgctgcatcagtgacgggcccagcctcacgtttctccgctcccatccacgcgccccatgaaattgtgtacctctccacaagcttgccctctgcgagcgcatgcatctctccatgagagtgccccttcccttgtgacggaacgtgtccctctgtccccatgagcactgcttccatgactgactgttggcctgtgctcgagatcaagtggcggtgcaagaagcgagtggatccacacctcctcccccgcgatgcggcagctagagctaggaaactaggaggagcaaaggaggctacaagagagcagggccatggctagcttgcttgttggtggtgtgaggaagacaagtggcagtgcgggctgtgtggcggtgaggaagtcctctcccatgagcattgcgtccatgactgagtgccggcccgtgctcgaggtcaaacagcattgcaagaagtcagtggatccatgtctcatcccatgtgatgcggcagctagagctaggagattgggaggagcaaaggaggtcac

SEQ ID NO: 185812 - DNA, 850 bp, Zea Mays
tgcagaatgtctgcgaaatctcgtgaaggagctttacttgggtttgagtgcctgtgtgagaagctcggcaaactatttgagccgtaagtgaggcacctcttcacttagaactgttgctctgattccaagtggttcattatgtttgctttcttgtaggtatgtcattcaaatgcttccattcctacttgtgtctttctctgatcaagtcctagcagtgcgtgaagctgccgagtgtgctgctcgggcaatgatgtctcagctcactggtcctggtgtgaagcttgtccttccttcacttcttaaggtatcaatatatatgttctatgctatcaaattgtaacatttgttgcatccaaatgttctggagagtacaagtggccagttcatcttgttgttatacattgaaatctgacaataacttaactttccgccgaatatttaggccatctgcaccagaaaccactagtttgtttccgttaatttgaaagagcagaacatattgaggtccatctggtaaactttttttttaaaaaaagtctacacattctggattttttccacttattgtcatttgcactgttcgcacctttatgttagttgttcgaatgaagataaaataggtattcagatactttacaaaatattatgccagccacactcatttgtaaaagctacatgaaacgaatttatttggcttgtctgatacattcaaaattttccttaaagcacatatttggatgatccttaatatgattttcagggtctagaagataaagcatggcgtactaagcaaagcagcgttcaacttcttggtgccatggcatattgcgctcctcaacagctatctcag

SEQ ID NO: 185813 - DNA, 2530 bp, Zea Mays
acgctccagtttaattccccccaattcactcaccttctcggatctccccacaatccagtaggagaccattcagccgggtttggtcaatcgtccaactacggaccactgccgaaagtcccgtttcccccgttcgatggtgacaatccccgcctatggatccgtcgtagcgaggactacttcgatctttacaatgtggatccagcctcgtggattcgaatctccacaatgcatttcacaggccccgctgctcgatggtggcagtccgttggtgcacgactccgtttttgcacatggtctgaattcagtaaggtgttgctagagaggtttggtagggaccaacacgagtacctcattcgccaactttttcacattagacaaaccacatccattgctgcatacatagaatagttcactggtttagtggatcagttgatagcctatgagtcacaaaccgatcccctcttttataccatgcgtttcatagatggcttgaaagatcacattaagtctgcagttttattacaacgtccaccaaacttcgatactgcttgtgctcttgcccaattgcaggaggaggtctcagaaccgtctcggtctgagcaacgcaagtatggatctatgccggccatcaagacttatcaatcagcattgcctctacctcgccctcctcatgccgacacgtcagctgctgatcagtccaggctgactaatgctcctcgcactcggcatactgatgataagttggcatctctgaaggcctaccgtcgtgctcgagggctttgcgacaagtgtgctgagaagtgggctcctgggcatcgttgtgcacctacagtacagcttcatgtcttggaagaaatgtgggagttgatggaggcgccgtctgaaacaacacctattaatgttgagtacactgcttcaggagaattgctgtccctgtctctctcagccgtctctggtaatccctctcgccacaccttacagttgttaggggagtgccagggccatattgtggtgatgctaattgattcgggcagttcccactcgtttgtcagttccaacttggcagcgaagatgataggagttactttactaccacaacctgtcatagttcacgtagctaatgggggcaaggttccttgtacacaagtgttcaaatcagctggctggtcagtgcagggctataaatttttcacagattttcgagtatttcccctgttaacttatgatgtggtgctcggaatggactggctggaacagttctgtcccatgaagattcattggagggagaagtggttgtctcttccttaccagggccgctcaatagtgcttcagggcaaatttcagcatccacctaatcaagacctgtttcatgtggtgtatcttctgaattcagtggacaatgattcttcagaaacaccagtggatccccgcattgcatctgttttacaacagtttcagaccttgtttgaggctcctcaaggcttgccaccaactcgttcctgtgaccactctatcccactgattcaaggatctcaacctgtattcattcggccctatcgttatgccccggctgtcaaggacgagatcgaacgtcaggtagctgaaatgctctccaacggcatcattcaacacagtaacagccctttctccagtccagtcttgttagtccggaaaaaggatcaatcgtggagattttgtgtggactttaggcaccttaatgctctaacagtcaaacgcaaatatccggtacctattattgaggagttcttggatgaattacatggagcgagttggttttctagtttggatcttcgagcgggattccaccaaattttgctcaaagaaggggaagaattcaaaacggcattccaaacacacactgggcactatgaatttcgcgtcatggctttcggtcttactggggccccagcaacctttcaaagtgccatgaacgccacattacagccagtgcttcgcaagtttgccttagtattcttcgacgacatattagtttacagtcgatctttggaggaccatgtggagcatctgtcggcagtacttcacttgctgcagaaggataactggaaggtcaaactgtcaaagtgtacctttgctacccgttctatcagttatctcggccatgtcatcagtgcagcaggtgtccaaactgatcctaacaaggtgactgcagtggttaactggcctagaccttccaatgtcaaagaactctgtagcttccttggtctagccggatactacaggaaatttgtacctcactttggtataatatctcagccactaactcttctcctcaagaagaacaccaaattcatttggacacaagatcaagagactgcatttcggtgcctgaaatcaaggttgagccaggcaccagttttggccttacccgatttctccaaatctttcgtattggagactgacgcctgtgaccagggaataggggcagtcattatgcaaggtggacaccccctcgcttacgtcagtaaagcactcggtcctaaaacacgcg

SEQ ID NO: 185814 - DNA, 1444 bp, Zea Mays
acgccgtcttctggaaggccatcggcgccgccgaccctgtgtaagcttcacccctccttcctcctcctgttttttttttttttttgactcccctggtttttctcggatcttaagcttctcctgcaggctgcagctcgatttgcgcaagacatcccatctcatttgtttccggaacgttcgtatgcaacttttcgctcgccgggtctgggctttggagttttgctgcacattccgtttcagctagatttgcctggtagacaagcgaagcgcgcgtggggaacattcggatgggcatattcctgtgcatccttcctaacatgggagccctttacttcgaacaaacaaacaaactagtgtatgcgacttttggttactagaacgtgtgcccgttgagccccgctaatgtgtaatgtgtgtgagttcttggggtgtacaagggcgggaatgcgtgaaatgcacctgcatttctttgtaacgctactgcgccgcacatttacgctaatgtgaagtgcacgaattcagcggttcttttacatattttgtgtcttcgccttggtgacgtgcaggcatttggtgtgggaggacggttgctgcggccacgtgtcatgctccgccgggtctgaggctcctgaagctgggtgcgagctgggcaccagtgtgtgcacgcttgttaggaaggtcatgacctcgcaaattcatgttgttggtgaggggtaagcaggaattttgctttgcttgctacaatgttcttagctaataagtgcttcggcgttttggagaagttcaagctttactgatgtatgtatgctatgcttgtattcttcagtaccattggccgtgctgctttcaccggaaatcatcaatggattgtccatgatcctgccaatgatcacaatctcagacccgaggtacaattccttctccctcgtgaactgatataaatgtagcccaatttcagttttatgtggtccattttgccgccatctcatttaaagcgtgaggcgaagggatttatgccactgcagaagtccttgtggagttgtggggttattttgtcctcgagtatttgttccacgcctgcaaattttggcatgtagtgagtttggtctattattctgtgaacaagttgtcattgtgataagctagctgcgagagcacacaaatagacatgtgaaataagtggagacatatttcaaggtttttgtttgtatggttttgcccttgagctcaagtcaaccatgatgacatccctttcttcatgcacgcgccatgagaatttcttcattatctttgggtcttgcttacttattttctaagcagaaatgttttctttgtttgatggattttaaattgtaatatgagtttctgtgatggaacatcaagctgattatgttcttctcacgacgataggtttctgctgagatgaatcatcagtttgcagctg

SEQ ID NO: 185815 - DNA, 1933 bp, Zea Mays
gccgaataaatgttggagagaagtacgtacgtagctgagtcaagaggttcaagtgacagcagcttctccgcagccaactttccaagctcaacattcttgtgaactctacaggctcctagcaatgcgcgccatattgttggacctgctgggaatggcatgccttcaatgaggctcattgtttcatccagcttgcctgcgcggctatagagatcaaccatgcatgcataatgatccatcgttggagtgatcccgtagtctctgaccatcaaatcaaagtattgctgaccttcttcaacaagaccagcatgagcgcatcccataatcacagaaaggaatgtaagaccatccatatcaatgccctcaacttccatctgtcgaaatacatcaagggccttttggctgtaaccatgttgtgcgtaccctgatagcattgagttccatgacagcaaatctctatctgtttgcctctcaaagacacactgagcattctcgatgcttccttttcttgcatacatactaacaagtgcactgctcacacagagtgcatcatggcatctgtgcttgatagaaatagcatggaactgcctacccaggtcaactccagctgccggactagcacaagcatcaatagcactagagattgtaaactcatttggcttcaagccatgcatggtcatcttgatgaatgcatttgtggcaccattgcaatcaccagcttgcgcatagcaagtcaacattgcagaccatgaaacaacatctttctggtcaatcattttgaatatagaaagagcttcttcagtgctgcaaagcttagagtaagagaccataagtgcagttccaacagttggtgtacactcatagtttgtcttgatcacctgggcatgaatttggggaggaaagctggcctctgacactgtcagaattgtcgagtaggttaaatcattcggagcaacaccatcttctctcattctgctaaaaagagcagcagcaagaggtatatcaccgttctgaatgcacccatcaatcatagcagtccatgaaacaacattctgagatcctgacatcaacaaaaatacatccagagccttatccagttgacctgctttgttgtaggcatccatgagggctgtcattacattgccatacgaatgaaaaccatgtttaagaacactactgtggagttgacgtgccaggccaaggtgtttaagatttgcgcataagttgatcactgttgagtatgttgactctgtaagcattgtaatactggatcgtgaatcatggaacagttgtagggcttcaagatcacgcccgttcaacacaaggcccgccatcaatgtgttccacgacaccatgtccctggtctccatcctacaaaacacgaccctggcctcttcaaccagtccacactttgcatacatgttcatcagagaattgcacacaaacacagtggagcagcaaccaaacttaattgattgagcatgcacgtgctgcccaagatcaaccataccctggctcgccaccattgagagaacactcgaaaatgtgaacggattgggccagaccccctcagcacgcatcctgaagaagagtgacataacatccaataacactccagcctggatgtacccagtgagcaacgatgtccaggtgacaacattcctcttgagcattccctcaaacaccttcctgccgtccagaacactgtgccagttcatgtacatgtcaacaagagacgtgccgaccctgatgtcgccatgatcatgtccacacctgacgcacagggcatgcagctgcttccccagtactctgtctggcactgacccacagattttgatgatgcctaacagtgccccaccgccaacacacctgccctggcggcggtgcgcatccaagaagtggtctagcgcctggtggacgaaaccctgccatgtcg

SEQ ID NO: 185816 - DNA, 279 bp, Zea Mays
atgactcgaacagcccttaaagggcaagaccccacactagggacacgccacacacactagaattcgaccaacaccgagaaggagtgtcatggccataagctacggagccctttggcccctgccatgcaccaaagactgagcctcatcttttacattgctcaagatgctattcaaactaggtgaggcaccctcaaacacacatatttctatgcttccaaatccaccaagccaccaaaaccaccaaagaattaaatcccttgcgtcaccgagctgcagcaa

SEQ ID NO: 185817 - DNA, 971 bp, Zea Mays
gtttgcgcaatggagcatctgataatttgcttcagttgctcatcgaacagaaggaagaaaaaggtccaggcacaggacaaattcatccatatggatctcacagtcttgggaatgatacttctcagtactgcttgaggctgagagacaaaaaagttgcagctcagctcgctctaaagtacttgcacagctgggaccttgatgctgcaaccaatgttctaactatgtgcatgtgccacttacctgagaatgatcctatgcgcagtgaggtagtttcacttgcatttattcatatttgaagttaaaaaaacatctgaaaatcctctgtctgattgaaccatgattatacatgccagctaaagatgttccaatacatatagctgaaatggcttatctagctaattatagtatttcacattacaatctgtggttgagtgctgtaaagatctgtcacgccatagggaagctattttatttctttataattttgtttgcatcattttgtaacaggtgttgcacatgaagcaatctttacagaggtatggccatatcatgagtgctgatgagcactacactagatggcaagaggtaacccgatgatatgttctttagctgcatcattgggaatataaatttgttttcttatcataaaggcattttttttctgaacaggtctttctcatcataaattattcttttaactcaaaaatgttgaatgttgttaggtggaagctgattgtgaagatgacccagagggcttggcactccgtcttgctgccaaaggagctgtttccgctgctttggaggttgctgaaagtgcctctttatcaattgatttgcggagggagttgcaaggccgtcagcttgtcaaactgctaatcactgatccacttaatggcggaggcccagctgcagcttcaagatttctgtcaactttaagggattccaatgatgctcttcctgtagccattggt

SEQ ID NO: 185818 - DNA, 2333 bp, Zea Mays
tcaagaaccttagatttgagttggagcaaggaaaagagcaaacctcaatcttgcttcatgctaatgaagatatgaagaataacatttctgtcttggacaagcaattggaagaggtcaggagcagtttgcatgctgaaattgcagaagtacgtgcagagaaggagacagctctatcagagttacatatgtctcagacttccatcaggaacttagagagtgtggtagaaaagcaaactgagaacattttaactctagaaaaagctaatgataagttaaacaataaaatatgtatcttgacagagcaagtagaacaagccaaggctgagctgcataaggaggtagcggcaatacaagaagagaaggatacagcactaacacaattaagacagtcagagttttcaatacaagatcttgagaatgaggtgacacgactgaaagacgaactttcaattcagctggaaaaaaattccaccttggacaagcaatttgaagaattcaagagcaagctgcatgctgaaattttagacctacgcgcagagaaggacacatctctattggagttacagacatctcaggattctgtaaggaatcttgagattctggttgaaaagcaaactgagaacatttcaactctgcaccaagctaatgatgagttacagaagaacatctacactttgactgagcaatcacaacaagccaaggaggagatgcaggatgagttgaaggcaatacaagaagagaaggatacagtgctaacacaactgaagcagtcagagacttcagtacaaaatctagaggatgaggtgacacgactgaaagaggaactttccgtccagctagaaaacaattccaccttggacaagcagtttgcagaagctaggagcaatctgcatgctgaaatttcagacctacgtgcagagaagggcacatctctactggagttacagatgtctcaggcttctgtcaggaatcttgagattttggtcggaaagcaaactgagaacatttcaactctacagcaagctaatgaagagttacaaaagaacatctacactttgactgagcaatcacaacaggtcaaggtggagatgcaaagtgatttgaaggcaatacaagaagagaagaatgcggtgctatcacaactgaagcagtcagaaacttcagtacaaaatcttgagaatgaggtgatacgactgaaagaggagctttctgtccagctagaaaacaattccaccttggacaagcagtttgaagaagccaggagcaatctgcatgctgaaatttcagagctacgtgcagataagaacacatctctattgaaattacagacgtctcaggattctgtcaggaatcttgagattgtggttgaaaagcaaactgagaacatttcaactctacagcaagctaatgatgagttacagaagaacatctacactttgacggagcaatcacaacgagacaaggcggagatgcaggatgagttgaaggcaatacaagaagataaggatgcagtgctaacacaactgaagcagtcagagacttcagtacaaaatctagaggatgagttgacacgactgaaagaggagctttccgtccagctagaaaacaattccaccttggacaagcagtttgcagaagccaggagcaatctgcatgctgaaatttcagacctacatacagagaaggacacatctctacgggaattacagacgtctcaggcttgtgtcaggaatcttgagattgtggttgaaaagcaaactgagaacatttcaactctacagcaagctaatgatgaattacagaagaatgtctatactttgactgagcaatcacagcaagccaaggtggagatgcaggatgagttgaagtcaatacaagaagagaaggatgcagcgctaacacaactgaagctgtcagagacttcagtacaaaatcttgagaatgaggtgacacgactgaaatgggagttctccgtccagctagaaaacaattccaccttggacaagcagttggaggaggcaatgttgaaagtgtctagcctacatgagaatcttgagaaggcccaagctgaagcagcttgtcaacttgatggcatgagtacaaaaaccaaagatctagaggagacaatcaatcaattgtcttctcaaaagactaagttggagaaggatgtgaaaattatgattgaagcatgcacagaaaacatgtcatgtttggcaggatttgaagatagagttacacaaaaaatttcagatcaggaggcaggactgaaggttctccaccagagccttggaggggctgttggtagctgtcagaggcttcagtatgcatatgat

SEQ ID NO: 185819 - DNA, 310 bp, Zea Mays
gcagatctcgctgcctcatgggtcctcccttgaacctgctgaaaaggaagcgaggatgttggaaggaactgctgataggaaagaacgaaggaggaatgtatttgatgctgacagtggtcttcgttggcttgaagaggagagggagacaagccttcttgggaggagggagcgcaagaaggatgtagaccgggatgtggataaccgcaagatcgatcgccgatctgacaatgtttctgcaagggacaacactgatccgcgcacagctccttcatctgaaaggtggaatgatggttccacccgtagcctgggg

SEQ ID NO: 185820 - DNA, 485 bp, Zea Mays
ccgctgtagagtgtactgcttccgacgcgtacgcgactgcatgcatgagcgatatataatgtcaccttggtgcagactcctgcgctccgaaggattttttaaatatttttaaatatttttaataggatctgttggctctgattcgggccaaacactaggggttgtatgattgtatctctgatggtgctcggcggcgaggacggcagaaggtccgcgaccctgctgcaagcaagtcttctctcctgctggctggatggtccgtggtttaggctggacggtacgcgaacgcacaaagggtcgaagaaccctagaactcactccaggagggatcccacaggagagttctagagagggtgccctaggaacggcaggccacccaggaggtccttagacgacgaagagtcgaagagagatgaatattggaggtttggaaaaagctaagctaggtctaaattacgtcacctcctaatacgataaaaaacgaa

SEQ ID NO: 185821 - DNA, 576 bp, Zea Mays
aaattctaggcatgccccatgccttctcagatcctttactaaagaatcttaatgacttgcctgcatcgaatttgtcattacctgctggttcttacataacccaatcattttcccagaaaatatgccatactaatgagttggagagaacaataagtaggactgggccagcttttgaatgtgtcaaaccccctgacattgcccgtgcagatgaatcaaattatcttgtttctaatcatattgaccaaaggtacaatcaaggaattattggcccagccagttcacagccaccagtatattaccaagatgaaagtttgtcaagtaatgtgacacaaaaatgccatgatggttatcatgtagttcaacagcaggataagttttttcatcaggataaaagcgcaggtccaattattgctccctggaacaattttgttcaaacagggttaatttacaacgcacatggtgcaaagttgccctcagataatttagatgctctagaaagttcagttccaaagccgatgcatgctactgatcattccctttcatatctccttaatgtatcccaaggagacaattcag

SEQ ID NO: 185822 - DNA, 600 bp, Zea Mays
atgttcctttgctatttcctatttttgagagctacttgaataaaagggcaagtactactttcctattaataattgtactaatataattcaatatactacattcctattaataaatttattaatatattattgtggctctttgttttcttatttgctatgtaatccatatataacaggcatcagatgagaaaacatatgatcttgtgagggaaggtgttgttatttttactggtgctctggcgaaacatctatcaaaggtgtagatggatactgaactatcttttatttacaagatacattcacagtactaaatatagcatttgtaacaggatgatcccaaagttcacagtgtcattgaaaagttgttagatgtccttaacaccccatcagaggcagttcaacgtgctgtctcagattgtttgtccccacttatggtatccaaacaggtgtgttttgttttgtacaattggattttggttctgcattgatgactctgtatccatttgttacccattttttttatgctttcctttttctgatttattattaaaattctctattctttatataaccaggaagagggtcaggctcttgtttcta

SEQ ID NO: 185823 - DNA, 1167 bp, Zea Mays
gattttaattgtctctatttaataatatgttagcataaattatcagaaagtacacatttcgggagttcgagaagatggcaaataaagaatttgtacggagatactctagtgctgcttgtcttccatcaaggtatatggaagaggagttttggcatgaaatagcttttggcaagatggagtctgttgagtatgcatgtgatatcgatggtagcgcattttcttcttcttctcatgaccaacttgggagaagcaaatggaacttgaaggtacttattttgtggcccagtttgtacagacatttatgtacctcttaattttacgcaatgcctaaaacttatcttgcactgctttacctattttgccgtataggctggatacaatctgctgatattctgtgtcatgactctgctgaaaacttgtcttcaagtgatatacacgatttttctttgatcattacacagtagggatcagtctaaaatagtaaatgtagcctgtctaatttgtatgagtatttggtaaacaatgggaacattcttctgttcaagaaatcacattcctgctgttatttcttcatcaagatttctaaccctgatatgttttatgatcatttctggcaatgatgatgatgtcataaagtatttttgtccgtgctttgatccagagattctcacggttgccgaactctacgctgcgtcttctcagagctgcagttccagtgagtagaccacagtgatgaatttccatcctgcttttttcagttacttacatttcatatattttcagggaataacagatccaatgctgtatattgggatgctctttagtatgtttgcctggcatgtggaagatcattacctgtacaggtgcatgatatgggattttttttccataccgccacttgattcttgaggggggggggggggggactgttcatctataccaccaagctagtcaatgtcgtggtgtcttatcctacatgtcattgaaacgggctgatggtatagataaagtgcacatatcaagtggcggtataaatgaaaatattcccactatatttttgtcattattctttgcatgatactgcttcttgacatgtctgtcattctttccagtattaactatcaccactgtggagcccccaaaacatggtatggtattccaggaagt

SEQ ID NO: 185824 - DNA, 4559 bp, Zea Mays
tgcagattacataaagtcatatgaggaaagcatatgcaagagcattgtgaacttgcttgttacgtgtcctcctgattctgtctccatcagaaaggcaagatacgacctggtgctttcttgaaatcatttaactatatgaccattactttgaaaatgctaatatccttatctcttacactggatttcaggagctattggttggtctgaaacaagttctcaacaccgagtacaagcgagggctgttccccttgattgacacacttcttgatgaaaggtaaaccaattttctttttccatcaattccgtgatccaacttttctagtttgttttcaaatgtgctatttctgggatctcattcagattaagtttgatatggccacatcttgatttcctgatactatgtacttgctttgtaatgtgtaactggtaaactgattaactttccaaagtgcttcattttgacctatgatcaactcatttaatctattttccccttcttttcgttggtgttttgctatttttagttacttttggtaggctgaataatcctacgataaagaatgcctgtaaaagttaataagattttctccattgacctaacgggtattgcaaagatgaacagcacatgctaatgaaccaggtctacttttctgcctgaaatatgaggagtctaattttcaccatcaaggcatcaacaataaaatagcttcaaataactgcccatacttaaaaccactcatgtgacaattcaaggggagtaaatgaacttgtttaaaaacacaacctttcctgatttgtatctattcgaaatcaatcggttttagttgtacttttcaggaacttactatggaattgtaattagcaaaagacttcatcccttcacgatgtcttgtcgttttcttatgacagttttgtattgtttccctttactattcttgtagcatttattgttctacatgtattaactcttagagtttctagtcatgcttgacaccttacttttggcgtgtcagggttctgattggcacaggtcgagtttgcatcgaaactttaagacctcttgcttacacccttcttgctgaattggtgcattatgttcgagaagatatttctcttccacaggttgaactcgcctcttgtatcatttatattgcttacagatttgggttagcattctatttgttaaaattgcatgtacagctgtcacttttgtgcccccttcccctccccataattatacccaaacacatcctttgggaattttaggatagatgcatcacttaacggaccttggcaagcgaagctgttatctgatttcttcattgcagacaccagaccatatccaaacagtattatggatgagacatgcattaggcattggatttattagtaaagctaggtggcttgccagatctctgcctggtgttgagctactatataactttcatggatatgatatgagctactatatgacttcaatacatgtggtattacacgactatttagtcacttcaatgatactgtgatccttagtagataaatctctctttaaaggcttacatagttccacttatcagtattatttatgccttggtgttgatcatgttgctgctgaactaatgtaagttcaacttattgcagttgtcacggatcatctatttgttctctcggaatatgcatgattcttctttgacccttataattcatacaacatctgcccgcttgatgctgaacctggtatatttgatattctgaaattttttattagtgaaagtaggattattacattttggtgcagtttatgattctgaacttttccttctctaatatgtatgagtataaaaatcatcaaatttatatctataaaataaggtggtagtgtagtgttacctaaatcagtactagtaagtcactaccttttgctttaggttgagcccatatatcaaaaaggtgttgaccagcaaagcatggacgaagcacgagttttattggtaagaagtaactttcataatagaatgcaagtaatttttcttttttcctaatcaactatacttattacttgaaatgatcaggggcgcatattggatgcattcgttgggaagtttaggaccctgaagcgaacaatccctcaggtatacaacatgttttgtgatactttcggttgattaggttttaaaacgtgttcctaatttattagctgatgacatgcaaacttgggcacttgcgttagatgctgctacaccgcagaatataatttaaaaaattaatgtttgaaagaaatggggattgaaaacatatagagaaaatatactgttacattgcaacatgtcgtgtgattctatacagaaacatcagtgttatctccttgtgttttcttgctgatatggtctaccttactcctctcactctatagttgcttgaagaaggtgaggaagggaaggaacaaccgaatctgagaatgaagcttgaagtcccattacaggtatgctatgtgaatgtctcttggaggtagcatgcagcaataccattcttttttggctgactgcactcctctttcctgagaaaatcacaaatttatgctttatttgatttttttggccatatagctgtctagctcaaatttctcaagataaaaagacacagcaacttataaatatcaatagccttggccggttatgaaaaccataactaatctcttagtcatgggcagatagataatttatttaagctttgcttgttaacaaaatgtgagagggcttagtcgcgttgtacttataaaataaatggattttttcctgagataggttaagtctgatacaaattgaagttgtttatgactgatgatttgatggccttatttttttggtgaactttgcagactgtgctgaatttgcagcaacctttggagtatactaaggaaatcaacgattacaaaagtctgataaagactcttgctgtcggtatgtattagttgttgtaaattattgctctgttccttgtctttcagcatctcatttcagttattgtttaaactgctatttcatactgacctcatacaaggaatgaagacaataatatggagcataacccatgctcactggccacgcccccaggtattataaacctcccaaatgcgtggatatcttttggtgattgtgatattatacttgagatctaattaaccctttgatgctgacatttctattatgtggtgaacagcaacaaaatcaacagtcttccaatttgtcacttcaacacttcagggggctgagggaggatgaggtccaccaccttaaaactttcttcctctttatttggctgaactgttactaatcatttttaattgtctattctaggtgcggaagacatctggtgttctgaagtctggcgttcactgtctggctctttttaaggaaaaagacgatgatagggaaattctgcaatcattttcgcagatgctggctataatggaagctcgtgatattatggatatgttctccttttgcatgtctgacctctttgattctatgataaccaacaaccagctattgcacatattttcaacccttttgcaagctcccaaggttctgcggcctttcacagatgtattaattaatttccttgttagctcaaagcttgaagccctgaagcagccagattcacctgctgcaaagcttgttttgcaacttttccggttcttgttcattgctgcagctaaagctccagaaagctgtgaacgcacacttcagccacacgtgccggttataatggaagtctgcatgaggagtgccactgaagttgagaaacccctaggttacatgcaccttcttcgaaacatgtttcgtgcattgaacagtgctaaatttgattcattgatgcgtgatcttataccatctctgcaaccctgcctcaatatgttactctccatgcttgatggtccgataagtgaagatatgcgggacttgattttggagctttgcctgattttacctgcccgcttgagttctttattgccccacatacctcgtctaatgaaacctcttgttcttgctctaaaaggtagtgatgaccttgtgagcttagctctacgtacacttgagttctggattgatagtctgaatcctgactttttggaacctagcatggcaaatttaatgtcagaagtcattcttgctttatggtctcatttaaggcctcctccatacacatggggcacaaagtctttggaacttttagggaagctggggggacgaaataggcgatttttgcgggagcctcttgcacttgaatccaaggaaaatccggagcatggattacgtttagttctgacttttgagcctgcgacaccttttttggttcctctggacagatgcatacaccaagctgttggtgcagttatgcaaggcaatggcttggaagcattctacaggaagaaggctcttcaattcattcgggtgtgcctcgattctttgttaaatctgagggaaaatgtacctggcgagggtgtgagccctggtgttctcggtacattgctaatctctaacctggatccctcaaga

SEQ ID NO: 185825 - DNA, 749 bp, Zea Mays
acagcagctggactggtcttgaaggaaaaatagtatgccatcctctccactctctccctcgttttctgtcatgtgtggaatttcggccatatgctagcttgcaaaggtgcaattttcatctttaggcactgatctgcctctgcttttgacagtggaaagcttcgagctagacaaaaggaaaggattgcgcagcgacacattatcaagaactatgctgttgataatcttgaggagttcatgactccatatatctctattgctaatgaacctgctgaaaatcctttgataatcgtagaagacccaagttcttcacagctatgtggtgctaaatgtttcagtgaatcaactggagaaatgaggcaatcctccaagaaatcaaggagatattctgaaatccctcaagatctttatgccagaattcctgataacgctgcttcatccaaggacaactcaaaggccaccgatgtcttcaatccagggaccccaaatcacctgctacctgtacttggcctttgtgctccaaatgctgatcaggtgaactcatacaaaaactcaatttgtgcaccaagcataaaggagcataaaagggccagtggtgacgtagtcaacaaacaactgtcaactcccgctgaccattctaatgagcttagaaacgaagttcaatcagcttctgataaggtcatctttcctggtgcatctgaggaagctttgcgaaggataagtaacatgatcccagataattattttcc

SEQ ID NO: 185826 - DNA, 1404 bp, Zea Mays
aaatatacttactatcactctcaaaagattccaggttacaacatcagtttgttagaactgtatcaatgaagttatatgattgttttataacaactttgcataacaaacaattatgtgcctgtaacagactggtagatttgggaaactaaataagagagttacattccctatggagttagatctgacaccatacatgagttgcactgatggaagtgacctgtatgatctctatgctgtagtcgttcatctggatatgctgaacgcatcattctttggacattatatatgctatatcaaaggttatcaaggaaggtggtataaaattgatgactgcaaggtatatagtttaacatttgtattgatatgacttacgacacaaataatctgtattaagcaccatttaccagcttctttgtatatgtaggttatggttgttgatgaggaggaagtacatgctcaaggcgcttatatgcttttatatagcaggtaattgcagttctaattattttgatgctgcctatcattgtcagtgttatgttcttgtggggttgggtgcattgctcacttatattaaagccttacatttgtacctcacgagtccaaatctatttgtcaatttctgcttgctctgataatatggtcatttttgctgttcttctgcattggtactgctgctcccaggattgtgtgctttgttttatcattggcaactaaatataattgtactgtactgaccgggaaaagattcatattgcctgttttgggaagtggaagatatagatcatatgcagccaatgggagatatatcaaacggacctaaatccttttgtatgaactatcaactgtgataatgcgcaatgtgacaagcacatagctcaacctgctttccctatgtttattattgattgttatggtttctgccaaacaactaaattgctatcataattgtctaatcatcactcttttgggacactattgttttcattctaaaatttacatattttctccattgtgtcaattttttttattatatattgaacaagttcttgtcaggttgctgtaaagtgtgctatctggactaaagaactgacaaacttccattaccatttgactctgcaggagaacagctcgtcctaggtcacttcttacagttgatgagtccgtgaaacagcaacaacagtgcaaatcgctcctttccaatgggcaaagccacatgatactagcagatacaacattgaactgtgaatcatctttgaagattccagaagatatgttacaacaggattgtgaatccaataatgaatccttgcatgaaatgggtattaaggaccaggagtcagacatggatctacgtacaagcattgaagatgacaaattcattagcaatggaaatctacgtttacc

SEQ ID NO: 185827 - DNA, 384 bp, Zea Mays
atcgggatcatctgattcaatgataaggtaaacacacagctctaacatctcaaccatctccctctctcatgttagcataaatgctgtggtaagtttgacatcatagatacatatttttatttactttgcagactatgggatctaggacagcagcgttgtgttcattcttatgctgtgcatactgattctgtttgggcacttgcaagcactcctgcatttggtcatgtctacagtggtggaagagatcaatctgtgagttaaattatcttgtgtatattattgaatagtcactgtacttcgtcgttttgaacttttatgtattccctgtgttccaggtatacctaacagatttgtccacaagagagagtcttttactctgcacaa

SEQ ID NO: 185828 - DNA, 446 bp, Zea Mays
gggctctttagcaaagttgtcgccgtgaaggagtatcatcgcgttctggccgatggatcgaagatgtgcatccctgattaaatcggtatcctatgcgaaccggtaaacacacatgaccctcgaatctaagatctacgaccacaatttaatgaagtacgatggtaagccccgtccgttcgatcccgatcggacatgccacgctgttttttccctttaaccgttgttccccattcgatctactccgtcggtcctttgatcaacggtccagggcacttctagctagtctagagtgtagatcagatccggaccgttcattactaatctgatggatgcaagctcgtcttcaaccctaaccgagcagggcgacggcgcccaacgcagattcaccggcaatcacgaccgaattgtgcccaagcccctaaaccccaaattaacaggtataccac

SEQ ID NO: 185829 - DNA, 421 bp, Zea Mays
aaacccctttatcagaaatggtattataaacattactccttgagctcttactatttccctggttatctgatcgttcatctgccatcgtagttgaagttacacttttcttggaccatagaggttccactgattccgcaatccggacaaaaaaatttgattctctaaatcttcgcaacacatgttcgatctgctgcttatgatcctccatctgaaggagagattgagtctccaaaatatcatgtcctgaaggagatgcttcaccattgagttcaacatcctgatagccactttctccagctgctccattatcatgaccatttgcactgacagggctagatttatttgtaaagttttgcatagaagttccattcttagacattactgcagcaattctaaagggggatataacctgtagatcttg

SEQ ID NO: 185830 - DNA, 409 bp, Zea Mays
cagcactttattgctgctggaagccacaatgaggagaaagttgcaatgtatgccattgattcactaagacagcttggtatgaagtacttggagcgtgctgaattaaacaatttcacatttcagagtgacatactgaaaccttttgtcattttaatgaggaatacccacaactcaaaaatccgaggtttaattgttgattgcattgttcaggtatgtccttgtgcatgaactttgacacatatatgaatctatgaaatgtaatgatctggtgtttcttaccaaatgatgctacatgtaaaaactttgctggatgtacatgtagttgatcaagtcaaaagttggtagcataaagtcagggtggcgttgcgtattcatgatatttactgcagcagctgatgatgaggatgaa

SEQ ID NO: 185831 - DNA, 545 bp, Zea Mays
ctgagcccttgaccccttacgtacaacagggagtacttgtctgaaatctcccccaaacacaatagtcttcccaccaaagggcagatcagggcgtcccatgatatcacacatgctgttgtccaatgcttcaattgattgtctcttagccattgatgcctcgtcccaaataatgagcgacgctttctgtagcaactttgatgtttcactttgttttgtgaaggtacatatagcaccatcatcaatagtaagtggtatcttgaagcgtgaatgggcagttctcccaccaggcattatggaagccgcaaccccagatgtagctgttgcaactgcaatcttgtcctgactacgtagcaccgcaagcaatgccttatacagataagtctttctagtcccaccaggaccatccacaaagaacacaccgccattactggtgtcaacaacagataagatcttttcttaggcagacttctgctcctcatttagggtttcttgcaaagcaacatcttctgtcgtcgcctcgataatttcctcctcgtaaatctctc

SEQ ID NO: 185832 - DNA, 537 bp, Zea Mays
tattcggggtacaagggatggcagaagactgagctagctgagtgaggactgtagatcctggatgtccaagtcgttgatgccacaatgaagaggtggtagcatgaagggaagatgttgtgctcttgagtgggtagagtgggccggagctatcacaccgaaggatcacgcgccgagtgggaagatccttcacagagcagccaagagggtcaaattccacagaatagttattgtcagtggtgaattggcgaacagaaattaaatctttaatgagagacggtgaaagaaggacaatgttaagacaaaaattgtaaggaagttgagtggtgccagtggaagtgacaggaagaaggttgccattgccaacaacaatgttagagggtagatgattggaagaggagaggtgggaaagtataccagcgtcggaattcatgtggctggaggcacctgtgtcgaagaaccactcttgctgttggggatgttgaagagtggtggtttgaaaattggtggcaagttgttggagatcccaaccaggagggg

SEQ ID NO: 185833 - DNA, 892 bp, Zea Mays
atttctctcgtcccccctcctcctccccttcccctaccatctcagtggcggcggggctagggctctccttctccgttcctccctcaatcctcctcccctcctccctctcgcatccagtcaaactccagccagccaaaaccagcagcctcgaccaggccgccggcaggccgaccgattgatcggtgtggatcgagtcgagggaaggaggcaacgggctacaggaccaagtccagcacccaggcgcaaaaacttcctgagcaggatcatgccttcttgccctcggggaagaagcgccaaaggttcgtttttccccctccgcaccgcaaccctcgccgctcgctcggatatactccactagcagtgccatttctggatgctccttcaatccaaccctactagtccctagatctgccaccgatccaaggcaaggcatggccaccgtgcggcctgcgtgcgtgcctcgctgctgcggttgtcggcaggtttatttagatgccgggcgtttaccccaactgaaaatctagattgagctgtcgtggactgataaactcaggtcagcactgcaggcaggagcagccccagaggacaaaatggctcgtctgttcttactcttcctcgtatctatttattctttctctctctctctctctttctttttatgtcgatccccattgcctcgtcgatccagatacactagggagtgctttccattgctatgaccatatatatatttgacaaaaaaggtctctggggtgagtagctacagagcgaatggaacactgatgtggttttgtttacctgtatctgcatcagcaggggaaggaaggatttgtgccatctgactccagtgcctgcattctagactcccaagctcgaacacaggccagggaag

SEQ ID NO: 185834 - DNA, 425 bp, Zea Mays
aacagggaagagatccctgtgtacccactgtacagagatcctgtgagtgtatattccacttgattccattctttattgttttatttttctctcccagcgctaatgccatattgttaacccaaatttctgccctcttctctgcaaacaggtacatgattttggtttttttcgctatgatccaggtgccattaagtttcttaagtatgatgagattccgctggcacctgaagcagcatcagtcgggctagaaatccgggttgtcggaaatgacagcggggaaaaggttccatgaattatatcttaaattctgctgttatgtacccctaaaatatacgtccttgttagacaccacagaccacagcagttgcatatttttttgcattgttccctgtcaaaccttagtgccttagatttctcctttttgt

SEQ ID NO: 185835 - DNA, 1113 bp, Zea Mays
cgacagtccaaaaggagctgcaaccgggttagagtaatcatcaagaaagtcgaaggccgctggtgggggtggattggaagcctcagaaaagggaaacgaggtttcatcaaaaaccacatgacgggagataatggtacgattggattggcgatcaaagcataggtaacctttgtggtggggggaatagccaaggaagacacaaagggttgagcgaggggataatttatgtggagtggtggcagaaaggttggggtagcatttgcagccaaaaacgcgaaggtgctcataggatgggttgtggccgaagagagcaaagtgtggtgtagagagtgcgagtgttttggtgggtagtatgttgaggagatatgttgcggtcccaagagccgcagcccaaaaactggggggaacactggattgaaagaggagggtgtggatgatattgttgatggaacggatgacacgttcagccttaccattttgagctgaagtgtaggggcaagacatgcgcagatggactccatgggaggagaaaaaagtgcgggcttgaaggttgtcaaattcgcgaccattgtcgcactggatgctctggatagggacaccaaactgcgtacgaacgtaggcaaagaaattggttagggtggaaagggtgtcagatttgagacgtaaaggaaaagtccataaatagtgagagcagtcatccaagataacaaggtaatatttgtggccagacacactagtgatgggtgaggtccagagatcacagtgaattaactgaaaattacaggtggcgcgtgaggaagaagtaggaaatggtagacggacatgtcgtccgagttgacaagcatgacaaggatgagtactagtatttttattacaagaaattgcggatgactgcgctaaatgtgataaaacggcgtgaccgggatgtccaagtcgttggaccatagggtagatgcaagaagagcagaggccgggaaccgcagggggtatagtggaccagagctgttacatctgaagatctcgcgccgagtgggtagatccttcacagagcagccaaaaggatcaaattcaacagagcaattattatcagtggtaaattgacggacagaaatc

SEQ ID NO: 185836 - DNA, 589 bp, Zea Mays
gtattcccgggattttcttttaacgtttgcacaaagttgcatcgaacttcctgcaggtttcatgattggattcgatatttctgaagcagtaatgagtgtacatgttggtgctccatttatagacaatactcaacttaattcaaaccatgcaaggataaaagatcgaggttcccgaggtagtcgtcatatgactggtaaatttgatgatgataagtggagaaaacagtttttttctactgtttctggacgtaacctgctttctgacaatttttatcaacctgccttttctaatcgggatgcagtacaacatgttgggaacggatctgtaagaagtttatcacaaagtcagccattaagtcaatatagtggcgaggtgctctccggagctatgaaagtagtatctcggcgcagcatgtcacgtggatctgttgatgagagatggcaacatagaactaatgttcagggtatttcatcgccttctcaggtatctatgccaattatgcacaaagctgagaaaaaatatgaaataggtaaggggattgatgaggaagggtcaaaacaaaggcagttgaaagctattctgaataag

SEQ ID NO: 185837 - DNA, 1307 bp, Zea Mays
tattttcagctggcgctgaatacaaggtaagacttagtggatggtgaaattttcgaaatcttgattgtagtaggttcatttgtcatttgtagccagatattttcaggacaaggtaggaaatttgatgaaccactattcctgctgtttgtggttatgttttactgttaccataaatacatctatcttttctcttatcttcaaccataaggcataaacttcatgcacttcttacttcaaatttgacatggaaatccatgaatgttataactgagtgctgctaggtcaacatatatcttattatctctacaatgaacttgtgtgcaaaagatgatgctagataagaccatatcaccccttcatctagaatgctagatctagatgacttgaatgcatgccatacatctagagcataacacaacacaattttgacaagcgatcaatacatagaattttgttagttaattggttgctatgtccttttgtaaatgttccccttcatcattattcattaataatacatgtattctattataatgtataagaatagatggatttccatgaccaagtgcatgttcaatacttcaatatatagatgttaagcacttctggtaatttattgcacaattggataattagatttcacattttcagtcacattttatttactcacttcaataacacattttttaattcatgtcttgattgcacttacataagcttgttggtgagttgatcattgtaggaatatatctctttctctgtttaggtcatctgatgattctagtatatgtttcctttctccaggtattgaaaagtcttgctgacgggttgatctcaatcacagtgaagcctcaggatctacaatgtactttcttccggtgtacagcgcgggaacttctcgcttgtgcagttttgagacctgttgtgaacttagcaaatccaaggtaataactcactggacctggttcaaataattatttttactgtcatcgtatttaaatgttaaattgacaggtttataaatgaaagaatcgaatcctttgctctttcgcatgccaataagttggagaaaggaactgcagaatccttggatgttgtcacaactgttaagcacagggaaccacatatgccctctgttgatgaattttcggcactaatagaccactcaagttcaggtgttgagctcgttcaatttcgtcagggtcaatcgaaaactgcatcagatatacaacctggaaaaagtacaaatccatatagtctaaaattagaatcctctcatgcacctttagtcagtagttcacacccac

SEQ ID NO: 185838 - DNA, 538 bp, Zea Mays
ctttgttatcttgggcctcatcagcattataactgtttattccagcttgggagtcattctgctctgaatgagttacagcggacacctcatctgacttgactgtcttatcatctgattctgcaatgctaccttgagctaagccaccatcttgagaaaaatctgttgcaggaacaccaggcattcccatattattatcagaacacctagttgattcttccgaaacatcgctcgcatccaagttaactaatccgttggcttccccaccattgcaggcaacttccatcagcacactacttttgcaagcctcagcctccacagtagtgtcacagtgtttcctctccaaactatcagttttgctaacctccacacccgctccacatggtgcctcagcctcagcacgcagcttcatggcgtcggacctcaacacccttcttgtcacattcctgttgtcatccgcggaacccctccggtccttccttttcttcccagtcaaggcaggccctccgccaggatcctcatcacgagaagcattgctttc

SEQ ID NO: 185839 - DNA, 634 bp, Zea Mays
ccatgcccaaatagtagcttagaagacccaaatcactcatattaaaagaatgcatcatctgttgcttaaattcagtaatcctattcactgatggcccacacattattagatcatccacatagactcccaccaccaggagagaatttccagccccttttctgtagacagcatgttccactacacacttgttgaaacccaaagagaatagctctgaatctagtcttgcattccatgctctaggtgcctgcttcaagccatataaagctttattcaatttcagcaccttacatggccttactggatcctgaaagcctggggattgaagaacatatacttcttggagatgaccattcaggaaggctgactttacatccatgtggtgaacttcccaattaccatgtgcagatagagctagcagaacccttattgtttccagtctagcaacaggtgcaaaaacttcatcaaaatctaccccctctctttgagcatatccttttgcaaccagtcttgctttgtgctttagtacatttccacttgcatctttcttcagcttgtacacccatttcagtcctattgccttgtgtccttttggaagatcagaccatgtccaggtgttgttatcatcgatagactg

SEQ ID NO: 185840 - DNA, 551 bp, Zea Mays
cgagataatgatgcggcgagtggacatgtcaaggcagcgatagcccttgtgagaggatgggtatatcaggatcaatcggagcctgattagcaattgattgtaatcccctagattggctagctgccttgtatagactaggattaccttctatctatagcctaggtatgtttccttgtacagggaatagccttccttacatgtacctcccatgcatgcctattggctatatataacaggctccccaccctcaatgggtgtgtggtgattcaatccattcttcccctttctacatggtatcagctctctagatcctgcgcccatctccctgctgtgcgcagcgccaactcctccctgctgtgcgcagcgccaactcctcccccctggtcaccatgaccgacgccaccactcctgcccccgctgtgattgtcgccccctatgcgacgatcaatgtcaagaaccacatcccggtgactcttgaactggcaaaacccaacttcaaccagtgggaaccattcttcacctccctctgtggaaaattcgctctcctctcg

SEQ ID NO: 185841 - DNA, 1618 bp, Zea Mays
gatctccacaccaaaactctgcagcatgataatgacagaatagctgaagagactgataaaggtacaaccgaattaatcctgtatccataataaaaactccgcaacattgatgagtgaagataatatgtatgctgaacatctaaatccacctgtgccaactgattattcactattttttttctaaagatcttgcttagtaatcttgcttcaagattttcaattcactaaattaaacttgctaaatctccagatgtttcgtctttggttttccctattgaagagcatgaagaaaaatatgcagtgagccctatagctgttgaaaagagcgtcagtcgggaagccagtgcatgtgaatctgcaggaaaacccctaactgtcatcttttctaacgatctccacaccaaacatctgcaacatgattgtgatgtgctaattaaggagactggtgaaggtaatattgcattaatatttgttccacaacttgttactgatctgcggagatggtgatgaaaacttgtgctgtttgcactgtgtttaatttaccaattttaaacatactgagttctaagtcaagttgttggctacttgtaattctatatatttttaataggctttatgtttgttgtatctgcaacagttaggcatatgtttcattgtcatttgttgtcttttaagtatctgacatttattttttaaatgtattctttccctttctcagatgttttagctcaggagaattgtaatgaccagcctgttccggcccagactgacctagaaatgaagttaaacgatgaacttgctgatccgggtatggactgtgtttaatttaccaattttaaacatactgagttctaagtcaaattgttggctacgtgtaattctaattatttttaataggctttattgttgttctatctgcaacagctaggcatatgtttcattgtcatttgttgtcttttaagtatctgacatttattttttaaatgtattatttccttttcacagaagttttagctcaggagaattgtaatgaccagcctgttcttgctcagactgacctagaaactaagttaaacgatgaacttgctgatctggctatggaatcaggttgtagcattactgaaaggaatgaagggcttgttgctcataatcttgatcaagaaggtaagcatccatttctatgatagctggataaatggataatgattgtctcagtttcagttgcactatcagatgaagtgttgtttgcgaataacgcataaatgtgtctcaggtttccttgaagcaacaccagagtgcaaacaggaatgtggtttgcctgaggagacagtaatttcctcaaaagaaacaggatctctgctgtgtgcagatcaatcaccaattggtctggaatctttattttcgcaagaaagcatagttgaatcagtggggcattgtgcacttgcttcagcaacaactcataccgaaaatggctttgatgattcaaaagattgccataacaagtctgcacttgaaaatgttcatgtgccagaaccttgttcacacaatgatactaaaggaggcatttttaaaaatgttgattgtatgcatacatcccagcgagatgatagaatggaag

SEQ ID NO: 185842 - DNA, 474 bp, Zea Mays
caacaacaggcgcttctggcccagcagctacctccgtaccaacagcagcagtagccggcgcagtaccagcccatggtgggatctccgctctgggaccagaattctctggcctccactttcagcaccgtcaccctcactccaccggcgaacgaccggtaccttgatacaggtgcctcttcccacatgacctcacatgatggtaccctctctcactcctcaatccctcggtatccctctcccacctctattgttgttggtaatggttcacttctgcctgtcaccgccaccggctcaacacaccttggctcccttaccctaaataatgttcttgtttcgcctcagcttatcaagaatcttatttctgttcgccaattcactattgataacaattgttttgtggagtttgacccgtatggttgttctgtgaaggatcttccctcgcggagcgtgatcatcaggtgcaatagctccggg

SEQ ID NO: 185843 - DNA, 605 bp, Zea Mays
gctgaagttctatatgtgtatccaaattaagtgtttgaactttaaacttgggttgatttgaaattcaaatggaaaggaaaatggaaaatagaaaataaaaggagtagggaagaactaagaaaaatactacataaaataaaataaaatcagaataaaaaaattcttcacacttatattattaaattatactattcaaactgaggacaagacattcacaaaatttgaatttaaacttgaactcaaattggatttgaaaaatggagaaaagaaaataggaaataaaaagaaaaaaagaacactatgccttcatgggccggcctgatccctttcggcccaccgggggaaaaccctcgccctggcccaacttccacgcgcgcggggacctgtggcttccacgttcactgacgggcggagcccatcgctcagccacacccctccctccgcgcggactcgttcgctgtctgtctctgtcgtgtgggcccctttggtcagcactttcttctccgccgcgagcttcgcgcgccgttgtaacagccgccgccgaggaactcgggaccccttcaaccacctcgcccacggacattgcgcggactcggactcgcccc

SEQ ID NO: 185844 - DNA, 473 bp, Zea Mays
atcaaaggtggaaatggcattgctgatggtcctattgacagttcaagtcttaatgtggtgatgcagaaggttaatgcaaatagttttggacatgaagattatccagatgcaaggttgatccttcctattttattgacggccaatgacaaaatcgttttatttattttttggcctaaatttatcttttaagtttatatgcagggaaggtattattggtgatggttcatttgactgtactgttgatcatgagaagtatgcgagcatttatggacctaccaccggtgataagattaggcttggtgataccaatctttatgctgagattgaaaaggacttcgccttttatggtgatgagtgcatatttggcggtggaaaagttctgcgtgatggcatgggacaagcttcagggtacccagaatctttctgcctagatacagttataacaaatgctgttgtgattgattataccggaa

SEQ ID NO: 185845 - DNA, 511 bp, Zea Mays
gtcaggcgatcttcgtcctctcgatcccacacctccgatcagtccctcgacgtcacccaaccaccacccagccctccaccctcaccgccgtcggcctcctccattatgagcaccaaaaccaacgacgatctggctgcgatgatcgagaagctcacgggcacggtcactgccctccaaaatgacgtcgagtcgttgaagaaggacaaggggccttcctcctcgccttccggcagcggcggccacgacgaccagcaccacatcgatcggccaccaaggttccaaaagatcgacttcccgcgttttgacggcaagtcggaccccatgctcttcgtcaaccgctgcgagtcctactttcatcagcagcggatcatggaggatgagaaggtttggatggcttcttaccacctcgagggcgtggcccagtcgtggtacctccagctacagacggatgaggggactccacgctggcatcgcttcaaggacatcctccagctgcgcttcgggcctcccc

SEQ ID NO: 185846 - DNA, 347 bp, Zea Mays
gtcgaagcacatgcttatgatgctttccgcaacattacgttcttggtgcatcaaatctatattatgtggtaacagcaatgccttcgtgtaaggtagctcccagataaacgagatgtgtgtccaattgtgttctttaccatacccttgaaaccaacctcctacgcccggttttaggtcacgatgttgtctcatgatattttcaccagtttgtcgcttcggtggcccatctctaatcctcttgccttttcgaaatgactttgtatcctttctaaaaggatgattatagggaaggaggcgtcgatgaacatcaaaaaatgtttccttcttaccatgttctaacatatatg

SEQ ID NO: 185847 - DNA, 552 bp, Zea Mays
taagtttgttatgggatgcatgctttttaggctgcaagagatacacaggctctaaaggtggccaaagagaaacttgaggaacgtgtggaagagctaacaagtcgcctggaccgcgaaaagaaactaagggtcaatacttggtcttgaacaatatttaaatacttgttatgtgtgcctattcttttaacccagaagtacatcatgttgcatcctgtattggcacatggtgcaactgcagttttcatgcttatagacatagcatctatggatcatacttgtgtgtattcaatttacaggctgatttggagaagtctaaagcagatgaagtttccaaattgaaagaagctcttcatgagatggagcagcgagtagaagaagtgaaagcgatgcaggaacaagaatcagcaaaaaaggctgttgaagaagctctagctcaagaaagagaaaagatcagtttattgactactgaaattgagggcctaaaggcatgttcttcatctataatattctgctttgttgcaactgatctacaagcagaaggattcaaacaag

SEQ ID NO: 185848 - DNA, 449 bp, Zea Mays
gtccaagagaccaagacacggataaaaggcttcaagaatacgacaccagtcagctgagagcggcgagactatcccaaagcttcagaacgagaagagtgccatgatggaaactggggctacatactcgctttgagaaagagtaacaacatctcagtttacatgttaaaacatcgccgtatgcctgttttacattattaaacaaaaaaagagagagaaaaacaatcacgcaagcacattatttccgcgcgtttgccgcaaccacacattataccatagaatcatacatagctttgcaggatccgataggtcataggtggcgccaaagactgatcggacgccgtagatatctctgccgggcggctagtcggaagagctgctgctggagggtgccggcgacggggtcgaggaggagtcggggccaggagcaggagcgggagcgtcggcggcgg

SEQ ID NO: 185849 - DNA, 1170 bp, Zea Mays
ccacgaattttcactagtaaccatatgaggaacttcactccagagactgaatcacagcatgtatccagtacatagagaactgacagcagttcttcatcacctagcctccatttggatgcagttttatcatcaggctgcaaaggaaggatgcttatagaattggtagctttagaagctgtcattccgtttccatcaacaagctgtcttattgatttcaacaaccatgaagagacagatcgtctttcgagcaatctaagtctttttagtgacttccctattgcagtcacgtttgctgcccttgtgtgatcaaaatctttgacgttgtcaccatcgttattaggttcatggtggggacagctcatcttgctttcacaaacatgactagtagatgccccctggctaccttcgattctagcagctgcaagctgtgcaagactttgtgttttacgaacaacttttgccctacctctagaagtttgcttaacagacttctgtacaggttcaacgttgaaagattcttgtaactttgtccctttcttcacccaccaaatatcctcctcgcctgattgaatcaatggaaacccttggaaaggagtggcgctgtcatccaatttctgccccttggacctcatacaatcctcgcatccacttttggcttccccagtctcaacttgtgtgagcgttgacgttactgattcttgaaagcttgttttgatttcacaaagttttgattccactaggggaggatatgtaaaacccaacagacttgacaaaagagctttaacatcttctacttgttctagcactcttccatgcttatcaccttctgatgcaactggaagatcactctgcttccgaatgcaggaacttgaagtgtactcacctctgccacttgcataaaatgaatgaccacatgaaagttctgagagaacaaggcgtcgctcactagagtatgttgacatcatctcatatagctgttgctcttctgcagtcctagtttcctcaagaacatcaaataaagaagacccaggaagctgcttcaaagttctgtgatgcctcctttttctttcaacatccagcattgtatcgttcttatcagtaattccactaataattagctgcctgacataaacctgagggaaaaatataccattgcggataagctccgcg

SEQ ID NO: 185850 - DNA, 621 bp, Zea Mays
gtcctcagaaatggagaatcttttaaagagggcaatgccatggcttggtgaggagatatgcataaaggatccacagacgcagaacaccataatgcctggtctgagcttggttcagtggatgaacatgaatatgcagcagaactcatttgcaaactcggctatgcagtccgagtacctacgatcgctaagcaaccccaacatgcaaaatcttggcgtggctgatctctcaaggcagttaaaccttcagaaccagattctgcaacagaacagcattcagtttagttctcctaaactgcctcaacaaatgcagctggccaatgagttgtcaaaggcatctcttccactgaatcagattggtgtgggcaccaaacctcaagaacagactcaagacccaaacaatctgcagaggcaacaacagtccatgaaccaactacttccattgagccaatctcaaaccaatcttgtccaggctcaggtccttatccagaatcaaatgcagcagcaaaagcaaccaacatccatggctcaaaatcagcagccagctgccagccagtcactgatcctgccccagcagcagcaacaacagcaacaacatcaacaacaaaagttggtacatcaaca

SEQ ID NO: 185851 - DNA, 798 bp, Zea Mays
agtgtgaaaatcaagaagaaacaaaaaacactatcagtgttaaccagactgacaccgcatacaaatatcctacaaccaagcccaagatcagtgttcaaattccagcttcctatactcccaacatggcaccaccccaatttatgcttccagtaccagggagatcaatgcctgtggcatttcaacagaaacaacctcaagtgcccattgaattcaggggcccaggttttcaaatgcactctattggctctgtatctagttccttgcccgtgaagatggctgtccctctgggtaatgcacctcacatacaaccgatgtttgttcatggtgctcagcctcatgcattccatcagcaatcctttattcaccatggacaaggctttggatgtgctcctccatctaattgttaccttcctcagtttggcaacatgagaaatgtgcaagaattatctcagcagtatcctagaagcggtgatgaacataagagaactatcaagataacacatccagagacacacgaagaactgatgctagatagacatgggcattcctttataaatgttcctgcttctgggcagatgcctttaaacaatataaaccagctacctcactctgttcaaacattttctccacttcagaaagtgtattatcctagaccaggaacgtacaattcagcacatgtctatcttcccaactccactgatgtccctcttgcaagtaggcaattttcctccaaaattcaaccttcgatgcatggttttgattccactaatagcaaccagccatttacttccatcagac

SEQ ID NO: 185852 - DNA, 344 bp, Zea Mays
cacaactgggaggcatgaggcgctgccgcttcgcaatccggaaattggtggagatgaagagacggatggagggcacgatgggcttgaggtgctgagcctcgggtgacgagagaagatggacacgaggagacggttgggagcctgaagatgcagacaatgagttgcatgggaattgagaaagttatggcagcggaagatggacacgaggagtcggttgggagcctggagatgcagtcaacgagttgcatgggaattgagaaatttacggcggaggacgaggggacgttgcttatccctgaaactgtcggccagaaggggacgttgccaattttgggcgccttaat

SEQ ID NO: 185853 - DNA, 576 bp, Zea Mays
gaaatgctctgttggtatgataaacatgtatgtgttcatgattgggaagtaaatgcatggtgattgtgagttggagactagtagtttgcgattcgtatgatttggtcggtgtgcgaaaatacttgtgaatatgaatgtttataaaaatgttgtagtgtatgtggtgtctcgaattgtgataataataggcaagccgacgggtatgctgtctagcgggcggtgtcgttgttctagctagccgactattagatgaccttggttaagctcatagtcacgatgatttgcttgttgtagtctaaatgtgtatgattatggtcgcgggtaaaaatctgtagtgctcatgtggtgtctaaactaaaatgcggactagtgggtgaaaagcgcttagatataagtatatgccggatttgatgattgtggtgaatgcgtttgttaactgaatgtgataattttagtgcactaaatgatttagataaaatttgcaagtctacttgttagtcctcatttgattaatctaactctaacaaatggtaaagtggtagaataattcaagtctctaaaacgcggcaattcttg

SEQ ID NO: 185854 - DNA, 528 bp, Zea Mays
tcgaacacctggtcgacaagatgggacgactcctcgccgaagatgactggcttgaaaagaacaaacatcgtctgcgttcaagctacaaagacaatggtggcgacacgagcactggttcgtcgaaagggaaatcatcggcacatcgcgacgggaatgtcactggacaggtcaagctgacctcctaggggactccacgtcgtaaaggcagatgtcgtaactgcggcatatatgttcattgggtggaggactgcaaacgcccaaaaagagggaagaagaaggaaccacagatgccagaagtgaacatggtcgttggcggagctgaacacaatggcgctctcatgatggcaacgtgcgacgtcgtccacggaccatgccaacatgttcacctgactgagaagactacaccggagttggtacctgacgggatgtgggtactggactccaaagctagcaatcacatgactggtactcgatcaatgctgacacagcttgatccgagtgttcgaggcacagtgcggttcggtgatg

SEQ ID NO: 185855 - DNA, 310 bp, Zea Mays
gttgagagtgggtcttagtcgctgcaacatttgtttagtagctggcttggtgaagatatctgcaacctgatctcctgaagcaatatgtcgaacatccagatttcctaatgcaaccttctctcgaacaaaatggaaatccacttctatatgcttggtatgagcatggaacacaggattagaactcaagtatgtagcacccaaattgtcacaccacaaaacaggcggtcttgactgcataacatgcaattccttcagcaatgattgtatccacgttgcttcagctgcaccatttgctaaagccttatactcg

SEQ ID NO: 185856 - DNA, 684 bp, Zea Mays
accaggacagtgcgcggaagcgaagaatgtgtctgttaaggaaggtggtgttgctgccggcgagagcaatgtaggcatagatgtgggcggtgttagggcaaaacactgctacgggggaattgatgagtgagagaagatgtgttgtgtaggcaatgtattagatgagaatagaaccagtcggttacagaatatataggggaggaggagatcctgtggcttatagaagtagtgccagagtgatctcctcaatcaatcaggatcagaccttcccaatgtgtctgatacagattgatccctacatcaatcaaggcatctcctaccataacagccctggattctatttatgctaaacacatgccattacaggaaagcacacgccattacaacaaaggaaacatgcactgctaacaccccccgccccacagtcggagcatcgaagccttggacatttagactggaccgaaactccgtgaagaccgaagtaggtagccccttggtgaagatatcatcagcatactgcgatgatgtcggaacgtgaagaacatgaatgtcaacgagggccacgcgctcgcgaacaaagtgaagatcaatcttgatatgtttggtgtgttgatgctagacggggttggaggacatgtagtcagcactgatgttgtcacaataaaccaaggcggtgcggtgcag

SEQ ID NO: 185857 - DNA, 496 bp, Zea Mays
ggcctctgcaagctctgttccgacttcatcgcctttcacctactcccattgctccgccattaattttttaccggatcaagagcaccttccttcctgtcctgtgcatcgaggaggagagagaaagagtatgtgcgtgtgagagggagcagagtcaagaacagcaagcagcccagaacccaacatacatttaagagggggatccaaaaaaattgcagtctttacctgcaccacccctccctaccacaaatttccctctctgctggaactggaagcagccgtggcatccgccgtttcttgcgtgcttcctttcttggttctcctactagctgtcatcgctggtactgaaccagcggagaagagagaggtgaaccacggtgatccccgtgctggacaccatggccgtgtcctggtaggggataagcaacccaggaaagcagcaaccttccgctgtgcggatcacaggagggggactgcgtggggaccagaccaagcatgg

SEQ ID NO: 185858 - DNA, 458 bp, Zea Mays
tggtgggcttgcagtttttgtggcaccttaccccgaggttggttgataacagtagccatcatcttattcgtattccactgaaagaaacacatttgagtgactgtggtggcttctgcggtgatatgaatattcggtttgagctagaagacaaggtaaactgtttgtgtgcttgttttccaattacatttaccactcttcagtatggaagaatacatattttgaattttcttgctgtacttgtgcagaatcttggttcagatttctctgtggtgaagggtattgagattggccaagaggttgttaaagctcagttgtttgagcctcagtttgaacatgtgattgacacaatcacattaactgttgctgaatccatgtcactagagccatcatcaccagttctcgtgactgttggtgttttggtgaagtttaaactcaaggtattccgacagaaagttgct

SEQ ID NO: 185859 - DNA, 295 bp, Zea Mays
ctagctttggcgcgaaaaaggcccgccagaggcctggtttcagtttccccgcgtaaaataacaccatactctaaacgggccttaaaacggcctgaacgccgtccaaaaccgtctacaagccgtcccgttcagcccgttcaggccgtttagacgccgagttgaccgtttagacggttgacccgtttaggaaaccgcccaggccctaaactggacggtggggtgccgttcaccgtttagaccggtctaaacggccgtttaataccgtttaggataacactgattattacatgcctgg

SEQ ID NO: 185860 - DNA, 463 bp, Zea Mays
aggcaatctagcctattagcaaagggtctttatacctttttatgccttgatatatggagtttcttcaacgatttcctcattagtgtttgggtccacgctgaagtagatgacaacacgtatagttccgggtgcgagttggtctgaaggcctcggggtctcgttcaaatccacatctagtgactcaaagaatgttacatctggccgctcttgttctattacttcaattgcatcattaatctccttgccaatcaactcgggccaactggtcttgtcctgcgttgccatgatcacgtactatccttagcttttctctcttttgaaactgttataatatcaataagaatcaataatcgagcaacgttagtgtaatgaatagaaacataatatgttgttttgtgctaatgctatcatactttcatagtaagcatgtcttaatcgaatgcactacataactaccgagctg

SEQ ID NO: 185861 - DNA, 310 bp, Zea Mays
ccaacttacaaatcaggtgataaatccaagattctgccagtaaagatgccgatctgtagctgtgaagaaactatccatgagttcgagatgttaacacgcgatgctgggcgtgtacagaaggatacactgaaaaagatcctcgagttgaatgctgatgctgaatatctgaacaagttcggcctcaatggcaggactgatgtagagagctacaaatcctgcatcccgctgtgtgtgcacagtgatcttgagccatacatccataagattgctgatggtgatagctccccactcctcactgggaagcccgtca

SEQ ID NO: 185862 - DNA, 345 bp, Zea Mays
tacaagagaagaaggaccagctaagaaagatggtggttcatagtaggtgggactcattgaaggatgtgaaatcaaagaagggaaaaaatgccacaacaactatattgaatccaaccttttggaaggatgtgaaattgacattggcagtttttgcgccattgttcaaagttctccgtttggttgatggagatgtgaagccatccatgggatttgtatatggagaaatattaaaggcaaagagacatgtcaaagaggcccttggcaatgttgagaaccgtttcaaggatgttgttgctgttattgacaagaagatggctggaagacttgattctccattgcatttga

SEQ ID NO: 185863 - DNA, 502 bp, Zea Mays
aaaagctagctcagttagctcagaagctcgattcccttcaacgagcaagtgcctatgaatctgtacacagaatagcggatgatgtaaatgaaaatgatagaattgaatttggagcagacttcgatttcaagccacttgcccgtttcattgttgatgtttctcttgacgcacccttagaaagtgctgaattgggcagtggtccatttgaaaaatggcagtatgatgcttggagcacatccacaactagtcattcaactgctgttaggggttctgtgagtttgaggtggctgaaagatcagtgtgctttgataactaaaagtggtggctcaatgctctcaggagatgaacttgcaatgaccttgtgcagagtgctcctatcaaataaagcaggcgatcaggtttttaacgttctactgaaaattgcctctgttttaatttttgtttctgcaatcatatggtgctcccactttgcagatagctggtgaacttttggacctggttg

SEQ ID NO: 185864 - DNA, 456 bp, Zea Mays
gtcgagcggctggagcgcgtcgtgccgctccgcgacggcgtggtgcacacggcgctcgacatcggatgcggggtgtgttgtactcgcatcgcatgaaagcttgccgattcagaaactactcgttggaagtctctctgttcacgtgtcgatgtgtgtccctgacaggtcgcgagctttggggactatctgctcaactatggcgtactgaccatgtccattgctccgagggatagatttgaaccgcaggtgcagctcgccttggagcgtggactgcctgcaatgatcggagcgcttgttgcccacaggctaccgtatccatcgaggtccttcgacatggtgcactgtgcggactgccgtgtcccatggactgctcatggtaggacatgcaagacgtcatgctattcctgattaaacatacttccttcctgatgcatcatctattcatttattatttca

SEQ ID NO: 185865 - DNA, 314 bp, Zea Mays
tatgaaaccctgaaagagtgtgctgtaataagcaaatctgctggaggaattggtgtctcagttcataatatccgtgctactgggagttatattcgaggaacaaatggatcatcaaatggaattgttcctatgttacgtgtctttaatgatactgctcgctatgttgatcagggtggtggcaaaagaaagggtatgtttcttcattatcgtcgcttttagttccttcatcttcagaaattctaacgagcttctaaaaacttaggtgcatttgctgtatacttggagccttggcatgctgatatttttgagttcct

SEQ ID NO: 185866 - DNA, 385 bp, Zea Mays
tgaaaatcgataagggatctcgctctccctattcagtgatctgcatgctgaaggcagccattcgaagaaacgttcgtgaatatgcacccttagagctgagtgagcatgagaatcttcctggaacttaaaattgacgatgtagacccctttctgtgcatgagattctatctgagtgcctccaaggagcaagccaatcagaatctcacgctgctcttcatccaacttcatgctcacaggttttggtggcttgacaactttcttactactgaggaggccactctgaagtttctccaaagattccactggtatatcgtacttttttttacacattaactcataaatgctctcagctttctgatagttctctgccaaaagatagcctctg

SEQ ID NO: 185867 - DNA, 651 bp, Zea Mays
gaaaacctctggccacaagacgagctttatatcgctcaatagacccatcagatttggttttaaccttgaagacccatttgcacgtgataggtacagcaccagcaggtaatagaacaacatcccatgtacatgtgcgatgaaggacatttaattcatcagtcatagcaagctgccactcaggtataccagaagcctctttataagatgatggttcagcaatgactgcaccagcacgggaaaacccataacgttctggagctgcaatagtgccacggtcacgaagatgatacctctgattaaaaacaacatgagagtcatccttgttagtacaagtatcatcaacaggatcatcatcaggactggccgtgggagtagagcgaggacgacgaatgtaagtctgagtgacaggtggtttggaagagtaagactgagatggtgtggaagtggaaggtggtgtgatgggaataaggacatctggggtagaaatagtaggtggtgatactgatgaagtttcagaaatgggaggaaggctcatgaaggaggtagactctgtggaataaaaagaagaatgagtggaagagttgtaaaagaagggacgattttcattggagctcacatctcgagaaatacgcatgcgacgagaagatgaat

SEQ ID NO: 185868 - DNA, 421 bp, Zea Mays
ttcagctagaccctagatgggaggaggaagactacaagaagttgttaacgtggaagtggtgtatgatacactgggcctgacaaatgaggtgatgggtggaaccaattgtgatggttggcaaaacgattatggtgatgcaggggcagctatagaatgcaaggacattgacgatgacattgtaatgtttgatatgaaaaatccagttatgaggcttggtaacatatatatatagtagcatgaaggagtttaggctcgcaatgatccaatatgcaattaacaaggaatttgagctaggcattgaagctactagtactcgaaggtatagaggttattgtaaaggggatgattgtccatggagtattcatgccagaaaagaagtagaagaatcgcctatcatcattgtatgactaattatcttgac

SEQ ID NO: 185869 - DNA, 320 bp, Zea Mays
gtcacgtgcctcgtctgtttgtccttgacagaaaaaccataagcgtcaaattcaattgaacaagagttgtcacgagtgaattgacgaacagataagagattgcgcacaagtgcaggcgcaacaagaacattgttaagacgataggtagaggtgggggaggatagtatagatgtaccacgacaggtgatgggtatggtggtgccatttccaacggtgatgccgaatgaaggaggggggagatgggacaggagtataccagccgaagatgacatgtgagctgtggcgccagtgtcgaggacccaaggagaggacccctggag

SEQ ID NO: 185870 - DNA, 336 bp, Zea Mays
gcttcaaggcaaggcttagggtgtgtcttgatgcaaaatgagaaagttattgcctatgcatcccgcctactcaagccacacgagcagaactaccctacccacgacttggaattggcagccatcgtgcacgccctaaagatatggaggcattatctgatcgggaacaaatgccacatcttgactgatcacaagagtctgaagtacatcttcacgcaaccggacctcaacctccatcaaagaagatggcttgaattgatcaaggattatgacctcgaaatccactaccaccctgggaaggccaacgtggtaacagacgccctcaaccgaaaacctttc

SEQ ID NO: 185871 - DNA, 878 bp, Zea Mays
aaagaaatgggattatcaaaatgtgagagctccaaattgcctttgtgaaaattagcaaggttaagactaaaatttcgctcagacgctttaccaatcagatccttatagaactgaaacatagcctgctgtttagcctcttgagaagtaacaagattctcgtcgaccatcagtttatgaataaagttcttctttttcctgaacctggcgtgcgcatgaaagaaagccgtattggcatctccagatttgataaacttcactctagaccttaatctagcaatggttctttccaaagaagaaagatgcagacataataattttagttttttccgcaaccactcttcagccatccacaaggatctgctgtcttgggcaatttccagaagatgtagagtcatcttggccaaagcaagttgagtagaaacattacccacagatttttggctccaggattgcaggtcctttgcaagtctcttaaatttaagggataatctctgcatgggacaagcagccaaaatagaagcattccaggaaccagccaccacctcctgaaaaccttgcatcttggtccaaaaactctcaaaatgaaaacgcttctttcccttaaaggtctcattaagccttaggatcagaggacagtgatcagacatattagaggcagaactcagtagagaacaatcaggaaataagtcctcccaatcagaagtgtagaatactctgtccagcttgactaaagtaggaacatctctttgatttgaccaggtgaatcttcttccagtgagaggcaactccttgagggagtgattattaatccaaatatttaaactgtccataagagttctattgatatttgaattactcttgtcatcagcgcatctgat

SEQ ID NO: 185872 - DNA, 321 bp, Zea Mays
ccaaggcgcgtccgtcggctgcggcggatgggctcgcctccggggttgtcgcacttaacttcgaggatcctgtaggaaccggcgccgtggaggacgggtacgactacagcaagggagacttcgtggaacacgcatgccggtactgcgggatccacaaccctgcgtgcgtggcgaggtgcaacgtaccctcctgccgcaagtggttctgtaactcgcgggggaacacttcaggctcccacattgtcaaccacctggtttgtctacttaccttttgtcacgagactttgttatttcgagactagtgagctactaatatgttaa

SEQ ID NO: 185873 - DNA, 690 bp, Zea Mays
tgttcgtccactttgggctatgttttttttttggtgacaaccatgtctcatgatcctccaagctttagaacgttgtctcttgctagagcgctgaggcggagtatcgctgtcactaacggcgttgctgaagattcctggttgcgtcagcttctccaggaactccaccaccgtacaccgtactagagcagcctcgtctcgtctactatgataacatcaacgccgtcgacctctccaatcttgttcatcatcaacacatgaatcacgtggaacctccattccatccgcaaaagggcaccacctgtgaagtatgcttcctccatgtctctacgacgtcacagttcaccgatatagtgatattttcacgatgggcctcccctccacggtgtgtgttagaattagccatatagccctagtgggccttataactgtagttgggctaggctcacccagtgctgcatatatgtagatataaattgtaccgcattgcctactaacgtagggtgttagttctatgctctgtatataatcagcccatggggcttactgcaatacaatctaattctgtggtaataccttctctaaaccaaggtaaacacccttcttggtattaccacataattaggttttcggccgggagggctcaaaacacgagtaaaaatctgacccatagggggcggatcctcatgctgc

SEQ ID NO: 185874 - DNA, 454 bp, Zea Mays
ggactgtccgccttgtattgtgccggtgatgagagaatgcattggaggacatgtgatgctgaggaatatcccttgcggatcgaaggatatcaggtgcaaccaaccatgtgggaaaaatcgccaatgtggaatccatgcttgcaacaggccttgccaccctcccccttgtgatcagacacctgcaaatggagatgctagctcaagctctggcggcaaagctgcttgtggacaagtatgcggtgccgcgaggagggaatgcaagcatacatgtactgccccatgccacccatcgtccccatgcccagatttgagatgtgaatttgctgtgactattacctgctcttgtggccgaatcactgcaactgttccctgtggtgctggtggatcctccatgggtgataatatgtttgaagtctccatcatacagaagctgtcaatgcctctccaatcagtg

SEQ ID NO: 185875 - DNA, 812 bp, Zea Mays
ccgccgccacaagcttatgttgagaaacaacacattcactagatatcaccttataatccaagactcactagatatcaccttgtaatccaagcatgctcatttatcatctcttcttgtaaggacagagttaatgtaactagggtgttggccactactatagattaataaatgagattctctctttctaaggaaagtgttggctatcaacaggtcaaaagctatcgcaatgtccaagacttcatctccctcctgattcctgctaccatacccaaaacctccatgaaccgccttaaaacttgcactcgttgtacctatatgtccattgagatctcctatgaaaagcttctcactaataggtatagctctaaccatgccatctaaatcttcctagaaaagactcttaagtctctcatcgtgacctacttgggggcgtacacgttaattatgtttaagaccaaatcacccacgacaagcttgactaagataatcctatctccttgcattctcatatctaccgtgccgttcttgaggctcttatcaaccaaaactccttcatatttatcaatcaaaactccttcctatctatttgcaattgtccctgtgtaacaaagtttagcttaaagccgatattgtctgcctcattcgtcttctaacccttccatttagtctcttggatgcacaagctatttacacacctcctagtcgttgtctcaaccaactctcttaacttacctttaagcgaccctacatttcaactacctaaacagatcctagttggatcgactagcttccttaccctttgtacccgtcga

SEQ ID NO: 185876 - DNA, 526 bp, Zea Mays
gtttaacctccaccccttgatcacagaaggttagcaccttgttgatccagtcacaatgcattgggctatgctgtttcaaccagtcataccctaatatcacatcataagcctccaacgccaacaccctcatggcagttctataaacatgccccccagccttccacttcacctctctgacatttttttcacacaccatgatctctccattagctaccttcaccttcacaggaggacaatcttctgtgctcaaccccagtttagtcaccatcctctgactaataaaagttgtggaactcccggagtcaatcagcataaccagcacctgatcttgaatcagagatagcaccctcatacaaccatcacactctgtcccctttatggcattccaggacagctgatgtaatccttccactatatgctcctcctcctgttccagcttcagcaacacttcgtcagttagaactgtgctcatatcctccactgtcaactgatgtatttgagtcactactcgcttgggacatttggc

SEQ ID NO: 185877 - DNA, 365 bp, Zea Mays
agaggatgctgtatcgggcgggcagcagcggtctccaagggcagaaggaggggagaattgccgccacaaagaagaatctggcgcaccctcgtctgagccctggcctgtgcgtgccgatgttcactggaggttaagtatgttgtgtgtggcatcttcggtcaagaaaggtgactacggagctggcaatttctcgacgggctttggggaaccgagcgccgtcatgaccgttgcgcaacaacgaacttcatcactagtgagtgccctaattgagtttgcaggattcttggctgggtattaggcgttgtgggtgtgagattggagcactggggtaccgtgacacggtgctccggcaagccctcaaccgt

SEQ ID NO: 185878 - DNA, 393 bp, Zea Mays
ttcttggtcatgcctgacacaatatcagcaatacgtttccaccactgcaggaagtttgtgtcatcttggataggggcaagaatgtggagcctgaatttccgaagagtgatgtaccaatataatctggaaaagctacaagaaaccaaaatatggttgatggtttcaggctcttggtcacaaagagggcatctaggaggatgatttagtcctcttttttccagtctgtttgcagtccagcacctattatgagccaccagccaaaggaagaaccgacacttaggaggtgcccaagatttccagaccattttgtaatgctcaaaaccaacagagccagtggagaaacccttataagccgagcttgcagaatactgcccattagaagcaattgaaaag

SEQ ID NO: 185879 - DNA, 449 bp, Zea Mays
tagctaagctacagcagtgcgcccagaacctgaatcacatgttctgggactttcaagctaagttcttgcagtgcacccaaagcctgccactgtatatccatcagggagcagctgggcaaccaccaatgcggcaatgcctgattcacccgccgcaagatccactgcagaattcagggatgacattgaacaaggaccatcgacgcctgatgatgcaccctcgaatccaccgtcgcctaatgccctcccgaatgctgctggctccaccactggcaatcaacacggatcagctgaggaggcaccgacgcctgatgcaccctcgaattccctggtgcagatgatctgcgactgattggtctatgggtttacagcactccgttctttttatttggctgcgcgtcatcttcgggactggtcatatgaaccgattggcatcaaaggtacgcactgtc

SEQ ID NO: 185880 - DNA, 373 bp, Zea Mays
ccctcccagacacaaccctcccattgtcttcccctcctctcctcacgccgaccactccattcctcatcgccgcctccgcttactaatccccacaaccgcaccgatccatcgctcgccttaggttttctgctcgactacctcctggtgctccaccgttctggctcgattcgcgccgagggcggttgctccgagctcttagccacctgtcgccgctgtagcctgctgctgcgggggtgctctgccgtcggctgccgctggtgtcgaggaatagggttttgggactgccaggcagaggagggtgcattggttggcttgcgcatggggatggtgcccaacgggctcctgcccagtgcgtctgccgggatgacgcgac

SEQ ID NO: 185881 - DNA, 590 bp, Zea Mays
tccttcgccacttcactccatcgcgaaaccaacgccttcttcctactggtgttctccgtgtgctgacgcaacgtgagaacaccctgcatcgtgttcagtaatccagttccaagacgaggagctgagtcgaggcacgcggtgagccaatctgtcgcgatccacacgtatccaccggatgtcatgctcagattgtacgccagcgagaacacgtcgattccagaatcgtcacgcgcgtgcagcacgaaaacccgggactccatcatcgcagccttgaccagcacggcggccatctcgctctttcttgcccctggcctgatcgcagctttgtacaggatcttcagtctcctcttggcaagctcgtcgtctaaggaggacacgccgtttcttccgtagtcgtcatcgatgtacacggctgtcaccatcttccacccgtagtaatcaactatcgcagccacggaagccatctggaactggtcgctgtggacagtgcgcacaaagaaaggatactgaagcggtgtcagagtcggatcggttgcagcgaaggacatcagaggcacctggagttcatttgcgacgtgggatatgacgtg

SEQ ID NO: 185882 - DNA, 282 bp, Zea Mays
tcttgtttaatattgttcatgacatgatcaaatgaacatgtatgtatgttgatcagcattcctacgcttgttcacttcatcacatcatccttatttcgatttcacattattgaaggttgctgtgccactgaccttagaactgtggtcaaattaagttagctgtacaccaatttactcacatgtatctctttatttctgccttctatgatttctttaccttctacgattttctgattccttttatgctaatatgaagatcatttgtctgtaaataccgatgtg

SEQ ID NO: 185883 - DNA, 1947 bp, Zea Mays
cgtctccttggggtaataaaatcactcccagcaataacttcaagaattggagttggaggtgccgcatcgagttgggtgataaaagaatttattgcccagatccatacagtttcaaaagttgcattgcacaggaaatcaaacctagcctcttttcttgaaagtcacggtattaattgtacttctgacttgtttaactaaatttgtatgcttgactattgcatgttgacttttagaaggtttggatattctattaatgctgtctgtttttgtttcatcttttgtatgttttttttttcaaccacacagaacttcacatctttatattaataaggaaaagaaagcatccaaaatagaccgtttacaagagagggtacatacacccatgttgtttttgggattagatatttacattaatttttaccaattagcataatggcgtatgttgcatttatgtgagttggagaatgaaaccctaaccctaactagggttgggactgatatatatatcaatagttgttggccctggcccattacacaagggtgtgacagtaattacaaggggctaactccaaaaccctagacaggtactctaacaatgtgcccccctacatacacataaaaatcattttggaatgtactgattttttcatcgtgtcaattatttgccttcttttttatgtttttgtatttgcctcctttatttctgttctggagataataacctgcatgcttagttaagtttcgtgagaaggtaggctagatgattctgtaggttatccttcttttctaacatgtgtaaacatgagtagttttacagtttaaattacatgaaactgcaaagatgtcacatcaattattctgctgccgctgctgcttttgttgtttttgatgtgcaaccttgccaactttactctgcaatctacatttgtatgattgtatctactagtttgagcatagaacaccgcaaatgtttagatacaataatcaagtgctgaaatgtgaaacatttctaatttaaaatattttctaacattcaaattcaaatatttattataatgactatattttgcaggtacagaactagtcgatggtcttatgcaggtattctggtgtatattagatttagacaggccggacacacagacaataaatagtcttgttgtgccttgtgtggaatttatttatagctatgctgaatgcctggctttgcattccaatgaaaaaactagtgtgtcagtgggacctgcagttgctctgctgaaggagctgctctttgcaccatatgaagcagtacagacatctagcaggtgattttctcttctactgttcatacatcagtaagagtaccacaattaatatttgctagtttttcttttgtttttgtatcattttctcacttgtgttttattgctgctttccagtttggctatctcatcccgatttcttcaagtccctttccccaagcagacaatgatagctaatgatgatgctcctgaaaaccaagctaaagcaagtgcttctgctatgaattcaaccagtgcaaactctcaggttatgattgaagaagatcctgtcacatcatcagtgcaatattgttgtgatggctgttccaccgttcctatacttcggcaaaggtggcactgtagcatatgtccagattttgacctatgtgaaacttgctatgagatacttgatgcagatcgtttaccagcaccccattctaaagatcatccaatgtcagcaatacctattgaagttgatacatttggaggtgaaggcagtgaaatccatttctctgtcgatgagctaacagattcaggtgttcttcatgctgataggagtgttcagacctccccatcatcaattcatatatttgatgcaagtgagtctgcagacttacctgagactattacagaccaggcaactgtttcgatttctgcatcaaaa

SEQ ID NO: 185884 - DNA, 3401 bp, Zea Mays
ccaaaccatattgagaagattctacattgttggacgtaggcctgtaattcctcttcaaagagagaccttgattcctcccacttggagttgtaccctcagcaaactctctgtccacttgactactaaatccgtccacaccagccatctgattgtttgcaggagcattgagatactgggaatttgaattgtccatgccaaggggaaccttggttgtaggtgctgctgatttgttgataaaggtggatgagcttgcctgagctgggatgttctggtttgtacctccatccattagctcaggtagaacactggacacattctgattcaatgtatgttgagctgatatggaagaatgtgcagggcgggtggcctgagaaggcagcgatcgaacactcggagcgataggacgtacatacctcaactggccaaattgatacaaaggggttgttgaagggtgcatatgaggcagggatgggttaaactgattgtggagatggattggcatctgtatggaaccaatttgaatggctggaaccggagttggtattagaggaggacctgtaaacaaaccaaactggaggctgacaggtacttcattctgcccaactactgttgaagctgacgaaaaaataggacccacagaagatgcctgaggtaactgggaacttgaagcaggtgtccttgagctattggatggctccccattactgtcttctgtcaggccatttacaccatcaagagtcaatgcctgcagtgctttctctgcttcagtaacaggatcagaatggacaactgaaccactgacattctcttgctctgcaactcctgagtttagatgtactccaactgtcctttccgtgctcctcacagaagctaattcaagttgactattcggtggaatttcaacctgcacgccctcatcaaacccaagtataactggttccagttctacgggtgtatcctgcccctctaagaactcatcatccaagtctatgttctcatcatcagcttcattcatttcatcttcctggtagctatcattgtcttcatcatattcatcctgttttcgcctatcatcattgtttacacttgaccattcatcctcctccaagtggggcactcctgaggcagcaattctgcttgtattgtctgcatctacagtcagagctgcatgatggttgtcagagagcgccgtatgttcaccatcagcagaagtcggtaacacaggagaatcaccagatacgtccatctcatcatgtgaaacatgtggaggtgagctaggagggcttgaaacagaaagagaagattgtgaacccaatacagggctttttctgtccacaatttgttgctcattgacagaaatgtggtcagatcgtatcccatgctggcgagatgcctcttggtatacacttccgtactgaccctgcataatctgcacatcatctctaccagaacactctctgttcccaccatccacaaaagatgaattgaaacgttgtgctgaagcaccaattgaacttctgtgcacagaggtcacaattgggggtgggggaacacgtggttgcctcatagagtagcgtggtctggtaaaagaagacaattcattaacatcaggactctgaaacatcctatctccttgttgagcattgaggcttccatgagaactactaggcagccaagctgtatctccaaacctgtcgctgttaaaaaactcattatcaaattcagattgtttgctgaaacggtcaatctccctaggcgcatcccatcgtggaaccttttcatgatggaaatcttcaagtgcccatgaagaatcagttgttcggcctgttgaagattgcctaaccgaaacactcccaaatccatcattaagatccttcttggggaaatttcccctctttgaagcaaaagggtcatgctgtggcctatgatgcacattctcttgttctggaaatgcaggccttgaactatagtgtgcagtttctctatcaataaatgaagggcgtccatctgtaagagtgcgcacccttggaactgtctcactgaacctgttaatactagaggattccaatggtgttgaggtattgatgcgctcattcattttgtcaatatcctttctgtcaccaaagttagcagagtgtgacaggtctctgtccttgacatctccaggaataaattcatcattgacagctcttgtgctgtcaatgtttgtttttgcttcccttttagcaattcttgcctccaattctaagagcttctgatgtgctgcctccctgcgccgctcctcctccatagcgatcctctttctttcctcttcccttgcgattctctgctcttcagcccttctagcagcttctagcctctcttgctcagcttgccaagctgcctgctttgcctgctcctccgccagccgttgcctctcctcctcttctcgtatcatcctctcctgttcctcttcttgcttccgagcaacttctctggccctttcctgttcttccattacccgttgtctctcctgctcctgtaccctcaagatcctatcaagctctgcctcaaacgactcccttgctgggtcatgaaaatcagctggtttagctgcttcttttttcttctttattgcagtcaagttaacggcagaaatgctgtcaaaaccactatcatctattaaaggctttgcaggggaaccagtcagccgcttctccctgccaaattttgccactggatcattatttaaaggccctttattaccaccaaagggctgcactttggaaccaacattattctggaaagaattcaacctaggccaattatttgaactgtcgccgtaacgctcgctagcagcttccaccccattctgtccataggcactcataggaggctccttaccattactccacacatccttggatccactggcagctatgttttctcggtatgattgcccactgcttcctctgccaccactgtaaggtcgaccatctgttcgctccctgtcgtgttggtttgacacgggagatcgccacagcctgtcctgcccaccttctttatttgttgcagccacatctctcccaaacatctcctttttgaagggatccctcatcgatacataaaggtcgcgccctggaagcatggcctcagtcctgccaaatcccctctccctgctgtcccgctctggaaggctcagccctgtgtcacgctcgtcatcagcccagtcagaatcatacctaagccggaccatcggaagcggccccagatcaggcttctgcaccctctcagcggaagtgcggccaccaggtcccaagctgacaccagaggccagcgtctcagtggtccgcgaggttgtcacctgtggccgcatcccaagagatcctggtcgcgcctctggcgtgacgacccggacccca

SEQ ID NO: 185885 - DNA, 436 bp, Zea Mays
tatctggtggtgttaatcctaaaccaaaaacatcatccaattcccgagctaatgttaaaggctcatctggtagggctaatgtcaaaggctcatctggtagggatgagattacctttacagaaactgagttccgtgatgttagtttgcagcggaatcgtctaccacggaaggcagaggatgtagggagaaaggttacaggtggttctgattcagattcttctggtcgccagggaacaaatttgagcaggcaatcatccattaccatccaggaactaaacttccaggctagagtgatgggaccaggaaaagggaaccaagatcggcatggcgaattgcaaatgaaggctaatgagttggagaaattatttgctgaacacaagttaatatcatcccgacgaggcaaacctacagatgtgcaggttgatagcacacgtac

SEQ ID NO: 185886 - DNA, 377 bp, Zea Mays
cgcccgtggtcaggcagatcgacgccggcaacagggacgtcgagttgctggattacctgaggttctacctcccagatatgttcccgtcgctgcggagggtagtgcttttggaggacgatgtggtggtacagaaggatttggcagcgctttggcaggtcgacttggacgggaaggtgaatggcgccgtggagacgtgcttcggggggtttcggaggtacaggaagtatctcaactttacgcagcccattgtgcgggatcgattcaagcccaatgcctgtgcatgggcatatggcgtaaatgtgttcgaccttgagacatggcggcgggatggttgcacagaattgttccatcagtatatggaaatggtgagctgctcc

SEQ ID NO: 185887 - DNA, 492 bp, Zea Mays
tgccaatctccctttggcggaggaccagcattggcaggtctcgttcgaggagatacagaaggcgactgaccagttctccccgagtaatctcataggcgtgggaagcttcgggtccgtttatagagggatcctcctgagcccaggtgcgcggcaagttgaagtcgcgatcaaggtcattgacctccggcagcatggagccgagcacagtttcctggccgaatgccgtgccctgagaagcgttcgccaccggaatcttgtcaaggtcgtcaccgcctgctccagcgttggccaccagggaaacgacttcaaggcgttggtctacgagttcatgccgaacggggacctcgacgtgtggctacaccaccaccataggcaagatccacaggatggggcgccgaggaggaggaggaggctgaccgtgacgcagagggtggacatcgcgctcgacgtcgcggcggctctcgactacctgcaccaccacggccaggcgcc

SEQ ID NO: 185888 - DNA, 836 bp, Zea Mays
tctttggttttcttgatatcggtagcaatcttctgaaccctcccttccagcgcggctagtttctcatgtaatttgcttgggtacctgttcatagcagacacgggttttgctgaccctccctccccacctgcagccactttctcaaaaactcctatcctgtctgccaattttaccttttcttcctgcttcctgccctcttcattattcttttgctgtttccttattggatcagggacatcatttgaattcaccacatggacagtgaaaacagggatgacagaagtcttgcctatatcgtcatccttctggatggcacaacattccacagatttggaagcagcctctcctggatcagcctttttggtattcatctccttcatcaatttattgggcccctctttcttcatattgatttcttcagctgcctttacctttgaatcagagccctttatttgcccaccaacatcttcacattgcttcttcatattagtcacgaatgcatttgttttccctttgttctcatcacattgcttcaacacattcacacaaaagctatctcttttcccaccgatctgcttggcctttgcatcaaagctctcccttttcctgccaatctcatcagtctgcttccccttggcatcaaggtcacctcttttcctgctgatctcatccgaccccttcgccttcgcatcaaacctcgcccttctaccagtgtcatcactaccagcgccagcactccctctcctagcctcggaggccctggatccaacaacactaatcgacctcctccctttctctacagaagaagccctgatcccaccactgacgctccgccg

SEQ ID NO: 185889 - DNA, 461 bp, Zea Mays
gcgagagcgagactaccggtaccatcaacacaccgactgcaatgacgatgccaagatcaacaagaggaagcatgatcacagcctcgtcatcgacgagaagcggggccggtacgagtgccctggctgcaggagggcattccagtcctaccaagctctcggcggccaccgcgccagccacaagcggatcaatagtaactgcagtatcgccaagcctgtggtcgaccaacgaccggagcgaattgtcgagaccaacatctcctcgtttaacatcaactacaccactcacatggctactacagcggtggtggccttgaaggcgaagtcacacaaagcgatcaaattcgagtgtcccatctgttttagagtgtttggctcgggtcaggcgctcggtggacacaagcggtcacactccattgccggtgagctctatgaacgcgcacatgctgacggagacgaagaca

SEQ ID NO: 185890 - DNA, 718 bp, Zea Mays
catattctccctgctgaatgatccctccgctgcgcaacagatggttgccatgtggtcatccttgggctcatctccgcgtgcttcagctgtgagagaagacatgtcgtttgacacctttcctgggcctgtggacgggacatcgtcacttgctcaaaggttcaactcagcagcagcatcgagtccaactggagtcgacagagggctaaaagagtcagatgggcttgttcttccaagtaatggctcacagcaagggagtagcatcattccgaggtctgttggcaacgctcttgcagacaggatgctcatggcgctatctttgttcaggaagtcattgagtgatggtgttcttgcccaagtctggatgcctgttgagcacaatggtcgtgtcgtgttgagtacatctgagcagccctatttacttgaccaggatcttgcaggttacagagaagtttctagaaatttcctgttttcagttaaggaggagcctggtctgcacctagggcttccagggagggtcttcatatccggggtgccagagtggacgtcaagtgttatctattacagtaagccagagtatttgagaatggagcatgctcttcttcatgaaatacaagggtcacttgctatgccagtttacgatcccagcaagggctcttgttgtgcagttcttgaacttgtcacaaacaaggagaaacctaattttgatgcagagatggac

SEQ ID NO: 185891 - DNA, 458 bp, Zea Mays
cttaaccacagtaactatttcttaggtgctgtgtttctgtacttaagattctgacattattttctttcccctgaactgtgtataggtacctggattggacattactagacgcattgacttggccaaatttcttactagagtacctgtatgtgatgtgttgcattaaaaatctaggggggaagagctttggtagaagccttctagtcgccgaatactataaacttcctgttaccatgaagttgagggtgctgcaaatactctgtgatgatgtcattgaatcagaagaactcaaaactgaactggaaaatcgagtaggctacaatgaggagatggagtatgagatagaatctagtgcatttttggaggctggttcaagatcagtctcaactagagcagcaaaggcctcagcttgcaaaaacacgaatgatttccataatcttctcgaaagtgctccaaat

SEQ ID NO: 185892 - DNA, 456 bp, Zea Mays
ggagagggagtgctggcgctggtggtgatggcactagcagaagggagaggcttgatgcgaaggccaaggggttggatgagatcagcaggagaagagatgatcttgatgccaaggggaagcagactgatgagattggcaggaaaagggagagctttgatgcaaagcccaagcagatcggtgggaaaagacagggctttggtgtgaatgtgtccaagcaatgtgatgagatcaaggggaaaactgacgcattcgtgagtaatatgaagaagcaaagcgaagatgttggtgggcgaagagtgggctctgattcgaaggcaaaggcaggtgaagaaatcaatatgaggaaagaggggctcaataaattggtgaaggagatgcatacccaaaaggctgatccaggagaagtttcttccaaatccgtggaatgttgtgccacccagaaggatgatgagatag

SEQ ID NO: 185893 - DNA, 725 bp, Zea Mays
cccaaacccaacacaattcccccgtgttgcctacacgcactggccacgaccaaaccctaggcgccgccgcctccggggccctcaggtacgcctctcgcttacccgccgccgggatttcgccgctgcgccgccgtccgtggctttgaacgactgacagcttcgcactagggttcgttgcgatttcgttgttaggagtgatttatgttttacttttctgtttgtgtgcgtgattggatcagggctgtcatacggggaaggaggaggatatcggtgaggagagaaggggatttatgtcccagcgaggtgacaggggcgaggggcacgccaggagacccggccggtccagcagcttcggcggccaccgcggaggcggagtcggcggcgcgggcaagggcggcgcgggatcctcaggccagcctcctctttctaccaaccgcaggtaaattactgacctcgttgattctgatcgtcctctgcttctgcgccgcacgattggtttgatctcgccagggatgatagggttttgatgagacttttggatctcgattgcagctttaggaagcccggcaatggccacggcgggcagcagagggtggtgaaccagcccgacacaaccggtttccaacctgcccccgcgcctgccccccaccaaactcctgcgcgaccgccacctgcacctcagaatgcggctgtgcatgttcccatatccgcaccatggccgcaac

SEQ ID NO: 185894 - DNA, 401 bp, Zea Mays
atttctttgtagcactgatggaaatcatctggattcagtggagaaaacttgcaagttctttgaatcaaaattttctttgtggatagagttattagatgatacagccggcactggtaatcgatctagtaaccaggtcagtgagaaggaagctgctatactgtggggatcttttttctgctaccctaacatgaaaggtgtacatcaagatagtttgtcactgctgaggaagttaatcatcaactttgatcggttgcttgaagtgggagaaggtgattttacttgaagatttctttatattactatcactgcagttggtttttctaaatggcataaattcaaaggatttacatgcagggaacatgaatggtcttccaatgactacctggagaggtctacttggt

SEQ ID NO: 185895 - DNA, 1631 bp, Zea Mays
gcattgcagtgatgcagtcattcactattgttcactgcggctggtagatctcagaaacctggctgcatcatctctcagaggcaatagtcacatgggtggggctactgaaagtcatgcctttagagagaggttagaagcagatgttatgaaagtcctccggcatgcttccctggcactctgcagatgtcatgaaacagatgccttagttggacttcagaagtgggctgcatcaacattctattcttactttgagcaagataatcaactagttcggggcgtatctgatcgcgacaatcgcttctcctggatatcaggattgatctatcaatcccaggggcagtatgaaaaggctgctgcacattattcacatctactgcagtcggaggaagcccttatctccatgaaatctgatggcattcagtacatcatagagcgtgttattgagtgctacacatccctttcagattggaaatgcttagagagttggcttgctgagttacaagtgctccgtgctgtacacgccggcaaacctttttcaggagctctaacaagtgctggcaacgaacttaatgctatccatgcaatggcgtgctttgatgagggggactttcattcagcttggggttatcttgacctgactccaaaaagcagcaatgagctcacccttgatcccaaggttgcacttgagagaagtgaacttatgcttttgcgtggaatgctgcgatgtaatagcaagttagagggcataacagaggagcttcataaggctaaattgatgttggatgaagcactcactgttgtcccactcaatggattgcctcaagctgctgcttgcgctggccagcttcattgcatatttgcattggaagaagccttggggttgacctcccaaaatggacttaatcaatcacaatcaataatggattctttactgaaagcactgcatgatcctgtcgataaaatgcatcaagattgcaacatgtggctaaaggtcttcaaagtgtaccgtaatacacggccatcttctttatccactcttcttctctgtcagaagcttgcaagtctttctagaaagcagagcaattttatgttggctactcgtttaaatcaatacctcatagatcatcctttgaagtcatctgatgagatggacaaggaaatacttgaattgaacattaagtatgaaggtgccttgctgaagcatgcaaatggaaataatgaagaggctctatctgatctgtggtcactggtccgagctagtgttctgtctagagttagttgttcatctggcattggcacttcacattcactggttgctagggcttgtttgaaactctcaacctggatggagcaagcgaactcaagtcctttaaattcgatcattccaatggtagtaaaagatttcagcgattctgatggatttcaagatggggcagagaaacttctatctggtgatagtgtatctgtttcgactttggattatcatgcacttgctcaagaaatcataggcactgctcgaaagatatcctggcaactttgccccactatgggtaaggcttggcttgcttatgcatcctggtgctttgctcatggcagttattctctgtctggaactgattcaaatttgcaga

SEQ ID NO: 185896 - DNA, 435 bp, Zea Mays
aacaccctcactaccaaggacacagtcgggtgatgtccataatacggcatttcgcacgcatgaaagcctctacgaattcttggtgatgttgttcgggctgtgcaacgccccaacgacattccaagcactcatgaacgttgtcttgcaacccttcctccaccggtttgtccttgtcttctttgacgacattctgatatacagcaagtcatagcccgaccacctttgccacctctgtgtcgtcttctccatgctgtgacaacaccaactcttcgtcaagcaggcaaagtgcgccttcgatgtcgcctcggtctcatacctcagccacgtcatctccaaggagggcgtcgtaatggacccgaccaaggtgcaggccatccataactggtcggtgcctcggtcggcgaaggcgatgcacggtttcctaggcctagccgg

SEQ ID NO: 185897 - DNA, 348 bp, Zea Mays
ggcaggttgtcttcttctctttctccagagccttcacagccttgcaaaatgctgatttcatctcggatagctctttgcctagcttcctatggagagtctcagaatgtttccttagacgtctctcatcttcaagctcctcttgcagggaacgaagggctgctctcatcttctcttggtccttgctccttcgagccattttgtcttcggtggcttgcctggctagtgaatcaatttcctgatgatactgctgcctctcttgcataagttcttgaatgcatgcctgggcatgatgcaactctcgtttcagtcccttcattgctgacacatcagctgcatgctgttcttcca

SEQ ID NO: 185898 - DNA, 404 bp, Zea Mays
actaaggcaggcagcagcagacaggcagcaccgcagcagtaagacacacgagggcagcaaagcactatatatcaactcaagcacgagcacactggagtgaccatcaacacctaacagactagcacaaataactagctcaagcacgagcacaagtcaaagtccaagaggcaagcacaagcaagcaggcagtatatccaagagattcagaacagagagaacagaggaagaaggtgcaagaagagtagctttgatccgatgggaaggacgctagcagggaggccgaaggtgtggatcgatgggcggggatccaatcggaggggcgaatccgctccaatcgaagggcaaatcggcgggtggaactccaatcggaggggcgaatggaggctgacggtcggatggaggcg

SEQ ID NO: 185899 - DNA, 365 bp, Zea Mays
cgaaggtccacagtctgagcaatctgggattgcatcgaacattgaatctgtcattaagcagtacattggacaacgttgggttgctaaggattcgctgccaggaaaagatgtaaatgggagctcagtaagtttggattccttactttaatgagatctaatgatataagaccttctatatatcacatttcttattattaactcacctttttgcagtacctcgtggagcctgaatgtgtaagctctcttcaaatcatactagttgcaactgcggacagttctgaaggaatgcaacagtcaattagaagatgcttccgctatgagatcgacatgaagactatgaatgaagaacagagaaacaaactgat

SEQ ID NO: 185900 - DNA, 598 bp, Zea Mays
aggttttttccttttctccgtcgtgcaagatcagtcctttctttttttctccgtccacggttcgatcaggttttaccttctcttcgtcgtgcaagatcaatccttcattttctccgtcgtgcaagggggtcagttgaatcagatgctccacgttacgtccacccttgagctcgatggcagaaggaagcagtagccataggaggagtgcattctcccctgggctggctgtgttattatctggcgatgaagctaagattagctcccagaagtcgcacctggtgtcctatcatgacgaaattgggcaccaggctgttgagaggacgatagagcacatctttgatctccctcacaagtcagtggtccggcctcctggaccagttgacacaggcttcgtgcactcagtggtgaggaatcaagctagaaaatttgatcttgactgggaaaactgcattcggggataccatcgcagcgtcttcattgtggacaaaggtgctgggcagaggaaggtggttcttgatgattcgagcatttgtggtagcttcaggaatgtccggggaccttcacttgttgagagttccgcccctttcagcagtgccag

SEQ ID NO: 185901 - DNA, 391 bp, Zea Mays
ttacattacacaaaggggtgcttcgtcacaaaggccgtgtctacgtgggagcccttccttccctccacactaagatcatctctgctttccatgatacagcacttggtggtcattccggcattccagttacccttcgccgtattaaacaattgttcttttggccgggtatgaatgcttcagttcgttcttttgtcagctcgtgtgaagtttgtcagaaagctaaaccggatcgtaatcgttatcctgggttgcttcaacctttggcaattcttcaggcagcttggcaaattgtttccatggattttgtcactggtcttcctaaatccggacatgctgattgcatactcgtggttattgacacattttctaaatatggtcattttctaccact

SEQ ID NO: 185902 - DNA, 694 bp, Zea Mays
acactccctcatatatgagatttaggataacataatcatttggagtactaattaggaatcagcgtctataaatttggtaacatacctatctgctattgcacgttcccatgctgctgagctgatctttgtttgtgtgctaagaattgcaggaggaagcacacgtattatcttcaatatggttcgatctttgagcgtgtcatgccaaactgatgctaagcagcaactgcttgatgaaaaggctggtggagcaatagcagagccaacattgacatggtagctgtcaacctgatcaaaatttggacctgagaaaatgtgcactcctccacggaggaaagcaacagcaacttcaccaccatgagcagaataaactatttgagctagttgtcgaacatcatttggaagatcgtaagggtcaaagctgagtctgttcgccctgtcaacactgcactcagaggagctccgttcatctgatgtcgttggcatcggaacatatgtttgaggatttttaagatcctccgttggtggaatgcttttattaactctagtggaccaaacagtttgcatgggaggctgcccacctaagctagtagggcttccaaatattggatgaagaacaacaggttggcacgaagattcccagcattgcaccctccatccggtgatagaaggtccttcatcagggtcataaggagac

SEQ ID NO: 185903 - DNA, 436 bp, Zea Mays
aaaatagctgtaagaaacttgcctcaaacttctcattgtaaagatgtctctgagaaagtaatgaaccagccttctattgctataacggagagactggagaatgtatcagaaccttcagtggctgatgacagttcatccaaagctgtagcagagaaaaaggatgcttatagagattctgcagtatctaaaggacagccaaattttggtttctcatctgggtcgtccagcattatagtgacaaagttccagaaatcacctgaatttaacaatgtatcctctactgctaaacatagcaaacataaaaatctgtgtgatgaaggatcaagaattgagaaaagttcagcatccagctatgtgcctaccagtacaggatgtgaagaacccctaaatagttctgccaaatctgagctgggtccatcaagagtgaagcgcaaat

SEQ ID NO: 185904 - DNA, 647 bp, Zea Mays
ccgactagccgtagtccatctcccctggctcaccgcccgcggtaaagtgctcaccgtcgaccgccgcctctcgaccgtgcgctgcgtggctcaacccttccaccgcgtcgctgtaacttgctactgctatcaaatcaacgccggtgaggttgccacggcgtaggacactaattcgcgtgcgccattgccttcttcctcatctccgaccgccgcgtgtctcgtccaaattcgcggccaccgcccgtcctctctataaattgagcctgtgactagctccgtgaggtcgtcagctaactagccaccgctaatcggccacaatcatccacccgtgtgctcgaattcggagtttcccccaaatccgatttccgccaccgtgaaaccaagctcaccgtcgccagccatactccggttagcccctcccctctgctcccttgtttaagcattcttatgcgtctatgatgcttgccgagccattgaattgaactaagagacctctggtcgccgggaacacgaccgtatagtcgccatactcacggccaccgtggccagagctccatagttgatcaatagcgcaattatgttaggggaaatgatcatggtgaccccgatttcatgtccgccgctcggagaacccagccatagcccca

SEQ ID NO: 185905 - DNA, 471 bp, Zea Mays
agacattgtaaagaagaaagcatttgtcccaccaccacgattcttcaatatcgatgaggcgaggtgacatttttcttcttgagaattgatctaattgtttatgttattgtttgctaatcttgtgcaaacagggagatgcatattcgtgtggaacggaggcgagataaagaatctggggagtactttgagtgggttgataatttgaagtttaaagatggtttcttgtacaaatcagtctcaactaaatcaatccacaaaagtaatattcaaccgactttcgatgagcttgagaagtttaagaagcctggtgatgacatgaatggcgacatggctagtttgtctactctatttgcaaacaggaaaaaagggcattttatgaagggtgatgctgtcattgttattaaaggcgacttgaaaaatctggagggatgggttgaaaaagtagaggatgaaaccgttcacatcagacca

SEQ ID NO: 185906 - DNA, 321 bp, Zea Mays
atcatcttgagctggaaagcaagaagaaacatgtctcttgttgttaagctacgatacatcttgaagttactatcagctgcttcttgggttgtgattttgcctgtaacttatgcatacacttggaagaatccaactggtcttgcaagagcaattaaaagttggcttggtgatggtcagaatcagccatcattatacattttggcagttgtgatttatttggcaccaaacttgctgtccgctacactatttcttttccctgtaattaggagagctcttgagagatcaaatcttaaagtcgtaacattcataatgtggtggtcg

SEQ ID NO: 185907 - DNA, 651 bp, Zea Mays
ttatgatgcagtaatgccatacctcaaggctattctcatgaatgcaactgataaatccaacagaatgttgcgtgccaaatccatggaatgcatcagtttagttggtatggcagttgggaaacaaaagtttaaggatgatgctaagcaggtaatggtttgctagttccccttatattacagtatacagtcgagtccataactctttccgtctataaaagtgttaaaacattattttttgtggcctttgtactcaataaacgaaatcaaattgggttgtaggatgttatatgctatctgttctgtatctgttaatgctattgataattcattttggtgttaggtgatggaggtccttatgacactgcaaggatctcagatggaggctgatgaccctataacaagctacatgctgcaagtatgttagaacttgaaaccttgttctcaacttttttttgtcaatttaaatctttttttctcatttgatctatatgttcgcctctgtaggcatgggcaagactgtgtaaatgccttggtcaggatttcttaccatacatgagtgttgttatgccccctctgctccagtctgctcagctcaaaccagatgtgagtgtcacttctgctggaccagaagatgaaaatggtgaatctgat

SEQ ID NO: 185908 - DNA, 319 bp, Zea Mays
ttaaaccgagaatgttgccatagtccagcacatccacatgatggttcctcaaaatctttcattatgcatactcaatcccatgagcaccatcacatgttcgtcaccgggaacgccgtttccgttccaggaacaatatcatccccgaagtgaaaaaccttttttaaggagcatatcatgttcctcatcccctgttccacgacctaatcgtcccaggaactttgtgactacgtccgcccatgagtccatttcatcctactaatcgcacatatagatagtaacgcaccccacataaaacatgtaggttcgatttaacgagggg

SEQ ID NO: 185909 - DNA, 348 bp, Zea Mays
ggttatgatgagtatgttgtctatcatacaggagtactatgtctgatcgctaaatcggctgtggtgcatatgtgttgctctatagcgacgttagggaagggttcctctctttttcctttgtatgatagtatgttgctcatgatgtagtgtgaaaagatatatcctatttgtgtggtggaacaaataatgcgtagaatactgattggaatgccttgctataaggtgctttatttgtcagaatcccaatttaattatgatggtatagttatgctagagagtataaattaggtacattctagttgtattgacatgataaagcttagattgaagtgtagtgtatgtatcagg

SEQ ID NO: 185910 - DNA, 498 bp, Zea Mays
gaaaaccgtgtcacgatcggagaccatggattggggaacaccgtgaagacgaacgatgtcgttgaagaaggcctgggcaactgattcagctgaataagggtgtgccagtggaatgaaatgacaatatttgctgaaccggtccaccacagtgagaatcactgacttgccacggacacggggaagagcctccacaaaatcaagcgcaatatccgtccacactccattgggcaccgggagcggtaggaggagccctgctgggtgcacatgctccgacttgtaacgttgacagacactgcattgacgtactttttcttgcaccaattgcttcatttgaggaaaatgaaaatcacgtcggagccggtggagggtacgttggacaccctcgtgaccatcctcatggactgcccccaggatctcctgtaatagcggggaggtaggaggaatgtacaggcgccccgcgaattgcaccatgccgtcgacgatggaccagggtgctgc

SEQ ID NO: 185911 - DNA, 335 bp, Zea Mays
atcaaactggccttcaacaggaacagaactaaggttgctattaaactgggtcatctcataatctgttggtgctactggaaacacctggggcctgctggaaggaggcaacaggctagaaccagatgtgtgaccttgaaaagcataactaggcgcagcctcctcagatccatggagaagttgtgatcctgatgtgagagaaggtatcctggaatttgaagcttccactggagtgtcatagtagtgaggacttgccctctcatatgtatcacttggttgctcaggaaggaactggtactcatggacagcccgtgatccaacatgaggttggactacgg

SEQ ID NO: 185912 - DNA, 294 bp, Zea Mays
tagggttgtgattggatatgatgaagggacaataatgataaaaattggtcgtgaagttcctgttgctagcatggatagcagtggaaaaattatatgggcaaagcataatgaaatccaaactgttaacatcaagagtgttggtgcagacaatgaggttgcctttgttcaccatgctattatgatgtaaacttagtaagcttgttataaggtttctctgtggtccttaattgtttcattttttagatcgcagatggtgatcggttaccattggccgtgaaggagttgggaagctgt

SEQ ID NO: 185913 - DNA, 387 bp, Zea Mays
ctccttcctctcttccttcgtccatcatggtggcgaatggctcgtgtcttcctgtcacatctgtgggtgccgccggccctcccggctcttttcgtattcccgatgttcttgtcgctccttctttggtccacaatcttctttctattcgccgttttaccgctgataattcttgttctgtcgagtttgactcttctggtcttactgtgaaggactcggcaactcggcgccccctcctccaatgtgacagcaccggccccctctacacccttcgacttccgcatgccacctcttcttcgtcttcgtcacctgccattgctgctgtttttgctgccaccacgtcttctaccacctggcatcgtcgccttggtcaccccggacgcgaggcct

SEQ ID NO: 185914 - DNA, 951 bp, Zea Mays
ttcagcgaagcatgcacgaaattcatgtcactttgccagcggcgtcatgacatcagtcctcaaaccgcacagccagcagtttcatcacactggaaggtctttgatgatgggaatgttcgtggttcttccagttcagacatgtctatagatgagccacaagttgatctcggtgaatccaacaacaaatctacagtcggtggaagtggctctcaggtccacagactaagcaacagccaaggcttagaagtcgctgcagaacagcaacccaagccaaccatcccacaggccatagataaacaagaagcagaaacagacgcgtctcccgcacctgctgcaggagggctttcaaggcgtctgagtgtgaaggacaggataaacatgtttgagagccagaaaaaggagcagactccaagttctggtaacagcaactcagcaggtactggtagggtggttccagggagaggtgagcaccgcagggttccttctggggcctccatggagaagttagttagaaggtggagcagtgttagcgacatgagtattgatctcagcaacaatgagagcgttaacataaatgacaaaaaggacaatggaactcctgttgtgactccaacatctactgatttggaggccaactctaaagcaaaagctgatgtggactctaatggacagaaggatttagtcacatcacactcctggccttatcaaaaggataatgtaccaatggatccgactaccacagatttgtgcccaccctcaactttaagtaatacacttgctcctcatagtgatggtgcaggaaacgacatggttataaactctagcattgagagtgagtcatcctttgggaaagaagcgggggttattcaaggactcacaaggatgtcaaatcatgctacttcaaatgtttccactcgaaaccatctaaaatcttctgcaaagccagttgag

SEQ ID NO: 185915 - DNA, 583 bp, Zea Mays
aggctcaaggagcagaggcatcccttgtgggcccatgcggccgccgctggcgatggtcaaagcggcagggagtggggagttaagaggttgacggccgcaccggcggtgagggatcacagggcggtactgagcgcactggcccgggcgctagctacgacggagtcggcgtacctggacatgaccagtcagtcaatgggatcccacccagagctggcagtgaccggagcttgcctgctcgtggtcctgttgagggatgacgacgtgtatgtaatgaaccttggggatagccgtgccattgtggcgcagcgacgggacgacgaagattgcttgattgggagcattccggtggaggacattggtgtgggcttggagatcgagacaaggatccctgggtattcggcaattgggctcgaggcattgcagctgtcgactgatcatagcacgagcgttgaagaggtaacctttttgcagacatagctgaattgatgcatagtgctaaattgctaatgcatttgtgcatctactgagtttactgaaaagatgagcttgcatcatataaaaaaaatattcaaacacatttttt

SEQ ID NO: 185916 - DNA, 284 bp, Zea Mays
ctatttgggaaaatgctgcacttaatttgggtctagctaatggttggcctgcctggcctcagcagccacaccctgctcctcttcagcatgtcgtgctagtcattcatgatcagttggtgcttgacccggaggatagggtgattgaggaggattctagttccttgtccagtggcattgttgtcagtaggggaattctgaaccgctttccctttagacaggcaggagatttcctcaagtttcattctcctgaaatgcctgattggattgctccttttgtgtctgat

SEQ ID NO: 185917 - DNA, 504 bp, Zea Mays
tggccatggcagaacccaccatcaaggacgtcatggaggtgctgaaatccctcaccacggagatgtccaccatgaaggtcgagatggcaacactgaaggagaaatcgtcctcatcctcggttgaagatgggggcgtgcgtcaggaggggccccgtgatctcgatcgccccccccaaattccagaaattggatttccctcgctacgacggcaaggctgacccaatgctcttcatcaacaagtgcgaatcgtactttcgccaacagcgtaccttggcggaagaacgtgtgtggatggcgtcttacaacttggaggatgtcgcccagctgtggtacatccagctccaggaggacgagggcacacctccatgggggcggttcaaggagctgctcaatcttcggttcgggccacctctccgatcggcacctctgtttgagctggccgagtgccgccgaaccgggacagtggaggactactccaacaaatttcaggccctattgccccgt

SEQ ID NO: 185918 - DNA, 365 bp, Zea Mays
ccctatacgacctcttatgtaagacgacataatgttgcaactacctcttcaaggcatttaggtccttgaaaactcgacccttttcgatcattatgctaggacccgcctcaggagcatctagcaactcatcatccctcccttctgcaaaggcgtcatgagatagactcagatcgctgaactcatgcactcttggatcccggtgctctagaataacatgcttcaacatctcaatatcactctctctaagctcaccaaccgggaggtcatcatctgcatcagcggccatagcaaaggcataaggctcctcttcattcctaaactcaggactattggatgcaataattccatctccacaatggagatgt

SEQ ID NO: 185919 - DNA, 376 bp, Zea Mays
aaaagggtcagaagggcaacacaaccagaaaacgcacacactgacacacaaaaaaaagaagaaaagaaaaaacaacccgaacccctgcacgaatcgtgtctcgagcctcttcgacgaagttttaaataaccccgttctacttagggttgaggatttcttcccctggtctgctcgccctcgagagatcgccgggtgaggagaggataggagtcaaggttgccgaactgcccgaggcctccgcgtgggagtttgcgtcgcgggatctgcgctgtcgtgtgatttccggaggccgttttggctgacgcgccgctggatctgcgccgtcgtgtgaatttccggaggtcgttttggctggcgggcggaggcggatttcgcg

SEQ ID NO: 185920 - DNA, 673 bp, Zea Mays
cctagatgcttctaccaatgacacacatgtggtgcaaatagttacacatccaggaaaagccttatgttctcaattgattcttgcggctaaaggtttaggcgaagctataatcataatccaggatgttggcctttctccaagagcaactactcattctttggtacatcactttggcgcttatcttcctaattctcctgatactttttatacttgttacaattcaatcaagtgacttctgttgcatactatgtttatactgttcaaatggttgccaacatcccttgagtcatatctttgtatctgtgctttgtctagcattaatcttgggataatgataacttttgaattttgatatatatctgtcatccctaatttacagtcaacttctatcagactacccctcataataaagatgtgctaatcttccttttgaggccactgatatcaaactgacagtagtttttgtggtgctgttttcttatctgtttgcaggttagagttgcaaatgttgactggattaagataacagcagaagagcaaatcagtcttatggtacgaggatctccatttttattatgtttttttgtattttttgctgattttttttcatttataggaaggaagcacaaaagatttccaaatattagctggcacccaagatggacaaatattt

SEQ ID NO: 185921 - DNA, 570 bp, Zea Mays
tggacatcatgttagctgtagtgatgacgcaaaagaatctacatccccaaggaaaaaattgacaaccctagttgattctttgggagcagataagaatgaagatcataacgttgatgagtgctgtaatgctcggtcttcttccatgtatagcatggaagtgctagataatgagcccgtagactttgaaaacaatagcttactttgggtagctccagaacccgaggacggagaggatgatcacgatggtgaacatgatgatgatgagggggtggatgctacaggagagtggggatatctacgcacaaacagctttggcagtgggcactgtcgaagtagagataagtcagctgaggaacacaagaaagccatgaaagacatagttgatggccactttcgggcgttagtttctcaacttcttcaggctgaaaaggtaccattagttgatgggagtggcaaagaaagttggctagatatagttacttctctgtcttgggaagctgcatctcttttgaagccagataccaccagcaaaggcggtcagatggaccctggtggctatgttaaggtgaa

SEQ ID NO: 185922 - DNA, 612 bp, Zea Mays
gtgcggctggcgcatggacccgccttgactgcggcaccttctccgcgaattcgttgcaacagcgcgcgcaatcgtgggggtctgttgggattcaccctcctcgcatccggatcgtgagttcgttcatcaaccaaccccctgcccctatataaccatcaggccatgattccttgcctcccagctccgtctccatcatcttctaggcagagcgagccaagaagggataaaggagttctgtcccgttgtgtgtaaagggggtcaccggcgtggaaccagggccctgctgccccatagccttcgggacgcaacctgggatgatctccggtgcttgtggcgtctgttcgcggtattggaggaatctccagagttttggtaattgcttgatagtgagctcctccgctgtttcgtcatggtgtgccatgggtggggtcctccgcgctgcacccttcggtaaggacctcccttctgtgcattagcgttgactctagctttgcgtggatttatcgatggggcagggtagggcgtgtgcttgtggtcttggcaccgtgggcgagtttccggcgattgcctgtgccgtggttgcgtctgccggttcggcgcgcgattggtccc

SEQ ID NO: 185923 - DNA, 438 bp, Zea Mays
caacacgagcatcatctatggactcacctagagacttgatattggcaacaagatttgtaattctcataccaaaatcctcaactgtctccccttctttgaattctatgttctcaaactctttcagtaatttttgcacatttacctccttaacccgatcagcaccaaccctcattatcctgcatcccatgtctccttaacagttttcttcgcaccaagtgtcccccacatctctttaggtacagacctcatcaaggcacccattgcatgtctgtcctgagaccgtttagcactggtccccggatctatcacctcccagatctccatagcctcataattgatttgcattaacatagcccattccgcataattggaacgagttaacatgggccataccagggaactttctttgatgccagaggtcgccgagctgggtcctgt

SEQ ID NO: 185924 - DNA, 513 bp, Zea Mays
atatcaagcttgaggagaagacgtggccttttctgttgatggaaaagtctagccgtttgttggaccaacataaaattatcctgaatgaaacgtcccttaatgaaggcactctggatcggagacaccatataattcagcttttgacttaaccgattggccaataattttgtgatcaactttgcagcactatgcaccaaactgattggcctaaagtctttgacatgcacagccccatcatgctttgggattaaagtaatgaaggccgagttcagcaagcaaaaattgtcaaacttcctgttccaaaccgcagcaactacagccataagatccatcttgataatgttccaacaggatttatagaagcgcccagtgaaaccatcgggacctggggccttgtcattaggtaaactcttaattgtattccaaagttcaagctctgtaacaggctcatcgaggtgtgcaagattgaaagttggcatgtgcaacgcctccagattaatagtctgctcccta

SEQ ID NO: 185925 - DNA, 1738 bp, Zea Mays
gttctccagcgctggcgacagcaccatgtcgtctctcacaggtatgaaatttcaaggttttaaggtttaggcgatgaatggttctacatgtgtacacacatctctgtgcatgtgcttgtgttctcatcagtctactagggtaccctttgacatgaattggcgatgtgtgacttttctcatacatgtgtgcatagaacatatttgcatcattgatcatttgcctgcattctgcgatatacttttctgtgaagttgctgccacacccatggccaccgccatcggtggcatcaactagaccacgtgggcaatcgcaggaataatcagaggaagaggatctcaatggggaggaggaaaatttgcttccttcctctgtttgtcttctatatttatgttcggctccattatgtagtctatatgattataccttaggcttcatcttcatatgttatttgggccaatactcttgatggtccatgtactcgctagtttgtctcttcttttccaatatcgtataaatatgaagtgttgactttgtcttttcttttccactcatgaggctctgattggttgattaattaggtgtttctctttcatgctagattcatgtaatgattacatcgtttctatgtgttgtaggagctgaaggttctgttaaagtactgtccacagccaaggacaattgggtgccacagagtcgtgaacctgaggaggtgaaggtgagcaccgaggggttggaagttagaattggtgggcggagagatgagaatgtgtcactggatgatgggcgattgtcacaagctgcatggattcgtcaatacatggaacaacaagaggaggtatagatgagtgaacaagtatttttcacatgaattgagtcatctcttagtactctttgaaaaactgttggattttgttagtcttatgttttttttgtccgcttgcttagtctccaattgtatcgttctgtttcatacttctctcaggttgttctgaacttccagtggatactaagagcttctacatcatgaacctgtgcaacttacagttttagaagacaaataactgattttgttgtctaatctaagtagcacaatgttttgttctatttgaaaaaaagaacacaaaatggttacacaaattggtaactattgttcactgggaactatgtttcacaacaattcaagtctcttcttatttttattgcttatggtttatctttttgtttcaaaacgttaactatcctcactgcagttttagattttgacatggtctccaatgtgtagtttttttgtagaacgaggtaataccctgcttataaagataacatatgagtttttccaagttccaagccagggacaccagcgagcgataactctaatatgtagctttgactattacttgtaataactccatgccagtaaacattaagtaatagaatgtaagtccttgagatgacacatctactaatgttattttcttgtggtcaatctaaataatcttttttttacacatgaatgggaaatttatgaaaacatgacacctttcaccaatgtatctgaggttgcatgtacccaacatccgaatatcctatgcatacaatttcacaacctctatcaagtctttctgttaactgttattccttttcatttcttttaatatcatatttcttggtacattttttcttttggatatcactgatgttaggaagaggatgcaaattccaatgattcctctacat

SEQ ID NO: 185926 - DNA, 1536 bp, Zea Mays
agatttgactttgaatatcatggaaagatacctgaaggggaactatatccaaatattgctgaagatggcaagcgatctgtagaaatctcacctgaagctcttcagtttgctgatgctgtaactttggtccgaaagaaccaggctatgctgtgccactttattatgaagcaattccaaaggaaaggacacttgggtagtgaaattcttctccagagcttgttgttcctgttgcactcagcaactgatctattttgtccaccagagaatgtagttgatataattttgaagtctgctgaaagcctcaatgatcagcttacatgtctttacagtttttttagtgcagggaataagaaattggataggataaaaatacatggtctaagaagacgttggatgcttctccagaaactggttctggcttcatcaggcagtgatagtactagagaacttgccagaaataaaagagatggtttccattttagaagtttagtccctccatcaacatggatacaaaagatatctgatttctccatgttttctagcccactccctcgatttttcggatggatggcagtgtcttgctatgccaaggaatatttaaatgagaagctgtttcttgcttctgatttctcacagcttacatctttgctatcaatttacatggatgaactttgtttgatggatggagttgcaatcccgaaagtcaggtctgcaaaaggtgaacaatttagttgtacggacttgtttcttaaaaaggaaactactctgtcagaccaaccaagcatgaccgaacagtttaaaatcttacttccggagctacatttcttctttccaagcatgggtaaattgtttaatgcatttggggagagcatcttggaggctgttgggctacagttaaaatgtctgcccaatagtgcaataccagacgtcctttgttggttttctgagttgtgcttatggccttatctcgaacacattaaggagcatcttgtagttgcaaacggagttagttatataagaggaagtattgctgctaatgcaaaatcagttgtcttctacctacttgagtctattgttactgagcacttggaggctgttattcctgaaatgcccaggatagtgcacattcttgtgtctctctgtagagcttcttatactgatgtggccttcctaaaatctgtgctatgtctaatcaagccactcatctcctacttcttaaggaagggaactaatgaaacaaaagtactgggccatataaaggagggcagcaattttgagttgctttgttttgaagaattgtttgaaattgttcgctgtggtaaagattcggtggatacaactgaagataatattcaggcaccgttggtcatcttcattctgggatctatgtttcttgatttctcatttgagagaaggattgaaatgttaggctccttgttagtatggattgattgcatcagttccgatccaccatcgttattatgcaactatcttcaaggtttccagacacttctagatggttttgaagctgtgcta

SEQ ID NO: 185927 - DNA, 491 bp, Zea Mays
gtcttgccaagacccatgtcatcccctaggattcctcctgttcccctgcagtgcagaacccagagccatcggaggccctcgcgctggtgggcgaaaagcatcttgaatatctttcctgggagcttgtatggcttggatgttgcagcagttccagttggatccatcttgaagtcctctgtcttctcccatccaacatcctcagcattgttctccacagctccaaggttctccttctcctgacccagctcatcgtcgctgacaccatggttcctgaatgttggggtgttgggtggtctccttgtgaatcccttgcttcttagctgcttaacagcataatctgttcttgttccttggtcctcctcgcagtcgtcataatcagaatcggaataagaatcaacaaaggatgaggcctttgataccctatttagcctcccaacatccttggtggtccctttgttcttccccttgccacggacgtcatcacaggcata

SEQ ID NO: 185928 - DNA, 352 bp, Zea Mays
gagacgaggagagaaaggagcgcttgactggccatggcaaccgcccgtgctgagtgcgcgcatctctcgcgccgctacccctccaaaccctccgttgtcgtagccatgcccaatgccttgctcctcctcctcccgtgtcgccacctgccgtgtcataccatccatccacccacccaatcatcatgcactcgcattctttacgaatcatatcgatggactactcttccggttgatcggaatcaagagcggtggtgggagcattgatcagagaaggagagagacgtaggtgatcccttgtttgtcacacgcgcgggtgcccaagatgctcggttcgtcggcgtccaggcgggag

SEQ ID NO: 185929 - DNA, 619 bp, Zea Mays
caagatcctttctgctcgcttggcaccattgctgcccaagttggtctctaataaccagagtgcattcgttgaaggacggaatattcacgacaatttcctgccagtacaacagcttgccagagccgtgcataaaagcaaagagcctcacatcgatgaagttggatatttcgaaagcttttgacactgtgtcctagctcttcctattagaggtcctgcagcatctgggttttgggagatggcggtgtaaccttctgtgtttgctcctgtccacctccaccacataagttttggtgaatggtgtccctggctgccccattctccatcgccgtggactcaggcaaggcaacccctctcccccatgctctttattttggttatggacgtgcttaactctctgatccaactggcttcttcagacaatctgctgctgcccatagctgggcaaggtccctggcctaggatttctctttatgcagataatgtgattacttttttgaagcctgaacttttggacttatctgtggtgagggatttgttacattgcttcggggcggtctctaggctcaaaaccaacttgttaaaaagctcagctatagtgctctgaggatgacattgtgcg

SEQ ID NO: 185930 - DNA, 517 bp, Zea Mays
ggccattgtcgcactggattccttggatggtggtgccaaactgagtgtgcacaaaggagaaaaaatgagtgagggtagaaaaagtgtcgaatttaagccgcaaggagaacatccacaaataatgtgagcaatcatctaggatgactaagtaatatttgaacccagaaatgcttgggacgggtgaggtccaaagatcacaatggattaactgaaaattttgtgtggcacgtgatgaagacacatgaaatggaagacgagtgtggcgacctaactgacatgcataacataaaagatcactagtagttttattacatgaaatcccggaatctgctagtttggataggacttcacgaccggggtgcccgagacgctgaagccaaagtgacgaggatgtggcggcatggaaggtggaggccggcagccgtagaggatagagcgggccggagctgccgcagcagacgatctctctccgacagtgaagatccttcacagagcaaccaaaggggtcaaattccac

SEQ ID NO: 185931 - DNA, 724 bp, Zea Mays
gatatcctagagaaagcaaagatattgcaatctgtaaaagtgaatgatgtaaggacaactcaatatgtatacaatgatcagtttttcttgaaaagatctcaaacgtgacttactggtatcctaatttttacagtggtttgaaaatgaaaagcagaggcttgggcatcttcgtgaccgtgcaagtgaaactggacgcagaaaggaatatcctattagaccatactatgatgtggtgatgcctttatgtttttcatttgctcaattgtcatttcttaatttctggaccattattcaccccttcccaagattggttatgcttcacttataatttatttaacttaggtcagctccattttcttgtcatagcttcgccaaaggtcttttaatgctagaggcatgcttccaatagctcataatcctctgctcaggaattgcgaatattcataataatcaagtacagctttatttgtattatagaactataggctattacttgtactgcatgtttcattattttgtgatccttgactgtatcatacacttagagaatatgtagaaaagctgcagcttctcaacgattctgaggaaagaacccgcaggattaatgaagttctggaagtgcatgttgactcacatatggatcctaattatgagtctgctgaagaaacagatgagaaaagaactggtatatatcttcctgtaatgttaatgcttcatgttgttt

SEQ ID NO: 185932 - DNA, 578 bp, Zea Mays
ctctcttcaatcgggctctgataatcttctctggagatggcagcagtcgaccgttttccatcggtggcatggctggaggcagtaagggggagtgccccgaaatggcttgaggagtcccacatggaagacgtcgtgaatgcgtgtcccttttggcagctctagtctgtacgccacagtgcccaccctttcaatcacacggaatggtcctgcatatcgtggccccagcttccctttagggtggtcgactagtgactgggcatttcgatgtaagagacggagccacacccaatcatcaatgctgaactcgagctcacggtgtcgctcatcataaaacctgtgtgcgtgttcttgagcttgtagtagcctgtctctgacctccccaaggaataggtcacgttcatggagcatttggtccacaatttgagttgcagcagtcctaggttgatatggaacaagtggtggatgatctcttccataaactacacgaaatggagttgttttcagtgctgagtggtatgatgtattgtagcaatactcatcccaggctagccagtccacccaagccctaggtcgatccc

SEQ ID NO: 185933 - DNA, 771 bp, Zea Mays
gcgccgtcgaaggcggcgcctagtctcgaggcttgcacgctgccgcggaggatcgcctcgctactgcgcgccatcgcctccgatctcctctatctccaatctgctccctcatcgccgtgcagtggaaactaggggaccgattcctcttctcggtaatacgaagaaccctagctcgctgtcacgaattcgtgaggaattggggttttgccccgaaaacctgaaatttcatctctttctatctcatcagtttgtcgcatatttctcgctgcgtgccgcgtgctgcggtgagtgattctccaagaattctggggacgctgatctgagtccgcacagaacgcagcggcagcaatgatgatgtcggacgatgacgatgctgagccccagctcaacgcggtggagggctactacttcgttgactccaagaacgagaaggagcctgtctgcttctccaccctgcctttctggttcggggacactgatgatcttcctgacggcaagaagaagctggtgctgcgcgggactggtgacccgggcgtcaaggtgtacgatgaggtggtggcctgcaggctgggtctcgaggggaaacaacccgagtttgcagtgctcacagcaaaaggcagacgttggatacgtctcattaggcccttgaacagctacgaggaaatgatcaggactgtgttgatcacagcgcagatgctgcattttctaaggaggaagcctcatgagccagaaaaaaccttgtggaaccacctttgcaaagtttttaagtac

SEQ ID NO: 185934 - DNA, 410 bp, Zea Mays
gtggcacgccgcgacgtgtgggctaccaggcgcgtaaccatggtggagcagggcaaggcggcgatgcacgcgcgaggcacacataagatgagtggcacgaggaaggcagatggcgcgggggacgcgactaggtggcatacgagagggaggaatatgatgaccagacatgtgagagaggcgacaaggcgttgtattgggcaaattttgattaacttttgatgcttaactctatgaccatcgaaagttaacatggccatcgaaagtcacattgtttcctaatatgtccacctttgattttggtccatctcgataatcctatagcattagttgtgtatcatattttaaaacttattgcctagaataaatatcgagatatatttttgttaactacaaatcaagttggttaaatg

SEQ ID NO: 185935 - DNA, 815 bp, Zea Mays
tgaacaacaaaagatgcaaattgaagccctcgaatgagaccataagaatttgtgtgactcatgtccttgtaagacagcactacattgttctttgcagtgacatagtcagctatgttatgatccaagaccaaccgcagaagcctgttcaacagagtcagatcaattttttcaaagaacttctcaaattttgtctggagcatcacaacacactgcccatcacttgtgtcccatatatccagtaaattatttatgccctggcaccatttataaacaagaagaggtggtggttctgaatcagcaggcttaacccaatttggaaagaggtgtcgtttgtccccctcgtaccacaggtactggtcaaggtatgcatcagtgatcttttcaagaggttcaatttcatatactggaatcaagtagctgtacaagtccatgaattctataccaacttctttgaaagctcgctgagtaaggaggtgcctttttatccttgacagtgcttcatgtggattatcatacgcttgttcgatcaacccaagctcctcccgttgcaattggttcaatctaactgctacactgtaggactccttcagtctttccagtgcaagtataagaagtttagtgtcatgcttgtatgacaacggcggaaaaggaattggcgagaactttcttgattccagccaatgaacagttgttgtatagatagcaacagcctcttcaggagttacatatggcccatctttcaagtaattgtgttgcctctcttgctctgccttaagccacagacgagttaaccttcctagatttttccgacaaac

SEQ ID NO: 185936 - DNA, 522 bp, Zea Mays
tggtatatgtccaggatcaaatttgttgtacgcagtcgaagtgcttgtgactgaggttagtgaaattgctacaatatgacaaaaagtctattttttcatgcagtatattgtctgttatgcaacgttaattaaagcatgctattaatagtatgaaggagcaagagacatctgttttctgagttctgacacaattaatatccaagtgtattggggctgtcgggtggttcatgaataaaaaattgcttagctatggtcttgcttgctgatattatattttgtattaaatatgaaacacaatttaccaaatgtttaaactttaaactaacaagcatctcttgtcatgtttacagacaaatgataggcaacctctgttggactctggtattttgtgctgccttatatatatcctcaattctctattgagccccaatgagaactccacagataccttgcctgttcaccaagaaggatccagaaatgagaaaaacaaaaatttggatcctatgcaatcacgacggcttg

SEQ ID NO: 185937 - DNA, 427 bp, Zea Mays
cttgatgattcctggtcctaaaagcccaggatatcgaattcatgtgttctttgagccacttttggaggaccttaaggatcttttccaaactggtatatccacatatgatgcatcgagaaatgagagttttactttgcaaggagccgtgcttatgaacataagtgatctacctggtttaggaatgcttgcttctcatatggttcatgggaaatttgcatgcccaccatgtggtgaaaatgtatggacgaaacaactgaagaatggtcgtaaatcatgtttcctaggtcatcgcaaatatattgatcttgatcatccgtaccgtttcgacgcaagttcctttgatggaatgatagagcttggcaaggagccttcaacttattatggtcgtccaattttgcatgagatcactgcacttggtaatttcaag

SEQ ID NO: 185938 - DNA, 999 bp, Zea Mays
cggccgcagtggtgcgcgcccgtggccgtgaggtcgccgatgacgtgatgcgcgtgctcgatttcccttccacgcctgattcaggcgtcagggcggggctgagatgcctcgcgcatttgatatctgcgggggacagggcgaactgggaggcggtagagcctttatacactgtgattctgcgcctcagtaccgatcaccggctaaaggtcatacaaagctgacactctccaactgttcccatttaaattttgttcccttccaaagtaactaatgatgctcctcaatcctcattgagtgtgccaatgcggtaatggaacttgattgtattaccgtttctcatctagctagcttagagtcacaaactagccaaccaacaactactgtaaagtatcatttagtatcactgagaagtttgaaatcattcgccacgacttctataaaagttgaaccatgctcaaaatgtgtagtccattcacatcaattcactaattcatggcttactttggtgggttataggtgcggaaacaatctcattcatgcttgcatgatgttctcctgagttttcaaaggcaaacaattttgattccagcaagtgaagcaataacaagatcttttgagcggtttctgctgcttgctggaggatctagtgctgtaaatacaggtgtatcagaggaaggccccaagggggctaaggaggtcctgtatattttgaatgctttgatatgctgccttccccttatggcctccaaaccttccaatactatcttgaaatattttaaaccactattagatttgcatcaaccaattttgataaggagtcttctggacattctgcatgctgtttgtgagagtccaaccgtacagctcaaatctgatgtgttattggaccttctgtgctcgttgggtctgtcagtgtcttcagaaaggaaatcaggagatgaaatggcttcaattgcacgacttctacatgttggcactaaaaaaatttacaagcaaaac

SEQ ID NO: 185939 - DNA, 1902 bp, Zea Mays
tgaacctttgctaagttctccaatagtaagcgatgctgcattttgtacaatgttgaggctagcacgttgcacagcccctcctctttgcaattgggcgctcgacattgctgctgcgattcgtgtgatatctgttggtgattttgaaatggttttggatcttacacctgtgatcatggaagatgatagtaagaagccatcatctggcatctttgaacaaatagtaaatgggctgactattgcgtgcaaagcgggtcctcttccagcagattcatttactttcgtctttccggtatgtcctccactatttttagttcaaccataaattcactcctattccccttgacatttccctttctctttcaacatttacttttccctgtttttgtccttttatttatttatttatttatttatgttgctaccttttggttcagatcatggaaaggatccttctatcttcaaaaaagacatgtcttcatgatgatgtgcttcacatactatctatgcatatggatccaatactaccacttcctcgacctaggatgttatcagttaaaaatttcttagttctttcagacttaatgctgttccttgttttattctcagactcctagaatttactatttttttttctgtgcctaggttctttatcatgtgctaagcactgttcctgcctatcaaccttcagttgggcctatgctgaatgagctatgcctaggtctaagaggccatgagttagcacaggttgttattttgtagtctgttctccagcttatcctattttattttatctagtgctatgtattcttacctcttccttttttcaggctcttgtcggtgtatatgcaaaagaactgcatgttaggcttgcctgcttaactgctataaaatgtgttcctgtgcactctgtgcaacgagatttgcaggtgtcaacaagcctctggattgctgctcatgatccggagaaggtttgtaagataacatccctgtgaacttgacttggaactcctctatttttttacgttactcatgtgggagcttccagcactggttctgccctttttagtgaaatatgttgaacttttttcattctagagcaggaaatgatgtttattttcttgctcttcggctcatgtaccttctctaggtggttgctgaattagcagaggaattatgggaccgctttggttttgatgccatcactgattactctggtattttcaatgcactttcccataaaaattacaatgttcgtgctgcatctgctgaggctctggctgcggcattggatgaaaatcaagacaaaatgcaagtaagtcgcctacaatgcaaattttctgttctgtatttgcaccccttctgctactatatagatgctcaagggttttgcaagacgagcaaaggcacatttaaacaccgacattagtttaattattactattgggatgggatgttgttttactcttcgtgaagacatttgaactggacatggacccactgaactaagatggcatgtagggacaaagaggtaatagcacatctcaaaatcatagaatgacatccatttaaaagctggaagatataatgccgtgtatttgggtacggtcttgtgtttctactgtatctttaatttcacattcaaataaaacttgaatagaaccacgttgatcggagattttttttgccaatttggagtaatttctttttattgcgggtgtcatattatttcaggatgcactttctacccttttctctctgtacattcgtgatattggcactagtgttgaatttggagatgcacactggctcggaaggcagggtattgcattagcactccactctatcgctgacgttttggcctctaaagatcttcctgttgtcatgacatttctcatctcacgc

SEQ ID NO: 185940 - DNA, 716 bp, Zea Mays
ggatacaggaatcgaggatgaatccaatccagaggatccagcacccattatttcactccacgccttaacaggcatccgctcagagggcaccatgcaactgcaagtcgacattcggggatacaccctcacagctcttcttgacacgggctctacccacaattttgtcagcctcaaaactgcagatgggctgcagctagcctacagttccaaccaaggtttccaggccacagtagcaaatggcgacaagattcactgccgacagattgctaacagtattggtatgtccattgccggtgaagagttcttgatggacgcatatgccattcctctagattcctttgacattatattgggtatcacatttctgcgcactttgggacccatcctttgggatcttgaagatctgtgtatggcattctggaggagaggacagcgtattctctggaagggattgggttcgcagcgttgggacatttccatgagacctgcagtccggtcactcaaggcagagcccaaacctatgatggaatgtctgctacagcagcttcaggaagtgtttgagacacctagtggccttcccccagctaggtgctgcgatcaccggattcatctcctcccaggaacagcaccagtagcagtacgaccttacagatatgcacagctccagaaagatgaacttgaagcccagtgtaaggccatgctccaacaaggcatca

SEQ ID NO: 185941 - DNA, 563 bp, Zea Mays
aaccaaccctatctgctatagccatgaagggtctgaaggccagtcgcactatgcaggtcattgtagtcatgggtggacaacgtctggtgggcttagtggatagtggtagcacccataactttattagtagccatgctgcttttgtggtgcagatcacacaatcgtcagggactggacagcaggtgcaggtagccaatggcgctcggttgccatgtcttgggcggttgaaagatgtccagttctgcattcaaactcacatcttctcagactcctttttggtgattcccttggaaggttttgatgttgttttgggggtgcagtggctgcagaaattgggtgatatcaactggaattttgattccctccaaatggccttctctttggatgggggccacgtgagtttgcagggcatcacacctcatgggcggccagtacatctgaagagtcttgtagtgggtagagaccctcggttgcaggagatcttgactgcatttgatgatctgtttcaagaaccgcagggcctgccaccctctcgtcagtgtgatcatcgcatctgtttgaag

SEQ ID NO: 185942 - DNA, 499 bp, Zea Mays
attttccccattttggaatgaaattatcaagagcttgcgtgaagaggactatatcagcaacaggtgtggcagaaaataataatacattatacagtattatcttatatgtgacttctttgcttcagtattgggtgaatttctttccagggaaatggatctgcttatgatgccaagtaactgtggaaatttaatgcttgtacagtggccactgtttctattgactagcaaggtatgagatatcctagttgaaatcaatgttttctttggatgaatgaatcttttgcatatcgaaacctttaatttggatgatatcaatctgttggttgcttcttctgtagatcatgttggcaaatgactatgcttctgactgtaaagactcgcagtatgagctatgggatagaatatcaaaagatgaatacatggcttatgccgtcaaagaatgttactacagcactgaaaaaattcttcactctttagttgatgctgaagggcagcactg

SEQ ID NO: 185943 - DNA, 629 bp, Zea Mays
gttccccaataaaatcctaaaccaatgtaccgaaacttccgtggaattttcaatcctaaaacctccagtaggatgggatacaccattcgtatttgatttcaaacctctcaaaagctgcataatatccagaccatcttttatttttagagtagcaaccatccgctcaaggctaacagctccatgaacaacagcccccacaacaagagcagaaatagcagcagatacttttgcagttctcccaacaaaacctttccctgagttgctgagctcacttgtatgatttccatatgcatcatgggcctcaggagatggttgaaactgattgcggtgcatctttggaggagcaaaagctgctgtaacagctgcagaagtttcaaccgccagagctatttcaaaggcacggctgaagcgatctccaagagtttcttttagtaagcaaagagaatttatgtgaataagtaaagtgtgccgaacaaaatttagcgaagtagccacagaattaacaccttgatagtttcctcctgcaaaatccaaatgttttgctatcatatgcccagcattcacaacgattgcagaaacagcagaagcaactattgaaaggtctccatctggatttgcacccccatttt

SEQ ID NO: 185944 - DNA, 2069 bp, Zea Mays
aggctacctccatttcttccccaaattgaggtgaaatcactctttctggctcctagctaaattgccatttatagatgcatcgtgtgcattgtcttttaacaggctgctgtctgtttagttcaggctgaccttaatagtgtcgtggacaccccagaaagcagcgtgcggttcttggctctacttgctggtccattttatcctatccttcaccttataaatgaaaggtgtggcttccttgttcaacttgtaatcgtgtatcagttcgatttgtgatacatgctatgttgccttccatcatatattgcgcttgagttgttgtgaatacgtgtttgcacttgcctgcctgtatgtgggcaatggtaactgaaatgtcctaaatttgcagagatcctaccaaatctttgtttggttctgctgattcagatgccctcagaactagtccagcttctactccaacagtttcttcaaactttgaggcatgtaacttcagattatgtcctttttcccttcctgagcgaactttggataatgttagtgccgattgacagtatatacgctgagctcctttgtgaagttcaaaaatactaatgtaaattcagcccacattacagcttgccttgattaatgggtgactgctaaaagttgcagcatgggatgcaaaaatatactctgtaggcaacttgaatagctcaaatcaaatttgttactacagaatggctgctgaagatctgtcactgtgcttaggttgatgttaccggggatattcctgttacagtgttacccttcaccattacacgttaaaagtttcaattgggctgtgtggggcatttaaataccaaaaatactatttttctgatcacgttgttaatttcttccaagcattcatgacaaatggttggtgtgtcttttgtctgaccatcccattcaaggtcacatttttcagaacagtaaatagttttcacagctgggccagtcctgctttctgatgaaacttctagctaactagcttagtttgctatttgaaatttggccgtaaatgtttagaaatgaggactaaatggttaagcgtgtaactttttcttggtgttttcttgaagtgtgaaacctaatgcattaaatgactgtctcaaacttttttttgggttcaaaatgatattgccatcaacctatcattcacataaggattttgaccttggccctgttatctccatagttccatgcaagcaccaattttatttcaccaatcctttcaattcaatgaaagattgccatcgtaacaaacctattactctgcaaaaatcatagtatggagtcggacatccttttatgttccactctctgagtggacctactacaaatcgtttcttttagttccttgcaagcaccaattttctttcaccagtcctttcaatccaatgaaaggttgccattgtaaaaaacctattgcgctgcaaaaatcatagtacggacatccttttatgttccactctctgagtaaacctactacaattcgtttcttttattttagaaaaagcatggccatcatacaagtatgtaggctgaaaaaaatgtatctggatctcttgctcgagcttgcctcacccctccaggcaaaaactggaacatacaatgtttttggtttatttgcttgcttgcttgtgtcgtttccttgctggcttgagagagccaatttggtttgcccatgctggcaaggctaaccttgctagtagaggtgaggcgaggaaattcagcaaggcaaccgaatagccccaaaatgtcccatgcaaaatgcccctttgttccttgaatgaaaagtgccgcataagccaattagagaagttgagggggttgtcatttaggacatcaaatacagatattttaggtgtctgttattctcttggggaacatagaggcactctgttcagtttgtccaccgatgtaatgttctaaactctttcttctaggcacaaccaaggagatcacggagtccatctgttcagcctgcttcatatttgctggcatttcgatctgaaacaactatgctcctcttaaggaaagcacataaagac

SEQ ID NO: 185945 - DNA, 916 bp, Zea Mays
ccagcgattccgaggccgacgagttctgcatctccacgcggcagaatgctagtggtgccgcgtcgttgggcaatgctggtgtcagcagccaaggcagtggcgatcggtcggaggagaaacctgtgacttctagtcctgagaagcttccaggggttaagtccagtgatgtagatggttcagacaagaaaacgggagttcagctggagagcagtagttcgcagcctgctgtcaagaggatcagagttgagactgtccatggtgatggcaatggatgcagtggaggcgcatctaagtgtgggactggtggaaaaatgctgcctcgggggctcccagcatggcggtttgagaggccagaagtaaggggagggcgtgttctggatgacaaaggtggggtgagtatgaaagcaagcagtgcttcaaagatgaaggagcaggtatcaagtttgggtgacaagagacaggcagagctgcagaaacatgaaagaaggacaccattgaagactgatcagggcaaagcaatcgattctggccaacaggaggttttaaggttgcaagggaaaaggggtgttttaaggatattgccaaagaatgataaggtgaccagggatactggtgatggtaagattctgtcaaggcaaactgaggtggatgaggagactggtaatggcaggattccaacaaagcgaggtgttttaaagctcctgccgaagaacaatggtgctgtgatggagagtaatgaatgcaagcttctgtccaagaaggttaaggtggatgaggaaactggggatgacaagatgccaatgaagaaaactaaggtggttgataaggagaccagtgatggcaagattcttgcaattacaactaacttggatgcagagtttggtggccataagttgccaatgaagaactgtactgt

SEQ ID NO: 185946 - DNA, 335 bp, Zea Mays
tacgagagggaactcattggcctcgtacaggctgttcgccattggaggccatacctgtggggcaggcatttccgcgtccgcaacgaccactacagcttcaatttcctcctcgaccaactcctagcaaccatccctcaacatcattgggtgggcaagttgttggtattcgacttcgaggtcgagtacaaaccgggcagcaccaacattgtcgccgacgccctctcccgccacgacatggaagcagcttcgacattcacatagcggcacctcggttgtccttcatcgaaaacctgcgccaagcacacataaccaatccaacactggttgccctcagc

SEQ ID NO: 185947 - DNA, 288 bp, Zea Mays
ggtatacctggttgtgcaaagtcagctctgtgtaaggaaatattgaacacacctggtggccttggagatgatcgcccttttcatagcttgatgggggatcttattaaaggtacagagcatttgggacgttatctagtgttatatggtcgctttgtttattgcagtaaaacatggcttcagttagtgatggacagtgctgttctttgttctgaacacaatgaaccgtgctcagtgtgaccattgaaatgaactaggatctggccattcatccgcttttgcacctttgtt

SEQ ID NO: 185948 - DNA, 400 bp, Zea Mays
atagatttttcgaaacagcttcagacgtttggtccagccctcaggcattttagtagatgtgcttcgactccggtatagtactatttactgttctggctttatattgttcccttgtgtctcgctatggtatgtcctgtgtagagaactgcggctggatctgaagttgtccgggattttgttgcacatatgacgaaggtgcttgtgtaaatggctggggcagaatccatcgagccgaagattgaatgccgaagcaactgagctcaagggttgtggacttggctgttggtttcgaacatattctagaatgtatggagaatagtatgaggctctgtggaggacctgctttgactgattatgcatgcttaagcttcgatgatttccttcagtttttggattgtga

SEQ ID NO: 185949 - DNA, 693 bp, Zea Mays
aagagtactaatagatttaatggcaaatctgaccctgtctcctcagaggttaaaaaggatacacaaagaggccttttagccaagggcaatgctatccttgaagagaataatagtaaggataaaatgcatacacttgatactcgcacttcaagaccttctcatctgacgaatcatgagaatgtgaagaatgccagtcaaccaacttcaaatatcgatgttgctgattcatctgacaagatgcaagaacataccagtgtcaatcctgcaacaatggaacaaactaaagtagactcagtgctcaatgacaatcctggagagcatcctaaagagatatatgcaatgaaggcagctgttaacataccttctcaggatttctcctgcggtgccatatctagtgaagatccaacacaagggccagcagatcatgtgaacagtaaagatgcacctatagtgaactgtggtaaagttcatgtatcgagggagagtaatgatgatgagcagtcgaatggtttacaatccagggacaccagcattattaattccaatgtgtcaagaagaccgtcgggccaatttaactcccagaatgaggttcttgaggaaagtgtttcgcttaatgaaggaagtcaagacaaccaaagttttagtggcgctcctaagaagtttttaaagaagacatcacatgggacaacaaat

SEQ ID NO: 185950 - DNA, 276 bp, Zea Mays
ctgtaatctactgaccgtcgtatgtacagtaagtgcaaacatgtccaaactcatattgcctgacattctaatcccaacttgtgtataagtctctggtatgtgacctttggttactccatgctcattcagtttcatgaccctgaatgcatctgttacgcaatttagcatgcttgctgcattgctttggagtctggaaccatatatgttcaaagataaaaacaacaccaactatgccctccagggtcagtgtttctgcatacctttttccttatgctt

SEQ ID NO: 185951 - DNA, 800 bp, Zea Mays
cagtaggggcacgtactccatagcacgacgcccgtggggatcggcgagcgcgatatggatggaggggataagcgagggagctagagcagtatctgccgtaagcatcagccggtcaactggtcgaataacacatgtcgatcgacgtgtgaccatcgggtggatgtggtggtggtcatggtggatggcgaccggccagtaggggcacgtactccatagcacgacgcccgtggggatcggcgagcgcgatatggatggaggggataagcgagggagctagagcagtatctgccttaagcaccagccggtcaactggtcgaataacacatgtcgatcgacgtgtgaccatcgggtggatgtggtggtggtcatggtggatggcgaccggatgacacatcgacggctcatcacaggagcaggccagggcactgggcgactcgtcgaaggaggtgaccggtagaccggactgcacataccgctgatagacgcatgtgagatcgacaaagcgagccgaagatggtcgagaggcggggtcgcgcatggcacgagcggatgcaacagggttgtgcatggcgcaggcgacggaaccgcgcgtggcatagtcaaaggtgatggggctacagatggcgtgaaagaggtcgccgggaccagagttaggggaagaggaggtacgtcgtcgggatcaacattgaggagagtcaaggtcaggaggtggggaggagccagcaaaaggaaaagcatcctcatcgaaaacatgttgagagatgatgatgcgttgggtgagaagatcgaggtacccacac

SEQ ID NO: 185952 - DNA, 340 bp, Zea Mays
tcctgttaccctgtccagactagcaaccatgtctcctaggtaaaggtaacctaataacatggatctgaacgatggttcatccttttcagtatgtgagtatagatcataaaaatagaaaccacaagcaagatggtgaattcacctgccggccaacatgggcatctaatgcactgagtggatcatcaaatatgtacacatctgaatcagaatacacagctcttgccattgaaactctttgcttctgccctccactaatattaactcctctttcaccaatctctgtcagatcgcctccctgatagaaagcataaccaaatgcattatttgttaatgtacagta

SEQ ID NO: 185953 - DNA, 639 bp, Zea Mays
catcaatcttctatctaaactcttcttgcatattcatgcgtgcttgtcattaaccttttatggctccagacttcgccatgttcttttttaccaaggcaaatcatcatgtttgtttggaagacccagtagtgctagcttgacagtatattttttatgaatcatgaccattttgcataacaaaaaggcttcaatagcaataatagtaccattgttgcatctatctctgcaatgacttgtttttcttggcatagcattttttaccagagttgtttatcatcactgtcattatgactgattttgaggattattatatattcacatcatgctgaacaggcttgatgggagcactccatcttctgatcgtcagaatcttgtggagatgtttaatgaccttgaaaacacaagagtgaaatgcacattgatatcaactcgtgctggatccctgggtatcaaccttcatgctgcaaatcgcgtggttcttcttgatggatcatggaatccaacacatgatctgcaagccatttatcgagtttggaggcaagaacttgtcagttgggctgctcattaagtgcacttgaatattgccatttatttttttgtgtggggatgttctttccaggtatggccagaccaaacctg

SEQ ID NO: 185954 - DNA, 402 bp, Zea Mays
cagaaaaatggttgtggctcttatgtttcagtgtttctaagtagataaaagtagtaatggatgaacgaagagggacataacagatggtgtcctgatacgcacttatcttatcgaggaagaaaagattcaggacaggacgaatagaggagagcagtgtgaggtgagctcgaggatccaactctgtctccacgatcgctaggtgtgaaattctcgggggtgtggtgagagtgaggagcatccagctctttatctccacctgctgctggtgtgagtgtgacactgatgatgatggggtaactgttttcaagtcgttcgaataatcacgattaattgtcctagtaggtttagatcaatcatgattaatcgtccaagtcgccgcccaagttcgttagtcagaacgac

SEQ ID NO: 185955 - DNA, 285 bp, Zea Mays
cttgggttttgaaaaatcatatcgtgagagtattgtcttgatgacaagaagctatcttgacaaagttaaagctctaggggcttcagaaaacaatacagttccatcagaagcaacaactgagcgaacagaagtatgtgatgagttctgtaaaatattgatgctatatgtttatcttatgtagtgtgattttgacttcttttcaatactccatgctaactttgccaaacaacattctagactcttcctgcaggctttctgcttgttgcttccaaccttacaagcaca

SEQ ID NO: 185956 - DNA, 511 bp, Zea Mays
ccgactccgagtgtccgactcggtacgcggcgcacagcggcggcgccatggccggatagcggacccagggggtaaaactacaccatacttcaattcgatagcgcatagcctaaaggaagggatgatggatacgatggcgactcaccagtggccagccgaggtaaggtgatgcccgtccacgaagcttggcggtccggcggggattttccgccacggtaagcaattgacgagcaatcgacgccccttcgcggaagaagacgccacacccacgatcgtgcgatcttccctgaccacctcccgcttccaatcgacagcaggatccggtaaaccgtggcgaatcgagcacggccgcgagccctcttctctcacccacgattttgtgttacacgtgctctggtcactacggcgaggcgagtagggaagaggtggtggtcacgagaacccctttaatcctctggagtccaagtcgggcagaggagaagaggttgtggcccgccattgtcgcgcgggt

SEQ ID NO: 185957 - DNA, 1372 bp, Zea Mays
aaagatggttttagggtaataatcttgtaatccacacttcaattttatatcctttattttgtctaagaatgggttctgtgtagatactaaagggtggtcctgaaggatctgcggtgaaagtgagaaagcaggatattaagaaaggctgcgtagataaaatgtttacagctgttgatcatcaaaagaagacaatatccattaacgacactgttaatgttgtggaagggccatttcaggtgaaaattgaactattaatctgacaggatcctgctattggtctccaattttgtaagcagtatgggaattgtatgttttttgcttttatttcaaggaaacattcatttgagatattttaaagaacgtgtgaattctttcacagagtattggcaatgatagttttaacattgtgcatgtactagtgctgctacattgttcttatctaagacgtattccactgttattgcagtacatgtagcatgcttttggattccagcatgtgtttttggagtattcaagaataccatattttccacttagcacacttgtggtgtgattaaatatatttgcagggtaagcaaggggtcgttaaacacttgtacttgggaatactgttcatttataatgaaagtgaaagtgagaactgtggatttttctgtgctcaaagcgggtcatgcgaaaagatacgaaagggtctgggaagctctactactgaaagttcggtatgtagatatgtgtatctacttgtcaaagaattgaggatgttctttgtgtcactttgctttctatgtaccaggactttacaactcctatgtttcctgaacctgcttatgagcaaaatgggcatcgggacagtaagtgtttcttgatttcttctgtaatatttcctgcatgtaagtatatcggtctgatttccttcataatacagctgaaaggccttacaggagcaccagagaacaacttttctctattgggcagatgctgcgcattagaaagggtcctttgaagggctacctctgtcgagtagttcggatatttcggaatgatgtgactgttaagctagattctctactgaaaattgttacaggttggttagcttacctattgttggagctgttatttggacaatgactgacttcgccatgtgtgcagtacaagctgatcttctctcagtcccagctaacagggggtaagtaactgaagcatgttttatttttctttccttcatcgcttatgctgtaaatcatgtaatgcaattgcaccatcattaggtcaaaagtatggtatcactttcatattagcttcttattatgttacatggtttaccagggataacttgtctggtgccccagctagtaaatttggaagtcaagat

SEQ ID NO: 185958 - DNA, 347 bp, Zea Mays
gatgttggcaatgtcaaggtgcacgtccgagaggccattgctgagggtgggttctcatctgtctatgctgctcgagacctggtaaacccagcgaagcagtacgccctcaagcgcgtgattgtccaggacgaggagtcgctgaacctggtccagaaggagatcacggtgatgcggtcgctcaaggggcaccctaatgtggtcacactggttgcacacgccatactggacatgggacggatgagggaggcactgctgctcatggagttctgcgggaagtcactggtttctgtgttggagggcagaggagcaggttactttgatgaggagaaggtggcgctgatcttccg

SEQ ID NO: 185959 - DNA, 536 bp, Zea Mays
gtcggaaacgattggcaaacactaaaaccgttaccgttttcataatttttatcggaaaaaacggtaactttggaaacaggaacgatatagatccggcaagctgacagagcagggaggcagggaccggcgattgacgagctggaggagcagggaggcgaggaccgacgagctgacagagcaggcagtggtagcgccgagcgcgagtaggtcagcagggaggcagcgtcgcgcgaccgttggggagaagggaacttgagcaacaacgcagggaggaggagagggaggcacgagcttaggcaagatgcttactggatgacggtgaagcctagggatgccggaggcgacgagcggacggaggcaccacgagtccgtgacgactagctcaacgctcaacgaggctgtgggcgtgacaaaggaaggatgtctgttttaggttaggggaactaggttgggttgggctcgaagtctggaaaagcgtcaaaacacgacctttttatggtccagagcgtttttacgctaaaaagtggcgctttagc

SEQ ID NO: 185960 - DNA, 382 bp, Zea Mays
cttaattggtagaggaagatatggttcggtgtaccgagggaagctgaaggaaatggaagtggcagtaaaggtttttgacctggagatgagaggagcagaaagaagcttcttgtcagagtgtgaagcattgagaagcattcaacaccggaatcttatccccatcataactgcttgctcaatagtaggtactttcaaagctttaatttttgagttcatgtctaatggcaacctggacacatggctacgtcacaaaggagacgaggaggctacaaggtgtcttggcttaactcaaagaataaacatagttgttaatatagctgatgcattggattatttgcaccatggttgtgggcggccaactgttcactgtgacttgaaaccc

SEQ ID NO: 185961 - DNA, 517 bp, Zea Mays
ttagagaatagctcttctagttcttcaagtaaataatgttgtagttctaattcagagggtgtatatttgatagggtggtatttttggataagatgtttgtgaatgtcatcgaccattgtgtgccatgtggtgttgaaaaattctttttcatcttttatttggcaatatgttagcattatgacaaatagattgcgtagttcaaatgatgttgcccaattagttgcttcttgatatgtgcgataccactcattgtcatcgtctagtaatcctctagctgcgcaagcctctttaaaggtttggtataaaacaccattatacgttcgtatatcttcatagtttttagcacctttaacaatcattagaagcattcttaaatagaatctttcaccttcagcagggtttacataatagagccttccaaatttgaaaccatgttgtcttttcttccattgtcttttttctccatcccaacgccattgtttgggaaactcatagtatgttaattcttttgcatctt

SEQ ID NO: 185962 - DNA, 1059 bp, Zea Mays
gatttagaggcaagtgaggaaagatctgagagtctaggcaatattgatgaaggatctgatttgaaaaaggaaattcctaaggatattgataaaacttgtgcaaaggaggtagacgaagaggtgatagagcttgataacatgttctttgaagactcatctgcttgggaagcagtggctccagaaatcttgaaacagcaacaaatagagaaattatcacatgatggttatggccatcttattggaaacatagatgatatatggaagaaggtccaagtgcctttttactctttcttcatattgatgggacatgtttcatgtttgatttgtgcttctgctatgtactattttctaaccgttcttttcttttgctcaaccacagggagattctggtaaaatgccgaaagctgttctacaaaagttttgtcaaaaacttggttgggaagcaccaaagtataataaaatatctgagagagatggcaaatttgtatattctgttaatgtgttgcggggagctactggccgtggtaagagtcggaaggctggaggcttgacgataatccagttacctaaactacatgaagaatatggatctgttcaggttacaacctttttctgttactttgtacactaacacttcttagttcttacaaatactctaggtaagctaattattattctgatatggcacttctccccatgataatagttttcattattatacgtacatgatacactgagatatcagttcataacaaatcacactagaatattatcttctcttcttatccaaagtaccaatattaaactaaattattaacaggaagcacaaagtcgagttgcagcttttgctctatatcaattttttgctgaccttccactacgtcaactgcttactgagccatactcatcacttattttaagatggcaagaaggttggaactattggttatggttttcttctgtgatgacttgagcattataaatggggttttgagctccaaattgcacgttttcataaaacaggtgaattgtcatctacatcaagggtgctggttacgg

SEQ ID NO: 185963 - DNA, 344 bp, Zea Mays
gtggccacgacacgtctccaatgaccaacatgccactagaacacgacgagctcgttcccaatcgcgcgcttcgttctgccatccaggaatggctccagcggcagaaaacggccttgtagcttgttgttgttcctgttggattgctgcgtgattgattgtccaccaccacaaccacgagacggtgttgcttctccaccagaccaccactacgcacggtcatctactgctgcacgctcggagttcaaggttgtttgctgtgaggattctggagaggcaccctcgccttgtaactctgtttgagcatggtctgatgagtaatctttacttgtctaacgagttcgtac

SEQ ID NO: 185964 - DNA, 408 bp, Zea Mays
tctgtgtgagctagacttggattgttgtagtaacctgatagtgctatggttggggagcatttttggccaactgggttggtctggtgtcattgaaatttgtgagaaaatgaggattaacaggaaggatgcagtgtggcctaaggtttagattcagagaactgaactttgttcagttgacgtgggtgcaatgagttttattcggtctttggagctgttttgtgactgattcatggtgttatggcctacagcccctacaacaattagttagaggataatatggtaaacaattggtgttaaagttgatccctttgttaccacttgaagtagtgagattttggtaggataacagtagaggttcagtctaggtgcctgaaaccgtggttcagtctgttcgaattcagtttggag

SEQ ID NO: 185965 - DNA, 1028 bp, Zea Mays
agtgtaagggcatgagaggcgcaattgaacgccatgggagaggaagaaggagcgagaggcagtgttgtcgaactctcggccattgtcacaccgaagggcacgaaccgggcgacaaaactgggtggagacctaggcaaagaagtgggtaagggtggagaaggtatcagactaggcgcaaaggaaaggtccaaagaaagtgagagaagccatcaagaatgaccagatagtatttgtaaccagaaaggctgaggacaagagaggtccagagatcacaatgaacaagatcaaaggcctgagcagccctggacgtggaagtggaaaaagaaagacgagagtgacggccgagctggcaggcatgtcagagatgcctagaggaaccccgactagaagagatagcggagcagctggagagctgggacatcatgtcaggtccagggtgaccgaggcgacgatgcttgatggtggaggtggtggtggcagttagagcattgggggaggatacaccggtgggggaagtggagggcaagtgaatagagtagagggggcagagctgtcacagtgagcgagcatgatagcccctagggctcgaactctatagaactgtggctgaatcaaatggggagcaacaagaacgttgttaaggcagaagggtcccggaagaaccgatgcacctactgaggtgactgggagggtggcaccgttcccactatggaggaaggatgtgaggggtgaggagggtgtgagtgagataacaagatggtagtaggagtggtgtggaaggaagctccgaagtcgaccacccaatcggagggagagggaggaggtggtgaaggcacggtgtgcgaggagagagccaagggaggtgagagagacaacatgggcttggttgtcaaggagacaatcacaattgggcagagccagaggcaccgaagggggtggaacacaatatgatgtgctggacgtgacgacgtagggtggaagagcatgggaagggaggtcggggcaacggtggtgaggctgagcgtggc

SEQ ID NO: 185966 - DNA, 1084 bp, Zea Mays
caaggcgatctctccatctccgactactgccgcaagttcaaagggatggctgacgctctcggcgaccttggcgaacccgttcatgaccgcaccctcgtcctcaacgtcatccgcggtctgaacgagcgcttcgccaacatcggtcttcaccttcggcgcggacgacctctttctaccttcctcgaggtacggaacgatttgctgcttgaggaactcacctttacacatcattcctccctgccggccaccgctctactcgcctccagccccgccagacctccgcccaagcaagaacaggcgaccctgcagcagtcctccggcaacaacagcagcaacggcaagcgcggcaaacgcgcagggaagaaaggcggtcgtgctcccaaacaagctggacaggcccccacgtctccctggcccagcttctacaatccttggtctgggtccattcaaatgtggcccggaccacggacggcgtcctctacccgcccggtcactcctgcgccggctgcgctagctcctcagctgccccagtccctcctcacgggcatccagggcccctggccagggacacagcagcaaacatgggcgcaccctcaacctcaaccgtggtccgcgccaccaccgagtttccctcagcaggttgttcccatgccatcatgggaccagcaatcgctcgtctccaacttcaacaccatgacgctccagccccctcaacaaaatgagtggtacttcgactccggggcaaccacccacatgtcctctgatgccggtactctctcccattccactcctttacaacacccttttccctcctctattattgtcggtaacgggaattctattccagttacatccacgggtgctgctgttcttacagattctcttcgccttaataatgtccttgtttccccaagtcttattaagaacctcatttctgttcgacagtttacctctgacaataattgttctgtggaatttgatcctcttggttgctctgtgaaggaccttcactctcggagagagatcgtccgatgtgacagctccggtccactctaccctctgcggtttccggcatctaccttcc

SEQ ID NO: 185967 - DNA, 830 bp, Zea Mays
taagaggttccttacagtcagaccttggagttgggctagaacattcacattcaatatcttgtttatcggaaggtacagcggaaatgtgaggctgattaagtgaagcgtttgatgcatctgcttcaactgctttttgctgattcacaaactcctccgttttgcatgtatcagagacagaagttgtcgctagcatttcaggccctactgatgttaatactgagttgtccacaagaggttccttactgtcagattttggagttgggctaggatattcatgctgaatgtcttgattatcaaatgatacaggaagaacgtgagaatgaggatgatgattaagtggagcattcaatgcatctgcttcaagcgttttttgctgattcactgagtcctccattttgcatgtatcagaggccgcagaggttgttgttagaatttcagacgctgctaatgttaacactgagttgttcagaagaggttccttagtgtcagatcttggagttggacctggacattcatgctcaatatcttgactgtcagaaggtactggaaaaatgtgagaatgagattgattaagtggagcatttgatgcatctgcttcaactgttttttgctgattcacaaactcctccattttgattgtatcagaggctgatgcagaagttgtcgctgagttgtttacaagaggttctttactgtcagatcttggagttggacctggacattcacgttcaatatcttgattgtcagaaggtacctgggaagtgtgagaatgaggagattgacaaagtggagcatttgatgcatccacttcaggtgtttttggctgattc

SEQ ID NO: 185968 - DNA, 383 bp, Zea Mays
attgagttttcgctttgtctttcctccagaagtatcttgccaggaacaccttgaaactacttatgcttggtgttgctgcatatatgtcattttgcaccctgctgtattgtgtttctgcttgtctttcctacaacagttatcttgccaagaattgtatgttaggctacttatggttggagttgctgcatgctgtcatctcacagtgtgcagttaccacttctatcttttgctgtgcgcttctttactgaaagtaaaaataacattcaagatgaaacctgctcaggatattgattctatgactggtttagttcttgccagcctgtcatgcaacttctattccgagtaggttaaacatactcacagtgggtatatagaaagaatac

SEQ ID NO: 185969 - DNA, 470 bp, Zea Mays
gtctggatgatgagtgaactacattttacatttttgagtttgttgagttatattgtccgtggacaagctgtatctggatgtggccaaccggcttcaggggctcatgcggctagcacaaggagcaaacaagcaacaaccttattctgagttgctatcattatttgttagttagctactagatccatttggtagtattttatcatcttgctgctagtatgtggttagagagggcatgtgatcattagttggaacttggcagactagaagaatatcaatcaatattgtcctagtcccattctcctacccttacccttgtggtgtggttgccggctatcagcgatgtcatgctgctgaggttcagggccatctagaccagagtttatcacaacgatatagttcgctactgtgacacagtttgttttgtagtgtatcgaatcctcgtgcaagacccttctcatgtttatccttac

SEQ ID NO: 185970 - DNA, 2025 bp, Zea Mays
cgatgattggtttatgctgcttttcaatgttgttcttacctcacttcctgttatatcactcggagtatttgagcaagacgtttcatccgaaatctgcttacaggtatatgatataacatccaacttattttaaccatactgcttatgataaactaggcatgtttagaactgaaaataaagcttggtcctggaatgtggtgtgtgttctcatggtaaaagtttttgttgtgttgagtccattcattatgcttccagcaaagaagcaaatgaataaacgggtacttaaaagataatttgctaaaccttgtttgttgaggagaatgacactcccatggaaccacaatcattagcaactggatgtagatcagactatcagagaactatactgtacttagatgtcagtcaggtattccttctcaggctactttgcatggtatcaagtacaacaacacaactatctgacatggttcatagtatattagaaaactaaaaagaaccatgaataatgcctcaatgtagaagcatatcttagtccatgctactatgatctgtattgcccatttgttatggttaggaatgaactctatctacctttgcctctcctttcatgtaaatcatttgtatgaaacaacatattattaccagtaaaagatggtttcagaattaggaacgatttggtgtgccttgcttctccattccatgttccattataatgctattcagtctctaggttatctgcttcaggttttcattcactgaaatgaaatatgcaagtcacttttattatgtggatactatgtaaatactatgtaaaaatacaatggtttgaaatacacaatgggtattggaaagataccagttatctcaggtgtgatattatgttgggaaacatgagcctgactgatggtttttcaacacatatcatcccatagttattaaataatgtagttcaaattcatctggtttaacatcttccttgaaaatagtttgatttgcatagcatgtagaaaataattaaggcacatggtttgtggagccatttatgcagattgaagtcacttggtattattgtccatatttaaagctgaccgaaatttcaaggaaatgcaagcacacataagtttgcttcttgacaacattatgtttgtactatggcccccatcagtggatcaaatcacatcttaaaaaaacatgctcccaagtaaacttttattctagttaatttcatgtgtatacttttattctagttaatttcctgtgatctttggtgctactagaagactcatgcatcgggccctttgccctttgtactttaggagctgggcaatcttctctgatcatccacattgctgcttctaacctttcatatatctatgttgacatggcatggcttgcatgttgcagttcccagcattataccagcaagggccaaagaatcttttctttgattggtaccggatccttggatggatggggaatggcctctactcctctctggccatattcttcctcaatctctgcatattctatgatcaggcaatccgtgttggggggcagactgcagacattgctgcggtgggaactaccatgttcacctgcatcatctgggctgtcaacatgcagattgccctaacaatgagccatttcacatggattcaacatctctttgtatggggcagcataacaacttggtatctcttcatcctcgcctatgggatgacattgaggtctggcgacaactaccagatcctattagaagtccttgggccagctcccatatactgggcagcgacgcttctggtgactgctgcctgcaacatcccctacctgatacacatatcctaccagagatcgtgcaatccacttgatcaccatgtgattcaagagatcaagtacctaaagaaagatgttgaagaccagacgatgtggaagagggagcggtcgaaggccaggcagaagacaaagattggtttcactgcgagggttgatgcaaagatcaagcagatcagggggaaattgcataag

SEQ ID NO: 185971 - DNA, 481 bp, Zea Mays
cttagatcacataatgccaaataacttagatgatgcagttaaaattgacaccatggtgcgtttaaataaccttagtgtactaaacagggaattattagaaggatcatggttggacaacataatttgggatcctaatgaggttaccccaaagcctaaactgatctttgacctcaaagatgatcatatgctttttgagatcctagatgaaaagaatgtggaccatctccagtctcatgctcgtgctatgattgttagccagtcaactaagacttcaacaccaacagttgacaattttggcgatcaaccaaagccattgagtggcaggttcaacatctccaatgacaagttttattcaaataggaagactccacaacaagctaaatctcatactaaaaaacgcgctttaatgggcataaaggtggtgcattctgctccagctcataagctgcaaaccatgaagccagtgttgagcaagtatgag

SEQ ID NO: 185972 - DNA, 790 bp, Zea Mays
tgtgaagcctggtttatgtttctgtctgtatacaaggcatcggtttgaaaacgtcatgcgtccatttcaggttaccaccagcgttagttatatatatgtattttcctaatgttcccttattctgcctctcatatatgccagttatcttccatggaaccttgaccttctcagtattcattatatagtgattacttatatttatatgcttttctgtttccttgcttactatctcaccctgctaatccattcccaatatatatcaatcaaattcttttagggaagttatacaaattaattgcaaacccacattctctgcatatggttactaatttgcaagatatgaaaatatgcatttctatgacacgaatgagctatttaatatcattgggcaaggctatcaaaattttcctaaatagcacatatagtctttgggaatttatatgcactctacatgctgaaggtgcctgagatgttacggatgcctttgactgagctgtgcctgcaaataaaatcacttcatcttgatgacatcaaatccttcctgctaaaggtacatttgccaatgtttttcactatttacttttgatctcatcacattctatgcaatatccgtaagttcctctgtaacttttataagaaaggctgagttcatgtgcacctttttgtagtttctgttgcgaggtacttagtagtagctatatttatgttagttctcctgttatacatatcattccttgttatcacatattatcttgttttgcgccaggcagtagagccccctaatgaagaa

SEQ ID NO: 185973 - DNA, 1138 bp, Zea Mays
cggaggtggaggagtcggcgttgacgactgcgttggcttcgtctgttgaggagaagagggtagccgaggaggacgaggagagggcgaggcgggagtcccggaaggaggcggagatggagaagaaagagaaacagcaggcggagctggagaactatcacatgcagctggccctcgagatgagcgtgagggaggacccggaggcgatgcagatcgaggtggccaaacagatcagcctcggctcctgccccatccagagctcgcccgcagaggtcatcgccttccgatactgggtattcagcatctccactcccctcctactatcttctagattgttttcgtaccgcgattggatctcactcgtgctatgttgatgcaaattggacgttagagcagaaatggggtctatcatatgttagcttgtcaaaggtctgttgcatgatgctacctatcatggtgacgttcctctgttagtgcattcgagaaaaaaagtttttatagctgttgaattatacttctgtaacggaataggtatggcagagtatggggtagtgtaatcatgtaacttatctcgatatggcatatatgaaaaattccttttctgatatctctgaaattatgttagttgggaatagtagccttggattgtctatccttcataactcgagattttctgttttgatggggaaaaataaatactccatgattttgtagtggggttaattttagcataatgaacatctgcttttctttatagaagctactggctgaccatacttagaagctgcatttgcaaagcgattacgttgtctatatcctagatatagccagcagctgatagccaccataagatgttctccttcatcagagattgttcagaagttaaactccctatatatttgtgactcttaccattttctcacttcctcatatggtagatttgttcgtgcttcacagagtttcaatgcccttagctatgacgacaaaatattggatggtttctatgacatttgtgccactggggatgagcttgcaatgtcaaccataccttctctgatggatctgcaagcactgccattttcacatggaggcaaaactgatgctgtattggtcgacagagcactggattctgagctcgtag

SEQ ID NO: 185974 - DNA, 1136 bp, Zea Mays
cttctgaaagtcgtgattgacaatttgaggaagatacctttgaaagaacagcgtggtccgcaagaaagattacacttgaaaagcctgcgtagttctgttgatgctgagggtagctatcaagacttcacatttttccagtctttcctgtctccaattcagaaatggacggacaagaaactaaatgactatcacctacatttctccgaggtttgttttccaacctcctggtttggcttgtgctacactgtatgcatgggcagttattcaaaagaaaatataccctttactacttgaaagctaatccctttgtttcgacaattgtttgattttattaatttgtttactttatgtaacaatatttacaatacccttttactgaagattttttttgtaacgtgtcccacttcatgagttttttgttcatttgttatttttaacctaatccacagcacaaatgtgcataaggttggccatcgttattcagctaaatgaaattgcatgacctttctagtccgatcaatcaatttagttctgaaatctcttatgaacattgtcatcttcatctctttctcattttggccttttacatgtttcattttcacttcccatgcatagtatttaccacatgcttttctcttgatccgccgttttacccatgggtgcatgttgctattattcagacttcagtacctggctcctggcatatcctctacacattttagacattatattgttatatatatatataatataccacactgaacctttttatctctcatttggttgcaacaagagatcattattttctgcacattgggactttcttatttttacagggctccagcttgatggctgatgttgtgacagtggcaatgcttacaaggcggatccttggtgaagaaaatgacaaggtccttttactttacttttgtttctgaccactgttgttgccatatcactttaacagcaacaatttcttgttctatttgaatatacgatcactgcagagtatagagagccgaactgttcactgtttgcacatttagaatttctaattttgggcactcctttgcttttgtgcatcaggtagcggagtctcctgacagagatcagattgaccgatacatcacttcttc

SEQ ID NO: 185975 - DNA, 790 bp, Zea Mays
gagttctacctcctcggcatcttcgcagaaggatttcattcttcttgctgcctgtgaagcacatcagacgcttccccagagtgcagaatttcctgctgatgtgtttacggcttgcctcacaacgcccatcaaaatggctttgcactggttctttctccccccttcttttttgtgtgtgtactgttccttctctccttttcttagcatgttgtgcttacactagtacatgcctataaaccatgcaggttttgtaagcgaacatcactccatggtcctctggatcgttctcttattgaccaaattcctggaaggcaaaatgaccgtaaaacacttcttggagagctcaattggatttttactgctataacagatactatcgcatggaatgttcttccacgtggtacattgtttatgagagaaataatgtttttggggaacaagaaaactagagaagattattaaatttcaaaataaatgttagcctatatttggtttatgatacatgtttcactgtgcagatctgttccaaaggcttttcaggcaggaccttcttgttgccggtctcttccgtaacttcttgcttgctgagagaatcatgcgatctgcaaactgttctccagtttcttatccgttgttacccccaacacatcaacaccatatgtggtaactaacctgactcgtccttctttttgcttcaactactttttgtacattttgtaacttgctaaatcccagggatgcatgggacatggctgctgagatttgcctttccaagcttcctcagttaatt

SEQ ID NO: 185976 - DNA, 405 bp, Zea Mays
gcttctcgttctacccatttgcaaccttttgtgcagattcaaaaggaaagcccaccgaggctattcgagggggaaggtatcgatttgagtttttggccccttaattatgatgatcatatgcttagcaccttcacctgactccctatgggcctactgttcttccccaagtgtaaagcaggtttccttttatgatgatgatgttcgcttttggcaacattggcgtaattgctctgctgctgctgaggccccaactgcagtcagtcagcagtcttccacgttcattgcacctgcaccttcgacacgaggaaggcactttgttgtcatttgttgtgagaacaaagtcatatttttggacttggtgactatgcggggccgtgatgttcctaaacaggagcttgacaatag

SEQ ID NO: 185977 - DNA, 1174 bp, Zea Mays
aacctgttctttcttcagtttctgaaggtctgccttatatgcacgcaggttctgtgcacgtttttgtgcatcattcagtggggtccttggcgccgataacctcctcaataaggcatctttccttcgtttatctgaaccatcctttgcattccttagcttctctttctctaccttctgtacatcattgtcagcaactggcaagtcatcctctgttttttcatcttccaccttcacagtagtctgcatgtggctatcataatccattgctggatcatatccaaatgaaacatcttcagatccacgctctggcaccaattcgtcaggttcgtaaaaaagctgatgtccagccttttcatctgatgctttatgaattctagaaggaagctcaacatctatgtcaatagtagttctgctttctgctccgatattatcatgtaagctggacctaagagggatcataaaggactcgtccgccacaccattcctattcttgtcctgctgaacaggattcttgtactgggcctctgcaagaggatccaacaaactatgtctggctatctgacttccctgaccataaaccatgtagtcatcacctgtccctctcctgtaccttcctccaccagcttcaatctcctttatttcactatgcatatagttcctcccttctccagacataacaagttcatcattggacatgacccggatagctctagtcctcccattggctgaatcaaaacctactatgttccgctcatggacaatgccaccatctctctcagctaaaagaataggatctgctgtgtttacattctgttttctccttgatgggggttctttctcaccagcaaacaggtctgcatcactagatcttgttttttcttctgctctcaacaagaaattttggaatgcgctccagtttccttgctcagcatcgtggccatttgacatttcatccttgctatattcatctccggaggcaaaagtagttctcctaccctcctttttctttgaacttgagcttttatgcttcctttcacttgatttggagtgtgaattgtcactgtccgcagactcaacttcagaacttgattgtgattcgctctctgatgagccatgctttttagatgttacattcacattcttgataacaaccacactaggttttttctttccg

SEQ ID NO: 185978 - DNA, 483 bp, Zea Mays
ggctggggaagtcgcccagctctccttcgctggttcccttggccttgagcctggcagcgcgctcagcagaggtcgacatgtgtagggaagagaggagtcggccttgagtctctcaggtgtctaacctaagctctgataccaaatgttagaggtaaacagagtagttttgccgcaggtgctaacctcagccatcattgcttgattatatagaaagatgagatgagtcacattgattacataacagctcattagagcttagctaatcagataggagccttggcagccgcacacacctgttgagctgctcaaggtctttaatgactataattaactagcacaagtaactaggagagtgcttaggaaacaggacttaataacaacaattatcagatactaaatgaattaaggattaactagtaaattggtatgctcatgtgagaagattaacctcaaacagtatttgggcaacataaagcagataac

SEQ ID NO: 185979 - DNA, 654 bp, Zea Mays
tcaggcttttcttgatatggcggaagatgatggtatttctaatagcagtctgctgtggttctgaaatgttgttctgaatgcgggcttagtggcatatgtgataacttctgttcttgtctcattagatcttatggaaggttacagagcaacagaagtaatgcccgaggactcgcaattaatgactcaatgcaaggctatagctgacatgaagtttacatatgttgtctcatgccaacaatatggaattcagaagcgttctaatgagccttgcgcacatgatattttgagactaatgacggagtgagtttctttgagaacttctgaataagtcctgttataggagtaacctgaacttttttttatgattgtcattcatccaataaatgtaggtgttagtaatgtaacaggatgatgcaaattgttcaggtcacattactacttactactgtaggttatatgttatgtgatggtattgtaataacataactggcatttttttggcagatatccatcacttcgggtcgcctatattgatgaagttgaagcgcctagccaagatagaaacaagaagattgaaaaggtttactactcagtgttggtgaaggcttctgttacaaaacctgatgagcctggtcagagccttgatcaggtatt

SEQ ID NO: 185980 - DNA, 838 bp, Zea Mays
attcggacatgctgacgcctgagcagcgagaagaggttagtaatgtctccattctgttttgttgcttatgtactgaatgctgaagccgcaaccttgactttatgtcctgttcctgtgtatcagatggacagccgcgtgaggaagttagtttttggagagaaagacaatgtcagtgacccaagtaccagttgtggcaccagtgcgataaatgtttcagctccatctgggcaggtttcaaacacaggaggactgccatttgaatcaggtgcagcaaatctatttagtagcttgccaaggttggaagtacctgccaaaaggaatagtcccttgttgaatcttcatgcagattatgatgagaacagcttaccctcgccaacccgggacaatgcaccgccttttcctgcgctaaagcctattggttttggagcatttccaatggtacctgagaaactatctttcctagacagagttgagcctacaaagaattcgttatatccacccttaaatgatcctctgaaggctgtctcttcctatcagcagaagtatgggcagaaatctgtatatccaagtgatgatctaccaagtccaactccatctggtgatgagggtaaacctgcagataaaggtggtgatatatttagtgatgtttccagcttccctgttccaaagagtattgtattaccaagtacaagtcagatgcctgcttctcaacctagcacagtcagcagcagcagtattagttatgcttcaagtacaagtcagatggctgcttctcaacctatcacagtcagcagtagcggtattagttatgcgtctggtccacctggttttgctaaac

SEQ ID NO: 185981 - DNA, 351 bp, Zea Mays
atccgccgcgggcctcctccagtcctcttcctcaccccgacgactccgcctcaaatccaatcccactcccacctagcggtccggctggcctcgcctcctcctcctcgcttctctcagcctcaggacgacgcctgcctaggcttccaccgctgatctgaccccgaaacctcgttcccttgtccgcttcctgccgtctcagtcgtcgatacttgtcccccaaaaccccgggctccggccgatctctgcgcgttgaccggggcgccgctgatggtggcgaggatgatgcggtggccgcggccgccggcggcgcgcaagttccgcgtgcggctgttggtgcggcgtgcggagggg

SEQ ID NO: 185982 - DNA, 608 bp, Zea Mays
ctctagtccggcgcggcgacggcgcgttcgccgagttcgtgggtgctgaccgcgggaaccacccgaccataatcaaggtagagagatgaactgatgctcgtcggtcgagcactgcagcacgcagcgcgtgtcatcatggcatagtcgtgtgtgacgatcgtgaatcaccatcttctgctggcatgcgcgagtgctcggcaggtcctgtgggacaacgacagcagcaagagcgagagcgatgagcaggcggcaggggatggagtcccaagcctcatatacgtctcgagggagaagagccgcacgcagccccaccacttcaaggccggggccatgaacgtcctggtatatgttcgtctctgtccactccactctcccagtccagctccagtagcaagacgcgagggtgtcatgctgtactgtacatgcgctgtgcagacgagggtgtccgcggtgctgaccaacgcgccgatcatgctgaacgtggactgcgacatgttcgccaacaacccgcaggcggccctccacgccatgtgcctcctcctgggcttcgacgacgaggtccacagcggcttcgtccaggcgccgcagcggttctacggcggcctcgc

SEQ ID NO: 185983 - DNA, 329 bp, Zea Mays
cacgtcataaccgacgcgccggttacatgacatgcgggcccgcttcctttgcgctggtgcactggatgtggacggagctgaaggagcacacggttgcggtgcagttggatgcttgtcgcgtgacagtccatcctttcgaccaccggtttctgcgaagatgggagagcgcttgtaaccacgggacggttgcatgcctctcgtgcggcggttcgccttcttcgtgcttcggatcagctcgtatgttgtgtgggtcccagcccccgtgtcgtggggggagaaccctggaggatgtcagtggggatttcgcccgtgacgctaaggggtgcaag

SEQ ID NO: 185984 - DNA, 705 bp, Zea Mays
ggaaaggaagtgcagcaaatttacctcaaagcagtggagagctcctactacaacagctctgacaaggtattttgaaacaatattggagcaattctgatttcattcaacctcagctccaaaactcctgactgcgcgcggttttcatcttaacaggcagtcaggctaatggacgatgtggaggagctgttcttgagacatttcacagaaggtgacagacggaaagcaatggtgtatctgaagccaaatcagcgggaagagtcacactgtactacgtttttcattggtaataacttttgacaaggtttccattccttcatcaccataggtttttccgatctttaaacaggcatgtaaattttccaggagtatccactggcggcttcatagcattgttcataggttactgtatcatggcacgcgttgctggaatgtacactcagcagtcaaacaaggtgtacatgtcaacttcttatcctgttcttaggtgagctctcaaaatgccaaatcagttaccgctgtgcagttcctgaaaaaagaaaaaccgttatgccattgctgacaatacatgatcccaaactgcagcatgttcagcctcttcttcctgcatctcttcatctatgggtgtaacatcttcatgtggagaaagacacgcataaaccacacattcatatttgaattcacgcctactaaagagctcaagtaccg

SEQ ID NO: 185985 - DNA, 429 bp, Zea Mays
aactgaggtgttggacttgaactgttggaaagcaacaccaattcttacaacaccctctggaggtggtacatccaacaaaggcccaccatctgctgtaaccatagctacctcaaatcggatatcatctagttcaatacatttccacaaattagaatcactgactgctctctgtccatttgaagtgctagaagtttcaagtgagagacttaggtgagaagaccaagtagcccacttcatctgactcgcatcaacaggttgatattcccacagaaggaagcaagctggatctctgtcaaggtttagcaatggacacttagttgatggtgactggcagaagtataggtcttccacatgcagtcttgcacccgaaaatgatgattgggggttagtattcttggttccactgcaccttgcgatttcatcagtatc

SEQ ID NO: 185986 - DNA, 503 bp, Zea Mays
gacaccggtgctacctcccacatgacctccaacgccggtaccctatccaatacttcaactccctcccttactgcaccttcttccattattgtcggtgacggctcgcttcttcctgtcatttccactggctccactactttaaatggttctttacatctcaacaatgttcttgtgtcacctaaacttattaagaacctcatttccgttcgccagtttactaccgataataactgttccattgaatttgatccctctggttgctctgtgaaggatctactatctcggaacgtgatcgtcaggtgcaatagctccgggcccctataccccctgtgcctccctgctgcacacagcttcatctccagctccactccgtcactttggcatcgtcgtcttggtcaccctggccacgagtccctctccaagctcgcatcaatcgttccgatgtgtaataaagatgctagctctcctttatgccatgcttgtcagttgagtcgtcatgttcg

SEQ ID NO: 185987 - DNA, 535 bp, Zea Mays
gttggatcagcatgaagttagcagtgttgcaggttttacccgggtggatgttctcatcgtagaacttatccgcaatggtatattttttcctcaggcttatgtcaggcagctaattattagtggaattactgacaagaacgacacaatgttggatgttgaaagaaaaaggaggcatcacagaactttgaagcagcttcctgggtcttctttatttgatattcttgaggaaactaggaccgtggaagagcaacagttatatgagatgatgtcgacatactccagcgagcggcgccttgttctctctgaactttcatgtgatcactcattttatgcaagtggcagaggcgagtatactgcaagttcctgcattcggaagcagagtgatcttccacttgcatcaggaggtgataagcatggaagagtgccagaacaagtagaagatgttaaagccctattgtcaagtctgttgggttttacatatccttccccagtggaatccgaacctcgccaaatcaaaacaagctttcaagaatca

SEQ ID NO: 185988 - DNA, 1048 bp, Zea Mays
acaataaagattgttctttagaagaaatgtccttctgtagtgacaaaagttttgcctcaaggaactccactgttttgctaaactcaaagttcttttttttcgactcatccaattcctgctctttttgcgtaagatgaccatgtaattccaacttctgccttttcagatcagcaattagattctgaagagaactgcactcttcaataagactctcaaccgtagattgtagtttacaattagatcttctcagaacttcagaatcatcttgtgcttcgcacaatcttctttgagattcttgttgtttctgcttaaactggagcctttgagtttccatctctgattgctgacactctactttatctttgagattgatgatgagagatctggagtcatgcaactgcagctcgcttgactccttttcatttgtcacgtaagtcagttgtgtttcaagtccagatatccgttctgacaactcgatgttttcctgttccagctccgatacatgcaactctagttcagctttgcagctctctagctcaactaagttcctctcaagaagtttattggttgaaacatgggaatctatactgctggaaagcacaaggatatctttccgcacttcatccagacatttagatgtgatgctgctttctttaagcgacgcggacaggcgttcctcaagctgactcttctctgcctgaaactcagaaataaaattctgcatctcaaccttggaacgacgaaggtcatcattttcctgtagctgcagttcaaacctagccttaagtgtatctgtctcaggttcagtatcctctagatctgctattctagcttggtacttccatgtcgcaccagattcacaaacttccagttcattagaatgtaaaccatttatctttcttctcagcgcagataactcaagatttctttgttccagctcctcttggcattttcggaacttttcttctagctcacaggtttgagacctaaaatttagcaccttcagctcaaggtcagcacattttctctgtatctcatctgcattaga

SEQ ID NO: 185989 - DNA, 1289 bp, Zea Mays
gtctggcactacaaggatccttctgggaatgttcagggtccatttactcttttgcaactttcaaattggacaagttacttcccacgtgatctgagagtatggcttacatttgagagtgaagagagatcattgctgttgactgaagtgctttcaaaacagcagaaagattttactcaggctgcatcacatacaagtagcaaggcaacactggttggcactggacatacaaggaacaaccctagtgtggatcagaccaatgctttctcccctgttggtcatagcgtggttagttcttctggaatacctgttcagtataataagtattctgttccagaaagggaaagtgtgtactctccagatgatagcttgtcgctgtcaactagttcggttccaccaaaggatgcttatactgtgaatagccaagcacactgccagaataagcattctgttttcattcaatctcctgggagttcatatgggcacacagacttgaaccatgatggaatacagggaggatgctctggtgaatcaaaccaccatcacagcagtagagccctatggagtcctacagtggcacatgtgagttgtggacgtggtaacgtggaatctcatcagaatcagcatgtttcctggtcagaaagtcaacatgaatctaaaaatggttcacaaggaggatttgttaaagatctgaattcaaggcaggatctatcgaaaaacctacctgctcaacgtattgggaaagatgtttccagtcctttgtttgcttggagtccggccgagtcgaggacagcttcaagtcaacaggaagggtcttgcttaagttcaacaactaacccaagctttctcgatgaacttcattcttctattgcttctgcaaagcctaagagctgcgctccagcaacccccattgaagacagaggttctagttcaccatcagatatgctaagtcatgaagaaagagttccaatctgcagtccacaatcagcccctttagcatctgcttctgatatgtgcaagatggaggagatcatgaatcagcaaagaacacttgtggtggatacatcgaatgcttcagttaaccagtctcctgaatcaagggcttttcctgtatcctctcctgataaccaagatattgaccgcgagtttcctagtccagttccaagatctgagaataaggacattgctgtggacagctcagaattagcaccagcgtcacctgaaaatattactacgaatttgcctgtttcagatacatgcaagatggaggaggtagtgagtcaacaacaagt

SEQ ID NO: 185990 - DNA, 514 bp, Zea Mays
gaaaatttgaatatatcataatttcatataataacataaagtcaagcgagcaacaaccaacagagcagaggagtgttgtccactatccactctaggaggcagatgcagaggacacaatgtagagagctagagaagcagaggacggggccctggagtggcggcgaacggtaggacggggccctggaggacggggtgacgagcacaacggacgagaatacgacctaactgcttgggtcctggagcggtggcgcagcggcgacctaggtcctagagtggcggtgcggtggatgtgaggatgagacacgggaggatgaggacctggaggacggggcacggcggatggagtgtgcgtcggccggtgactggagtggcgacgacgacgtcacgtctatgtaggagacaagagtgcatggcggtgaatggagtgcatggtgggtgcatgcaggaatgcaagggctgagagaaggctgcccacattgttaactggattgggcctgaattagctcagcgagag

SEQ ID NO: 185991 - DNA, 614 bp, Zea Mays
tcccagtcagcatgttctcggacaggtcaacctctaccaaacctgccgctcctatcgtcccgttgttgatgacgatgtcgccggagaggttgttggtgtacaggtacagattcgtcagcttctggaggttccatatcccggacggtatgtttccggtgagtccattcatggacaggtcgagccactccatctccgccagctccgcgacatagctcgggatctcgccggtgaggttgcacttggccagccagacggtcgttagcttggtcaagttcttgaacgactccggcagcgtgccggcactgaagggagtcctctcgagcttgagcgtccgaaggttaaccagctggccgagctccggcgggatggtgccggtgagctggcttccgccgagagcgaggtacgtgaggttggtgagcctggacaccgccgccggtatcgcgccggtgaagttgttgtggtccagggcgaggtaggtcaggttggcgccgagccggtcgatgtcggccgggaggtccccggcgagctggttgtgggagaggtcgaggcgcgcgatggcggcgcagttgtagagggacgcagggaagccgccgccgacgctggtgttggacagg

SEQ ID NO: 185992 - DNA, 730 bp, Zea Mays
ttcagctttctcatggaaaactttacttgatctaccatgtccagatcgagggttcaatataacaagtactctttgcggagatttgcatttaatcggtggctggtcaaataaagactcactgaggggattttctgagtcttgattgatactagatgctccaaggcgaggtagtaagttaacatatatactttgttcagcaaagcatgtcacccacaaaatggcctcgtcaagggtagaggctataaagcagaaatctttctgaactctgcatgtctttttaaataaagactttttagttgagtatgcatgcaatgtaaaatgtttgactccagaattatatgatacctgccaaaatataagcagagacaaaatatcagtaaagtgatgaaaaagatctaattaataatacagacacatgttattatctgacttacagagacaacatcctccagtaggagtacagagctgccccagatcagagctttacttgtgagtctagcatcaattgcatcagcttttccgtttgacggtaactgattattatcactcgcacttctatttttcttttgaagaatcagctttccagcatacacttcataacctagaaaattggacctctcatctgccacgtcaattttgtggtcatgttttttcccttttttagcctctttgtcgtcaataaccaagtgtttctgccttgaagatttcgatttgcttcttttctcttgag

SEQ ID NO: 185993 - DNA, 548 bp, Zea Mays
attttggacaatattttgaaccagcccagcagttgttccgagatgcgtgtcattgttaaagagatatcttatccggtaagtggattgcttcttgtctcttatttcagttggtgaaatttgtttgcactaaaacaatcaaggattttgtcttcaggtacattccaagggtgcaaactctgcgacaaattgatctgttttgtgcgaatacgattgcaaaatgtgaaccgatggcaaataatagagcagcatcttttgccaagaataatgtatcagcagcagctgcaataaattcttcatcccttgccccaccaatatccaactttgcttcagcatctcttgtgaagtctttaaactatgttcgctcattggttgcaaggcatactccaaagttgtcattccaatcaatagtcgcggcaaagcagtcacttccttcactttcatcatttctgaataggtccttactttctcaactaactccagaagttattagcaacagagaacatcttgaatcgaaggaatgccatagctcacctgattttatatcatca

SEQ ID NO: 185994 - DNA, 694 bp, Zea Mays
cgttgtgcacctacagtacagcttcatgtcttggaagaaatgtgggagttgatggaggcgccatctgaaacagcacctattaatgttgagtgcactgcttcaggagaattgttgtccttgtctctctcagccgtctctggtaatccctctcgccacaccttatagttgttaggggagtgccagggccatattgtggtgatgctaattgattcgggcagttcccactcgtttgtcagttccaacttggcagcgaagatgataggagttactttactaccacaacctgtcacagttcacgtagctaatgggggcaaggttccttgtacacaagtgttcaaatcagctggctggtcagtgcagggctataaatttttcacagattttcgagtatttcccctattaacttacgatgtggtgctcggaatggactggctggaacagttctgtcccatgaagattcattggagggagaagtggttgtctcttccttaccagggccgctcaatagtgcttcagggcaaatttcagcatccacctaatcaagacctgtttcatgtggtgtatcttctgaattcagtggacaatgattcttcagaaacaccagtggatccccgcattgcatctgttttacaacagtttcagaccttgtttgaggctcctcaaggcttgccaccaactcgttcctgtgaccact

SEQ ID NO: 185995 - DNA, 725 bp, Zea Mays
cagaaactgacgttgatagtcttcaacggtgccggtgcgccgaaggtccttgagatcagccataccgttggtccgtagaggtggtccaaaccgcatatgggtgaactcaacgaagcgggaccaagtgaggacaccgcccgtgtcccgctctagagcgtagaaccattctgctaccacaccgtccaaatggagtgatgcctgccacaccttctcatcgggtggagtcctcatgcccctaaagtaagtctcacatttattgatccacgacagggggtcagactcaccatcgtagtggggaaaggagacattgggtcttcgatagccaccatcgtcgacgcggtcacgaagagcagatcctgtgctatgcatgaccccgacaggcgctgcggtacgtgggccggtttctgaagattccggcagctgctcgtcgattgggcgcttctccaaaagcgtgatccgttgtccatgcaggtcgaggcgtgagttgatggtggagagctacgccaatatctgatccaacttggctgagtcggaggaggtcttcgcaggatcgtgaccaacgccggacatgttggtcgatgcgtcggaggagtctgagacggctactgcggcgtggcacaaaatcaagagggagtcgcttggttctcttcgtcatagctgggggaggtagtaggtagcttacttctttggttacctcggccacaaatgcttggacaggggtgctt

SEQ ID NO: 185996 - DNA, 556 bp, Zea Mays
atatctccacaccattcagaagtgcatcagcacctgaagcgctggccatggagtcagggcctagctgaagccaaagtgtgtctgcctgctgcgtcgagttgtcaaagaagtcctcatgatatgctttgttaattcccccagccctagcatacacatcgtagctctcagcagcagtcttgttattgatgtagatcttgaagatcctctggctgggcttgtcatagacaagctcacagaaatgaaggcgtactaagtaatcaaagtttgggtggacatagaaccgccacgacacgttgaaccgcttgtccacaaccatgttattgcccatgattcttgcggtctcgtaaacatcaatcggcgcaattgtcgactcgttgcttgatacatacactatgcttgaagcattagacacagtctgagcagcatttgtagaaaacatgaacgcttcgtcagtgtaccatggcctgtggagatactgatcactgggcgatttaagtgcaggacctccaatgttcagccggtacattgtctcaacacctctgcccctcaaaccaag

SEQ ID NO: 185997 - DNA, 552 bp, Zea Mays
ggcagcttctgactcaaatagcgtttcaagcagctttcgtgatgataatggttttgtgatgaatgaagaactcccttctgtttctgaatcatcggatatgcaccacgatgaacaagttctggctaatttaatggaatccatgaagttgcatggattcaacggacagattcaattgccaatgcaaataccttctcatttgtctgtagcgcatccccctttactggctccaacaacttattcacaaaagcatttggctggggttccaccagctaacttaattgggacaccatggttgcccaatatgcagttcctgcatggatttgttccacctatggcccattacatacacaatccaaattttgcaccaaacatcgaggatggtactgagactgaaaaacctaatacatcagatgtgaatcatgatgctggcaaaacttggcaagagtatggtgttgggttttctagacattttgatcctgaagcaagagatcctcacttctatggtattgatggcaaggagcattcctctttgcctaatggtgtaccaggtgc

SEQ ID NO: 185998 - DNA, 465 bp, Zea Mays
catactggatcatatgatgtggtatctccgtaccatgtcatatagatacgggtacagaaaccttacttgagtaccagtgatacatagataataatagtataaccttgcatcgtgaaaagaatgtgctatcaggagcaagctctggaccaataacagcaactattgcattaataagatgaccaattccttgtcgaagatcaacatatccattttcttccaagaggagaatctccatagcaaggaaaagtgtcccctgtgtaacaagatatcaaagcatccattaaaaatttgcaatcaacaatggaagcacatgatattgcatgcttaccccacaaataagaaacaaaaagtgacatcaagaaaatattaagataatgagctttcaaatttgtatgctggcaaagcacaaaagatgtgtgcctcttttagtttcatggaatgatgcctttgattaaataccatatg

SEQ ID NO: 185999 - DNA, 417 bp, Zea Mays
gcaggcttttgcttcgggaggcagtgtcttgtcttccctcattgacgtcgagctccgtggtatccctgctcacctttggggactggagacagcggaggttttgcttggtccttattgcctggttcagggactacacccggattctatcagcggggaggacttgtcggtcatcaggttgagtgcatggtgccgctctcccgtggagttgccgaaggtgttggaccttcatgctgtggagccagcggtccccgatgaagacggagtttggattccacgttcgttggtgttccctgtgttggtgaagattattgggccggagggtgtccttgtggaggagcagctgcagccacctccatcggatccctctgatgatgagccggggccgagtcgtcgggctcggcgggtgcagagactggg

SEQ ID NO: 186000 - DNA, 289 bp, Zea Mays
cctgagcaaagcattttgcaactcagatgacaccgaaacatttgcagctgtcagcagtgcagcatccacagctgaaggaacaaattcaagttctgtacaatgcacaatgtcctcaacaaggccaccaaacttaagaacctcaactcttcctgactcaaactgactgaggacagagaaagtatgcattatgttggtgactattcttgcagctggttcatttgccggtgttgtgggctgaacaatgcacatacagcgagaaagaagtgttgccaacaaggggataccacca

SEQ ID NO: 186001 - DNA, 485 bp, Zea Mays
tggtgatcctggatgacttctctcactacctctggacttttcccctccgtcgtaagtctgacacctttcccaccctctctcattttttcgcttgggtgttaactcagttccattgcaccatctgggttgttcagtgtgacaacgggcgggagttcgataactccacgtctcgtgccttcctctcacgcggcgtccaacagcggatatcatatccctacaccttccctcagaacgacaaggacgagcacatgagttgcaccatcaccaacctcatttgtactctcctgtttttggtctcattccttgcttgttactgggctgatggtctccacactgccacctacctcctgaactacctcccctccaaggctttcagtcatctcacacccttcaccctcttcggcaccgccccttcatgttcgtacctccgtatctttcgctgcacctactatcctaacacctctgccacgactccccacaaactc

SEQ ID NO: 186002 - DNA, 862 bp, Zea Mays
gaggtacaaacgctggttgtggtggaccagatttggtatggcagttggtgcattgcagttggttgcagcaatttatctcatgtttgtcattgtaagagatctctcaaatgaaagaagatccacttcctgcttctttggtatgttggtcgccattctgagctatttatttcctaactttgtacataattttttacaagttcttgtttgctggtagtttacaatcacatgaacttcatacatatacaacgacacacataaagtgggaaaaactttcgagcacccttttcttgaagttccatatgaaatttttttagtgaatgtaccacaaacatgctaactactctcactttgagcagattttgcttcaataaatgcactgaaacatagttaattaacacaatctagtaacaactcttaagagtatacacatttcattatactatcctaaggttttattttctgctgtgctaatccactcatctacttgggattgaataagtcgtttggatggtttataatctaggacaggataaagctgatcgggtgtcagtacgagcacttattgctttatttcttatcctttcatgggttgtgatcattgtccaatgcttcacgggttctgatatattgaggtggcgatcattttatgcaacacatgatatggcatggaaagctcattacagggaagtgttcgaccatggaatccgagaagctttgtgctgcctaggacgtgcaaaatatctgtaggtggcagtccaatgattttacaccttggaactccaatattagtttagttatttgagctgataattatatttactaatttagaactgtattggaagaagatgaggtttattctgtt

SEQ ID NO: 186003 - DNA, 384 bp, Zea Mays
ccgaaccccacctagccagaaacaacatctggagcaggggcagggacagagcgtttgtcagctgacagacaccccaacactaaaacagaaaaactaaaccacccgactttgagctaggaggtaagaaaaacccttagccccagccaaagaccacaagaaaacttcctcccgggccagccgaacggccaccaccaagtttggatgggaaccattgaagacaacaccatttctatgcttccacaacatccaagcgtctaaagcgaccaaggagtcaaagcccttcttactcagcccacccagccgagcactattgaaacaccaccagtgatcaaaatcatctatatcctgtcctagaaggaagtcctgcaaaccaaaaggcctgag

SEQ ID NO: 186004 - DNA, 564 bp, Zea Mays
cagtgcaatcggtttatccctggaggatggactggagtatgctcttaggaagcatcgcgcaactcaacctatggattctgtggaccaggatggccacttgagatttatgacaaattctagagctgtagacatttccgtaagtgcttcaataggaaaggagatagatcattgtggaaagaatgataagatagatgtcctcagccctctcgagagaagggttatgaactggcactttgcacatttagagtatggttgtgctgcaacgctgaaatctgtatcccttccatactggaaccaggacgatgtatacggaggattcggaggtgctcattgcatgatcaaaggtggctatgacactgttctacggagccttgctaaaggacttgatattaggttaaatcatgttgtcactgaagtactgtatggatctgaggagttaggtgatagctgtaaggatgggaaatatgtcaaggtttccacttcaactggaagtgaatttactggagatgctgtgttgataactatccctcttggttgcttgaaagcagataccatcaatttttc

SEQ ID NO: 186005 - DNA, 532 bp, Zea Mays
cccacgcgctcgcctatctcatagtccttccccattccgcctctctagctggcctgtcgaggaccctcgccatcctccccaggcgcaccaccaaacggtccaaacccccagcggcggcgctaggatttgagtctcagcgcgccggcaccgccaccgccaccggcggtgatggcagggcaggagcgtaggacaatcgatctggaggagggatgggcgtttatgcagaagggtatcaccaagctgaagaacatcctcgagggcaagcccgagcctcagttcagctccgaggactacatgatgctctacacgtgcgcctccttctccccttactcctcctcgccgccaccgtctcctgcgcagcggccgcttggtttcacaccgcgatccgcctcgatccggttctgatctaggttttggtcctcttgtcgcaggacgatatacaacatgtgcacgcagaagccgccgcacgactactcgcagcagctctacgacaagtatcgggagtcgttcgaggagtatatcacctccatgg

SEQ ID NO: 186006 - DNA, 528 bp, Zea Mays
agaagagagttctgggaaagctactctctcccgttgcgctgaggaaaagtgatccaagcgtagtgggagtttctttgggccagagaatgaaacaacaaaattcaaagcaacaactgaagaactattctctgagcttgaaagatgatagcactaaatcaagtgaacagaagaatctgaaaaaaagattgcttgagcataaagggtcatcagagagtttgtcaaagaaggcacaactgaaagctgttgatcagcaagccacatctggccctgtgctcaacaagcttgaaaagaagccaagaggaggacccctcaacaaacataagcaggatctcaggaacaagataaaacatgtgcttttagataatgggtggaaaattgacctaaggcagaggaaaaacaaagattatgaagactcagtctatgtttctcctaccgggactggctattggtcaatcactaaggcttatgcagttttccaagaacagtttcaaaatatgggtcgctcatctaaacttaataatactaaac

SEQ ID NO: 186007 - DNA, 621 bp, Zea Mays
agaagctaatttgctgcaacataatgtcccaagggacagtgatctgagtcctcttggcttactttggtctgagctggaaggacgtccaaaacaacctctctcatctaatgtacttagtgtaaatgaacgtagaaatcccaagcctacaacacccaaggacattccacctgtaaacatgagacaagggccacttagcagaatgaatgaagtttctagtgtgcgcgatgagtggcctgcaaactttggtcggctggacaacatgaatgatgcaaacatttctggcagaatccatcaggttgaagcggagcatcatttgaattttgatgggcacctgctgcttcaacagatccgacgggagcaacagcaacagcggcaggagcaattgatggcccataataatttagagttttctggtgcatttcccgggcaggtgtttgatcctttgaaccaacaccgacagcctatgaatcaacagattcctgatgtggagcatcttttgagaatccagtttgaacttgagcaacagcagcaacgccaactccaacaagagcagcaccaacggcagctacagcagcaacggcaagcccagcttttgcaacggcagcagcagcagcagcagca

SEQ ID NO: 186008 - DNA, 271 bp, Zea Mays
ctgccctttaaaatcgcccctcttccgtctcataccttctttctcttagttgtatcctcttctttggctcgcgagtttgtaacctcatcctttgttgtgcttttgcttcttattgcctttacccttctcatctctcaatcttaccttggtgattatgctatgttcgttatctaaaacctccaatctcccaccttagttcaagcgtggtctcttacttatctcacccgtggttatatcctatactttacctcttgcaagacttatcttattt

SEQ ID NO: 186009 - DNA, 352 bp, Zea Mays
gccaagcgtgagggtgaaggaaccatggtcgaggatgttgtcttggatatagttgtgatcaatgtagcagttgagtcaactaatgtcaaggtataggcacaatgatgcgtcgtggggttgatggaaatgcgttcaggaagttgtcgtggaagagggcgatggcgaggtcgacgtagtcagggccgtcgaagacggggacacaactgagagagttcatgtagtcaagctgccaaggatgaagcgtgcgttggggtagccaggctcgataacacgttgtggatgaaagtacgaacctatcgtgatttcgatcccacaacaagtagatttgtagattaggtgtgggtcagcgcgt

SEQ ID NO: 186010 - DNA, 394 bp, Zea Mays
gatggcagagcaagcggcgaaggatcgtgatgtcatggcgcgacaaattgatgaaacagggaagagggtggcggccttgactttggaacggatggctgagcagatggaacagtttggggaaccttctcctaaaccatattcaaggcctggaggggtaccttctctacaccagtggatgagtatgtagagtttgttgagttacgctattccactgctatgcacaatcctaagttggatgagattttctttgtgcaacagtttgtgaagggtctcaaatctgagattcggggttcggtgttgtgtcaagtgccaactacggtgaatcgtgttgtgctattggcaaagttgcactctgaagttttggatcaaggtagaggttgacctcaacgaggtg

SEQ ID NO: 186011 - DNA, 380 bp, Zea Mays
tctaccgaggccgagcacatggagccaacaactacaaaatcataaggtatgctagcagccatttagccaatgctcggacttcaccccaccccccaccttcacgatccatagcctcgaggaggaagaggagacaggggcaccaatgaggttcgatgcctatgagagggggtgcacgatgtgagatgagacacccaagcagtcaaactaaacactattgtccaatcccctcttcctattagcatgcaaagatttaatttgatgtaatgtttcaatttgtactacatttttactagctttgcagatgcttcagacggttatggtcagtgacttttttcttttcagatttgttagaatacacacagaaatttggatctgtctcc

SEQ ID NO: 186012 - DNA, 415 bp, Zea Mays
tcatgctgctcccgcccaaaacgatcatgaataagcccacaaaattcgtcccaagacatgtgacgcagcctgcgctccaccgactgcaaccatcagtgagccttgccctcaaactgcatggacgccactttgacccacatgtggtaatctatatcatacatctcaaaataattctctgactgcacacgccatagttgggggtgcgatccgtcaaaacggggaaaactgatctgcggcaaacgcccacccctcgatctcccagtatcgcgcatgggttcatatggataatagcactctgggagaaaaccagagagatgggtagggtgaggtgggtgcgtacccttgaccgggccgtgaatcggggtaaattcatacccggactcactctcccggtggtatgaatcgacgtggtggc

SEQ ID NO: 186013 - DNA, 289 bp, Zea Mays
aagctcgtcttgtggctcgtggtttccaacagactcaaggacttgattatgatgagacttttgcacctgttgcgcatatgactattgttcgaaccttgattgcagttgcagtctcatcttcttggactatctcccagatggatgtcaagaatgcttttctcaatgatgatctacatgaagaagtttatatgcatcctcctccgggggttgatactccatcaggcacgtttgtcgtctccgtcgcgcattgtatgggctgaaacaagctcctcgtgcttggtttgagaga

SEQ ID NO: 186014 - DNA, 457 bp, Zea Mays
ggacgttccaagtcccagcgctggtgtgaagacgttaatggtggtgactcgtcgggaggatcctcccttgcttctcgttcttataaagaagctctccttcacccttctggatatgctggtctcgcccctgctcctccccctcccctcttgaagacgaaggctggtggccagttggaggtgcaaggatcgtgtgctgatagtcgacgtcgaaaggaggacggctggcgggtggttgagcacaggaggcgccatcttcctcgtcgaggatccatagtggatctccgagggaagtgctacaagtgcctatccacctcccacctggtagctttctgccgacgtcctacgaggtgctatcgctgcttcaagtttggccatcaagcggcaaggtgctccttgccggaagctgggcgaaagtcggtgtggcagcgtttgggctctagtggcgatcgtactccgg

SEQ ID NO: 186015 - DNA, 452 bp, Zea Mays
ccggtccagctttgtaaaacggcatgacagaatagtcaacacacaggatcaacccttgctgagtggatttaagggactgctgggttcctttcatagctacagcaccctgcccaatgtctatactgctgcttggtgagtaaaatcctctaccaaggataatcttgttccatcttgaggcctcacgcacaacaacatcaaggccctgcaagacctctctaggcacaggtaaatctgagagttgacttaatggcagctgcttcttcaaatctactgatacaatgtaggtctttgatcgaactctcacacgaaataaacctgcaggcagttcagcagaagtatacagatttcttccaccatcataagcaacacatgaggaaagacgccgtaaactgctttccctgaagagctcatccttgacagagagaaattctgccttggatagctctttgccc

SEQ ID NO: 186016 - DNA, 463 bp, Zea Mays
gttaccatgaagatgtgaggatcagtttgggcttgagtcccaaagattttttgattgctattgttggtactccgttttcatatggtgataatttgatggaagaggcacttgtcttgcaagcagtaagtcctttgttacggagatatcactctgagaatagcgcacaatctgaattgaaagtaaagatcttcactgggaacataactgagaagcataggatggcccttgaggttatatattttgtcttcatccctgtctggtcatgtgaattgttatttacagtctgattgctttaaattgtatctaactttgtattagttttcgggttcatgatagtctgttgctctaagtgttggcttcccaagaggtgcagcggagcatgttgctgctgaagataaggacatcctccttcgtacagctgaccttgttatatattattcttgtcttgaggagcaattattcc

SEQ ID NO: 186017 - DNA, 640 bp, Zea Mays
gtaactggagaggttgtaggggtaggtgaccattggctagggctcgaaccttgccatgaggacgcacatgcgggagagagagagagcaggaaaggcacacaggagaagcctagcaacaattttgttgctttgcttgatttcctcaaccattgcttaggaatatttatcccttcctaatacacaccaatctaggaaataaaccaatccttaaacttgtcgctaagtgtcaacccggtccataaacttttaaagtgtgctaacccggtccttaaacgatgtttgggtctcaattacatccaaacagcgtttatggaaaagagagaagagatacatgctgacatgtggggttcatatgtcaaccacgactcgtatggatgtaattgagacccaaacagtgtttagggaccgagttgacactctttaaaagtttatggacccggttaacactgagcaacaagtttaaagaccgaaaatatattttacccattgaaaaatgaaccaatcaaggataattgggcttggccttgttgcctagccatcgatgtgttggtgtcgtacgttgctacttgacattggactatatttagtactaggtgaaaaaaacacacatcttcaaataataaatattggcacatcaata

SEQ ID NO: 186018 - DNA, 653 bp, Zea Mays
ctttttctagattgcctacacttactctgcgtctcattgatatttctggaaggaaagagaagaggcgccttctttcacgttcacatctggaaaggggtgagaagcaactctatgatataaaacacgatgaattggttgagggatacactatagcgtctggattaaattttaagggattaggacttctatcatctgttggacatggtggacggtttggatctgtgaaagaattgtcgcctcttggcgatatggttagtttggatcttcttttcttctttttcttgttttctaccactacaattaaatagtactgattccatattcaggatggagcagttgatctttctgcctatgatgatgatggaaaatgcatgcatattcttctttgttcaaagccatcctcgtatcaagctgttccaacaaaggtagctgcatgttaatctacaacttcatattaaagtgtcaatcagttgacttcatgttatgcaacaacaggttatccatgtacgcccgtatataacattcacaaacagggccggacaagatttgtacttaaaacttagtattgaggatgagccaaaggtcttacatgcatatgactggagggtttcctttatgtactccaaggggactactgacaaactgcaggtact

SEQ ID NO: 186019 - DNA, 340 bp, Zea Mays
gcatcataataggggtttcacacacccagtaagctaccaacacacatagctagaaatataacatggttcatacatggcatcaaccacagtatcataataggggtttcatacatagtactccgtcctaaaccccatacatcgcctcaaacagcaattacatggttccacccaatatgtcatcattaggaggttgagctctcttcttggatgtaatctttttaacccccaccctttgtggtgcttgtgaggaccgaggaggatgcttcaacatcgccaagtggtgtgcttggtccttcttcagacgggaaccatctttgaatgttctttcactgctttcttg

SEQ ID NO: 186020 - DNA, 611 bp, Zea Mays
aagcttcatgctattacttcgggcggtgatggttctggtcatgtgcagcagggatcccctcctttttgaagacccccccccattcgagtaggagaaggggagaacatggtcattcgggacgtctctcagttcatgaacgtttgggcccaagagatgagaacatgcagcagcggaacattagctcggaggtggcagtttcagatttaagaactttggaatctgatggggggaccttgtctcctaggctgttagagatgactgatgacagggttcttgtttcaccggtgaaggcgaagcagctgaaagtttactttcgtcaaagattcaagaatgtcctgaacctggaggaagctggagctcccaattctgtcactgtgcttcctccatcccccacagacgtggcagctgctgacacggctccatctgagtatcctgtttcagatgttgacgctgtgttggcaactccgtctggaacgttaccttcctccctgtcagatgtggcagcagcacacgcggctccgtcggaggctagtgccttagacgttgatgctgagttggctgctccatctgaggaggacattccagcaacaacacatgctgagttggttgct

SEQ ID NO: 186021 - DNA, 1012 bp, Zea Mays
gtgcaacactagggaaggtgtggcatcctggctattagatcctgaataccgtaggtagcagcccctgataactatactaaagtagctgatcctagatgctatataggactgcactacctgctatgcttgacagaatttcgatacatatcctcttgtaggaggatggaaagaagcctacagatagtaattacaaattatagtaataatttgacaaggaccaagaagaatacatatacctgttgatcaataatcacaagatccaaatgtttgattggatcatcatcatttttgccatgaaattcccaaactcttgatatccgaacacaaatgatatagtggtagacccctggtcgaacttgtgatagtggtgtaatgtccatctgcaaatacaatttgttaaaaatagtatcaatttatgttgccatggctctcaatagattgtagtacttctttatacacaatattttctgttattgttccacatgaaccgtcgtcattttctatcaatattttgagccctttcttttctgtaactcgtgacacagctaaatatagttgaccgtgtgtaaacacctttttctttaaatataaccctacatttgatagtgtttgtccttgacttttatttatagtcatagagtagcaaaccttgattggaaattggcgttgacataatgtaaaaggccatttattgcccttagttgtcagattaatgcggggtatatgtattttttcgccaacgtgtgtacctgttattattgttccttctataattgtgtctcctagttgagttataataattctggttccattgcatagtcctaaactttgatttaaatttcgtagaagcattacaggagtgccaattttaagttttagtctatgagaagggaaattgtttgcgtttaaagtgtttagatactcaatagggtataaaatattggcatcatttggagcatctgtgcatttagatatgctatctgcactatagtattctctctctactgttggc

SEQ ID NO: 186022 - DNA, 300 bp, Zea Mays
cacgctcacgcgcccctccccccgccgccaacgcccacgctgcgagcgcgaatccatcttctctacctcctcgtccattcctagggttcctcctctgccgaatcgcggggaactctgcgggcccaatttggtagggtaatctcctaccaggaggtcaaattccagtcaacgccgcttggttttgtagccgaccggtcgatttgaatccaggggcaccgattggctgggtgagagggcaggctcgatttgaacccgcctctgcccttttcgtggaagttttgggtcttattaggcgcggat

SEQ ID NO: 186023 - DNA, 626 bp, Zea Mays
gtttgcccacccaatgatgctgagggatggtggctaggcgctggttgaggaggcacttgaggctgtagtggtccgtcttgacgacgaagaggcgccccccacaggtacgacctctaatgccgcacgacaagcacaagcccgatgagttcccgctcatatgccgctaaagagcgatggcggggtgccatcggtcggcttaagaaggcaatcggatgagcctcctgtatgagtacgaccccgaagccatgggtcgacgcgtcgcactcgacgacgaaagacttggtgaagtccagtaatgttagcattggtggggacgtcacagcccctttgagggcgctgaaagcggaggtcgcgtcgtcggaccatgcgaacccctccttgaggagggccgtgaggggtgctgtagtggcgccatagttgtggacgaacttacggtagtagcccgccaaaccgaggaatccacgcacggtctgtgctgaccgtggttgaggccagtcgtggatggcctggacctttgcagggtccatagcgacgccctccgccgagatgacgtggcccaggtaggcgacggagtcgacgccaaatgagcactagtacctcttcacaaagaggcggtgctggcgcag

SEQ ID NO: 186024 - DNA, 445 bp, Zea Mays
gccgagtctgtggcgcaggcattcttcaccgacatcgtccgtctccacggcattccccagtcgatcgtctctgaccgggactcggtgttcacctccaacttctggagcaagctgatgcgcttgagcggtaccaagctatagatgaccacgacatttcatccccagtcagacggccagtccgaatcggtgaacaaggtcatcatcatgtatctcaggtgcttgacgggagatcgaccccacgactggctgcgctggctcccatgggcggaatatatcttcaacaccgctttttagtcatccctgcgcgacacgtcgttccgcgtcgtctatggctatgaccctccctcactgtgctcctacgagcagggggcaacgcgggtgcctgcggtggccaggactttggaggagcgcgcagagttcctggcagatatccgtcaccggctgg

SEQ ID NO: 186025 - DNA, 660 bp, Zea Mays
cagaaatcggataggagcagcatgtttggctttaatgattctcaagttccagaaagtcctgttggggtgttttcttctgagtcattatacatggccacaacttcagaagccactggtgttgagcagagtaatggtccttcaaaagtgcttagatcgattcctacatggtcttcaaaaactcatcttcagagcagtgtcataccaaaagtacctagatcagctgctgctcttgcaaagagaaaaattaaggagattgggaggagagaagctaccaaactagataattatgatgtagtgaggaatcccacttcagtgaaaagatttgaagctaggactctttccttctccactgcagggccaagcaatggaccaaacaggtcagcatctacatcaaagaagatccggaagcaccgatctccgttgaggactggcaagcgtgcattttcaccttctagtactagattagttcatggctttggtgacgagcatgaacctgagaccagacatgtaaataagaaattcaggattactagtaatgaggctcccaagaagtttttgaagcatactgaagaggatactgcagataatgacttctcttttgcaagtgacatgccagtatcgggacaacagaatgatcaatatgatgttgcacaggaaaca

SEQ ID NO: 186026 - DNA, 352 bp, Zea Mays
atctccatctgtactttgttttcctgatgaattgtccatttttccttcaatagttgaatcactgacttgatcattttcagaaatagatgcttcaataactgaaccatgttgatgaatcgtctcctccaagttaacggaattccactgttgtactaactctgctataaacttgagcagggcaatgcaaaattcctcctggtcacttatttcaaaatccggttgattgttgtaaactctcaagtatacattaccaacgatcaattctttggataaagcttcataggtgaaagactgtgattctgtcaaatcatatgaaccatcagggccttgactagcacgctgctggtctaca

SEQ ID NO: 186027 - DNA, 337 bp, Zea Mays
ctcccatatccattacctatctcactcatatttcaaactccactgagtatatgcatatgcataatctactaaaaatagaatacaatgatggccaatatggtctaaaatttgaggcaccaatcaaggccgtgttcagttgcatgtgcattagagaagattgaagaaaattaaattcttttctattcaattttgactagcctcaaattctcttcaatccactcctaaccaccctaagagcttgtttgatttgagggtaattccaaaaagaattcgagtttaaaaactagtcctaatagaaatgcagaactcgcccattctaccgtttcaatctgtaaac

SEQ ID NO: 186028 - DNA, 573 bp, Zea Mays
caaattgcagcgctatggtgaacgaaaagagatgagagtgggtgcgatagcttgcggattacatggcgcaaccggcctggccctcaatttatagaagggcaaagcggtggccacgaatttgaggaggacgcgcggcggccggaatgacagggtgagtcatcggcgcggctgacagtggcacttaccggttgagaagctacagcggtcatcgtcgagctagggcggcaagtgacgacgtgtttaacgggtggaaacgtggcaccatcgcggcgcagaacggcaactccggcgatggccacgaagccacgtcgccggcgtaaaaggtgaagacagcagggctacagtagttcatacccatcggcaaggagatctttccaaggtcaacaaaatccattcccccgcgacacgaatcccatcgcccaacccagctccggtcacgcggaccatcggcgttgagctgtccgagctggcatcctcatccgtgtactgtaccatggggaaaattcagtccaatgcacctgacagccacatttgaagccaagttttctctcaattttgaatggcaacataacc

SEQ ID NO: 186029 - DNA, 426 bp, Zea Mays
cagataacatctccacttctctactgccattaatattgcaagaaattccttctcataagttgacagttggctgttcttcactcctaaagctttactataaaaagccacaggatgtcccttttgcgacaacactgctccaatgccagtgtcacaagcgtcagtttcaatgacaaatgtctcactgaaattaggtaaggcaagaacaggagtggtaatcatagcatccttcaaagcctcaaaggcagtttgtgctgatggtggccatccaaactgtttttgttgcagcagtaccgtcagaggttttgccagtatcccataccccttgacaaacttcctgtaatagcctgtgagtcccaaaaatcctctaagttccgtgtgtgactttggagtaggccaccttctcattgattctgtcttagaagggtc

SEQ ID NO: 186030 - DNA, 521 bp, Zea Mays
caatgatccacgccgatgtggttgtcgccggcttcacagaggaaggtactccatttgccgaggactactacataagtgactacactgagtgcaagcttgggaaggaggactctccagtgtctggggtttgcccagataaggtctatgagggcgggagcaacgattcaatcctggtgtatgggcaccgccaggatggagtgtcctttgtcaggtatgcgaggaagcttgatgctgaggatgccaagtatgatgtgccagtgggtgccacggaggagatggtggtgctttgggccattggtaggttgcggccaccagacacaatgcgcccacactacctcccacagaaccatggggggccaagggacacgacctttgggtttgcccggttgaatttgtcggagacggtggacaattgccttggaccgttggatgcggataataaggaggatcaggagaggatcattgcagatcgcaagacaccacttgtggtgacatctgctccagccgtgcgctacccgaac

SEQ ID NO: 186031 - DNA, 395 bp, Zea Mays
gggggcaagttttccacaccaaagaataatggccaaaaactgttgaacctgtgaagaccttcataggctgatttggtcgagtatttgccatccctagctaaactgaatatatgcttatcttctacttcaggctgtaccaccacttctgataacaattcacacaactgcaagtaatccactaatgctccaactgaaagagcccctttgatgtcagaaatccattttctgttggttaatgcctcaagaacagttctattatttgcaattctttttggtataattgcaaaacctaggagccagatcactcactctttgacccaagagccatttgtctatccagaacagagtgcgggctccattccccacatctgaaatcaagacagtggagaaaaaag

SEQ ID NO: 186032 - DNA, 463 bp, Zea Mays
gcctgaggtagagtgctgaacatgcatgccgaggaaatggtgaagtctgccaagatccttcgtaggaaattattgctggagggcactgatacgtcgtagtgttggcagggaggaggcagtgagcacaatatcatccacatacagaagaaggtaggccatgtctgcacccttgtgatagacaaacaaggacgtatttgttttacctcaatgaaaccgagctgcagaaggtgagaagcgaatctgttgtaccatgcacggggggcttgcttgagtccataaagagagcggttgagacggcatacataatctagatgagtggagtcttcgaaaccagtgggctgagcacagatgacaatttcagataatgtgtcatgaagaaaagcattactgacatccaactgatgaataggccatcctcgtgaaagagccaatgagagcactgtccgaactatagcagtttttg

SEQ ID NO: 186033 - DNA, 341 bp, Zea Mays
aaaacattcggcagccgagtcaaccgagaacacgagccatccacccaccctgtcccttccccggctttcccccgtcctcggctccaccaattgctctcgcgtcagtggaaggaaaaaccaagggcgagggagggaggagcgcatctccgccccgcccgcgttcccgtaccccgatccgccacatgatctgacaccgcattgccgccgaggtgacccctcccgcccccagaatggaggcgctcaacgagctctgcgacctggtggccgcgcacccggatctcctcctcgccgacaagcttgcatggctctcctcccgctgcgccgccgccccgggtgccgcc

SEQ ID NO: 186034 - DNA, 370 bp, Zea Mays
ttagctggtgacctaccaaactttgtcaaagatgatgagaaaatcactttcaaacgactgcttttaaataaatgccaagaagaatttgaaagaggagaaagagagcaggctgaagcaaataaagcagaagaagagggtggagctaaacaatctgaaggcgagagagaggaaaaacggattcgagcacggagacgcatgctaggaaatattcggttaattggtgaattgtacaaaaagaaaatgctgaccgagagaataatgcatgaatgcataaataaactgctaggtgagtatcaaaacccagatgaggaagacctagaggctttgtgcaaattaatgagcacgatcggggagatgatagatcatccca

SEQ ID NO: 186035 - DNA, 566 bp, Zea Mays
tggagcttgaaagtgcaaagatactgctttctgagaaagaagttgccataaaaattttggaggataagctttcattatgtcaatctgaattggattccaaggaaaagaagctgaatgatgtagaggtgataatagttccaactttcatgactaatatattaactaattcgctgtagtacttatatttttttgtcctattgtaggcgtcccttaaatctgagattgacaagcataagaagattaatttaaacttaaaggtttggttttttttcacttagttgcaatattgaatttctattttctattttgtttattcatgtgtcttctcccattttaaatgttccagagaaagcatgacaatttgatgaaggagaagggagagattgctaaagaaaatcaaagccttgtaaagcagatggaggatcttaaatcaagtacttccacgctgttccttgttccgttgcatcttattctttcccacttgagcaaacttttgaatagtttcatactagttgctgcaaatctaataatatactttagcagctcagaagacaacatctgaaaca

SEQ ID NO: 186036 - DNA, 685 bp, Zea Mays
tccgtgtgccggcccccaaacatttgttctgccgctatggagcacctcttgtgtcgacccctagggcaactcttctagcccccggggcacttgtttcgcccctcgaggcacctcatgcctcggtccctgggacacctcctgtgttgccccctaggccatctcttcctacctatggggcaactctttagaccctcgaggcacgtattccgccccagggcacctgtgctttgggaacttcccattggggtctcttgtaggcgtgcactgcatagcgccaccgtcactgaccgtctccactggtcatcgttgcgaccactcttaggtctcgacacctgctaaactacaccatggtatctaggtggttgtgcacatgcaactccatcgtttggatggtgcccgtctaagatccacgtctccattggaacatcgacatctgcatccatggccaccaacacagctcgggaaaattgcttttttaggtcacactgctgctcaccaaaataccccggcattcgttgcactcgttagaattaatatatatgctcttgtgctaggatagtatagatgagcctttagacttctagatagtccgctgttgctgacaagctagctagcagcagtagtcggccaccaatagttgccaggcactgtagcaaccggacagctctagcaaaggtggttactg

SEQ ID NO: 186037 - DNA, 442 bp, Zea Mays
gtttgtcccaatggtaaatttgtcctaaaccactttgccaaccgtgtacgcccacctgcccccgtaggtaactgagtacagacaagtattctccttctccatgcagttagcaaactcgagaccaagggaatccttgactacaagacattctcttgttttgcagcccgcacggtgaaatgttgttgatctactagggtcaaagatctgacccgccttggtagcttgttcatggcaatgtggctggcatgactggcactgtacccaagaaagtgtcgatcctgtgtcgatcccgacaaggttcataccaagtggcgtgccgatgttgatggacatcaaaaatagaaaactgttaatgcttctatcctctgtcacattgatagatatgcctgctttcatctcgtcattagaagtgcccttagaaccaacacatggatgattccta

SEQ ID NO: 186038 - DNA, 547 bp, Zea Mays
cttaggtctatctgcaccagaaagaagtgaatcgtttcaaggtgtctatatactttttggatgctttaagaaagggcctggaagcattgcacgggtaacatatttgtctgacagcgattgattttgggaaccaatttggtaatcagtacaatggagtgcaacagagaagaagccttgaaagccagggaaattgctgttaagaagttggaaagcagagattttgttggtgctaaaaggattgcccttaaagcacagaggattttcccagagatagagaacataccccagctgttaactgtctgtgaagtacattgtgcagcagaagcaaaagtaaatggaatgttggatttttatggaattctccaagtagaaggaacagcagatgaggtgaccataaagaagcaatatcgtaagcttgtcctctcacttcaccctgataaaaacagttatgctggtgcagaatctgctttcaagtttgttgcagaagcatactcaacattgtctgatcgaaccaaacgatatgcatatgatgtcaaatggagggctg

SEQ ID NO: 186039 - DNA, 584 bp, Zea Mays
ctttttggagcaggtggttttatcggggttacggtgatggatttactagagacgcttaggattggcggcgaggttgagctgattgtatttaccatgttttgttttggctagtctcgacggatcgatgcgtcgggatgcacttgtcaatgaatttctgtagtatttttatttcggctactagatccttagctcgtcgattgcaagtagtgtggatttgagctgggcctcgctatttacggtgtcatactacataccagtgtgtagaattatgttcccgaaaaaaaacggtggaggatccgtagttacggttgtggaaaagttataaaggtggggacaatcatttggaattgtatctagtaatggttgttggtcctatatttaacatgtctgctttggttatcctgtttgtttgtttgtatttgttgacgaggagctatatcagacaattattgatctgaactagtactagaaatatgcgagttcagcacacaggattattgattcaaaacaggaaggttttactttgaacttccataccagtcatcctattcctacgaattgttcatcagtatacaggaaattag

SEQ ID NO: 186040 - DNA, 477 bp, Zea Mays
cgttcttgaggcggaaggggtcggggaatgacatcacccactgaggtggcggggagaaccgacccatcgccgatgatgataaaggaggggtggggaggatgggtggaggatagggtaccgacgtcaggggtggtgtgatacgaggcaccagagtcagccacccagacagtgaccgaggtgggcggcaccagtgtcatcgtgctgagccaacaagagtcccacccggcacctcaagggccccacgaggacgcaacagggaggccaggagaagcaggtgacccgactggtgttgaggtggagccgagtgtggcggtagcgccgatggaggcggggcagcgtagaaggccggcagtggtgtggcaggggacgacagagtacctgctgacggcccgatccacatggaactggtgtcggtcgttgggttgtagtaggaaggccacgagccacctccccgggccgacgatggaccacttgggc

SEQ ID NO: 186041 - DNA, 788 bp, Zea Mays
gaattactatgttttgtccctgacttcaaattggataaagctactgttcagtttctcattttgaatagtaatgatcatgtttataatgtttctagtgctgcatgatgtggtttgacccgctattgcttattggtttctaacttaatggacctgatatcgtaggggtacttctggatgatcttcttgtggccgaggatcttgctgctgctgaaacaacaaatgctgctaatcatgcagcagcaaatgcagctgccacaaatttgcaagcaggacgaacacctgggaagtatgcgtataatgaacaaacaagacaaacaattacagaatcaggtcctgatggggctgtagttcttgggactccagttgcacctcctgtaaatggggacatgtatactgatatcagtcctgagaatgcggtgctgcaaggacagaggtacatgtattactttttatgaatgtattcctatgctgttctttgaacaagttaataatattttgccattttggtaacagctatgtcattctgatgaatttggaattcttcacaggagattaagcaaaggcgtggattacttggttgaagcatcagcagcagaggcggaggcaatcagtgctacattagctgctgtgaaggccaggcaggttaatggtgagatggagcagttgccagacaaggagcagtctccagactccacatcaactagcaaacattcaagcctcatcaaactggacagtgctctttctaacaacttggcagctccacctggggttcggttgcaccatagagc

SEQ ID NO: 186042 - DNA, 858 bp, Zea Mays
gagtaatatatgctgaattcaacaaatcgagccttccaagagatccttgttggagaaataagactgcagccagtaggtcccatttgattatgtcccaacaacatttataaaaacgccctgtgtatccgtcaggtccaggggctttatcattaggaagacttaaaacagcagaattgatttcctccaaagaaatgggattatcaaaatgtgagagctccaaattgcctttgtgaaaattagcaaggttaagactaaaatttcgctcagacgctttaccaatcagatccttataaaactgaaacatagcctgctgtttatcctcttgagaagtaacgagattctcgtcgaccatcagtttatgaataaaattcttctttttcctgaacctggcgtgcgcatgaaagaaagccgtattggcatctccagatttgataaacttcactctagaccttaatctagcaatggttctttccaaagaagaaagatgcagacataataattttagttttttccgcaaccactcttcagctgtccacaaggatctgctgtcttgggcaatttccagaagatgtagagtcatcttggccaaagcaagttgagtagaaacattacccacagatttttggctccaggattgcaggtcctttgcaagtctcttaaatttaagggataatctctgcatgggacaagcagccaaaatagaagcattccaggaaccagccaccacctcctgaaaaccttgcatcttgggccaaaaactctcaaaatgaaaacgcttctttcccttaaaggtctcattaagccttaggatcagaggacagtgatcagacatattagaggcagaactctgcagagaac

SEQ ID NO: 186043 - DNA, 678 bp, Zea Mays
tctgcttggtgtttagacccgtccttggtgcctgcttcaagggagctttggatcgtcgaacctccctttgccgttgatgggatgtcttctggcaggagaacgctgatgtatccaatccgcatcacattctcgtctgccccacggagggatggatccgatcctaagcttcatgctattacttcgggcggggatggttctggtcacgtgcagcagggatcccctcctttttcaagacctccccattcgagtgggagaaggggagaacatggtcattcgggacgtctctcagttcatgagcgtttgggcccaagagatgagaacatgcagcagcggagcattagctccggggtggcagtttcagatttgaggagaactttggaatctgatggggggaccttgtctcctaggctggtagagatgactgatgacatggttcttgtttcaccggtgaaggcgaagcagctgaaagtttattttcgtcaaagattcaagaatgtcctgaaccaggaggaagctggaactcccaattctgtcactgtgcttcctccatccaccacagacgtggcagctgctgacacagatccatctgagtatcctgtttcagatgttgacgctgtgttggcaactctgtctagaacattaacttcctccctgtctgatgtggcagcagcacacgcg

SEQ ID NO: 186044 - DNA, 677 bp, Zea Mays
cctaaatcaagtaataaaagagagtcaagtggcaggaggggaagaggaaggcctaaaacgataccactttctgctggaactggtcattttgtggcttctgttgccagtctcccaaagacaacctgtgtactgactagttcaagcaatctcacgtcgttgaacaagagtggtggcaaatttatagtaagtagcgttagttcatgtggctgtgatgttgagaaatgcagtgttcattcaggtgttttgttgtctgatgatgcaccaccagcacatggcttacaaaatacaaattgtaaggaagaatcgaataccaaaataggaaaagcgggatctagaaataagcctgttgcagttgagcacaatcattttactgatcttaatgtaaaagaacaaaaagtgcagacaactccaatgtcaggtgatcctgtgatcttggttgaaaattgtatggaaggacaaggccccagaaaggctggggggcaacttcaaaggatacctgcttcaaacaagagtagtggcgcatctgttggtggtggaacatataaaatagagacattatccacaccaatgactaaaggatcatctaaaaataatgacatggcttatggggctggtttgaatcagtctcagaatgcaattgttggttgtgaaggcatggaagttattgaaagcaacac

SEQ ID NO: 186045 - DNA, 568 bp, Zea Mays
aacaatttgaagttgagaagtacgacaaatatttaaggagtgagttcatttattccttaaatcttggtggaagtgtcattgtagagtagatgtgcacaaccagatgttcctcaaaacactaatttcagcatttgatgttacatcgtgttcatccgtctaatttgttgttgttgatgtgtatctttgacatcttgatatgttgaacatgctctctaattgtaaaaaagattagaattgtttccttgaaatgatctttttcaatcaactagggttcagaatgtagttgttctgaaatcgcttaaacatgaactcaagttatgtttcatagatttgattcgtcccacctgtcttgtaacactggcacacagcataaattgatatgttaaagagatctaatctattaattatttttgttacaacatgatttgtgatcagattatgaggatgctgcattgaagacccaaagtagtcttgcctacctgaactttggccaaaatgttatctttagctcagctttatctacagcaatggttttgagctcatatggaataatgagtggtgctctgac

SEQ ID NO: 186046 - DNA, 792 bp, Zea Mays
tgcagattcattggaggaacctctagtaagtgattcgcagaggactgacaatataacttcagttgaagagaacacaccattgcatagtgataacacaataggtaaagcagaacaatcaaacaaaccatcaccaactggatcccaaaccacagctgcgacgtatgaagtaaaggagtccttcagtcaattccatgcatcatctaaagacgtgacaggtttgtttctctatagaacatgccatcatgtgcacccagctatgggataatgatattttttggttcacaaaacacaattttattggtatgtcagataatctatagctgcctagaggctgtgccagtaaagctaccatgttgttttgtcgtttgaaatttctacttgcaaaatgtggagtaattctaaatgtttttcgttaataacaaaaccaataatgctgtaatgctgccgaaatgctaagatattaccatgttacacggagaaaggagcttaatacttgtgcagtaacactcttttcgttttccattaggaaataaccagagattgagttaggaaatttaacctcactaactacccatgttggttacagtttgttcagaactagtttaatatatgctagtgtgtcaatgtgatgaaaaggagtaacgaaaagtataaatataaacctcttatgcaggatccacgcaaaaagaggcaggacatgtggtaactgtgcagcgaaacggagcacgccaagagcaaattcctctctcacggcctgctgttgatactaaaactgataccagtcatctaggc

SEQ ID NO: 186047 - DNA, 419 bp, Zea Mays
tcccggatatatatgcaacgctcgtgtcatctgttccaatacttgaagaagcagcacgctacgagttgagatatgggcacagaaatagagctacaagaggtctattttcttcttcttatccttttgatcaatcacgtgtttatatgattcaatcatggaaacaactgtcagttttgatagtgtgcaggaggtggatattttggcatattacacgttgagtggtgaactcaagtatcagtttgggtctggaaggtgaagctgatcagttgctgctggatgaggtttgtaaatattacattgtcacaaatacgcccttttcatgctctgtccagttcaagttcgtctgtttgtatgggtacttctatgtagagcaccaaagttgttgtttacttaatagtttctgccatcattttttagaa

SEQ ID NO: 186048 - DNA, 590 bp, Zea Mays
gtatgctctcataaatagtctagtgaccttagagtcactccaatcttcacttccaagcactcttattttgttgaccaacaccattagccggtcaaagagtgattgaagtgactcacccttagtccaatcatatcgtgcaagctcatcacttgaactatcttcatcacttgatctttcgaccactttctttgtcttgtgatctttgttcttcttggaggaatcttgttcatttgagatcaaggcatgagtgtctcttgtcttgattggggcttcttcggactcatgttgttaaatcttagcaaatagttggtgaggtgtcatttactcatagtcatcacggtcccttatcattttgctagacttttatccttttcttttgtatgctctcataaatagtctagtgaccttagagtcactccaatcttcacttccaagcactcttattttgttgaccaacaccattagccggtcaaagagtgattgaagtgactcacccttagtccaatcatatcgtgcaagctcactcttcaaagcttcaattctatgtctcttagctttggggtctccttcatgtgacattttgagaatgt

SEQ ID NO: 186049 - DNA, 571 bp, Zea Mays
ctcagttcggttgcaccatccggggtgttcagtgtgacaatgagcgggagttcgataactccacgtctcgtgccttctttgtctcgcgcggcgtgcgactacggatgtcgtcaccttagatctctcctcagaacagcgataccgagcgcaagattcgcaccatcaccttcctcattaacgtcctcctgtttcaagcctccatgctcattactgggctgagggtctccgcactgccacctacgtcctgaaccgcctcccttccaaggtggttagccattccactcctttcttcgtcctctttggcaccgccccttcctatacacaccacaacgtctttgattgtgcctactatcctaacacctctgccaccactccacaaacttgcaccccaatccacttgctgccttttcctcgattactctgatcacaaggggtaccgttgcctcaatcttctcacccaccaaatcatctctcgacatgttgtcttctatgaggatgcttttccccttgttggctcctccccacctcccaacctccactctctcctccatgctgattttgtcgatgtcca

SEQ ID NO: 186050 - DNA, 1000 bp, Zea Mays
gcctgcaaaggctcctgtagacaaacgtcaaaacaacaacagttctgaaaagcttcagaaatcacagacaaagagctctccagctaaagttgaaaaacgaggtagactggagctcctaacttctaatgattctatagttggatagcatgttgcgagatcttgcttagcataacttaatacttaattttttcatgctcatagttgcttggatctgattatctgagacatgacttttctgttcaatgtgtttgctaacaactttatcattgtggatattaacttgatcctgttgttatgcttgcattctttggagaatcaactcactgtcacttattctttgtttctgattttgcatgtctcatgttaatatgttatattgttatgcttgattttcttcagccgaagcaagtgctgtaggcaaaagtattgcttcaaacagtaatgctgcaagtgcctccgctgacaaacaaaagcccaagattgttgaccgtggttctatgcaatggacagaaaaatatcggccaaaagttccaaatgacatagttggcaatcaatcaatggtgagtagttctgcttttggttatgttagttaattcatatatgtagcgatactttattacaaacttcatatataggtcaaacaacttcatgattggttaaaaagttgggatgcactattccttcattctggccaaaagggtaagggaaagaaacaaactgacagtgcagccaaaaaggctgtgttgctgagtggacctcctggtatcggtaagactacaactgctaaagttgttagtcagatgcttggtttgcaggccattgaggtattagtctttccactatttattccccatttttacttggcaggcctgaattcaaacaatattttttttgtgataggtaaatgcgagtgatagccgtggtaaggcagactccaagatcgagaagggtgttggggggagtacatcaaattctatcaaagagcttatcaacaacgcga

SEQ ID NO: 186051 - DNA, 712 bp, Zea Mays
tgcaaatgtttaagatccggatggtttacgcgtccgacgtccggaaggaggactgcgaggtgatcctcaaacattctgacgttgctatcctaggtgtatgtagctacttcggtgtttgatgacctcgatgtttgggaacaggtggcagacgagaagattaagcctgtagtttctgaggccaatgagaaggctcttccggatttgctttcagacccgcctcaggctgaagatgtacttggaagtgagattctgtgctttgcttatatataatgataatatatgaatgcacttttctaggtcctctccaatgaagttcacattgctgtgtttctctgataattggattagtggtgaagggcgacaaagatttcttttttcaggtggggaagcagagtaagataggcagcagaaaactagttgattagccatagaattaggaaatcagtatatattgcaaaattagagtcgaactactatcgaactatgtaaagttctaaataaagtaggaaagtgacctcaattgattacacaaggtcattttgcttgccacttcagcattgttgtgcatgttgtggcggcagggaagtgcggccactggtgaggcttgcgtagaggttgatgataacgtgtatggtaggcctgaatgctgctgaggtaactaggagaggtgagcttatgtggttgttttccatttatagcatcgaagaaaata

SEQ ID NO: 186052 - DNA, 1137 bp, Zea Mays
gtatacacctttaatttttccacagttgtaagtttagtttacaatgtccttatcattttctgtaagactaacatgtttcttatgtcattgtaaacgtgttagtcagtttcatttatctaaataacgattaaattatatagacatatagtcataactaaatattagagacttttttaatcacgctgtctaattaaatgacatttttcagtcatttcgttgcatgttgcaatataagacagtaaactgtcatagtcgtctcttacatgtttaaactcaattataagactttcaactttgttcaataaatcaatgttttgtttcgcagctttattttgcaatgactagaaggacagcagcataattaatacatcaggattttaattaaacagcaccaaataaaaattgcattgttcattaacaaacatctatcatccagcgtctaaagttgaaccggagaatgagcatatgtaagaaattaacatgcccagttcacatgaggtcacgcagaggatcacgtgagtcgtgagatgttatttgtctttttttctccttccaaaaaatggtatttatgcattcttccgagtttgaatcgacacatccacgaggatggtaacagaagatacgcaggcaacggtataatgttctaactgaagcacaacatctagggacgagttgaactgggcatgttaatttctgtcgtatactcattctctatttcaactctatacgttaaatgatagatgacagataatgaaaaatgcaatccttatttggtattgtttaattagaatattataatgtcttaattatgttattgtccttttagtcttttcaaaatgaagctgtgaaacgaaacgtcgatttattaaaaaagttgaaagtcttaaaattgagcttcaacatgtaagggacgaccgtgacagtttactgtcttatattggaacatgcaaaaaaaataactgaaaaatatgtcattgaattagactgcgccatgaaaaatgtctctaccattaaggtatgactatatgtttagataacttgatcgttatctagataaattaaactggctaacacgtttaaatgacatcgaaaacatgttggtattagagaaagatcataagaacattggaaactaag

SEQ ID NO: 186053 - DNA, 307 bp, Zea Mays
aacacgactggtttaccttctgaggaagctacacacccagaatcacagttagatgaagaggaacaactgactaaagaagagtggcaggctattaataagctgttgagttaccaaccagatgaagatatgtcttttccccttgagaaggtttccccaaatgtgattcaatttatgatggatgtatccattggccaggctggtgcaaggatcatcaatattgatggaactgaggttttatgtggtagatttcatcagcttcaggttgtcactaagttgtatccgaagagcacatgttgtgatgtgacat

SEQ ID NO: 186054 - DNA, 999 bp, Zea Mays
agcaacatgctggtcattggatgactttttaacacgctgtttaattttcaggacggtcgtgaaattagagtaggggattgtgctctttttcgggctgtcggtgctcctccgttcattggattgatacgttggattgagaaaaaggaagaagcacatcccaaattacgtgttagttggctttatagacctaccgacgtgaagcttaacaaggatatacaactcagcgctgccccaaacgagatcttctactctttccaccaggacgaagcatctgctgtttctctactgcatccttgcaaagttgcctttttacgtaaaggtgttgaactaccagctggaatttcatcatttgtatgttggcgcgtgtacgatatagacaacaagtgcttatggtggcttactgacaaggactatattaatgtaagttcatcatttatttcttgttttgttcattatatatctattattcacatatgaaattgaaaaccagaaacggcaggaagaagtaaatcgacttctacacagaacaaggctagaaatgcgtgccgcattgcaatcaggtggacgctctccaaagcgtttaaatggtccatcagcttcccaacaactgaagactgcttcagttggtacgcaaaatggtggtttgtctaaaggaaagaagagagatagaagtgaacagggagttgatccagctaagcgggatcgggatcatctacttaaggttgacgagagtgagcctggaaactttaacttggatgatattaagtctgaaatatcaaagataacagaaaaaggtgggcttccaaatgcagaagcagttgaaaagcttgtacatcttatgcaacttgatcgaactgagcagaagatagaccttagtggtcgggttatacttgctgatgttattgcggctacagagagtcctgattgcctcggcagatttgtgcaatcaaggggccttcccgtgttggacagttggcttcaagaggcccacaaagggaa

SEQ ID NO: 186055 - DNA, 499 bp, Zea Mays
gcgctatgggttcctgatctattcatgcaaagagtccagagtaatggagaatggtcattgttttgccctaatgaagctccagggttggctgattgctggggtgaggagtttgataatttgtacaagaaatatgagagccaagtaagctgaaaagtgaacactgtatttgtatgtacgctttattgaaatgggaatgtgctttactaaccttgctttctggattcagggcaaggcaaagaaagttgttcctgcacagaccctctggtttgacattttgaaggcacaaatagagactggtacaccttatatgctttacaaggtacatttagtggctatcaaataggagtacctcctatttttgtctcttttgccaaaagtttccagttaaggatttcttgtaatggctattaactgtatgcaggatacttgcaataggaaaagtaaccagcagaatctgggcacaattaaatcgtcaaacttgtgcactgagataattgag

SEQ ID NO: 186056 - DNA, 533 bp, Zea Mays
cacctcgagtaccgtgtggacgtggtggaggtgatccatccatgtggtgctgtagatgaggatgtcgtcgaagaagactagaacgaagcgacgcaggaagggctagaggatctcgttcatcagggcttggaaggtggccagggcgttggagatgccgaacgacattacaaggaactcgtatagtctgtcattggttcagaacgccgtcttgtgtacgtcgcctaggaacatgcgctcctggtgatagctggaccagaggtcgagcatggtgaattagtgtgccgtgtagttcatccagcagttcatcgaccactggaatagggaatgcgtccttgacggtgatgctgttcaatgcgcggtagtcgatgcagaaacgccctgagccgttggctttcttgacgaggaggaccggcgaggagaatgcctggcttgggcggatgagtccctgttggagcaaggcttgacattgacgttctaactcatccttgtggctcaatgggtacctgtatggttgcacaaccaccgggcgacac

SEQ ID NO: 186057 - DNA, 509 bp, Zea Mays
gatgtctgtaggcttctcaaagccaggggaggagtggaactcagaagtagaagatggcctggatagtttaaaagaactaggacagagtaaatggtcaaaagattttgaggatgaaaccacaaagtccgagaatacagaggaaaacacacatgctctttctggcctggcccggacatatagcacaggacgcaaaaatgtcagttggggtgatcgggtatgcttatgtttcagtgtgaactttatcgttggctctcttgtactttgaactttgattgtgtttttttcctcaaaatagttgggtagttatcatctatattgaaatgtgcttctaacttctgaatcggttgttttgttcagttatttcttgcattatatggtacttcagagatagaactcaatggccaagcttatgtcataactatattgtttctgtgtgctcatccttcatcttatttacttttgcagcttgaaaagggtgggttttccatttatgcaactaaaagaaaact

SEQ ID NO: 186058 - DNA, 388 bp, Zea Mays
caaggatgtccttcctaagtgtattcctagacactactttgaataatggttgcaatgctgcacaaaacttgcgaaatccaacatggtccaccatagacaaagggtactcatggataatagtcattaatgcaagctcttttctagctacttcttgatcaaaaacgtatttctccacagtcacagtcccatcttgtggatttgcagtcaatttaagagatgactgttttatacccttcctaacagccctatctggacaaatctcaagatgaccactcaagtgacttgtaccatttcttgtgtcccctcctaaatgcttcttacaccatttgcattttgctttccaaaccccatttaattcaattctatcaaactctaaccaaactttaga

SEQ ID NO: 186059 - DNA, 660 bp, Zea Mays
accttactggccatatatgtgaagacagggaaatatgatgaaattgctactgtatgtgaagaaatggagaaattgggcattgagaaggacactgttacttacaattccttgattaatggatatggaaagcaaggacgcttggacatggtcgctttccttgttcaagatatgcgggcgcaaggcgtagctcctagtgtgctgacatactcaactttgatagatatctattcgaaggcaggaatgcatggagatgcatttaatgtctatttggattttaaggagtctggtctaaaggcagatgttgttctgttcagctcttttattgatactttggccaagaatggcttggttgagtgtgctttgtctttgcttgatgagatgatgaagatgggtatcaagccaaatgttgtaacctacaacacaatcattgatgcatttggcaagtcgaagatttttactgaggaggattctgatattggtgacatgggaattgttggggtttatggtggccaggttgtaagggtcactaatccagtgataagaggagggcgctctgccactgatgttaggatgaggaggtcacaggaactatttttcattctggaattgtttcagaagatggtccagcagggtgtacggccaaatgttgtaacattttct

SEQ ID NO: 186060 - DNA, 286 bp, Zea Mays
tgacaaagtgaaggaagaggcgcggtggatcctagatacgggagccacaaatcacatgacgggtgagcgctctgcgttctcctcactgaatgagaaggtgcaaggtacaatgcgattcggcgatggttcagtcacgaccatttgtggtcgcggatccattcttctccactgccggaatggtgaccacaagactctgacgggagtttactacattccgaggctcaccacgaatatcgtgagacttggacaattggaagaaggtggacacaagatcctaatgctgaac

SEQ ID NO: 186061 - DNA, 840 bp, Zea Mays
gaagtaggcttagcagaaaagttgcaggtgttgtaactagcagttccagtcctaaaaggtcttttgagaagcgcagatcctccacggtagcatgccttattgaagccttttgattttctgataaaacttactattctcagtttataatttctttgacataacgggtgtacctttgcacgggtgcctttgttggcaatattcttttgtgcagatccattgcatgtggtactaagtactaactcatcattatgtttttcatattcatcagatggcccctgatgtactatgcttatggtttattgtatttctgaaaaatagcacaattgctcttatttctatatctctggtgtctgcatagtgtgttccttctatagttatatgctttaaatgaacccactaaaattgtttccttgtgggtgatagttgtattgcatggttatttttacttcaactcctatatagtcttatgcatgtatgtttccacgatattcaattgaggttgaggcaccaccaaacctttagttaagttgaaatttgaactatttgtgttgttattttgtaacaagacctactcctactgatctgctggaagcttaaagttccatagtttgtcattctgataatgtttacctacttacctgttgcgacaagacaacaaatgctaccctccatttcttctgtgaaataacttgtgacctgaggttcataattttgctgtctttttctattttctcaagcagtatgttgtacgagacagtattaaggagaaaccgacctatatcatggtgccaaagagagaggagcatacacaaagggaaaaaattgtttctggaaattcag

SEQ ID NO: 186062 - DNA, 381 bp, Zea Mays
ctccgatctaggccgagctatgaactatgtacttctacaggtcattgatgaagaccggagcaagcacaagactacttttcatctcacccctcggtgtacaactgcagtacattgtatggctccacttcgctgcgtccaacaacatgcctgagtatgaggctttggttaacgttctgcgcatcgccatcgaactgggtgtgagacgtcttgacgtccgaggtgactcctagcttgtcatcgactaggtcatgaaaaattcgagctaccacgacgcgagaatggaagcctactgtgaaaaagtttagcgcctcgaggacaagtgctttagcctagagctcaatcacatcgcacgacgatacaacgaggtagcagatgaactag

SEQ ID NO: 186063 - DNA, 413 bp, Zea Mays
gtgcctcttgtggcgcagtgttagggcctgttgctggtttatctcattaggtggatgtctttatgtcaatgatagatcgctgttttttgtgttggaatgtgagaggccttaatgaccgagcaaagagggattctgttaaatctgtggtggttgatcttaggccttcaatcatttgtttgcaggaaaccaaattaagtatcgtttcagattatgatatactctccatccttggggctggtttcagtaactttgtttttaaaccagctcagggatctaggggggagtgctgattgcttggcgtgatggtactttctcctcggttgcatctattataaaagattattcgatctcagttcaattccaggatgagtctggtgttgcttggtggtttacaggagtgtatgggcctcatc

SEQ ID NO: 186064 - DNA, 806 bp, Zea Mays
cgcggacctgcatgcgttgctttctagctctgcggccaaaagcacaatgctgactgaatggttcgaggctaatttgaggcatgaacaagctagatgcttaacgtattgcgacttcccaaaacaatggacatgggatgcctcggcccgatgttggaaatcgaggtctcgctgcacaaaaattggacgcatgtactatgtacatcctactgctggtgaactatactacttacgcatgctattgatgatagttaagggttcaacaagctacgctgatatcaggacgttcaacggtcaagtgtacgacacatttcgtgctgcctgcgaggcgcgtgggttgcttgagagcgataatgagtggaagttgttgtttgacgaggcgatcgtatccgcatcgtcgtaccagctcaggcagctttttgtgaccgtggttatgttctgccctgttgctaatgtgcgtgcattgtttgatacatactggctatcttttacagatgacattgtccgacaacttagagatacattgggaaatcctaactacaacataccgcatgaacaactcatgtctctcctgatacgcaaactttcggctgcctttgctaatagtggcgggaacataaatgattacggtctgccaaggatagatgtccaatgcgctttcatggatgagaacagattaattaatgatgaaattgaccctgagccattaatgttgtcgatgcacattgattccttggttacacagttgaatgcggaacaacgaaccatttatgataccataattggtcgtgtttatagtaactcaccgg

SEQ ID NO: 186065 - DNA, 362 bp, Zea Mays
ttatgaggaaacttgatggaactgccagcacattttccaggattgacaatgagttttcttatatgatccaagtaacgaaatcatgcaagtgttttggcagcattaaagatggatgtgatgatgctgatgtagcgcttagagccaggctttgctgggcaactttgcactcacttcttcactcacatatttcatcatataggcaccatggatatatttggttagttgaattgctcctttcagaaatcagtgaagaaacagatggttctgtatggtctaaaatccaaaagcttcaagaggaaattgaagttgctggtagccaagacctatcatgttcagaagtctctctgcctgtttgtatgctt

SEQ ID NO: 186066 - DNA, 762 bp, Zea Mays
gaaatttgcaagcagagcaaaacgtgttgaaatttacgcctctcgtaaccgggtaaataattaggcatacaaaattgatttcctgtaccactattctagaaaatgaaattaagacataatgaactttactgcccagataattgatgagaaatcattgatcaagaagtatcagaaagaaatatcctctctaaagcaagaactcgatcagctaaggagaggaattgttggtggtgccagccaggaagaaattatgagtttacgtcagcaggtatgttctgttgttataactgcagaataaagctgtaattaagttgttatgtgatccttggaaattgactattattttgtgtggtggtaagttgataaccgtttgaaaagtacttttcttttatctttagttggaggagggtcaggtcaagatgcagtctcgtctagaggaggaagaggaagcgaaagctgctctaatgagcaggatacaacgcttgaccaagttgatacttgtttccaccaaaaacaatattcctgccttgacagatggtcatcagcggcataattctgtcagcgagcaagatgtaagtattaattgccctaccattgcacatttgtacatattcttccttcatgcttctgtttcatttggaaatatgaattatctgtatatttcagaagttaagcacttcacaagatagctctacacttgtccaaaatgagggcacaacaaaagaccacctaccagactccttagatgagatcaaccaatta

SEQ ID NO: 186067 - DNA, 1462 bp, Zea Mays
ctcttctcggaatcattatcatgacaattctcatgttcattaccagccctagctgtataaaacactggagaattttcaccactggaacaatcttctgtccttttcgctgaactctcgtcagcaggcttcaccggtgaatctataagtggattgaacttcgccacacttggtggtggacttactgttaaattctcactagccgcctttagctttagctgtgaagacctttcagaactcaaaatagtctccttgtgaatcgacacgataggaaatttatcttgctcaaattttccaataacttcattggattgtactactttatctgaataagagtttagaagacaccgtctcactgaattcctcgcgtcattattcacactgactaccttaactggagaaggatctgactctgtcctagataaaccaagcctctgactcaaagattgctttaatgatctcttataagaaagacccttattatcactctccttaagagcagttccgtcattatgcaggtttctccactgctcttcccagtaactctcagctaatggatgcaacggagtccttggaggagttgaagtagcaagattactataaactctatcataatcacagctatccttctttgataaaagagatggggataatgtattcgcatcaatagcagtagactgtagagatttagctttctcaattaacttatgcacatcaacgttgtttggaaaattcaataacctctgaagacataacgtattgatttcagtggctagtagagatgatctaaggtgaagaatcatagagaccgccatggctgcgatgaatgcccctctagatgagcacaatatcttaaagttgcattcttcattttctctaagtagcatatcattggagcaagcaaaaacttcatcccatacaactaaaagatcgtcgaggcagaactctcgtccaaacaagactcgcagccaacgaagagcgaaatactgcggttctacatccagctcaatgaaatggctatgaagagatggctcaacaatggaaagcaaatgaaataaagatgctgaggcttcaatgacaggtgctagacttgagctagatccaaccttggatgtagagaaaaactctgccatgcagaccactccactacctccgtccatcaaaccatcaaacattgaataagcatcatgttccatgaacctttcagacaatacaatgcctagttcaccctcggctccatatgcatcactaagtgaaattatttccttcgtatccaggtcaagctcatcaagagtgttaactctggaagcgctttcagaatcatcgccattgtcagccctggaatgccagtttgagtcctttctaggtttataactgaaaagcatatctgtatctgggaaagccactccatcaaaatcatcattgaagcaatcctcatggagcttccttacttgagatagtttat

SEQ ID NO: 186068 - DNA, 304 bp, Zea Mays
gctggagatagctgtggtcaatgtagtcaaggtagttgatgttgaggtggctgtatatgaagctgctgacacaaagaggtgccatgatgatgacaaagatgtgtcggggtagtcgtcatgaaaggggatgatgctgaggtcgatgtagttagggctatcgaggacgtagacaaatgcagtgacacaatcaagagagggttgatgtagtcaagctgcgagggacgaatcatgcgacatggttgccaggcttgggaatgcattgtggatgaagcacacactagtgttgccaatatttgacgtacga

SEQ ID NO: 186069 - DNA, 454 bp, Zea Mays
gacaaaggcactttgatttgtagccaccagattttgaaggtgcggtgctaagcgattagccaagactttggataccaacttggcgaagctgtgaataaggctaattggcctgtagtctccggctgtcttggcatcaaccttcttagggataagtgttaggtacgcagaattcatcatccacaatttgcgtgtgttaccttggtgcaggttgataactgccgccatcagatcagccttaattatgtgccaacaagttttataaaatcttcccgtataaccgtctggccccggggctttgtccgagggaaggctagcaatagtggcccggacctcctcctctgtaatgggaaggtccaaggccccaagatcaacattagcactgtggcaagcctccaaatctagagtgaactcacgctgcttcgctacccccaacagattggagaaaaaatcaaac

SEQ ID NO: 186070 - DNA, 642 bp, Zea Mays
agaggattgaacgacacaactggctagtaaaaacattggtcctggtcaataacaaagttaataatttacctgagacagaaaaggcgtttcaggaactgaggaggcggcgttgctccctggacattaatgttcttaacgccatggtatccatatacgggaaaaataagatggttaagaaggtggaggaggtcctttcactcatgatggagaattctatcaaccacagtgctgcaacctataatagtttgatgcatatgtattctcgtttaggtgattgtgaaaagtgtgaatcaatcctcactgagatcaagtcaagtggcatgcgccctgatagatactcttataacactgtgatatatgcatatggaagaaaaggacagatgaaagaagcctcaaggttgttctctgaaatgaaatgttcaggcgtgaaaccagatattgtaacatacaatattttcatcaagagctatgttgccaacataatgtttgaagaagctattgatttagtacgctatttggttacacaaggttgcaggccaaatgagagaactttcaattcaatactgcagggctactctagacatggaaggatggtagaggcgaaatcattccttagcaaccttcctaagatttatcctggaa

SEQ ID NO: 186071 - DNA, 435 bp, Zea Mays
agggatgaatttggcggcacaaagatttgtcggccatgcagaatgagcccatcaaccatccgccatggttcagtgagggtgccgtctttgatttgagtacaaatgcgttgacagtcttggttagaggtgcactcctgacgcaactcttcatacaaatggaaggtggggctagacaacgtggcaatcatgccgtcggtagtctgccttcgtgacaaggcatctgccactgtgttgaatcggcctgctctgtattccacgataaagtcaaacccaaatagtttgctgatccactgatgctgaggcactgttgacaatctctggtcgagcatgaattttagactgaagtgatctgtgcgcactgtgaatcgacgaccccagagatatggtcgccagtgacgaactgcctgaacgagaccaatgagttcacgttcataa

SEQ ID NO: 186072 - DNA, 594 bp, Zea Mays
atctgatctagatcccactaatctaacatgagctaatccaaattgagttacttaagtaagttagacataaattaggccctgattctataaacatatcttaccctaaattaatgccttggactaactcatccgtaaacaacaacctaacctacatcataggttgcctaatccagatatcctaaaagcaaagtaaaactctgtttaaatctaactacctcatgtaccctagctatcctagctatagccatatgtcctcaactcggatggcaactctaggaggaaggccaaagaagaccaacatcgtcaaggaaggagaaggagatcaacctcgacatggaagaatacgagtcaaatcagatctcgagataattcaagattcaccacccaagatgaagtctttgcttattatactcatccttgccacgacctatacatgccataaccgtacctcatctgacctaatagatggctagacatacaatatccatgtgttccaaatcgtctactaaccgttatgtaaaaacttgaacaaaactttgatttccaaaacccaaatgagaaactaaaattctagaccaaacttattgtatccct

SEQ ID NO: 186073 - DNA, 350 bp, Zea Mays
ctggcctcgccgttcgctcccctcgatccagacagcagcgacctctgaagtgagaggcatgttatatgtcttttggttcaacgtctggtcaaggttcagtgtgatacgatagtcatcaaggttctcaacatggcccatgctcctaaggtgctcagagtacgggtttccacggagtatgccaactaattgtttaataacatctttgtctttctgttgacattcttctcggcacttacgatatcgatgctcgagattgggatcatcatcgtaaaagtaaagctcaaggtgtttatgctccgccccaccttccctaccaaatgacttgatattgtggtacatcatgccttgtg

SEQ ID NO: 186074 - DNA, 370 bp, Zea Mays
gtgatcttcagcaccatctcccccaatatatgtcggatggccagggagcaatggcacggcacaccacctctggctcactctcgagaaccagtttcttatgaattgtgacctgcatcctctaactcaacgccaccttccacacctttgtccaggatgacctctttgttggtgattactgctacaagctgaaggggatgtccgactccttggctgacatgggcacgtcggggccatcattcgacgccccccttcctatccttccttaagattcaatacgatcttgttctggaggatctcaacatgaccaccactggtcttgctgttgctctaatggccttcatcgccactcccccgtcgatcgcccccacat

SEQ ID NO: 186075 - DNA, 3084 bp, Zea Mays
cccccgcggaaaccctaactccctcttggcacaggaggcctatgacggagattcgccgcgcgcaaggagggagtggattcgcgactgcgcagccgctgccgtcgtcctagggcgcgtcgagcactgccaccccattgacgggcccatccccacgacatccgccatgttcgagggccacgtatgatctcttacccttcctccatgttttcccattccttcagcacctttgatcgtgaccatttttgatgcgcgatatggaggaaggccgcgtgattgcctagtggaccgatgtgttggtttagtcgtggcgttgttctgtccgggttaccaaatctctgtgcagatcatgttcgtatttggggatagtttggagggttagaattcggtgcgttgatgattgacccttggtcgtttgcgttatgatcttcccttgaggaagaattgcatgttgatttatggaggagcctctaaacgggcaagttgtggacttttggtgcttatgtatacgtttgttcacaattttatagttcgactgaattccaactattgaggaatctgtttactttggttgagcaaaatgccttatttcatttggcctacgatcatttaagtagctcatgacacattgtctgtgatggttgcatatggtgatctggcagcaatgtgaaagttcatagctgcggcatttctttctttttaaattgaaatctcctagcccctgttacctcccgacaatatgcacttgttgccctttaaatttggatattcttctttcgtgattgcatcttattctcaccagtgaatgcagttttgagcatccacactattatggtgagagctatgttttgtgccatcctactgcactgcttgggatttcattgtgtcttttcttttgcgtcattatgtaagaaacaatcatgctggtaaatagtggagtcgtgagtaattcatgaggttttacagcaactttgctcattcatggcaatagacacgtaccacttaaatggtgaatcatgttatgcactctttcgctatctataatttcatatcgaatttctattttttgttttcctttttttgactctttcatcattcatcatttgtgttaagttctgagccatgacatagttgtaacttttttctacaggtgctgtatctgctacgcaaatatttgggtgaatatgttgaagggctttctgttgaagctctcagaataagtgtatggaaaggtatatttctttcataataatgttcttttctattgcttaaccttcatctcctgcaatccgattccaattatttcatgttgttatatatgctttctattctgctgttgtttgaccaagcacactctttccttatttagacaaaaaaatatcaaatctcaactttattgtattgtttatttgatactaccctgaagttagatgaagtgaacaagttgtaacttctttgttgtatgaagtgggaatgtgggataggtgttataaagcttgccgattacgtgcatacagagaaacagtcttattcaggaactcgaggattgcctcccacattttactcatgtacatcccttgcttggctctaagttgagtcatataatggattactgctctcctgcgctttcgaaaaaaaaataatggattactggattctcaggcctgatttggccatgcagtgtctctgtcactcttgcatgtatgctcatggatcctgtttctagagatgaaatacccaatggtgttctatctccatcttgcttttttaaccgtaattttgagaaatcaccaaaatgttttccctctaacagtaattgtagagcttagtaagatttacaactttgtagctttaaagttttttgatttgaaattatttagagtgccaaaaattatttttaaatccttgatttcaaaattcaaaatttagaattttgaaacgaccatggatgatgatatggtctatgcaaaagttgcagttatcaatgatgtataacttcgtagtcgataatttttttatctgtaatcatttcatttagagtcctaaatatttgttttgttttcttagatttggaaattcaatttttagaaattttaaatggcttcagtttagccatagaatagtatagatcgtgtcaacatctgaagctgtttaaaaattctaaattttgaaatctaagaaaagaaaacgaagatttagaatcaatttaagaaaacaaaaatgtatatttagaattccaaatgacttaaggtaaaaaatttatgaactgcaaaattatactaccacttttgtatggaccacatctaaggctgtttgaaaattctaaattttgatttccaaaatctgaaaattttaaaagattttttgcattataaataatttcaaataaaaacttgtcaactaagaagttgtacatctcattgagctctagcatttttgatatataattccatctttattcgacttcattcaaaagttatgaatctttttagataataacaattaagggttgcttgcgcgttcgagaaaaaaaagggttgtggtataatagtcatgcacataacggtcaactatattttctcactctcatccacttcttaaaattatcattttagcagtcaaagtgtcgaagagtcaattgctatggttgaagagcgtcctctagcaaagacaacattgagtaatgttcataagcgaacactaacattgaacgatatcgtatatcaaatttagcctaatatttaccacttgaaagtttcagcagtaacagtactgctcatgtagattttacattttgtaatttgtgtactaaattacctggccttcagcttcaaaaaatattacctggctttcattttcttctgttaaggtgacgttgttctaaaagacttaaaacttaaggctgaagccctgaattctctcgggtttccagtgacagtgaaagctgggtttgttggcaccataacattaaaggtacatttcttattgcaccatatatgattgtttctgttttcagttttgtggttgcattcttacatcacaatatctaacattgtgtaaacagttgcttactaaagctgttatcat

SEQ ID NO: 186076 - DNA, 604 bp, Zea Mays
gatcagcgaaaatcatttattcaagaggagtatcatattaataaaggcatggtgtttctatgagagtcgtattcttggagctcaccatggtcttatatctacttacgcattggagacgcttgttctgtacatatttcatatattcaacaactctttcaccgggcctcttgaggtgaatttactttattgtcttttatatgtatcctgacatgaaaccaatgttttattttctattcatgcgtgcacaggtgttgtaccgcttcttagaatttttcagcaactttgattgggagaaattttgtttgagcttgtggggcccagttcctattagttcacttccagatatgactggtaatctatatgtattgctttgttttgatagatcaatgcttgattgagacttggacgtattgatagttcatgttacatcatgcagcggaacccccacggattgacagtggtgaattgttgctgaacaagtccttcttggatacctgtagttctgcatatggagttgtgcctcacacccaggagaaccacagtcaaccatttatttcaaagcactttaatgttattgatcctttacgtacaaacaacaatcttg

SEQ ID NO: 186077 - DNA, 853 bp, Zea Mays
aataccaagaactggtgtattcaataatcccacaattgtttcactagatggcaatccagaattgtgtggaggagccatggatttgcatatgcctccgtgccatgatacttcaaaaagagtaggtagatcaaacttattgatcaaaatattgatcccaatttttgggttcatgtcactcgtattgctggcctactttttactcctagagaagaggacgtcaagaagagaatctagattagagctatcatattgtgagcattttgagacagttacttataacgacttagctcaagcaacacgggacttctcagaatccaacctaattgggagaggaagctatggttcggtgtaccgagggaagctaaaggaaagcaaaatcgaagtggcagtaaaggtttttgaccttaagatgagaggagcagaaagaagcttcttgtcagaatgtgaagcattgagaagcattcaacaccgaaatcttcttcccatcataactgcttgctcaacagtagataatgtaggaaatgttttcaaagctttaatttatgagttcatgcctaatgggagcctggacgcatggctacatcacaaaggagatgaggagaccgcaaaatgtcttggcttgactcagagaataagcatagctatcaatatagctgacgcattggattatttgcaccatgattgtggacgaccaactgtccattgcgacttgaaacccagcaatatccttctagatgatgacatgaatgctcttttgggagattttggaatttcgcgcttctatcatgattctcagtcaaaatgggcaggttcaattagttcaattggtgtaaagggaacaattggatatatt

SEQ ID NO: 186078 - DNA, 343 bp, Zea Mays
cacgagtctgtcgtccactttcactttagccatataattttttctctttctgtatttcgcatgcaggtggaaataagaggtattcgcatctccctcctttaaccaattcaggcgcgacctagttctggctatcgttctttccagagacgcaagccctaaagacaggtgcttgagcttctgccgcaaccaactttcatgaggagtgaggcatctaagatcttgggctttttccagctgaaagataatttcccgagcgaataacagctgctgtctgacattcccgaccttcttctgtccccacgactgcaactcccgagcgagcctagccaatttatctgctagc

SEQ ID NO: 186079 - DNA, 341 bp, Zea Mays
ttcagtagattcagatgcaatgaactgcggtgtggtgtactggtatgacctcgtgacattgaaaaggcggcgggcacgaggacgaccatgaccaacacagcatcgtggtgcacatgctagacaacaagcgtggcatgagtcggacgtaggtggctagaccgaggtcgtcacgggagtctctaggcacttgacctggttcgctttgacgacagacgacgttggcaataagttgtcatgtcaaggccatcggagtagctccaatatgacaggatgttcgttttgggcaactttaggtgcactctaccctatgactccgcaatttctagccacctcgccgtggt

SEQ ID NO: 186080 - DNA, 628 bp, Zea Mays
cttgatccggcctgaggtaccatgcatagcttcctggacttatctcatgctttgttctcattccaaacacaattgacccaaacgttgcaataacaaagagaatcacaaaaaggagatatattattttatccattcttcgttcaactgaactcctctttgatggtggctccattgcattttgcatcacctttgtatcatgtcccgtaaatattatggtgccatatatatacattgtattacgaagttttgaatcccttagcaggacctgttccggagacagagaatattgttgcccattgtagtatagtgttcctaagaaagaatacaatttctcattcggatcctcacaccgaatgaaagccttgaaactatggaaatggtcatcattcaagcccatagtcacctctaatgcctgtttccgcttcaagtttgtctcaccatcaagattcatcgtctccacatagcataatccatcacaagagctagacgaaaggaaaataagatcagcagggaagaactcatcctttttaactttaattatatcgccaactcgaagcttcttccattctgtctcatgaaatgattggatcccatcatacacctcaaccttcctattgttcacttctat

SEQ ID NO: 186081 - DNA, 280 bp, Zea Mays
gcccatcgctcgcgcctaggggagccatcgctgcctcggatgacatcgtcgtcgtgcgcccaagggccaccactgctgtgcacccctaggaaccgtcgcctcgcctatgggatcaaccacagctcacaccttggggagcttgccgttgccgctcgtgcctagggaattccacctccgccgctcccacctcaaatgtgtcatcgtcgtgcgtgtcttaggggactgccaacgcgcgtgccccctgggatccgctccgcggccactcccacctcgaatgcgt

SEQ ID NO: 186082 - DNA, 544 bp, Zea Mays
catggagccatctaacataaccaagttattatgtgcgatcttggtttaatcagaatggcattgattttcatatagcaacagctaagtttatgcatttgtaatttttacttcacatctatgtgctttctgcactatcatatgtaatcagttttggtgtttaggtcgagctgttattagtgctgctgaaatgggaatctcattcccactgaaacgaagagatcagttactggagtacgttttaactctaatgggtagggatcaaagtaatgatctcactgatttcaacactgagcttttgcacacacaggtatatgctcaagttttgacccttgtttttgttttcagatatagaataaattcttcgtttagttgaagcttcactcttttaaattagcttacatctacaatatttctttatatctttttcactcctgctcattatgtaatagcacagctacttattcaagttttataacatttttttactcttttctaaatcatacttacatatgcagagccttgctttaagtgcctgtactactct

SEQ ID NO: 186083 - DNA, 1493 bp, Zea Mays
ttaaccacagcaaatagtcagagcatgaatgttgcaaatttgcagtctagatcaagaatgaatcagatgttggtttccaatcagttaaacattcagtccattcagcaacagccccagataaaaaatgaggttttggatcaaacagaaaaggtgaattttcagtcaccacagttgactcatgatcaactactacgccaacacccaatgccgcaacatcaggtgcaacctaattcccagtttgttcaaaatcagtatcatataaatcaacagcagccaaattcacagcatcagcaggctatgctaaggaacaattcctttaaacagtctcaaatggcttccacccattcaatgcaactggcagaacaggggtcactgctacacactgaactggtatcttcacaaactagtgatcctgctgatcttccaagcttccagggtcaataccagcaaagaaatgctcttgacaatgttaaaggagggcagatgcttggtcatctatctagctctcaaaattttcatccttctgtctcacatggttctcagcaattgttgccctctaaccagcagcttgatgacggttctaatgctgtaagctatgtgctgaaaggatcgcaggcagagcaaatgctgcgtcctcaatggcagccacaaacaatggaaaaggctcctgttactactaattcaacactcgaaaagcaaatacaagaagatttttgtcaaagagcaatgtcgcaagatggagcacagcaaccattttcatcagattggcgtctttctaattgcactgcagcttctattgatcctgcattgccgaagcctgcagctggagggtttgaacaggtcaatggaaatatacattacctccgtcagataaagtggttgctgctactgtttcatgcaaaaacatgcacataccctgttggaagttgtaagttccatggttgtgttcaggtgcaggagcttttgaagcattttcagaactgccaaagtaaagattgttcatacaggagctgcagtaagtcaaaaatgatgtctcaccattataaaacttgtgtcgatgaacaatgtcctgtgtgcagcgttgtaaggaagtttttgcgccaatcaactgaacaggcatctaagcaaaaagctctcgagtctagaaaacttgctcaacaaaatgtgcctcagagaatcatgaacgggatagaaggtgatagaatggatgttgacccaatgtcagttgaagcatttgatgatcaaccattcgttccaaaacgcttgaagacgcatcctccatcacccagtggcctagagaatgatatctctgtagtctccaattatcatgtaaactcaggctttgcattgcaggaaacacagcctgagcagcttgaccacaataacaggacatcatatctgaaacgagaggtagatgcaaaggctgacatgcgagctcctcaaaagcccataaaaattagttatggtattgatggaaatgtgactgcatcaag

SEQ ID NO: 186084 - DNA, 1031 bp, Zea Mays
aagccatccaaccgcggagatgtgggagcccaggaggtcgtagcgaggggtttccttgattggtgaatcttcgatcaaggatggagcaccgggctttgctgctcggcgtggcgctggcctttctgctggcctctggctcccagggcttgaaccatgaaggttggcttctcctagcgctgaagagccagatgaacgacactctccaccacctcgacaactgggacgcgagggatctaacaccatgcatctggaagggcgtcagctgctcgtcgacgcccaacccagtggtggtgtctctcgacctcagcaacatgaacctgtcaggcacagttgcgcctagcattggtagcctgtctgagctgaccctccttgatctgtcctttaatgggttctatggtaccatccctccagagattgggaacctgtcgaaattggaagtgcttaacttgtacaacaacagttttgttggtacaataccccctgagctcgggaagctagataggctggtcacgtttaatctgtgcaacaacaagcttcatggcccgatacctgatgaggttggaaatatgacagcacttcaggaattggtaggatacagtaataatctcactggctcactacctcgttcacttggcaagctgaagaacctgaaaaatattaggttgggtcagaatcttatatcaggcaacattcctgttgagataggtgcatgcctgaacataactgtgtttggtcttgcgcaaaacaagctcgagggtcctttacctaaagagattgggaggttgaccttgatgaccgacttaatcctatgggggaatcagctttctggtgttattcctccagagataggaaactgtacaagtctgagcacaattgccctctatgacaataatctagttggccccattcctgcaacaattgtgaaaattacgaatcttcagaagctatacctttacaggaattcattaaatggtacaattccatctgacattgggaatctttctcttgcaaaagagatcgacttttcagag

SEQ ID NO: 186085 - DNA, 822 bp, Zea Mays
aggattactcaacgctatggttggcaaagttggaaaacggatggacaatcttttgattccattggaactattatgctgcatatccagaactgaattttctgacatgaaagcataccttcgttggcagaagagacaggttagcattgcttggtattttctgaatgaccttgaaccatatcgtcatttcataacattatatccttcatctatgttttgtggggtttagttaaacatgctggaggaaggcctcataaaccatccagttgttggatttggggagttaggtcgaaaagtcaatgagataaggagcctttttagaaagattgaagaatccgaggttttattcatacgcagcaaaagtattgcttgacctcttataacccttacacggaatctccactaattaaggattatccttgtgtattttttctagtccttgccaccatctgctgcagaggttcaacggacagaatgcttaagatcactgagagaagttgccacttctctatctgaaaggcctgcccggggtgatcttactggtgaggtttgtcactgggctgatggataccatctgaatgtagcattgtatgagaagatgcttggcagtgtttttgacatcttggatgagggaaaacttacagaggtcacttcaaatccatgatatttgcagttttccactgactaatttcaccattagtcatgatgtttctcttacgtttttttctttaatccaccaggaggcagaggaaatccttgaactcttaaggtcaacttggcggacactaggaatcacagagactgttcatgatacatgctatgcat

SEQ ID NO: 186086 - DNA, 483 bp, Zea Mays
atcgctgtcagtcatgcaaagagccatcagaatcacatattaggcgttatactcaccagcatggtagcttaacaattagtgttcggaggcttcaatctcgaaagttgcctggtgagcgtgacggaaggatatggatgtggcacaggtgcctcaagtgcaaacctaaggatggtgttccacctgccacacggaggataatcatgtcagatgctgcctggggtctgtcgcttgggaaattcctagagctaagtttctcaaaccatgcttctgccaaccgagttgcaagctgtggacattcactccagagggactgccttcgtttttatgggtacgtgtctgctatattctttacagtatcatattgttctgtgctccagtgagatctcaacaattcaaatacaactccaggtatggaaacatggtggcattcttcagatattctcctgttgacattctctcagttaaccttcctccaccagtact

SEQ ID NO: 186087 - DNA, 377 bp, Zea Mays
caccattgccctctctgaatttagcttcagatccatcagtcggcttcctacagcgttgcctgtgtttcttgcttttctttttgctcttccttcttgatggccttgcattatcactcggcttggtaaagctgttgactaagaaatctgaatcagacatgctattggatgttgtgggcttatcttccagtagccttgatgaattatcctgccatcttctgtgagatacatcttgagcattaaggtgcaggaacaaaatcgatggtgaggacgatgtttcagggttctcttctggagatgtaggtcgagatgaaggatcctcacttgcactctcggtgagcgatagtgatttgaagtcgtaacagaaattgaagggaata

SEQ ID NO: 186088 - DNA, 641 bp, Zea Mays
cgcggggagagctgaggccaagggggtcaggttctgcgtcaggccgccggacgtcatggagacggtgcacgaggtggccatttacatccaccgcttccacaacctcgatctgtttcagcaagggtgagaattgctcgttttgtccgcaatcccgatcttgtttcagccacggcgtgaatttttcgttcttctctatttgtgcgtgtcttatttctcgcaaaacgttttctcgggtttactttctttactgccttttagggagaacatgtttttagatagaacatataaaggtccgagctatatgtttgtattttctcgaggtgtttctgtccttgcctttctcgttcggtcggttgtttccaggcatttcttctcgcagctggggaattccgattttcctcatgattatgttcccctcaggccctcactgtaacttatgtgcgacagttgtaattgatgccgcgtgtggaacctttctggcacttatctgtcgagtgtaaacatttgccatttatttttgtttcttatgatatgtttttttggattatgcgcagatggtatcagatgaagattagtgcaatgtgggaggaaggtggcaacaaaacaccggcttcacctgccagggtcgtgcaatatgaagg

SEQ ID NO: 186089 - DNA, 275 bp, Zea Mays
agctcacccctccctctatctgttccattcctcgatcatcaccactccttgcaccatcacagaagtccatctccagcacttgtgccaccaacatggcctttgatagcatccacaaagccatcacgctcaaggacctcgccattcagatccaaaacctcaccatcaccctcaacgatgtgcccggcaaggtgaccaacaattcatcgtggttgacggctctaggtgataacgtcaccaacctgtccatcgatgtctccttcgtcaaggacgataaa

SEQ ID NO: 186090 - DNA, 2660 bp, Zea Mays
caagaattgctcctctaagttctattggagcgtaatctgatcggtttgggtcggttcgagaacttgagattgcgatttgggagttgcgggagagaaaggaagagatgggccagagcaaggcggagtttttggagcagttcggtggggactacggttacccggacgcgcccaggggcatcgacgatctgcgggccgccgagttcaagcggctggaaggtgtgatttcgcgtccttctcaattcatacgcgaaaacttgaaattgaatttgttggttcctgtaaaaatgaagacagctatttaatgtttgggttaattatgtccgtgccattataattttctacgttttgatatgtgccactaaatttcttaagcttgtaaatatgccatgaaatttctaatcaactcttaaatacaccattttgttgaatcagacgtaactcttaaataagaacacattttcgtatttccttttttacccttgttcaaagtaaacccagcagaaacgttgctacgaacgcagccattttgtgacttttcgtctctccaaacatgcgctccgtaaccctagcagccgccaccggagctgcacgcccatcgtagctgcgctccactcctcgctagagctgcacagttgatgtactgacaaacaaaggtaaaaaaggaaatccgaaaatacgtgtgccggtggtacttcagattgtgtatttcagagttgaatagaagtttaatggtatatgtgcaatcttaagaagtttagtgacacatatcaaaacgtagaaaattataatgacacagatataattaaccattaatgtttttgtcatactcattcgcatacactcctttattgggaattttgagttttgttgttgtggctaagagaggagtgacgccaattttgcattttgcggacgtgactgagagcatgcttgattaggatgagaggataatcttaggccttgttggattccgattaggcctaggactaaagtttagtcctagaactaaagtttaatctctattttggctccaagactaaacaggttcagaacacattaaatgcattatcgaaagactgaaataccccttgtatgcataagacgtcacatagagagagagagacggcaataaatgaagggcaggaagaaataaatccgctgtagtcacgtttagctaccctttgagagactaaagactaaagcaaaaaggattaaacatgactaaaaaccaaggactaaagattagttcctgaagccatacgggaccttaagctttacatatatggaaattgaagtttgctatgctagcttctaaagatgtgttggttttgagcagggatggtttacctggaccatgctggtgcgacactgtactcagaggcacagatgacggatgttgctagagaccttatgtctaatgtctatgggaatcctcgtatccttaaatttgggtcttatgtcacgaaagttcttttttccttggtagctatttacttagaaaaattattgtggttgtgttctttgacatgcttttagatagtcagaacgatccaagcatggctacaagtgatattgttacttctgcgcggcatcaggtactgcatattataaatatctggacttatcattcttatgtctgtgttttcaattatagaacacttccttaaaaatcagcaagtacacggggaagaccccaaaccctagacgggtattctaacagttcctttgaaagaaagtcagtgctggtgattggtatccgttattgattttatgctcacaagttacaacaaatgtttaaatgtctatttcagcgtatgttctaaagtggaaatactcaattatatgtaattgaagttgaaaaggagtatgtatatacttttcatgcttcgttccgatcaaagaaattgtgaattggtgctaacatcttacacaactgtatgtgatcgtcagaagttgcaaccagccttctcttgcttatgatgcaatctttattctcacaggtcctaaaatacttcaatgcatcaccaaaggactacaaatgtatatttacatcaggggcaacagcagctctgaaacttgttggtgaatgttttccatggagtagagacagctgctatatgtacacaatggaaaatcataatagtgtgcttgggataagggagtatcctaccatgattacaattacaactctacttactggctagttaatgtatatatcactatgcaagtacacgctccaatggtgcaatgtgtcatagatgctttatctacatatctttatagcctcgtgccctcagatgtatggcaaaacaactattttcctttctaccccatcatcaataggttttataaatctctaaaattgttttttgttgaaaatgggttctttcattagcagtctatttcaaaagctgagaaattcaaactgacacagtgtaccagaatgtgcattggtccaatacaaactgtagattttgtccccttaatatatttacagatatgctctgagcaaaggagctactgcatcagcagttgatgttcaagaggttatcgatccatcaaagagtcatgaaagtgacagtatgtttaaggtttcaaaacacctaaatcaaagaagaggtgatgatgtgcttctgcacaagtatcagaatgggagcctg

SEQ ID NO: 186091 - DNA, 1293 bp, Zea Mays
cacgaaccaaaaccctcctctccctcagtccctctcgagcctcgatccgcctccgccccacgcacccgacatcgctcgctacgcccacttcatcgccgcgggcgcaatgagcgcgggctggaggacgctgttgctgcgcatcggcgatagatgcgccgagtatgggggctccgccgaccacaaggaacacatcgtgagagccccttcctcttcccatactgtttcccccctctgctctccttgctctcggaaccctaggttatccgagcggcgatttatagttggggatatgagcttagcttggagcgcttggtgtttggttgccgttgctgttggtcagagtgggtggggagctaaaaaccgtagttactcgcacagccgcacaggagcctgagacctaggttttagtattattggactgctgcagtttgtgctggttaaaaaaaatgtttgtatgcttgtactaaatgctgccagaacaaaaatactggtagatcactttacttttagattttgatagaaactacgctttggaattgcgatgcagccattttcctgattgtttgtggtatccagaccttaccttgggttttgcttatttcttctaagtatcagaacctcaggcttgtgactctttgttggatgtggtatatgtaatattgctgtttgatctaactagattttatcatgtagacaaattatcacgttttaacggttctgtcaggaaataaaatctgaatggaaattattattattttgtgcttacccacctgaaagttcgcacatctgttagtgcagccagtgcagcatccccccccccccccccaaaaaaaaaaaacgaaatggaatagtttgtaaatcctagatatacaaatctggcttcatggtcatggattgttgtgcttctgttgaaacttttgtaagtgaatcagcgattttagtcgatggcaacaaatgtcccataaggtcttaacttttaagtgcaacaagtagagttcttatgatgtcatttttgttgtgcagtttaattaaatgatttcaccagcaaagaatggacatgatataagtagggtacaaaataaaggtgcataactaatttctgcacacatagttagaacagtgctccatattgtgtatttacacactatcatatatttgtttcaatgtatgaatatggatgatatggttatatgatttgtgtaatttatcttaaacatgttcttatcaaacatttgcttcataggaaacttgttatggtgtactatcccgagaatatgaacactccagagatgc

SEQ ID NO: 186092 - DNA, 368 bp, Zea Mays
gcatgagccgtggttgtggatatcatgatagagatagccatgatcaatgtaacagtcgaggtagccgatgtcacggtggctgcacatgaagccgtaggcgcgaagagatgccatggtgatgacgaagatgcattgaggcagtcattgtggaaggggtcagtgccgggtcgacatagttagggccatcgaggaagtagaagaagacatcgacacaatcgaaagagggttgatgtactcaagctgccaggacgaagtgtgcatcgaggttgcctaggaacacactatggatgaagcacgtaccggtgttgctaatactagaaatacgaggtagagggtctcaaccatgcatcaatgtctaagggaccaac

SEQ ID NO: 186093 - DNA, 411 bp, Zea Mays
gaggatttccggtccaggctggatatgtgcagccaggcattagcccatgaggaaggccgcaggaagcgagtggaaacagagatgtctgagttgcgccacatgtatggcaatgtgatctctgaatatcaaggggccaaatcaatggtcgagtcgttgagctccaagacagatggggatattgcatatttgagaagctcactggctgagaaggccacaatgctcaaggaaatagaatacagtaaggcacgtattgaacaagaaaatgaggatttgcggtcaaagctcaaggagtatcaggaggcacagattggtggtgcagatgctgttgtatcattgaaaagtctgcgggagaagttccgagccctggagcagacacatagaagttgcaccgagaagctaagaggtaaggaa

SEQ ID NO: 186094 - DNA, 527 bp, Zea Mays
tcaggtagtggcggtggttggttggtggtgttgctcgcgcgcagcggcagaggaggtgcgcttggtccgtgttggcagggaggtgcagaggagccatgggtgatggaggtcttgagctgatgcgcttggtgcagatgtgtccgtggtgccagtgggcagagttttcgaattccttggcactggagtatgagccggacgatcgacgaccgtgcgtgtggcttgaggttgatttcccatggaggagttcgaggtgtggctcaggcttgcagcgggttgcggcttttggcgtggcacagcgttggcgacggcgcagttcatgacggcttctttcgcttcctttcccagtttgtggtggtctagtgttttgttgagtgtgttgtttgcatggtggtggtgttcgcttcggcgtgttactctgtcgtcgttgtgctgagttggtatggtgtcggcgtgttgatgtcccaatccaaccgcctgttgtctgtcccccgtcttgcggagtcggagctgctcgtcgcttgtgtcga

SEQ ID NO: 186095 - DNA, 285 bp, Zea Mays
aatctaacactatgtataactgactaagactaagactctgatttaaacattattacagactctgactctatcggtctagggctctaagtctatttgggtcctgcagtcaggggtgccataagcatgatgaccatggggtggcaagcggtaaaggtgcttaatcccgacaggaacgggggaaccatcctcctgatggtggcgctacgcgcgctcagcacgcagttccgcaatcttcgcccgagccttgctcaactcatcaagggcgtggtctagcttggtgttgag

SEQ ID NO: 186096 - DNA, 308 bp, Zea Mays
ccaagttagggttaaggtttacaaccttcaaaatggtatcaaagctaggtttagcccccctctatccctcctacgatcaccttcgtgtattttggtgtgcctcctatcctaatctttctgccattgcccctcataagcttgcgccccgttccactcgttgcatcttccttgggtactcctctgatcacaaggggtaccggtgcctagacctctccactcaccgagttcttgtctcccgtcatgtcgtcttcgacgagtctgacttccctttcttcgtatcctcttccgctgcctcctctgagtaggac

SEQ ID NO: 186097 - DNA, 467 bp, Zea Mays
ggagtttaaacttgaaattgttgatccggtcacaaccgatggtggtatgctgcgccgttcattggtctaccctatccgggtgtcggtgaaggtccttgatcgaccggacatgttgcagtccctacagccgtcacctcctccggcggaggatgatcccgatcagggcaggcggcggaggcgacgtcgatctaggaggtcgtcttttggtattaatgctcccggaaaaggttcgacgacagcggtcttgcctcgggtgtcggttcatcagcgacttgggccgcgcgtgcaagcctgtgggaaggaaggagtcagggtgcctcgcctggcggtccataaacggctaggccctctggggatatttaacgctgataaaggtgcagtcaagaagatgaagcgagtttggattcccaagagaaagttggagtcatctgtgtctatttggattcctaagacatcgtctgctcttg

SEQ ID NO: 186098 - DNA, 272 bp, Zea Mays
tttcattattattaagaagaaaaagggggagacatgaatgtaaactccctaataggttacaaggaggacagacgcgccaccaaagccacctaggacctaagaacgaagaccctaggctatgctggcaaaacaactctagctgagtaccacaacacacattcggaggacatagcctgcacaacctttggggtgcagggagtagcaccctcaaaaatgcgatattatacacatttgtatataagttattgtgatattatatattccgttgcaac

SEQ ID NO: 186099 - DNA, 277 bp, Zea Mays
gtcaaactgtgatacattagaagttgaactgttctgcacatgcaatgcggttggtcttacatgaggataaccagatacttctgttatgttgttagcatgaagctgtttgatttgcttaggaataatatccccaaaacttgcagagacactggatgatagaactcgattttcattggcaaagttcgacttcaccaaagtggacgtggatgtgtgttcctgctggagacgtagagcagtcgattcactaaaacactcatcggtatcttcggcaatacct

SEQ ID NO: 186100 - DNA, 667 bp, Zea Mays
ctgcgcgctggggcagggagcttcattgctatgccgtcagagattggatgtgtggggacgatgatttccatgtgagcagcggcctggtgtccatgtactgcagggttggccacccggactctgcaagaactgttttcaataggatggcacgaaggaacgttgtttgctggacagccatggtgggagggtacatagagaatggcatgtttgatgatgccgtggattgtttccgggcaatgtggcttattgatgccattccaccgaacaggattacgttgatcactgtgctctcggccattgaggccctctcgagcttagcagaggggaaacaggtgcatggttttgcagtaagaatgatgatgcacgcagagatgtcgctgaacaatgctttgattgatacatacgcaaagtgtggggccttgcattatgcaaggcggatctttgatgataccagttggtgcaaagatgtgatctcatggggtgcaatgattttgggttatggcattcatggtatgggtgtggaagcagttgctttgttcgatcagatgctttcatctggggttaaacctgacagcattattggacttggtgttctttcagcttgttgccatgcaggtttggtgttgaagggccttaatacatacagctccatggtaaatgatcacgg

SEQ ID NO: 186101 - DNA, 472 bp, Zea Mays
cttggaactggaagcggaggagcctgtcctgttggagtccgacgctgcaggccagaatggacaggacgtcgcgacgtcgcaggaggctgccagcactgacatcacgactgtggcggtgaggtgtcaagaggagcaggtcggcgcagggcagccgaaggaaaaagcggaggcggagatgtcggatttgcaagaggagaggccgcagagcagcgaggtcgtggagacagaaacgggggcccatgagcgcacggacgatggctcaccggccgtcgttggagaagcagcagcaacacctgagggagaagatgagcttgcaaccagcgcggcagaagagaagatcgtcgaggagatccagcgagcagaggcgactgagaactcgaaggcgaacgcgaaccctgaggaaccagaccaagaaaccggcgtgatctccgaagaacccaaggagggaacgagcgtggtctctgaagaacca

SEQ ID NO: 186102 - DNA, 836 bp, Zea Mays
cccatcacggctgctttcgcgcaggctcctcccctcgcgctccccttccaagaagcaactagaagaagcagcagctcccataccccacgcccaagtacccgtccgtgcccccccgcccagagaccaacaacaactcacccgctgccgccgccgctgccgcctggcccttccccttcctccggcagcactggcagtgagcgcctgattgtttccgagacgaagctcatcacggtgcactcctgcgctgggcgcctaggggacgctcgcaaggtgttcgaaggaatggcgtgcagggacctgctcgcctggtcggccatgatcggtgcctacgccatcaggggcctgtacgaggaggtcgtcgcgctcgcggtggccatggtcagggaaggggtcatcccggacaggttcctgatcacccggattctacaggcctgtgcgtacacagaggacctggagctcgggacggcgatgcattccctggcgatccggagaggtttcatggcggagggagcgagggacgtgcccgtggggaactcggtgctggccatgtacgtcaagtgcggagagttgggccgtgcgcgcgccgcgttcgacatgatggggcagcgggacctgtgcacgtggaactcgatgatcttcgggtgctgccgctccaacgaatgggaagaggcacggaggctgctcgacgatatgaggcgccaaggtacagagcctgggcttgtcacatggaacacgctggtttcgagctacgcgaggtctggggaacttgatgtggccatggagatgctggagcagatggaggagtccggtgttgctccggacgtcgtcacctggac

SEQ ID NO: 186103 - DNA, 447 bp, Zea Mays
ccatgtcgtcgacgaccgaccagggcgcggtgcgggtgcctcggcacctcgtcgtggatggccaccagtgccggatcggtagcctgggcgtgacgtaggcggccgatgaagtcaaagcgcggcgcagaaatggccaacacggcgccctcctcagtgtcatggcgggagagggcgtcggccaccgtgttcgtggagcctgaccggtactcgacggagaagtcgaaccccagcaacttgtcgacccaatggtgctgcggaatcgtggcgaggcgctggtcgagcaagtacttgagactatagtggtccgtcttgatggtgaaacgccgcccccaaaggtatggccgccagtggcgaacggcctggaccaggccgatgagctcccgctcataagctgcgagggagcggtgacgtggagccaccggccgactgaagaaagcaatggggtgg

SEQ ID NO: 186104 - DNA, 465 bp, Zea Mays
ctggacgaaacgttgagcagtgagcactatgagcctacttggttgaatcaatgccttgcacttgtgagccaatggaccaccaggttgattcagccactcatcctccatgtcagcataaaacatgtcgccaatggcaaggacctcagcctctgtcgaaaactttggtgcaatatccccaacagatctcttctttggctccttcagctttgcatcctctggccaagctgcctcaatcttgctcagagaaatcccaagtcctttcagcttcttaatatgttcctcatcaaggaaacatggaggcgaggctgcatagcatatgaactgatcgatggccactttcttcctcttctccacaaactcctcataggtgatcacaaccttcctcccaatgcagtcattaatgtggttgatatcaagcacccgatcatactggtaatctgccttctggctgggcaccaccagggt

SEQ ID NO: 186105 - DNA, 389 bp, Zea Mays
atttggaaagtatatgtggacagatggaactctttattatggcgagtgggatacaagcaagatgagtggtagaggagcaattcagtggccttcaggtgcttcatatgatggagatctttgtggaggtttcattgacggaacaggcagtttcaaaggagttgatggatctgtatataaaggttcttggaggatgaatagaaagcatggaatgggcacaatggtttacgccaacgatgatacttacgaaggtttatggaatgagggcttgccagatggatttggtaaatatacatgggttgatggcaacatctacattggactttggaaatctggtaaaatgaatggcagaggagtgatgcaatggacaaatggcgatactcttgactgta

SEQ ID NO: 186106 - DNA, 380 bp, Zea Mays
gttggagatcggctcgtcgaggtctcggagagcacctaacataccctttatctggcaacagtacttggtgacggagaggtcgcctagacgaagatctagtagccatcgtcgaggtggagaacacgagcttcacggatgccgaggaattgctccgcgatggcaacctaggcctagcgagcaccgctggggtggacctaaagaggcttgagtgagggcacaacccccaactcatttacctgatacaaatagtagagctcagattttcaccataaggtcccctactcaacctaactcggatgcccccactaacattttggtgctcatctttgcaagtatgctcgtactcccaatttgtcttgggtccacccctactgtaccgc

SEQ ID NO: 186107 - DNA, 636 bp, Zea Mays
catttcggtgcttccaaatctcccaagcaaccaaaatgatcagggagttaagtccttttcttagactcttctcaacacttttgatactttggcgccaccagtttgaaaactgtgtgcatccaggctgaggggcaatggctaggaggcccaaattgtggaggattaacgtccatatttgtcgggcaaacacgaaagagacaagaatatgctggatggactcctcggcttgatcacacagaggccaagcaactggatggggaaggcctctttttgctagtctatcagttgtccaaaccctgtttttgatggccaaccatacaaagaatttgcatcttaagggggcccaggtcttccagacacgtcgccaagggccaaaaatgatagagccagtaaaaatgcatcatatgttgatttgctacagtaagaaccatgaccagcaatgtcaggctgaagatctaccccatcaaccaagttccagagatgcagatactccactaaaactggtacagacaagcctccccttatatctaacacccatttacgatatgtgaaccctccgctactgttctccgctttaatgcccttttaggaatcatttggatcggtgatcttctgactagcctcgatcatacgaac

SEQ ID NO: 186108 - DNA, 450 bp, Zea Mays
acctgaaaaagaagacacggcgacagtccaaaaggagctgcaaccgggttagtgtaattgtcaaggaaatcgaaggccgctggtgggggtggatgggaagcctcagaaaagggaaacgaggtttcatcaaaaaccacatgacgggagataatggtgcgattggagtggcgatcaaagcataggtagcctttgtggtggggggaatagccaaggaagacacaaagagtggagcgaggggataatttatgtggagtggtggcagaaaggttggggtagcatttgcagccaaaaacgcgaaggtggtcataggatgggttgtgaccgaagagagcaaaatgcggtgtagagagtgcgagtgttttggtgggtaggatgttgaggaggtatgttgcagtcccaagagccgcagcccaaaaattggggggaacactggattgaacgaggagggtg

SEQ ID NO: 186109 - DNA, 558 bp, Zea Mays
aacaagtgaagccttttctaatattccttctgatttggtattggatttgcaaaggatgctatcgatggatgcactatcacgtcctagtgctatggcctttacaggtgtctaacacctttatttccctcatttaagggaatatcaatggagattttgtgtccctcactggtgggataaatcatgaccaccactgatactttcatgaaatgacttttaaaataatacatttttctgcaggttcttctttcttccgggatgatacgaggttgcgcgctcttcgtttccttgaccatttgcttgtatgtatttattattcccctggataagttaaaaggttgcaatctcttgtttttgtatcagtctttcttctttgctgtctgagaatcacctttgactagaattgttttcagttgtacctgtcaactcagcagcaagagtcttgcctgtttgactagacaatgaaacgacacaatttagtacctgacaatggccctaaattttaaggcaccattcctttcaggagagagataatatgcagaagacagagtttttgaaggc

SEQ ID NO: 186110 - DNA, 1143 bp, Zea Mays
ctgacatggaacaaagacgggcaagtgtctatgctttgatatatgaatgagatgtttggaacttcctgttggcccatgttataaccatgtcgaattttttgcaggcatttcagaagttaatttatgtgtccaatcttgtctttggagatgcatctgtattcctacttccttggaaacgtctgtttggggtgactgattctcaggtaattaattataaaaatgcttgttaattttttgcatgccttctctcagttttatgctttgatctcacagagttatttgttctgtattttgaagttcagttcgttttttctggcaacgttgctctttgcatagttgttatgctgcttttgatgcagttgatatttcgaagagtttggacaaatgttcatcaagtgttaatgccactactcacagtccaaataagaatgtctttctttacttaccatggtattaagtatcatttgacattatgtttctagattgacattgctatgagggaaaatgccaagaatttatactcggtgcagctcaagtctattggaagaggtaatgctagaacacagttttgtttaggtgttagttcaattataaagtcatagtgtcatattattcataagttttgctttatcaagtaaatcatatagtgtgctgtaaagacagcaatatcaattttgttgttgttatatttattgtttgatatatctcttattgcatctcaagaacattctgaaatcacaaaatgctctcggtttaggtcttgacataggcacactcattgaagtaaggagagcacaacttgcatataaactttctgatgaggtaactcttttctcaactctgttgctgcttatttgttttttcttcatttgggatgaaatctacatcagtacttatagaacaatgtcattttatatccatgctatgatgcatatacactagctgagagtttagacaaaaataaaaggtcaattatcattggtgcttggaaaagataatagagtcaatgtaagcatgtttttgtttttaagtgacattctaaatttcttgcagattgctgctgagatgttccgtgagcacgcgaagcagctagttcaagaaaacatttcatcagcattagacatcttgaagtcacgtattccg

SEQ ID NO: 186111 - DNA, 431 bp, Zea Mays
cactggggacgtgtccccagtcgagaggttcgtgccgcctctccttgcagcctgccgtgacgtgctagaggatgagcggatgtcgcccgctgtgctccggtgtctgctcagcctgcttatgttggttgccgccaagtttccccactgcttccgtccacagtttgttgatatcatggacctgcttcttgggtgggcgtttgtgcaggacctagctgatgcagatcgcagcatgatcattgatagttttccgcagtttcagtggcattggcttgggaatctgcagttttcacttggattactgcccaagttcttggccgatatggaggggcttgtgcatgatctcaacctgggaggcagccataatcctgggaggcttcgttcgctgtttgcttgtttctctacggtactgcagattatgtcttctggtgtgg

SEQ ID NO: 186112 - DNA, 408 bp, Zea Mays
ctgatacacaaggccaagccttccatcttcagtgttaactcccgtaggttccacaatccaaaggtctctggaagcagggatggttgccgggtcaaagcaccatccagaacaacgaaagacgtcaagattccggagctccagggtatcaggatggacttcatgcacccaaacacactgattcagtagctgctgaactgttgataactcccatgcatgtaaaggaataccagtcagttgcacttccacagggatcggcaggctcactccagacgaacccaaaaacttggaccatttcttggacaacaacgagaacgtgctggatctgatcaagctccacctctctgttagtaccagagctaaacactcatttggaagcatgagcaatagattggccttggtaaactgccg

SEQ ID NO: 186113 - DNA, 348 bp, Zea Mays
gttgtttgattccatgctgcgggattttccactaatgatcgatgatgcggagttttacttataatcatttgctgcggagtttcacattgatgtcgacgcttcagatgcttgtagatctatcaaaatttgtttcagtgggcgacttctgctctgtttctatggcaacatgagcagcactaaacttggagatctgatttgttcagtgtgagcactagctacttgtttatgttctagatttgagtaggatcggatggattaacgattaggtggatgcgagctgatttgtggaattcgtcgaactatgtctctggtgccttcatgtaatcctttttgaacttcctaatagta

SEQ ID NO: 186114 - DNA, 389 bp, Zea Mays
tgcaactccatatctgaaacatccactttcctggttaaagtggctatctcacttcttagcttatctacatcatcctcttcccctcttaaccctgcctcaccagaattgcttgttgacccatccgtactagcatcaggagctgagcttcctgaccagtcaccagaactggtcaatgggttcctcacggtgcgattgttggcaaatggcgagagagcattgctactatcctgaagaaatgagttgtgtgtgcttgcgctaattttgggggtatatcgcccagaacttccatctgaacccgacactgagacggcatcgaaactgctgccattgtggagatggcccactggatcagcagacataggcacatttcttcttgatggaaacctcat

SEQ ID NO: 186115 - DNA, 521 bp, Zea Mays
aactgctgccccgaacgccgccagggtgacgcaggtggagttcgcgacaccactaagcgctgacccgaacttcgacgcggacgacgacgaggacctggagcatcggtacaggactctggagaacgtcctgggcaccatcaccgtgcctgggtgggctcatcgcgacgtcgagaaggctaagctgcacaacgtcagtgtggaggagcccaagtccttcaaagatgctgatggcgatccaaactggaacgcggcgatggaggaggagctcaagtccatccatgacaatgacacatggtcgttggctgatctccctcggggtcagcaagccatcggcctcaaatgggtgtacaaggtgaagcgaaatgagagcggcgtcgtcgttaaatacaaggcgcgtctcgtggccaaggggtacgtgcagcgccccggcattgattttgaagaggtgttcgcccccgtcgcgcggctggaatcagtccagctactacttgccattgctgcgcacttcggctggggagtcc

SEQ ID NO: 186116 - DNA, 1077 bp, Zea Mays
ggtgtagctcaagtggcaatatgccacaagagtatggctaacagttgacaggggtctgttggtttttcatttcagggtaacatgtttggcacaaaggggaacatgtttagggacacaatatgatgggccatcaaccaagggcatgtatgattgttctgttcaggtgcttatagactaacacgactagcctattaacatctgcaaactgtaatctattcttacatctgtacaagaaaacatgttttatgtgaactaattggaaaccttgttgcaggacacccctatggacgacgatgttgagttggataatgtggcctgcataatcgcggtggataaatatgtcaatgggagggggaaaacacaagaggactacactagaaaagaagctgctcagcgcaaagactcgagtgaaaatcaagggcagaatgatgctctagagctagacaacctccggatggagatgcaagctgacgaacgtccgttagaaccaggaaacaagagggacaggaagtggcagaaaaatgtatatggactcggatcagcttcgggacagaaggaaaccttgtccaggagagaaaatccacggtcagatagagggatggtccacagtaacgacagcaaaacaatttattacaggaagggtgggacggaagtcgataatgttgatgaccaccctttagaaaagcaagaccaccaggatacatcaagtgacggatctaaaaagagaagccgaccagtggacaacgcatctggtggcaacagaccatacttggatgagaacaagaagcgtaatctcagagaagatggaagatatgctcattatgaagactggagaagtgaaaggaatacagcagcagacacgtctggatataaggcccaatcagaagagaagcctgtatggacaaacactcgaacaggatcaagggagcattcactggacaggcaaaggatagagtgcggtgacagctatcgtggaacctataacaatagacaaagacatgaatggctgcacccgcacgctagtggtaattcctcgagaattggttgggatgacaggaggcagtggagttcatctcg

SEQ ID NO: 186117 - DNA, 2677 bp, Zea Mays
taatcgaacaaggctctttgatagaaaacaactccatcaaatcctaaaccacttcatatattattagtcggcgagatatttgattgtttctgttacacacactgtttcattggttaactatgtgcatactgaagaatattcttataataagatccattctatctcattctttataattttgttcttctgaagtgtttgtcatagttgtatcactattaacaaagttttactgtctgttctttcacacagatacatataccaccaccttttgggacatgaagttgagcatcaaataatacgtaacaccctaccaagacgctttggtgcacctggacttccagaactaaatgcttcccaggtacattatctctctctctctctctgtctctctctacactcacacatgtgtgtgtattctttgttctatatttcctcttttttttgcttttcatgtcttctaacatggtgcattcatgcctttgattaacatggttgtcttctgttctgggacaatctgtgtatattatatattttaaattttgggtgcagctttgcaaatttgctgctgttatggcctgtgtatgttgttattgattgtttgatctgatgttgtcttctgtattatttattgtgtattcaggttttagcagttaaaagtgtcctgcagaagccagttagtttgattcaaggtccacctggcactggaaaaactgtcacatctggtgcaattgtgtatcacatggccaaacaaggtcaaggacaggtatgggattattagaagtatgttgttcacttgtttgacatggtttagggagaattgtctgacctctaattttgtcaaatttgtaggttcttgtatgtgccccaagtaatgttgctgttgatcagctggcagagaagataagctcaaccggtctcaaggtatcgttgaaatcttatttaaatttctgcagttctccaacttgctttatatttagagttatatgccaaagctgtttggaggattaactgaacattttatgtatggttgaatgcagtactcaactgtgaacctgtcaccagtacttcagtagtatatgataatgatattcaactaagaatttatgaataatcatagcatgatgataaatgaaaaaaatccccattccacctgatgtgcccagtttttcagtatccaacttctgttggtgctgttatcctgatattcattcggtatttagtgttttctgttatttattttttattatgtgctacaggttgttaggctgtgtgcaaaatctagagaagctgtttcgtctcctgttgagcatctcacacttcattatcaggtacatcctattgttgcttttgtggaaattaatcttgctatgaatgtcactgatgcttatgttaactcttgcaggttaggcaccttgatacctctgaaaagagtgaatttcacaagttacagcaactgaaagatgaacaaggtaatccatgtttaactattgtgataccattatgccacaatcaagcattgtcgagggatgtgatgtgcaaagattattgatgagtattccgacaagcatattctactgttacaggtgaattgtccagcagtgatgagaagaagtacaaggcactaaagcgtgccactgaaagagagatactgcagagtgctgatgtcatttgttgcacctgtgtcggtgctggagatcctcgtctttcaaacttccgtttccgacaagtaattattgtcgcctcatgctgtctccggttagctatgattcctgttgtgtaatattctgatgcaacagtaaactttattgtcaggttcttattgatgagtccacacaggcaacagagcctgaatgtcttattcctttggtgcttggtgtcaagcaggtaaaatataaacttgtattttcttttcttttctttttatttatcctttattaatactcttgcaattataggttgtccttgtcggagatcattgccaattgggtcctgtcatcatgtgcaaaaaagcagcccgtgcaggattagcacaatctctctttgaacgccttgttatccttggagtgaagccattcaggctacaggtaatacctgcatatgatgtaccttggtgttattatcctttccctgcttcatcctgcaactttggcactccatgtataaaggctatagttttttcttgacttagttatagcagttacttacatttttatgtcatgataattactcctcattagacattttggaaactattgttttttgtacttcacataaatgagttcatgctgatgttatctggtttttcctgctgttatcgatctattaagttatgtcaaaacttgaaacaatggtattgccaggattaatagtcataattagaagtgagctgataactctataccatcagcaataattctaactcaaatcatctctgatttataggtccagtatagaatgcatccatgcctctcagagtttccatccaactgcttttatgaaggcacactgcaaaatggagtgactgttaatgagaggcattcgtctggaattgattttccttggcctgttccaaatcgcccaatgttcttctatgtgcaggtagcttctttgacaactatggaaatattgatgtgtttcatacacaaactcttatctggatgtgctgcatatccatact

SEQ ID NO: 186118 - DNA, 497 bp, Zea Mays
gatgaagtggaagaggttttaatcaaatggtgtggtcttccttatgatgaatgcacttgggaaagatcagatgaacctaccctgatgaaatatagccatttggtcactcagttcaagaattttgaatgccaggctttggataaagatgtggtaaaagattatgcaaatgcaaggaaccgacatgagcttaatgtgttagttgatcagccaaaagaacttcagggcggcatgctcttccctcatcaattggaagcgttgaactggctgcggaaatgctggtacaagtcaaaaaatgttatccttgctgatgagatgggtcttggaaagacagtgtcagcttgtgcttttctatcatccctatattgtgaatttaagattaatttgccatgtcttgtcttggttcctctttctacaatgcccaattggatggctgaattttcatcttgggctcctcatttaaatgttgtggagtatcatggttctgcaaggtcaagatc

SEQ ID NO: 186119 - DNA, 1617 bp, Zea Mays
gcgcaccgcgggtaccggcggctgcaggagcagctggtcacggacctgctcgacatcggcgagctcgcgggcggcggcgtccgcgccaaggaggcggaggtgtgcccgcccgagtacgacaactacgtgccctgctactacaacatcacggacgccgtcgacgtctcggatctgggggccggcgtcgtcataagctacgaccgccagtgcacgcgcgacggcagggtcacttgcctcgtcgcgccgccgcggagctaccgggttcccgtgcgatggcccagcggcaagggcttcatctggaaggacaacgtgcggatcagcgggcaggagttctcgtccggaagcctgttcaagaggtgcgcgaacaaaacttgctccgtcgctaaaattccaggtggtgggtttggtgtactggttgtgaatttggtggttgctcattgataacaggatgatggtggaggaggaccagatctcgttcccgtcggacgcgcacatggccgacggtgtggaggattatgcccatcaaatcgctgagatgattgggttgcggaatgaattcaatttcaatgaggctggggtgagttattgccatatgttcagtttaacctatgctattactagtaattacctatttgacttccaaatctagtgaaggcatacccagaagccagaactagctgaagtatgcaactgaaccaatgatatttctgtcaacgaggtgtcattcacccattcttttggcacaaaacctaattattaaaagagtcactcgctcttggtagtgctctttgtcaacacaacaccctacgaatttgctggcttctgccaaaattttctgtccactttgttttttttttcttttcaggattcaggacacctgtactttatagtggttccataagtaacccttgtgatttccgttgagcattttctttgggttcgatgttttttaaagtatttaaaatttctacttcattattttcgataaattcatggcacagttttaagcacataattgttttttttaaaaaataagtagcaggagctctgctattcatataagatcggagaagggtttcaaaaacataggtaggttaagcacataattgttgatcagttattttggggcaaatattctatttatttgggaaacagtatttcatttcattcataagttgtttccctgtctgatttatcgtttaaaatgacccttcacatcatgatttgttattcagcaacacttgtctgtcgtggtctttccacttggcggtactttagaaatcttgcatgttgagtgggctggctggaaagtgccggtctatttctacttaatttgacttgggaaactctgcatgcccaatgtgctggaaagtgtatatcagagcttactactgtgcctgcaaaagtatgttggcaggaccttaggatctccactacgatatattattaaagcacagttgtttttaaagatcatcatacaaaatacatctggacatactatgtagatcactttatgctctgattggctgaagtaagactttgggtaattgttatgtttacaggaactcttatttctgatggtgtttcttgctatgccattttcaggttaggacagtc

SEQ ID NO: 186120 - DNA, 545 bp, Zea Mays
taattcaatcggtccgagatagcttaattcaatcggtccgagatagcttacgtacataatagttgcagcaaaatcacatatatgaagctaaatcgtagcaataggaaagggggagggggcaatcggtccgagatagcttaattcaatcggtccgagatagcttaattcaatcggtccgagatagcttacgtacataatagttgcagcaaaatcacatatatgaagctaaatcgtagcaataggaaagggggagggggcaagcagtaccagttggcaggtcatcggccccgacccgcggaagattggctcaagcagcaggcagcggcgaaacggattagtttgcgacacaattattcctcttctcgtttactactccgggtaaatgaaagggcgcagcgcagtactatagtacatgaggggaaggggaagacagggaagcaggtaatggcgccctgcccttttaagccgccgccgccggcgtcttcctcctgcccccctgccccgcggcgttcctgtgggtggtgcgggcagtcggctccggcttt

SEQ ID NO: 186121 - DNA, 646 bp, Zea Mays
cgaaggtagaaaagaggcacaagaaaagaaaagtggcacaaatcacgcagatggaaaacaaggtgatgacagagggtgcgacggtaaggaagaaacataggcggcagaaggtgaagcaggagcaatctggccaaacaccatttctcaatgatgtctattcaaaggcaggggaagaagctgctgctggtggcgtcatgggcagtcagtgtgtcaagaggatcgaccgcagcaagaattccaaggttttgaagaagcagcagacactgccccaaggctttttccctcccatagccaatcccgatttcattgatcaggaccccaattattgttctccttttggtgcattttttgcccaattcgcctacaaacctgagcgccggcaagatgggaatggttcgccacttcctagtaccactggtcgcacagcgaggctgcctcctcgaggccacccgttatctgggtcttctctgcttactgcaaaagaggtctccaaggctgcccggacaacaaccttgaacaccaagcaaccatgcccagcctcagaatcaacctcagattcacaagaagaggcaaggatcgaagggaaagaaaagcctgagaagaagatgacaagggagatggcagcgagggagtctccccgacattt

SEQ ID NO: 186122 - DNA, 676 bp, Zea Mays
gtctttcaccgaactagcatctgtcttcttaagcagcaaggaaacataagcagaattcagcagctgaagtttgaagacatgtcctttataaattgcattcaaggctgcaagaatgtcactgccaataatgccccaacaagttttgtagaacctcccggtgaagccatcagggccgggagccttgtccataggtagatcttttactgatgcccatacctcttcagcagtgaaaggagcatctaaatgagataagtcctgctggaataatgggtggaagtctgccaagttgaaggagtaatttctcagatcaccagaacttcgcagatgttcataaaaatcatccactacttcttgtttctcctcttgagtaacatagattctgtcttccacctgtagcttagcaataaaatttttcttctttctaaaccgagtgtgctgatggaaaaaatttgtatttgcatctccttcctgtaaaaacagcaccctagaatgcaaacgggcaatggtgtgttccaaagaagtcaagcccaaacaatgcatcttgagttttcttcgcaaccaatcctccccctgtgatagagaacgagaatccctaacaatctccaatcggtgtagcacttcttttgccatagaaagttgtagcttgacattcccaaccttgcgatggctccatttc

SEQ ID NO: 186123 - DNA, 507 bp, Zea Mays
gctaatgagtttgaaaatgtgtatgctgatatttttacttgtcctgtggggcatcttccgatgaaatatcttggtgttccaattgataacaagaaaatcagtaaatcgctttggtgtcctatgatggaaaagatggataaaaggcttgctagttggcaaggaagatttttaagcctggggggagattgacgttattaaatagctgtctttctaatgttcctctgtacatgttatcgatttatccggctcgtaagtccattattaggaaactggatttgtacaggaagagacttttatggcaaggaggttcacaagcaagaaaaattcatctggttaactggaattctgtctgcacacctaaaaatcaaggtggcttaggggttttgaatctggagtatatgaatgatgccttgttgacgaaatggctttggaatattgaaaattcaaatgatttatggcaaaagattattacaaaaaaatatattaagggaaaacctcttatctcag

SEQ ID NO: 186124 - DNA, 424 bp, Zea Mays
gctcgagccagctgtgcgcgagtccccctggccgcgcgttcctctgctcggcgtacgtccttggcccggcgcctcctagtgtagacttgtccccacatgacatctccccctccgtcgagacccagctcgtccccgagctggaacgctagatgcttggcacggaatgtgtcgatgtcctcccaggtggccgatgcagccgattgacctttccactgaatcagcactaggcgcacaccacgtgcaagacggtagcgcaccgctcgttccggctccggaacaaccgcgccatggtgaattgtcggtagaggtggaggtgctgctggcggtgtcccatggaatttcttgagaagtccgacatggaacacgtcatgcaggcggactccggttggcaagtcgagacggacggcgacgtcgttgatcatct

SEQ ID NO: 186125 - DNA, 543 bp, Zea Mays
cggcccatcttccccatccacgcgcggtctggctagtggctcttcgcgctgacatgtggggcccaatggccagccactgcccgctctcatggccgtcatcccggtggctctggcgtgtgggaccgcttgtacggtcgcgctcggaccctctggttttcctctctggttggtggacccatgctgccaggattgtcttccccgtgggccacgcgtgaaacaggaacccgaagtcaccgtaggctattaccaccggaacccgcgaactccgccgttgatctcgctgctgctccgctcggactcgccctgcccctataaaacccggtcgctctagctcccttaaccatctcgacgagtacccagtcaccaagtgaaccgtaggcggaagggagagagaagaagattgccgccgccttgtgcatcggtcggggctgcgtctctggccgtggaaggaagacctggagcatcgccgtgacgcggggatgatgtgtgtgcccccacctggcagaatcagcggctatggcgtgcgaatttcctcgccgacgt

SEQ ID NO: 186126 - DNA, 515 bp, Zea Mays
ctgatagggtgcagcacaaagtcagtgggatcgagcaaaaaatcaagatcgtgtggacggaggcaatatgaatgatgggaaaagggaaatgaggtctcatcaaacacaacgtggcgagaggtgatgtctcgattggtgagagaatcaaggcagcgatatcccttgtggttaggagagtagccaaggaaagtgctgagcatggagcgaggagcaagcttgtgggcggttgtggctgaaaggtttgggtaacaagcgcaaccaaagacacgaagatgattgtaccgtggaggagcaccaaaaagagcaacatgggggatggaggtttgaagcgttttggtgggtaggatgtttagcaggtgagttgcgacatgtaacgcttaaaccgagtaggaagggggcatacttccttaaaaagtaaggtacgaaccatgttgttgatggtgcggatgatacgctcagcaaggaggtgtagggacaagacatgcgaagatggatgccgtgggttaggaagaagg

SEQ ID NO: 186127 - DNA, 1738 bp, Zea Mays
cttccgccgcacgcgaccggaggcggctcaccgcgtagccgcgagcccaacccttgccccgcccgcccgtccttcattccttccggtggactagccgccgtacgcctcaggcagccatgtctccccccgagaatcccagccccgcggcgccggccgagccgtcgcagccgccgccaccggctgccgcggccaaggggaagcggaagaaggacgagaagaaggatgacgatctggtgagtccgccccgcttcgagccctaggagaggtcgaactgcggtggctaaaatctcgctcctcttgttttgatcttggggttttgcttccgcctgacgtgtcggatggtgccgcagtcggaggaggatctggcgctgaaggagcagctggagctctacgtcgtgcgggcgcaggatgcggatccgggcgtgcagaagctcgcgctcgagagcatgaggtactgcccgcttcgcaaatccgcccgattcaggtctagggttgcgtggccccaagggtaactcagcttttgtggtggtcctcgtgtgatattagttgtgggtttaagtttgtcatctttgtgaagatttggttgagcttgagcgtcgtggtgctgtatgtttcttattgcctatatagtgtgtagagattaagacgagttttcctgtgtatgacaatgataattgagtgttccagctgcactcctgtagttctggacttctggtgcaaccaacgtcttatttcttgacccctttgctgccactaaaactgatctgtttcaggcaggagattcgctctgccacgagctcaatgacttcagttccaaagccgctgaaattcctccgcccacactttggaactctcaagtcctatttcgaaacaatgccagagtccgagctcaaggtatctgtgatcacttcgggccacccagctgaggtatgttgtatattggtttggcacagtgttgatgccggcatcttattgttttgcagaagtacatggctgacatactgtcagtgttagctttaacaatgtccgttgaaggagaaagagtatgtgcccaccacaatagttatcttcatattgccattattttttttttgtttaacaaaaaatcaaaccttcagctgttccgtgaatctggaattgagacatcatcttgtcgcaggagagtctgaaataccgtttgctgggttctgaaggtgatattggttcatggggtcatgaatatgtgaggtatggttgaactgaaataatatgtttcctgtctgctacactgtttttcctggttccttcaatcagtgaagtctaaatttttgtatcgtgctgtattgccaatgctactcatgctacgttatgcaaacacaataagaagttggtaagcatttattggactaatatatcacactatatcatgaaacaataagtgatcttatacaagtatatgctgtttacaaacttggtcacatcctgttcaaataacaacagagcatagggatgattgatgattcttttttgtacttggttttcactcaggattttttttttgcatagagtaacctcttcctgaaatgctgttgattcagctgtgtacttgttgggaagtttattttacctgtttgatatgctatttttttaaatatagatacactgtttgcattcaatttctttgcaaaactgttggattttacatgaataactgccctatgcagaaatttggccggtgagattgcacaagaattccaaa

SEQ ID NO: 186128 - DNA, 454 bp, Zea Mays
tcaaaatcttctttttgttcgtcaattcaccaccgataattatcgttctattgagtttgatcttttttcttgtccgtgaaggatctcgctacctgcctcctaggggcgcccctacttcagcttcatcatcgtcctccgcatcctacttcagcttcatcatcgtcctccgcatcctacttcagcttcatcatcgtcctcgccacagccgcacgctctgactacctccactatatccagtacttggcatcatccacccggtcatcctagccctgtcgtgttgtccaagttgtgtagtagctcagtcatttcttgtactaagggcgcccctgagcatctttggcatgcctgtcagcttgtcgtcatgttcgacttcttttatcaagctcctctcaagttgtgcacaattttgatcttatacactgtgacttgtggaccactcctattaccaatgttt

SEQ ID NO: 186129 - DNA, 614 bp, Zea Mays
ctctcgcagagccaccacgggagctgaagtcgtcccctcccgcagtcacccccaagcgagaccactcccacctcctccactggcgtctagccggtggctgctgctggtgcgctacgtcactggctcggggggctcggcgcaccttgtgatgaagggaaggcggcagtcagtggtccggcgcatgtacaaggcgctcctgttcctcgtcgccgaccttgtcctcgaatccgcaggtcagcacggtttccatcccctcccctcccctcttggtctccccttctgccgttctgcgtatctgccaagcgatttcaaattaggcactgccggtgagtggcctagagctgggcggcgccctctgtttactgttgcaccgccggtctgatgcgactcatcgtcagcagcctcatcgccggcgttgttgcgttggggcgcgcagatagcccgttgaggccttgtaccctcgagaggtggcgcggccctccttttccgtcctccgctgggctggtacttggtagcagagagttgagatcgctggattaatctttgttttgctataatgtgcaggactccttggttgaaactcatgccatttgtgaatcagaatggctgctctg

SEQ ID NO: 186130 - DNA, 674 bp, Zea Mays
tacgcgggggcggggcggcctcatcagcttcataaggaggaggagacccacggctacgggaggaaggggggacacgacgacgaccacgagcagcaggcgtaccgaaagccgaagccctcgtacgggcacggggacggcgacgacgaccaccaggcgtacaggaagccgaagccgtcgtacggggacgagaggcccagctccggccggaagaagaagaatgtgagcgtaggctgccgaatggccgatgggccttgaactcgtaatctgggctgttttaaacatggtgaaattacaggacgacgacgatgactctgatgacgacggcgcgaggaagccacgttacaaaaagaaagacgacgacgactcggatgacgatgacaggaagaagcgctacgagaagaacgaccgccgccgccgccacgactatgacgattgagctatatgcatgcagtctcgtatatacacatgtgctcgagtcacgcgttatgcaatgtatcatccccattgcatctcctactagcagtactgtagtaaataagcgaagctgagatgcagggggatgcatatggtggacacagttttgatttcaagtgacgccgctttacagcctacttcttccttgtttttgttcttcaccttttgtactgttctgatggtaacctgtatactcgcgc

SEQ ID NO: 186131 - DNA, 624 bp, Zea Mays
gccggttgggtacccttggtctcgagtggcggcctccctctgtaaattttgctgttggccccacttacaatgcaacaactggtgaataccaaactatcccaattattgatccggataggtgggaaccgcttccagagataacagatttcattgagcttgaacctgaaaatgaagttatctctgacgatactgattctgagtacaatggcatggatgagtattcaagtgaaggagaacaggatattatgagtggtgattcttcaggtacttcatattcgagtggagaaattgatgcagataaccctgatagtgctcatctccgccgatcaagaagaaagaagaaaaaatctgaggtaagtaccaactctcaagatcatcctatattacttggtgtcgtgttctaagtttcgacatgttttctttctattacatcttctgcaggctgatcttgttacttcatctggtcggcgagtcattaggaaaagatttttggatgatcctggtgtagccacagtgtcaaggccacatagaggaaggaaatctaggaatggatgttctagtaaaaagaaaagatcccctaaatccaggggtttgcgacctcggagacgtgctgctgaaaccgca

SEQ ID NO: 186132 - DNA, 670 bp, Zea Mays
tatcactatctgtggataactcacaatcaatgaaagcggatgacttcatagcaaaaagaggtagacagatctctagtgatggtgaactttagatgtactctattttattagagaatctatttagatgttgataaggatgaagatgcttgctcaatacttttatatatctacttgatgttctcactgcattatcatgcctctagttttgcctttccatccatatgttttgtaacttggcagcttgcaaaacacaaatgaactgtgagaattaggtaaaatgccaccttcaagctccacattgatcaacaaaattcgcacttgtctcatgttttcgttacacatttattgatgctgccgaccctacattcgtctcatataataaaggatttaaaactctcagtgatagtttatttgttacctgtgagcccactatggttttctctgattttacttgtatgtggacttctttcccagctatggaggcagttggagctgctgaaacacggcatggagagtggtcggtaacaagattacgttctgctgcgcgtggcactgctaatattgagagcttaagtttgggtgttggaccaaggggtgggcttggagaacagggtgattctgtctctcgtctgcttgttcttacaagtacttcacttgttgaaagacgtcc

SEQ ID NO: 186133 - DNA, 972 bp, Zea Mays
tagctggcaacgtcatcttaatcttcttacatggcctgagatattaagacagtttgctttatctgctggttctggaccccaattaaagaaaaggactgtggaagattctcactatcattatgataatgaggtatgtgctcctatacaacccacctgtctctaagattatttcagttcaaagtatatctctaatattatttactctcctaataatatgtatttctcactttaatcagtaagatatttgaattttgttataattttctccttaactgatacagtactttgtaaacgaatggtcaattgatatttgtgaaattcaaaataatctcgtggatgctgtcagcaacttaccagtaatactaaggctgacctgttttgtttgcagtccttccaaattttgtgtacttaaactacatcatgttgcatcaatttacggtactaaatagtaaatattcatgagcctggtaaattgctatcaagaaatgatgagattattaattacaaatataaattgattctagagataaccagtttgcttgtttctagcattaactgtaaaatgctggaaatttgtgatttggcaccttggttctagtggatcggatgaatgtcaaaagtcaaaactgaaaaggtattgttgaatgtactgaaataatgacaattctcatgaacaattttcatatatctgagccacatgcatataatattagttctcagaagcggtattccatgagttcacaccaaattctcagttttttacatgacaagaaaaaacttctaaatgtattttcacaaggtcgacacgaaatttattgcagggtcatgatggtgagaatgttatattggcacttcgaaatggtacagcagcagtgaatgctgttgctaagatgaaggaaagaggttacaccaatcgccgtagatcccgccaccgtctgactcctggaactgtgaaatttgccgctttccatg

SEQ ID NO: 186134 - DNA, 859 bp, Zea Mays
tgcctttccaagggagcacctgctacaccattaggcaaagacaaatgttctttgccatcaatatcatagatgtgaggatctcttgcttcaggatcgaactgtccagaaaacccaacaccatactcatgccaggttttgccagcatcatgattcacatctgatgtattaggcttttcagtctcagtaccatcctcaatgtttggtgcaaaatttggattgtgtatgtaatgggccataggaggtggaacaaatccatggaggaactgcatattgggtaaccatggtgtcccaattaagttagctggtggaaccccggtcaaatgcttttgtgaaaaagatgttggagccaacagtgggggatgcgctacagacatatgagaaggtatttgcattggcaattgaatctgtccattgaatccatgcaacttcacggattccattaaattaaccagaacttgttcgtcatggtgcatatccgacgattcagaaacagaagggagttcttcattcattacaaaaccattatcatcacgatagctgcttgaaacactatttgagtccgaagctgctgcactagggtgagataaacagttcaaggaagacactgattcatcctgtgaagacttagtgctgtggttgctagacatttctggaaccaggatgtttcttctgctgctgtaatcaacacccaaagatttttccataccaactgcattagtccgcctgccacgaaatccttctgcagaagagtctgtgagttcaggacttgatcgggttcttgcaaatctagacctgttctgcccatttctgtcattgacaaagagaccatttggcactctcttatccctttcactttgca

SEQ ID NO: 186135 - DNA, 485 bp, Zea Mays
gagatggaaggtggtgttatgggaataagaacatcaggtgtggttgtgaaagatgatggttcagatgaaaaatcaggaacggaaggaagacacatgaaagaagtggattctgtgggataatatgaggggtgagtggacttgttgtaaaaaaaagggcgattttcattgaaactcacatctctagaaattcgaatacgacgagtagatggatcataacaacgatagcctttgtgttcaggactgtatccaagaaagacacactcaacagattgagcagtcaatttagtccgttcacgtggtggtaacaggacataacatagacagccaaacacacgaagatgatcatatcgtggagatgtcccaaaaagaatttcacccggtgttttgccagaaagttttgaggatggttgtctattaatgagatacacggcagtggaaacagcttcactccaaaaatgtgaaggaacaaaagaagatatcaaaag

SEQ ID NO: 186136 - DNA, 298 bp, Zea Mays
caaagaacgatgttgtgtatagacctgtgtcacaggaggcttgatagtgtagtcgggactcgggaactagaacagaagtctctgaagaagacaaagacgtggacatagaaggaggcgcaacatacgagggcacatgaggaggaggagacacaactggaggtggtaggcgggagagtggcacacttgctatagcagaatcagggatagacatgaaagacagaggatcaaccaaagatgcaaaggaagctttagaagaaggacgagggtagaaaggacgagtctcagttaagacaacatc

SEQ ID NO: 186137 - DNA, 312 bp, Zea Mays
gaagttcccggatagtgacccaaacttcttcattggagaatggttcatcaagctcggaaagatcatggtgttgcagccccaaggactgtaaatccaaagtgaaatctctttgctcagctgaaccaagaaacatatcaaaataatcatgagctgcttgctgcttgtcctcctgacctgtgaccagctgatcttcaacattgaatttagcaataaaattctttttcttgtggtcacatgcctgctgatgaaagaaagaggtattggcgtcaccttcccggaggtaaagaatgtgggacctcaatcttgcgaccg

SEQ ID NO: 186138 - DNA, 368 bp, Zea Mays
gcctggccaggaaccatcctctataacacaagacccagcgaacagagccaatcccagccgttaatcacgctctggcccacaggtcattgcctcatcaatcaggcttaagtgcttgcctccttattagtcaaggatgcaacggtacgatcctatagaactgatcctgttcaagtaaggtcgtgctgaactctacgaggctcagcattataagctggctaaccttggtctgcgcttccgaggtggtcctaatacgttcgctaagctgttcagctcaacacgctagttcgacaaacaacttctctgattttaacatgcttggaaaaggtggattcggaaaagtttacaaggtaattagaagttttagcttg

SEQ ID NO: 186139 - DNA, 654 bp, Zea Mays
tgggacaatttgaaggaattatccttcaaggtacgttgaatttttattaatcttctgctccatctactatatgggtctattacttgctaataataaatttcgacagactaaacttcttaaagtgtctcagttatgacccgtagtattccataaattttttgctcagtaaaattgtgtcaaatattaccaccaaaagatagatcgtagtcagtaagaatttcagaaaaagcaacagtactatatatttagcgttgtaattttctatgctcttttgtcttccactgtctgcagatggttgatgaggccaacacaaagctcatgagggattacgtcgtcgaggtcagccacattgaagacgaaaactaaaacatcaagtggtttctctttgaactactatattttataggcgaacgataacatcaaatgctttctcttgaaccttgcctacagcattttataagaggcttgcatgtatatatagaagatgtataggttatgaagcgcactagcttgatcctgaaactttgtatgtagcataggtactaaacatagtaagcgcattagcagtgatacaccgtagatgtttagcattacttgaataaaactcggcacgcatacaccgtgttactttcttgatcatcaataggagtgaga

SEQ ID NO: 186140 - DNA, 416 bp, Zea Mays
gtggtggtatattttgttgggcttttacttgatatacttcgtcataatctcgaatcaaaaggctctgatacggatcacctttcaagtactggtctgtcgcctgctggtagacaagcgttagaatggaggctcaaacatgccaaacattctattgaagacctggattggcgtctatctgttctaaaacgtcttccacctctgtctgagcggcaatggagttggaaggaggcattagttcttctacgtgctgctccttcgaaattactgaatctgtgagtttttctatgatgtaatttgtcctcctgctatattctgttgtatttacattttgtgctttaccaaagtttctagtattcccatcggaagggggctcttctcccttctttgtactgttcctcttttctctattgaaatgg

SEQ ID NO: 186141 - DNA, 747 bp, Zea Mays
cacagattaaacaccttatgctgatattatctgctgttgttctatggattgaacctcctgatgtaatcacagcatcaatccgaaatgggggaagtgaaaggttctctcaggatccatctttgcaatcttgatttaacccgagaaaaaacttgagaaatgctgatgagcgagatattcattgtgttgcagtgagttcatagatggttgccatgccttgctttcaatcgcatctttaactactggctcactttttgacaacctcctaaaatctataaggtcagtttgttgtacattatctagttggacatcacaatttaggttaatttttggtaactcgtcccttgtattcctacatattagtcaattgggccttaatatggcactactatgtccaatttgtaagatggtaacgtaaccaagataccattgctacatctctgattttccttggtgtatctggctctttttgtaatagtgaaaatgcatattgtgagtatattcagaatattttgtacacttcatgcaatttattattacaatatcagctaacctgagattgctattctattttgtttaacatggacatgcttgcactttgtaggccctatggtacagttaatctgctttctgctttgacgtcagaagctgtcaagtcggttctgaataaccagagtgaagaggaaacctggggcatagattcccttgatattttgttagaaacatggaatgttcttttgggggtacttc

SEQ ID NO: 186142 - DNA, 318 bp, Zea Mays
ggcaaattgatcacaaattcaagtgcaaacaaatgaaatcattggatcttgccgacaagttatcctgtggaggtgaggccaacagtaagaaaacatcaggtttcggtcgcatctcattggtgcctgcctgtaaaaagataagcaaggtatactgttttatataacctataaatctgtttgtgttttaacttctcaatcatctgcaaccattttttgtttgtgttccccatacacagggtcaggtcctctttccttatgatgagttcttaaagttgtacaactggaaagaccttgatgttgtaccttgtgggcttatga

SEQ ID NO: 186143 - DNA, 433 bp, Zea Mays
cgcgccgaagccgtacgtcgaagcgtcgcactctacgacgaactgcttggtgaagtcagggagcgacagtacgggtgcggatgtcacgacctccttgagagtactgaaggcccccgctgcgtcgtcgttccatcggaacccctccttttttaggagagcagtgaggggggctgcgatgatgccgtagttgtggacgaatttcctatagtagcctgcgagcccgaggaatccacgcaccgccctggccgagcgtggttgcggccaatcacggatggcctgcaccttggtcggatccatggccacgcccgacgccgagatggtgtggccgaggtaggcgatggtgtcgacgccaaaagcgcacttggaacgcttaacgaagagacggtgctgtcggagcaccgagaggacgacgcggaggtggcgcaggtggtcc

SEQ ID NO: 186144 - DNA, 706 bp, Zea Mays
ggaccacgaggcgtacggcgccctgctgcgcgacgcggaggggaagctggagcacgtgtaccagatggcgatgcacgggagggacatcaagaaggtgggcggcggtgatggcaaaggggaagagggttccggggcggtggacgaggaggtggtgcgggtgctcaaggacgcgggggaagggaaggtggtggagcgggtgaacctcgccgatcggcagatgcgcctactgccggagcccattggccggatccgcggcctcctcgcgctcgacgtctcccgcaaccagctcaaggttagggactcgtacctaagcattcgcgccgtctccctacatcatgcattgtgacgtccacgaattttctgaatgagttgttgggattggtcgaatggcagtattttgtagtgatcatatcgaagttcattctcccttgcacattgcacaaagtgctttgaaattaaagtggttttctgtggaattaaagtggttttatgaaattcttaaaccgattcacatgaaaaggtctgtacaatttcggttaaattttcgcgttcaaacggatctaaattaaactacacatgtggcgctgtggcagttcagttcacgggcgaattccctgtttggcgccttcaacagtgatgttccttgcttgaattcgcaggtgattcccgacgcgattggtgggctcgaacacctagaagaactccg

SEQ ID NO: 186145 - DNA, 627 bp, Zea Mays
cattcacgtcctttctgcctctccataagaaccctctgcgaatcttatcaatcgatttgatcacccacttgggaatactcatggcaatgaggagataaatagggatggcagagagaacaaaacgcaccaacgtcgtcctgccagcgagattaagtagccgagccttccaattggggagtctatctgctatcttctcaacccagtccataagatctgcctttctgagctttctatctgatattggaagacccaaataattacaggggaaggacgccgagctgcaaagaagaaggttgcaaccctgctgcacagcctggtcgctacatttaattgggatggcgcaactcttgttcatattacacaccagtccagacgctgaaccaaagcagtccaatattaccttaacacaattcagatcttccactataggtttaacaaacagaaccacatcgtcagcataaatagaaattctgtttcggacattcccttccagaaggttatggagcagccccttatcttcagctagcagaaacatactactaaggacgtccattattagcacaaatagcattggggaaaggggatcaccttggcgaagccctctccgatgcctaataggaataccag

SEQ ID NO: 186146 - DNA, 314 bp, Zea Mays
ggtgttgtagattcttttgtgggaaggcattatgctaggcgccaaatttagtttgttaagaagtactaaaagttaggcaataattaaggaggcttatcctcccgggagagttattttatcccctagaaaatctgtaatatggttaggcacctaagctataaaggtggccttagattgtactaggagattatcaaagaagttgtgcctgtgggtgcggctgcttgatcaccctggcagaacctacgccatctggtgatcttagctcccagccgccacacaggataccctattccctgcgttcttctactcaatcc

SEQ ID NO: 186147 - DNA, 342 bp, Zea Mays
ttgacccccaaaccgccgtctcgcactctcccgcctccctataactaatctcctcctttccactccccgccgcgcgaaaccacacgcggcggccgcctcctccaccacgccgatggcgacccctcactcacccagacccagctgaacaactccctccaccaagcacacgcaagcaggagaaggagcaggagcaggagcaggagccgagggcggcgacagagaatagaggtagaggaaggcgatcgacgaggagctcggtctcacctgctagcggcggcgaccatggaccggatgctgctcgaccagctggccggcgaggccctgcgggaggtgctgcacgcg

SEQ ID NO: 186148 - DNA, 514 bp, Zea Mays
gttttggcaaccaacattgcggagagtagtatcactatagatgatgttgtctatgtgattgattgtggtaaggccaaggagacaagctatgatgccttgaataagctcgcatgccttcttccgtcatggatatcaaaagcttctgctcatcaggtatgttactgctgacaatatgtaactaggctctttgcagacatgaaaagtccattaacagatgcagttctctctttattttattcacagaggagaggtcgtgcaggccgcgttcagccaggtttttgctatcggctctatccaaagatcattcacgatgcaatgccacagtttcagttgcctgaaattctcaggactcctttgcaagagctatgccttaccatcaaaagcttacagcttggagcagtatcctcctttttagccaagtcactgcagccaccagatccactttctgttaagaatgctattgagcttcttaaaaccattggcgcactggatgatatggaggagctcacttctc

SEQ ID NO: 186149 - DNA, 486 bp, Zea Mays
gaaattcttgcaatatcttctgcatccgcttctgatacatgcaaaatggagtttgtgaatcagcaaagaccaattgaagcagatgcatcgaatgcttcacttaaccagcctcacattttcgctatatcttctgataataaagatatagagcgcgaatgtcctagcccaactccaaggtctgaatgcaaggaatctcttatggagaactcagtattaacaccagcgacgcctgaaattcttgcaagatcttctgcatccgcttctgatacatgcaaaatggaggagtttgtgaagcagcaaagaccaaatgaagcggacgcatcgaatgcttcacttaaccagcctcacattttcactgtatcttctgataataaagatatagagcgtgaatgtcctagcccaactccaaggtctgaatgcaaggaatcccttatggagaactcagtattaacatcagcggcacctgaaagatcttctgcatccgct

SEQ ID NO: 186150 - DNA, 551 bp, Zea Mays
ttcgatggtgtacagaagagtttaccggttgtttcacccatcttgttattcactatcttgatattcaccatcctgatcagaatgtggccaccaatggccaccatcgagtttttgacatcacacctggtaggcaggcactgacctctagacatgctgccttccacagttccactcatctttctaccatccttggttgcagtccttcctccccccagttcctagagcccagaggtttggcgctgcacatcactgttccttcttcagtccactcatgtagtcatgtccatggatgaggttttttcctcttgaattcagtgggacaaccgttatgttgtgtttcttggaaaaatgtctttcgttagtgttggtcttctaaataagcgtcacttcataccactttggatctgactacttatcacaagaatgatcaggtaagaaagtccagattcctctatcctttgtagtcttgcagatgcttattattctaactatattagtttatttaacctttgcaccagaaaatagcaatattcttggtcctcacttagata

SEQ ID NO: 186151 - DNA, 430 bp, Zea Mays
aaaaccgggaagtttaggccaaagactttcaaagtggaaccgacgcttcccacgtgtaacagtatgcaggcccaacaacagaggacagtgatcgggaacacctgaggctgcactttggaggaaggaaccagggaaaatgtcatcccattcagggcagcagaataccttgtccagccttaccaggataggggaagacctttcgtccgatcaggtaaatttgcgcccgtgaaggggaagctccttgagattagtgtcatctaaaaacctccggaatcttcccatcattgccgtattcagattggcattattcttgtcagcagcttggtaaaccatatacaccggtaaaccatactcctgcaagaaccgaagcttttgctcatcttcctgaggaccatatacaccggtaaaccaccagttcctgccgtcttgt

SEQ ID NO: 186152 - DNA, 2430 bp, Zea Mays
agttcaaagcagacactacaaatgagcatgttttagcatctctagctgaggagacaaagaaactgctgaaaaaagatacagccatttttacacctgttttgacaaaatggcatccacaggcagcagttgtttctgcttccctcattcataaactttatggaaataaattggtaggttatatccagcatatcttttaaatgaatttgactttgtaactttgtgattctgcatgcttacatagaagcgttttccagagaccatttcttgagcatgctgagcatcttacggaggatgtggtttctgtatttccggcagctgatgctttggagcaatacgtaatgtctgtgatggcctccgtcacgggagatgatggtttggatagcctatgcagacataaactagttccatatcaggtcagcttaaccttcattaagcagtattaaaacttagataactgcaaagcaacccatttatttaccctacattttttgccattttatcaatcaatgtgtggtgcacaacgaaagatagataatgtgttatgtatttaagtgcattgttggtgtagtgttgtttatcctaattctctgctttctttttcttagattgaaagtaaatctggtacattagttttacgctgggtaaatgggcaacttgagagaattgaaacttgggttaaaagggctgctgaccaagaggtaacacacatttgtgacttctttgtttttatataatttctttgccctaattgtcttattactagtacgaccattcaccatgggatttgaaatgaaacatccaagttctttatatactcaaagtatcttttagcttaattgctagtttgacctttagtttaacaaagtaaaaacatatgtgttagtttattgtattctgtctaagtattatgggccttggcctagcccatgtaactctatttttttaatatatgcaacactcagctcactctatggactagggttttcattcctcaacatggtatcagagccagcagcctctctccctcccatccctagtgccataatcacctcctagcatgtaggtcgccggcgcctcctccaccctcccctctcgcctctctcgtcgctgggcggctatcaccactaccgcaccccactcttctcctgtcgtcgcggccgacgcggggctgccatcctctttgtgcggcacagggtcgtcacccttcttgttgggcgtaggcgctaccgcgatcgccttctcgagaaccgccgcgaccgcctttctactccccactacaggcgttgccgtggtcgctgtcccaagcgcccctctgcccgcctccccctcgacggcttggggcctagccgtcccaggtccagctgaccttgcctgggcatcgccggccagggcccaggcgtggtggctctcggcctaggcttggccctgccctttctagctaccatctcgagtgtcctatttgggcccatggtgtccttcatatataaagagtagttatatgggccaatatggagttatggaccttaacatgggtcactatggtgggctaggttaggataacttagcttagttagttggagctttttgtggtcagggtgatagaagaattggagccgatcttctgagagataactcaaccaagctgtcaacaaccaagtaaattggtctataactccagattacattattgaaccatattaaagtctagaacatcaacgacttagagttcaaatgcatctaaatgacaaagagaatagggtattcataattttcagatttgaagcatttaccaaacatgtagatcatcatccaatccaattggaagccttctctttcatctccagctgatgttgcaatagatggcccagctgcaacaggtgcttcttcctccatatcctcattagaatcatattctcctccatgtgctgctggttcatcttcatctcctcattgccctcttcgacaatatctagatctacaactatagtattctttgcacgtttctgaaccctaatgggcctagaccaaattcttcgagaggctggccctagagcccatgacatcacacatcgggctagtcgatggccaccctagtcggacgactagtcgtgattcgtcaccgactaatcggacgactaggtttttagtcgacctcatcggggagacttatcaagtccataggaccgataaggttgactaatcgcgactagtcagatgacttgaaaacattggaccattgcttgcatttccttctcagttctttactggcttattttttctttgttacattagttaatacttttaaactacaattatcgttttctatgttcctaccttctctattctaatttttatgcttcgcaggtttgggaccctatatcccctcaacaacgccatggaaattctattgtagaagtctatagaatcata

SEQ ID NO: 186153 - DNA, 344 bp, Zea Mays
tctcctcagtagcacatgcctgtccagaccacacatccaaagaggtagatgtcggtatagttgatgtcagtgttggagtagatatgtgcggggttgatgaatgttgggcgactcaaccccgatagattgggcaaatgatataagcaacaacaggtgagaaccaatgttaatggagggcgacagggtaggtcatcaagaggtgtcttttggttacacatgcaacatggcccacatgtgggctcaccatgcggattagacaaatctcgtcgacgcgggagggagcggtagtgtagactgtagagacgacatggatcggcggtggggcaggttggcgactgtggagg

SEQ ID NO: 186154 - DNA, 359 bp, Zea Mays
gtcctggatacggttacgggtacgccactgggcctggtccgggtcctggtcctgattatggcggtattggcatgaacggcggcggtggttatgaaccaggccatggtgtcatgtatgggcaaagctatggtggcagcggcagcggcggcggctatgatgaccagggctatggtggcatgggcagtggtggcggcgctggcggctatgaccaaagctatgctggcataggcggatatggccagagcttctttaacatcagctacgctcgcagccagccacctccaccatctgtctcgcacgagcaacgcctggaggcgactaatgccagggtccactactattccggcaatggcgagcag

SEQ ID NO: 186155 - DNA, 576 bp, Zea Mays
cagccggtcctgcactaggacggcgccggggacatcatctgttagtgtgtccatggtgtgatcgtgggcggcgcttcgttgcctgtgtccagttcgataggcaaaggaagaagaatcacgctgcctgctagctgaagcgtcacgctgcctgctagctgaagcgtccaggggggttttcgcgaaaattgcacagggaggtggggagaggtggaaggagtatttcgcaaaattgccggctgtcgttggatgggagatggatggccgagatttaatatgcgcatgtgagtacggtaccggtttgagcacacgatacgttgccgtccttaatacatttcccatccaaccatctatccttccagaagagggtattggctccatcaccgagcttagtaataatggctgcagcgatcagatttttaaccaccttacatacacgagtggggaagtccgtccaaggcctactggggtctgttttctgcagccatggccaacgagctctcagagcccaacataggttctttagctcactaatcccaagaccacccagctccttggacgggtaaccttaggccaagc

SEQ ID NO: 186156 - DNA, 335 bp, Zea Mays
gatgctttattatgattatgatgccaaatttgtcatgtgagtattgtagaaagagggaagaatggattgaatcaccacacccccattgagggtggggagcctgtcatatatagccaataggcatgcatggaaggtacatgtaaggaaggctattccttgtacaaggaaacagacctaggctatagatagaaggtaatcctagtctatacaaggcagctagccaatctaggggattacaatcaattgctaatcaggctctgattgatcctgatagatacatatcctaatacccgcccgcagtctgagcgggaggatcacggacgcaaagactgttc

SEQ ID NO: 186157 - DNA, 647 bp, Zea Mays
atcaacatattatttgctgtgccatatctctcctacaaatatgacatcaactttgtgtcccaaaaactctagtaacagtccaatcgctggtcaaaggcttgtcttaaagacaaacaagccttgttgtttcaaatggatggagtagcataccatttgaaaaaacaggagctaacaaatgtatgtcacgttggcttcaatttagtaacgggctaaatggacatcacagtttcaccactacagcagctcattctgccatgcaggcaatggcataaccaaggccaagacaagctttgaccatgcaagtccaggtgtacagtggctgctccacaggatcacacttgatccttctatgtaaagttcagcaaggcaatttgttagataatattccttcaggatcacacgtgttagtgtcagttagttagataagacatgagacatatttaactgctatgttatgcctctactatcattaggagatcctaaagatcaacctattccctcacttccattctctaatctctactcatctaccttcttacatgcacctctcaatggtatcgtcagacacaggcaggatgccagcagccagccaaggatcggccagcaacctctcacagctacatgttgcattccttctcccagtgata

SEQ ID NO: 186158 - DNA, 456 bp, Zea Mays
tccattcagacctgcgtcagctttctattggtagtgtgatagtgaagagttatggccgttacgacgtaaacgggtttcgcttccgtacaaccaaatttgaagcttcccgtcctttagcagctatgaaaaataacggagtcgtaatccgggctgaagatatggaaaggcacgaatccgagtattacggaatcataaacaatatactcgagtgccaatttgtagggaacaaggatctgagggtggtgttttttgactgtacatggtttgacccgaagcattatagaaccgaatttggaatggcgcaggttaaacacaagcaaatacttcaaggggccgatagatatgtccttgctcatcaggtggagcaggtatattactcgtcatatccatgccctaagttgagcgcttggtgggtcgtatacaaaacctacccccgtgatcggttgtccactcctg

SEQ ID NO: 186159 - DNA, 317 bp, Zea Mays
gctgctactaagccaatgcccgctatgaaacgcgcacaacaaaatttatgccgcaagcttggacttctaaaaactgatgatcggtcggatttcgacgtttctttgcagaaattcaccactctcttcaaggggccactgccaaaggaggtgattgctgctttagagtccctcttcaacctgaatactgttgatgcagagctcgtggatgaggcactgatggaagccgctggggacggtattgcagaaatccaagagagtgcggcggagttgcaggaagaggccaggcgcaatgcctgctcaagcctgctggtggctgc

SEQ ID NO: 186160 - DNA, 373 bp, Zea Mays
cacgcaacgcaagtgctcttcccttcttctctctcggttctcgccttctcggccctcctcctctattcttccctctcgtccacggccacaggctagccggccttgagcgcctgtgacggcgcaggttctggggttgcaacacgcccctccgcccttccggcgcatctgctgaattccactctcctcttgcccgccggcgtcgcctcttttctttgctatcgtcggcctcggaccccaaagacgacaacagcaggagggcagcgcacctgtgaaagcggcgcctctcttgccgttaaatttccgcgtcgcctggcttctcttccgcactctgctttcaagcccctctgccatgaccgtgcccaccaaagacgac

SEQ ID NO: 186161 - DNA, 2045 bp, Zea Mays
gtctctgacaattgtgttgtctcagaggacaaaacattgatgagtgaaggtgaggtcaacatttggtggtaatggcatactagttgttaatttattctctgcatagccaaatctataggctttaattatgtttaagttatatggcatcacaattgtattattattttttgatcttctttggatgctggaaagctggcatattaataccctattgattttgtgatgttgtaattagctttgtccattattgtcatgttatatactcaaagggagactttgttggtccaaaatcaccaaatggtttatcaattagtttcattgtcgcagaccgtgaagagcaaagccctgtgtccggagaacagagagttagcttggaagcaaatgccaatgagcctgaggaaaagaacctagctaacgtcacatcaactgatctccacaccaaaagtctgcagcatgatattgacagaatagctaaagagactgataaaggtacaactgaattaatcctgtatccataataaaaactctgcaacattgatgagtgaagataatatgtatgctgaacatctaaatccacctgtgccagctgattattcactgttttttttctaaagatcttgcttagtaatcttgcttcaagattttcaattcactaaattaaacttgctaaatctccagatgttttgtctttggttttccctattgaagagcatgaagaaaaatatggagtgagccctatagctgttgaaaagtgcgtctgtcgtgaagcaagtgcatgtgaatctgcacgaaaacccctaaccgttatcttttctaacaatctccacaccaaacatctgcaacatgattgtgatgtgctaattaaggagactggtgaaggtaatattgcattaatacttgttccacaacttgttactgatctgtggagatggtgatgaaaacttgtgctgtttgcactgtgtttaatttaccaattttaaacatactgagttctaagtcaagttgttggctacttgtaattctaattatttttaataggctttatgtttgttctatctggaacagctaggcatatgtttcattgtcatttgttgtcttttaagtatcttacatttttttgaatgtattctttccctttctcagaagttttagctcaggagaattgtaatgaccagcctgttcctgcccagactgaccaagaaattaagttaaacgatgaacttgctgatccgggtatggactgtgtttaatttaccaattttaaacatactgagttctaagtcaagttgttggttactttcattctaattatttttaataggctttatgtttgttctatctgcaacagctaggcacatgtttcattgtcatttattgtcttttaagtatctgacatttattttttaaatgtattctttccctttatcagatgttttagctcaggagaattgtaatgaccagcccgttcctgcccagactgacctagaaattaagttacacgatgaacttgctgatccgggtatgtactgtgtttaatttaccaattttcaacatactgagttctaagtcaaattattggctacgtgtaattctaattattagatttgtgcattattgtcatgttatatactgaaaggaagactttgtcgttccaaaatcaccaaatggtttatcaattagtttcactgttgcagaccatgaagagcaaagccctgtatccggagaacggagagttagcttggaagcaaatgccaacgagcctgaggaaaagaacctagctaacgtcatatcaattgatctccacaccaaaagtctgcagcatgataatggcagaatagctgaagagactgataaaggtacaactgaattaatcctgtatccccaataaaagctctgcaacattgatgagtgaagataatatgtatgctgaacatctaaatccacctgtgccagctctcattcactgtttttttctaaagatcttgcttcaagattttcaattcactaaattaaacttgctaaatctccagatgttttgtcttttg

SEQ ID NO: 186162 - DNA, 526 bp, Zea Mays
gattttaatcgactatggctgaagctttgattattacatcagtgtattttacatgtttaactaattaacttatctattgtacaggagcgagtaattaagaccattctttttgtggcatccatactgcctcacatctgtcaaccactcctcattgtgtctactactactactctctccttgtgggagactaaattcaatcgcttggcagcatccatcaatgttgttgtgtacaatggagagaaagatgtacgcaaatcaatacaagatctggagttttatcaggatggttctgtgatgttgcaagttctcttgtcccaccctgatgccatcttagaggtactattattctcttggactcagcttgtctaagtttatccaataaaagagcaccattgcttgctttagatgcattttgcattactgttatgaaaccatgaagtttacttatcaagtaatatgtacccttttgcttcctgtttgtttccataattacacaggacatcgaagtgattgaacgaattaactg

SEQ ID NO: 186163 - DNA, 581 bp, Zea Mays
agtcatcagaagcagtcacaaaaaaggtattatcatttgatacggcaatgtcattgacagaagagcgatgctcctggagatgtgccactagaattccacgaggcttccatccagtctccaagttcactgctgatctggagaaaggcaaccctccagtatcagagttcggaatgatatccccttgcaaagaggaattgctcttcatagagtcattgatgctgaaatcttgtcgcgtgctactaaaatgatcatctctggtctgcatggcaggacggtttggttccaaccaaggtagccttattgaagctttatacactgatgaatcagggaccatgtgtgtttctcctaaaccccgcttattatcagtacaaaaagaatatgatggtattcctttagataagccatcataaaaggagctatttgcagcagatgcatgcagagcaaaaccagaatatagtgatttttcaaaagaaacagagtttttgacatacaaggacatgctgctggaaatattagggcctttcggtcgcaggatatcttcaaggttggccaaggatccactttgtgctgtaccaggatat

SEQ ID NO: 186164 - DNA, 420 bp, Zea Mays
caatattgtagatggcatattgctctacaactttgctgcagagcttggtataggttatcatcaaaaatcaagagaaaacttggcttcaaatgtggctgtcaggtgcattagactgaacttccccatggtacagtacacggatgaggatgccagctcgggcagctcaacgccggtggtccgcgagaccggagttgggttgggcgatgggattcgtgtcacgggggaatggattttgctgaccttggaaagatctccttgccgatgggtatgaactactgtagccccgctgtcttcaccttttacgccggcgacgtggcttcgtggccctcgccggagttgccgttctgcgccgcgatggtgccacgtttccactgcgttaaacacgtcgtcacttgccgccctagctcgacgatgaccgcc

SEQ ID NO: 186165 - DNA, 1164 bp, Zea Mays
tgttcctacaaggcaaggccctttgattagtactgagaaaaattcacctctagagaaggaaaagagcagcgcaagaatatctgctacagtttctggcctttctgatgacaaattgcggggtctatctactggcagtgaagggtgggaaaaaaagatgaagcgtaagcgctctgttggaacaatgctcagcagaggcagtgatgtggatcgagatgtcaaatccgcgggccagcatagaccagccaatgaagtacgcccacggtctagtgatggccttgggtataggtaaaaaacttgtccttgccattaatttttgttccttgggttaaacttagctaatttctggtttccaactccctgaaatgattgtctgattcatcatcatgctgaactaaaacatgtaatcttgcgaaaaactaaacactgataagatatatgtggtatgttcacaaattgatatcatctgataccatgaaatacagatacaagggtccaacatatcgagtagaatgatactactgtatacatgcatcatcagaaaggtggtgtttggcagcttgtgtttctagctcttgcttggactattctttgatcaacacgtcttttttgtcatttgcaacctgaatctgcttccagcactatatttggagatcttctttgcctgggtatccatgttagagctcatctttcttaattctcacattgcagacatggagtttcggccggagcactagtaggtaacaagttggatggcacttctcagcagaataacattgtatcccgcattctgtccaagtcagatgccgattatgtggctcagccaaatgaaagaagagaacgtcatcctggagttgaaaaagaaaggaccacattaaaaggaaacaagtaagctaagatacttctgttgtcctgataattcacgttttttccttgttgtatacatatatgtgaaagagtattgcaagattgccatttatttgatgatatgcaatttgttaactagggcaaattcttctgatgatatgcaaaacgtaagcttaaacccattgcccaaggctaaagcatgcagggcaccaagaactagttcacttgctatgaactcgtcttctaatttccaacgttcaactggaggaagtgatgagtgggaagaaacaccttacccaa

SEQ ID NO: 186166 - DNA, 345 bp, Zea Mays
cgagtatgtcggcctaaccgacaagcatgacagagaccctcaaaatgtcccttactacatgaaagatctaaactattggtaatcttggtcatgacattgggtcttggatggtcgagacgacgatgccaagtggtaaaggaggtggtggagaccaggacgggaggcggagacacgccgatggtggaaggctggagcgtgtagagtggccccgagctgtcacaacgggcgtgaggggtcctggtggccagatccttcatagaaaaaccagaggggtcaaactcaatggaacaagagttgtcggcggtgaaccgacgaacagaaagaagattatgagtgatatgtgag

SEQ ID NO: 186167 - DNA, 309 bp, Zea Mays
atggaggtctgcttagtgacgtagactctgggcccgtgctggactcgatgtgtaaagccggcctgctatcctccccacagttggcagcgaggcagtgatcactgctctgttgagccagcctcatcgtcaatgaggtgccgagctttcgctagagctcccgtcagccaccaagtacccaacttgagacgggcagcaagccggcggccaaggcacttgcccatacaccgagtcccaggcccagaagagtcgtaactaaagcgcatccgcaccacccttaatgcccccgcacgggttacaagccctcgctac

SEQ ID NO: 186168 - DNA, 466 bp, Zea Mays
aaaaggagaggtgaactcggcgcatccccacatgcgattgcgatgcgtattgggctggaaattagtaggaagtttcagacgtacaagccacccctcactagtcgctactcaactcagtgctgcttgctaccagccaccgagctggacggagcgcagagaaggacgaacgaatcagatacgacgcggccaccgctttctctctgccagaacaagaataagcgcggacggccgtcgtgcgtcgtgttccacgccacaaaacgtttatcagataaactctacacactggtcttaaataaactaatctattagatgagcagatcttcacattggactttaggctgatttggtaaccagagaattgaaacttgaaagcattcatgggtgagaaaaatctctttcctctccattaataccgtccaattcccttgtcaccaaaggacggacagaaacctccccgaggtgaaag

SEQ ID NO: 186169 - DNA, 849 bp, Zea Mays
ggttgctgtcttccgttattcaccagtagacattctttctgtcaacttgccatcctcagtactggactttgcttgtccaaaagctcaagattggatcatcaaagaagctgttgatgtatgtttatgttagttttatctaagcttgtctaatttggctctaaaagccaacccattgacatcattttgggagatgtattgccctaggtaatcttttatgacttaacttgcaggtatgcgctaggaaggaacatctgtatagggaaatcgttgctaaacttgactgcatcgaaaagatagttaaagaccagaacattggtatgaagtcaggcttgcataaacatgttgctgatcttaaggagttggttaaagttgagtggaagaagtatgacgtaagtttaaattctacttttttatagattgctattgaactgtacctagttttctacttctcttgtagattgctatcgaaaatatagttacagaccagaacattgttctttactttttcaggttgtatcagcgttttctatcgtagataacttgcagacatttgaaccgtatatagatgttctagagctcaatctcctgaggagagagcttgtacatgatattcacgtatgggatcgcagactgtacatgatgcactccctcacgaaagagaactgtcgtactatgccaaatgacgcacaattttctgagaagtttactgaaagctcattagaacaatcaaaggatgtgacatctggtaaacatttgaatgctgagagttctctagaacagaatcaaccaagtacgttggaagtggctgcagtttcagtgaaatcatcccctatgacggaacaaaccaac

SEQ ID NO: 186170 - DNA, 430 bp, Zea Mays
ttcacttgaaggacttacaaatgaccgtagagtcatggatactgttccagaggatttacctaagcctggaaagacatcaatgaaaaccatctttggcaggaaaaatattagaaaagatggatctgaagggaaagttgtatctgttgagccagtcaagaagttacaaagggaagacagagagttatggatttgttattcttctctagattccatgagcacattgagactttatgacagcttaaaaagcaagcttacaacaaggagatggatcttggatggttgtcctaggggcaccatgtatgatttctatgaacagtactggcgtccttttggtgccctacttgtgaaaatggagacagagggaatgcttgttgaccgtggttacctttcagagatagaaaaggctgctattgctgaacggaaacttgct

SEQ ID NO: 186171 - DNA, 1316 bp, Zea Mays
aagaatcctgcggtggatagtttactttcaacgtcagctgctcctgaaaatctaacgacaacttcaacccatgattctgatacatgcaaaatggaggtagtgaatcagccaaaaacatttgaagcggatgcatcaaatgctccacttcatcaacttcctcattctcacagtttcctggtaccttctgacaatcaagatattgagtgtgaatgtccaggtccaactccaagatctgacagtgaggaagctcttatgaacaactcagcgacaactgcatcagcctctgatacaagcaaaatggaggagtttgtgaatcagcaaaaaacccttgaagcagattcatcaaatgctccacttaatcaatctcctcattctcacattttctcagtaccttctgacaagcaagatattgagcgtgaatgtccaggcccaactcaaagatctgacactaaggaacctcttatgaacaactccgtgttaacatcaggaccatctgaaattcagacgacagcctctgcagcctctgatacatgcaaaatggaggagtcagtggatcagccaaaagcgcttgaagcagatgcatcaaatgctccacttaatcatcatcctcattctcacattttccgtgtatcttctgataatcaagacaatcagtgtgaacatcctagcccaaatccaaaatctgacagtaaggaacctcttgtggacaactcagtattaacatcagtggtgcctggaatgctagcgacaacttctgcctctgataaatgcaaaatggaggagtttgcgaatcagcaaaaagcacttgaagtggatgcatcgaatgcttcatttaatcagcctcacattttcgctgtatcttccgataatcaagatatggagcgtgaacgtcctagcccaactccaaggtctgaatgcaaggaatcacttacggagaactcagtattaacatccttggcgcctgaaattctagcaagatcttctgcctctgcttctgataaatgcaaaacggaggagtttgtgaatcagcaaaaaccaattgaagcggatgcatcaaatgcttcacttaatcagcctcatgtttttgctgtaccttccgataatcaagatatagagcgtgagtgtcctagtccaactccaaggtctgaatgcaaggaatcttttatggagaactcagtattaacatcagcggtgcctgaaattgcaagatcttctgtatccgcttctgatacatgcaaaatggagtttgtgaatcagcaaagaccaattgaagcagatgcatcgaatgcttcacttaaccagcctcgcattttcgc

SEQ ID NO: 186172 - DNA, 669 bp, Zea Mays
cgaggtacgacaaggctgtcttcaaggtggtcgatctggtatgtcgcggaagcttcatccttatgccgcttctcaaaatttcttgcttttgtcagctcatctgttgccttggggttcaggaagattacgccgctgaggatgaggaatacgaggagaagcttaagaaggagagcatcgcattgttcttcctggcaacgtaagaattggggcggtgtgattaagttaatcaatcaagcatggagaaagtatgaattttgtttctggtgaattgccatttgccaacatgtcttgttgtcgtttcagttatggcgatggagagccaactgacaatgcagcgaggttttataaatggttctcagaggttgggatacaaatttacttttatggttgcacttgtggatgaccctttggtactatgcattaattgccttttttgggtttggctgcagggtaatgagagaggcgagtggttgaataatcttcggtttggggtgtttggcctcggaaatagacagtatgagcactttaacaaggtttgctggtgtgtctacattgactggatgcatgcatgatctctgatttgtacttatgctattcttgttgccaattcattatcaactgaaggttggaaaggtggttgatcaactcctcgcagaacaaggtaacaaa

SEQ ID NO: 186173 - DNA, 486 bp, Zea Mays
caaaataggggtccgtgatgtacatgccgaagtgaataagtactgctcattcattgttggcatgggtataattactgtactagccaacttcttgcagcacttctactttggtataatgggagagaaaatgaccgagcgtgtcagaaggatgatgttttctggtatgaccgtcttttcctttatgttacttttgtagtcccatatttgatggtgcaacctcagctcttataaactatctagtttaacatccataaataaagcacatattcatgagtattgaacacaagaaacaatgctgctaagttctattgtgtatagattatagtaaaccattgttgaaatatcagagttctcaaattctgtttattgtattccagcaattctgcgcaatgaagttggttggtttgacgacgaagaaaatagtgcagacatattatcaatgagacttgcaaatgatgcaacatttgtccgcgctgctttcagtaa

SEQ ID NO: 186174 - DNA, 377 bp, Zea Mays
cagttgaggaagttgtcaaaagaggggtaagccttttctaccttttcattcacaaatatgttcacaaaatgtgtttttgcaatcacagccacttttatgagtgctatttatggtgcactttgtaaagttcattcatatgttgagcctccaattttgcaaatatacttaaaacattcttctatcttgagcgataccttttgagagttgacatgatcccttttcttgtatttccttaggtggctcaccctgataaaattgctgtcggtggtcattcatatggtgcattcatgacagctaatctgctggctcacgctcctcatcttttctgctgtggaatcgctcgctctggagcttacaacaggactctaactccattt

SEQ ID NO: 186175 - DNA, 483 bp, Zea Mays
agccttctcactctgtggtatgtggcctggcctcctgaatgacccccacaacactgttatgtagggcatctataatttttgttctcagattagagttgcttgccacccaaacctgatcacccttcctgatcactctctgctgcaaggagaaacccttttcatctggactatgcactgctaactgagccaatagcacttgtgcttcttcatctgtaacataagaattaatcatctcttgattccacataggcttcacttcaacaactgactgcaaagccattaggtgtcccactctggataaagcatctgcagcctggttttgtttacccttcttatactcaattctgaactgcaaatccatcatctttgccatggccttcctttgcagtcaggggcggagctacctagaaactagggggtgcacatgcacccgcgaaaatttggaaatatagtggtttggaccaaattttcaccatatatgca

SEQ ID NO: 186176 - DNA, 632 bp, Zea Mays
tcactgagatggcgtggcaagcaattgtctcatcccctgaggtggcgaaggagagcaagcaccagattgtggagactgagcatatgatgaaatccctgctggagcaacggaatggccttgcccgccgcattttttctaaggcaggagttgataatacaaggcttcttgatgccacggagaagttcatccagagacagcctaaggtgcttcgtcctcaacacactccgattctgttgatattcacatgcagtttgtcttagcaagattaatgcatcttactatgaactcggaataatgatcagagaactggaaaaacatttttcccacttcaataaactcaacattcttcaatatctttctatatattgcttttcgttgaaacaaaaaacaaggaatttccattcatagttgtcttacgttctgtttaatgattcaggtattaggtgaagaacctggatctatgttggggcgtgacttagaagctctgatacaaagagcccgggacttcaagaaagagtacggcgattcatatgtctcagttgagcatctagtccttggctttgctgaagataagcggtttgggaaacagctgttcaaggattttcagattactgtgaagacgttgaaatcag

SEQ ID NO: 186177 - DNA, 346 bp, Zea Mays
ctggtcgaccaggctctgggctccatcaagaccgtctactccttcacggccgagaagaggatcatccagaggtacacggcgatcctcgacaagacgatcaagctggggatcaagcagggcatcgccaagggtctcgctgtggggttcaccggcctttctttcgccatttgggccttccttgcgtggtatggtgggaggctggtggtgttccatcatgtgaccggtggaaggatatatgctgctgggatttccttcgtcttgggtggcctgtatgtttcttgcactcttcacgctttatctgacttcatggcaccatttggtcatgtagatgtagaagcctgcctaa

SEQ ID NO: 186178 - DNA, 2787 bp, Zea Mays
gcgactggcgtcgcgccctctataaaccaccactcttctcccccacagcactctctccctcccatcccctccctcgtcgtctcgccactcgcaacaccccaaaaacctcacgggctctcgacccctcgcgctcgcctcgtcgccacgccggcgtgaggggcgcccacccccgtgcctatataacgctgccggagcggaggtactcgtccctcttatcccgtcgcccagatctaattctgtttaacgccttcgtctccgcggcgtcagggcgatcccgccgaggtcaggttagctcctgccccttgatccgatgcgcacgtttgggttcgtggcggcttgggtgcgttagctcgcagatctgggcgtttaggaccgctcctcaccccgatctatgcgctgtggctgtggcccgcggttgattcgacgctgtgcagcctgctcccatcggtgtccgctcgccgaggctggaattctccgagatcgcacgtgtttatgttgtgccagtgtcagatctgctcatgcgtggacggtcgcagctctgcatgtctgttcctgttgctcggcgcagagggtagatttagcgcttttggatttggatttacgccatctctgcgcattgctgagctgctctgcccgcgcttttgcgctgtcgtagaaaggtgtctgggttgggtttgcgtgacctctggcgtgtgtggctggacttttgcgcgtattgggggctagctgtgggccaaatcttccgtgtacaaatttttccatgtttccctttagagaaacctgctcgtgctgagtaattcctgtgtaaagataaaagcatgatgtcatggactgagataaaagcacgatgtcatggactggcacctgtgcgcttgcgctttacattcttgccgcgagcttactgatgatatttcagttcccctttccataagtgaaacagctcctgccgtgttggttttaattgtttgacaagtggactgactggtgtcgtctgatcataaaatatgattagcggaatactttatattcaaagggaaatatttcatgtgaaaactgagattgttccacttaaatctcatatattttctgttttcgctatcttagctacttatgaaaggtaaaaatcgcaaatataggaaaaatgtgagttgccaaatatgataggaaacaaaacttaggttaggtcacaccatctaataataaatgaccatctttccttttgattgcagggtataagctggtatcatggcgtccagcgcagtagcaccaagatggttaaggggtaaggtgaaggctgtgacatctggggattgtcttgtaattatggggtgcacaaaggctgagatcgaacctgagaagtccatcaccttatcctaccttatggccccaaggctggtaagatcaagctgcacttgatgaatttccttgtcggtaatgagcaatatttgtggccttttcacagtttttatttgtttcatgaatcagtaaatcattgggttgctctagacaaactaggttattaggttgaggttatgcttgaggactaatgaatgcgggcaattctcaagtttttttggttgcattttgttactaaattttgcagttggaactatttactgagtatcaattgtagcttcttgacaattgacattcttctcatttctctagttttcatttttcgcttgtttattcatggtgctataggctcgtcgtggtggagttgatgagccgtttgcatgggaaagcagagagtttctgaggaagctctgcatagggaaggtgctacatttgaacttcatatcttctccgagctctcatatcattcattgtattcttttttttttgacactgcaaaattataatctcctgttaacaggaggtcacattcaaagtggattatacagctcctaatattggacgagaatttggaactgtttttctatgtgataagaatgttgcatactcagtagtttctgctggatgggcaaaggtaagaaccattctactttcacctttgagtttctttatcatatttactgtactaaactagatgtgttactgatttattcttctacttccttaatcaggtaaaggagcaaggctccaagggtggcgaacaaaacccgcaccttggtgagttgttgaggttagaggaagttgccaagcaacagggtgttggtcgttggagcaaggttggcaatttttcatcttgaccaacttattttgtattgaatgagatatgcttttcttgattttgctgttgtgtgcttcttatctacatccaggaacctggtgctgctgaagagtcaataagatatcttccaccatctgcaattggtgaagcaagtggttttgatgcgaagggttttgcggttgaaaataaaggcaagagtttggaggccattgttgaacaagtacgcgatggcagtactgttcgtgtgtatttagtccctagttttcagtttgtccagatatatgttgctggagtacaggtacgctactcataatttggtgttgttttcttttatgtttttataaatttaatattaattagaaataattctaggccccatcaatggggagacgcccatcggcacctactgtaattgctgaaactgatgatactgctaatgacacgaacggtgaagattctgagggaacacctgcccaactgactacagcacaaagacttgttgcatctgcagcttctgctgaaattccaccagataggtatggaagagaagccaagcacttcacagaggctagagttctcagcagagatgtaag

SEQ ID NO: 186179 - DNA, 570 bp, Zea Mays
ctctcattctctgagttctctctcctctccccaccttctctctcctctccccacgaaccgcgccaccttttctgacgccgcatcatcggcgacttcatcgccgtcgacaagacgcatcaaggcagtgcctgctactcccgcctccgcattcttgccccacggagcgtgctcctgctctcggccgccgtcctggtgctgaacagctgacacagccggagagatccgcccggcctcggatccgtttcttctcctgctggtgccttggtggtgagtgaacctagcttccttctgccggttgattcgatctaggagctccgtttgttcttgggggcatttactttgccgtggccgtggtccgtgagcaatcaaatccaaatctgtctccctttcgatttgtttgctgcggagtgcggagtgcggagggtgacgcgctgctagctcttaatctctctgcttgtttctccttcagatgctgatgcggactcgggactcctacggagagctgaggtgaccttgttgagtgtgcccttacccagcgccgcctgcctccgagccgagatctcctccgcg

SEQ ID NO: 186180 - DNA, 344 bp, Zea Mays
tttggtgttgcaaacagcaccttaggtgtgttatttgtagcaggtaaaggatcctgtccataaatacggaatattggtctacatcctccctcttcattgaagcctggaatgtttcttagtataacacagtctaaagtaagggcccggtcctgaggtggccactctgaactcacgttcctccgagatatgtaatgtaagtatcttatctgagaaggcataggattcaatggtgaccacaactgaaccagttcatgaggagcttgcctgtaaatcatttccagtgtcctctgctcaccaatgaactgctttctatacaacagcagtcctgctaacatgaatgcaag

SEQ ID NO: 186181 - DNA, 272 bp, Zea Mays
tgttcggtttatatacaggattcatggaagagtttgcgagtgtccaatttgatttgtgaaggtacatacaaagcattaggagattcatcttctagcattttctttgatcaggtgttaataaagccttatggattataaagtgtgtttttagcttctggatttgcacgatgtgaaattactaattgaggatgctgaaaagataccaagaatagtggggcatactctacttgtctttaagtgttagctgaggttttattgtccttaaaaatgcc

SEQ ID NO: 186182 - DNA, 338 bp, Zea Mays
ggaagacgagtgaactagaagatgggctcccggtccctggttgcgatgaggaggtttagagttggctggactcgatgcgacttttatcacctagtgagcatccttatctggaggcgagcacactaatcctcctcgccggtggcggtgcaacaacggaagaagcggacggaggttgttgcgaaatggacgcggtttgttgctagagcgacaggtgcgagaacgctgctgtgcaaacaaataggataggatggggtatgggactgcaggttgattttgaagaaatacaatgggttctttgtaaaaaaatgacgagggacgatcgttgaaactggtgcttt

SEQ ID NO: 186183 - DNA, 293 bp, Zea Mays
catggcagtgctagtgttcttaaggcatcacttacgggacaaggcggtgtccttgatgccttgcgaaaagcagcgagagggaaggagggataatagagaagtgggaggaaaccaaccaacaggtctgaagctagcatgtgcatgttccccatccttgccaactattgggcctgaagctaccatgttccccatccttgctagctctggcagctagaatggcaacttcctcctatcagctgcagctgctggtagatctaggatttggcggcagcttgtagctaatctgattgtgc

SEQ ID NO: 186184 - DNA, 348 bp, Zea Mays
cgtcgagccgtccttggcgacgagggagcacattcctgcgcagccacaagatcttaattttgttcggtataacagttttgtgtacaatattattcgacatctagagtgtgtgcgcgtgtgtatgtggagcattttcatttcggtgtggtggatttacataccaatgcctcatctaacacagtactacagattcaatactaatatccatgcttacctttgtttcaatgttacaagctcaatcgtgtaactttgcatatgaagcagcaacaccataattgcagcctcacaggaaaacttatgaatatgtcatgctccctatagacgccaatatctttacacagatttttc

SEQ ID NO: 186185 - DNA, 353 bp, Zea Mays
tgtgacgtacaatgcattgatcaattgcttttccaaatttgggtggatcgagaaggcctacagctactttggggagatgaagagactgggagtgatggcaaatgtggttacgttgagcacttttgtcgatgcattttgcaaagaagggttggtccgggaggcaatgaagctgtttgcacagatgagggtgaggggaatgatgccaaatgagttcacttatacttcattggtcgatggcacttgtaaggcagggaggctagatgatgccattgtattgcttgatgaaatggtgcaccaggggttggtgccaaatgtggtgacgtacactgttatggtcgatggcctttgcaaag

SEQ ID NO: 186186 - DNA, 406 bp, Zea Mays
cagtcccttgctatgtccttcagcacgatgaccttggctccgcccacctcaatcttggactgggttgctgactctggtgcctcctaccacaccacccctaacgccgatactttatccaccacccttcctcctcaaccctctcttccttcctccatagtcatcggcgatgggtcggtcctcgctatcacctcagtaggtgatgtgattcttcccgaccccttccgcctcaagaacgttcttgttggttgttgctcctaacattattcagagtcttctcttcgtccgtcaattcaccactggtaactcttgtcctatgaagtttgacccctttggcttttctgtgaaggatcttgctaccaggacccttctctcgctataacagctccgggtcgttgtacacccttcc

SEQ ID NO: 186187 - DNA, 300 bp, Zea Mays
caggaattaaaaaagcaaggtgtagcagaagaccgcctgcagctgcttgttgatgtcactggagcttttaggccagggatactaacagctcttgttggagtcagtggagctggcaaaaccaccctcatggatgttttagctggcaggaagactggaggtctcatagaaggaagcatcactatatccgggtatcctaagaaccaagagactttcactaggatatccggatattgtgaacagaatgatgttcactcaccttgcttgactgtgatcgagtctttgttatactcagcatgcctt

SEQ ID NO: 186188 - DNA, 455 bp, Zea Mays
agaagaggtggcgtgcggaagccgaagggtgtagagggggccggtgctgtcacatctgaggagggggcgccgagttgccgagtccttcacagtaagaccagaagagtcaaactcgatagaacaagaattatcagcggtaaaacgacgaatagagagaagattgtggaccaaagaagaagctacaagaacatcaggaatgcgaaaagagctgggagtgccggcggtacccacagatgtgaccggaagacacgagccattcgccaccatgatggacgaaggaagagaggaaggagggcgaactgaggtgagtataccagggtcgggagtgatgtggtaggtagcaccggtgtccgcgatccactcgggacccgtcggcggagtcagtgggagtttggaaggcagccaaggcggccgcgtcccaaccaaccagtccggacggtggagcagccggcggc

SEQ ID NO: 186189 - DNA, 428 bp, Zea Mays
cattgcctttgcttgacttggtcaatcgtcttgacctgatcaacatagactactggtccatgtactcttgtgcttgttgattttctcaagtgttagacactacggtcaatcttttagcttctcttgtccctcactccaactccaagcctcggcgtctgttcttcactgctctaagtatattggcatgaacctgcttgaccttcactattgactatcttggaccttcaaacctacgcaccacaagccaagatatatgttgcacatatcatactcatgttatggttagtcaatgctaaaccaaagctaatcatttccttaacaatcatttatcacacttgaacaccatcgacatatctcgatcatgtgttcgcacatatgttggaaaacacctaaaaatagcgtgttactgtaagttaaatgttagtgtt

SEQ ID NO: 186190 - DNA, 350 bp, Zea Mays
ctactaccaactcattatctcaatcctatcttccccacccctcccatccttcctctatcattgtgggtaacagttccatcctcccgccctcccggtcacctcaacagttgattcggttcttccaggaccattctatgtaaacgacgtccttgttgcccctcatatgatttggtcccatctattgattcgtcgtttcactattgacaatcattgttctatggaattcgatccctggggttcgtcgtttcactactgacaaccattgttctatggaattcgatccctaggggctcaccatacgacaccttacgactcgtgttgtgctcgctcagtgcgacaactctgggcct

SEQ ID NO: 186191 - DNA, 288 bp, Zea Mays
gtcagttttctctcgcttgtttgtgttccggttgcttgggtctgagtttcagaattttgttttcacaccttcagttggggctagtggagggattctagtagcttggaagaataatatcagctcatgtggctctaggattgatgaccattgtgtctcggtgaattttagccttgagactgggtcatcttggtggttgtcatgtgtctatgcccctcaagggaatcatgagaaaattcagttcttacaagacctcagattgattaggacccactgttctgggccatggct

SEQ ID NO: 186192 - DNA, 578 bp, Zea Mays
cacatgtagcaactgctgttggaaccatggtggtcattcaggtacctagcttagctgtgtcaattttgttgtcaggtcagtgctgatgcaatagcgaatatcacctatcccttcgcatgttgtttcttttagggtggaattggtcctactggcttatccgctgaggaccttcatgttcttgatcttacacaacaacgaccgcggtggcataggtggattctcttgctactctactgtggtttaaattggacttttagtttgactgtttgctgaggattcgatttcttttgcacagagtggtggttcaaggtcctggtcctggtccacggtatggacatgtgatggccttggttggtcaacgattcttattgacaattggtggcaatgatggtaggaaattgctcgtgtctgttatgtctagattattgctacatacagatcattccagctgatcgatgttgatagtaagactgcatcaatgtttcaggaaaacgacccctggcagatgtatgggcccttgatactgcggccaagccatatgaatggagaaaacttgaaccggaaggtgaagggccacc

SEQ ID NO: 186193 - DNA, 757 bp, Zea Mays
gtgaaactgacatgtgggataatagatttggtatatgtgccatgttgctaggaggcaggctcacttccacacactacatacactgtggtggccggtgggatattctgatggaatgttatggaccacaaatgatttgaatgagtatgatgtgtcggtggtcgagccaataggattttctcctttttgtttctttgtttttttcctggctgaaagcgacaggaaacaaaacaagatgtggatttgaataaatagaactgcaaattcactgtatttagctatttatccgatagtatcagatgttctattgaattgatgaacatgttcacagtttgcgatttgcacatttccctttctcagaagtaaaaataccatacttcactgaatgctagcagttttactgtggctatttttcaatactcttccgcagttgtttgaactagcaaggttaagaatatctaggttttcacaggtggcatgtccaaagattgttatgtgaaaatgaatttgcacgttgattttctaagttaattagcaccacaagttagtttagcagttactttttccataagtagatgctgtaaaaacattatgcatggtggctctcagtcaccctataaataacacacttacttccaattttcttaaatatttagaggctggccttggcacaaccatgatattgaccattgcatccaatgattccacaaaacttcgagctatgtgtgtattatttatataaattatgagggtaaggatg

SEQ ID NO: 186194 - DNA, 1526 bp, Zea Mays
aggtacctccagatgctgttgaaccactgttcaagcagatagtaaatcagtttgtgcatgaccgttctcgtccagaggtttgcatgccccctttcagcatactatgtgttgttccagctaacaagactgcatgaacatatatctgactttacttcttttaggctattgctgttggcttaaatgttgtgagagagatctgcatgagaatacctttggtaggtaccttaatgtttggatggcttaaacaatactcttgtctgcaatggtactagacagatacccttaggcactggaactgaaatctattgcttttgttagctgtgtttcatatatgacataagcagaggggataatgaccatgttttcactaattattcttttctgtattaattactgatagactgaaaaggttgcaatgttgtgctcctaagtcctaacagaattaaacatgtaaatagctgaattggaataaagttgtgaacggttttagtttgtggttgtctgccattatcgtcattgtggtggatttttttattggtgctcttgctgatgcaaaacacacatgtaaacctgagatttttgtgcattctagaatatctggtcagatgtacagtttctttcttcaacttatctttatacttcatccactatggcaaacctgcagatgatgaatgaggatctgctccaagacctcgttttatacaaaaagtcccatgagaaagctgtttccattgctgctcgttcgctgatcacattgttcagagaggtcagataatttcttacaaattttccaatattttttctatatgttggaatcccctgtcgctaaacctctgttgattgaagttcagatctgtccttcattgttagtcaagaaagatcgtggccgtcctgtggatccaaaggctcggcccaaagcatttggagaagtcactgttgctagcaacgttcctggtgccgagttgctagatgaaaatatttcttcagaaggggaaagttcggacgatgagtctgatggttttcactccgatgatgagatggacttgacacctgcccctcctggaacagaagaaaatatggagggttcatctgttgcaaacaaacatgatgccgatggagataccaaagaggaagatgacgcatctgatgatgaagatggtacggatcaagatgactccaacagtgatagtgatgaactagacgatgactctgatgtggatgtgggtactgatatatctgatgaagacgaaggtgacgacggtgaactgaaagaaagcataaatggttcagaggatgaagctttagaccagaatgaagacagcgaagaggaagacaagtcaaaaggcagtggctctaaagcgcagaagaggaagttaaatgattatattggacagctaaattctgctgatgcaagccttcgagctctgaagaggttagcaactgccaagaaggctgaagaaccatctgatgaaactggtaaaattctatccgatgaagatttcaaacgcatcaaagaactcaaggta

SEQ ID NO: 186195 - DNA, 487 bp, Zea Mays
acaaattggagggccttcgacctggaagccctggtttgactggtgtagttcttggaaactacagtgagatattgtcacttagttcttcggtcatgcggtgcatccttttgtgtcgtggcattttaggcattattaacatagttaacatgaggcttaagaaggatagtctggaacttcctgcatttgcttttgatgatctgacatatgctggtcagaacaagggaactggaatgaatgcgcatcgtgtgccggcacacatgactgaccctatatatttgttgcctatgtttatcaggagtcttttgtgtttggatctctcaaactgcagtggccttacacagctgcctgcttccattggcaacctttctaatctggttgcattgaacctctctcactgttattcccttcacacactgccggcgtcagtaggaagactgaagaacttgcaaattcttgttctttcctgctgccatgaactaaggatttt

SEQ ID NO: 186196 - DNA, 432 bp, Zea Mays
attacaagccacgcttgcgagtttattaaacattccaacggcaccgacacccagtgctgctactttcgctttcgctgggtcaatcatttgtttggtcaggctggcataagcagtaccactgctatgattgtgctagaggactggtagcctcgtgagtcgtgacaaactgttttatgatttgagaaaataactggacaaacagcaggagcctagaacgttttagtagcagttagttcgctgtcatagccggattggacagacaacctgaacatgcacagagcggccctgctaggtagaagtactgctgtcttctccgttccaaattataagctatattctaaaattataaagtataagttatattctaactttataggttttatttttttaattataagatagtttaagatttctaaatttctaattttttac

SEQ ID NO: 186197 - DNA, 291 bp, Zea Mays
ccaaaaagcatccatcagactacattttcctggaaaatggaaataatctgcatgatgtgttgagggcatgtacaaatgctacattagacatgttggagcctgcaatacgaaaggcaataggcccagcacctcaggagagaatattcagatgcaaatcatgcaaaagtttgttattcctcccctcatccctatcttgctcggctttcttaattgctcaggtgttgatatatatagtatttcattcaggttcattcagtacactccgcagtgggaaatttgctttgttttgtg

SEQ ID NO: 186198 - DNA, 338 bp, Zea Mays
gctttctgacaggcatcacacacggattcatctgttgagggacctaaacaaggaagtttattcttgctaacaacctgacgaacaatgaaagaagatggatgacctaaacgattgtgccatcgggacatggagggcttgacagcaccaagagcgttctttattgtggatgtagcggggatgggatacagtcctttgtgacatcgccccttaagcaaaatgttcttggtgtctttgtccttgataacaaaaaaatttggatgaaattctatgaaggcagagttatctgaagttaatttatgaaccgagacaaggttttttttagcttgtggaacataaag

SEQ ID NO: 186199 - DNA, 1451 bp, Zea Mays
tcttcaggcagtgggcgtctggattctctgactgagagagcaagacctgatcgtagttctagtccaagtaaaatccactcaagaagttcacctagcccaagttcttatcatgacaaagatcagagccggtaacttatcttctatatggctatacatctgaaaatactggactaatctcttaaaagggtgcagcattgtagctataccttgtcctagttttacagtaatctgtttttttatatatttctatttaatgttaaccatgaatatttgttccttactaacatgtattatgtgcatagtttgtgcgctaaattattgtagtatttctatgcataaggtagctggtcatctttgtggcaggtgtatttgctgactactgttgtcttgggtgataaattattttaagagactatatattgttatttgtaatatatctgtaggcctggaagctcctgttgagatcacagtttatttatcagatacagtttggttggctctgtggttggttttactgtcgcatgttagtaagttccagaatggaacagttggttcatggttggggagttcctctatgaggttcagggttaatatttgtctatttaaaatatttagtttggcttcttgcgaattggttttgtttacaatccacataaaagaaaaaaaactatatattgtttcagtgggtagaccatgggttggtcttatttagtttacagaggttgtttgtcaagtgaggcttgatcatttcttgaacatcatggtatgtgttttaaatattggttttagaatgtcaaatattgcaatcttgcaaccaattaacatattttgggtctaaagtggtggatctgaaaatggttaattcattgaaaatggttaatcttgcaaccaattatgctctgttccttctaacatctgaaaatggttaattcattgatgtccaggcatgggtctaaagtggtggatcatggaaagagagaaattccatatgatgagagaaataatcgtccaagagcatcttctggtagagaaaggacacctgcttctagacttcgtgacagggatgcagaaaattggtcgtctgaaaggcttaaacagaaggatgattaccaacctcgtgatgtaacattggaaatttctacatcacactatgaccgcacacctagcaaagataagcatacttcaccaaaacaactgtctgaaaaatctccatcttcaggtgaccataggttttcaggtaggcttagtggtgggcgtagtcttgataataaaggagaaagaaagagccttacgaaatacagagatagagatggtgacatagctcaagagcgatcacatcatcaagatcgaatgccagctaaggttccattcagggagccaacaccgtcaaattcatccataagtagaggtggtcattttttgggcagttcaccaaataatcctttgccacc

SEQ ID NO: 186200 - DNA, 1059 bp, Zea Mays
tgagatctcgctttgaatctttgcccgaggccttcaatgaacgcttgattccttctgatgcaaataagagtaaaggtcttcgtgctgccttttcaagtagacccaaggtatttgtttatattgtaaggttgggcgttatgagtagatcaatggcagttcaattgagtatctatctatttgatctgacacagttttttaggcttctggtgacgaaagacagaaagagaaaagagctgcaaggtttgctcaaatgtggaatgtcattattacaagtttccgtgaagaagacctcatagacaatagggagatggatctgctactggttccatactgtaaagaccgtgagctcgatatatttcaatggccacctttcttacttgctagcaaggttgctcatcttgctctttctgtattttttctacttactatatttgtggattcagcagtttattgtttatctgctggattgtagatcccaatagcactggatatggcagcagacagtggcggaaaagaccgtgatctgacgaagaggataaaatcagatccatacttttcctttgctatcagagaatgctatgcttcattcaagaacatcatcaatactttagtgtttggtcagcgggagaaagagtatgtcttctcttcccaagattgttatttattagggaaatatgggccccggtcacgtggttgtttgtcgtctctggaattgaagcaatatggcacaggcacactaaacctaaaatagtaccaattctactctgaacacaccaccccaaatcaagggctcaaaacataagtgatgcattttagtgtgaaagcatgaagataatataaactgagttcattttgaatgggtatttaacccttggtgtgtaacatctgtttgactaagtccatttgagccgcttggatttccttctgaataaccatgtgatgcctatttcagtgtcctagcacagattttcgcagttgtggatcagcatatagaagatgaaactctgataaaggatctcaatatgaggaaccttcctgcactgagcaagaagtttgttg

SEQ ID NO: 186201 - DNA, 1247 bp, Zea Mays
gcattcagaagatgtgcttgatctctgctggtccaaatcccaggtatttctagcgttgctgtttgttctaaacttgcccctagtttatttttgaccagtaatttgataaatgctgaaatctagaagcatgccataaacagtataacgattgtagacaacaattgcttagttcttgttattcgttttactatagaaatgttaacggcatatttttatgaagcattattccagcagccatctttgtggtgattgggttcaaccatgttaggacagaaataacatagcacctagagctgcctattttaatgcatttctggcgtaattagctgcaaaggatgaattggtaacttgtaatgcatatcatcaattatttgctacctaaacgttcttcctccaagttattgtacctttttgtgtatgcacatattggtgaatttatcagcatgtaaccattatcaggccatggcaaacgtccaaacattaatgcccagattgccatgaacatcatattttttcagtgccttgataatttacttttgcggctctaaatgttggctacttgttaactcctatcatttttttgtttatcatcaaatagatattatgtgtttcacaatatatcatggataggtgtgtgggcttctaaaatctaggattatcttgcctcatcatgtgctttccattttttaaacttttatattgaccaaatgcaagtacaaaagggttgtttgttcagtgttcccaacttaagtaacaccatgaaacaggtcatataaatgtgacactaagtcttgtcacatcaagttgtggagtctcaatttatggtctcttggacacacattttctaacctgttagtcatattacagatggtctggcgctaagtcacacagcatcaaaccatcagtagggtactactatttatcaggttctgcaagtttgagttacccctccctaatcacacttattaatgaaaggggttgcatttagacccgaccagttgcctccaagagcacaagtgcatgattagacacataaaatttgttggattccttttaggtattaagttgccagctgaaaacatctttctcctctctgtgctggctacatatcgattttgtgctcagtgacagtgctccataggaagtatgattggtaaagttccattaactccttacaaaatttctcagtcatacctttctgaaatgctttacagtacttactttcatcttcaatggataaaacggtg

SEQ ID NO: 186202 - DNA, 428 bp, Zea Mays
atggagaaaagttgactgatgattggtggagcttttttgacaagatatggacgcttctgtgctatttgaatggcaaaggccaaaccagattaacaccaaagggtttaaatacagctggaccatctattgggcaacgggcccgcggattagtagagtccctcaatatcccagctgcagaaatggctgctgtagttgtaacaggaggcatcagtagcgcattaggtggaaagactaacaaagttgctgacaaagctatgatgctaagaggggagagatttccaagaattatcttccatctcatcattatgtatctctgcaaagctggcttagaaaacgcatccaaatgtgttcagcaatttatatcactgctccctaatattatctctgaagatgatcagtgcaaaaatagactgcatttcttgatttgg

SEQ ID NO: 186203 - DNA, 394 bp, Zea Mays
ggattcaactgcttcatcgcttgaatcatggattgggtttgctgttgatctgcacaaggctctgcattcatcttctcctggttcaaacaggaaagatgcaccaacaaggttgcttgaatggattgatgctggtgttgtttatcagagaaatggtgctcgtgggcttcttcgttattctgctattcttgcatctggtggagatgctcatctttcttcaggaaatgtgcttgtgtcagattcaatggatgtagaaaatgtagttgcagattcaaacagtagagatggtcaggtcatcgataatcttcttggtaaacttgttgcggataagtattttgacggagttgctctatgcagcacttctgtggtccaattaacaacagctttccgtatcttg

SEQ ID NO: 186204 - DNA, 683 bp, Zea Mays
atcagatatgtggaaggattttgattcccgagttcttcgatataaagtatgttcagtactgcaatccatccttgtcttcttccgaccaatgctacccccatgtgtccactctctgtgagcatcattttgttatgtaccacttcattgaagctcctgaaacctggatatgttaaattatacatctacccagatggccagattccataatgtttggttgctatcagcataccctgtatggagtattggaaataaataaaataatatctaaacctcaatttctagatcttaaacttgtcacaatatgaatcaattctctagttgacacattccgacattgtgtttctgttttttttctgtttgtgcttttcaaactgttttgtccaggaaaaagaacagccttatatttatttgatccattggttatttcaaagctgactcacactttgcaaccaggttcttcctcctctttgtgctgagttacgcaacatggttatgcagccaatgattttgcctatggttctaacaatagcagaatctcaggttatttctgtggtttctcatttgtatccactttaatgaatgaatagagtttctatgcattcaaagaacattatggaatcccgagtatttattcttagcgctagttctttccatgtaaaatatgtgtatcactatagtaaaat

SEQ ID NO: 186205 - DNA, 499 bp, Zea Mays
gccgaaaacccgaagatgttcatacgaggggtgtttgccaagtaaggcgaagtggggtgtgccgcaagtaagtgtcttggtgggaagaatatttaggagatatgtggcagtaccaagagcagcagcctagaaagtgggagggatgctggcttggaagagaagcgtgcggacgacattattgatggagcgaatgatgcgttcggccttgccattttggggggaagtgtaaggacaagacatgcgtaaaagaactccatgggtggagaaaaaatcgcgagcgttgaggttatcgaattcgcgaccattgtcacattgaacaccctggacggtgacaccaaattgtgtgcgaacataagcgaaaaaatttgtaagggtggaaaaggtgtcagacttaaggcgcaagggaaatgtccacaaatagtgggaatagtcatcaagaatggccagatagtatttatgaccagacacactagtgattggtgaagtccaaagatcacaa

SEQ ID NO: 186206 - DNA, 540 bp, Zea Mays
ggacattcaaaagatgctgatgagatagattgtggtactgttaaactgtctgaagatttcatagtcgcagatattgctattcatcctagacatgctcggataatgaaaccacatcagttggaaggtttcaactttttggttaagaatttgattggagacaagcctggaggttgcattctagctcatgccccaggtacagggaaaacatttatgcttataagcttcattcagagcttcatggcaaggtatccatctgcaaggcctcttgttgtgctgcccaaagggattctaggtatatggaagacagaaattaaacgatggcaagtgcaggatataccagtgtacgatttttactctgtcaaggctgaaaaaagagtagaacagttgcaaatcctcaaatcttgggaagacaagatgagtatactatttcttggatacaagcagttctccacaatcgtcactgatgatgggggcagcaatgtcacagctgcatgtcgagacaggctgcttaaggttcccaaccttctgatacttgacgaa

SEQ ID NO: 186207 - DNA, 360 bp, Zea Mays
aaatttcaaatcgaagtcttcctacacccagcgacgaaaaggctgcgacaattcgaatcaaaaatccatccgagtcgaatcgagccagcggaaactccgcggccgatctcctgtgctctcaccgcccgcctcccccgattctgcagcccctcgctgcgaatctggacgcgatttcgaggctagggtttgggaggctccggatcgcgagcccgtgcggaggcaagggtttggattcgggggttgctgctgcatgtcgggggtgctggattgagctactccgcgccggcttgtgatggtggtgaccggcggtggaagacgagtagacggcggcggtgagtagggtttgttgactgagttggg

SEQ ID NO: 186208 - DNA, 335 bp, Zea Mays
gtggtgttttacttgagtggacataaacacaatctaggtatcccttgaatagaggggattattggaaaccaggtatcacaaaaggtcattagctagcccaggtatcacaaaaggtcattagctagcccagtggaaaaaggtgccttacaaccttaacatatgtttggatagttctctctctcaatttggctaaattttccatagtctttattttattttgagaaatgatgtggcaaattgatgtgtggtgttttacttgagtggacataaacaccatctaggtatgccttaaatagagggtagtataggaaacctggtatcacaaaaggtcatta

SEQ ID NO: 186209 - DNA, 649 bp, Zea Mays
gataaatctatctgaacagacagatatgatggatcttctaggttcagacctgccagctcaagggggaaatggaatggaattttcctggtctgatggtattcttctccaggctttaaagaatggaagctgggttcttttggatgagctcaatcttgctccacaatctgtcttagagggcctgaatgccattctggaccaccgtgctgaggtcttcatacctgagcttggtcaaacttacaaatgctcatcgtcttttcgggtctttgcatgccagaatccttcatcgcagggtggtggacggaaaggccttcccaagtcctttctgaaccgcttcaccaaagtttatgttgatgagctatcagaggaagattatctattcatctgtaaatcacgatatggttcattgatttctgaaagtttcatccgaaatcttattcactttaatagcagactgtatatggataccatggtatataggaagtatggccaacaaggttctccctgggaatttaatctacgtgatattatcagatcttgtgagatgatagcaggttccccaaatcctatgatggatgattcttttttaaatactgtttatctgcaaagaatgcgcacattggttgatcgccatgaagttgtcaagctttat

SEQ ID NO: 186210 - DNA, 371 bp, Zea Mays
tttttggaggctggttccagagcagtcttgactagagcctcaaaggcctcagcttacaaaatgctgaatgatttacagaactttgaaagtggtccaaatgtaacaaattcagatgttgctgtagcagatgtttctcaggacggtaatagtgatgattgccgaatatgtggaatggatgggactttggtatgctgtgatggctgcccatgggcatatcattcgagatgtatcggtcaaaataaagctttccttccccagggggactggttctgtccagaatgtgttgtcaacaagcttggaccaacttcatcaagaattgaacgtggtgcaagaggagctcaaatgtttggcattgatatgcacgggaggct

SEQ ID NO: 186211 - DNA, 511 bp, Zea Mays
cggctcgattctggatcaccccatcgtaaatcctctctgtgattccgatgatgaatcaccaaatcctctgagtccatgtcttgagccatttgctccaatctcagttacacaaccaccttccccgtctgatccagttgctgtaccaactggattctctcctccacggccttctaggctacgatcacggccatgtccgcttgccctaacagctgctgctggatgtcttccatgtctgcaaccttctctgtcaatacctccaacttcgccatcaacttctcccatcaatcaccttcctccttcgacttgcccgccatcacctccagtaggaactgggtctgcaccgatggtttcgctgctggcgccatgatctcccttctcctggaacaccgcagcaaggttgcaggttcggggtcttcctatctctgtgtacagcgcctccgagcccttccaccacctcgtcatgcttgcgacgattcctgatcaccagactccctcacccactccgaggaga

SEQ ID NO: 186212 - DNA, 357 bp, Zea Mays
gctcttgcaagatccgcccggggagttcttttgggcctgaacgagagccagaagagcacggtacgcttcaactgcttccatgggcgacgactgagcaaccttcaacttggcctttaccctaagcaaagatccttgatccagcttcgcagtctcatctaaggcagcgtccgtcgcgacttccgcttccgagaacctctgctgcgcagaaagaatcaacgctagcagcctccatcctttcgaaaccgacccgcccgttgcctcgatgaactccttggcgcatctcagggcggcattcatgttcctttgctcggcgtactcaactcccatgtcgaatatgaggtcggcgttgtagcggtt

SEQ ID NO: 186213 - DNA, 354 bp, Zea Mays
aaactagacacatctgacccaagttgaagatgaatacaaggaaaagcttgagaaggagaccttgtccaggagagaccttgaaaaggtatatctatttttatgttcatgtcccctgcaaaattttagttgtttacaagtttattaaatcttgccataacccggaacaagatcttggatgttcttacattgttatatgtgatcttattaccgcaggaagctgtcaacttgaagcagaagcttgaaaagtgtgaatttgatctggagaatacaaggaagtccagtgaattgagcctcgttccattgaccagcattgcagcaggctcttctgatgtagtagacacaacagtacaagga

SEQ ID NO: 186214 - DNA, 675 bp, Zea Mays
cgacgatgcctagtggaggcaaaggcagcaacggtgagggcatagggtggccaagacgacgatgcctagtggaggcaaaggcagcaacggtgagggcatagtggaggcagaggcagcaacggagaggcaacaacacaggatgagggagatggggcagggaagcaaataggatatagggggccaaagttgtcgcatcgggcgaccacagcacaagtggtacgatcccataaggtgagcccctagggaccaaactccatgaaacagtggttgtcagtggtgaagcgacaaaccgagagaatattatgtatgatgttggggggcaacaaggatgttgttgaggtataaaaggaccaagaagaattgtgtcgcctactgaggtgataggcagaatcagcctgttaccgataatgatggaagaagggaaggtgggctgcggggatggggtaaagaaacagtaccgtggtcaggagtggtgtgatacgaggcaccagagtcagcaactagtcggtgggagtaggagtgggctgcgattatatggggtacgaggaaagagctaggttggcacccaccatagagccatcgggatggacgttgtggccaccagtggcgagcaagctgacggcgcgcatgggcgatggagacggcaagacctcgattgtcatggagacaatctcg

SEQ ID NO: 186215 - DNA, 713 bp, Zea Mays
cgtccgaggagcgggaccagctgccgctcacgtcaatggcgaagcgcttctccctcatacactccatgaagatgcccagcaacaacggtggcggcggaggaaagccggccgagttcgaccacgcgcgctggctcttcgagaccaagggcacctatggctacggcaacgcgctctggcccaaggacggacacggcggcggtggcggtggcggcggcttctctggattcgaggagccgcccaacttcggctcccgctgccgccggccgctcaccaggaagaccagcatatctcaggccatcctcagtccttacaggtagcaaattaatggcaagagatttattagaaaaatccctctgaaaacaatagatttctgtgcggttatggtagatttaactctgctctccggtacaggctgctgatcgcaatccgtctcgtagcgctggggttcttcctgacatggcgtattcggcacccgaacccagaggcggtgtggttgtgggcgctttcggtgacgtgcgaggtctggttcgccttctcctggcttctcgacagcctccccaagctctgccccatccaccgggccgccgacctggatgtccttgccgagcgcttcgagctgcccaccgcccgcaatcccaagggccactccgacctgcccggcatcgacgtcttcgtctccaccgccgacccggagaaggagccgccgctcgtca

SEQ ID NO: 186216 - DNA, 626 bp, Zea Mays
ttgggaagacaaaggacactattaatgctaggcttgacttggaagaaatgagcataaggaaacatttgcatttgaagcgtgatggaaattcctacactgttcctcatgccccctatgtaatgaataggagccaaaagttagttttttgtgacttcttgagaagagtaaaatttcctgatgggtatgcttctaacttagcaaaatctattactagtgatggatgtaaccttcaaggattgaaaactcatgactgtcatatcctactccaaagaattttacctgttgctatccgaggaattatgcatagggatatatacgaagcaattgccgaattaggtaaattatttcaacaattatgtgctaagactctaaagttagatgttttgcatacaatgaaagctaaaatcccagtcattttgtgcaaacttgagaaaatatttcctcctgctttctttgatgtaatgctacacctagctgttcatttgcctgatgaggcaatccttagaggcccagtacaatatggatggatgtacccagtagaaagacgattgttgacattgaaacggtttgtgaggaacatggcaagacctgaaggatccattgcaaaagcatatgtcgctaatgag

SEQ ID NO: 186217 - DNA, 661 bp, Zea Mays
cgcaagcgcgctcactgccgtgtatggtgcaagtggagtcaaggcaaggataccagagacaaggaagtagaaattggccaccctcctgaactgctcgaagagggacttgggcaggaaggtggccagattgtactttgtcgtcgacacctcattcagcaggtaactgaatccctcctcttcaagcctatcaggctcattgacgtacacgactctggagaaccccactgtcccaatccgtaagtggtcatcactagagcccccgtgacaacgcatgaaagtcaacaatgtgctgagcttaagtttctccagcctcttcgtcggcgccattcctccagactcaagtgaatcactgcaccaaagctactcccagatgccccaagaagtcgacaaggccaaaacctcacgggttttttttggaactccccgccgtagcagccaattcgctccaaccttgtccaaatcaatcttactgcagaacgcaattggcaattccctctgaagaagagcagctgagattcgagcagcaagaatctccaagaatgcagctcgcaataattcagctcctctcccaaccaacaagtagcccccaactacctaaaaaaagcaaataaactgcacagggagagggactgaaccgagagccaccccaggccctcagcag

SEQ ID NO: 186218 - DNA, 740 bp, Zea Mays
cttgtgtcaaagaaatttgagcttgtaccttcatctgtgtgcttttctttggagtgttttttactgaaactgaaattagttgtgtttgctctcaatattggttggttccatgagttctcaagggtacgcggaaggcctctggaaactgatccatttgctctacccatatggaagccagtatttgattcattcaggtcggtaacctgccggggtccaagattatttgtagtctgcaaacccgaggatgaactattatcactgaacttgcccaagccttctgcactaactaatgtaagctcagcatcattccggggttttgtatctgatgccaaaccaaggaaatctatgggcttgttatctgatgtgccatcgtcatctatataatgatcagctggaagttgaaggtcaaaagtgccttgtctgcttcttggaccaacatcacttgatataaatccatttggtgaggactgcacactgccttctctaaggaacttcatggaggactggtttgtatcattatgctctccaatagctttcctgtatgttgtggacattggaggaactggcatctgccacatcatctttgcaccgttttgtggcacttgtgatggtgaatttgtatgtgatgcaactgccaaagttgggtatgaatatacctctttgctttgatgttgtttcatcatatccttctgtattttgtaaactcggtgcagttcatacacctggatagcgagtgggtt

SEQ ID NO: 186219 - DNA, 550 bp, Zea Mays
ttttcacagacgaaatggaggcccatctccatgtgtttcgtgcgtcgatgctaaacggggttggagagttagacgacgttgatgttgccgcaatagccggtgctacgagatgacacgctgtggagttcgtgaagaaggcgatgcaatcaggaagcttcactaatgtcattagcgacaatgtgatactccgcctcaacgctcgagtgggggacgacgttctgacgcttggaggaccaagacgaggttgtagcctagaaacagaacatagcctaaggtggattggtgtgtcttcggacaacctactcgctcaccattagtgtaggcgacgagctcagaggcggaggggtagcgaagaagtctgtcatcttgagtgccctaaagatagcgtagaacatgtttcatctccattagatggggctcttgcaaatcatgcatgtgaagacaaaactgctgaacaacgtaagcaaagttgggcctagtgaacgtcatgtactaaagggtgcccgcgagactccaaaattgtgtggcatccaccataggagggttgaag

SEQ ID NO: 186220 - DNA, 472 bp, Zea Mays
attatatgttgatcagagactagggcccaaagctgcttggatcttaacttgtctatattcatcaaagttagcaatgctgtttatgacatcaagatcagttatatggttctcagctgttttgctacttgctgttaccccacctttacttctttacaggtatttactgtaaatctagtgtttagattgaaacaccaacatttttgttgttctgtaattttcttatgaaaaattcttctgacttgtgactttcagagacaagtccaaaggagcttctaagatgaaggtctggcaagcttattttcatgcatctgtcatagcattttctgcctggctctgccgggaaacaatttttgaagctttacagtggtggaatggaagacctccttcagatggtctgttactgggttcatatattcttttgacaggagttgcatgcattccaatagtcgctctccatttccctcatgctcag

SEQ ID NO: 186221 - DNA, 594 bp, Zea Mays
cttgcacatcggagagccaatggaaattagggagagcatcttggaccaaccgtttgttggcaagacgcaagggcaccaaatcaaacaatgcaggagctatgtccttaatacatctcccctccaaccatctgtccttccagaaaagggtattggctccatcaccgagcttagtaataatggctgcagcaatcagatttttaaccaccttacaaacatgaatggggaagtccgcccaaggcctactggggtccgttttctgcagccatggcccagcgagctctcaaagcccaacagaggttctttaactcactaatcccaagaccacccaactccttgggacgggtaaccttaggccaagccaagaggcagtgaccaccacagaactctttcctacccctccagaggaagcccttcctcagcttatcgattgctttgatggcccatacaggaaggtcaagtgccagagctgcataaatcatcttagccgtcatgacaaactgcacatgaatagctctaccaaccctggtcataagttcagctttccatccaggcaaaaggctggccactctatcaacaatggcttgaacctggtcc

SEQ ID NO: 186222 - DNA, 601 bp, Zea Mays
gctggaagctgttctagataaggctgttgaacttgaagacgggaaaaaagtgtcacggttcgttaagcttgttttaagttgtgcttagtaatctgggtttttgcttgtcgaaggtgatgctttggggacttagatgtgacagtaactaactacctttgcccctccccctctgttttttccagtggaattgacctggacactgtgaatataatacagcgtgatgcactattgctctttcgaactctctgcaaggttggttgcttgagtaatgttactttagtgggagctatgagaaagtagcaattatatacttcctgcgttttgtcatccttttagatgagcatgaaagaagaaagtgatgaggttgctaccaagacaaggctgctatcacttgaactgctccaggttagcttacttctttggggttgctaatgttcatttttgtttgttttgatgttatttgtagtcattctctttagggattgctagagggagtcagcaatgtgttcatcaaaaattttcacttcattgattcagtcaaagcatatctttcgtatgctcttctgcgagcatctgtctcttcatctccagttgtttttca

SEQ ID NO: 186223 - DNA, 378 bp, Zea Mays
ctcaggcgcaagaaaccaggacgacaagttgattctcggaaaaccgaggggttctttaacaaaaagaccaagcgaatgggtatcgggcgttctatctcagatccctgcctcaaggtttattccaggagaaagaagcttgttatagagccagttcaggatgaggagtgtgtgctttcttcacagctgctggagttcaagaatgatgtcactggtccgattaatagtttgctgcctcctcctcgaaccaccaatagaaggaggaggactgtgcctgctaatttcattcccaggcgtagcaggagggtggccaagtttcctccagaattgggttctagttctgctgcccaggtctgtagacaattgggtttttgtgatgag

SEQ ID NO: 186224 - DNA, 1614 bp, Zea Mays
tccacattctcttccacttccacctccgtccgttccccttctcctcctcctctcctccccttccatgccctcttagcttctgaaggtctccgccacctcctgctagctacccttctgagctttcaagctttgctgaacgcacgcgggcggacgcggtaaagcatcacatcttctttgagagctgcagggaagagatcgataagagttctattttttgcaaaggcacacagacatatatagttcttctgctagatctcaccgccagtcagctcgcagcgaaggttccctgggctaccttgtcgctggatctgttgctggtcgtgttgttacttgtcaggcaaggtataatatatctccgtacagctaggaataggattgggtagtaggggggtacgcatgtgccagtgaagaaatgggaaggagctagtgtggaggcagcaagaattagggttggagaggttccgcgagaggagaaatgatgatcccggcgaggcacatgccgccgacgatgatcgtccggaacggcggcgcggcgtacgggtcctcgtcggcactgtcgctcggccaggtaatctttgggcttggtgagatcagaagactgccttttagtttcatctctcttttctttgggaaaatcagaacacgttgttctcttgtttcttctgcgctctctttcttgctctggcctctgttgggtaaatttcttcgtttgatttgaggtcttagtctcatcgctagctagctcagtactggggattagagcagaagggccatgtatgcatgtagtacttatcctgcaaggattagctttttccttggaaaccgagaagtctctggagagagagagagagagagagacgtgttatagtactcagttggctgctgttcacacatagattaggtcatcagagtgtacgtatgagacccatttctttaagactttgctgactcctatataaaggggcagatgaatgggccatcagcttggcaagagtattggacacttcggtccctgctgcagattcctgatcacacacacagatcaacaggtataggttgggttgggtctctcgtatgtggaccttggacaagaaattaacgacctacagtacttttttctttcttcttcccagttccaagcttgctttcacatctaagtcgtccgtgctcctacgtgggtaccaaacgaaccaagaagaaagaaagaaaaaaatatttctttcccgatttatatatagtttcttgtgaaatccttcgtgcaatccttccatttcatccctaaattacttggctacgccagtacattcttctcttgaatttttccttttgctcttggacgaaatattttcgattccatctctcttcgtgccttgaacttttccctcatgcatgacatgcccaatccagctacaaattaatggcgaggagctatgaaacgcacggaacatatatgcctcaacaggcaattaaacctctggcacgcacttaaattggttatattaatttcaactcgcttgtgcaacggtacaaacagatgatgttgagttgtttaatttccccttccttaattgctcgcagccgaacttgatggacaaccagcagctccagttccag

SEQ ID NO: 186225 - DNA, 808 bp, Zea Mays
tgggaagtccgtctctggttattattcttcgaaaggacagaggaatggatgcaaagcatggagcaaagcaactggacagtcaagggagactaaagttccatttccagtcttttgtttcattcaatgtggcacataagtaagtacattttcttgcatgatacgtattaacccagtaataagggctgtctacctttctgtctatttacacctcacctgtttggttctgtttcttcatgagtatgtttgtttaaaacgccaatggcctgctctacagaacaattacagcactgtggaaggcaaggtccttaacccctgaacaaaaggtacagcttgtagaagaggaatcagaaacagaagacttccaaaatgaggagggagaatctttgttagggatagaggatgccaaaatgtcaggagttttttcatgtacaaaaccttttgatgtaagattccttattatatcgagagataatgtgtgatctaccatgttcttcacaaagaatcaaagtgttacaactttacattgtaaataactctgtgtcaccaggtatcaacactaatgggcatatttgagggtggtcctttggagtgccgggtgatggagaaagttggctgtatggactactctgttacagcatgggaacctgtcagagctgatatttaccagaggcaagttcattataagtttgacaagaaatcagcacggcacggaggagaagcaatgagcacccagcaaaagtcccctttgtctaataagaatggctggcttgttgaagaagtgatgacacttgaaggtatccctgttggc

SEQ ID NO: 186226 - DNA, 375 bp, Zea Mays
cttgaggaccttacaaagtacctgagacggcagagggaaggaggtgacgaggttggcgcagtagtcgcctcctctagagacgacaacaacgtcgagacgatgccgaagagctcagagccctaccagcacgcttcctccagagacgacgacgacatcaaggcaatgccggagagctcagatctgtaccaggggcctgcacacgcatgccaagagatgggacatcgacccatttttatcccttgctcatcctacgtgtgggattaaaaaacatttacatgtgacaagaacactgttatgtaggaaaagagaagatgagcaatcaaacctcagaaacaaaatggaatacttataagcttggcggtaatgttaaacaga

SEQ ID NO: 186227 - DNA, 460 bp, Zea Mays
tcgatgaaagctggggataactcgatttggatagttgttgttcttgctgtgccaagaacaaccccgaacctgcaagcaaatcgaagaacaagcaagaacgagtggacaagcaaacagcacacagtctttgcccgaaggatgaatctcttactcacgaaatgaggttctgaatcgagtaaaacaggtgctcaactgagtcacgagtttacaaggaagaagcagcaactttctttcaacaaaacaaaacctggggttcagggtgaggactacagtagcgtttataggtggacaagtgatttgggggtggaaaccctaaagggggcgcgcccctgaatgggctctaaaggaacacagcctacaacccaggttggatggctcgacttctcctggactattctgatttgctcgctttgaatctgacagtgaggactagctcatttgaaagtagacttcctgatct

SEQ ID NO: 186228 - DNA, 2506 bp, Zea Mays
attaattttgtggacgagactgtgagaacactagctggaaatgggacgaaaggatctgattacagaggaggaggacaaggaacaaaccaggcaggctctgacattttttccctagctactctggaatcatcataccagaaacaaaagacttctgcatacaacttctataagctacatagattgttcctaacactgttttggttcaccctcaagtggcatttgtggctgttagaggaacatgaaattttgttggaaactagctgcaagtatcaatagcttgtcttgactgcaaggagcatagtccagcaaccagcctattagatttgatatttgaacatgatatatcagataagtatagccacaatattgctgatctgtataaagacatgatttctgctcatattatcaatgaaaccctcttgtggtcgaggttatccacaaacacatgcaaatactctggtagtctggtactagtagttagagatgccttatatggtcaatatccatgattcattgacttatttgtttacaacatacataaccctttacaaattcgaataacctgtgtgtaggatgtcaaccgtataacttatgttctgtaacatactttacgttgaataaatttagatgtattttatcaactgcaatgcaccctacacttgtttccaaccaaatagatatacttagatggcatcatgctgcatcaactgactccatatcatgagaagttgggatagttaactagagagtgacgttcattctagcaatctgtctttgttggggggctccgaactgaagacattttattagataaatctgtccgccctcccttggaggctctggactaagattcctaattctgcttaccctctcctcctctatgcggcttatatagtcctgccgcctaatacatctaaccaatctcctatatttaagctaatctccctaacccttaacagctggtacacccccatttagccagctgttgggatatctttgggtgcctatgcttagtatgctaatacgtacggcccatgagccatgaaaagcatcaataacagtcttcaaaactatttatactttaaactataaattcaagttcttaatttatcataacattgtaaaagtacattatggttttctagccacaacacacaaggaatatgtatcaggttcaattcatcaaccaacaccataccacaccatcttatatttagatgaaataagaggcaaatgaccatgcatgcaagaaagggaatatgtttggggggggggggtgagtcagcatttatctgaaaactgaggtggtcaatgactatgtaattcagtattgcttcacctgtatgtctggattagtggattaattcagcacccttggctttatcatatcattgtttatggtagatggaacaacaattgactggaaagtgttcatgcaggtcctaaattcaccatgggatgtatgctacgatcccgcagaggaggccgtgtatattgcaatggctgggcaacaccagatctggaagcacaatttacatgatggaataaccaaagttattagcggtgatggctatgagaggaatctgaatggctcaaggtaacagattctggcattatctgtcaggaaagttctaaatgtgctgttttaattggtcttacagcgcagtaatatgtttatgaagatggttaatgacggtttctatctgatgagtggctaatgatatttttggcgatatttccttgtgataaatacatatgtttaaaccgctttattttatccgacaagtagcaaatcctgtatggatcttggagctggagctgttccaaacagtgtaacaggccctattttacagcttgaagccatgtttatttttttcctttttatgctaatttctgtgaaagttgaagtagaataaccattccagatcttggcgtacaggcttgcttcttatatgatcagcctaagacttttcttcctttaatgtgttcatttgtctcctgcacatccttgcacttgatttggttaatactttgaagttttgaatttattttctgaaaaattaaatttatgttgcagcgccaccagcacatcgtttgcacagccttctgggatttcattagcttttggtattcattgctgactctttttttgccgttctgtttctgatctgatggcactgagtataggaatttttataacagaaatgcatgagttacttgttgctgatagtgaaagtagttccattcgagttgttaatctgaagacaggaggctcaagattgctggctggaggagatccagtatttccagaaaatttgtttagggtatttctctcttgatacaattgatgttctgttaacttatttgatgctaatctgtctgagcatttttaagtcagatacttttgtctcttcagtttggagattatgacgggactggctcagatgtgctacttcaacatcccttgggtgttgtttatgccaatgacaatcaagtatatatagct

SEQ ID NO: 186229 - DNA, 875 bp, Zea Mays
cttatttcatcagatggtgctgacctgggtagagaattggaagacagcttagtcgtagataatcaacatgttaacaaagatgacactagcactcagttactttcctctttcagtgaagcttcaagttccatgcacagttcatttgaaaatggatcgcttgaaaaaggatttatttgcaatgctgggcattttggtccatatgaagcaacaactgcccatagtgacaatgatgtgcttgggtctggggtatcaagttcatttgatgagctatcggtcagcacatatgcatgtgaaaacatacctattattcatgaatctaatacagatcataccatgactgaaaaaagcaaagataagtcgatcacatcaaataattcgtcatcatgttcgcctccatcttctgagataggcagtactcctgctgtacgaaggaaaaaggtcaaagacgtctcggagtatatgattagtgctgcaaaagagaaccctcagatagcagaaaggatccatgctgtgttacttgaaagtggtgttgtgccaccacctgacttgttttcagaagaatctaaggaacaaccaaaggacctgattgtttacgacacatctctgtttcaaacaacagatgaaatgataaggacaatgaatgagcttgaatccacagcacacgatggttgtgctggtcttggtccttcattgccacctgatcctggacatgagctccaaacaaagattgttccttatcggatgcctcctgacctcaagcctgtccagggattaggtgtttaccataagtttgatttccgggataacatcaatccctctatacctctctatgaaccaagtccagctcctcaggaaaatccattacaacttataaa

SEQ ID NO: 186230 - DNA, 540 bp, Zea Mays
attgccacgaagcaggaggttcaaaactccggtatccggcaaggggcgtatggtgcggcgatagactctgtctacacgagggatgccttccatggcaaaacatttcttgactacatctcagcactaggaaagaagccactagccggtgctgatcttcttgacctagccaccgccaaagcacagttgagggcattcaatcgttcaaggggttcaagggaccttcctgagtttgtgatgtttgagggcattgcggagattacagagatgacacacacaaagggagaaaggatgcacaagagtgaggatgatgttctgagcaaggagaagaaatcgaggcgcgctgggagttcacgtagaaaaggagaggctttaccagaggctgcaaatgatgatgctatagatgaagacagcaatggaggggcaggaaatgatacgttgagtcagggggaaaagtcaaagcgtgtgaagagttcatcgaagaagaaaacagacatttacaaacatttatatggactcaaaactgattctgttgctgacagc

SEQ ID NO: 186231 - DNA, 592 bp, Zea Mays
aatagaagctgatgcactggcttcgcttccactaggcactaggtgaatatttcttacgttttatgttgagaatttgatattcccatcgatctgcagcctccattttcaagtatagcaatagcacaatcagtatatctcctggccacggcaatatgcaggacagattcaccttcaccatctactgcgttgggatcagctccagccatcagcagctcctacataacacatacataatctaaaaagtaggaaccagcaagcttaaacgacatgaggtgagcatgacgacatacttgcatgcactctggttgaccatgatgagcacagacatgggcaagagtaggacccaggccttctctaagcctagaattgatactagcagacctgcctacaagtgcacgaacacatcgtggagagccagcagccaaagcaaatactataggtgggtcttcatccttatctaatatatctacattctcttggtaagccacaatagcttccacaagctctgccgagcctcggcgacatgctaaatgtagggcagtgagtccatctgtattttgtgcttctaagagagaacggatgaaaccaccat

SEQ ID NO: 186232 - DNA, 620 bp, Zea Mays
caatctctggccagcatctccagtagcagaggaatgcttcctgatctgtttcagcagctcgcttgagttcctgtggtcgtcgatagccgcggcctgagcacaatgtatgagtagggttgtgagatcaactggctcctcctctgcaccagaacctgatctccccttccttcgccctcgcttatttctagatcctttcacatatcccccgctgatctgtgcatcggctggcattggtgagtggaactcacagttcttgtcggtacacaacagcaccttgtcaaacatctcccggacagtctcttcgtcacacagtgccgactgtttgctcttcctcccctccatctccatgtcctcgtcacgcgggttcttctgacccttatgagcagcaccaactaaaccctcccgcaccatttcacgaggcagactacttgtgaccacatcgcgaaaccttccgcttcctgtagaatcacagtcatcagtgatccaagactttacttcatagccctgtgctgcgataggcttggcagactcgaggatgtcgacgaatggtttctcgacggcggcgaggagtgctgaatcctccacaggcgcgctggtaataggataggattcctcgtcct

SEQ ID NO: 186233 - DNA, 674 bp, Zea Mays
attcaaagagcgtttgtctttagagttttcgctagcagaaacctcatttcggaacccctgctgacctgcatggctgaaaacaccaacttttgttttaatacacttgtcaccatcaatagcatcaatagtaaccttatttgtcatagatgaacaatcttgatgcatatcactgtcgtgttctttctttagctctatgcttaagttattattagtattgataccatccttgctgattgggacattccccaatgactcatcatgaggcttatttgtagttggaattcgtgaaacagtattaacatcatcatctgaacagtccatttcagcacttccttgtgacataccatcaacaatagcattccccagagaatttgaaggcaaaggttcaactgtaggattggaggaacttggtaatgcaccgcaagattcattagtatcacaagacctctgcctcgtatcctcatcagcacgaatatggccggctgttggcttgcaaacagtagaaacggtgggctggctggaggattcagataacccaacagcagggctagcaacattaccttgcgaacgctgtgattttgcttccaccaacagtgtagtatgaccatttcctgtttccacaacaggactgagggtggcacttgtggattcttcatgcttcacaaatttgtcta

SEQ ID NO: 186234 - DNA, 292 bp, Zea Mays
gttctctacgccagaggttgagttctattgaagcacacaaggtgaccttggagactctactgccttctggacacaaaattaatgacttgttaataaacatctggagagtttgcaaagcaggctatcaaccaaataacaaacacattctgggtgttcttggtaatatgggatccggtggctcccttctgggccagcttactggagctgggaggcctgcctgctggataatatttgatatatatgtggagaatgcaattgatgggaagcatctaagtgttacatcagctatcgg

SEQ ID NO: 186235 - DNA, 705 bp, Zea Mays
tgcggttatagtagcggcagagaaagctgcatctgcagttgtagaggctgcagtgtcgactagtgtctcacggtaatggggagaaatgcttacacaaatgcacattatgtttcacattgttttctgtcactgacccttttatttatctgagagttcactttgatgttacagaagcacaaatcaagttggtgaagaacgtgcagcggaagaagctgtacaaaccagcgaagaccaggatttggaaaattttgttatcagtgacaaatcacagctcttacaacttagagaaaaatatagcatccagtgtctacagattttgggagagtatgttgaagctttgggtcctgttctccatgaaaaaggtgttgatgtttgcctcacattattgcaaatgagcatgaaagaccaggagggatgtgaccactttgctcaactccctgatgttcttaaattaatttgtgcattggctgcccatcgaaaatttgctgcactctttgttgatcgtggtggtatacagaagatcctctctattcctagaattacccagacatatatgggtctttctgcctgcttattcactttcgggtctcttcaggtagacaaccatacttgttcatgaaatcttaatgctagtcttctacttccttttctgccatgctaatcttctgatatgcttgcagtctaccatggaacgtgtttgtgcgc

SEQ ID NO: 186236 - DNA, 1086 bp, Zea Mays
ggcttctcatctttgccatcactagactctttttccccttcattggacatactaacaccccttaaaccaatggctgttggcaagtcatattcctcaactgttgcactagagggcaagatatttgttcttggtggtggtgatggtgcttgctggtttgatacaggttactacttggcttctaagtttattttcctcttgaactattgtattgcaatcactgccctgattctgcatttatcttttggatgaagttgactgttatgaccgaagccgtgatgattggtccacatgcccatcgttgacttgtgacaaggggagccttgctggggttagtgtcaacgggagaatctatgcatttggtggtggagatggaaccaagtgtttctctgatgttgaaatgtttgatcctgtgcatggaaagtggataaagaatcaacctatgctggaaaaggtatcagtttctaccattctttgttctagaatctggaagcttttcttctcatagattactgaagcacatagtagtatgtgcgtagatttgcctgacacaaacaacttggggaaataataaccatttactcatggaaaactgtaattctgcactgaagctgtgaagcaaaccagttcctggttccatttcaatttcatgtacccttttcgtgaaaatacttgcttcagacacaaatctccacataatatgattaactccttagcttggctgactttgcacactatttttcagcgctttgctctagctggtgtagcactaaatggtgcgatttatgctgttggtggcttcaatggtgttcaatatttgaggtgctgtttttttttcctgcctgtacttagtactttgattggtttagttctgatctggtggaaatacaacagctcataaaacctccaaacatgtggtggcctatggtttagtgcaaatctgaataaattgtattatttcgtaatttttcattaccctattgtctattgctaatggcagtgatatttgaagtgagaggaggacaagaaaactcttctgctaactgtgtgatgtgtattggcagctgtgctgaaagacttgatcctcgg

SEQ ID NO: 186237 - DNA, 843 bp, Zea Mays
tggtcaatgagtgtggtcttgttgatggaaatcctgtagttatcaaagcccaccctaagtttcgaatgtttttgacagtaaattcaaactatggtgaagtttcaagagccatgcgaaacagaggagtggagatctttctgatggaccaaagttggaatctgaaaggatttagcaatgtacctggggacagtgaacggaaggatgtgataagatttttaatttcttgcggaatacccagaatggaactggtctcgtcaatgtgtgaagcacacatgtacgcaaaaggtgaaggttcacgtgttggtgtgaacattacccttcttgaaatcacgcgctgggttcagttgttccaacaactgattgttaaaggaaatcagttcctttggagcctgcatttgagctgggaacacacatatctaccatgtttgggtgaaattaatggatctggcattgtggaggaaggaaaaaataagtttttgactaattttgacagatctgaaattttggctagaaactttagttttttgactgtttttgatggttgttcaactagtttgcattctggattatctttgtccttgccgggtggttggccaattgagcaaaaactaagggatctcatttggtattcaaaagaaacttgtgtcatgaggaattgcatgtttctacagtcattgggtgcccaatacgctgcttatcagataagcagtttgaatgataattcattattgttgggtcagattagtctcatccacccatctattcttcctgctgcaagcttacgcgaattacagtttcctacggttaatggtcagcctgtcaaaatttgtgtcactggggcat

SEQ ID NO: 186238 - DNA, 522 bp, Zea Mays
cagcaattgaatggttgtgtgacgattgtcctccaaaacataatgaaggtaaggtaggggtgagaatgttctcacctccactaaacattttctgagtgaagaaattcaattcttatgaaatgttcgtcgtgaaaaatttaaagctcaatgatattttagaggaaggggaaagtaaaaatgaccacttaatttatcaactagaaagtgctgatggttcaagtcattcagcttctgatcttactgtagaaacacaaaaggcagtgggtgctgttgggcctaccatgaacacaatggagtgtctggacctctcaatgggaaaagatggctgctctttttcacagaattgtgttgaaggcttcacccaaggaacaaagtctgactttttttcttcaatcaatgatgttgagacatcatatccatttgttaagggtagttcttgtcctacactaccgaatatggagcaaaaagatggtgtattggaaaatgcggaacaacctcatcttttggagatggttaatcttg

SEQ ID NO: 186239 - DNA, 539 bp, Zea Mays
atgactgtacaaagagatgtttccagtataaaacggtgataattgtatcataaacttgagacaaaacaagcataaaacagtgataattgtattataaaagtatgggcaacaatgcataacacgacgttgtttactgcataaactggtcacacagtgaagtttatgactgtacagcggtgataattatatcataaacttgagagaaaacaagcataacacgagattgttgacaacataaaatttaaatgacactgcacatcatataaagtggagtttcatttgtaaatataaacgacactgcttctatccatataccatatataagacaaattaaattgataaaaaaaatatgataaacgcataaaaaaataccgaacaatgtacaaatggttcttgtccttggcgtatcttgcccttgtcagctcttgtcaatgcttgaataatattcctatcaaaatatttgatgcgtggtgttccacgtttattctgaggtgtagctgaatcatgaagatgatccaaataatacagctgcaaaagca

SEQ ID NO: 186240 - DNA, 437 bp, Zea Mays
cttatggtgcttctcctgcggaggtagttccgaccaatttactggttgataagttgtcagagaccacatcctctgctagctcattggttaaaactgatggtcggtacaaggaggaccatgtggaatgtggtattatgttgaatttagctacattgggaactgatgagatggatggttctggatgtgctggttcatcttataatgatgcaggagggagattaagctccagttgtgtttcttacttgaatgacaaatccaatacgacagattcttcagaatttgacggatccaccttcactgaacatggcttgggagaagaaagcaatagctaccagaagttaacatgcccctatgtttataatcccagttatgcaaccatggattccatctttagtaggtggaacagcgacaacagtgggaactacagtgtcgatgtt

SEQ ID NO: 186241 - DNA, 646 bp, Zea Mays
tcatttctctttcgtgtgatgaggatttccagaatatgatggaagaatactgcagtcttgaaaaggccaatggctctgttagactaaggatgtttcttgtctccctcaatgaatgtgaagattcgtcattggacgcaaagagcttggagagtgaaccagagtatcattttgttgttgctgtgaacaatcttgcacatttgggccggagcattagtggcaacaatttaatgagccagccgagccatcaattggatccttctccacactcctttagagactcacctgtctgtcaagccaatacagaagttaaagccaaagattctgttggagcaactctcaatgaatcttcctctcagtttttccttgctccatacacacaacaattggtggtcgagccatcgacaactccgtccccaagtttaagtcagcagaggaccatgaaacaatctaggaagcaaccccctgcagatgaattgacaacaaaccaagaacatgtgagtagaagtgaagtttccagtagctcaaatttgaaaaccatgcttccgaaccatctagataagaagcacaatgatgcggacaagggtattggaactggatctcccttgaaacatcttcacattcgaaggcaggtaaaagattgggctgg

SEQ ID NO: 186242 - DNA, 335 bp, Zea Mays
cattgcgggggaagtgccagatgtggctcctgtggtatctgaagcacggatggacgaggacgggggttgctccacaggcaatgagtactctgaaatgaagatggaggtggatggcggctgcgtagcagaacgagagggcgatggtcaggaacaggaacaagagtgcactgcagctgctgtggaaagcgaggttaagacgggggaaggtgacggcggagtggtgaatcaagggactacggcacatgctgggggtcttcaggttaaagaggaggtgggggaaggcttggtgggccgctacattggacgtagcgctccagggcgcacgaggattctta

SEQ ID NO: 186243 - DNA, 408 bp, Zea Mays
acaaagttccaggaattcagcaatgactctgactgaaattgccccattcacatcggagatccactggaaattagggagagcatctttgaccaaccgtctgttggcaagacgcaggggcaccaaatcaaacattgcaggagctatgtccttaatacatctcccatccaaccatctgtccttccagaaaagggtattggctccatcaccgagcttagtaataatggctgcagcaatcagattttttaccaccttacatacaggttgaagctgagctttagataacttcttcagggagagggagacccaagtatttaattggaaaagtttcaaatctgcagggaaggagctgttggaccaaattcaaatcagcatgtgtgcaacggatgggtacaatactgctctttgcta

SEQ ID NO: 186244 - DNA, 2324 bp, Zea Mays
gcaaatatcaaactccactgctaccactaatacacatcgcccccgcacatatcgatctcgtcgtcgtctcccccggtggcatgctccgctcccgctagatccgatctattatctatggatccccgccgtctccccatccttctctccctcctgcttgccttcttctccgccgttgtcgcctctgacgagatccacggatgcggcggcgtcgtcgaggtcgacgttcctcatgttgctctatctccgtgtacagtgtgtttcgctttggttaggtgtgacttgttacactgatgcgacttggggttttgggtggtttcaggcgagctctggcttggccaagtcgaggaaggcatcggattccaagctcgattactccgacatcacggtatgccgtccgctcccgccatcgtcagtttttatatcttaggaccgtctcatcccatcacgtagacaagcttcgtagttgcactcagctgtcctttcctatcgagctttgactggtatttttatgcatgattcgtttagtctaaacatacatttgcttgatgccgttcacttgaattggacctcatggagagctgaacacgttctggttgcatgatgctgagttaccgccgctgctctaacaactatcctagtttcggattgcctgttgtcccatggtattcagatcactgccctatgggtttgcatggttgggtttagcgactctacactctattcagaccatttagaattaccattagggcacaagaggttgccctgccggtgttttgagcacatactgatttcttgtttctggtagctttggtgattgctggaccttaattatgctggggggagcgatgggggatgattcaaataatattgtccattagatttgagtaagggagagagtttatccagcgatctgaaacgttggttttcatgttttgttaagtctgggtgcaatttgtttagtggaggttgtgggtgtgggggatgatttggttgggtgggttctactaagtttaaactgatggatattttcatctctcatatagtgacatatgcaaactgtagcatgtagagattaatatcatttttaatacatggctattattctagtattgctctatttgtgtctgtgtatgttccgttaatcatgcttgtgctttggttttgatgcatatgtttttatatttatttatgatttgcactaagcctccaactgattccctcttaactttgtgtatcaggttgagctctgcactgttgatggtttggttaaagaaagcacacagtgtgctcctaatggatactattttatccccgtctatgataaggtatctttgtgttttttgtttactttagttctggattatcttttatgtgttctcattttatttacacatacaattttattgcaagtaggagcaaaggttaaagggcactactccctcctgtcacaaaacatgttatgttttggctactgtcagcatgatgccctgtttaagtttttgtcatcaatatcctttttgatatttcaattgaacttctagaaattgtatagcctgatcttccttcaaaaaacagttccatactattacatcattgatatattttatacatatttagacaattagactactagttattgtgatcaaggtatgtaggctcctaatgaatattacaaagaaatttattttttgactgtatgacatccaaagcagcacctatttttttttgtactggaggaagttgctaagatcataattttgatattctcttccattgtttctaaaataaaatttatgtctactatttatgcttgtcgcttctgtcaacacagggttcgttcatggtcagagtgaaggggcccaagggatggtcatggaagcccgaaactgtaaaataattccttaactgaatctttcctttgtttccctccttactttgtctttactaagcactaagtgcatttgttcttttactggatgacatgttcacctaacacttcaggttcctgtcatcattgatcacaatgggtgcaatggaaatgcggatataaatttccagttcactgggtttgtttctttagccatttagtttaatttttttgtgtgaacatgaatcacattgaaacttcaaatgttaatgtatgcatgcaccgtgcaggtttatgatatccggtaaagtagtgggagctgttggtggtaagagctgctcaaaacggggaggacctgctggtgtgaaaattgaactgatgacagattctgatgagttgattgcatctgctttgacgtcatcatcaggagaatattcatttacaaacataattccag

SEQ ID NO: 186245 - DNA, 396 bp, Zea Mays
gtaccaacaaagggagtttgctgaggtgtagcagcatccgcttcggggagaagcggaactcaatttttgcttgcgctccagacaatttggagcagaaatctggacaaacgttcgaagctgatgcccattctgcgctaaaattgtgctctggtatcgggagtgtagttatagccaagtgttctcacatatttgagagaaatggggacacctttgatgggaactgcagtttgcaagatatcctcaagcctggtttatggctctcaccggagaccctccgccggttttggcgtgtctctgagctgaagcctaaggattttcttgacattttgaatggttttggactcagtgccgtaaaagtgagaaatgcaagatttctatggaatttgtacaggtgga

SEQ ID NO: 186246 - DNA, 486 bp, Zea Mays
gcttctaagaaaattaggaaagaagagcgacaccattttgatgtagatcggatccttggatctgatttagctagcggagatgttcctgatgaggccaaggctttgcctgcgaagtcagcaacctcaaagggttcaggtgaaaggactgacctttcttcatcaaagcaaaaaagtgcctcacggcataatcgtttggaaacttccaagaaagcaagacaagatgatttagttggtcctgaagacgagagcaagggatattttcaccagtcagatgtacaaagatcagatttgtctagtaagaagaggatagtgaaggaatgggaggagagccagcacaattcagtagctcatgtaagcaaaggagctgtcaaagaaacctatagggaccagaacttaaaggaagcaaagttgaaatcattgaattctgaagagctgttttctatgacgagcaccaaaccaccaaaagttcaacatgctgatcaggtt

SEQ ID NO: 186247 - DNA, 301 bp, Zea Mays
cggacgcacgacaggatgttggctccaggcgtgaggcgtctgggtggctgcaggctgcctggggattgaccgattgaggttgagggggatggctggatggggaattagggattagggtgggctggtggcttggtgctttggtgggctggcgcctgggctcaatggacaatggtggactggtcatttgttcattagtgtccatgtgtgggccgacaataatggactaatggtaaatttcggatatccaacggattacccacgggtgagatttaatatccaaatccatgcccactttatctcg

SEQ ID NO: 186248 - DNA, 386 bp, Zea Mays
atactcaaaactggagaggtccagacatcacaatgaacgagttcaaaaggtgtagatgtattagaaacagaactagtaaagggcagtttagcgtgtttgcctagctggcaggcatggcaaatgcggcgagctgctttattacattgaatagctgaaagcttatttagggtttgaacggcggttggcgatggatgtccgaggtgagcatgccacaactctggagtaacgacaacaacatggcagcaaggcggcagacgatgtggaatggtgtagagatccccgttgctattgcaccgaaggaggaccgttttggtttggagatccttaacagaaaaaccagaagcgccaaattcaatggaacagttattgttgcgagtaagctgtcg

SEQ ID NO: 186249 - DNA, 553 bp, Zea Mays
ggcaaagacacctactgtcaaggcccctttaatatcagttaaccattttctgtctgtcaaggcctcaagcacagttctgctgttcctaatcctttttggcaccgctgcaagcagtcgaggagcaatgtcttcaatattctttccgtggacccaacgatcttgccaaaataaggttgaagacccattcccaatgtcagtgagcagggcggtgtagaaaaaggtctttattttgttagatatctgcatgggcagtgaggaccaaggcttatccagatccgttttgcgtagccacaaccatctcattcttaaggcccatcctagttctttaagactagaaatcccaagtccgccaatttcaagaggtctacaaactcttccccaagccactaaacaatgtcctcctctgacctctttccttccacgccagagaaatcattttctgatcttgtcgatagctttgagcgagcctgtgggtatgtcgactgccatgactagatatataagcatgccggtcatcacatactgaacctgcactcttctgcctgcccttgtc

SEQ ID NO: 186250 - DNA, 370 bp, Zea Mays
tgcgggctcacgaccgcgttgtggctccgcccttttctccgccgctaccttcgcgactcacgcccggggatcggtgtcttagattttggctgctcacttccccacgcttatccccggcggcggctcggcgaggaggggatcggtgttgtgggttggtgggagcggagtgccgcctctgtcgcggcctcgcgggatgccctgcctgccgagcgtcgctcgccttccttgacctctcccccggattgtacagggcgttggggagcattcggcgcctctgcatttatagaggggaggagcgagggagggtggcggtgagctcgccctcaccgcgcctagctgccaaccccgctctcctcgtctcgcgtggcgt

SEQ ID NO: 186251 - DNA, 760 bp, Zea Mays
gcagggcataaggtagaaggtgatggcgatggagaggtagaggtagaagaagatgaaaatactgagattgtgttatgtggagacaatgaaaacaatggggaggttgaggggtcatttgaaattactgaggaaggaggggaaaatgaaacaagtgaagaagcaaaacaggatgtgatgcccagtacaacaatgccattattaccaaacttgcttcagtgttgggtgacgccactatcaggcttgcttcgttgttgtggggaacatggcagccctcaagagagcaccaactcatacataaaagaaatgttgcaagtatccaagtttcttcgtgtcatcaatctacaaggcatcgagatcggtgagagcttaccaacaactattgggaatgtagcacaccttcagtacctcggtgtcactgcttgttccttgaaatatatcccatcgacaattgaaaaccttaaaaatcttcagacgttggatgttcgagacacgtttgtttataaacttccagaagcattttggagtataacgacactgcggcatgtatttggtgagggtcttttcttgcctaagcaggtgggtgacttgaaacacctgcagacacttgaaagcatagatcctgataaggataatggttgggacagcagcacttttgagaaaatggctcaccttcagtcccttcatgtttgggattctaaggagaatggagttaatgctgaggctctatctgctgttattgataaagctaatttcctcgaac

SEQ ID NO: 186252 - DNA, 681 bp, Zea Mays
ctggaggcaggccatggcttagcctgtggcggtggcacgtggagggaggtgtgaggacagtcggtggctcggtgcatggtggcactgttgtccgacgagacgggcttgagttggcgagtagggaacatgggtggccgacaccagtagtccaaggcagggcgatgtggagctcctgtctagtgtcaccgagtgggtgagggccggggcgaggaggtgagccacgagtctgcaacggcgcaagcacatgcctgagatgggggcacactgtgtgatctgtttgtcgcgttcctggagaaacagtgattctagctatgagggatgctcgacggagaagagaccggatgatcggtgaacaaccagaggttgaagaaaagggtagaaaagacattcccccaccttgaactctaataatcggtgcgatgtgttatggcaaatatacactcattcataagggtactaggcatatttcaacattggcggtgtggattggccaattccattgaagtcggatgtcctgcagcaaaatttgcctaacagtatgacatatttctagctatcatgtcattacttgagctgtctggagaaaagtacaattacctagggctgtctgactaggtgctactgtggtaggcatagcctgaacacctccctagcaccaattgctttatgaaacatttactt

SEQ ID NO: 186253 - DNA, 705 bp, Zea Mays
gaggagatagacaagctgcagaaacagatcctggcattacagactgagaaagagttcttgaagacctcttacgacagcgcactaggaaagtatctagacattgagaaacaggtggcccaattgcaggatgaggtctgcaatttgcaggatgctttcagcaccggtgtagccattgaagacaatgaagctcgggcattgatggctgcacaagccattatgtcatgtgaggatacgttggtgaatttacaggaccagaaaaacaaattgactgaagaggcggaggtggagctccgacgagccaatgaggcaattgaaaagctgaaaaccttcaagaacgaatgtggactgcctcatgtgcaaatggatgggcatgatcaccatgaaatagaactggtccatgcactgcccttcgaggattctgatgattctgcgctgaatggaagcaggcttgacctccaggaaatatgtcaaagagtcaaagaaataattgaatcttaccctgagctatcagttgcggaattagcagataaagttgaccgacttgtggaaaaggtgatcagccttgaacttgccactacttcacagaatgctcagatcgatagaatgaagactgagatagatggccttcacgagcgcctgcatgctttggagcaagacaaggtggctttggttgttgattctagtaacttggctgacgggttgagg

SEQ ID NO: 186254 - DNA, 393 bp, Zea Mays
gggaacaacagccgttgtacttaggcatacatcatcgtagttggtgaaagccgacgagaccgcggtcttgtcgctcctgttcgcctgcagcgctgcgtggggtaggtatgctcattaaatgctcatgtcccctgtgaccttcggctgagacctgcctcggggatgccttccttgctcgagacgggctcgggcgaggcggagacggtagttatggggagagaggacctcggctgggacgaggattctactgagtatgtaccttgtccgagggcaggtccgggcgaggcaaagttatgggtgaccgccgagaggggccttgggcgaatcgtggtttataccttattgtcctcgggaatgtgcctggtggcaacctcggggttaagcacgtttagg

SEQ ID NO: 186255 - DNA, 391 bp, Zea Mays
ccagtattgaaagtcttgatgatatgagagctcctagatttctgcattaaagctaagtagttacaaaaaaaactgatacatagtattaacaacacagaataattgcaagcaacatggtgaacaaatgcatcagatgtgaacgatggttttaacaaggtataagagaataacaatggaaggagtagatttttttcttacttcactgtggagaagaaaattttgaccatatcaagaatcaagtcctcgcagccaatgttgagcatgatcatagaacatctaagtgcagcaacattttccaaaattttcatccttctagtaagaaatggactgctagtttcagcaaggtccgcaaatatgctgataaatagcttaaatatttcctgtgaaaaaa

SEQ ID NO: 186256 - DNA, 396 bp, Zea Mays
gtttggataccattgcgataagtagctgtctagatacaccagtacccacaaattctctcacacccaatatgccgacatggtggggtaaatcatcgtcaaaagatgttaagaaaaccaccaaggaaaacctgatcgatacatttcatcgcttgataagtccaaatgagcaaaagggaagcacaaaatcaaaacggaattgcaggcgtggcaataatacagctgctgagaaagtttgcaaatcaacaacagtgtcacgtccaacttctccatcgaaagaagtttctcgctgccaaagtttttcggctgataggctgcatgcccagccacttcctattcctggagtacgccctcgagtaactcgtgcagttgctgatgtcaatgtttcaaagcccatat

SEQ ID NO: 186257 - DNA, 348 bp, Zea Mays
aagctacacgctacatatgcatgcatgcagggatatttcattacaaaatatgcttatttttctacgtgtccgtgcgtgcatgttctggcaaaaataactaaagagagacggcttatgcgacgacgacgaggagaacgtggtgatcaacggggacgacggggcgatgaggtcgtcgatttccaccaagaggagccgggctgctgcgacccataacgaatctgagcgtgtaagctactagctagatccccattcctgcactcgtcatacgcgtacatgtagataggtgaaataaaacgcatgggctagcattatggtacgccatatatgtcaaacagtcatatattaccc

SEQ ID NO: 186258 - DNA, 338 bp, Zea Mays
tttttctggaatacgcaggagagctgcgcatctttgtattaatagaagaaaagaaagggggagagaaccccaaaacagcacacacaccactagagactagctacggatcaccgactaaaacatggaggaaacacgacccacaccgctgttttaagccagcaactcatcgacttggaggaaggacaaggccttggcaccagtcatggaccagagcaccgcctcttccctagccatcctaagggccgtgaccaagctgggattacaaccatcaaaaacacacctattcctatgcttccaaatggtccaagcacctaggatcactaaagaattgaaacctt

SEQ ID NO: 186259 - DNA, 379 bp, Zea Mays
ctcagctccaccttcaggctgggagtgtccagaacattcgcctgatggttcctgtcgtcctggagcccgagtcgccgtcctacgcacgctggcgggacttactcctcctcacccttcgtcgctacgctctggacgaccacgtcctctgcgaccccaccggcatggcgccgactgccgcgtgggtgcgccttgacagcatcgttctcacctggatcgtggggacgatctccgttgacctccacagcctcctccggaaccttcctcacgctcgggctgtttggcttgccatcgagggccagttcatgggcaacgccgaggcccgggctctccgcctcgacgctgcttttcgcaccttcgtccagggggacctcagtgtcag

SEQ ID NO: 186260 - DNA, 619 bp, Zea Mays
tgggtttgccagacccagcaatgtgttcggaacgaaaacgtgtgccaatgtagccaataccagatgaacgaggtagagggcctcaatcatatatcagcatccgagggaccaacagagaaggtctcaatgacgattgcggtgtgcagaataacaggtagaaggtgctgatgtagcatgcaactgtcgaagtagatgatgttggtatggacgaggcgacgacactaacaacgtggttgtgctggatatagtgtgggagcggacgaccggacgcgtcaaacccgaaggtgagcaatttgtgtgggcatggtcgagtagtccggacgtagggcatggtcgtagtggtgtagcggtggcctcgcggagggcggcgacgttctcatgctcacaggtagcgctctgagttgacaacaaagactcgatgagtaggacgaagaccttgtgcagatagatggtgcaacaaagattgcacatctgagtcatcgatgcacggggaacgacgatgtaggtgtatcgatgaagcgggcaacaatgttgcgacttgatgaggcaacacaacagaagccctgttgctcagagaagatgcaagtagtactcgataatggacgtcacaggagttgag

SEQ ID NO: 186261 - DNA, 565 bp, Zea Mays
gccgatggctgcatgtgcatcaaatctatcctgaataaggcagatttcattctgtgtatctgcaatctgcttctcgatctcccggtaccgagcaataccactctcataggaactcttaacatactctttctcggtttgcagaacaagtatagatttctgaagtctgccgatctcttcttgtgcctcctcggcgctcatgcgtggatgggagggtggcttgttccatcctgaccctgacggaccttgtctctttgcgttgagaatctcttggaccaaggacttgtgtgtcttgattggtgtgattgctttggggaaatcatggtcctcctcttctaacattgcatactgcacctcttctggacaagcagtagcgatggtgtggttggccttatggagctccttggatatgtggtcatagcgttcgacgagagctctgtaagccctgtagacttgctccacatggcttatcacctctggcctggtgtggtagtacatctcggccctcttgccaaaggaatcggcttcctgtccgaggagtttgagcatgatcttgactcgattctcc

SEQ ID NO: 186262 - DNA, 674 bp, Zea Mays
aagctgaatgcacttgagtcccaggtttgtacattcagctaagtgtttgttgcattgcattcctcatcatatactaacaacacaccatttgcaggtccatgagcttaagaaaaagcaggaagctcaacaacagcttctaaggcagaaacagaggagtgatgaggcagcaaagcgcttacaagaagatattcagcgtataaaatctcagaaggtattttctcctctaaatgtttctgaatgtgatttaagtttttttcctgacatatgttcctttcattcgatataggttcaacttcaacaaaagatcaagcaagagtctgaacagtttaggtcttggaaggctgcccgtgaaaaggaagtacttcaggtaattgttcttacaggttgttgatcatctttatgaacttctttctcaatgatcacattgtgataatgctgcatttccattaattagctcaagaaggaagggagacgaaatgaatatgagatgcacaagctcttggccttaaatcagaggcagaagatggtaagtttcctcatttttttcctctttcaggtttaagataacatgattgtcacctacaccattctgcttgaaattgtaggtcttacagaggaaaactgaggaagcagctgctgctacaaaaagattgaaggagttgctggaagcaaag

SEQ ID NO: 186263 - DNA, 844 bp, Zea Mays
gcatggtgcttctgccactcagcagaagacaggtactgtggtagcagctcagaagcaattggtacaattgcgttcccaccaatggcgatggaaaggcggtcaaggcactcctgcgccactccatagttgttcccttcccctgcgtcctcatcttcagtttcagcagagtgccaagcagggtcatcctcgacatcaagcagcatctgcatcagcactgcaaacagcctaccaacaaactgcgggagtcgccgcatcattcctggtgcacgctctctagcctcagctagagtaatcacaaactccaccgccaagtgtctggtcccatcttccagctgtgtagcctcagcaacttgcaacattgcccctaccacatcagcaatctgcctcctcaggaaccttggctcggcgccagcgagctccaccagcagctccagtgcctcctgcgcagagacttcctggccagagtttaggcaatcagtgagcgccctcatcattgctgggagcaaatcctgcatcttatccctgtcggagttggttggcaggcactgaacaaggttgactgcggcacccagggccgcaatccgaacatcaggagacgtgggatgcgccagggctgaggcgaggaggttgtggatagtcatgagatggtcgaggagagattctgcgatgtaatccgccagcctcgcgaagatgagcagcgctgactcctgaaggttgtgcgcatcaggccccgacgcggcgcggaagaggaacggcagcagctcgggccaggcgttctcaggcagcagcgaggccgcgagctcagagatagcgtcgcagaccttcttggcgatgggcttgggag

SEQ ID NO: 186264 - DNA, 436 bp, Zea Mays
ctcggatgtactcaacacgacacgaccattgtgctcaacaggcatccagacttgggcaagaacaccatcgctcaatgacttcctgaacaaagatagcgccatgagcatcctgtctgcaagaatgttgccaaccgacctcggaatgatgctactcccttgttgtgaaccattatttggaacaagcccatctgagtcttttagtcctctgtccacttcagttggattgaatactgatgctgagttgatcctttgagcaagtgatgctgtcacgtccataggtccaggataggtgtcaaacgacatgtcttctctcacagcagaagcacgcggagatgaccccgaagatgaccacaaggcaaacatatgttgcacagacgagggatcattcagcagggagaatatgtgatcagcaactgatgggctgctgagctccgag

SEQ ID NO: 186265 - DNA, 351 bp, Zea Mays
atctgttggccatcatctttgttactaacttcgtgaagctatggacaaggctgattggacgaaaatctttcacttgggctgcaccctcaaccttaggcaaaagagtgataaacgctgaattgagcagccccatgtttctaaattttcgagcccaaacacaagagatcgctgccataacatcagctttgattgttacccaacaagccttgtagaaacgaccggtgaaaccatccgggcccggagctttatccgacgacatagattttatagtgccccaaacttcttcatctgagaaaggcacatccaactcatttagattgaaagaaggcatcccaagggcatcaagattta

SEQ ID NO: 186266 - DNA, 984 bp, Zea Mays
tttactaggctcaatgtgcacactgaagtaaacaatgaaatcaatggaggcacagaaaatagagcaacagatgcttatggtcttgtttctgtggagaagaactttcatcataacgctgagtctagcgaatggttttctggtagatggtcttgcaaaggtggtgactggaggagaaatgacgaactaagccaagatactccattcaggaaaaaacttgttctcaatgaagggtatcctctgtgtcaaatgccaaaaggtagctgtgaggatccacgccggccctgcaaggatgagttgtactaccctgtacgtgctaaaaagtatgaactgccattgtgggcattctcattgacagaagaagatattgatagtgttaatgacaccactaaaagcggtgttgtgcctgggaggccaggtcagaccagacagccttctaggggagtgaagggcatgatgctttcagtggttaggataaattctcgtgttgttaaagatcaatcatctgttgaaccccatacaaaacccagaggaactgatcgaccactgtcgaggtcttcacgctcccattcaattggagctgagagaagttctgtccatgaaggttcgtctcatttcaggaagcaccatgaccatgattcacaaagttcgcacaagtccaagcctgttccaaacattccaaaggaccgtgtatgcactgttgatgagctgtcagtttatcggggtgactggtattaccttgatggcactgggcatgagcatggtccattttcttattctgaattgcaagaattagttaaaaatggcactatcattgaacaaagtagtgtgttccgtaagattgataacacatggtttccagttcttaaggatttaaaacctggaagctctgttcccagtgcagcacgaagctcaagttttactgctgctcttatgctcccagaccaatataattttggtgtgaaccaaggatcaggtagcttcaat

SEQ ID NO: 186267 - DNA, 324 bp, Zea Mays
atcaagcctgaattctccacggaagcacaaaccatctgcttcgacttgctccttgtgctcagatagtcagtgggagccaaaagtacacacacgcacaaacgcccttctcctatctgtgcatctgcggcctttccgtgtagacgaaaatttgctgtcaccgtacattggccagcccagctaatccatgtagaactcgaattgaaccccattagaagcagattgaaaaggatctgcgaagcggacacacacagcaacaacctatcgctaaaggtgacggaagtgcaaggggaggtgagggggaacatgtcgctggcacacgaagaa

SEQ ID NO: 186268 - DNA, 1030 bp, Zea Mays
gtcaaaagggcccatggtgaggaagagctggactagagacggaaatggaatgcgggcaaaagaatctggaaaggttggaaattcaagagatgagggtacaggaagaagaaacgcatgtaagaaaatgaagaaacccccggatggtgagtatgctggcaagctgagagttgagctggacatgtgctccaagagaggagatgtgatgggggcgatcactctgtatgattccgcagtcgaggaggggatcaagttggggcagcatcactacaatgtgctcctttatctgtgttcttcagcttctcttggttttgtgcaaccagcaaaaagtggtaatatgggtagtggtatcgccagtattggtcctgcacagaaacttgatccatcacccagcagaagcttgggaggttcagagggagacaatgcatatgcatctgaaagtcatgttcaagatcagggaaaaaacaaggccgatttgattccaggtggtttgaaggcacaaacagttagcataccagtagaagatgagcttggagactatgcacgtgcacgaggatttgagatatttgataaaatgtgctcagagaaagagagagttcaaatgagtgaggctgctctgaccgcaaaggcacgtatggcgttgtccatgggtgacagtgatatggcctttgagattgtgaaacagatgaaaggcctgggtttaaagccaaagttgcgctcatatggtcctgctttaacagcattttgcaacagtggtaatgttgaaaaagcatttgaagtagaagcccatatgttggaatctgggatcacacccgaagaagctgagttggagacacttctcagggctagtgtggttggccgacgcggagacaaggtatattatttgctgcataaatttaggactgctgtcagacaggtatcccattccacagctgaattgtttgaggcttggtttcggagcccaacagcatctaaagttggaaagagaaagtgggatgcaggtgctatagcgaaggctattgagaataatgga

SEQ ID NO: 186269 - DNA, 314 bp, Zea Mays
aatctcttagcaacagagcacacatttgctattttctcttccgagatgagaatatgacaattgtacagcaatttcctttttcaggtgcccacaagctcatcgtttggcattacattggtatcaaagaacaaagaactcacccaaagctggcaacctcggcagtaacatgggctaaacacaattctattgataaacaactaacatctctgacatataatgtaatgcatccatccaacataataacaaactacccaaaacaaattaacatcagaatgagaaacacatccaaaggatggaatggaacgaagatattt

SEQ ID NO: 186270 - DNA, 1162 bp, Zea Mays
ggaagtgcatggatacattaatctttttctatttgctagccttctcccatggagatattatgacctactatatgcttatttgtgatccctaattttaggtatgtgttgggagctgtagaaacatttctagatgctattccgtcagctggatttttccaaggtactcgagcaagttttatcttggtttttatatgaatatttttgcgtggatggtcaatttgtatatgctgaaagacaataccatagaatgaacagttcaatcattctatgtccattgttgtcaacgatacacgtaatgctaacatgctagtcatatagtttgtttgtacatgcactttatgtgcatgttcccataaaaatagctactaccaaatttaaactaaaaaagcctatttacccttggtgctaagagcaataactaaattgagatttgatcacaaatttgttataatagtttggtggaactatggaatttggatgtttctttgacattatttgtcaaatggttgcaattgtggtggaaagggtcgagggaaacctgatgtcatttttcattgttctttttatccaagccagatggatacactattataacgaccaccgttttgttgtatccactagctcaaaaccaatcttaggaagtgcctgggcaacaaataccggaaatttgtggagtttaaaaattacatattcatatttcacatgggttgggataattgaaggtgcaagtataaattataaataatttattgtttatgaaataaatatctagaacattatttgttgcatttgtaaaaaatacaaaaaaagtttaaatcaaacagttagtagcacaagggaacttgtttcttccaagtgctgaatttgtggaaatctaacttttgcagtgaccatgttcttcatcctaagatttgtctatctaacattttttatctgaattaactcgtgtaaatttatttaaaagcagagactataacggtggtcaacaacacattagtaaatggtacaacaaaaagtggcgcaacaactatatcaacaccaagtctgcatgacctccagatctacggtgtgatcgtgaccatattactctgttttattgtattcggaggcgtcaagatcatcaacaaggttgcacctgctttcttggtcccagtcctcttct

SEQ ID NO: 186271 - DNA, 560 bp, Zea Mays
gccgaggcgtcgccagggcagggagccgaggcgtccatctcccgcggacttggatatctcaatattatctagagtactattggagttattatcgactacctttcattgtgggatttgattcactcaattcagttaagacaggatgttgcacacatgcacatatctttcgtcttgctgctaattgcaaatatacaacaaaggcagcatgtgaaagcttctttattgggtcgacgccttttgaaccttttcacagaatatggagaacatgggcaccaccaaagacaatgttcttatgctggttagcaggtttaaccaccggactgaaagtctcttcaaaatcaatacaggacgttgggtgaatccacgaagaacccaacgagcgttgtaggctcaagagacccattgacattgaacttatgcttgaacacccatttgccagtgaccacattagacctaggcggtcaggggatgagatcccacatgttgtggacagaagggtagagaactctgccttcattgtagctcgctaatcaggatcagcgagggcgacacaatagctt

SEQ ID NO: 186272 - DNA, 876 bp, Zea Mays
agctgaaagaaattcctttgattggcagaaaatttacttggtcgaaccagagacaggatcccacccttgtgaagctttatcatgttttttgcacttctagttgggaggattttttccctgattgtctgctgtatagcaacgcctctgtttgctctgatcattgccctttaactctcaaatttagagaggattgtaaaggggagggcagatttcattttgaaggtttctggcccaagctccctggtttcaatgaggtggtggctgattcatggaatcaaccaatgttggcaacctgccctttggaaaggctgtcccaaaagctcagaaggcttgctaaacagctgcagtcctgggggcatagagaggtgggaaatgtgagaaaccagttgggtcttgctagagaggtgatgcataggttggaatcagcacaggactttagagttttgtcagaagatgagttttggctgattgggaagctgaagcaacattgttttgtttatgcttctatggaaagaacaattgcacgattgaggtccaggattaagtacctaaaagagggggatgcaaatactaaattctttcatatgcaggctcgtttcaggaagaaaagaaatttcatttcatatctagaagatgaaggaagagtggtctctaaccatgaggatatgcaggaggtgcttgacggatttttttccggtcttttgggtgctgattttcagaggcaaagcactattaatttgtcgagttgtcacagagaggccgtggatctcagtgatcttgagtgccccttctcagagaaagaagtgttagacacaattgcgtgccttccgtctgataaggctcctgggcctgatgggtttacagggaggttctata

SEQ ID NO: 186273 - DNA, 360 bp, Zea Mays
ctggtttgagttgatgttgtggcagacatttgatacagctatatcgtaatctttcaaagccgccattgctgcaaccttgcttggctcatgatcaaggcaagatatagcttcagatagtgcagaccgaaggctcaccagcccaaatggcagattagacgaagtgggctgtcgtcgagagctagagggttcttcttcaacagatcagacgacgtcatcggtcctcttgtaaaatatggcttcttagttctcagaaggccccagttttagatgccttttggtgggatgaccacaccacagcgggctgcgcaaaaaacaggggccttggcagatcttgtcccttgtggtaaatctcagcatacg

SEQ ID NO: 186274 - DNA, 646 bp, Zea Mays
aggtatggggctgatattgctcgtggagtagcagaactccatgcagcgggtattgtttgtatgagcataaagccgtcaaacattcttttggatgctcatggacatgcagtcgtttcggattatggtctttcagcaattctgaagaataggagagttcctgatgactccggtgctggcattgatgctatgctgcttagtcccaattatacagctcctgaggcatggggaccactgaagaagtcactgaatatgttttgggatagtgcaaacggtatatcaccagagtcggatgcatggagttttggttgcacgctcgtggaaatgtgtactggtgctgttccgtaagtagcatgattattcaattcgttatcattaatgctttgtgaatggtgttcttatatgctcattgaaatgcagatgggctggactgactgcagaggagatctgtaagtctgttgcaaaagagaagaagccaccacctcaatattcaagagtagtaggtgtaggacttcctggggagctgtggaagatgattggtgaatgtttgcagttccgagcttcaagaagaccatccttccaggacatgctgaaaattttccttcgacaccttctggacataccacggagcccacctgctagtcctgag

SEQ ID NO: 186275 - DNA, 664 bp, Zea Mays
acaatctgcaaactctgcattaagcgcttcaagttctgaaggggctgattttctgattgtaaatactggcagtggtgattttgtggatgttataaatgatgttgttggtcaacatgtgaagattccgattttcgtcacgttgaatcatttaagtgaaggaacttattctgacttcacatccaggttgctccaatctggtgcatctggagttgttacatccttagctggcatggaactcctcaatgacgatcttataaaaaaagacttcacaaaggtgggctcagctgaggaactcccacaagcgagttactcttctgctgggatgctggaagatgttaataatgtaatggtcctaactcgtgattgcgagaagactaaagttgctggatttacaaaattggatgaagaagtgataaagttgatagaaatagaaaagcctattctgaacgaagctatcactattatccgcaaggcagcaccaatggtgatcatcttacgttacacatttggtagttgaagatgccctggaatgaattcaattatacttcatctcaccatctttagcatattttgacttgaatgtaattgccgatttgtcatcacacagatggaggaggttgagcttctagtggatgctgcttctcgcctgagtgagccatttttg

SEQ ID NO: 186276 - DNA, 479 bp, Zea Mays
ggttgtgcttctcgacacggaactcctcctgcagtcgggatcggaacaggaccagggcggtccttgacaggaggtgtgcgaggtacaaacaaccaactcgattcattctgttcgcgatggaagagtggaggaaggaggatgcagggcgttgggatagggtgatgaaccggttggatcgtttgattcagaagtcggaagtggtggatgacgtccagcaaacaatcccgattcagtcgaggttagcagcagaggtggcaaccgaatggactgtgttggcacgtcaaatgaaggaaaccaaggctagggatatggagatgtggcctgaaaacagggttggttggatccacggtctggtgaacgaggatgtcagtatgggcttgctgcaccgggtgttggaggtatggcccctctggtgtttgatgaaatgcctcacaacagcagtgaggcggtggttgtcctgttccctgaagattcagatt

SEQ ID NO: 186277 - DNA, 383 bp, Zea Mays
tcgattctcttgagtcgatgggtaatcgctagtcctttacctgagggctataaataccaatccatgtcatccatttgtttagtacaagaaaccctttgaagagaaagagagagcctttgtctagtgacgtgtttgagctttgataatcgcgagactagggacctcattagtgcatagagagtgacaagtgtgcatttatgattctcattaggtttgttcaggtcaagtgagattttgttcttattactcttcgagatcgacatcacctacacagtttggtggcgatcgagagtttggtgatcactcgatggagagtgtgggtggcccaactcatggtgtaaatggtagttggttattgactatgctagagtgtttaataatcg

SEQ ID NO: 186278 - DNA, 414 bp, Zea Mays
gcctagcagacccattaaggcctcatacattccagattagaattttggagggatccataaggaatgaaggaagaacgactaccagtgagggacacccaatatatcagcagattggtccgccttgcagcatctccaaaggcctagaccacccaaatagcgctgccatggccgtgatctgcacctctgaaagccctttgctgaaaaccctggcatactcatcaaggtcttcaggccttaaactttcagtttcttcagcattcccaatacccagttccttcaagatacgcttcttgccctgcgtggccggtggaggaggaggcagcctctccactcctactccagcgacccttctgctgcgtcggggtaccacctcattggctgtagctttgccttgtcgcagccttctgactggcg

SEQ ID NO: 186279 - DNA, 1112 bp, Zea Mays
gtcctgacatcagtcctcaaactgcacagccagcagtttcatcacactggaaggtctttgacgatgggaatgtccgtggttcttcgagttcagacatgtctatagatgaaccactagttgatctcagtgaatccaagaacaaatctacagtcagtggaagtggctctcaggtccacagactaagcaacatccaaggtttagaatctgctgcagcacagcaacccaagccaaccatccaacaagcagtagataaacaagaagcagaaacagatgcgtctcctgcaccttctaaaggagagctttcaaggcggctgagtgtgaaggacaggataaacatgtttgagagccagaaaaaggagcagactccaagttctggtaacagcaactctgccggtactggtagagtggttccagggaaaggtgagcaccgcagggttccttctggcgcctccatggagaagttagttagaaggtggagcagtgttagcgacatgagtattgacctcagcaacaatgagagtagtagcttaaatgacaaaaaggataatggaactcctgccgggactccaacatctactgatttggaggccgactctaaagtaagagctaatgaggactctaatggacagaaggattcaatcacgtcacactcttggccttgtcaaaaggataatgtaccaatggatctggccaccacagatttgtgcccaccctcaattttaagtaatacacttgctcctcataaagagagtatatatggtgatggtgcagaaaacgacatggttatgaactctagcattgaaagtgaagcatcctttgggaaagaaccgggggttattcaaggacacacaaggatgtcaaatcatgctacttcaaatgtttccactcaagaccgtctaaaatcttctgcaaagtcagttgaagaagccttgctgaaaaataaagttattgtaactagtgcatcgtcagaggagcatgtctgcatgatagacaaggaaatcacagctgttgctcatgaagtaccagttgcaagtgaacagattccccagaatgatattagaggtctccatacaaaagatattcacactgaagcagaagtgactggaaggaag

SEQ ID NO: 186280 - DNA, 312 bp, Zea Mays
aggagtggagaggacgccgacggaggagctcgaccatgactattaatggcacgacatgagtgcgggaaacggctagcagtaaaggtggtgccgagtggaaggagagagagggcgcggacgtttcggctgggctgtgcggcaacgtgaatgccatgggcaggagaaccggcggcagcgcgtacgtccgatctagcagacgagcagattgagccgtgtctgtgtgggagaaaataattaaggagagagaagaaagtgatgaggcccacatgtaagggagaaagaacgaggcatgggatttagtgtgcgggcttg

SEQ ID NO: 186281 - DNA, 370 bp, Zea Mays
gagatgatgtcagcgagggcatcggaaagggtgccaagaagccaagtgcggacgacggcattcatgcgaatccaatcaggtgactcgggaaaaacagaatcagagaggacgtggcattccagggaaaatttggtgagggtgagaaggaaagattcggaccagcgggcgtaaaagttggagttggtgtcaaggagtagagggacaagagcccggatgttggttactgcaacagcctgggcgtgaaggtttagcagcgtggctgcctcgtggtggagaagagcagcatgcagagttgcaggtgggatgtcgtcgtcggcgtgagtgccagtcgaacaagtgtcctcctccggctggggaggagcagcagccg

SEQ ID NO: 186282 - DNA, 646 bp, Zea Mays
aacatagtgttctctgcggatcaagaaaatatcctttaaaagaaccgtttgtggagctcctaaagggtagtttgcatacattcctgaatgcgttcacatatcccgatcggacatgttatccggttgcatcaacaaacactaaggtaagacctaatggccacaaatgtgcttgcatcatttgttcagaaactctttgtttaacattatcattgtatacttggttgctttccaggatttctacaacttggtagatgtatatcttgatgccgtctttttccctaaatgtgttgacgacttccaaacatttcaacaagaaggttggcactatgagcttgacaaccctgaagaagagataacatacaaaggtttgtttgctcaatctaaataaatatagtaagcaaaatttacatgtgacattacttgtcattcaaaatgcaatcctttaacaattttaggtgtcgtcttcaatgagatgaaaggagtttactctcaacctgataacataatgggacgtgtatcccaacaggtaaatgggtgttctgtttcagatgttcaatttcttggcatcttgttcgatctcactagcctttaggagaatgtgatgcaattacatctcttattatcctttacatgatatcatcctgag

SEQ ID NO: 186283 - DNA, 335 bp, Zea Mays
taggtggtatggagttctcgggatacttgacgtagccatcaagcacttgcttgaggtcattgcttgtagccatcagtcgctgactacacaaaacatgttcctcaatgattttttccattatgttcaggttaatgaccaactataacacgtcagcttaataccttattgaacctaacttttggtgcatttctaattttgtgatatgttttgtgtgtatagagcatggggaagaaatttgatgtgtacaagctccaacttcctgtttttaacatgtcatctctcaaagttctacatgaggatcatcgcacttatgcatcacatgcagatgtaaggcc

SEQ ID NO: 186284 - DNA, 313 bp, Zea Mays
gaaggattcaccctgaatgttatagcatacaatactttaattacaggctatggaaaaagttctgatatgcagaaggcaaacaaagtgtttgatagctttggtagtgcaggtttagctcctgatgaaacaacctatagatcaatggtagaaggttttggtagagcaaacatatatgaagagacaattttgtactacaggaagctcaagggtgctggcttccgaccaaatgcatccaacttttacactatgatcaacctactagcaagacatgatgacaatgaaactgcagctgaaattctacaggacatgaggg

SEQ ID NO: 186285 - DNA, 881 bp, Zea Mays
cgggcagcagtgtcgttgttcgtcatcgaccccgtcgacttcgtcggtgcgcgtctcctgcgcacggtttatgagatgttccacacctacaagctgcgtcggcacacccgtcactggtctgcaccacgttcgtctttgagttcttcgctgaattgaagcaccgttgtcgcattgcagtggctctctcgaggaccttcctatgtgtcgtggctctcccgccgcggcaacttcaggatcctcgatgagtcgtcacgcctacctcttcgtcttcttccagcacaaccttgttgccagcgtcttcttctcatcctcgactacttcgtctactccgctctgacaactgtgagttgcgacggcactccgccataccgcaccagtaccgtcgtggaggtcttctctgctagtcccttcagatgctgacactaggttggggccttctacctagtacgtgcggtattagcaacactagcacgtgcattcatctacgacgtgtttccaggcgtggcaaacctagagcacgcctcgttcacgacggtttaacaacatcgtcctcagcatcgactacttcctctacggctgcctcaactatgttgttgtcttcgtctatggcgccctcattctgcgctgtcgtcaccctggcgcctcctggcgcgtcgtaggccttcccgcgtgctgcacccgcaacttgtgcggcttgtcttcttcggcgtcctcgatagctacatctaccacagctacccgacacacggcacctcgataacggctcagcacccttgcactcgatcacctcgacattatttgcacaaagggctatcatttgcatgggctactccagttgcagcattcgcacctgtgttccgactattggggggatatctcca

SEQ ID NO: 186286 - DNA, 510 bp, Zea Mays
ggagatgatgcgcagtttcagcttcatgcaggcgaccgaggaggatttcatggagggcatgaccgcatacgagcacaacggcgttggcgacggcacagcgcacgggcctgtcgcgccggagccgcctgcgctgacggcgactagcctcagcttcaggtttcagcaccagatgcccgaagttccaacggagacggcgctggtttcgagagaattcactgcggcaagacaagagacggcggtagtttcgagagaactgacagcagcgagagacgatgatggacgacaacgagaggaagagaaggaaccacactttcctttggaaccattcgctccgttgcagacggcggcagacatgcaagaacaccggcacgacgaagcagaggaaacagagttcctggcggaggagccggcagaagagcggagcggagaggttgcgcaggaggaggcagcgccacccaagaccgtcgcggccacgcacaactatcagttcctgactgagcgcgacttccg

SEQ ID NO: 186287 - DNA, 402 bp, Zea Mays
ggattttatcaccggattgcctcagtccaatcggtctaattgcatcttagtggtggtggacaagttttctaagtatgctcactttcttcccttggctcatccctttacagctctttcagtggctaaactatatttgtcagaagtctatcggctccatgggttgccagctgctatgatttcagacagggacccggtctttacgagtcacttgtggcaagaactgttcaaaatggctggtactcagttatgcttaagcagtgcatatcaccctcaatcggatggacaaacagagcgagtgaatcagtgtctggagacgtatcttcgctgttttgtccactcttctcccaagaaatgggcgcactggttgccgttggctgagttttggtataatacttgtcctca

SEQ ID NO: 186288 - DNA, 808 bp, Zea Mays
aagagctcacaaagatggcccataatttctatgatgatactgcactcccaaagctggtaagccttgccttagctattttcgtacttcctttaaaattttgactcacttgtagaaacattctctagttcagctatcatgtcctgatttgttcattaattaccctataaaaaatctggtcatggtactggatgctaagatagtttactcaatattttgagtaatcattggtcaagcttatatgatcttgggatgctttattcacgtaatgcttaattcatttttttcttggaatgcatttggcacaggtagctgattttgcgtcccttgagctttctcctgtggatggaagaaccatgacagatttcatgcatgcaaggggacttaatatgtcctctttaggcagggtggtgggtctaaattttatgcctatatgtttttcctggtatgtttggataagcttgcataataatctgacattgtttttttttaaattgatcaggtagagctagcagagaagctcccacacatccagtctatatgcattcatgaaatggttattagatcctttaagcacatcatccgagctgttattgctgctgttgatgacatgcaaaatatgtctgcagctatagctgaaactctaaacatattactaggatctcccagacttgaaaatggtgctgacacggatgcccatattgacaataatttgcgactgaaatgggtagagagcttcctttcaaaaagattctgctggaaactgaaagatgaatttgcacatttacggaaatgtatcattctgagaggg

SEQ ID NO: 186289 - DNA, 730 bp, Zea Mays
ttggtgggcaattggccttctctgggtcagggcggccactttcactgtcacctgcaggaaatggtctcgttttttgaactctagggtgctgtgttacctaccctattggacatagagcttcagggaatccccatccatgcttgggaagtcaagactgtggaacaattgcttagtccttttgctagtgttcatcatgttcatccagacaccttggagctaaaggatgtggttgtttatcgttgttctgcttggtgtttggacacgtccctggtgccagcttcgagagagctttggattgtcgagcctccctttgccgttgatggtgaatcctctgacaggagaacgttgatgtacccaatccgcatcacattctcgtctgccccgtggcgggatggatccgatcctatccctcaggctattgcaatgggcggtgataatatagggagtgtgcagcagggatatccactttcaagacctctgcagtcgcgtcacggaggtggggaagatggtcagtcaggacgtcgttcagttcatgatcgtttgggtccaagtctccaagagatgatgacatgcagcagcggaacctgagctatcagaaggtaatcagatttaatgaggacagtggaatccggtgggggatcttgtctcctgggctggaagagatggctgaagacaggcaagacaaccctgatgtcgtcaatcctacacttgagaaggtgaagcagctgaa

SEQ ID NO: 186290 - DNA, 332 bp, Zea Mays
tgaaccgcgtatgccaaatcagggcgagtcagcgtgatgtactggagagcaccgacgatgctcctgtacatggaagggtcgacgactggagcaccaacagtcgcggagatcttggcatgagtgtcgacatgggtcgtcgtggagtgacactcggccatgcctgcacgctgaagaagctcgacggcgtactgtcgctgggacaggaagatcccggtggggaggcgcttgatggagatgttgaggaagtggtgaagatccccaagatctgtcatggcgaactcggagtggagcctgtcgatgatgcgctggagaaaagttgacgaagaggcggt

SEQ ID NO: 186291 - DNA, 576 bp, Zea Mays
tttaggtttcaaagatcaaattggtttaattacggacaagacaaatgtacagcaccacttgtcatgtcatgaaaagagggctaaaaggcgcagaactagcaagtttggtgagccagtagtgggaaaagatggtaaatttgaatgtcctatttgttttaagaccttcgaggaggaatcccggtactttggccatgttggagctcatgcaaggtatgaagggttgactcctgaagcatttgtggataagactacttatagaagggcaactaataatcacttggcagaaatttcatttggtcttcaagagttacctgaatcacatggacaaaacaataaggtttcttatggtgaaacagtctttcggcaccataatcattcaaatgaacatgttgacaataactctacggccactgagctttttagtacaaattatccagataatttcattagaccaaataaaacctggggtaggtctgaagaaggtccttccttcaatgatgcttcaagtgtatgtagatacacaaattttacgggccatgccgatttgacagttccagaaagagcatcaatctctaa

SEQ ID NO: 186292 - DNA, 380 bp, Zea Mays
tcccagcttccctttagggtggtcgactagtgactgggcatttcgatgtaggagacggagccaaacccaatcatcaatgctgaactcgagctcacggtgtcgcccatcattaaacctgcgtgcttgttcttgagcttgtagtagcctgtctctgacctccccaaggaacaggccacgttcctggagcatctggtccacaatttgagtttcagtagtcctaggttgatatggaacaagtggtggaggatctcttccataaactacacgaaatggagttgttttcagtgctgagtggtatgatgtattgtagcaatactcagcccaggctagccagtccacccaagccctaggtcgatcccccgtgatgcatctcaaataca

SEQ ID NO: 186293 - DNA, 518 bp, Zea Mays
aaatgatgctgcagactatttcgtgtctgaggtggaaacagactatttgacattggattgcctggagacagaccaatgttcattccagaactccccatagcacggttctgcaagatgtaagatcccattgcttgctgactagactgacctaaattttcagattccttcccagcagatacagaatgccttctgggggcagaatcacttgttatgtgtcgaccatggtttgaaatgtgtgtttctctttcgttagggattgcatttagatattcctgattgaaatcacctggtctttgttctgcgctttttcctggtgactcagaggtctctggagctctatgtgtcagattacggttcatgccaatttgctcaccactctgactagtgaccatctggtaatgatcctgtgtcatcattggcatgcttgagctcatcatgctaatatttttaccatctgaactttcattagtagcgcttacatcagacctcctctgctgaaatctctggactgaattggc

SEQ ID NO: 186294 - DNA, 1685 bp, Zea Mays
gcagctttaatagagaaaattgagagtttgaacaacaaagccagaaatgtctatgcacagaatctcccagaaccagcttcatccaaggaattcaagaagcataaaaaaactactgatgtttcatctaatgatgtcatcagtacgacatgcacatctgatcaggcagtttctgtttcacatatttctgctgtggtgcagagacgaccaaatgtgaccattgagggtacaattcttggaccggcacattcacatttaactgaatttagcaaagctgagaagcttggtgattcaattaacaatcatttacataggagagttgattcttcgagaaacagttaccatggtccttgtaaagataggccagctaataaattcggaagttgtggacgtggagaaagttacataactaattcattaccagtagctgatttggggaatgatatccatcatggccaacaacctcagattgcctcacagctgcaacctgtgattgtacctgatgatatgccagcttcactcgattatgagtctcaggtatgtagttgtagatttgtgctatttttacaaattgtttatggctatcattctaatattttggaaattccttattgcaactagctttaggtggggacattgaccgaagaccactatcagtgaaaatttaatactctgaaaaccatcttgtgtatatgataatcaggcagttagaaaactttgttttttctactgtagcattgccattgtttgaagttataataactcctcgtaccttgtttatttctatctaggatctggttggtattcatatcacagtacaactggtgcacatcgtcagaaaacactagcttttgctaattaagacacatttgtttgcttttggtgcttgtggaattttgaaatatatagaacaaaaagcaggatgcagcatcaaatgctcaaaacaatcaggtagttgaacatggttcttaggagtttgaatgttggttgctcactagtgtcattttttcctattcagcgggcaaaaatgaaggagttggctgcagaacgtgcaaaaaggatgaaagctgaggaagaggaacggataaagaaccaaaaagcaaaagcactcgcaaagttggaagaattgaacaggcgatcatcagtacttcagaagaaatcaaatgatacaaaagtagaaactgatgatgcacatgataagcaacagattggacttgatgtgaatgctaaacttgacacttcaactgaacaacatgatgttgttacgcctgataggcttactgctcttctgcctcctaatgatcccaatcatactatggttcagatacaggcccagtctactgcacaatcaaatgctttagatggtggcaaagcgcatgatgctcataccacctcatctttggtcaagaacacacacagcaacatggagcatgttgtgcagaagagtatctcacagtcgcataatatcagtatggtaaagactaagcaaggctacaggaaaagacaggttgtttcagaggagaaaatttctggcgagaaggcaagtgcttcagtaaccactgattccagtgtgcagaaaaatgttgatgttcccgtcgacacagtaacggctgttgttgcaccacatgatgatcccccaactcagaacaagaagggaacccggcatttgaggagtaagaaaaaggtag

SEQ ID NO: 186295 - DNA, 800 bp, Zea Mays
cgacggcgcggagggtgaattgttggacgaggagcaggagacagacgaggaggaagaaaaagagatgctggatctgcaggatcacatggccattgacgacgacgagcaaactgctccgcaccaaggcaaggatccgtagtccccagtccccaccaccactgtcgtagtagcgtcttcgcaagattcacttgtcggttgaactaataatgacactgtgctcttcaattgctgccgtattgcagtggacgacgacgacgagcaagatcttgagccaccgacaaaaggtgcacgaacacctctgccaatttcgtccctattttccccctctgtattctcttccatttcttcactgttgtgttcttgcctccggactgcatcaccgtgaatgtagcagggattaagcccacgctgtcggtggaagaagagagagcgaccaacccagagccggtgaagccgccgcctccaggtgaattccagatcacttcgccgttttttgcgttttttttggctgcgatggattagatagtagatatatatggccgccgcgaatactgtcttaattttctgttcgtggatggtccagggaagaaactagcctcggtggtcgatctccgagcggtcaatccggaacccatgacccctgctcctccgccaggtgaatttctatattccatcaaatgcagaactcacgctaattcgggtcacatcacttgctgctccgaaacgcagtcgagaagaaggcgacaccgatagtggttcaccgcatgaccaacttcgagctggcacaatcttttccaggt

SEQ ID NO: 186296 - DNA, 498 bp, Zea Mays
gttctttgatctctctcggcccgttggtctttcttctcttttgtccacatccacaccaaatataacctgtcccgttctacgtccacctgaacatgatgtgagttcgtggtcatcttcaatgcgcgcaaggtgagcttgaacatgttgtgagttcgtgatcatattcattgcacgcaaggggccataaagctcacggtcacagcctcgacagacatcacggccgccacggcgagctcagggacatcagatataggtcggcagagacgtaaggtattggccgccgggtacatgtcgcggcttgcggctgccaccgtgccacgacgaactcagctacacgaagagcatgcagctgaggataacgtgtctgtcgttggtattgatattgtaggatctgaaagacagtggttgacacatacaatacaacaacgatgtcgtttcttcagtctcgagcaatgagctagagcggtggcttcaacaagatctgtatcttgttttttt

SEQ ID NO: 186297 - DNA, 514 bp, Zea Mays
cttgcttctttggtaactgtttctcaacatctcttttcagtcgacgcagtataaatggacgaaggacattgtgcaaccgatctataatttctttgtttactttatcttgaccttccaccatcccagaaattggattgcagaaccaatccttgaactcttgatgagactgaaacacatgaggcatcagaaaatgcatgagggaccaaagttccataaggtcattttgcagtggagttccagtcagaagaatacgtctctttgaattaaagttgagcaaagtctgccaacgttgtgatttccagttctttatcagatgagcctcatcaagaataagatacttccacttctttctcttaaacactttagagtcctgtatgacaagcctatatgttgtgatgcaaacatggaagaaatttggtttcatccagccctgacgcttctgctttctctcctttgcgcttccgaaataagtcagtattttaaaagcaggacaccacttaagaaattcagtctc

SEQ ID NO: 186298 - DNA, 722 bp, Zea Mays
gtggaatggtgtagagatccccgttgctattgcaccgaaggaggactgttttggtttagagatccttaacagaaaaactagaagcgtcaaactcaatagaacagttattgtcgcgagtaagctgtcgaacagataacaaattacgagcaagctgaggagcgacaagaacattattaagatgaaaatagcgatcagctataggtaagagagatgtgccacggccagatgaagggatggactgcccgttcccgaccgtaacggagcacggtggggaaggtaacgggaaaggagtataccgtcgttggaggacatgtgggatgttgctccgctgtccataacccaagaaggagagtcctgcaccgccatttgattaagagcagcaatcaagttggccgtattccagccgcctgaagaagcacctgcggcgggaaactgcggcggaagaagaaacacaccgcacaccactaacaggtggggtgaccttcattatatagcccgtaggctagggttacattagggttacagagtacatgggcctaatgggccaggcatcctatatgggctgtcacagttacattccaacaagaagacaggtacattttcagtctagcacctgatggcgtttactcagcaaagtcagcttacaaatgcctcttcatcgggtcttgctcctttgcacactatcaaagggtttggaaatcctgggctccatccaagtgccg

SEQ ID NO: 186299 - DNA, 458 bp, Zea Mays
ggaggtcgatatccacgtgcttcgtgagctgatgttgcgtgagattggtggagaggtagaccgtttgacgttgttgtagtatacgagggtggagcgtgctgtgaagctcatgaagaagctgacggtgccaggaagcctcggccacgccattcgccacaatgcgatactcgacctcagtgttggagctggaaacgacgggctgccgcttcgaggaccaggagacgaggttggtgcttaggaacacaacatatagacagtggttgtcagtagtgaagtgatgaaccgagagatgttaaatcatatgaggggcaacaaggacatcattaggacagtcaaaagcgactgttgtcctctagatgctaaagggactacaaatgacagtcaaaaagcgattgctgtcctctagatgttaaagagactacaaaggacagtcaagctgtcctctagatgctaaagga

SEQ ID NO: 186300 - DNA, 1268 bp, Zea Mays
attgatttgaagacaagagcaagcccaccaccatgcgtagggctggagtttgaacagctgcacaaaataaaggttaaacttttatttgttttatctgcttcacttttgtttaatttttcttttgcggcagcagggtaacccccattttactatggattttagtatgcattcatttaacttcccattacctttatgaattaactaaacagggtgtgatcgagtgcccaataccagataaagacatacgaagatttgatgcaaacatccgcctgtttcctccattcattgataatgacatttgcccattgactattaataacacattgctgcagtcatgctacttgagaaatacagaatgggcttgtggtgtagcagtttatacaggtaacttgttgatactatttgttttgtttcatgtgacagcaagaacggggtcatcctacaataatcatggaatgaccacatttcaggaatggtagtgaaatgtagtatcactattaatgtaaacaaggctgttgtcgacaatgttacttaagtgagacaacttggatttctatagcatttcgttttatcattgatgaatatcaaacaatttactttggcatatagtctttctaatatttgagaaaggctatatatgggtaaggatgtacaaataaagggcaagacttgtgtcttttacctctgttggatatttggaatttttcaaacaagtactttgtaccaactcaactatatcattttggcagctatatgtatactgtacacattacacactataaagttccaaaaaacgtttgttgctatatgattttgtcctaagcacttagcagctgatacatatattgtttgcctaatagttaacgggcttattcaaggaagctgaacttgaaagggcttcattgcacactgatgacaagaaaaggggctgtactcagtgaaattgtgctttagtgctttgattgcagaaatttaaatagtttgcaggctttcagtaatcagtaaatataatgctgtttagtcttacaagttacaacaatcatgtagaacacattattattaattttttttttgctcacacacctcctacaaacttagtttcaatggtattatagtaatatgcagagtaactgacaatttttttttcagtcttaccctttttatatatgaatcagattttgtgacatggatttattttaaatttcagctttaccaggagattgattattgataatctccactttcaggcaatgaaactaagttgggaa

SEQ ID NO: 186301 - DNA, 1536 bp, Zea Mays
aacaatcgtaaggttaaggacaaggaaagagaagagagatctgattcaaaatttttagaaaggggtaaagatgtaagcacaaatcatgacagggaggattctaagcaggtagggcaatctgctgtggaagctgataactttggacaacgtgctttagatgtatcagacaatctaagtggatcaacaggggtatgccaaactgacacatgtgacaagattacagaacctgtgactgtgaacgcaatgaatgatgttggtattgagatgaacaattcacaaacatggaaagatgattctactgtggatatcgagacactggtaacatctgtgtctgctgctgtgaacagcatacgaggcaaaataaataatttgctagacagtacaagtcatataacacctaataggtcagttagcatttcatccaaaatttgcgatatttctcttgcaagcttggatttaataatttaccataactgaatctcaacttggcgcaacagaggcagatctcggcgcagcaggggcattagcagtataattatttcccggtatgaagatgaccttccgtcgtctagctgctcagactgcaacacatctgtctgtggtccagttccaaggcgtgaccaggagactgctctactcaccttaaaagaccggcttcgtgagcttgggcagcgactacatgaggtgaatcagctgttctcaaaaagtattggacactatttataattatggtttaattattattgaatgttcactctaatttaggacagatctgtcttgctcgagctcactgtttaagtttattttagctttgtcacaattttatacccccgagtctttgcattgctgatatactaaagatatagctgacgattttcaatttgcaattttatataatctttttgagatatccaccccccacccccctaaaaacactacttcttggtttctggtgaaggttttcattgtatttgactgaattacaatacttgtaaaaaacgcaaagatttttctaggaaatctacaaaatgtaagatgcagatctgtgatactataaatagaatgctttgtaatttgattgcgattgctacatagttcaattgtaggaacaaacaccagagctgttgctctgatactgtggatatgttttggcgagataacacatatcacttgattaccatgttctaattggcagagtaaccattcctccatctctgtgactatggtgtagctggatacatcaagattgtattataactgttttgtttcttctgaacctatgtttggtgattatatttgtagcatattacttggtagatgtacttcaaaagaatttggtgatccatttcctgggttcaaagcttatttaatcttatactgagattatacgtattctgtagcacttctatctatcagctatcctgctgctttatttagctgacagtaaaaaaacttgattaatttgtttgcatttatgtttgtttcagaaagaaattgagggcagggaactgctcaaggcccatttggaaaagaagg

SEQ ID NO: 186302 - DNA, 1660 bp, Zea Mays
gccacagcagctcgtccccttccccccacttcttcctcagataaggagaggccccaggccagagaaaaaagcatcgaatttccccccgttaattggcctgagccctcagccgtctaccagcagcagctagaggtacgattctcgcattgcttgctccctgcgcctgccctcgatttttgctgttttttcgagctcctcttccagttcttttgccgtgttggaaccgcatctatgcagcctagcgcggggtactagcgtgattcggtcagtggatcccgtcgggctgctgcttcctcgcggctgatttgcgagaggaagcaggtccccgggaagcgatctcatttttcgttatttttttagctccctacaccaaagaccagagtcagatccgaggctacccgccgccccggcaaggattttacccggccggagctctgcaacatcggtgggatcgatggctgcgacctccacgagctccggtgcccacgaatcgaagtcagcagcgccgtgtggactgagtcacgtgcctggttcgccgtcctgtccgacgcttctcacctcgagagcccgtcgctgttgcctcggactcgagggagctggcggcgcaaacgccgtgcggccaaaatcgagatccccaccatccgaatcgaggtcctctctaccagaatcagttcccgccgccgcgtcgaggtagctgtcacccaaattgagctttccgtcgctgctggatgtgttggaatcggaagcttcgggcgcatagcttgagctcgctcaagtgtatcgagcaagcaaaccaagcgttgggggtcttgctttgcgcctttgccgcgctagcttagcctatctatccgtgctaggaatccccctccctttcggtgtgatgtttttgacttgccactgcctggtgttgctggggctgcttttctcttctcctttggggctctgaatgaagactgaagaaatcgaaagagaggaaagctacgcctgagtcggggaacgcctacgaagtaagttttggcttaaaggtggaagcttttgaggtttctccttgcgaaataaatgcttttttcgatgttatttgatggatttggttggtactcggtcaaaaggtgttcttggtttgccctttctatgctctggctgctgttgcaactgcaacttccctttcccttagagtttggcgctctaaaagttggttcactttgcacgaaggatttctgtttcttgttgctgattgggttgtttggatctatctgcaggcagacaagctaggttttactgcttcattgagcacaaagatccgctgacctcttgctcttggtaaaaatccaacctttcttgtattgttttcttcctgggaaaacctccttgtggtgcataaacttcgtagtacactctgccatttctggagaggaagctgagaactactatccatatctggcacgacccttgtcaagaaccatggctgttcacatgccatgaagctgcttgaactggaggcacctaaatgctgtggattgttcctatgcagatgattggatcagtggtttcaggcttcggggggttcgatcagatgttgtatgaataatagcaggattgcttgagagactatagtttgggtactgtttgcttctgtatttactggtacggtttcctactg

SEQ ID NO: 186303 - DNA, 428 bp, Zea Mays
aataaaggggggacaagaaggaagactgaggtgaagggagtagtggagcagggacactggagtaaggagagacaagtgaaggagtatagaagggtaaatggattgtgctacacttgtggagagaaatttgagccaggtcatcaagctaaatgccctaagagggtgcctcaacagctgaatgtgattaccaaagaagatttggagatggtgctttctgaggaaatgttggaaagggtagagcaagagaaagggcaggaggaagagttgcataaactgtccttacatgtcgtgagtggagctgacacttcagagtgcatcatattcagagccttgatccagaatcagttgatgcttatgctggtagactctggaagttccactagtttcatcagtcaaactatggtggacaagttgcgtttaaattctga

SEQ ID NO: 186304 - DNA, 474 bp, Zea Mays
gtgaaaggaccctcgcactgacaaccccagtttccctttcctcttgcttaataaggacagattttcctggttttgttttactagaactatcctggctcttctgtgaaccttcatcagctattgtaacatcaccgttcacagtttgttttgcaacatcctttggtttactttcatcctcttccacctgttcctccatttttccagcattttccatgagcttcttgaagagctccccactgttgctaagttcatcaaaagtaccctcctctttaattacaccatcatgaattagcagtattttatcgacatatggcagaaaatgcagctgattggtaacaagaacccgggttttatgctgcagttcgcctttgatacatttatcaaatacctgcacatgtactaatgtcagtgataacagttgggaagagtaattaatttgtaacaaacaacgaaggagagttgcatttcgtttca

SEQ ID NO: 186305 - DNA, 272 bp, Zea Mays
cccaatagcaagcaggaacggatgcctgaaaaaagtagggacacatgacattattagtagtgtgaatcatgcgttcagtcttgccattctgagggaacaagctgcctggcaagggaatcggcagtagtgcgctcattctcctaggtcagagcagtgaggcactcacgctcccaagcaacaatcatagcggccttggtcgtctggagggccacgacaagtttggactgggccacggcaacgtaggatgggggaggatagtcagtggagggtag

SEQ ID NO: 186306 - DNA, 357 bp, Zea Mays
gatgcttgggctccccactgtgagaccagcgaagaactttgcatgccaggcctgcaaaacaagcaaggggatggagaccgtggcaatgccgtatgtgttcaggtacctggctgctgagttggctgccatgaacataaagctggagctccggttgagcaacaaatcaggattgcctctcagctaagaatcataacaccagaattagcgcttgttcatcgcgggggctgcttcgcaggagaagcttaaatgtaaccattggtccggcgtgtagttgtttcatatgtcggtgtgatgtaccaatgtaacttgtaagaaaaacataaatgacaacacgagttattatagtttgaatggcgg

SEQ ID NO: 186307 - DNA, 1313 bp, Zea Mays
cttaatacgagctattgacgatgaactagaagtcactgtaagagcacacgaattacgctcatattacgagcgacaaatgcaagagtaagtctttgttgtgctttgataatttgtagatgctgaccttctagtgcttttgttattttgtggtgcgctatatatgcatgtatgtgcattattttgggcatttttatgatgagacatagatttgtagttattcaatgaaaatatgaactcaaaataatttgctattgtgctcccttgtggttagaccactagagctttgggccaatccataggacagtgcctttaaatgttgaataggttctgttccttctgccaagttgtttatattacaactccattgatttcccaacacaattctgtgaagagaaataatgggattgtagtaagattttgcattgaccataatctataacactatataatccaccagtttaaattttgcaaaatccacccaactaaatcaccccacacatctataacccccgctaaatccaccatacaaattgcactcaaacttaacacaccattgaaaccaacggttcagatcgctggataaccctctcccttacttaaatctaattgacatcatccctccctttccccctcccccgtgtcccgccgccccctccgcctcacgtatccgtcgcccttaactcctcctcttgcaccgccgctgtcgtcgacctcttccctctactatccgggattgttgcgttagcacgggctatatgctagtatgttaaaaatatttacgaaactgtggcatcattaactgtctccaaaattcctgatttgatatacctatatcgattattcactccttttctttctaacctcagcagcataatatatgaactgtagttgaaatatgctggattctgtatccgtgttccacggcattagcttttgcacaactgccctgtttgaaatttcttttttcctccttgaaataggagagcagcaatatccaaggaaatagcaaaactaaaggaggaatcaaagcacaagatcaggtttggtgatttacatccctttttatttttataaggattaattgatctgttatagtgtctctgaattgttccttactagttgttatttctgtagtgattgtcctcaagctatgtcacctagtgctagaagttctaggatatcagcattagagaatatgttgtcctcctcatctagtgctatggtatctatggcttctcaactgtcagaagcagaggagcgggagcgtgtattcaatggtaaaggtagatggtaccatgtcaggtccctcccag

SEQ ID NO: 186308 - DNA, 555 bp, Zea Mays
ctgaatagctattgagttttaaccactgtgttagattgagtgcaccattgtgttgtctgtacggccttaagcccataactacctcatcaccaatctgtgtctaatttagatggattttgttgaaagcatctttcatgaaccggttgcaagaaaatgtactagatttaataaagattcactaaactagattcctcagtgcaaccagcatgccattttgtgatttagccttgatttgttttttcatcgagtccgcgggaacatcgcctccacaacgaaggcacgtcacggcagcagtacctagcatgggcgtcggtgtggttctcatctagacagccataaggttagtaccgagctccccttttacctcctccctctcctctacctcctctccgcctagcgttccaagacatccgtctacggttcgtctttctttgtcttcctctttcctacagatccgatttcctcactcatgccgggtgctgtccgcagacgattagatctgttttattcactcgcgttgggtgtcttcctaggttcgttctcatgtcgtttgtg

SEQ ID NO: 186309 - DNA, 1170 bp, Zea Mays
cagaacctcacaccttcaccaggagtgagcccatctacttctcctagcagtggcagtttagttgctagatatgcaatggagtccagcaagcaattagcttctggtattattgacatgggatataaaacattttcaaagtaccgccaggaacttctaccagatggttctaactcccctttgtcatcaagcccaggcaggagatctggtaaaattccttccagtgtgcatccactggaagctgacaatgcaggaatggttagttaaagcctcaccaagactttttctatttcattgcaaattaagtgcatgaaaaggaaaatcttctatgtgaagtaatgaaagttcgttggacacttgcaggtagtcatcaaggatttcacttccaaagctgtggtctcacagtttagggctcacacaagtcctatatctgctctttgttttgatcctagtggaacacttttggtgacaacctctgttcatggccataacataaatgttttcaggatcatgccaacttgcgttgctaatggcacaggcgcaacgcgctatgattggacagcatctcatgttcatctttataaactgtatcgtggcatgacatcagctgtatgtttactaagcaattaaaaagtcttcctcagaatgttttataattttattcattttgttaattaccttgcatttgtgtgcaggtcatacaagacatctcgtttagtcattttagccaatggatatctattgtttcatctcgtggtacctgccatatttttacattgtccccatttggtggtgatgccagcctgcagccacagaattctcacagtgatgggccacctcttgcgccatgtcagtcaaggccatggtggtcaaagccgtcctttctgatggaccaacagcttcatcaagttccctcaactgtgacaaattcggtagtcagtaggataaagaataacaattctggttggctaaatactgtcagcaatgtggctgcttctgcaagtggaaaactatctgtaccatctggcgctgtaactgctgtttttcataattccatctaccagggttctttgccagttccatctaaggctaatgctttagaacatctactggtgtattcgccatctggtcatgttattcaacatgaacttttaccttcttcaggttctgagt

SEQ ID NO: 186310 - DNA, 588 bp, Zea Mays
ctgttggtgtcattggggaaccgggtataggcgtgagggagtctaggcgtgaacgccttaggttgtataatcagacaccaagacggaaagatgcaaagatagagtacatgagaaaacgtagagcactgcaggctgacactttgaatcatgcgtccatcgccatggaggacccaacatatacccctgaggttgtacaccctacagcggatgcaacggaacctgatggatcctcagttaccgcctgcgactgggttatccctgaattcgtcaggacacctttcctgccagcttcaacatagaccgaggatgtcggttcattcgatatgtctactgaaccacgaagacgtaaacatcatgtgccgcgtggggaagacaagctatcttagcccgtcgaaactagcaatttgaagcatccattgcaaggaacgtggctacttcgactggggatactatcggtgacgctgagatcaacaacaatggtaattactatccaatcttaaatggatcttgcacgacggcgatagcatgtagtcagactaaacgtgtgtttccatcagtacaatgtagggttccatgccaaggcgctac

SEQ ID NO: 186311 - DNA, 717 bp, Zea Mays
tctctggcaacatatgtgcctggtagttctgctcgtgttgatggttcagaagagaatgtgttacctccatgtttatgtgcgatttttaagagaggcaaggacttcggtggtggtgttttctcacttgctgcaaatgttatgagtgatctcatacataaagatccaacatgctatactgttcttgattcagctggtttgccacaagcatttcttgatgccataatgtgtggtggactttacaactccgatgcagtctcatgtataccacagtgtttggatgcattgtgcctgaacaataatggtcttcaattggtaaaggaccggaatgctttaagatgttttgtgaaaatctttacgtctagatcatatatgaaagctcttagtggtgacacagcgggagctttatcaagtggacttgatgaattaatgcgtcatgcaccatcattacgatcctctggagttagcatgtttattgaaatcttgaacactatttttaaagtgtggtgtggtgtagactctatcccctataaggaatctgataattactctgcagttattcccatggatactgatgtggtggttgctacctcacagagtgagggtgtacctcctgaggtaggatgctcaggcgaaacagttgatgctcctttagatgctgtaacatcatcatccattgagttatttcttcctgagtgcatatgcaatgttgctcgcctg

SEQ ID NO: 186312 - DNA, 307 bp, Zea Mays
cgcacgtgcgcgtgcgcgccggccggaaagctagcggcggtggcgcagaagaatgagtagctaggaggaaggagacgccactgggaaagtgggacgagcgtacagacgataaaaggactgaaggagagcagagacagagcattttcacagcagtagctgtagctccccccctgttttgttcagaattctgctggtgagtgtaactcctgcttctgcacagccggcattcaatatgtccagtacagttccacatcagctgacgccgccacgacagttttaccacaccgtcaccttgtttttgctgaca

SEQ ID NO: 186313 - DNA, 383 bp, Zea Mays
caatggtattgtgctgaaaatcagtgatatactctctggtgattccttcacaccacaggaggagttaccatcagctagcgttggggtcttgccgtcagatgtgtctcctcctattagcctgtgcacttcaagcaactttggcactccagcaattgtctacaacaatcccagctttgtttctactttcaatggcccatgccaaggcagttcatcagcaaccagcaatggtggtcgttcggctccaaaggaaaagcacaagaggctagggggaatatatcggaaatcatcatcgtgccaaccgacaacgtcgtctgcctctgtcagcaggcttcgcagttacgatgtgtacgttggatttcacggccgcaaggcttcactgctga

SEQ ID NO: 186314 - DNA, 401 bp, Zea Mays
gaaaagtagcaactcacacacagtaggagaggagaggaaagaacccagcgatagatcagagtcggagagaaaattttgcctcctcccatcggaatctagctaattattttccagtccttctcccccatgtaagtctccctctcccatccccgtcgcctgcacctaccggaagcgaagccttctacagttcaggtccatatccgggtcgccgccgtcggctagctctaggcggacatggtggccgcttgccggagcacggcctccacctacgcgtttctgctgctcttgctgtttgccgctgcggtcgccgtctcttcttcctccgggttgcgccgtgtccaggaccaggacagatcggcgctgctccagatcaagaacgccttccctgccgtagacctgct

SEQ ID NO: 186315 - DNA, 462 bp, Zea Mays
gagcaaaggcacaaggaaatggagagacttgagcgtgagagaagaaaagaagaggagagattactgcgtgagaggcagagagaagaagagaggttccaaagagagcaaagacgtgaaaatgagcgcatggagaagtttttgcagaagcaatctagacgagtttgtttctgggttcctagaatgttaattgtaaatgtagtgtagtaaataccttatttatgctgcctacacttgtgcaggaagagaaacaaagacaaaaggagcaactccgaaaagagaaagaggcagcaaggcaaaaggctgccaatgaaagggctgctgcacgtagaattgcacgggactatatggaactggtggaagatgagcgtttggaattaatggaattagctgcacaaaacaaagggttgccctcaatgctgtatcttgacagcgacacattacagcagcttgattcttttcgag

SEQ ID NO: 186316 - DNA, 330 bp, Zea Mays
aagatggtgggtctgcaaaaaaggcaaagttgctacctgatcagagtgatgaagatattcatttgtcacaagacattcttgccagtcggaaggaggacatctgttttgacgagctatgtgatgcagaaccttctgttgataatgattctctgaatcccggagcaggaaatgaaacctggggtctactaaacggccatgtgttagcaagaatcttccattttatgagggcagatgtgaaagcacttatttcttctgcagctacctgtaggagctggaatgctgctgtgaagtattacagaaacatgtgtagattcattgatctgtcttctg

SEQ ID NO: 186317 - DNA, 368 bp, Zea Mays
agcagaaccagacgcaccttttaaacaataatgaaactatactcaaggagacattcatatagaattcctggtttcagataaaccaaaatggaagtttataataattaacatctcaattctgctcgggaagcacttataagggacattgtgataacatgagaaattgatcagaaacgtcaagaaattaggtgcccacctcaactccgcaggatttggaaatccgccttatggacacaatatttgcaaatgggaatagcccattggaaccacagaaagcggaaaagccacagcagaattatttacttcaccgacacatttaacatctcacatcggccatggcagttggatataaacaaggtataatgcag

SEQ ID NO: 186318 - DNA, 309 bp, Zea Mays
ctgggttagtccaggcagagttggctgcttcctgatggatgacttgattcctgcgtgatgtctgatgacatgggataactaaccaacctccaaatagatgcttgcctgattcgccttgcctgaacgaggatacgccgtcgccatccttcgacgaccatgcaccttgatcttgcaggtcgcccgactctaagtcgttgcaagtgaaagaacaagccggtcgtcatcaactcttggattagtttagccgctcgtcatcaactcttgcctgattcgccttgcccaaacaacagcctttcaaatataacaaac

SEQ ID NO: 186319 - DNA, 482 bp, Zea Mays
gcacgaggaggaccaccgttaggagagggaacgcatgagaagcaccaaaaggaggggcataacaaggagaagcaccatacaatctataaggaggaggatcatatggatatctatacgagtactaaggaggatatggataagcaaaaattttatggagaagtgtcggtggaagggacttctatgataaaagcgtagattgttggaggctcaatcgataccgaccgtgttcggtcgttgagggtcgataccaaacatgcggatgatagcctaaccgatagcctaaccgactgatccaaacacccgccatcaaagccacattggtcagattgtctctaacagtttacctattctatttctatttcctatcatattttcaaacttcactctatcagtctcattaataactaatggtcgtaccacgtcccctgtccataccggccagcgctgatccggcctacaggctcgggcttctaggggatgaa

SEQ ID NO: 186320 - DNA, 747 bp, Zea Mays
ggcaaatatgaaggtaccaagtagcattagagcaagacactgatcgaccgatattattcaactattgcccagctgatatcaagagatccagacctgctgtccaataccaccagtggtagaaatgcatgagtgttctcaccaaatcctagagcactatctcaatgctggatcacaataatgtcaaaacttcctattctcaaccagtcaaacagtacagactatacaagccacatcaatttggcttacagtgtaatttgtcctgtgctaacccaagcatcatatcaatgccaatactgtcaaactatcaccaagtcaagctgaattttacaatgatctagaagcatgatgggacttggcaatctctctcaaaactgcacctacaacagcagcctgttcaatacattcagctttgttcaaagcatctagaagactgatgcatgcctttacattaatcctacatcctcgtaatcgagtttcttcaaatacatgatatgcttcaatagctctatttgcatggctcatcccctctataagagcattgaaacttgcagcgtcagggattccaccgttggctttaaacctctcaaagagactgcaagcatcggttatgttccctacctttgcgagcccagaaatcatggttgtgtaagtcacaacattagggaccaatccctgtttctgcatttcttgccagaacacaaaagccttattgtacttctgtacgcggcaaagtccatttataagaat

SEQ ID NO: 186321 - DNA, 561 bp, Zea Mays
ccaaaaaactgattcttccaaaccgtggactgatttgccgttccaatcaaaccggttcttggatagcttgtgctccttggcaatggtctccatagtgggggatgggcagtccactcttttttggcatgacagatggatcttgggtcaaaggattgcagacatggcccctcatgtttttagtttggttactaaaaggctggtgaagcgaaggacagtggctgatgctctgtgtagctcatcatggattggggatttaaggggagtggtaacatgggaggtcattgctgacttcattttgctggcagatgttgtggctgacgttgatcttcaatcgggagttccagataaacattattggaggttctcttccaatggtatctattcggccaaatctgcttatgagataatgttctgtggttctacctccctggcgggctttgaaagagtgtggagcacctgggcgccgcctaagtgtcagtttttcctctggttggtcctacataataaatgttggacggctgaccggctcgctaagaggggtcttccccatcttagttcttg

SEQ ID NO: 186322 - DNA, 1344 bp, Zea Mays
ttcggtttcaatattttccattacaaacactttgtgatgttctcagcagctcatctttctctccctaactttgtagattggcaatgatgcttctcaatttgttggtccacttgtattgaacctgttgttagaggtacacttctcattccatgacccctacccatcattaacagtgctactgaagtgcattgattctagaacagactgtgcgattatgcatttcttagcgcacctttattatgctctttgcaccaataaactttgtttcccccccttttccagtctatgcaaaaaggtgatccatcttggagcgggtacatctatgctttctcaatctttgcaggagtggtatgggtcattttgtttcctgcatgctgtgcaccacatttgtttcttgtttcggtgcagttgaaacagcaattatagtacttacgtctcttctcattttcagtcacttggggttcttgctgaggcacagtactttcagaacgtcatgcgtgtgggtttcaggttgaggtccacattggtatgtgtttcttttatatgaagaacttttattgtccttctgtaagaggttgtacagtaaacatgcatccttgaaaattgaaatctcgcgttccacattcttgagaccattcttgcttttacttagattggattggggatcaaaactccagatttgtcataacatgtggattccctacaaagccttttagtccaggtagatattggtagggaacttaatgacataatgagattgtttttgcaaattcccccttaacatcatagaatatacctggttttgttggtagtgatattagttcaatgcgaatttgtctttatcatctagaatgcagacccgctatatgatttctatgttaaatgttttgaatttttcttttaggtatggtcatcaaagtttacattgaaatttgaccttttgttcttgtgcagattgcagctgttttccgcaaatctttgcgactaactaatgatagtcgtagaaagtttgcttctgggaggattaccaatttgatttcaactgatgcggagtcccttcaggtatacttttgtgttagactgggtcaatgttacaaaagatggaaggactgaaggaaggagaaagtgccatgtgtggatgccatgcatgctagccatttatggcttttggttttgcacccttctaatttagatttgtacctttgcagcaagtgtgccagcagcttcacagcctatggtctgctcctttccgcattgttatttccatggtccttctatatgcacagcttggtcctgcagcattagtcggtgcactcatgctggttcttttgtttccaattcagg

SEQ ID NO: 186323 - DNA, 494 bp, Zea Mays
cactatacgaggcaggaaagcttggcgattcttgtattgctgatctatgcaatgatcttgccagtttagaggggaaacggtttgaaggtgtgctgcaggaattcgcaaaccatgctttcagcctccgatccttcctcgagtgcttgctgtctggcggaacttcaactgaaacagctgacctgactactagtgaagcaaataaccaggagagctctgtccaggacggtttagacaccacttgtgctaaggaaaacaagggaaacgacggtgtcgataatgctgctgagaactcgactcaaatttcagaatcctctgatggtggccaactatcactgcaggacaacaagatgggtgattctgatgctgcagatgcgaatagatcatcagcatcttcgacgatcgtgtctgaaggcaaggaaagcatactcaaacacgactgtgacagcgtccaggctccaaagctgggtgcttcagctgctaacggtccatcgtcc

SEQ ID NO: 186324 - DNA, 558 bp, Zea Mays
cacacatctctgcattttggaccgtgcggatgcgcttgctcgagaagaactgcggttgcgacggtgtgctctgttcgttgttgtcactggttcaagaccgagggtggctgctgagactcttgctgatgaggtggctgctggtttcgggctggatgcgtcatccttctccgttcatcgttcgtgcccagaagattttgtcttaatcctgaattcggaagagttggccaatcaggtgtacaacaatggtgctgttttcaattctctttctgggtctttcaagttcctgagatggtctagacttgcccatgccgaggtggtggcctttccatctcctgttcttgtggagttcaaagggattccaattcatgcttgggatttggctactgctcagaatttgttgagggatcactgcactgatgtggagctccatcctgacacggtgaatcgacacgacttctcttccttcaaggtttttggatggtgccgacgtccacacctcattccaaatttggtggagctccttgttccggaacctttgatgatgacgcctggctctac

SEQ ID NO: 186325 - DNA, 502 bp, Zea Mays
ctttacggccgccgccgcttctgcagacgtcccgtgccctttgctgtttcagcgttctttcttgtagtttcatgaagcatcttggttggtttgtttcttgagtgtctcttccttttctcccctttgctcctctttgtgcagttttgttcagagagacgatgttttcctcttttttgtcgtccttaagaatttatttctctcttctgttgcgagctctgatgaggactgtgatgaaaaacacaatcaaaacacaccatctttcgggactgattggctcgatacgagccatgctgccaactctgcaattctgacgtccccattccagcccgcagattttcttttgcatttccacgcttttattcatgcgtctgtatgctgcatcgtaaaaaaattgatctgaaatactttgacagtggcctgtgacgaaactcagcaatcaaaaacaccatctttcggggctgattggcgcgagccatgctgtcacactgcaaagaattctgag

SEQ ID NO: 186326 - DNA, 487 bp, Zea Mays
cgaccagtggagacagactaagggagcaacctcgacctgagacacggctctcggtctggaggaggctctcttcgtcttcagcaacctctgtgatcaaggtgaagaagaagagactggtgtggagaaggaaagacaatcagcatcctcctagagattcaggtattgctgttcgacaccaggaaccatcaacaatggagggcgacggcggaggcttgatttcacttgatgctgtcggtgtccaatcaaaaagacagcggactcgcaagagacggcgtagaaccaaaccgatttctgatttggataagcgccccgctggaccggtgtcgcctgctgaagatgataaaccctgcatcttgagatggagtcagcagatgaccagagctgaggatgatcttcagaaggcagtggtgattactgttatcagcgatcgtgagaaagtaccggttgaagagattgctgagttaattgctcctaggctggagctgga

SEQ ID NO: 186327 - DNA, 375 bp, Zea Mays
cggctcccgtgacatccatcaccaagacctaagcgcatttctcctagcaacagggttgttggcttcctgttgtgtcgcctcatcgagacgcaacatctcgcccatgtgcccacttcaccattgtagctacaacgtcattccccacgcatcaacgattgtgttgtgtaatctttgttgtgttgtccatccgcacaaggttttcgtcctactaatcagatcttcaccgttatgttggagcgctacctgtgagcgcgaggccgccaccgaccctgtgcacgaggccgccgctgctgagccaccaacgccctacgttcgagctgctcattgttgagcatccgctcccgcccggactacttgccatcgagtttgatgcag

SEQ ID NO: 186328 - DNA, 512 bp, Zea Mays
ttattgtatttatcgtctttatgcatacagtgtcagttctctaacaagtttgttttggcatgcagctattaactcgtctggtttttgagcgtggaagcactgatgcagcagcaaaggttgctgacacaatgagtgttgattttgtgcatgagattatatcagcatgtgtgccacctgttttacctccacgaacaggacaaggatgggcttgcattcctgtcatacctaccatttgtaatattagttcagaaaacagactatgcaccaagtcttctcctgctcaaggatggagtgcacatgattcgtccttgtcttctcgtcaagaacccctctatcctctccaattaaatttagtgaagcatttagcccagttatcttcagtaagagcagttttggcctgtgtatttggaagcagcatactatctggggacaatgaatcatcttttactcatgtgaaagattcaacacaagctccagaaactgagagatcattttttgaatttgctcttgag

SEQ ID NO: 186329 - DNA, 729 bp, Zea Mays
tgcagctttgcaatgcaaggcattccaagtctgaggatgctactgaagatgatacaccaagcacctcagggaggcaaatatatgaaactgaatcatctggttcgtcttcaaaagtggtaagggcatcctctcttgaatcttgatttctgtactggataggtctgtcctttgccacccaggttttctgtaatgctggcggctggcctataatctgcaattaatcttagtgcttttatagtgggctattcatagtggataagaactatttcatgcttgattctttatgtattttttttatctttgatcattcgcgtcccactccaatcacttctagtaccttttccatcgctttctgattttctttgcttcctgtgcaaacaacttgtaaatggagctataatactggatggagactggtaaaatcattttaagtcttttgaactaacacaccatgggtttttatcttttaaagcgtgtcaattttttactccaagttattgcaaccagtatcaattctcatcttgatgttgggcattaacattatctttatcatctgtgttttctcagcactgtagtttgtcaccattgccagcatatgaggctgcatttgattgggagaatgagaggtctttgatatttggccaaagggtgccagaaagtatacctgcaataagcaacaggttgcttcagcacacagactaaaacaatgcatccaacatttctttttcc

SEQ ID NO: 186330 - DNA, 1311 bp, Zea Mays
ggtgttgcaactgtccgtgtatcagtaattccagagcgatcaagaagatcttgtatatacttggactgagacagatataaaccttttgaagtctgctgaacttcaatacccaagaaatagctaagtggacccaaatcagacatttaaaattccttactaagttgcttgacatgagagatatgttctgagttgtcacctgtaatcaacatatcatccacatataatagaagtaaagtgcgcccttttggagagacatgaacaaacaatgcaggatcatgttcactagaagagaaaccagcagctgtgatgatagagatgaatcgctcaaaccaagcacgaggagcttgtttcagcccatacaatgcgcgacggagacgacaaacgtgccctgagggagtatcaacccccggaggaggatgcatataaacttcttcacgtagatcaccattgagaaaagcattcttgacatccatctaggagatagtccaagaagatgaggctgcaactgcaatcaaggttcgaacagtagtcatatgtgcaacaggtgcaaaagtctcatcataatcaagtccttgagtctgttgaaaaccacgagccacaagacgagctttatacctctcaatggaaccatctgattttgtcttaattttgaagacccatttgcatgtgataggaacaacatgcgagggtaaaggaacgatatcccatgtaccagtgcgttcaagagcagccaattcatcaatcatagctagctgccactcaagaatcccagaagcttcctggtaagtagtgggttcaacaattgccacaccagctcgtgggaaaccatagcgatctggaggttcaatggtatcatgatcacgaagacgatatccctgattaaaaacatcgttagactcataattgttagtacaagaatcaggtacaggatcactatcaggaccagccgcaggaatagaccgggaacgacgaatgtaggtttggaacagtaagtagaggatgacgtggaggtggaaggtggtgttatggaaatgagaacatcagatgtggatgtagaagatgatggttcaacgataggaatggaaggaagacacatgaagtagattatgtgggataatatgaggagtgagtagattggttgtgaaagaagggacaattttcattgaaactctcatctctagaaattcgaatatgacgagtagatggatcataacaactatatcctgtgttcaggactgtatccaaggaatagacactctacagattgagcaatcaatttagtccgctcacgaggtggtaacaagacataac

SEQ ID NO: 186331 - DNA, 361 bp, Zea Mays
gtgtttttttcccattttctttgtgtgtgtttgcgctgctgccttcttatcaagtcttcttgcacgtccttctcttctctcccggattcatgcttggcgatatttagactgttttcgtctgagattctttctgcctcctgcgttcttggtccccggccagcagtcggcaatatcgctctgtcgatcctcctgatacttcgtcttccattggttttttaatcccatgtgagcagcagcagtaagaagaggatctgattcgatcggaggagacctagtgacgccgccaaatcgaatcgaatttcttggcaacagcaacagtaacaaaaactagattctggattcgtcccattttttgcactag

SEQ ID NO: 186332 - DNA, 394 bp, Zea Mays
ctaaaacacgtcggaagccagagaggtggcgcgctaggtacaaggcagggaaggagaaggacatgccaccggtgtcagctactgtgtgagcacgagagaacgaagacagaggcattgaggcatagagcagatgcaaacttagctagcagagatggatggagactggggagaagagatggaggtatggtacttgcagggcgtcgttgtgcttgggatggaggagtggagaggcgctgaatcccttcgccgatggcgcgcctccgttgccctcgtgttgacgtatgatgtgtgtgctgtgtatgcagggtgcccgcgactgcgtgtgctgtgggaaagagacgatgtcgacagggtttagaaagtttactcagtgatgtagccatcgtgggctgac

SEQ ID NO: 186333 - DNA, 494 bp, Zea Mays
caagaatcgtccactgatatagcgatctgaaagaacagctgcagctacaagggcactgtcagatattcgtacaccatggtgcaactcatatctctctcttagccctcggagtattgaaattgtatcttcaactgaaggttgatcaacaaaaacttgttggaagcgccgctccagtgctggatctttctcaatatatttgcggtattcatcaagggttgttgcaccaatacaccgtagttctcctctcccaagcattggtttgagaagattaccagcatccattgcaccatttgtggcacctggaataagatgaacattcataaattacctactagcagagacaggtgttctatcgttcatgtctatagtagtaaaattcacagcaagcttcgacaggcagtttcgtattaagatctgccacgaatttggatttctacatggtttggcctccagcatcattttcactttcatcataaaacagcagacaaaacagg

SEQ ID NO: 186334 - DNA, 640 bp, Zea Mays
gccaagctctctgccatggagggcgctcctgtcaccgaccccgccgcgtaccgaagtctcgcgggctctcttcagtacttaacgctcacccgccccgacctggcatatgctgtgcagcaagtgtgcatgttcatgcatgacccgcgcgagcctcacctcgcgctgatcaagcgcatccttcggtacgtgaagggcactctatcggccggtctccacataggcactggacccatcgacaagctgattgcatactccgatgctgactgggctgggtgcccagactcccgtcgctccacatcaggcttctgtgtcttcctcggcgacaatttgatttcctggtcctccaaacggcaaaccaccgtgtcacggtccagtgcggaggccgagtacagggttgttgctcatgtggtcgcagaatgctgttggcttcgacaactccttcaggaacttcatcttcccttgaaggtcgccacagtcgtttactgtgacaacatcagcgccgtctacatgacagccaacccggtccatcaccgccgtaccaagcacatcgagattgacatccacttcgtccgtgagaaggtggctctcggtgaggtccgagttctccatgtgccgtccaagtatcaattcgctgatatca

SEQ ID NO: 186335 - DNA, 614 bp, Zea Mays
gggaagtcgagagaggcactctcccctgttaaaggcagaggtcgcaggagggtcgctgacagccctcccatttcagcatcaactcgaactggatgcatgggttgaaatcagcagagaggaagagacagaacagcacgtcacctttgatgagtccaaggacgaggaggccgcagaagtaggggaggaacttgaggaagctcagaagcgaggcccagaacccagtcggcggctccattggcaacttcctccggcctcgtccagaccaacctagagcccaaggactcgagttctcctccaaagctcccaaccgttagccaccaaaaggcttatagatcaatccaaaaaatcctccctatcaacccttcctccacgccggtcctgtcagaattgtcaatcccgcagagctcgaaaggcaagcaagaacccaggaataccttgttgggaggggaaaagggaaaccgcgggctcctctaccgtgtctccagttccatccagacccaaggacccggagatggaaccgtgaggaggagaaccaccaagcggcgtgcgcaagaagacaccaagacagagggagtaggaccgcctcggaccctcggtgacacacacacacacac

SEQ ID NO: 186336 - DNA, 988 bp, Zea Mays
ttgtggagactgatgcttgtgatgatgggataggtgctgttttgatgcaatgtgatagaccagtggcatatctaagtaaagcattgggtgctaagaataagatgctatccatttatgaaaaagagtttttggctctaatcattgcagtggacaggtggaggcaatatttgcagagggctgaatttgtgattaaaactgatcatcaggctttgagttttctggatgatcagcttttgcaatctgatatgcagaggaaggctatggctaagttgatggggcttcatttcaaaattgtttacaaaaaaggcaaggacaatgtggctgccgatgctctatccaggattggtcatgtgatgcagattcacacggtgactgaggtgaaaccagcttgggtgcaagaactcctgaatgcttatgtgacagataaagaggctcaagatctattggctcaattggccctggccagtcctaatgagcaaggtttttctttacatcaaggtattattagaaaaggggatcaaatctggatagctaacaattctgcccttcaaactaagttgatttcagccctgcatgatagtgtggtgggaggacattctggtggtgaggccacttaccaaaggatcaagaggttgttctggtggaaagggctcaagtcagccgtgtttcagtttgtgcagcaatgtgaggtgtgtcagcatgctaagcatgaaagggtgcattatccgggtctcctacaacctttaccagtgcctcaaggggcttggcaggatcttacattggatttcattgaaggtctacctagatctgagggatatgatactattttggtcgtggtggatagatattccaaatatgctcatttttttcccctcaagcatcctttcactgctgttggagtggcacaggtgtttcttgacaatattgtcaagttgcatgggacaccaaagtctttggtttccgatagagacgaagtgttcactagttt

SEQ ID NO: 186337 - DNA, 465 bp, Zea Mays
caaatatctgcaaaactgtttgaaagggaacattaagcgaacgacaagtttaatcctcacaacaataaaacgacatgactgttgaaaacacataaacaacgataatagtgaacatgtaggcctgtgttgtcggacgtccagcagctaagtgctctttttagtttctaactcgtaagcattgcgaagccaagcgattcttccttcttttgtctgcaaggttgcaaaaacatctctatacttcttctgaatcaaaagatgagtggcaaacaaatgtagttcgctcccttctggtgatccatcatccattacttgttgcaactgcttttttagctcaaggcgaactgggtcattgtcagcagaggtaatggacttgttagtggtcattgagcgggactcaaaagcctccactagtcttttcatgtagtcttcccttgaatcttttttcttctttggtttaggagaatc

SEQ ID NO: 186338 - DNA, 792 bp, Zea Mays
ctcaatgaaggaggacggcattgagcgggacaggtatacgtacaacacgctcattagttgttgccgtcgaagggggcttcacagggaggcagcgcaggtgttcgatgagatgaaggctgctggattcgaacctgacaaggtcacattcaattccctgctggatgtatatggtaaggcgcggaagcatgaggaggcaattggggtgctaaagaggatggagaatgccggatgtacacccagcgtggtgacctacaactcgctcatctcggcttatgtgaaggatgggttgttagaagaggctctggagctaaaacaggagatggagttcaggggtatgaagccggatgtggttacatacacgacattgatctctggccttgacagagttggcaaaattgacgcagcacttgctacatacagtgaaatggtgaggaacggatgtagcccgaacttatgcacctataatgcattgatcaagttgcacggggtgagggggaaattcacagagatgatggctgtctttgatgacctcaggtctgctgggtatgtgccagatgttgtcacctggaacacgctcttgtccgtgtttgggcagaatggtctagattctgaggtttcaggggtgttcaaggagatgaagaaagctggctatatccctgagagggacacatatgtttcactaattagttcatatagtcgatgtggtttgtttgatcaagcaatggagatatacaagaggatgatagaagccggtatatatccagatatttcgacttataatgctgttctatc

SEQ ID NO: 186339 - DNA, 363 bp, Zea Mays
gctttctgtttcgcttctgtttacgacacctgaaccagtttttggtaccggtgggggagcactgtcccaatggctggccgccgttcgccgtcggcggatcccggtctcggtcactgcgaagctcccgaaatgagatccggtggcgctttagagccctcgtccgttccaatacgcagtcggatgctgggttacgctcgcctctaaatctaagcttattatttatgcctttgcttcgtattcgtcagatctgatttcgtatttctgtctcgaccgaaattttgcgcggtgcagtgattataaaaacattcctcgtactgatgggtcatcctcgtgaacgactcctatacacccatagaatctgag

SEQ ID NO: 186340 - DNA, 284 bp, Zea Mays
cagattttcactttccaattcctatttatctcttcttttgttctttaatttggttcgtacgtacaagacttctcggatcactcgtcttctttgattgcatcatcgagacctgcattttcccttccaaattcgtcactcactctggttggccgccttctgtcttctgatccaatccggttgaaatcctccgtctccttccagcaagatctggcacataaggagaatcggcaagaaccattctgcaaatgaggccggatacgcggcttgaatcggcggtgttccag

SEQ ID NO: 186341 - DNA, 318 bp, Zea Mays
gtctgaaggggtattaaggagtttgtatcgacaggaatatggacaacatatgaaagtacaaggtagcaaagaggaccatacgagctgtaagtggggtgaaggatagagtgtacgaggatctttaccaaagtttgagtagaaaggaaggagagaaggatatataatatgatggctagggttcataaggttgattccagtgggtatccgatgcggatacgcaaattagaatgatgcgcattgttcatgtctcgcaaaatgaaatgttgctccaatagaatgcgatgaagagagagaactcgtggatatgcgatacgatgg

SEQ ID NO: 186342 - DNA, 579 bp, Zea Mays
tcagaagagagttcaatgggttagcactggtaaaaagagtgctatatggaagaaaacacatgagcgaaatgctcgccgtgtcctcaacctgatgatagagttagaaggtttatgggtgaaactgggccaatatttatccacaagagcagatgtacttcctgaaccctacataaatgtcctcaagcagttgcaggattcgcttcctccacgaccttttgaagaggtatgcatggttgtcctcgaatgaatggaaggattaaagattgataattcttgtctggtcctgacatagtattgtcttggaggtcatttaagcaattacttaacttagttcttgtctctgctatgcaggttcgtgaaacgatagagaaagaacttggagaacctatgagtgatctatttgctgattttgtcctagaccctctcgcaaccgcatcagtaagtactgtattagcaaactgaactttacttatctgatataaatcatagtatgctcatttcatatggaccttttattttcaatgaacatttggtaacagatagcacaagttcatcgtgcaactctggcagatggcagag

SEQ ID NO: 186343 - DNA, 352 bp, Zea Mays
ttctctgtattacctctcaggcgattaatctaaattccatggcaaccccttccttccctgtgctgttcactagatgcctatcctgatttgatgagatcttccatatactcacatccttgtttgttctctcctttcttagcttagcttgtgccatctttttataccccatcaattcttaccaacacaacttccaaggcgatttcaatatcaggatttggaatttctggcatatttgcttttgtttgtaaattagatgtacactgttgctgtcaactatactaaaaactttgtatgccattgtgagtttgtgacatctattaacattaaaatattctgcataaaaacatttgcc

SEQ ID NO: 186344 - DNA, 558 bp, Zea Mays
agggggttgtgcttgtgccgaaaaaggcggagggtgtggggtggtgaactgccatggatggaagacaattgaggaggtaggcgatagtgtgtaggacctcaacccagtagcaggcggggaaggaagcttggaataggaacataacatgttggtggtggtacaaatcatgtgctcagcccgaccgttctgtggggaggtgtagggacaggatagtcgcagttgaactttgtgagagaggaggaaggaacgagaggagtggccgaactcatgattgttgtcgccctagacagcatggacaatgtgaccgaattgggtggagacccaagcaaagaagtgcgagagcatggtgaaggtatcgaacttgaaatgcaaagggaaagtccaaagaaaatgagaaaaatcatccagaatcagcaagtaataaaaaatgggtgatgtccacagatcacagtatacaagaccaaaagcctgagaagccctagagtaggagctatggaagggaaggcgaacatcccgacctaaccgacaagcatgacacagactatcaaaattgcccct

SEQ ID NO: 186345 - DNA, 604 bp, Zea Mays
ccagtgatcgaaaaggttggctctgttgcttacaaactacgcttgccagaatcttgccacattcatccagtattccatgtctcgcttctcaagaaggcattgggacctcacgtccaggtgagtcctacactaccatctgtttcagattcctcccaaaaaccagagaatgttttgcagcgcaggaccattcggcgcccgtctggagatgtcccgcagctgttaatcaaatggtcctcctggccggaagagttggcaacgtgggaagatgaggctacaatcaagctccgatttccagaatttacggcttggggacaagccttgtctcaaggaggggagaatgtcacaatacgagaggatcctaacttggaaggaaggccgcagagaattcgaaagcccaatgatagagtgagtgggccaaaatggacccagtagtggtttcgtttcttaattttcctgagagatacgctgttggtatttgagggggtgcaacactgcgtggagagggtgatgtcggaagacaccatttggccggctgcgaccggaaggaaggcgacgctctgtcgttgtaataccctactctgaattctctacctaaattcgatct

SEQ ID NO: 186346 - DNA, 398 bp, Zea Mays
cacaaacattgttttgccctacacccatgcctgtaccaatacggtacgcactgttgcgcatgcgcccttccccaatgccgccaccccttctccatcgtcgtcgccctcctctcttgtcgccctgttgtgctcaggcagccccctgctccagcaacagctacgccccctccatcgcgcgacagttgtagtctgcagaggccccctacaacgtgctcatgtcctcctcttttgtttgttcagtggctgaaaaggcgagtaggcgaccactcctctgtttagaattcagagaccaagatgaggacctctttagacggtaattgctctgatattttggttgttcggtgttctctgttcacttattgagtagtattgtgcccgccttggcctcctcttgagtt

SEQ ID NO: 186347 - DNA, 675 bp, Zea Mays
gcactgcagcgaagacgtacaggtatgtccagttgatgttgtccttctttgttccgtacatgctcgccggtcccagcatcagctcagcagaacccgccggcccacaggtgagggcttctttctggttggagatcgatgagtaggccgccgagctgttgaaactctttggtaccttcatgtagctgtctccagggaagtacgggaacacctggccgttgtagagtaggcctttagtgtagcaccagccatccccgcccttgtacgtgaacgacaagcaggcgctgctgttcaagcacatgtcccggcaggcttcgaacgggacggactcgttggaggacaggtcgaagccgtagtagtcagcgtgaggctgctcaacgaaggtgaactcctttccgtcgtcggtcgtcaagaacatgggcttgcatcctctgttccagttcgtcggatcgaccatctcgtagtccggggggcatctgcatctgaggccacccaggtagtcgcagagcccgttcctcccacacagtccatgcacatagcacatctgtatgacagcctgccccgtgacgcgccacgcccccgtcgacgcgttcaagctgtacatcctgaagttgccgtcgtagccaatcgtgatcctcctcttgacccctggaccagaatccgaagcctctatcctga

SEQ ID NO: 186348 - DNA, 425 bp, Zea Mays
ggggaatggagaaaatgaaaaaagcatttgaaatctatccttattatacattggcactcaaccaccttgcgaatcattatttctttaccggccaacattttgttgttgaacaattgactgagacggctctttcttcaagcaaccatggactactgaaatcacatgcttactacaacttagccagatcataccacagtaaggtaatatactctttccatgtacatataaaactaatagcggtccttttccttgtttatgttagcattttggattcctttgttaaaaataggcaaccacatttatttatgcatatatttggtattttaataaaatgcagggggacattgagactgctggacgatattacatggcatctgttaatgaaatcagtaaaccacaagactttgtgttaccatatattggta

SEQ ID NO: 186349 - DNA, 531 bp, Zea Mays
ggcaacctttttcatcacgtacgtgctcacctcaggctgggcgagtctgtgctcggagatactgcaggttttcaacttggtctacaacttcttcagcaggttcgtctgctgctgccatcgccagaataaggaatacgtttactctttcccgtaccacaccgaagtgcccaaagtcctcctgttcaacctgctcggcttcacgttctcgatcatggcgcccctcatactcccctttctgctcgtgtacttctgcctcggctacttggtgtatcggaaccaggtgtgacaattcttgaaactactctctgtgcatgtgacatgatactgataccggaagcttcagtcgctcatatctttgtctgtttgaccttgatgggtttcttgtcccgcatgcagattctgaacgtgtactacccaaagtacgaaatggggggcaagctgtggccggtcatgcacaacgccatcgtgttctcgctggtcctgacgcaggtgatcgcgctcggcgtcttcaccatcaagcgctcccccgtg

SEQ ID NO: 186350 - DNA, 635 bp, Zea Mays
cgagctctggggtctcttataagtggaatgggtgaagaaatcttcccagatcttgtgccatggttattagatactctgaaatcagataatagtaatgttgaacgatctggtgcggcccagggattgagtgaggtttgttttccttttttttgctttgagtgccttcctcttttgtagtatggcatttcttccatgtttgattatattcaatttccaggttttagctgctcttggccaagattattttgaccatattcttcctgacatcatccggaactgttcccaccaaaaggcttccgttcgtgatggacatcttacacttttccgggtaattgctctcaaattttcatatgttatgatatgactatattcctgtaaaatgcaatgtgttattaataacttttaatctattttatagtatttgccaaggtccttgggtggtgttttccagaattatctgcaggctgttcttcctgctatattagatggtaagatttttcagtatctgtctctgcacttggcacattgattctctaataatttactcttattagggcttgctgatgagaacgaatctgttcgtgatgctgcactttctgctggtcatgtctttgtggagcattatgcaactacgt

SEQ ID NO: 186351 - DNA, 883 bp, Zea Mays
aagaactgcagccaatagtgttgactttcctgatcctacctcgccacatattgcaaccttctccccagccttgaccaccaagtttatattcttcagagttggttttgacgggttctcatcccatgaaaaactgcaagagttcatcactatacgatattcatctcccacacagtatttcttcctggcctgtccactcagctcaggcgcatcaagaaacttcgttatcctagtgaaagcaactttagcctgtataacgactccaatcacatccggcatctgcctaattgggtcttgaacaaggcgcagagtggccacaaacgtgaaaacattgcttgcatcaagagggattttcagaagatagcatgtgaggaaggttgcagccgagaccagaaccggtgatgtccagaacacgaaaccattgaaggatttcctaaggttgaacgccgacagccacttgatctcaatctccctcaacccctcaatgaccttcttgaaatgcgtctcccacgcatagagttttaagaccttcatgtggatcaaggactccgacatcgccttcagcctcacgccctgtgcttccataagcctagtctgaaacttgtgctgcagcttggacagaggagcgttgcagatcacagtgagaacgatgacgaccagcgatgcaatcatggcaagaccaaccgcattgtacaggatccccagagcgatgcagagctggacgcttgtcgtccacgtctggtggaaccagtacgggaactcgccgatccggtaggcgtcgacggtgacgtagtttatgatctctccagaggaatgcttcagcttcgaagagcccgacagcttctgctgcttcttgtagatggcggccgacaggagcgacctcacc

SEQ ID NO: 186352 - DNA, 746 bp, Zea Mays
gttctggatgcgtgggtcgccttggccatgtcaggcaggcaatcgtagcatgagaacgcgtagtgttataggaatgtgggcaagtgggcaacctcttgattccacgaatctgggcgaatcaaacttttcttttcaaaggaatccgattcctgaatcttgcgcgccctgtttgaattactggagagatgaaaaaaaaggcgaggccgggatagaaggtgtatatgggatcttgtatggtggacggaatgaaaccccactcatttcatggaacataccttgattgatctttgccttcggggggcgagaagccgagaattgatgtgagcccattgcagtttgtacctgaagctatggctgggattcattcttcagtcgtacatcaacacattcagcttcctgatctcgctcttctcccctgttcgatttgaaggacatggcgacctcgggaaagaaacacctgaattcagtgaccttgctgttcaaactaccgtattacacgcaatggggccagagcttgctgattgccgggtcggaaccagcactcgggtcgtggaatgtcaagcaaggagtatctctcagtccagtccatcaggacagtgagctaatctggtgtgggagcgtgtctgttgttgccggctttacctctgagtacaagtactatgtggtggatgacaagaagaatgtgttgagatgggaggctggggagaaaaggaaactagtcctgccggagggcgtgaaggaaggag

SEQ ID NO: 186353 - DNA, 408 bp, Zea Mays
gtcgggatgtatgagaagtcatcactttatgacatcaggggattgacagactttcatacatgcatcatcacctcgcatcgaagatcaactaacaagaacaaatatccgacaagagaacggctacgaaaaccaactcacaaaagagactatgccaacgataaaaccgggtcagttggaagaacacgaggaatgaatctaagagaagaaaagaaataacaagtggctcagaacttcttagagggtttgtgcaaccaacaccggcgtccgagggatgcctccggcacacggatttctttcctcatcgccatcaaactgctcaaaacgatatagtaatcgacaaacagaaacaaagaaaaaatggagaaaacatgaaggcgaaagaaccatcggacacagagagctagcaac

SEQ ID NO: 186354 - DNA, 493 bp, Zea Mays
ccgttgcaacggcgcccggacttcacgtcaactgaatctatacaacctcctccgcttctccctgcgcatcactcaccgttccagctctaggattataaatgccaccgcgtcgcgttgtcgccctgggcgcgcatcacctcgccaacctcctccttcggggcctttcccagcctctgcggtcatggagcgtctcgtcggggtgcctgggttcacgcccgtcgtaccctatcgtctatccagtaaccggcatcgcacccggaggaaaacaaaattagtggcgggctcgccgtgcgcagtacctgcaacgcacgagcaccgcgtcttcggcaccgacgtgtgatcaccgtctactcgctcgttgcagggcagacattccacgatctcgtctacggctgcgccggtgtcgtctccatccctctggtccgtgccccgccatggcccaacccaagctacagcgacctccggcaattgctcaccgtcagcacagttccgc

SEQ ID NO: 186355 - DNA, 5051 bp, Zea Mays
gtctctgacaattgtgttgtctcagaggacaaaacattgatgagtgaaggtgaggtcaacatttggtggtaatggcatactagttgttaatttattctctgcatagccaaatctataggctttaattatgtttaagttatatggcatcacaattgtattattattttttgatcttctttggatgctggaaagctggcatattaataccctattgattttgtgatgttgtaattagctttgtccattattgtcatgttatatactcaaagggagactttgttggtccaaaatcaccaaatggtttatcaattagtttcattgtcgcagaccgtgaagagcaaagccctgtgtccggagaacagagagttagcttggaagcaaatgccaatgagcctgaggaaaagaacctagctaacgtcacatcaactgatctccacaccaaaagtctgcagcatgatattgacagaatagctaaagagactgataaaggtacaactgaattaatcctgtatccataataaaaactctgcaacattgatgagtgaagataatatgtatgctgaacatctaaatccacctgtgccagctgattattcactgttttttttctaaagatcttgcttagtaatcttgcttcaagattttcaattcactaaattaaacttgctaaatctccagatgttttgtctttggttttccctattgaagagcatgaagaaaaatatggagtgagccctatagctgttgaaaagtgcgtctgtcgtgaagcaagtgcatgtgaatctgcacgaaaacccctaaccgttatcttttctaacaatctccacaccaaacatctgcaacatgattgtgatgtgctaattaaggagactggtgaaggtaatattgcattaatacttgttccacaacttgttactgatctgtggagatggtgatgaaaacttgtgctgtttgcactgtgtttaatttaccaattttaaacatactgagttctaagtcaagttgttggctacttgtaattctaattatttttaataggctttatgtttgttctatctggaacagctaggcatatgtttcattgtcatttgttgtcttttaagtatcttacatttttttgaatgtattctttccctttctcagaagttttagctcaggagaattgtaatgaccagcctgttcctgcccagactgaccaagaaattaagttaaacgatgaacttgctgatccgggtatggactgtgtttaatttaccaattttaaacatactgagttctaagtcaagttgttggttactttcattctaattatttttaataggctttatgtttgttctatctgcaacagctaggcacatgtttcattgtcatttattgtcttttaagtatctgacatttattttttaaatgtattctttccctttatcagatgttttagctcaggagaattgtaatgaccagcccgttcctgcccagactgacctagaaattaagttacacgatgaacttgctgatccgggtatgtactgtgtttaatttaccaattttcaacatactgagttctaagtcaaattattggctacgtgtaattctaattattagatttgtgcattattgtcatgttatatactgaaaggaagactttgtcgttccaaaatcaccaaatggtttatcaattagtttcactgttgcagaccatgaagagcaaagccctgtatccggagaacggagagttagcttggaagcaaatgccaacgagcctgaggaaaagaacctagctaacgtcatatcaattgatctccacaccaaaagtctgcagcatgataatggcagaatagctgaagagactgataaaggtacaactgaattaatcctgtatccccaataaaagctctgcaacattgatgagtgaagataatatgtatgctgaacatctaaatccacctgtgccagctctcattcactgtttttttctaaagatcttgcttcaagattttcaattcactaaattaaacttgctaaatctccagatgttttgtcttttgttttccctattgaagagcatgaagaaaaatatgcagttagccctatagccgttgaaaagagcttccgtcaggaagcaagtgcaattgaatctgcaggaaaacccctaactgtcatcttttctaacgatctccacaccaaacatctgcaacatgattgtgatgtgctaattaaggagactggtgaaggtaatattgcattaatacttgttccacaacttgttactgatctgcggagatggtgatgaaaacttgtgctgtttgcactgtgttgacattttttaaatgtattctttccctttctcagaagttttagctcaggagaattgtaatgaccagcctgttcctgcccagaccgacctagaaattaagttaaatgatgaacttgctgatccgggtatggaccgtgtttaatttaccaattttaaacataccgagttctaagtcaagttgttggctacttgtaattctaattgtttttaataggctttatatttattctatctgcaaaagctaggcatatgtttcattgtcatttgatgtcttttaagtatctgacatttattttttaaatgtattctttccctttatcagatgttttagctcaggagaattgtaatgaccagcctgttcctgccaacgagcctgaggaaaagaacctagctaacgtcatatcaactgatctccacaccaaaactctgcagcatgataatgacagaatagctgaagagactgataaaggtacaaccgaattaatcctgcccagactgacctagaaattaagttaaacgatgaacttgctgatccgggtatggactgtgtttaatttaccaattttaaacatactgcagagttttggtttatcaattagtttcactgttgcagaccatgaagagcaaagcaatgtgttcggagaacggagagttagcttggaagcaaatgccaacgagcctgaggaaaagaacctagctaacgtcatatcaactgatctccacaccaaaactctgcagcatgataatgacagaatagctgaagagactgataaaggtacaaccgaattaatcctgcccagactgacctagaaattaagttaaacgatgaacttgctgatccgggtatggactgtgtttaatttaccaattttaaacatactgagttctaagtcaaattgttggctacgtgtaattctaatcattagctttgtccattattgtcatgttatatactgaaaggaagactttgtcgttccaaaatcaccaaatggtttatcaattagtttcactgttgcagaccatgaagagcaaagcaatgtgtccggagaacggagagttagcttggaagcaaatgccaacgagcctgaggaaaagaacctagctaacgtcatatcaactgatctccacaccaaaactctgcagcatgataatgacagaatagctgaagagactgataaaggtacaaccgaattaatcctgtatccataataaaaactccgcaacattgatgagtgaagataatatgtatgctgaacatctaaatccacctgtgccaactgattattcactattttttttctaaagatcttgcttagtaatcttgcttcaagattttcaattcactaaattaaacttgctaaatctccagatgtttcgtctttggttttccctattgaagagcatgaagaaaaatatgcagtgagccctatagctgttgaaaagagcgtcagtcgggaagccagtgcatgtgaatctgcaggaaaacccctaactgtcatcttttctaacgatctccacaccaaacatctgcaacatgattgtgatgtgctaattaaggagactggtgaaggtaatattgcattaatatttgttccacaacttgttactgatctgcggagatggtgatgaaaacttgtgctgtttgcactgtgtttaatttaccaattttaaacatactgagttctaagtcaagttgttggctacttgtaattctatatatttttaataggctttatgtttgttgtatctgcaacagttaggcatatgtttcattgtcatttgttgtcttttaagtatctgacatttattttttaaatgtattctttccctttctcagatgttttagctcaggagaattgtaatgaccagcctgttccggcccagactgacctagaaatgaagttaaacgatgaacttgctgatccgggtatggactgtgtttaatttaccaattttaaacatactgagttctaagtcaaattgttggctacgtgtaattctaattatttttaataggctttattgttgttctatctgcaacagctaggcatatgtttcattgtcatttgttgtcttttaagtatctgacatttattttttaaatgtattatttccttttcacagaagttttagctcaggagaattgtaatgaccagcctgttcttgctcagactgacctagaaactaagttaaacgatgaacttgctgatctggctatggaatcaggttgtagcattactgaaaggaatgaagggcttgttgctcataatcttgatcaagaaggtaagcatccatttctatgatagctggataaatggataatgattgtctcagtttcagttgcactatcagatgaagtgttgtttgcgaataacgcataaatgtgtctcaggtttccttgaagcaacaccagagtgcaaacaggaatgtggtttgcctgaggagacagtaatttcctcaaaagaaacaggatctctgctgtgtgcagatcaatcaccaattggtctggaatctttattttcgcaagaaagcatagttgaatcagtggggcattgtgcacttgcttcagcaacaactcataccgaaaatggctttgatgattcaaaagattgccataacaagtctgcacttgaaaatgttcatgtgccagaaccttgttcacacaatgatactaaaggaggcatttttaaaaatgttgattgtatgcatacatcccagcgagatgatagaatggaag

SEQ ID NO: 186356 - DNA, 320 bp, Zea Mays
aatttcttatttggaacgtgcgaggtcttaatgggtctgctagacaggatgttgtacgtactttggtggattctgctcgagttgatgtggtttgtcttcaagagactaaaatggtggatatttctcggttccttgtattgcggatgcttggtccagcttttgacaattttgtcttcctaccctctgttggtgctagtggtggcatcttggtggcttggaaaaatagcattggtatttgtgctagtagcagggtggacggtcatagcgtctctgtgaactttcattcaagcaccagccccccttggtggcttacatgtgtg

SEQ ID NO: 186357 - DNA, 358 bp, Zea Mays
tcccggtttctccggtcgatgggctggcggcgcctgtgcctgcaatctcctcccgggaggcggatgatgcttcgtttctgaggcctgtcggaccagttgatgcgtcagctcccccaaccttttcggtctctgagttggcagcgcctgtgtcttccaaggccttaattgctctggacgcttcctctcccgcctcctcgggtcctgtccttccatccgctggggataattattctctccaacttgctgtggtgcctggtgatcggtgtctgggcggctctgcctccacccatatccccggagatcttctgtcggaaacagcatcccctcctgtggtcaaccagattacgacgcacttgga

SEQ ID NO: 186358 - DNA, 303 bp, Zea Mays
gaaattggttgagtttatctgctcaggttccttaatacaattttagcctcctgcgcccatcctgaaacttctgcaaggagcgtgatttcgctatcttgtctgattgagggtatggagtacttgaaactgaaattgagcaagtggattttcgttctttccgctgctttacatgtaaattaaattttggttcgatgtgtgacagctgttgtacttggtatcagttgtggacttgcagctaaccagagtcaaagtgctttgaaggacttactgagcacgtttctgttcctgtaggctgtagctcag

SEQ ID NO: 186359 - DNA, 553 bp, Zea Mays
atgtttttgcgccactgataaaacttgaggctgattatgacaaggtactgtgttctgattaagagatcatgttttttatcttttccatcacaaaactgagttgtgttactgttttatatgttgttgtagatgacgaaagagtcacagagcaaggataatgtaactgtccggtgggatattgggttgaacaagaagcgtgtagcttactttgtctttccaaaggtctgttcaagaagtgaaatatatgggattagtgaattaataccataattgtatagttatctgttgttgatgatgttcggtattgcttcgtgatactctattgtctaacacgggaaacaattatgtattttaggaagacaatgagttgaggcttgtgcctggagatgagctacgcttgagatatcctggtgatagctcacatcccacatggcaatctgtgggacatgtggtaattagaaacctgctgataatcttaattgggccagttttatctttgtggctatgctaaggacatttgttctttcagattaagctcactgcacaagaggag

SEQ ID NO: 186360 - DNA, 528 bp, Zea Mays
ttgcggatcagcttggtggggacttggtcgtccgccccgtctcgcagacttactcggcggggacttggtcgttcgtcccgcctcgcagacttgctcggtggggacttggtcggtaaatgggccggagagaggcttatgggccttgccttgggtaccccattcctggtacccgacaacatgtttcatgtaataaagtagagtcatcttccctctgtcatgcttgttagctaagaaacatgcatgtctgccattcactagcttgtcattgcatacctccgctctctttgggttgttacattgtgatgtttggacatcactcgttcttagtatttccggttgtgttgtcgctactatttgatgctcatcgatgacttttcacactattgttgactctttccacttaaaagcaaaccgcgccaccacctagtcagctttcttgcttacactaagaacaaattctagcttcctgtcaaagccatttaggttgataatgggcgcgagttcatcaacgatgccctcggctccatt

SEQ ID NO: 186361 - DNA, 476 bp, Zea Mays
aacagctcctgcatctggtcatgattagtcacagtcctaccctcatcctccaaatgagaaataaagtttctcttttttctaaagcaagcctgcatatggaaaaaacttgtatttgcatccccttccttcaaatattgtatccgagaccttaatcgggcaattgtcctctgtaaagaggttaggacgagacaatgttgtttcagttttcgcagcaaccaaacctcttccacagccagggtcctaacatcctgggcaatctccagtctgtgcaacacctcgcgagccaaacccaattgagtcccaacattacccaccgttttgtgcccccaagactgcagtctcttggacaatctcctcagcttcaaggacactttctcaagaggacagaaacagtgagctggctgattccaggaggcagcaacctcctcaaggaacccagggagcttaagccaaaaactttcaaaatgaaatctgcg

SEQ ID NO: 186362 - DNA, 410 bp, Zea Mays
ctccaaggtggaggccggaggagagagtgcccttcaaatagcgcaggatccgcttgagcagcgccaggtggggctcgcgcgagtcgtgcatgaagagacacccctgctgaacggcgtaggccaagtctgggcgggtcagggtgatgtactggagagcgtcggcgatgctcctgtacatggatggatcagcaatgggggcaccatcagtggcggagagcttggcgtgagtgtcgacaagggtcgatgtagagtgacactcagccatgccagcgcgctggagaagctcgacggtgtactgtcgctgagacaggaagatctcgtcggaggagcacgtgacggagatgttgaggaagtgatggaggtccccaaggtctgtcatggcgaattccgagtgaagaaggatgatgaag

SEQ ID NO: 186363 - DNA, 450 bp, Zea Mays
ctttgtatttatttaactaactgaatcatataaaattctttgagtgacattaggatacatgaaaaggaattaggatactagtggaaaccaaaaatcgaacaataggacaatataatcatggccatcgtgtcgtagacatatatggctacaaagatgaccactgatccaccagggtatatattgttagagtgctacttcatcaatcatgtttgacttctttggtaggcttttttgtgagctcggtgcacaacacttcgcaggtcttcttgtcgtcgggagccttattttctttggtgcactcctcgatgcaagcacctcttatgtcattcgcatttgagggttcttctggaacccacaacgatcttgccaccacaagaaaggtggcaaggaggagaaccaccacaatcatcttgttttgggccatcagtattgcttctatttagaatggca

SEQ ID NO: 186364 - DNA, 851 bp, Zea Mays
agggttgtcaggctcaacccgttgcagcgcagcgccaagagtggatgaggtgaaaatttttactccgctggtcttagctcgcttcttgtgaaaaagacgcagcttttttccgcctttttttttctttcctttcttctttgagccgtccaaggttccgttttcttttcttttcttttctagagattgggtttctgctgcagttagttcgcgtgtcaaattcgggttcgattggcggcaggaagctgttaattgcatctaaccttcgcggcctttcggtttccacgtttggtaatgataggcccagttgtgagggaactggttcttaggatttatcaagtgcgttcaactgtcgggggttgacttgtcttctcttcttcacttccagtctcgcgagttggcatccaaacagctgcacatgtatagattctttttcgttgttttgggccttctgtcatgtttcttttgatcttctgcgtgtttgcttgatcatggaaaggggtagcgtgtatcgatcttgcattttgtgtgtgtgtgtgacacaacgcattgtgcatcttgttccttagatcttttaccttactcactgcagtgtcttaatcatttgatgggcaggtaatttctcgcgagcgcattcagcacagcaggttactattggctgctcgtccacttaagcaggttgaggtatccatttggttcgacacagtgaagaactgaagatacgcattgtgcttgcttgtcttgcggggctcacaaacatcctgctggtgtgctgtgctgggaaggtcacataatccacttggctatatgccggggtgggaatgtgaatcggggcttcattagtgcaggcagca

SEQ ID NO: 186365 - DNA, 348 bp, Zea Mays
tgcagctttatatggagaagtacgaggaggagtttaggggatacctgaaggagtttgttgaggctgtgtgggggctcctcatggcgcagaccgcttcgccttcccgtgtgcagcttgccgttactgcgataaggttcttgactacagttgctgagagtgtgcaccatgctttatttgggagtcctgaggcgatgaagcagatatgtgatagtgtcgttgtgcctaacttgcgcctgcgggatgaggatgaggagttgtttgagggcaattgggtggaatatgtcaggcgcgactctgagggtagcgatgcagatacactcagacgggcagcgtgccggttgctgcggg

SEQ ID NO: 186366 - DNA, 303 bp, Zea Mays
gtaggatttcttaaccccttgtttctccttaatataaatgatatgcaactctcctgcgtatttgagaaaaaatgatacgcgaccagcacaaaacacgcgtagacggacggaggaccacactagagcgcgcagaagactatagaggccaaagccaaggagtacgacacccaagacttagctaggtcgagagcaccaaattcgtagtccttaggccactccacgcataagagacttgggagcctcctccctctcttgcccgcttgtaacccctactacgagcattgagcaacaaaggtgttggta

SEQ ID NO: 186367 - DNA, 336 bp, Zea Mays
gctgatgaaaacgacggggaggaagaagatgaggtccctttgactcggaagaacagtcggcagtatgtcaccagcggggaaagtagtggagttccttctcctgctctgtctgccctcattggtctacaagagttgtccctggcaaactttgatcagactcttgaagatatggttccagaagacctgctattagagccagcggatgatggtgtgatggaggtttgtgctgacgtgctcgacgccgggttgggatcatcccgggcagcgtcccgcgcctcgtcgaccttagagcgcggtctcgagggttaagaaactgacttggatcgccttgctccc

SEQ ID NO: 186368 - DNA, 477 bp, Zea Mays
atttcgtcgaagaccgttgctgtgtccatgctgcttctcagtgctgtcttcttcgtgctgctctccgcgccagctcatgctaggaagctggggacgatgagggcgcctaccagcagcgtgcgtcgtcctccggcggctccatgcactccaaggagtattctgcaggaggtcgctactcagaccgaatctaccactactccaggtcacagccccagcattggccacaacagccctccgaattgaaatgctctctgcatctggaatcatctgtaccccgagcgagtatatatatcccatgcttatatatgtggtgtttgttcccttgaaatcgtatggtttgtttgaacttgaaaggcaacctgaatttttttgtttcttttctcttttagaatccaccaccagtaaatccagagcatgcatgcatgtggttcatatgctttattttttcccccacttttgtgtgaaagacttgctaaa

SEQ ID NO: 186369 - DNA, 632 bp, Zea Mays
aaaagtgagtgaagtcatcgaggatgactaggtagtactgcgcaccagagacactggcaacgggagaggtccaaacatcacagtgaataagctcaaatggtagagatgaaactgaactggaatttccgaagggcagccgcacgtgcttgccaagttgacatgaatgacatagagtatgagcggacttattacatgagatggaattattttgtctaagcaaatttagggcagcagctcctggatgaccaagacgatggtgctagaggttggtggaggtggcgaggttggcttggggcgtggcagggacggtgtagaggccgtcggagctattagagcggagaatcacgcgtctggtctgcagatccttgacagaaaaaccaaacgcgtcaaattcgatagtgcaattgttgccacgagtaaattggcgaaatgaaagtaagttgcgcactagagatgggacaactagaacattgcaaagcgaaaaggatgaagtgctaccaggcaatgtggaggtgccggagcaagacacaggaaggtgatgaccgttgccaacagtgatggatgggacagaggagggttgatgggagagaagtataccatccgtgttgtgcatgtgggaggtggcaccagag

SEQ ID NO: 186370 - DNA, 295 bp, Zea Mays
ctggaggcaccagtatcaaagtgccactcttgttgaggcggctgctgaagagtgacagtttggaagttggcagcgagggtgtgttgatcccagacgggtgcaggcgtagaaggatcggcgtaggcagggggcggcccatatgctgcagcgggaactgcccactgaccaggagtgtcggcgacgaaggcatgcggtggtgggggcgaggcagcaggcggacgaggagtcgaaggtggacgttggccaggccacatgtagatggcccccgtccaagggttgtagtagttgtagttgg

SEQ ID NO: 186371 - DNA, 512 bp, Zea Mays
ctttgttcttagacattgcaatctcatatctacttctttcatgcttggtctatgtcctcctttggatcttaagcacgcttctataagtgaggagatttcattaatctcttcttggtctgcctcttccacaacttgagaatctattatttccatgagagtcccttcctgtagtccttcaatgaagtaatgagataagttttgtttggcacccgattcattgataaaaattggtttctttcttgtcaaaagttccacaagtatcactccaaaactatacacatcactcttctcagttagagaaccagtatgataatactctggatctaaataaccgaatgttccttggacaattgtcaccacatgtgtttcatcaagggatagagatcttgaagcaccaaaatctgaaacctttacagtgaagttgtcgtccaagagtatattagaagacttcacatctctatggaaaattggtattgcagcagctgagtgtaaataagcaagtgctcctgatg

SEQ ID NO: 186372 - DNA, 303 bp, Zea Mays
ctagattagaaattgactcggatgagaggctagagataaaacagaacatgactgcatgcatcttgttcatttagagtcaaagtcggttgggatgttgtagccaaacaggattcctcttgtaataggcgcctatataaatatataacccatcaatcctagatgtcaagataagcaatttaatatcctggtgtcatgtttcattcatggtaattagagccacctcctccatctattagccgatgtcctgatcaagagcaagtctacatcaacctcaccaatgacaaggtcccatggcgtcgtcta

SEQ ID NO: 186373 - DNA, 337 bp, Zea Mays
cttgccccaaatatctaaatccatcctccttcgcaggcgctccaactttccccttcccggcaaccaccctgtgccttcctcgctgcctcgattccgcttctgtgctcggctagggagagcggcagagtatcaggcgggtgacctctatctcgccggggcggggcggggcggtgacgctcgcaatccctcgcttgctgctgcattttcgaatactgagatggccatggagatgtccccgcggcagtcgcctccgcggacgccgcgtagggcggcgaagccgcgactgttcatcaaggagatggtcctccgcaacttcaagtcctacgcaggggagcag

SEQ ID NO: 186374 - DNA, 2894 bp, Zea Mays
gcacagcacaatcctcattttctcccttctcctttcccttcactctcttctctcccaatctggaaccccttccctctgctttcccatgtcccccgcgtccccctgccgttcacggttgacctagcgtgcgtccctgggtctctctcgcaccctcacgctctccgacgactggtgggccgccggcgcaggcgccgcgctgcgccaggtgctgaggtgttcgtcggtatcttggctggcaacgaccctgccaggtattcccatcccttctcttcccttcatgctgtgggatcgggaagcccagcacccaaaccctaacctaaagctatttaactatttgatcgacgcctcccaacttcgagcttttttttttggaaagaaaaatttaccggagaccttttgctgggtccgccaagaggtggtgactagtgagtttactgagatggtataaactaagagagtaagagtggaccagggacaagttgctactggacgactagagtattaggaacagagcgtcaagtccgagatttgggaacaggaactgaagatggacgatgacgtgcactaatcgttggagaaggacatcatcttcgtcagacgagatggcgccagctgggatgggaatagaagaggtggccggcagtgagagcttctgccgttcagtgtcccgcttgcacgagccccctgccccagtcgttctgacaagcaccagtagggttggtggaagtgacggcaggaagaaggttgcggcggtggccagtggtgctgcttcacctgcctgcacgacgggatcctgtcggcggcggcgtgcctgctggatggagagtggagtggctgagtgagatgctgatggatggagagtggggagtcagaggatttgaaccgtagaggaggcatggcagtgtctagctgggtgtgcagcccgtgaccccagctgtccatattcatccacaccttagtcatccgactaacagtgattagtcaacgactacgactataattatagtcttccaggtcgagtcgtagctcctagttgagtctagggagctgactagtcgcgattaattagacggtttgataacaccgcttaataacacaagtacctcatgacatgtattgcaatttctctgtagcactgttcaataaaatagttttgtcataaaccctcaagcaacctgagtagtaagctgctagtggttggtaatattttcacctgaagacatttgtccatgctttactcattgacttggggagcttgaagagttgtaactttgctgtgttggtattgcttcttgctgttatcatcattaattttaatgtagttcactatctgccaaggttctgtagcgttgctcaatcttctgtcgcagacagcacaatgcttgtttcttaaattacgacctaattggcacttttttttctcatggtccttgctaagcattatcctcgtgtcctttgctgcaggttgatttaccttttactcggtgttctgtgctctccaattggttccttgtcacacaacaattgtagaggaaatggattactatcagctgaatgggtagcatgatgatgaatcgtatatccgacatcatttttatactttagataagacagcatgatggaacctagaaaagatgatgttcgctctgctactcaaagttccattcgtgggtcctcaagctcagcatgtaccagttaccccgttccagaataccctgttgcaggcaccgttaagcctgtccttaattattcaattcaaactggggaggagttctctcttgaattcatgagagctatacccaagaaacatcttgttcctggtatgcctcataatcagaatgtcacttctagtgctggtcacaaagattctagagtaagccttgttgctcctcgcacaggaggtgaaactagattcgatgcatcgatatttctgacctcaggtaaccatcaaccagatgaggttgaaagaaaacctttttctgaaaacgaaaacagaagaaggcacatgtcaagtacgtcagttccacgagttccatctggtggtggaagtagtcagggactgttccgtggctatgcttcttccgaggcttccgaaagttccagaatgattaaaattctctgtagcttcggtggaaaaatattaccccgaccgagtgatggaaagctcaggtatgttggtggtgagacccatataattcggattagtagggatatttcctggcaggagcttaaacagaagacaacagccgtctgtaatcaacctcatgttatcaagtaccagttacctggtgaggatcttgatgcattgatctcggtttcaaatgatgaagatttgagaaatatgatggaagaatgtggtttacttgataatggggatgggtcccagaagcttaggatattccttgtttcctctattgaatttgatgatatgagtttcagcctgggtagtatggatagtgattctggaatccaatatgttgctgccatcaacgggatggatggaataactgcaaattcatctagtggccagggtttagtaaatacatccctgaatgaatctgatcagttcattaatctcaattttgatagtaggctgacaaactcaagcagagatagttcaaatttgcatgcagtgaatgcgtctactttcatgcgtccagagatgcacccaagaccaatgccatcagctctatacaatgataatacttcaaatttgcgctcttactatacccatgtgatgcataatttgcagggttctgattattccaacccagctaccagtgaaagatttcatgacattgaggttcagaggatgcataatttgcagggttctgattattctaacccagctaccagtgaaagatttcatgaaattgagggccagatatctattc

SEQ ID NO: 186375 - DNA, 795 bp, Zea Mays
cattgataggaatgatagagatgaagatcattcacggaagcgtttggatgatggcgataggagaggctctcgacaaagagagcgtggtgatgtggttttgaatcgccgtgaaagtgatgattctcttataaagagaaagaaggacgatgagaacttgcgtaggttgaagcctgaaaatgaagacatggtcgcgacacatggttataaagcaagggatgacagtaacagaagaaaaaaagagagggatgatggaattgatcagaaaagacgagatgatagtggtagactgcgggaaaaggatgatgatcgttatcatgtcaaacagaaggatggcaactggagacaaagagaaagggaggatagacagaggcccaagcaagaaaatacattaaccgttcagagggaagaaggaagaggaactggtcggggtagtcggatgatggatgataagttagtcagtggtggtaggaagaaggatgaaccaagatcttcattattaagcaaagacactcaagagcgtacaaggcaaaatgaaccttcgaggagaggtcagggtgtggaagaaaacaacatgcagaataaagggcgttttgatgacaattcaaacagtgagaggaactccaggcaagaaaaacaaaacaataatcgtctatctggcagttctgacgctcgccatgcaggcagagataagcatagggagagcacaaggaagggcagaggttccgagcttgctgagcatgatctccacagatcgagcaaaaggaggtgtgaagaccatgaaagccatcgcagtgg

SEQ ID NO: 186376 - DNA, 822 bp, Zea Mays
gtcccatctgcatctccgccttcaacaggaccagctccaacaccagcagcatcaaaaccagctccaacaccagcacccaccacttcaaattcaacgcccccagcaccagcaccctcatttccttcaagatctcctcccccgcctaaaacaacctcaaactcttctgaaggatcaactacccgagatagcacttcaccatctaagaaacacagtacatcaaccctcaagattgttggctttgttcttgccggagtagtgctgtttattatcatagtcctcctagtattattttgtctatccaagtaccaagagagacggtcgagatatgatcataacagaagtcagcaggcaagggtgcatcatagggttgaaccgcaaatcaagccacctccagtgcaacaaagcaatgatcttaaaaaaggtaaacctttcatcccagtattatatagctttgtgtttatttttggttttcctgtaattggtttatttgataggttcaggtgaggtacttgatagaaggggccatgaactaagttcatcaacggcaggtataaagtctttatgacaaagtgcatctaagttatattcactaactacaaatgtctgaaagtttgcgtgctattgtttacagctctcgcaaagaaatctcctgaaaaccaaaaggagcatgtaattaattttgatcgaacagattcagatctgtttcctgtttctctaccaccaccacctcctccacctccattacccccaattgaaagagttattgcaaatcccattgttccaccagaaaagcgatatagtcctccaccaaagacaagtagc

SEQ ID NO: 186377 - DNA, 541 bp, Zea Mays
gtgcaatccccattagtgattaaaaggagtacagtgagccaggcacttttcaacagaagttgggtctctgatatcaaggcagccctaacagtacaggtgttgatggaatatctcctcatttgggaactggtggagagcatggtgctacagcctggtaccccagatcaatactcctagaagctctctttttctggacagtacaatagtaaattagcttacaatactatgtttattggcaccatcacattctctccttagaagcagatttggaagacttaggctcctgcaaactgcaagtttttatctgactagccatcaatatccattgctagacatcagatcgcttggccaagcgagggcttccacagcagcctgcctatcccctttgtgatcaaggtatggaaactatcaagtatcaaccccatgcttgcttcctgcttgtttgctagggagatctagaatgtagtgctccaaagattaattcctgttgtaagaccacttggggctgacagttgcttctgttagagtggacgtgctgacc

SEQ ID NO: 186378 - DNA, 580 bp, Zea Mays
cgcccgcgttcctcccgctggggtacgagtacggcgacgcggacgcggtggaccacatgccccatcgcttggagacgggcgagatggacttcttcaagagagagaagagggagaggaaagctgacgccgccgccccggacgacctcggcatcaaggaagaagacatcaccatcaacgtaatccgttcgatttcgttattgctccctctagcctgtcggatcggcagttttcctacgttttcttgacgcgcgcggccggttcggctcggctaaatttcagatgggtctgcaccacgtcggcagatggaagaacaggagcgaagagtccgtcgacgagggcgtctcctccaacgacggggatacgagggagatgaaaactgaggtgaaggaaaacaatatcaccagcggagccgtgatccatgcataatttgcatagtttctgctacttgactgtaaatagtctcttgtttgtactgaataaaatatcatatctatgtgatcagctggcactgacaaaatccgagcttggacgcctgaacgaagagaacaagcagctcaagaacattctcaccaggctgacc

SEQ ID NO: 186379 - DNA, 350 bp, Zea Mays
aacagatccacatcgccccccctttctttcctgggctgctgaccctgactcctccctccgcatagagggaaaaaaggaataccaggcagcgcaggcgcgcggaacggaagagcaccaaacgccagcagcagcagcagcgaggcaaaataataaaaagtcggaggcatcaaatccaaaaggtttttattagcatggaagcgaaatccaaacccctgaccaattcgggccgagcagcaggcggaggaggagttgcatccgtggcctcccgtgttgctcctcctcgcgcccgcgtccctattacttctccgcgtccgtgctggggcgcggcgcgcccaccgatcctgttctac

SEQ ID NO: 186380 - DNA, 477 bp, Zea Mays
tccgtgaaaagctgtggttctttgtgtgtcttttcggtttttgtgtaacgaaaccaaaagacgagttagtttctctgtgcctgaggatgtcaagagggtttgccaaccatctatcctaattaatggagtacgagaagtttgcggagtatgagcagaagtactcagaggatgcagcaaccaaacattgaaaagtatcatggggagttgcctgcctgctgggctgatgcccttcctgtaagtccattagcacctcttgctcctcgtgttagagctgacatgcagaggatggcttgtaatgtcattacgcttgatcattcacatcttccagcagctcagtttggcaacttccagaagcatacgcctgaggtgcgcaacgtctgcttcggagcgagggagcatggcatgggcggcatttgcaacggtgggcacagcccagggctccgtttcatggccaacgactgctatgcaagcagtcct

SEQ ID NO: 186381 - DNA, 309 bp, Zea Mays
tatccgggagcagggaaattctcgtgcaacaggcaaccttgaggcagctccaatgttttatagcccccatcaagacagtggatccaacaaatctagtctaggtgcaagttcaggaactcctacaaactatgtggcggaaccaagagctgggaacacagcagtgatgacacaatttaattcgactcttcctgccagaaaacctgcagttcaggcaactgcatctccggatacaggtgtgccggttcaacccaccgtgattcctttaccagtgtccagtgcacctgctccagatggagtatttgtcggtca

SEQ ID NO: 186382 - DNA, 487 bp, Zea Mays
tgctgaaaagaggtttgtttatatgcaggagctccgtgattatatttctgtgatgtgtgacttcttgaacgacaaggcatttttaatagaggagctggaggaaaacatacagcaattgcatgaaaaacgagctttggctatttctgagaggcgtgcggctgacctagctgatgaatcaggtgtaatcgaagctgctgtaagtgctgcagtatctatccttagcaaaggatcaagctcaacttgcctatctgctgcatcaaatgctgcccaagcagcagctgctgctgctaggggaagttccaacctccaacctgagttggatgagtttggcagagatatcaacatgcagaagcgtatggatcttaagcgcagggaagaggacagaagacgaaggaaaactcagtcagagaccaagagattggcatctgcagcgaagaataaggacatcgagaagatcgaaggagagctaagcactgatgaaagcgac

SEQ ID NO: 186383 - DNA, 490 bp, Zea Mays
gtggagtacttgtgtaagaaactgcgaagagcatccaaggtgcaaactgctaagaatcctgggaaaactgatggtgaagacaatggtccatgcccaaaagtagatgaaaaggaaatttttgaagcatatgatattgacagagatgaacccgagcaccgatatgacatgttttcctcgtatgatgacgatggtatgtatgatgacgatggtatgaatgttgagacaaatattgattcttctgacaacgaaacggagagcgaaatggatactgaaaccgatgacgaagagtctgttactattgaaactacagaagaggatgttccagtattagcatttttgaaagatgctgagagctcatctgcgttgaaggcatcatttggagctttgtcgggaataccaaatgtgctggaaagtgtcgaggaattaagtgatgctaaatgtgaagaaaagaccagcacttcacttcgttgttttagtaaatgcacagaac

SEQ ID NO: 186384 - DNA, 365 bp, Zea Mays
agaatggtgaactcccaactgatgctggtgttatcccaagggctgtaaggcaaatctttgacattctcgagtctcagtgcgcagagtatagcatgaaagtcacctttcttgagctttacaatgaagaaatcactgatctgttggcacctgaagaaccaaaattccctgttcttgaagacaagacgaaaaaacctattgcccttatggaagatggaaagggatttgtttttgtgagaggtcttgaagaagaagttgtgtactcagctggcgaaatctacaagattcttgacaagggttctgcaaagaggcgtactgcagaaacattgctgaacaagcaaagtagtaggtcacactctatattctca

SEQ ID NO: 186385 - DNA, 657 bp, Zea Mays
accgagatctggtcctagccaccgtcatgagcagggaagcaagaaccaaggaatgcttcttcaatctctgtagcagccagcatttgaggtcagtaagagatctaccatcccttgccgattccagttgcaacatcacttctctagccaactcaagttgcaacttgaaattgcccactttcttgtcactccatcgctgcagccccttggctgtagctttgaacttgtcctgagcagggaagcaagaaccaaggaatgcttcttcaatctctgtagcagccagcattcgaggtcagtaagagatctaccatcccttgccgattccagttgcaacatcacttctctagccaactcaagttgcaacttgaaatttcccactttcttgtcactccatcactgcagccccttggctgtagctttgaacttgagggagagggatttgaggggacaagaaatattctggacagagttccaagcattagaaaccacgtcttgaaagccctcaaattttggccaaaatgactcaaaatgaaatctcctcttgccccgatgattatccttcaatccaagaaggagaggacaatgatcggagtcctctgaagaagaacattgaagcaagaaatcttggaatttctgctcccactccaaggaacagaacac

SEQ ID NO: 186386 - DNA, 399 bp, Zea Mays
atgctgaatttgttgaccaggaaacccattgagcatgacttgtgtggtggatgaagcaagaagaccacaaaccatgtccctccagatctgtccaaacccaatctgctgcatgacatcaattaaaaagggccaggagaccgagtcaaaggccttggtgatgtcaagtttgaggagcagccgagataatctatgttgatgaaacagtcttgttgtctgttgcactaacatgaagttgtcctggatgaatcgccccttaatgaatgcactttgatttggggaaaccaattcattcagtcttggtgcaagtcggtttgcgagaattttcgtaatgagttttgcaatgctgtggaccaggctaattggcctgaaatccttaacttgctcagccccatctctttt

SEQ ID NO: 186387 - DNA, 504 bp, Zea Mays
caagggatggccgaggtggccgggagtctagagaggacgtcgtggctgaggcgacggtgccaagtggaggcaagggcgtagggtggtagcatgggcggaggaaggtggggtggggaagcgaatgggatataaggggctggagctgtcgcatcaagcaaccacaacatgagtggtaagatcccgaatggtgagcccccaaggatcgagttccatagagcaacgattgtcagtagtgaagcgacggactgagctaaggttctggatgatgttgggagccacaaggatgttgttgaggtacaaaggactatgaaggactgtgtcatcaacggaggtgacaggcagagtcgacccattaccgacaatgatggaggaaggagaggtggggttatggggatggggtaaagtgacagttttggtgtcaggagtggtgtggaacgaggcgccgttgtcggcaacccagtcggtgggaggaaggggcgacaaagatatggaaaaggatgagag

SEQ ID NO: 186388 - DNA, 448 bp, Zea Mays
gcaaattatgaatatatatattaagactttaagagtaataataggtaaaaaaacataaataagatttataattttttccggattgtatgatctttagtaatgccactgaggcctctgatcactgtcccttgactctcaaactcaagatggatcttagggggaagcgcagatttcattttgaaagtttttggcttaagctccctgggttccttgaggaggttgctgcctcctggaatcagccagctcattgttactgtcctcttgagaaagtgtccatgaagctgaagagattgtccaaaagactgcagtcttgggggcacaaaatggtgggtaatgttgggactcaattgggcttggctcgcgaggtgttgcacagactggagattgctcaggatattaggaccctggctgtagaagaggtttggttgctgcgaaaactgaaacaaca

SEQ ID NO: 186389 - DNA, 365 bp, Zea Mays
agatgtgaggaaacatttttgagaggactggatgatggtgttgtgctacccacagtccaatctctctaccttggacgatttacacctaccaaaaattatttgtcaaaattattcaaatgttttccagcactttcttctttgcatgtgatggcatcaccatcagatgaggacaacgaggaagtggtactgcattttccaccctctagctcgctgagagatgtcaacttcacagggtgtaagaatctgatcctacccatggaggaaggagctggattctgtggcctctcgtcgctcgagtcagtgaccatacacaaatgtgacaggttattctctcgatggtccatcggaggacgagcaactcagac

SEQ ID NO: 186390 - DNA, 552 bp, Zea Mays
ccgactttcactgactatgttaaaatcatggagtcggtgaagttggacaggagcaagaatttacatggcgccgatggccagagtttgaggagaaggttcgcgggtgatggccgacaaaggaataggaggtctggtgatgcaaggaataaatcatttgaaaggaatcaggggcctcagagggacttggcgaaggatgagaatcagaaggatgttacaggctttgtggataaaagagcaactggtcatgtaaaaagtagcaatcgcaggcaaggggaggttgaagactatgcacagagaagaataattcgtggtggtacaagaggaaatggagacaatgggcagttctcatcacctgtgaaggctaaagatactaggggtagtatgtctgttcataggttggtgacgaacaaacagactcagtcagttgcagggaacgatttacaagggcgagcaacttatactccatctcggacttctgcccttccaaatagcagtattccatcaaagaatgctaaggttcaaatgagaaaatacgactatactatgacaagt

SEQ ID NO: 186391 - DNA, 1384 bp, Zea Mays
gctgggaaaggcgaacaagtcagagatatatgtttggatacactatctgctgttgctgccaaagtgcagtgggaacactatagaacaatattgaagagatgcttccgagaattaaaccttagacctgataagcagaagatcatattgaggctgatttgttccatattagatgcattccatttcatgaaacctgcaaatgatgcctcaggaaattctgatgctttgagtgaagatattgattcttcccttacattctctttggtcacagtctcttctgataagcaacagtacatgcaaaaggtagtgtttccacaggttcaaaagttgttaggatcagatccagagaaagtcaacgtcaacataaacctggtagcactgaaaatacttaagttgctaccggtggattattttgagtcccaactttcaagcatcattcatcgaatctgtaacttcctcaagaatcgtcttgaaagcatacgtgatgaagctaggtctgctttagctgcttctgttaaggaactggggattgggtatttgcagtttgtggtcaagatattaagagctatacttaaaagaggttttgagttacatgttctgggctacacacttcattatttgttgtcaaaaaacattactgctgatatgtatggtaggcttgactactgtttagaagatttgttggcagtggttgacagtgatttacttggagatgttgcagaacaaaaggaagttgaaaaacttgcctccaaaatgaaagagacaaagaagagaatgtcgtttgagactcttaagctgattgctcaaagtattacattcaagaccgatttactgaagaagataatctcacctgtttctttacatcttcagaagcaacttactccaaagttgaaaaccagacttgagatgatgctacacaacatagccttagggattgagtgcaactcatctactgaaacatcaaacttgtttatcttcgtatattgtcttattgaggatactattacaggaagcagatctgaatgcaaagagaatacacaatctagtcctgatcaagacagtactgtaagaaagaccttcctgggactaggtgagagtggatcacagaattcttatatacttaccaagtttgcacttgacttacttcgtaatcgtctgaagagcatcaagcttgacaaggaagatgaacaactcgtgaagatgttggatccttttgttgaccttctgcgaaagtgtatgagttcgaaacatgcaagtgtcctctcagccacatttagatgttttgccttgttggtgaaacttccgttgccatctctgagggacaatgcaattactataaaaaatgtacttatggagattttacagagagctggaaactccaatggtc

SEQ ID NO: 186392 - DNA, 360 bp, Zea Mays
gtttctacaaggtttgttgggtaacaatcaaagctgatgttatggcagcgatctcttgtgtttgggctcgaaaatctagaaacatggggctgctcaattcagcgtttatcactcttttgcctaaggttgagggtgcagcccaagtgaaagattttcgtccaatcagccttgtccatagtttcacaaagttagtaacaaagatgatggccaacagattggctcggcatttgaatgatatggtttctccgaatcaaacaacgttcattaagaaaagatttatcttagacaatttcatgcttgtgcagcacactgcaaggtttcttcatcgtcaaaggcaagcccgcattcttttcaagctcg

SEQ ID NO: 186393 - DNA, 452 bp, Zea Mays
agatttattcaggacatctgttcaaggtacactgatcatacatcatggagctctgatgtgattcaaaggaaggcatatgcagaagaaagaaaatggcctggattttctgataaagggtcagatataaatgaagccaatcagactacactattcatcgagcaggccctacaaaaccttggcattgaacaaaattatagggataaggaggaagacataacaataacatgtttacagaatgaacaatcatcatctatgttctgttccacaattacaaccgatcattgtagtattgacagatacccttttaagaatttgcgtgaggcagttgatgtactctttctacacggagcatcagacatggtgattgcaaagcaagctattgtatccttcagtttttttattttatcttgtactacctttggtctcttttacttgtcgcttgggatatcatg

SEQ ID NO: 186394 - DNA, 369 bp, Zea Mays
atggactttgattgcacaccagctgtgaccgtggctaccttattgcttcaatcgctccaaaggattcctgatgttgctgaatcccgctctcgacaacttataccgctatttctcaactttatgggctatgatgatagcagcatctttaggtatttagatgctaaactatcttacttatacaatttcgagttttggaagttcgatccttttttgtacattttctgaactctgacttatgcagtgctgattcatatatgcctgaaaaatgtaaaggcaaacaatggaaagcgattctaaaagaatggttaaacttattgaggttaatgcacaatgcaagatcgttatatcagggcaattttctccaggaag

SEQ ID NO: 186395 - DNA, 371 bp, Zea Mays
cgtgtacacacttctctggactcttgagctggaaccttgaatgcttgatcaatccttgtagcggtgacgggatgtgttgatgtgctcctgcactgcgcaagctgcaactagtgcgcgagcgcgatgcttggcctgaaggctggagccttggtgcggcgcgacctgcactgcgcaagtctgcaactagtgcgttgtgcgcgacgcttggcctggagccttggtgcggcggcgagggggtgttcgtccggatctcctggacgctaggacggcggcccgacgacgagatgaacgaaaggcagagaaagcggctacgaccgtacggggaaagcggtaggaagctagggttccagtcttccggagcacaccgttca

SEQ ID NO: 186396 - DNA, 624 bp, Zea Mays
ttgctgcttatcacctttctcttgaaacatcattctttgcagatgaaggtgcaacacttcctaaattgccctcgagacatgtggtagttgatccagatacaaggaattgtacaaatagcaattcagctgcattgaccaatgttggtatgcctcatggacgtaaatcagaacatgacaaactctcacagactgctatggtcaacattatgtttgaaaatacccctgtgtcacctagttcattgccatcgaatggagaaggccacatgtttgtgggtgcatgtcagcataaagaaactgaatattctgttgatcataagaactcttgtgaacattgtgtatcccgtgcaactggttcatgcaacgggtatgaaacatctttatgttcatcagataatgattcaatgacacagaatcaaaatttgcagaactctgcaaagcttacatcaaatgctcaccaatatgagtttccagcaaaggaatgtcaacaagtagaccactgggatagacaaccacatgatgatcaatcagtagatcagcgggacctgaataaattttctggtgaatactttcctggttctgacaatcatcagagcatattagtttcgttgtccagtacgtgtatcc

SEQ ID NO: 186397 - DNA, 566 bp, Zea Mays
gttaatttctgctggtggatctggcattcataaacgtacaaaatcaacacattcattatctcctccgatccaatggggtgggcagaggcctcagaagatatcccgttcagcaaggaagtcaaatttagtccctataatcactactgatagtgcactggtaccaggttcgctggacagtcctgtcaatgaagattgtgcaggtttaccgaggcgtgcatctgtaaatagccttcaacaaacaaaacgaggagatcatgggctctcaactggacctgaaggcaatgagcctgtagttgctgagaaaaagctaagggacaagggcaaaagggctggtgaactggatgatgggcatggctctggttttcagaagattgctatgcttgggcatccttccaaaaggaataagttgcctgctgatgaggatattggagatgctttaaggagacaagcaagagttgtcccgggttttactctgaccaggcctgggactcctgtatccattgacaagcttgaaaatgctccgattacaaaacaaagaagtgtgaggacagtctcagagagaactg

SEQ ID NO: 186398 - DNA, 352 bp, Zea Mays
atgccatcccttgcgccctaacaattttaaacaatggtcagagaagtgaaacacaaaatagtacaactatttattggactgggcaattactgattatgtgctgagacaaagctgacactcgatacttctgtagcaagcaatcctattaagtgctctataatttaccactgtatttccaatattccacaagaaccttaggaccaagaaccctacttcgtggtcagcagatgcgaaggaagaggaggtacctggcaatcgactggaccgacaaggtgaagaccgagtcaaacgagaactgcaaccggcgatgcgacggctaaacctcaccaaagagccaccaccgatccagcaa

SEQ ID NO: 186399 - DNA, 781 bp, Zea Mays
tgcatgaaatgctaaggttcatccggataatttcctttgtgttgttgcgaatctgaacttccatatgggtcatttcatgagcagatataggatctttgcacctcagaacattgccagaatcctttggagaatcgacattgaccacagttccattcgtaacaagcttaaagctaaacatcaggggatctggcaacagtatgtccattatagatgcttgtagtgccgtctggatagcatctttaatattcagctcacctgagctatttctcccagagtgccatttcacttttatttttgaaatcaagttgttgatagacgcatttagctctgccttggcattcctttctgctatggcggcggccctggatccaagaggttcatcactactacttgcctttacaaagaaggaagcatcaagaacaggcaatttgaagttctcaagaggtatgagaactctggcagagtagtcccgatcaattctagttttgtgacaagcagcatccccgtctgaaattacttcttggtccacatccgtgtcatccaaatgcacagcaacatcaacataaaaaacgacatcagtaggattgaaaagctcaagttccagaaggcggagcccccagcttcctttatagggatcaaccttcaataagtttatgtctttgccactgacaggttttaagtgtgtttcagtaaatcgagcaggtatttccatggacaacaggcgtgctcttacaagacgcatgccctgcacaacacagatattcaagggaacaactaggcg

SEQ ID NO: 186400 - DNA, 456 bp, Zea Mays
gtgctgtcttctgtccctatctatcttatgcttgcattagaactccctaaatgggtttttaaggcaatcgataagaggagacgaggctttctttggaaggggcaaggtgatgcaaatggaggtaactgtctcgtgtcctgggaagctgtccagcgacctctcaagtatggtggtctgggtattctcaacctggagatgtttggttgggccttacgtgccaggtggctttggttacagaagactgacgcatcaaggccatgggctggtctccctatccgagtgcaccgtaatgcaaaggccctcgttgatgtggctattacctcagtggtaggcagtggtgaatctgtgaagttctggtctgatcgttggctccttggtaaaactgtggctgaacactatccaacccttatccaggtgatttctagaagggctttaaagcgaagaacagtacccgag

SEQ ID NO: 186401 - DNA, 501 bp, Zea Mays
caacaagttcaggaatgttcttcctaatcctttcctattagcttgttgtggttgattacctttcgaagcattaaacatccttaaacaacagtttggcagatggatcctactcccttatgtgtttgcaccttgaattgacgtggttcattgggttgcctttttggctgaaaggcagggtactgttgaatgatgtatcaactttaccgttaatatgtttattggatgagtacttatattggactaataaaagtggctggtaggtagttaaagtaaacagctgcatgtttctattgagtttgcctatttgcataggattatatatttcttttgcaaaaccgttattctagttttcttcatccgctggtttattatacacttgggttgatcttgcaggtttgacatgccttttaacatttggttttgtgatacactgcccatgtatccagaaggcaaactagattctgatgtatgcatattaaaattgccgatatcaaataaatc

SEQ ID NO: 186402 - DNA, 516 bp, Zea Mays
cagcacctttaggtggcgcgtctcgtcgtccttgcttcccaagagaccgtcgccttacatctatcgctcgctgccttattgcctgcacctccgtgctgtgctgtactgcacctccgtgctgcgctccggtacgtcctcctctcatccttgcgtcgtgtcaattatattgcgatcctgtattcttaaccagatcagttcatcagcctagcttctggtcattttttccgcgttcataatgtgttctttttcggttttatatatctccaactggatggattccccgtgcagaggctgctgctgctgcagagcaagtgcttctttcctcacaaattaaagcgtatagtcctgtgcgacgcgtgtgccgacggccggagcaaggaatagatctcgggtcctggtcacgggaaggtatcttggaagagctggatacaaggaaagttgtgagggcggccgccgccggccttggaattagttcgttctttcaactggagctatactagtaggagggcatttaag

SEQ ID NO: 186403 - DNA, 289 bp, Zea Mays
cgacaggagtcacgtgctggcgattgtgtacctacaggtcccatgaggccataatccgtctctctcacgcgccaattgatagggaaggggaaacagaagagggcacacacctggttcatgggggtgggcgctgctagagtcttgctgctccacctcttctgctccattgataacacttctctcctttgatttgagtctcccttcatcttctccattaatttgtgccttctctggtcctcgtatgctgattgattcatggctcttttccccttctctgttggttactgtc

SEQ ID NO: 186404 - DNA, 1668 bp, Zea Mays
cgaaagtgaacattggcaatgttcttgattcttgtggcgactgggctggtgcattgcaagcttacgaagaaggctaccggtattatcttgatgtcttcctgtccaaaagtcagaagattttaagtaaacttgcatgctgtgatcttaagtaaatggccatgaacaatacataggacacgacattggaggctttattcactaacatttctattaggcatttgagaacccatttgttatagattcttttattggaaagaagtacagtagacgccaaaagaaacagataagtcattaggaggaaggttggttctattatttaggagatgcagctttaggcgccaggataaggtgcagtttgttaggagatgttagtgctataatttaggagatggagttgttagtttgttagggaggcgctatgatataaggtgccttagattgtattaggaaatcatcgaaagaagatctcccaacagtgggcgatcaccttcggccatcctggcctcccagggtgatcacagctctgctcctccatatttgttgtgttccctcctcaactcctctctccttggcgcactccaagaaggagaaggcagcccccccccccccccccaacaccatttcttgtattaatgaaaactatacttttttaaagtttgcgatttagaaatgagaaattgtgaagtgctaatatcttgattgagctgcatctttagttttggattgcacccctatcttctagggaaacactttatatatcaagggattgagcttgtcctaaacatccagcatctttgatacttttagttttaacatcagctcaactgtattgcagagtttatttgtttaatcccatattgccgttttagtttttgtgtcacattattgtgttgggtctgcgcccgaccgcccgtgccacctatctttctaataattaactgctcttgtccttaacagcatgatgcttccatctttagtttctgatgctcacatcatatcatatgcaggattgctgtggaagcagacctacctaatgtgcaactttctgccctcgagaacatgcattacagtcatatggtcagatttgataatatcgaagaagccaagtaagttactaagacagattttgcacaaaagagttttattttatgcaaactaaaaggatttccttttcaggaaaatgcaggaaaaaatagacaatctgaagcaaacactgaatcaatgtgaagcaagggatactgttagtgactactgctcagaaactgacactgaaggtggttgcacatctgataacacgcttgatgctcagaatgaccatggacaggctgcaaataactacgaggaacctgatgatgatgttacgcttgcttcactcgttcagaggagtgggagctcatccaagattaaggtacccaagatacggaattcttctaagaagtttgatgaactatgtgatgtgactgaagacatacataattcttctaagaaggttgatgaactaggtgatatggctgaaggcactagggcagttttaagtagatcacgttctgatcactctgttggcagaaaacgtgtccgtgtgatcttatcagatgatgaatccgacgagaatcatgaaaacgttcagtttaaaaagacatcaactagtcctgcagatagtatgtcagt

SEQ ID NO: 186405 - DNA, 727 bp, Zea Mays
gaaaaaaagaggaaagagaagctgctgaagctttaaaacgtgaggaggagcttcgtgaagccaaaagacaacaacagaggctaaactttctgctgtcacaaacggagctttatagtcatttcatgcagaacaaggctggtggctcagcgccacctgatgaggaagatgtccctgatgaagatgaggaagaagatcctgaagaagctcaattgaaaagagaggccttgagggcagctcagcatgccgtttctcaacaaaagatgaggactaatgcatttgatagtgaaactgtgaggcttcgtcaaacttctgagtctgttcttccaactgatgattcatctagcatggatcctagtaagattgatctattacacccgtaagttctgcttgaaaatttctttatcatttacaacattataaatgagttctctagaactgattgatttggtactatcttatttttagttcaacaatgcctgagaagtcatctgtgcaaacaccagagttgtttaagggtgtattaaaagaatatcagttaaaaggcttacaatggctggttaattgttatgaacaggtaaattgttaatgttaaagaaacatacattttgaccatttagtatgagcactactctttgatttactttaaatttttggaattgcaggggttgaatggcattcttgctgatgagatgggtcttggcaaaactgttcaggctatggcattcct

SEQ ID NO: 186406 - DNA, 272 bp, Zea Mays
aaataaggtaggagtggtttgaaccaaaatgcacccttcagccttgtagttggcaccattgtcagttacaacctatgacttatccctgccaatcttgtcaattctcttgtctagtagttctgcaagcatgcatcatgagactcactcgatgcatccaccgactctaaaaagaatgtacctttagggctgttaactaggaagttgatcaaacggtgaccctcctgtctgtccatccatctgacatgagggtgcagccatattgactccatgca

SEQ ID NO: 186407 - DNA, 694 bp, Zea Mays
tgcttgaaaaccgtgctgtactgagagccatgtaagattatttactaacaataatggcatgcactctcagccttctggctatgtgatcatctgctgatacttctctgccctctaaccatttttttcagggctgaatttggcgttgttctggtttacttctatatctgtgaccgcacagacatatttccagaaagcaagaaggtaataaggttactcctgctagttactcttgacactcagcaccgcagtaagccacacatgtaaactacagtgggtgttgcttatctaaattttgactgtataatgtttctgatcactgaagctgctatttttatttcttattttatgatctattatggcctgtttcttatatgttctttatgtcttttacttgcattgtaatcctttttttttctttgacagagctacaatcgtgatctgttcctgtttctatacattcttctcatcatagcatcaacacttacttcactaaagaagcatcatgaaaaatcagcattttcaggaaagtctatactctatcttaatcgccaccaaactgaggaatggaaagggtggatgcaggttagtgattttgcttcacttatttatttttcttgatgttgtgatgctttggtatctatatcataagagaattttagaggtggcgccgagtatgatgacatgttgatatggc

SEQ ID NO: 186408 - DNA, 450 bp, Zea Mays
cctgaacgtactgcttttgttgatcaatattattttgttgcaagagcatgccagctgaagtctggagcctttgttgcattcccaattgttgctgcgtttgattaggctgagactggaactgcgacatcatatgttgttgaggttgctgaagctgattctgctgagactgaggttgcatcaaacccattgatgtctgctgagcatgctgttgctgctgtggttgctgaattggcttttgttgctgtaacatatgcatacggacatttggcacggttccaagaagctgctgctgctgctgatttagacttgacacatttccctggtttgccaattgttgtggctggtgcaagggcatagattgctggttcatcatctgctgcgtttgatgcatattcaaaagattagttgactgaactggtagcctttgttgctgttgcatctccacagcac

SEQ ID NO: 186409 - DNA, 1234 bp, Zea Mays
aaggtaaattggtggagtgcggttatctgaaatcaaatccttactgcaaaatgcaaaaccaaaaaacacacacagcacttgtcatgtgactcaccctgcaccgagaagcaatatcccaacaacaagcttcggagcttgtttttgcactgatttcattaaccctcggaagacagatgtaggtgtaaactctccatcaactttggaggagaagaaagatgccgagaagaaacgggatgatctcttcaccagtgcttttggagcactcagtggttccttggtgtgctcctttcgttccatttcttgcttcttcccttgtttcgacttatctgaatcagactcagcttctttctgaggctcaacagacatcttattactgctttcttcatcatatatttcacgggatggttcaagctgctcaaagccctgaacagtcaagtcaccgaccattaggcgctcgatacttgacacctcatcccttacataaacatcatcagtgacatcgctgctatactcgtacccttcagaaacgctgtcttcttcagtgcttctctgctcttcagcaggtgacggtagctccaccacggtatcaatcgaggctatggccttctccgctttcagcagcaccatttccgcatcgttgacacgctgtgaggcttccatctcaagagccaccgcctgctcagccagcaccattatattggcaacatcttcttcggcgttggacgcatccatctgggccttcccagcgagatccgtcagcctatcaacctccttctgcagctccattttcttgtcctggacacgactcagctcctccgcgcaccgcgacagggctgcccgacaatccttaatctcttcctgtgcagacaggagggcctcctgctccatgccttcgatgctaacctccgtcgggcctaccgagccccggttggcctccagcgcctccgcggccagctgcagcctcgcctcggccatggacagcgccatggtagccttctggacggcctccttggcgtccgcctccttgctgatgatctcctgcacggtggctacggccgcgcacacatccctctgggcgccgtcggcgcggtccttgaacgcgatggccgactcggatatccgctgcgccttctcctcgaacatggtgctgttgaccctggccacctccagctcgttcctggacctctgcagcatctccctgaggccgtcgacgtcggcgaggcccctgtcgtcg

SEQ ID NO: 186410 - DNA, 1061 bp, Zea Mays
cattgatagagaccacgagctgttctagaagtcaccgcgctgcagcctgcagctcaggggggcctgttccctggatctcgccatcgccattgccgctgccccccacctactactcctgctcctagtcctacacccctcctactccaatccaagaggtgctttggatcgcattgcttcgtgctagagttcggtggtcagcctgcgtgtgggacagtggtactccctccctgcttcttgattcgtctctgtggttgtgtttttagagccactgctttccccccttatcttcatctggtagagtgggtttgatgtggcttcctgcgagaaagatctcactttgatagtttgatgtcttcatgatctgtctgaggtttttcggcttgatttcggcagctgattaagcacccgcagataccactttttttttcttcgagtatccgctcttgttggactggatttctgaagtgctcgcagattgtctgtttatttatatcgtgttgcctccttgtttctgattattccaatcttctggacaattttttcccttccgtagagcgcgaaagatctcattttgatctgctaaacagctgcaattgtatcccaatttgcttcagtctccaccactggatatctcattggggtttctccaagatttgcatctgcatagcgtttgtctcgatgctgttgtctgttctgcatttgctcctagtgtccggcatttgtctgtctcttcatgctgctcccatgatctaggccaaaatttgacaactggcccatccaattgacgtctttttatttattcttatacattgtctggctttattttcagttcaactctttgaggatttggcaactgtattttaagcattaagcttcaacgcagaatttgaaattggcggggctgttgttcaaagaattggagatggacaggaagaattgtcctccatcgccatcgccaagatcgaccgagaagtctggaagagaattgagatctggggaggccaatgtcagcacaaataccaatagcaacctcatcgcaaaaggtgacaaggagaaaggag

SEQ ID NO: 186411 - DNA, 326 bp, Zea Mays
cacaaattgaggatgtcaacagatactactttgaggatggtgaagagaaaccagtttgtttcagtatcttgcctttccagtttggtgaggacgatagcgaggcagttttcctcagaaaggatgttttcttgtgtggatttgtggataaaaatcttcctgtgtacaaggaggtggtagcttggaagataaggcttgacagtgagcatcccaacatctatgtgctttctattgagcacaagtggataaagctgttgaaaccacgaaaatgctatggagacattgttcgatcaacattgattacggtgcaaatgctccacttttttggg

SEQ ID NO: 186412 - DNA, 380 bp, Zea Mays
cgccgctccctcacctcctctccctgccccagcccggagaccagcacaagcacccgctccgagtccaacttccccgccgccaccgctcctacaacccccgccccgcaatcccgccgctgcccatccacgatcgccgcctccggggctggcgaaagccagtaccatccgagtgccgccgcccctcactgcctccgatccccgctgccgccgcaatccgcagactcagctggccaccatatccctcctcccctcgcacacctcttcctcgccgctcgtcgtcccttcccctccgacgccgaccagaaccgaaattcaacaactccctgggccctggcttccttcacccttttcccttctctctcctcgctgttgctttcgtg

SEQ ID NO: 186413 - DNA, 271 bp, Zea Mays
taccgatggagctctcaaaacttgacagcctgcgtttcttcaatgtctctcacaattcgctgtcagggagccttcccaatagtcgcttctttgacagcatcccttattctttcctctccgataatgctggcctttgcagttcacagaagaacagttcctgcaatggtgtcatgccaaagccaattgttttcaaccctaattcttcgtcagacccctggatggatgttgccccaagttccccaagcaaccggcaccagaggaagatgatatt

SEQ ID NO: 186414 - DNA, 899 bp, Zea Mays
tcccttcagcaagtttcacgcatatcctctgttcactgtgaacatcagaatccattgtgatctgggtatcatactccctccaacctctatcacccactgtaacaagaacatttgcaatgcaagtcaatagctctggactgctatgcccacttctagaactatcaggaagtttttttgcatcacttgtcttaacactgacatgagattgtatcttgcggaaatgatctttgttttttaagccaagttcctcacttctaggagaacctgagtatgaaacttgacttcgtggcttcttagaaccactagcgaagccagtcaacatgtggtcttctggcagtaactttgaaccatctccaaaagcacgtgatatagacgtaaaccggttccgatgggaagtagttctgggggcagttggtgtaacacgaccaattggatgttcattcaattcctgaaccaagttagatataggatgcttttctttttcatctttgtcaagaggtttatcatttgttgcatcaattgctttgtcttgaggaatattgatggaaatacgatcctctgcaaacttctgtgaagagcaaataacactaaggttggaggaacatggcctatcagcaccaatacaaggctcattttgatctcgaaactttatgtcaattatattgcatcatcaatactgttgtcattacattctgggcttatattcctttcagtaatcttgggttccctactagtagagctagatggatttgcacaactagcagagaccatatccaatggactataaggtgatgaaccaagattaagtgaacaaacttgaagtggagcatgacaaactgtatcagatgcatgttctgttaccaactgctgatgatcctcatccaaagcacatgacatgg

SEQ ID NO: 186415 - DNA, 404 bp, Zea Mays
gtaggtttaagaataaaaattgggctggagcctggaggtcaccacacctatttgcaacgtgttccaagcgtgtcactactggtatcaccaaagctctcgtgagggcatagatagttgaactacgtttagaagatgatctacagaatagcttaatgacttttgacatggatagtatagctaccatgtgatgatgtgaatggggttttcttcacgttagagatgtccgacacgtttgtgatctttgcattcttcaactcatgcattcatgtccaaatgctacctcgtatgtcgttgtcactgccagcataggctacgacctgtcaccttaattaggtctctctagttctgtcagggacaggcaaaccttctcccaggacccttaatcgctagttgagacaaattaa

SEQ ID NO: 186416 - DNA, 382 bp, Zea Mays
cttgaatggtcgttgcggcgctgtactgactgctgttggaatttgtgggtgtggtgctgggacaggtactgatgggcgatggggctgtcgcagagccttgttgggtgttgatgttggatggatgtctagggcctaggatctcctttcatatgctcgcgctaagctcagagcttgattaaggtctcgtggcgccataagctccacatcgatcttgatccgatccggtagttctgcagtgaacaactgcacctgctgctcttgggagagaggtgttgtttgggctagcagatcccaaaacctttcctggtaatcatccactgtcgtgtgaaagggtagtcgtgccagttcacccaatggattgctgcgaaatggcggtccaaac

SEQ ID NO: 186417 - DNA, 718 bp, Zea Mays
tccaatgctaatttgctggtgtccatgggtgggatatctgggctagagtatgttaacctttcaagcactgggctgcatgggcaaattcctgctgatttctcttcccgattggttggattgaaggttctcgatttgtcacggaacaatatcagtggggtagtcccagacatgagttctcttggcctacacttgctggacctgtcggtgaacaatctcacaggtgagatacctgtggcattggtgaagaagctgacatccatggatcggttcaacttctcatacaacaacctgactgtttgcgcatctgagctctctgcggaggcgtttgccactgcatttgctcagtccaggaatgactgcccaattgctgtgaatccagacagtatcgtgaaaagtagagggaaacataagggaatgaagttggttctggctgttgtgctctccttgttcttctctgttcttgggttgctttgcttggcagcggcatgtcgaagggggaggaagaggtgtgatgagctgcctgtggttaagcaggtgtcgtcgttcgatgagcctgctgtatcagggccattttctttccagaccgattcaactacatgggttgctgatgtgaaggttgcaacttcggtgccggttgtcatctttgagaagcccttgctgagcctcacatttgctgacctcttggcggcgacatcaaacttcgacaggggcaccttgt

SEQ ID NO: 186418 - DNA, 1510 bp, Zea Mays
cgctgagattaatgcagaactcgatctttcagatgcttcagctgatgaagcagacaatggtggatctaactccaaaggttttgaacccttgcatgccttctattttcttcgataccatttttcaacataatgtaaaataatcccattatgtgttgtcgtctctgattcttttactcccttttggcatcttactgttgagtagcttgcaaaccaccgtcatggactcttgttaggtcaaacttgtttctgcatcgaaaccgcaggacacaatccattgatgaggtcagtgctgctaacaaatcccccccatctggtttgacttaatttcagctgtttttctctatgcacttgtagttccgttaattataaaccttgcaaatttgtaacgacatttagttcaaaaggtcactatagattctcgttcatacatctgcttgcaggctaggtaaggaaaagttagtcaaaaggtgcataaaacaaatatttatactttaggtactctgcatcacggatgtgtgtggcacaccattttttttatggttattaaggtgtcacttaagcattagaacagtcttggtcttgggtcaccacagaggcaaggacgcaatgcaaggtaaagcttcgtcgcattaggcatatgtggtcatcctcttgattccgccgtttccccctcatttttcttctgcccactcgattttgctcctggccctcttgtttctgctgctgttaacttgatttgccatctcccgcttgtcaaccccttgatttggatggggatctcagcgtctgtcgatctgagggggcacatattggtctgggaagtgaagggaagcagcagagaggacgagatagggaaacttaagccagaggggcagatgtgtaacagcagcactgaagaacgggagaggagcggctgtgctgaggacaagagagaggagagttgtgggcactggagtgaggggatcgggactttgtatgccaggaggttagaggcacatgtgctgcgtgttggactgggctagcccacttactcctttctttttctttttccgtcttccacggctctaacctgcactttcctttggatgtaaggtgttgcctccctcacgccatagccacttaagtgtaatgctaaggctgtagttggtcgccatgcctcgccttaccaccttgataacgatgctctttttagctgcaagaatatcttcaaccatccaaccaggcaaccactagaaaatcctactactttgcctgtagtccatgttaaacttaaatcaaactatcatgaactattgtacaaaaatatatccgttctttgttatactccttgtgacttgagtacttgctgaaattttgaaggataacctaatttgctgcctttttattaattatgaccagagcatggtgtgcaactgcaagccaccccaagatggccgaatgggttgtagagatggatgtttgaacaggatgctcaacattgaatgtgtcaagcggacatgtccatgtggag

SEQ ID NO: 186419 - DNA, 465 bp, Zea Mays
atttctcttagctcctcagcaagcatgaaaaaaaagttaatgacatgctctggttctccagcaaacttttctcgaagcactgggtcttgagtagctataccaacaggacaagtgttcatgtggcattttcgcatcataatacaaccgagtgtgatcagtggtgcagtgctaaaaccaaattcctctgcaccaagcaagcaagcaacagcaacatctctaccagtcttcaactgtccatctgtttgcagaacagctcgaccacgaagcccatttgctactagagtttgatgtgtctcagccaacccaagttcccatggaagtccagcgttcttgatacctgtccatcttgaagctcccgtgccaccatcatggccagatataagaacatggtctgcatgtccttttacaacaccactagcaacaactcccacaccagcctcagaaactagtttgacactgatacgg

SEQ ID NO: 186420 - DNA, 858 bp, Zea Mays
taacttcctctgatgctgtagatcttgcttaaaggtgctaatggtgatgagctaaaaaaggtgaagcatgttttgcaatatggagtatttgcagcctaccatttggcacttgaaacatcattccttgtggatgaaggtgcaactcttccagaactccctttgaagtcgccaattattgtagcttttccagacaaaccttccagtgctgatagatctatctcgacaatacctatcataccaatccctagtgcttcaccgccaaacagttgcctgcaagcatttggcttgcaaaatgatgatctgacatttgatggcactaaacgaatggaacaaacagcattgggagttccttatgaacaaacagcatctgttcagatcaatagccaaaatggacatattaccggttttctggatatggtccctcaatcatctgttggtcccttgtttcagcagtcggacattcactgtcctgatggtactggaggtgtgaacagaaaaatgaatttacaaggcagcctacctggaaccactagaaatgtgttggttaatgactttagccatagtgtatctactgctcatccgacaaatttggtgtcagctaagggtgacggttcacttgccaagaatcctgagattggtgacaagatagcagataagccggctgcccctctcaacgtacagatttctcatgacgatgagagcataaagaataattcagttgcaaaaacagatgaaattccagcatctccagcagaaaatcagagtatattagtttctttatcctctcgttgcgtttggaaagagagtctgtgtgagcggccacaccttcttcgcataaaatattatggtaactttgac

SEQ ID NO: 186421 - DNA, 610 bp, Zea Mays
acctccgcaagttctcatcgtccttatttctcttgatatgagaatcgtccaaactttcacggcgattcaaaaccacatcaccacgctctctttgccgagatcccctccactcgccatcatccaaacgcttccgtgaaagatcttcatctctatcattcctatcaatgggcctcatcttatttctatgccttgcaccaccttcaacattgtactccagcctcaaatcttcttctttagctcgtcggctgtgaacaccatcatctctccttggcaaaatttctgtctctcttaccttatcataactcctaccccgcatgtcaacacgatctctgtttacataagattggtggatatcttccctgcctctggagggtaaatgtgatctttccaaatctgattttacatctcgtgagtactcatctttccggcgaagattgtgttcttctgcgtcatgatgccttcttgcattatttactctccttgattgcctatcttgaagaacctcttcacccaattcaaggcgtttctgctgatctttgctgcttccagacatccctttactattttcattagttctcaattcaacaggttcactgccattgtgtccagt

SEQ ID NO: 186422 - DNA, 690 bp, Zea Mays
caagcggcaacggcagtaaggacatggcgacgagctgctgctgctggtgcatgttgtctgtggacatggacgacgatgtggcagtggtgcaagatagcttgccatcgttgatggctcgacgtgccatgcggcggctgtgaggagctgatacggaggggtgcgttgtcgtgcatcatgtcaataaagacgctgccatccacaaaggcggaggggatgatgtgctcgaggaggcgtgggatccatgatccagaggtagtacgtgaggtcctcgtctttatccaccacggaggagcgatggtcggggttctgttgccagcacctgcctcatccgcaaacttagtttctatctgtgcgcgcggaggtagagcgggcagaggagatgacgtgcggatgtctgtggcgccgatcgtggtattggtttgatagaaacagtagctggctggttcttgcgggttgttgcaggttcttactgttgtcgcgcgggcttgagcaatcaaaagatgtcgggccacaatgaagctgcagctctctcgcattggtcactaatgctgattttgtgggttgggttggtgggtacgttaacagcctgccccgcctgcacaagtttaggatgactgctatctgttttttttccaacttaatgtgctcactatgtacacttagatgcttataggtgagttcaactagtgt

SEQ ID NO: 186423 - DNA, 422 bp, Zea Mays
cacagagtcagcaacattcaagatatatgtttttgtaatcagtgcatatgtgggcattaagataattttcagcctacttatgagtgtcccttgttgccatggtttggctgaggcttgctatcgctggtctgctgtacgccttgttaagtggatgcatcaggttttgtcctttagcagattctgacttcttatcttatcatttgaaatctttgtatgcgatgtcttctgctaataatatctgtcatttatttgaaggagaataattatgttggaagaggcatgcatgagagtccccttgactatatcaagtaactggaacttcgaatcataattctgtcttccatctcacaaattggaagttcgtaattatttactatattttctgtgcagatacgccactttctggattgcaattcttggtg

SEQ ID NO: 186424 - DNA, 432 bp, Zea Mays
agaatggagtctcgatggcatataccgcttgaattgattaaggaccgtccgttgttttgttgtgagcaaatttccgtgctaccacatatccttttatgggaaggatgagctaattaccttagttgatttgttcctatggacacagtcctagacatgtggtcccatgtgactagggttgtccccggtggaccttttatggtagaggatgcctagggttgtccccggtggacctaggtaggcatccacatgagctaggtgtgcattcatatgtctgaggctctttgtaaacggttgacatgagtacctccttgttcacagtggataagttatatggtcctttctcatgtgggtaaagtggcacccccttgcaaggattcatgaatcaatttgaattgtcgtgctcacggttacgagcaatactctttgccattg

SEQ ID NO: 186425 - DNA, 543 bp, Zea Mays
cacagccaaaaagccaccccgtgcaaaacacatagagctcccagtcccaacccggtcaccctccctctcctgctcctcgcatcgccggtgtcctcgacggctcgcgccgtcgcgctctcgcaaaaccctagctctgcttccctccgtcgtctcgcccgttcgattgaatcgcgccgcagaagctgttgcctctcatctctctccccgccctcctccggaaaccctagcccactccgcgaggccgcgatggcggagaggaagctggatcgaccctcggcgctcggcaaaggtgagacgcccgacctaggcgccctggcccgcgggagatccgatctgcctccgacgcctccgccctattggccttggggtagatctgtgattgattggtgggtgtccccgatttgacgtctggttgttgcgtcgcacaggtgggctgtcgcttgggatcgaggaggacagggttgccgccgccatggggttcgtcgaccactcgaaaggtgtggatttcttcacccgaaatcacttgacttttattccttcctg

SEQ ID NO: 186426 - DNA, 288 bp, Zea Mays
caccgccttatgcactggcctccatatcatctgttcaatttgactgttatggacagcggtttgccactgctgcattagatggtaccatttgtacatggcaagttgaggtgggtggaagaagcaatgtctatcctacagagtcatctatatgctttgacagccacgcctcgtatgtgtaccaaactccatccatgcaatgcaacagccaatagctgctgcttggtacagatctcgttttcttacagataagttcttattggttacagggatgttgcctatgtgtctgca

SEQ ID NO: 186427 - DNA, 1054 bp, Zea Mays
gaagattcttgtccaatccaggtgtgtacctgaagaacagagcaacattgtgtggatcaagtttttcaggcaaaagatgaacagcttgtaggtactcaaaacccttctttttgtccctattaaaatgttcaacgccaatcattagctttgtcttgatgcttttttgctggtgaacaaatttaacccactggtcaggatcattactgctctcacatttcaactgccagaaaggaaaatattcacttatttctggaactgtttgatcatgatgttgaggtgcattatcagtccgctgtgccattgcctgaatgacagcaaccaaaccatccaaagcaagcacatttaaagctgacaaaggactattcacaggaaatgcgctcttagacagaaggttagctaactcttcaaaaatatttgagcactgtagatcacagtccatatttgcatacatctcagccataaactctttctgccagcaaaaatcaattagagcctctagggcaacttcttgctgctgataacttgctccatatctactctgtgctaatcttaggataacacatgagaagaaagcctctatttgcagcttaagttcatggcgcagatggtaaaagagagtaaaaacaatgctgcacacagtcgacaggatcagagggctcattgacaagccaaaatgcattagattgcggaacaattcatcctgtacaaatgctaaaagtttttgatgtctgtgtatagacgaagccgaaaactcaatagccgaattaatcaaccccagagcaaagagcggcacatcctcatcaaagtcaattggactcatccttgggttcaactcaatgtcttctgctatgttcaagagggagcacaagaattgcaatatctctaccatacaaggaaccccaaagggctccatcaagtctttgtcttgcataacaccagaaccgtctcccacttcatcgccagagctgttcaaacatacgtagtcactcttcccgttctcagtctcctcagcacccaaacatgggttcttgcaaccagcaacctacgtaacaat

SEQ ID NO: 186428 - DNA, 300 bp, Zea Mays
ataacgttctggagctgcaatagtgccacggtcacgaagatgataaccctgattaaaaacaacatgagagtcatcattgttagtacaagtatcaacaacaggatcatcgtcaggactggccgtgggagtagagcgaggacgacgaatgtaagtctgagtgacatgtggtttggaagagtaagactgagatggtggggaagtggaaggtgatgtgatgggaataagaaaatctggggtagaaacagtaggtggtgatactgatgaagtttcagaaattggaggaaagctcatgaaggaggt

SEQ ID NO: 186429 - DNA, 338 bp, Zea Mays
cacaggggaccggcccaagcagtggctgcgctggctgccatgggcggagtacatctacaacacggcgtaccaatcatcactccgggacacccccttcaaggtagtgtatggcagggaccctccatctatccggtcctatgaaccgggcgagacgcgggtggctacggtggccaagaccatggctgctcgggaggaactcctcgctgacgtccgcacgcgactggaacaagctcaagccatatagaagaagttatatgacaagctttactggtcggtctcctatgccgtgggcgactgggtgcttctacgcctctgacagcgcgcttcatcttcactac

SEQ ID NO: 186430 - DNA, 311 bp, Zea Mays
ctacacacgacgaggtcgtggcagttcatggggctcgagagggacggcgatgtcccgcagtggtcggcctgggagaaggccaggtacggcgaggacaccatcatcggcaacctcgactcaggtacatctcatctgtcgcatcgccgtcgcctgtggagtcttctctgtaatttgactcgctcacattgcgactgctcgtgaaggcgtgtggccggagtccgagagcttcgacgacggcgaaatggggcctatcccagactactggaaagggatctgccagaacgaccacgacagggcgttccaatgcaacc

SEQ ID NO: 186431 - DNA, 398 bp, Zea Mays
gtgctatagctcggcagttggtcagtgtgtggattgaagtttttcgtagagaaaaggatagcaacggcggactcaaattgctgcgtcgaatgccatcaattgaatcgagtaagaccaagagtaaggatctgcaatcaggaaagcctaccttacgtgtgccaaatggaactttggacaacaataaagtagtgtcccagcgccagcgtacaagattcgcaagtagtcaatcaccaccaaagataaacaagaagtatgataacaaggaaatgaaattggaaactgtgacagctgctatgtctgatggcaagttgctttcccaaaagcaacaacatggtattgaatctaaggtggaggaatgtggcattcctatgtctgaggaagaagctgctgcattcgct

SEQ ID NO: 186432 - DNA, 517 bp, Zea Mays
gtgggaggtagcaccggtgtcgaagtaccagtcagtctgctggggcggagtcagggacacagtgctgaagacggatgcaagggactgagcgtcccaagatggagtagtcggctgagccagcatgccgtgggtagcgcttccctacaaagggccggtctgcagagtgtgctgcagaggggcgcttccctgtccttgaagagcaccatgaacgtattgctgggtctggtgggccagcagcgcctggtgaggagcgatggagacaggagcagcgtagaaagcctgctgttgctgggccgtcggaggcagcagggcctggtgctgcgccaggagaccttgctgctgctgtggggtcggcgcccgtgggccgggccacatctggatggccccagtccaaggattttggagggagggtcacaggccggaggcactcccgtgctggctgccgggaccagtgccagggaatggaagaataccctggcggccttggccacccctcttgctgcgacggttggggtgg

SEQ ID NO: 186433 - DNA, 871 bp, Zea Mays
ttcatttagatggcacaaccatcttaatcctgggatcaataaggacgcatggacacaagacgaggaaatcaggctcatccatgctcatcaaacttatggaaacaaatgggctgaattgacaaagtttttaccaggaaggtacatattctttctttccccagcgtcttttaaactaacaagagtaatagataatgtcaaatggaaaaacatagtcttctatgcattagtgatattccattgcagtatgacatatatatcgcattgtaacatcctgatatatttttcggttactaattaaaatgtgcatcactaaatcagcctgttagaaaatattgagctatattagaatacagagaaattgatgagtaagtatgtatattatcctatcaggacagacaatgcaattaaaaatcattggcacagctcggtgaagaagaaagttgattcatacagatcatctggtttactggctcaatcccagggcttcacacctgttgaatacactgctggtggtttaaatgttgattcttcatctgcaataaccaatcaaattagcgaaggcagtggttttaatgtttttcgggaggctgaagattcgatggagttaagtcagtcttcgtttgccaagggttcttgctctcaggaggagcaaaatgatgtgactttgggatctcatttgcatgtgcatgaatctttgtgtccagatggttccactaatgatggcaatggtgcttctggtttacctgacattcatcaccgcttatgcacttctgacatggatcaagataaacacttgcaggaaggaatggatttggataaacacttgcagcatgaattctctcaaggaacggatttgcatcttgatgtagat

SEQ ID NO: 186434 - DNA, 857 bp, Zea Mays
ttcaagcactgttgttgacatgtactgcaaatgcggcgcgataacagaggctcagaaactccatgatagaattggggggcaagaacttgtttcgtggaactccatcatatcaggtttttcactcaccaaacagagtgaagaggcacagagattcttctcagagatgctagacatgggtgtaaaacctgaccattttacttacgccaccgttcttgacacttgtgctaatctggctaccattgagttggggaaacagatccatggtcagattatcaaacaggaaatgcttggagacgaatatatctccagcactcttgtagacatgtatgccaagtgtgggaacatgccagactcgctgctaatgttcgagaaggcgcggaaactggatttcgtatcatggaacgccatgatatgtggctacgcgctccacggccagggacttgaagccctggagatgtttgagaggatgcagagagcaaatgtggtgccgaaccacgcgactttcgtcgcagttctgcgggcatgcagccatgtcggcctgctggacgatggatgccagtatttccatctgatgacaagccgctacaaactggttcctcaactggaacactttgcttgcatggtggatatactgggacgctcaaagggcccacaggaagccctagaatttatcagaagcatgcctattgaggcagacgctgtcgtatggaagactctgctaagcatttgcaagatccgtcaagacgtcgaagtggccgaaactgccgctagcaatgtcctacggctagacccagacgacgcgtcggtttacattcttctctctaacgtatacgctggatccgggaaatgggtcgatg

SEQ ID NO: 186435 - DNA, 306 bp, Zea Mays
ctccagagcactcatatactagcagttctggatgtaccacagggttgacccagattaatccctatgacaacttagagaaaatagatgctcttatggatgatggggctgaaatagatggttctggttctactgacctggaaacaaaagacagtaatcaggaagttgaaaccgatttggtggtgggaagaattgaaagtgtggataacaacagtgcagcagccttcagacaagttagaggacaagaatgtgacaacagcgatcctaaatcctatggagactctactactcgagtgaccagaggtaaga

SEQ ID NO: 186436 - DNA, 327 bp, Zea Mays
attcatcaactgatactgtctggctttcttctcttactatcatcaccctgttgcatttaaccttgatcacaaaatcacacaggtataagacgataccacctatctcctgagcttatcgaagaaggattttgtatcagtccagatgaactggcagcaattactggaatccgtgaagactctacgatcctcaagtcacatggtggaatcagtggaatatctaggaaaatcaaggcatcattggatgatggcatcaaggaaactgaaatagcaaccagacagaagctgtatggcagcaacaagcacaccgagaaacctcctagaagcttc

SEQ ID NO: 186437 - DNA, 656 bp, Zea Mays
gtcttcaccaggatcgcctccaagcatccgaattcaacagttggtaacaatctgctcggccatctctagaacgtttcctcaagatccacgagaatgtttctgatgctacatcacgcgtgcaggtgtgttctactgcggcgcaccgacgcttgccaaggagctgaaggctctggcgcacgagatgagccacaggacgggcactcgcttccatttccacaaggagtacttctgagtttcgacggatagaatgggcagtcgatgctcgttctaacgtgatctggtcttttctgatctgatctcgatagcgttaggtaccggtaaagaagacagaattttgcacagatgcaagacaaaccaagctgacctctcctcctgatctggaactgtacatagcataaaagaagcaccacagggttagcttagtatacgtagcacaattcaaataaatatattgacaaagaaaagagagacagagaaagggcaggatagaggctgttgttgttaactcgaagatattgatgataggcatggcggtatacgtgtatacattatagttaggtgctaggtggtagttatatatatactgtatatgatatgggtcgatgaatatacgaggagccacatgctgctgccattctcaaatgtggacgtgcatt

SEQ ID NO: 186438 - DNA, 767 bp, Zea Mays
cctcttactttccctgctcattttggtagtaaatgatggcaccattctgcctccaaggcacactaatcacaaccactaatccactatttcgaggaataattctgaaccatcaactcaacagtaagacaagccaacagttgctttcccttctggacatggctttgttgggctcgcatgtctctcaccgatggtaggcatccgatttggtaggaaatctgggcgctgatagatccattggcagatttattgggtaatgaaaacagtgattggtgagaacatgtcatgtaacctcatgtcaggtggggtgctatctgtttggtaggattaaaaaataattgttctgtcttcatcctaggtatatcgcaagttcttcggcgggtactgcaactgctcataccatggttagtcttagtgaacctctcttggtgttcttaggtttacctatagctattatttatctgtagctattatctactgggtttctttcttggtgttgatagtttgttggagattaggcgtttgatttcctttacaaaataggttcagtttgaaattgcggccaaagcaatgttttcatgtggtttcatcaattttagtttctatatttacatgtgtttgattgtcccttgctctcgtttagatagagatttctatcaagagtatagaaagttggtgcctgacaactagctgcttgcattcatccaccccctactcttatcttgcaaaagcccacttcttgtgttttgcttgtatatatattaggctgg

SEQ ID NO: 186439 - DNA, 621 bp, Zea Mays
ccacatttggttactgcattgcggcgtgtccccctatgcctcactgaaggagcgggactcgatgtcatcatgcgccaggtgtagctccgcctctaagttgtagtgcaccactctaggggtatactactcactgagatgttgtccatagtgcggtagtgcagaggctcatcgtcgtggtaggcgtcgatgcaaccctcatcattggatagtggagtggcaaacaacgtgtgatgttcatcgcggaccaaagttgttgacgtcgaccccgaaggtgtgggcgtcggtgcaggacaatgaggcgtggctgacggtgttggtggacaaaccaggtgctagggtaggtgagcccggtgaagaagagttactccctcgaagtggatgtagtcaacaacgaagtcactgatcatcgaagtcaagttgttgtccaccatcatgacccatacccagcctcaccctttgtcgaacgcaatgttgcacgtgatgtgcacgcgctatgtcacaaggtcgaagatgcagtaggccttgacgccgtccacgtagccgatgaagactcttagcatactccgatcatcgagcttgttgacatggctgagctcccgatacatagaagtaaactaaaat

SEQ ID NO: 186440 - DNA, 327 bp, Zea Mays
cccaccaccgctcaccgagctcgcggtcgccggagatcaccgttctccggcggccccgcgtacgccggtatcagtaaaggttggttatccacatcgaaaccccagctcgcgcctcccacccgagtcagtcacgccgctaaatttggctcatccgccattcagaccagcgccgctagggttttggacctatggatccgctccggagctacctgggccggatcctcctcgaagagatcacaccggtggtgatggtgctgtccacaccgctcgccgaggccgcctgccgtaagaacggcctcagcttcgtcgacatgctctccccgttct

SEQ ID NO: 186441 - DNA, 504 bp, Zea Mays
gccgactgcttcccgccagagagtggggaagggaggggggtgagaagggagatggcttcttggatagggagtgggtaagaatcacacgatgcagttacctccacctttctctcttctccttttgcgggcatattcttcacctccgcctgcctagatccttctttctttggcccggcttagcttccagtctcaccaacagttctgacctcggagcatctatcaatcggcccactccactctctggtaaggcaaccagccacgccacggcaccctttttgttcgagaatctgcttgcccgcgtcgccgtcgtggctttgttcctcctcgcgactgattcgtcggcctgagtcgtcactttttgtctaattggtttcagcgccggttccatcgggttttgatgcaagagtagaggagttgttgctaggttgttgtgactggttgttggagagcaggagccagattgaggagaatttcagccaattttagcggaaccgtaaaacccat

SEQ ID NO: 186442 - DNA, 532 bp, Zea Mays
gggaactatcagagctgatcatgacgacttctctatacgttttgcctctgctatggatcaggtaaaacttacaattttttttcattgcatcagtatattaatattttttccaaaataactgcaaaaatgatattgcatgtcatgaaccatcactatcggtccttatggatgataatcgctgactgaacattgtttccaccattgctcccaactgaagtctctacctttggtttgatgaaacatatatttgcaatataccatattccttgagtcatcaaaaggaaaagaactcaaaaaagtatttcatttgacactgagatagtaacacttctttgtctttggtgtgctctttcatccattgatattgatttgttctttcagatgataaggttgaagtcatcagatggtgtgtataatgactggtcccgcgatatcaaagggaacatgtatgatattgttgttgaaggcttccagcttcttagtcgttggactggcaggatttgggaacaatgtgcatggaaattctctcgcc

SEQ ID NO: 186443 - DNA, 1222 bp, Zea Mays
cccaagcttaccctcgccaaggtccgccccccgtttctgcgcattcctgcttgcttcacatcgtctctagagaatatgacgaccaggataaaaatgccttctttgctcactagtatttgaatggacgtttaatatctccagcagcagcttaccatcattatccctatattcaaattccaccttgcgaacagtgttttaggtgacggtgaactgctggacacggtaggcgtgctttggggttcgatttaatttcacattgctccactgctacttaaatgatagatagagttcatcatagcagtagttgtgtacttgtgttcgctttagcttagccgtttcggggactgtctggatggtacactttttttgtgtgtgtacctgatcagtatagtatgcttttgaacataataacgcatccaaataataataataaggtaaattacaggtgcataattagatttgaactccatcggaaacgcaagagtcgttagtaattatctcctgtatatatgatgctatccgctgcatttgacatgcatctcttatgggatcactctttcagattcttcttaagaagtcagatccggatgcctcgtctctcgatgtggagaaactaattgccaaaaatagagacaagctcgatgatattctgagggactgcatggaagctaataagaagggtcagggttttgacacatcagaaagtgggccctctttgaatacgacacggccaacaataagcaagccgaccgaatccaaaagttctttgaatatttccaagcccagtatgggcagacctatccaaggagggactccattgactttacttcgaccagcaggaagcaaaccgaagcaagatggtccttctctggctcagtcgcgaccagttggaagcaaagcaagtgaagatgcacctttgtttatcttgtcgcggccaattgggagcaatccaaagttaaggggcactccggtgcaagatagttggcccagtaaagagagtttagctgccgcaacagagttcagtgaggcggggagcatctcaagaacaggcgaggtggatgtcgccttgcggaaacccaccgtgcaccagagtcaggatgatgatctgaagtccaagctcaaaattaagccaaatgttaacctgaaaatgaggaaagatatgaatgaggacttaaggaacatttctctccttcaaaagccagatgttgcaaaagatactgta

SEQ ID NO: 186444 - DNA, 671 bp, Zea Mays
ggttgccggagtgccggcgaggaaggggtgtctgaagcaaacgggcggaggtgccaccgaggccaagaaggttacttttggggcggaggtagggaaggccaggagactgaggtctcgggtcatatggtcgccggtcgttgccaagacaagggggaagtctgctcgagccggtactgattctgctgctgaagacggtatttctgcagatgtgggcgctgatgtcccagtgaggcggtccaggaggaattcgttcaatcctgccgaggctgaggaagcaggagaggctgttgctgttgacaggaagcccaagcgcaagaatcaggagaatgacgagggcgttgctgttatcgctcaggctagagttacgagaaggtcaaatttggagtggtctgctactgtattgcctcctgctgttgagaagaagagagggaggcagaatgcagctgagtctgatgtgcagaagtccgctctggtggaagtaacagctaggactacaaggtctcgctcaatcgtacctgttgtggtgccacccactgtggttgagaacaagaggaggaagactggagatccacaaacaactgtagagttgactatgctttcagatgtgcccagaagtgattttcctgccaccaggtctttaaggaacaaaattgtccacgttaacaacagcg

SEQ ID NO: 186445 - DNA, 465 bp, Zea Mays
atcaggaggaaggaggcgagcggcgcttctcgggaaggcgtctacttcgaaatcgaggtgagttctcacttctcaggcacacatttgaatgcactcgcaaaattgtgagttcgttcgcattggtgtagtggctaatccaatttgatttgcgctttagtgttaaatcacaaccgtgcaatagccaatctactaggcgtgtaggtatgagcatacgcctaatgaaggagttcatctgtgcccaggtgaaggtttgcaacgggaagcttctgcacgtagttgcttcacgaaagggtttctacttggcagggaagccacaaaacgtaagccactccctggtggacctgctgcaacagctcagcaacgcgtttgctaacgtgaggaaatcttaaatcttcattatcgtttgtgcttagatctctttacttcgatgtttttatctgtcctggtgaaatatatgactgccag

SEQ ID NO: 186446 - DNA, 563 bp, Zea Mays
ataatgatgggtagatttcggcgctgtatcaatgacctggagctgaaagaaattgagctattgggtagaaggtttacttggtgtaatgagagagaaccctactctagtccgcttggacagagtttttgtcaccgccaattgcgtcttcgccaatgggataattctgaggctcacatggtcgctgtccattggcaaagacacaattgtcccaattgtagtcggacgacgatcgtgtgcgcctcataattatcccaccttgctttatttgggaggaggaatccaccttaaaagggagagtcaccctttccccatcagactagtcttttggggcgattgagcctttccttgagttggtgtgcttaatgaactgttgggctccgggcaaccctaatttgttgggcctcggccaaccctagctaggttgggtgtatcatattgtcccttcttctcttataaaaatgagttaatggcaaccacaccgatccaaaacgggtcaaaggttcaacaaaagggtgagtcactgaggaggctggatgatgtatatttatatgggcagaaactac

SEQ ID NO: 186447 - DNA, 358 bp, Zea Mays
ggagatttgtgggagaaacatggtggtgagctgtggatgttatatggtgggatggaacacgagtggatggaatcggttgatgctctttcccgggtggtagatgtgcaactagaagcgaatgatggcaactggagagattgcatactccaagcaatcattctcttggccacaaaattaggcagaaggagcgtggttgatagggtgtaccggggaaaagggaggttggagaaggaggaattccctttcgctcgtaacaatgattttgtcggtaggaaaaaagagctttccgaattggaactcattttgtttggtgatgtcatgggagatggagaaagagaatattttgagctcacgacaa

SEQ ID NO: 186448 - DNA, 649 bp, Zea Mays
taagatcatgaaccaacgcattaagattttttagccataagacacgatcacacacaaggatcagtttcaacgctcgtcccgcgtcatagttttacaaataactcctattgtatgaaataacccacaagacacattctcttcacatcgatcgcatctgatccagttcgtctatccactccccgtcctccacgaattcgcgccctgcacgacgcgcgagcgactcagtcacccacacaaagacacaaattcacgcacgtcatgtcttctgttcatagcaacgatctgcatggcaagtgggcctgtgccaaatgcaccgcgatagcagcccaacaacccatgcatgtcgctcgatccgtaggggacagggaaagcggtttcagcagacccacacatgccgcgtcttccatgcatagaaacgtggggaaagcggcttcagcagctgcggggtggagccgttttactcatcctaatccgtctaccaatctggctacaaaaagtcgtatcgaggcccctcaagcgatagtggtggtggatctactcgtcgcaggtggcctgacactctccagctactctgactcgcctacgtcctccaaggtacgcacacatgtacatctgattttctggctcactaactccacgggcatcttca

SEQ ID NO: 186449 - DNA, 506 bp, Zea Mays
attctctaggtcacgaaaatggtgcacaatttgagacttcatgcgtgaataatttaccttcagaggtccatgcagacccagaaatctccagttcattttcggaatgttgttcatcaggaagtcatgccaatggtaatgaaaatcattctgaaagcacagctcaggaaactgcatttgtagggaactctagccaaaatgtcaacaataaagaggaacttgagcttccgtgcattgatgggttgccttgtacttcagcaaggaatcagattttgcaggaacattttaatgttattaatgctgatgaaaacaaggaaattgaagtgaaaatatcaaaattagaagggtcttccaaatcttatttgaattttgaggaagaaaagttacccagttttgttgatgaatcatgcctacagaacaaaaatgaaagagaaaatgaagtaaattcagaatcacccatccatgaaaagatgacaaagttcgggtttgaggacaaaggtgatgcatat

SEQ ID NO: 186450 - DNA, 333 bp, Zea Mays
gtaccctccaaaaattaacgtatgctgtttaatgtggagagcacacagcattcttctattctcagtcctatagtaaggctatctccaacagcccttaggctatcggctatctccagcagcccttaggctatcataagcagtctctttgctgctataaataaaaggtgcattgtatatgcaccaaatgctggcctaagaatatagggcggaagaatagttagctgtgtgctcaccacgcagctgcgtgatgggaacctgagaacttcgccctctttatgtaggcggcctctcttctgcctcctccttccgcgaggcgatctggtgctattccgt

SEQ ID NO: 186451 - DNA, 489 bp, Zea Mays
ccgcaacacctagggacaaaatgagctccgaggagtcatctgcaatgctcaattcaagaattgttgcaatgaaccagttcatccacaagcttcaaaaagagaacaaattgagggagaaagagcgcaatgaggctcgcaatgtgctaaagctgagggaagaggagctagcacaattaagagcaaagctcaacttgatagaaaggcagggaaaagctactgagaatgagatcaattcaaaagttatggagaaaacccagacattgaggggtgaactcatgaagatggaagaagcgatgtataagcagcagcaagagctctgtgtgctaaggcagcgactgcaggaggttgagcgtgaaaaggctgatagttgtcagccagggcagcaggatgtaattggaggtagactgctggcacggctatcagagatgcctgcaggccttgatcaatcaatggcaatcgacatgtctatggacttagatatgggagatc

SEQ ID NO: 186452 - DNA, 782 bp, Zea Mays
cgccgaggacgttctggatgttcctgtgggacgcctgccaggacatgacgctcctgctgctcgccttctgcgcgttcgtctccgtcgccatcgggctcgccaccgaggggtggcccagcgggatgtacgacggcctcggcatcgtgctcaccatcctcctcgtggtcatgatcaccgcggccagcgactacaaccagtcgctgcagttccgggacctggacagggagaagaagaagatcgacatgcaggtcacccgcgacggctaccgccagaaagtgtccatatatgacattgtcgtcggggatatcgtccacctgtccatcggcgaccaggtgccagcggacggcctgtacatcgacggctactcgttagtggtcgacgagtcgagcctctccggcgagagtgagccagtgcatatgtccagtgcaaaacctttcctgctcggcggtaccaaggtgcatgacgggtcggccaggatgctggtcaccgcggtcgggatgcgaactgagtggggaaacctcatggaaacgctgagccaaggcggtgaggacgagacgccgctgcaggtcaagctcaacggcgtggccaccatcatcggcaagatcggtctggtattcgcggtgctcacgttcaccgttctcatggcacggtttctcgtgggcaaggcgcacgcgcccggcgggctcttgcggtggaggggagcagatgcgctctccatactcaacttcttcgccgtcgcggtcaccatcatcgtagtcgccgtgcccgaggggctgccgctc

SEQ ID NO: 186453 - DNA, 1480 bp, Zea Mays
ggcaaggccctttggttagtaatgagaaaaattcacctgtggagaaggaaaagaacagtacaagaatatctgctatcgtctcaggactttctgatgaaaaattgcggggtttatctactggcagtgaagggtgggaaaaaaagatgaagcgtagacgctctgttggaacaatgctcagcagaggcagtgatgctgatcgagatgtcaaatccatgggtcagcatagaccagccaatgaagcacgcccacgatctagtgatggccttggatataggtaaaaaattgtgcttgccattattttttgttccttgagagttagaactttgtttctggttgctgactctctgaaatgatcgtctctgattgatcatcatgctgaactaaagcatgtaatcttgggaaaacttaaacattgagaagatatgtgtgatatgctcacaaattgatatcatctgctaccttgaaatagagatatagggtccagcatcagcgagtagaatgatactacattattactgcacgtgcgtcatcagaaaggtggtgtttggcagcttgtgtttctagctcttccttgggctattctctgatcagcatgtttttttgttgtttgcaacctgaatcctcttccatcactatatttggaaatcttctttgcctcggtatccatgttagagctcatctttcttaattctcacatcgcagacatggagtttctgctggagcactagcaggtaacaagttggatggcacttctcagcagaacaacattgtatcctgcattctgcccaagtcagatgtcgattatgtggctcagccaaatgaaagaagagaacgccatgctggagttgaaaaggaaaggactacagtaaaaggaaacaagtaagctaagatacttctgttgtcctgataagccacgttttttctttgctacatatatgtgaaagggtattgcaaaattgccatttattggatgatatatgcaatttgttatctagggtaaatacttctgatgatatgcaaaacggaagcttaagtcccctgcccaaggctaaagcatgcagggcaccaagaaccagttcacttgctataaactcatgttctaatttccaacgttcaactggaggaaatgatgaatgggaagaagcaccgtacccaaataaagtgtcacctttggcgggcatgacgaatcgcaaacgttccacacattcaaatgcttcctcacctcctattgcctgggtagggcaacgcccacagaagatgtcacggacaagaagagcaaatgttgtttctccagtgtcaaattttgatgaagtgttatctgaaggatcaccacttgacactgccactagatcagcacctatagagtctggcagtgtcttgctgacaaagaacacatcaacaaccaaaatggatagcatcccatctcctgctgggttgtcagaaagtgagggatcggctgtggctgaaagcaagtccaagg

SEQ ID NO: 186454 - DNA, 499 bp, Zea Mays
gtttctactggagttgtttatttatttctgtagttgcaaaaagaataaccaattttcagatattagtgaattgtactgttttgaggctcacattgtgcttgttttgtaggcgtacacccacaactgttatggttcgtgagtcacatgttgaaaggatggggagtatacaagatgttccatatgaaattctgaatgttctagaattcaacaggtgagtttatttggtgtctttgtaagtgtaaatttaatgagatgaaatcatcgttttgttctttatattttactgtactaacagtacaagaaagcgacaatcggtggtttgccggttcacaaatggaagactagttctctattgcaaggtaatacaaggaagacgaccttggtttgacttctgttttgttcgttgcactaacctgacataatcttttgtgtaaatagggtgctgataatgttgtatatgaacgattggctgatggaaatcatgatatgaaaaagatca

SEQ ID NO: 186455 - DNA, 909 bp, Zea Mays
cgtaatacttggtgacttgctggtgcattcagtttttctccatgcaaatagtggttcatcctctttgtgatataagcagtgaagactggaataaaccctgtgtgatacttgcttgctcctagtcatagatattattttcaatcaaaactatatagaggttattcagctactctggaattgcttgagcctcggttagagcacaaaagagacaattcctagttagatgaatgcataggagcacatgattagatgatgatccagatttaactgaccagatccttttcaaactgtatttctctgatgtaaggaatggagccgatcaataacagtaacccgtttcgttttgccgttgcagtgccatccagatggataacaccagaatccatcgtcgagaccaaaccatagtaatcgtggctatcgttttcctggagctcatcgctataggggccgtacgtgggctttctgtacggcatcgagttcgccgtagagaaagctcgcgataaggttcacgcgatgtcgggtgaccagaagacgaaggagatcatgcacagtatttatagcattggggttggttatattggtcacttgattgcctcgccggtgatgtttgtgatgaaaacacagggtggaggaaggtgcgctccattggcaagagcgtcagtgcaagcctcggagttgccaaggtggtggaaggaggcgtggaagtgaaacaagcagagcctgtctggatgaaaggcattctgatttggtgcccgtgacaacattgctcgagttcttttgtcttagtgattaagatgctttgttcaagaaaactgagagaaatgagcagctgaatttaatcgtcggtagttctgtgcaagtcaggtggaactttgaactttaattcttctgccactatgtgatatggtg

SEQ ID NO: 186456 - DNA, 364 bp, Zea Mays
cttccgtctctttcgctaactgtttggatcattttacgtggagattgcatgccatcaccttccttgaagtgaaaaatatatgggctgatcttggcatttcatgggaggttttgaagatgatgaaccaccctcaaaacgcgcaagagcatcctcagtagaatctgcaagtttaccagactgtttcttgttttcaaaatctgccaatcctttgggaagtacaatggctagacctttgccttcccaagggaaagaagctatggttggttccaagggtgttattaagaaggaggaatttgttaggataatcagcaaaactctgtatagtcttggatatgagaaaagtggagcagttctggaagaggaa

SEQ ID NO: 186457 - DNA, 696 bp, Zea Mays
cctcaccatttgcaaaggcagcatgatgcagctattgaacagctcattcaagcaaaatttggtcatgggcttcatagggagcaccataatgatatgttggatgttctctcgcgttcaaatcagagacagatgcttcctttagagcagcaacttcttttaggccttcaacacgagcagcaacttaagtctcaacaattggcaaatgctctgcggcaacattcaggccaggaagaagaaaggcacttaagtggggtctggccaatggatgctgctgcccagtttatccgctcaggaaccagtccaaatcagatacacagtcgtttcgatctccttgagaaccttcagagatcgtcatcgtttgatcatcatgaacatctagaccgcagcttatccttacacgaacagttgcatatgggaggtcaaggtattcgctccctagagcggactggttctttgcctggtggtggtcctggaccaaacccagatgtcataaatgccctaacacgtcatcatggacttagtcagttggaaacacatggtgatgtataccctttagttcaaatgcctatgcttccttcaggtgttcatccccagcaacttaggcatcaggatcagcttcctggttctcacataggaaggcttgaaaggcactggtcggatgccaatggacagttacaaaacagtctaatggaatct

SEQ ID NO: 186458 - DNA, 432 bp, Zea Mays
caactgctgtagaggacaaattacaaaaaggggtaaaacagtgtctgacttttcgtattgttaagatatgaatcttggttcctagtattatgctagtaactattttgagttatgctagtaactattttgagttgttctgactcctaagttatgttttgtgctctatcaggttcctcagtgcatagatcgtttggcgcaagcaggtctcaaaatctgggttctgacaggtgacaagatggaaactgcaattaacatcgggtatgctgtcaagtagaaattcttaatatgtgggaagtaactttttgtaccttgttagcacatcacatccatcaacatcgtgtgatggctctatttcttttgcaggtatgcatgcagtttactgaggcaaggcatgaaacaaatatgtttgtccatacccactggtgagcaggt

SEQ ID NO: 186459 - DNA, 674 bp, Zea Mays
ctccgcccccagtccgcctcccgcgatccccttctcccgccgctcgtcgcccgcctctttcctccccgctccccgcaggttcgtctcccgcctgccaccctgtcccctctccctcgttcacggctcccgcgggacgccggcggttcccctgcgccgctccgctggtttgatttgtcgctgtagatttgaaatccgattcgaatttttttgtgccgcagcggaccgtttcgatttcgattccgatgctccgaagacgtgcctcgagcctcgtggcgctgtaggatctcatgcccgaattattcagttaccttccagctctatacacctcctccgcctagcccgcctgccccgtgcatgtcggttccgtccgcttaccacctgttgacgggagggatttatccgtttcgttatcgcgcgccatgctacgttacgtgttctgttggccactccactcttctgcggttgcagcgagcttaatgttttgcctctctttatctgttcttctgcagagctggtgtgcacttctattacattacatgcatgtggagtaatttacctacggcagattgctgactaaaggcgctgaagtaaaccttccctcagtatacttcctcggatgtcacgtctgcccctctgcgtcatttatggctcagaactcgtcccgtcttcaccgc

SEQ ID NO: 186460 - DNA, 491 bp, Zea Mays
cctgttgccttatcgcttctcaaaacaatagtcaggctaaaattggtttctcacgaaatttatgatatagttgttaagataggagagttgatggtaacaacattaactgaatctatacagcagcaatgcattcaaattatgctacaattttttctgaactatccactttctgagaagcgcttacagcaacatattgactttttcctggcaaacttaaggtatgatgaatatccatagttactttatcatgatatctcactgtatgctaacactctggaaaattgcagttatgaacatccttcaggaagagaagcagtgcttgaaatgctccatgacattcttaccagatttccccagaggattattgatgagcagggtcaaaccttttttcttcatcttgtagttgctctagccaatgaacagcatcagaatgtgtcttcaatgatccttagagctattcaaaagctgttaggacgcattggtggtcaggg

SEQ ID NO: 186461 - DNA, 680 bp, Zea Mays
cacatattgtattacttttttcgaaacgacaataaatgcatgcatgctttacttgttgccccaccaacccttacaaccatcttattgctacagatattgatgagtgccttattccaaataaatgcaatggaatatgccacaattttgatggaggcttcaattgtacaagttgccctcacgggaaagagtatgatccaaaaaatcataaatgtgtcatgtcagctaagcagcgtattctaatttttggtgagtcatgtctttatgcaacaaattaaaagacatgaaatattcatggtctcatttaatggatgtagggattgtaattgggcttgtttgtggtcttggatccataagttttgcacttggtgcaattgtactcaccggtaagtggaaaaaaggtatccaaaggagaattcgaagagagtacttcaagaaaaatcaaggtctactcttggagcaactaatatcaaatgaaaatgccacaaacaaaacaaagatattcactttggatgaactagaggaagcaaccaacaagtttgatgctactcgtgttctaggtcatggtgggcatggcactgtttacaaagggattttgtgtgatcagcgtgtcgtggctataaaaaaatctaaaatagtggagcaaatagagatagatcagttcatcaatgaggttgctattt

SEQ ID NO: 186462 - DNA, 636 bp, Zea Mays
gctttgctactgggctcatgctcagcatgtctttctttgacttggcttacgatgctgtcaacgccatcggctttctgagagggaacctctgggtaagctagctaaggtattctgttgggcgtttaatttgtaagatcttctcagccagcgtgcattattttgtttttttgacatgtgcagtttttcgctggagcgctgctgttctcaacaatcgcggacgttttccctgagccagactgcagtgcggcagatgaaaatgggaagcagcaggtggtatagcttaattagcttccatcgacgacttaattaattgcatggttcggtagcagtattttattaatgtcaaaactaacatacatagggtttcccgctttatgtcctcgtttaaaaaaaataagggtggaaaggaactcatgatgagacatcgccgaagagttatatttagcgtcattgtcacagcaattggtaagagccagcccctaaactatttctgtggctttatgtagctagagtgcgtaggttctaacaaaaaaacacaagtctaattggctttaataatgcatgactgccttaaacaacagttgctggtgtgagtttacaaaacttccctgtgggcactgctgcatttcttggaac

SEQ ID NO: 186463 - DNA, 366 bp, Zea Mays
agagaatcatcattttcacgtacctcacgtcgtggaggtcgaccacccaagccatggcgatcacgtcgttggtgtcgtcggtgcctaatagatcggtcatcacgctcggtgtctgctgaatactccgtagcatcatctcttgcggtaccagcaatggaaccatagccatcatcatcaccttgttgcctaccttcacgcccaacttggtccatcctatctaagcgctcaataattgctgcaagagaggtgttagtagcagcaactgttcgttccaaagtggtcaatgtgttgttggtaacaatttgtgttgtttctaattgaccaatacgctcattggtgacttcaacatcttcattgagggcatct

SEQ ID NO: 186464 - DNA, 342 bp, Zea Mays
gcatccgagaaagaccaaaagtggagcaccatttgcatggagaaggtctgaagctatccacgaagttacttttgagtgggagcttgtcccttgtgtgggcattccctttcatggggctccaacaaggattaggggaaagcttgcatgctttttgatacctcggtaaaatactgatgcttcattggatgtgaaaggatcacgatgcccaagagagggtgaattgggcttgtctaaaattctaacaaaagattaaaccctaaacatgagcccaacttcacccaaactactagaaacaagtaaaagctatggaatagagaacaaccctaagtcattattgcaaat

SEQ ID NO: 186465 - DNA, 452 bp, Zea Mays
ttcttctccaagccccagcagcagatctcttgagagtaatcaatctaccccaatgagtggccatcatcattcatccatcagagcacagcagaataggctcacagataaacaccatgagagggccagatgtccacctagcccaaattctgcagtactgagcttattgtcaggtcatggcacacatccctgtccagagaacggtcataattatgttgggttgggtctcagcaatgtttctttagcctcagactctctaggttcttcctctagaagttgtggaagacatgaaatggttggagatgaagagactagacggaagactgaagacgttgtccatcattgttctcgtaggctttttgcagacagcgataacattgggaaacatttcttcgcatcaaataccaatgactccatgtgtaatgatcctgaacagagtattggcttgaatgggg

SEQ ID NO: 186466 - DNA, 350 bp, Zea Mays
gatccctcctccatctcgtgctacttcttcctccgacgttgctcgcctccctcaggatcccatcgccccgctcgccttctcctccatcagcccgaccagcctcgcctccaccctttgcctctcacttcattctcccgtcgtcgcatcgcgcagctccgtcggccccgatttggctcttttggccgccgcgacgtccctctgttggatcccgccatcgtgccctgtatgggtgtgtctcatttactaaaaactcctgtcgccggcacgctgcaatctgacttcaggatgctcgcgccactcccatgcctgacaagcacactccgtggccactacgatgtcgatcacgcata

SEQ ID NO: 186467 - DNA, 692 bp, Zea Mays
aaagaggccaggatacaagaggtcgaagcaaagtttacccattgtcaagcaatttgcaatcgcatgactcaggtatgatatgaacataaaatggatgaattaacacctagatgcagagttgttattttagtctattcactcctttactatctgatacattaatactgttaatacggagcctacccatatgtttgcagggtgtacctgttggttcttatgtggtttgcttttctttatcaggagaaggagctgcttgaaaagcacaatgtctggcttgatgaagaactgaaagcaaaagtgaagaacttggctgaactaagaaaaacaaatatggatgaggaggctcggttgtcagcaagtattgctgaggcgagtctttgtgatctaactcatgatggatagtcattgtgatctatctcatgatggataaatatgatttagaacacatgcgctgacttaatcttcgtgtttcagcttgaaagagagatatctgaatcctctagctccttgaggcgaagcaaagaacgcatctctgaactggagcaaagggtatcctacatggaaaaggtaatttctcatgcagatgattgcagtattactgtttccatctaatcttttctcttcatgttttggtgattgaaggagttgcgctcaacaaaggatactgcagctgctaatgaacaacgtctggg

SEQ ID NO: 186468 - DNA, 3308 bp, Zea Mays
gcgacgacgcgacggtgaaggggaagtgtgaagggaagcagaagcgagacaaatccccacccggctccaaaccctagccacctcccccgtcccccccttttcgtcccccagatctcgctggcgtctgctccgcctcgcttcgatgtgaccccaccctagggtttgagacggtgttgcggtgtgtgcgtgtgtcgcggcgattcgcgacgcgagtaggattcgaggtgtcggcggcggtgcgagcgcaaatgaaggacccggcgcaccgcacgaaggtggtgctccggcggctgccgccggcgatcgcgcagcaggccgtcgtggaccaggtcgatgcgcgcttcgctgggcggtacgactgggcctgcttccgtcccggcaatgccaggtccgcgctctctgtgcttcaagtgcttgtggcgttgctgtgggagggtggtactatcctgtttaacctatgaaccgtggtaggaagctattattacgttccgtttgctagttgttgtgtacccacatcgcaagcaattagccagttcatccgtgtattatggaggtagagccgtgagattagttaccgagttgtccaattttacctttctctgattgtggtgacctaattattttctctgtcttgcaatggcctgggagagattctgagttatctgaattacaattaaagtctgttcaaagtctaaatttatttgctttagcattgattgctactgaagtgttaactagaacatagaactagtggattgccttcttagctgtttctctctgttgattgtattgcacaatctgtatctgacctacctgtgcttttgatagagtttaaaagagctaaaatcattggttaaggcagcagatttattgattatggcagattcattttttcattctatctttgttgcttctggagtctggactcatgttttcatctttagttgtagagaaagttgctgagaagaattaaatccatctgatagtttagaactacctttacacattcaactttctttgctttgcagtaattgattactggttagtgattttctctggccgttttatatattagtttaatgttacagggacttgtatctgagttttttgctattataatattgattttgtggggcttctctcctttagtactctcaatttgatcttctctgtaatagtatttataagttgattcatccttcaaaatagtactccaaccgcttttaatcattttcttttttatttctcaccgttgaccatattgtatctctctattttcttctctcctagctccccatcgttggctcgactcctctctcttctcacatacagcatcgcaccgacggcacaaaaaaacattgcagcagcacgccggcgctgctggatggtgaccgttcggccaactgccaccccttgctacggtctgaaccaccagacagaagatagcagtgttgctcatcgtcttgcactcctgcgtctctgcctggattatttgtgtttctgttatttgtatagctgcgagggtaatgatagggtcaacttatgttctgagaaataaaaaaaagaaaataaaaatgattgaaaatggttagaatactattttgaaggatgaatcaacttgtagatactattacagagaagactaaaatgagagtactaaaagagagaagcctattgaaatcagtactataatagcaaataattcgtatctgagttttttgctattataatattgattttgtggggcttctctccttgtatctacattagcaaaattttgtaggaattccttcttgagtgattcatgtttttaactgatttgctatccaattgcttagtgcttattttgatttgttttggcacttccgtttccctcttttcatagtgttttatgcagtatatttccgttttgctttcttttttatttatgaacaataaatcacaatcaaattttctgtcagtgacatgtcctgcatgtttagttgaatatttttttcttttgtattataattgcggactgtttacttcgtgtaaactgtaaagcaattctctttgcttgagcatgttagtacattgcttaattttgaagctacatgattgtgacattctttttttttcatctttttatccagccaaaagaatcataggtattctcgactttacctaaatttcaagcacccagaggatgttgttgagtttgctgaggtcttcaatggacacatatttgtgaatgaaaagggtattttcttccatattgttgaattttgttcatgataatctatatttaggatgtgcagcttttatacattttaatttgatcatattgtgccaacttcagcagttacaagcactgactctttagtctctttaatagcaaaaactatttgtccttagtgccatacccatttcattgttcagacttcctgtgatctaagtttattatgggtgcacgccttatcatttactatgtagcatcacaaacacaaattgatgttatatcttgatgctggattattcacatagccattaaactgaaagttgtatatgactgggtctagttatagtttgcttcctattggttgggcctaagttatagtcagctttctagaatattgtctacttgacctgatggtgtataggattctgttttcccttggtgagtgtggaagaagagatcaatagaaacacactagtaaaaacttgttatgaagtaaattttgaaatcgaattggatgtacttacataaggtcacaacattgatagcacgtgaactatgtcatactgacattaatattgtccttgacgttatcgtgcttgttgatccaacttaggtcagcgctagaggtggtggctggaagcaagaacaccatatgttggcttgataatatttcttgtacagtgtgttatattgttatgctgaaacagaaattaactacttagtgtctgaatgtttggtgttttttgcaactgtagaccacatgtctgaagttttttttgggggagtgccatctatgtttgctttgtgtaaattgggtctcatggatgttatttatggttgtcaggtgctcaatttaaagctttcgtggaatatgcaccatcacaacaggttcccaagtcaaatgtcaagaaggatggccgtgaagggactgttacgaaaggtcctaggcaatcactttacctaattctttgtcaattgtattgttctatcatattaccattttcctaaacttggattttgtcattttggaattactagatcctgagtacttggagtttcttgagtttatttcaaagcctactgagcatct

SEQ ID NO: 186469 - DNA, 704 bp, Zea Mays
caccttaaggtttgttgatatttctgattgaatgactttggaatgacttctggctgtctttgtcaacagatctgtgctccagttttacgacaatggcacgattcagcttgtggacaagctgtctcaatctcctctgtgggagattgccacagggcctccactctcagaccatattactaccactgagtctggtccgaattacctcatttatcctttcaatgggaacgagaacatgaatgggaatagtactgaactttgggaggtttataatgggaacagcgtggtatgattttctcaggcacattgcttctctgaaaccttccttgtacatatatttgtttctcacccttgcctctctgttcctgcagaggctcccatggaaattggaggaattcgttgccaggagcccatatattcgggattctgttgttactatcggatcaaaagtttcaactgtttttgtagttgatgctgatagtggtgagattatttacaggcatagtatcccatctgcgttaaaggaattggaaggaccaggggttgaaggagcaccatccaagctaaatgtccgtactagtgatgacagtgataatatcatagtgcttgtgagaactgactattctctcagtgcatcagaccttggcaatcatttatttaactggacaagaacttctttcactgcaaactactatgtgaaatacaag

SEQ ID NO: 186470 - DNA, 700 bp, Zea Mays
caattcttggtcaaaaatgcgtatgtgctatctttcggtattattgaaaataatcgttaatgactatttttgacaaaaatgaggttgtgtggcctttgattaatgaccagagactcgtacacctaccatagatcacattcttgtatttctagtgttgaccatttgtcggttaaaaatccatatgtgttagcatttagtattattgaaaatgatcgttcatgttattttcaacaaaaatagctgttgtgtggctattgattatcgactaaaggctcatacacatcacctcaaatattttccttgccataaatcacattctgttggacaccatttttatgtggtaccaagtcccccaaccttaaacacacttaaatcctaatagataatctactacttttctataaaaggtatgacttaatactccaaggattaaacaccagagtactccaaagttgagctaaacacacaaaataagtcttctgaattggtgctaagtttgaacttccagactatgaaaccttgaatctttagaccactgttactgccagtttcatatggatttagggttaagtgatttaataaagtttgtgcacctgatgcaactctataattttgttacatcgaccattttcaaactatctacagatcaaaagttataaaggcctgaagagagctcgctgataagaaatttcagaattcc

SEQ ID NO: 186471 - DNA, 542 bp, Zea Mays
acccaaacgagacgcagctggaggagatccttctcaagagtctgggcaccacctttgacaatgctgtgagtctgatcaccacaatgggctactctgaggcggttgcacgggctgctgttgtgcgggcagctgcgcaatacaactggagggagagccttgcagggtttggagaggcagcagttgaggttctcaagacggaaggggacatgttgccgagggagggtgcctctgttgaagacatgaggaggattgagcaggctgtgcttggtagtatggttatgtgggtaaatgaggctcagccactctgcaccacaggcgatgtaatgttttgcttgcttatgtctgacatgaacgtggcaaatgccagtgccatggactacaatacttcttccctcccatctgttgctgctcaagttattgcccaaccagacgcggggaactatgttactggttcaggttcaaatttatcagtttctattaccaacccacagactggcgttacattccgtggaaaacttaccccaatgccaccgggctcttat

SEQ ID NO: 186472 - DNA, 564 bp, Zea Mays
ctgaactatcttttggcacagaaaggactgttggagagacaaaactctttgcaaaaccctgtttcatattggacaggagatgctccagcatcaaaagtacatcccatggctgatacatctcgccaatctttgcaatctcaaaatgttgatttactagccatgctgcaaccaaaggagaagcctcaagttcctactggtaattcgggtctgccactatgctccaattaccctgaagcaagtatcgttaatcccaacttgcatagtggagatcttgctcaaggggctcttaatatgcgtcaagatatgcagaactcccagaacattggtattggagttcaacaacacaacttaatgccacaaaaccgaccagctttggctcagttgccatctgagaagcttgctgagatgtctcaagatccacaactgttaaatatgattcgtcaagatctgcagaactcccagaacattggtattggatttcaacaacacaacttaatgccacaaaaccgaccagctttggctcagttgccacctgagaagcttgccgagatatctcaagatcca

SEQ ID NO: 186473 - DNA, 573 bp, Zea Mays
caaagagctgtcattgccttcgcacactttctttatcactctttcaagaaggatcacatcggggactactacttgtcagaactctgcagcagcatgccagtaattgatagctatggctatgttgtcaaggaaagaaatagcattatagttcctgccaagggaagcaaatgggttggtttgatgggaacaaacccatggagggatcacggctacattgagttgtcagcagaatacaagtcagcaggacattttgctggaaactatacttctgaagaccagctattggaattcctcaagacaaatttgcaggcttcggatgtgccattcatactcccaccagatgccagattctctactgtgtcatcatctctaactgtggacaatgtattcttgctgctggaatggataaagaatttgaggtcacgtggtgtaagattaccagacctgttcttgacttgtgtcaaggaagggaattggctcaagacgtcggctgggtacaagtcgcctaatatatcatttctgtccagctccaattgggggagtcttctgcaaacagcaccttcctgtgttgat

SEQ ID NO: 186474 - DNA, 441 bp, Zea Mays
cataaatgctcagcattttatccaccatgtaagaaaataatgcatatacatggtacatttttacatatttcgcatgcttttcctccaatgttttgacagcaagtaaatctgcttaaataacttccaacttcacagctgcgtcaaaatttgacaaaagataactacgtcaaatccatgtacccggcccttgaagcggactgccttcagcaagtgaaactgtgcatagaaattgggctgaactgcgtggagaaggaacctacaaagagaccaactgccagggaaataatctctatgtttaatcaaaaaaaggattcgagcagatctggggtatctaactgcatcgttaatgtgatagaggcgtggctatcaaggcttccatggcatccttggcctctaactttgctccgtcagacttaagcttgatggcaacagcggtatttg

SEQ ID NO: 186475 - DNA, 467 bp, Zea Mays
ggaaagagtatccaagtgtacaacaccactcacacaagacagtaggtcctagaaaaggtttcaaatgtccctatagccctgactccctgagtgcgcactgtaaggctccctcctctgctgttcacaccagcaagcttgtgctcagagaaaaattaccaaagagttaagtcttcctctatgctgtttgtccaccatcttgattgcatggcaccaccatcatggaagctaactctgtcagtttgaaaatctagtgcttttaagaccaatttttgcagaataagtaaccacacctgcacctcccttgaagttgcgccaggttactgtagttgcttttctggtgtaaggtcgtatgatcaagcgtgctctgaattagtcagtggagcatgatatactaggtcgattcatgcttattgctgcatagttaatttctcgttgtaatgcaccagtatgtaattgtatcattctgt

SEQ ID NO: 186476 - DNA, 462 bp, Zea Mays
cttcgtcatgccgctcgcagggtacgacctcgtcctggggactcaatggatggtcacccttggtcgcatggtgtgggacttcgtcgaccgctccgtctccttcctgcaccaaggccgccaggtctcctggtcggacgtcgccgaccgtcagccacacctgctcgtcgctaccacgacaccgagagccctccttgaggagctcttgcactccttcgacggggtgtttgctgagccggcgggtctgcccccgcagcgagctcgggaccacgccatcgtcctaaagccaggctctacacctgtggcggtccggtcgtaccgctacccggtggcgcacaaggatgagttggagcggcaatgcgccgccatgttggcccaaggcatcgtacgctgcaccgactcggcgttctcctcaccggttctgctggtcaagaagcaggacggggcttggcggttttgcgtgga

SEQ ID NO: 186477 - DNA, 461 bp, Zea Mays
tagatctgatataggacccctgaacacctatatgttggaccctcctttgaagttcttgtttttatctcttattgagtggcccgaagcttgatcttctcattattgggaatatgtgctttgctggtggaactaagttgttgacgtctgagctttgggctcttcccttctactgagctggctatgttctcgtatgtggcgtttttgtggaggttgattatataacattggatcatattgtgatgggtctggtagttgggggttgtaagcttcccactgttgtgactgatgttgcacaattgggcttgaggacgaagaatgtgagttctgcccttgatgctggatgtatgacacatcatagttagtcgagcattaagatgatgtatggcacacattcttcggctggccttcctgcttcacggttgccaattccttatgcttttggatggtgatgctacaatatt

SEQ ID NO: 186478 - DNA, 605 bp, Zea Mays
cacattgctcgccctggctatagctcgtgattggcctattcaacggcttgacgtgaagaatgcctttctgcacgggacgctcagtgagaccgtctactatagtcggcctacgaggttcgctgatcttgtccatccaaacatgatttgccgcctccacaagtccttgtacggactcaatcaggcgcctcgggcttggtatagttggtgcgccacctatctgacatcattatgatttgttgaagccaagtcagacacctcgctattcatcttctgttgcagttcagacacggtatatctgttgctttatgttgatgacatcattttgaccacctctactgccgaactccggcaccgcactattactgccgagctccactgcagtgcgaatttgcaatggaccttgggccgcttcgccatttccttggcatcgctgttgagcgacgttttgatggcctatttcttcaccagcgcacctacacgcttgacgtcatcaagcggcccgccatggctgattgcatgccgtgtaccactccggtcgatcttcaggtgaagcttgccgtcgattcagggcctccgatctaggacgcctcccagttctgtagcat

SEQ ID NO: 186479 - DNA, 311 bp, Zea Mays
tgctgagctgaagctgggttgtttgtcggttggcattcttgacagctcttgtggaatggtgtgtaggcttgctaaattatgtatctctttttaaaatctaaaagttttaacattgttttttctctcgtaaacacagtatttatagaattattacaaatcaaccaatattaccttttttcaggtcacaccactttttgacacaacaatcgctaatataaatcttgcaacacatggaagatttgagacattgaatgctgtattgatctgttcaattgctgcatccacattcaatagacacttggaggcatggg

SEQ ID NO: 186480 - DNA, 340 bp, Zea Mays
cacccaccttagatgcaagtgcctcagtgcagccatcaagcttttcttctgctactgaaggatgtgctggagtttgtggtgttatggactgctcagaaacatctgccttagaaacaggtgactcattggagatactatgagcttcttctgattttgaaggctgttctggaaatgttgttactgatacttctgaatgatctacctcggatgtctgtttcttagttggggtgctatgattttcttcctctactgacagatcctttggaaattgtggcttttctgatacttcagtgccatcttcttcaccattgtgtcccatgaaagccatgacaggattgaa

SEQ ID NO: 186481 - DNA, 358 bp, Zea Mays
ggtagctcggaccaggcaaaagagctacgctggtaataggagaagaccaatggagtttgaggaaggtgatcatgtgtacctcaaggtgtcaccacttcgtgggatgaggagatttaaagttaaggacaaattgttccctcactttattggaccatttagagtttttaggcaagttggatagatggcctatcaactcgagctaactgataatctatccgatgtgcataatttattccatgcgtctcaacttaagaagtgtctccgtatacctgaggaacagttaccaatggaagagcttaacgttcagggtgatttgacgtacacggagtacccgatcaggtttcttgatacattgacc

SEQ ID NO: 186482 - DNA, 330 bp, Zea Mays
atttgtttctgcaaaatctcaattgcagggatgttcagaggtatggtgtgcctagaccaacctcgatacagggtgacgagcaatcaagaattcattataaccagatggtaaatggcagaaaccttcagcaacctggagttcctgttcctggtgtgttgccatctggtgttgatcagggtgcccgaatgatgccacctgcccatggtgttggaatcatggctggactaaatcgaggcacaccaattactaggccaggttttccaaggcttggttctcttggaaacatgtcacccaccaatggtcaaggcttaaaaaatactgtaaacgttc

SEQ ID NO: 186483 - DNA, 442 bp, Zea Mays
tgacgacaagggtttggctagacttgtctttgagaaagctaggttcgctcgaagtagtggtgcaagtgaacatggcaatgggtgtggcatcaacacatgtaggcatggggtggtagagcgatcatggtgcagtgcgacttaggtgaggtgtgcatatgtgtggcgacgatgcagggggagagggtggactgggatggcatacgagtatgggaatgagaactcataacatgtttagggagctgagtgcacaacttaaaggtaatggtatcgggatgagaattcggaacaagggagttaagtttaatttgcatgtaatcggactagaatgagaactcgggacaaatttaagaacgttaggtgaaatttactctttctatagcctgatagagagagaaaaatagagcattgtattgagggtaagaggattacatatataggaaag

SEQ ID NO: 186484 - DNA, 271 bp, Zea Mays
ctctctgtgtgtgtgatttggtatcctgatgaaggatgctggtgtgtattggttttggttttgagttcagtacctctcccctcttctggattgcgtattccctcggttgatgtagaaaatgactggtacagatctgacacttggagcatatagggttatacgttctggtacgattaccatccgtggtttatcgtttgtattttgaccgatttgttttgaacatgtttccttgtgcaggttcctgaggtttatctgttcttcgtattgtttg

SEQ ID NO: 186485 - DNA, 418 bp, Zea Mays
caccagcgaccactctgtctactattcctgcagcacctgctagaagaatcaagcagcaacacggcttcaacctttcgacggtacgtcatagcgccagacttgccaacggccctcgaacgaatgtcatgcaacgggcccagcgcgtcctctgccgcaagcttggtctcttggcaaaagatgacgctgctgattttaatactgctttgcaggaatttcaggattggttcaagaagccactgactgtggagatggggacggccctagatgctctgttcaatcttgatatgccagacacagttcgcctcgacaaggccttgatgggaattgctggagatgctatagctgagatccaagaggaggtggacgccatgcatgcagaggccagagcagttgctgcggcttgattgatggctgtttt

SEQ ID NO: 186486 - DNA, 282 bp, Zea Mays
ttttcctcctaacccaatgtgtttcccaaattttccatgctttaacttgccatagtgtccattataatgatgtttaaacttgccaaaatgtcctaagtggtgattgtgagggtgatggccatgggttaagtgatgtacaccataggtagcggcggcggcggctgctgctccaccaatgagcgttgcccccatgttatatccattacctatgaacatgcaacattatggtatcaagttatatatgtatatgtcacactatacttaaacaaaagtgaatgcatg

SEQ ID NO: 186487 - DNA, 719 bp, Zea Mays
gccagcccggccttcaatggggagatggccaagcagtacccgttcaagcttgaccccttccagagcgtatccatcgcttgcctggagcggaacgagtccgtgcttgtctccgcgcacacttccgcggggaagaccgtcgttgcggagtacgccattgccatggcgttcagggacaagcagagggtcatctacacctccccgctcaaggccctgagcaaccagaagtacagggagctcagtcaggagttcacagatgtcgggctgatgactggcgacgtcacgctccatccgaacgccacatgcctggtcatgacgacagagatcctcagggcgatgctctacaggggctccgaggtgatcaaggaggttgcctgggttatattcgatgagatacattacatgaaggatcgtgagagaggggtcgtgtgggaggagagcatcattttcttgccccctgccatcaagatggttttcctttcggctaccatgtcgaatgcgaccgaatttgctgaatggatatgcagcctgcacaagcagccctgtcatgttgtgtatacggacttcaggcccacaccattgcagcactatatgtttccaataggtggttctggtctttaccttgtagtagatgaaaatggccagtttagagaagataactttgcgaagctacaagactcctttgctaagccaaataatcaactggatggaaggaaaggtgg

SEQ ID NO: 186488 - DNA, 570 bp, Zea Mays
aagcgattagtcgtcctagtcgccgactaaccacgattagtcgtccgactaggtatagtggtcgactagttttgtctgttttgggccactaatccggtctctgttacatgggccggtccaccatctatacaacacaaataatgttttgccctacttgtaccaatacggtacacgtagtgcacaatagcgcgtgcacccttctccagcgccgccgccctcctctcttgtccccctgctgtgcttcagcggccctctgctcgagcgtcagctgcgcatcacgcggcagctgtagtctgtagaggcccccccctccagcgttgttttgcaaaatataaatagcatatagtatatgtatgtatgcaacactatctctactcttcaaaacttcctccacgattttatcagacccattagtttctgccttccgcagctatcctcccgacccactaggccactacggcaatgcccctaggacatctcttgatctcgcatacctagtcaagaaatcttgggtcctccactgaatcagtgtactgttgtcctgctacagctagtgtactattgtattgc

SEQ ID NO: 186489 - DNA, 350 bp, Zea Mays
gattacgtggcccaggtaggcgacggacagggcagcgaacgcacactttgtacacttgacgaagaggtggtggcggtgcagctcgtcgagcacggcgcggaggtgtcgaagatggtctgcccatgtcttgctgtatatgagaatatcgtcaaaaaagacaaggacgaaccggcggagaaacgggcggagcacgttgttcatgagcgcctggaacgttgctggcgcgttgcagaggccgaacgccatcaccaggaactcgtacagcccatcgtgagtgcggaacgccgtcttgtgaatatcttccggacgcatgcgcacttggtggtacccagaacgcaggtccagcttgg

SEQ ID NO: 186490 - DNA, 292 bp, Zea Mays
gaagtagatctcccaatcagtggtgtagaacaacctgtccagcctaaccagagtaggtgaagccctttcattggaccaagtgtatcttctaccaagcaactctagctctttaagttcaaggtcgtttaagaggcgacgaaatcgacccatcatggcacggtccagattactattatttttgtcttccgctctatatataagattgaagtcgccacccactgcccaagggcctggacaggaagctctgatggttctaagctcctgaatgaaagccaatttcagattatcggac

SEQ ID NO: 186491 - DNA, 557 bp, Zea Mays
cctgacacagaagttcgcaccaaagacgttcaaagacgttgttggccagagcttggtggtgcaggcgctgtccaacgccatcctgaggaggaagattgggttggtgtatgtattctatggtccgcacggcacgggcaagacttcgtgcgcccgtgtctttgccaaggcgctcaattgcctctcctctgagcaccccaggccctgtgactcatgcacgtcgtgcattgctcacaatctcggcaagagcaggagcctgatggagattgggccggttggcaacatcgacatggagggcattgtggacgtcctcgataatgtgatgctttcacctgcaccatcacactacagggtgtttatatttgatgactgtgatactctgccagctgacacttggagtgctatctcaaaagttgtggaccgggcaccccgtcgagttgtgtttatccttgtcagtccaaaccttgaacttcctcacatcatcctgtcgagatgccagaagttctttttcccaaagctgagggagtccgacattgtcaatacattgcagtggatttgca

SEQ ID NO: 186492 - DNA, 450 bp, Zea Mays
agtcccactccaagtaaacttgagccagttttgtgtgaagaacatgtatcaagttcaatccagcaaacaaataaagctatcctgatgccttcaagatcaccactagttgataatgaggctaatccaactcccccaaaatcacccgtgccacaggctgatacagttgctaaagctactccagctccacccaaatcaccaatgctacagattgatacaattgctaaagctacagcagctcctacaaaatcttctacttcacagcttgataaagttgctaacatccaagctgcccccaaatcacctgcaccccagcctgatgaagttgcctcacatcataactcagtatcgggacagattctgtccacatctatctccaagcctcgagaagatacggtttctaagagggctgcagtcgttactgtacctggaactcctacaccaatgtcaagg

SEQ ID NO: 186493 - DNA, 382 bp, Zea Mays
tgagtgttctttttctttgggggggggctgaggccgttcatgtccattaaggcatgaacaaagcaacaaaaatacatgactgttcaacagggaagaaacgacctacagaacaggagaaggaagaaacatatgggtgctttcaaatgtgtgcgcaaaacatagtttatgttaataacataaatctttacttttcccttggcctagcatcagttgcccactggattagtgcaagtcttagacggtgatccctgtttaaccttctggagtggtgtaactgttccatgtttttgttcatgttcttagcgtgagctatattaggatcttcctatgtttggcaggtcccttgggtttggatagtggatggcagcacaggcttgttgtt

SEQ ID NO: 186494 - DNA, 282 bp, Zea Mays
atctgcaaaaaactgatcagagatcacaatcctatctatttcggcacttggagattcacaattctgatatcaatgccattcagcaagcctatcacatcattcttcattttgctactaaatggaatgttgagtttgctgatcattgcttgctgaagatgctgtgccatattcattacacagaaagatgcgcaggatggaacactgactatattgcattccatatggtattatctacaatggccatcaatactcccattgacattcttcatcactgcattttcc

SEQ ID NO: 186495 - DNA, 493 bp, Zea Mays
ggatgtggatactgatatatctgatgaagacgaaggtgacgacgatgaactgaaagaaagcataaatggttcagaggatgaagctttagaccagaatgaagacagcgaagaggaagacaagtcaaaaggcagtggctctaaagcgcagaagaggaagttaaatgattatattggacagctaagttctgctgatgcaagccttcgagttctgaagaggttagcaactgccaagaaggctgaagttccatctgatgaaactggtaaaattctatccgatgaagatttcaaacgcatcaaagaactcaaggtatgtggattttggatggcttatagatctacagtaaattttttttaaagctaattttggcaaaataaatttgctcatattctgatcttagatggatcattgatgtcctaaccgaatatatttgtgtttcaggcaaagaaagaggcgaagctggctttggctcagcatggactaatcaagggtggc

SEQ ID NO: 186496 - DNA, 1151 bp, Zea Mays
aaaaaccgattcggagaagggcattagtggagatgactcagatttgatagcaaggaaaaatacatttggttcaaacacatatcctcgtaagaaaggaagaagttttttggtatgctaaggtttcgtttatgatatagtacttctcttttctctgggttagtcacacctgctgattgaacatcttgtttaggctttcgtatgggatgcttgtaaagacctgacgctaatcatcctcatggttgctgctgctgtttcactggcattgggcataacaacagaggtgggcatcacatctgtagttctgactccctaactgtacaaaattgtcaactgtgttttgtcacactgaaacagttgttttattctttttcccttctgtgggtatcctatttcaaatctatccaacttcatctactttccagcacatgcatttcttatgcagatttcatcatattgccttatatctttccatgtgcttacattgattacattgctcatctgtgttcctttattttgcattggaatatgatgatattagggcataaaagaaggctggtatgatggagcgagcattgcctttgctgttcttctagttgtatttgttacaggtgtgccactatgacttttctctgactttctgtgttctttgtcatataacaagcagtgtgtttctattcacatcaaatcatcaagtaatatatgataaaactaataacaagcatgtgaaaagttacatataatgatgcaaaattagtagtggcctaaagcaacaaagttgaagtcaagtatgcatgcctgaaacttcaaataaaacctcttactcagcgccaacagttccttttacggtttgtgtacagttgctcaaatctagtggctattatttttccatgttaattttcagctatcagcgactacaagcaatcactacaatttcaaaatctgaatgaagaaaaacagaacattcgtttggaggtgaggactagaggcgcatatattgctatcgatttctttactgatcccaaataacattacaaatcattcaggttgttagaggtggaaggcgaatcacagtatcaatatatgatttggttgttggagatgttgtccctctcaaaattggtgaccaggtagagaaggccactgagcatgag

SEQ ID NO: 186497 - DNA, 404 bp, Zea Mays
aggttgtcgggacatggagcacacgaagcgcgcaagcagccacgcgttcccggacgaagtggaggtcgatctcgacatgtttagtgtgttgtttgcatcgaattagtcgagaggtagaccgcgctcacattgtcgcagtagacgagggtagcacgctgcaggggtcgttggagctcctggagtagctgtcgcagccacgaagcctcggtgacgccgttggccacagcatggtactaggcctcagcgctggagcgagagaccgtctgatgccgcctgctggaccaggagatgaggttgtcaccgaagaacacaacattgcccgaggtggacttgcgtgtgtcaggacaacctgcccaatccgcgtcggtgtagacggtgagagccgaggacgaagagcaaccgag

SEQ ID NO: 186498 - DNA, 666 bp, Zea Mays
tgctcttctttttcctgagcgccataccctacttcgtgtcctcccagttttggttgtcctagcaacctcatcagagaaggagagtgagtcactttataaaagggtgaagataaatcgtcttctcaatgtttttaaggtctggtcatctccttgtaaatatccacttaagtttacttataattagaatttttggaggagttgatgtttacctgattatgctacttcatatttttaaacttcttgttgctcttacctatttattttacagaatgatccagtgatcccggcatttccagatctgcatctttctcctgctgcaattttgaaggaattgtcatcatattttcaaaatttttccagtcaaactcgtctccttgctcttcaagcgcctcatgaaattcagggtcgtgagctacaagaatatcctttctgctgagttttctaaataattttcacaaatgggttcaaacaaacgttggtttcttacctggacagaatccctattatgtaccaaaaacagatccccatgatttactccacataaaggcaaatgcaatttcgttagagcagacagcgcggccagaatgaactaaatttgcatatggtaggtgagagtcatagagaattagggaactcatacccgttaatggaggggtgactttcaac

SEQ ID NO: 186499 - DNA, 842 bp, Zea Mays
cttgggacagcatgaggagttccctcttgctgtgatgcattcctatgttgactccatgaagtttatagggttgaaatttgatgctgcaattcgtgcgttcctgaaaggatttcgccttcctggtgaggcgcagaagatagatcgcataatggaaaagtttgctgagcggtaggtttatatgtatttatagaactcaacacatttttctttatgatttccgccagtgaccctcagacactgatatgattatttgcaggtactgtgctgataatcctgagcttttcaaaaatgcagatactgcttatgttcttgcttatgctgttataatgttgaatactgatgcacataatccaatggtgtggcctaagatgtcaaaatcagattttgttcgtatgaacactgcaagtgatgcagaagaatgtgtcccaaatgagctcttggaagaaatttatgattccattgtcaaggaagagataaagatgaaagacgattctcatgatacttcaaaatccaccaagagacctgaaacagaagaaagaggccgtcttgtcaatattctcaatttagcccttccaagactgaagtcagctagtgatacaaaggcagagagtgaaaagatcatcaaacagacccaggcacttttcaagaaccagggacagaagaaaggtgtttttcatgttgcgcagcaggttgagcttgttagaccaatgcttgaagctgtaggatggcctttgcttgcaacattttctgtgaccatggaggaaggtgacagtaagcctagggttgtatcatgcatggaaggatttcgtgctggtatccatcttactcgtgttcttggaatg

SEQ ID NO: 186500 - DNA, 364 bp, Zea Mays
ctgactccgtcgcccagctttctgccgctcttctccaacacgaagcggttgctcttctccaacacgaagcggttgctcttctcaatctgcacgctcaagccgtcgccgtgcagaacatccgggccctcgtcccactcctcctcgacgtcaactctaccttctactctcggtggtgtgagtccttcctcctaaccctcaccaaattctctctggactgccacgtgctttccgatgttgtccaccactcgcccgactggactcgcatgaacgtcgttgttctgtcttggctcaacggctccatcaccgacaacctcgctgatacaatctccgagcgtggtgcatctgctcgcgtcctgtggctcgc

SEQ ID NO: 186501 - DNA, 710 bp, Zea Mays
catcgtttggtgtctttaaaaagttgcagcacaaattgaacaacgtgaggagaataagataaaggaggcaccaagcaagcacccgatttttcatatctccatatattaggactgaagatttccagcatggatgaaagaatgcatgctttaactgtacaacagatatcactgttgcaaacactaatattttgcactacctgtaaaaattcttccagtatctgcagcaagatagtgccaacaccatctacagaaaagactctgtcatgattagagaaattgaacctcagtctaaacaaggctggaagactatcagcacatctcgctactgaggataacatcatggcatcagaggcatcaggaggaaactcaatagtgagaccacagactaatttcaaaatcctttgggcgaaagacaacctcaagccaatgtttacatcttcaaccatttccaaagcgggagactggcaaagcttctgaaccagtgtaagaaggcgtggcatacaacataagtgagcaaccgcaaaatgctgtgctaatggcaccatggcatttggagatactgcactgcatgattgggaattctctaaaataacataatctcgctgcaagtattctggtaataaggccaaatgaaactgtttaaggtcatcttcacttttcgagcagttgaagcctggtaagaaagaattgaaggtaagtgagaactcatc

SEQ ID NO: 186502 - DNA, 348 bp, Zea Mays
ggcagttgaggtggagtagcaggcactgaagtcggtggacgatgtgttggcggccgtgaccctggccacatgtagatggatcctgtccagggattgtagtagttgtggccacctgggggagtggaagtgtggctggaaccaccgcggttgccaccggaggaccgaccaccgcgcttgccccgcttgccacggtgctgaaaggaaccgccgccactgccacgcccaccagtctgctgctggtgattgggtgaaggtgggcgcggctgggacgactgggatccagtggagctgccggtgttggacagggcagcgagggcagcggccggagcagcttttgccatcgtgagt

SEQ ID NO: 186503 - DNA, 494 bp, Zea Mays
actggagcaggaggcgagagtggcggcggcgaggagcacgaggtggggctcggaggtgatggacgccatgccggaacaggaggcagcggtagcgccggcgaggctcaggaggtggaactcggagtcgttggatagcatactggagcaggaggcgagagtggcgccggcgaggagcacgaggtggggttcggaggtgatggacgccatgccggaacaggaggcagcggtagcgccagcgaggctcaggaggtggaactcagagtcgttggatagcatactggagcaggaggcgagagtggcggcggcgaggagcaggaggtgggactcggaggtgatggacgccatgccggaacaggaggcagcggtagcgccagcgaggctcaggaggtggaactcagagtcgttggatagcatactggagcaggaggcgagagtggcggcggcgaggagcaggaggtgggactcggaggtggtggacgtcatgccggaacagg

SEQ ID NO: 186504 - DNA, 571 bp, Zea Mays
attttcacagaagctgcaagtactgcttttatgatctgtgccttgactgctgtgtggagatccgcagaggtgagattcctggaggagaagagataatgagagtaaagcctgaagatagaggccgagcatatctttttggtactactaactcaaaggatgggagtaaaaggttctccatgaggaggcacagctcatccctggagaatgagccttccaatgtagtaggttctagtgagggggcaaataactctctggagctgtggaaagcagaaagtgatggtagcataccttgcccaccaaaggagctaggaggctgtggcggttcgattttggatctcaagtgtttttttccagaaaagatgctttcaaatttagaagaacgagctgacagaattatgaggagcgaagtatttgcaaaagcagtagccaaaagaagtgaccagtgcccttgttatgaccattcaggaaacataagaactcaggacgtgcgagagactgcaaatacgaaaggctcaagtgataaccatctctactgcccagttgccactgctatcaaggaggatgacttggc

SEQ ID NO: 186505 - DNA, 319 bp, Zea Mays
caggaagcacatttaagatgtgtgaaaggcaaaaacggtgacgtgcgttagggaaaacctttttgatagctatcgctacatcatgacagtagtttgtaattattgaatgtggtggtttggcattcatacatcttaaccatgtaccaaaaagccacacataagccccaagagatctaccagcaagcaggccacaacctagtaacactggctgtgcatggtggttagttcccatgaatgacacaaactgcatatcatactgatcgctgaagtttgtgacattaatagcaacaacatcaccaaagtaattgtatgaactgcg

SEQ ID NO: 186506 - DNA, 1340 bp, Zea Mays
gggaagatggacattgacaccattagaatactacttagcgctgggccagccttttttgtactaaacttcattgaatgtatgttctctattgtaatattatagttatttttgctttatcttgattcctttctcatttctaaatgtaatctgggatgtgatcgatttatatttctacggttttttatattccatattttgtaggctgcttggatgtcatactcatgtttggtgcatataagacggcaagaggttttgctatctcaagattagttattcgatttctttggttaactgcagtttcaacatttgtaacctatctctatgtgtgagtactcacttagcttttgtaccttatactgtcaatgcacattaatgctgtctattcacttaaatgctgaatattgaacaggaaagtcctggaagagagagacacaaggaattcagattcgacttatttccgaatttatggtcttgttcttggtggttatgctgctgttcgaatcatgtttgcactgatggctaagatcccagcttgtcataggctctcaagtttttctgatcggtctcagtttttccaatttttcaagtggatataccaggtatgatgtcattgttcaacataacttggaaatatatttcgattacttatttatgcactgattatgtttttactaatttgttttcaggagcgatattatgttgggcggggactttatgagagtattagtgattatgccaggttctttcttttaccttaacgatttctgttatattatcatattgtggcacccttagtttattatgaactgtccaggttaacatctggagcagattttttttttaattttcaaatcttcacttcagaataccgatatctatctctatatgaaacctgtaaatattttcttgagtattgcatgtgaactagattttggttgaaaattaccaaggaattctgcttgtagtttcttttgtttcagggttggtacatgtgtcacttatcgcgaagcctacgaaattactaatttggaattgcgttaaaatagcttgacatacccttgttggttcatttacatgttgatgttaacagttagtggcaattgctcagtgtgattacttccagcctttaacagttactggcaattgaccaagatattaccatttagtagatttttgattacttgccataccgtcatttatatactcaccagacatcagttctctgaatagtgactagttctcacttattgttttcaagtgtgttgtgttatatgtttgtgacaattttttcttaagcagatacgtgatattttgggtcgtcatactggcatgcaaattta

SEQ ID NO: 186507 - DNA, 346 bp, Zea Mays
tttctattcgtcggtttactgctgataattcttgttctgtcgagtttgactcttctggtcttactgtgaaggactcggcaactcggcgccccctcctcagatgtgacagcaccggccccctctacacccttcggcttccgcacgccacgtcttcttcgtcttcgtcccctgacacagctgctgtttttgctgccactacgtcttctaccacctggcaccgtcgccttggtcaccccggacgcgatgccttgatgcaacttactcgtagtgccactatcccatgtactagatcacatgatgagcatctttgtcatgcgtgccagttaggccgccatgttcgtcttcc

SEQ ID NO: 186508 - DNA, 2043 bp, Zea Mays
cttggatggagaatgccatcaagttaaaggtattgacaatagtttcagtttcagtttaagttgcggttctgtcgttcaaatctgtacatatagttaggaatatggcactacacgcatgaagttcccggaacaacaaaagtttggacactttgtatatgtagcgggttccttttaaggcactccccacttgaaacaaaatttagccctaaatttgtgtcggagctaatgtaattaaaatgattaataatatattaactgtctaatttacctgctaatgatggtaccactggattttattttaaggtcctcatcaacaaaaggaaactcttccggtttttttgatagattttgtccttgaattcctctggcttccttccctactccaaatcaggagatagcaatgtaatataatctcccatcctttctcgcaaatgatgctgcaacgttgcatgcataagcagcatgtcatcaggactagaatgctttttcataccaatgctctgaaactagacaggtacctgccaattttatcgagtttatttccagcaacgcactttgattaattcgccttcttgaaacagtagataagttctttgctatctctcaggatacacattgttattactatctcctctccaagttttacgtaaataaaaacaacaagcacttagttcacattccaaagcatttcagtcattacaatggcagcaaacatgtgctggtacaaaacgacccacaagcacataagctttgtttggcaaggttacagctctaagctccacaacgcagttttacgcctgttttcatccaaacaccataatgtgcctcagctctatgttctgccaaacatgctgtactcaactactaaatacaggaatcaaaactagtaactgatgtttgaataacttgtgcacttccattttttatgaccaacgcctacggcctacctctgatcacattttttatatcagctatcacccctatgtgaaactgtctttctttaattagtttctcaaatgccatctaattaacacttttagctccgccattgccatcctgtcagttagaacagtaaacaatatgtgttctaaaatatttcgtcacatccagatgttgtatggtgcatgtcacgatcacaccaattgaattagaagtatctcatctcttgctgatatgaatggaaagattagaaagaatgttgcataaacgctagcatatggaccgctttataccaggtacatgtgcaaatattagttaacagttatgattgtattaggcaacaaataaacattttttttcatgcgtgctgtctttccaaaagcatgattagtttggaggctgctagtttgggagcaccttaaatttttccatgtgtagttcagggtttagccattaaactaaagtatgattaatggtctcctagacattttagtctttgtgctttttaaaaaaatcaacaaaaaaaatcttaatgtcctgttggaggcagagccaagtttggttcaaaatatttgaaaccagattgccactttaattgacttcttctgtagaaccgaggaaaaactataggacatcttttctcctgcagcttatgttgatcctgtgtggtccttttgcagctactaacttgactattttctttgtgcaggttacaatttgaactgctggcaatggggcctcattgttccttcatcttgatcctactgctatgcttcacccccagctctgctttgactggacataatgatataaatacattgttcaaactgagggacatggtcactgaagggaagggatttctccgtgactggtttgattcagaaaaagccccttgcagttggtcaggtataacttgtgtggaacatgctgtagtggatatagacttgtcatctgtgccaatttatgccccgttcccgttatgtgtcgggtcattccaatcactggctcgtctcaacttcagtggttgtgggttttctggcgagcttccggatgccttggggagcttgcacaatcttgagtaccttgatttgagccataaccagc

SEQ ID NO: 186509 - DNA, 556 bp, Zea Mays
tgtagtcaaggaagaggactggaacgaacagatggtgtgcataagggtgtagcaccgccaagattttgccgagatctgatcccctgacgccgaccgcgaaaccgaagcaatcgccgattgcaaacaaaggattcgatgcgccgatctaccaccgccaacaccacccactccgatccgcccccgccaacaccacccactccgatccgccaccactacttcgccactggaaacgagagacggcgcatgcaccgccgaggatcaccaagagtttgataccatatgtcacgacgagacggcacacacactgctgaggatcaccaagagtttgataccaactgtcacaacccgtggccgccgacgatcgcttgccgggatgtgagacgaccagatggtggtagagagccgaggagttcctcgtcccgtttctgatgtatttcttttttgatattgtttcttacacagttccaatgttttatccctcacacacaagctgacttcctggccacacatccatactcagcacttatgtcggacccacttacagacacagactttc

SEQ ID NO: 186510 - DNA, 544 bp, Zea Mays
ctgctgtatgcgtgccatgccatgccttgccttcgtcgtccctacctcatctcgacatgtctgtgcagcgtgatgttcgagaggctgtcaggatcggggagcgcgcacagagacgtgacccagcagcacataaacgagtatgccgacgctggcctgagaacgctggtgctcgcgtaccgcgagctgaaggcggatgagtatgcgcacttcgacaggcagttcgcggcggctaagaactccgtcagcgctgacagggacgaaaagatcgacgaggctgcggacctggtggagagggaccttctcctcctcggcgctaccgctgtcgaggacaagctgcagaacggggtgcctgagtgcatcgacaagctcgcccaggccggcatcaagatttgggtgctgactggcgacaagatggagaccgccatcaatatcgggtacgcctgtagtctgttaaggcaagggatgaagcaaatcaccatcactctggagacagcagacatcgctgcgttggagaaaggcagcgacaaggccgccttaaccaagg

SEQ ID NO: 186511 - DNA, 358 bp, Zea Mays
gggggattcaactggcagcctgcgggccccctttggattacgtcgctccaccaacgccagcagccctgtcttcactcgctccagtctgggatcaacatattcttgctgctaatttccagactgttgccctacatccgccaccacagcatgaatggcacttcaacaccggcgccaccaaccacatgacatctgacgctggtacaatctctcccacacctccttcacagcatcttccatctcatattgttgtcggtaatggaaatctcattcccattaccaccactagcatagctcacctacctcacgatttatccctccaaaatgtccttctctctccatcacttattaaagatttgat

SEQ ID NO: 186512 - DNA, 666 bp, Zea Mays
ctctagtgctgcttggtaatggggtctgcatgcaatatggtgttcacatgtgatgatacaaaaatgtcaaactcagacatagataaagtgaaattgtttctccttttgtatttccttacaaattgggtattacagaaacttaggttaaaattattcactttgagttattccgaaccaagcacctaataataacttagattatacagaacaatcaagtcgcatggctaacgcctagtcagcgtttgaacttcggacagtgagttattccgaagtccgtggccttctcgatgaggttggtgagcgagtgctcgtactcgaattcagtgaggtcgcacaacatcttcccagcatcccctcccgctgtcgccccgtgttctgttctatagctagaaatacggtggcgatgtgccttgtacaagatgcaaaggcgtcaacgtttttgtttgttactttgctgttttttgaaattgacgggacctgaacattgtctagtcatgagaacacaaatcatccgcagattattgccccgaaatttgtattgctcactgtctgggagagtttgtccagcattccacttgaagcaaattggttgcatatttgaatcctcaacccaatctgcacacgtgtctatctacaattgacctggtacaacaattcaacaacgac

SEQ ID NO: 186513 - DNA, 792 bp, Zea Mays
ctgccacatccctcagccactcacgcagcaccgtcgtgcgtccctggagatcgtctgtcactgcaaatcagcattcaagtctcctgtacgaggcgccgctggatgccagcctaggtaaacctactgaagacgaggtcgatggatggacaacggtccgttacaggcgtcaccggagggtcaacacacctgcgcattcaagcctcccaacaacccggcacactgcgctgcgctccccggccagggaggaattgatggcaagcttgagaggtaaatgcatgcgctgcttgtccagaggccactttgctgcagattgcagggatccactgaaatgcctcaagtgtcgaggttcaggtcatatggctcggcagtgccctcagagaagtagtagcagcagcacaccaaccactccacccccacatctcgacggcccctgcttcccacctcttgtccagaccgtcatggtgaggcccggcgacccggacgcccgtccgaaggagacgttcactgtggcggcctcctcccaggagatggaccgggagcttgacagtctgagcacccatgccgtggtggcctggctcggaggagttcggccggacacaagccttcgcacggtgacgagggcgttctgttcccagttcggcgtgcgtgcaaacgacatcaaggtggcagagcattacccagaggacttcttcatcaccttcacgcaccgtcaccacagggatgcggcggtggcgcaaagagacttcaaatacggcagcatcgacttccgcgtccgacagtggcagcttccaa

SEQ ID NO: 186514 - DNA, 571 bp, Zea Mays
ccgatgtgttcaccgggcagttttattaaagttgctggcctattataaaagatgacattctggcagctgtttcaactatttgggggagagacttcaggaatttcagattccttaacacagctttcattgcgctgctaccaaaacataacgatgctattgctaccaaggatttcagacccattagtttgatccacagtttcaccaagttggtaactaaggttcttgcaaataggttgaggtgtcatatggaggggctggtctctaaagctcaaagcgccttcatcaaaggtcgcttcatacaagacaattttatgcttgtccagcagacgacaagatttttccatgctaaaaatcagcccagaattctcttgaagctggacattcccaaggccttcgactcggtctcttggcctttccttcttgaggttctggaaaaattaggctttggtcccgtgtggagggatgtgataagtggttttcttatgacctcttccacccagatcctgctcaatggggtgcctggaaggttcatttctcatagaaggggcttgcggcaaggtgaccccttgtc

SEQ ID NO: 186515 - DNA, 340 bp, Zea Mays
tccggtttagctagtcgtgatgttcccgatgaggccaaggcttttcctgtgaagtcagtaacgtcaaagggttcaggtgaaaggagtgatctttcttcatcaaagcaaaaaaatgtctcacatcataaccatttggaaaattccaagaaagcaaggcaagattatgtaggttttcctgaagacgagagcaaggaatattttcaccagtcagatgtgcaaagatcagatttgtctagtaagaagaggatagtgaagaaatgggaggagagtcagtacaatccagtagctcaggtaagcaaaggagctatcaaggaaacctatagggatcagaacttaaagg

SEQ ID NO: 186516 - DNA, 1547 bp, Zea Mays
caggatgcttctgaagctctattcttcagaagtgcattcaagaatgtcattttcaatgctactgaaggtgttaaaaaggaatcacagtcagtgtccctcaacaaaagtttggatcctgaaggtaccatttatatgaaaaccaattgagagcaggaccagagtgttaaatctgcaaatatctgcaatttcgtgatgaatattttgctgaaaaaaccgatacggcatcgtgtttacacatgtttgttaaatatatcaaaggaagttcttcctactctagatgtctagagctctctgtctcccactctcagatgttttattttgtgtgcccttatgtattttataagcaagttcccagatagaatccttgtgcccttatatatcaacggattttttttcttttgaaaacatgcacattacatgtatttataataaaatgtaaaggggaataagaagaaatgatgtatttctatttttggagcaccacatgaagtaatcattttttttgtcttatataatactttccctgagcagatatcgttgtccagttcgtgattagctgtcctcggctcgtatctggatctactgtaagtaaactttatagatgtctttatcttttataaactatccttacctgtgttaatcagtaacttatttaatcaactcatacctacttgctgctgtcccccacgtccactggtaacaaacttaaggtcatcgtcactggaagtaaccctcaattaggaagatggcaaactcaagatggtctcaagctgagctatgttggagattccttgtggaaagcaagctgtgctttacggaagtctgagttccctataaaatatccttttgcaaatgattgttcccttaatcttttattggatgcgccacttttagctgttggccgatatcacgtccttaattttttttctgagaatgattgtccttaacatcttctccacatacaaatattgtcaaatcagtcaagcaggaaactctacattggagcttggcccaaacagggaggttaatgttgatttatcatcacccaagcaatccagatatattgtgttatctgatggtgctcttagggtaatgttttcaatagtgttatctgcaaagaagcatttgtttattgcaagagaagtttctaggaacttcttagccattttaactagaaaccatcgaccatgctatgatgcaatataatcaattaatagtatgcagtatacatgaacatgtgtttgaaataacagaaccatggaactccacacttcggataacaaaccagagaatcagtatgcatcaatgcatcatacacagccaaattgtgtataatacttcatctgcatctaccaggatgcaccatggaggggtgcaggtgttgctgtacccatgttttcaatcagatcagatgaggaccttggcgttggagaatttctagatcttaaacttcttgttgactgggcagtcaattcgggcttccatcttgttcagctccttccaatcaacgatacttcagttcatgggatgtggtgggattcttatcc

SEQ ID NO: 186517 - DNA, 364 bp, Zea Mays
atgaaactgtggaaggaaggctcttggtgaagatgtcagtgaactacgaagtggctgagacgcggagaacatggacattattgacagcgacatgctcgcggacaaagtggaggtagatgatgcacacgattggtggagtggtagactgtattgacgttatcgtagtagacgagggtgccgtgcgttactgtgtgagtgggctgtggacctcatgaagaagctgatgaagctaggaagcctcgaccacaccattggacacagtgcgatactcgacctcgccgatggagcgggagacaagcggtcatatgttctggacatcgatcgcctgagcgtggagggtggcgatggcggcgacgtcgaacct

SEQ ID NO: 186518 - DNA, 470 bp, Zea Mays
ctctgaacattaccctggtgtatgatagacagagccgccagcagatccaccttaatgatactccaacaagatttatagaacctccctgtaaacccatcaggcccaggagccttatcagacggaaggcacgcaattgtgtctaacacttctttctccgagaaggggcactcaagatcactgagatccacggcctctctgtgacaactcgacaaattaatagtgctttgcctctgaaaatcagcacccaaaagaccggaaaaaaatccatcaagcacctcctgcatatcctcatggttagagaccactcttccttcatcttctagatatgaaatgaaatttcttttcttcctgaaacgagcctgcatatgaaagaatttagtatttgcatccccctcttttaggtacttaatcctggacctcaatcgtgcaattgttctttccatagaagcataaacaaaacaatgttgctt

SEQ ID NO: 186519 - DNA, 372 bp, Zea Mays
tgaatatgcagcatcactgtgaagaaattgagaaggaaatatcttctgccaagaaacagttagaagaacaatcttgcattattgcccagtctcaagctgaacagaaacaacaatctggggttataacaaaattgcatgcaagaattgaggagctagagcatatggaacaagaacataagaagatgcaaagacaacttgatgcatacaaagagatgagggacaacatgttaagagatgctcactgcctaaaagatgaaacttcaaagaaggaaagcaccctgcaggtgaaattgagggaggcattaagtgctcttgatgaagcaaactgtgcccttgctgacaggaagcgtgagctgagccagttagaaatca

SEQ ID NO: 186520 - DNA, 1028 bp, Zea Mays
cgggaaactcctacgtatcctgaagcactgattggaaggggcacagcttatgcatttcaaagagaattggattctgctatttctgatttcaccaaggtagacctttagatattgagaacctccagtgtctgttatagtaaaatgtaaaatggcctcctcttttcttgcaggctatacaatctagcccatcggctggggaggcatggaagcgacggggacaagctcgtgctgctttaggagagttcaaggaggtgcactttctctatttctctaaatttcaaaactcatgttgattgagacatcgagtcgacaaaattacatttagtcagtgaggcaaaaaagaaacaataaagatcatctagcaattcaatttcaaacatgtatctatattacatatgaatcctttacttttcaggccattgaagacttgactaaagcattggaatttgaaccaaattctcctgatattttacatgaaagaggttacttactcttgcactcatgtttgaattcttactagcaaagtgcccacacgttgttatggtttccatttatgcttgaatatagagtataaaacacaaatacatgtgtgttctcttggctgggtgggtgtgaatatgggtttggactttggagccaacaaccatagtttgaatctccatttgtgtatcattttagcttttttaccgttgaaatgtggaagtgaaggttaacgcaagggaaggggtgacacaagatgacgatggaaactgatgctttatatagagagattgccattgatgccacttgccatttctcgtatatcttttgatgggaacaaaacgacaccaagtctttatgctcacttcatgtctatacagtaataaagctgtataactatgcttctaggtctggaatgccatcttcacatttttctgatagcatatcttgactcacaataggaattgtgaacttcaaattcaaggactacaactctgcactcgaagatctttcgacatgtgtgaagcatgacaagaagaacagctccg

SEQ ID NO: 186521 - DNA, 289 bp, Zea Mays
caaagaaaacgatggacatgttgggacaatcaacaattgtgagatgcttgatcagcatagtcagggtaatgctggtggtataacttatgatagaaatgtcgtaggccaggaaatccatgcaaccccagatacttcgtatgttcagcagtatgcttatgctgataaaacacgatctcagttgaaatcgtacattggtcaccgggcagagcagctctatgtttacagatccctgcccctaggtcaggatcggaggcgaaacaggtattggcagtttacaacttcagcatca

SEQ ID NO: 186522 - DNA, 500 bp, Zea Mays
gccgctgagcggcagtgaggtgtcgatgcaggggcagaagcggtgcgtcaggcaggatagtagccagagccttacctggattggacaccccgagtccaggttcactttcgatcttgtcgctgacgaacatgtcacgcaggtgcttttgctgctctcgattctcagtttagcattcgtccctctttccatctgctgacttattttcgtgctaactgtgcaaaatgcgtaacttcaggagggcatgttcaatgttgccggggtgcccatggtggagaactgcatagctggctataacagctgcatgtttgcttacgggcaggtaaactgcaggtttcacttgctagtcgctgctgtaaatactcaagttttaagattgcattattctgttattacaaaattatctgcttctgctagactggaagcggaaaaacacatacaatgcttggtgacatagaaaatggaacacggaggaacaatgtgaattgtggtataactcctcg

SEQ ID NO: 186523 - DNA, 346 bp, Zea Mays
cacggagaactacacttttgttgtagccaaccttcaatgcaaagatcatcacttatatggcgcctttgctctgcaaattggcttcaactctctttgaaaaccatttctattcaccaaaactgattgaaagcgaggactggaccgcagcccagttcgttcgttcgccaggtgtgcgacggagcatgggtccgatccctaggatcgacaccccatgcctcactctggggtttttcccggtatggtttacacatgtgtgtgcggtcagtggttctgcgtgtttgccacacactagatgactaggcctctcaatccctttcgaatgtgtgtattggacacatgtgtgcgt

SEQ ID NO: 186524 - DNA, 529 bp, Zea Mays
tatggtttcatctagctattttgcaggtttgaggctcacatggaagttcatgttggatcaattgatgaggaggaggatgagcaaggaattgcccatatgattgaacatgtcgcgtttcttggcagtaaaaaacgtgaaaaacttttggggacaggtgcgaggtctaatgcgtatacagacttccaccatacggtgttccatatccactctccaactaaaacaaaggtctttacttttctgtccttatttctttgtggaacttatcagtgtctatttccaatttggaaataagcttatgataatttgtatttggtgaagcccaaatttgttttcttgtttagttgtccttggaaaaaatcatacgtaaatggactgaatgtatttgttgactgtgaaactataatttttagaacttatgatcctagttagatgtgttccattgtgatatttaatgtttacatataagcttgtcttctatctgcaggaatatggtgaagacttactcccttctgtgctggatgcattgaat

SEQ ID NO: 186525 - DNA, 598 bp, Zea Mays
tcatggttctggaaaacatgcgccttctggtatcatgtggtccttcgctgctggctccaatttggcaacatctaccctcagtgctgaaaaggagtcgcggaaaaatctgaacaagttctacaaagaacttcgaactttgaaaactgttaacatggctggtaactcaagggactaaagtttgaatacattgtctggaaatgttgggctaaagctccaacattgtgagtgataactacatctcaatttgcttgacaggtcgtcagtttggagatgagggcctgttttttctagcagaaagcttagcctatgacaaggtctgatattttaaccattatctgactgtacccaatattctatatgtatatttggctatttgcacacttagctgctccttgctcctgtaccttagcagcttaatctcatttgaatgatttagaaaatgaatgtttgttcatgtgcattttcagagtgcagaagaggtggacttttctggcaatgggataacagctgtggggatagaagcctttgatggagttcttcagataaacacaactttgaaaactctcaatttatctggaaatgacatcggggatgaagg

SEQ ID NO: 186526 - DNA, 504 bp, Zea Mays
ttcatttcgagagcttttggcctaaactcccgggttttatggaagaggttgctgcttcttgggaccagccggttcaggcttcttgcccttttgagagggtgtcgataaagtttaaaagattagcgagaagattgcaatcttgggggcataacgcggtcggcaatgtcagttctcagctgggggtggctcgtgaggtgctgcacaggatggagatggctcaggacagcagggtgttgtcgtctgaggaggtgtggctgctgcgcaaattgaagcagcattgccttgtccttgcttctttggaaaggacagttgcacggttaaggtcccgggtccattatttgaaggaaggagatgccaacacaaaatttttccacttgcaggctcgccaccgcaagaagaggaattttatctctcatttggaggatgagggaaggttagtcaccagccatgatcagatgcaggaagttctggatgatttcttttccaatcttctgggttctattg

SEQ ID NO: 186527 - DNA, 721 bp, Zea Mays
gattcactcctccatctatcaatgtggtcaatggtgtttgtcttcctatcactactactagatcacacacttttactttaccacatcacaatcttgttcttaacaatgttttggtgtctcccaacattactaagaatctgatttcaattcatcgtttcgccatcgatagtaattgcttcattgagtttgatactattggccattctgtgaaggacttgcatactaggcatgtgatcgtcaggtgtaatagcctgggtgacctctacccattctatctaccacccactagcgcctccgcattcatctctgcactcacctccctttggcatcatcgtctcgggcatcttggtcgtgaagctttgtccaagctcctaagtttcagtgtcatttcttgtcataaatatgatatcaaccatatatgtcatgcatgccaactcggtcgccatatatgtttacctttcggttcatctagcttttgaggtattcataagttcgatttaatccaccgtgatccttggacatctcccattgttagtgtatctagataaaaatattacctttttattgttgatgattgttcacacaacatttggacgtttccactccgtttagaatcagagacattttccactctttctatttttttatattcgcacacaattgggcaccacgataaagagcgtctagtgcgataatggtcatgaatttgataattgttagg

SEQ ID NO: 186528 - DNA, 694 bp, Zea Mays
tccgccactttcctctgcgttttttttcgggatccttttgtctttccatggtagggtgcgatgacgaggtacacacaaccctgatcaatcgcctccgatggcgatctgatgttcaccttttacctttggttcgtattcgctgagcatccgatcttcttcatctatcgaggccagcattttttgtttctttttttttcttgctcggtttgctttggatcgagggacctggggatccgccgcccttcttcgtgcggcgtcatccagtttttacccctcgaatacggcttgcaggcgcgtcctagccatctcgctctctgcataatcctctgcgagacccgggctcgtatgccacattcgtcgttgtcaaactaaacaaaaaaaataggcttttgtcgcgaagatcccagcagagaggtgcgctgatgcctccctaacaatcataatcttcgcagagaaacgctcatgatccgtggtttcgtggatgtgtgatttggatttttgttccattacatctgtttccacggcgacattttcatgattactgcagcgaactgaacgagggacctatggatggactgctctttgtccgtgttgtgccgtccaagtttgccttcggatagtaaaaccagcaatctggtcacgagatctcgcaagccttttcatgtttgtgggaatggtgtgccaatttgccaaa

SEQ ID NO: 186529 - DNA, 502 bp, Zea Mays
cttttgtttgctgccctttgctacattcatacacccataccacaaagatattagcatgccctgtagtggtgcaaataatttttactgaagctttgctgggatcattgatgtcacctatgctgatgtgcattctgcagtaaccatcattgtctgaaccttttcgctgtagctttatgatgcagcagatgtgtttgtaggaaaggtttatagtaggcgcgttaagccacagggggctggtaaggcctaacggattggctgagccatatgggccaccaagataggctagaggccttatccagattagattgggtcacaggtttatctcttagttggttttggagtccctgttatcacggcatggcctagattataaaagcctggccatagaatgtaataggtatccagaaattaatatatcctccagtttggagggttacctgggtcaccctgggggcacctcgccgcatctgtgacacgagtaacactccttgtcccatccact

SEQ ID NO: 186530 - DNA, 693 bp, Zea Mays
tgatagttctgaggatgacagtgatgatggaaaaccttacaaggttataccaagaagttcgtaccatcttgtcaacaagaaaaacaactatggcattgcatttgttgatggcttgctagagtttgtgaaaaagccgggaaatccatttaaagtgcaggtttttgatgaatctattttttctgatgcttcaagacttactgttaaccatatgaaatgggacaattatacttacttggatgtggacgatgatgtgcctttttctgtgagggatagattggcaagtggtgcaagttctcaacatgtaatcatcaatgttgacaagattgtttttaccatcactcatgaagtctctgatactgatatttttttcccacttgtccaaacctgcataagtgatatccgtgttgttacgcaaatatttccatctaaaatcaggattctaagttcattcaaagtctcagcgcagtatttcattgcacgaagaaatctgtggtcagtcttgtgctaatatctatatttgttttcctgtctaattgcattttgctggtttcttccaaacttgcaaggagatttggaattgagttcttgctatttgacacacagggaagaactcatctctcctatcacctcctatacattctttcgatttaagttttttaccccagatccagttactaagtatggaaagacggc

SEQ ID NO: 186531 - DNA, 343 bp, Zea Mays
gccaaaataattacctaatgctaactgttctatcggactaatgggtctgttaggactatgaactgtccaccgataaagtttgtgaaaaacaggagcttacctcccatgcaatgtcaagtgattagatttttgttcaaattaaaaggcaaactattgagcaaggtaaaggaagttattgtctttactgctaagcaaagcgaaggagcaagaagaatgacctcgattgaaattaagtcacagtaatttcataggagtgaaatggagtgatataatttgtagaaactaattgtgaaaatgtaggagtgataaactttgcagaaaccaaatcgaacctggcaccgaa

SEQ ID NO: 186532 - DNA, 383 bp, Zea Mays
acaagcaggagggggcggcggccctggaggagaagaagaagaggaacatggccaaactccgcggcggtgcctaggcccagcagagcagatggatcggagcaggtgcctaggcccagtctgccaggccgcgctgcgctcccgtcatcatctattcatctcctcacccagattttgcttccctcgctcgctctctcattcgtttgtgcagctgattacgctaggtctatttacgcaactgtcgtgtgtcgaattttaacagcgacggccatgcaccaaacccccaccccacacatcattttctttcttcctttcttttgattcgacgacgcctgtgattcatgcatgctctcgatcgaggcaaagctgttgtatgttgttatggt

SEQ ID NO: 186533 - DNA, 469 bp, Zea Mays
accataattctcattctgaagatttggagaaacaaccagcagttaaagaaccaattaaacggtcaacacgtaaatctattgctttggctgcacttgagaaagagaaggatgtaattgaaggaaagaaccctgaagcacatgttaggcgatcaacgaggaaatcagttgtgcaggttaaagataccaaaagtattgttgaagagactcaatatgctaacagtgaagatgtggcgaagcaaccagcaactaaaggacctgctagggggctgagacgtaaatctgttatcacagaattgcatgagaaagagaagagtctcattgccgaaaagaacatggaaacagatgaagcgatattaacgcggaagcctgtaatcccagttaaaaatattaaagctgttggtgaaggaattcaaattggtaagggcaaagatgtggataaacaatttgttgtgaagcaacctactaggcg

SEQ ID NO: 186534 - DNA, 328 bp, Zea Mays
cctgccaaatgctgcagtcagcccagatgttgcaaaagtttcaagttcaagcatcaatgaagaatctgatggtccctctcctaaactctctgattggtctagaagaggatctgctgatatgcttgactatctccaagagactgataacactatttcattggatgacattaaaaatcttccttcaatgacatgtaagactcgttttggaccaaaatctgatcatggaatggccacatcatccgctggaagtatgactcctaggtctccattaactccaagatcaaatcatatagacatgcttttagctggtaaaaatgcaattaatgag

SEQ ID NO: 186535 - DNA, 1714 bp, Zea Mays
tacaaccatgtggggtaatccacattacgaggcttgcagcagcccatcagctggacaaacgaggaactcctcatcagggatctcccatcggaacaaggtagctaaagcctttatctgactgacggaaagaggcttatcaaattctctagcgcagcgatctagatcatccgcagaaacaggagcctctccatttttcaaccccagcttcaaacaaatagtgtgagccgctgagttcaccctaaggggaggaagtttggctacacgtcttgatcttcttggcacgaagttgggcgggatagactttctggctttaagctttggagatgaaggaaccggcaacacatttgtgaggggctttacgatcttgttaatgaatgtcatagccacctcctcctctgaagctatacgactttgcttggggagttttcttcgagaatacacttgcaagaccttgcaaggctgctggaccagggtaggagatggccacataaagtccaaggagctgtgcaggttatcattctgctcaaaagacaaatcatcagaatccactgagatctgagaaccgactgtgtccagatgagccaatccaccattctgagcaggttcagacaccataagagcagaagtcaaagagtcatgagcttcaccaatctctgacagcaccaacgagtcatccacttttgaatctgcacgagatggcgccaaaacagcaggcaccaaagcagaaaacagggagccagaactagaaacctcccacaaggtagcagagtaacgaaatctctccaccctaggcgtcatccaactaatatccgaagtcattaatagcactgcctgattaaacatacgggccaaggcattaactgccgccgccccacccaaaacgtccgtattaaggcatgcaaggggggacgccaaagcagccgcccttctgacagaacccgaggagccattcatcaatgaatcagagataaagggtctaaccccaggcgccgtcagctcagcttccgaagcaatcgggagagcgaggctatcaactgggccgcccttaacagagtaccagaggtcattaactgacgtctcaaccgagataccctcattaaagcatgcatgggggggcaccaaagcagcagacaaactgccaggacccgaagagccaatcattaatgaagcagatatcaagggtcccatctcaggcgccatcagctcagcgtccaaaacaattgggagagcgaggctatcaactgggccgcctttatcagcactaatagaaactcgcggaccaaggcgagacttaaccgaagcacgaacagtcaagtcatggaaaccgaaccgtctcttccgctgaacaatatctcgatcatcatcagactgatccggcaatggtggatgagaaaggattgtctcacgtaccagccgatcatccaaacatgaagccaaaacagagataggatataccagtgatcggggatacgacgaatccacctcaaaagccacaggtggttcctcaacatgcagatctacaattgcaggcaacaatgtcggtacaaggcaccatgcacgaagcttgaaaacaaccctgttgttgtcctcaaaagaacttggaaggatctcatgaatcatacaaagaccaaatagaagactctccactgtttcaatcctccaaagatgagcaggaggatccaaccctcttttctgcagtctatcagctgtccaa

SEQ ID NO: 186536 - DNA, 779 bp, Zea Mays
tcttgaagatcttgaaaagcccggtgtagatgatgaacctcagccagttgttttgaagtatgaagatgcttaccaggttaaaactctgttttgtattctatcacttgggcttactttttgcgggtgctttacttctactctcaatctgtcaaagctcatattttgaccttgcattctgattagcatatcctgcccttctttttgccagtaccaaaatgtttttgcaccactgataaagcttgaggctgattatgacaaggtactgtgttctgattacgagaccatgtttcttatcttttccataacataattgaattgtgttgctgttttatatgttgctgtagatgatgaaagagtcacagagcaaggataatgtaactgtccggtgggatattgggttgaacaagaagcgtgtagcttactttgtctttccaaaggtttgtttaagatctgaaatatatgggattagtgaattaatatcatcattatatagtgatttgttgtagactatgttggtattgctttgtgatactcttttgcataacatgggaaacaattgtgtattttaggaagacaatgagttgaggcttgtgcctggagatgaactacgcctgagatatcctggtgatagctcacatcccacatggcaatctgtcggacatgtggtaattagaaacatgttgataatctataaattgggccagcttgatctttgtgcctgtgctaagtatattgttctttcagattaagctcactgcacaagaggaggtggcacttga

SEQ ID NO: 186537 - DNA, 656 bp, Zea Mays
cagaaactgatataattgatgctcttactgttagacttccttatctaggggtgactatccttcctcttcagttcaggcaggtaaaggatcctatggatatcatccgcatggtgataacatgtcaagcaggtgcataccttcattttgaagagatcattgatgtcgctaaacttctgggattaagaagtgaagaggaagtagcggatgtggaggaggctattgccagagaagctgtggtaaatggtgatcttcaacttgcccttgatatctgtttaaatttaacaaaaaagagtcatggtgcagtgtgggatttatgtgctgcaattgctagaggccctccacttgacaatttggatactggtacccgtgaaaagctattgggtttcgctctcagccattgtgatgacgattctgttggggaattgttgaatgcttggaaggagcttcatgctcagggtacttttgagaaattaatgattacaaccgcaacaaatcctcccaatttcttgattgatggatcttcaatcacaccacttcctgtacaaagtgtgcaagacatacttgacctgagagatgacaatggccatgatagacgtagcgaccttgtgggaattgttaaagacatgctgtcaaaagtttgcttggacttttctaat

SEQ ID NO: 186538 - DNA, 296 bp, Zea Mays
cgccatagcatcgggggtcgagcagctcggcgaaatgacgcagctgggctgaggagagcggtcgatcgagagatcatccatcggggtcagggactcagggtgtgagcgagggtgtaggtagggtgggtaaagatggacaagatggagagctacctgaacgagaacttcgggggcgtcaaggcgaagcactcgtcggacgaggcgctggggcgatggcggagcgtcgtcggcgtcgtcaagaaccccaccaggcggttccgcttcaccgccaacctgggcaagcgctccgaggccgc

SEQ ID NO: 186539 - DNA, 470 bp, Zea Mays
ggcaactactgttgacgagcctgtcaggccaccgagattcctaagataccgtttggattgttaaagatgggcctttcttatgcaattttcccttaatctgcttgatctttgcatcaacccgcgcagtgaaaccaatctttgttttctgcctggccttggaccgctccctcttccacattgtctggtcttcgacatctttctttagatacttgatctcttgaatcacatggtgatcaagtggattgcacgatctctggtaggatatgtgtatcaggtaggggatgttgcaagcagcagtcaccagaagcgtccctgcccagtatatgggagctggcccaaggacttctaacaggatctggtagttgtcgccggacctcaatgtcatcccgtaggcgaggatgaagatataccaagttgttatgctgccccatacaaagagatgttgaatccatgtgaaatggctcattgtt

SEQ ID NO: 186540 - DNA, 2142 bp, Zea Mays
tgtactcgagaaggttgcttcgcagcagactgctgaaggccggtggtcaggcggccggacgcagggtggggcgtgggggacagggagggtctccggccaggcaaattcggctcagggtggcagccaaacaagcccctgatgccggagcagtctagatccggcgccccgatggagtggacgacggtgcagcacctggatctccgccactccggcggccgccgcggtgcctcggcccgccctatgcagccgcacgccgctgccttccgctcctcccaggccatcgtcgctgtggccatcggcacccacgtcgtcggtgcgttatctcttacgccgcttcgactacccagtcactgtagccttgtagttgtagatacttggggtaaagctgagggtgcttgtggcacgggttggttgtaccaatgctgatctgggggacactgatatccggttgactcgggtgatggaaacgaaggaattgaaggggagtcagatctccactgcctggaagtctaggtttaaagggagcttgtgatcaactttgtaggattccattttagaactattgcatttcatgagtaatgttcacatgtagagtagattacatgaaccgacaatagcagtttggttagtttatggatcagtcccatagtttgatctgtactttcaatgatgattttgttagccaaagttaaacacctgggttttggtatgaagtaccatgtaagtgaatgctatctaggttacatctcactaggttttataattcagttgtttgtactgtgtagtgtgtacccgtcgcagatatatgtggataactaaaaaacttgtggcttagaatgtttacaaacatggtatcatcatgactagttggtcgtaaccatggtatcacatttgcgcccctgctgtcctcaaatattgaatggtatttaagtagtttgtttattcattcatttaacctttatactctttgttgtggaaatcacttgactttctgctttgtgataaccaaagtaccaaaccttatttctatcaaagatggcaatttaaatacagtgtaaacgttgttactactaaagtttgttgaagaaatcaatggatttctctagttgatgtttatcttgtgtggatacaatcatacaaatcctttgagttgtctcagttttctcatgtgtttgcagagttcgatgctctgtcgggaagcaagatagcttctattgaccttggtgcccgtgttgttcgtatggcatatagccctacaactagtcatgttgtcattgctattcttgaggtatgtattagagcttcacttgttttttttcttctgaaaaagcatttccttttattgctagaaccgaagtgccttcaaagtaaggcaaatgcttatgatactgttcacagaaaatcataagagtgacgatgcttcgttcttgttagtaggaaactaggcatacttttagcacttttatctagtcatctgccatgcagagtgaataatattattctctagcagcctgaatgcatgcactgctattggctaatggctgcgagttttgcatcttttattaatagcttgttcaactgttgacccctttgttatctcttgttctgcaggatgctacaatcagatcctgtgatttcgccacggagcagacacttgtgctgcattcgcctgagaaaaaaacagatcatgtttcaatagatactgaagtccatcttgcattgacacctcttgagcctattgtattttttggtttccacaaaagaatgagtgtaacaggttactctcttagcttggcaggttaccttttgtgtttgcttgggaggcttaaagtgatcctccatttggttttgtttttacaggttgtatttccacgtgttaacctcttgttttgttctagttgtagggactgttgatggagggagaccgccaacaaaaataaagactgatcttaaaaaacccattgttaacctggcttgccatccccgcctccctgtcttggtaaacagccatatctttacttttttctgttttttgattttatgttgtcatgtttctgcctttacgcatttctgaccaagcttatgatttagtatgtagcttatgctgaaggcttgatacgcgcctacaatatccagacatat

SEQ ID NO: 186541 - DNA, 492 bp, Zea Mays
attccgtaaaatatgttctgagcaacagataggaagaactaaggtattcctgagggctggtcaaatggctgatctggatgccagaagaacagagatgcgaaacaatgcagcaaaaggcgttcagagtcaattccgtactcatgttgctcgtgagcagttcctagtactacgggacacatctatttatttgcaatctttcgttagaggtaaactctttccgtatagccctgggtgtaaaatgcatgcttatggagtcatagtggagccttgtacatatactaagatctttattttcaattacagccagattggcatgtaagcaacatgaattcctgagacaacaagcagcagctttgagaattcagaaaaatgcacgatggtattttgcctggaaaacttattaccaactacgattgtcagccattacattgcaggccgggctaaggtccatggcagctcgtaatgagttcacctttagaaagaaaaataaag

SEQ ID NO: 186542 - DNA, 683 bp, Zea Mays
aaggaaaaatagtatgccctcctctccactcccttccttgatttatgtgatgtgtgggattttgccatatgctagcttgcaaaggtgcaattttcatctttaggcactgatctgcctctcctttggacagtggaaagcttcgagctagacaaaaggaaaggattgctcagcgacacattatcaagaactatgctgatgataatcttgaagagttcatgactccatacgactctattgctaatgaacctgctgaaaatcctttggtaatcgtagaagatctaaattcttcacagctatctggcgcgaaacgtttcagtgactcaactggagaaatgaggcaatcctccaagaaatcaaagagatattctgaaatccctcaagatctttatgccaaaattcctggtaacacagcttcattcaagcaccactcaaaggccactgatgtattcaatccagggaccccaaatcacttgctacctgtacttggcctttgtgctcctaatgctgatcaggtgaactcatacaaaaactcaatttgtgcaccaagcataaaggagcgtaaaagggccagtggtgacattgtcaaacaactgtcaactcctgctgaccattctaatgtgcatagaaacgaagctcaatcagcttctgataaggccatctttcctggtgcatctgaggaggct

SEQ ID NO: 186543 - DNA, 633 bp, Zea Mays
cacccacttaagggtgatcgcgcgatgaccgtgagggagatcagcgagcttccaggcgtggtttgtctcaaccacgtccatctccgactgcatcgctgcacgtcaagccacatgtttctcggcctctgtgaaagaccgaggcttgccatcgtcgcacgcaagatgcaactctcccgccaaaatgcaagacgccgggcctgacaccaacgggtcgatgagaaggccctccactgtacgataccgcaatggctcaccgtcgtggcacgcgtcaatgcgctcctcatcgtgggagaacggggtaacgagctccaccgggtcgtgctcaacacgagctggcgtcggaggggacgtgcctgaaggggttaccgtcagtactagagtgcgttgtggcgaagagctcgttgtagttggagctggagagcgtggaactggagttggtggagacttgggggctggggtagacctgctcggagaagaagagttgcctactcccccagctccctcgacatggacgtactcgatggtgaagtcgtcgtacgtcagagtcgtgttgtcgtccaccgccttgtcccatgcccatcctcgaccttcgtcaaacactacgtcgcgcgccgttcgcacacgctgtgttcc

SEQ ID NO: 186544 - DNA, 674 bp, Zea Mays
gttgtttgtcgcagtgtcagttgtagctgttcgaggtagtgaatctttacatactataaattttcatggtctaattcaaggcaaagaggccctagtgttggtggatttgggaagctcacattcctttgtgagttctgccctggcatctagtctgacaggcgtcgtcaacatgcccaattctgtgatggtgcaagtagctgatggaagttgtctgccatgttctagtcagttgtttcagagtcttacatattgctgcgtacgatatgattctcggcatggattggttggcgatgcatagtccgatgaagatgcattggggccagaaatggatgcttattccttaccgtgggtcttcagtattgttgcatggatgttcagctgaattgctaccaggatttgtagttgaggtaactatggtcgagtcagtacctaattctttcgttgagttaggattgccagaacccttggtgacactactgtctgaatttgcctcactgtttgatcctcccattggtcttccaccttcgcgggactgtgaccatgtcattccattggtgaagggtgcatcaccttttcatgttcggccttattgttatcctccattgataaaatacgaaattgagcaccaagtggatgccatgctgcagtcgggtatcatccaacccagctcgagc

SEQ ID NO: 186545 - DNA, 527 bp, Zea Mays
tggtgactccatattatgtgagattgaggatctagtgccagatggatttaaggctcatcgtcagcttccccacgcccactacttatcctatatgttctcttagctaatttcacatctagaattggcattaacacatgagaactctcccaaggcttttgggtattatatgttgaccaacatagtggatgcgtgcccatgagctataacacttagctagaggggtcaagtgattttagatgagcaacatagatagtagcagacacatgataaggctatttgtcaggttgagcaggtagagttagatcagcttttgtagcagcgatgtgatcgatgaaagctcatacaaggactaccttgtgccaccatcttaacttttgttgccaccatgttcacacaactctaaggttggtgaatctagcaccataccaccatttgtcccaccatcatctaatgaaaggatatctgaccttttagtgtagatgaatgtaggtcaatagaagatggtagtggagggcaaagcagtaaag

SEQ ID NO: 186546 - DNA, 1204 bp, Zea Mays
ctctgttcagggagactagccttgaggtgaaccgcgaacagttgactcccaaggagaacgacaaactcaacaagtctatctccacctaccttcgccttctagctggctatttgcatcttccctctgccctcaagacccttgaataccttatccgcagatacctgtatgaatttagctcagctaattttgccgatggccctacgagctctagcttattctcttgtttctggtgggaaccttcatgtagggtgcatgtatacaattcggatgagttgctgctgagcgcactgccataccatgatacacatgcgtttgttcggatcgtgcagttggtcaacttagggtgagtgtggctctggtctggatagatacttattttctccatttgtcttcaatatcaacttgtgctggttgatgtgctttcaggaatagtaactgggcatttcttggcggtgtcaagtcctcaggtgcaccgccacccaggagtgttctagtgcaacagtgcatccgtgataaggctgtgctggagaccctatgcaactatgtaacgccgaaattaataatccttttaacagtaggattctgtcatgatttttgatatttttttgttgataattcattttactttcaggctacaccaacaaaggaattcagtcactcgaagacagtcgtctgcttttgcactgctgtgattgttgagtgtttgggtgctgtccctaagcttgacacagatgtagtgcagagggtgttgggatttgtgtttgactctcttaatcctgcagtgacgcgagaccaggaatataaggttacctcaaatgatttgcagtttttttggccccttttcaatggtcatatttgttatattttttctttcccttttactttgcaaccctcaactggatactgtgtgtacactatttcgaacattatgaatcttttattgtgctatatgggtttacttcccattgaagaactattgacatcctgctttcttagcaatgttataactacagttatgttgtatctttatgaccaggctggcgctcttatgattgttggagtacttggaacccgtgcgactctagcgcctaaacttgttcaaaatttgattcttttcgttgcaaggactgcacaacatgatgcattcgagtcagttgacttgccatggcttcgtgtttcagtgatggctcttataagtcttgtt

SEQ ID NO: 186547 - DNA, 300 bp, Zea Mays
ggaaaatcaattgctctttcagaagtacaaataatatcagattcttgacatgtgtcaataaagtcagcagcagaggaatcaagacactgtggaacaatattgtcaattgcccccacttgaggggcttcagctttgaaggaaggtgctggcacccgatttttagtttgaaattcagattctgtttctgtctcagattcaagtgtattaagtgcatccatgtagttgtcggcttctcctggaatgtcatcatggtggttcaagactgatggcactaacagtgattttgtctttttaagtaag

SEQ ID NO: 186548 - DNA, 655 bp, Zea Mays
caaaagcatgttggtgtgtcggtttccaaacaaatgatgtgtgcttcttgaggagatcagttaagggccgactgattaagccgaagttcttcatgaactttcggtaaaatcccgctaagcccaggaacccacgcagttctcttgcattaacaggtactgaccactgttgcaccacctgcacctttgccggatcggtggccacaccctcggcgctgattatatgtcccaggtaggcaatggtcgtctacgcaaaggcacacttggtcagattgactttccactggtctcgttgcagcagtcgcagaacagtggtaaggtgttgcaggtgctcctcccaagaatgactgtaaatcagaatgtcgtcaaagaaaacaagagcacatttgcgcagtactggggagagagtgtcatttatggcttctaaaaatgtgttgggtgcaccagtgagtccaaatgccatcaccagaaattcaaagtgacccatgtgtgtttgaaatgtcgtcttatgttcctcacctgggcagagttgaatctgatggtaccctgctttcaagtctagtttgctgaaccactaagcatgtgataatttgttcattaattggtcaaatactggaactagatacttgctcttgactgtgatggcgttcaagtaacg

SEQ ID NO: 186549 - DNA, 588 bp, Zea Mays
tttgtgtcattcgcatcattatcattcttagtggcacctgaatctcttcgatcaaccaccttttgtttcactgtttgattctccatactggtattacattctcccagctcagcatggtgaccttttggagatactgcactgctcactttccttgtatagtgagcaataatatctcccttcctccctctgcttcctagtgcagtctcattcgtggtagttttgcataagcttccagaaacttctctctgtctaactgtagctgatctcgtaactcgcttctcaaaccgtgactcctcttcacatgtcccctgctttgcctcacatgattttctacctctccttgtaaaaacaatgtcatgtgccgaaatatcattggtttcgttcacagggctgcccctctcctcctgcttagtgtacccagttcgatcagtgtggttatcagctgcacatcttccattcccagtcaaagaaatctcagtttctgtacaagtgtcctcaatttgagaatgattctcaactttcggatcaccactgtggagtatcactccttcagtatgaaccaaattattctcctgcttactatcatcc

SEQ ID NO: 186550 - DNA, 531 bp, Zea Mays
gatgaagtgagattgaagaccgacaaaaccaccagttcaaatgccagcactgaaagtttactcaagaaaacgttcattaggttttcaacagcaacaagatgatcaagatgatggtctagctacggatgacgaattggcatctatggaccaacataattcagctccttcctcccccatcttgggctctggcgttgtagcagccttgactgtaccgccgaagcctattgatgcttctctgatttcaggacaccaggggactgataacgaagtgcctatccaacacctgaacatacacgagacgtagtagcagccttggctgttccgcctgtgtctgttgatgccattctgtttccagaccacctggagactgaggaagaagtgcccattcaacacctgaacacccaagtggaactatcctcacaaaatgagtcaacaaaggatgctttcttcagcaagatcagtacaagaccaactggactgctgcctgttccaaagaccaataagctggccaccagtaagcagtctaaaaac

SEQ ID NO: 186551 - DNA, 969 bp, Zea Mays
gtcaaattcttcttttttgcaaaggagcagacaggtaggatttgtaccgtttttttttaaatttggtgatgctctttgaatttatttttggctaagtctgtaatcaggccatctgcattcaagaattgatatttgttattagcttaaaaatgttaagaagcaaagtttgcacctgattacttggtgcggtcatttgtcaacatgcttggcctgtttgttctatctttttcaatgccaccactttttggggcttcagcttgattatccttgattgttctttgtttccaactgagcagcatcatatttgatagactggcaaaaaatggaaggatgtatgaagttgatacgactaggcatctgaatgattatggtgaggcaggcttgcgaacattggcactatcatacagggtgcttgatgaatcagaatattctttgtggaatgcggagtttcttaaagcaaagacatatattggtcctgatagagagttgcaacttgaacgagtctctgagttgattgaaagagagctgatccttgttggtgcaactgctgtagaggacaaattacaaaagggggtaaaatacagtgtctgacttttcgtattgttaagatatgcttcttggttcctagtattatgctagtaactgtttcatgttgttttgatttataagttatgtttttgtgctctatcaggttcctcagtgcatagatcggttggcgcaagcaggtctcaaaatctgggttctgacaggtgataagatggaaactgcaattaacatcgggtatgcttctgccaagtagaaattcttgatatgtacaagtaaccttttttacctcgttaacacatcacgttcatcaacaccatgtgatgtttctatttcttttgcagatatgcatgcagtttactgaggcaaggcatgaaacaaatatgtttgtccatacccactggtgagcaggtagctcaggatgca

SEQ ID NO: 186552 - DNA, 411 bp, Zea Mays
tttggaatctgactgccgtttcgtcaacgcagcggctgagatggacaacaagggagagctgatcctgaacgcgtcgtcgttgccgtcaagcccctttggctacggcgctggccacatctcccccgcccgcgccatgaacccgggcctcgtctacgacctcggcgacgcggactacctcgacttcctctgcgcgctcaagtacaatgccacggtgatggccatgttcaagggcgcgccctacacgtgccccagcgaggcgccccggcgcatcgcggacctcaactacccgtccatcactgtcgtcaacgtcactgcggcgggcgccacggcgctccgcaaggtcaagaacgtcggcaagcccggcacgtacacggccttcgtggccgagcccgccggcgttgccgtgctggt

SEQ ID NO: 186553 - DNA, 562 bp, Zea Mays
cacaggcacagtcaattttcctgaaggtgaatcatttggtgtacactcgatcctgtccgacatgccaagctcattgatttttgctttcaacagcctgctaaattcatctttctcagaagtagacataacacaaggtgaagcttcgacacatcctttttcaggagccggcactcgtgtgcgagttgtctcatgtgctagcctacttggggatccgccctttgatagattgcttcgcggagacgaagctctggccacgggctttgtagatgatctagaagcaactgcaactgcatttctgtcatctctgctactgattgctgcatcatgccccaccttcctccctggtccccttttatgtgcagatccattgcttaaaatcctacttgtggatgataatccattttggctgttcaaatctctgcgtgtcattctcccttgcccaacgatccgtcccgcgagctctcttatcggaccagaaccaccgtgtgcgaccttcctagtagcagataccgattcacgagcgcgtccaaccaggcgcgtcgatccagccaagcccccaggc

SEQ ID NO: 186554 - DNA, 692 bp, Zea Mays
tgttcctggagcaaaaatcagattgtggcgtagaataagggagtttaatgcatgtgtaccatacactggagtgcccgtcaatattgaagtacctgaagtggtcgtactggccttgatcagtcttcttccaaccataccacatagccttcctgctgatgctcctcctcttctgcctccatctccaaaagcagcagcaacaataatgggttttgttgcatgcttacgcaggctacttacatcaagaagtgtggcatcacatgtgatgtcgtttcctgtcgctgttgggagaataatgggtttgcttaggaatggttcggaaggagtagcagctgaagctgctggacttgtggctatgctaattggtggtggtcccggtgattcatccatcttaatggatgcaaggggagaatcccatgccacctacatgcatgcaaagtctgtactgttctcgcaaccaatgtatgttccgatccttgttaacaggttgaggccaatatcggtgtcaccgttgttatctttgtctgttgtggaagtccttgaagctatgctttgtgaaccccatggtgaaacaacccaacatgctacatttgttgagctactgcgtcaagttgctggtttgcgccgtcgtttgtttgcattatttgcacatccagctgaaagtgtgcgagagactatttctgttataatgcgga

SEQ ID NO: 186555 - DNA, 431 bp, Zea Mays
ttccatcagcccagcagtagcatatctagtgcctagtattgacttgacctctatctgttgacatgttcagagtttcatgctgccggtggacgaagaggtgctaatgttgaggtcttattccccgggtccaatgtggttggcagtggcagtgcaactgcaagtgattctgttcctcctgtgacctcaaatgttgatagcacaggccctgcttcggcattatcagctgctgcagactcaaaaatccttgctgaaaaggctattgcagcactccctcccgagcttagtgcacaagcaactgacccaaaaagaaaggcaaggtcacaggacccaggatggaagtttgggtggtggccagacacaacaaagaaggattttgttcagtgtattttctgttcgaagattgttccttccggaatcaaaaggttcaagca

SEQ ID NO: 186556 - DNA, 461 bp, Zea Mays
gctttctggaaatacgttgaatgagttaaatctgtcgtctgcaactgatgtgtccgaattgttgggatgctttgagcagtataacttctttaggcactacaaaactgttttatcagaagttgagcattatgttgatgtgtatttcagcctgagtattgatacgaaccagaagaattttgttgcagaaagaaggggtttgtttaccaaatggtttgaatttgtggctgcaaaagggcactcctcaattaagacttcgaaattaatgagtgggaatgcatctttgccttcattaagcttgcttgctgaaatagttgagcagatgaaatgtgatctggaaatgtttgacttctctataccattgacaaaagatgatcttagtgaaacactgaagtccatcaacaacttgcagcaaaatggagctgcacaccaaccagttagattcaaatgggttgcgggagatt

SEQ ID NO: 186557 - DNA, 1133 bp, Zea Mays
cgtagagcattttatgtcaaagatgccctgctttaccgacggagacagaaaattagtgaagacagagatatacaccatacaaccaccttcgatggacgcgggggatgacattgcttgacatggactgcgtggctgaggcaatcggcatacagtacttgcagcctgtactactatacatagacagttctgttttcctccaaagtgctttatccttagaccattctcttctgtcatatccactcccgctccactccatactgagcgtgcgttcttgatccatactgagctctgccgagtgctcgctccaatggctgaacttgcagccagcctggtggttgccccactgctgtccatgttgaaggagaaggtgtccagctctctcctcaaccagtacaacgtgatggagggcatggagaagcaccacaagaccctcatgcgctggctgcctgccatccaagaagttatcgctgacgccgagaggcagacgtctcgccgcggcgtggagaaatggctcgagcagctcaagacgacagcgtacgaggcgaatgaggtctttgacgacttcgagtacgaggcgctccgccgtcgagccaagaaaaatgggcacatcgccaagcttgccattatggcaagggtaaaacttttccctacccacaaccgtgttgcattccatatcaggatgagctacaggcttcgcaggattgttgacaccttcaaggaccttgtggaagaaatgaacacctttggattcaacaagcttgagcccgaggcaacaacgacatggaaggagtggcgtgagacagattctattatcgttgatcctgaaaatattgttgccaggtctagacatgatgagaggaagaaaattgttaacttattggtcaatggtcatgttaccgatggtgatcttatggtcgttcccattgttggaatgggaggactaggcaagaccacactcgctcagctcatctacaacgaccctcaggtcaaggagcacttccatctactaaagtgggtatgtgtgtcagatgatttcaatctccgtaatctttccaacaagatatgtaatgtgtcagagacaatccttgaggatgccctaaagaagctacaggaacatcttaagggaaagaggt

SEQ ID NO: 186558 - DNA, 592 bp, Zea Mays
gcggcacgccggatggaggagaggcggcgcgcaggatggaggcaacgagccaacggcgcactgcaggaaaggccccaccctctcttccttctctttccctcccactctctcggtttggcgcgctgcaaaaccctaaaccctagcatgtacgcacgcaaagccgcgaaccctaaaaacctcccgcgtaagcacctttgtgtggcgtctgtggcgaaattggacgccatggcgacgcctaggcacgccaggcaacgccatacgcatccaaggcgcggcgggatcgacgcctagaacctaggctcgcctggacgcctaggcgacgccataataaccttgaggataacactacttcaaaggaaaccaaacatcaactcctatctctggtcttcttttcctttggggatgtctgagacagtgcgtacgaagaagggaggcgagaacaaggaagcaccgaatcacacctcaagaagttgtctgccccatcctgatcttgtctcttccactgctgacgctgatctaggaaccaccggaagtaggtaaatggggagtcagaacgaagagttgaaagccaaggccgagattagattgggga

SEQ ID NO: 186559 - DNA, 347 bp, Zea Mays
ttccactctgcccgtcacctcagtaggtgcctcggttatccttggaccgttctacctcaacgacgttctggtagccccccacatcactcataatcttctttctcttcgtcgtttcaccactgacaactcctgttccattgagtttgacccctctggtttctctgtgaaggatctggccaccaagactcccctcgcgcgctgtgacagctcggggcccctctacacgctccggccatccacctccggcgcgtctccgcctcctgccctggtctccaccacctcctccaccacttggcatcgtcgtctcggacatcccggacctgacgtcatgaccaagattaccagta

SEQ ID NO: 186560 - DNA, 347 bp, Zea Mays
gcaaaggggccagataagtggcgatctttgcattgaaggttggccacaacgaactgcagttctccgtgccgctcagatttctctgttttgtgacggcctcgaacaatctgctacatggtctcttatctgtgatccaatttggtttttggtcttttttccatcctagttaaaatcaaacatgatgaactatactaaacattacgtgtcgcatgacattggctttgaagcggcagttttaacagatgaattactgctcatcattaaagaacgagttaatatcagtaaagaaccgagtggataaatcagagcagatcagtaaagaacggttaactagggcccgttccaat

SEQ ID NO: 186561 - DNA, 760 bp, Zea Mays
ctggttcaattacttgttctgccaatgatgcattgcttgatattgttcgagcaagttcagatccatctgcattagaaggatgcctcaaagaaccaccttttacatcctctagatctccataagatggtaaagttccgtcggcagctatctcctcgaccacacgtcgcctttttttctcaataacagaatcttcgttagaatgagatccatccacaacaatctcatcatcagtttgcattttgatgcatccgtctgccaggttctcagaatcatactggcacttgagatccataggactagattcggataaagatgaaacagcgtttgagtttgtgtccacatgactagcatgatgagctagagctaaaaacggagattctggtggtatagctggttttccagtccacaagccagttgcatcatttcgagtatataactgaggtgacgcataccattcatgttgatctattgtcaccagtacagactagtcacgtaaataaaaatggttagtttatttatgaaactgaactcaaattttgaactgggatgtgcaggagataaggcattgattattgtgataaatagctactcaaatcttactttgttcctgtgacggtcagggtatttgacgtattctagaggcactcgtgttcccctagacaattttgaaagaactgcaataaggtcatctaaatgtgcaatatcctctcctgcaagctttttaataatggcatggcgtggaacagatgcccgagagagc

SEQ ID NO: 186562 - DNA, 1070 bp, Zea Mays
gttttgttgttgcgtgaaaagattggtctttgatgtgattgttgtggttagccatcagaatcaggaaatggataataatcttctgttatgtttgatgattgttagacaatttgatttggagatggggccggaaatgatagagcaggatggatggtaggaaaaggaaggggaaattcaggaattctctcaggcgtatggctatggagtgcctgtgctctggtgagcagttgaaggcgtcagatgagaccatgcggtcatctgattctacgatcacaaaggatttctcggccagtgggtactcttctcggaatggagagattgagcagtaccttgataatggcaacatagaggaagccgagttgtcgctccgggagggcatttgcctaaattatgaggtaagttgttttcttttgtgaaacagattttgttatggcaccaagaacagctgaaatatatgctgaatgtgactaggaaatgccaccaattcagctagtatgattcctagttaagtcaatcttgggtttcttttgtcaattttacttccttgtgaagatttttgtacgtaactaaaatcaacctgcgtgctgaatgtatttttttctgcagttagttgaataaatatatggttattatctttttcttcactaaaattagttcactacctcctacctagcagtttatccaagctagccttttctgtaccagtataagtatttcaagggaaattctttcttatttcaagagaagacttaccatttttattactgccattctctttcttcgatttcgttagatgccagaatgtcatctgtttaagttctatatttcagcattacatttggacctagctgtttctagctcgactgacagcacatgctaaacaggaagcaagggcattgctaggaaggctagaatatcaacggggtcatgtagaggcagcactccgtgtctttgatgggatagacatatctgcattagttcctaagatgaaaatctcaattgctagaaaaacagaccgtcggaagactcattcacagtgggattccccaccaatgcccttgcatgctgtc

SEQ ID NO: 186563 - DNA, 779 bp, Zea Mays
tgacaagggtggaagaaaatcttggtggaattggagccgttaaggtgtgtatcatcttactgttctgagttgtgctagctggtatgttttattgatcatttcctaagtatttgaaggatttggtccttaagatactactttattatctttaggttcgctccgttcacaactctgtcatggaattgaggaacatatgcaaccatccatacttgagccagcttcatgttgaagaggtagaatacatcttccatttcttcctcactgttgttgttgttgttgttatttttgaatccttatgtttgccatcaacaatttgggttctctttatagattgagggctacctacctaaacattacctaccatctattttgaggctctgcggaaaacttgagatgttggacagattgctgcctaaactcaaagctacgggccatagggtgagtgtatctggatataatttgacttgtaatttgattgttcatttttctctctagttgctggttgaactggaatgttcttccctctctggtcccttaccttttttcgtgccttcgttccttttgtggtgattactgattagttctggatcactgatggcaactataatcttccaggttctacttttttctacaatgacaagattgcttgatgtaatggaggattacttggtttggaaaaagtataaatatcttcgattggatgggcacacttctggccatgaaagaggagctcttatcgataaatttaacgatcctaattctcaagcattcatttttct

SEQ ID NO: 186564 - DNA, 746 bp, Zea Mays
ctcctgtacaacaacagatgattcccctgactccatcttattgctttcttcctcacttttttcagtattaatattgctatcatgtaatttaacttcaagatgagtacctttgtctaccatatcactactctcctgtgggccactaagttcttttggggcatcatattcttgagcaatattgtcctcagcttccgttatatcatctgaactagctagcgcagactctgctggttgtgactgcaagatgttcctatcagacgtatcttcctttcctgtgtgaatagattcccctgtttcggtgtcacctgattgatgtattttagtaggcgaagaagatgcactaccatcaggtaagtctcgaacagactctctaagctgattcggctctgcttcatcactaggatcagaatgtttgctaacttgatggtgctggttttcttccactgttgaaggatgtcctgcagattgtgatgtttctgatgcttcagcatcacccaccttagatgcaggtgcctcagtagagctatcaagcttttcttctgctactgaaggatgtgttggagtttgtggtgttatggattgctcagaaacatctgccttagaaacaggtgacccattggaaatactatgaacttcttccgattttgaaggcagttttggagatgttgttcctgatacttccgaaggatctacctcagatatatgtttcttagttggtgtgctattaattccttcctctgctgaca

SEQ ID NO: 186565 - DNA, 1920 bp, Zea Mays
agccggcgccggagaggacgggtacgactacggcaagggagacttcgtggaacacgcctgccggtactgtgggatccacaatcctgcatgcgtggcgaggtgcaacgtgccctcctgccgcaagtggttctgtaactcgcgggggaacacctctggctcccacattgtcaaccacctggtttgtttacttatcttttttcatggcatagctcatttagaatttaagactactcagatgttaatttgttgagaattgcttaaaaactgattaatcagagttctgtcatacaagtctgttgataattgttttttagaaactgaacgagtgagattttgtcgtacaaatttgttgataattgcttaggaacgaacttagtgggctctgtttcacaatagtctgctttgaatcaattctaggccttttagttgttaaaagaagacatcatgctttattggggtgcactttatggctctataagtaaactattgctcagatgttgtagcaagtagcagcatgtctttcgtattatatgcgggggtggctaaggaggtgatcggtaccatcttaaaattggtaaattgatgccatgagtcggttagttagtttttgtatttttcatggtatgccatagtgtcggtgtatctagttgctgtaatttgttagccatgctgcattgatgtggctttagacttggaaggttttctggtggaaataagtatagaactatagataaaataactctgaggagaatgtcatgttaattatctcttgaattaggttgagaataagcaaatttgtagtatactgttgtatctgtgggagacattgcaatgggaatgcgacgattgctagatgtgcgtatttggttttgttgtgcagtagcagtattaacttttgattttttgtgctaatggaatggttgatacattttgtgaaagtggttcctattgttcagacccatttgcaaagggtccttggacatattgtttaaatagttggttaggaagctagctgtatttgcagtgaagacatttcgttcctatttggtatctagggtcttaattgttaagtcccatttgcaaggtgtcacttatactgtctaaatagtttgctatcagtttaatttaattttcagtgaagaccatctcaaaccgtatgagtaggagtgtagaacacaacattatgacagcaacatggatataacttttgttaaaaaaaattgtcaacacatctgtttctacaacttattatattgcaaccctgattccttattgagaggctctgtggtgtttcataagcagctttgctatcctttaggcaactcgcagcatgcaagcacaccattgtccttggacagtggacacacttttgatgttttggcattgtgttgtggtggttgtccaagcaaaccaaggactggtacaagtacatcctgaaaaatgcttagtacaaaagctgaggcatgggtccatttagaagtgaaatgaaggatggagagagtctggtgggagaacagtgatgatatcctatcaagtttatctagttctagaaagactatgattcttctcaccgaaaagaacatatatatgtaaaccaagcttcagtggtttggcaatgcgtcaaaatttctagcttgatctacgatgtcaaatgtcaatgctctaacagtgaacgtttggcctagttgattataagcatatacttgctacctacagtcacccataagctttgtatacaaataaatgcattgagtgtaggctagatcactcattctgaatcatatgcttattgtgttattgtgtaagaatccacctacctttacccatttaaatgaaacaaattcagtatacatggtcataaccatatgtttatcatttgcaggttagggcaaagcataaggaagtgtgccttcacaagga

SEQ ID NO: 186566 - DNA, 500 bp, Zea Mays
ccgtaagcggccagttcatcacaaaagcacaaaatcaactgaaattaaggaatacaatgcacctgaaaaagcacatctatttgaagaaaagctggatatgagaagattggtaaaagaggaaaatcaaagcaatgatatagctttgctggataaaaacacgggcagtgttgcacttgagcacagtgatcatgacaaaaaagggattatatcaccagggaagcctaaggagatgatgcaaaacgacagtgaactagaacaattaggagagtggacatcagatgctgatttttatgaattggttagcaatgatcagaaatgcagaactaatggagctgaatgcagagacaatggtctgatgacaaattccttagccaagcttgaccggtctgagaatgaaaaattaggaggctttgcaggtgagtcaaaaaggtctaggaaattgtgggattgtaacaacagaacatgtctgcggactgaacatgtaaatcagggaaaagatg

SEQ ID NO: 186567 - DNA, 963 bp, Zea Mays
tcatttgaattttgatgggcacctcctgcttcagcagatcagacgggagcaacagcaacatcaacagcgacaggagcaattgatggcccgtagtaatttagagttttctggtgcatttcccgggcaggtgtttgattctttgcaccaacaccgacagcctatgaatcaacagcttcctgatgtagagcatcttttgagagtccagtttgaacttgagcaacagcagcaacaccaactccaacaagagcagcaccaacggcagctacagcagcaacgacaagcccagtttttgcaacgacagcaacagcagcagcagcaacagatgattcttgagcaattgttgcagcagcagctgcagggttctaattttggaccaacaaatatggttgatcaagtcttacttcgtgaacatgtatttaatgaactgcaccagcagcctcaccatttgcaaaggcagcatgatgcagctattgaacaacttattcaagccaaatttggtcacgggcttcatagggagcaccataatgatatgttggatgttctctcacgttcaaatcagagacaaatgcttcctttagagcagcaaattcttttaggccttcagcatgagcatgaacaacaacttcagtcccaacaattggcaaatgctctgcggcaacattcaggcagggaagaagaaatgcacttaagtggggtctggccaatggatgatgctgcccagtttatccgctcaggaaccagtccaaatcagagacacggttgtttcgatctcctggagaaccttcagagatcgtcatcgtttgatcatcatgaccatctagaccgcagcttatcgttacaggaacgattgcatatgggtggtctaggtattcactccctagaacgatctgattctttgcctggtggtggtcctggaccaaacacagatgtcataaatgccctatcacgccatcatggacttgg

SEQ ID NO: 186568 - DNA, 571 bp, Zea Mays
gcgatacacttaagcttgtcattgtaccttgcaatctattcacactctctgaaatttctccctttacacattttccagtgacttagtaatttcatgttgcttagtggttcctaactttggtaacccttttaactgacaggcaggactattcccattgctcagatatggctgttcgaggaagcagtgctttcaagctacgtttctatcccaacttagaagtacaaaatattgcacaagaatgggttaaagagagccggaggctgttctatctaagaactgccaacaatgtcacaaataacatctataagggaaacactcctctatggactggaatggtacaaaatgaactctctgaagattgcaggggtttgaactacacttatttgaataatttgagggaacgcgtatcgtccaaatcaattgtaaatagacatggtaataaccgagaactgatcgggcatagtacgataaatcagcatgtgaaatcagtgccagctccagtacgtgttgttaatgatagtgtcaagtgtttcagcatgcctagagcctctaaggtggagattccttggcc

SEQ ID NO: 186569 - DNA, 563 bp, Zea Mays
catcaggaacactcaagagcaatgctcctggtgggaagctgttcacatggggtgacgcaggcggagagaagctgggccatactgacaaaaagtcaaagcttgtaccaactcgtgtcgaatcgctcgttgattgtgattttactcaggtgtcatgtggtatttcattaacagctgtgctaaccataacgggtgttgtatttaccattggaagcaaggaccatgggcaattagggaatcctcgatctgacactgacagcgcatgtatttgtatggttgaagggccacttaagactgagtttgtcaaagatatatcctgcggaagttcccatgtcgcagtcttggcaatgaatggaaaagtgtttacctggggcaaaggcacagaagggcaacttggtttaggggattacgttgacaggagctccccaactctagtggaggccctggaagataaacaagtggacagtatagtttgttcttccaattccactgctgcaatttgcgtgcacggggaaatctcaagcaaggatcaatctgtgtgcagcagttgcaggttggcatttcgg

SEQ ID NO: 186570 - DNA, 345 bp, Zea Mays
tagtcttggaaactgctctatcatcaattaagagggagcagcttcttgaggctgttgatgtatgtcaattttcaaggatgatactgtgttttttccctggtggtaggagcattccataacaaattccactagtctgttgactcattgatttatcttctggaaagtggttttctgcaggttgtttcgttgttcccccttctccacccactggttgctgtcttgggatgggatattttgaagggtaaaacaggtctgcggagaaagctaatgcagctgttctggacaagcaaatcccaaggtctacgactacaggaatattcacattaccgtagcccgacagatgag

SEQ ID NO: 186571 - DNA, 357 bp, Zea Mays
ggtcccgagtggatcgcggacaccggtgctacctaccacaccactcctgaccctggtatactcacctctgttcgccctccttcctctctcccttcgtccatcatggtggcgaatggctcgtgtcttcctgtcacatctgtgggtgtcgccggcccttctggctcttttcgcattcccgatgttcttgtcgctccttctttgatccacaatcttctttccattcgccgttttactgctgataattcttgttctgtcgagtttgactcttctggtcttactgtgaaggactcggcaactcggcgccccctcctcagatgtgacagcaccagccccctctacacccttcggcttccgcac

SEQ ID NO: 186572 - DNA, 928 bp, Zea Mays
ccgacgttggcggatctgcagaggacggccgagctggagaaggttgttctttgtctctgcttacgttttgcagctctaacggcttacttggcttccattgtgacgacgttccgtttattttgctgaaaaactgggtttcagttcttggttgaagcgggcctctatgagggtaaagaggagtccgcgaagcgggaagatgtgctatccgagattggtctggtaatccctcgcttcctgtttacccgctgtttacatgtttgtttaccctacccaacaagttgacatctcatacttgactgaagttgtgggttgaatttaagaagggaacatgtgatatatactacaccatttctcgaagttgtgagtcattttagttttatcctaagtcaaacttcttgagctttgactaagtttatttataggaaaatgcacagacatctgcaacatcaaacaatattcatttagataaaaccatgaataaatgttggtagtgtatttatttgatatagtatatgttaatatattttctacacttggttaaagttagacaattttgactaagaaaaaatataaaacgacttacaatttgaaatggaggtagtaatttccaattgagctttgtatggtgtgtactgccttgtagcattttgctaagtcagcgttgtgtacaagtacttgtatggtttttgttttgacatttttgaacaggaaagaatgctgatggttatcaacatatttatctgtccattgctgacataatctttagtacctatgtagttttgttctccattgcttatttgcataaacaatatgcctattttttttgtctttttttcttaatctatctttgcttgaaatgctgcataatacattaacatacacatatactttcttttgaattcacagatagtcaaggaatgggtgaagc

SEQ ID NO: 186573 - DNA, 464 bp, Zea Mays
gtggtaatggggatgcaacttatcctgccaaaagtaatgcacagcagcctagcagttgtgctcctgacgtgagaaaacaatcaaaagcaagcatcacagtttatcagcctgacatgagtgtctatttaacttctgacatggtcagttcttgtgagggatcatatgtttctgccggtgagccactgcaaaggagcttgtcatctggaagaactattgggaaagtaactgtggtgaataaaaggccttcttacccatcaagtaaggtggtctcagcacaaaagtcacaggataaggtgtctacatcatatcaaaatgatgcccatgagaagaatccttgcaacaaaaatgaccaaagttagtaaagagttttccaataaaatgaattagctttatcttatagtgctactgttatctcatataattaccacattatgcaggatctacccccacatgtgaatcaagtc

SEQ ID NO: 186574 - DNA, 385 bp, Zea Mays
gttcaaggaattggtttattcttatacctgtagaagtgcagtaactttgatactttcacaaatacatacttccaacaaagatgttcttgaaaaagatgagagtgaccctaaccataactcaccatctctggatggttggaattgcttttcctcattgttcaagtgctggaagaagcttgtaaagtatgttggttctaatgaacgaacagattatttagtagaaactatttattccttgacactaggtgctatcaccctcagccagtatggtgaaaagtaagtgttgcttctgcttattgcttttgaatgtctcaatagcatttaatccacagaagattgtatagaggcgtgattttacatgttgtcaatgttcattgggtgaagc

SEQ ID NO: 186575 - DNA, 440 bp, Zea Mays
gggcatgttaatttcttacatatgctcattctccagttcaactctggacgctggatgatagatgcttgttaatgaataatgcaatatttatttggtgctgtttaattaaaatcctgatgtattaattatgctgctgtccttctagtcattgcaaaataaagctgcgaaacaaaacgttgatttattgaacaaagttgaaagtcttataattgagtttaaacatgtaagagacgactatgacagtttactgtcttatattgcaacatgcaacgaaatgactgaaaaatgtcattgaattagacagcgtgattaaaaaagtctctaatatttaggtatgactatgtgtctatataatttaatcgttatttagataaatgaaattgactaacacgtttacaatgacataagaaacatgttagtcttacagaaagatgataagg

SEQ ID NO: 186576 - DNA, 362 bp, Zea Mays
caaccgtgggaggaggaggttggacgctggggagattgtccatttcgccttcccttcgtacgagaagatctatggcgggttaaagatgactgccaagaaggcggcggctctggcacagattgttcgcttttccaccaaacgagccggagaggttttactcaaatcatcttatcatgcatgtttattcttgagatttttttgttcaaattgctacagtttgctcctgtctcattctctataatgatggttgtagattgggaagctgtccccagagtggacgcaatgccttgtcccgcttgtcaactcgtccaaggtgaagattcaggggaagctcgtgttcccaacaatggagctgaggctga

SEQ ID NO: 186577 - DNA, 534 bp, Zea Mays
gctgcagcatccaacaaacgacctgtaatgacctaacctatcaccgaaaaatgaatcttttacatctcgactcatcttttaattattctagatatactgcaactgcaagcatcatcctgtgtcccaagaaaacgttgcacaacgaataggagggcgcgagctggaaccacggaggtaaagacacaacagcctttggaggcggacccgtggaggccaacgttggtgttgcttgcagcaagtgaacctcgtgcagtgcagcccctcatggtcctgcggccaccagtgtgcaaagggcggtctggctggagcagatggtggcgaggccagcagacccccttgtacgaaggagagtagttgtggtagttgcccgatcgccgcatatgagggccatcgccgtacggagcgttgcagaggggcgccatgtctttcagccttttgtacgcggaggtgaacaaccaccacgttgctcgggcgcgctgatgcagctacgactcccccgcaatggagcatccccatcatctgcttcacccgctg

SEQ ID NO: 186578 - DNA, 702 bp, Zea Mays
gatggatctgtgcaatatgtgaaagggaatatgggtgtaggccagacgattcgtggaatagttaaaatattcacagtggctgtaagtattctgttctctgtttatgcatactgctagtgtttgcgatttttgtctcaccatcttgaggtgtaaataggtcaccattgtggtcgtggctgttccagaaggacttccattagctgtcacacttacgtaagagtcatttgtgtgttattttctgctagcgctttcatcacctgccactcaacatgctttatttttgtcaggcttgctttctcaatgcgcaaaatgatgaaagacaaggctctggtgtgttcccaactttctataccttggttttgttatgctactagctccgacatctaatgctatgaacactcacttcctatggaatataggtgaggaggctttctgcatgcgaaacgatgggttctgccacaacaatctgcagtgacaagactggcaccttgacgttaaatcaggtgcaatggtgtttattcactttatacacgcttcagatatttccgtttgttaaatctgattggccctgattttaaaattctcttcttcctgattgattttaagatgactgttgttgaggcatattttggtggaaagaagatggactcacctgataatgctcagatgttatctgctgatgtcacatcgctgattgttgaa

SEQ ID NO: 186579 - DNA, 334 bp, Zea Mays
atccagcatgcgtgttggcttccagaatacccattaattttcaactctttaatctgtgacggtggctctagaccatcaagtacagcctgctccaactcagtgtccacctcacctgcctcaagtggcatccactcagagtccaagtccacctcacctgcttcaagtgccatcctttccaggtccaggtccacctcacctgcatcgtgtgccatccgttccaagtccatgttcgcctcacctgcctcatgtgccatccattccaggtccacctcacatgccttatgtgccatccattctaggtccaagctctgtaagcttgttttttgttgcaagc

SEQ ID NO: 186580 - DNA, 405 bp, Zea Mays
cgacgagtggccaacgaagccccgatgtcgaacaccttccccactgcgagcaagtcttcctagcccatcgtccatccgaagcctcgacgccacgccaggagcactaccgaaccgccgttcgtggtcttccactgccaaactccgtcccaaggtgagaatctacgctgagacctcctctcccctaggacgcgcttgtgtcaatacgccgcgccgccatattccaaccagagccgctgctggcacctcactcccccgtgtctacccctccctctctcctctcatatacccctgcgcgtgatgtcgtcgcctcgctgtggtgtttgcaagttcacgtcttgcgccgtagcccgcgcactgatcgcgagttgtcgcgcgtaccactcgtgctattcggacgtgtcgttg

SEQ ID NO: 186581 - DNA, 343 bp, Zea Mays
ggatgatcaacactgtgaccttgaaaatatagatgaaagagttgcgcttcatcaatagctgctcccttgacatcactgccttgagtgattcccagctagaaagcccatattttttggtggtcaacgcagcaggatgggttttggacttttcaaaaggtatttgcaactccttctgcatctgttggcatgcatggaatgatttgaaacgttctgcaaagtcgggtacagatacataatgatattgctcctgatcaagataccaatattgttgctggtctttcttggaagtaacctcttgaagaaagtctgcgacacctttcctgtcagggcaccggaaaccgac

SEQ ID NO: 186582 - DNA, 310 bp, Zea Mays
ctcagcctggcgttcgcaatgaagaagatgatgaacgacaaggcgctcgtgcggcacctcgcggcctgcgagaccatgggctccgccaccaccatctgcagcgacaagaccggcacgctgaccaccaaccacatgaccgtcgtgaaggcctgcatctgcggcaaggtgaaggacgtgaacagctccgcggagaccaagacgctgccctccgacctgccggcgtccgtcgtggcgatgctcctgcagtccatcttcaacaacaccggcggcgacgtcgtgctgaaccaggacagcaggcgcgagatcctgg

SEQ ID NO: 186583 - DNA, 427 bp, Zea Mays
gaactgtcgattgttggaagtgaccttcatctttgggaggtgggggtgtatgatttgagggggagggtggagttggatcctttcttggtgggatagctggggtggtagtttgggggaaatgagggtaaggttgtgtgttttggtagtgagggggattgctgttggtatgaagtgtgggcgatggtctttgtcggctagtctggaattgatctggccattctttccttggcctctttggtgacggggcaatccctagttgaatgcccgacgtcctctccatggaagacacaatatgaccttcgctcttgtttggatcctctgtcgctgcctttgtcggccctcgccccccttgttgagtgcttggtatgctcttggttgcaaggcgtcccttagctaggttgctggtgatgagtgatgctattgattt

SEQ ID NO: 186584 - DNA, 611 bp, Zea Mays
ggaaatttctttagaatacgcagtgcttttgcgtatggggcgaaaaggctcggaaagttacttgaatgtccaaaagaagctttaattcctgaattaaaccagttcttcacaaatacatggataagacatgggagtggaagtcgtcctgatgtgcctatcccaagtctggttgatgtgcggcctatgaaggttgtttcttctgtagtgtcaagcagccagagaagtttagcggcattcaagaaaaaagttgaaaatcctaaacttcatgttaatcaggataatcttcgtccgaatcaagataatctcactggagttggtgacatacattaccgtaatctaccaagaacagttaatccttcagtttctcatgttcagcaccaaaaaagttatacaccacaaggcaatgctaaggtctctgaacagcttgaaagaaataactcagacggattgatgcaaagtgcaagggataagagagtgccaaatggtctctttgtcaatgacagaaatgggcagaacaggtccagatttgcaaggacccgatcaagtcctgaactcacagactcgtctactgaaggatttcgtggtaggcggactaatgcagttggtatgga

SEQ ID NO: 186585 - DNA, 594 bp, Zea Mays
accacgcttgaggagtgcctcgccatcgccgaggacatcggggagctaccgctcattgtgcgcccggccttcactctcgggggcacgggcggtggcatcgcttacaacaaggccgagtttgaggacatctgcagggccggcctcgccgcgtcgcacactcagcaggtgctcgtcgagaagtcgctcctgggctggaaggagtacgagctggaggtcatgcgcgacatggctgacaatgtcgtcatcatctgctccatcgagaacatcgatcccatgggagtgcacacgggggactccattaccgtggctcctgcgcagacactcactgacaaggagtaccagaggctcagggactactcggtggccatcattagggagattggtgtggagtgtggtggttccaatgtgcaatttgcagtcaatcctgctgatggggaggtgatggtcatcgagatgaatcccagggtgtccaggtcgtctgcacttgcctcaaaggcgacagggttccccatagccaagatggctgcgaagctctcagtaggctacactctagatcagattcccaatgatattaccaagaagactccagctagc

SEQ ID NO: 186586 - DNA, 404 bp, Zea Mays
ggacggacgaaggagagaaatcaagttaattaagcttacttgactgcaaatgacgtactaatggcagccagacaccaaaagtcgatgagcttgagcgcggagacgaaaccaccaaggaggacaacggtggaccacgtcagcaacagatacgcgaggccggtggcgaccttccgtgcggcggactcaagcagcaggtaatcgttgatcagcctctcttccggcctccttgcgcgataactctcagcatcactatagttcttctccattaatctcgcccaccaccatctgctatcgcttcttctaggcccccctgctgcaatgggaggccgccgccgccctaggcctacgccggaggcggacgaggacgacggcatctgatccggtcgatcccgtgaacaagtgtg

SEQ ID NO: 186587 - DNA, 1904 bp, Zea Mays
gaagaagcctatagagaggaaacaatggcgtgcccagacattattctgccagggtcttccttgagaactatgccctatttcagacctatgcctgcattaagacaggaataccatgaatgtgcaacttgccatgcccctgcaaagactcgttgctccagatgcaaggctgttagatattggtaattttttttcttgtctgtatccatttctataatcagtttatgtattgaaagaaaccatgcctgatcaggcttatttgaaattcaaagatctggtccatcactcatccttctccagtttatctaacctgttccacttagcaataaaaacaattctactaaagctagtttagattttgtttttttgcactgagatattagtttatggcatactgacatagtgggactgcggaaggtggcaaattaatttcatataagagagcgccattttttaaggaatttctgatttctgtaatgaaggagagtttttaaaattgatcttctgggtgtcccaatctaactcctccccaccacaaacaggaatttctgatttgtgtaatgaaggagagattgtttccccaatttttatcattcatgttgttattggccatgttgataatctaacggtctaagctcatgattctaactcactcttatgatcaaataggagcacccttgcttttcatgcgtgtgatatggattcgtaactaaggtccaagcagttttagacgcagctttgttgattagtcatgaaatatgattaattggctttttactctctaatgctaagcaatagcaacgaaattttcagattgaaaagttttaatccttgatttatctatatatccaagttgtatacttgtatgtgcctagcaactagtcaacaaatttgtctacggataagcactgttgcagcacactactagtattttggccgacttgacatcagtgtcagtacttgcggttattattttcaccttcatctggtagtgagtgggttgcctgattttgtggcctatttctatattgaaaaaccatgcagatcattatgttgtttagatagtcacgggctcatggccaacttgaagcttagggactgacctgtttctgtggacctcaggttgatatttagcaataagatttttgtctctctagtctctactgctttagccctccactgtgtggcattaatctctcctggctagaatttgtattagactagtaagtaggcttgaactgatgacttattgtctaattatatctaattcaccttaggctagttggtcaagatgttaaatgtgcctactaagatgttaaaattaatcacctcatcatcacagtagatccagcacatggttagaagtagcattgcagatataagctctttgacataatgcaatattctttgtgactgattgattgaatttgttcttgcaccattactgtgttaattgtcttcattgtgtactaactactgtgtacactatcttgcccttatgtcaatgacacctcataaagtcataatcattttgaatgtgatgcagctctgggaagtgtcaaatagtacactggaggcaaggacataaggaaacatgccaaaagtggcttggtagtggttctagcagctttggtggatctagcactgaggctactgaacagatgccgttcttgactaacttaaattcacctcttccgggtggtgacattcacttgcgtgacttgaacttcgatactttatcagaaccatcctttcccacaactgatggttataatctagatactgatccatttttggcagacagaagcaacatgaataaatcaaatcaaggtattcatatgagcgaaaatggtgctgttggtgtatcttttgaaaagaataattataatgctgatgatgaaatccac

SEQ ID NO: 186588 - DNA, 404 bp, Zea Mays
ctgtttctggcggttgaatccactgttccattcgtttttttacaaggctgtttatctcatacagtaaatctgttgtgccccgcacaacacaccttgttggaaattggccctcacatgactccaaatgatgttacatttcagaatgctgctcgcttggacagtgagataatttatgatagggatttcgactacgactactttggcttcaaaactctggagaggtcttacctgttgaagcttgatggtaaggtcgttgaaaggccgcagcacatgttaatgagggtttcactggggatacacaaggaagacatcgagtctgccatcaggacgtaccatctgatgtcccagcgctggtttactcatgcttcaccgacgcttttcaatgctggcacgccgaggcccca

SEQ ID NO: 186589 - DNA, 787 bp, Zea Mays
ggggcatctgactcatctaaagatcttcttgaagctgctgaagaaacaattgaggagctccgtgatgaggcaaaaatgtgggaacgccactctcgtaagttgaaggctgatctagagatgctaaaaaaggagtgttctgaaaaatcaaagcaacatgctgagctagcaggcgagctatctgctgcacaagctgaacgggattcctataggcatgaaatagaagaattgaagtcatccttacaagatgtaaacacacggcaaacaattacaggaacacctaaacgttcagactggatagacctgcagaaggaacttgaaggtgaggtgaagtttcttagagaatcgaatgcggacttaaccatacaactaaacaggactcaagagtcaaatatagagcttctttctattcttcaggaactggaggaaaccattgaagaacagagagttgaaatatctaagatttcgaaggtcaagcagactgctgatcctgagaatgggcttttagtaaaagaagacaaagaatgggctaagaaactgtcaatgaaagacgatgaaatcacagttctgagggagaaattggatcgggctctcaacattggaaatgcaggtggtgctggttccaatgccatttatcttgaattggagaaagaaaatgaaattttaagggctaaaatacaagagcttgagaaggactgctctgaactaacagatgaaaatttggagcttatatataagctgaaagaaaatgggctcacaaaaggtcaggttccacgtatttcaaacaaca

SEQ ID NO: 186590 - DNA, 648 bp, Zea Mays
tgggcagaccttagctcgaactggtcagttatcctctgtaaacttaataacttatacatttatagtatatttattgacaggctcacgtttgcttttactcaatcctgtttttcaatttgtaaaccttttgtccacatggtgaaaacttgtatttttcagcagttttatttcattattgactcatgaaccacactctgtttactatttggtatggaataatttactccagtagcaaaatttgcgattaatctgtgaatgttgaatgatatacctgtacttttgtatttataatttttactctagttcatcaagtcacgtgtgcttttctgatggcatcacaaaagattaatctgtttgtcctccttgaacttctaagtggaactcattcgctcaatatatttgattataatcagttcacgtcaacaatattttttgttttactctgcagtccgtggtatgatgtactataggaaagcccttatgctgcagagttatttggagaggatacaatctgaaggtattgcactgctcagcatgtgagatgcatatatgctactttatctgaatgtatatcctcttttcttgttttccttcactagatttggaatctacattagggttggctggttcagctgataggcattttga

SEQ ID NO: 186591 - DNA, 686 bp, Zea Mays
ctgcaacagcagcagcagtcgttgctatcacaaccagctgttactcttgcacaattacccctaatccaagagcagcaaaagttgattattgatatgcagcagcagttgtcaaattctcaaccactttcccagcaacaaacaatgccccaacaaagtattcaagttccatcacgggcaacaccaccaccaacaacaaccgtgcaacaagagtcacagcaaaagcttccacaaaagcatgttgggttcactgacacatcacataccaccattcctccgactacatcagtcaacaccatttcagttgtaggaagtcctctgatggcaactggtgccacacattctgtagttactgatgaaattccttcctgctcaacatcaccttcaacagctaatggcaaccatattgtgcaaccagtcctcggaaggaaccaactatgcagcatgatcaactatgagaaggtgcctcagtctactcctatgtcgatcccaagctccctggaagctgtcacagcaacgccaagatcaatcaaggaattgcctaagttgaattctaatgtcaagcaaagtgtaatggcttcaaagctaccaaatgcagggcatgtagctcaaaatttgactaacaatgcacccccgacggactatccggaaacagcttcatcagcaacttcagtgtggctttcccaagc

SEQ ID NO: 186592 - DNA, 482 bp, Zea Mays
gttgttctgaaagaaaaacttgcacgttatgttgcctttgagcggaagacagattcatcaaagcttttagagtattgggttcctgcccgcctttcaccagtgcaactagagatgtactgttacatattactatcaaactccccagcccttagatcacattctaaaacagatagtgttggtgctcttcgcaacattcttatatctcttcggaaggtttgcttttaaaacttctttgcatgcaatgacttgttttgacgtagcaatttagctggacgagatggaacctgcatgtacaattacttatcatgcatgtctacagacaattctattgatcttcagttaatccttatgcaacagtgttgtgatcacccttatcttgttgatcaatcgctgcaaagcacacttaccaaggatcaccctgtaactgatatccttgatattggagtgcgttcatgtggcaagttgctgcttcttgacagaat

SEQ ID NO: 186593 - DNA, 329 bp, Zea Mays
gtcaaggtcgatttgctatccaacaattttgcattatttctggctacctattggtcttgctgccacaccggagttgccatcttagcttttgtcgtcctgtccccttcctatcagggcaatatgacttgctccccttcctgtcaagctacatgcttcgaccagctgaggcactgaaatgaaactaaattattgttgcaaacctctctgccatcttgtgcgtgcactatgcaaaatcacaaggcgggcttagtttctctaacactgataatgcttatttgatcagttgaagcttgcattcatttccatgaacaaacaagagtacctccaag

SEQ ID NO: 186594 - DNA, 496 bp, Zea Mays
gagccatgatccggctgtctccttggggccagtcatcgcaggtccggtggccaacgctgaagatgctgctcgtgagggcgtgcaggacgttgtggacgcggtggccgagcgctttcagcgggatcctactggtgatgagtagctaggcctgcgtggagaaaacgaggtttccgctggggagcgggttgtaatataccattgatttcacaagatactcttcaggtactacttactgggcaatattataacttatctgcacaccacttttcctttgctgcgtgcaccgttaccaacttcttccttggtacttggcccccctgggatatggcctcgacgcgtcggggctggataccaggattcgtaattggcaactgatgtcgtgaccctcaaggggagctcccaactgggacttgacctgcacacagtcttggcaaggtatttttagtagtgcgcccatagggtccgccggctggtatttcttatcctttgatttacg

SEQ ID NO: 186595 - DNA, 475 bp, Zea Mays
ccccatgagttcctccagaatgaggtcatcacggaccttctagaaagacgggaaagggacagagcgggtgatgatcgtgcgaaggttctcataccgcgggtttaggccacgaagaagtgtgagaacgaggatccgatcgttgtacggagtgttgagatcagccagggcatcagcaaagcctttcatcttgcgacattattctccgacggtgagatcgccttggacgaagttttggaattgggcgtcgaggtgaagagcccgcgtctcctggtttccgaggaactgattttccagggcaatctaggcttgacgggcagtaccgccacgctcacggatgatgtcttgaagttcgacggagatggttccagtcacctaggagaggacaatactgtccatgcgatctcaggcagggtcctcggggaagacggtgttgctgaggacatgatcagcaagggagaagcgcttgagagtgagc

SEQ ID NO: 186596 - DNA, 507 bp, Zea Mays
ttcggcccccagccctgcttaaatccgcgtggtactcctatgcattcggcggtagcggcacttcctggtacagcctaccctgcgtgggtagtgggtggatgctcgtggaatttagggggagttgcaggatcggtgcgcccggttggggttctcgctgctgagtcgcagtaatggggatttgggggtcgctgttccctcctcgtcgtcttcatttcgtcgattagtgcgatttgagtgaaacggtacatcgattctgcgtgggaaagcgtggcggtaatcggtggtggttcttcatttcgcctcatattgtctgatttgtattctagctgttcgcttcatctctatcaccaaaatccctgttctttctatcataaaaaagaatacaatcccacatttcagcctctttatgtattttcagtgaattgattttacccaaatctatcaccaaactccagtttctacagacataggtcataggtctgccttggtttggctcgggggctcttg

SEQ ID NO: 186597 - DNA, 855 bp, Zea Mays
tgcagcatccttctccttccagttgtttgcccgattcgcggcatatgctgccaacatctgctggacctgtgctgacacgagtgcagccacctgctcccggtagttcgctgcaaggcctcgcagcaaccggcacgctgcccgtctgagcgtatctgcatcgctaccctcagagtcacgcctaacatattccacccaattgcactcaaacaactcctcatcctcatcccgcaggcgcaagttaggcacaacaacactatcacatatctgcttcattgcttcaggactcccaaataaggcatggtgcacactctcagcaactgtagtcaagaaccttatcgcagtaacagcaagctgtgcacgggatggagaggtggtctgcgccatgaggagcccccacacggcctcaacaaactccttcaggtatcccctaaactcctcctcgtacttctccatataaagctgcaggttatcacagacagcagcacggagcgcatcaggggcaccatctgcctcaacaggcggtgagtaggatgtggtaacgaaagttcggaactctgtcatccactggcgcatgttatcctcgaagaattcaggcaggtcgatggagttaagcgagtagaagatctcgcagcagaggcggaggcactcaaacacggggcggagctcgagcgggttggccgtggtggcggtggcctgaaggcggcgggaggcgaagaggaagacctcgaggagtggggcggcaaagatgtcaaggcagtacttgaggtcgaggcggagggcattgttgtcgaatgcgttgcggaagcgggagaagagcgacaccacggcggtgaggagggagttggtggcggcgat

SEQ ID NO: 186598 - DNA, 429 bp, Zea Mays
tgttgattgatgccagattccgtgctggagatgtggatgcagcgatcgcattggttgattccatggccaatagggggttgaagcctgggattgtgacatacaattcggttttgaaggggttgtgtaagcacagaaggtttgataaggcaaaggaggtgttcaggacaatggaccagtgcagtgttgcaccagatgttcggagtttcaatattttgatcggaggattttgtagggttggggaggttaaggaggcagtgaagttttacaaggagatgcaacatcgttatgttacaccagatgtggtcagctttagctgtttgattggattattctcgaggagaggggagatggaccatgcaggggcatacttgagggaaatgaaggggcttggattggtgcctgatggtgtgatttacacaatggtcatag

SEQ ID NO: 186599 - DNA, 1063 bp, Zea Mays
aagagtagctatgtagaaggtaactaattgttcttcatctttggtctttttgcaaagactgaaagttggtcagcaccatgtgtttcttcctataaaagagggagcaatataggttaattaaaaatattaagtacatatattgatatctatatgggtattatcggatgtgttgaaaagtagttaccttgtcggagtcatcaattgcattgaaatttctcttgtatgatacactgaggttgtcaaagcaactgtaacatatcagattaaaagatgttataacaaaacattgtatattttctggatgatatgaaaagaaagatataaaaagtagacccactaacctagtctgatcaatctccataagctgtaattcatgtggtgatgctgcttctgaaccagaggtcttacatagcaatgtacatgttagttttatttttgcggattaagatttataattgagatgttttgatagaaagcagtacctgtatatcttgtgtctttggctctattggtactaggggtggtagctttggaagttgagatgagcttgcgctgtggagaacaacaggctcttcttttttgaacacggaaaggagtaggtcttttccatgcctctttttgatactaagaatatcaaatgttggatctttgttgtccttattaggtcctctctttttaatactttttcctggaaacaacttggtcacaacagtcaatttctcacccacaattgctttaatctcttccggcaattcagatttgttgctttgtctcagtaatttctctacggttttcccaataagtgatgtcgctctctcatcaaagagcacgaattctagctcataggtgccatcagtggcatatagagatattttatacctatttagagtataggttatagacattgataaaatacaagaagttttgtgtataaaaatgattgtacagagagtttacctgtggaccatctgagaggagatgtggccttgtttacaaatgtatgtttttccttcatatcttgttgatgtattgcattttgtgcatccttgatagaaccagggct

SEQ ID NO: 186600 - DNA, 735 bp, Zea Mays
gcgttttatgtctctggtagccccagacacctcatactctcctctgttgcctgtgatgaagcagatgactgtgttctcttcattaatgctggtggtggtgcaatcgaaagctgtgatccctgtgtgaaggtttctggtgattcattctttgaaggaggggatgtgatagaaacaaatgagagcatagccgaaggtggtgattgtccatttatttatcactcagcaagatacggcagtttcagctacaagttcgacggtcttgcccccggagcttattttctagatctgcattttgctgaaattctatacacgtgtgggccaaaaggaattagcatgttcgatgtcctggtgcaggacgagaaggcaaatatgctaacttgttaattaaaacttataactgtctcccatgatttctattcaggttcagctaaaaaatcatcacttttgaatccacagatactgtctcagctcgatgtatatgctgtagttggagggaacagggcccttcaagtgcgtgatattagggttactgttgagatgaatggtgctgttatgatcaatttcaaaggagtaagaggaagtcccatggtttgtggtatctgtattcgcaaagcaccacttttatcaggtaaggagttgatttggtgcaatttacttatttttttctgagtgataatcttggtcttacactcgtggcagcaaactcggttacaaatggcaatgtcttgtgcaaaa

SEQ ID NO: 186601 - DNA, 348 bp, Zea Mays
ccgtggtgttctgtgcagtggctaaatttctatagtaaaagctgtgcaccatgctgtgcagggagtttgccacgtcacttctttcttctcagccgttggataccaaacggagtacacaaaattgtccacgtcgcctttcaatagagtccattggatgtgcagggagtttgccacgtcacttctttcttctcagccgttggataccaaacggagtacacaaaattgtccacgtcgcctttcaatagagtccattggatgccttttaaacggtgcgtactctgccttcttttttttcctctcacatcctcccgtaagttccagagaaggctggacattggacactccggc

SEQ ID NO: 186602 - DNA, 955 bp, Zea Mays
gttccagttcacaccacagcatttggtgagattgttacagatcattgtcgatggaagttgtgatatggctgtaagacaggttgcaagcattcatttcaagaattttattgcgaaaaactggtcacccaatgatccaggtctgcagatgttattggcatgccgttgaatttgcttatgctctgctaactcaaattaatatatttattttgtttatgtagatgagtctccgaaagttttggaaagtgacaaggccatggttcgtgaaaacgtacttggttttattgttcaagtgccccctttgttaaggtaaatacttagtagtaccctaaatttcctcctaactgttggaatggctacaaaagtgttaccgatcaggctttgacattttcagtgccaacatggttctgattattagcacatcaaccttatttcatccccctgttatatgataatgattgtgctaaattagatatggagaattgctgttttgagtattctttgtttgtctttttgattgcaagtgaagcattaggtacaaaaatcttgacatatcgtttaactcatacttgtttggtcctgtctctttaggccttatgggttgactatttaatagaaatatcagttcaaatgtttttagacactatgatattgtaataccatcattaacatttctcttttgataaagttgaaagtctgccatcttgtggtggaaatgttataattttgtattgtcatttatggaaacattgttttaacgttttctggttatttgtagagcccagcttggagaaagtatcaaaacaattattcattctgattatcctgagcagtggccaagtctccttcactgggtttcacacaacatagacttacagaatcaaatttttggtgctttatatgtcctaagggttcttgccagaaaatatgagtaagtatccttatagatttgtattcc

SEQ ID NO: 186603 - DNA, 548 bp, Zea Mays
ctcttcttcactggtatcattctgctccttctccaggctatcctctatcacactgccagcactagcaggaagaagctcctccatgcttccaccatgcataaccatagcagctgcctcactcagtacatcagacctgctggtctcatctaccacctcaccctccttctcagccgattcatctaagacttctccaccttgagcaataacccttcatgcgtatgagattcaaattgcatctccccatcccatgccacttttagacccactttactgaacaacggatcacccaacttccatggagcattaggaacaacaccctgctcgcaattgttgtgcgtctggtcacccttcccttccaggttcaccacatctccatgcttggcttcctcatcccaaatcacactctccagcggcatttcgttgaacaccagagagtccatactttcaatcagaactggaacgcagttgtggcaaccatggccatcgtcgctgttgtcaacaacccaaaccatgttgttgttccaactagcagagtcgtcaaaaccacc

SEQ ID NO: 186604 - DNA, 3112 bp, Zea Mays
acgaaggacacgaaggttattttacactcccgattgctataatgatcaggattgtcactttgtcagacatttctgattctatatcctggaaattgtttggagttttggactacggcttataagaaaactatgattacattaaatccgaattttgtataagcggtcgcaaacgtgccttagacttcctctgatttttgtaagaacaccttcaacaatcaacaataaaattaacttgctaactcatgaatcatgattcttttaaaaaatgaaattagagtaacttaacatactagtatatgtaactctctattctaaattaagagacattttgagtattctagatacatagtttttgctatacagatatacatgtcaagcgaatgcaaacgctatttccacttcacaagttaaacataaagttaagtatattttcactcattacggtaaagatgatcacatagtacatttttgctttagactagctaaacaacaaagaacagaaagtgccatgactgtctaatttcagaagggcttttatttctcttgagactgtggcatttttatttttgcatagggtgaaacaaacaccattatatgagatatgatactagtggagttaaaatcatttttaggtttattatttatcttaaatttgtcactaccaaaaggtctaacatatgggtgcataagtcttagaacgagcataaggatcaaacctaaattagttttatgtgagagggagcttgttttttgttctaaaatttgggtcaagcttttattttccatcttcctttaaagtatccaatatattttaaaggggtgaatgattatcacaagtgttattcttatatttatcttttttaccacaattagagtacaaaaaacctcatggtagctatattttttagttgatgtaatgtatcttaacatcaacatctttcaacttcaactcaatgaatttacatttatcatatgaagttggtttaacaatagcacaaacatgtttctcattttgttcttttcagttttaagttgttctaaagtaggaacatgcacatccattgttgaagtaagtttggataaattaagtcacatgatttgcatgagtcatctttagaaatcaaagttttaagtcttgcagtttcagcattttaagatttaatcaaagtatcatatttcttaatttttttatttactttctctagtgaagtaccaggttttttaactgcacaagctacatcattgtaacacgactctaatgcacgacctttacttacgttgtcaaactcgctatttgtggagctctttttacttgccgttaaacactttttacttgccgttaaacacaatccactcaaatggttcttacttttgggagttgcaccatcctcattgtttgtgtttgtgtccacatcactcaaattgatttgatcaaagaagaacatgatgtaccaccttgtggttcaagtagtctgttgttgctgaatgtgtttttttgtctcacttctttcaatttctttttcctgttcaccttcacccctgtcaatttactagaaactttgggcttttggagggaatatagttgagtggaccacactcaaaacacctttgaggatctccacttcttttatcattcttacattctttaaagcttcatcagattgagaagagaagtgtgctagttcttcttctagaaggtcctcaagctattcattagttagtgaagacaagaatgataacaaaaaaactagatggagattcaatattagacatgctaggttgagagatcaaatcaattgactaattattattatttctggccaaaatattcatgagttttcaatttaggttaacattagtaatataagtaactttcctctcctatatagacatattaaagctcgaagtaattgacgtgcatttttcacattagtataagtaacattgatatcacataggtcactaagaattttattatagtgagcaaagaaatcatctaataattcatcagatttcatctcaaaatgcatttaatcttttttgtacatgtcttggcgtacctctttttttgaagataaaccctcatgataatcaggaagtgctctctgtactcgatatatggatttatgatgcataatgggaccaaagtcgctccttacaagaattaagtgatgggtttcttgccatgatattaacctccacttgggccgtgtccatggctcttatctcacgttctcggacacctaataaggcttatataccttctcccatattgcaaagccctaaatttgaatataagatctaggttccatttcgctattgaccatgtttcgcctcaaaacaacacttgcacatgaacaaacacacaatcgtgttcgagcataagtccattgactcaattcaattaatccgcataccacctcaaatgtgtgtatcatgcgacaataacaaatcaccatgctataacatgcatatataagtaatacatgcacattacctataccaaaattttaatcattttgaaatatcaatttcatcttaaataaaattttcatcacttgatctcacattacatcaacctcttatgaagacaaatagcttgtcattaatcaagatctgaattgttggcacaacgttcctctttgcttggcgacctctcttaatgataacttcccaaatttctacataatttgaaatttgattgaatatatttttttctcttgtgaagatatccaaattggagccagtccattgtttgttttttctctggattcactacacaagtaagcattcgacacaatctatcaagaaagatcgcagagatcaacttaaggcttgaagacatcattaacaataaggagaaatacaagattgaagctgcacccaatgattttccattggtgacatggaaaccttctacggacatctctactgtggcaaaaagtttgtaagttcccacaacactactctctaaagtgtcgttcgaggagttgagtgtaaatagaactttgttaatgaccgctcaaacatgtacaaatattcaaaccatcatgtcacgtcgatatgacaacataagtgatctaaaagactgttgtttattgctttaaaacgc

SEQ ID NO: 186605 - DNA, 273 bp, Zea Mays
cgactcgctcgaccatttgtcgctcgtgaaacgtcaccatgtgcatgtttggaagatggagttgcagctgcatcacagatggagagttctgactaagctcaaatccatatatcctccataaggcttccggaggagtcacccaccttgcatctctatactgctggatctcatctacatcatcattttccttactcgcatctgtcataacaaccgacgcacgatcatggcctttgtatatgtacttgaacaagtacttaacagccttgatgctcc

SEQ ID NO: 186606 - DNA, 374 bp, Zea Mays
agagcaaatgattttttttctttgtgttcgtgattattcataagttctgctgttttcatctcaaacatgatacggtgtgataaatgtgcatgataggaagcggttaaatgatttgttcttatacattgccagcacatgattagtgttactaggctcatcataaaaagatcgtactacgtactacgctaatttaataatacccattcatcaagaaaagattacagtatagtttaaggttcaatgtacctgagggtactttggtcattttgaggcgcagatcgacatgcatgattgtcacctgtgccgtgtgcggctgtgcggcgctgcttccaccgaggcgagcgagcgttacaaattaaaatactccctccgag

SEQ ID NO: 186607 - DNA, 427 bp, Zea Mays
cttattccacagaagcttcaatgtatagtagctgtatgccacctgtatgcatgactgttcagacacctaaaagttcacttgccagtgcgagaaaaagtacaccaggaaatttgtttttttccaataatgttcacatagatgaagcaggtggtggaatgtcaaaggttgataatgacgtccttgacttggataatggttggaatcatatctcagatgaagattctgtagcaatacatgatcacaacggtaatcacaatgaatattttccaacatctgacagtccacagagcattttggtttccttgtcaattgcatgccctctgagaggaattgtatgtaagcagtctcagctatttcgtataaagttctatggtacttttgataagccgcttggaacgtattttcgtgaagatttatttgttcaggt

SEQ ID NO: 186608 - DNA, 338 bp, Zea Mays
atggatgaccagaggaatgatgagcctcggcgtttgggcagtcccttgccccagcgacggtctgttcaccttcgccttgggcctcccccgccgtctggacatggaaggacttcacatacatctaggggacatgaacagccactctttgacgcaccggagttacagcagatggcctcggataatgggatgatactccttaatgagttgtctgcagagaagccaaacagtctccatgatgaggcccctactgacagctggacatgcactattgggccgctgaactccacccagccgttttcgcctcagtccaaagtgactgggtcgctggaaatgacagg

SEQ ID NO: 186609 - DNA, 1483 bp, Zea Mays
gaattattttcaagtgcagatcatcctcaatttccattaatcaaggtataaggttaccctatggtttcatttttaccattaatgtagtgaattacttattgttaatgggtgcagaaagatgttagtaaagcaaaaagtcgtgaagttgttgaattttttgaatctggatttggtatacacaatgctggaatgatgcgatctgacagaagtttgatggagcgcttgtttggtgacgggcttttgaaagtatgtatttctgcatgcttgagtattctctagtcttgtgctaacttctttcagtttaggtccttgtttgtacagcaactttggcttggggagtaaacttaccagctcatacagttgttataaaggttagtgctttcctttttgctctaccttttttttaaaagatgtgtataattgatggggcatctagccaatactggataattgaaagaactaaaagcttgcagtttattgtaacttatcacttaacctaatatctttaggatgtaattaacacctgtctatctgtgaggatcctatgctgtttagttcgatatagcaactactctttgtagtttggcattaatacaaacacatcttggtattcagtgttgtttagttctaactagttaccacttgctttgaagatagtctgggatcaacattggcatgtaatactatttatctggatgggcatactaaaagcctcaagttttgtgtaatacttttagtttatctttctggtttgataagacggatgagcatcacaagccttgcatgttttcaattgtctatacctcttttatgcactgcacattgctgatactcacatttcccaacaacagggcacacagctatatgatcctaaagctggtgggtggcgagacttggggatgcttgatgtgatgcaggtgtctatctaaacctgtcatatatctgtgctattttttttccttttgaagtaaaaatactgttctattatgttcatttcttcagtcaaccactcttatgtttctgatgtttatgcattcatattctattttgtgctagatctttggacgtgctggaaggccacagtttgataaaagtggcgaaggaattattatcacaacacatgacaaattggcttattacttgaggttattgacaagtcagcttccaatagagagccaggttagcataccaggatgctatgctaacataataatggaacttgttcagctatggggtaaataattaagatcataatccagggggttatcctaacattaggttgttgtataatggagcaatttttatatgaccaatagttttatgttattttactattgtagtattgtagcccttgttatgacaggtcttgaaaaaacggtctgttatatattcttttgacccacaatttaatatgtcgttaactatatataatcttgcagttccttggatctctgaaagataatttaaatgctgaagttgcttt

SEQ ID NO: 186610 - DNA, 296 bp, Zea Mays
gaaggataggagattggagaagacaccacacactgcagtgaggtggtgacgttcatatatatagccaatgtggctgagtgtacatggcaggtgccaatcacagtacatggcaggtgccaatcacagtacatggcaggtgccaatcacaatacatggcaggtgctaatcacactgattgtggacttgccgaatatgaacttgcctaatatacacttgctatatatatctatcaaacatccttagattttgttttcttaacttattgaggactcctatctgagtgaatgtcatccaac

SEQ ID NO: 186611 - DNA, 583 bp, Zea Mays
ggaaagggacgctgatccgatcgcaagagacgaatcgtgcagttggatcacggagcgcggtcgagtgacgaagttgtcgcattgtgccgagcattaacgaatcgagctcgatcgagagtccgcagctagtggcggcgtttggtgccagcgcgcgaccagggccatggccggcgccgcgttccgggctgtggttttctccctcctcggcgccgccactttcttcgtgggttcctcttcggcgtcgtggcatgcgcaggtgttcgtggtcggcggcgagccgagggggtggaggaagccaacggcgcccaacgaggagagctacaaccactgggccgccaggaaccgcttccacgtcggggacttcctccgtgagtgcatgcatgcactaatttaaccataccatgcatgcatatcgatcgagaattcgctacattaatttggtatctggcatgcgcgttgatgcacgcgtgatccatccatccgatccgccgctgcagatttcaagtacgagaagaacgactcggtgctggtggtcacccgcggcgactaccagctctgcgccgccgacaagccaacgctgcgg

SEQ ID NO: 186612 - DNA, 384 bp, Zea Mays
tcctcggcagcagtgtggcttgtgaccgtccctgtcgttgcgtcgcctcttcgagcagcagcgtcgtcgttcgtcgacccccgccgttgcatctacatcattgtcgactctgtcagtttatgtctcctgcgcacggtctgtgagttgttcgacacctgcgagctatgtcggcacacccatcgctggtctacaccacgttcgtcttcgagttcttcgctgacttcaagcaccgttgtcgcgctacagtggcattgtcgaggaccttctacctatgtgttgtggctctcccgtcgcgacaacttatggatcctcgatgcgtcgccacgcctacctcttcgctttcttccagcacaaccttgttgccagcgtcgccatctcatcctc

SEQ ID NO: 186613 - DNA, 397 bp, Zea Mays
gcaagattttgtttcaaaccatatcatcccctacatggaacaaaagatccgtgtcctcaatcagcaggtacacagttgagagtttggtatatcattatgttcatcttatcatttcccaacaagattcagtaccgttttaggtagccacaacaagaaagggttttagaaatcagatcaagaacttgtggtggagaaaaagagatgatgtcccagaagctccaaatgggccaatgcaagtgattattctagattttgctgcttttcactgtatatatctgtaatttctaatattctgtaactttattttctccatcaggtatacattcacctccatagaatcacagatcagagtacttggtgatttcgccttcatgttacgggactacgagcttgcctt

SEQ ID NO: 186614 - DNA, 1048 bp, Zea Mays
gtaatgaaggatcctgaagcatctaatgaatgtgagtggaagtatctaggaaaaaataaacccacagatgctgagatgctgagaacatatgcgattgggttgcttgctatggcattgtgcaggtactattagtgtcctcattgatttatcatctggtgtgataatgttataattttactaccgaatacatcatgatattcatccaattcttgcacgtttcattttttcacctcagtggtgggcaattggtagaggatgtcttgactttgggggtgccagcaaagctcatgcactttctgcgcataagagtccttggtgatgcctcatcttctcaaagagatgctaatcatccacaagacaccaaatatcctcgaggcagagacgataataggggtaaatcacgtctggcccaagatggttctcggttggatggaacaagggttgggtatggaatattgaccaacccaacagcagagaaggacaatgaacctggtgttgtaatgaggcaagcatatggagaaaggtcattggatggcacttttgcctcatcagataattctgacgtccctgaggttgattggaccaatgataactcttatggcacaattgtttgtgacacaaagtcaaaatatggggaaaagacttctgtgacaagggctcttaaagatgaagagatcagcgaaaatggtgaactgttgaagagaaagctgagtcgagccccctctcgacttagagtgaagggaaaagcaggagacaacttgcctgaatgtgaaatgacacctttatcaccaacctctggattgagaatcggaggtcgggcttccagagacaggaatgtggtgagggttgatgacccaaagaaggcaactgatgtgaacaatagttctgcaggcctcgagttgtttagcgctatttccaaagaagaatatgaagatcgtttgagggattgcattattggcttgaaggatatatctgacatcgttttgaaggcagtgagagctgctgaggctgaggccagatctgcaaatgcacctgatgaagctgtgaa

SEQ ID NO: 186615 - DNA, 373 bp, Zea Mays
ctcagttcaaaagagctaaggaacggtcagattcatctgatgatgatctttttaatgagctgatgtctctatgtaattcaagcagcagtgatagtgttgacccagatactcttcgaaggttatctgagaagttgcagcttgtcacaatatatgacctcaatcatgaatctctgaccttgcatgagatggctagtggcggtgatcctggtgcagttgttgaaaagatgtcaatgctcctcaaaaggattaaggattttgtgcagacagaagaccctgagatgggtgcccaagcaagtacagcaaccatttctacaaaagacaattcagcatgtcctgttattcccgatgatttccgttgcccaatatcactgga

SEQ ID NO: 186616 - DNA, 576 bp, Zea Mays
ggtgctgacccgaagtgagccattttcgcaactttttcattgcctctatgtgtacccattgactgttagcttgagccgcaaaagaaacctctttgttagagtggaactgagaaaggacgattctgacatcaggaagcctccattagaggtttgcttgctggattttttgtcatcctgttgaatgttggtgtctagtcaaacatccttatctattagagatgtgggcttccaggctgttcatcctagggagcggaatacgatgctacagaagtggggccatacacagattgctgttggaacaagaatggcttcctaccatgatgaagttaaaatcagcctacctgctcttttgacaccccaacatcatcttgtgttcacatttttccatgtagatcttcaaatgaaacttgaagcaccgaaaccagtatgtgccatgttccttattagtttggattatgcttcattgtttagtttgctcatgtctgacatgttctttatttcttcaggtgatcattggatattctgtacttccactgtcgacacatattcagtatgcatcatctactcaattatttt

SEQ ID NO: 186617 - DNA, 1452 bp, Zea Mays
gtagagtggtttagaaaagctctagctgttgaacctgtcaaggggaacctacggctcagtgggtactcagcttgtggtcaggatggaggtgtacaactacctcatgcgtatgttgaaggtaattttcagttttaatgaatcagtttagcaatcttgcattcttgcctgctaattgcctgactatgttttcatgtgaatctctcctcaattgcagatggtgttgctaatgctgatttagtcctcttagtaacaactagaccaacaacaggtaacacccttgcatgggctgtggcctgtgaacgtgaccagtggggtcgggccattgcaggtttgtgaaccaactcaattaagtacagacatccacatgccaggggtttctagtgttgttctgaccctacatgtattctttttctgcttttaggacatgttaatgtggcccctcgtcatttgacagctgaagctgaaacattactttcagctactctaatacacgaggttatgcatgttctagggtttgatcctcatgccttcacacattttcgtgatgaaaggaaaaggagacgtggtcaggtactcaacaatgtatttcccacttcagtattgtgatatattttcttttgcttaaaatagaccctaatgctcaaaatgtcagtgcattaccttatttaaatttgggttgcacttcgacctgcttttaatgtttctatgactaaagcgctagaaattcgatgggtgatgtcaactttgctggtttatggaataatcgctttggcaattaccactatatggtggtaatacaagggcagttaagcggataatcctaaaaaatggttagatataatttaggttgcaggtgcttataagttggagtcttgggagttacgtgtagacctcatcggtctgctgtaagctttgtcacatcacatgttgggcaaccagctcacgatgacatttatgttaaaatgtatgccagcaactcaatgattgctgaagaatttgagaacatgacctccatacttgtgtgtgaatatgtactggacaaaaagaataaaattccacacagtgtggcatgcttagcttaacaaccaatattcttctctaatctatgtttatctatttgttccttcaggttactgctcaaagtttggataaaaagcttggaagaatggttactcgtgttgtcctaccacgagttgtcatgcacgcgagacatcattatggagtaagttctaactaaagatgtggaaaaagttaattgagtcattggcgacagttatttattttcatgctctttacttagaaaaccccttcatataaactaaccaatttgttttcatgctctttacttagaaaatcacttcatataaactaaccggtttttgtcttgtactcttgtgctaggcattttcccaaaacttcactgggttagaattggaagacgggggaggccgg

SEQ ID NO: 186618 - DNA, 951 bp, Zea Mays
gcctgtggatgaaggtgtcgaagatgcttttgagctgcttcacgaggtcaatgagcgagtgagaactggaatttgggttggagactgctttatctataacaactcgttgtggcgcctaaattattgtgttggtggtgaggtaaaaatagtctactccttgaaaacgttttcttctgtttaagttctctatatggccactttgtgagtcacgacttcaattgtttacacagttataagctttgtacttacaggtcactacaatgtatcatttggatcgccctatgtacctattgggatatcttgcgaaccaaagtcgagtttatcttattgacaaggagtttaagtgcgctttctctaaaacaatgtttcctttcttttgtaacatctgctgttaatttctgtgactaacatataagcttgatacagtatcattgggtacacattacttctgagtttgattgagtacaagacccttgtgatgcgtggggatttggaacatgcaaatgaaattttatcatccataccaaaggcacaatacaataggtttgttccaaaatgtaaactgatttttttctacgctcttttctctctctaatttatctttgcttttagatccgttttctatttcgtaacggcagattatatgttaaattgatgtatatagtagtgtcacttaactgttctgatgtatgccatatctaaatagactcctttaatggtatatttatgttgtaaaaaataaatattgtttttttcttgtgtatgttcataatttactgacttagtatacttagttttctccaccctttttgtgtattttggccaacatcatttagagtctgtactcttttaacctcggttcttgtttctctttcatatggcagtgttgctcattttttggaatctagaggtatgttggaagaggctcttgagatagccacggatgctgac

SEQ ID NO: 186619 - DNA, 293 bp, Zea Mays
attctccaatggagggattgatgatgcacttaaatcatcatgggaatggctgctcaagttcaaatcaggtgtctcgcacatggcatttcaggcgagcccctcctttctttttgtaacaaataaccctatcttctcggcctccagttgtctcatgtggaatctgaatgtcaggccaccggcaatgaaggtgtcaggttactggctattaagtttgttgaaaaaacagttcttatgtacacaccagatcctgatgtcccatctgatccgccaactgaaacaacagaaggtatggc

SEQ ID NO: 186620 - DNA, 337 bp, Zea Mays
cgcacaccgaaaacagtacgtgcagcccaaaacagcgattaataaatttcagctcctatacaattcaagaattgccgcgttctaagttcttgaactattctaacactttaccattcgttagagttgaattaattaaatgatgactaacaagtagacttacaaattttatccaaatcatttagtgcactaaaattaccacattcagttaacaaacgcattcaccacaatcatcaaatccggcatatacttatatctaagcgcttttcacccactagtttgcattttaatttagacatcacctgagcactactacttctcatccgtgaccataaccata

SEQ ID NO: 186621 - DNA, 576 bp, Zea Mays
tcggttagcgaataaagaccagtgaccgttatgttgggatcaagggtaggaattgcgactggaaatttctgtgcttcaggaagaggagttccctcttttgagttttgcacagaaaatagagagccaccatcataaaaattcagctgtccaggatttgtcaaaataaaaagtgcagaagttctgcttttatcaggaaccccagtatcaggaataagaatcatatcagcaaatgatccatcaagtttgagatcagttcgtgacatgcatctcactgattctaatccagcagttgattccaggctaagaacctgcaagagaatgagctattttgtcattgatggaggctgagttttctgcagtgcaatatttgggaaacaattatgttcttccatgttcagggaagtgattccgataggtatgtatacattatttggctgctgagacctgaactaaaaaatatcttcagaattgtatgggtctacaagatgggttctgcctgaggaaacagttcttatacttgcaggaaactctcatggttgatcatgtttcatgcaaacccgtgttgccctatcgcca

SEQ ID NO: 186622 - DNA, 414 bp, Zea Mays
cttcctcagacgacaacaccctgctatcctgggccatctccatcctgtgcagcaccttacgagccagcccagccgagaactgacattgccgaccgctttatgcccccaagattgtgaccttctcgctaatcttttaaacttcatcgacaccctctcaatagggcaagaagcctgaatcggctggtcccaagaaacaacaacctcttccataaaacccgggagcttaggccaaaagctctcgaaatgaaatccacacttccctttaagatccatactgagcttaaggatcagaggacaattgttagaagtttcagaattcagatgcactgctataaagaaaacaatcagggaaagcctcctcccaacaagtagaacaaacaacatgatccaacataacaagagtgggattctccc

SEQ ID NO: 186623 - DNA, 1991 bp, Zea Mays
gttgcgggagctggcaccgcctccttcgaggtgcgtcgtcacggagggtagtttccgtttcgtctccatctccccaaggatcggtcatggtcatgctcagcttcgttgggatttctaagaccgttgagcattctgccgagcctatggtcccaatccataaccgaaatcgcttcatggatcctaatgggcgcgtcgaacatctcggggtttctattttcactggcacaattttattgcacgttgaaacatatagttagggttttatgacaaatgtatttaatggccatggtatccgtacgaaaatggcactacattttgtacagttttgcatgcttaccatatgctgtgccctcttgaaattttggtgtagctagaccaggagagagagtcgcactgtgatttcatgcatgtaattaaaatggactttaattgcatggtacaagccaaaatgtggtatgttcgttaaattgcttgggtcagattcaaacgaatccagtatattttatgttcctgctgggagatcgttactagtctgtgtatttgtgtgacagggctgtcatatataaccagctatttattttgtgatgccaactgttgaatacactactttccctgtttctttttaacgcttgaatcaaacctctcactccacatcatgcttcaaaagacgtttgcctaggcgctaggcctcacctctttcgtgtagtttccacgtaagcagccttggtgaatattttcgcctgcctaatcacgtaggtacaactgttgtctgcctagcatagcactttcaagaacaccatgtttagcatgggagaagataatactcttctgtgtattttgagaggatattgtccttttttgcatgggtagtgctgtcactccacacatttgttaaatagaaaaatcatcataagttgcatatattattttctgtttcaaatgcaactctgttagttttttgtgtgatttttagttttttctttttcctctataattgttttctttcgaagcactgcatatactctaaacaacagtttcctactttttctatgtagaactaagtcaacagtctttatgggcttcatgctagtagatgatagttcctggcttcctgcactgcttttggaagacctgccttttcaatcatagaggattggtagaccagatcctggcaaagcaatgctgatggaccctcctgttatgcaaatggactgcaagttgaaaaatgctatggataaaacaccacaaatcgcctatgataggaagctgaccgtctcacatgatgattatgggtgggcaggctctgatgtccacctaaaagatgatacaatagtatgtagccctgtcgatcttagcgatgcttgtcaatcaggcatggatcgggtattagattctgcttccaaaaattcatctcttaatttgggcgatttatctcaggggacagaactaagagagaagaatagcgacagttcttactccgatgtaaaacttcagttaaatttaagtgctggaaattataatggcttgcaaactgatgattatagctttaataaacagagttttggtaagaaggatatgcatcatcctcaggaagagatacattcttctcccaatacaatgtcattaccaagtccatgcagactcaatggagacgtcacaccttgtgaagcggagaaaatagcagaggatcgtggcaaagtagatgggattgtagatgctgtaagtaaggaagtcaaaactgacttggtaggatgccatgcacggcaggaagaattgcaatgcacgctccaagatctatcagaaatagcctgcagtattgatttagtacgtaataaatcttctccacaagaagagaagaagtctgtttcccctttgaatgacatgggccataatgtggataacaatagttgtaatggtgataccaattataaagggcaggagctcaatatggggaatgttggagatgaggatcatgctgtagcactttgggt

SEQ ID NO: 186624 - DNA, 387 bp, Zea Mays
caaggacagagggtggcagatattgcgccaagacttcttcaagttgttccgaaaagaaaaatcaatacaaggacagtgcaagaagctattactggaagagcatggatgtcggatattcgaggggccctatctgtgggggcaattattgattatcttcacctttggaacttattgttaactgctgaattaaggccgaatgttgaagataagcacatttttaggctggctgccaatggaaaatattcagcgaaatctgcctacgaggggttattcattggctcgattccttttgaaccgtacgagaggatatggaaaacctgggcgcctcctaaatgtcggttttttatgtggttagttgctcaaaaaaggtgttggacagctgatcgt

SEQ ID NO: 186625 - DNA, 613 bp, Zea Mays
gagcctctcggcgaggtggctgcacgggaaaggcttctacccgctcatcaccggcgaccaagccatacatcctggcagcaagcaggaagacgcgtaagctagctcaccattaactgcactaatcacagtgtgcaatgtattgaccatgcgtgcgtgtattcgagccttgtgcagccagttgtgcttggtggggtcgctggaccccgagaagaccaggggaaagatcgtggtgtgcctgagagggaacatcccaagggtggacaagggcgctgccgtccgccacgccggtggcgccgccatgatcctcgtcaacgacgaggccaacgggaacgtcctccaggccgacccgcacgtgatcccggccgtgcacatctcctacgccgacgggctcaggctctcggcgtacatcaagaacaccaagtaggccaatagctagcctccttacaaacatgaaacgtgttccccttttttcctgcaggaaaatggtctgcacaaatgacaaattcgtgtgtaatgtttgtgttaaagggttccgtccgggttcgtcgtcaaggggaggacgatcttgggcacgaggccggcgccggtcatggcggctttctcatctcagggg

SEQ ID NO: 186626 - DNA, 343 bp, Zea Mays
aagagacgatgacattaaagacgtggttgtgctggacgaataagaagccatacgaagtcggacgtgtctaaccgaaagattagtccaaacggatgtgtctgcccaatggcagcagttcggacgcaaggtatggtggtgatggtagcactcgatgttcgtgatggaggactcaaatagcttgacaaagattgggtattgatacgtgctgcgtaaggggcacaacatggttgtcgttgcaaatgagacaacgatgtagatgtagcgacaaatgccatgtggatagaggcatgcctgtgagggcatgtcttcgtcgatgatgactataggcagtggtgctgtggcc

SEQ ID NO: 186627 - DNA, 851 bp, Zea Mays
tacaggtatctgcggataaggtattcaagggtcttgagggcagagggaagatgcaaatagccagctagaaggcgaaggtaggtggagatagacttgttgagtttgtcgttctccttgggagtcaactgttcgcggttcacctcaaggctagtctccctgaacagagtgttgctgtattttgcaaatctctcgtctacgctggtaaggtgctccaaccctgaaaagcaatttgattcaggtaccgtagaggaagagaagctcttcgaatgaaatacctcatatgcaaaactaaattggttttgtttttaaaaacttcattcaatttgagctattagtgaagtttcataaaatcgcatgcataattgcacaagcataaacaactaggtgtactatgtagacggatgggatcaacctgcaaatagcagcaaaatccagagggaattccgagaaagctgatttagatattatattaaatgggagctaaaataagaatcaaacgaaccaaacaaaattctagaacgctcggtttagcggaaaatacaaccaagttgtccttcatgaaatgctggctagtggctactctagaagagcgcaactaataaagcatcagcatgctcgaaccgatcaggtcggtagttagtggtacgaaccagagagggcaatgggcaggatggcccggaggtcgatgtcggcggcctctttggcgtcgaagagcacagacggccgggtgacgggccgccgagccggctccggcgcagcgccgagcgccgacttgatggccttcagctgcgatgcgatagacgacatcgccgacagcttgtctcgttggcggtggccgcgactcccttgat

SEQ ID NO: 186628 - DNA, 324 bp, Zea Mays
tacattttacaattcttgagtcataagaatcgtcgttcaattaagagggatccgcaaaagttgagtaagtatgtgcgatgagctcagtccaaaccttttcaaatcctctaagaaaatattttactagatcatgaatgctcttggaaaacccactttcacaacctactaagatttccccttggttcacctcagttttctcaaaatcagttcaacagtctcaaaaatcggttcaaccgaacctaaaaccggttcaaccggtttttgcactgttccctctgtcactttctgacctgccagtctgccagtcaattctgtcagaaaaag

SEQ ID NO: 186629 - DNA, 654 bp, Zea Mays
aaatggcattccaccatacccaccttcaggaaggtttcctgctattcctcctgccacttcaggtaaaattcccctctctgaaagtacatcaaatcactcaggcaacatatatctcttgtcatttcccatttcttgaacagcagtcccacctccagccacatcacctgttattgcacaagcaccacagcgacgagcagatcctccaagtagagattataagaacggtgaggataaaatcacccagtttcatacatctgattgtgttttaatcccttttgtacttaatattggatgaatatttaggaaacgcagtgccgccagcaaatacttaccctcctacaaatctcaagaagcatcatgttccacatgcatcccctccaaagggatccactggtcaaactgtcccaggtcacaaatcaccagttacaggtaatctcagctattaaacttaggctgtgtccatttgaacattacaatgtagaattgtagattgacaaccaaaactacttgtttcaggatctgcgcctgcaacaagtcctttgccccagaacacaaacatgccttcaatcccgaagaatgcttcatcagtgccacatgcccatccctcaccaccaagtatagctccagaattggcacccactggtagatctcatg

SEQ ID NO: 186630 - DNA, 745 bp, Zea Mays
ccgttcctggccgattcgccagctggacgtgaagaacgccttccttcacggtcaccttgaggagacagtctactgtcagcagccgcctggcttcgtcgatccagcggctcctgaccatgtttgtcttcttcagcgctccctctacggcctgaagcaggcaccgcgagcttggtaccagcggttcgcctcgtacattcgtcaactcgggttcactgcttccgtctccgacgtctcactctttgtgtacaaagagggtggggacatggcctacttgctgttgtacgtcgacgacatcatcctcaccgcctcttcgtcaactcttctccagcgcatcatcgacaggctccactccgagttcgccatgacagatcttggggatctccaccacttcctcaacatctccgtcgagcgcctccccaccgggatcttcctgtcccagcgacagtacgccgtcgaccttcttcagcgtgcaggcatggccgagtgtcactccacgacgacccctgtcgacactcatgccaagctctccgcgactgctggtgctccagtcgccgacccttccatgtacaggagcatcgtcggtgctctccagtacatcacgctgactcgacctgatttggcatacgcggttcagcaggtgtgccttttcatgcatgacccgcgcgagccacatctggccttgctcaaacggatcttgcgctacttgaagggcacgctttcctccggtcttcacctgggcgtcggc

SEQ ID NO: 186631 - DNA, 285 bp, Zea Mays
ttgagtgctcagaacgaagctggcgacaatcctgctgtggctgcgagaagtggcggtgatgccttgcggagccccgctaactgtggagtcagattgcattccaacaacagtacaggtttacctggaaatgtccatgacaagagtccttttgcaaagcgcaaggtggagaagtttgatatgtccaaccttgagtggatagacaagattccagagtgccctgtgtattgtcccaccaaggaggaatttgaggatcccattgcatatatacagaagatttcacctgag

SEQ ID NO: 186632 - DNA, 462 bp, Zea Mays
tggttttgatgatttcctgcgtgatgggttgattgaatatcttgatgttaatgaagaaaacaatgcactggtacatcatgattcttttgctttttttatggtttgttatccaaattatggtggtgtatactaatattttcaaatagattgcattgtatgagcacatggatcaagatgatgttgaaagaagcagcatcacacacattgaaatagagccattgagtatcttaggggttgtatctggacttattccatatccacaccataaccaatctccacgtaatacttaccaggcaaggatgtagattatcattatatatctcattgtttcttggtttatttttctattgacatttctcttatttcagtgtgcaatgggtaagcaagcgatgggaaatattgcatataatcaggtaaggaaccacataatttttgtaccagttaattgctgcatttttttaa

SEQ ID NO: 186633 - DNA, 1022 bp, Zea Mays
tacacagtcgtaccatcccacaactgatgctgatgaacggctgtccccttctcttgctactcaagctgctcacaagtatgggaatatcccagttgttcccacacaaactggccaggatcaagaggtttgtatcaacgctctactttgcatcagatcgaagttgtcgtttcatttatggctggtgttcttagaaacttggcctatttgtcagtaatttaataccagaagttttcagcatgccatagaagaacaaatttaggtggctgcaagtcaatacaattgtcgcaaatgcagatttttagttcaaaataattttgggctagctacgtgtgtttgttttataagaacagtacaattacttgatctctcttcattcatatatgatgccatcatagttctctgttttttttttgtgtcattgagttattagaaaacatccggtctatgctattcattgccacattggataggtctaagcttatatcattcgttatgaaaaatacaatccacatttatctatatatctgttaattactgcaggggaacgactcacctgtgattatttcatctgtttctgcttccgttgctacccctgctgctggagttctgtcggcttcagttgctatccctcaacagtctgttcctgtatttcgccagcctttaggtgttcatataccacatctcccgatgaattatgtcccttacaatcagtacatttcaccattttttattccaccccctacccttcacccttttatgggtaatgctacattttctcagccaccttcaacaggggtcatgtacccaactcctggaaccgcaagagttcttccacctgtcaaattcccagttccttcattcaagcctggtgctaacattgggagccaggcatctattggagttcctggttgctatggaacatatggttctagtccatcggtttacactaataacgcacccgtgtcatctggaaatctagcagaaaatgacaatgttacttcatctcagttcaaggaaaataa

SEQ ID NO: 186634 - DNA, 631 bp, Zea Mays
gtgacaggtggtttggaagagtaagaaggtggtttggaagagtaagactgaggtggtgtggaagtggaaggtggtgtgatgggaataagaacatctggggtagaaacagtagatggtggtggtactgctgaagtttcagaaatgggaggaaggctcatgaaggaggtagactctgtggaataaaaagaagaatgagtggaagagttgtaaaagaagggtcagttttcattaaagctcacatctcgggaaatacgcatgcgacgagaagatggatcataacaccgataacctttatgttcagggctgtatccaagaaaaacacactcaacagattgagcagtcaatttagttcgttcacgaggagataacaaaacataacacgtacatccaaaaactcgaaggtggtcatatcgtggaggagttccaaaaagaacttcaccagatgttttgccagagagtttggatgacgattgtctattgatgagataaaccgcagtagaaactgcttcaccccaaaaatgtgaaaggacaaaagaagatatcaacaaagtgcgactagtttctataatgtgacggtgtttgcgttcagccacaccgttctgtgcatgagcactagggcaagaaagctgag

SEQ ID NO: 186635 - DNA, 396 bp, Zea Mays
tgaagttgacggcgggtcggactcagcgttggagacggtgctcgcgacggcgggtggattgcctagggttcggcgccgcggtggatcaaatgcggctcgttctctgcggtggagaagaacaagggggcagcgccaccttctctgcgattctgggtccctcaccggtgaagaagaacaaggcgacatcgtctccctctatgcggtggagaaggtgaatgcgacgacgttcgggcgacggggggagaatctctagggttcggcaaccgcagtggagaagaagcagatggcggcgataaagctagggttcggccgccgcgagcgttacgggtgaggagagctggaaaaactgcgtgcttggttgctggattcgtgggcccgatacacgtaatctgctgg

SEQ ID NO: 186636 - DNA, 291 bp, Zea Mays
attgtcagctcagctaagggtgtgatcgatatgatatattcagatgtctatctggagatagatgggtataataaacaacgtctttcttacatttacggcattctttcagcatgtcattcatatctgaagaggaccaatgagatagaattgagatacccagtgcatgtgcatacccataagcttgaaccatttcagtactataaggtacttgaggaagagtgcaagaaagtctgcttcattgatggcttgaactttaaaaacattgctggactggataatctgaactttgag

SEQ ID NO: 186637 - DNA, 435 bp, Zea Mays
tcctcaagctaggcaagtggagattaattacggcatcttcaactctcagcgatataatttgtcctcccttgacatgccttttactgaagcagaaattaaaaaaagtattgaccttctgccggctgataaggctcctgggcccgatggttttacggggaccttctttaaatcttgttgggacataatcaagcacgatgtgatggaggcagttaaggcatttcacgaccttcggtgcatgaacctgcaactcatcaactcggcaaatattattctacttcctaaaaaggagggtgcggaggcagttggtgattttagaccgattagcctcattcactccttcgtcaaaatcatcaccaagactcttgctctccgattagcgccacatatgcatgaaatcgtctcaccatgccaaagcgcgttcatcaagaaacggac

SEQ ID NO: 186638 - DNA, 888 bp, Zea Mays
ccacggcttcctcacctgcgcaggtcgccccgccccgcccccgcacgagggcggccttttctccctccgttttctcttcttctcctttggtactccggttctgttgctcgtcttggtcctgcatctcttcttggacgtggttggattgagctctggagtcttggggctgctgccgtctgatgcctggaactcgtaggttcttcgaagtttcgcggctgcacacgcgtatttgctcattttcctccgtatgagcctatgcggtgtcctgttagttgtttgagctctttatgcagtcgtgttgcttgattggattggaacagtagtggtatttctgtacttctgttggaaactgatcgaatgcactgtgggcgtttggctgctcagttttcttagttcacttcacctcatcacctgatttttttcccagcagttcctttcgcctgattttttctgtgctcagtttaagcacttattagcttatactttatacttggtgtttttgttgctcttgttgtcccgttgtttaatgacatgacgttcgaatctggtactgttcaaagcccaaatgaggaggctctgtgctgcctgcactgagttattgcctgtctgtgtttcattggcgattggtggacagacttgaactttgacaagctgatgatggaggctgggacacgctggttccggccgaatgagatctatgcggtgctggcgaactatgcaaggttcaaggtccatgctcagcccatcgacaaaccaattagtatgtgttccacattcgccataaaccccttaccttactgcaccctgcacatgtgtttgtttctcgaatacgcaggaggaactccatatccttatattaagaaagggtgaaacgagtccaaaatagac

SEQ ID NO: 186639 - DNA, 592 bp, Zea Mays
gggaactctattcgtgctgtacttgaggtatatattgtgatcctgctaaactattctatcttgtcattcctcattgggaaacacctgatcaagagtcttgcaggagcgtttggagttagcaaatgccttaaagaagcaaatgtgggcagaagcgcaacttgacaagaggcgtttcaaggaagaatttactagcagagtacaatataactctgacatgggtttgaagcctgatatatatcaagaaaacaacgtgacagagattacttcaactccagcgtgtgatgcttatagagagaatgatgaacatgtcgggacaatcaacaattgtgagatgcttgatcagcataatcagggtaatgctggtagtctaccttatgagagaaatggcgtatgccaggaaatcctcgcaaccccagatacttcgtatgttcagcagtatgcttatgctgataaaaggcgatctcagttgaaatcgtacattggtcaccgggcagagcagctttatgtttacagatccttgcccctaggtcaggatcggcggcgaaacaggtattggcagtttacaacttcagcatcaccaaatgaccctggc

SEQ ID NO: 186640 - DNA, 785 bp, Zea Mays
ctactttagtcagattggacaggatgttttgtactgctgattgggaagatttatttccagattgccttcttcagagtgctgctactcaagattcggatcactgccctctcttgttgggcctgtgtgatattaataaaaggaaagggcgcttccattttcaggccttctgggtgaaattggaggatttccaggatgttgtggctaacgcatggagttcgattcccgcaggccagtgccctcttgttagtctttccaagaaattacaagctacggcaaaggctttgcagcgttggagtgataataaagtgggggatttaaaactacagcttgaaatggctcgggagctcctttataggctggagatggctcatgacagcaggactctatctccaagtgaggattggttaaggcgtacccttaagaagcacatcttggtgctttcctccttgtcgagatctatagcccgtcttcggtccagaattaattggttgaaagaaggggacgctcatacttccctgttccatgctcaggctagattaagaaagaagaagaattttattggttcattatctacaagtgaagggcttattttgacatcacatgaggataaggctgatgatttgttccatttctatgatgccttgctcgggactgctttggggagagaaaaatctcttaatcttgatgcccttgggatgccttctttcaatctcaatgagctagatgtgcctttctcagaggaagaagtttggggtactgtaaaatctatgccgtcggataaagct

SEQ ID NO: 186641 - DNA, 396 bp, Zea Mays
ctcagctgtaatttattttggcctagaaaggatggcgggtatatttttaaaaatcgcagggtctcttttgaaaaatgaccagggctgaaggggtatggccacgatttaatctcgaccgtacattgcaagatctacggttcccaggtcatcttccacctctcgtttgaaccgtggggcgagggaaaaccacgacggttgcgctattgccgtggtaggcgatctagcatcctggtggttcctactggcgtgtctagggaatatacaggaaataggaacggcgaatctatggatagaaaatttaccggcgccaatacgtagaggaactcggccacggcgcaacaatccgactatgcactccttgtcatgaatgattttccggctaccaggttccttgca

SEQ ID NO: 186642 - DNA, 720 bp, Zea Mays
gtctacattagttgtagcacgtactaagtttcctctatatcaaagagcgcaaaggtccatattcttctgcttctgctaggttattattagagtttatctatttcttatctttctagttttgtcctatatttttcaaatacatatttgtatatgcagttcgagaaagaagaagcttgtcgtatgtcaaaacgccagccagaaactgagaaaacacgagctgatgctactgcagatatgtctgaagatctctttgaaggagaaaaaggagaagatgctggtgatccatctgtcgcatacggggacagcaccacggggagctcacctaaaacaagttcaattgacaagctatacatagtattgatcaggtatagatattattccttccaaatcgtttttaaataggaagcatggaagaaatggttcttttctttttcttgttagcatttgaacgggcactgatattttttttgccctaacaattgcttaattttgtggtgtttcctagtggaaaggcaaatgaattgctcaggcatatgcgcatctagccttcgttaatctgtttgcactttatattgcagtctacatggtctggtccgtggtgagaatatggagcttggccgagattcagatacgggtggccaggtaatcttgttgcactcagctaataagtataacaacttctattgacctgtataaatgcacactgatctagtatattgc

SEQ ID NO: 186643 - DNA, 643 bp, Zea Mays
aaaagcagtgacgtcgaagtccggcaacatgacgaggaggcggtggcctggaggggctacaactaggggacgacgtctgttggtgcggtggctagagaggcgatgacctaagtagggccgatggagcgaaagcgagtgaaaaacggatcgaggctttgattaccatgttagacaaatatatatgcggcaacggaagattatgtcttgcattgagcccttaggtggtttatatagacgtacatgacacaggagataggcaacccaccattacatttgacagtctatgaaacacaatatctaccaaatatactctaacacatgccaatttactacacactatatcaaggctaccaaatatggtattgtgggaacccaggaacagctatcccgcttactcgtcttctgctccttggcgcctccgccaacaccctcagccccacgccggcggccactccggtgtcggcggcaacccccaaggtcgcccccccccccgtcctaggaggcgccatactccatcctggttccgtcccctctgccgctgggaaggtccaaggcacaaaggtggaaggactctagccctgttctccttggcgatcggaggcccaagcccccctcctatcaagccatgattcatgctccttcg

SEQ ID NO: 186644 - DNA, 362 bp, Zea Mays
caatttatttacccaataggtatgcttattccttaacagtttaatgcatggccttatgtgtttactgcagtggtttgcattaataactacatttcggtgtgtgctaatttgcctttctaacccctgtcgacctatcggaatgtgctaatttgcctttctaacccctgttgacctatcggattgtgccttcgccttttgcaattctttgaagtccctgcttattgcgtgccagatgtgtgttgctgttgccattttttcgactgctttgtcgtttctgcgtcagtctgtgtgtttgcatgtctgctgcgtcgtgaacgtttttttttatcagtcgtgcgttattgcactttgcctgttccatt

SEQ ID NO: 186645 - DNA, 348 bp, Zea Mays
gatccaacaaggaaggctgatgactgcatctgttccagcacagctagcgcccaaatctcattgcccttactccacttaacgaactttttagctggtagtttagaaacttgcaatggcgggggaaccacaccttgaagctgaatgggttgtccgtggtgcacacacattagtgtccgatgagtccaatgacactctaggactatgaggagaaagccagtcgtaaccgagaacggcatcgtatgcacccaattggactaatttcatatcagtgcgaaaggtatggccttaggtccaccattccaacatgtacaggtttggaatactgagatgaaagacccaactggttca

SEQ ID NO: 186646 - DNA, 1834 bp, Zea Mays
atcgaacaccaattcatcagttcagcgagcattgtatcctgaactcgttacttattgtactctctatttatttggacatttggtgttgccatagttgcacatgtttgcattatgttttctttattattaactggaaatatgttgtgagcttgtgtcccttgacgttgtaaaacatggtggctactcttggatctggagaatctcgtgcctctttatatattatggatctttctgaagctgttgacttggcaatcggaccatggactacctacagagttcattcacttgatcgaacaatgtggacagctgattgtagttctgatggcacacatgcagctttcggtgagttcgttgagtcagagcttaaatattggagataattaaagtttcccttgcacttaggtacactatttttgcaacttgtttctgattgaaccttgtgttacgtaactctatcaagttggatgcattcactaagaatttcactacggaattagcatttctgaaattctttgataatttaaacgtgacagttgaatattgaacccatatagcaagacctgcttgttttggtacttgtatacatatgtgatttttttcacaataactcagttttggttattgtgatggccgttttgcaatttaaaggttagtcattgctatagttggaggaattaatttaattgtcatagcaagctgtactcattcttacagttttggcagtttgcagcctgcttatgttacagacacatatagtatcctttcgcttgggattcacttgttcatcttatttctaggttcggaccttggtgctggtctgatcgatttggaaacaaggggatcatcatggttatgtcgttctaaaagcgacattctttccctgaaatttgtgcactcggtaacaatcttaatctacctaaacttcttcccactttgtagttttaactggttgagatatcattttatggtttgttgtcaaatgacagttattgaaaattttgcttgcctcaaccttttgcccccactttccagttaagcttaaatttggtgcatgtgcatctaatgcatgactacatgattctcaaagttttgaaaggaaagcaatatgctaccgatgtgacctttcctattgcagcatatgtcataatctgcagacctacgtaatatggattttattctttcttgttgaccctgtatccatgttatgattacttcggaatttactgtgacacactattcctgtctctgctatgcccactggattttctcactcctataagggaaaagttgtgctatgtggtctacggaatgggagtatagcccctgttgatgtacggcaaaaacagcataatcagcctactggagtagcttcatctagcaatgctaggaggacagttcccatgctgcccacaagacatggtgggaagcaaagaaaccaggtatgtaatactagtaaacagcatccattattaccatacatgtttgccccaaaattcctaaaataaaaggattgtcagaggtcagattggtaatgcaggtggcgcaagttctttttagagcaccatgttcacatgatgttctaaatggctaaaaggattgaaaaaaattagaaaatttaatttcaattctgttatgtgtttattgtggccgctgtgagtcaccatctctttaacaggtcaagttaggttattctagttgacagctagaataaaaagtatgatgggaaatatatttattttgaatgcatattttgctagtgtacctcgtaaaaaaggtgatgctattgttttttcttggaacttgtcatgcaggctagcaaggataaattttcaag

SEQ ID NO: 186647 - DNA, 396 bp, Zea Mays
atttaagctcgagaatggcatggtaacagttcctgccacagaagctgcagtggttgacaagaaggcagatgccaaggagattactgggttggaggtcaaggaggaaaaggcagtgaaaggatgcgtctttgggactaagaggaagttccctagcagacaagtgctggaggaatcgccatatttgatgaacttcatgaggagaggaagcgtacaacagtttgtaaagagcccccctctgtttccccggcaacaataaagattaacgggaagccagcatgtacatatatcatggactatgttctccagaaggtgagaggcttgttcattgttgaatttgtaagaattatttctattgttgcaaatttgcaatgtgaacaaatggaagtaatctgacta

SEQ ID NO: 186648 - DNA, 289 bp, Zea Mays
ctcggccgcctttcatccaaatgttggagtaaaattttccacccatcagagtcactttagccgaaggatccttcgtgttctccacggtaaagacaaccttcgtctgggttgcagctttaatgcgttcgcagccagatttttccaaaattgctacagcccctctggcactggcaaaggcgtagaaatcaccacgatcactaaggatctcttcaaaagcttcggcttcttcaccgatccattcgatgattccttcaggatcgcctctaataaatttttactcggatgagta

SEQ ID NO: 186649 - DNA, 1700 bp, Zea Mays
ctgatcctcggcgacctggacctcgatcagttcgacatccagcttggccacggcacgctgcagctcaacgacctcgctctcaacgctgagttcatcaaccgtaaggtgcgttttcttccctcccgcttgtgtattgttctcccctgtatattggagccgtcgcatgtgtattggagccgtcgcagtccgctttcaataaggcgcaggggaggctaggttttgcgatagtttcatcgccgattgccacaccctgttttctggatgatcgagttttggcgtggggaagcccagaacttggtactgaagataggaatagttgatttgattgccgggtgggtttagttgtttgattttaaattctgatcatgattgaccactattcgaagtttagttggtattgaggcaggggttttggcttttttatgctggagctgaagattggtgccgaaaagaagttgagctgtagaattttttttgattaatgtctgtgtcaattttgactaatcccattttgttgttgcatggtatgcttcagtatttttttattaggttagtttgtacctaaaagtttacggaatagcaacataataagatcttgggggcaggagaagaggctatgcacctttgttgtagttcattcatatgaagcatcttaaattgaaatacattacaatgtaaagtttgcacacactgaaatgccgagtgtggctagtgttatattcaatttagcagaaagcatcatgtgaccagttagtctatgattttacttgctgttctttgtagcttcaataccctttgctcactattttttcttctaatttgattcactgttgtacttagcacaccacaatcatttcttatttgaatgcccccaccaaaaaaagttgtggaacctgcggaagtgaaattgtttgcttcctgtcttatagtgaaatcatcagttaattttctgcattatttcagttatcaggatcccctattacgctgaaagaaggatcaataaaatccttgctagtaagattcgctgctagctgcgagattgttgttgaagaattggagcttgtgctttctccatctgttgcaagtgaagttgatgatgtgcatactgaatgctctgtctctggtagtactagtgacacacacactttagtcaagatccaaagaaatgaatccgatagtaatcagtgttccacttctgtatctcgagatgtggatgatggtgtaaagagaattgccaatgccgtcaaacggtttctgacaagctttaatatcaagttaaagaatgcctatgtcatatttgatcctcaaaccagtttgagtagtagatttccagaaactagtcgatctctagttttccgaattaaagagttggaatttggaacccaacttggtctatttaaactggacaactttttaactttccgtgaggcagtcattgagtttttgaagatggatgatgtcgacacactgcttcaaaatgatctaaatagaggaacagctgacatttcagcacatcatagtactaccgcagtcttaaccggtcccattggtggattctcagggaaactcaatttaagcatcccatggaataagggttgcttgagctttgagaaaattgatgcagatgtatcagttgattcattagaattacgtttacaattcagcagcatccggtggatcatgaatgtatgggattctct

SEQ ID NO: 186650 - DNA, 575 bp, Zea Mays
cgcgacccgcgtccggcggccgcccatcgccagtgccgtgacacgtcactccgacgccgtcgccaccaaatctcctggcaacgcctcacgtcttctagttctaattccagcctcactgctgccatcacctccgcctgctgtgtgtcttccacctcgcgctgccaaagccgacaaaccctagcccaactctccctaccctcgcccatcccactcctttcgtccgattcgtggaggcgacggaggggctaaggcatgacgaccgatgggcagctcagggagtgggtctccgacaagctcatgagcctcttgggctactccaagagcgtcgtcgttcagtacgtcatcaggcttggtatgcggcgttcgtcgagctcctttctttttcatgttgctcgattctgttcctcttctgttcgtttactatggatcatgtgtgtgcattcccagcgaaggagtgctcttcacccggtgacctcgtgggcaagcttgttgagtttgggttcagctcgtctgcggagacccgcaccttcgcgtcggatgtctacgccaaggttccccgcagggccagcggcatc

SEQ ID NO: 186651 - DNA, 443 bp, Zea Mays
aaggctgaggggaatggtggtgctggtgacatggacgtgggtttgcccagtggaaatggtgatgccaacggtggtgctgagatggaggaggacgaaattgatccgctcgatgccttcatgaattccatggtgctgccagaggttgccaagctggagagtgctgcagtagcaatggatacagcccctgctgcaggtgcagatggcaagaatggtaagagctcaaaggatgtcattagtaatggggataagaaagggtcaaggaaagctacggggagaattatgcaaggggatgattcagactcggactacgatgatgctgatgatgatggggctggagaggatgatgaggatgatgaggaattcataaagcgtgtcaagaagacgaaggctgagaagttggcgatcgttgaccattcgaagattgactaccaaccgttccggaa

SEQ ID NO: 186652 - DNA, 321 bp, Zea Mays
attcgatggacgtgcgcattcggacggtgtcgatcacggagatgatggacgtgtctgatcgcaacctgaacgactccagcatcgtgcaggtggctcaggggtttataaacgagacaatggaggggagtgttgcaccagagccagggtcacatttggagccaaccgaggtggatggaaaggaggatactgggatgagcaagattagagaggatgggcttgcactcttgaagaacctgtgtaagctgtcaatgaagttctcgacgccagataaccctgaggatcagatgttgctgcgcggcaaggtgttgtcacttgagttgc

SEQ ID NO: 186653 - DNA, 283 bp, Zea Mays
attaggttttgttgttcttctgtgtcggcctggtcttcgcgtgttgtgttttgttgtctggcggaggcgaatctagggtaacggtcagtcgggaatggagtcctccgacgacgggggctccgggccggcggcagggagtcccggccctccgtcggcccccgcagccgttggcggtgcgagtagcgctcctggcgcgtctggatccggcgggaagccgccggtgaagcgcgtcatgaagacgccctaccagctggaggtcctcgagaggacgtacgcaggttcg

SEQ ID NO: 186654 - DNA, 772 bp, Zea Mays
ttccacatcagcatacaaagactgcaacatgtaagcagcgtcaggaagtggtaaaacatcagaggcacaaagcattcgaccctcaacaggcaaagcagatactgtttcccgtagagctcgggaggctctagaagctgttccaaaggtactgggaagggatagctgtgcagctgaacctttctgcacagccagcagagatgacatggctgtagcggatgaatctgacattataagagcaccagcagaatagaacgcagactcaactttcaaagctaggtcctcaggatgaactctgccagctgcagaaacagcaccaaatgtaagcccgccaccaacccccagaggtggggacggcctagtagcaacaatttttaaacaggtgggcctccgcagaccactgttcaatccaactgaagaaccaatcccacctgatgtagtgaggaataatctcttcccatctgataaaacaacaacagcatggagccatttcgattccatagcggatagaggtgagatgcaaacaattgatggttttggtgatcgtgcagttcttggtggcggtgcattagtcctccggccaccataaggtgcatccagtggatcaacaatgttcttttcttcagtaatttttgtcaaagggccatcaccattagctcctagatcaaataattgcattttcatgccctcagtacgcgtatagatagtatttctctcctcatccatgaccatatcaactattggatcaacagttgaaaatttgaatgtgtttggc

SEQ ID NO: 186655 - DNA, 517 bp, Zea Mays
atcaaactcgccgaggttgatgccgtaacagttgacgcagaaagcttcggcgttgatggcgatctccacgttccgtgctacgccctggcacggcacgcgttccccgttagccaccatcacccgaagcgtggggcagggtttagtggctaatttgaggcggtgcatgatgtcgacgttgatgaagttggtcgtcgatcccgagtcgagaagcgccaccacccgatggccatgaatgatcaccggcaggagcatggcctgctcggtccggacccctgcaatagcgtgaagggataccgtcggtggagggtcggagtcctgcatggcgtccgcccctgggaccgcgggatgtccgggctcgccgtggttgaaggccccggcgtgatcctccggtgtgaacgtgtcgtcgacgtagtccgccgactccaggtagaagagacgctggcagacgtggccacggacatagggttcgtcacaattgtaacacaatccttgccgtcgacgttccatctgttccgct

SEQ ID NO: 186656 - DNA, 476 bp, Zea Mays
ttactcttatccctaagaaggagggggctgaggaggtaaaggatttttgacctatcagtctagtgcacagtattgctaagcttgtcaccaaattgatggctaacagactgtcccaattgctgcatgatctagtttctctaaggcagagcgcttttattaaaggtcgtttcattcaagacaacttcatgatggttcagcagcctgccagattgcttcatcaacaaagaaaaccaagggtacttctgaagctagacatcaccaaagcctttgattctgtctcttggcctttcttgcttgaagttctccaaaaactgggatttggacagatatggagagatatcttaagcgggctattggcaacttcctccacacaagttctcctcaacggagttccaggggacatcattcatcataagagagggttgagacaaggggatcctctctcacctatgctttttattttagtaatggacatc

SEQ ID NO: 186657 - DNA, 459 bp, Zea Mays
tccgaaccctatccaatggctccgggctgctttacttcgggggtccgggttgtgcgtacaggggtcccgtgccttctgggtccgacgacgttgcctctgagaacgccaactgctcacgagatacccctggggttgttctctgcatggttaagggtagctgcgcatgcatcatgcctttataccgtagtaaggggtacccctaatccagggtaccgacagatcctattaggttaacatgctctcgggttgcttgaaaccaacacatgagcatggaagctgaacatatgttcatagatttgttgacatgcgatggggcgagggcgagacacttattggttcaagtgtcttaaccctttaggggtcggggtagtcgctgagcctctagttcaggaggcactacctgcaaacttgcaactggtgcaaggcccgactatgtgttattgtactaacatgtgacag

SEQ ID NO: 186658 - DNA, 421 bp, Zea Mays
gctgattaaggttacaattttatcaatttatgagcgtactctgcttgatttctagctgttgttgattcataggttgcagagaaaaaatgctggagctgtggccaagcattctcttccaacacagaactctgcagccacttgcacacagtggagaattgcctaattgagggaaaggtgccatgggaggacgatgtgtacttgaaacctttcatggaagatgactcccttttgcacagcttgtcaatcgatgacgatgatgaagatggggactgtggagtgtcaatggaaaagggacaatattcagctgggaatgaggttttagctgaaccatgggggaacaagctgagcagcatatcagaaagaaatgattctgacatcagtgctcaatttcagcaagagtgtactattggtagtacacaaa

SEQ ID NO: 186659 - DNA, 373 bp, Zea Mays
gaaaatgcctaccacaggcgtgattgctggtaccagagatggcctttcatctgagagcatctctagatttctgctgcctgcttctgaatgcgagtttgtattgaactcagttaagggccaattacattaattacaattaaaataggagatatcactgtctatttcatatagcatagccttgtgttgaatattaataatctatcatataatttcattgtatgtaggttatagaagaaatacaaaaggacccttggcctgttccagctgatcagcgtgcatctaggtgcactggagctgccttaagtgttgcagccaatctccttggggtttgtgttcctggatcaggtgctaggataatggcatttgttggtgg

SEQ ID NO: 186660 - DNA, 480 bp, Zea Mays
tggagtgagatttgttagtggaataatattaaagtcgaaggcacttgcttttgagcggatgctttttcgagctacaagaggaaacatgttattcaatcaggcatctgcaggggaacctgtaactgatcccatatctggtgaagaggtctgatcatcatggtttgcccttgcttattctgtgtacattgagttaaatattttgctaaatttgctccacaatatttactgatcacattatttggactctgttttcagttgtcatatacataagctaaaatcaatggaatactctaattcagaaaccaacttagttcatttggtaccttaaaagattctgaataatatgtcaacattttgacaggtagagaaagctgtttttgtagttttcttttctggggaacaagcaaaagcaaagatactaaagatttgtgattcatttggagcaagttgctaccctgttcctgaggagatggtcaagca

SEQ ID NO: 186661 - DNA, 850 bp, Zea Mays
tgcccttgcagttctggttgtacttttggccaggtaaaattggcatattttagtgtgctaaccgtctactttgtttatctacatcaatctgtatcaccttgttttctcgtaggtacttcactgggcatacttataatcctgacggatctgtgcaatatgtgaaagggaagatgggtgtaggccagacgatacgtggagtagttagaatattcacagtggctgtaggtattctgttctctgtttatgcatactgctttagtgcttacagtttttggctcaccatcttgaggtgtaaataggtcactattgtggtcgtggctgttccagaaggactaccattagctgtcacactgacgtaagcatggtttgtgtgttattttctgccagccctttcgtcccttgccactcaacatactttatttttgtcaggcttgctttctcaatgcgcaaaatgatgaaggacaaggctctggtatgttcccaactttctataccttggttttgtcatactacttgatccgacattgaatgctttgcacgctcacttcctatggaatgtaggtcaggaggctttctgcatgtgaaacgatgggttctgccacaacaatctgcagtgacaagactggcaccttaactttaaatcaggtgcaatggtgtttattcactttatacatactgacatacatgtttcagataattctgtttgttgaatctgattggccctgatttttaaattctcttcttcctggttgattttaagatgactgttgttgaggcatattttggtggaaagaagatggactcaccagataatgcacaaatgttatctgctgatgtcacatcactgatt

SEQ ID NO: 186662 - DNA, 389 bp, Zea Mays
ctggctgtcagctgtcagactcagagctttagcacgagagccaccacagctagagcgagtgacactgccaacccaccggggacggcggctgcgttggacagctgggacgacgtcggcgggttgaccttggagcagacctgcctgatctctccattgtggtgcgtgagcgcgcccagcttgctcatggcgacgaaggacgtggcgaagtcggcgaagaactcggtcgccggcgcggtggcgttggcctggctcgcgacgtaggcgctagtggtggtgtcgaggaggagggcggcgtctgtggagagcaggcccttgttgccggcgacgagggtgtagtagtcggcgtcgaaggtggtgggcgtgggagggtcgaggtagacgagggtggc

SEQ ID NO: 186663 - DNA, 426 bp, Zea Mays
aacaaggtcccgatcgcggtaagagaaggcagcgctcgggggatctctagcggcggcggcggcgcaagctcagtgaagtccaggcgagagggcgcaatgacgagctccccctcccctcccggttcgcgctctttattctctcaccctctctgcgttctctgctatctaaatatggatgtgagttatcctctgttgtagatttatgatagagcactggctctaatcctgttgcctctgtggatgtggatgcaaacacatatgaccctatggctgatccaaaactgatgaggacatcctccactattacccgttggcaaagacgcaattggcccagttggcccaattgtagtcggatgacgaccgtgtgagcctcagaattatcccacctcgcttaacttgggaggaggaagccactttaaaagggag

SEQ ID NO: 186664 - DNA, 1226 bp, Zea Mays
gagggagggaggaggccatcgcatccgccggctggtcctgatcccggtcccgggtcgtatttgggcgccgccgcacgcagcaggaggaagacatcagcgcggggcgaagcgtcgagcccatctccgccgcgggaaccactggtgagcgatttgttcttggtggttttgccgattttcttcttcttctgctggcctagattcgattcctgcttacccggccgccgctggtaatttttttgaggcatctggtgggttggagtgcgcggatttccctcacccgcgtgaacactggattgatggattttggagtagtcaactagcaattctgacacagtatttcgacatccatgtgtgtggacttcgttataacttttttcccctttgggagcggcgtgcgaaactgtgaataggcatctccagactccagttctccacaagagctggtccctgtcactccgcgacgggaaatctgatattagtgtagaattatgtgctttcgtttgatttgctgtcgcttttaagattccgccatcgctcttgtgtgattctctcagaaaagtgggatgtgtgctcagtggggggtccttttagtttagcaaagtacatgcagttggttgttaggtggctttatggctgcatattagattgagacactagtttgtttcatgctgttcgttacccgttttagctgccatgttttggtgtttttttagtagaagtgaacatctaaggttctgtggatggcaggagttttatatgattggaattaggtgacccaaagcggacattgatagaatggcttacaatttgcttgttggatagatgctataactggaacatgaacgtgaccttggaagtttttcgtgctactacttcatgtttcctattgttgtgtgactaacaaataatgactaccatctgctctctcgatcacaccactgaaatagcaatctccgtgcttgcatgattaccaggcatttaggatggtggacaagaatgatgggtcagagggtattaaattcaacacatcaaacctcattcaaacaaccgaagaggttgcaagagcgtttatcgctgcggcctcggctgccactgcacagtctgcacggacatctgtagtgtattcatccaaagatgagagtggcagcccaatgcagaagcttcagcagcatttttcgaaaatcatgaaagggttttcgtccgcaccagacctgtcaggaacttac

SEQ ID NO: 186665 - DNA, 1385 bp, Zea Mays
ttcgttcctagacacgctagacttggctttggccataccttggactccccttccctctcctctccccgtctcccggcgtgcgtgcgtactacttactgcttgtccaatcgccgcgaccagagctcccgcgcacgctactggagaggattccagcgcccgtcgagcaacaggactctagcgcccgacccgacaaacgacagatagtagctactgcctccctacaccgtctcggcatctccgggggcacggcacgggaacggaggagcggagaaatccatccgccgaaccgcttgctttgcttggcaggcaccccgtacaattgggggttccggttcgaggaacgctcgggggggcgtgtgtgcggccgccttcgctcctcatccagaccacttgattacgccgcgctccctacgacaggaggtgcccaggccgaggtccttcgccggcgacgagcaccaaccaggtacgtccctgcacccgttctcttcccctgctttatgtgttcggatctgatctagtctagtaattttttttatttacaagtgtattatttatttatgcctatactaacttcgtttccccccttttttttgattttgatcgacccatagccaattccagagcaaccaaccgcaagggcatgtgacaaactgccgcctgcggtgccttcgccccaggcaatgtgctccgacatggatcagcgcgaccaccacgcaaccaggtcatccccttggaccctcgctcgctcttctcgcgttaagcttaatcctcagccgcctctgcctctggcctagcttgagttataattaaccagttcattagattaacgaatttgctttactttgcttgcttcgatgtttagctttcctcccctcctcaatcaggttgtccaggtgtatcattcatgttacttagtggacctctgacagaacataatactctcccgtaccttagctctctctctcttttttttttgtttctaccatcaacatgtgattatgttattatacagcatctgtttctcttaagcataagtctgttttccgggaaatcaaaccagtgttgcacagcttgaatcaaagccaattattcgccgagggacacccatcatgtgttggtaacactgaatatggatctttgtttatctgccaaccactagctaaacctgtacagctttagtttttgattgacaatccagtttaaggcacatagatatgtatggaggcccccatcctcaccgttttcccttttgcctgacacaacacaacagggaggctgcaccagaggctaatggttaccatcacagcccccatggtgtggaccagagtcaggttgtggatgctgataagcatataaaccatcattccacagacgacaatgctccc

SEQ ID NO: 186666 - DNA, 1519 bp, Zea Mays
catcaataacttttgttgcttgacagatcaaaggacatctcagcactctggtgctccccatgagttcttccatggtccatatcagtcagcatatccaccatgggcaatgcatccaccttactctatgcaaggcatgccttactatcctggaatgaacccatattacccttccccctaccccccaatggatgagaccaggtaccacccctcagaaaggagagtatcaaagaaacactcagatagcaaggactcagaaacttcagatgataaaagtgaccagagtggttcagagagggaaacttcttatggtcacaggtcccataaaaaagataaaagggcaggtaagaagaagcctagtgtggttgtcatccgaaatatcaatgtaacatcgaaaaggcacggatcatcagacagtgactcacaaacaggttcagatgtagtatcagaggatagcgacgattcacacgccaagtccagaaagaaaaagaataatagctcaagttcaaagaaaaaagatgctaggaagatggttttcgagtctgcagatgaatatagcaagaatggaatgtcatatgggcaagatggagaccaagggagctggaatgttttccagagtttcctgctaagagctgatgagaaaagagataatgacgcggacctattcgccagtgagaaaaaagcacccccagcaaggatgaaggagagcacaagcgttgatgttgattcaattctcttggtggagcaaaattctgctggggccaatgaacataatacaacaggtttcagtatggaaaatgagaggattagaccccagcagatgctgtctggtgatgaacttatgatgtatggggaaggtgaaggcatgagctttggatgtgatgacataaaggagattgaagctggaggtgtgagatacagaagaggaacaagtgatgacttcatgatatatggacaggaaaagtcaatggacagagggagttctttggatcctcttgcagaagcacagtacaagagccccaccctggttgacaaaaatgtgcacagcttggcagatgaatcgtttatgatacctcttaggtctacctcagaggataaccatgaaccagaatgtcgtactgccattgacattgatgttgagcttccctcaactgttcagaagatatcagatgctaaagctggtagtcagcttttctatgagccagctgaattgatgccggagcgtggatgtgaagacgtttcgtttggatatgatccagcaatggattataatagtcagatacagagtcaatctgccaccatggttgaagatgcacatatggaagatgcattgttgagcactgtggatgaaataaagaagccagagaaagacaagaagctaagaagttcacaggagagtttggataaacgtagaaaagatgcttcagcgaggaggttgtcatcatcaaaaggcccgctgactgatgcacagaaacgcgcacaaaacttgcgaatatataaagcggaccttcagaaggcaaag

SEQ ID NO: 186667 - DNA, 510 bp, Zea Mays
gggaggaagagaagaataataataacttagaccgtgccatgatgggcaggttcaggagatgggcaaatgatttggcccttaatgaaattccgttggttggccggaaatatacatggtcgaatggtcactctaatcctaccctggtcaaattggatagggttttctgcacaacagattgggaggaacaattcccagattctcttctccagagttcagccacggatgactccgaccattgccctttgctgcttgggtttcatgatttcagcagaggaaaagggagatttcatttccaagcattttggcctaagatggagggatttattgatgtggtagcccattcttgggtgtttgttcctgcagggtcgtgccctctacttaccttcgctaagaagttaaaggcaacggctaggagtttgcagggctggaatgacaaaaaagttgggaagattaagctgcagctggagatggctagggagctccttcatcaattagaggttgcgcaggaca

SEQ ID NO: 186668 - DNA, 289 bp, Zea Mays
ccacgagttcactccatgcagcagggtgatcctagtatcgtcacctactgccagcccatgaagaacactgtcgacgccctccgtgatgtcggtcatcccgtgaaggactctgagctcattctcaacctccttcatggtctcaaccctcgattttccaacacggccgacatcattgccaacgccactgccctcctcaccttcgctgcagcacgcgccatgctcactttcaaggaactgcgcctcgccaatgacaacaaggttgctgccagcacagccctcatcaccacca

SEQ ID NO: 186669 - DNA, 287 bp, Zea Mays
gccgtcgacgcccgtttaggctgtcgccgcgtgcgttctcgcgcggagtgccgtcggcgtatctgcgcctacaaaggctgccgccgcgcgcgcccccatggggttacgcggttgctcattgtgtcacctgctcttgcgctgccagcctgagttcgtcgttggtgttgtcgtcgacagaagcaaagttgttggttctactgccgcgcagggcctcgagctctaccgctgccacacatgcagcatccgccgccgctgcttctacttccgccctcgttgctgccagttct

SEQ ID NO: 186670 - DNA, 385 bp, Zea Mays
cgagcacccgttctgcatttttatcaggggagagccggtgtgcaggtgcctcgacggaacccggccggcccccagcagcagcgtcgaaatgaggatgatgatgcacgcagacatggagagagccagcagctagcgtgccactgagccactgatgtacgtggttttggtttgtttgttcttggtccagcagtaacagtgatagtgtcgtgaatgagctagcacactgtcgagtctgtcaggatgatgctcattctcagtgtcaggtcgtctgtccgtgtcgagaccgatcgtacttacgtctttgttttggtataataaagcgtcgtgcaaacgagttctgttactatgccagctcgtgatcaatcactagagaagccaacaccag

SEQ ID NO: 186671 - DNA, 726 bp, Zea Mays
cgcagcttgttaggagctttggtgttgagaacttgatagttgctgttaataagatggatggggtggaatattcgaaggagcggtttcagtccgttaaatcgcaactcggcgtctttcttcggtcgtgtgggtacaaggactcttcagtcacctgggttcctttgagcgcaatggccaacgaaaatttagtcacagcttgttcagacactcgacttttatcttggtaagaccgttctaatggtgggcctctttgcgcatcactttcttgccccccagacttggtggctgatcatcaattttgttgatgcctgatgtcaggtacaatggaggctgtctgctgcaagccatcgactcgttacctcctccccgtcgcgacgtgtcaagtccactgcgccttccgatatgtgatgtcattgcatctcacacgctgggccaggtggctgtctgtggtaaagtcgagtctggagggatccgaactggctgtaaggtaccattttgatgctacgattgggcatcacgcacgctataatagctatagatttggtggctttcctgtcctgtctacttttacctgctgctaaacaacatatattttgttgcatgaccaagctagctataatatctgcaattttgttttatttacatacaagtttctcgattcgttattttgatgatggcttgatgagtactccggcatcaggtccttgtcatgccttctggagacat

SEQ ID NO: 186672 - DNA, 410 bp, Zea Mays
taccggccctagcaccccttcctgtggttctatgggggtgcccccgatgtctctctcatctttccccatatcatcgccaccaccacctcccactaattgggttgctgactccgacgtctctttccacaccattcgtgaccccagagcggtctctttacctcatcctcccagccccatcttccctttcttcttcactattggtaatggaccgactatgcctgtcacctcagtaggtgacatgatccttcttggccctttgtacctcaacaacatccttgttgccctcaacatcttccagaaccttctctcggcgtcatcttcttcggcgctcttccccgagccgtcctctgtccatagtgcgctcgccgaccccaactggagtgtgctacgcaggagtacgtggccttaca

SEQ ID NO: 186673 - DNA, 466 bp, Zea Mays
ctcccaggaatatcattaatccagccattatcctcgatcgcctcctgaactgtccttttgttaatcagcttcttaggaatggtctcaataagtcggggagcgatatccccaatccgctgcccacccaaccatcgatcactccagaaaagggtagaagctccatttccaatctcagaatacaaggctacttgtagaaactcttgaatttttttggggtatgcaaaggcagggatgcccagggccgacctggctcagttttttgcagccaagcccaacgcattttaagggcccaactcagttcagtgatgctgaaaatacccaatccaccaagctctcgaggtctgcacacactgccccaggccactgcacaatggccgcccatggcatttttacgaccacgccgaaggaaccctcttcgaattttatcaatgtccttcaaagcagtagaaggcaagtctacaaccat

SEQ ID NO: 186674 - DNA, 304 bp, Zea Mays
tccagcatcaagtaacatggaagaaacacataatacattgaagtttgcaagcagagcaaaacgtgttgaaatttacgcctctcgcaaccgggtaaatagttaggcatacaaaactgatttcctgcaccactattatagaaaatgaaatgaaagacataatgatcttgactgcccagataattgatgagaaatcattgatcaagaagtatcagaaagaaatatcctctctaaagcaagaactcgatcagctaaggagaggaatgattggtggtgccagccgggaagaaattttgagtttacgtca

SEQ ID NO: 186675 - DNA, 350 bp, Zea Mays
cggactctacttccatcaagcagtggtggtttatggtcggctcagtcgctgtgcccaaaaagggaacgcgctccctgctcctactggtggtctggcacatttggctggaaaggaacaaccgcaccttccaaaggcaagagaggtcagtggcagatctgctagcagcaattaaggcagaggcaaggctgtggggtgtcgcaggtgctaagcaccttcttgcgcttttacctatgctgtaattacgtaacctctatgtacccttcctgcggtgtctcttgggcactgcttcactctcttctttattaatagaaacgtgcacaatctcgtgccgttcgttcaaaaaaaaaaac

SEQ ID NO: 186676 - DNA, 299 bp, Zea Mays
tcaccctcaaaaagatttcgcagctctccctcacccacactcaccccaatcggcgaggacaacaattctcgcttaccagtcccgtccacacgaagacgcccactctccatctcaccacgttgacgcccaccacttcgcgacaatccgctcacccctccgtttcgccactgcccttcgccgcctatacccaatacacgcgcccgggggctcctcggaaccctccgcgcgcggcgagggctccgctgcagccacatccaacaccgcgaaataatccaagtcctcatctgaagactcctccg

SEQ ID NO: 186677 - DNA, 342 bp, Zea Mays
gcgtgccaaagtagaggaagaagttggggcaaatggcatgagggtgatcggtgaaggagtggcgatgaaggtcgtcggagcaacaacagggcagtggcaatcatgttgagctcctctagaacaagatcatctgggtcgaccttgaggaaggacgggaagggagagtagcgtcggatgatagccctgatgtgctcaaacttcttatttaggccttgaggacaaggatctagtcgttgacagagtgcccaggtcaaccaaggagtcagtcgtccccttcaacttgcaacagtagtcatcgacgggtaggtcaccctggacgaggtgcagaaggtagcgtcgaac

SEQ ID NO: 186678 - DNA, 645 bp, Zea Mays
tcctgcgccacatcctgcatcacctggtttctctccggaaagtgcaggagagcatgcagcagaagcagaggagtcggcagcggaggcatctacgtcgcccagaacacccacaccagctccagcaagtcctcaggtagagcatgtgacccccttggaggatgatgatgaaagggtggatgcctaccatgacggtgaagaactccgttatcgaaagattcatgacattattggtgatcagccaacccctctgtcggcgcagcggctgtttgcagaactgaatctcacccattctggtgagcctacaagctatgaagaagccaaggatgattcagattggcaagcagcaatggaggagctgagatcagtagagcggaatgggacttgggaacttgtttctccccgtcccggtcaccgcccaatctcactaaaatgggtgtttaagctgaagaaggatgagcatggagctgtgattaggcacaaggcaagacttgtggcccgtggttttgttcaacaggagggaattgattatgaagatgtttttgcaccagttgcaaggatggaatcagtacgtgttttgcttgctttagcagcacaagaaggatgggcagtacatcacatggatgtgaagtctgcgttcttgaatgg

SEQ ID NO: 186679 - DNA, 583 bp, Zea Mays
gagaaatatgatacgggaggcaacagcctttctgttggatgttctgaagccaaacttgccagagcatgcttttcttcaaaccaaggttatcatctttcctctttgaacatgaattggttgtgcttggatgtgtacattatttgtttctcaggagcatttctgtatgaattgtaggttttggagataaacttagtgacttacccaaatgttgctgatgccattcttgctaatggtatgttcagtcattacgaccgccctcgtattgctcagctatgtgaaaaggccggtttgtacttgcgagccctccaggtcagtgcatttgcattggtgcagctgatatccccgcttcactttcctgtttaactaaaatattatattttgtgatgcagcattactcagagttgcctgatatcaagcgtgccattgtaaatactcatgccattgagccacaggtttgtagacttcagtaattttcagatatcttcttctattgttttgcccattgacaactttctcggacaggcacttgttgagttctttggcaccttgtcaagagagtgggctttggagtgcatgaaagacc

SEQ ID NO: 186680 - DNA, 457 bp, Zea Mays
cgcgttggacctcctccaagtctccaactcacgttatgccaggttagacaaagattttgatttttgactcacgtttgcatctcatgcttatatcatatatcctttagtattttaattttgttcaatgttcacgaatttgatagggaaccaaagtttgatggaacggtttttgaaaagaaaattgcctccagctagtgactctaatgatcctggtgccgatggagagacatcaagaaggggagcaaatgcatcaaacactaaccttgaccgtacagcgagtcatcgtcctttgcgagtttcacgaaaccaggtaaactttgatgagcttccttacgatccagcagatagaagaagcatatctgattacataggacaaaagctccaagatgaaattagaaagaagtatttgatcagaggtccttttagaccacctgttggctttaaatatccacagaag

SEQ ID NO: 186681 - DNA, 704 bp, Zea Mays
gtggacttttcctttacgtctgaaatctaacatcttcgccactctcaccgatttctttggctaagttcgtactcagttcggtgttaccatccaaggaattcagtgtgacaacagccacgagtttgacaaccttcgcgcccacactttcttctcctcccttggagtccgcctacgaatgtcatgtccctatacctccgcccagaacggcaaagccgaacgcaccatccaatctatcaataatgtcattggttctctacttattcaggctaccattctaagtctgtccagcaccaggcccattgagattgatcttcattttgtccacgaacgcgtcgctcttggagaagttcgtgttctgcatgtctcagttcaccgatgtcttcaccaaaggactcccagcttccgtgttcaatgacttctgagtctcaatgttcgctcgacggacgcttcgactaccggggggtagacaatctccgtatatgacaactgcatatgctgtgtatggctagtgcttggctggccctgtttggtagtatagaatatggtaggagattgatatgactggatacgtgcaggatctgttcatatcctgcaggtatcccctagacataggaggtttcctttagcctcaagtctgtcctcactatatatatgtacatgtatcatctctattcaataaattctacattcctaccatagctgtc

SEQ ID NO: 186682 - DNA, 447 bp, Zea Mays
tctggcctcagctttgaggaaatatgcattggtgtttttcgatgacatattggtgtatagttcatccatggaattgcatcttcaccacttggcgcatgtttttgacttgctgaaccgcgatcaatggaagtttaagctctccaaatgctccttcgcagtcaacaaggtgtcatatctcggccatgttgttagccaagctggagtttccacagacccaactaagatccaagcaattgttgactggccgacaccatcatgtgtcaaagagcttcgcagcttccttggcctagcgggttactatcggaagttcatacgtcactttggggtaatctcccaacctctaacatccttgttgaagaaagggattatttttgtatggacaccagaccatgacgtggctttccaaaccttgaagcaagctcttgtcacggcgccagttttagctct

SEQ ID NO: 186683 - DNA, 362 bp, Zea Mays
agattctggagacgcacaaccaggtcgaggaaaagaagaagctataccttccttacaatatcctcccgcttgatcctgacagtgccaaccagcctatcatgctctatcctgaggttaccacctattttatatcaacctgctatcgttcatgttctcacaagatggttatgcatttttacgctatggtttatatgttgcctcgcatgtgttatcattatgtgtgtagatccaagctgctttccatgctcttcgtaacactagaggtctgccatggcccaaggaacacgaaaagaagcgtgatgcacccaaggaacacgaaaagaagcgtgatgcagatcttcttgcctggcttcaggccatgt

SEQ ID NO: 186684 - DNA, 483 bp, Zea Mays
cctccgcctccatccgtccgtcgtcgcccggcgaatcgatcgaagctagcaatcaaatcagaaagagcaagagaagcgcccgagtccctaggccggaaagctatggacagcgccgccaactggcggtcaacgcagggcaccgaccctgccgccggcggcgtcgatccaaacgcggctgcccccgccggaagcgactggcgcacccagcttcagccagaggcgcgccacaggatcgtgaataagatgtacgtcctctccatcttccttccctccttctgatgggaactgtcaagcgattccaattctttcgtttcgccatggcggatccatgtcgcttcttttacgactcgatcgattcgattcgtgtacacctgcttccctctttacttatctctttaccttatttagatagaaacaaacagtatgatgcttgctgggtagggtctgctgatccatccttgcacttcgacctaacaattcgtt

SEQ ID NO: 186685 - DNA, 532 bp, Zea Mays
agaagaagaaaaaagagaggaagtacgaacctgtactatgcagatgtggtgttgaagctaagtatggactagttccttcagagcttggagtaggatatttttgtggtcatatggtagactacgaagaggttggtaattgtatttaatgtcatgagatatattgttgcctccgtactaatgttttgtttcgtatgcgtaggagaccaggaaatgcacttgggagtactacgatgataaagatgaagtgaagcatgagataaggtcgaacaaactcatgggagagaagatgcagtgtggatctcagctcattgattcgtacattaaacagtgcggacagaagatacgtaggtttgccgaagaacttggctgtaatagcccgatgcgtgttgagcggagaaaaaggaaggtggcttacgagaagagggcacaggaggctagggaaatgccggcggccagagccgaggaggaaatgctggacaatcttgctggtcatctgtgtaccagtgagtgacacaaagacgtgttgtttttg

SEQ ID NO: 186686 - DNA, 537 bp, Zea Mays
gaaggacccattgaactgcaaatgcattattcagctgatagatcacttcaagcacacggggcctaacggacagcatatctgcctcgtctttgagttactgggagatagcttgcttaagctggtacagtacaaccggtacaaaggcatcgggcttgatagggtgaggcaaatatgcaagtcgatcttggtaggtcttgactacttgcacaatgagcttggcatcatccactcagatttgaagctcgagaaccttctccttctctcgaccattgatccctccaaggaccccattcgctctggcctcaaaccttgccttgagaggcctgagggaaaccctaacggtgaagctgggattaatgcgattgagaataagctaaagatgagagcaaggagggtgcttgcaaagcttgctgagaaaagaaaatcagctgtggaatcttcacgctcagaaaggagcttgggtggaattgatcttacatgcaagattgtagactttgggaatgcttgctgggccgacaaacaatttacagattttat

SEQ ID NO: 186687 - DNA, 1082 bp, Zea Mays
gttggcgattgtgctctttttcgggctgtcgatgtccctccattcattggattgatacgttggattgagaagaaggaagaaggctatcccaaattacgtgttagttggctttatagacctaacgacgtgaagcttaacaagggtatacaactcaacgctgcaccaaacgagatcttctactctttccaccaggacgaagcatctgctgtttctctgctgcatccttgcaaagttgcctttttacggaaaggtgttgagctaccagctggaattgcttcatttgtatgttggcgcgtgtacgatattgacaacaagtgcttatggtggcttactgaccgggactatattaatgtaaattcatttctttcttgttttgttcattatatatctatatatacttattaacatatgaaattgataactaggaacggcaggaagaagtaaatcgccttctatacagaacaaggctagaaatgcgtgccgcattacaatcaggtggacgctctccaaagcgcttaaatagtccttcagcttcccagcaactgaagactgcttcagatggtacacagaatggtggtttgtctagaggaaagaagagagagagaagtgaacagggagttgatccagccaagcgggatcgtgatcgtctacttaaggttgatgacggtgagcctggaagctttaacttggatgatattaagtccgaaatagcaaagataacagaaaaaggtggacttccaaatgcagaagcagttgcaaaacttgtacatcttatgcaacttgatcgaactgagcagaagatagaccatagtggtcgggttatacttgctgatgttattgctgctacagatagtcccgattgcctcggcagatttgtccaatcaaggggccttcccgtgttggacagttggcttcaagaggcccacaaagggaagtctggtgatgggagtagtcctaaagaagcagataagcctattgatgaacttctcttggccctgcttcgtgcactagctaaattgcctattaatctcagtgcattacaaagttgtagcattgggaaatctgtcaatcatctgcgcagc

SEQ ID NO: 186688 - DNA, 449 bp, Zea Mays
gctgcatagtgctccatggctggttcaatgccatatgtgcttggcatagaaagaaagagttttctgcatttgtctgtggagtctgagcttgtgtgactgcaagcagatatgaccagaagaaaggtaatggaatcaggcctgaccattgatctctccatctcagaccatatcttcaatatatcatccccctgatgaagaagaagatgggcagtgatcattgcattccatgacaccaagtctcgacaactcatccgctcaaacaaactgattgcatctttcaactccccacacttgccgtacatactgataattgcgttaccaactccacgagcgctcagaagcccggattttgcagcaaaagtatgcatttgttttccaagttcagcaaaacctagactgccacatactccaaggacagaagtcaacatgaactcatcaatgaattctgc

SEQ ID NO: 186689 - DNA, 601 bp, Zea Mays
cccctccgttggtgcctcgccgcttcgtcgagcccatgcacgtctactagcgtcgtgcttgtgagggtgcaccgaccagttccctcgccgagccgtcggtgtcccaccctcccctcctcccccgggaccctcgccatgttcacccgatggtgacacgtcggccaccgggacgcttcgtctcgtggatcacctgactctctcggcgaccatccccgagtcgtccacctctgcggtcgtctcccccgtaccgtcctccgtccgtggcgcgcttgccgatcttcactggcggcgcgctatggaggagtacgaggcgcttctcgccaaccacacttgagacttggtgccacgtcccacctgtggtaacgtcgtcaccggcaagtgggtcttcactcataagaaggctaatggctctctagagcggtacaaggccagatgggttcttcggggtttcactcagtgaccacgtgttggctatgatgagacttttagctcggtggtgaaaccggcgactattcgcactgtcctggctctttcagtctcgtgctcttggcccattcaccagcaggatgtcaagtacgccttcatggtacctgacagagac

SEQ ID NO: 186690 - DNA, 790 bp, Zea Mays
ctccgaggcgccgcgctgttgagtgttgacgccttctcgttcctgggaggaggtgatttctctgctgagggcctggggagtctcttggttcagtccctctccctctgcagtttatttgctttttttaggtaggtggagtgtggagttgttgggtgggagagggcctggaatttatttcgagctgcttctttggagaccattgtttctcgaatctgagttcctcttcttcggagggagttgtcaattgcgttctgattgatttggacaagatcggaaggaactggcactctcggtgggcgtacaaaaactctgagcttgtggccttatcgacttcttgggggcatctgggagtagcttcagcgattcacttgagtctggaggaatggcgccgaccaagaggatggagaagctcaagctcagcacattgttgactttcatgcgttgccacaggggctctagtgatgaccactcacggattgggacagtggggttctcccgagtcgtttacgtcaacgagcctgatatgcttgaagaggagggattcaactaccccttgaatgaagtgtcgacgacaaagtacactctggccaccttccttcccaagtccctcttcgagcagttcaggagggtggccaatttctacttccttgtctctggtatccttgccttgactccacttgcaccttacacggcagtgagcgcgcttgcaccgctctgtgtcgtgattgtagccaccatggcaaaagaaggggttgaggactggcggaggaaacaacaggtatcattcttg

SEQ ID NO: 186691 - DNA, 471 bp, Zea Mays
ggatgatgataaagatgatgaagttgaagtacttggagaaggggaaagtagagcatcccattcagttgttcacccagttccggaacagcccaaaagagaaggctctcagctgaagcaagccaaaacaatcaacacgcgtcgaagtcttctaagtcaattgcatccatgtttcgcaaagcacctgaagatgtggttcacgagaggcattgcaagggcaacactcaactacattgcagcgaaagagcgagaaggaaagaacagatatgtatgttgctgattttatttatgatagtggcttaccacttaatgtcatcaactcaagggcctttgagatcatgcttgaggcggttgggcaatatggtcctgggtatgtgaaaccctcctatcatgatgttagggtgccattgcttgagaaggcaaagagtgtagatgagataaaaacgactcatgagttggcttggactgaatttg

SEQ ID NO: 186692 - DNA, 451 bp, Zea Mays
ggaataatgagttgagtaacttagaaaataaggatcttgatgtcttgaccccaagaacaacaactgctaatgatctaaatagcaagaagaacaccgagaagattccaattgcaatgtacacagaagtcaacttaagagtactaacatcaggattctcgacattagtagccatccatgaattctgtgatatttggccacatacgaaaattatatgggaaataatacccagagaagcatagaagaagcctttattctgacgcaggtagagaatataaggcttgagaccagtatcacccatttctctttcttctgtcttaatcagttgatctgttggtgatggtttcaaagactctttgtatctgcttccatgaacatcaattgtcttcttgatcaatatttcattttctctatggggaggcaccctgttaagatctgaaacaccaatagtgtc

SEQ ID NO: 186693 - DNA, 366 bp, Zea Mays
tctggataccacctcaagcggcagataaggaggatgaggcccagagttttgctacaagcattgcttatgacgacgacgatgacgattatagtgatgggataaagtggggccagtcaagtttcccatcccctggtaagcagcatgacgccggcactagcaatcatagggaggtacgagaaaaagcgatgctagaagctatgaatggccagctgaagatacttgtcagtcggtttctcgcatctgttggcattccgtcttcgaacgaggaggctagcgatagctggcttgacattgtcacctccctgtcatgggaagcagcgctacttatcaaacctgatggtagcatgggaaaggaaatggaccctg

SEQ ID NO: 186694 - DNA, 379 bp, Zea Mays
tcctgccagctagccagccatcctcccgctcgttcgttgctcgcccgacggcagtactcccgcccgcttgttggccagcacaccagcctgaatcttcttctgcccgcctgcagaccatacgactgcatgccagccatactgctcactcttatatgatctgtaaaaaaactactttcgccgcttattcctctacgctcctgtcgtcaattattgttgctcagctatggcaccatcttcgtcttcaccaaacgggggtgccccattacaagttgtctgctcatctttgatggcaccaattatcgtgtttgggttcctcacatgtggtgacatatgcaaggtcttcgtctatggaattttctttcatgtggtgacatgcaag

SEQ ID NO: 186695 - DNA, 337 bp, Zea Mays
tctgattcttcatgatacattcgaatatcctggttgatgaatagagcttgcaagatcttgaccatctcgatggatatatacaaagaaatgggtatgaagtagctgtacagcatcaaggacgtcaacaaatgaaagaaagatgccagagctgctctctttggatcatagaatatggtagtagcatctggccgaagataccaccgtttgagctcaccatctcttaggtcctctttggtccagatcccaaagaagacagaaccaagtaatgcaatcatgagtagagaagacattagaagataaataatttgatccattttcttctcaaccttacttcttt

SEQ ID NO: 186696 - DNA, 455 bp, Zea Mays
cttaccgcgtcgcacactcagcaggtgctcgtcgagaagtcgctgctcggctggaaggagtacgagctggaagtcatgcgcgacatggctgacaatgtcgtcatcatctgctccatcgagaacattgatcccatgggcgtgcacacgggggactccatcaccgtcgcgcctgcgcagacactcacggacaaggagtaccagaggcttagggactactcggtggccatcatccgtgagattggtgtggagtgtggtggttccaatgtgcaattcgcggtcaatcctgcagatggggaggtgatggtcatcgagatgaatcccagggtgtccaggtcgtccgcacttgcctcaaaggcgacagggtttcccatagccaagatggctgcaaagctgtcagtaggctacactctggaccagattcccaatgatattaccaagaagactcctgctagctt

SEQ ID NO: 186697 - DNA, 1002 bp, Zea Mays
tgctcgccctgtcgagcagattgagctatccaatatccatttagctcgacacagtgaagaactgaagatacacattgggcttgcttgtgttccgtctctctcaaacatcctgttggtgtgctgtgaaggtctgaaggtcacataatccacttggctatatgccggggtgggtaatgtgagtcgggcttgataaatgcagacttgttaacttggtaattagtcaaatgaaactcaaattctttaatgacttcttttggccatttttagcctcagcttcatataatgtagctggacatttgtgcttccttccaaaagttccatatttctttgtttatttaaatcaacgtttttagatgggaatatatagctgaacatcttcaaactgtttacataatatatctgcattgttgttgtgctgatgccagtagaattaacacttaacaagtagtatctgttcattactgagttcatgttttagtgccctttgtaattggcaattgaattgcaattggagttaggcatgtgtaactgaaatgtgcaaactgccacaataaagttgtgacatccagctgacggaaagtttgtcttttcgtgcatatactctcagtaatcatcactaaatttatcaggacttaggagttggtgttctcttgtaagctgccaatttatttgtttcttatgtcaacctatgaataatgcacacttgtcttcttccacaattaggccattattgcagaatcttttctgtgatctattgtatttattattccattgagggtttgattcactggtctcttgcacagttttgcaacaagaatgggggcaaaagtagaacgggaaagttatatgcctggatattatgccacgggggatctcaatttggaaccaaatggtagatggtctccatactatgaggagatgacatcaaatgatcagttatgcaatggcttcacaacaaaaccaacaaatgactattcagaatttgacaaagaaatactcaag

SEQ ID NO: 186698 - DNA, 345 bp, Zea Mays
tccgaggactccgacgaatagttcatcaggaatggggcagcgtttcccacggtgacacgagcgacagctccctcacacacaagcggacaccatcggcaaggatccatggcggctgcagcccactgctcctcttctctctcccgtactcacgttcggcagcgaggccgagcacgtacacaggcaccccggcgaccaaacagagtgcccagtcaagaccttggagacgacgaatcacgcgaccgatggaagaagtagccagcaccgagcgactgagggccagtggccatggatcagggagtggcacgacggagcgcagatttgtgaatccacagcactaccgacgag

SEQ ID NO: 186699 - DNA, 364 bp, Zea Mays
agcaagtacaagagattgcaaatcttcaggaggccaacaaagaactcaaagcagcaaagactgatctacataatgaggttatgttacttcaacaggagaaaattgtagcactgactcagttacaagaatatgaggctcaaatcaagaatcttcgaattgacttggaacagcagtgcaaccaaatttcagttatgcagcaagcaaatgaagaaacacaggataaaaattctagcttgcacaagcaactggaagaaactaggattcatctgcaagaggagatcattgcattacaaggagagaaggaagaggccatcagtagcttacagcagtcaaatgattcactcaagaccctagaagtccagtt

SEQ ID NO: 186700 - DNA, 286 bp, Zea Mays
cacagccgccgatgcaactgcggcggtggagataaaggaggaggaagagaagaaggcagagcaggaagcaaccatgcagcgcgcacctgcgagtaggcggggaacgacggaggaagcagcggaggggaaggcggcgctgaacgcgcgggcagagtccttcatccggaagttccgggaggatctcaagctggagcgtctcaactccattatcaactacacccgcacgctccgccgcggcgttggcgcgccacagcccactgcgcagtagctctccgctcatcggtgg

SEQ ID NO: 186701 - DNA, 423 bp, Zea Mays
ggcgcttaagctgagtgatgaactcaatcttaatgagattgagtgtgttcgtttgctagttgatgctaacagagaggtaacatttgcaggattcaaatgtagtgctctgttgttatcaaccaagtttgaactgttacttgatcttcttacatgtatccatgtggtgatttttcagtgggttctctatgggcgagagccattggaaatatatagactcgcagctggcctttggtacatggagagaagggatcttataaccgctctgtacattctgttgcgagtaatatactaatcattttcgttccaattgtggaataactttgcttgaacgatgattttgatatgttttccatgtcttttgtagtctgttgcacttgaccaaggtcttgatgccgatctgatgtctgaaatcgaggatcaaat

SEQ ID NO: 186702 - DNA, 364 bp, Zea Mays
ttcgtctgtaggcaccatgcgcctcgcttcggacgaagatgcggagatgggagatcgggcttgtctagtgcttgtgtagtgctcgtcacaatgcgccgtgcacaaccagctagggaaattttgggcgctgcgggtgaactgcactcaacgataaacggctggtcgctaggattcgtcctcgctgcgcaggctccatcgacaagccatcgcccagctcggtcggagggaggtggaagaaggtccgtgcaccgttcattccgtgatcgacgataacgattagaagattataccccccccttcgttgttgtgatctcgacccttgatcttagatcgtagggttctgggaggctcaacatgttcgaac

SEQ ID NO: 186703 - DNA, 665 bp, Zea Mays
catgaagtgtgatttaattagcagactaaaagtggtactgctacatgggactaaacacttgtgacctagttttgttttggcccatcagatatgtgtaggtttgattggtgtttgttttgtgttattaatgcagggtgatatcctagagaaagccaagatattgcaatatgtaagagtgaatgatgtaaggacaactcgatatgtatacaatgatatgtttttcttcaaaagatctcaaacttgacttactggtatttataatcgtgacagtggtttgaaaatgaaaagcagaggcttgggcatcttcgtgaccgtgcaagtgaaactgggcgcagaaaggaatatcctattgactatactatggtgtggtgatgcctttattatcacttatattgtttctcatcgactactatgccgctgaattgctatttcttgattttatatcattatttgctcgttcccaaaaattggatcattatttaacttaggcaattgccattttcttgccatagctcaggaattgcggatgttcatgataatcaagtacacctttatttttcttatagaactatatgctactacttgtagtgcatgattcattattttgtgatccttgactgtatcatacacttagagaatatgtagaaaagctgcagcttctcaac

SEQ ID NO: 186704 - DNA, 1019 bp, Zea Mays
gttcatatgccttgtagccactctggttatccatggcaggttcaaacgccttgtaacctccctggttacctgtggactgtttgaacatgttgttactggcatggtgacctgtggcaggttcaaatgctttgtaatggtcctgataacccgtgtaaggttcgaatgccttgtgactggattgttgaatgtcagaagtgctataaccgctctgaatacttggcgattcaacgcccttgcgtccaccatagtgatcagtaacagtttcagctgcattaaaaccagcccgttggttcgtagatgaactggtagaatcagcattcctgtgttgttgaaaaccataggaactactagccaggctgttctctgtagcacattcagatcgtacattgttaccaaatgcatcggtaatctgccattggttctgatgagcgaaactattcgagaatgagttgtgttgggtgacctgatcatgggcagcaaggtcctcattttgtgcggcattatagcctgtcagagaggaagttgcagcaacaccgtcgtttgcaataacagtctggcccatgctagctgttccagcctgcatggcggcctgctggtataactcgagggagtgccactgctgggtgttggtgtcgaagtaccaaccagggtactctgcatagaagagcatgttgggtgggtactctgaggcagccccttggccccaacttgagacagcaccggttgcggtagtgccctcctcagcaattgtctcaagccctgaatgcactgaattgtgcagataagaggcgtggagctgctgctgctgctgtgcataccgagtgctgttgtccagcacctgagctgcattcccagttgaatttacactgtcgtcaagctggtaccattgctgggaggcctcatcatacttccacccagggtacatggcctccaaagacatgggatctgctgaatccactgcagtgctgccgccgccctggtcgtgctgaccactgacattatgctgattggaggagttg

SEQ ID NO: 186705 - DNA, 691 bp, Zea Mays
aatacagcacacacaccactagagactaactacggatcaccgactaaaacatggaggaaacacgacccacaccgctgttttaagccagcaactcatcgacttggaggaaggacagggccttggcaccagtcgtggaccagagcaccgcctcttccctagccatcctaagggccgtaaccaagctgggattacaaccatcaaaaacacacctattcctatgcttccaaatggtccaagcacctaggatcactaaagaattgaaaccttttctcacaagatccgatgcccgggagctgctagacttccaccacgactcaaaggattcctcatgagctggatacagaccccgcagcgccactgaattaaggaaatcaaaccagaactgcctagcaaaaacacacttgaccatcaaatgatttatggtttcagcctcttggtcgcacaaggggcactgctctggtcggtctagccctctttttctgagcctgtcagcagtccagcacctattatgttccacaagccatataaagaacttgcacttcccaggagcccaagatttccacacacgctctgctggttcgaactgaactgaaccaaggaagagagcattataagcataactagatgtataatcacctgaagcgctgaatttccataaatgtcgatcccttattccaggctggagcacaac

SEQ ID NO: 186706 - DNA, 818 bp, Zea Mays
gattattgttctgaaaaatgagaaggtatcactgcagaaggaggttgaacgggtggaggagagatcagcattgcttagagagaagctgtcaatggctgtaaagaagggcaagggtctggtacatgagcgtgaaggactcaagcaagctctcgacgagaagagatctcaaatagagaatttgaaacaagttttggaagggaagagctctgagatagagaagttaaaacatgctctggatgaaaataagtctgtaacagagaatgtgaagcaagttttggacgggaaaaacactgagattgaaaggcttaaacatgctctgggtgatagttgcgtggaaacagaaaacttaaaacaagcttttgctgagaaaacctctgaagcatataaaataaaacaagaactggatgcaaagaacatggatattgagaatctaagaggtgcgatagagtcaagagaatctgccatgacagatctcagagagcatgttgaacatctattgtcgtcgcaggttgcacgtttggaaaagttgcaagtagatattgttacccttaatgatgaaaaggtgaaattagaaagcatgttggaagaagccagagcttcctgggacactcttgctgattcaatatcaagccttactcttcctattgatcagccttttgaggggcctatggaaaagtttagccagattgcccaatacatccaggaatctcaagttgctaagagttctcttgaaaatgagctacagaaagcaaatgagcaaattaccttacatgctagcaggcattctgatgccctttccacaataaacatgttagaac

SEQ ID NO: 186707 - DNA, 496 bp, Zea Mays
aacatgttccaaacgaaaaagggatgtgctcagagtcaaagaccgaacaagtagatgtgaccatgccaagtactgcctttggattggaggatgacactagtgttgctaaatctggaagatttcatgcatatcaccagccagttgatttgcatccttccatatacattggtgatatccagacatcagatgacagtcagcaaccttcaccagatttagaaatcataacatctcaatcagagaacaagcagaataacagtagagtagactctgcaagggatgtcaagaatgcagcccctatttctacttcagctatctcccaggggaaaacagaacaagagaggattggtttagaaatatctaatccttgctctataactgctgctttagtggcacaaccaaaaaaagttgttttggagtcaacaaaggccaaaagtaccaatggacgaagaaagaaacgaaaagagacacttcctaagggtagtggacacaagtatta

SEQ ID NO: 186708 - DNA, 1177 bp, Zea Mays
tacccttttctctctgtacattcgtgatcttggccctgctgttgaatttggagatgcacactggcttggaagacagggtattgcattagcgctccactctaccgctgatgttttggccgctaaagatcttcctgttgtcatgacatttctcatctcacgtgccttggtaagtaatttgtttttatggatcttatcattgcagatttgcagtgccacttacatagttacatttaacttttaatgcttctcatgacgaatctacaggctgatccaaatgttgatgttcgtggtagaatgattaatgctgggatccttattattgataggcatggaaaggaaaatgttcctttgctatttcctatttttgagagctacttgaataaaagggcaagtactactttcctattaataattgtactagcattattcaatatactacgttcctattagtaactttactaatatattattattgctccttgttttttatttgctatgcaatccatatgtaacaggcatcagacgaggaaacatatgatcttgtgagggaaggtgttgttattttcactggtgctctggccaaacatctatcaaaggtgtagatggatactgaactatcttttgtttacaagatacattcacagtactaaatatagcatttgtaacaggatgatcccaaagttcatagtgtcattgagaagttgttagatgtccttaacaccccatcggaggcagttcaacgtgctgtctcagattgtttgtccccacttatggtatccaaacaggtgtgttttgttttgtatcattggattttgggtttgaatgatgactatccattttcaacccattttttaagctttcctttttctgatttatttgattaaaatgctttattctcaatataaccaggaagagggtcaaactcttgtttctagactcttggatcggatgatgaaatgtgaaaaatatggtgagcgacgtggtgcagcttttggccttgctggtgtggttaaaggatttggaatttcttccttgaaaaaatatggcattgctgcaacattgcagaaaaatttggaagacaggttgtctactttgttacctcgtccactagtgctgtatataatgactttgtaaataaaatgagtatgcattcacctgtcacaaattttcactaaat

SEQ ID NO: 186709 - DNA, 289 bp, Zea Mays
caattccgctgccgacgttgtccttcacctcgtcatggagcccgatcaggacgcctgcgccctgtacgtctccattgaggccctattccaggcaaacaaggagtctcgcgccgtcgtcctcgagcaggagttccacaacctgtcccagggcgatctctccatcgacgcctacgcccagcagatgaagcgcaccgctgatgcgctccgggaggtcggccacactgtctcccccgcgcagctcgttctcaatcttctgcgcggtctcaaccctcgcttcgccaacaccgtc

SEQ ID NO: 186710 - DNA, 723 bp, Zea Mays
accgtggaaaattgaaaggttgaattttgtagataatgatggatgggcatatgctgcagattttcaaaacttgaattggccatcatcatcctggagatcttctaaatcaccacacgacttcgtgagaagaaggcgttgggtacgttctagacagcagtcgcaagaacaaagtgcagaaattcctagaaaagtacttgctactgtcagtcctcattcatctactgcgttgccttggacatcgatgattagggatatggatttatgcttgcaagttcgcccatattctgaaaaatcagaggaatcatatagctggagccagatttgttcactaggttctgagagtatacctaaacagcagcactcttcactttctaggcaaagcaccgtaaagcagtcagtggtatcatcaaggaattctgttcttaagcttgctgaactcgagaaaaaagatgtgctctcatattgccatcctcctgttagcactgaaagatatttctggtttagtgttggaattgatgcttctgttgttcatacagatttgaatgtacctgtctatgactggagaatttctttcaattcaattcttagacttgaaaataaacttccctatgaagctgagtatgctatatgggagatttccactaaaagtaatatggttgaaaagcagcatggtattgtcccttcgggtggaagtgtatttatctattcagcagatatacggaa

SEQ ID NO: 186711 - DNA, 960 bp, Zea Mays
tatgctgctgcggccggaaaagagcgccgcctctgcttcgtggtgacacaagtgtcacatacctgctccacatgatcgaccaccggcatcccacgtgccatctcctccttgctgagtcgtcggagtgcatcgaagttcagatggccgaaacgttcgtgccactgccatgcctcaacatccttgcgcgccgcgagacagataggttgtgcagcctcgaggtgcaaaatgtacaacctgttctttcctcgatgtaccttggccagcaatcggtgatgattgtcccaaatgtgaagcacgccatggttaatcacaaccttggaccctccttcatcaagctgtcccagacttagtatggagttcttcagcgctggaatgtagtaaacgccatgaagaactctctgctcaccggtcttggcttgaaaaatgatggatccaactcccttgatttccaccttcgatgcatccccgaaacagaccgttcctcgaacgccagtgttcagatcagcaaagagttcttgacgcccggtcatgtgatgtgttgcgccagagtctaggtaccaaccgctgtccatatcttctccattcacgccaaggtaggcacaggcacgtggctcagagagctcgacgtgctgcgccgtgtagctgtgcgccggcgtgctctgctctaggctgataaagccctgtgccagaaacagagcaccatcttcttcacattcggcgtactggacgcgcgcctcatgccttccttggttcccgccacgctgtccagcctgatttccaccgccgcgacctccaccacggttgccaccgccgcggccagcacggtttccaccgccaccgccgcgctctgcatcctcaaggcgcggctgcggacactcacgtgcccagtggccttcctggttgcagttgaggcaggtgttggggccgacacggccagcaacattgccgtctcctcgtccg

SEQ ID NO: 186712 - DNA, 362 bp, Zea Mays
cgattattcatgtcgcttccacctgcgatctccaggacctgctcaatctgtgtattcagagggtcgcagtctccgctctcgatagccgctacctggacaaggagcttccggctgacatatacaacaagatcaaggagatccgccgccaaccagagaacgccattattctggaccctgagcatgacaagagggtcaggaacatcctcaaggccttggattccgacgacgtcgatctcgtcggcttgctgttgaaggaatcgacggtgaccttggacgatgcattcgcgatacactatgctgcagcctactgtgagcccaaggtgtttgcagagctgctcaaactggactctgctaacgtgaac

SEQ ID NO: 186713 - DNA, 612 bp, Zea Mays
caactagaaaagaatcggtccgattggatactgagccatctgtaccctatcaacaagttccagatgctggttctggcaggcactctgatgacgagcaatttcatgcagtctcctttcctccagatggcgagcaaacgttcactatgtcatataacaagatcacccggggaaggccagatgatcttgttgaaatgaccgcttgcatagtagaaccttcaattagctatgtggttgactcttgcaatttgtcaaatgatttagaaatggattatgtcccagtaatggacagtggcacaaatgctaatgttgtgaaagaaaagatgaacctaccaaacattgcagattccggcctggagtgtgctgatagtgcttatgtggttgatcatcagcaacatatcccaacatgccctcccatctctgaaaatatttgccaggatgaaaactacaacaagaggtctagcacacattcagtgtcaagcgaggaagcaccttcccctgactatccattcttaagggtatccaacatcaaccttccagcagcacccatcaaagtacaaccaccaccgatgcccccatctaaattgcttaataaaaagggaagcaacgaaaatg

SEQ ID NO: 186714 - DNA, 416 bp, Zea Mays
cttgtatcagagtacactcttctgtcttgtaatcttcttggcttcgggattgctttggatacagaattatttcttacatttgcacgagcatctggctgcaagtccacctttctgctaccttgactactgcttccagcaaatgtgttggcagccctcgcttttcttggatgggcatttatttggtgaatattgctccgttgcctactgggggttgctgggtttgagtgcactttatgtttggtgactgtagcattctgttttctgctgtttggcacaagcacactagacgaacttgtgcccagttggttactatccttttgtctgttcagcccacttctttcagcattgctattttcagggttcttgtgggtttcaagctttttaccaaattttctcatcccccctttttcctgggc

SEQ ID NO: 186715 - DNA, 297 bp, Zea Mays
aggcactttacagccccttcccataccatcttggaaatgggaagatatttgcatgaattttatcgtgggattgcccaatacctcccgacaccatgattctatttgggtcattgtggataggttgaccaaaacagcacatttcttgccagtgcataccacccacaagacagagaagtatgcagaaatctatattgatcaaatagtgcgtttgcatggaattccgaagaccattgtgtctgacaggggagcactgtttgtggcacgcttttgggagcagctccaagaatcacttgggac

SEQ ID NO: 186716 - DNA, 359 bp, Zea Mays
cgcctgcccgcctccgaatccgggtctgccgccccagccctccaccttggtgtgctggtcgcgtctccgtgaaggtggattgctcgatgtggtgctagaatccagctacatcgggtgagacgaggcaaacccaagcgagtctctactgctctatatgatcgcaatgagggcgttcacagcggcatcaccatgcccccgccacactccccatgcgcgacgcctccatcacgccatcaccgtccttccccacgcgattcccttccccacgcctgcgccaccatcccgctatcaccgctcacccgagccatcacgccatcaccgcccttccccacgcgacccccttcccacgcactgtgtcc

SEQ ID NO: 186717 - DNA, 605 bp, Zea Mays
aaaagagttgctgaggaacagaggtacaagagggcactatcacgtgaagaggtaaaccagtagataacaatttcaagtttaacatgaattgaagcatgtcaccttttatatctcagcatccagatatgaaaatccactgtgataaaacttcaaaatgtaaaggaaatgttggcgcctctttctgtatggaaggtccctgtttttttacacagtagttctttttatgatgttcaaaattaagtcattgttaggttaaattcgctgctattaattagtggttatggtgtgatattggcttgcgtccgtaggcttctttacttggcaacatattggcattaatttgatatgtttctctggttatgctaacatattcatatatcaggttgaggtgcatgatgtgggcaaggagatggagctggatcttattaaacaatatagtcaggttgactgttgatctacactgttcattgtcgctttgcatatcttctgacattaaatcttcaggttgaacggatatttgctgatagggtcagcaaagctgatggagatgatctggttcctgaatatttagtcaaatggcaaggacttccttatgcagaatctac

SEQ ID NO: 186718 - DNA, 376 bp, Zea Mays
gtcgaccatgaacaatatgggtattcttgaggtctctttattgatgatatatttccagttcatagggtacattgtcatcccgatagcttttgaaatacagctaggggtaaaacttcctgaggtgttctatgttccatgagtttccaatttccgtgacatccatctgagtgagacgatatgatcccggccgagtgacttctgctactatgaatggtccttcccatagaggtgacaacttatgtcgtccctcccccgttagaattcggcggaggacgagatctcccactgcaaaggatcgacgtcgcatggccttatcgtggtaatgcctcaaagtttgctggtaccgtgctgattgaattattgtgttgagtcgttc

SEQ ID NO: 186719 - DNA, 1108 bp, Zea Mays
gatcacagaggatatcagaaacgctgggttctccataaacccagacgagctggcatcgatcacaagcaagcacgacgcgaaagccttaaagatgcacggcggggtggacggggtgtcgaagaagatccggtcggcgttggaccatggcatatctgccagcgacctagacacgaggcaaagcatctacggcgtcaaccggtacgcggagaagccttcgagaacgttctggatgtttgtgtgggacgcgttgcaggacatgactctgatcatcctgatggtgtgcgctctgctgtctgctgccgtcggtctggcgtctgaaggctggcccaggggcatgtacgatggcctggggatcatgctcagcatcctgctggttgtcatggtcactgctgtcagtgactacaggcagtcgctccagttcaaggagcttgacaatgagaagaagaagatattcatccatgtgaccagagacggatcccggcagaaggtctctatctatgacttggcggtcggtgacatcgtgcatctgtccatcggagaccaggtgcctgccgacgggctgtacgtgcatggatactcccttttgatcgacgagtccagcttgtcaggcgagagcgagccggtctatgtttctcaggacaagccattcatcttggcggggactaaggttcaggatgggtcagctaagatgatggtgaccgccgtcggcatgcgcaccgagtggggaaggttgatgagcacgctgagcgagggaggagaggacgagacgccgctgcaggtcaagctgaacggagttgcaaccatcattggcaagatcggcctgttgtttgccacattgacatttgttgtcctgatggttaggttcctcattgagaaaggtttgacggttggtctgtccaaatggtactctactgatgcgctgactatagtgaactacttcgcgactgctgtcactattatcgtcgtcgctgttcctgaagggctgcctcttgctgttactctgagccttgcatttgcgatgaagaagctaatgaatgataaggcacttgtccggcacctttcagcgtgtgagactatgggatctgccggaaccatctgcacggataaa

SEQ ID NO: 186720 - DNA, 819 bp, Zea Mays
ttcaccgaagagaaaaaaagatccctacttgctaaaagacatggtaaaggggctgatttcctgagagcagttgatgagataattgaagtttatgattctctaaaggatataggtagcaacaaggttgacttgcctgccgaagaagtaaagccaggtgtagaaaagtttgctgaaaataatagccgcatggatactgaagatctggtcagtagctcctatatgcacaatgatagaaagatagaagatcattatgtcactaccaggagtcatgacatggtcaattctgacaggccttcagttgacgagcgatgtgttgtaaattctgctcctgatgagcctattgaaaatgtatccatccttgatgaaatgagggatatttctttgcgtactaattcattttcaaataagcaaagggatgcacagccacaaaattgctacacacgtactagggttccatctctgcggaagtcaagaagttcattaagtctggaatcaagaaaggctcaaggttctggtaatttttttgatcataccaatttggcttctattaatttggttcctggtgaacataaggaaccttctcatcataggcatgaagatgacaaagctaactcaagttctgtttctacatcagataatgtctggttgcattctggtgaaggcacttccaaccaacctgtaactttgggggctagtaacggcaacagaatgttgaatactcctgctgaagtggatagtactagtaaccgtgaagcatctgaaaatggaactacagagacagaactgaaatcaaatggcacatcagatcttcccatgaac

SEQ ID NO: 186721 - DNA, 313 bp, Zea Mays
gttgaaggtcgctcggtcaagaagctccctcaggcggagatggaggaaagccgccagctcggcctttgctacaactgcaacgataagttcagccgtggacacaataaagtgtgcccacacctattcttattggtcctcgacaacgttggagacgaggacgactccaccgagccagaggccacggatgacacacctctcatctccctccacgcaatagccgacgttcactccttgaccaccatgaaggttcgcatcaccatgggcagcgctgtcctctacgccttgctcgactccgggtccacgcacaacttca

SEQ ID NO: 186722 - DNA, 348 bp, Zea Mays
cgccggtgcatagcgctgctgcacctccgtcgccggcgtttgatgatgatcaggacagcgggcctcgtcggcgcaggctcaacagttcagttcagatggggcatgctgagtccggggaaacacttgcagcgcgaaggcccgtccgtgaaaggctgggtgttgccccggtctctgttcgacatgtggaggctggattgtccgtgaaagactcggcgccttccgttgccttggttactggggacacgcatactgaaggtctgaagctgtggagcccggtgattggctgcatggatgctgggttgagtctgcccctggagaatgttcatgggcctggcactgagactttgg

SEQ ID NO: 186723 - DNA, 466 bp, Zea Mays
cctcgcagtcgctattataccccgcgtcgcggagcgagggggtggaaaaaggagaatcgatgtgcggctggatccccgtggcgaagaatacccagcaccgatggcttgaactgggaggaggaaaaggaataatgacaccaccaaaaacaattacttgaacaccacgaacaccgccgcagcggatggggtggtgggtgaggcgacgaagaagggaaaggataggggtgtggcggagattggcgaagccgcaagccaggaacagcagcaacgggcgtgtggcgactgctcgaactgggattattacccacgcgctgcggagatggggattgggttcggatcgctgctgccattgtgtgcagccaataaaaaccaaacccccttttttcctctccgcccccgttcgttcccttttcgcctggggggtgctggctgagaggctcaggcttcgtatttcttttgttttgtt

SEQ ID NO: 186724 - DNA, 374 bp, Zea Mays
cgaggtcgactgggctggcttgatttgggcaacggtgaagagggaggtagtagctggcacgacacggcgatacgcaccgtacctcctccatctgatggtgcgccaaaggccggagcgtttcgttgagggtaatgggagcttggcgcttgagaaggggttgaaaggtcaggtattgcagcaatgccagttggaggacgaagaagaaacctctttggttttttggggcacccaaaactttggtgacttagaggaaatgccaatttttggcagccaaaacataagttttttccctcaaccgcaggaggtggggggcaattgcagttaccaaactatttcacgtttccaagccctcatgcaacggatccaaggttatg

SEQ ID NO: 186725 - DNA, 329 bp, Zea Mays
tgaaagagaagatcagactcgtctacagaattctgccagtgttctggaaagtaaaatagcgtcagtgctacatgaggatattggagaggttgacgatttaattccgctcgtgtgctgctttggacctgccaaatactcctttattccttctggaagaccagcaaataggttgatagaccatgagattcatgatagaatgaaggacatgttttggtctccagacaaatttgtgagggcaccaggagggtcttcatccaatgttgctctagctttagcagcgattggtggaagggttgcattcatgggaaaattaggtgatgatgactacg

SEQ ID NO: 186726 - DNA, 1068 bp, Zea Mays
acaccatgctcacggcgtacgtgcacgcgggcgacaccgacacggccgcgtccctcttcggcacgatgccggacccagacgtcgtgtcctggaacacgctgatctcgggctactgccagcacggcatgttccggaactcggtgggcctgtctatggagatgtctcgccgtggtgttgccctcgacaggacgacgctcgctgtcctgctcaagtcatgcggtggcttggacgacctggcgcttggtgttcagatccatgcgctggcggtgaagacgggcctggagacggatgtccgggccggtagcgctctcgtcgacatgtatggcaagtgcaggagcttggatgacgcgctgcgcttctttcatggaatgggtgagaggaattcggtctcgtggggtgcggcgatcgctgggtgtgttcagaacgagcagtacacacgggggatggagctgttcgtgcagatgcagaggttggggcttggagtcagccagccggcttatgccagtgcctttagatcctgtgcagcaatgccatgtctgagcaccgctaggcagttgcatgcgcatgccatcaagaatgtttttagctctgaccgtgttgttgggacagcaattgtggacgtgtatgcgaaggctggtaacttggttgatgcaagaagggcattcattggtttgcctcaccataatgtggagacatgcaatgccatgatggttgggcttgtgcgcacagggctaggagctgaggccatgcaactgtttcagttcatgaccaggtctggtgttgggtttgatgtaattagcttatcaggtgttttcagtgcttgtgctgaggttaaggggtactttcaagggttgcaagtacactgcttagcagttaaatcaggttttgatgtggatgtttgtgtcagaaatgcaattctggatctatatgggaagtgcaaagcattagtagaagcataccttgtattccaggagatggagcaaagagattcggtctcttggaacgctattattgcagctctcgagcaaaatgagtgttatgaggatactatagctcatctaaatgaaa

SEQ ID NO: 186727 - DNA, 657 bp, Zea Mays
gcctgctgcacagttcttctgttaataattctttttggaataatgctgaataatcttggagcaatatcagatacccttttgccatggatccatttatctatccagaacatggtgttggtcccattccccacctcagagatcaacaccttggagaagaaggaacgggccatgctaggaacttgaatggacaggctagaccaagggcgtcttgggtcagttttttgcaaccaaagccatcgcatgcggagggcccagcagagctcaggaaggctagcaatacctagacctccaagctgcaacggacgacatacttttccccaagccaccaagcaatgccctcctttcacctcttttcttcctcgccagagaaaaccttttcgtattttatcaattgcttcaatggcccagtgagggagatcgattgccattgccatatagaccgtcatgctagtgaggacatgctgcactaaaattcttctccctgctctactcatcagatcggccttccagcttggtaggcggtctgcaattttgtccacaaactgctgagcctgattcctggataacttgtgtaaagacaaggggagacccagatatctgcaaggaaaggttgcaatctcacaaggcagccagctccggagttcctcaatagtctcc

SEQ ID NO: 186728 - DNA, 726 bp, Zea Mays
gcagatgatgctacccctactgacgaggatgtccttgcggagcaaaacctagtaaaggaacaagctgcaaacaatgcggtagatcctaatgttgcagttcaaatacatggtctacgtaagacatatccaggaactttcagcattggatgttgttgcaaatgctctaaatctaagccgtttcattcggttaaagtaagttttcaattagtttttgacataaaatacatgcaactatgcttgtcatcatctgattattcattgcctaaaactttattcagggcttatgggtgaaccttgagaaggaccagctattttgtcttcttggtcccaatggagctggaaaaacaactacaatcagttgtctgactggaatcacaccaattacaggaggtgatggtaagtatcgttcattgaagcagcattcttgtttctttgtctcaaaacaacaacttccatactaataatacatactaaacatctcatagcattcatttatggtcactctgttcgaagcactgtgggaatgtcaaacatccgtaggatgatcggagtctgcccacaggtggtgctttatacattttgatattattgatgcaagtggtggtatatttgaaaaaaaaacacataaatatgtgtgttctgttactttacagtttgatatcctgtgggatgcattaacagctaaagagcacatggaattgtttgccagcatcaagggattgcatc

SEQ ID NO: 186729 - DNA, 522 bp, Zea Mays
cagggattgtaaaagccctgcaggtcggtgcctcttggttttagcttgttgacagatcaggcattgttggacaaagtcagccacatcttgtttcatgcccttctagacaaacatgtgcttaaccttttgatacgtcccttgaataccagaatggccccaaccgcactggcgtgaaatgcatcaataagtttgatgcgtaaagatgagttgttgccaatcgatacttgtgtgccacaccctgatggaccgaataccccctggcatcaggactactaatcgccaactgctgcagcaaggattgtgcctccggatcagtaacatatgagttgagaacctcctgtagccactgaggttgaatgatagacaaagcatgaagatgaagtggagagtgcagacgagatagagcgtcggcgacgacattatcgtgccccttatacacaatctggaattggagccccatgagcttggtcattgctttcttttgaagatcggactgcaggtgttgatcctccaagtaacaga

SEQ ID NO: 186730 - DNA, 310 bp, Zea Mays
gaggagcaaggcgtccacttcggcctctatggtgttgccccgccgccttggagaggcataaggcgatgagaagcggatgccttagggtgtttagggatggactaaggtggatctgacctgagccgctgatcgattgagctctagaagtggtggcggcgctggttcctggttgttggctcctggcgacggtgtccctcccttgcgccggcgaggtcctctgttggctcctggcgcgcgacctccactcctccctccctctgaggcagctacagggtgagggtggcagctgagggagggtgactgggtgagg

SEQ ID NO: 186731 - DNA, 550 bp, Zea Mays
atttataatcttccaaacctcaagatgaatctgaaatttgatattgaggtcctcaacattcctttttttgatagtttctttattgactttgtatctgccatgctacccatggccatgctaaatgttcttttgggatttcaggtgctatttaagaaccttactgttgacataaaggatgtgaaaccaacctccctgctcaaagatcgtctgtgcgaagtcgagggaaatccagatttttcaaataaagatgttactgcatctcaaacccctgtggttgcagaagtcccttcagggaccatcccttcactaactcatatggaacaacaacctgagatcaatatcacatcccgagctatgagccttccaaatatacttaatcaggttggctttgaacttctgtatcgaatatgtggtgcactcttctgccattatagttggaatatattttctttgcagtatgctgctcctgtccgtctacctacaaacagcacggtagaagatgacaaagttgctctaatgatgcctgagcaagtgccctcgttgacccagg

SEQ ID NO: 186732 - DNA, 849 bp, Zea Mays
gttggtttgttccgtcataggggatgatttcactgaaactgcagccacttccaacgtacttggttgattctgttctagagaactctcagcattcaaatgtttaccagatgtcacatcctttgattgttctaatgagctttcagtaaacttctcagaaaattgtgcgtcatttggcatagtacgacagttctctttcgtgagggagtgcatcatgtacagtctgcgatcccatacgtgaatatcatgtacaagctctctcctcaggagattgagctctagaacatctatatacggttcaaatgtctgcaagttatctacgatagaaaacgctgatacaacctgaaaaagtaaagaacaatgttctggtctgtaactatattttcgatagcaatctacaagagaagtagaaaactaggtacagttcaatagcaatctataaaaaagtagaatttaaacttacgtcatacttcttccactcaactttaaccaactccttaagatcagcaacatgtttatgcaagcctgacttcataccaatgttctggtctttaactatcttttcgatgcagtcaagtttagcaacgatttccctatacagatgttccttcctagcgcatacctgcaagttaagtcataaaagattacctagggcaatacatctcccaaaatgatgtcaatgggttggcttttagagccaaattagacaagcttagataaaactaacataaacatacatcaacagcttctttgatgatccaatcttgagcttttggacaagcaaagtccagtactgaggatggcaagttgacagaaagaatgtctactggtgaataacggaagacagcaacc

SEQ ID NO: 186733 - DNA, 1092 bp, Zea Mays
catatagcacttgtattattacagaaaagtgcaacattattgaaattgtcacatatcataccctttttaagtgtagctatcgtccaaaagaatttgggaccaacaacaaacaacgaactaaataatcgataacagtgcaaggaggtaagggtgttgtagcatccctagcctccacgctggattcgtccttactaaactaggtctatgaaccataatgtcaaacaaataaaagcataaattgaagaaggaagaggaatgatgaactaaacctaatatgaatcaacaaaaaaatactctccctattttaatttataagttattttcaatggaaagcatcaaattaacaaaagacaattgcatgaagaaacgtcaaagacatcagattatagccaatggggaacaagagcagcaaccattagttcatgtaagtaataaaatgacaataaataaaagtaaacttaaaaggtgtgcatgtacaaactaacgtgactatgtgagtatacaataaatcatcaacaactagatatggtagtgtcgggatctctaaatagtgtacatatttttcctaataatgataaactaactagttgtgcttcataacatatggatgttggtttagactaagattattattttgtaaaacaagtcacttatatattggtatcatgagctaactaaaaacaaaatagtcttcttttccattgatgcggtgggcctgacctgttctagtgctaatgttttatacatatttgcttgcaacttgacatatatggagtggttaataatggaaaacgaagatggaatcatgtacagaggagatcgatcgaatcgatggtgggtatatatcacaccttgttgtgcgagtgatagtcgtagagtagcgtcggcgtcaccgcctaaggactgagccctagggctaagggtgccgacgtgtcatcgaaaaccatcatcgcaagccccaggcctagcaataaggtcgtgccacacggtggggactactacgaggaggaagatgacgatagcgacttcaggtcccaactgctattggaaaacaactatacaatgttctcgtcaccgacgctactctacgac

SEQ ID NO: 186734 - DNA, 295 bp, Zea Mays
gaccacatatgcaccacttagcttgtttttgcaaatcttttggaaattcttttcaaattcatttgcatttggcctaaggtatagaaatagatttttcaaagatatttttaagatttgaaagattctcccccctttttttaaatgcttttcctttggccaaatagaagatcccctgaataagttctccccctttggcataaatagtttttctcctcttagctgtcaagagggttttctcagaaaagtaccaatttggaagacttaaaagtttttgaaaacagggtggtggtgcggt

SEQ ID NO: 186735 - DNA, 632 bp, Zea Mays
cgacatgagcttaatgtgttagctgatcagccaaaagaacttaagggcggcatgctcttccctcatcaactagaagcattgaactggctacgtaaatgctggcacaagtccaaaaatgttatccttgctgatgagatgggtcttggaaagacagtgtcagcttgtgcttttctatcatccttatgttgtgaatttaaaattaatttgccatgtcttgtcttggttcctctttctacaatgcccaattggatggctgaatttgcatcttgggctcctcatttaaatgttgtggaatatcatggttctgcaaggtcaagatctatcattcgccagtatgagtggcatgcgggcgattcaagccagattggcaaaacaaagagatcgtacaagttaaatgttttgcttaccacttacgaaatggtgcttgttgatgctgcatatcttcgttctgtctcatgggaagttcttgtagttgatgagggacatcgccttaagaattctagcagcaaactctttagtttacttaattcgttatcatttcagcacagagttttgttgactggaactcctttacagaacaacattggtgaaatgtacaacttattgaacttcttacagcctacttctttccc

SEQ ID NO: 186736 - DNA, 341 bp, Zea Mays
ggagaatctggtgtatatcagaatgataatttgcacaagtcatcagtgctacatactgggctgattgatactgatccaagtgtgaacttgcacgacaatggtggcctctctgtgtcttcgtctcaaaatccagttgtggactgtgtttctaggagagaggatccccttcgtgattggggcaatatcgcctgcagtgaaggaataattggatgtgaccataccaccaccgataatgaacacataaagctagcacacaggctgcacgataatgttcaaatgaatgtacctgtcatagttgaggacgtgactgataatgtgccttcaggcattccatcatcgag

SEQ ID NO: 186737 - DNA, 454 bp, Zea Mays
aagtgccatagacgaagatggcaacgtagtcgaggcagtcaatgaaaaaggtctatgccgaagttgacattgtcgaaccatcatggccaaggcatgctaggtttgccaggtctgagaacacgtcggggatgaaggcatgcaccaatgttgttagtaccagacgtactaggtagagggctccaaccatgcgtcaacgtctgaaggaactagcagagaaggcctccacgatgattgcgatgcacagaagaatggcgaggaagaaggtatcgatgccgcccgcggttgttggagtggactaagtagacgaggacgagaggatggcattgcagatgaggttgtgctggacaaagtcgaagtatttgggtgacatatcgaggctcctggagtgtcagggctggggcgagagagctgcaccgcacaagcaaagccgcgatggtgctggagtgtcacgaca

SEQ ID NO: 186738 - DNA, 308 bp, Zea Mays
cagaaatacaagttacctcagtctagaatatatgcctcatactttagtggtgatatgtcctcttgtttgagttcggacgacgagtcaagaaataccttgcagaaatatataggagcagaaagaatcttgccttccatgtccaaggtacttgttatgtcttatcaattttgctttgaatttatgtggacatttatcgactgagtgcttcaataggttgatttttggatgcccggtgaaactggtccttgtgggccatgtattggttttttccttgattgttcggacaacaatgatggtgttgattccgt

SEQ ID NO: 186739 - DNA, 299 bp, Zea Mays
ggctttacaagtccagttgagtcagtaagctttgactcttctgaagttacgataggtgctggtgcagcaagtggaacgataaaaatatggaatattgaggaggcgaaaggtattaaccagtgttggtactcaacagtcagtgcattgaaaacatgaactgcaactatgtcttgcaataatctcagtttctattgacaatttgcacaatgtgcagttgttcgaactttcactggacacagatcaagctgtgcatctcttgatttccatccttttggagaattcttagccactgggtcttc

SEQ ID NO: 186740 - DNA, 307 bp, Zea Mays
caagataggactactggtgatgaggagtgcgctgcctgcacacctctccaccaaatttgagcctctcccttcagcagctgtgtgccaaagcgaacccgatctccatacacaatctcgaagacattcatcttatcctccacgtaagtcagccaatctaccgcctccaccggagtaccactgccatcaaaagaatccaacttcatgcccatccactgcatcagagaaagaccactgactggaagaggcacctcggccccgccacctggagcagcacccgcagggacagcgcccccgggcactcctccac

SEQ ID NO: 186741 - DNA, 397 bp, Zea Mays
ctgtgccaaggttcttggcaaggtcttttattaatagcatgcaaactcaagaactcccgtctcttagccgaaagaacagtgcaggacctagaaacaccccattgatgaaaaatgacagtgaggaaaactttttcgaagcatcagatgattttgatgaatttgaaacacctatgcatcaaaagaggactatatcagactattttagcacccagaaatttttgcctactagcgttccttccctacagccgccaacatttaagcgcattcctgatttgataccagatactgaacttcaaactggcaaattcacattggaaggtagtggcactttcaatagttttgtgaaagctcagatagtgatttatgatcaacattctccccagtacaacagcttgga

SEQ ID NO: 186742 - DNA, 421 bp, Zea Mays
ctcaccgtcagggtaggggctatgaggatggggtaaagagacaatactggggttaggagtggtttggtacaaggcgtcaaagtcggtaacccaatcgataggagtgggaggggctgcgaagacatggtgtacgaggagagagccaggaggaggagcccccacaaagccaccgggaggggggctaggtccgggagtggcgagcatgttgacgatgatcatgggttgtgatgacgacaaggcttcgatcgtcatcgagataatcacgacactacgaaacacaaatggtccaatagcgtggcgaccctcctgagggtggatggaggcaggcgggtggaagagttcgagcagtcactgagaaccgggttcatgactctatcaaaggccatgaatgtgccccgaaaaagctggccatcgtgaagag

SEQ ID NO: 186743 - DNA, 383 bp, Zea Mays
tgttgaaacacttccccctgaatacagtgacattgaacctttggctaaagctccggtatcttggtcgaaggttgaagcctgaaactcgatgtctttaagtattgagatatgatgaaagcactcactcagtattttattctgggcaggtgcattattacagagatgaaatcctcccccttctgaagaaacacaaagtcatttactttacacatacagattctcgccttgctaacaatggccttcctagttacattcagaaattaagatgccgagttaattacagatctttgaagtattctcatacaattgaagatcttggtaataccctagtttcaagaatgcgtcaggaccgaagcccatatcttgctctccatctaaggcaa

SEQ ID NO: 186744 - DNA, 474 bp, Zea Mays
gatgggtaaacacttgctagaggctttgacactggagtggtcttaccaggatgaaggcatggacgatgacatgggcaaagaaattgctagtgagattcttcaaaatcttcaacctaacagcaacattatggagcttatcattcgaaattatgctggagatctgtttcctgtctggatgcaggacaattacctttgcaagctcacctcagttacacttgataactgccatggctgtagtgagctcccttaccttggtgatctaccatctcttaaatctctcttcatacagagaataaatgttgttgaaagatttggaatcgagaccagttctttggccactgaagtaaaatatcccactagatttccatcactggaggtgctgaatatatgcgagatgtatgatttgcagttctgggttagcacgagagaggaggattttccacgactctttcgactttctatcagtagatgccc

SEQ ID NO: 186745 - DNA, 439 bp, Zea Mays
tagttcttcccatgggcaaatgaaacctgtaagttcagttttattgatccataaaagtgaaatacctagctgtacttgaacaatcagtttatattggaagagaccatacttgtaagcaaatgaacctatgaacaacatagaaaggtgacacaaatgccggatcatctgctagcagcccatgcggggcttatttgcatagttattgaagctggatgggcaattgacctgctcaggcaggttcaacagttttcctctccaacaactagtcctcttagtagcaactaccgagtatatttgccttggtgatgtgatcagcgtggttgtatctaagtacctaaaccccaattgtatgctgatcgtttcagttggttcgtgcaaagtcagatggctcagtgataatttgcatctatctgatgacttgaatcatgctgaaccaggc

SEQ ID NO: 186746 - DNA, 395 bp, Zea Mays
tgtgaccaatttggaaaaacaaagcgatgatcacatgtttgtgtcttgaaccaatgcccactttccgaacatgaagacatccaagacttgcttgtaccatgtgtctttgcaagagagttttgacacaagctcttcacccatcggccgcaagagctaacagaagtttaagcgagctagagggatatcgtcgaagggtgcattgtgattagctagcaaacatgcccaacgttgcaatgggacatataccttatcatgcagccaccttgtggcttggagaaaagattgtgtcatgcgttccaattcgtctaggaatctaagtgagtgttatgcatgggcgtgcgatgcttgattgcataatgtgttcaaatatgtctcgggattggactccgctcatg

SEQ ID NO: 186747 - DNA, 703 bp, Zea Mays
cgactatcgcacgctgaacaatatcaccatcaaggacacattccctattccagtggtcgatgaacagctggatgaactacacggcgtgcactacttcaccaagcttgacctccgatccggctatcaccaagtgcacatgttcccaagcgacatacacaagacgtcgtttcgaacccatgaaagactatacgattcctcgccatgccatttagcctttccaacgccctgactaccttccaagccttgattaacgagatcctctagccctttccgcgtcgcttcgtcctagtcttctttgacgacatcctcatctacaacaccacctggatggatcacctccgccacgtccgcgcggtactcggggtgctccaacaacatcgcctcttcgccaagcgtaccaagtgtgccttcggcgagcgctccatcacatacttgggacacgtcactcagcagaaggcgtggtcatggatgtagggaagatccagggcatcctggattggccggtattcgtccgggcactctgcggcttcctcggcttggcgggatactaccgcaaatttgtgcaggactatgacctcatagccgcacccttgacggcattgctacgcaagtccgggttcgggtggacggacactgccgtagccgccttccaggcgctcaagacggtactcatcaccgcctccgtgctggccttgccggattt

SEQ ID NO: 186748 - DNA, 614 bp, Zea Mays
gtttgtttacaggaaactaaaatgcaggatatttctcgttttttggttatccggatgcttggaccagattttgccaactttgtctttcgcccttcgattggtgctagtggtggcattttggttgcttggaaagatcatataaactgggctggtgtttctagagtggatgatcattcagtgtcaattctttttcatcctgttgatgatgtggagtggtggctgacttgtgtgtatggtccccagctcaaccaggacaaaattgcctttcttcaagaattgagagatattcgtgcttcctgctctggcccctggttggtccttggggattttaatttagtttataaagatgaggataagaataactccaatctggataggccaatgatgcataattttcggagatggattgatgacttggctcttaaggagttgcctttggttgggcgtaagttcacctggtcgaatgggcagcataatccaactcttgtcaaactggaccgtgttttctgctccttggattgggatgatcagtttccttgggccctgctgcaaagttcggcctctttcgattcagaccattgcccgcttcttctggggcttaaggatattgtgca

SEQ ID NO: 186749 - DNA, 388 bp, Zea Mays
cagatggaactctttattatggcgagtgggatacaagcaagatgagtggtagaggagcaattcagtggccttcaggtgcttcatatgatggagatctttgtggaggtttcattgacggaacaggcagtttcaaaggagttgatggatctgtatataaaggttcttggaggatgaatagaaagcatggaatgggcacaatggtttacgccaacgatgatacttacgaaggtttatggaatgagggcttgccagatggatttggtaaatatacatgggttgatggcaacatctacattggactttggaaatctggtaaaatgaatggcagaggagtgatgcaatggacaaatggcgatactcttgactgtaattggcttaatggactggc

SEQ ID NO: 186750 - DNA, 315 bp, Zea Mays
caggatctcaaccaggcaagaagaagacactgggtcttcccagttttgctgaactgattcatgaaaaccatccaacttcgaccagaaactctcaaaatgtaatctttgtttgccagtatttctaaccttgagtcccaaaattaatgggcagtggtcagacactccagcagtagcactctgaagaacagcatcagggaaaacttcttcccaatccgttgtgcaaaaggcacggtccaaccggacaagagtgggattttccctctcattagaccacgtgaatttaggaatctctttaagttccagatcatctagaac

SEQ ID NO: 186751 - DNA, 1101 bp, Zea Mays
ccagtatgggcatctactgcactgaaaggatcatcaaagaggtaaatatctgcatcttcatacactgaccttgcaatctgaattcgctgtttctgtccaccactcatgttaattcctctttcaccaatctcagtcaaatcaccatttgcaaacaactcaaaatcttttgtcaatgcacatgcttgtatgatgttttcatatttttccttgtcatgtgtgtttccaaacagaatgttttcccttatgttcccagacaggatccaggcagtttgaggaacatatgctttgcggccactgaccctgacagtcccatctagctttggcatctccccgagtatgcatgataatagactggatttgccagaaccaacgattccacagatagccactttcatccctctctttacctttaactctacatctgttagagttggagaagtcgtctcaagttcccagctgaatattccatgatcaatctccacatcatagtctgtgtcatttcttggtacttgtgtaaccgcatcacatttcaattcttcttcctcaaggtattttgccactctgtcagctgaaacttttccctgagcaaacactgaaagtaagtcaggaagtgtgaaaattggatcttgtagcatgcggaatgtcgcaagagctgacaaaacagttccagctgtcagaggaatccccataagtatacatgagccaaatgttatggaggaaatgaatgcaggtgacccccaaaatatgaacgttgttagagccgacaacctcaccgatctccatagccagttgtactcctcgcctcgtaaactttctagcttctgaaggtacttcatatcccacgcttgaagtttcagtattttcatgcttctaagaacttccgttgttgccttcattctgttgtctttggcaaccatgattttggcttgcaacctcttttgcattctggttagtggaatattgcaagccattattgctaatgtcgctgctaaaccagcccaggccccgacccctaagtttgtatggagcacataaacagctagagaaagttgaatgggtagcatccagatatagtttgtataccatataacatcagttatc

SEQ ID NO: 186752 - DNA, 368 bp, Zea Mays
aacaagtcaactttagacacatctgctaggcccgatgtaaatgctgtacagagttccaatcagacggtgaaaaaccatgacacaaaaccagtggcagttcaagccgcgacaggtaaccctgttatgggtcatcgtgctacaccaggcgtggcatttgctccaccaaaacctactttcatcaatcacaatgagatagcaaagaatgttctacaatttcttcaccaacctgcaaaccatcctagctggactccaccatcaactgagtacatgcattctcgtttgtgctgtcaaatatgcaaagttgatatcattggtacagacaatttacttgtttgtgatgcttgcgagaggggagtacacttgaaatg

SEQ ID NO: 186753 - DNA, 479 bp, Zea Mays
tgaagagaggacattgcagctgaagtctttgcataataactttggctgtcttcaaacagcaggcggtgagctttatcaggagatcaagatgatgaacaagaggcttggagacatagaaatggagaacaagtaccttggcaaagaactaagtagaactatgagtgtttatggtggatctattgtgcaaacagcaacaggaaaaggaaatccagggcgaagagatgccaaccttctgaattcaaacaggaaaatccaacaagattgtcatgtaaatctggaggtggaacaagaggaagtttgcaatgctgattttcaggagtcaaatgaaacactacaggatgaggtccgtaagttaaggagcgaagtggaaatgcttaggagcaaggagaaggctgtgttcaacatcaaatcctgtgatgaagagatcatgaaattgctggctaacatgcaaatggctatcatgaatgcagctctgttca

SEQ ID NO: 186754 - DNA, 448 bp, Zea Mays
aaggacaatttatcgggcacttagcacaacacgcgttgccgagtgccactctcagcgaaaaatgacaattggcacagaccccatttgtcgagcggcaaacaatcggcaaaggagtctttgcccagagtcaagctcttagcgaaatgtgaccctcgacaaaggggcgttagcagccatctatagttggcagtcattaactatgccgagtatcaggagttaacactcgacaaaataacttctttgccaaatatcctctgtaagacacttgccaaaataacttttttgtcgaatatcttctgtaagatactcaaactcaacaaattaattattcgctctttctttgacactcgacaaaacatattttttcttttttcaccaaacttttttatactatgttcctacacttagacctacatgttccattttgacacaattatcaaagtgcttg

SEQ ID NO: 186755 - DNA, 337 bp, Zea Mays
tcgaggccacaaccgactcaactcgagtggcgtgacttcaagctgggacgccatgatctcggtcatactcctcctggcgccatatctcgctttcgtgccatcggtcgcacgaagcattgatggagctctgcgtgtctcgttggctattgatggcttggtgtagttcactcggggggatgagcgatggacagaaggtgattagctgctcgagtaagcagcccctggtagccttctgcgtccagagttcgtgggaggccatcagctatttgggctagcacccctccaacttcacttggcatgttcattgcgcaagcgaagtcggggtacaagtttggag

SEQ ID NO: 186756 - DNA, 343 bp, Zea Mays
gtcaagtacaacctcgccccactgttcaatttagcaactagtatcattaaggcttttcactgatgcagttcagatagttacttgtgaattgccggaacagctagtcacttccgccttctttcctccaatttatcaaaattgcgtatcaaaatcgcgcgtcagttggtacaaactttaggctcttgaccggaacagctgcacggccacttagcttcaaaatacattgcatttgcaccggtgctaattcgtgattggttgtcggttcatctttagtctagctcggagctaagattaaggcccctttcacccctttgcatgttgatcacgaaccccaaggttttgg

SEQ ID NO: 186757 - DNA, 1404 bp, Zea Mays
tgtcagtcatgcaaagagccatcagaatcacatattaggcgttatactcaccagcatggtagcttaacaattagtgttcggaggcttcaatctcgaaagttgcctggtgagcgtgacggaaggatatggatgtggcacaggtgcctcaagtgcaaacctaaggatggtgttccacctgccacacggaggataatcatgtcagatgctgcctggggtctgtcgcttgggaaattcctagagctaagtttctcaaaccatgcttctgccaaccgagttgcaagctgtggacattcactccagagggactgccttcgtttttatgggtacgtgtctgctatattctttacagtatcatattgttctgtgctccagtgagatctcaacaattcaaatacaactccaggtatggaaacatggtggcattcttcagatattctcctgttgacattctctcagttaaccttcctccaccagtactggacttcaattgttgtagtacacaagagtggctaaaaagggtggcagttgaggtgtgctcttttgttaaatttgaagctatgttcatcctctgcatcctacacatcagttttagcatgaacatcatgtgctcatgtatttctttctatagatatttggcaaaatggaatccttgcatgtggaggtgtctgaatttcttcactgtactgaaaagaacattgtaactgaggatgaacctgtgagggaatgtgttcaaaggcagattatcgagatgaaggattggcttaaaatgcaaagaaatgaatatgaggtggtacattcagactttcctggcattttttaacctttcctgccatatcattaactttttatcaagagttacaatgattttatattgatttattgccccttttcttgcagatgttgcttttaccagtcatgagggaaagcaatcaccccatgcagacatcaattgatattctggagctcaaccgcttgcggcgtggtcttcttcttgatgcttacatttgggatcggaggctatgccatatagactcggttcttaatacacatggccatatttcaaaaaccaatccagataatcttgatattctcctatgcaccagactgaaggagtggaaagctgatttgctttgtggggatactgagattgaaaaatctttagggagtccaaagaaatctttgttatccagagagggccatttgaatgataatgagtacagtgttgctgatacaaatttagagatttgtttggagggtcatcctgtggatgatgcagatgatcttgacaaagtctacaacaaattcagtggagtaaagaagcggcctactgctgaacctactgatggcttggaacctgttgagaggttaccctcacttgcatccattttctctgatactattgat

SEQ ID NO: 186758 - DNA, 828 bp, Zea Mays
tctatcgatatatacaatgaaataggcaccaagcacacatacagcatcaggcttgtaagaaaatggcagaatgctgcaaacgatgcattgtttggatcaaagaatatatttgcttgatccggcctgaggtaccatgcatagcttcctggacttatctcatgctttgttctcattccaaacacaattgacccaaacgttgcaataacaaagagaatcacaaaaaggagatatattattttatccattcttcgttcaactgaactcctctttgatggtggctccattgcattttgcatcacctttgtatcatgtcccgtaaatattatggtgccatatatatacattgtattacgaagttttgaatcccttagcaggacctgttccggagacagagaatattgttgcccattgtagtatagtgttcctaagaaagaatacaatttctcattcggatcctcacaccgaatgaaagccttgaaactatggaaatggtcatcattcaagcccatagtcacctctaatgcctgtttccgcttcaagtttgtctcaccatcaagattcatcgtctccacatagcataatccatcacaagagctagacgaaaggaaaataagatcagcagggaagaactcatcctttttaactttaattatatcgccaactcgaagcttcttccattctgtctcatgaaatgattggatcccatcatacacctcaaccttcctattgttcacttctatgtcctatgtaaaagaagggcaaacaaattcagttcagtaaatattaaacaaaataatgtgtatatattgctgggaaattacttcaaca

SEQ ID NO: 186759 - DNA, 313 bp, Zea Mays
gctcaactaagcgtttgacaaagccgattagaaaaggggtcaacacactagtaattttagggccatggtgctacgaagcatagaaatgcaattgtatttgatgaggctaggccttgtgtgcaagttgctcttaggtgctttgaggaggaacgccatctctaatgtttcacaggctgcaagcccttggtcatgggcctggtgtaagctaggtctacatatctggtcgatatgggccatgtcttctattaagaacctaatgtgggcacctggtactaccacgacttcaccctccgcgctgacacactaggcccgc

SEQ ID NO: 186760 - DNA, 504 bp, Zea Mays
cttcgctactccgacccagtacacccctctactgtgtcactttacccaccctgtcgggctggttcagcatcaactcggtccgccactgcatcagctcaggactccgtagcagccccctgcagttcctacctccccgactgcgccatggactccatggactagatcctgggatcaccagtctctcgccaacaacttcagcaccatgaccctcagtcctcctggcatcacagattgggtcatggattctggtgcttctagtcacatgactcccgacagtggtaacatctctatttcgtcctccgcgctccacttccatcatggttggaaacggatccactttacctatcacaacttctggccactccattatactgggtcccttttatcttaataacattcttgttgccctcgatattgtttaaaacctcatttcagttcgtcagctgtcaaatttgaccctcttggcctttctgtgaaggatcttcattccaggagcgtgatcgc

SEQ ID NO: 186761 - DNA, 859 bp, Zea Mays
cagctggacgtgaagaacgccttccttcacggtcaccttgaggagacagtctactgtcagcagccgcctggcttcgtcgatccagcggctcctgaccatgtttgtcttcttcagcgctccctctacggcctgaagcaggcaccgcgagcttggtaccagcggttcgcctcgtacattcgtcaactcgggttcactgcttccgtctccgacgtctcactctttgtgtacaaagagggtggggacatggcctacttgctgttgtacgtcgacgacatcatcctcaccgcctcttcgtcaactcttctccagcgcatcatcgacaggctccactccgagttcgccatgacagatcttggggatctccaccacttcctcaacatctccgtcgagcgcctccccaccgggatcttcctgtcccagcgacagtacgccgtcgaccttcttcagcgtgcaggcatggccgagtgtcactccacgacgacccctgtcgacactcatgccaagctctccgcgactgctggtgctccagtcgccgacccttccatgtacaggagcatcgtcggtgctctccagtacatcacgctgactcgacctgatttggcatacgcggttcagcaggtgtgccttttcatgcatgacccgcgcgagccacatctggccttgctcaaacggatcttgcgctacttgaagggcacgctttcctccggtcttcacctgggcgtcggccacatccagtctctcaccgcttactcggatgcggactgggctgggtgtcctgactcccgtcgctccacttcgggctactgcgtctacctcggcgataacctcatctcttggtcctccaagagacagactaccg

SEQ ID NO: 186762 - DNA, 500 bp, Zea Mays
ctaaggacagcgagttcatttcaccaaagtacaggggttcttttacaagtttctcgtgactgaaggggtatccggttaccagggctaatggatcgtgcatccacgactaggattagatctcgaccatctccaagcggtacgctaggatagccctcagatcaagatttgaccaccaggatttatgagatctaaaccgcccacaaccctccaatcaacaatctacgattgagaagccccctgaccgaatcggtatacatgacacgatcacagtcgtcggcggctggatcaatgacccagattttaaacatcgccaatctgatctcatccctcaaacccgcgatccatgattcggatcaatctggccaaaccggtacgcggtgcttaagcacaaccatcagtttcagatcgacggcccctgctgccttccctccttcctcacgacgaaacacggcggcggtgccacttgcccgcggcggcgccctcaccagcaacggccaccc

SEQ ID NO: 186763 - DNA, 831 bp, Zea Mays
ctcagatgttgttttcagagcaacaaatggaaaatggcgtgctgttcttgttgagatatcaagaatgaataaagttggccgtcctgtgcttgttggtaccaccagtgttgagcaaagcgaatctttatcaaagcaattgcgtgaagctgggattcctcacgaggtattcctgttagtttttcattaacactagtaaatgctccttttttccactcaggaattctgttatttgtgctcagtgctcacatagaaaaaatgttgatacttgaacataatcctgttctagtgtgaaatggttgtgtattataatgtagatattttttatgtacataaggcaacacaacagaattaactcagagtaacatttgtctcatgtacaaatttccgtcttctttgactccacagatagttcattattattaccattcagcgcgctactctgttctgcatttgtaactatgtaatttatttttatggctgcttgaagctacatcattttagctgagggtaacttaactttgtgcccatcaaatctttgacttatgtttttgaataaattagtttttcattctttcatagaaaggaaccaatggcaattaatgaaaaataaactgtttttgaaaggaatctagctgcgacctactaacatgtttgaaagttgctacaccagtttctcatttcttaaggtgccaaaactttctaaatcttattgtaatttctattgaaggtcctgaatgctaagccagagaatgttgagagggaggcagagatcgtagctcagagtggacgccttggtgctgtgacaattgctaccaatatggcgggacgtgg

SEQ ID NO: 186764 - DNA, 347 bp, Zea Mays
caaagttgttaaaaggcgttttcattttgaatctttttggaatgaggtggtgcacaatgcttggaattctgtccctgttggccaatgtccatactccactcttgatttaaaattcaaggggacagctagggcccttcaaggttggagcagcaagaaggtggggcacattgaggctcagctgcaacttgctacagaaatgatccattagcttgagattgcgcaggatggttgtattctttctgcagccaagaggtggctgttgagcaatttgaagaaacattctctggctttggcctcaaccaagcgaaccattgcacgccttagatcaaggatttcgtggctcaagg

SEQ ID NO: 186765 - DNA, 651 bp, Zea Mays
aattaaggaggttgatgtgggagtggtggcaatatttgacggtcataatggagctgaggctagtgagatggcttctaagctttttctggattacttcttgctccatgtttattttcttctcgatggcatacactctctgcggttcagaaaatctactgggaaactgacatatagggaagttactatttttaacaatgtatttaatctgtacaagcatggccaatccgaccatgcagagaggtatgtcttcctgttcagtttttatacgccatttttcgttcatatgttgcttaattgttcatgtgttacaactttctcactgataaaaaatgcaggtcatgttgggcatcaccagccattctagaccggtcatttcatacggaaattctgaaggaatcactaatgagggcagttcatgatattgatttaacattctccaaggagggtttcatgtttcacctgtataattaaattttgtaacattatattcatacgtcaaaaaatgattcttctttgtgttcaatgcaggaagcattacagaacaattttgaatctggttcaacagcgaccgtggtcttgatagctgatggacaaattatatctgccaatgttggagattcaaaagcttttctgtgctccgaaggatataat

SEQ ID NO: 186766 - DNA, 382 bp, Zea Mays
ctgcatatgagcatttccttgctggtgcagtatcctttgagccagccaataggatctggaagagctgggttccacctcggtgtaaatgttttatttggttggcctccctcaatagatgttggactgctgatcgtcttgcacagtcttgcacaacgaggcatggatcacccagagatgtctgctatgcgaccaggaacaggaaacagttcagcacattcttgtatcttgtgtatttgctagggaaatttgattccggattctgagtaaagtgggtttgcagcatctggcgtctacagttaatgataaggtgttccaagattggtggagatatgcagaaaattcacagaaaaggttttaactccactgtcatcttggtgacctg

SEQ ID NO: 186767 - DNA, 351 bp, Zea Mays
atcaagctcctccggctgctgacagaggctcggttcattggcgaggatccgcgcttggtgttggcgttggtactcctcttagttgggggttccccgtcctttcaaccattctcattttgtggtggtgttgccatgaagtaggcccttcctaccgccttagtggtgtcagagttgggctcctcagttgagtcgtggttcgagttatcctcgagaaggttggggacaaaagttggctagtggctgatgatagccatgaacgttgagggtgaggcttcctccaccttttgcttgatggcgatggtgagccggttatggtgctacttgagggtggcggcacgcctcttgaggtgc

SEQ ID NO: 186768 - DNA, 277 bp, Zea Mays
aagatacatatgtatgaatataatgaaagtagcacaacagtagcacaagatatacaaagacacagtggcgaactaaacattaaattggaagacaccgtagacaaccacacgttagttttagttatctacacatcatcggacatacgtagtcactaccactggaaagatgacgacacttactatacttaaccaatgcaaacatgacctcacaagcatgagcatttatttagtttgctacgacttttcattagttcttctattaatcacacaaaagcat

SEQ ID NO: 186769 - DNA, 320 bp, Zea Mays
tgtcatgggatggatacctcgtgtgcatcgagggaggcttctcgcgacgcttcaaggcgggagcaggggagtctgcctttaaagaggggttcatccctcgagtagcagccatgccttgcttctctcccactcgcggcgtcctttcgcctccaagctctctgtgcccctttgccttcaaggtctctgcttcgcgttgccatagtttgtcatggccttgtgacttcatcccgagcgcgcccagactgagtgagtgctcgaaatggtataccgcctgcttggatggaatgtgccagcgctcggcggaaggatttgcaccggcg

SEQ ID NO: 186770 - DNA, 465 bp, Zea Mays
cgacgttctcgtagcacctcacatcacttataatcttctttctgttcgtcggttcaccaccgacaattcttgttccattgagtatgaccctctaggttttctgtgaaggatctggccactaggacccctcttgcccgctgtgacagctcggggcccctctacaccttcggccttcatccaccggtgcgtctccattgtccgtcctggtctccaccacctcctccatcacttggcatcgtcgtcttggccatccaggacccgacgtcatgggcaaactcaccagtagcttagatttttaatgtagtaggggacattttgaggatctctgtcatacttgtcagctaggccgacatactcgtctcccattcactacttctagagctgagcaagtttttgatttggttcattgtgatctctggacctctcctgtacttagtttgtctgaatataaatactatctgatga

SEQ ID NO: 186771 - DNA, 298 bp, Zea Mays
gaaaaatgagaagtcccatcataacacgacttgggaaaagatgcatgtcaaaaatagaaatggcacatgtactaaaatcacagaatagcagacatagatatgtaggtacaaaatacatcatgcattcatgttaaacaaaacattaatggtaacatcagcataaaaataagatcttcgaccttacaattcagacgtccgggtgtctgcatcagattgtatactggatgatttagtagccagtgaagagttgcttgctgtatcccccacattgttcactgaatccactacaatagtctca

SEQ ID NO: 186772 - DNA, 998 bp, Zea Mays
ttccaggagccaaaggtcttcctttcatggcaggactgctatcttgtgaagcatggcggctaacatcccatgtccccttgttaaacctatcattgctatatttttcaggtggtaaacttcttttgtgctctgataaagaacctattgacgatgctatgtcagctttgacctttttagcactctcaggctttgctgtagagttctcgctgccagaagacctttttaatttaggtttagcaatactcactgggccaaattttgattcatcctttgatgttgattttctcttgttgacatgctgcactgtcaattgaccagcttcccccttgggtgagttttcactggctattctcatggagtcatcaaaaaggttgtccagaaaagacatttcattatatttggtatcaactccaatagaatccattctggtgctcgtcatgttcttgcttcctgacatttcagatggcttactaaggttgccggcactaaagccctctgctgctgcatcatcattaccggtattaaacttattcagaccaatatgaggtgatgtactcctgtagtcaagatttgtttcaatgtcaatttgttcatcatcaacatcgagtcttttcaaatctcttggcgatgaagacaaattaaggtcatccactacttttgtgtgtgctatatttgctttgtcatcatcactcgtaatatcaacagctgcatcagatccttccttgctgcttgatgagccatcactgtcactattgctgctgcttccactaccagtttctgcagcacttctgctttggctcccactatcacttccactgttactgctgtcactatcgctatcgcttccactgtcactggaagttccagccttaccttcactgtcattactgagttttccatcagttggagcaactagggagcccacaatgtcaatcctctcacatatatcaggatcatcaatcgtcaggcttggagccgattcctcaattttcttactg

SEQ ID NO: 186773 - DNA, 511 bp, Zea Mays
gaagatcccggggatagcaaccacccgtcacccgctattccaagttcactgccgattcgatctctgggaaggcgctcagagcaacatggttagaccgtgggggtgcgttgaagactcacagcgcctggggcgtcctctcgacgtctgaatcgctcgtcggagtcggggtcttgcggcgtaccgccttgtcgcgttgccgacctcgtccgcggcacaatctgctggtaagatgccttccaatctagtcgtattgattccccgtacccatagccgttgtcaggttcgctggtagctgcgtcgtagggctgggggcggtagttcgtcgccatcgccgccgcgggtaccaggcacgccaccaccgcgggagagttggggaggctgacacagtgtgaccgtcggatcattatcgacggacacgattaaactttggacgttagcttccagggcaatcgtggaccattgattttggatctgtccgccttgggcgctcggggggtatgatgaatgtggg

SEQ ID NO: 186774 - DNA, 1114 bp, Zea Mays
ccaccatgaaggggaaggtctattcgccaaagacgacatggcgggagatgatgacatgacgagtggcaaggtcgaggcaacgatattcttcgtgagatgaaggatagctgatgaagaaagtcttggatctagaagcaagtttattaggggaagtggcaaagatgttagagagcacgggcaaccaaaaactctaagatgtgtgaggtttggttgcgtgcgatggggaatctcaaagggtatgtgattgtggatggtggaggggcacctattgaggaggtaggtggcggttgctaggcctcgaccgaactatggggcggcatggaggcatgaaggagaaaggtgcagatggagttaagtgcgcagagtatgcgtttagcttcgccattctgagcgatggtgtaatggcaggataatcgtaatagggtgccatgagaagcaaggaaggagttggtggcattgatgcattttaccaaattctctactattatcagcctgagaacacttgatggccgagttgaactgggtacaaatgaactgaaagaagttagtgattagctattgcacttcagacttgtgttgcatggaaacgtccaagaaaaatgagtaaaatcatctagaatgacaagatagtaaagacaacccgaaatactaggaactggagaagtccatacttcacaatggaggagctcgaagggatgggaagtgcatgagttcgaaatagcaaaaggtaaccacatacgttcactaggttggcaggagcactattcgcctaaatggttttctagcttgtttaaacacccatgcaaacgctacacagtggtatgtcattttagtttaatcggacgtttaccctgtttaattggctgtgtaacacttttaatggtctgtttagcctgattaatggctaaacggtaggtgatcgactgttcattgtttaacatttaggataactttggacatgaatggcaaatagagcaatgtattttattacaagagttgactctgatattctgtagggtagctaaggtagctggtgcggggtgaccaagacgctggtgccacaacggaggggacgatgaggtgggcatgagcaactacagtgataggaaaggtg

SEQ ID NO: 186775 - DNA, 465 bp, Zea Mays
atgaaggtacataatggaaatggggagaagagcaggccatgaatgatgatttctatatagagttcatggaatcaggaggggttgggacacagcagcagatggatgctccactgtctggtccaacggcaagtccgcagtgcagaggaggcactggaacattccctgcagcatcaccacctgcacaccatcagaattcaggaagtccttcacattcagctccaccgggtggaactcacgggatgtctggttcagggtcaggtaactcagtctcatcaccagcatcgccggaacgattcacatccccatcaccgccacaaattgcagaagaggacctcgacacagaccatggttcagaggtaccacttcggtttcgccgtctaaccaatatacttgggcctaccgaagtaccaggtctggtagaaagggagctccatgaagaactcttattagttgagaatgaagaac

SEQ ID NO: 186776 - DNA, 578 bp, Zea Mays
ggaagtatatcggaggaagagagatcatcctttactaccaagcaggctagtcttgaaaatgaaatcaaacaattgaaacagcagctcagcaataattctgagaaagaaactgaaattaggaggaggctagaaggtatgcttgatctaagtccaaactgttagatcttaaacagttagcagcctatattaaaattcagtgagctttatttttctaaattttctgtttccacattttagatgaaaccaagcggagtgaatttcttcagcagcaactaaatgagctcaagatggacaaagagagggtaagtttttctacctatgtaggacattcctgtgtatcttgatccactgtcatcaacatgtttaaggtaatagatttgactctatgggtgtgaaaattatttcttatgtacttctgcagatgacaactagcatggaagagctacaaaaggaactgagtgagaagaaatcagagtttagacgtgttcaggatgagcaaagcaaaagggacaaggagcacgtctcggacggatctcttcagagcctaagaaatatgttgatggctttacagaaggaga

SEQ ID NO: 186777 - DNA, 479 bp, Zea Mays
gctcgatctccagtgataaggaaatgcatattaatttttgtgtttactaactgccactatgtttaattcagcaatactagtattgtgaactgtttgctttataatgctactggtgaatatataagagtattgcttgttcattaaaatatataagagtagtgctttttctctgccttttattgtgtttcctgtaatcagtcatatataagagtagctgctactggcatgttctcctgtttttctttcagcaggagaccctgtgtcgatggtccagatttgtagctactacgacgacgtgattcagacatggactaggcttagtgaacatgccaggccttcaagtccaagttggcagttaaaaattcccctgcatagagtaggctcagtcgtgcgtgaaccttggttaccttgcagtggttgttttgtgccactgcatgtcagtcacgccatgaaccttggttgttttgtgccactgcata

SEQ ID NO: 186778 - DNA, 430 bp, Zea Mays
gccacagtcaccttcgttttcttgccaaagttgttaggctcttcatcagctcatctagttgtgcagacaaattttggcggatttattatacatgcaaagggcatggctgtcagttcaccctatcagatactgccattgacagggatagatgttcttataggtggacagctagagaggaacttatcgatatacaacccatatgacgatactctctatgttgaggaagtgtctgtttggatgtcttcattggagagcacaaggtattcttctcaccttgtctgccagctgggcccctttgatggagcattggagctatcctcttcacgtagcaactggtatacagcaagcagtgaagaatttagatggccagtggtcaatatcaggcctagtgaacaatgggaggtgcttccttcaaagaggaacactgtga

SEQ ID NO: 186779 - DNA, 387 bp, Zea Mays
aaacaatccattctcattcctcgttctcaaacaagtaagggtacaacaattaacttgttcttcggcgtgcagctgctgctaggatgaggtgcttccgcatctgctcagtctggtagttggacaggaacttcatgcacataggcggctccaccttgaagatggccagcagcgaagacggcagcgcccagagcccatcgccacagatcaaaccagacgccaccacgaccgacagcaggttcgctgcctgcttgttccttctcctccacaggatgactaggaggctccccaggcacatgtctatggcgaaggtcggccccacaaagaaggggatggccatggccatgatgtttgggacgtagcccttgatcctccagccgttggccgcgg

SEQ ID NO: 186780 - DNA, 705 bp, Zea Mays
gggtcgtgtgaaggtcaaatactgtagggcaccggcaagactgcggtaatctgacgggtcagtgactggagcgccagagtcggcagagatcttgggactggtgtcaacgggcgtggtacaaggtttgcattccgccatgccagcacggtccaagatgtccaacatatactgccgctgagagagaaccataccatcagaagtgcgctggacctgcatccccaagaagtgatgaagtgctcccaaatccttcatagcaaattcccgctggagagctaggatgaccttccgcagtagatgtgtcgaagaggcagtgagaacaatatcatcgacgtaaagtagtagataggcagtgtctgaaccttggtggaagacgaaacgaagtgtctgacttggcttctacgaagttcagggagaccaggtatgtggcgaagcggctgtaccaagcacgaggagcctgttttaacccatatagtgacttgttcagacggcagacaaagtccgggtgagcagggtcctcgaatccggagggttgagcagcgaacactgtctctgtcagggtgccgtgtaggaatgcattcttgacgtcgagctggtgaacaggccattgacgggagagcgccagagagagtactgtgcgaacagttgcaggcttgacgacgggactgaaggtttcggcgaagtcaatgccagggcgctgggtgaagc

SEQ ID NO: 186781 - DNA, 320 bp, Zea Mays
tttgtggcaatcaaaaaaggtttttgtaaagttccttttttcccccaaactagcttaactcatcattagcccagcactctaattccattctatcaaagtagcaagtagctagatcttgcactggctgatgagctgtgttctggcattggctggaagaggctgtgagttggagttcacttttggttggttttgctgctccacaactcataatatctcccagccaataggttacaccatggactaggctggaatggggcctctgctgtgtcgtcgcctactattccttagctgtttctctttgtgacagctgtgccactgag

SEQ ID NO: 186782 - DNA, 380 bp, Zea Mays
gcgggatacacgcagcatccacgaccctggttgggaaggtcttcaggtcgggtttctactggccaacagcaaagagtgatgcagccgagttagtccagaggtgcgaagcctgccagtacttatcaaaacagcagcatttacctgcacagcaactgcaaaccatacatgtaacctggtcgttcgcatgctggggactggatatgattggacccttcaagaaagctcaaggaggatacactcatgtactggttgctatcgacaaattcactaaatggatagagttcaaacccattgcctctctaacttcagctaaggcagtggaattcatacaagacataatattcaggtttggaataccaaatagcactataaccgacctg

SEQ ID NO: 186783 - DNA, 718 bp, Zea Mays
cagggctcaacgccagccgggagggaggtggctactagaatcgggtgtgggcggcgcgtgtagacgatggcctttggggccgcacctggtgtgggagcagggcatcatgtcgcgtggggatggaagttgggtgggaccaagggtgctaggggcgtgcactacgctagagcctaggctgcttggggctagaaccctggtagtcctaggggcacaggcattaggggtgtcgacagagatgtacctgcaaagggtggggtcctaatggtggaaaacagagaacctgacaaataaaaaaatcaagattatttgaatgagccgaggtagagaaggggaaatctatctcatcgaagacaacatggcttgaggcaataatgcggttggaagagagttaaagacaccgatatgccttatggttagaagagtatccgatgaagacaccgagtggaacgccacatgaaggttgggatagcaggcgcagccgaaaacttggaggtgtttgtagaaagggggagtaccgattagggcaaaacgggggcaggaggcactgatggtctttgtggggagatgattcatcaagcatgtcgtggtgtggaggccttctacccagtagcgtgttggagtagaagtttggaaaagcagagagtgaacaacattattagtagaacgaataatatgcttagctttaccattcttctgaggtgtaggggcgcaacatgtg

SEQ ID NO: 186784 - DNA, 410 bp, Zea Mays
ccgtacctcgaggaaggtaggaaaggtcgcccgcaccgaaggtgaaggacgatgttggcgaagcgctcgttcagaccgcgaatgacgttgaggacaagggtgcggtcatgaacgggttcgctaaggtcatcgagagcgtcagccatccctttaaacttgcggcagtagttggtgatggagagatcgcctaggcaaaagttgcggaattccgcgtcgaggaagagtgcccgagtctcacggttcccgaggaactgagacacaattgcaagccaggcggtacgggcagtagcgtcacggatgaggacagcatcagcgaggtcaatggtgatggtgctgacaatccacgacttgaagatgcagtccattcgaacctagtcaggagaagtaggcgcgaaggtgtcggtgagtac

SEQ ID NO: 186785 - DNA, 599 bp, Zea Mays
cggcattatgctaggcgccagatttagtttgttaagaagtgctaaaagttaggcaataattaaggaggcttatcctcccgggagagttatcttatcccctagaaaatctgtaatatggttaggcacctaagctataaaggtggacttagattgtactaggagaccatcaaagaagttgtacctgtgggtgcggctgcttgatcaccctggcaagccctacaccatctggtgatctcagctcccagccgccacacagagtaccctattccctgcgttcttctactcaatccaccttgatatcccacccttcgtggtgcactcctccccgccctgcgcatcgcagccgggttcacaacaatttggtatcagattccaaagctgcagctacatccatgtctggcagcaacgaagatcctgggaagatgactgactccgagaagctggaccgtattctgggacagttggccacaatgaacaaccgcctggacgcccacgctcaacggctcgctctcctggaacaggaacctgttcagccgacaggatcgcggctagcgccgcctctggccgcgactaccctgtccacgggtcctgccctggag

SEQ ID NO: 186786 - DNA, 552 bp, Zea Mays
caacggtccatgagcgatcattttatgttgcccatccttggtgatctcgttgttcctttataacttctatcgataatgaattcttacttcaaccattctattgcaccctcacctatcttacccttgattgttttctccacttcgccacttcacgagtcttgccttaactttatccttcgtcatgccttttgttataatcaccttcaccttagacacctctatatcttatttgatgtttgtctcatgcctgtcctttaaaatcacctctcttccgtctcattctgagagctatactttacctatctttaccttggtcgtatcctcttctttggcttgcgagtttgtaacttcgtcctttgttgtgcttttgtttgttattgcctccacctttctctcttgatcttgccttggtaattactccatgcccgttatctaaaacctccaatctcccaccttagttcaagcgtggtctcttacttatctcacccgtggttatatcttatactttaccacttgcaagacttatcttaactctattcttggttgtaccta

SEQ ID NO: 186787 - DNA, 456 bp, Zea Mays
cgctggttaaaaaaagaggctccggatagtcattcatcaatggattctaacactatctgaatgacaacgtcatcaagaaggtcctccaccatcagatcctccatgtccaacgcggtgcactccgcgtcatataccaggttcatccagccgtcctttctcataaggtcatgtgccacaatgtcctccaccgtctggccttccttccaatgcaggctcaggtagcagctcaccttcgcccacacctcctcaaggacatggtaccccatgggaatgggtctggttcgcaggtcgaagcgtgagtgccatgggccgatgacgagtgaggagtcatagatgtccagcaggacctcgttgatgagatcaaacaggagcatgcgcctgacgatgctgtgaggttcatcgcttgccatgctgacctcctgacacgagcattctgcctcgtcaaagaccacaggg

SEQ ID NO: 186788 - DNA, 658 bp, Zea Mays
ttagaaggtgctagacagagaccgattttttaaggttgacagcctaattatgaggcatacaattttttggctctcctgtatgacatttcatggaaacaataattttctctgtatcgatgtttgaaagaccgtaactatttgttgataagctctagatggtgttggttgacctcttactgatgctattttattttagaatatttttttgtggaagtggaagggttctagcagggattctcttcccttcagccgaaaatcaacaaggatctattcagggtggaactaactgacatcgaggtttgctcgagctccctcagcacatagctgaacaaggtcccgatgaccgctgttatctgcgtacactggtccaaatcatctgcactgaccagaagaggctcagctacgacacttgaggacgatgacagtgaactgaatatattttcacaattagtctagatttatggatgtgtgccttcattaatggtgacagtagtactcatgtggctccattgctcattgagatatggtggcatgttgaattgttgaccccccctacgttgtatcacatattcacatctactagcactggtagttatgaactaggacaacaactctttttatttttcgtattagccttctttgaaatgatcatgcgaat

SEQ ID NO: 186789 - DNA, 500 bp, Zea Mays
tgcagactttgagagagcaccagttctatctgaagaggagtaaatgtgtgtttgggaggaatgagctcatttatttgggacatattatctctcacacaggagtggccactgatcctgctaagacaacagccatggagaaatggcctgttcctcagtcagtaactgagttgagggggtttttgggtctcactgggtactataggagatttgtgagacattatgggattattgcaaaacctcttactaatctgttgaagcataaggcttttcagtggagtcctgaggctgatcaggcttttcaagcgctgaagaaggctatgcttactactcctgtgttggccctacccaggtttgatgagttatttgttgtggagactgatgcttgtgatgatgggataggtgctgttttgatgcaatgtgatagaccagtggcatatctaagtaaagcattgggtgctaagaataagatgctatccatttatgaaaaagagtttttggct

SEQ ID NO: 186790 - DNA, 1571 bp, Zea Mays
ttctgtcatttacttgtcatcttgtttttgaacttgtactgaaatactgaatatccagaatggtcattttcctgatgtgcagatttatatttggaaatactgaaatacatgatgagctgtaatcgatgcttgcatttatttttgccacctgtaggattgctccaatagacactccaaagttgggcagtattgtctctggtgttgtggaacggcttactcctgcagctgttgttgttagtgtaaatggcttctccaaggggacaatactgaatgaacatttggcagaccatcatggtatattctcatctgttatatgatttgcgttgcatttaaacattgcatcgatagttttcccgtgtgggttcacacgcatattccttgttgctgttaaatactttaattgtttatattcatataacattactgctctgctgaccatggtctgttttttcaccactaggtcaagctgctcagttgaagaatgtgttgaaacctgggcacgagttcaaccaactcttagttctcggtgaagtcaactaacttcatttgttatcaatgcactttgaaaaaaaaacagaacaaccctttttctgttaataaacatttgacgcattggacatttttacacagttatgttgtaaaaattatagcaaaaaatgaatctaaagtcactacgtcatgaccagtacttttttttgaactgatggaggatcaagcatacactgtctgaagtgttgtatatctagagggagtaccatactaccacgtaacagtttatgaaaggatgtgcagaatttcacaatggcaagtaggaagttcgctgttttgcatgcacacttgtagcgtgtcatggtctgtacattacctcacgatacaatcagttgtttgcactgcttaatgatgatgcaccttttgttgttgtcagatggatatttgatcacattgctaatttttccaactgattttctaataccggtctgcagatactgaaggtcaaaatttagttctttcggcaaagcactcacttataaattgtgcaaatgacattccttcagagatatcacagatgcatcctggtgttgtagttcatgtaatctttctctagttatttttacttagcctaatgtgagcaactgagctgacatttaatttatcttagggttacatctgcaacattattgaagctggttgttttgtccgtttcctcggacatttgactggtttctctcccaaggacaaagtaagattttttcagctccatcattctttttgttgttttgaaaagaatgtctaatttttcttgtttcacaaaggcagttgataggtggatagaaaagctttctgatgcgttctatgttggccagtcagttcggagtcatatactcagcgtatgccataattgttggtatatatttgttgccatcctctattatctgtgttatttagaatcttctttttgttcctccctgttcaggtaaatgcagaaactgctagagtaaaactcgcacttcaacagtcaatgtgctcctcaatggattcttcatttattcagggatactttcttctggatc

SEQ ID NO: 186791 - DNA, 328 bp, Zea Mays
gctcctcctgagctctgtacttggcggcttgtggaaatggcgcgcgtttctgcttcgccaggatgcagtcttcacacacctgatcgacccgatcgatggaggggaggccacggaccatctcctcgcgctcgagcttgcgtagcgcctggaagttcaagtggccgtaacgctcatgctagcgccacgccacgtcgccgacccgcgctgtgaggcataccggggcagcgatgttcatgtcgaggaggtagagccggctgggtgatcgatacaccttagccagcaatcttcgctgcagatcgaagagacgcaggaccccctcctcgatgac

SEQ ID NO: 186792 - DNA, 983 bp, Zea Mays
tgacttcattggtcttttcaaaatttcctcgaaatcagaatggcctgagctgtcttctggaatttctcttctggtatattatttcatggtaagcagctaaccattgattttttcagcatgcacagtgtgacatatggggcaaaataattctgcatagtaatttactggatgactcttaatactcgttgctcatgtttgcttgttctttaatcttgatgctttcatggctactaatttgtcatgttatatactttagtaggattttgtacataacatgtgtgtgtgtgcgtggaaggtgggggggggggtcagactgttataacttactgggatgagctgtccagtacctgaacctggcatactgaggttcataaaatgttcaaatataccttactgaattgttgataacaacatcattgtctccatttccttattgaggacccaattcataattgtgatctctagtcatttatatattaggcagagcgtaaagaaagaatttgaaatggaacaaattgcgcttatgagatcagttgcattgttggctatggtagtaatatatgcaagggcataaaacatctctgaatgtactgtcaggtctcaggtgttacctgaagtatatcatttattattcggtcaagtaaaacagtggtccttatgtttttagatggatatagtggattgatgaattcaccaaactaagctgaagtaataataaattatgcatcaatagtaatatctggtgttgcactcgttctaatttagaattagtggcagccaaattgtcatcacttcaaaaagtaggaagctttactgagttctgacttctcgttatccgaaagatctttaccttctaatactggtgcttgtctgcttactgtagttgtcatcagcgaaacgagacatacaggaaatgggttcacttatatctctagaaaatgatagcttaacagaggaccttctgccttctagaaatgcgtttt

SEQ ID NO: 186793 - DNA, 376 bp, Zea Mays
gttgcctcccagagtgaccgccaccatcatcactccagcgctgggcctttgaacgaccagcaggaaaggagtccagggaggagaggggtctcggctcaggggagggaagtgttgtggccgtcgagcctagagtagacaccagcgtgaggctcttgggggttcgagcgccggggggagggaggcgagagacacatactgatctccacttttatggtagaacttaaatggcataattagagctatacttattggtgagaagctttttataggagatatcaatgtgcatgtatgtacaacaagtgcaggtttcgtggcggttcatagagattttgggtatgatcatagaaatcaggagtgaaaggaagtcttgaacttt

SEQ ID NO: 186794 - DNA, 463 bp, Zea Mays
gagaaggcagatcttccggctgcagcaggggctttctttggaactttgaaagatgatggttcagcaggatctctgccatctttcgcaagctctgcttggagacggtcgactgcaaccgatgctagatgactgggatccgctcccaaactacagcaatcgacagcatgcagcaatgaggcccaaacaacgaaaggatgcgaagataactgagatcatttttcattggggcgagcctatcaatcatatctgtacaactagatgccaaacttcgtttgtgtaatgtggtcgataagtaaatgtcatcgattgcagcggatctggagatcagttgcaatggaaaacaaacaagagaacgtacctccttaggaggttgttggtggttggatcgtcgagggagaagagtgcgatggcgaggtgctcgggcgagacgaagctggagcccatgttcttggagagcacgacg

SEQ ID NO: 186795 - DNA, 557 bp, Zea Mays
taactgctctgttggtgctactcttcctacatcaaatatgaacttaagattaccaggttctcctggtatggttttgggaagcaattcaccattgcctttgaatgctccctctaggtaaatggtctgattatcctctagctgatatgtaaaacattccgtgtttatatttgtttctgcaaaatctcaattgcagggatgttcagaggtatggtgtgcctagaccaacctcgatacagggtgacgagcaatcaagaattcattataaccagatggtaaatggcagaaaccttcagcaacctggagttcctgttcctggtgtgttgccatctggtgttgatcagggtgcccgaatgatgccacctgcccatggtgttggaatcatggctggactaaatcgaggcacaccaattactaggccaggttttccaaggcttggttctcttggaaacatgtcacccaccaatggtcaaggcttaaaaaatactgtaaacgttcatcctggtgccatactgggacctggaagtactatgttgaggccacgtgacccaatgcagatg

SEQ ID NO: 186796 - DNA, 415 bp, Zea Mays
ggtggctggcaagcccttgaacggtctctggctgcgcgtcccaaggatgaattacgcccatccctcaggaatgggctagatctcccacccccagatgcaccaagcccctgagacagtccctgattggcatgtccataggagccattactttgatcaccatcattcacagaatccataggaagaccagactgcgagttggaatcattcggtcggaaggcaacagaaaaactaatagtaattgggtagctcagagccatagtttctccaacattgccctcaacaacctgaacagactcaacaatccacaagtcacgtgaagcaggaatagtagacggatcagtacaccaagcagagcatcgaaagcaggacaaatcttgcagtgccaaggtctcctgatgcacctgatgaatccaag

SEQ ID NO: 186797 - DNA, 393 bp, Zea Mays
cgggattattggaaaccaggtatcacaaaaggtcattagctagcccaataatgtcttcatccactagttgtactctaataccctctagtgtgaatacaatgcccacaatatcatagaaacgtcatttgaggtttaaaaggtgatctattgctttgaattctttatattccaactttttagcaactgtatggtggaaaaaatttgtcttacaaccttaacctatgtttggacagttcactcacgcaatttggctaaattttccatagtctttattttattttgagaaacgatgtggtatattgatgtgtggtgttttacttgagtggacataaacacaatctaaggatgccatgaatagacgggattattggaaacctgttatcacaaaaggtc

SEQ ID NO: 186798 - DNA, 731 bp, Zea Mays
ccttgagaacgaccatgcagatttccagttgacaccacatgatccccattctgtggttggagaagctaatttgccgcagcataatgtcccaagggacagcgatctgagtcctcttggcttactttggtctgagctggaagggcatccaaaacaacctctctcatcaaatgtacttggtgtaaatgaacgtagaaactccaagcctacaacacccaaggacattctacctgtaaacatgagacaagggccacttagcaggatgaatgaagtttctagtgtgcgtgatgagtggcctgcaaactttggacggctggacaatatgaatggccctaacatttctggcagaatccctcaggttgaagctgagcatcatttgaattttgatgggcacctcctgcttcagcagatcagacgggagcaacagcaacatcaacagcgacaggagcaattgatggcccgtagtaatttagagttttctggtgcatttcccgggcaggtgtttgattctttgcaccaacaccgacagcctatgaatcaacagcttcctgatgtagagcatcttttgagagtccagtttgaacttgagcaacagcagcaacaccaactccaacaagagcagcaccaacggcagctacagcagcaacgacaagcccagtttttgcaacgacagcaacagcagcagcagcaacagatgattcttgagcaattgttgcagcagcagctgcagggtt

SEQ ID NO: 186799 - DNA, 792 bp, Zea Mays
ttctggcagcttctatgctactggctctacccctttaaccacagcaaatagtcagagcatgaatgttgcaaatttgcagtctagatcaagaatgaatcagatgttggtttccaatcagttaaacattcagtccattcagcaacagccccagataaaaaatgaggttttggatcaaacagaaaaggtgaattttcagtcaccacagttgactcatgatcaactactacgccaacacccaatgccgcaacatcaggtgcaacctaattcccagtttgttcaaaatcagtatcatataaatcaacagcagccaaattcacagcatcagcaggctatgctaaggaacaattcctttaaacagtctcaaatggcttccacccattcaatgcaactggcagaacaggggtcactgctacacactgaactggtatcttcacaaactagtgatcctgctgatcttccaagcttccagggtcaataccagcaaagaaatgctcttgacaatgttaaaggagggcagatgcttggtcatctatctagctctcaaaattttcatccttctgtctcacatggttctcagcaattgttgccctctaaccagcagcttgatgacggttctaatgctgtaagctatgtgctgaaaggatcgcaggcagagcaaatgctgcgtcctcaatggcagccacaaacaatggaaaaggctcctgttactactaattcaacactcgaaaagcaaatacaagaagatttttgtcaaagagcaatgtcgcaagatggagcacagcaaccattttc

SEQ ID NO: 186800 - DNA, 384 bp, Zea Mays
aaacaaaactagcaaagggcagcctagcgtgtttgcctagctggcaggcatggccaatgcggcgagctgctttattacactgtatagctgaaagcttatttagggtttgaacgacggctggcgctggatgaccgaggcgagcatgccacaactccggagtaacgacagcaacatggcagcgaggcagcagacgatgtggaatggtgtagagatcctcgttgctattgcaccaaagaaggaccgttttggtttggagatccttaacagaaaaaccagaagcgtcaaactcaatagaacagttattgtcgcgagtaagttgtcgaacagatagcaaattgcgagcaagttgaggagcgacaagaacattattaagatgaaagtagc

SEQ ID NO: 186801 - DNA, 369 bp, Zea Mays
atttcagcagaggaaggggaacagcgacctgtaatgtccagtctgagcttcaatgtagcacgtaagaagaaaaccatcgaaccacagcatcaaggaccatgaattccgccggaatcaggcaccatttcacgtccgcacacaaagagcacgagctggcccaaaattccgcgctacgcgtgggcagagagcacgtaggcgctgcccatccacatctcagttgcacccacggtagaaccatggaccggggaggggaaatcaatccgcccaacgcgggctgagagcacgcaggcgatagatgatgatctgcacatccacatctcagttgcacccacagtagaaccatcaaccatggatggaggaggagaaatc

SEQ ID NO: 186802 - DNA, 522 bp, Zea Mays
gtacaaacaaccaactcgattcattctgttcgcgatggaagagtggaggaaggaggatgcagggcgttgggatagggtgatgaaccggttgaatcgtttgattcagaagttggaagtggtggatgacgtccagcaaacaatcccgattcagtcgaggttagcaacagaggtggcaacagaatggactgtgttgacacgtcaaatgaaggaaaccaaggctagggatatggagatgtggcctgaggaacggggttggttgtatccacggtctggtgaacgaggatgtcagtgtgggcttgctgcatcgggtgttggaggtatgacccctctggtgtttgatgaaatgcctcacaacagcagcgagactgtggttgtcctgttccctgaagattcagattccttggtgttcagtgaagtgggcctaaaagtggtatgggatgaggagatgcaatctgaaactcacatgcatgaaggtttattgaagcagcttgctcgaggtggagaagatttagaagaatcggc

SEQ ID NO: 186803 - DNA, 433 bp, Zea Mays
cgacaggcgtactcaagatcactattctatgtgccattggtcatgtagccacgcttgaacgtgctagagtaccacgaaacattataaagaacatactgctatacagttaccaactatgtcatatccagcaacgtggactgactccatatctatctctacaacaagacatatttgccactactccatagcatgctcaacactgtggaatgaccatggtatgccacagcgtacgaccccacaactatgacaatataagagttgttgagcctctgttgtgtgaggtccgccatcctgcaggctcgtaactctctctcccttggcttataaaagtagagtagcgtagagggggtgaatccaaccaacttctaaagggcagacatagaggtgaactagagaccgatagtctagaactataaccaaaaccacatgaaaa

SEQ ID NO: 186804 - DNA, 284 bp, Zea Mays
cttgactccttattataaagaagatgttcttttctcttcacaagcactagcagaacagaatgaggacggagtttccatccttttttatttgcaaaaaatctacccaggttctttgctgaaattttgattgtggctaggcacacctcaatatttccacattcttctgataatgaaaacaatgttttctatccaacatccttgcagatgaatggaaaaattttcttgaaagggtgcattgtgagagtgaagatcaactccacgagactgagcattctgaagagcag

SEQ ID NO: 186805 - DNA, 322 bp, Zea Mays
tcttttcaactattattttttctttttgacagtgctgctggaggcaggctagagtgcacaatgcaaaacattgcagatgattttatgaacacttttaactacagatgcagcaaaggaatagaaagtatgtaggtagttaacatttgttaactggtttattaatttttctgtgcaactatttattgtcttcgttatgttgagttttacctatttcatatttaacaggtgagcttaacactttcattgtatataatgaaaggaaaagagtcacttcatcagctaaaaggaagctgaaatcagaagacagatcattgcaccaggt

SEQ ID NO: 186806 - DNA, 460 bp, Zea Mays
ctacatgtccttttaaatccctggaaatgaaatttcaaggaactgcaaaaagcttgcaggcctggagcgaaaagcagatcgggcacgtgaggtcccaacttgcccttgctaaagaaatcctccataagctggaaatagcgcaggatggtagagtgctcagccctgctgaatgctggctcaaactcagactcaagaaacaggcattacttttatcatcttgcaagagaactattgcaaggctgagagcgaggatttcatggctcaaagatggagatgctaatacaaagttattccaccttcacgcccgtcaccgtaaaagaaaaaattttgtggcatgtcttgttgatggggatcaaaacctaaccagccatgaggagaaagctgcctgtgtggaccgtttctacaccaatctattgggaaacagtatggacaggatacgggcaattgagttagaggctct

SEQ ID NO: 186807 - DNA, 364 bp, Zea Mays
tttagcataataggtcccatatgtagagtagtgaggaatgatagagtccaactctcctcagcaactcagacaaaaggaacaactttgcaacttgtactaaacctacataaataactctgatgagttataaactgatactgacttgaggctgggattcaaaactgggttcacaagtcacaaccagttgggaccaacgacttacataatccgctactgctactgcaaatgtgaacagatgaaactgcagtaatcacctgctagaatttttattctgataagtatactgctaaaatttctcttgctacaagtatatctgactctatccaaagatcatggaggtaaaatccagtaacccagtttccac

SEQ ID NO: 186808 - DNA, 1827 bp, Zea Mays
gattgtcctcttgtcgagatcctcacgtcccggtcctcaccaccggtggcgacggggtgtgacagttggtaccagagacggtgtatcctcggcgtggggggcgacggacggccaccagctcttctctgcgctagctatcggggtggcgacgacgattgttggcgcgtcgacggcggatccagcggtccggcgtggtgacctcattgatccggcgcgacctacctccttcagctaacggtggcgctccagcggcccttggctcgagttccgttttgttccgcgatggcttccctttcccccggcaactccttcatcgaggcggtgtcgacggcggtggttgcggcggatttggcggtgctgggctgacgggaggtctcgatttggcggtgctggtggcggcgactccatcaagttgcctgtgtgctccctcaactttcttcctcagatccccttcggcaggcggcgtgcccacgacgccactgtttgggatatctggtgacgagtgctctcagtcacggcactggtgacgggttccctttctctgagactccaaccactggcggcaacacgggatttggtgcgtgtgtgcggcagctacgggagattgtggagctcgagtggctctgcatcccgctcgtagcgctcagatcgtgattggctgctttcatcctctacaatcactagttgagcagattttgggtgagcgcggtgttaatttgttgatgctaaggcaagccagtaacctggcacacaacatgttcgatgatatgtcatttacagaggtggtctgggatgatgaaggggcactattcgatgaaatgcattgcacggatgtcatctgggatgaggagacacatcatggctttgactcacatggcctattgcagcaccatgctgaagcaatggataaccagatgcagggcaaggagaaattggctcaaagtggagattactatgatgagaggaaagtcaatattgaaccagacatcaacaacttgctcattcatgtcaatgaccatttctctatgttggtgattggtgcggattctaggcgaagtgatgttgtgtgggacgaggacatgttatctgacctcgatactcatggtggcttattacagttactggcatgttgtaaagatgatgagctcaaccaggacagagacactccttttctcttgggccttggtatggatcaggtggatgagatgctggccagcccgtccagccttggcatgaatgaggacttgccatctgtacctgagacacatggctcgttattgcagcaagtggcatgggacaggaagcactttgcttatgaaatgtgcacgcttattgctgagatggtcctggaagatgttctcaccgatgttggcaacctcgctttcagcattgattcaagcatgcagatcagtgatcaaccttccaaatatgcgctagtcatcgatgcttatctgctgaagacgcagtacaaaaaaccatacatttctataagccaatgggatccaggaatttggtgcaaaggtactatggcccatgagcagcaacagcttgagatatataggatgtttgagaaacaatgggattcagttatccttaaatggttcaggaatccttttgtgctgctgcaatcatgcaatggggaggatctgaatgaacaaggcacagtgcctgtaaatgacattttcgatgtattggctgctggccaggagttgaattttggcaacgtcaccttgatcatttatgggggatgccaaggagcaatgggtctgcaggttctttttgcagaattacacccttggcaccacaatgtctttacctccatagaat

SEQ ID NO: 186809 - DNA, 286 bp, Zea Mays
ttaaaagcaggaggttttcagagcttacaaaaccaaaatactggaagggtgaacaggttgacagcataatgaccatgcaacatgttgcattgtccaaggcaaacaatgaatatccaaaaatacacacccttttctctaccgaatgttcatcatattttgactggcaaactgttggacttatgcacagttttcgtttaagcggacagcctggtaacatcacgcgcttattgagctgtacggatgaggacttaaagaactataaaggacatgatcttgctcccacaca

SEQ ID NO: 186810 - DNA, 277 bp, Zea Mays
tgaaaaccatgtgcaacaaatcacgctttgtagcactcaattgagccatcagagcgggtcttaatcttatagacccacttgcgcgtgataggagaagcagagggaagaagtgggacaagatcccaagtgctagtgcgttcaagagcagcaatctcctcggccatagctaattgccactcaggacgagaaagcgcatcacggtaggaagtaggcttaaaaagaatagaagcagaagcaacaaaaccaagacgagtcggacgacaaagcgtacgtcgat

SEQ ID NO: 186811 - DNA, 371 bp, Zea Mays
accatctggaaccttcaaatccttaaaaaatgtaatactgatttcttatccatttgagacaaagcataatctgcctgtggcataacatattttccaccatcttcaacaggatgcaaatgtggctttaaattcatttctttcaaatcaagacgagatttattgttatcctttgttttgccttttatgccaaaaacagtttcaataatacaatcacatatgttcttctctatatgcatcacatctaaattatgcctcagcagaagtgttttgaaatatggaaatttaaaaaatatgctcttcttagtccaattatcccccctctcatcgtgtgaaatcttagtcttcttgctcttatccttggacaaaataat

SEQ ID NO: 186812 - DNA, 732 bp, Zea Mays
gaatagcaagttcctgcaacttcccacaatcaaactggatcaaacgcctatcaggaaagtagacttgacgtcgaacaatagcagaccttataggagacaggatgggagaaaactcgttcatgcatttttctctatatgctggatcaataaaaacaggagagtttcctttgctgtaccagcaaacagggggaggagctcgagcagcaggaattgcgaatgtaaatgattcaacaatatcaagcattttctgaaagcgttccacagatggaagaacaagatctgcaaggcttgatgaatagtccatgtggcacaaagggttgttcctcttatcaagaatatttgatacatgatgctttacagtcaaaacatgtatcatgtttgtgccatagacaggcctcttttggcatctaactctattccaccatgcaatggaagctgccctttctctggattcctttattctctcctcctgtagtgctttctgaatatcttcaaaaatgtttgtcaaattacttccctgacgatccttattagagcaaaaagtatcaaggtcatggttccaggaagtggtactcaaaggaaaggcagaaatgacctcatcagcttcccaggaactcatgctaaattcattttgcgtaaacactaaattcatatcagacagtcccacctgagaaaatggactcttatcaaggagcatgcagactgaatagctgagctgcatgttaatcccag

SEQ ID NO: 186813 - DNA, 762 bp, Zea Mays
tgaaggacgccaatctgtctgtggatgtgggcgatattcagctgcacgtttccagggattgggaccacctgctggcaactcatttgtctgatcctatgcagcatttcgatgggttgatgggcttatctgtaacactttcgccccagtcatcgggtggtgatgggccgctggaagtgatgagctcgcctcttcaattaattatccaacatttttctgaggagctgctgggcctaaacaaaacactttcgccccagctaaacttatacactgggacgctggatgtgttgaggttggaatcgcctcatcatagtgaaccatttctaagaatagggttgctgaactcacccttgccgccttcaccccaacagtcccttaatgctgggatgttgattttggcaggattgagcccacccctccaagacacacctgggatggatgagtcgtggggcttgaacagggatacttcgccccagcaacctgggacgctggagttgtcttgtccaagctcgcccctccagccttacctgggaaatagctttaccccacagttgctgaaggtttatcacagaaggcaattgaaaagacagtgccaacaaggcctttctcagccacagatggatgatcgctgcggtgatattacggagatcgatgctgaaaggatgctggatcatgctccactgatgaatgccccgaaccccaccgtccagatctcccctccggaattaggctcagaccgggaatctaaaatggatgccttcttta

SEQ ID NO: 186814 - DNA, 1202 bp, Zea Mays
aagaaaagaaaatggaaatatgtccgtgaacaaaaaaaacgtcgaaggtatgcaactattaaaatacacacttctttatacatctttataagttaatatacttttataattggtgctcttttaaatccatacactttagcggtttagcttgatgttaggtgctggtcattttatgggactcttatagattgttttttaagtacaattatatagcttaaactttcagtaggtcacatggttattaagccgttgctaaagcgtcgctttaacgacgcctaagtggtaaggcgtgcttggacccgtaaggcgaggcacggcagcggcgtgcagggcgcccgcaacggtaccgtgcagggccacgcgaccacggtgcaggatattcactgttgggcttttttttttcctgtttccctcttctaactagattgtgctaacttgctcattatctttaaattagtaatatatatattgtataatttatatatattattaaggtgtcgcctcgccttacactttaccgcctaaaagataaaaagggggtcggtcgccttaataactatggtatggtaggtcatcttactaatatttgtgcactttgcagcgtatactacttcatatgttaaatttcaagtacaatcagattgcttaaactttcagtaggttcttactactatttctgcactttgctgcgcatactacatatgttaaacttttttggatacatagatatgtctcgtatgcatatatggtggaattttaaccaataactgttttgtcatttttgggggtgcatttgtaccccttacatagaacttacattcaccctaagttccttttattctggacttattaaagtgacggggaactaaaccaattaactgcagtaattatgcagaagaacaaagtcatgtctctcttctgcttctgccaggttgggtgctgccgccacttttgacgatcctaacgctttgctctcggccagacatgccaatcagctacctgtcaacagtcggaatagatctacatttttccagaaacaagaattggccctctttagatcacattggcaggcatgtgtcttctgttatctattatgctctgtagcattggtttaccatctttttttttttgctttgttgatgattgttaattccatatattgtccacaccagataatccagcttgcttcaagtacagtgcct

SEQ ID NO: 186815 - DNA, 275 bp, Zea Mays
tgaaaggtaactgagcgagtgtgcagtggcttgggagggagattgaagcacttgactggctggcaggaggtggtttcacaggtggattgagtcgtgcttacctttctctgctgtcggattgaggtctccgcagggcacaccaccaaattggttgccccgccactagatcgagatgtttccgggttccgccgacgggttcatgttgatctggtcctcctcttatgtcgatctggctaattctgccgtgcttctctttctgtaaccttgattcacca

SEQ ID NO: 186816 - DNA, 1200 bp, Zea Mays
tctttcgggggttaatgaaatcagtgcaaaaacaggctcccaagcttgttgttgggatattgcttcttggtgcagggtgagtcacatgacaattgctttgtgttttataggttttgcattttgcagtgaagatttgatttcagataactgcactccatcaatttaccttgttttctgttgtttgtgtacagataaaaaacatactgtatcctgtgtatagtcacctcttctttgcactgaaaatttgaaatgggaatggaagtgttttccttattataactgctgggcatcattttcattcatatcagttagccaataccttaaagtttttttttgttttatgggtcccgtagggccttcttcttaaatagagctgagaagagtcaactatttcagcagcaagaaattgccacaagtattggaaaggtaacctccacgacaaagcccatagttcgtgagatacggcaaattccacagagagtaaagaagctaatagagctcttacctcatcaagaggtacaatttcctcatctgaacttgctcatcttctgatttcattttgtgtacttcgaatgatattcaactgttatgatgaaacttagcttgcatgtaaatttccttacactcgtcatttccctattcaggtaaatgaggaagaagcttcacttttcgacatactgtatttgcttcttgccagtgttatttttgtaccattatttcagaaaatccctggaggtgagatacattctaatattgtttgtgcacggcatagttcagcagcatctgtagttttttgcattattttggtcactcaagcaagtttgcaattgaactaaacggttcccccttctagtctcatcaacttttagtgttttagtcacaactgccaactgtggaccatgcttttcctgaattgaaatgcatggacttctgaagttaggagttagaatgcatgaactcatgtgcatacaaaagttgagaaacatctgtgattaagatcatcagttttcatggaagtttttgtgaccttctgcaaataaattttaccttgatatcttaggcagtcctgttcttggatatcttgctgctggtgtcctcattggtccatatgggctctccatcatccgtaatgtgcatgggacaaaggcaattgcggaattcggagtcgtgttcttactgtttaacattggacttgaggta

SEQ ID NO: 186817 - DNA, 716 bp, Zea Mays
ccaaaatctaggaaggtcaggggctaaactacaagacttccccagacacaggctactcacgcggggacggcgggttcatatgctaaaagagcaggggcttttttaagaaaagtggcgcggtgaaggggtgcgggttgtttcaggccgcacgatcacagtctgagggttcggattagatcctagacccatattcgaatcggtaagcaatctgggccactggattgccgatcaacgacacatgttttaaaccagcgcgatctgatctagggcgcccgatgaagatccaactaccccaacaacacccgatcatagccgttcgatggccattcaattcggatctgatggtctatgtcttaacagaatgtagatctcccctacgccgcacaaccctatacctacggcttggattcaatctggcagaaacagtaccttggctctaatctcaatcgtccattcccaagatccacggtcaggagcctttcttcctcccagtgactgaacgacgcggcgcgaagtgtccagtggcggcgagcacaccatcctagcccgccggtgatctagagccccaaacccggaggtggctgcatgaaataggagcgacagcggaagcgaacagattagggtatggtttaccgcaagcagaggggaaggcgagaccaaccgacgacgcagtcaagcttccagttcgatcaatggcggctccctacacctttcgg

SEQ ID NO: 186818 - DNA, 568 bp, Zea Mays
aaaaagatgttctgttggtcaggcctgaaaactgatgtggaattatttgtgaaacaatgtgcggtttgtcagcaagccaaaagtcccaagcagtatccttctgggttacttcacccattgcctgtgccagcaggagcttggcaagacttaactatggattttattgagaagttaccccggtcagaaggatatgatactattttggtggtggtagatcgattcaccaagtatgctcacttctttcccttaaagcaccctttcactgctcagggagtggcccaaatcatggtagattcagtaatcaagctgcatggggtgcccaaaacagtggtatctgatagggacaagatttttacaagtgttttttgggaacatttgttcaagctcttggatattaagcttgctttaagcacaacctatcaccctcagacagatgggcagagtgagcgagttaatcagtgtttggagatgtatctcagatgtgctgtccactccaaccctcagaaatggaagtcttggctatctttagccgaattgtggtataataccactttccactcatcattgg

SEQ ID NO: 186819 - DNA, 332 bp, Zea Mays
ggcgttagaccaccgcccggacgccttaagaacagaggtcccttacaagtaagctaagagagttagtcgatggagcgagcaggaggggtgttagtatcctatgtgtccaggagacaaaatggaaggggcaaaaagcgaaggaggtggagaacaccagtttcaaactttggtactcaggaacagtgtcaaacaaaaatggagtaggtatcctgattgataagaccctcaaggatggagtggtggacgtcaaaatacagggagataggattatcctagtcaaactagttttgggggatgtagtcttgaacattataagtgcatatgcccctcag

SEQ ID NO: 186820 - DNA, 393 bp, Zea Mays
gagagattagggataacttctttcttaattcagattgtcctccgtccatgcatatatatggccggctacctccatgattctaggacttatctaactactaagcaactaatcagctagataatagggcctgccctttattctaggacttatccaactactaagcagctagatagacttggctgcccttatgcgcccagcgccctggccgcgcgcttggtggcccgatcggcggcccgtcgcacgtcgcgggctctcctgcgcctggcgtacgtgcgaccgtacatgacatcctcgaaggtagcaaggaccaacttcatgttcaccgccttctcaacattatggctcataaaaagcactgtatcatccgcatactggagaatggacaagccatct

SEQ ID NO: 186821 - DNA, 409 bp, Zea Mays
ggattatgcgcactggtgccctgaccacggcgcacggcggaatgccccggactacacgacgtcggcgagcaatccccatgctccacaagccctcaataccgccatgtgaggtcgcgaacgtgttcggtgtgctctggagactctcctcgaccatcaaccaagcccagagtaaagctcctgacgagatgcccatgcgagcggacatacatctccccatggtgctttgaaacgacatcttcttgcacacagcgggcagcaccagttccaagggatcccggggatggagaccaaattatataggctccgggtccaacagaaacgacccgagaaaaagggggagagatacgagccagcgatttcggagtccgcgctttggttacgagaaaaggggagaagaaggagctgaccg

SEQ ID NO: 186822 - DNA, 290 bp, Zea Mays
cgaagactgcgcgcacccgacgagggactgcctagaaacgaaggccaccagggataggatgtcctgagcacaacccgccgacaacccaagagttgtcgcccatacatatcaacaccacctcccacaaccatacaaccacggccccgctcagcatccacctaaccacgcatatcaacacaaccaggaggtacaaatcgtaccacctccgctccagcctccgcacccgcatcagccaaacatccaccacccaaatcaccccaagcaccaaagcaagaagacttcgctgatca

SEQ ID NO: 186823 - DNA, 824 bp, Zea Mays
accgaacctcgccgcgggaccagcacgctcgggaaggctcccgccaaggaggagatggacaaggaggtggctttcaacaggaagcgggccgaggggaaggacggagggaagcgcggcagcatggagctcaagacccgcaggctcaaccccgtcaacaccacatgctacgtgcaggtgagggcatcactgacttgtggattctttctgcttggcgccattttacgtcaactttctgattcaaatcactagtatacctagtttggggtttattcgaggagagattggaccatgtgtgcaattataaataccgtggattagtagttccagaggccacatttgcgtctgttagcctaacattgctaggcatgaaccagatacaatcccaaactgttctcatgggaagagtagaggtagcatacaaagaatccaaagccaaaccataggccatctagtatttaacttattttttggtaaacaactatcattatttaaacgtattctgttgaatggtgcagaatttacaacaaagatacatcatcgacacactcagtcaataataaccataaaaatccaccctaatctctgagattatattgtaataatgtgtaaaatatgcactcaataaccccagctgctggcctggccttatgcagctgtcccattggtgaatcactgcattggttgaaccaaataattagtgtgggggcaatttcttcccttgaactagttcatgagtgcaggaactgttgttcttttggttttcattcaatctcactcccctttgttattcctgcgcagatacttggtacaggaatggacacaca

SEQ ID NO: 186824 - DNA, 554 bp, Zea Mays
gctgaacagtactaccagaagttaaaggtatgctacttctctctttaacctcacttggtttggcatttgtcttgatatgatgctagacattaccatatagaccagtttttcttaaatttgtgaactcagatgtgggtaaactttgtttctgtgctgttgaatgttgatagttggatgcttgtcacatcagcaaggttcacaaaacaaatggtggcttgtgcagtgaacattaataacttcagttcaatgttaattgggtgaattagctcatctactgtttgccctatgttctttctggctatttcattgttaggtggaattgtgaggagttgctgacttttgggatcttaaatagcaattttcttttggattgataaaaagactgtttcttgttgtaatgtgtgcctttctgtttcaacagggaaatgatatcaaggcattcaggtcattttatcaatcacttgttgagaagataagaccacaaggaaatgggagtcttgttttcagatagcatcattctttgattttcaatatgtcttccaccaaaagactcc

SEQ ID NO: 186825 - DNA, 288 bp, Zea Mays
gccgaaccggcgggagcagccggaggcgtacatgctctacctcgagcttctcggtcggtacgcggtggctcctgtttacccggagcgcatggagaataaggatatgtaaggaccttactcggttactccacactggcgtccttcacttttggtttggtgtactctattcatgatgcaacttgcacacttgagaattgacaaattgcttattggatatcccggtttaaatctgcgctgtatttgactatttgctgatgcttttgggtgcgtgggcccagcttgatccgg

SEQ ID NO: 186826 - DNA, 523 bp, Zea Mays
cgacgtaaacatgctaatatcaacaacactagctgagacggagagagaagcagcaatcagtcgtactaatgttgtatcagcattgaaatgtagtcgacagcctcgctccagctgtcccaccaacgcacagccatgcccgcccgcctactcggcatccacgcgcccatgtatcgcacgctaaaccaaagaatgccagaaaaaggacaagcaaaaaaggtaactggaacaggggtggattcggagcagggagaagagacaggcacctgacgcggcaggcgacattgttggccgcattggccgatgggcgttggagggctgaaggtgccagacacgtggtcgactgatcacgtgcagccgtgtaggggcgatggagcactggagtcactgtggcgccgctgtggaggtgtggaagtggagccgtccgcgctcaacgagtcggcgagggtggacgacggcatgatgcagatccgtgcagactgcggttcgctgcgtcggatccgtgaagcgtgaaggccacaggcaa

SEQ ID NO: 186827 - DNA, 636 bp, Zea Mays
gcatgcctaagggaattttggcacacttttacaagtcattgatgagtgtgacttacacagcgggagaaaaaccttgccacaaccgtgttacaaaccaaacacatatctaactcggtcaaacctgtctaaccttagacgtggcaaaccgtggcaagtgaggcaataaaccaaacaggcccttagttcttcatgggaggttttccctctctgggtttggctcccccttactttcaaattagtcctaagggtgtgtgatgtttccccattctattgtccttgtttatcttacactattccaaataccctacttctattgccaatttatctctacctgctggaccatgtggtcaatgctcagtagcctctgttttttggttgtgccttcacactgaatatgcttttatgcaagacaattaatggacagaacaatgcatgctaaaaagtggacctgattttacagcgagcaggctaattcataaaatgttattggttgaaatttattgtgcttggcatatcaggtgggattcacggcatcagatcatatggatctactgattgaacaaattaagatgcttgctggggaggtcgcatttggtaccagttcactgaaaagactaatcgaacagtccatagatg

SEQ ID NO: 186828 - DNA, 431 bp, Zea Mays
taatcattaagtgaaacacgatcaagaagaccctaaatgtactcctcttgagacagatagaagtccacaagtgtggtggcctcaatcccgaggaaataataaagaggaccgagatcagacataaaaaactgctcactcacgtgccctcatggaaatatactatggaccatcaccagtgataatcatatcgccaacataaagaagagcctatccacaagatgatgtgtgcacaaaaagacttggatcatgagcattagcataaaaaccagcagaagaaaaacactctaaccaagcccgaggatcctgcttgagggcataaagggagcatcaacagacatgtcgtcgcagctgacgggcgaactctggcgagtggtcatgaagatgagcgccatcaagtcaaaggagctgactgcgaagacgtgcagagccac

SEQ ID NO: 186829 - DNA, 531 bp, Zea Mays
gagcaaaagagagaggcagtaggcaacgcccccacagaggcagagagaaagccagaggcagtagtaggcagagcacataaccaaacaacacccatccaaaaaccccaaaaggaagagagaaaggagtgagaaaaccacgcagtcgtttgtccagacaaaacaagaacaagaacccagcagcagtacgcacttcctcctcctcctcctcctctctctctcgctctctctcctcttgctctcgctccctctcgctcccccagtccgcctccctggcccatcagatccaattccttccccgacccccatcccggatccgccgcaattcctccgtgcgtcgagctcgattgctccccgcccgtggaatttgctcctttctcccgcaagaatcccacctcggccggcgacttggggggacctgccaaggtttgggcgcgcgctcctgcttggcgtagcgggccatgggcgtgctgttgccagctaggctgttcgtgcgccggatgctcagggttgtcaggctcaacccgttgcagc

SEQ ID NO: 186830 - DNA, 319 bp, Zea Mays
ctctagctcactgtcacagtggacggagggaagaagaagacgagactcagattgttgatacgatgatgggcggaccagattagtggagcgcaacactatggccaggtgcaatggtgtccgtagatcatctagcgagcgaacgagattaaaaaggaagaaaacgattcaggtacatgaatcgtggtctggatctatgatcctacgggcacaactacttactggttcagtggatggatcttagccattgattgaacaatgtgcggtcaagatcataatagagacgacgttgacctgagtgctccaccaccgtatatcccag

SEQ ID NO: 186831 - DNA, 320 bp, Zea Mays
gctcgctcgactcgctcgccgggcaccgaggacgaatccgcaggacgccggtaatcctctccccctcctccccttcctgctttgcgactctgcgcggcgctgctagctttgtccgtgtaatcctcggctctggccggtaatccttcgctctggccagtaatccttcgctctggtcggtaatccttcgctctggtcggtaatcctctgctctggccgcgcggctccgctccgctccgccactccactttgctgcacaccgtgccacatcacgctgctgcgtgccttgcttatgcgctgctgtgcgctctgctttgctttgt

SEQ ID NO: 186832 - DNA, 510 bp, Zea Mays
aaattacaattatttttaatttctcttaaagtcgcgcagcgtatagactactgtcgtccgacggcccacgagcaatgcaagctacgaacccaagggatctcccaaataaagttgtgaaagctctcgttactcaccgcccgatccaacggatcgtgctctcgaaaacaaatcttggtcgtccccttcccctcaaatccaacggcgtcaagctcacgtcccgcagatcggctcctcgcaccatccccgccccgccgctataaaaacactcatctgttgcatttcgattccgaacccaaatcatcattccctttgccttcacatcagagtagacgcgcaccctaggctctcgggagatggaggacagtagcgcggtggtggagaagttggcgtttgggcgaaagctaggcggcgagccaaagaagaaggcggtgtcgcggtctgtcaaggctgagctccagtttctagttgggcgcatcaggcggtaccttaaggaaggtcagtacgcgcagc

SEQ ID NO: 186833 - DNA, 400 bp, Zea Mays
caagaggtagccaccgtctccaaaaaatctggaatcttagtccaaaaactctcaaaatggaatcttcgcttccccttgacatcctcattaagatgcagagctaagggacaatggtcagagagctccgaagagttgacatcttcgcttccccttgacatctattttctaatggtgctgctagattgttagtgcacttaacaatgccatggtgtttttggagatgtgttataaattctatttatggattttgagttttttcttgaatatataggagagctgcggatcaatatattaagaagaaaaaacgagtgtagaacccatacaataccacacatacagaacattcacacaaaaataagcttgccagtgactacaaacaacaaacaaccttgaccatcaa

SEQ ID NO: 186834 - DNA, 388 bp, Zea Mays
agctcatccactacatcaaaggctgccaagaagaagaagagctcagccatgtctgttaggttggtgcaatacttgtttgtacagcagtctgttattactcctaaccttcactcatgcatattattcttgctacaagatctggacaaggctccaaccagccagaccctatgcctttgtctatcatgatgccatcaatggaggttgcagacaaggaagagaatcaagaaacaaaaaaagaggtggcaggacatgggaagaaaaataagagagagccagaagtcatcggatctcctgcaatgggaactagaagcaaagccagttgcagtggcagtcctgccatgggaactagaagcaaaagaaagctcaatgtctaattggaactaggtag

SEQ ID NO: 186835 - DNA, 448 bp, Zea Mays
gtgatgtgtgtcgtcttgcctgcctccctcccttttccaccatcgtgcccaggcgcttccatctcactcagcctcaccctggagtccactccagacccggtggccacccccaaaacagtgagaccagcgcactcagccaccatccttgtggagacactggaacagagtccctctgcgcctctgctcctagtaggcaggtccaaggagcagcagtgggactccagccccatttctatcccccgacagcgtccctaagccacccactatcgagcaagtgagacacaccgttgaggacgatccagggggcaaatttacgtgagtcgttgagctcgctgccggtacctccgaacgttgcggcaacctaggctctcgacaccagaagacctctgagggaagtgtttcaactgtttctcaagagatcaccgagttggcgcctgctgtcagcgca

SEQ ID NO: 186836 - DNA, 386 bp, Zea Mays
gaagtggagaaggaggtggcggagttggagaaggccgatgaggatatgcaggaagccaacagcgacaagttttgcaatgatgaaaaggacgggaacgagacaagagaggtggaagtggaggacgaggtggcagaactggagaagaaggccgatttggagatgcaagaagttgactacgataaaatttgcaatgatgaaaaggacgagaaggggggcaaagaagaggtggtggaggaagagggagttgaggaggcatccaacatcaagattggcaatgagattaagtatgagaaggagtcaagggaggaggagcaggccagtaaggtgaatgagcaagatcctgacaaggagatgcaggtggttgataaggacaagctgaataccaa

SEQ ID NO: 186837 - DNA, 788 bp, Zea Mays
cacctagggcttccagggagggtcttcatatctggggtgccagagtggacctcaagtgttacgtattacagtaagccagagtatttgagaatggagcatgctcttcttcatgaaatacgagggtcacttgctatgccagtttatgatcccagcaagggttcttgttgtgcagttcttgaacttgtcacaaacaaggagaaacctgattttgatgcagagatggacattgtttgtgatgccttgcaggcaagttctaatttgttttagattggggatatttatttagtgacatcaatgcttaatgttaagctgaagtactcataagtagtccaagcagctctggtatttttatataacatttactcttggcctgggttttgttcatttgtcactactattattatttttaacttcatccatcccaaaatatatggatttctggttttgtcctaagtcaaactattcttagtttgaccaaattgatggagaagaatattagcatttaccagatcaaagaagtgactatgaaaatacattgcatattggatatagtaatgctcatttggcatcgtaatttgtaaatattgttgttcatttctatgcacttggtcaaatttaggatagacttaggataaaaactgaaatccttatattttgggcagagcgagtatataagcaattagttctgtcaaaattgtagtttagtcataaataaccaatcctatatttgatacttatcccattgcgcttgtgtagggtgtgaacttgcagacaacaacagatcgcag

SEQ ID NO: 186838 - DNA, 322 bp, Zea Mays
tcatcaactacttcccagagtttcaggtattcaacaagcacctgtacagtgagggcaccctggatattagcagtccaggacctgcagcccaacgcttgagaaacagtgtgttgtctccttgctcgtttaggaattacgtgaaagagattagggaccagcccagtgtgttgtctccttgctcgtttaggaattacgtgaaaaggattagggaccagctcacctacagtgcaatcgcgcagccaactatttgtccagaatttagcggcctgaccatcgaagagagggcactgaaaaggcagcccttcccaaggtcaagaatcgg

SEQ ID NO: 186839 - DNA, 549 bp, Zea Mays
gctcattcacatcatgttaataatgaactaaagatactggagcgttttgggtaattattacctggccctctccctaaaactttacgagttcttgttatccatagtaaccttaatgcaattgccatgatctcctgtgcagaggcaaaaattgtgtgattaaatatgaatgctctttgaaaagtggtgatctagactgttttgttctagaacatgttgagcatgacagaccagaggtttagtgttttctaatctacttcctctgaagctgttctattaagcacccatttatccatccttttttaatgtatttctttatatcccagattttgaaaaaagacataaccttgcttgagctgcagtggtatggacactgtcttttcagagctcttgcaagcttacataaacaggtttgtataactgcatgctacctagtcaacttttgatttctgttgcttactggtaatcctgggtatctgataactggtattcctgtcttcagggggtagtgcatagagatgtcaaacctggaaacttccttttctgtcgcaa

SEQ ID NO: 186840 - DNA, 1158 bp, Zea Mays
agtttgcttagaatcgaacatagcactaacaaggtaattgcatatttgcaaaaaaaaagttcttggttggaatttctgttattgaagcaagtaaatcacttcacagggaaatagctgatcttgtggaagagaaaacagcccatgcggaagctgaggaaaaaccagctggtttaggtgacaaactgcaagaagcaaacatacatatcctccaatcgtgtaagcattgtgaggcaatggaaagagaattgaacgagtcaagatctcttattgaagctcttgaatcacagcagattatattgataaacgaaatagctgaacttaagaaggggtgtgtcgaaatctcaaggttgaacagtgaacttgacctccaccataggcaggattacttgaccaaagaggagcccaaagcggaacttcttaagtgtttcggtaaagaagattcacctttgcagaggaagtttaaaagaatgcaagcttcacttgaaaaggcacggaacctaaatacaaggtaccaaatagatcaggcatcacactgttttgctgagaaagaaatggatgaagttcgtaaacaggttgaggttgaaacagctaaggtgattcaatgcttagaagaagatctgatatcagtccaacagcaactaaatgcaagcaacaaaaatgacttgttagccaaacaaagcataaatgaacttcaactagaaatcaagcagttgaatgataagttacttgaggtgttgaaagagaacgaaatattttcttctgtgaccaaggaaaaagaaaaggaaattgaactattgtccaatgactggaacagattagctgccgacattggaaaatgtcttgtggatggaaatgcagctttaggtgaagcttctgatcaggttgcctttatttccaaatctttatctcaaagaaaatggatcgagaaacaagttcgaaagctgtgtagtggtatatctgaaagagatgagctactcgaagagcttcagaacaggttgaaagaggcagatgatataagacgtgacttagacttgaaattaaggtccttaagaggagcaatgcaggttgtaaatgaagagcatcagcaggaaaaatgtgatcaagaaaaagaaatatattttctaagatcacaaatatctgaacaaggacatgtaaaca

SEQ ID NO: 186841 - DNA, 322 bp, Zea Mays
agaaaggccaagagggtcaaattcgacagaacaattgttatcagaagtaaactaacgaactgaaatgaggttttgaacaatatcgggggcaacaagaatgttattaagataaaagggacccgatatgatggagtggcctgaagttgtgacaggtaaagtggatctgtttccaaccatgatggaagtggagcgccaagaatgaaataaagagatgttaccactatcgagagtcatgtgactggaagcaccggaatccatgacccagtctgtggcgccaggaggacttagggtcatggtgctgaagttgttggcgagagactgc

SEQ ID NO: 186842 - DNA, 452 bp, Zea Mays
aacagatctataaataaatctaaactaattgttaatgccacaaatgtgtggatgtgcatgtctccacaaatacaatgttttttcaaagtttagcataacagcaaataattggtcagagatcgccaccaagttgtgactaccatcaatatcctcactaagccctgggatgaatatactagtcctgttgacaactccgaatggcataacagcatcaacatttgatcaccctcatattaatctaaaactcttgattgcagtttaccagatttaaacaagcagccgatacagttgatagaagaatgtttctggaactgaaggatataacatgaagtttccagaaagttatgctgctaatacaagccacctccaaaattgcaattttctaaagatggactggagtaaaaggcgtgtgaaccccatacagaatatagaccactagaaataaagatagc

SEQ ID NO: 186843 - DNA, 324 bp, Zea Mays
catgcaaagtgccaagcagcatgtggtccaagattggtcgtctcaggcgatcattaatgcccaggcttaccaaaggaagcacactctatggttctggagcaagtccaggaattatgtcctgtgttgctggccgtcttctctgtgacacctatttatgctctcgtgaccttctgaaggaggtaacctgcagtgcgattatttttttaataatggaaggcaactaaccatacaatttttaaatataatttcagttaccaaattcagcgtttaattctgttccatgcaggtgagttattccttgacacaacttgcagaaacacagtt

SEQ ID NO: 186844 - DNA, 500 bp, Zea Mays
tgctcagatattttgttagaaaacactttttagtactgaatgccgctattgttttcccgttgttagaatacaacagtatctacaatcgcagaagtaaatgtagtatgatggttttgaaaattcttcgtggggcatagaggtcgccctaagatgagtaatcgcaaacgtgcttgtgttggattaagtaggcacgagtgtgccgtgccgatttaagtcattaccaacttaaaccgaccgcttcgttagtagggtatagtggtcaccccgagttaagtgagcgtgagcatgtagcaccgccttaagccattgccgacttaagacgattgctccgttagtagggtatagtggtcaccccgagttaagtaggcgtgagcatgtcgcaccgccttaagtcactgccgacttaagccgattgctccgttagtagggtatagtggtcaccctaagttaagtaagcatgaggatgtagcaccgccttaagccattgccgacttaagccg

SEQ ID NO: 186845 - DNA, 535 bp, Zea Mays
ttattgttgcagggaggcaatcccttggatttcaaacttggccatgtagcttcccttagtgtacagtccacttctgtgacagaacagatagctgaacaaaatgtgataaggtgatacctaattactaatctatcatttgataacattgtttattcatcctaattaataatctatcatttgataacattgtttattcatctaagccttttgtgtctgttgtactgcagtgaggccaaaggtagttctgcatttgctacgtcatctcatggagattctgttgaaagcaacgacaagccaggaaattcattgtgccgtgaaggcaatacagccgataatcttacgcttttggatggagatgccagcaacctgggtgtggataaaattgtgaaacatggaactaagagaactaattcagctcaagctgagcagttcctgcactgtgatggtcagaacaatgcaaaagaagaagattctgggttgttccgtcttggtccaaagagccaagcgtatgcacgacgtaggtcaaagcctatca

SEQ ID NO: 186846 - DNA, 3770 bp, Zea Mays
ctgaaagatgaatatgatgcaaaactatttgattactatgcaacctcacagcttgtgttggcctctttggatggaacagtgaagccaattggccctccagctatatatacatctgttgatccatcaccggatgataaatacataatgctttcttctatccaccgcccatattcctacattgtaccttgtgggaggtttccaaagaaagttgagttgtggactgtagatggaaagtttattagggaactttgtgatttgcccctggctgaggacattccaattacgatgagcagtgtacgcaagggtaagcgctcaattaattggaggccagacaaaccttcgatgctgtactggtatgtagagcaccattctaagcctaacttgctaaaatttgcattggtactttttctgtttatttaaagatgaactcctcctgcaacatctactgcgcctcaagccctcaacataagcttacaaaccgataatagaaaaatatagttcactttagtagctgtgtggaaatagaaagacttaaagccatccaagttagttaaatctcaattttaatgctagaaatgtaataccgtacaggaacattgtaatgggactagaatgacaatcctccttttatgtttatttatggttatggtctcaacttggatgatttgaactaaaatattttagcgcccatccattcaaacgtatcctcatggtttaccttccaaattaaacattttttgaaacttaagcgccaaatttagcgacccagaaacaaaacatcaatgccaatgctatcgatttttctataaaagatcttttccttgtccaaaatatgggtaagtgcccatattagtatcggatatgtttatgtgcaaacaaaatatgtgttcgttaaaaattgatagaatctaccatctatgactttgagattgactatcttaaagaaaattggtttgatggaacagtttatgttcttttgttggttccacgaagcctgacctagtgaccttacatcaaagaatagtgccaggtgtcactaagcaaaaaagaatagtttcaatatagtaagttctatttctatagcagtataatttcaaacagtaacatctgcattctgcagtagtatagttgcattttcatagcccttgatgggacacttcttgattgaaacttgggcactcctcttcaggggtctgaactgccggttgaaagtgaaacataatggtagtttcatagtttgcctatcagcatatgagatgaaaatgtttgctttcttggtaaccataacttttcctttatcctttttacttagttctgactatatttgattagctccatatattaaccaatttcacataaaacggagttatgataaatatgacttgatgccaatgcatgtttttctttttgcaacattccaattgtaccactagtctctctgattccaaatttagaccgtttttagatttgtcctaagtcaacatatttagctttgaccaccaatagctaaaaatctaaatagatttacagcataagagcatctttaagtgtctttctaaatttcactctctaaattgtcatttggagagtcatttgcataaaagtcgctttctatatcttttcactctccaatagcttttctatatcttattgtactctagagctattctcgttttctaactttggctagcaagaaatcctgaataggagatggctatatttggataatcatttaaagaagctgttggaggatattttttttaccaaaatctctattcctagcaattaggaaggatatagactctcttggagttgcttgaaggtatgcctcaccaaacattctgggtctcttgaaaacagtggctgatgaatgtagtctttggtgcatgggtgcctctaatcttcaggagcttctcattaggtcgccctacccagacctgtaggctgtggttggtaggttgctacccccttggtcatgctttcatctagttccaggagagcttatttcttgtttctagctggtgtgtgtgttgtgtttctggctggggctgttttaccctcaccccttgacctctttttctctcttaatgaaaggacacacagctctcctgtattgtttgaggaaaaaaaggttgatgctactagattcatcatggcgatgcacagtagctcaagccatggttttgggtgtctgatataaaaggagcactgactgttcctgtcctaggagagtatctatttatttgggaattgattgatgatcgaaccctgcaactaggagtaatggaccagcactgttggatgcttacatattcaggaacatacggcagtaaatctgcatataatgtcatcctcatccggctgcctgccccgtttgcccccttcgcgatcaagctggagaatccatccaacaactccttgtgtcctgtgtctgtgcttggcaggttttgagtgaggtccttcagaagctggggctgatcctccttgtgcctctgaccatcaccaagtgtttctcacattggtggtatcggaacttgcctggggaaatcaggaaagggctaaactcagtcatcattctagtggcatgggaaatatggaaacaccaaaatgactgtttaatggggcaaggacaaatgtcaggacaaccttagaggcagttcctgatgagtgtgtcttctggtgctcagtcggtgtgaaagatcttcaagaaatttggtcaggacgcttaatgtggccatgtgatttttagtcctgggtcactggttgccttttgtgttttttggtgcagtttcttcctttgttcttgtgtgtgtttggatgtgtttatgtgtagtatgtgtttgggtgtgcctttttggtgggagagtttcttactttctttaccacccttgttctgttttcccctcatctcgtattaatgaaatgatacacatatctcctgcgtgttcgagaattcatgacaagtaatttcataatatacaagtatctctatcaggttataaacctatgcattttttatagcaaccttcttttatctcctagtggaagtaagtgggttgccttgtacaggattttgtttgccccctcctttgtctatttaatataaggatgctcagctctcttccatgttcgagggaaaaaagaattcgcaagtgaaagtttagtcttgtagaccgtgtcaaactgtcaatgtcctaactcttgaatgacttacattaagaattagaggagtgctattttgttttgttgtttttagtggtactaacatattttaaaaaacatcctttgaaatcaatataaaatcactaatcgtcggtccagtacaattaagcatactcatgttagaattgaattgacatttgttttttcttttttaatttgattagagatgctcaaagtattgatactgcctcgatgaagtgtgatatggactaacagttcattcgggtctttttaatcatcagatctcttatgcataaaccatgttattagggtatctgctgtatctttagatgctctatgatatttgtgaagaacatttacttgcgaattaagtataactttcacttatcaaagctgtaagtgtttccatgagctactcctttgttctagctcatctttactttattcttctgatcagggtggagacacaagatggtggagatgcaaaagtagaagtctcccctcgtgacatagtttacatggaaaatgctgagcctataaatggtgaacacccagagattctgcataaacttgaccttcgctatgcg

SEQ ID NO: 186847 - DNA, 369 bp, Zea Mays
ggcccctaccactctggtcaacgactctgacgcacttctgcccttcggcgttgtcgccactaaccccaccttggtcgcagccctcaccactgctaagacggctgttgtcgctgctcgaaaatgcaaatgtgttgctgccctcgcctgggagggcgactcaccgaggtggatgccttcgcccgacagctagccaatgctaaacgtcacctgctcggcccccatatattgagcccctgccagcgcccccgatggtcgctcctccctcagagtatgaggccatagttataactaacttccatgcccaggcggcgggtgtctacaacatccactctccggttcccatcctcgacccagctttctccacttgcg

SEQ ID NO: 186848 - DNA, 500 bp, Zea Mays
ggatttccaaatgcgttcagcaggctcaaagctaacagagccaagaagcaaagtcctgtaagctgaactagccgagtattgacccgattcactgaacctccaggcatgcacatcgggaacatccggctgaagaaccatcccctctagcaagtcacaaaggtccatgagattagcaatggctgtaacagaaatagcccccctcagatcagccaaccaattgagatcaggcaaggcgtctttgaccaggcgcctagaagcaatgcacttgggcaccatacccaagacagcaggtgccacgtccttaatacatttgccattcagccaacgatccttccaaaaaagagtatcagacccatctcccaaatgagtgataacagccgcagccaccaagctttgcacaatgtcgcaagtttgaatctgaaagtccgaccatggcttagtcctatcagatttttgcagccaaggccacctagcccgcagtgcccagctcatgatccgaa

SEQ ID NO: 186849 - DNA, 439 bp, Zea Mays
gtgatggccgacaaaggaataggaggtctggtgatgcaaggaataaatcatttgaaaggaatcaggggcctcagagggacttggcgaaggatgagaatcagaaggatgttacaggctttgtggataaaagagcaactggtcatgtaaaaagtagcaatcgcaggcaaggggaggttgaagactatgcacagagaagaataattcgtggtggtacaagaggaaatggagacaatgggcagttctcatcacctgtgaaggctaaagatactaggggtagtatgtctgttcataggttggtgacgaacaaacagactcagtcagttgcagggaacgatttacaagggcgagcaacttatactccatctcggacttctgcccttccaaatagcagtattccatcaaagaatgctaaggttcaaatgagaaaatacgactatac

SEQ ID NO: 186850 - DNA, 331 bp, Zea Mays
accagaggatgtggcaccaaaggcaggagtgggggatgcaccgaaggctggtgtagagctcccaaactgagatgaggatgttgtgccaaatgtgggagtggattgctgctggccaaaggcaccagtggatgttgtgccaaatgcgggagtggattgctgctggccaaaggcaccagtggatgtagttgcaaagagcgagcttccggtctgtgccccaaaagctgtggtcgggctgccaaatggttttggggcaaaaggattgttggcagcagtggaagactggccaaatccctgtggagttccaaacgaggtctggccaaatgggcttgtg

SEQ ID NO: 186851 - DNA, 634 bp, Zea Mays
gcgaccacctcttcagcctcctccagtgtgcctcctggatgcacccccctcgggctccaggccttcccaggcggacgttctaagtatcaatgttggtgtgacgcacgcggggagtcctcgtccgaagggtcgtctcaggtgccttgctcctttaaagatgctcttctttcctgtccaagacctactgtggcaccctctcgtccctctgctcccccggggttcgctgttccttcaacgactgtgaagacaagtttctgtcggattcctgaagctctcagccaacctggggtggggaggcagagtgggggtggctggcaggtggttgagcgccggaagcagaatcgtgttttgccttgctctcgtcgagggtccccagtggatctccgaggcaagtgttttaactgtttctctgcctcccacttcgctggtgtgtgtcatcgccccactcgttgttttcggtgtctcaagtttggtcaccaggctgcgtgctgtccttctgttgacctgaagaagaagaaggtggtgcgaggctcagtttggcaacgccttgctgggatggaggaatcgggcccttctcatgcctcttccccatcctccctgcccaggagggcggtgtggagacgcatcaaccctg

SEQ ID NO: 186852 - DNA, 397 bp, Zea Mays
ttggccgtgattcagatactggtggccaggtaatggtatcgttgaacgtagcagctattatgccatttgatgtttcgaagatattcactaaaacgatactagtgtcatacaaggacatgatttcactttcatccactgtgtgctgtttcataggtcaaatatgttgtggaacttgctaaagcattaagttcatgtcctggagtttaccgggttgatctattgacaagacaaatcatagccccaaattttgatcgtggctatggtgaaccagacgagatgctggctttgacaagtttcaagaactttaaatgcgaacgaggagagaacagtggtgcacatatcatcagaataccatttggccccaaagaaaagcatctagctaaagaaaatatctggc

SEQ ID NO: 186853 - DNA, 345 bp, Zea Mays
cttgaatgaagcatagcattctctgatagcaaaggaaaagtatggatctgattttatcctcttcgtcagatcacggtcttttccgccactgtctgctgccatatccagtgctattgggatctacaatccagcagataaacaataaactgctgaatccacaaatatagtaagtagaaaaaatacagaaagagcaagatgagcaaccttgctagcaagtaagaaaggtggccattgaaatatatcgagctcacggtctttacagtatggaaccagtagcagatccatctccctattgtctatgaggtcttcttcacggaaacttgtaataatgacattccacatttg

SEQ ID NO: 186854 - DNA, 412 bp, Zea Mays
tttgatgccatggacgatcctccgtcaaggatggacgttgcgatctatgactcgagcggacagtgcgtcattggccacacagaagtcaactttctgaagaacaatctgtcagaactgactgacatatggcttcctgtcagtgggaagtgtgaccaagcgagcaaccctaggctgcacttgagaatattcttgaacaactcgaggggcaccgaagtcgtcatgaactacctagcaaagatggggaaagaagtcggcaagaaggtaagggatttaccacagttctttctgtgctgagaaagctgatcggcgggcgtactcccgtcttcagccgctcacagcagtgtaggacatgtgtgcagataaatttgcggtcagcccaaacaaacgttgcattccggaagctgttcgccct

SEQ ID NO: 186855 - DNA, 371 bp, Zea Mays
gtagacgaatgcacgtgttggtgttgccagtaccgcacgtactaggtagaaggctccaaccaagtgtcagtgtctgaagggaccaacagagaagacctccacgacggttgtggtgcagcatgtcgggagtgctgttgcagctcacgattgtcagagtggagtagacgaagtagttgaggatgagatggcgacgctggcaacaaggttgtgctggaagaaggtgaagaggtaggcatggcgacgcatcgaggattctggagtcgcggcggcgagagccacgacacacaggaagagactcaacgccagtggagtgcgacggcggtacttgtcggcaaagaactcgacgatgaacgtggtgcagaccaatgaca

SEQ ID NO: 186856 - DNA, 324 bp, Zea Mays
caaccatgttgtagcgtgcactcgagacactaccgattaacttaacgcaattaccactacaatgcacttcgatatacacgttcgacatcactgtgcttcgacagaccccacacttccaatctacttgtcacatccaaacacaccacgtgcccactgcgttctcatgaccaattttagcacaattatttacgacaacatttatcgactagacaatgaaacactaaccgaccattcgcacatctcatcttaaaaacactaatcacatgtcacataatttatatcttcgatccactctatcctacactacgatgaatacataaaata

SEQ ID NO: 186857 - DNA, 295 bp, Zea Mays
aacacgacataccactcaaaacattccaaaaacatctacttgctagacgttagaaacattagacctacccttcgtattactaaccctaccacacatcacatacatgcctacccatatccttcgcattattaaaccaatcacgctgcgtatacgagcctaccaacatattcttcacgtcatttaaacctcaaacctatatttcaccccacatcgcgattcacatatctagccaacccatccatcaatccagttatatgaataacaactccacttaccatgaccaaatcaactcgac

SEQ ID NO: 186858 - DNA, 566 bp, Zea Mays
cccgggtggaatcattgatgccggtatacaagtaagcagggtaaactctgtccttcaaaggttgaatattcttgaagacaaagtcggcgaccacggcctcagcagtcagacccctatccttcaataagcagatttcagcgagcaacactttggcttcggctacctctgaaaaagtgggagactccacccagctaggcgtgcgaacgtctggttgccttcctgaccgaggggggagggatttgccgtgattctccatggtgaaccactcgaggcgccatcccttaatgctgtccttgagggggatatcgaggtattccactttcctccctcggcaaagttctaaacttgcgccgccgacgagctgatgctgccctctagccatcccgggccgacagtgatagaggtacctacagattccgaaatgggggagaattccaagaaaagcctcgcaaagatgtacgaaaatgacaacttgaagaatggagttagggttcaagtgtggcagattcaaatcgtagaaatcaaggagaccgcggaaaaaaggatagatgggaacaacaagtccg

SEQ ID NO: 186859 - DNA, 328 bp, Zea Mays
ctatgtctatcaatttatcatttgatttcatcttaattatattcatcaatggtagatgaactggcagtctttctataggtggccaatggtaatgtatctcgtatcctaataatctccaaagagcatcttgctcgcatatatatctgcagtctagatattcttgtatctcatctatagtttctgcttctttgtttacatgtgattcttctcctttttggatttttttgaatataacctttgctctatcaggtcctttgtttacatatttgcataaatatttcaagactgtactcttgtttacatattcaacatttatatgagcttggta

SEQ ID NO: 186860 - DNA, 290 bp, Zea Mays
tacggttacgggtacgccactgggcctggtccgggtcctggtcctgattatggcggtattggcatgaacggcggcggtggttatgaaccaggccatggtgtcatgtatgggcaaagctatggtggcagcggcagcggcggcggctatgatgaccagggctatggtggcatgggcagtggtggcggcgctggcggctatgaccaaagctatgctggcataggcggatatggccagagcttctttaacatcagctacgctcgcagccagccacctccaccatctgtctcgca

SEQ ID NO: 186861 - DNA, 478 bp, Zea Mays
gaagattgtggactaaagaaggagcgacaagaacatcgggaatgcgaaaagagccgggagagccgacgacacccacagatgtgacaggaagacacgagccattcgccaccatgatagatgaagggagagaggaaggagggtgaacagaggtgagtataccagggttgggagtggtgtggtaggtagcaccggtgtccgcaatccacttgggacccatcggcggagtcaaagtgggagtctggaaagcagccagggcggccgcgtcccaaccaatcagtccggacggtggcgtagccggcgacgtgggccacgacgaaacgacaggtgtcgagggccagggcgatggagaggcgaaggcgtaccccgacggcgaggtgaaccccggttgcgcaccagcgaacatgaccgccgggggacgagcgtctgaaccgggcccctggaacggccatatggagatgcgtccggaccacgagtggtg

SEQ ID NO: 186862 - DNA, 315 bp, Zea Mays
ggacgcctgcgtgggacaggtggatttggatatgtttatgaggtatggttgagatgccgtcatttttctagcagttcgaatgtttccttccccttagcctcttttaagttaacaagttaagcaggggataccacatggtaacgagggagcgatggccgtgaagaggcttaaagaaaaaataggtatatcaccgaaacagtttgagaatgaggttcataatctgagcagaatcgagcacaggaatattgtacggcttataggctactgcgatgaaatacgggaaatactatctcatggtaaaaacaagaatgatcc

SEQ ID NO: 186863 - DNA, 525 bp, Zea Mays
gtagagcttcacggggaaggtaatggcccacttgtgggctagggatttgtcatcggggcttcatcggcgccgtggcaccgtgctgtggtcaggttgattcgccgtgcatctaccggtgaatgcttgctcagcaggtttgccatcctttgaatttcatttaactccaataggatgggtgtctcgtgtattcgagcctctatgcgagtccgtcggccatggcctccgccatgacttgttccagcgcgtcgtggcccgaggtctgcattgggagatcgacactaattgatcggggaataggctcggggtgtcgtcgggttcgcgagagccgggtgaattggagtaatgcggtcggaatgggcgcattcgccaactccagtgaactcgccgtcgcgcgaggtgctgtgccgccgttagtcgggttccggggttgatgaaggacagcgaaccgttcgatccatatttggaggatgcgattgattctggagagcagcacttcacgtggttgatctggtccgttgaatagca

SEQ ID NO: 186864 - DNA, 524 bp, Zea Mays
catttcattaagaaaaataagtagcaggggaaagaaccccagagtacagcacgcctaaagcctattacatgaaagagagagggaatacatgaccaggacagccaagagttatcctctcctgcctactgccccctccagcagggagcggagacccttagctccagcctcacaagtcacaccacagcgagccctcattggcaatattttggagcaccaccgaagcgtccggtgcagagctctcaaaggtgcaggcatttcgatgcttccaaatctcccaagctacaagaaaaactagagtgttgaggcccttttgtagttcctttggtgtcaatctgatggaactactccaccacttcataaagctgccattccagggttgaggcaaaacagacccaagtcaaagagtagtagaaaccaaacttgtttggcaaagacacaggagaccaacaggtgttgtattgattcagcctcttgatcacagagagggcaagctgcagcatgcgggaggcctctcatcgcaaggc

SEQ ID NO: 186865 - DNA, 295 bp, Zea Mays
gggcagtaggacatagaaataacactgcatcatccgcatacaacgagaaacggtgctgcatactcctagaagaaagaggctgaagaaacccttcctcagaggctcgctgcacaagcagattcaagacatccattacaagaataaacaacataggcgatagaggatcaccctgcctcagtccgcgttgatgcccaatacattcccctggcagaccatttagtaaaattttggtagaagatgaagctaacagcccgcatattatatcacaccagagctgtccaaaacccagtttttt

SEQ ID NO: 186866 - DNA, 692 bp, Zea Mays
ttttgataattagatggttcaacagttacatcaacaacactaggaaatccatagcaatctggaggttcaattgtactacaatcacgaagatgatatccctggtgatttggtaacgcatcaacaaactgtgacccatcaacaatctatagatcatcagaaacatatgaagagtcatcattgttagtacaaacatcaacaacatgtttgccatcaggactggccatgggactagtgcaaggacgacaaatgtaggttttggtaactggtggttttgaagcgaagtgggaagtgggtgttgaggtagaatgacttgtaatgggaatgagaacctcatgtgaggatgtggtagacgatggtgtagtggaagatgaagacccagatggagcatggatgggaggaaggcacatgaaagaggttgactctgtagaaaaagaagatgaatgtataagagagttataaaagaaaggtcaattttcattaaaactcacatcaggtgaaatacgaatgcgacatgctgaagggtcataacatctatagcctttgtgctccggattatatccaagaaaaacgcactcaacagattgagcagttaatttagtttgttcacgagaggctaacaacacgtagcatgcacatccaaaaactctaagatggtcatagcgaggagttataaaaagaacttcactaggagt

SEQ ID NO: 186867 - DNA, 364 bp, Zea Mays
aggagggcgcaacaacagcagctgcaacagcaacttcaacaacagcaacagcagcaacaagtaccactgcctccaccaccaccaccagttccacctcgtgataagcaccgggaatttatgagtcataagccaccgaccttcgccagttcgccagatccacttgatgcagacgattggttgaagtcaattgagaagatgctgaatattgcacaatgcactgaccgggagaaggttttatatgcttctggacgtctgactggtcctgctgctgactggtgggattcttatactgctgcccatgatgctgctgatactattacttgggcagagttcagtacgcggttcaggaactaccatattccag

SEQ ID NO: 186868 - DNA, 322 bp, Zea Mays
gcatccgagaaagaccaaaagtggagcaccatttgcatggagaaggtctgaagctatccacgaagttacttttgagtgggagcttgtcccttgtgtgggcattccctttcatggggctccaacaaggattaggggaaagcttgcatgctttttgatacctcggtaaaatactgatgcttcattggatgtgaaaggatcacgatgcccaagagagggtgaattgggcttgtctaaaattctaacaaaagattaaaccctaaacatgagcccaacttcacccaaactactagaaacaagtaaaagctatggaatagagaacaac

SEQ ID NO: 186869 - DNA, 408 bp, Zea Mays
cggaggtggagactgcgatggagggagtgatgggaggctggcgccgagcgtcggcagtgaatagggcggaggcgctggaggggaagggggagaagactaccgcccgaagccggaggtcggacgtgctgtaggagggagatggtggcagtggtggccatggtctggagacggacccgagaccagaggcctccccggcgagcggcggatcggaggcggagagggtggtgggtccgctgctggctgctcagggcctggcgccgtgtgggggaagggaggcgacggacatggggtgttgtggtgggaaacggaggagccgatgaggggtgggaaggagcaagagaggtggtggactggtggttgacgagcgccggcattttaactcgagaagggagaggggaggggaggacg

SEQ ID NO: 186870 - DNA, 547 bp, Zea Mays
ttctgccacaacatgggggcatggcggcgtcgcatcggcagtggtaggcggaacctgggggcccaatgacgtcgtctgaatagtggcagtcggaggcaggtcgccggcatcaaggccagcagacacctgctgctgggagccggactcaccaatgggagcgactttggagacagagggaaaagaggccctgacaagtaaaggacgggttaatactcgtcaacatggtaactaaaccaatgggggaaatgagaaggggtgcacttacttggggccctggaccttccaacgaccttggaagcgagacttccgttgcccttgctgctgttgttgttgttgatgctgctgcccctgtggcgttgtcaggccagatgatggtggcggcgggggcggcgggactgaaggtggtgctagtggaggactggcgcgcctctgcgagccctgggccggggagccggcctccccgaccctgccagctgtcttctggcgcttctgagggaagcctgaatcaaggggcggatccgcgacgaaagatccgttggcacgacgc

SEQ ID NO: 186871 - DNA, 390 bp, Zea Mays
ctcgcgacgcgtggccacagacgcggagaaagctaggcctcttcgacggaaccgaaattttagttaaatcgagctgagccgtgacccaggagtccgtgtactacggtgtaccggcgccctcctccgctaccttttcttcaccttctccacgccacaaccagacggggtacgtgctgcctcgtcgccaccaccatcgctcctcctccccgccgccagaggctaggacgaggcaggagacggaccgacagccggcgatgtcgccgccgacctgtcagacatggagacggggcccgagcaggaggcgtcggcggaggtggatcccttggtggaatggtggctgctgttccggctccggtcaagaagaagcgaaacctccccaagactccaggt

SEQ ID NO: 186872 - DNA, 464 bp, Zea Mays
ctggttcatgaagtgtctgagtatgatgatttcttctccttgggtggtaactcaattactgcagcacatgtggcccacaaattggagattgacatgagattactttatatttataccaccccttctaaactttttcatggtttacttggggaacacagtcatgtaattcctccaactcctgaatttcacaacagaaagaagttgagaaaatatgcaagcatatcagattcctttggcccagtttctgaatatttggacagtaactttcatgaccaagggcagataagtaaagagggtgcatacgatcactttgcagggaatcatgtaagtgatatagatggccagcttagcaaaagtaggacttacaatacataccaagcaaaaaacctgtgccctgatacatgctcaaatgatgaaattttcagtggcagaccatggatactaaattttcacttacaaaaggt

SEQ ID NO: 186873 - DNA, 868 bp, Zea Mays
ctagattggtagacgcatatacagagagaggttggaaacgagtgatcgtgatgctgacatggaacaaagacgggcaagtgtctatgctttgatatatgaatgagatgtttggaacttcctgttggcccatgttataaccatgtcgaattttttgcaggcatttcagaagttaatttatgtgtccaatcttgtctttggagatgcatctgtattcctacttccttggaaacgtctgtttggggtgactgattctcaggtaattaattataaaaatgcttgttaattttttgcatgccttctctcagttttatgctttgatctcacagagttatttgttctgtattttgaagttcagttcgttttttctggcaacgttgctctttgcatagttgttatgctgcttttgatgcagttgatatttcgaagagtttggacaaatgttcatcaagtgttaatgccactactcacagtccaaataagaatgtctttctttacttaccatggtattaagtatcatttgacattatgtttctagattgacattgctatgagggaaaatgccaagaatttatactcggtgcagctcaagtctattggaagaggtaatgctagaacacagttttgtttaggtgttagttcaattataaagtcatagtgtcatattattcataagttttgctttatcaagtaaatcatatagtgtgctgtaaagacagcaatatcaattttgttgttgttatatttattgtttgatatatctcttattgcatctcaagaacattctgaaatcacaaaatgctctcggtttaggtcttgacataggcacactcattgaagtaaggagagcacaacttgcatataaactttc

SEQ ID NO: 186874 - DNA, 294 bp, Zea Mays
ccggcgtccgccgcgtggctctgtctttacaccgtgccgttgtgactcctctaggccatcccatcgtcgacggggagcttgccacgccattagccacgatttcaccgcgacgtcttcttccttatctccggccacctccgctagccgcttaaattaaagcgccaccgcctcggggctctataaattgaccccgccgtgagcttcaccacatcctcacgcattcagccaccactaatcgctagccgtccttcgctagaactcgcgaattttggatttcccccaaatctattttcc

SEQ ID NO: 186875 - DNA, 326 bp, Zea Mays
gcaacgtctgtgagcagaacaaaataggttttgattcagccaatgggaggactagagttatccgggtcatgtccaatgatgaacttgttatgtctggagaagggagaatctatatggattgtgaaatgaaggagattgaagctggtggaggaaggtacaggagagggacaggtgacgactacatggtttatggtcagggatgtcagatagacagacattgtttgttggatcctcttgcagaggcccagtacaagaatcctgttcagcaggacaataataggaatggtgttacggatgagtcctttatgattcctcttaggtccagc

SEQ ID NO: 186876 - DNA, 375 bp, Zea Mays
ggaaacaggaagagggtgcgggcgtgcagcagaagcaagggcgctttccacatccacagctagcctcttgcgcttacggaaagatcagaggggcaggggcggagcgtctgttgcaaggacgcgcacgagactcgtaagggagaaaccaaacaagtagcagggagctcaatcgccgcggaggggatcgatgaagtcgccgctgcggaggttcaggggcttcggccaccaccacaccaaggaggagcggaggggccaccaccagccgccgccggccaagctcgacgagctcgtctgcgccgcccaggttcgtcgtatctttcatccctcttcttcttctttcccctccgctggccgtgtgaatgaacagcactgtag

SEQ ID NO: 186877 - DNA, 740 bp, Zea Mays
cgagctgcaaaggaggttgaagtcagccttctgatggatgaagttgaaagggctcaagcacgattagtcagtcttgagagggaaaaggtagccttgtgatttgaaattccagtttaatgcttctgagttctgactgcttaacatgtccaacatgttacaatattttttaccaccagtcatgtgtgaatggtttaacatacttactggtgtcagtttttttggtggccatttctgtcctttattttttccagtttctgtagaaatttgtctatcagaatcatgtataaaatctatgtttccgtggcacgcaagcaagaggagcttgttcccacatactcattgttggtatgaggataggacattttggaatatgatttgaacttggagtaaactgtaccaaatctttcctgatgatctgcatccttaagagtcagggccaaattaactaaactatgattcaatcattcagggactaaatagtgttaccttatattgaaagtttagtgtcaaacactaaccacatttttctgagaaataatgctatgtagtggtaccgcgttaacgtttcacctttccttattcattatgttagcatcaaattgtggataacttcaaatgtgtaaaactattgttttgctcagtgcatggcccaagataacttttcctattcttttttacttgactacagggggatctgcgttcacaattgcagacaactaatgaggatgcaagcaaaagta

SEQ ID NO: 186878 - DNA, 271 bp, Zea Mays
cgtcaattaggaagtcctcgaggccgatagtcatgctaatgctgtttgggaacctgcaacatgagaccttgtcaccgtttgccaccgtggcctggagataaagttgttagtagaacccgtgtccagtagtgctgtgagagcttgtcctttgatagatacctccagctgcattgtgccctcagatcgagttccagtcaaagcttgcagtgatatcattggttctggttcctcaggatcggtctccatggcttcctcctcctcaaaatcagcg

SEQ ID NO: 186879 - DNA, 359 bp, Zea Mays
aacgtccacccggtacaacggcggtggcggtcaatactccaattcttgggaagatgcggcatgcatgagcacgccgttccaatcatcggtattattacgaggggcgatcattgaacttccaagccccgatgacccacacgtcagttctcctggcttgcaattgggttccatgcccactctgcttgttttttaaagggctcgcacatttgttggctgggcagtggctggacactcaccgtccccacatcaatagacgataagaagaccgttttcaacagttgataagaagacggtcttcaacagttgatgccatccttcctcccaagtcccacctatgttttaggagtttccctcgacta

SEQ ID NO: 186880 - DNA, 285 bp, Zea Mays
caaggggttgatgcagatctgtgaggagcgatggtgccttcttactcgcgtgcgatactcccccaaccgtctgtactacatccggctcaacatcgtgcaaccgatgtgcctcaccacctagggcgtggacacagcatggctgtggcacgaaagcttcggacacatcagcctccagatgcttcggaagctctccattggtgacatggtgcgaggacttccacacatcgatcatatcgatcaggtgtgcaaaggctgcctggccgaaaaacagcggcgacattcatt

SEQ ID NO: 186881 - DNA, 340 bp, Zea Mays
tggattgatcactgtctcacttactttagtatatacagaatcccacaggacatttgggtcgtttctgcctcgttacacatgaaagagaatgctgcccgttggtaccaagtccacaaaatcaagcatggtattgagtcttgggagggcttcactgaatcagtcatgaacaaatttggagctgagtcttacccccaagccatgcgacagctgctcggcctacggcaacagcactccttattggagtacaccaaagaatttgaagaggtccgttatagagtggctatacacaattcagagattgatgaagtcttctttgtggagcagtacatcagaggcctta

SEQ ID NO: 186882 - DNA, 634 bp, Zea Mays
tcacccaggggccaggacaactggttctgaccagagaaagctcctctaaaaaagccaatttctcctcatctctatggggtccgtagacacccgagaaccaccaagcggtgctgttttctttcataaaacagactgacactgaatggtcatgaattttggagtctatagcagaaatgagccctctacgccaggctatcaaaatacctcctctagtaccactagaaggtaagaaaacaaaatccccaaactctgagccaagacaggaagcaacatcccagtgagagatagaattcagcttggtttcttgaatacatacaatagtaggcatcacacagtttattaatgatctgagagtatccctgcgatgagggtcattcaaacccctcacattccaaaccagtatagcaaaattattcattgtgagatagaatacgaccatgtggggtaatccacattacgaggcttgcagcagcccatcagctggacaaacgaggaactcctcatcagggatctcccatcggaacaaggtagctaaagcctttatctgactgacagaaagaggcttatcaaattctctagcacagcgatctagatcatccgcagaaacaggagcatctccatttttcaaccccag

SEQ ID NO: 186883 - DNA, 812 bp, Zea Mays
agtaatgtcattgacgcaatgctttttgtgtttgggaagcgtgcaaagcaggttggtattgttgcttaatgttgattttttagtgattatcactatattcatttagttcatttcaccgggagattttatgttatttgttctatgtcaacaaatcattcgatttgtttatagcctatccaatggtagattctagcatgtcactctaagttccacaataatttaaaagcctgagagtaatatcctgccatttaagtttgtaaacatataaattatcatcctaagtattatgtgaaaggattattctagaacctagcacattgatgcttcaattgtattaatcctcttggtttagataataatcgtattaatcctatggttgccaagtagtctgtgttttgaagttgatactttagagttcctgtctgctaaatgtactgtgcatactagtttctcgttactgttacctgttttccctttgaactttacatggacaatgcaattttcacaaattcattcgtacaagtgatcagattcattttttccttaccaatatctctgcttttaaagaaagtaaaaataacgtttgagatacaaaccccactggattaccatttcacaaggaacatatacggaaataaaattgatccaatacattgttagtcgctatcattacttaggataattttgtatttctcttgttcttccatcaactgcagatgcgcctaaacaaggtctccgagctcatacacaattcttccaatcatcagaacctagacagtgctggtgtttctgttcattttcaagaaattatt

SEQ ID NO: 186884 - DNA, 402 bp, Zea Mays
caacaaacttgtcatttctgctcattgcatctcctctctcgctctagtctcgccaaaaaggtcactttcgtcgattgtgcgtggacggagaagagaagttgcgcacggacagtccgcaagcttgtggaaaagttcaaccaacatgtcatcatcccggtatttcataatcttatgtatttcatcaaatctcttcaactttgggattattcggatttcctctttgatctagaattgagcaatagttttacaaatctgattggtgggattattagtgctactcattatgaacgttgtgcaaaaatttgaacgcgtttggatggatattttccgtggaatcgacatttcaatgattgaggcgattagggttctagagcgtcgtccctggccggtcgcggaccgtcc

SEQ ID NO: 186885 - DNA, 356 bp, Zea Mays
cttggaatcccacgaaaaccaaataggcaagtagagctgcaatgtctatggtatgtttggaactcctacagataattgttagcagctaaattcctaactaattgttagctgaacctccaaccaacaattagcccattagttgactcaattcccagttaaaaggtgctaaagactaatctgcactttattcatccagagtaccgcactcagctggccccctttcttgaacccacccgaccccttcattccatcagcggacaccgtcacctacagtgtactaaaccgtttaaccctaaaaaccgccattcatcgatgacggtttacgaaaacctgtctgcttttcattttaaattata

SEQ ID NO: 186886 - DNA, 302 bp, Zea Mays
cttggctttcggaagatcagcttcgcccttcttcctttcttgaactcagtacagcaagcgagacagctctgccgcgctggagcatgccggcggcgcgaacgcagtcgcctccgccgcggcgcctagcgctgatagctcgggtttaaaggagtggttggggaggcgagagagagattactggagcagacaagacaaggcaaggcaagtactttgaactgcttggggggttggtgttagtgttagcagcaagcaatgagccaatgacctgagaacgggagactgggagagagagaaggacgtaa

SEQ ID NO: 186887 - DNA, 403 bp, Zea Mays
ttggaaagtagaaagatttcaaggaaacaattgctctagccaaacgagtcaccacttttatttataggcatggaaggatccttagtggaatgagggagcaaacaggtggcatggacctagttagacctggagccactaggtttgtcacttgcttccttactttgaagagcctacataagcatagaaatcatttgaagggtgggaagggatgcatggaagtcaaacaagtagtcaaaaacagaggctgggaagggagtttatgacattgttctagcctcaatgttttggagcacagttgaagattgccttagagcttcagcaccacttcttattgtccttagggcgatcgatggtgatgagaagcttgccatggtggaagttgcaacactaatggatagtgcaa

SEQ ID NO: 186888 - DNA, 631 bp, Zea Mays
ccacatagaagttgcctacaaattatagaacaccaaaatagatttcagcgcagaacttgtgccaagctcaaagccaacagttaataaaacattcacttttactatgcaacagtgtgtaattagtcgacaatagcttcaccatgagcgcaaaacagattaggagcaaataacttcacatgtataataaaattccttcaaggggctcgccacgcagctgggctacgaatggctctcgtctctcccgcccccgccccttcggctcccgacgccccttcccctccccagcaccagcaagcgccggttcccattccggggccggcggccaactcccaggctgctgtcgccgcagcttcctctagccctggcgcgtcggcttccatcccctccttgtctcctcctgtgtcccatgcaaccaaagggcgctccaagtccgttcggtggggtgacctcagtccggcttcttcggatggcgcgacgtcgttcgactcccggccttccttcaaggatgtgctggtgagaacagcgaacccttcgccgcccggccgcgtggcagcccaagggtctgtcccggcagctggaaagtcctcggcgctagggaaggtgtaccgtcagccgcaccccctgtctacaa

SEQ ID NO: 186889 - DNA, 641 bp, Zea Mays
tgttgatggacctataattggctgaaccatgctttagctaaagtctatttaacaaagggagcatacataatacaaaccaccaatttcctgcaaccatatccagaaaaaaacactttaaagttcaaggttaactgtcttaagcaaggatttcatctgatacatgtgttgcattattcacccttttagtgctctttaacatgtgtgcacatgacttaggagttttagctaatttatgttcagctgcatttattgtcacacattttttgtggaaaacttgaacctagacaaaatctgcatcgctgcttaattagttgatttattccctcaggtttctgttcatttcctctgaaatatgttttgggatggacctcggccagaagtgctagcaacaaaagagacaaacaagcaacccttttttgactttggaatttcatgaattaggttcatgaatgaacacgccatgaaatgcatattttccattatccacactgtcatgttcattcgcttgtttagatagaaaggtctacatgttcattcaactggtaatcaacagttttctgcaattattaaaccttgattagtcagtccatggctactcttgtttctgggttttaaagagatgtcaatattgttcgcacaac

SEQ ID NO: 186890 - DNA, 342 bp, Zea Mays
ctcctagtaaaatcacacagtttccagttcatggtgattaagtagatctaccaaatgtgtctaaacctgattaataatatgcaacacaacattaacccatgtagtgctacttgtacccccaactgtccattctagtctccggtgcctgggaactgatgaccgttctagtctccggtgcctgcctggtattattcctcctgttcccgccagcattgcctgcactaacgagcccccaggacgacgtcagttgctacagtgttctatagtactgtacctgtacgtactacatgcaagagtaaccttctaccaaagtgagtgaccgccactatctcttgtccaagc

SEQ ID NO: 186891 - DNA, 338 bp, Zea Mays
agtagggaagacttaccgctcgctggtgctgcgggcagccatgcatgtgcacaagtttgtgcgaacagctgccaccttgtgggccaccaccttcgtgcccgaccgtagggtcctctgcctctcgatttgaagatcagaagaaacaccaggagctcgggtgagtaagagagaaaaatagaagaacaatagctggaggagtaggggaggaaccgaggaactcactatggctctcgccaatgactcgtcgacaggtggtggtggcgctctttggactctggttgctgttgtgggtgtcgtgatgtgttgcgacgaacatattgggttacacatagcggagg

SEQ ID NO: 186892 - DNA, 273 bp, Zea Mays
caaaaatgtgattcttttacttgtgattcatacatttgaactaaattccactattgtagagtaacaacctaaatgacgacagctttttgctccatcacaaattccagtctttgttgacggactataattaaatacttcaaatagctgaagagaattttgaggtttcgttgatcttttgatatacgtttcagaggaccacaccttgtctccatcttctatacctttatcacttttgactttttaatcgagtgacctaattattgttcataaaac

SEQ ID NO: 186893 - DNA, 727 bp, Zea Mays
atcatattgtatgcagattttctgctatactgacctgaagatgaaaacttccaagaaaaatgatctgggacattaggatgtagaactataccctcaacaagctcccaaactttgaggaattctatgaaaacctgaactgttagagcgcccttgacatcaaccacccagcctctgttggataatgcctggctcactgtacgcttcttaattactctctttgggattgctaggatcagatttggagcaaggtcagccacactctttccttgcaaccaattgtctgtccagaatttggaagaaataacattcccaatatttacagttacggccatttggaagaatgcttgggcttgcttaggattattaacaagaagaccaaaccatagttttgagggatcagttttcataaaccataaccagcggatacacaatgcccaactcatcctttccagataatgtactccaagactgccaaacatgtaaggtctttgcaccttggcccatgagactaaacaatttcctcccttggcctgttcttgccctttccaaaggaatccccttctccttttatgaacagccttaaagaaccatttgggcagattcaagacgagcatttggtgaatgggtgttgctgacattacagatttgacaacaaccaacctgccaaccttgcttaggaggggggctttccatcctggcaatttattggcaatcttgtcaatcagag

SEQ ID NO: 186894 - DNA, 470 bp, Zea Mays
ctttaccatttgttagcgttaaattaatcaaataaggactaataagtagacttactaattttatacaagttatttcgctcgttagaattaccgtacacaatcaacaaacacattcaccacaataatcaaacccagtataaatgtgtatatcgattgcgcccttcacacactaatttgtatttttacttagacatcacatgaacaccactaattttacccgcgaccataaccatgcgcgtctagaccaaaacaatgtttactatcgactaagagttctaagtattaaacccattattactttccatgcgtaattaaacctcaacttaacaccagtgacaccagtggatttttactaaactcatcatgcgcataaccctgtctcgcatacaaccaaattgtggcgtgcactcgagacacttcgatcaatgtggcgcaaccactaatatatgaactccgacactcatgtctta

SEQ ID NO: 186895 - DNA, 806 bp, Zea Mays
aagcaagacaagatgatttagttggtcctgaagacgagagcaagggatattttcaccagtcagatgtacaaagatcagatttgtctagtaagaagaggatagtgaaggaatgggaggagagccagcacaattcagtagctcatgtaagcaaaggagctgtcaaagaaacctatagggaccagaacttaaaggaagcaaagttgaaatcattgaattctgaagagctgttttctatgacgagcaccaaaccaccaaaagttcaacatgctgatcaggttttgtcttatgatggggggcgtatgaacagtgagttagttgaggataacacactctttagtggcaaaagaggtctgcctgaacaagaaaagagcctttctgatcaggctttggacttgggtgaacctgctagtgatgtggcctatattcagacttcagctgtaacttcaagttcttcaaaggcttcggtctcacaaaaaaagaagcagaccactcaagctatgaagacttcaccaattgagcctctttcttcatcaccacggaggaactccaacattgacaaggtctctgtccctcatagtagaatttcaggtaaggatggatctctgaatgctaactcagccactgtgccaatcatggcaaaacaactaaatactgaagttcgcgtagcaagcaatgatcaacggtctagtgaacctgtttcggttggttctccccgaagaaaatctgatagggataatggactggttcagttaactcaaggtcatgcctctgatggttttcatcttgaaaggggtttcaatgaggac

SEQ ID NO: 186896 - DNA, 358 bp, Zea Mays
gtctcgtcaggctttcgctactggaggtggacagccgcttgtgcccgttggcgttgaactgcgtggaattcctgcgcatctctgggggattgaggctgctgaggctgttcttggtgctttctgtttgattcatggttttttgcctggcttggtcaaggaggaagacatgtctgttctcagactgaaagtatggtgccggtcacctgagctgctgccggcggtggtggatctccttgctgaagagccgatggtctgtggagaggatgggagatgggttcctagcacgttggtgttccctgtttctgtggtggttcttcattctgatggaagttcagcttccggtgtggatcctccagcg

SEQ ID NO: 186897 - DNA, 4584 bp, Zea Mays
atgaattatgcgatcacgaaagggaggggatactgggtagcaattggtgtggagaggaaaggttcaagttgattttaaccaaggcagcacgacggcagcgacgacgacatacaacaacacgacggtaggggtgatgatggcagcgccatcgggtggtggatgcagtggctgtcttgactgcctgcatgatattgtgcatgcactatcgatgggatcatgcctgacagtagagcagcggcctgccatggctacgggaggtgcgcacaaagggagagatgtaaaagagaggaaggaaaaggtggagggtaggataataggaaatggagtgggtaatttggcttgcatgttcacgcgacaggggaagaagggtaccaaccaggatgccatggttgtttgggaggtatgttcccatcgaccttgattatatttctttacattgctaaagggttcacctcttttacactctgttctttttaaatttctaatgtttattatcattcagatcgtctatctataagaatcaataagaaatacatgcatataataaggcatattgaactagaaaagaaagactaaaaatcaaattttgctgagctatccacccttttaatatctaaggtgacattatatattgaaacaattcagtttttgtacgtgatgtatcttggtggaaacaatcaatgacgtagagtattggccaccgatcttcattattcctaaaactgtgcatagcctcttgttcctcctctacccttggatgcacccctaacctattcttgtccattcagcatgctaccaccctcccttcttttggcctccctcaactatcaccttttgatgtgtttttcttcctccttgcacatccatagatcaaatagttaattttggatttctcattgcgttctcatggaatatttctttcatttttcttattttctaaaaatataatataatgcaccaatcaaaattataaaaaggacaattcaaaggatggtttagcgatggagcaagcaacatctccatcagggatggaggcagcagtagggcgggcgctcgagccccctcctgttcctgagaccatggagtcccactgaagtctccactaaaatttaaaatgtacacaatataatataaaaggggcttctatattgtagtgatttagtttaggctctcctaaactttctcttggctccgtctttgatctccatacagtttcaattaaaattagaggtttggatattacaaacaatatattgatttataaaaaaacatcttgtgatttgaccacctcaaaatagtatcactgcttattattaatgtagtaaacgaagattgtgctttgggagatgtatgcaataaaaatatttaaatatcgattcattattgactgcagtgagttgtatataaacatttgaagtcaaaacaactatgtttctttgttgatctacaaatatggtatatataaattagagcatgtttggcatggctctggctcttttaattatgctccggctctggcttctcttcaagagcaccttatctataggagctagtgttttttaacaaaatcgtttgataaaacagctcctcttgacacaagagaagggcaatatggagagtgggggaggagccgctaggagctagttttttttgctctggcttctctctataaaaacgactctggctcctcagtgctctttgttgagagctatttttagaccatttggaagggctcctacaggaactggagccggtttggaagccctctcaaacacgcccttagttgtcaaagttgtattttgtagattctgtgatgtccaaaacaaacttcctctgaccagatcaagtacattttgcctaagttttgacaatgaaactgttgagatttaaatagcagaacgtgacacgagaaaactgcggagagagtggcagaggggccctttctccctcaagccatcacaatgcgcaattgggtctaggagcaaggttttggtgtcgtgcacaaaaattccaccgtgcagcgcgttatccttcggtagtgtgtggtggtgatacaagtttgacgagttttgtgggtttgtttgttcctgccatttgcctgtctgcattggctaaaaaccttggcaagcataggttagatccaacaatggcgaccctttaggcaccactctcttcttggaagcattgccaaatttcccttgaaatatggggaaactctgccttcattgttaggtgcgctagggctacctgtgcgtaggtagctgatgcccgaagatgtggatcaagtagatgagagatgatgaggatggttggttccattggttgtatgttcttgtcatgtttgtgttggttgcttccggttggtcagtcaagatgttgtttggaggcttttcgatggttttcttcagtgatctttttgtttctaaggtctttgaacctatttaaccttataaacttagtcaattatcttctagctacgatgaatagtagatctgccccatttctgaagtttcatataaaaacataatggatatatgttctaggttcaacaattctatatagggggcattagtctagattttagaatcattataacgctgtatcccaaaagacaagtagaaccacatgctaaacacaataagaacatgtctcaaattattgaccaatcctaaacaataaagaccattcatgggatacaaaagtctgcatagctactgcattcgaattgtgggaatcatgcattaataggtacattgaataatcggtttgatgcaagtgtgtctagtgcgagagtaagtcatgtaaaagggtttttgtttagacatcccaaaagaaagttcattcttttaagccaatttatgcttcaaataacacccacaattgtcaatagattcacactaatagtttatcacatcgattcaggtgaatgggattttcccccatatttctaggtggtgtaaattgtaacacaatatgagcagtgtgtcgaataaacataacataatggtagtcaagaaagagacattgaatggattaattctaggtacaaaagcatcaatgtttactttcattataattcattagcactagattatgttccctttcattacaaatttggcttattttcacttccattttgacatgctcaaataaatgttgtgtcaaaacgtatttcataagaaaattaataaaacatatttaatgatgtagatgttgatgcatttttctaaaaattgggtcaaatttagcaagactcgtcctatctttagtagtgtaagaatatattaatcttcataggtatcttaaataaaaaatatgtgtagagttctagatcttgtcgaatactacaacatagttatagagcatttgtccatccatggttgtttgactatttttttttaaaatagcatttaaagttttgcatacttgaaacatataaatgggtctctagaccatctaaaaaaatagttgccaccttgcacaatttcaagataaagtttgtcttcatcctttttatttataaaaattataaattccatgctgcacctatttctaaggtggtccatattaccgtacctaaggtaattttaaatgcttgtttttctaggggtgcttggtaaaccaacccttggaatcactttccgttgagggtttgtctcaatatccatttatatgagcagctgaaattaaaactgcgtctaaaacaagtgcacctctaaaaactacttcgtgtaatactccattcttgtttttctaccacattaggtttgttctaagtaaaacattactatctttgaccttcattttgaaaaatacttaacgttatggattttatatattgaaaatactttttatagtcactcttaaaacctaaatcttatattataaatatatatatatatatatgtatatatttaaattaagtcacttttaagacgtaaatcttatattacaaacctatatatatgtatatatttaaattaatatctaataatataaacatttgactgaggataaacctaacatgatatgtaaataaaaacggagggagaagtgataaaaggatgacatataagcttgaaatctaataaaaatagagattgaaaattttccattaaggcagactccatctttctttgacaatggcgccctttaaactaataagtacatttgtctcttttctatcttgtatatttgtattctatttatatatgaccataacttgcattgtgttcagaattttaatggaaggtcagacacgattttttgtggagtttttgatggccacggtccgcatggccatattgtagcaaggaaagttagagatactctcccttcgaagctgcgtgctctgatatatgatgactttggggagagccccatttgcaattcagatggctcaattctagaagaaactttatctccgtacgctgatgaagaagacaagtctccagtgtctgtagaaaaaggagaacgtcaggaatcctttttgtcaatgaaagattcattccggaaggcttttagggtaacagacaaagaacttaaattgaaccggaatatcgatagcatttgcagcggaagtac

SEQ ID NO: 186898 - DNA, 676 bp, Zea Mays
aattcttgacacacacacacaccgatggtaatggtgatggagggaggaaggacggaaggcgacgagctgattgctgattatgtggattgccttatgtctctggacaccaacacccggcctgtccacagcgatggtctcatcctcggtgctccaggcgggggaggagggacggtcgatgccggaactgagccagatgccatgagagatatcccctcatccgaggaccccaatgagcccgtgctcggcatgacgtttgagtccgatgaggccgccaaggcattctacaacgactatgccaggcggcttggcttccccttccgcgtcggcaggtctcggcggtcgaagggcacagaggaggttgtcgtcatgaagaggttcgtttgctccagggaaggggtgtacaagaagaaacagacctcgccggatgaggcggcaaggaagcgtgagaggatgtctatgcgagagggttgcaatgctatgatggaggtggttagggaggcggaccattgggttgtctccaaacttgagaaggctcacaaccatgagctcggcacttgtagcgccaaggttgggtaccttcgtgcgagaagttctcttggtggctctgataaggccacaatggtggggcctgacgagatggcgtttcttaggcagaatgtcctgggggaaggaggag

SEQ ID NO: 186899 - DNA, 994 bp, Zea Mays
agggtattttagaatatttctctaggtgtacaagctcattttcttctttagttaggctgctatctgttcattattcttttgtactgctatctgttgattacttatttttcgacttttattttttaaaaaatattcagggtgagaacgttcctgctccgtttatgacatttgaggccactggattccctccagagattctgagagaggtatgtcctctttagtttggctttgctacttgtggatccatggatgcattatctaaactttatcttaacctagaaattcttgacaatgtgggccgttgaaaatgatatctttgaaatggaaaattatcttctctcatagtgagtgcattgtatgcattgctcaatgatgtagcacaatggatttacggtgatgctgagtgccctaattcaacaataggttttcaatttctgggcactgtagtgaaatacttgtggctattttctgctgacaagtattgggaggattgatgttgtttcagattataaaatgaggctgaggcttcctgcttcttgtctctgccactgaatcaacaaagagcttcttcatgccttgagttgcttaagtaagcagccatattcacttaggatatttaaccactttctcattgtttgcaaccaatttttacttgctatggaaaataccaattatctgctgcaggtgggcatgcccttatgatgcttattcgttttttcatttaagatccatgcagctggtttttcaaatcccactccaattcaagctcaaacatggcctgttgcgctgcaaaaccgggacatagtagctattgctaagacagggtctggaaagacgctggggtacctaatccctgcttttatacatctgaggagatgccacaataatccgatgctgggccctacagtattggttttggcccctactcgcgaacttgcttcacaaatacaagccgaagtagttaagtttggtcaatcatctagagtttcttgca

SEQ ID NO: 186900 - DNA, 578 bp, Zea Mays
aacatggcccaccaactggtgaccgaagaacacaacccaacacgccagagacttacacccagacatgacagcaacaacatggctgcacttagttacacccgctcaagacctgcgactcaaacattagtgtgacgcacgcttcttccacgctcaccaggatggagttcctcatgtggagtatctgacaatggcggtgtaacagcatgcatgtgattagtggctacatgcatgcaatcgtgggcagtgcgtgtgtgcatataagctgaagcctgtatgcaaagcgacagtggtagtattgtgcttgtgtctagagttagtgtgcagtgtcgagagaaaagtagagtttgtgttggttctggtgtgcagtgccgtcatgaaacaagtgtgtgcctgtgttgtgagcatcctgtattcctgtgtccaccgagagaagctagcaacgcctacttgcttgtgttgtgcccaccctcttctgatctccttgagtcaagcgtaagagtgttgtgagagagagtggagttccaaggctgctaataattcacccgtgtgaccacctaaaacactgttttgtactattt

SEQ ID NO: 186901 - DNA, 300 bp, Zea Mays
cagtggagaggaaaatggcaaactggaattcgatgctgtagagtagattgtcctttacctactctaagggcaaaaccaacacatgacaggaagagctatgttgtcgttttcttcccacgaacaaaaacttattcttgggtagacatgctacttgttcttccaatagaggaatgtcctttgccacttgtaaatggaactcatcgtaaatggagaaagctggtgaaggatttgaacattcctcgacgattcaacatgcaaaatcttgccgtttttatgataaatttaattgatgagcttcat

SEQ ID NO: 186902 - DNA, 605 bp, Zea Mays
gcccctgccagtctagttgtgccgggcgcgggtcgacgtggcaggtggtccgagtaccgcgcacatgcaccgattgaaggtgggtcgtacgtgcgcaccctctattaccatttatgcatctgtttcattcaaattacgtatgcataaacacgtaactgacacggtgagtgcgtatgctccgcgcgggttttccggcctcgtggtcacgacccgcgttgtagttggccgcgtttatacttgcatattatgactccaaccgtttcataaattgacatgtcgatgcggcttggtcggtgtggtgtagtatttgggatttatgattgtatacttcgatgttaacaactacatatcattttgggatttattatattacgcaatttggcgtgggtcttgattaattattttttgtaaactgtttacgatactttgcacagctatttatgcttcttatgatcacgcagttaccaaaccttcaccctgactgtgcgctgactagtggacccacagtccctcgccgctcccccgcgggccgaccgagctaataattcagctcgggtccacccacaacagacaacagacacaaaccctaaaaaaatcagttcctc

SEQ ID NO: 186903 - DNA, 406 bp, Zea Mays
ttctagtgtactgtgtcttctcaaggcaattttggttcctttggttcaagcaagttggtcttcattctctagccccaaccaaccatgtttagtttcttggattggtggcgcagagtcaatgatttggtgggtgaacaattgacagggggattaaacatcttgattattttgggggcatggaccatctggaatcatagaaacaaatgtgtgtttgatggtatctcacatagtatcgcgactacgatgatccaagttggtgaggaaagacatctctgggaggcagcaggagcaaaagggatatctttcctaacaactcctctggatgttcattagtttcttttgggtcttttggttattgcttcatgtttcatgtgttttggacggcgtgcgttggtgggtgtgtttt

SEQ ID NO: 186904 - DNA, 633 bp, Zea Mays
tccctcagcaggttgttcccatgccatcatgggaccagcaatcgctcgtctccaacttcaacaccatgacgctccagccccctcaacaaaatgagtggtacttcgactccggggcaaccacccacatgtcctctgatgccggtactctctcccattccactcctttacaacacccttttccctcctctattattgtcggtaacgggaattctattccagttacatccacgggtgctgctgttcttacagattctcttcgccttaataatgtccttgtttccccaagtcttattaagaacctcatttctgttcgacagtttacctctgacaataattgttctgtggaatttgatcctcttggttgctctgtgaaggaccttcactctcggagagagatcgtccgatgtgacagctccggtccactctaccctctgcggtttccggcatctaccttccttgcctccaccacttcgtcgctctggcatcaacgcctcgggcaccccggtcgtgaagttttgtccaaattagctcactcagggatttcatgtaataaacctgctagtgatactttatgccatgcttgtcagttgggtcgccacacacgtcttccctttcatgtgtcttcatctcgtg

SEQ ID NO: 186905 - DNA, 272 bp, Zea Mays
tgcgggtggagcagaggaaggaaatgcggacgctagcgaggtataggtagctggccaggcatggatggaggtggtgttgtggacagaggtaggaccatcagagtgagttgcagccttgcaggtgacgacgaggaagagatggagaggcataggcagaggtggaggtgtacgtgtacgtgcaggagacatgtgctgaggcacaagatgcgttagcgagggatagcggagaggtgactgaagcgggagaaatggagaacgaaaaaagacgcgcg

SEQ ID NO: 186906 - DNA, 569 bp, Zea Mays
tgatgttagtggtgcaactgctttgagctctactgctgcttcaagtgatttatatggaactcaagcaatcggttcatatgggaaagttcgttcattgaaagctgtaagttttgagcatttcaagtaccatactggtctatatatgtattcttctctctaattttctcttgaattttgaacaggtagctgttttcaaatgttggagaagcagatgggaccagactcatttcggaaggtattttcatctttgatacggctattttctcatagttatttttttgtctaaataattgcaacactttggctaagcaactaaatcgatgtggagatgtacaagactattcatgatatgagttactgtgtttcagatactaatcatccttttttttatctatatccatagttgaaaattctagatagtatctgggtaggagtaaagtacctattggctgttttttttgtacgcggttatttcttaattgaagattatgtatatatagattgcttctgatagatttcaattgttcacaatttcagattttgcaggtgatagtggctccaagtcgtgc

SEQ ID NO: 186907 - DNA, 279 bp, Zea Mays
gcggtgtttagtggagctaaagcgtcattagcggagcaatgggcaatattgcagtggcagaccttatgaaaaataaataaagagatccattttgtctttctaaccagaagcagtttgttcatggtaacatcatggcattttacactacaagacctactagaatatctagtagtagttgttagagtatattaggtaacaccggatatggatagtttaggattgattgtaatcccatgatagccttccttatctctaggagaggtgtcttgccctccaaac

SEQ ID NO: 186908 - DNA, 391 bp, Zea Mays
tgcgacaacgtgagtgctgtctacatggcagccaatcccgttcaccaccgccgcaccaaacacatcgagatcgatattcacttcgtccgtgagaaggttgcccttggacaagtacgcgtgcttcatgtcccatcttctcatcagttcgcggacatcatgacgaaaggcttgcctgtacagctcttcaacgagttcaaatccagtctttgcgtccgggaccctcccgctgcgactgcgggcgggtgttagacatatatggacattacagccatatatggacagcacagccgtgtgcagccatatatggacagcactgccgtatatagactagtatagactgattatagtcttccttgtataggcatatagctttccctgtttaggagattgt

SEQ ID NO: 186909 - DNA, 338 bp, Zea Mays
ggaagagccaaacgataagcagctggcccaattttctcagtcactgtgtaaggcccaaaatacttgaaggcaaatttgggacaaggtctattgaccacagaattttgagcataaggctggagcttgagcaaaacctgttcccccacctgaaactccctgggaacccgcttcttatctgcaaaatgtttatacctctgttgagctctagccaaattggccttcaacatctcactatgctcagctctgtgctgaacaaactggacagctccctcatcctcctgccctgtgaccgaaggaattccaagaacagatgcttcatagccataaagggcctggaa

SEQ ID NO: 186910 - DNA, 518 bp, Zea Mays
gattaaaagaaaactggaagccattggttgcccagaaaatcagcgtgttcaactagctgcccaccaactttccgggatggccttagcctggtgggacaccttcaacgtcaccatcagagatgctacctgggcggaatttgaagcagctttccgggagcaccatgtgccccaaggactcgtacagcttaaggaggacgagttccgagaactgactcaagacggaagatctgtcagcgaatatgtgcacaagttcacagagttagcccgctacgcgccagaggacgtcagtaccaaaggcaagaagatggtccgtttcctgaagggactcaggccagaactcaagacaattctagctagccaagacttcctcagtttctctcacctttccaacaaggccatgcaagttgaaagggcaaaggaggaagaaaaagggcatctcaaaagaaagttccaggttctctgggcacagcaacaggaccggcaccagaagactcgatcatttggattcccacccaagg

SEQ ID NO: 186911 - DNA, 524 bp, Zea Mays
gaggagcaatgttcaaaaattgaagatctgaggaacaacatgtttcaaggtgagatattcgtatgttcttttgactatctttttagtaattaggtagaacatggtacaccttttttttcttgctcccttacatatcttcacgcctgaaagaaattatttgatcaaaatgatatgcttttgcaggataaatacttcatgtcatttttgccattgtttgtgatgtatgtgtgtaccattgtaatcatgaaaactacatatgcagttattcataccaacgtggtctggaattaactttgaagaaatacaaatgattattcttgattaatagctatgcttaatttgcttcattggatcacttacaaatgaatgaagccaccagaaaacgtgggctgatatgttacattattgtccccttcagtttctgctaggcaaacttacatgaaaggaattgttagccagtcttcagataatcagtactgggatatatggaaccgtcagaaattgagtccagaattcgaagtgaa

SEQ ID NO: 186912 - DNA, 334 bp, Zea Mays
cgggaagagactgaatttattcatgtctctatggatcgggagttctggaccaccgccaacatgcataggtactacaggtaccttaactctttgtctaggatgaccgttctcccgaagggcgggaatcaaatgaacgtccttggggagagtcgggtcttccttctcctccttgctcccaacagtctcgcccgcattaatgtgtttgacatgatctgggaagagatcatctgtgcttgctggtctcctctcaaagggtgtcttcatgcaccctttatcatgaagatgatcgaagtggtcacccagactcacttcgaaaaacctgtcaaacactccc

SEQ ID NO: 186913 - DNA, 790 bp, Zea Mays
aacagctcttgccactgtttacagagtcactgaccgtttgcataaacaccctcctatttctaatcctttgcagaccaaagtccctgtcgacgagcgacgccggtccgcgctccggcgaaactattccggccagatgacgccatgactggagttctcaagcgacaggaaccaaattagctacctaccgcacctttcccctcacttaatttctgaattgaagctctacacccttctgcccacggtgtcagcgcgggtgattaagtggatcaaagtgttccggatcagcgagggctgggctggctaaaatgaagctagagaaaggttcctgggttcactagagatgacgcacacgccaaattttggactagacacgagcggaaaggtggggcgacggagagggtgccatggcggtgtttgacagtgcacgggtgcgttccggcgatgggcttcggtcaaactccaaattgttgcgtccaggggcaataagagatcacatactaactgaaacaaagagtaatttgatcattactgaccggaggagcgctggccacgatgaggttgggtttcgggtgtgcttgaactgaattggggcgaatgcaaaattagagctcgtagggaatcggctaggagcaatacttggtgtggaggtgcgcaatgatattgcgaagctagttacgagctcaatttataaaaggcttcgtcggtggcactcaatttggtcgagcaacgcggcggccggagatgaggaaggactctggcgccacggtttcgtgtccaccgccgtggcggg

SEQ ID NO: 186914 - DNA, 292 bp, Zea Mays
ccttgagagaatcagcaatggatcttatctgaacatggcttcacatcctgatggatccaacagagttttcttgtctagccaagctggaaagatatggttggccagcatcccagaacaaggctctgggggcactctacaatatgatgaggcaaacccatttcttgacataactgatgaagtttatcatgattctcagtttggcctcatgggtatagcatttcacccaaagttcgctactaatgggcgcttctttgtttcttataattgtgatagaactcaatctcctaaatgt

SEQ ID NO: 186915 - DNA, 552 bp, Zea Mays
cacaaattgaggatgtcaacagatactactttgaggatggtgaagagaaaccagtttgtttcagtatcttgcctttccagtttggtgaggacgatagcgaggcagttttcctcagaaaggatgttttcttgtgtggatttgtggataaaaatcttcctgtgtacaaggaggtggtagcttggaagataaggcttgacagtgagcatcccaacatctatgtgctttctattgagcacaagtggataaagctgttgaaaccacgaaaatgctatggagacattgttcgatcaacattgattacggtgcaaatgctccacttttttgggagaggggagcaaagaagttcgaatcacctttgggatcaccttgatgaagtttttgggtatccatctacatgcttactttgtctttaccctcgagtatatgcttataatgtttattcgtttgtcttttgaagtaaatacaatcctaaacccgtggaggatgacttgatgaagcaccataccctaatcaagttgtttgtagagaaagatcaaaccttgatgaagtcaa

SEQ ID NO: 186916 - DNA, 495 bp, Zea Mays
gcaggtagaattatgttacaaggatgcacaagctgagtcaaatgttttcaatattcaatcaaatagtcagtggaatgatgtagtagtcgaggatagacaactgattttaactagtaatgagggtccgactgctagccacaacactccaggtcatttcactcccctgccaatagaaaatcagcttaactcaaatgataacttgcagatcttcattgagtcaatcacaaacataccagaaccatccctaatccactcccctccaaacagaaacaggtgtgccatatcaccagtagtgcgggggtcagacaatttaggtgtaaatgcaaataaaaatattatctcgactggtaaacgatcgagtggcaggttggcagcaaaacaaaaattaaagattgggggcagccggatgccatctccaaagcgcaggaaattctcattgcaaagttaaataattctgcagccatacaatacaaatgttcaagtgcttccacctcc

SEQ ID NO: 186917 - DNA, 545 bp, Zea Mays
agtgcttgagagtttaccagataagaaaggagcagcatctgaagctagctgtgctgttcgagaagcagacaccaacaagatcgaagctaggtcagaagagagatttgcacccaacagaatggtggcggctgcacatagccaatctggattcagtttcgatgataaccatgctacttgtgcacccaactgcaccatgaaacttgaacctgcacttagagatgacagcagggaagttaaggaggcaaaataccgccgcattcgtcttgaagagaaaggagaagcaaagcagccagcgagggcaagtgacagatcaccaaggcctgtggttagcaacatcccttctaatgcttaccctttagaagggccatctgagtgtcataaaaaaccaggattcatatatgctagcggtgagaagggacatctgagtgacaagaatttagatgttcctagcaccagagccggtggccttgagaaagaccgtactgagcttctgcggatgctcgatgagttgagggaccaggtacagagatcctacgagattgctg

SEQ ID NO: 186918 - DNA, 525 bp, Zea Mays
ataacgaagtgcctatccaacacctgaacatacacgagacgtagtagcagccttggctgttccgcctgtgtctgttgatgccattctgtttccagaccacctggagactgaggaagaagtgcccattcaacacctgaacacccaagtggaactatcctcacaaaatgagtcaacaaaggatgctttcttcagcaagatcagtacaagaccaactggactgctgcctgttccaaagaccaataagctggccaccagtaagcagtctaaaaactcaccatcttgccccactatgactgcgccaaggaagagacgacgagttgctggaataggagttattcaatatgcatgacatgagcagtagggccaccagaaaggccatgaaagcacttcggattatctcggattcggagggggttagtcaagaggctttggagtattatgtgaatctgcttaaacaccctctgtctcaatgccatgtggatgctctctctgccctgtttggctggaatactccagcagacttag

SEQ ID NO: 186919 - DNA, 278 bp, Zea Mays
cagccttcctagtttagccttaccttgtataggtgacagccttcctagtttaggagattgtatccttgtacaccaggccacttggctatatatatgagaagtcacccacctgattgggtgtgcggtgctttcccctaaaccaactctctacatggtatcggaggaccaggatcaattcgatccaggccttccttccgctgccctctgcttcctctcctctcctccatgtctgagccgaccttaggcgccagcgccgaccttgacgccatccagcagct

SEQ ID NO: 186920 - DNA, 319 bp, Zea Mays
tgcagaagcttgttctgttgtgaaaagagtaggctcgaaacttgatcctgcagatggagcttgtttacctttagatatcatatgccttcaccttgagaaggctgcagtggtaatgtgtattttctgtactttccgtacatgcatacttgagactacctgtgagagcattccactgtggtactcattatcctgctcttatctacaggatagattaagttcaggagaagaattagttggtgatgatgatgttgcaagagctcttcttggtgcctgtaaaggtcttcctggacctgtactttctgtgtatgatcacctgtta

SEQ ID NO: 186921 - DNA, 961 bp, Zea Mays
gttttgcaaccgccttgcagtattgtacacactgtccggtgcatcctcctctgttgccaatccgttctgaaaattcagctttcctgggaaattggcaagtgtagtgggagtggaatttacgaaggagctttgatcagtaacccatgtccgccagagcgtgtcgttctcaggagtcaccttgggtccccccacgttgatcctgtagaatgtctgcagcggctgtgttgacagcccaagatactgaccgacagggtccagacttagtaccgagtcggttatgagatcagggacagagatgacctcgatagcattgacgaaggccggtgtgttgttcccaagaggcacaaatgtgaggatgagcatgtccctggtaatgttcagggaatactccttgaacaccggcgaagaactactgggcgctgtgaaattgtcgaggagcacgacatcctgcgtggacaccttgaaggtcgccgtggtgaggtcatagctctggtatttgaaggggaagaagtgaaggcggacaaaatgtcggccatggctcttgagcatgaaggcataggacgatggcacaacgaatatcctagcagtctgatacagcatagcaccttcaaaccctgagaccaaattcggcgaggtggtcgcggcggtgctctgggtcggggtcgtcaggatggctgccccagaagtgtcagacacgaaaaccctgtggtcgacagtcgcgtcgaccgtggagccgcagttgatgaggtagtcgtctgcaggggtgaaatcggcatggcagcaggtgccaaacaaccagatggccacagaaagggctagcacaaccagtttgagaccaacaactgtgctatccatggcgagtccaagttgagctagaaggatgaaggggttacgaatggcacggtgatgcagacaggctggaagggctatgtaagaggaagcagaaatactttgcttcagc

SEQ ID NO: 186922 - DNA, 616 bp, Zea Mays
cttcggcagcatccccgagtcgctcggcgactgcaagacgctcacgcgcgtccgcctcggcaagaacttcctgaccggccccgtcccggccgggctcttcgaccttccccaggcgaacatgctcgagctcaccgacaacatgctcaccggcgagctcccggacgtgatcgctggagacaagatcggcatgctcatgctggggaacaatcgcatcggagggcgcatccccgccgctatcggcaacctccccgcgctgcagacgctgtccctggagtcgaacaacttctctggcccgctgcctccggagatcggcaggctcaggaacctcaccaggctcaacgccagcggcaacgcgctcacgggaggcatcccgagggagctcatgggctgcgcctccctgggcgccgtcgacctcagccggaacggcctcaccggcgagataccggacaccgtgacgtcgctcaagatcctgtgcacgctcaacgtgtcgaggaacaggctgtcgggcgagctgccggcggcgatggccaacatgacgagcctgacgacgctggacgtgtcctacaaccagctgtcgggccccgtgccgatgcagggccagttcctggtgttcaac

SEQ ID NO: 186923 - DNA, 484 bp, Zea Mays
cacgtgctttggtacccagtgactgatatcatttccatgacctaaaagcccaaatttaaatgtgccatccccccatgtgtaaagatctccagatagtgtaacagcacaagtgtgatattcaccacatgctacaagctcaatgttcatatgagaaagagcatcaataagttttggctgagacacatcacaatcaacaccatgaccaagccgtccccctgattcctcaccccatgagtatatctcgccttgtttagtaacaagtgcagcatgccttcctccacaagatatgttctgcacatcaagtcgcacggcaaattctaacggttttggtacaaggcagtccatttttgcacctgaggagcttccaactcttgaaccaccaccaccaagaattccttccccggttccttctccccatataaaaacatcgcctaaagcatcaccatcgtcatgaccagaaccatgactagatgaactaactgca

SEQ ID NO: 186924 - DNA, 570 bp, Zea Mays
gccaacccagacgccacctcttcctcccctcctcccctcccgcgcctgtaagttccacctcgcctcggcgcgctcgccgtcccgcgccgccgcttcggtttccggcgacgacgaggatgaggaggttgacgtggatgacgacgaggacgacgagacaaccatccgcaacgtagacgatgaatacgacgacgatttcgaggacggggatgagggagatgagggcgatgaggaggcggtggacgaggagagcggtggtgagtacgaggaagaggcgggggaggacgaggacaagcgggaggataccgcagcgcggaggcgggactcggaggagtataagtcgcggcgggtggcgaagctggtcgccgaggtgcgggagttcggggaggacgtcatcgactacaacgagctcgccgggatctacgacttccccatcgacaagtttcaggtatcgttttggttcctgactcggtgggctagccctgattctatttgttgaactgtgcaactccatccaatgctgggtcggtaaagttaaatgtagttttgatatttttgtggaagatctctcac

SEQ ID NO: 186925 - DNA, 570 bp, Zea Mays
gcactgaccacggtgacccatctcgatcgatcggcggcttcgctagctagctgggacacagcccccatataaatcatccactcctccgtagcaagcacatcctgaagctgcctttcttttccaataagctaagcagcaggtgcaaagggaattcgagatccagagagctagctgatcgatggatccgaaagttggcgttgctctgaccctctccctcgtcggcgggctaagcacctcccttggtatgtatatatgcagcagcactttgcttcctctcgctgctcatggtcgctagaattctttctagtcgtacactactatttaactctcatagcttcttccttttcacaatattatccgatcgagagctagctatagatagcttctgttgtatatatatatgcacctcttatatatattagcttcgatgatctagctaggataaatttcatggtatatatataaccacatgtacatacataaggaaccaccactgaattctacccaacaaatgttcactaggtgcactgttggctatcctcaaccatgcgccaaacaacagaacactcg

SEQ ID NO: 186926 - DNA, 348 bp, Zea Mays
ggggatctccgagacctgctgcataggagacaagtcatcacagcgacaaagcaagactgaaaactgtcgctgatatgcctccacggtgcctgtcctataaagggctttcagttctgccaggccattggatcggatgggtggtccaaacctcatgtggatgtagtcaacaaatcgcgcccacgacagaatgccatgatcacgttccagggcatagtaccactcgtctgctgctccctccaagtgtaatgatgctagccaaactttttcttccgccatggttcgcatccctcggaaataggtgttgcacttgttgatccatgtcaatggatctgattcgccgtcgaagga

SEQ ID NO: 186927 - DNA, 357 bp, Zea Mays
tcgcatcaaaaggtcaaatctgagatcagacaacggaataatggacggagtatgactgttggtttgacaaaattcatttgaactttcagcaaaccaacaatccctcgtgagaagccctgcatataaacgtccacatggcccacacacacggaaacggaatcatccattcgagtacaagtttctctgcggacacatggagtgtttccaaccgtttaccgacgcctcctcctcgctgtcagctcaaattaagaagaagaagaaaaaacatttgactttctgcagccacattgaaaactggtttcggcggtggaccaatgatccctgcagtgacacatgtgctcacgcagtcacgcctgg

SEQ ID NO: 186928 - DNA, 337 bp, Zea Mays
gagagagcttaaacgagggagagggagggttggactgaccggaaagggggctggcctcggcgaggttagttcgcggtgttcttgaaccgaattggggagaatgcgcaattcgggcgtgctggtggacgatcgagggtgggagcgggtgctacagcttcacaactacatggcgcagctacgggcgaggtcaatttatagagctagcgagcggtggccgcgaatttgagcaagacgcgcggcggccggagggaaagaagaacactggcgcaagtaaattcgtggcaaacggcgtggcaatctccccggcgacgatgggacagccttaaggtgtcacggt

SEQ ID NO: 186929 - DNA, 312 bp, Zea Mays
agaggatcaccctgccgaacccttcgcctgcatttgaaacttttcccagggacaccattcaagagaaccgcagaggatcctgaaaccaacgaagacttgatccaagaaatacatttctcagggaagccgagagattggtgcattgcaataatgacattgtgctcaatagtgtcaaatgctttagcaaaatcaagcttaaggactacttctttcttcgagtgatggcattgatgaatgtattcataggtccaggctaggcaatcttggatggacctactcgtgatgaacctgtaccgattcttatgaatgagc

SEQ ID NO: 186930 - DNA, 478 bp, Zea Mays
agctgctacctgaatctattctacttcttcttatttgtcttatctatatcaagttggaagtatgcttttatgtctggaggaacagagggacatttcttgacattcttccctctgcgggagatgctccttcaatcaggtaccacccccttccgctctcgtttctttacaatacttgcacttaaaacctgtgccaaccttctcttcgtgctgccacactagttctgtcatgttttctataaaatataaacatataattgattgagcatacacatttaacaataactaatacataaactattgggcattcacatttaacaataactaaatcaaaacatatttaacaataactaatccataaaccataaaccatcacatatgtaacaatattaacatacaacatatataaatctgaaatcctaattccgaaaacatattatcgagactaaatctgaaaccctaaacaccgcaaaactaaatc

SEQ ID NO: 186931 - DNA, 1015 bp, Zea Mays
gtgctctggctcgtcagcgtcgaggtgagcccactgccttcgatccggtacgggttttggcgggcgggcggtgggagctgagtacagattcggggcggagtggtcgggaaagttcggggggctcagcgtgctctcagcggatttggtataggctgatgcgggcatcgtgtttggaggttgatttcagatatttggcttccctgctgcgcgtagggttttactgtttctctgcgcacttttggggcaacaaatatttgtctgtctctcggagctatttttggatgcttggggcgcgaccaaatttaggtacacctagggttttatcatttatatgtggattgcttgacgtttgctctctctttcgtgaacatttgggcttcttataacttgcgttcaagtaccattgtaaggaggaaccgtgctttttgtattgatcccgacgatttttctttcaattcttttctcgtgttgcagattgtgttggttctagtctgcactcgcggagctggtgcggattctggtgaaagcaaaggatcgtttctgcaagactctgaagctggagaaaaggatgtctaccttagccactcctgcatccacgacgagatactacatcaacggcgacgagctgggaggaaggagtactctgtcatgccacaagtgtaccatgagtctcgggaggatgcggagcgtgtaagaggacgacacttgttgggcatgtcatcttggcgtgctccgcacgagaatgccaggaagccaatacgaatatacctcaattatgatgccgtcgggcattcgcccgaccgtgattgtaaaaatgttggcgacatcgtgaaggtcagtttgtcacattagcttttctcattgcaccaccagctattttatctgtgtagtagaattgaaactgttgtttctatttggtagcttggcgaacctcctgtatcatcagcaccaggaacacctatatgcgatcctcatggtgatccaccactggtgggagactgctggtacaattgca

SEQ ID NO: 186932 - DNA, 392 bp, Zea Mays
ctatgagtgacaagtttgagaaatattggagctgttctagtttgagtcttgctctagcatgctttcttgatcctaggtataagaagaagcttgctgaattctacatgagaaagttctatggtgactactaccaggtccgtcttgatgagttagttggtgctatgaagaacttgtttctattttatgcaacctctaaaccttcatcttccaacaatgatatgaatgcaaaccaacatgtcagcccaacagaacatttagctacaaagaagaatgttgaacttgatgctttcttgtatgatgatgttaggcctggtactaattatttaaatgaattggacaaatacatggcagaacctcttctaaagcaagatccatttgatattttagctttc

SEQ ID NO: 186933 - DNA, 396 bp, Zea Mays
tgcaggtagaagagcaagcaaaggtgcttggtaaaggtttgcctttcaaaactgctctaattgtcggcggagatccattgcctcaacaaatttacagaattgaaaatggtgttgagttaattgttggcacccctgggaggctaattgatcttctcatgaaacacaatgttgaccttacctatgtttctgtattcgttttggatgaggtggactgcctgctggagaggggattcagggatcaggccatgcagatttttcagtcactttcacacccacaggttatgatgttttcagcaacaatacattcagaagttgagaagatgtctaactcactggctaataatgtgataagtatctcttgtgggaacccaaacagaccaaacaaattagttaaac

SEQ ID NO: 186934 - DNA, 397 bp, Zea Mays
ggcggcggcatgatgaacaacagcaagtctctgctggcgcggaaccagaacggcgagttcgaccataatcggtggctcttcgagagctccggcacctacggctacggcaacgcgttctggcccaagggcggcatgtacgacgacgacctggacgacgagggcggccccggcggcggtggaggcgacggtatgctcccggagcagaagccgttcaagccgctgacccgcaagatacccatgccgacgtccatcatcagcccctaccggatcttcatcgtcatccggatgttcgtgctcatcttctacctcacgtggcgcgtccgcaaccccaacatggaggcgctctggctctggggcatgtccatcgtgtgcgagctctggttcgctttctcctggc

SEQ ID NO: 186935 - DNA, 981 bp, Zea Mays
cgcgggcgtcgagcgtacacacgcggacgttcgcgtggtgcatccggaagtgtagtcggcggaggcggtggcgcagctgacgaaggaggtgtcctagaggcaagctcctggaggacagggccgcgcaggaggatagcagggtcttcctcatgcacgacaggcgacggccgtggtcgctcgacgtcacgtggtgacggagctaccacgggaacagctgctgcagggttaggggcaatcaaaaaatccatatccgtcacagggaggagtgtggtggagaagggaaaggatgtctcgtcaaacacgacgtgacgggagatgatgacgcgcctggtggtgaggttgagacagcggtagcctttatgggaagaaggatatcccaagaagacacaggctgccgagcgaggagctagcttatgtggtgttgtggcagagaggttgggatagcagagacacccgaaaacacgaaggtgactgtattcgggggtcttgttatatagtatggtgtagggaacggcgttgttcacagaggaacagggccggcggttgaggaggtaggtggcggtgacgagcgcctcggcccagtaaggaggcggcatgtgggcatgtatgaggagagtgcggctgatgttattcagcgtgcgaagtatccgctctgccttgccgttttgctgggatgtgtaagggcaggaaaatcggaaaagaatgccacgagatgaaaatagagaggtgagagtgtggttagcaaattcagtgccattgtcagcctggaaggattttattgtgacgccaaattgggtttgcacaagagcgcaaaaatcagtgatgtgagaggctacttcagatttgcgaataagtggaaaagtccagcaaaaatgagagtaatcgtctaacaaaaccaaatagtactggtaccctgatatgctagccacgggagacgtccaaacatcgcaatgaatcaaatcaaagggtgcagaactgcgt

SEQ ID NO: 186936 - DNA, 272 bp, Zea Mays
agagagcacctttccctatgggacgatgggtacggaacagcgatgttcccatccttctccacctacgacgtaaacgaggatcatctgaactgtttcaactattgtgagcagttcttccgtaggcagcgctcagtcgccggcacctgttctggttgctggggcacctcccgcgccgccccctaggacaacttctcttttggccctcgaggcaactcttcagacccctggggcacctcgtgctccttgaggcacctccgtgtgccggcccccaa

SEQ ID NO: 186937 - DNA, 1208 bp, Zea Mays
ggacctactgataggatctcagatcctggtaaagccaccaatggcagttctgcagttccagaagaaaaaatcagaggtttggcaactactatcgatggttgggaaaagccaaaaatgaagaaaaagcgttctaccattaaggcagacatgtcactggctggtgttttgaggactgttgatgtagaccgagagtcaaaacaaggcatgcagcacaagtttactaatgacggtagggcgagaatgacaagttctagtttcaggtcagaaatttaaccaactaggctcggagttcatatttctagttctatattgattctgatattttatccctttaagcttcttttgagaggcaacttaactgttatcgcacgaagatagtggggaacattttaagaagtttatacctgaagattctgcagcgtgattaaattaataaagctttgggacatactccatcctgaaatgataagcatatttgatcagggaaagtcatacaatgtagctttggaccttaatttcttttaaaatatgttgtcatttgctaaagagttaataccattttagaagcactttgaatacaaacttattggtgcaagttgtatataatctaacaaattgttggtcaaagtttgtaaaatttacttcttgttcaaaatacgcttatcattctgggatggagggggcagttccttaaatcattaatgaaaaagtttgttacgattccattttgctttctgttctctgggtatcactatatgaaactctgtgcaggtctggaactgttgcatctggcacaaccaaagcagatttgctttctacacaaaatggtcttgttatgcgacccttaaataggagtgatcaagacaatggtttccatcctactaacaaaagggaacgtcaagctgcattagataaagaaacgcccaacccgagaaccattaacaagtaagatgtgcttttttacctgttctgctctatgctcctctattttatcatttaccacattaaactaagaaagttatcttctgctgcacactgagtcctaattctttcatcataactgtgattagtatttcaccttcaccgccaactcagttcacacacttgaatgaacaaaatcaggccttgacacattgatttttcaggcctaatgaagacgacagtggatgtaacattgcatcattaccgaaggcgaatggatctgcgcg

SEQ ID NO: 186938 - DNA, 482 bp, Zea Mays
atttcacaagtttgtgatacatttatgtcacaggacgtgtcatgtgtacccgagtcatccttaattttggacggcacatctgcatccataagtggtgatgaatttttgtcaagggcagtgtccaatggtttttctgccttttgtgagggtacatacactacctccagaatggtattagaagacagtgactgtgtgaagaatctaatggctgaacgacaaaaagatgttgaagatgtagttggtgagacaagtgagacttatatggaatcatttcggagaaatgaacaggcaagctgttcagctgctgggtttcaattaatggatgaatgtagtcgtgctgaaagcatctggctgctctctggcaaaaaatctaatgactcttgcaaggtggaactagtacaggacacttggaacaggctacggagttgtcgtcttgaatttaccagtgaggctaatcacaacagagcaacttctggagcttt

SEQ ID NO: 186939 - DNA, 292 bp, Zea Mays
cttggttatcctatccataatgacccgaatggaatcgtggtgctgggaggtgttgggcaaccccacaataaagtccatgcaaatgtcctcccatttccaagatggtatggggagaggttgtagggtacccactacctttaaatgactggccttgattctttggcaagtatcacactcagatatgtacttagcaatctctctcttcatcctggtccaccaatataaggatctaaggtcatgatacatcttgttacttccgggtgcacagaaaatttggagagatgagcttcgt

SEQ ID NO: 186940 - DNA, 407 bp, Zea Mays
cctagatggtggccttgtacttgcaactcttgcactaaaggaagataaaaactccatatcgccaagtgcaggtgctgatgattcattgttacattcatcctcttccacatgatactcaagcattaaattcgttaacaaatctttgacttcagcacacttttcctcacaatcttgaccagatgtaccaagcagccactcaaaacacattagcaaactcaaaccttttagtcggggatcaagtatagttgcaatgcccatgagtccttgaatatcagaccaatatttatcaaatttggttaccatactagctgacatggcttcaattatttgattgccacaagttgaccattgtctaattttcattcttatctcacatatcttgatgaagtataaattggcagtgacat

SEQ ID NO: 186941 - DNA, 615 bp, Zea Mays
accaaatcagatagagcatcccagagatgcagctaatcaatcagggctcccacagtcagagctcccttaatatcaccaatccaccttctatttaacagagcttcttgcacagttcttctgttggttattctttttggtactatactaaacaacctaggtgcaaaatctgaaacccttcttccattgatccatttatcaacccagaataagatattagctccatttccaatcacagtggtcagaacagttgaaaagaaggatctggctttacttgggacctgaattgggaggtcagcccatggccggatagagttagttttcttcaaccatagccatctcattcaaagagcccagcaaagctctgggaaactagagattcccaagactcccagttgcttaggcctgcatacttttctctatgcaaccaaacagtatcctcgttttgcttcctttcttcctctccataataagtcttttctaattttgtcaattgcatctgtggcccatttggggaaatcaattgccattgctgtatatactgacataccagtgagaacatgctgaactaaaactcttctgccttgcctgctcatcagatcagcctttcagtttggg

SEQ ID NO: 186942 - DNA, 297 bp, Zea Mays
gttccttgatatgaaaggaggcgtggagagtatctgtctgaaaacaacacgtgcagcagtctctgcatcagtaagttcccgcgtaggttccgagggaaaccagtccctgacagggtaggtgtaatcctggggagggtagagataagcccacagcacagtaatggcgacaaatactacgacaactgatatccatatgcgtcttcttggacttgctcttgtgcgaggaactgcagtacccttcatgtcgctgaagcccagttttcacacctgataccaccacttcattccctttggcta

SEQ ID NO: 186943 - DNA, 299 bp, Zea Mays
gaagtttagtttgtcactgcagttgtttgggtcaaatttttaggtttgggataactagtgtcttgaggaatcaggaccattgttgaagccttgtaccaatggatcattcaatggttttgcatggacaagaacagatctagagatgcacaaaaaaatgatagctgtgatactcgtcatgaatggtctaagaaatcctgttcactaaatgcttttcttattcgaatagtcttcccgcaggagattttgaagtcaagttgattttttccctgtaactcagtagcaggtattgacagcagcag

SEQ ID NO: 186944 - DNA, 1447 bp, Zea Mays
ctcgcagagccaccacgggagctgaagtcgtcccctcccgcagtcacccccaagcgagaccactcccacctcctccactggcgtctagccggtggctgctgctggtgcgctacgtcactggctcggggggctcggcgcaccttgtgatgaagggaaggcggcagtcagtggtccggcgcatgtacaaggcgctcctgttcctcgtcgccgaccttgtcctcgaatccgcaggtcagcacggtttccatcccctcccctcccctcttggtctccccttctgccgttctgcgtatctgccaagcgatttcaaattaggcactgccggtgagtggcctagagctgggcggcgccctctgtttactgttgcaccgccggtctgatgcgactcatcgtcagcagcctcatcgccggcgttgttgcgttggggcgcgcagatagcccgttgaggccttgtaccctcgagaggtggcgcggccctccttttccgtcctccgctgggctggtacttggtagcagagagttgagatcgctggattaatctttgttttgctataatgtgcaggactccttggttgaaactcatgccatttgtgaatcagaatggctgctctgaggattcaaacctcagctggtcctcccgaactcagaaggcgcaatcttgctagcaacccagtccatgtggggctggatttggtcgggtttagttcctggatgttgccggtgggtgaccactggtgtgcaggcagcgcagccgtcacaagccatggtgttggatatgttggtgctgggaggaagaactgtcacagggcatgcttgaagaatggtgtggtctgctctttcgacgatagtggtgtcagggtgtctatgctgtgttcatctcttccatctgaagatgtaagtttcagcagcaaaatgtcattagttaattcaacaggctttgcacagaagaagaaagggagtaaggtatggcgaagatcccagggtggtaagaaattggtaaggcatagagctccgaagcatggcctgggaaaggacagacatggtcacagatcttcagttaaggatgatgataccgatgcagttttgtctggtataagcaaggagtccagcattgaagagtgcaattctgctctgatccgtcttgagaagctcagcgatgagaaggctcttaagttctttgagtggatgaaggttagtggcaagctaaagggaaacactcatgcatatcacctagctcttaaagccattgcctggaaggaggactggaagatggctgaacttttgcttcatgaaatggttgctgattcggactgcgcattggatgctcgagcatttaacggactgatatatgtttgtgctaaaaggaggcttgatgcttgggcaacaaagtggtttcacatgatgcttgagagagaagtgcagccaaacttgtctaccgttggtatgc

SEQ ID NO: 186945 - DNA, 329 bp, Zea Mays
tcacccaacagttctggtaccatctttttgctccttttggggtgggtcatctctgttcaagggtcgatgatgtttcctttgagtggtggaggaccaacaaaatagcgtaaggaaagataagagagaaaggggttcaacagtgctaccattttgggtgtttggtgtcttcggttatagagaaatcaagttgttctttgataaggatcgtccctccattcgaaaagtgtagcagcaattcctttatgagctagtgtgctcaatcaaggctggtgctaagcatccgagtgagctaggtctatctaactccaacttcatgagaaggatcgggt

SEQ ID NO: 186946 - DNA, 1481 bp, Zea Mays
cttccctcgccccctcgccccctggccccaaccctcccacctccatccgccatccttgcctctcgccggcctccactccggacccggcgaccaccccagaaactcccctcggcgtctctcctgacggacgatcacaggctccccaggtaggccgcctgaaggctcaacgttggagtgactctagcccggtttcatcgtctggagattcttggcgggcgcctccgtcgtataaggaggctctgttagcctgcccctcgcgcccggcggctcctcccctggtgccaggcgtgaaggtggtatctggtatccagccggaggtgcaaagtcggcgggcaactcctcggtgtgacgacgaagggtggcaagtggttcggagtaagaggaggtctcgaggtgatcatcggccacgtcgagagtcccctgtggatctccggggtcggtgtttcggcacgggaagaggcaaatctcaggagggctctcttcgttacaatagtgggaaccaggccaattgtgactgattctgaggtcatcgacgaagttgctcatagtttcaacatcaagactgaggatatgaagattcatcagaccaagccagaagattttcttctgtttcttcctgacgaggctacggcaacaagggtgcttaatgatggcaagatcttaaaaggacctcgatttagtctgattttcaagtgttggacaagatgttctcatgcctcatcttcaatcatgccagggctggtagacatagagattagagggatcccagaacatgcatggtttctgtctacagcgaagagtatactgactgattcctgtttgatcgctgaagtgcaccctgattctttgtccaagcgagagctatcgtcgtttgtagtcagagcctggtgctttaacccggagaatctccaacgcgattcagtgcttcacattattgagcctgggttacagatgttcgagaaaagatgccttacatacaagatccaaattagagtcctgcatgctggttcacacatctcaccagaaggtctccctccatccgcggacggcgataaacccccatgggatgatgatggaaacgacgatcatggcacccatcctcggcgtccgattggctctctggtgctgcgcaagccactgcatcttcgcttgggcccaatgccggctgagggctgcggcaccgaggcgtctgcgccgccaggagcctcgaaggcggggccttgggatactgggcgtgatatgcaattaactctaggcactgatatgtctccgacgcccaaggcgtcccttcgggatgttgtgcatttaacgacttgtattgatgggtctccagtgtccgaggcgccccttcatgagaacggaacaccttcagggcgagatatgcaattaactccaggcactgatatgtctccgacgtccacggcgccccttcgggatgttgagcatttaatgaccggtactgatgggtctccagcgtccga

SEQ ID NO: 186947 - DNA, 493 bp, Zea Mays
actctctcaccctcattgtaatgggcttggcccatctaactcaggctatatatcaatctcccaaccccttgagtgggttagggtttccattattctacatcggtcagccccatgcacacgatccttgctacgtcgacgcacctgacactgctccttagtgaaaagcaggcgcccaagctcatctgtcgtctccatgcagaagcggctctccgccacatggagccacccgacgagctcctccaacggcattgtcttgaggtcgcacaacatctcgatggatgccgcgacttgattgaacttcggtggaacgacgcgtacctcctccacctcctcgccgagctcgcgcatctccgagacgagggagcttagtctcatggcaaagtcgtccaccttctcaccatccttgaacttgatattctcaaagaccttgagcagcctttcggcgttggcctcccgaacacgtgcatctcccatgcgcatgcttctcacagcc

SEQ ID NO: 186948 - DNA, 432 bp, Zea Mays
gagcgcatctacataccttctctctgtttcccgctcgtctacattgtaatgcacagccactgatgcagcattgtcatccaattgctgagaaaataagaagatcctgagccgagtgaacgcctcccctgtggcagtgactttgtcatactcctccatcatgttcaccacatcatcgtgattcacgaccgagaccagcgcatccagatcctcatcaggttgctggtatttgatggtatcagcatccttgtagagatctctcatccgtgcagctaggtcggcatatgatatgtcacgcggcaatatgacaatccttgtctcgccaccaacatatcgaagacagccatcaagtggtcggggaaggatactacctccaaagctgcagaggaacttggccatgcgtggtgccccctcagcctcagagatgcctggggc

SEQ ID NO: 186949 - DNA, 373 bp, Zea Mays
agcaatgtgaagtccaattgaatagcttggtgaagaccaattatcaataagaaatccattcttcatcagtatgaagttgagaacccatttaagatcaagtgcacaattgaacgttgtagttcacatgcatttgttcctccaataccacttgtatgtgagagaattatgaatttgcatgaaatataggaatatcacttgtaaggatgataccacttgttgagatattggtccagaaaattcctttgtttatgcaagactgctactcacggacggtccgcagtgggagctcggacggtccgtgtcctgatctctcggactgtccgtggcctaggaccggacggtccgagacctggaacttgcactccattgagct

SEQ ID NO: 186950 - DNA, 573 bp, Zea Mays
tcaccgtttttttggcccagtagccgcatacatctgttggcgcccctaaaccctaaatcctccctgtgcatgtgcctgcgcccctctcaagtttctgtctggcggctgctgctctagcctccagtctccaccgtccaccatcgccggcggctgcccctctcaaggtcgtccctgccccctgctcatctacaaggagcaagatgagctcgtcatccgaaggtcatccctgctcccctccttcccccttgtctgcactctgcactctgcagttttacattctgcgcagcacggcagttttgccaagaatttgcattctgcgcagtctgccctggccctgctcatctagtgttctatacctctatgttctactgccttacttcaatagtacttagcttcatctctgccaaccagtttccatcagcccagcagtagcatatctagtgcctagtattgacttgacctctatctgttgacatgttcagagtttcatgctgccggtggacgaagaggtgctaatgttgaggtcttattccccgggtccaatgtggttggcagtggcagtgcaactgcaag

SEQ ID NO: 186951 - DNA, 458 bp, Zea Mays
cggccgtgctcgccttctccaccacggtcccgctctcggagactgccttcgcggtgctcctcccccctacctcctcgtcctcgcctggctcgccttcccgcagcgcccaggccgctcgagacccggatcccgcctctacccctcggcaccatcgtcagtgtcttcgatggccacaacggccccgacgcccccaccccgacagacactgagccctcttccgctcgcgtgactggtgccccctcaaccctcgactctcctccccaccgtggccccttccccagccccagtgaccagcgcctcccttcctaagtgcggccatggcgaccatcgtgccctagcccgcccctgcaccatggcaagcacaccccttctactcctctcgccccaacccctgtgcagcccagcgcggtggcctataacccacagcaaggcgcaactagctggctggtggccctgcc

SEQ ID NO: 186952 - DNA, 358 bp, Zea Mays
tctaaatagtgtacatatttttcctaataatgataaactaactagttgtgcttcataacatatggatgttggtttagactaagattattattttgtaaaacaagtcacttatatattggtatcatgagctaactaaaaacaaaatagtcttcttttccattgatgcggtgggcctgacctgttctagtgctaatgttttatacatatttgcttgcaacttgacatatatggagtggttaataatggaaaacgaagatggaatcatgtacagaggagatcgatcgaatcgatggtgggtatatatcacaccttgttgtgcgagtgatagtcgtagagtagcgtcggcgtcaccgcctaa

SEQ ID NO: 186953 - DNA, 401 bp, Zea Mays
atttgctcttccaagtcccagcgtttactcttgttaaaacctatcaacaatgatgttattgtaaccaaatcaacactgaagccttgctgctccatctccttcaccaactctacagcctctgcaacttggtccccaatcccctccttgcagaactccctcaccatgatactataagcaattccatccaacagttgccctttcctccttagctcgtaaaaaagccgacatgctgcttctgccctcccattattaaacagcccatctatcacagtgttgtgtgtgcttgctgagcattggattccatcagccaccattgtctcaaaaaaactgcatgcctcatcaagcttcttcactttaaacagcccatcaagaagtgaattgtacaccaccacgtcactcac

SEQ ID NO: 186954 - DNA, 335 bp, Zea Mays
ggcccatactgcctccgtgagggtcgagggcggagcttgatagtgactgacgaaggcgaccccaaacgccatggagctgaggttgtcgtcgacgtgttgggtcttggtgccgctcttgaaagcccaccagtccgtgtggtaggccccatggggcccctacaaccggcaagccacctccgatgaggtcaggttgataaaaatgttgccctttctagcctcattcctgaaatctattggcaggtagaggaagtcataatgcgactttcccctatcactaaatgacagaggagggacaactttggccgggaggcggaatgcatccgccccatgtccac

SEQ ID NO: 186955 - DNA, 378 bp, Zea Mays
ctttactgctccacacactccggagcagaatggggttgtggaacgcaggaaccaaactgtcatggggatggcaagaagtatgctcaaggctatgaagttgccaggatggctctagggggaagcagtatcgatggcagtctacatattgaatcgatctcccactcagaatgttgaagggtgcacgcctcatgaagcatggtatggttttaagccctctgttgaacactttcgtacatttggatgtctggcgcatgtaaaacagggggccaaacagccgtcaaagttggaggacagaagcacgccgatggtgttcatcggctatgagcatggcagcaaagcttggcggttctacaaccctgccacaaagcgtgtgttggt

SEQ ID NO: 186956 - DNA, 502 bp, Zea Mays
caatgattcagttaatgcgcttgatgcctgcattgctcagggaataaaaccaagcaaccgcagtctcagaatagtgttaagtcattactgcaggctaggaaaccatgagaaatcactagcattatttcacttgattgagcgcaatggatggaagcatggtttaatcattaagaccaccctagcttcatgtctcctttcatttgggagacaattggaagcaaaatcatgtctgaacaacctgagcaaaggtgagtttatcggatgttcaagcaattttgatgatctcatcaaggaattctgcattctaggagatttgaaaatgactctttatctgctaaatacaatgttaaagaaaggcacactgcctaatgaagccagttacagttctgttatatataaactttgtacattgaaggagttcgatcaggcacttgattttcttgctgaaatgcagctggcaagtctaaaatcaagtgaaatctcctgtgatgcacttgtacat

SEQ ID NO: 186957 - DNA, 1026 bp, Zea Mays
caggatgaagagcctaacgagagaaggattgggaagctgtgcgagtacgcttcgaaaaaccctcttcgagtgccaaaggttcaccccttgctccctcattggaattttgttgtttccatgctaggtgtaggggttctgaccttttgagcgaattgctcttgctgatagaatacagtttgctagctctgtagctactgtagccaagattataaatgcaatcaaagatcgagtagtgtaacttatctcgaaactcggagatgcctcatgggcattgttctaggcctctagcttaatgtttcaagtattcccttgtctccttggcgctctcatttaagagtagtagtccttgttaagtgtattggctgacatgattgcctcgtattctgccctagcaaattcagtctcagtaagcttgtcgtcttatgcatgttgatatctgagcagatcacagtttacttggagcaacatatttatcgggacttaagaagtgagcaatacggctttgcaaaagttgtgatgttgatataccgcagactgtcagtttcctgtaaagaacagatgtgagtcttcttttcaagtttctcttgctcatatggccctggattctgtgaagttgatatttttatttggtttgcgatggatacttcttacactttgttattgcttttgcttgttaaaaatgtaattgttgttttcttaattcaggcctctgtttgcaagtagcctattaagcattgtccacacccttttagaccaaaagaggcaggatgatttatgtatcgttggatgcgaaaccttgtttgattttgctgtcaatcaggtattcctattggagtagatgccattgtccattagcaggactcagtttatatatagatatgtcccattattggtgatattgagtctgtctattccaggtggacggtacatatcagttcaatttggaagggctggtcccaagactgtgtgaaatagcacaagaagtaggagaagatgagcgagcaagtgccctacgagcggcagccc

SEQ ID NO: 186958 - DNA, 597 bp, Zea Mays
ttcggacattggaagggcatacagatgttgttaatgttgcatgttgccatccagatcttctaatactaattacaggttcattgaacgggtcagttcgtctgtgggatttgaatcgctcaactacgttccggtaaatataaataccccatagcatcatgtcttgatacatgcacaacgcacgatcttatgctgttgaaacaggattcactaatttataatggttttaatggagtaaatagcaaaaaaataaaaaaatacactaaattaatatgtcagttactgtaagtatgtatactatgtgctcagagagtcgaataattgttggagcaatacttaatgcttgtagctctaacccagagagggaacacaccaaatctctactattgtcaaaaataaataaattgatttttttagagtgaggattgaggacaacaaattcactgtagtatggcatttttgcaattgctgatcgtcatatttaaggtgtctaaaccctatgcatgcataagtattaacagtatgcatgacattcttccagatatgagctcatatttgaccttggagaagtatatgctatagcaagtttgaagggtacaa

SEQ ID NO: 186959 - DNA, 396 bp, Zea Mays
cccaagtacatgtcgtgatatggttgtattgagataataaattataagtgttgcgtgatatgagactcgatcgatgtagttaatattgaattggcctgtagagaggtggtgacatgccgaagtagtcatcgcttcctctacggttaagtcggagtcatgcgtgatgatgttatttatggggtgaatgcgtattgaaatattttatgttgtgccatatgattaggaagatgaaggatagatatgttgtttcggaaatgttagccaatagattcgaacaagcgtgatagaggttgagtcacttatgttataaaattgatgctcgacatgttaggtctcctaaaatgtggtgttttaggtgacttgtgtgttatccattttaagttgagaaatgtttaa

SEQ ID NO: 186960 - DNA, 506 bp, Zea Mays
aaaagaaattcagtacccgaaccgtgctgctttgtgaccaagtacgtttgccagtcatatggtattatataaaccaagggttacctctgcgagtctgatagtagtgtccttccatggtttatgtactgtgtaactcctgctgtttctgtgttctgcttcttaaaaggcatcagtgatttgtaatataagtcattgatatgtcttttttgatgatcagtgtggtagagaatatcatgttggttgcctcaaggaacataatatggctgatctgacggtgatttttctaacctgagacatcttggcagagtttgtacccaaaaactagcaccatactaatgatcttgttcaggcattgcccgagggagcctggtattgttctacggactgtgtgaggattaaccagacactgcaagatttacttaacagtggtggagaacctgttcttgccatggatttagatgtcattaagaagaaacgagaagtgaaaggttttaatgatgatgatg

SEQ ID NO: 186961 - DNA, 329 bp, Zea Mays
ccccaaaacaaacggaccatcggaaccctagaaaccatacccttcttcaatgtgacatccgagcgtcacatcactgaaccacatcacaccctctggaatccccttatcccacgaaatggcacagaagcagagctcaaaccccgacagggaccataccgtgccacagcaagaccacgaggtccctccgcagaagaggccgcgaaaaagctcccccggcaaaactaaatcgtgagacgcagctagcgaactcaaagctccgagcacggcgtttgactgcagccaaaagaacgagaggggcacagggtactcaccgctgcgagctggcgacg

SEQ ID NO: 186962 - DNA, 377 bp, Zea Mays
aggctgtgtgacgtttcctttagaaacctccattgctggctccccatcctcttcctgcttcatggtttcacctgctgccttctccttcctcgattgccgcagctgctatgggaataccatctttctacaaatgggtcgtcagcaagtacccaagcatcatctcccctgtgaaggacgaaccagaggagtgccctgatggcatcatctacgacaacctctacctcgacatgaattgcatcatccattgctgcttccacccacaggaccagctaacgcatgcagacatagatgtatccacacacctcaatccatgcgaatctggacggtataaatgtatgtgttgactgactgacacaccgttgcaggtgcgccctccg

SEQ ID NO: 186963 - DNA, 451 bp, Zea Mays
aagatctgaaccgcatgagcaatatctggcctggtgacagtaagataaactaagctgccaacaagatgtctgtatcgagatggatcctccaaaggtgtcccatcagtcggacgaagagataagtgtagatccataggcgtggcaacagtgcgagtatcactaagaccagaacgatcaagaagatcttgtatgtacttggcctgagaaagataaataccattttgagtctgcaaaacttcaatgcccaagaaataactgagtgtccccaagtcagacatttgaaattccttactcagagacgccttcacatgagcaatatggtctggatcatcgcctgtaatcaacatgtcatcaacataaagtaataacaacgtgcgtcctcgtgaagaaacatgaatgaacaatgcaggatcatgatcactagaatagaaaccacaagccttgatgacag

SEQ ID NO: 186964 - DNA, 638 bp, Zea Mays
ttcctgaaccaagttagatataggatgcttttctttttcatctttgtcaagaggtttatcatttgttgcatcaattgctttgtcttgaggaatattgatggaaatacgatcctctgcaaacttctgtgaagagcaaataacactaaggttggaggaacatggcctatcagcaccaatacaaggctcattttgatctcgaaactttatgtcaattatattgcatcatcaatactgttgtcattacattctgggcttatattcctttcagtaatcttgggttccctactagtagagctagatggatttgcacaactagcagagaccatatccaatggactataaggtgatgaaccaagattaagtgaacaaacttgaagtggagcatgacaaactgtatcagatgcatgttctgttaccaactgctgatgatcctcatccaaagcacatgacatggattgctgagaaccattagtcgaattgctttccattaacatttttctatggtgccaaagcagtactgaaggtgcagttgtcatgtccagaaaactttgagtgaatttacaccggtcatccaaacaacaaatggcaggtttgatatctgaataattagactctggaagaaagacagactcttgaac

SEQ ID NO: 186965 - DNA, 341 bp, Zea Mays
tgcttttagaaaaaataattgctttgggcaggcttccattatcagtagtgtgtcatcagcatattgaacaatcggaaaatcttggccacaattttcagtcaagggtaactggagcaaattctggtgtcttgctttactgataatactctgaagtaaatctaccgccaagacaaacaacaaaggtgagagaggatctccctgcctgacccctcgcttgcaatgaaatgttttccctggcactccattaaataaaaccgatgacgtgccagtttgtaggatatttcgaatccatctaagccatttaggtccaaatcctctatgaaacagcacctgaaggataa

SEQ ID NO: 186966 - DNA, 358 bp, Zea Mays
aaattgagggagaaagagcgcaatgaggctcgcaatgtgctaaagctgagggaagaggagctagcacaattaagagcaaagctcaacttgatagaaaggcagggaaaagctactgagaatgagatcaattcaaaagttatggagaaaacccagacattgaggggtgaactcatgaagatggaagaagcgatgtataagcagcagcaagagctctgtgtgctaaggcagcgactgcaggaggttgagcgtgaaaaggctgatagttgtcagccagggcagcaggatgtaattggaggtagactgctggcacggctatcagagatgcctgcaggccttgatcaatcaatggcaatcgaca

SEQ ID NO: 186967 - DNA, 291 bp, Zea Mays
tacaacgtctgcctcattcaaagcggcttacgcgtgtgagcatgccaactgcgagctcacctcaacgttggccaccacaagagagttggtcgaacctagggcgccctatacagtctcaaggccagccccgacaccttcatgtccgctgaggacacaaaggatatccagattgatgccattgatacatccaagcacatacgcatcggggcggcgctctccgacagacaggggagcacactcgtcgacttcctccgggctaaccgtgacgtctttgtctggaagcccgtggac

SEQ ID NO: 186968 - DNA, 296 bp, Zea Mays
accctttggccttcattagcaaagccttaggacctaaaacgcaaggtctatcaacctatgaaaaggagtatttggccatccttattgctgtggatcactggagaccatatctactccatgatgagtttgttattttcactgaccaaaagagtttgacacacttgaatgaccaaaggctacacacaccctggcagcagaaagtttttaccaagctactgggattacaatacagagtggtgtacaaaccggggggctcagaatcgggtggttgatgccctttctaggcgaccccatga

SEQ ID NO: 186969 - DNA, 285 bp, Zea Mays
cctctgacagctgctcggccatctgttggagactaagctgagccacgactcttccagtttctgcaatctacttgcccatcaactgttgaccagtggttacctgtgtaatagcaccggaattaatatccaactgaaccatcatccgttgctgattggtgttgatctgaccgatctgatcgaacatgagatccatattctcgagaacacggtgccagttggccgcgttctggttagtgttcactgccatggcgtccaacagaaactgtgtctgcatggatggtcgag

SEQ ID NO: 186970 - DNA, 387 bp, Zea Mays
ggctggtaggtggatgcaggtgtacaaaatgagacaggggttgggtgactggtctcattttgttcgagctgtacaggacaagtttggttctgaagagtattctcagtgtatgagggaattggttcatatgacacagagagctagcttggatgaatatattcaggagtttgaggacagtcgatatgcaacaatggtgcataatccaaggctggatgagactttctttgtgtcccagtttattaaagggttgaggggagaaactaagggatatgtgatgtctcagttgcctagaacagttgacagggccatagctctagcccagatccatcaagaggttttggagaagggaggatacaaatttcagaaaggtctacagtcaaacaaagg

SEQ ID NO: 186971 - DNA, 560 bp, Zea Mays
agcacaatgaagtttgcagctcaatcaagagctgacgtaactaggaagcctcgacgactgcactagaacgagagatagtattctaacgtttgaaagactaagagatgaattatcatcgaggaacacatatagcctaaagtagacttacgggtatcaggattaccagcccaatcagtgtctgagtagaccacacggttagactgaatagaagaatgtatgtgaagacccaagtccaaagtgccacgaatataacgcagaatacacttgattgctacaagatgaggctctcgctggtcatgcatatggagacacgcctgttgagtggcgtatgcaatatccggtcgagtgaaagtgaggtattgtagagcaccagcgtggatggaaaaaaattgtaggaccgaatataggagcaccatcaacatacaacatcggataatgatcaacatgagtggagcacggcttacagtcaaccattcgagcacgatctagaatatccagcatatattgtcgctgagacagaagcagaacggaagaagcagtgtgttgaacatgcatgccta

SEQ ID NO: 186972 - DNA, 320 bp, Zea Mays
ggagacaacaggtaaggtcctctctattcttgggattgctgtgagtcagctatatggtgatattagagccaaagtgtctgaactctcaattaaagctattggaaaagctaaatttaggacagatgattctggtcttcaagctgatgctggaatgagcttgcaagtatttgaacaacatatagaaaaatgtgcattaatttctggagttgttgatgaagtgcatgaagttattgggagaaccttagcagaaacaagtgctgcttatgcaaagcccagtcctaggcactgggcctctacttttcaggcagctttgcactcaa

SEQ ID NO: 186973 - DNA, 318 bp, Zea Mays
ttcggctatgctcataaagacgtcgcgcacttggtctggtgtatttgttatgtcggtccggcgcgcatgtagtcggtctatgctcataaagacttcgatttttcgcacttgttgtgcttagtccggctgcacccttaggcgacttttgcacggatagtctttttgaggaagacttcgatttttcgcacttgttgtgctagtccggctgcacccttaggcgacttttgcacggatagtctttttgaggaagacttcgatttttcgcacttgttgtgctagtccggctgcacccttaggcgacttttgcacggatagtct

SEQ ID NO: 186974 - DNA, 293 bp, Zea Mays
gcacaatatttgggtttgctttactaggagacgagacagttgatacattcgagtgggtcttcaatacgttcaaaacatgcatgggatgtgacagaccacgagtgatgttgacaggtatgttgtcataaaatggctcgtaattattatggcacgtactatatgatatcatattggcttgcatgatgttatgtaaatttatctatttcagatcaagaccctgccatgccaattgcacttggcagagtattcccaaacacaatacatcgattgtgtttgtggcatgtgcaaaacag

SEQ ID NO: 186975 - DNA, 650 bp, Zea Mays
ctcagtgcaaccagcatgccattttgtgatttagccttgatttgttttttcatcgagtccgcgggaacatcgcctccacaacgaaggcacgtcacggcagcagtacctagcatgggcgtcggtgtggttctcatctagacagccataaggttagtaccgagctccccttttacctcctccctctcctctacctcctctccgcctagcgttccaagacatccgtctacggttcgtctttctttgtcttcctctttcctacagatccgatttcctcactcatgccgggtgctgtccgcagacgattagatctgttttattcactcgcgttgggtgtcttcctaggttcgttctcatgtcgtttgtgacctagatcgtgtggaggcgttggtgggtgcaagtttgtatgtgtggtgttgctacggtttcggaccccttcttgataggttgatttgtgtctctcatgcaaaattgaggagaatgatgtttcctaattatagataggtttagaacttttattttctagaaaagtagttaatgagattttcttatgtgtactttggttcataaatccaagagagcacttgactagaatatgatctggaatttcaggtaaaggtacaccctaccttctatcaggactagaatcttag

SEQ ID NO: 186976 - DNA, 595 bp, Zea Mays
cggaggtgacgcaagtgctcagtgatggagctgctgtagatcaggatatcgtcaaagaaaaccaagacgaaacgacgcaaaaatggtcgtagaatgtcattcattagagcctgaaatgttgctggggcattgcagaggccgaagggcatgacgagaaattcgtagaggccgtcatgcgttctgaaagccgttttctccacatcacccggacgcatgcgaacttgatgatatcctgagcgcaaatccagcttggtgaaataccgagcaccgtgcagttcatcaagaagctcatcaaccattggaattggataagcatctttgacggtaatggcattcagcgcccgataatcaatacagaaacgccatgatccatctgccttcttcacaaggagaactggtgaagagaatgctgaggagctgtgctgaataatcccttggcttaacatggtggcacactgacgctctaattcatctttgtgggctgctggatagcggtatggccgcacagccaccggtgccgaacctggcagaaggttgatgcaatgatcgcgatggcgcggtggtggcatacctgaaggctcagcgaacaccgacg

SEQ ID NO: 186977 - DNA, 1143 bp, Zea Mays
gaaaaaaagatccctacttgctaaaagacatggtaaaggggctgatttcctgagagcagttgatgagataattgaagtttatgattctctaaaggatataggtagcaacaaggttgacttgcctgccgaagaagtaaagccaggtgtagaaaagtttgctgaaaataatagccgcatggatactgaagatctggtcagtagctcctatatgcacaatgatagaaagatagaagatcattatgtcactaccaggagtcatgacatggtcaattctgacaggccttcagttgacgagcgatgtgttgtaaattctgctcctgatgagcctattgaaaatgtatccatccttgatgaaatgagggatatttctttgcgtactaattcattttcaaataagcaaagggatgcacagccacaaaattgctacacacgtactagggttccatctctgcggaagtcaagaagttcattaagtctggaatcaagaaaggctcaaggttctggtaatttttttgatcataccaatttggcttctattaatttggttcctggtgaacataaggaaccttctcatcataggcatgaagatgacaaagctaactcaagttctgtttctacatcagataatgtctggttgcattctggtgaaggcacttccaaccaacctgtaactttgggggctagtaacggcaacagaatgttgaatactcctgctgaagtggatagtactagtaaccgtgaagcatctgaaaatggaactacagagacagaactgaaatcaaatggcacatcagatcttcccatgaacacagcagtaaatttcaagagaaaaagaaaatcagatagaaaacctggacctcattatagagattgtacaacaccaaataaagatgaccaattatgtgctgagtacagtgaaatccttccagattctccgaattcaaagaatgaagtaagcaagtcagatggagatgagcacttgccattggtcaaaagggcaagggtccgaatgggaaggtctcagttggaggattcaccagttgatgaaattgatgtttctaataagaagccagagcttgcaacagccttggaccaatgtgataggaatggtaaacctgcaagtcccgccaatgattactcagc

SEQ ID NO: 186978 - DNA, 671 bp, Zea Mays
caaccatgcttgatggggaaccgatcatatccttaccacccaagactgtttcacttaagacggtggacttcactagcgaggagcgtggtttttataacactttagaagttgaatcacgagaacagttcaaggtcagttcacagtatttgattaatagccttgtttcttacattcttctgttttgtcaatcagcttgatctttggatatcacatttagacatatggacttccacatgaggcaagctaaaccaattagggaaggtttgcatacatagttgaatatcttttacaggaccagtgtatggtaggtagttcgacattatgttgctggattacaagtgaactttaaaggacgatgacacatgttgaataacttttacaagtgaactttagaggagtattacaaagatgcgcagctctcctacgttgtcgagaaaaaaacatgatttattgctcatccagttgcctgttttaggtcactctgaagttgatacattgatgcaaaacttatccgtttcatttgcgactattagtctattagaaggctatgctcactacaactgctttgcaggaatatgcagctgctggtactgtaaagcaaaattatgtcaacattctattgatgcttttgcggctaagacaggcatgcgatcaccctcacctagttagag

SEQ ID NO: 186979 - DNA, 603 bp, Zea Mays
ttcagtttccttacttcggaaaaccatggtattgaggcctatttcaatgaccagtttctagttgtggagagtgcggctgggaaggggaagaaggcttctctccatttcacttatgaattcaaaccccggtgctggtactttgttggtctggagcactctagcaaacaagctttgcttggtaagtctgagagtgaattgcggttgtatgtggatggggaccttcatgagagctgtccatttgagcccccacgcatcgtgaaaccactggttttttgttgcattgggaccaatccatcaccaactattgccggtcttcagcggcggcggcggcaatgtccattgtttgctgagatgggacctatctatatctttacagagcctatcgggccagagaaaatgagtcgacttgcttccaggggaggagatgcacttcccagcttcggcaacggtgctggttttccttggaaagctacaagtaaccacatcagggaaactgcagaggatggttatacactcgatattgagattggtggaagcttacatcttctttatcatcccagcctgctcaatggccggttttgttctgatgcttcaccttctggc

SEQ ID NO: 186980 - DNA, 549 bp, Zea Mays
caaaacggtgaaagtcaggatattattctttttgatcccctttctacttcaagttttattccagatgacctttcattggcttctgtcatgccaactgaaaagtctgtgcaatcaacacctaaaagaggtagagggcgacctaggaaaaacccaagtgacaaactgacagactcatctggtattgtatcagaagatgtgtgtacagccctacctccaacaactgcaatctctacaaaacctaaaagaccacgggggaggcctcgaaaatatccaattccaatgaatgatggatctgtttcaggcgctgatgttgaattagggaaagagacaacttgtcagactgcttcatttggctgcagtttggaccacactgcttgcacagagtttaatgccaagttatgtattgttgcagttgatgcagcattgccacctattgacaaactgacctgttcacctggtactgtatcaggagatgtgtgtacagccccaactctaacaactgcaatctgtacaaaacctaagagaccacgggggagacctcgaaagtat

SEQ ID NO: 186981 - DNA, 334 bp, Zea Mays
ggatgccaaaaatctgttcatggctcaatctacatgttcatgtcaagtggaggatgccaaaaatctggaactacgatgccctgtatccgaaattctccaaaatagagaatgtatacattttcaatgataagatcatagccaaacatttctctttctctgtatagttcttgtcaatgtttgaagagtttggagttgaacctaccttgttgagtggaaggagattgtgttcagaaaactttagagatactttttagattgccgggatgtaaattgttgccagctggaaggccttgacttttaacagtctgaaacaataacatttaagcatggatta

SEQ ID NO: 186982 - DNA, 511 bp, Zea Mays
ggagattgcacacgagggcgagcccagcgtcgggcaagacggagctttgcgcccgagggccggtctgcttttccgtcgtactaggcatcccatcggggggatggcaggtgtcgtgcgtgcacagtggcgcgagcgtaatcatgttgttgcgcctggacgcgacttttgtcttgttgccactgtgctcctgtgcggggtaggtgtgcacattaaatgcgagtgtcccctactggccttcgggtgtgccctgtcctcctagcctgagaccggctcgggcgagacggatagagtgatcgtagaacgaagtgacctcgggcaaagcagaaatgggaagcatgatctgtgagtggcttcgggcgagacggagatttgccggagctcatgacgtcgtttatggggaagacccctgcggtgggcctcgggtgaggaggtgagttggccccttaccttcgggggttacgtcttaaccgttccggagcgcgtttttagaggtgtaatccggctaccccta

SEQ ID NO: 186983 - DNA, 587 bp, Zea Mays
cttggaatagggatgtccaaagatcacagtggatgaggtcgaaggggtgaatagcttgggacatggaagaagagaagggtaagcgagtgtgaccccaagctgacaggcatggcgaagcgaggtggcattgccccaagggcaagggatggtcgagagtctagataggatgtcatggccggggtgactaagacgacagtgccaagtggaggcagaggcagtagcggcgagggcgtaaggtgtggcaacacaagatgaaggaggtggggcaagaaagcgaatagatatagagggctagagttgttgcatcgggtgaccacgacacaagtggtaaggtgtcgtatggtgagcccccatgaatcgaactccatagaacagtgattgtcagtggtgaagcgatggacggagaggagattttgtatgatgttaggggcaacaaggatgttgttgaggtagaaaggaacaggaagatccgtgtcgcttaatgaggtgacaggcatagttggcccattatcgacaatgatggaagaagagaatgtggggctaggggaatggggtaaagagacagtactgcggtcaagagtagtttg

SEQ ID NO: 186984 - DNA, 774 bp, Zea Mays
gtctgataccatgtagagaattagggaacatctcacaccccattaagggaggggtgactttcatatagtcaagatacaatttggagtacaactaaagtacatacacatctctaggctatacagattaatagtaggtcatagtatgcttgaaattccttaactaaaccacttatcagaggcattacttgattttgaatcacatgggaactatcagagctgatcatgacgacttctctatacgttttgcctctgctatggatcaggtaaaacttacaattttttttcattgcatcagtatattaatattttttccaaaataactgcaaaaatgatattgcatgtcatgaaccatcactatcggtccttatggatgataatcgctgactgaacattgtttccaccattgctcccaactgaagtctctacctttggtttgatgaaacatatatttgcaatataccatattccttgagtcatcaaaaggaaaagaactcaaaaaagtatttcatttgacactgagatagtaacacttctttgtctttggtgtgctctttcatccattgatattgatttgttctttcagatgataaggttgaagtcatcagatggtgtgtataatgactggtcccgcgatatcaaagggaacatgtatgatattgttgttgaaggcttccagcttcttagtcgttggactggcaggatttgggaacaatgtgcatggaaattctctcgccctatttcagattctcaacaaaactccatgacatgttttga

SEQ ID NO: 186985 - DNA, 271 bp, Zea Mays
gtcggcaacttgttgctctttgggctgattcctatcaacctgcacttgatttgctatcaagaatacttcctcctggacttgttgcttacctccatacacgttcagatgaagaatcacagagccagtatgatgaagcaccgttgagcagaaggcagagacgaatacttcagcagaggagggtccgtggtagtaaaagtatgtcagtacaagaacaaggggtaccccccaatggtgttgaggatggggaacccttcaggcacaccagtgcggg

SEQ ID NO: 186986 - DNA, 517 bp, Zea Mays
catactttagtggtgatatgtcctcttgtttgagtttggacgacgagtcaagaaataccttacagaaatatataggagcagaaagaatcttgccttccatgtccaaggtacttgttatgtcttatcaattttgctttgaatttatgtggacatttatcgactgagtgcttcaataggttgatttttggatggccgatgaaactggtccttgtgggccatgtattggttttttccatgattgttcggacaacaatgatggtgttgattccgtaaggaacataacgaatgccaagcttgttgagatatgccgtcttgtgtttgttgaggttggttttctgttcttttaagatcttttgcatgcgaaacttctcagctgttaagttctattgctacacaatgtctctgctttactcatatctttccttcatttttagttcgatcggcaagcagatggcgtcttggagcctttccaagctaagcatgtcttaacaaggattaatctcgaatgtttagctgc

SEQ ID NO: 186987 - DNA, 381 bp, Zea Mays
ggccggctcgagatgatactcagaggcaaggtgtcgaacgtcggcgctcctgttgcatactcggtttggaatctgcctccttccaaggcctttaccagttttgtgtcaaatcctcctgctggtgatagcagtttgggccttagagtgcgaccctctcccgaagaggttagtgctttggttgcctcacttgaagaaattcctgacgacgagaggcaggttcattttgaggtgcctttaaatccaagtgatgcagaaataagtgccatgctggatatgctagctgaagattcttctgatgcagtccctgctgaaacactggcggtagcgcccatcccagaggctagcgaagctttagacattcagaagtatgacaatgttcgt

SEQ ID NO: 186988 - DNA, 286 bp, Zea Mays
tagctctagatgaacagaggccaactaaagagcagattgtaaagcaaatggtatagtcaggacgtgttcacagaagcagcaactggcattactgagcagagtgacactgaagatgaaagggagagtttgcaaaggaatatgaagaagatggttactggcaaaacggaaaaagtggctaaagcacagcgtttgcaacgagatgatattgagattgtaccagcagaacctgtccgagatgaagaggatacgtcttcatcttctggtgaatcagatgtttcggaggatg

SEQ ID NO: 186989 - DNA, 435 bp, Zea Mays
tcagttattttgctcatttcgttctgggacaaatagtttgctcttacaaatgatttttacaattttgacacaccactagagttttgtttcagtcatcatttcacatttctgttctgtattatctctgccactgaactacaggacaaagttgctagcactcagccacaaaaggctgctcgtttacaaactaccgaaaggaaaattagcatattggagaaagctgtggagctcaatccagatagtgaggaattattgctttgccttctgaagtcatatggcaagagggacaacactgagactctattgactaaatgggagcaaatacttacgaagcacccagatagctctacgttgtggaaacagtatctgcttctgtgccaaggggaattctccagattcaaagtttctgaaattcggaagtcctacgtgtatgct

SEQ ID NO: 186990 - DNA, 1236 bp, Zea Mays
tgcactgtctttttggtgggcgcaggtgttccgacctctgctgaacatcactggggagttcacggctgaggacgtcgaggcggcgcttatcactcccaacgagattctagatgatgtgcatatgccactgctaaaggtgggctccttggttgttcggcttgagcttgttttccctttccttcatctcgctgtggtgtggaacgaggtgtatgtgtgtgtgctcttcctcttagtctactttttttatttgctgcatggtgcatgctgttaattgcttcatgaacaaatactgaaatgtgtttaatttttttttctgcaatgaccaaatttgttcattttttaggcttgcctgtattgtgttaccaagtttggaatgggatgctgccttcagtttatagaagcttgcggttgttttttctgcttaactggccacatgcaatattggtatcatgtaccattattattgttttgtgattttgtcactcaataaattcatgaccccaaattacatctttgtaactgatcatacatactagctgcttgcttagagccctttagacagttttgtacagtacattttttgccatgcaaacattttccttgattctcatgcttattggtcatatctgcagtcaattcctcctgtaactcgcatggctatgggacgtggaacctgggtgaccgtcctatgcagaaagctgaaggattggtggcattgggtacacaatatatctcatattgcaaacaactttagatagatatgaataacagtattccatttggtttggacctaataagatcctaaactgcaggttgcagaaggtgatctgccaattgttgcatctcatgggttagcctcgcacataggacattcttgagtaaagcttgcactgcagcttcacattgataaaaatttccaatcgtttcatcttgcagaactgaaattgagacatacaaaacactagaaccagctattcgtttattaattttgaaagcgatatgtgatatccgtgttgaggtatgtactgattttattttaatttaacgatgaaccaaaagaactttggcagaatggatacttcagcctttccatctgtatactcttgtctcatttcttgaagtgtagtacagtcataattgtgtatatcaattttgattgagtctcagcctcccagtgtctcatattcagtttttcgggaagcttatttctatataatgggtaaatatcaacatggt

SEQ ID NO: 186991 - DNA, 320 bp, Zea Mays
caataaggcagtctttaacacaacttcggtcactgatttgaattgtgatatttttgtaaaacctgtagattgctcttgaaacatatttacactttaaacagtttgatggcatgtacaaattatgtatgtccctttatgacgtgagtcagaatcataatgcacgttttggcataattatattgttctagcagattgatgttggtgcaataattcctaatttctgtgatgcaactgagtaatttccgtccagagttcagatccggtctggatggtttcatgaaatttgttcttgaccgaacaagaccaaaacaacttgaagc

SEQ ID NO: 186992 - DNA, 1918 bp, Zea Mays
tgcgagtggcctggtgcgcgagccgcgcgagaggaaaagaggcagagcgagccttccgcctcctcccccccttcgcgagagagaaaggagtgggggaggaaaaaaaatcttagggctttctcgtcgatcctctccgcgattaccccaccgattcgtccaatccaatgcagcgcggccccgcggtatcaaatcccccggcggcggccgccaccggcgcctccgagaacggtaagagagcggcccgtcctgtggggggtttcgggtgttcttagcggggggtgctgcttgatatcgtcttccgtcgaattccttgggttctgggcgggcgattctgtttctcggcgcaatgcgatgcccttcatcaagaaacggtgacttctcgggcccggggtttcgtgggggatgcggtcccggctcggcgtgcgtagttgcgtgtatggtgaacggatcgtcgatgagactcttgatcgaatccgcatgttgcctggatctgatgcgagagtacgcttgggatttgtgatcctggaacgggcagcagagagctgttttaggccctctcgatcataagaggggggggggggggggggggggggggttcgtgttcttgctttggcctttgggtaaccccagagcatggcgcggatcatccatggctctgttctgcatagctgggtgagggtttcttgaattggactaccttggattgaggaacacgacagaatagaattttccatctagatggtttgaaattcatatatatcagttcatatcttgcaggtggatgtgatttgtctcgtgcggatgggaaatggtcgtaggatcctttataggttattattgaactgccccccacagttaattggtgggtcttgtctattattgttaggtccttcttgcattccattttctactaaatacaagggcgcaggtgaagacatggattgatgctttagctctaaacgttgatttgttttgaataggcttgcttggtctggcgtaatgttagtcagggtattaatcctcatatggagactagagtccccatcaagccatctagtccggtacttgaacttacatatgctgtttttctttatttggcatatccacatatcccgattctgtaacggttcgacaattccattaaatattctaagttggttatgcggtatagtttatagaagtgcaccttccccgtgtgcctggatgttactcctgaaagatacttagctgctggactgttaattcatttaacaaatatcacaagatggagttgcacattaatttcttctgttctatgttatctatcttagcaatctgcatctcatactgtgttttgactcaattgatatttagtgtagtttcttgctatatatgaccatgctgcatgattttagtaatgcctcacagtctcacacttctgttcatgaagtaaatattagctaacagtacacccccaaacaatgtttctgcttaatcttgaactcgcttctttttttactttgctttgcattttcagtgagcagaaatattggacactctggcccatcttgcagtgcacctgcatatcagttgtttcgccctgttactcgttctatgacccgtgggtctgatcctatcgtggcttcacctggtttcaaggcaggaggatctgatagcgcaagcacacaaagaagtatttcatatgcttcttttagcgctcaattagttgcctcacgactgactgccactcgtacccggacccctctaaaagtgacttcatctggttggaagcctcttactcaacctgttgctctgaacgaagagaggaaatgtgcaaaccttacaatcaaccctactgctaagcgttccagagttacttcctccagagctgtcaaagattcaatcaacaattcagcttcaaaagccaactcaagtgttc

SEQ ID NO: 186993 - DNA, 280 bp, Zea Mays
cttcccctggaccgcgtgggtaaacaagaaagtgatgaaatacgacgttgggagatgtcgtaggagacgaagattctattcgcttgctacttccctctgctcctctgctactactacttcagttctcgccttctctttctgccctcacctgactcctcccttcctgccatttctctctcgatagtcgataccaccacacctccgctcccctccaagcctctccttttcctaagccccgacgtcttccgacttccaggtcggtgccgggcaacaataactt

SEQ ID NO: 186994 - DNA, 1347 bp, Zea Mays
acagaacagcctctttttgggcatgaaagacagccaattgatccaagtgaccaacctttggaatttaacagtaggaaagctcctgatttggcagtacatataaatgtcaattccaatatcccagctcctcaaacactagcacctaatcatgatgtagctgcaacctctacacattcatggacgccatctgctacagtagggtacctgcctcgagctcctgtgccaccacaaacagcacaggtgtgtacacatgtttgaaattgaattactgaccttttctcttaagtccccttacacgagtgattctactctttttgaacctacagatggatccttctgtgcatgctgcaccactttttggagcagcatctagttctagttatgtttcacctgcagcatttggtgttggtaatgtaacagaagtgttccctacagatccaaacactccttttagtgttgcagataaatcaaagaaagtacgcctccatttttttcctgccatgcacttccttttctgattgttttcatttgtttaactttgaactgttcctgttgcattctgtaccagcctccagtacctaactggcttcgggaagaacttttaaagaaaaaatcggaaccactgagtgcttcagcgcaaaactcagaaaacttaaatcccatggaagctaatgaggcagtacagacaataggaagacctgaccaaagtgacagcagaagcaatgattccgctaaatccactgaagacgatgacgatgatgaggtgccatttgctaattacagttcttaacgttcacactattgattattgaaactgtttttgtacgctgcatacaagatcaaaaattaacatccttccagtttatatttgaggacatgaggagtaattaacatgtccaagttagtaatctaaatagtgtgtgcttatgttggagcatgggagactctaaactctaaatgaagatatggaaaaatgttaatatcatactactgataatagtgaacaaccttgcttgtgctagataatatcagcattggactagagctggaggctactggctttaaagaaatctatattgagggcatgtaaaggcttgttatacattgactctaaatatgttctacagagatgctgtgcccatatgtcctacagaatcgactttgctattttcttgtaatgcagaataagtagaacaggtcgttgaacagcatgttgatattttttcctggacattttcaacttgagtatcacatggtccttatttaaattattaagctcatacttaaatcgcttgcaggatgaaattgaagcagctcgaatggcagcaatcaacaaggaaattaagc

SEQ ID NO: 186995 - DNA, 271 bp, Zea Mays
gaaatgttgtagactccattgtagggcgtcagtatagcaagcacaacaagaaataaggggggcgcgacagtaggccagcgcacagccctgagtcgtagcaagggcttatcccctggtttatctctgtgtttgttggagtctgtttcagttatcccttaagtttagcagataagttgttaggccacctgagttataaaggagaccttagtttgtattaggatttttatccaagaagttgatgtcggctggcacaactcttgggtcatcctgg

SEQ ID NO: 186996 - DNA, 446 bp, Zea Mays
gaaaaaacaataaattgggggacttcatccagcgaagtgacgcgaacacgaagcagggttctagagatattactccgatcctcctcccatagaatcaacctcccaaacgacccaatggcggcctgcaagaactctgaagaacgatagtccaagggaaaccccaaaagcataagccaacactcatggttgaagagaagagcacggtgattccaagcatcattgtgacggaccgtagtgaaagtagcgtctaaatattgttgggggccaagcagaaccaagttatctcgttccagaacactacggaattgcacaatcacctgccccaaatgcgagcgctgaatggctcgaacaccaaccctacgatgctcaacaagatactccctgaccacatccctaaccgcagggaacaagacctcgtgctcaggcaaaggatgaatattgataat

SEQ ID NO: 186997 - DNA, 458 bp, Zea Mays
cctcccacaaatacacaatatccagaagtggatctccgatcatccctactgcttgcccagtccgcatcacaatacccctccaaattcatatgttgatttggtctaaaccacaatcccttgccaggggttccctttaggtatctcaggatttgataaactatcttcatatgcccagttctaggatcatgcatatacctactcaccacacttactgcataagcagtgtccggtcttgtatggcaaagatatatcaaacgaccaactaccctctgatatctttcccgatctatagggtcacctgactcaacacaagtttggtgattcctatcgatgggtgagccacatgggcgacacccaagcattcctatctctgacaaaaggtcgaggacatactttctttgggagagaataattccctgagatgatctagctatctcaatcccaaggaagtatcggag

SEQ ID NO: 186998 - DNA, 314 bp, Zea Mays
caatcatcatacagtccttcagagttccaacctgccacaggcacaagctgttcatccctagtaagaagtgccacgaacacacaacccaacgaccagatatccgaggtacagccaaccaaaccatcaaaatcacgaccctccgtccgcaacgtgtcacctagcactgccgccacctctggagcgatgaaagctcgaacactgttcgagctagccccagcttggactccccggcacaaggccaacgcctgattcaaatcaagcatgcagtgcccaaaacgatcgaggcagaagcagtccagcccgaggcaccccag

SEQ ID NO: 186999 - DNA, 720 bp, Zea Mays
ctgcgatggatccatattatgaatctccggaggaacaggagcaggaaattgaaaaaagtattgtactcccgcccatagtatcatctgatattattattacaactctgacatgaatttccatatttttattgtacaggtagcttcaacaagtccagaggttctttcttgaggaaagatggtaatcctgtgcctccaggtaaaggagatggtagaaatgctgcacagcgagattcaaaaactaattgggaatctaatcgaaatacatgggccgaatcgagttctcatatggaatcaccccttccacggaggtccacattttcttctcaaggtgaaagtgctggttatacaagtaaatcagagagcccaaacactggtgcacaaacagttaaactggaaggcaccacacgcagtgctccacaagggtcacctggtgcctcttctggaattttagctaataacatatgttcaggggcaaaaactgcacctcaatcagccattaacgagtctgagaagatctggctgtacatggatccttctaataaaatccaaggtcctttctcaatcatacagctgcggaaatggaacagcaatggctacttccctcctagtttgaaaatatggaaagctagtgagaagcaggacgattccattctattgactgatgctttggcagggaagtttgagaaagaccttcctccatgggaaccgccacatgttagt

SEQ ID NO: 187000 - DNA, 304 bp, Zea Mays
ggaggggttaccgtcggtgttggagtgtgtggtggcaaagagctcgttggatccggagttgtggctagagagcattggtggcgaagagcttgatgtagccggagttgtggctggagagtgtggcgctgcagtcggtggagacttggggactggggtagacctgctcggtgaagagttgcctactcccctagctccctcgaagtggacgtactcgatggtgaagtcgtcgtacgttggagtcgtgccgtcgtccaccgccttgtcccatgcccatcgtcgcccttcgttgaacactacattgcgc

SEQ ID NO: 187001 - DNA, 386 bp, Zea Mays
ctatggagctccggccacggtggccgtaagcatagcggcgaaatgatcatgttcccggcgaccagagagcccccagcccaattacatgggtcggcaagcatcatggagttacgagaaagctcaaacgagagggagagaaggatgagctgaccgaaaaggggctggccgcggtgaagccggtttcacggtggcggaaggtgatttggggcaaaaccaaaattcatgcactcggaggcacgattgctagcgattgttggtggccgagggggtgatggtgttacgcagctaggggagggctcaatttataggcggagtgagcggtggccgcaaattttggacgagcaacgcggcggccggaggtggagaagaacactggcgcagtgaat

SEQ ID NO: 187002 - DNA, 962 bp, Zea Mays
ctttggtatcagctgaagctgtccaaccagatgttgtttcatttattgctgcaggcttgaaagagaaagacactttaaggaaggggcatctgaaatttttacgagttatatgcaaaaactctgagtctttaacaaaggtaagggagtaacttccagttttgtatacataatgaaccatcatcctgttcactacatttttttaataaaactagactctggggaaaggtgccccaatggcatttattttaagaagagactgtaattctgggtctagacaaggtcctgaaggctgcctgcccaggcggtgtccgttaggaccctttttctcctcttaatataatgtcacacagccctcctgtggttcagaaaaaaggggaacaccaccagggctcaaaccctggtgggggcatctaatttgacggacctaccacctagtagtgcgtctgcttttattatcattattatgcttttctttgcttaaggaagagtggttcaatggctgaaaaaatgcaggcactaaaggctcatattaactattaataaaactgatctgctccaggttgcttctttattggatcatttgattcagttgtcaaaaactggcttcagcaaggcaacacagcggttggatggaatctatgcactctttgcagtatcaaggcttgctgctgttgatacaaaagcaggttttctacaatttcttcttgcatccaagttcttttttgtatacttgccagcatattttgccttaaatgtggtttgatgaatatgcagatggtgccattctgaaggagaaactgtggacattgattgctcaaaatgaaccctcattgatctctttacagttggtaattctgttctgagtttccaccaagaataatttgttctcctgcaaaatgacacgagaagtggacacacttcagcatctcacagacctttttatttattatttagaacctgat

SEQ ID NO: 187003 - DNA, 366 bp, Zea Mays
ttggtcactcgaaccccagggtcagaccttctatgccagcacaaatgctcccaagtcagaattcttttaagtggagtagtgttcttggtagacttaaccgtcttccatcccaagggattgatgtgatcttaggaatggattggttgaccaagcacaaaggtatcatcagttgtgcaaacaagacagtccttctcatagatcgccaaggaaagtcagtctcttgtcaggctcagccacccgccaatgacccaatgatgtttaacgtagtatcagaaagcatgtcagtagtagaagaattcatggatgtgttcccggaagagttgccaggaatgccaccagaaagagaagtggaattctacatagatc

SEQ ID NO: 187004 - DNA, 723 bp, Zea Mays
gagagatcaagtgttttgcagcatgaaatgtcggctaagttggtcctagctgatgctacatcgggtgctgagaaatctcgcacttcatttgaaattcatgctcacgagttagcagaagcaaaagcggcggcagttgatgaagctaacaagcttgcaatatgggtcgaaaaacatgcactggttcttgaggctatacgggagaactctgttgcgtgcattgagtcatgcatgcaattgaattgtaaggacaagacattgagccttatttcagccgtcctagaatcaggggtcccacttacagttgtaccagaaccaacaagagcgcaatgctcggaattggatagggagatttctcaattattatctgagttacagggtggactttcctctgctttagactcacttggtgaatattctttagtcttgaagcaagttcttccggttaactacatcacaaccagtccggttactagttgggcgcaagtcttgcagcgatctgtaaggagtacatcgcaagatatgctttccctggctaaaatacaggctgcagaagtcattgctaaggttcaaggtgaaggcattaatctggtgcaacaaagatatcaggatctcgtaaatcaaatggaaagttatgtttcatgtgtggagaaacttgcgagggagtgttctgaactgatgaattctattgggttgaataacgaagtgcaatcaaaagagcggata

SEQ ID NO: 187005 - DNA, 566 bp, Zea Mays
agcttatgtgccttcttgtacgctgccatctgtcatgtgaccaattcgtcgagcatcctataggcatcgggcaatgccaaatcctgggcagttgatccagcgtccttgttgttttcctgatgaattcggctgctggtgttagctattgaacctcgttctttcccctcacacactgatgaaacccgaagtctcctgttgctagtcggacagcgcgcgcggcggctgtttttcttgttagttaccatctcatgttacctcatcttacttccgtttccagcaaaaatccatgtgatgtttcgactaatctaccgtttgtgtgcttcaaactgttgcagggttatctcttgattcttggttggaaatataccatacagcagtaaggagaagtcagcgaatatggcagacgcgctgtttgttgttctcaggaaagttgccctttccctgggagaaggcgcgctggtgaagattggcacggacgtggtcgaggcagcgcccatcttgacagattttgagcatggcatgcgacaaaccgagggcgagctcttggtcctgcaggcctttatcgg

SEQ ID NO: 187006 - DNA, 349 bp, Zea Mays
cggaactcttggtcggcgtagagagcacgggtggtgcggttccctaggaattgtgactcgatagagagccacaggacgcgagctgtgacgccgcgctgggatacagtgtcggcgaggtcgtcggagatggtgttgaggatccaagtacggacgacggcgttcatgcgaacccaatcgggggaggtatatgcagtgatatcggagagaacatgaccttccagggagaacttggtgagggtgagaaggaaggtatcgcaccatcggacgtagaatgtggagttggcgtcgaggaggagcgcgggatgagggtgcgaatgttctgcacagccactgcctgggcgtgtagatt

SEQ ID NO: 187007 - DNA, 406 bp, Zea Mays
gctcccgaagctctagcttcctggcgagactcatggcgatggacatggactgtggattgtggatctcgatgtcgaggctaaggggtggttggagtcccgccgtgaagagatgtacactctgggtttccgtgaggtggccgacacgtggtagcagggcttggaagcggtcctgatattccaccactaagctcatgcgatgacatgctgccggtttgcccaatgggttggaccgcaggggtggtctgaatcgctggtgcaggagttcggtgaagcaacaccattgtggagtgccctcgtcttgttgaatttggatgaaccacaactgcccgatgtcttccaggttgtaggaggccatccacacgtgctcttcctctatgatgcgttgctgatggaagtaggattcaca

SEQ ID NO: 187008 - DNA, 457 bp, Zea Mays
tcgtgtcgctcggcggtggtgcggacaagcctctagagaaattcccggcggcacgggtcccacatttcactccggaggtcccccggcgcgcggtggaggccggggatccgaggcgcctcccgttcctctctctctacctccccttggacgttggtgtgtttcccgcgcgacgccgcacagaggcggtgggaagggccaggcaagcaatcggagcgtagggcagtgggccccaccggtggtggccggcgggcgaggacggaacggagctgggaagacgcaggtggtggtggttgctagcactagtatatttgtggtggggaggagggaggttcggttggaggtggagcaaccgaaagacgaaccaccagcggggaaaacgctccagctgccgagctaaccaaccgaaccgcaggcgagcgagaggggaaggcgaaacgcggctgcgatgactctgctc

SEQ ID NO: 187009 - DNA, 481 bp, Zea Mays
tcaagatacaggaacagataaggcttgagaggaaggagcatgaagattgtacacagtcaagcaacattagatttgatgctctacagaagaagattagtctattgctagaagagggcaggagtagagaggtgcagcttggtgaggaggagctcaagattgtcaaagctgagatagagatatttgtcttgcagcagtgtttgaatgacatgacagaagtaaattctgaaatcgcagaacaactgcgaaagaataaagaaatatgcaaggtccaggagggaaaaatctacagcttatcacagcataatcagaaactaactgaagggattgattcagtagtgagagtattgcatctggatcataagtatgaatccttaggccaaatgaagcttgaaatcattgtgcagctcatcttaaatgagatcagctgcctgctgaataacatatctgatgcccaggatgtgaagcagaaggagcttgttga

SEQ ID NO: 187010 - DNA, 395 bp, Zea Mays
gaccggggagcaagtttatgaggcgtggtggcagagagattgggataacatcgacagccaaagacacggaggtgggtgtgtcgggaggagtaccgtgcaaggcctggtaaggggtggaaaaggagagggttttagtggggtgatggttgaaaagataggtggaggtatgaagagcctcaaccaagaagacaggggggagatgtgcatgaaaaaggagggaacgaataatggtgtttacagtccggaggacacgctcagccttgccattctgctgggacgtgtatggacaggacatgcgaaggataacactatgggagagaaagaaggcgcgtgaagatgaattgtcaaattcatgaccattgtcacattgcacactcttaatggtagtacgaaat

SEQ ID NO: 187011 - DNA, 311 bp, Zea Mays
gggaaaaccccaaaagacccgggcgaaacggcgcagtagcgaggaagtaaacgcggcggagcggaggaagcaaaaggagacgggaggaaagaagaaaagaaagcgtctccttcgacgcagctgtgttcccttcccttctccccctacctcgtctccgcccgagtggaaggaaaccaaaccatcgtggtcgtggagtggaagtggaacaaacaaacgcacgggcgcgcgccccctccctcctccatcttgcgcatcgccgctacctcggaggcgtgaagcctctcctccactctccggcgcagcagccgtcg

SEQ ID NO: 187012 - DNA, 507 bp, Zea Mays
ttctcccatgtcggtatatgaaagttgtcacacgccttgcacgtgcaattggtttcttgaattccttcaagtttcctatgtcctccaacattaggtccaagcaatgtgcagcacatggactccaaaataatgcaggaatcctctccattagaagcttgcctgcagctttgtaattggcaccattatcagtaacaacttgtacaaccttgtctctcctaatctcatcaacttttttctcaagcaaatcagcaagcatgtatgcatcatgtacttcacttgatgcatcaacgaactctaaaaagtaagtgccctctgggctgttcactaagaaattaatgagatggcgtcccctcctatcagactatccatcagacatgagtgtgcaaccatattgtttccatgcacgctcatgttcctccctcattgtatttgttgacttcacagcctcttgtagcaatggctcgcctagttggtaaggtgttggaggcttataccctgaaccaaact

SEQ ID NO: 187013 - DNA, 306 bp, Zea Mays
gtgactgagggaccttcagccttagaggcggctgctgcagagaacttggccctcaaggatggtgttgacacttacccagcccccgagggtgttgccgggatgattcggctcgggtgggaagcgtaagccgtgacccagcccccgagggtattgccggagacgatccggctcagatgggtagcgcaaactatgacccagcccccgagggtgcccgagcggggtctccctcttgtacttccatggatgttcacgcaggatctcctccacactctggttgcatggtggtagcccaagcttttggtcaag

SEQ ID NO: 187014 - DNA, 401 bp, Zea Mays
agacgaaaaggactggtgctccccaaggggatgagctgggacgaatgtaccctttttgttgaagatctgcgatttggagcttcaattctgctaactcggtaggggccatgcggtatggtctctttgcgatgggcgctattccaggaatcagatctatgtagaatttcacttctctttctagtggcattcctggcaactcttccgggaacacatccatgaattcttctaccactgatatgctttgtgttgctaaattaaacatcattggatcattggcgggtggctaagcctgacaagagactgactttccttggcggtctgtgagaaggaatgtcttgtttgcgcaaatgatgatacctttgtgcttggtcaaccaatccattcctaagatcatatcaatc

SEQ ID NO: 187015 - DNA, 1272 bp, Zea Mays
gaaaactacaaagcgaagtatggaatgagtttgataaacatttgcaaggaacagtggtgccagccacagcgagttattggtcttcgtgcttctgtagatgaagtggaagaggttttaatcaaatggtgtggtcttccttatgatgaatgcacttgggaaagatcagatgaacctaccctgatgaaatatagccatttggtcactcagttcaagaattttgaatgccaggctttggataaagatgtggtaaaagattatgcaaatgcaaggaaccgacatgagcttaatgtgttagttgatcagccaaaagaacttcagggcggcatgctcttccctcatcaattggaagcgttgaactggctgcggaaatgctggtacaagtcaaaaaatgttatccttgctgatgagatgggtcttggaaagacagtgtcagcttgtgcttttctatcatccctatattgtgaatttaagattaatttgccatgtcttgtcttggttcctctttctacaatgcccaattggatggctgaattttcatcttgggctcctcatttaaatgttgtggagtatcatggttctgcaaggtcaagatctatcattcgccagtatgagtggcatgcgggcgatgcaagccagattggcaaaacaaagagatcgtacaaattcaatgttttgcttaccacttatgaaatggtgcttgttgatgctgcatatcttcgttctgtctcatgggaagttcttatagttgatgagggacatcgcctgaagaattctagcagcaaactctttagtttacttaattcattctcatttcagcacagagttttgttgactggaactcccttacagaacaacattggtgaaatgtataacttattgaacttcttacagcctacttcttttccttctctatcatcatttgaggagaagtttaatgaccttacaacagcagaaaaagtagaggagctgaagaaacttgtagctcctcatatgcttcggagattgaaaaaagatgcaatgcaaaatatccccccaaagatagagcgaatggtacctgttgaattgacatcaatccaggctgaatactaccgtgctatgcttacaaagaactatcaagtactgcgcaacattggaaaaggtggtgcacaccagtctttattgaacatagtaatgcagcttcggaaagtctgcaaccatccctatcttattcctggaactgaacctgaatctggttcacctgagtttctgcatgaaatgcgcataaaagcctca

SEQ ID NO: 187016 - DNA, 491 bp, Zea Mays
agagcagggtcaatcgtaggaggggcagcaggggtagcattagaactcccagcctcatgaccatgtgagcgaggaggcataggaggtggaggcgggggtggaatcccaaaatcatcatcatcatcatcaattgctgcatcctgagcttcgaactgatgaagagcagtagcctcggcctgagtgtcaaaaactggagcagaagctggcacaggagcctcaggcgcaggacggtaggatccaaaaacaaggcgtgaggcctcaagtgtgccctggaactgtggaggccgaattagctgagcaaaaatgtggcacaagtagtgagcatatggcagctgacgatgagcacgcataccatccaatacagtgtcctcaatctcacaaataaggaaatcaacaacgtcaaactcagagtgagagaccagggcaccaaggagccagagctggatatgtgtggtagcctccctgtatcccatccacggcagaagtgtccg

SEQ ID NO: 187017 - DNA, 1046 bp, Zea Mays
tccaccctccctccgtttcgccccttgctgggaatcgattgggccggaagctgattgttgcattgcgaaagaggaagaggacagtggtgctcgccgtcaccatcgaagatgttctcctcgcccttctccgtgacctcttcgcacagcagcgagcatgagccggttgcaagggacagctccatcatcgtcgccgtcgaccgggacaagaacagccagcaggcggcgaaatgggcggtggataagctcctcaccaggggcagcatgctccagctcgtccatgtgaggggtaggcgcttctacacccgttttatttatctatttatttatatatgccaatgtgggtttcctgcatcaacatgtacgagatgatatgagaataaattaagtcgattactcgccttgctactccaaccaacctcaacagcctttgagctaggacagtttctgaccattaggagatcttcagatcagatgcagtatatacgatgctaaaccatttctccgatattacaccagaccaattttccttacaacaagctggttttagataaagtgtcaacctaaaagtttttctttatatcgtaacaatatgagatgatgccattttagatatcaaccaaaaaactgaatgcctattcctttgtaggacaatacaatgtgcactaaaaaaaactcattcttctattcaacatggtctgctttatgttacaatcttgatctgatccattaaggcttattatgttgtttcatatgaccatgctacagttgaagcaaacaaagatgagggtgacgcagagataacacagctatttatatcatatagagggtattgtgctcgtaaaggggtaagtgggcattgaatattacctctttttttatatctcaaatcatggaaaatgttaggccaagttagcatataaaaatgatattcacgtttttgccacctttacatcgcagatgcatctgaaggagttgatcttggatggcactgacatctccaaagcaataattgactatgccactagcaatgccatcacagacattgt

SEQ ID NO: 187018 - DNA, 568 bp, Zea Mays
gcctgagtgacctggtttccttcagatgttctgcctggtgcattgatacatccatgattccggagtcacgggagctctggattactgagcctctgcaggcacctactggagattcgcaaggagtcatttctctgggttatacagtgaagatcagatggtctatttcttctttagctgctgctgctcctttggtctctgcctcaccgtcgtcgccccgtgatcatgatgatggccctcggtcataccggcggttccggtcacactctccacgtgggcgaccacgggatggcatcaatgctagcaatcttgaggagctgggacagcaacgtcgttcagccaaagatagactgggtcccagatgcttggattccaaacaaacgaatcatatcccttctgatttggacaattctgtggatggcccttgctgcgatctcaacggagaacaccgtgcgggcctagagactccccacggggatgactcggctccggtgcacattgaagagcaagcccaacatgctgttttttctgatcaaatggactgcattctctttgggcagcagaatttcac

SEQ ID NO: 187019 - DNA, 340 bp, Zea Mays
gtaagaaaggggggtatccgtttaaatacctaggtatcccgatgcactacaagaggttaagaaataatgattggaaaatgatagaggaaaagtttgaaaagaaactcagtggttggaaaggaaagctgatgtctgtagggggtcgtcttgttctaattaattcggtacttaccagcttggctatgtttatgttgtctttctttgaggttcctaggggtgtacttgagagattggattattttcgatctagatttttctggcaaggtgaaaatcataagaagaaatacaggcttgctagatggaatatcctttgccaacctaaggatcaaggggggttagg

SEQ ID NO: 187020 - DNA, 688 bp, Zea Mays
gttctgctcaatgtcaatacccagaaccagatcgaggtattttttttaaaaaataataaatatatttgattgccgctgtcgattgttaatctggaagggatcttgtcatcttgtgtgcaggtttgggacattgatgcgaaaaaactctgttatctgcacccggctgaaaaggcgatcactgcattctctgtgctgcagaagagcttctacatgtgagtcatagacttatagttgttgccgactctgagtcggtgaactccaaaggatttagtgctctaatgtgaattctgtgcctggcagatatgttggagatagttctggaagtgtgtccccattgaagcttgatttggctcagagatgtctagctgacctgccgtactggattccttttactgaatcttatggtatgatgctgctaaactagaaatatctgtctaacttgctcataatcaactttgtcaagcagtctcattttttgtatttttccagtatgtggttatattcaaaggtagcagagattggtttaatttttagaatagttcttgcaaaaagagctgccgtaattgaagtggaacaccaaaatttgacccattttgtttttggttttttgtttctttgctgaaggttccactaccagtgccggtaatgatgtggaagtagtatttgtttcaccccagcctttgtctga

SEQ ID NO: 187021 - DNA, 449 bp, Zea Mays
cggctgtgttctccacggcggaggcgatcggagccgtgagaaggtttgtctgcgatcgcgtgctgctgggatggggagagagcggctttacggtgtcgatggaggtcgctgccgcgttaaggttggtagaggaaggcaaggcgtacgaggtcgactgggctggcttgatttgggcaacggtgaagagggaggtagtagctggcacgacacggcgatacgcaccgtacctcctccatctgatggtgcgccaaaggccggagcgtttcgttgagggtaatgggagcttggcgcttgagaaggggttgaaaggtcaggtattgcagcaatgccagttggaggacgaagaagaaacctctttggttttttggggcacccaaaactttggtgacttagaggaaatgccaatttttggcagccaaaacataagttttttccctcaaccgcaggag

SEQ ID NO: 187022 - DNA, 581 bp, Zea Mays
aagaataggaagggagttgccattgctaacaataatggaagagtgggagggagaaaagcgagggaggactaccatccgatgattacatgtgggaggtggcgccagtgttgaggacctaggggctgttgcagggcagcctctagaccagatgggtcttggctaggggagggcgcttgctgctgccgcctacgggcatgctgactagcccccacctttatgtggtcggagatgcctgggaccaagcaaatgcggcgttggcttggcgaaaaggcttgagagacatgcagaatgtgggcgcaccattggtctacgacggattggtcgccgagatggtgatggatgaaatgatgcagtccgacgaccaaggctggagaggagtgctgacgggtgtgtgtgtgtggggtggggtgggttgtgtggagggcgtagaggagtaggcgtccaagggaggggaggtggcactagaggaagggggggggtcagcggctggtgggctggggcagcaagatgaaaacctagactcttgatatcaggtacaaagatagacgggaaacaccacacacccttaggtaggggttgac

SEQ ID NO: 187023 - DNA, 611 bp, Zea Mays
taactgtcattagggtacgcacaattgataaattctaggccacaaagctaagtagtacatgccatacttgtcaactctgatttcttggtgaaaattggaaaaagccacttttttctctgaatacacaggagagctacatatcattatattaagaagaaattagggaagggtaaagaccctattacatagaggacacacacaactgtcacctgatacaatcaaacactaccacgaccaacacactaaaagcctaaccaccgacctggagagaggagagagctttagcgtcggccatagaccagtacacaagcccctccttagccattctaacagcagaaataacactaggacgacacttatcaaacacacacttattcctatgcttccaaatgatccaaacgcccaagatgaccatggagttgagacagttcttcaggtggactgcaactctagaacaactattcttccaccaggtttcgaaggagagatcaacttgttggggagacagttcctgcagatttgctagcgtgaggaactcaaaccaaatttttttggcaaagacaaaccaccagcaagtgattgatggtttccgaagcttgatcacaaagagg

SEQ ID NO: 187024 - DNA, 425 bp, Zea Mays
cgagaagttccttcacaagtccccaaaaatgtatctcctgtttgaaaaactattaaacaaacttgatggaccggtgttagtccttggatcaaggattgtagatatggagagtgatgaggagttggactacagattgactgttctgttcccatataatatagaaatcaagccacctgaaaacgaaaaccaccttgtaagttggaaatcccaattagaagaagacatgaagatgattcagtttcaagataaccgaaatcatattatggaagtccttgcagaaaatgatcttgaatgtgacgatttaggctcgatttgcctatctgatactatgtgccttagtaagtatatcgaggagattgtggtgtctgcggtttcatatcacttgatgaataacaaagatccagattaccgaaatgggaaattag

SEQ ID NO: 187025 - DNA, 435 bp, Zea Mays
atgctccaaatgtaacaatgtgtggaatgtctacctgtccagcataaattaaagccaacattgcccaagctgtattcactacatgaggactactggcctctgcatagacctggtaaatcttaaaatgaagaccatcactaatgatatataatgctttaagaactaaactacttgatggactggctagatgggaacaattcacatgataacatttaaatattttgtcgaagaccaaatatatgtgtaccacgctattctatgaaatatcaaacatgaaatgaccaagaagacacatagttaggtaagggaaattaagaattaccgcagttccattagacggatatgtctcaccccatccacccgtgattagctgctttgacaatagaaacctacatgctttcctaatagaagaactgttttcataagttcttccag

SEQ ID NO: 187026 - DNA, 447 bp, Zea Mays
atcaggtgtatatagaaggctagcgcacatctgcacctatagaattctgcccttcaaaattagatctcacgatggactatatctggagtttttctataataaaacgaaaaggctaagagtgggaagagtttttctaaaacaattgtgcactgttagatctgattttaaagccaggattttaggccagccctcatatgcagctgataggatcccttaaatgtcggtgacagtcggttctcactcatttcacctgtggctgtgcaaggtccgttggaatgaggcacgaggggcccgggctgtcaattaggcatgatgctgcgggctccatggcaggagctatcttcatgtccaacagcgtcacaagggaccaatgcttccaagcaagcattttcggtctacccttggagtatcgatcctttgtcagccacatcagaaaagggatgccct

SEQ ID NO: 187027 - DNA, 337 bp, Zea Mays
ggcaccggacaaatctgaagttcatcccttgaacgtgatcaaggtcacgatggaggaccttgcagaggcagaccggaaggagattgaagaagaaatcgcacgagagatggaggagaaatggaacgagagattggcttgctttcgaaaaaccaagaatggtgtgatcaaacagattggtggggcaagcacgtccagcaagaaggtaagttcatctgtcacttgtgaagaactagctcacatgattgataccgctgtagctagcaaatatgggactgatgtcacaaaaataacacacatgatttctgagggagtgcgcaattcttttgacacatttaga

SEQ ID NO: 187028 - DNA, 305 bp, Zea Mays
gtgctggtctccaaggatccggacaacatccgtgagatcgcgctgcgtgagtacaccgagctggtgatcgacgagacggaggtgtcggaggccactgcagcagaaggtgtgacaccccttgctcgctctttctagctccaatccgatctgccttcttgaacctgatgtgcctgtgctgtcaagcaattgattgggcctgtcttattccatttttttaaagatccatcataatcaattcatcaatttctctttagtttcattagtaagcaactggcacattaggttgtgatccttatctcataagt

SEQ ID NO: 187029 - DNA, 489 bp, Zea Mays
aaacagggtcaatgccgcattccatgacccaaggtcggcatcccaaatcgtgggtctaggtcaccataggtaatcgtcccaaacgctagggagtcatcgtaccaatacagatggggacgacgaccagtgctcgttcgtgatggaggatcatgcaggttggggcagggcagctcagattggggcaaggcagcgcagatgacagcaaagcgatgtcgatgtgtaaggagacgaggacggagatcctcctatggccagcaaatggtgacactctggattcttgcatcagtgctcctcctgcaggttccagaggtcctgggctgggcggcgatgcttctgctatatgagctctatggctcctatgtgagtctagggcagaagtacagggcttcattgctataatgggttggtaattgggctggtgttatgttgtgttaaggtagtactaggctaggccagtgaggcatagcacgtagggtccttggaattttg

SEQ ID NO: 187030 - DNA, 284 bp, Zea Mays
caaagctccttcagaccaccaaccccaagaggtagagggggacgaagctttggaggaatattcagctcacaaccaagaaggttgttctacttgttctgtggagaagataaggggcacataaataggacatgccaagtcacaatacagaagcaaaaggagataactgaggctgaagcacgacagaatcagccgaagtaagtcctacatactgcttcgtgctattccccgtacattctgagttgtgggcaatcaacagccattttcacaacccaaattgtcagcag

SEQ ID NO: 187031 - DNA, 312 bp, Zea Mays
ctgggaaatggaggacaagaaacacaaggttggtggatctcagtccgggagtagcagccatcctcgctactcagacaacccaccccatcaattcaagcaaggtcaccagcatcagcatcagcgccagcaccagtaccagagacagtttcctcaacagcagcagcatcgtcagaacaaccaaccaggagggaatcagtgtcggcgtcagaacaaccaggcagctcgccttcctgccccagcagccaactagaacaaccaagcagccccagtgcaagtaggaggccacacatgcttctattgtaaggaacaaaa

SEQ ID NO: 187032 - DNA, 296 bp, Zea Mays
gtcacgattcatgtgtcgtggcttgcggataaccgtgggcgggtaaagatcttggcgcctggatcaacttgggtccggtcgcagctaggctcaaagtacccccttgctcatcgatcgattgggatagatctcaccgccgttggccgattaccgccgtgcgccacgtgctaaagcactttaccacatcgcagtagctcagcttgcgatatttgctcatcgccggtgagttcgccacgacggaagacactaaccacgcgcgccagtaactttctgtttcctcggccgccgcgcgtctt

SEQ ID NO: 187033 - DNA, 460 bp, Zea Mays
atcttgtaaatactgaagactgaagaagttgctcactgcttgcctttttttgggtccactgcacaccctgttctcattcatccttatccttgaaatataaaagtcttaactagtagttcacaggctcgaaatctcctcaagaaggctggggaggctgtccctgttgagttgctcaatggaattggacttcttcattttgagaagggagagtttgaggtttgcttacaattactgcacaatattacgaactatcatttataccggtcactacccttaaattacactttcagatggcagaacagagttttaaggaagcactaggtgatggtctttgggtttcaattatggacgggaaagtaggcagttctatgatcaactggagtgtccagaacaaggatcagagcttctttcaccaacttgaaggtgtacctcttgaattacattcaaataaagtaaccac

SEQ ID NO: 187034 - DNA, 472 bp, Zea Mays
ctggggaggagaacagaggctgctcctcaaccggcaaaacaaccggagtagtcactttcaccgaaatggagtaaatcaatgtgcgagggaagcaggatccatcttctccaatagacgtcggctcttcaacgtggagatcgcagcgagaaggcaagcaatccatagagaaaccccaagccttcagtttcagaactgacaaatccgtcccatcaacagcatccggatgtaatccctgaacaatgcagtgtccaccgagcagatgctctgccgtatcaatcccccagaggtgtgccggaattccgccaagttcaacatccataagcacagggagggcacctccaccagaggtcgacgcctgacgtgaccacctcctaagatgcagccggaggggggtatggaaatggaatttccaccagccaaggcacgaacagcgtgatccacggaggggaagaaaaccaggtacgagttggac

SEQ ID NO: 187035 - DNA, 878 bp, Zea Mays
agcgaacatgagggccttttgctaactgaaaggcaacaaaatgaagcagctaatgctgcacttgctgaatctcaagcgagaaatgaagcactggtaagcaagcttgaagatgctgtgaaacaaaatgatctcctccatgaagctgaccaaaggttagtgtttattccagaaagtaatgtggccaactctgcaaactgtagcatcatcaataatccctaatttgcatatctataaggtcatagctattctttaagaacaaaaaatagcccaataacacagtggcattaattattgttagctgtacagattaatcttttttcttttcatccttctatatgtgttccatatagtttgcatcttgttgaatgcagatttcaagaagctacaaaaaatttggaatcttcactgacatttgagaagcaacgacatgaggcaaatttgatagaattagctgaagcacgagaaaagattgaagaacttcaaagagaagttggggacactgatgaaaaattcaccctgcttcagactagtatacaaaggtttttcttttattcccttttgcaagagttctaacctcctgtgataatgcattgagttttttagataacttttaattataaatatacaatgtctagattaatttgcatgaaaaaggggaaaggattaacccctcacaagactaataattatttctttctttgatgggtggacatagcgttgaagaaaggttaagagagaaggatgctctattgacaacagaaagactagaaagtgaagcaactaagaaatcactaaatgaatctgaggatagaaaccaggacttactactgaaaattgaaattgctcagaaagacattgctcacttccaagaaaccgtc

SEQ ID NO: 187036 - DNA, 398 bp, Zea Mays
gttttgttggcctgtgcctccaggttcgtgcgcttcgtgagcacgccagaggtgctggagttgacgagcacctatgatttagagatgtcgcagctggaaggggctaggaagatatatgcgcagggagtaagtgccaagcaattgtttcagatgctgggtgtttttcgtcttctgtttcttcgtgtagctattgcctaaatttctgtaccttattcagggtactggagacgctacctcaggtggaactggtatgtaggatgattatgttcagtgtttggattggcattccatcatcaattggggtttcgatattgctagcttattccatctatgttcatacctgataacgtttctctgcgcctttttattttggaaattttagtccatgttaactcgag

SEQ ID NO: 187037 - DNA, 815 bp, Zea Mays
tgagctagtatgttgccctaaatagaacctgcttaattgatggttttggtttaaaagtaaaaacaacatcattgcgacaaagccaaatagaccaaaacattgccgccactctgatatatttgcttggtttagaccataaagatttcagcgagttattcctacagattgtgtttggtgaagacgaatctatcaaggaccacatacccttacttgaaactagggataggatagttgcgagactaaagggctcccctcttgctgcaaaaactgtcggtagattactgaaaacccaacttgacttggttcattggactagagtgctataaaataaggaatgggagcaaagtaacagcaagactgacaatatgcctgcactgaagttgagttatgattacctgccttcttagctccagcaatgtttcttctattgtgctttgtttcatcaattctacgaattcaaaagagaagatataattaacttctggataggactagatgttttgcattcatcacacagtggaaaataaaaaagttgaagatacagggataagctacttggcacagttggttaatcatggatttttcaaaaagaaaaggagggaagatggtagtgaatagtgattgttacattattcatgatctcttacatgaattggcgcagagggtttcgtcacatgaatgccttagcatagacagttgccaatctcaattgagctccttacaagtccagccatcagttcgccatttgtctataaacatatatgacaccaatgtcaaagatagattagctctcaagaactgtatggagggtttca

SEQ ID NO: 187038 - DNA, 372 bp, Zea Mays
cgatccttcaacccccagcaataggatggaagctgaaaaccccaaagatgcatgcttattgtgctatgatcttacactttgtagacatgatcacggtggttattgatggctagccggcatcatcatcaccatctcgatcagagaaaaaggaggaaaaatagttattaggaggatttctcagtcgcatcatttttgaacaacagataaaagggtttcagctggccagggccacacgggaggtgctctcctcggcgccgtccgccgtgctggagcaccacgcgtcgtcggatatgaactgcatccaggactcatccttttccgcgtcgtcgtcggctccaccggatgtggacgcgacgggcacatccggcgacg

SEQ ID NO: 187039 - DNA, 329 bp, Zea Mays
caacaggtgacgagggacgatgcgactcttgttgtcctcgacacataattttaaatgaaatgaccacaaatttacacgtcaatgttttccccaacaatttgcatattgttgcgcgaaacaaaatgcatgttggtaccaactctcccaaggtttcatcgagccggacgttgtcgcggtagcaacgacagatgccgagacgaacacgtgacaccagggccacaccagtttagggtatgcgaagtcgaggcgaacgttgtctcggtagtgacgatggacaccgagacgagcacgtgacaccatatgaagggcatcacctggttctactagcc

SEQ ID NO: 187040 - DNA, 497 bp, Zea Mays
ctctggatatttatactgtagtagtttctggtgacgaaattagtctcacatgcatgttacatgtaatacagtatccataaaaatgggagcaacaattatttatacaacgaaattgagcaatgaaatgcagcttcgcataattgcaacacctacatctgccgccaaacataatttcctccaactatgcaacaggagaaaaataaagcgggaaggaagaaaccaaccccacatggagggatgggagcttcatgcaagcatgccgtactggctgcatctctcatgagagcgaactgaaactttccactggatccgattcctctagcatcaccgctgcctggaagcagtcggcagcgtcagagatcctcccatcagatctgtgcacttttcctaggtaaagccaagccatccgatttgtgggctcgactcttagggcgtcggagaggaagcacctcgctgcaggtagaaacctgggaccttgcttggagagcattgcgccg

SEQ ID NO: 187041 - DNA, 307 bp, Zea Mays
actcgagcctaccaagcagtgccaccgcgttggcacatgacattctgtagctcgacggtaacatgtctgaggagcaagtagaggaccacaatatccatccaacgtcgggaggggatatcagggaacacagtgtgggtgagggtatggtcgtcgagcgtgtagcgttacagggtgaggaggacgaggttgcgccagtgggtgcaggaggaggaagctaggtcaaggagaacagaaaccatggactagatgttctagacaccagccgcatatgcatggaggttggcgatgatggcagtctcgtatgccg

SEQ ID NO: 187042 - DNA, 333 bp, Zea Mays
aaaaaataaaggtagatccacaatcttgttagcttgttgggctcacaagcatcattcttggcttaagcttagctcgtgtacaatgtaagccatgccggtatatctagaacttttctagtactatatccacagcagttgtcccaacttggatgtagaaattgaaaattgggcgaactgtacaaggatgcagatgcaaaaataaggtacccattcagtagaacatgaatgcggatggctgaacagattatgaggaggagagagtacccagatttggggtacacaagggggtagcgtcctttttcacatctgtatccgtgttctgttgacagctaa

SEQ ID NO: 187043 - DNA, 356 bp, Zea Mays
ctggaccgtgtgcccgcgttcttccttgcaagacgagcaacgtcggcctattggagagcagcaatggtggctgcgttcagatcggcgttgatcatgctgtctggcgctgacgactatgctagaagcagcagtgccaggaggtgggttaggagggtcgccgaccatagcagctggtgtggcaaatggcgcatacatagggaacaacggcggcgagaagcagaactgcgaggctaaacctaggcgaatgataccatgaaagcggaaacagatcgtctgcagttacgtctggtcattgacatgtggctcaggcctaggccggcccacacgtcagtgacccatctgcagttacgttcagg

SEQ ID NO: 187044 - DNA, 690 bp, Zea Mays
ggattggcatatgaactccaaagccttgcaaaaagaattataagcctatgttgctcagcatctggttgtgaaagaaactggagtgattttacagcagtaagtactgtttttttgtttgtgcatacttcatacttcatacttaagagttgagaatttcagattgagtaataaactatgtccatgtgcagatccatacaaaaaagagaaacagactggagcacaagaggctaaataaattggcctatgtaagctacaacaggaagatggataataggttcacaaatataagagagctaggttccaaggaaaagagaagcaatccactgttgcttgaagagtttacatggcaaaatgaatgggttgaagaagaatctgatggtgataacatttgggacgccgtggatgaagctctaggtgcaagtcagggtctccgaggccaaaatttgcctaggactgctgctgctactggttcctcctctcaaacccagacacaaacctatgttagaaccagaaaaagacccagaaatgcagcagctacagctcaagacatacgtgaagaagatgacaattctcctgctgaagatgaacaagaacaagagacagcaagacaaatgaatgatgatgaagatgaaggcgaacaagaatcaggtggaaggggagctgcaggtgatgaatttcaattggatgaag

SEQ ID NO: 187045 - DNA, 349 bp, Zea Mays
cgatcttatatgcaataatttggaactttatcatttctgtcaagccaagattggaagagagaagtttgtgggccttccttcagagcgtcgtgatgctgaactgaaaatgatccttttagctgaaaacaagttgcatcctgctttattttcagctggcgctgaatacaaggtaagacttagtggatggtgaaattttcgaaatcttgattgtagtaggttcatttgtcatttgtagccagatattttcaggacaaggtaggaaatttgatgaaccactattcctgctgtttgtggttatgttttactgttaccataaatacatctatcttttctcttatcttcaaccata

SEQ ID NO: 187046 - DNA, 370 bp, Zea Mays
gtcagatagggcagttggcgatgcaaggggctagcgcaggctggagggcggcgcagggccacgtcgcgggctggtgggagacaccgggagaagggattgggggcaagccgccgtgaggaagggcgtcgggcgtgaccggattggagtcaggcggtcgttgccacgtcgaatggagcgttggagaacaggagcgtcgcagggcgagatagaagcgagcgcggccacgccgtggggaagagcggttctgggttggagctgagcagtcatcgccgcggcagaggaaaggtcgatggcgtcgaagcttgaagggaggggtgcaagctcgttgggcgcgccgacaacccacgagatgtccgatggctcagatcta

SEQ ID NO: 187047 - DNA, 438 bp, Zea Mays
ttcttatatccttttattataattttttggcacgtgacatgattattagtgatgcacgttctacattgtatttatcatatctgttgtggctcagaatttgatggtgtgccatgcaggtaaactatgttgaacctttgctaagttctccaatagtaagcgatgctgcattttgtacaatgttgaggctagcacgttgcacagcccctcctctttgcaattgggcgctcgacattgctgctgcgattcgtgtgatatctgttggtgattttgaaatggttttggatcttacacctgtgatcatggaagatgatagtaagaagccatcatctggcatctttgaacaaatagtaaatgggctgactattgcgtgcaaagcgggtcctcttccagcagattcatttactttcgtctttccggtatgtcctccactatttttag

SEQ ID NO: 187048 - DNA, 1883 bp, Zea Mays
gatttccagcggcctcgactcccgatccggtctccgtaggagcgtcggtatcctcgtgtctccggcagtctttcgaacctcggttggtcccgattggcgagaaacccccgcgtcgaattggcggccaaggggcgcgggacgcatcattcgattcttggcggctgcttgcctgcttgtgcttgagcgcttaacagaacttcgcgagctgggctttctctaggtggaaaggtgagcgattcgacgacttctttaaccgattttgcgctttactgttattttagccttgtttggccggctcttttgccccttttccccctttcgctttattctgcgcaatatttgtttcacccttttgctttcctcccccctcccctccccccctctccctgtccggttttaaagacgcggagagattgtaaagtctaaatcttgcattcacttggggaattggataggtagggagtggataggctttgtcggtaggtcctttttccggggagaattcgcctgagttccttggaataaaagaagatttgcgatccttaagcctcacgttccttgatctgctggtgtggaagttgatcttgatcatgttcccgttcgtcgtcttcatgggtacgctccagggttccttctctgttttcttgtgttcaccttgatggctactggtgcgaattttgagtttcttaaatgtttcatggttcctttttttaaccactggggccatgtcgcaattggtgtatcatcacggcgtgtattgtgctgaattgggtgcgggtttgctatctaatatttgcgcatggttttgttgttgcgtgaaaagattggtctttgatgtgattgttgtggttagccatcagaatcaggaaatggataataatcttctgttatgtttgatgattgttagacaatttgatttggagatggggccggaaatgatagagcaggatggatggtaggaaaaggaaggggaaattcaggaattctctcaggcgtatggctatggagtgcctgtgctctggtgagcagttgaaggcgtcagatgagaccatgcggtcatctgattctacgatcacaaaggatttctcggccagtgggtactcttctcggaatggagagattgagcagtaccttgataatggcaacatagaggaagccgagttgtcgctccgggagggcatttgcctaaattatgaggtaagttgttttcttttgtgaaacagattttgttatggcaccaagaacagctgaaatatatgctgaatgtgactaggaaatgccaccaattcagctagtatgattcctagttaagtcaatcttgggtttcttttgtcaattttacttccttgtgaagatttttgtacgtaactaaaatcaacctgcgtgctgaatgtatttttttctgcagttagttgaataaatatatggttattatctttttcttcactaaaattagttcactacctcctacctagcagtttatccaagctagccttttctgtaccagtataagtatttcaagggaaattctttcttatttcaagagaagacttaccatttttattactgccattctctttcttcgatttcgttagatgccagaatgtcatctgtttaagttctatatttcagcattacatttggacctagctgtttctagctcgactgacagcacatgctaaacaggaagcaagggcattgctaggaaggctagaatatcaacggggtcatgtagaggcagcactccgtgtctttgatgggatagacatatctgcattagttcctaagatgaaaatctcaattgctagaaaaacagaccgtcggaagactcattcacagtgggattccccaccaatgcccttgcatgctgtcagccttctcat

SEQ ID NO: 187049 - DNA, 330 bp, Zea Mays
aatgtgcaagttatggagtttcggcatctgcgccaacttatccaccttgttattattccatttgttaaatattgccctgccgatttatggctgtggctagtgaaccttttgcagccgttatttgtccactgtcagcaagctcttaattattcatggtccagtcttcttcatgagggtcgggctaaggttcctgacagcattggtaatctttctgggtcagaactgaaggtagaggtaatggaagaaaagttgctacgtgacttgactcgtgaagtatgttctgtcctttgggctttatcatcaccaggcttaaataatggacttccatcc

SEQ ID NO: 187050 - DNA, 372 bp, Zea Mays
attaataacaaggtcaattgaagtcctgcaagcttgtgaaagcatttctgtttcggccgaaggacaacttgagagagcaatgggatgggcctgtgctgggccaaatacttccagtgcaggtggttcaacggcaaagggttcaggaatcccccctgaatttcatggtcatctattaaaaagaaggaaattgcttcgggtggttcaaaaagaggcatctgatcttgttaaagtttgcacctctgttttggagtttgaagcatccagagatggactttacttcgttcctgaggataaagcttccgaacaatcttcggacaaaggcagggcctggcatcaaactttcttgaatctcctggcacgtctagatgcggc

SEQ ID NO: 187051 - DNA, 774 bp, Zea Mays
ctgctgtgtctaggatttggtattttgtttaattatttttttaacattgatatcttgtcacaaataccaattatccatatgcattgtgcctctatccagatgacttatgacttgtttattcagtttaccagctcactgcccatgttttttatgcacatggaataaattgtaagaaaatcttcttgatgcttttttaggcctccactcatggcataaattgtagtatctgaacacacatcttaacacattccatacatcccacatgcacatcaattattgcccttaagacgtacactagattgaccctatgcacacatatacctgctggagaggttcacgaagccctggtttgaaatacgggcccgttgctgtcccatcatggcccaaaggcactggaggttgatctggaaattaatttagcggcatgccatgatgaggcactcatcaaacaatcctgagtatcgaagattcaacccgagttttggcgcaaaaatcctagaggctgatctagaaattgttatgggggcatgccacaatgaaacacctttcaaacaatcctgatggttgaactcaagtgagcagcttacctcacatgccatgttacccagctacgagcccattctcatttagtttgatacttgatatgaccttttaatatactaagggaatggtattctattattagttagctggttatagaaaacacaatttaggcgaaggggtaatctgttttcttgtgtccatgtgcaaactgctttgctctttagttcttac

SEQ ID NO: 187052 - DNA, 487 bp, Zea Mays
atccccaaggatataaagggtcctctagttgctggtactctggcagaaactacagaagcaaaatctagatggggaaagtcagttaatgataagcagagggaagaggagatgaagcatttgtctttgttgaagcatacctctcttttgaagaacttgaagagaaaactgattttggtatgttttacaaaatctctacctgcaatgaagtttaccaatttcagttttcatcattcattttgaagacatcatcacactttccactctatttaggagaaaatatcattgcagccattgcacatactagttataataagttttggacttgcaggcaaaaacaaaagttgcaaaagcagagaaggctctagctaaagtccaggaatttctcactccagcagagcttccaactgatctggaaacagttacagatgaggaacgcttcttatttcgcagaatcggcctgaaaatgagggcctttttgatgcttggt

SEQ ID NO: 187053 - DNA, 457 bp, Zea Mays
gctcatgctcgtggggagggagcagaggacgagcaataatagtggcatgattgagaaagaactgctaatggctgatgctgatggcgttcccctctccccttctcccgcgctccctcctctcctcactcgagcacctactttttcattccttgtgctgatgtttctcgtgtgtcgctctccttttctctacgccaactatggatggattcgatgattacctcacccgagtaaaagtttggtggtgacctagacaaaaggcggcatcttgctcttgcatgcaacagattctcgccatccttctgtttcttctctggtaaagtggtaatggattaccatccctctgtatgcccaggcggccgctagacatcgactacttgcacagctcgagcagcagcaagaggacggggaaggagaaggtggccacgccggagtcccccgcgccgccggctgccgcggc

SEQ ID NO: 187054 - DNA, 611 bp, Zea Mays
cacgacgcgtaggaaggtcctcgacagcgccactgtagcgcgatgacgatgcttgaagttggcaaagaactcgaagacgaacgtggtgcagaccaacgatgggtgtgccgacggagctcgtaggtatcgaacaactcatagaccgtgcgcaggagacatgcaccgacagaattgacaacgatgtagatgcaacggtgggggtcgacgacgaacgacgacgctgctgcccgaagaggtgatacaacgacagggatgacgataagctgcgctgctgctgaggaggcgttgcagtggcagagtggacaacaggtcgcgctgctgcccgaggaggcgatgcagcagcaaccctcatgcccggcaaagaaactcgtgacagacgacaaatgtcacgggagggtgaggtcgtgcacgctatcggttggccagaccgacggcgtgcggggcgaagacgacgatggtgatgtcgatggcgaggagacttggcaccggcttcctgccttatcgcactcacgacatgtacacacatgcactacgcggcctcctcacatcggctccttaacagactcacgcaacacatgtaagagcaaccaatggccctctgcaagcacaca

SEQ ID NO: 187055 - DNA, 437 bp, Zea Mays
aagatattatataatataatcagcacagtcagattaattaagatgtcgtggactgtcggggatgttcattcagcatgccatccccttgcatatttgacaatcaagtagcctgatcattctgtccaaaagttgatgttagatgactaagaaattgagggcaggactcctaagcaaaagcacacaagtccatgatagaacacaatataaaactggtgcttttgatttgtccatggctattgaggacattattatccataacagccattgatgtcattatccatggtaattcatgaaacacccattaccatgttttcccacaaacattttcatgtttaccatgtctagttatctacaaactgcaatttcatgtcagccctagtacggcattatgtttcctaacaactgtcaggacaatagagaaatagttgcataatcct

SEQ ID NO: 187056 - DNA, 307 bp, Zea Mays
gataggcagtgcaagtgggatcaggatatgtgatgctgagacagttaaagttatgatgaagaatcaacagaattgcagtatgattgggaaactggtttcagaagttggactatgggttagcctctcaataacttagttttaaatggtctacgttgacatgtctttgtctaaaattttattggtacttgcattatcaacctaccaagaaataaagtttgttctgttttttctgctcctttgatctctttgctaaaattcatgcggtgatttgtgttccaggccaatcaagaggctgaacagagctatg

SEQ ID NO: 187057 - DNA, 473 bp, Zea Mays
gtcaaaaggagtgtcgcttgcgaagttggtacactagagactgatgttgtttcattgtttgtcctttgatgatggggtcgaagaatgatgcagcctagctttgttatctctgtcacggaagccaaattgttaatgccccaaagcctagcatacgcccgctgaatgttcagcagatgaaagtggcgtttggttagaaaattgactagaggtgtacaattattgggtgcatataggtcaagatgcttgctatattcctcttgtatctaaggacagtatgtaaggaaaatgcaattttaccactagcgcgtcgacgtcaaaatatatatatgttcgtgaggtttaattttatctatatattccactgattattagcaggtgattttttaattcagagggaaaaaagagacgtacacgcggaagctttttactctagtagttagagttagttgttagtactattgcagtgtagagta

SEQ ID NO: 187058 - DNA, 478 bp, Zea Mays
ctgctttgtaagcctttttactctttataagatgcacagttctcctgcaagttcgataaagaaaatataccaagataagtgtaattaatttcctttgaaacaatgactgtgcgatagtgtgattaataagctatgctttgatgtacatcagctttggtgcctgaaatctcccacatcagagtgtactctgcacggccattcggacaaagtgaattgcttggatttcgtcacacatgatggtcagcaatatttgattagtggatctcaagactgtactgccaaggtatcgatgttgtctgtgtgtatagacacattatagttccgcgcataacaattgctactgatccatgctatatttttgtcaaatgaggcatgggccttgaaggaaaaggaatgcgtccagacaatggatgttttcatgtcgccagttgtttctgtcatttcccttccggacactccatatataactacaggttca

SEQ ID NO: 187059 - DNA, 469 bp, Zea Mays
tgctgatagcaaggatctatcagagaatgttgtagttcagtccaaagaggtagataaattgaaacaagcaggagagggttgccaggcgttaatggagaaagacatggagaatgctagtggtgcttttgtactagaacagacagaagatggacacagaaaatcattgatagagacaagtataaataacgatagtgaaattactctagtcgagcagttggatggacaaagtgagagtcttacgaggacaggtactgtggaaattcatggagaaaccattaaagcacaagacaatgagttctataaggatgtggtagaagattcaaatgactcaaccaatgaaaaggatgtggtagaagattcaaacgaatcaatcaatgctaagatgccatgtagttcagctactgtacagttaaaagaagataagatggaagtttttcatgaaggcaagatggaggagccatgtgctcag

SEQ ID NO: 187060 - DNA, 467 bp, Zea Mays
ttcatgccgtcatgacagggctgattcaaagattatgcgatgaagtggatccaaaagaattaccattgatgtatacttgtttatgtgaagaaatcaactgctgtcttgaggatggctgtttggagcatttgaagtgcttgattgtttttcttgcatttgctttacaaaagaagcaaaacaatgcattcggtcagatttaccaattcattgtcaatatcctttcgctgcttgaatttattgttaggtcagattagatgattagtagattcttctctattttgccacagataaggtgaagatgattaaacttgttgagttgctggttagtagatatgtgttccctggtagcaacataacaggatcttcttcaattgaggttcttggaagtattcttgactttatgctttctgttctggatgttccaaccattttgggcaatttgtccatcatatcacctttctatgccc

SEQ ID NO: 187061 - DNA, 469 bp, Zea Mays
gcagtacaccagagaccgaccaaagcacgtgtgttccaggaagcaaagaagaacgcacactaagcagaggactaagatgcggaagcaagcgtagttagccaaacaaacctacgaccacgaccgcctccacacgagctaggtcacgaacggtatcagtgcaacaggcaatcccagcggcgtcagcaagaaatcagatctggaagaccaaagaagacggaggaaggagatcctaaaaatgcgaggcagagacgggggagacgaggaaggaggtaagaataacaaaaacggatgctaggtaccaaccttatggccgtccggaggaggactgtgaggatgcccatgccgcagcactgctgcgacgtgccctcactgtggagcgttgcttcggcgggctcggcgaggagacgcatcggaagccgccgcgcgacggcccaaatcctctcccgaagccgctgcacgtgggtccgcg

SEQ ID NO: 187062 - DNA, 326 bp, Zea Mays
catctgcagtgcatagatacatggctgctgtccaattcgacgtgcccgctttgccgtggcacgctctttgtccccgggatgactgtagacgacctgctgttcgatgattttgatgagaggttggaggagcctctaccggaggagtgtgaggatggacaccaagtttccaggcagaaacccatggatgaggagcagccaatggccgagaagagggtgtttccagtaaggcttgggaagttcaagagtgttgcaaatcagggtgccatcggcggcgtggttgtcaatggtaatgaagctggtatagtgagtaaggaggcaggggagag

SEQ ID NO: 187063 - DNA, 334 bp, Zea Mays
gatgctgctcctgctggggcgttggtggtggcacctcccccagaaactgatataaccttggatatacagaagcctgccagtactcgcccaagacgcccttcccgagccaatcaacttgatcctcctgctgacgaacagaaaaagaaaaagagacgtctccggcgggtatctagtttggatcgggatgccggtccttcggctcctgctgctgaggaagttcccgtgcctgagcttactgacgctgaccttaatgggggtgctccacctgctgctgaccccaatgggggtgctccacctgctgttgaccccaatgggtgtgttgtctgtgttgctg

SEQ ID NO: 187064 - DNA, 295 bp, Zea Mays
taaaggggatgtggcccaaactttcaaggagagagttatcgaggagggcccttgggcagaagagggagacgcaaacatcatgtggaggaagatggcgacatgcatctgaaagatagcttcagaagagtttgggttgagtcaaggaaacagaagggaagttaaagacacttggtggtggaacgaagatgtccaaaaggctatcaaggagaagaaagattgctacaaacgcttaatcatgacaagtgtgcagacaacatagagaaatacagaatagtgaagaagtctgcaaagcgag

SEQ ID NO: 187065 - DNA, 337 bp, Zea Mays
caacaagctgcaggtgcagctatataaaaagcgagcagctcggacatacccgcaccaaaaggacccaacgaagtccagccagctgagctgagcctcgtgaaccagagcatttgctccttcctcgtcctcctcgatcgacctctctccttggtgccgctgccgccatatatgaactgctagcacgcgcagcagccagcagctgccgaccggcctataatcagaaggccagaaaggatcgatggagaccatcaagtgctgcatcgcgtgcatcctgccgtgcggggcgctggacgtggtgcggatcgtgcactccaacggacgcgtggaggagatcagc

SEQ ID NO: 187066 - DNA, 334 bp, Zea Mays
ttgtggttttgatctcttaagatgtgatgggagatcatatgtctgtgacgttaatggatggagctttgtgaagaactcatataagtatttttcttaatgttcagtttttaattgggaaacctgtcagtttgatttaataagtgctgaaatgtttgaacaaacttgtcatccaggtattatgatgatgctgcttgcatcttgagaaaaatatttcttgatgcaaaagctcctcatctttcatcaaccatccctccaactcttccttggaagtctgaaccagttcagcccactgaaggtcttacacgacagggaagtggaattattggtacatttg

SEQ ID NO: 187067 - DNA, 390 bp, Zea Mays
gaccaggctgggattacaaccatcaaaaacgcatctattcctatgcttccaaatggtccaagcacctaggatcacaagagaattaaaaccttttctcaaaaaatcagatgcccgagagctgctagacttccaccacgactcaaaggaatcctcatgagctggacatagaacctgcagccccactaaactaaggaactgaaaccagaactgcttggcaaaaacacatttgaccagcaaatgattcatggtttcagcctcttggtcgcatagggggcactgctcaggtcggtctagtcctctttttataagcctgtcagcagtccaacacctattatgttccacaagccatataaagaacttgcacttgccaggagcccaagatttccacac

SEQ ID NO: 187068 - DNA, 438 bp, Zea Mays
cgacaggatcgctggcatcgtctgaggcccgcgtttcccgtgcggctgaagtagatggggctagcgcggggagtagatcctgtagcagaaaatcaaaaagatccggtcgaggctttgaagccgcaaacggaaagtgagtctcatcaaacacaacgtggcgagagatgatgatcttgcgagtggatagatcgaggcaccggtagcccttctgggaaggagggtaaccgagaaaaacacacgccgcggagcgaggagacaatttgtggggggtcgtggcactgaggtttggatagcacaggcaaccaaaaactcgaaggagtgagtaatctggcatcttgcgataaaggagatgatagggaataccgttatgtatggacgacgaaggccgccggtttgtgagaaacacagcggtggagagagcctcggcccaatagggag

SEQ ID NO: 187069 - DNA, 323 bp, Zea Mays
gatgtgtacggacaagacatccgaagatgaacaccatgggtaagaaagaaagtgcgggcgctggagttatcaaactcgtggccattgtcgcactggattccttggatggtggtgccaaactgagtgtgcacaaaggagaaaaaatgagtgagggtagaaaaagtgtcgaatttaagccgcaaggagaacatccacaaataatgtgagcaatcatctaggatgactaagtaatatttgaacccagaaatgcttgggacgggtgaggtccaaagatcacaatggattaactgaaaattttgtgtggcacgtgatgaagacacatg

SEQ ID NO: 187070 - DNA, 382 bp, Zea Mays
cggtgatctagctctcgtgaagtgtccaccgaggtcggggaggtcctagcgaacacgtcgaggggctggtggtggtcagagatggtcggagtcgctctggtcgtgcgcgagggcggaagaactcatcggcggcgaggagtccggcctaaatacggtggtagagttcaattggttggcttgagaagctttaccaggtgacgcagaggctgtgcgcacgaggaatttgaaaaatggtgtagtggcttacccggtccacactctccggtgagcggaggaagtccggcgagggtggtctggcgtctccggcggggttgcgcttggtctgagggtttgggaagcttcatgggcctctggtgaagctaaccgagcaactagcgtggat

SEQ ID NO: 187071 - DNA, 362 bp, Zea Mays
agggtttgaagaggatttggaaatgtcaaatgatccagctgtagcacttcatcttcattgcatgctcttatcgttaatcgtgacagctggcacaactttgacaaagagccacacaactgtgcacataagttactccttacatcacaaattataagccgcctcagctgggataaatttccaagttttgcaactaatacttcacttgctgtaatggcatacagagtttgcagttcaatcaaagtccacaagcccttaaatggctccacagcttcccaacttttgaaaccgctgaaagttacatcttgcaaccgtgaaaccataagatgtcgcaatttcttcagttttgaaaacccttgtgggaa

SEQ ID NO: 187072 - DNA, 1256 bp, Zea Mays
gacgagtggaagttcgctcggaaaatcgtgcctggctgggacgatggtaaggtttccaaacccctcgagctcccttttttagagcctagagctcagagctgtgatgttttggccttcccccactcttcccttctgggtgtttgcgtgcttgcctgtgattttgatttcagtttaattggtcgaaactgcgacttggttgcagcttccagcgaagtgcgtcaggcgtataaacaatttatcggggccgttgtggagttgttgagcggagaggcagtgtctgaagaactctaccaagttgcgcagactgtatatactctatttggtggcgatgacacggagtatgttggtgctaaaaaagtcctttccaaaaggtagcaaacaaacatgccatgtctctcttttttcaagcctcacaaacttggcaattcgtttggcttttgtgctcttaaatgaggttcaattctatgcattgcaactcgggagctcttaaactgccagtagtaaattaccgaggtctagatggcagatggccataatctcctgggcaatagtttggttgcatcaattatttgagccgtgttacatcatctttcagaatactatcactctgcgtggttttctgtatcatgtggatgctataagatcaagttctttctgctggattcacactacttacatggtttatgtctcatcaggaatgagttggagagccttgtgggctacactgtacaagactcagttttgaaaaagctagctcagttagctcagaagctcgattcccttcaacgagcaagtgcctatgaatctgtacacagaatagcggatgatgtaaatgaaaatgatagaattgaatttggagcagacttcgatttcaagccacttgcccgtttcattgttgatgtttctcttgacgcacccttagaaagtgctgaattgggcagtggtccatttgaaaaatggcagtatgatgcttggagcacatccacaactagtcattcaactgctgttaggggttctgtgagtttgaggtggctgaaagatcagtgtgctttgataactaaaagtggtggctcaatgctctcaggagatgaacttgcaatgaccttgtgcagagtgctcctatcaaataaagcaggcgatcaggtttttaacgttctactgaaaattgcctctgttttaatttttgtttctgcaatcatatggtgctcccactttgcagatagctggtgaacttttggacctggttggcgacaccg

SEQ ID NO: 187073 - DNA, 319 bp, Zea Mays
tctatgtttagcaagttaagaattatatagagtaaagtctagattctagagggaagataaatgacgtcgattgaaaataaaaagggcaaggcacagtcttgaaatgacactacacactacaccgatcctccagcccttgccacgctttttcttttgtatctcgtgggtcatggcttgcagtgcagcctatagcttgcactgcaggacagtgtgtctggcgtcttgacctgcttacaccaacacgtgactctctgttggctgctgcatactcgccttgttgccggcaccgcgaccggggctgcagcccaggcagtcccag

SEQ ID NO: 187074 - DNA, 293 bp, Zea Mays
tttcattttgaacttgttcaacccgctgctgtgtttatggatctttggcatcattgatggcattaaacttttgagtctggcacttactgatctccaccttgaaccaggacatttcttcatcccattttgcttcctttctgttctttgttgctttctcaaatcttccctaaacccaaccaaatttctttaaacaaaaacgtgtatatgtgcatttttagcccacacgcggattcgagaacaagctctatgagcatcttcctccctattgactgtcaaaaaaaagacggtgatgc

SEQ ID NO: 187075 - DNA, 350 bp, Zea Mays
cgcccgaggccacccttgggcgggatacatagtcataactcgcccggggccaccctcgggcgagagacaaagtcacggctcgtccgaggccaccccgagcagaaaacataaccgtgactcgctcgaggccagcctcgggtaagatgcacatttccgattcgcccgaggacgcctcagacaacgctcagaagttacccgctccgaccaaccactccagttctgaaacatgtgtttgtacgttcatctgccccgctgagggcgacaaagtcaacaaaggacgacacaactatggtcttatctactttcaccgcacacgacgatgcacagggcacgaatactgggcattgttc

SEQ ID NO: 187076 - DNA, 379 bp, Zea Mays
agacaacagacccataggttgtggttcgccccactgggcccactagtcagtctgatactctgatgggtgtgtaagtgccctagtgtaactggccctggggtgtcactgtattgtaatgtcctcgttgcacaacatattccagaaaagtagaaggtgatcgggggcataaatgtacttaggcccaccaactcccggtcatcctataaatacccccgtcctgtagctggacgagacacgcttgacaagatatttgagctctcagccatccgttttgttctgccacctgtcaccatgttcacgagtgcttgggcccactgctttcagacccaacactaagcttacacaaaactctcctaagaaaatggaaacaaactaactg

SEQ ID NO: 187077 - DNA, 288 bp, Zea Mays
ccatgctccttcatctgggtctcaaacctccaatactccatcatctaccacatccccacctaatgttcttattcccgtcacaaatctcgttcctttaacaccttcacctttttcttctaaaccacctgtcaccaaaacatacgtttgtcgtcctcgctccagtcccatggttggtcttgatacataacctgttatagatgtgtgtactaacaatgatggctctcctgctgtttctgttgagttccagatcgatgctgagttaccaattgatcaaggatatcatctttg

SEQ ID NO: 187078 - DNA, 845 bp, Zea Mays
aaggctcgatacaagcttcagctggatccaacagtggaggaagttaagaagctttctaatacttgccgcaaatatgccagagaagagagagtccttttccattataatggccatggtgtaccaaagcctacatcaaatggtgagatttgggtgtttaacaaggtaacattatgaagacactgtaatacttgccgcatgcattatttatgatagttgtctctgataaaatggttgttttttttgcattttgttgcagagttacacacagtatatcccactttcaattactgatcttgattcatggctgaagacaccttccatttatgtttttgattgctcagctgctggaattattgtgaaagcctttctagaggtatgatacatgtttcaaatgaacatttgtttctcttgtgcttgaagttgaaggtcatatgattttgttcttggactgtgtagtattcatagtgacttgtttatttcagcgcctagactggagttctacctcctcggcatcttcgcagaaggatttcattcttcttgctgcctgtgaagcacatcagacgcttccccagagtgcagaatttcctgctgatgtgtttacggcttgcctcacaacgcccatcaaaatggctttgcactggttctttctccccccttcttttttgtgtgtgtactgttccttctctccttttcttagcatgttgtgcttacactagtacatgcctataaaccatgcaggttttgtaagcgaacatcactccatggtcctctggatcgttctcttattgaccaaattcctggaaggcaaaatgaccgtaaaacacttcttggagagctcaattgga

SEQ ID NO: 187079 - DNA, 657 bp, Zea Mays
cgtacataattgcaatccttgccatgaactcgtcttctttacttcgatctaggcaccactctgtccccttctccggccgccactgattctcctgcaaaccaaggacaggcttctagtcctcctcaatctgcatttgctcttggtccagtagctgttccaactggtagtagctctgaacttcctatgcgtttgtgacattatgctgtcagaccataatcagcactggagtgtaacgccttactgcattgcttcgtttcagcgccgaccactccatcggcgagtccttccccggagaaagccgcggctgtaagtcctgctgctcccacggagccacgaattgccccggctccagtggctcctcctaaaggtaactcatcttcctccgattctgctgttgtccctggagtcagatatgatcttccagtcctaatggctgcactgcaaactttatgttattgtagagtatagtgcacctcctccagttgaggttgcacccactgatcccaccgatgaggttcctccaccagtagctccaccacaagctgcagttggaaatcccactccaattcttcctgggacacctgcattgctaccttatgttcaggctcctgctccatctgtcgttctcaagcctaatccaccagtcgtggtgtcacc

SEQ ID NO: 187080 - DNA, 362 bp, Zea Mays
cagacagcttggtccgggcatccaccggtgtagctgtcgggtggcattcagacatgccagcgcgctggaggagatcaacggcgtactgccgctgagagaggaacagtccactgctgtctcgtgtcaccgagatgccgaggaaatggtggagatccccgaggtccgtcatggcaaactccgacgataggcgggaggtgacgtgctggagaagagctggtgatgatgcggtgatgatgatgtcgtcgacgtagaggaggagataggccatggcgtcgcccgtcttgtagatgaacagggaggcatccgttttggaggtggtgaagccaatgcttcggatgaagctggagaagcgctgattccag

SEQ ID NO: 187081 - DNA, 895 bp, Zea Mays
ggttgggcagctaaaggaactggtgaacaaggcccacaacgcagaactgaaactgttcttggaagttgaacttggactggtaatagcttctttcatgattctaggtgcggaggatgtttggctgccagctgccactcctcccttaggttagtttgatcatactagtaaggtgtttgcttgctaaacataagttagggatgccgaacttgtttccagcttggcctcacatatgataggtacaaagaattgtgtcatcattttttttcgctgcactgttggcaagttaagcaggaaataatgtttgcctcacttgaacatcgttagatatgaacaaaagggtctacattttcacactttttatttcaccaaccattaatatagtttgaaactgataagatctgttctcattcttttgcgggcaatgtaggaccttaaacctcttcctcttcccgacaagactagagaagatatatttcttttcttcaaactctatgaacctgaaaaggaacagctgcggtacttttcatagattccaactaactactgtttgacaccctcgatactttattttttgttgcatatttactctactggatggatttttcaggtatgttggtaggctttttgtaaaggcttcaggaagaccacaggacattctgctgaagttaaggatgttggcaggtttttcacaggatgatgatattgaactttatgaggttagtctgtttttttttggaaagcctacattgccaatgcttatgtgtatgcacattgttcttgttcattatcttattctttgtctgtgatgatatttatgttgttttcttattattccatatttccatttcattatcttaacacattttttcatcaaccttaggaaattaagttcgag

SEQ ID NO: 187082 - DNA, 281 bp, Zea Mays
cacaaactgtcaccactatgggaaggaccattcatagtagcagaagtcactcggcctggatcatatcgtctcactcaaatggacagcacggaaattgggaactcatggaacatagaacatctcaggaagttttacccctagctatatctcaaaagctattgggacgacaatgtattctgtaaactgggaaatatatcatcaataaaaagacttcaaaggcactgaaattgttcactgacaacctacatgcttacttaactcggggtgaccactatacccta

SEQ ID NO: 187083 - DNA, 480 bp, Zea Mays
cgccgacgcgctccgtggagcaacgcggacaccaacggcggtgtaaacgccaccagcgatcccactacctactgccctcgctatcattctctagtcaacgccggagtaatggtggtgccgcaccccgccacgacaagctagcaatcggcttctactatggctatgcaggcttcgctaatgatggtacgccgagcaggtgcgaggtggtttccttaccgaggagctgtccagccgtccctgctaccagtagatccacgtgcgccgcccgtgtctgaagatcgctcgagcaccgcctccgcaattcctcccacagccgagtgcagtccgcagaggaatccctacggtggcggcggtctcccgtccctcgctccgttcgtaccgaccttgacgatgctcacgtggggataggtaggagcagcagatgcgccctgggccttatacccagatcgagagagggcaaatctctacccaaacccgcgg

SEQ ID NO: 187084 - DNA, 1029 bp, Zea Mays
tccccagttcctcaacattttccacacgatgcatgataggtgcatgacatctttacaggtgatctttgtctcttttttccccgatccttgtgcttactcttagtattgataaaaggtcctgtttatttctagcaatattcgatagcattttttaatagttactgtttgtatgcccagagaagccacatataggcatataggacctctcataattaattaacatcttgcactctccttttggatccatgattgtcagtttcattgatcatgctggaaattattatttactgcagattccttaatttctgagtttctacctattgccttgaagtgtgaagtgtctccattccatggtctctttgttgtgtgttttatacatgtgttcactgtggtcagccttggcataatgtatataatctcatactcttctacctcattattgtttactgtatatgtgcatctctactaatcttataaaaaaacttagttccttgttcctttcagcattactgatgctaatttggttaagggatcatacttggcagctgaaaatgataattagaattgaatgattttctttaaagtgtattacaacttcatatgctcaagtggttacttattgtgcttaatctttatgagccaataatagcaataatgaaatttccatgcattctcgactattggataatagttctttcctgataccctatatgtattggacccatcttaacaacaattgaattcaggtgctcacctcaaccggatcaattgataatggatatgttcagcttcagaaagatttcatggaggttacttctatccatgcagtacttgttctgatttgcctgctttatatttttcctctctccccgtaattgatgataatattgattgaccacaggtgttagattttataaatgatgcgattgttactctggattcttttgttggtgcttatcaacctgccgctttattgttctgtactaattttgaaatgaggtgagcaagcttcttgttcatccattgatg

SEQ ID NO: 187085 - DNA, 712 bp, Zea Mays
catgaatattgttcttgttcactaccttgaaatcaaggtatgttttgatttcacacgatgaatttgtatctctattttctttgaaagttttgttaagtgccagttgaaaagctcatattcattcaccatcaatgccaacattgctggcatctacatctacctgtacatttatgatagccacatgatctcccgatggaaaaaggcgataacaattgacggggaaaagtgtctgttccagttgtgactaatagtctagaccagtgcatgaatatttgcaaactgaaagctcactgctcactgttgtggtaccctgttctccagatcacttgctaactacaaaataaattatttctggcagtgaaagacattctgttaagagtgcaagaatgatctgaatttagcttttactctgatccaagcctttttaaggatattttatttctatatctgactgccttctttttgcagggtgccaaacaaagtttcaatcatgctaaagaagctgaagagactgcaggattatctaatgccgatagtcctgcatgctcaaactctttcgctagtcagagccaggtagcctcccgatctatggatgctgaaagcccaattagtggacagatttcggaatatgaagatgctgaaacaggtcttgctgtttctctatcttcgttctgcatcatctgtactaagtatacattaaacactgcacgat

SEQ ID NO: 187086 - DNA, 1741 bp, Zea Mays
gtacgtacaagacttctcggatcactcgtcttctttgattgcatcatcgagacctgcattttcccttccaaattcgtcactcactctggttggccgccttctgtcttctgatccaatccggttgaaatcctccgtctccttccagcaagatctggcacataaggagaatcggcaagaaccattctgcaaatgaggccggatacgcggcttgaatcggcggtgttccagctcaccccgacccgcaccaggtgagctgccggatctgctcgagtaactcccggcgatgtttctttgtttcctctggtaatttggccagtcaattatatatatatgtgtcatcttttgtggctctggtgtgtggcgtgttgccaaaaatggagcgagctctggaagctcgggcatggcatttccccatgaaacggcaaagctttcggctttcgccttaacctcgtatgcgttgccaagcctggcttggttaacactgcagtgctagtctgctagatctgatgtcctcatgctctaaatttgatcgagtactatggccgcagctttaccgtctgccacgcaaatgatttgtttctctcttctccccatcttttttctaggtgtgatttagttgtggtggcgaatggacggaaggagaagatagcctctggtctgctgaacccattcgtcgcccatctcaaggttgcacaagaacaaattgccaagggaggctattctatcacacttgagcctgacccagagattgatgcaccctggtttaccaggggcacgttggataggttggtttgcgtcccattgttaggggttgtcatttgcaaatttgttctttgacaatatacgtggtgatttgaatccctctctttcgcaggtttgttcgatttgtcagtacaccagaggtcctggagcgggtcacaaccatagagtctgagatattgcagatcgaggatggcattgccgtccagggcagtgacagtcttgggttgagatctgtaagcagacatctatgcctgataacttttgactaacatactaatatcagaaagatgagatgttcatatttgtgctttgttaggtggaatactataatgggaaattggtggactgcatggaaggtgaaatgctgacgagcatttctttatttcaccacgagtcatagaacaaacagcatatgtgccatctgtggagtctttgttttatcacctaagtaatgagcaatgtttatttgttaccaaaaaagaactttccgtatcttcatggaccatgatacttggcaaattgctatgcaatatttactttagcatttaatcattataaagtttggtgtaaatgtaaaatcaggcaatgctgttggatcttttacaggcagatagtttgttttcaacatactgggctgcacaaggaaatcccaatgtatatgcatggagtgacctttcctagttatatggattcttaaattaattgttttagttttagctttagctagctcattggaagttatgcattctgagatggagctagctatcacgtcgtgcattttaggaagagatcactctcatagtctcatctactttaaaaaagctacatttttcttgaaggatgaatctgaggtgcaacttgttttggcgacagttcttgtattcttctgccctgttgctgaatgtccctgacccatctacttacaggtagtaaggcaagttacaatcctgatgcagatagggcacttgttccatacaag

SEQ ID NO: 187087 - DNA, 367 bp, Zea Mays
cgccctttgcttctggcgatgttgaagccctctgcactaacgaggcctccatcgtcgccatccttcacgctcagacgactggtgtctagaacattcagcggttggcacgaccttgtcctcgctttgcagcgctatgtccttgacgatcgtatcctcattgatgaccgcatgtttatgccctcctggtgtcgtatggacagtgtgtgtcttggatcctcgacagtcggcattgtcattgtcgagctgaaggacgtcattcatgagcatggtggctcgtgccttcctgttggacgtgttgggttaggtttttatcgggttggatcgggttttttagttttgggccatgttttttcaggttgggtcgggt

SEQ ID NO: 187088 - DNA, 378 bp, Zea Mays
ggaaaatagggcgctatatggcgtggaggatgcaagggttttggtggggaggcgattcacaagatatgtcgcagtatgaagaccctcaacccaataggccggagggagacttgcctgaaataaaaaggagcgcaggatattgttcagggtgggaagagagcgttctgctttcccattttgttgagatgtatatggacatgacatgcggagggtaacaccatgggagagaaagaacgtgcgggcctgagaattatcgaattcgcggccgttgtcgcactggaagctcttgatggtggtcccaaactgcgtgcgaacaaacgcaaaaaagttagaaagagcgaaaaatgtctcggatttgaggcagagcggaaaagtcca

SEQ ID NO: 187089 - DNA, 734 bp, Zea Mays
ttttcctctgcatggtgtaggatggagccagatgcatcctgtctggaatgcatcccaccactagtgttcatgttggtggacatggttttcaaggaacctcctatgtggcatgtcaaggctgtgctaggggcattgccactgtggtgacagctcttcccttgctgctgccgaatcccccagattgcgttggagatgaggtagctgtaggcgtggaagacacttgtggaggtgagtagttgttcatgattatggagctgagggataggcatggtagtgcaggtgacggcaagcagagtggaggtggaaaaggtggggcaaagattcataggtactttctttacgtcacatgtatgcttgagatgtttctgggctcgttggctactgtgggatagccggataggggtaggtggttcttccatcttttgcccttttcccatccctttgtgtttgtcatttctatctaatcacctctaggttctgtttttatgccatccattcgacaagtgttgagcacttctgtggtatgaaggtggcagattgcctctctatttattaacttaataatcatgattcggggattgtgcttaaatatctccagattcgggtgcaccatctttgggtggcttggatagcatcgcttcgagttgcaactactcaaacaatccatgtatttttctcactgcctatccatgtccatgcaaagagggggggggagtaaagggggcattatgatc

SEQ ID NO: 187090 - DNA, 432 bp, Zea Mays
gatatcctgggaaattctattgtccaagaatgaatagcatgaacaaaccagcttatgcagccatatgcactcattcacccaataaaccagttctcatttttgtgtcatcacgtcgacagacaagacttacagctcttgatatcattcaggtcgattctactatggatctatgatactagatgggtataactataaacattactgcaatcttatctgtttaatgtgctctacgtgcagcttgcagcatcagatgaaaaaccaaggcagttcctgagcattgaagacaactccctagacatggttctttcacaggtttctgacagtaatttgaggcatactctgcaatttggcataggtctgcatcatgctggtttaaatgacagagacagatccttggttgaggagcttttttcaaacaataagattcaggtg

SEQ ID NO: 187091 - DNA, 396 bp, Zea Mays
gaaaaagacttgcagaagcttcgggatgctagaattcagcaagacatgcttgatcgtgaagcttccattttacgtgcaaaaactcaagcagctttggcagagggaatctcatggggtatgacagatgatgcaatagaagagtctgcagaggttagttgtttatttaccacagctggttgtagttgtttatttaccacaactggttgtgtttttagttttagatcagagcttttgatggagctatactcaagtttaatctgcgcaccactttcctaattcagcttcatatattgctttgtatttttactgatcatgttcttggatcttaggatgatgcagatgaaattacttggcaaacctacaaaggtcagcttactgatagacaagagaaaactc

SEQ ID NO: 187092 - DNA, 414 bp, Zea Mays
tttaactttaaaacgtttaagcgagctttaaaacgtctttttaaacaacatggacaaaatatgaatataacataatttcacataataatgtaacatgcccataaccacactaccacaaatccacaataacacaagttcaagtgttcaactaatagcaactagcaagtagacaaccacaaacaaagtggaatgaaatgtggaatagttcacaatcacaagcatagcacaaaagcaactaaagtggaatgcaatgtccacaactgcaagcacacaagcgttactcaatctccctctatcatatctcaataaccatcatccaaatcatctataccaccatcattcttgtctgtcttgctcatcaccatagctagcactattgtttgttgcttcatcatcatccatatcaaggttgtc

SEQ ID NO: 187093 - DNA, 286 bp, Zea Mays
gcacaggacagtgaatagtaacttgtcccgtgcaccaacggctagccctttcatagaagaaaactgtcaatcagatccgttagtgtgcactgtctagtagctcaaaaattacacaattataaatttacttgagcaactgagctgatcaagcgtacaaacaccaaaaacaaaatttagagctgaatcaagtgcacaatcaccagatatacttgaaaatcaaaatttcagttctaagttctcaaacaccaaaaaccagatagtagtgtacaaacaacaaaaatcaaaa

SEQ ID NO: 187094 - DNA, 273 bp, Zea Mays
ctctgtcttgctcgagcttggcctcggcctagataacatcgacgagaggacgccaccaactcctcgaagactgcaggatcgacgccaagtctacttttacaccatacgagacagattaccatgcacttttcaccatatttatcactgtttcaacaacaacgactcggacaacacctccatccggtatgctcaggtacgcgtacgagcccccaacccaggcttcggctctctgctcggtcaagatgcgagatacaggggccagacgtcctcccc

SEQ ID NO: 187095 - DNA, 293 bp, Zea Mays
ggagaacgagacccggcacagcctgtatcccaagatgagatcttggaggtgggagaaactcctaatgaacgagtcttcagggaaaggaggaactcttgccgatgtgatcgccggtaggctcaagagcaagctgaataggatgcgaggctacactgagagaacccactctttacgcgaaacctgaaccctaaaaacttcgcccgtgccatgaacacaccgagtgaggtccgtggagtattggcttggatagccgatggcctcccccggactccagacgctgaaggccatcgatg

SEQ ID NO: 187096 - DNA, 409 bp, Zea Mays
ccgctgatggccagtcatcgagatgcaacaccaacagcgaaccaaacgaattcgacgaagagaggtacccaaataaagctggtgataatatatatagtctgatatacccccagctagaactagaacaatgcctgtgccctctcgatcagtgtcgatcgggcaataatgctagctgtgctgcagggaccgagaagccgaagcaggcgacgcgagctccgagggcgccaatggcagcgggactgggacctccgtcggcttcacgcccaaaatcgacgagctggagaaccttctggaagcctacttcgtgcaggccgacggcaccctgaacaagctctccactgtacgtgtgtatgtacgcacacctgctgtgtgtgactgtgacgacgctgatcgatcccgtgtgcatgca

SEQ ID NO: 187097 - DNA, 348 bp, Zea Mays
acaaaacagctttccaaacccaccaaggccattatgaattcaaggtgatgccctttggtctttctggtgctccggctacttttcaaggggcgatgaaccaaactctagcacctctgttgcggaagtcagttttggtgttctttgatgatatcttaatatacagccctacatggtcacaccatttatctcacctggaatcagtatttcagctgctcagacaggacaagtggcagattaagctgtccaagtgttcctttgctaaacaagaaattgcttacctcggacacgtaatttctgtacatggagtgtccacggatcctgccaaggtttcagcggtctccacttggc

SEQ ID NO: 187098 - DNA, 343 bp, Zea Mays
gaaagaagcaacaacatataaatgatagtaccaagtgctgcagctgcaagcagaggcgaatagcttcatatataagtgaagctaggagggcttgcaggcttccacttttgataggcgcatctcctgtgtgttacggcgtgcctacaatcattaggaagaaagtaatgacggattctaccacgagagagatgacctaaaagtgtggtagtatcggcatggtattggtgactattgatagtgtgatctatggcgttgatggagttggcacgaaagtgtgccagctcaaatgcactgactaatttatgctttatacccagtgcttggacgcatggtcttgctggac

SEQ ID NO: 187099 - DNA, 830 bp, Zea Mays
gctccgggtcccacctcgtcgccgcggtggacgagtctgggcagcggtacatcgacaccatcaactgcgtctccgcggaggctatggccgtggccatgcgtccgaaggacagtgtcgccagtgccggttcctccgcacacaactccgaggcatccgagtacagcggcctagtggaaggtatgtcaccgcgggcggtgccgccgcctgcgtccgctgcaactgagtattcatattcaggtggggcccattaccttagtgctttcccggagtcggttgggttcactgcagtctcgttgtcatctccggcgatgggcatcccggctcaaaatcccatctttgttgtgacagagccatcaacgttaccgcctcatcaggttgctcctgcttatgcaacaccgcatcagccgcctcaagtaaccacttatgtgcagcagcagcctcaagtcacccattatgtacaacaccagcatcctcagtctgctgcttatgtgcagcaggtgccgcagtcgtacatagagccacagcaggtacaatacatcaacacccaacaatttggtgggcatggggtgccgcaatctgtcaattacgtgcctgtgcatatgaaccaattcatgcccagcattcctgtgacgggttctttggccaccactgctgctcaaggcagtacgttcaggcctgcttccgcaggtgcagaaccagttctggagaccacacagttcacaaggccagtgcaagctcaggttgatcatagttaccgggtggtgcaaactccgctatcacagcttcctcctttgtcttctgtgcatcagcaggcaaatgatgcgcagagg

SEQ ID NO: 187100 - DNA, 768 bp, Zea Mays
cggaaagccggggacggagttatgcagggacggcgcacgtagacttatcagaagcagcgacggctgggcagctcttcggtaagtgactcccctccctcgcacctgctcggcgtaccatcatttgcatagcgtgcataccgttgttgaagccgattgctagctcgtcgtggcggggcgcggcgccaccattaccccggcgttgatctgagagcgatagcaaaggcggtcggtagtggggagtcgatggcgtttccgccgtcgtccgtcggtgaccgcgtatttttcctggagcgcgttggcgagtagacccgttggggaagatgatgtgctggtcgtcgatctgttaacagatgctcgtgattagacggagggtagtgcatgtggcatccgcaggatcttagatgggcggagcagatttaatcgcgcatacccttgggcgatccaatctagaccatccgactgataatgagcgtcttagattagactcaacttacctcttcgtttatttaaatctgagccatccaatctagatccaacgtccgagaaaacaggataccccttcagcgcagtcgttttgcagaggagcccttaaagaattgcagaatgaacctggcgtccaccactactgctcaccgagtattaggaacattacgtgatggcccctgtattttccagaaattaatgcccagtccagagaattagaaaatccaattagaaaatgatttttaatgtgaaaataaatgccagaaacttgtgaaattcatagtt

SEQ ID NO: 187101 - DNA, 411 bp, Zea Mays
gaactccatcgtgatccatatgtggttgttctcgcttttagttattctatgtaatatggtgttaaggctgtttcgtgatggtactcgtgattgtgttcaactatgtgcgccgggcctgtggttgatcgttgatccatccatgcatcaaccgtcgttggttatatcatcatttgccatctctcgcttgctattggacaggttgtctggtcgatttgtcgtattagttttagtataaataacgagaaagaaacacctagtacagtaatatgagactactatatgctataaatcagctcacgtcatggtgtttgtgtactggaatacatcatctgtccagttcttcacattttacacacctgcagggcctggcttcatactctatgttgtacgttgatgattattagatatttt

SEQ ID NO: 187102 - DNA, 757 bp, Zea Mays
ggatgatcacgatggtgaacatgatgatgatgagggggtggatgctacaggagagtggggatatctacgcacaaacagctttggcagtgggcactgtcgaagtagagataagtcagctgaggaacacaagaaagccatgaaagacatagttgatggccactttcgggcgttagtttctcaacttcttcaggctgaaaaggtaccattagttgatgggagtggcaaagaaagttggctagatatagttacttctctgtcttgggaagctgcatctcttttgaagccagataccaccagcaaaggcggtcagatggaccctggtggctatgttaaggtgaaatgcttagcttgtggtcacccaagtgaaaggtaaacaaatctattttccaatttccatgcatcactatttaccttcatatgcctttatgattttacatcaatatgcttgagcatccataaccttaagttaattgaaactgaagctttgtaattcatactagaaagacatagttgatgacacttgatgtgaactttctttgttttattgatctattacgttttgagtttcatactgtatttatctgtgcatttctttggtttccaccagttcttttttttggttttatacatcttcctttatttgcagtttcgttgtaaaaggagttgtttgtaagaagaatgttgctcaccggcgtatgtcatcaaaaaaggaaaagcctccaatcttgattcttggtggtgcactcgaatatcagcg

SEQ ID NO: 187103 - DNA, 718 bp, Zea Mays
gtcgaaggtgtctgaatcgagttcatcaacataagggggaggtgtatgatcatttacttattcatgggatgactagcacatacactagatgggtacatcatggagaaccatttgaggctgaaattaatgaaaattatgatcatgtagatgaatatattggtatcaatgaggatgacggtatgaacgagaatgaagaagatgagcctgataatagaattcctgatatgattcgggagttgtacccaactaatgaccaaggtagagggaaatctatgtttgcagctttattagaagaaatgaagcatgaactttaccctggagcaccttacacacgtttttcttttttggtgaagttacttcatatcaagtcattttatcgaatcagcaacgttgcattcactgcaatactaaaactattatcatcagcattcccagattgctctcttcctgcatcttaccatgaagcaaagaatgttattaatgcgttaggacttggatatgactcaatccatgtctgcccaaacaattgtgttctatttcgaaaggaatatgcaaaacatgatgaatgtctggtttgtggtgcatcaagatggaaagatagtacagatggaaaaaaacatattcctgagaaagtactacgacattttccaattattccaaggttgaaaaggttctttgcttccaaaaaaatatcagaggagacacaatggcatttatt

SEQ ID NO: 187104 - DNA, 274 bp, Zea Mays
acatcattgagcgagagccatttattcaggaggcgagatgtctgacctacaagattagcattgctgctagtccggctccccttcagttaccctcggacagcagtctgcctccttcagatgagaatgagtttcatggtgaggaggatggagatgtccggggtccgtccaatccccggttccgacaaccacgccctttgcagcgtcagcctgtccaccatcgcctcagatcacatcagggcgtgggcagagaacggtctgtggctgtgcatggaaa

SEQ ID NO: 187105 - DNA, 918 bp, Zea Mays
gttaggacagcaacaactcatacccctgaattccttggactgccgcaaggagcctgggtgcaagaaggtggtccgcaattcgcgggtcagggtgtcgtcattggcctcatcgacacaggaatagatccaacccaccctagctttgcagatgatctatcaactgatagttatccagtacctgctcactactctggcatttgtgaggttacaaatgatttcccatctggatcctgcaatagaaagctcgtgggggctcggcattttgcagcatctgcaataactagaggagtcttcaatgcgtctcaagatcttgcttcaccatctgatagtgatggccatgggacgtaagtagctcctttcgaagttgatacctagacaaatttacccttctactgatattctgttactgtgtctattgtacttggatctggtagctcctagttgtgcagacatccatacacattttttgattgcgcacctgtatgccacagatttttttattgtttgggtatcagactactttgttatagtactagatctaaatactagacttcacatgccatcgtgtaataattcttcataggcataagttccctattacgtacttgctcaacaggagtttatgttatagaacattgattatgttattttgtaagagatcgttgtcagataagatgcagaaattctgctagaattgttgtttcattttgttatttctttctttcaggtcagctattgctgcatatgcgagcactcccttggatgcatttttagttctaattaaaaccaaatgcgttgaaaaagaaataaaaaaccatgccataggaatcatgtggtattacttgaataaaaatttcctctgattctaagatttgtggctgcaggcatacggcatccattgctgctggaaatcacgga

SEQ ID NO: 187106 - DNA, 397 bp, Zea Mays
gatgctcttctcttgcttgagaatgcattggaaggctcaggtggtggtggtgctgctgcagcttatcaagaggcttttcgtatcatcatgcgaggtgtaagtgataaatcgttcattgtcagagcagcggcagcacgttgcttgaaggcatttgctaatattggtgggcctgcattggggatggctgatttcgattcttctatgtcttattgtgtgaaggtattgtttatttaccttctttctcatgcttaatgtggctcagctagctgaaaagcacatgttgaatctgttccttttgttgatgttttatcacagggtttggaagatagtgtatcttcagttagagattcatttgccgaagcacttggtgccatacttgctcttgcagtgaatccag

SEQ ID NO: 187107 - DNA, 446 bp, Zea Mays
tcccgacatgtggtctccagaagggaatccgttctctagagaatatgcaataagaaccccgaaagatcattctgccatggaaaatgattctcctcgttcaaaatactgttcttgctcagcagggcactctcctgttagctctcctgtcgctatacagtgcagatcaacaagactaggcaatttattaaacaggaacgaagtactagatcgttacattgatagagggcatggagatgcaatcgtagatgagaaacagaagcagtgcgtacctacggtttctaatttgggaaggccacctcgaccccactctacagtaccatccataccgagaccattcaaagagacaacggaaagctacccagatgtggacttaaacgacgccttcctttggcgacttgctcaagagggtataggagatacccacaagattacaactatgtgcagtg

SEQ ID NO: 187108 - DNA, 1283 bp, Zea Mays
aatcttttctgattgtatcttgaattcattccatgaatcaagaatcttttttttgtctttcaccctccaattgtttgctgacatagttgaaatatctgttacattcttgcaaatatggcaggaaggtttacttcaagaagaaatccagaagcttaaagatgaaatcaatgatttaactaactacatcgagtctcggaaaagcgaatcaagtaagttagaggaaacacttgcgaaaagacataatgactataacgatttgaggaagcagagagatgtgcttcaagaagaaaggaagtatgtaaatttcttttgaatggtcatggcattgccattgaatggatgatgtgttgcattaaattttatatacttagtagaaggaaagttttgcaggtcatattggaaggaggaatctgaggtgacagctgaacttgataggctacaagaagatcttataaaggcacagaaaagcttggaccaagcaactcctggggtattaaattctacatctctcttattttaaatgttcttttgttcatattaccgattgttactgaaaattttctttcttgggatttgcacttttattcctgtgtgtgctatatattggcaccttaaatatgtgattatgcgcccataaattattggtgatcatgatatggaagcatagataaaatatctgtgttcatttgattatgtatcatctgtttttcctttttcatgtcaagttctcttaaagcttcttggtcaacgttttattgttgctttgagcaactacaatggagcttttatgacttgtctgtaatgtaattacttagaaattctggtttgtgttagtcacaacatgtttgctatgtaataaaatatttcctccagaacggatcagtggctcttaagtttcaacctcttctggtggttgcaatgttgtggataaaattaaatttgcaccaaaagttgggtacgtcttgtcttctgttgtgcaatcagttgacatagatgatggcaaatttgtcttagatctctaccctgtaaaatgtctgcattacagaactgatatccctgccatgcccttccatctgcctccctctcttcaatctcacactatccatattcagtttgatatgtgtagcattcacttattttattttgccaagatagtgcttgaagcaatctttgctggtgctaattttgttcccttcctcaggatatcaggagaggcctgaattctgttagcagaatcattaaggaccatggtattactggtgtttttggtcctgtattagaac

SEQ ID NO: 187109 - DNA, 486 bp, Zea Mays
tgccaaacttcattaggaatgcttccatttagttgattgtttgaaagatcaactaacaatagtgtggagaggtttcttaaggttggagggatgaccccactgagataattaccataaaggttgataccttctagctttttaagaaaggctatgttcggaggaatatgacccgtgagatggtttttagagagatctaggtagactaagttggaacagtttgtaagccaatctagaataacatcctccaaatggttgcttcccagaaagagtaagtccaggtttcggagcttgttaagaagaggtagggggccaatgaagctattgttgctaagatcaagggtatgaaggaaggtcaggtttccaacagaggagctgatttggccagccaagttttggccggtgaggttgagctccgtgactcgatatggtcgcgtggaactgcagttcacaccatgccaatggcagaagtggatgctggggttccaa

SEQ ID NO: 187110 - DNA, 394 bp, Zea Mays
ctctcctctccgtgtccggtggagcttctccacctccggccaagatctggaaccagcgagggtgcccggcggttctcatcccggaccccgactctttcctcatctctgcaacctctggatcctccatctgcccccctgcaggatctggaagctgcacccgtcggggggagaagcaagcagcacatccagcccgctcgagctcgctcatctgacctcaccactgagcttccgcaggatcttcacatccccattccattgacaacgtgaaagagaacatgtgacggggctgccaagctacatgacaacgacgccgattgccgaatgccgagacaccgcgcacgctcttgcaggcatgtagtcctatgctattcatcctcctctctctctctctctc

SEQ ID NO: 187111 - DNA, 374 bp, Zea Mays
atggcaccttgtcgccgttagccaccgttgccgtgagtcgcggtcggggtaggatgggcagcccggatcgtcgcgccgcctcttcggcaatgaagttgtgggtggagccagtatcgaggagggcaatgagagttgtcgcgcccaccacgacgcggatctgcatggtcttgcccatggacacgcccgccactgcatggagggaaaagatgggcgcgtccgtctcccctgtgtcggctgctgcagcagcgctgctgtctatagcgtcgtcgatctccacgccctcgatgaagaaaaggcgcttgcagaacctgttgtggccccgagtataccgttcattgcagttgaagcacaggttttggcggcgccgctctgcc

SEQ ID NO: 187112 - DNA, 306 bp, Zea Mays
gcgaactgcagctggggaggagaggagtaggaggaggatgtagtcgcctgggagaggtgattccagcagctgccttctctgggcggaggggaggaggacctgctcaccaaggatggttgagaaaattgcagtagggcaaaaggaggaggatgtggtcacctgggaggggagatgcttgctgctgcctcctacgggcagaggggagaggatcttggtcgccggagagattagggatgggttctcccgttgctgctgctatgaatttcgaatctgtgcaatggaggagatcgagagaggaaggggagg

SEQ ID NO: 187113 - DNA, 325 bp, Zea Mays
caaaccctctcggtcaactatgctatgcctgcctgcctgctttcaacacgtactgttcctttttcaaaccttccctggaaacgaaaacagaagatgcatggtatttatgcttggggatttgccttcttttcagtgtactaataagcttggggtttgtttagtcgttcagcaatcaacttggacgagtgttgataaataaaactcgatctccaacctttcgttcataaatgggtcagctaactttgaggtcggtctcactctcacaccagtgtcgctttctgattgtattgtattggacgggaagagctgaggtcgacgcttttct

SEQ ID NO: 187114 - DNA, 743 bp, Zea Mays
cgaatttgaagactattcgtgattatttggcttggagacaagtggactgtaagctactggaattgattcaaattatcttgtatagcaaacgccacctcatatttgttcacacaactttttttttgccctgaagtcctacaaggaaactacattatatacaccaaagttgtacaaagcatgaaccttcgtgaacataaaaagaaaagagtgatctatgtacgtgtcagaatcaaacagtaattttgttagttcactgatatgcatattctttgtttgtgccttcaggtcatataaataatcagtacaatacctgcttctggatgttggtgaaatctggaaaaagtgaacaagaggcccagctagctttgaaggtagtacaatttttcttgagttggtgacctttctatcacaatggtataaatgttttaattcagattttgtttttctagggaacatttgcaaaggacaagaatgagctgcttgctaaacaattccaaataaactatgatgatgaactggctatgttccgcaaaggatctagtgtttaccgagagaaggtgatactgcaaatattatcagacatgctacataacatctatcttataatgtattacatataattgtaggtagaaacaactgtgaagattgatgactatggggagcccataaaaagaccaagattgaaagttacagtggcacatgttgataccatagggactgcgttttgggaaaaccatccacac

SEQ ID NO: 187115 - DNA, 453 bp, Zea Mays
ctataccgtgttgaatcatcaggcccaaggggttcaccattgtgaaggcttaatttttctgaagtagagagtggtgtagtggtaggcttgcaatttatcataccaactcgactaagaacatctgaggcatactttctctgcgagaggtgaataccattatctaccttctgcacttctattccaagaaaataatgtaatgggccaaggtcttttagtgcaaaatcaattttcagatccttgagcaaagctgagacaacatcctgagatgaacttgctacaattatgtcatcaacatatacaagcaagaagatggtgataccttccttgatgtaaaagaacagagaggtgtctcctttggatgcttgaaaacctagctgcaaaagtttgtcactgagtctggaataccatgctctaggtgcctgcttcagaccataaatggccttgtcaagcttg

SEQ ID NO: 187116 - DNA, 538 bp, Zea Mays
attgcttttatagtgagaggtagaaaaaaatgaacatttgtgctattgattgtcaattttctacttagtgatttttttcatgggagtttggtttagttgtggtgagctctttcgcaatccatgttaattaagttgtatggtgggagggaatagacgtagtgattgggatgattatcttgtttatgtatatgtggagcgtgggctgaaacacagagatagcaaggaacgtttgaataggccagtacgtattgttgtgaagccacgttttcttatattggcgtgattgcgtaagtatgaaatagttacgtcatgagaagtctaggttgagatgcaatttgtctgagttatttgttagatatatatgtatagtataattaaaaaaaagagagttcctatatgggatgatataatgtatagaatgtgcttggatgaatatgtaggcaggcctaacatgcttaaacagattcctgtttgcatgatgtgagattaggcttaaatggtttaaaaagttatcatattgcttctatacttatatttg

SEQ ID NO: 187117 - DNA, 381 bp, Zea Mays
gtcggttcagatgtctattgcggaagataatctcaagacggctgtggtgatcacagtggttagctctagagacgtcagcgctgacgagatcgcgttggttttggccccacggctggaaatggaggtgggaggattggttctccgtcagttctcccagtccagcttcttggctgtcttacccaaccatgtgcagctcgacacgctggtggatcgcttccatatcatcagagaagaaaacttcatgctctcctctaggcgttggacgaggttcgggggtgctgttggtaattccttgaagcatctcgtggaacttgagatcagaggtctgccgttgcacgcgtgggagacttcggtggtgcaacatttgatcaacccccatgc

SEQ ID NO: 187118 - DNA, 496 bp, Zea Mays
cgcaattctcctgcgcgttcgataaaaaaaatctgcagttgtacctacatgccattacgttctcctatgaatagcttctcactaatcgatatatctaaccatgccttttaagttttcctagaaaagtcttttagcactctcatcgtggcctacttgggggcgtacatgctaattacgttaatagaccaaatcacccacaacaagcttgactaagataatcctatctccttgcctcacatccaccacaccgttcttgaaactcttattagtcaaagctcctactctatatttgcagctatcattgtgtgaaagcttgaagctggtattgccacctcctttgccttttgaccttccatttagtcttttagacactttaagatatttttacatgtctcctagtcgttgcctcaactaactttcttaacttatttgtaaacgaccctacatcctaactacctaaacggatcctagtttggttcgactagcttccttaccc

SEQ ID NO: 187119 - DNA, 288 bp, Zea Mays
gctttctgaggtgccgcctgcgcgatcgatgaggcaccagaccccgcggtggagataggggacggatcgcagggcatacatgcatgcgcgcggcgagcgatgtaaacgatgcatgtcgtggaggggggatagcaatcagtggtattctttcaatacttcctcccaatcggaccatgtttgctctgcagactgcaggcatcgtgcattcaggtactgatttgccccaaaaggatgcacgtaaatgatcgggtcattcgaacctcgagcatggatggatgaatatatggg

SEQ ID NO: 187120 - DNA, 429 bp, Zea Mays
agctataaacagagtgcttcaaggggttatttctaaactgcatctccttaattcagcttatgtgaccttgttgccaaaaataatgaggcattggaagttaaagattttaggccaataagtctgaaacagttttgcaaaaaatgtaactaagctgttggccaccagacttgcaccaggctccctgtttagtgtcaaaaaatcaaagtgtctttgtgaagggaagaaacatccatgataattttatttcggttcaacagactgcaagggctattcataggcaaaaggtgcctcgtatcccgctgaaattggatattacaaaagcttttgactttgtatcttggcccttcttgttagaaatcttcagacatttgggttttggacctgtttggtgcagcatcatttctaaaatgttatactcttcttcaacaa

SEQ ID NO: 187121 - DNA, 399 bp, Zea Mays
atgcggctgtaggttactggaaaaccagagtgtccgccaataggtgaatcatgaagggccgaaatgacttggcgttgtatagcctccgaactccccagccacactcgtcctttgtgtcgaatgactccctgagatagagtgtatggggcagcagcatccggggagacgaccagtttggtcaacaggtcctgtgcctgtggatcgtcgctgtagctggcgacaatttcttgaatccacattggagtaccttgagaaatatgcatggcttgcccttctgccggcatccgagaaagagcgtcagcagccatattgtcacaaccctttttataaataatgcggtactgcaaaccagccaacttgatatataatttttgttgccagactgtatggagccgctgt

SEQ ID NO: 187122 - DNA, 382 bp, Zea Mays
tttttttatgaatctaaaagaaatgaaggtttgaaatttaaacttgagtatgaattgaaattggaatagaaaattgaaatgaaaaaagaaaagaacagaaacctcagctgggccgcccaatctccttttcggcccacttccactcccatcccgcgctcggcccattcctggactcagcctccgcacgcttgcgccgacgggtgggctccactcgtcagcctcccttgtgccgcgcctcgctctctcgctgcgccgcgggacccgctgtcagccgctccatcccttcgctctgctcgtgcgtgcctcgccgactcgtgggcccatgcggtcgggctcgttctctctaccggaatcgcgcgcaaccgccgccgcgatgtccccg

SEQ ID NO: 187123 - DNA, 776 bp, Zea Mays
ggaagaagaagccatagcaaaagcagctgaggggggattagagaagaacagcagcgcatcagatagggagaattgaagctgatcttttgtatcatatatctttcctgcatgcttcatcagtccgacacttgagagaggttcgagagagaagttattaagctgcctccacactggtagcaagtgattgcatgcatgggggataggacatggcagcagccacatgcgcaggcttcttccccagacgcagggaccaaggtccaagcttcatcatcgtccgtccatggcaacatcatgtaaaccctaacacacatggatatatagctggattcggatcttgctctattttcttgcgaatatatagatatatagatggatcggaattgaaggtttgctttttttttttttgcttgcttttgactcctttcttctgatttctgaagcatatggtggattatatatactgtggcgtcaatctcttctctggttttcatcagatttttaattttccacggtggatttaatttaactgttcaacatagaatttgctcgatcggaaattttgtctttacataaacttattttttttattggtagcatttccagtatatcattttagtaactgaccaaactaaaatgatgattgataccagcctaatttataattttgcgtgtattgatttgtgcaagtgcagcagaaaggagccagctggaggcggcggatacgacgacatggccgagttcgatcaagcgctcttcctctatcttaacagcagcca

SEQ ID NO: 187124 - DNA, 373 bp, Zea Mays
ggtcttggtgcataggggccctaggggcattggtgttgcatgcgggagcaatgtaggtcgagctacaaagaaagccaaactcagcggtggagttggtggtggtgctgtagggggatgagaaggggaagtctgtgtcgacgaaaacatgatgggagatcaagatgtgatgagtggcgaggtcaggcatcggtttcccttgtgctcagggagtacccaaggaagacacaacatgaggagcggggggaaagcttatggggagcagttgcagaaaggttagggtagcacgcacccccaaagacgcgaagatgtaggaaggcgactaatgaagtatgtggcggcgtggaggctcttaggctagtagcgagaaagaatg

SEQ ID NO: 187125 - DNA, 272 bp, Zea Mays
tcagagggatcctgcaagtgtgaaatctatatattctggacaaatggggcaaaatatgttacagccacaagtgctctgcctgtgctccattatcctcacgttattttttacccttttgcaaccgaccgctgcacagatcactgcaccatgggaaggtaaaatccttcttattcactgcactttgcatgcatacccattactcgacttgatctctgcataatcgtcatttgtgcccatttcacttttaccttgtaaacatggcccttagcccc

SEQ ID NO: 187126 - DNA, 539 bp, Zea Mays
agatatgacacggcggcagcagcagatccagctatcaccatgacggactcggggaggaggccaccaactaccaaacccatcgcacacgtcctgctcccctccccttctcgtcgcgtcggcattgcattgcacgcctcgcccggcgcctgctcccttgcattttccattgacctcccccccgccccctctcgtccgtctcctcctccccaaagcttcgaattttcccgagccggagccacaccttctttctccccgcgtcccacgattcgccgtcggaaagaggcaaggcaacggaaaccgagccgtcctgcgtgagctggggcggggtcccccgtctgggtgccttccgtgccactctcctgcaacgcggggcgcattgtcttgctgcccccttgagaagggaagattcccgccatctattaatcctcctctcgtatgccgttttctgcctggggaggacacaaacgcagcgccgcgggaaagccgggcgccgcatggatcgaggcatccggtgttcctgtctcaagacccagttttgg

SEQ ID NO: 187127 - DNA, 287 bp, Zea Mays
ggcagaaatgcttcagtccggcattatccagcgtagcaaaagtgctttctcatcatcagttattcttgttaagaagaaggacaatacctatcgattttgtgtcgattaccggcatcttaatgcactcactatgaagaccaagttccatgtaccaattatcgatgaattcctggatgagcttcacggagcagcatggttttcctcattggaccttcgcgctggatttcatcagatccgcatggcaccggaagatcgccacaaaacagcctttcaaacccaccacggcc

SEQ ID NO: 187128 - DNA, 361 bp, Zea Mays
ggcgctgaagcgtgctaacatcgacagcatccgaggcggtctcgatctgcaggacgacagagaccgtcgccagccgtacgatgggagggctggaacggcggagctggagctggactcggaggaggttctgctgggcgctcactacgtgttcaacgcctgcaagagcttcttcaccgacgacctgatcacgtcgggagcagagcgcgaagctatcagcaggggcatacagttcaatggcggcaggtacacgcacgagctgatcgagatgcagctgtccctgatgtacgacatcatgtacaccaaggcggcggtcatctacacgtggtatggcatatgcatccgtctaatgtcaccggcggcc

SEQ ID NO: 187129 - DNA, 482 bp, Zea Mays
gctggaggttaatttgttggcttgaatggtttgtacgatttgcaatgttagagtatgtggcgcaatcggcggcgacggggccgcgcgtggcacggtcggaggcgacgcggctgcgtgtggcatggtcggaggcgacgcggccgcgtgtggcacgggcgccgggatcgggggtagggaaagaggaggaatgtcgacgggattgacatcaaggagggaattgaggtcgggcggtggagagggtcagcaagggggaaaacatcctcattgaaaacaacatgatgagagataatgatgcggtgggtgagaagatcgaggcactggtacttgttgtgatcagaggaggtactcgaggaaaaggttgtgactggatcagggcgcaagtttgtggggagtggtgatggaggtggttaggatagcaggccttcgacatttgggtcggcgagtagtgatacattctgtagagcaccagtgggaagcggggg

SEQ ID NO: 187130 - DNA, 498 bp, Zea Mays
gtccatgtgatcaccaacatccgtactagcgaaacgatgcaagtgtgcatccaactcggcggcgcctccctcctcgccctcctcgactccggctccacccacaacttcgtcatcgaggaggtagcctcccgcatctcgctcgagcttcgacccggggcaaactgtaggctacggtggtgaacgacgaccacgtaccttgcccgggcgtgtaccgcggcgcgatcaacgacaaggcgttctcctcggacttttttgccccgcccctcactggctacgatgtggtcctaggaacacagtgactcgtgtctctgggaccccatcttgtgggacttcggcgccctcaccatgtcctggcgcggggatcatgtgtgctggtgtggccgaggccgaccctcctagtttagcactcgggcattcaccgtcgacaacctcctgacagccctactcgacgcgttcgccgcaacctttatcgagcccaagggcatgctgccaccacgc

SEQ ID NO: 187131 - DNA, 297 bp, Zea Mays
tcaatgcaatacatctctcctttctacactcggtaccattcttgtctcctggtcctcgaagcgacaacacgtcgtctctcaatccagcatagaagccgactatcgtgctatagctaatggtgttgcaaaatcttccaatctccgtcagttacttggtgtacttcgtggtcctctcagtcatgccacattggtctattgtgataacgtgagtgttgtctacttatcctccattccagttcaccaacaacggatgaagcatgttgagattgatctccattttgttcatgagtgtatcgc

SEQ ID NO: 187132 - DNA, 1526 bp, Zea Mays
tgactgcatttgtttgatctatcctgttgccattctgtgtttgccgcagagggtgacagacatggctttctttgctgaggatgtccatcgtttggcaaggtactaatacaaaatgatgggtgttcagttaccactgcactaaccagtgatctgtttgctggctattatctggttatctactattgcattttggaattatcttgttgcttctagtatatacatattacttttagtagactacagtctccatgttctaatttgcttcggatttctacagtgcgagcgtagatgggcggatatttgtgtggaggatagatgaagggcccgatgaggaaaacaaaccacaaattactggaaagattgaaatcgccatccagattgtaggtgaagctgaagcttaccatccaaggatatgttggcactcacataagcaagtaaagccttacataacacccctcaatattttttttgcgcatcaacctacaaagtgacttcaacctgtatcctgcaggagattctttttgttgggattgggaactgtgtcttaagaatagacacaactaaagtgggtagaggaaaagactttactgtggaaggacctgtaaaatgtcatcttgaaaagcttattgatggtgtccgcttagttggtaagcatgatggtggtgtgactgatttgtccatatctcaatggatgagcacccgcctggcttccggatccaaggatggcacggtttgtacgaagcttactacttttgtcattgaatattttgcaaaactgcactctgttgatttgaatggtaccttaagtttactcaaagaatttatcacatgaatagtctattcattaggcactgtatatctgttctaaaagctcaaatgtgaatatgtatctttgtggttcaatcttattagactataacccctctttcatacgatttaggaatcttccagacactagccacttaaacagtatgtgctaccacatatgttaagatatactccaagacattattagtataatagaattgctgttgtattcttattcttatatattcatttttgtaccttggaacttcacgtccactcgaaaaggcagatagcagtacctgtgctttctgtatatgagtatatctgcaatgtattgcaaagctattgtattgggaagaaagcataacaagcacgacaattttttttaaacctgtccgtagatgtgtagcctttgttataccagaaaatctcccatgcagcgaggcttctgtagcaatcactgggaaaccataccagctgctggcttaaaacctgtaatcaagctaccaacagtcttatgtcttagctgcccaaaaaattccatgttagaaacaatattatctagagaagtgccatgcatctctactggccccttgtgatgttcattcatcttttgcaggttaaaatctgggatgatcgcaagcaagtgccattatctatttttaagccccatgatggtcaagcggtttattcagttgcttttcttacagcgcctgaac

SEQ ID NO: 187133 - DNA, 581 bp, Zea Mays
gaaagatcaaataaggcaaactacgaactcatcgggatgtgatgaacgtggacgtctccgacagcaacatgctcatggatgaagtgaagatgaatctcaacatgctttgtatgctggtgttgggcgaggttgacgaagaggtagacggtgctgacgttgtcgcaatagacaagcatgctcctggtgagggctatgaaactcctgaaggagatggcgcaactagctcgtctcagacaccacactagcgacagcccggtactcagcctcagcactgaagcaggagaccacaacctaacgcttggaggaccaagatatgagcttggcctaagaaacaccgtacaaccggagacagagtgccgacaagactgcattagacagtgggtcgttgacagaggcaccatcaccaaagaccttggcatgtgtgtccaccaatgtcgcacatggcttgcaatctagcatgccagtgcgctctaggacatctagggtgtactaacattgctaaagattcgagcgacgctcaacgacatccccaggaaatgatgaagaggacccagatccttcattgtgacttcttgctatga

SEQ ID NO: 187134 - DNA, 277 bp, Zea Mays
aagtacattagtaccaatcttcaagaacaaaggagatgttcaaagttgtaccaactatctagggattaagctcatgaaccacactatgaagctatgggagagagatattaagcatcgcctgagaggaatgacacatatcaccatgaaccaatttggattcgtgcctataaggtcaaccatggaagtaattttcttaataagacaggtcatggagcggtataaggagcgaaagcaattttcttaataagacaggtcatggagcggtataaggagcaga

SEQ ID NO: 187135 - DNA, 558 bp, Zea Mays
ctggatcctcaatcaacggcacatatcagatcggacggaccccgcgtttcaacccaaacgtttccccatgatcaaatccccatcgtccaaactcggatggacgactctggatatcgtcttcttcctcctgcgcgcggccacggcggcaaacaaagcatgcgtgacggacattcgccggagccctgcctagacccaacgccgcaccgattcccaccccagaaacggttggggacaaactcattggagattaggtggcggttgtcgctgtccacgagctgctcggatctgcagccaaggcaagcgacggcgagaatttgcaggtgatctgacggccttcgatctccctggatgtcaccaccacgagcacgtccccgcagtgaaggtctcgatccaaccctggcgccgaatcatcgccaaatccgagaacagcggggcggcttcctcgcactcagcttttttccgcaaatctctctctgcaatccgacgagcacatggcgatggctacaacctggaggtcagggagcggcggacgttcctttttatattccgaacgcgagg

SEQ ID NO: 187136 - DNA, 380 bp, Zea Mays
cgaagaacagaatttatcaatgactgaaaagtggacagtgcattggtgagtccaaactacattaccaagaattcataatgtccgtggtgtgtccaaaacacagttttttcgatgtcatttggatgcatgcgcacctgatgataaccactccgtaggtcgagctttgtgaagaattttgcctcgcgaagttaatgcagcaactcatcaactactgggatgggaattttatccttcactatcttcatgttaagttcacgataaccaatacaaaatctccaagtgccatctgcctttttgactagcaatacatatgatgagaaggctgatttgcattccctgataatgtcttgctgcaccatcgcaacacactgacactcgat

SEQ ID NO: 187137 - DNA, 371 bp, Zea Mays
cgcttcccctcccgcctcctcgactccctccaccatccgttcgcctccctgccttggccgacgcccctgtctcttcctctaccagccccacgccgattctcattccgaggccggtggccactgcactgtcctccccggcgtcggccgctgctactgctaccgctaccgcttctcctctccccagccctggtgggcgcacgaaggcccagcgatggagtgacgagggcagccactcttcggctgtcgctctggttcgcggcgcgtccaggcgttcctacaaggaggtgttgctggctgcagattttccagcttctggtggcgccgccggtgtggttgttggcgatggctggataagagtggaaggtcgccgg

SEQ ID NO: 187138 - DNA, 380 bp, Zea Mays
tgggctctgcaatgccccggctacgttccaggccctcatgaatgatgtactccggcctttcctgcgccgtttcgtcctcgtcttttttgacgacattttggtctatagcaagacatgggcggatcatcttcgtcaccttcgggtcgtcctcaacgagctacgccatcaccatctcttcgtcaagcgagccaagtgctcctttggtgcctcttcaatcgcctacctcggccatgtgatatccgtggatggagtcgccatggatacaactaaggtgaaggccatcctcgactggccgactcctcgttcgtcccgagccgtccgtggcttcctcggcttagcaggctactaccgcaagttcgtccacaactacggcattgttg

SEQ ID NO: 187139 - DNA, 392 bp, Zea Mays
tctagtgtggtggagaaagtgggcgcattaggtgtggtggaaggctcaagaggggcaggagctgacatagtggaggaaggaggagtggtgactgggtctgagggatcgaatcgagcaggggtggagcgagccagagacgagaggcgatggactcggaaggcaatctgatcggaggcaatcctcaacgagcatccttgctctgcctgatctgctgctactgcggcggcaactgttgcacgagtggctatgtccaactgtctcttttcttgccccctgctgctcaagatatactgccttgcccttgtcatgtctgaaagggcgaggagggttctgatcatctcctcccctgacggtgtgacattatttgtcttcaccatcctgcactgatcaat

SEQ ID NO: 187140 - DNA, 445 bp, Zea Mays
tcgccaaggtcatatcagccatgctcttgaacctgcaaaatattgccctgaacgaaattcctaagctcaatgtcgaggtagaggcagcaagtctaccggttgttatgaactgatgctcgagggtgagccaaaaatagtgcatggtggtgtggggtccatcatcttgttgatgaggttggtggagatggtgccatatatctaggagatgatgacataacccgtagctgcccaatctggcaatgctggatcagcctcatcgcccaggacacatcacgtcgcgtgtagttgttcgagttgatgatgaggatgatactgtcgccgagtggcactgctcgagtttggtggtggtagcgtcatgttcaccagctgtcactcgctcacgctgcaaagctgcgcaatctgtaattgactatgaggattagtagaatgattatgacgatggtac

SEQ ID NO: 187141 - DNA, 354 bp, Zea Mays
ctactatccaaaatctctgcagaaatgcagttagccttaacaacagatagatgtcctaatcccctagtccttgcttttaattgatgtattattgcaggaaggatccttccactaagtctttctccaataattctcctcttgttccacaacaccattaccatctgcctatacttgtcagcaagttcatgtacaggcaagtctttgaagtccttaatccaattattgaagacttctgcaagattgtttgtgatgtaatcacatttgatttctgggttgaattcactcctcctccataacagtttgtggtttttgtctagccaatccttggcatcaggggaagcctctacaacttgg

SEQ ID NO: 187142 - DNA, 627 bp, Zea Mays
gaacctaggacctgctacttattaaatcacatggctaccagtgcgccacaaacaagagtgtgattaatactttgatacagtacatattattacgtattattgacttttgtgtggtctcagctccacgtatccatccagcgccctgtacctcaacaacaaattctttcacgccgccgcaattgaatcaagaggcagcagcctccctctctcgtgacatcgccggtggtaccaatttgggcgccattgagggtgactacgccacctcgcctgtgccctcgcactcgcaggtaattgcggtggtgccaatttgggcggcagtgcagctggtgacgcctccctcgtagctccacccacaggttactgtcttgctcagatctgccctcattatagaagcaacatcgacttgcgtgcccacgacacaagctcgtgtcagtgctactgccaccatccctccacagcacagccacgctgcctgcctcatgtgtcactactgcgtcctatcctgccacaccggatagaacttctacaaggtaccacattattgaccttcaatttatgactaatcaaagaattgatccctatggtagaggatacaagttgcaatgtcgaatgagttttaaatttttt

SEQ ID NO: 187143 - DNA, 597 bp, Zea Mays
taagtggtccatctttcagctggatgccaagaatacctttcttaatggtgagttccgtgtggaggtctatttgcagccatcttctagaagggtatggtttgacgtctttgccactcttggtttcagcgtttttcttctgtgatcaccgttggtggtttttctactgatgttcatgatcctgctcttttttgttcacacatcatctcattggctccctcttcttatgttgatgatatgattatcatcagtgatgatcatcaacctttgtgaaggcacgtctgagtgaacaatttcttatctatgcctctatagtcttggtcctctttgttattttcttgggattgaggtctccacgtttgagggcttctatctatctcaagaaaaatacattcaaggttttcttgatcgtgcttctgttactgatcatcgtacctttgagactcccatagagctcaatgttcatcttagtgccactgatggtgagcctcttgttgatcctacctgttatcgtcacgtagttagaagccttttttatcttggtgccagtcgtcctaatatttgttattatgtgtatatgcttaatcagcttgtttcggc

SEQ ID NO: 187144 - DNA, 795 bp, Zea Mays
ctttcagcaccatggcgatgacccctcctccctccgactgggtgatcgactctggtgcctcctaccacaccactccctccgcaggcacgctctctcactcccatccccttcgttcccctcatccctcctcgatcgttgttgggaacggctccactctgccagtcacctcagtaggtgtctcggttctccctgggccgttctacctcaacgacgttctcgtagctcctcacattactcataatcttctctctgttcgtcggttcaccaccgacaactcttgttccatcgagtttgacccctttggtttttctgtgaaggatctggccaccaggacccctctcgcccgctgtgacagctcggggccgctctacacatttcggccttcttccaccggcgcctctccacctcccgtcctggtctccaccacctcctccaccacgtggcatcgtcgtctcggccatccaggacccgacgtcatgaccaagctcaccagcagtttacacccttcatgtagtaggggacgttttgagggtctctgtcatgcttgtcagttaggccgccatactcgtctcccatttagtatttctagttctcgcgctgagcaggcttttgatttgatccattgtgatctctggacctctcctgtactcagcatttctggatacaaatactatttggtgattttggatgattattcccattttctttggacttttcctcttcggttgaagtctgatacgctccccaccctcacccaattcttcgcttgggtttccacccagtttcgtcgctcgg

SEQ ID NO: 187145 - DNA, 916 bp, Zea Mays
ggaaccgtctcacattgtactgtactaacagctatttcagaggtgcttaatccctgcaagagtatgatgtgtgtagtctagattgcttttgaattgcctgaattctgccataaaatttatgtcttatcatacatatttccctatagtatatttggatgaatttacgaattttttgcttacttctcttttgaaaagcagaaatattcttgtcagattcaaatagattctgtaggcggcacttcttgtatctgaactgtttgatcattttatcttctcagttatagtcttgcagcaacttgcatagttgcatgttcctagcggatttgccacactttctgtttgcctaagattaggtatagtaaggttaggcaccaccaaccaaacaggccatgtatgacaataccttattcattgtttactatatgcttgagggatatggtttctttgtaatccacgataacttcagcatcactgagaaaaatgctacataactgtttatcatactatcgctattcatcttgtttttgaaagtgtgcttgaaactatatcgatatactgccttcttttttttgcaaggaccttgaatcatttgggaaatttaatgcagattggacactcagcatatgttgattctccactcgggccagatgcgtttcgggaatatgaaaccttacttattcaggaccatgatgagcttcttaagaagtctgagaatttagacagacataaagaaagcattcataaagaggcgagtgattttacctctgacgttgataattattctaagtggggttctggggtgcattatggctctaattctgaattcagcccaacgaaaagggatttttttgatgacgaaatgggccaggtagaagcaagagggagaagactgtttgtagctgtgcgtcactttccg

SEQ ID NO: 187146 - DNA, 372 bp, Zea Mays
aataatacgaacggtcaaagttttagaaaaaaatcaacgacgtcatatatttgtgaacggagggagtagtttgcggtaaaagcatatttgttcggatttagggaggaaaatgagtttatctatactgtgactcatacagtcttggtaacacggttaacaaacggacataacatgcaaactgtatctttttactatttaccttaaccatgtgagttcttttatttggttctggacatccttttattctagcttgctgtaatctactggattgcagcatgaacaccttcatgggtcttagcttatcttttcactgccaattgtggtctgagatgtgtactattaaatctcgaacaactatgttgcaggcttctg

SEQ ID NO: 187147 - DNA, 549 bp, Zea Mays
gtgttatggagaaatagttgaaactaatggcagttttgggcgcaaggacactactgaattcaagagatcagtcaagggatttaatttcactgatagtcatttgatgaatggaagatgggccaaagaatgttctagggatgctatagaaatgtttttccgagtcttagctgtttgccatactgcgattcctgtggcagatggaaattctgctggtatgccttatgaagctgagtctcctgatgaagcagctcttgttacagctgcaagagagtttggctttgaattttatcataggacacaaacaactatatcagtgcatgagtacgatcctgtcgttggtggaaaggttgataggtgcttatcatttccactgttcttagtgattattctttaaaagtgtcaacgttgccaacgtcatgatgctatttttgtttcagaacatataaactactcaacatcttagaattcagcagtgctcgtaagcgtatgtctgttattgtgaggacagaagagggtcggctatttctgttctgcaaaggagctgacagg

SEQ ID NO: 187148 - DNA, 478 bp, Zea Mays
ctcggccaccttcctggccgctttcgcggctaccttccacgcccgccttcgtggccacctccacgaccgccgtcgcgctcgtcttcgcgtcgcggccctctccgtcttcagctgtccgcctccgctcgtttcaactgctcgattcaaccgttcgcctccgtcttcagccctctccgtcgcccagtcttctccgccaccgactgctcgcgtgactgtccacctcgcgactgttcacacggtcttctgcctctgaccgttcgtgcgaccgtcgatcatctacaacgcgactgttcaccgttgtcgactgttcgtgcgatcgtctgccttcgcgcgacatcgattgtctgcttctgcgcgacatctgggtcaagtggaacttcatcgtcccaacgctcttgctcacttcgtgtggctgtctgcctccgcacaacattggctgtctgcttctgtgcgacatctgggtcaagtggaacttcat

SEQ ID NO: 187149 - DNA, 396 bp, Zea Mays
ccgaccattggcaagacgcaaaggcaccaactcaaacaaagcaggagctatgtccttaatacatctcccctccaaccatctgtccttccagaaaagggtattagctccatcaccaagcttagtaataatggctgcaacaatcagatttttaaccaccttacaaacatgaatggggaagtctgcccaaggcctactggggtctgttttctgcagccacggccagcgagctctcaaagcccaacagaggttctttaactcactaatccccagaccacccaactccttgggacgggtaaccttaggccaagccaagaggcagtgaccaccacggaactctttcctacccctccagaggaaacccttcctcagcttatcgattgctttgatggcccaaac

SEQ ID NO: 187150 - DNA, 288 bp, Zea Mays
cgaagtccaaggtgtgggaagaattcagtgctgtgttaagagatgacaaaattcaatgggccgaatgtaagcactgtaaaatgagccttggtggaacaagcacaggaagaacaacccatctgcggcggcatcttaagatctgtccagcgctacctgcaactgatcggatgcagaaacagaggtcatctccacatcctggttccaccattgagagcatctggaagttcgatcaagacagatctcttgaattgctcatcaaggttttagtgtccaaccttttctcctctc

SEQ ID NO: 187151 - DNA, 377 bp, Zea Mays
tgtgccttagtttgtgcttttgtgaaaaaatccgcaagctgtaattctgagggcacatattgaagatcaatggtcttctggtgacaatgagatctagtgaatgagacatcaacaccaatgtgttttgtgagttcacgcttcactggatcatgacaaatttgtatagctccagtattgtcacagcgaagaagtgtaggcgagtcacaagaaacgcctagatcagccaagagccaacgaatccagataatctcagcagtagtagtagccagggctcgaagttctgcttcagtactagatctagatacatcggcttgcttcttggatttccaagcaacaggggatgatccaagaagaatacaataaccagtgatggagcg

SEQ ID NO: 187152 - DNA, 635 bp, Zea Mays
cgcccatcatcattcgggcagttggcagggcgcctgcaccattcatcgaaaaggtagcatgagagtgaactcttccttcgtaataggatagtgtttacctgtgatccagccggtgaggtccgccctcataaacccggtctctagaatccatcgcacagttcttttgtactcggtgaggtccaccctcataaacccaatctctggcgtccatcgcctaactcttacaaattcatttatgaaggaagaatttgctctcaattcaatcattttcctgctttaatttacatatattgtttcctctagccctcacgtggttcctaacttctgttgtgatcatgtaactagcttgtcgcttagtttggggccccatttgatgttgaacgaggatcgaatagctagggacctccaaccaggggaaaggaccacgttctcaggggtggtccggagctaggtagccacttagcctggttccgtaccataagcctacaccctccaccaccctagaattgttgtcctaatacctcggactgggtccctaaaggtctggaccttgaccaaacttaagggttggttcctaaagctctgctcgacaagctccagctacatgattcgaaaggttgagcacaacaaagtag

SEQ ID NO: 187153 - DNA, 492 bp, Zea Mays
ccagcaaactgccagagccgtccacaagcagaaggatccggttgccctacttaaattggacattggtaaggcttttgactcagtctcttggccattcctgtttgaagttctccggcatcttggttttggcccattgtggtgcaatatgattgctaaattgctgcactcctcctcgactagagtgttggtgaatggagaacctagggatctaatttgccacgagcgtgggttgagacagggggatcctctctccctaatgctctttatccttgttatggatgtgctgaattatctaatccaaaaggctagtaatttgggcctgctgcagcctttgttaagaagaggctctggtcaacgggtatcgctatatgcagatgatgtagtcctgtttttgaagccaaaggaagaagagtttgctgtgatcaaagaaattatatggatctttggtatggcttcaggtctgatcacaagcttgaataaatgcagcctaac

SEQ ID NO: 187154 - DNA, 497 bp, Zea Mays
atcagtacatttatttagatactgtgtaaggtctttgatgcatacctttggtcgctaatagcttacagaacatattcttagagtccttcaaatatattatattctgcaagtgttttttctaatacatatctaccctacatgtctccaacaaagttaatgatgtttagtcttatgtttactctgtattgtcataagcgatatgtttttgagaccagaggtagtataaagcttcagactaatatggtatttattcttcagaggtgaacacttttgatttttcattatagtcatctagaagcaaactgcaataattcactgcaataattcatatattcagaaaagttctcttattcttgtattcttgggccccatgcacaacaaatccttatcctaataccaagtcatgaccagagataccattttgaattcgtcacaggattgtcatcaattccttatgcttgccaacaacatcaaacacttgaaagaccatattcaaa

SEQ ID NO: 187155 - DNA, 573 bp, Zea Mays
gtccaatacacctagatcgcccatgtccctgtggcaagatcccaagtttagtgtgaattctctatgtttagccacccccaacaggttggtatagaaatcattcaaagcttcatgcttctgctcatgagaggtgaccacccgatcaccgactgtcaaactagagatgaagtttcttttcttgctgtagcaagcctgcaagtgaaaaaaagaagtgtttgcatccccctccttcagatatctaacacgggatctgaggcgagccactgtcctatctaaagaagcgagggccaaacaatgttgcttaagcctcctcatgagccataattcttctgaagacagcagcctgctatcctgagccatctcgagtctgtgaaggatttcctttgctaaagccaattgggacttcacattgcctgcattcttgtgccctgaggactgcaaggacctggccaatcttcgaagcttcaaggatacaagctttagagggcagggggtctgaactggctgcatccaagaatcagccaccacatctaagaaatcagcaatcttagtccagaaactttcaaagtgaaa

SEQ ID NO: 187156 - DNA, 632 bp, Zea Mays
gcaaggcgcggctcaggagggcggactgcaacgtcaaggtgcgttgtacgccgctgctgttctgcaacactgcaactgcagtctccccgtgcgggtgatcttatttttgccattgtgtttttggtgttgtcgtgtgtgttcagctggagaggtgggaagcgtccttgagagattaccaggtgctggtccaagaactgccggagaatgaggacgtgaagaaggctctctctgaggtcgaagccaagctcaagggccaaaggcatggggccgcagcagccagatctcagcactgacgtcatgtaactacatgtcccttctccagctcttgcagttgtattttgtgtcaactacatttgaaagtgcgcactcatattccttggactaatgattcaaagtgtcggtcctaacaaacttcagtgctctttatctatctaaattttaactggttaataggtggtagatggtcacgcttagataaacaaataagtagtgattagaaaatccggcagattccttgactgcccaccatcttttttaaagcaaaagtttggcatgttgatcataggatagcctgtctttctttgcaggttttctttactctgtcggctaccagagaaatcaaccgcgactgc

SEQ ID NO: 187157 - DNA, 831 bp, Zea Mays
gaaaatcgttcaagcattaccccaatacagtgatcaagttgagaaattgacgctacatatagaggtagatgattatttttaaatatatttggctacgtgttttatattatcatgtttaatttttgtattcacaagccataaggtaatattcgttatatttataagtttataagaacttccatatagacacagaagggaaaaaaaatatatactatcggtaaaattactatgttctagtagataatttatcaagggacactaaaagatggtccacatctcatgcaatagattccgcccatgcaaacacattgtagactcagtaggtaaatacattatttataacatgttaaaagaaatgccattatcattcgctttaaggcactcgtttcacattaatatgttgtatattcattttttgcagcatatgattctgtgtcttacctttgaacaatctcttttgcctcaactgtcattttaaatgaaagttctaaaactttggattaatctcttgtttagattgctggaaaaatgaacaggtgtatcagggagtatgggctccgtgatattgggcaattggagcaggatttggtttttggagatgcgggagcgaaggaagtcatcagtatcctcaggtcaaagcaggtttgtatagaaagagaaacaaaaaaacaggcttgctgctaagttgctgtcgttttgtttttctttgcttgacatgtttgttccattattaaggatatgagcccagaaaacaaaatgaggttgctgattatatatgcaattgtatatccagagaagtttgaaggtgacaaaggggaaaagttgatgcag

SEQ ID NO: 187158 - DNA, 271 bp, Zea Mays
attaggagctggctactgctgagccatcttctttgggtgctggattgcccagtggccttgctctttacaatggaaacatcctcgacctcctacttgcattggggctgcctggttgttctgattatctactgggtaggaagttgaggtgcttggctattctaatggtactattgtggctaatgatactacctctaagcctattgatggttctgacactagttctgctactgatatcactacgggtggccatgcttgaactgctgagatgaat

SEQ ID NO: 187159 - DNA, 296 bp, Zea Mays
attgttcttgtcttctgagctgtagatctgattaaaatctccagctattacccaagggccagcgcatgtctccctgacatccctaagctcctggagaaaggaatgcttgagagggtcttggtgtggcccataaacacccgtgaaccaccactgagcaccaccttcctcttgcaacttgactgaaactgtgaaatcatgcaccaaactctcaataacagaatagactacctctctacaagccaccaaaacaccacctctggttccttgcgctggggagtaaacgaagtcactaaacc

SEQ ID NO: 187160 - DNA, 330 bp, Zea Mays
atcagtaattgattggtgcaggggtcgaggcaatgctgctgagtctgcaggtacgggagatgcatactcttttcagtactccagtggtgatatcctggagccgtcaagttcgttgtccattggtggagattcaatgagcccaccccagccaaccagtagcaatcgaggtatacctgctgtgacctgcactctgaacttgataattctgctgcaaaaataatattgccaaagggaggaagagacgatgattgtatcacaggagatttgcgtgtcactgcaggcatttcagaattagagttccaaaagggatatcaccgtgtcagaccaacc

SEQ ID NO: 187161 - DNA, 501 bp, Zea Mays
gagttggaaagtagaaacttctgtcttgtgccatcagatatgtaatgtgggccaggatcacatttgaaccttttcgaacataggcacatccttttacaatcttgtttattgtattatctccgattcccctaagttctgcaaccacatcacctctgccccactgctcgttgatatgtgtgagcaaccctgtttaccgtcgccatttatcagctcattgtcctgttgtgattgttggcgcaaagctagcctctgatgccccagacctgtgcctttctacttgcttcgactatgtccacctctacctcggtatttcagtaagaagaaaagggctatcatctgcatgagattatttgcttgtttctactttgatcatagcatatgacatgactacgatgaatattagtcttagacttattcttaagtctgatcgacatcgatgctcctgttacaactggggtgtgagggtggctcgagtttatttggtaattatgaatataatcc

SEQ ID NO: 187162 - DNA, 1220 bp, Zea Mays
gtcgggactatcgtttcgcagccggttgagcgggtcgaaggtggttcgttctcatctattgctttggatcgacggctgctaagtgcttatagtaccttgcttccatgactagcttttctttagcttgcttgccaactgtgtgtaagggatgcaacgggcgtatcgtcagttctgaacaataaatgcacggattcggactggaaattcaacctcattttttatctgtccttgtcagtacaacattaagtggtaccagtaccaccatgccttttcttatcataaaaagattaaggttccccatctctggattctatcaaaggagcaatcacagttgtttttgaatatctggtagtctaattgttcaactaactctaaaatttgaacctagtgagaggtcttgtgcagtagtactgagtatcattgtagcaatcatcatattgccagtatagttttccatatctcatgactcatcaatatcttgatggtgcagctcaatcatttttattctattggtagtgttattttgtttctggggctgttatatgtttcttccaaattctgatgcacttactcctatattttttagaaagattagaaaggtgagtgtttttgttaaaaaaagaaggtaacaacaaggttacattgcgccacatagtataatctgatctcatgttcatgtcatctttgtgtccttttaaaggccctatagaatgtggacagccttttgctaagtcaattccttgataattttcaggtcaggcctagccatatattgcacgccgctggtcctgatgaaccacatgttgcaagtccaacatggtccgatacttcccttgatacaactgacatggatcatgctattagtaaggaggagcttgaagatgtcctcaacactccgcttcccgagcatccgaagctaattcgtggtcaattgaagaatggcctccggtatcttatcttaccaaataaagttccagcaaacaggttaggaaacccttttcctgctcacatctattaatttttataaatggataaggaatttgtacaattccacccttgatttccatataatggttggaaatttgatggttttctataattttgaatgtgaattatggagatacttgacaactatgggtggggacttgaacttctgaactaatgtgaggtgtttattgtagaattgtgaacttcttgatgtattgataggagatgaggta

SEQ ID NO: 187163 - DNA, 468 bp, Zea Mays
tacatgtttgggcttattacatgaaacaacaacaatactagaaagcttagcaagcacgtcagggccaggatgaccaagacgttggtgccatagggacgcaggagtagtaacagcagcaaggccgtagtgtgtagtggctggaggagcacgcgcagtaggaagactgatggtgtacagggacccagagctgttgcacctaaggattgtgttcctagaactgagatccttcacagaaaggccaaacgggtcaaattccatggaacaattattatcagtcgtaaactgacggacagaaagaagatttttaatgatatcaggtgtaacaagaacattattaagataaaactggccagaaagcaccgtatctcctacagaggtgaccggcagactagacccgtttccaacaactatggatgaaggaatattagaagttggagaacgaaaacgggagatgttaccagagtccag

SEQ ID NO: 187164 - DNA, 293 bp, Zea Mays
attttatgtatgctactctcaaaggattttctgtttttgatgatcgtgaaggaaccaaagatgagttaaggcttgccattgggaaatcagcatctgttcgggacacatcatctgttgatggctatgataatcctaatgaacttgattcaggtgaacgaagaatacaaaaggatctaggccttgagccaatcccctcgatgcttattcttgatgccatcttccgaaaatcttcgtcatccgtctctgtctgtgttcagcggcccaagtttcttgtggcacttgacttcttacta

SEQ ID NO: 187165 - DNA, 1274 bp, Zea Mays
tcaatctgtcccttctgagtgctatgttagtcatgaatgccatgatataaatatcgaatctgagggaaagaacgtggtggtatattttgttgggcttttacttgatatacttcgtcataatctcgaatcaaaaggctctgatacggatcacctttcaagtactggtctgtcgcctgctggtagacaagcgttagaatggaggctcaaacatgccaaacattctattgaagacctggattggcgtctatctgttctaaaacgtcttccacctctgtctgagcggcaatggagttggaaggaggcattagttcttctacgtgctgctccttcgaaattactgaatctgtgagtttttctatgatgtaatttgtcctcctgctatattctgttgtatttacattttgtgctttaccaaagtttctagtattcccatcggaagggggctcttctcccttctttgtactgttcctcttttctctattgaaatggtgcacaactctcttgtgtgttcaagaaaaaatgctttaccaaagaattattggttgaaattcttttgggctagaaatatttacatgtttagcttaaaaattgtaaggtcagtgggtcccacggagctcaacgtccctgactgttctgtggccctgccttgttgtttttaccattccaaagtagtttcccatacacatcagttgaagttcgtgtaatatttaggcttgtggacatgtcacttctcattgcacagttgactggcacttgtttcctcagacatgtataatctcagctgaaacacaagaactgttatgtcctcgtctccaatttgtcatgggcagtcctgctcaattttgtgagtagcttactttccattggtcaatgctactgagaccgtctcaattcatcaagaacagttcatatactgatatgattgaagcattatcccattgaaaaacatactggatgaatattatatattgaaaaacatactggatggatattatatcgatctccaggatttgagttttcgtctcgttttttttgacatcagtaaatgcttaatactttcatatttttgacctatcatgtaacttactcttgtacaattgtaattttgtaaaattttattagtattttatgaatttgtgtgcgcgtgtgtgcgccacacacatatcatgtgagcatgcatgcttcaatatgttatgatatatacttactgctcaccattcaaattcttgacagatgcatgcaaagggaaaactatgatataggagaagaagctg

SEQ ID NO: 187166 - DNA, 399 bp, Zea Mays
tgacaagtaccgacctgaaactgtggcccaggtgaacatgacttttgtgtttatactgtccatgcataatatgaagataatcaattgtgcactgcatttcccttattgcttctatttcattagccttttctgctaaatgcttcatttaggaaagtggagatcaatctttgtagtatgcttacatttcatcttatgttactgctatctttggttaaacaggtatgtggaaatagtgagcacgtaaagtttcttgctgaatggcttaaaagctgggatgaaaaaggccacaagattggagttgctaacggggacactaatgataactcatatcaagatatatctgattcagattattcagagagtgcttctgattgtgaaaatacacttctaatcactgga

SEQ ID NO: 187167 - DNA, 508 bp, Zea Mays
gtttatccccttatgaactaggaaccataacatctggtatcatattccaggccatcctccccaccacttccgccacccaaatccatctcttcaccatcatccgacgcagcctcatcaacctctgctatggcggaacccaacacatccgatctagtcaccatcatctaattccttgcagcaacggtggaatacctcatgctgtcggccgccgaactccagcaggaccaccgaaccgagtcctctgcactgggcgggaagggacagcacaccggcgatcatcaccaggatcgacccccgcggttccagaagttggacttcccaaagtatgatggcaaaactgatccattggtgttccttaaccgatgttagtcctacttccatcaacagcgcatcatcgacgaggaacgcgtgtggatggcctcctacaacctcgacgacgtcgcccagctgtggttcatccaaatacagcaatatgagggcactccatcatggcactgcttctccgaac

SEQ ID NO: 187168 - DNA, 373 bp, Zea Mays
cgacaatgctactaatgaaaattataaaattgctattggtgacaggctagaagatgcagtacagaactatatccagatttacgagagtgatgtggatgtacagcagctagaccagcaacactcgcctgcacaaaaacgtgctatctcacctcacctggtttaccagcagtgaaccaaaaggagggcaaatgaagttggacgctatacaaaccgcacaaaacctcaatgccttgaaagtcatgtgtgtaatgcgcctaatcaccatgtagcaacatcaacctgttggtccctcaagcagcatagaaagtagtgcggtagaaccttcagatgactcgacatcatcagcatgaccagcaactctatcacctcgatg

SEQ ID NO: 187169 - DNA, 667 bp, Zea Mays
cggagtggaagtggagccgaggaccaggggcgtggctcaaggtgggacgacgacagggaagccaagaggtcggggtgggacaggaggagccacagctttgatggaaggcgtaaatgcaacgatgacggtggcggtgatgctgaccgtagcggccgccggacacgcgactacgatgagtcgaagagaccaccgatgtcaaggtcctattcgcataacgatcgttgggcttcagctgatgccagagtagatcgaaggaggagaagtaggagcaggaccaggagctactacagtggcagcaggagagatccagatttgctagcaggcacccgtgatttggatcgcaccaaggtgccagactctggcattgttcctgctgctggtggtgatggaggcgtgcacgatgcggatgccgatggaacacgaaagcagctgaaggttcctagttcaatgttggtttcggagatgaatgacagtgctgtcgaagctgcgcctatagaagaggatcatgctcaagacatgtctgaaggtgaggacggtgagtttgcagaagagatttctgaagacgaggatggtgagtttgcagcctctgatttgaatgatgaagatggtgatgaaatggatgacacccaaagacaaccgtctcacatgcatgttcatgcatctgaat

SEQ ID NO: 187170 - DNA, 353 bp, Zea Mays
gtcgagatacgcaaccgaggtggcgccgaaagcgcacttggtgcgtttgacgaagagttggtggtgccgaagctcggagaagacggcacggaggtggcgcaggtggtcggcacatgtcttgtcgtaaattagaatgtcatcaaagaagacgaggacgaaccggcggaggaatggccggagaacatcgttcatgagcgcctggaatgtggccggggcattgcagaggccgaacgccatcaccaggaactcgtacaggccatcatgagtacggaacgcggtcttgtgcacatcctcagcccgcatccgcacttgatggtaatcggaccgtaagtcaagcttggtgaagaagcgcg

SEQ ID NO: 187171 - DNA, 394 bp, Zea Mays
gtgaacaataatgtccttgaagacctatctggtgctggtactgcagggattaacaactcaactagggaatcatcacacatgcataactttggacgtccaggtgcttcatcatcgattccccttacttctggcagttctaggagaccaaatcgacactatgcctcacgctctgtgcctggggttgggagtttgctcctagtaggtcctcaaattgacgaagctgaagctcatgctgcttcactaggtgctggttcagaaatcactgcgtcgatgcttgctcctggtactgaattgccttgtacagtgaagctcagaatatggcggcatgatatcaatgaaccatgtgttcctttagcacctgaggcatgccgtctgacgatttctcatgccgttc

SEQ ID NO: 187172 - DNA, 965 bp, Zea Mays
attggctgctcgtccacttaagcaggttgaggtatccatttggttcgacacagtgaagaactgaagatacgcattgtgcttgcttgtcttgcggggctcacaaacatcctgctggtgtgctgtgctgggaaggtcacataatccacttggctatatgccggggtgggaatgtgaatcggggcttcattagtgcaggcagcaggcttgttaacttggtaattagtcaatgaaacccatactctttaatgacttcttttggccactgttagcctgtgtttgatataatgtagctgttcatttgtgcttccttccaaaagttccatattttgttctttattggagcatcaattttagatggcaatgtatacctgaacatcttcaaactgtctacacaatatgtctgcattgtttttgtgcttatgccagtagaattaacaattaacaagtagtatctgttcattactttagttcatgttttgtgccccatgaaattggtaatggaattgcaaattggagttagacatcatgctttgaaatgcacaaactgccacaataaagccgtgacatccagctgagtgaaactgtcttttcatgcatatactctcagtaatcatcactaaatttatctggaggagtttattgttctattgtaagctgccaatttctttgtttcttctgtcaatcaatgaatattgcacgcttgtcttttttccacatttaggttgatatttcagaacctttttctgtgatttattttattatacagttgagggtttgattcactagtctcttgcacagttttgcaacaagcatgggggcaaaagttgaaggggaaagctatatgcctggatattatgccacaggggatctcaacgtggaagcaagtggtaggtggtctccatactatgaggagatgacatcaaatggccagttatgcaatggcttcgcaacaaaaccaacaagtg

SEQ ID NO: 187173 - DNA, 366 bp, Zea Mays
aaaaccttccagaacgcctccctcgagctccccttcgctcgaccgctcccgcgcctcctcgcgctctacgaccccgacaccttctcggacttcgggcacgtcttcctccccaacggcacagatcccggcctcgatgccgccgccgagccggcgcccaccatgttcgacaactgcatccctctctcggaggcggagacctaccgcctccgctggacgctcaatgcctccgccggcaccgtcgagatcggccttgaggctgccgtgggctccgagtactacatggcattcgggtgggcggaccccaaggccaactcacccgcaatgatccacgccgatgtggttgtcgccggcttcacagaggaaggt

SEQ ID NO: 187174 - DNA, 412 bp, Zea Mays
tgacaaaagttttgcctcaaggaactccactgttttgctaaactcaaagttcttttttttcgactcatccaattcctgctctttttgcgtaagatgaccatgtaattccaacttctgccttttcagatcagcaattagattctgaagagaactgcactcttcaataagactctcaaccgtagattgtagtttacaattagatcttctcagaacttcagaatcatcttgtgcttcgcacaatcttctttgagattcttgttgtttctgcttaaactggagcctttgagtttccatctctgattgctgacactctactttatctttgagattgatgatgagagatctggagtcatgcaactgcagctcgcttgactccttttcatttgtcacgtaagtcagttgtgtttcaagt

SEQ ID NO: 187175 - DNA, 417 bp, Zea Mays
ctcaggtgcggtttgtctcaaccgcgtccatctctaactgcatcgcggcacgctatgccgcgtgcctcacggcctccgtgaaagatcgaggcttgctgtcgtagcatgccagatgcaactgcgcctccagattgcgaggcatcaggctcggcaccgattggtcgctgagaaggtcctccatcgtacaataccacaatggctcatcgttgtggtacgcgtcgatgcactcctcgttgtgggagagcggggtaatgaactccactgggtcatgctcgacacgagctagtgtcggagtggacgtgcccggaggggtgaccgtcgatgtcggagtgcgtggtggcgaagaggtcattgtggccgaagtcgtgactggagagcgtggcgctagagtcggtagagactcaaggactagggtag

SEQ ID NO: 187176 - DNA, 284 bp, Zea Mays
gtttggtgctggatggtgtgacattgtgagtgggctgcttgccacatcctcctctcagattctccttaatggtattccaggggacttcattccgcacagaagagggctgcggcagggagaccccctctcccctatgttattcattttggtgatggacgttctaaacctcatggtggggcgagctgttgaagctaggctgttgcaacccctgtcaacttgttcctttctgcatagagtctctctttacgcggatgatgttgcacttttcatcaaacctacagtgg

SEQ ID NO: 187177 - DNA, 279 bp, Zea Mays
atctacttgctcctcctctgtatacccttctgctaacaattggtatccagatccaatcggtcatcggtcgttgctatggctcccccttcccccactccgtccgatgccgctctaacaatggcattagagaaccagacccgcgcccttctcgtggagctcgacaagagattccagaccttcgacaccaaatgggaatcccaggtcggcgcgctcgaatcagcagccgacgagtccggccatcacctctcagccctgtctgcgtcactatgggcggacatc

SEQ ID NO: 187178 - DNA, 1593 bp, Zea Mays
ggagttgtagaagaaagttggagcgtcacaacaaaagaagacgaagaaaacctgattccaaaggaacattagataaagaaattgatgaaccattggatatgccagcagatgttagtggcagcgatgaacttagagaaggtgatacccttcaattttattcaaatttgctaagaaaaaaagttattttatttagtaaaaggcgaaagaatacactttgtgttcacaatgagttattttttacctatttagtgtttagcgtgattattatcaacttatcatcggttcagccattgatggtttttaaggtgtcgcctaggcagcaaggtgtgtcacattactgaaatcagtgagaaagagggaatttgacgagagtttcacatacaaagagaggagcaggagggcatgagaagtgcctggtacagcagcctctactccactagcatctctgctggctctggtggtgatggttggtgcagccctccagtcaactacagtggcaattgtttcagatagagttggcgccggtgcccaatctagattctagagtgatggctttggtagtgatggcccaaattgtttgaagaatataatttacatcattgcctggcccaaccttactgccttacttaagtgcctaggtggtaggaaggggcctagtctacacgtctcgacgtactgccttaggaatattgtgggtattagttttttcttaaaagaacagcaggagagctgcctattatattgaaggaggaccaagagaggtcaatagtgcagatgagaatacagagaaaacaacacagcagtggtacaataagatacccacttgaaagtaaaacatttcaatatatgtttatctgattatacatgcacattgaaaaaaagaacatttcatgtctgtttacctatcaataggttacaaatacatgtcccatttttaagtataggtttgccacaagcccacaacagaatattctctattttaaggataacagtaacagcaacaccttactatttgaaataagtagaaaatggaaagtaatctttccatgttaatactttgcaaagatatggttagcgtattttacttcctatgaaaatgacttcactgtttatataatattttattagctaggattcaagtatttggttaacatgtgtttccttagtccaatgtaactcaatagtcaatacttatgatttggttagggtacatataatggtagtgtcggttcatctacggtcttatattcttatttgagtaaacaacctattataatgtagtttaacatgaccattcaagtgcagtttgtgttgtccagtgtatgatatctttgttgacttgttaattttgtgcagagaacatggaaggcataaccagtgagattcttgagactgttcttagcaacaaggtgatggacagagaaacacctgtgggatctgaagatgtgcttagttcaccaacctgtacacaaccttgtttgcaaaatgaccaaagtaaaagtgtagttacctttgcagcttctgttgaagcctgcattggtgcaaagcaggaaagcataaaacttgccaattccccaatgcatgacaccaaga

SEQ ID NO: 187179 - DNA, 405 bp, Zea Mays
cgtgatggttcctttgtttcagcggcctcaataatcaaggacaattctgtttcggttcagttgcaaggtgatgatggtcatctgtggtggttcacgggggtgtatgggcctcatcaagacaatttgaaatctgcctttcttcaggaattaagggatatcaggaatacatgtgtggggccatggttggtggctagtgattttaatcaaatttacaagtcataagacaagaataattctaatattaacaggtctctattaggccaattcagaggtcttattggctccttggatctgaaagagatacatttgaatggtagaagatttacctggtccaatcagaggatagttcccacccttgttaagttggaccatgttttttgcactgcatgttgggaggaggctttc

SEQ ID NO: 187180 - DNA, 626 bp, Zea Mays
gttcgcaagtcattcgaccctgcaatccgggccgcctccgagagtggggccgagcaatgagttgcttactcaagttccggggaactattgcactttcgatcttgcgccggacctcactcgggcaaatgcgagcaatgctgctggtaccattgattttactcgggctggtccctccagcagtgctgccactctgcccaagtatccgagacatggattgccagctagcagtagcaatgagcagtcctcttttggagcgcttttcccgaacagaagtgctaatggaatgggtatttttacttgtcaaagttcggctaacgaaggtaaggttccagtgaatttggaggcaatgactacatgtccataatcgtagctttcctgtgatctgaccactcgcggcaatttcaacttgcaggaatagcaaatgttggtgtgcagtttcaggactcaagtgtccatggactgcagaaattgccattcaaatcgatgactcatcagcatcctacactgcctggtgatcgaatccgtgtcacctgtatgaatgttggtgggttgaacttgcaatgttgttacaacctgacttgactaccacagtatcactgtggcggtagtctttgagatggctacaa

SEQ ID NO: 187181 - DNA, 333 bp, Zea Mays
ctaaccagacgatttgcgcgtgcgcagagggtcgaagaacactagaactcgcccccgagagggaccccatcagggagtagagttctgaggcatctcaggatcgacatgtctcaccagggatgtccctagacgacgtatagtcaaagatggatgcagatttgaggttagggaaaatctaagttaggtctaaattacgcttactcctaatgcaatgaagaaaataaagtagattgattgattggttcgtttggtgatatagacaattggtcgtagtcattcatatatataaggggaggtttatactcgttcctaggcgaccccaacagaattggt

SEQ ID NO: 187182 - DNA, 360 bp, Zea Mays
atgatctgccaggagatcattcatgcctcatgctctcccctcaaaggttatctgcatgctcctttcatcatgaaattgattgaagttgttactcaaatcagatatgagaagggcaccagacatcttccttacacccctttttggatagatcccaataatcccgcaggcaggatgaaaaaggctcttgccagttctcgtgagcagacttctgctggtcccacccatcctttttccgctcatggcactcccacaccacgtggtcgtggtcgtggtcgaggtcatggtcgcggtctgggagctcgattggctcatgggattgcagcctttttctccatgtgctgggatatctctgctgatgtg

SEQ ID NO: 187183 - DNA, 436 bp, Zea Mays
gagcttcagcaccagcggcagcgacagcgatgacggggaggagtcctcggaggaggtgaccgcctacctggaacttgtagcttttctctcaccaggaattctttgccctccctccatctcctaaattggatgcgaggcctggtacttgcagctcgagacggtgcaagcggacttcgccttcttcgaccccaagccgagcgacttccatggcgccaggctgctgctcaagacgtacctcgactctaagccctgggacctcaccggcttcgctgatctcatcctcgcgcagaccactgtaggcacggttgtcaagttggccgatgacgaggaggaggaaggggaagggaacggtgttcagaaggccaattctagtactaacaatgacgacgatgatctgtttggtctcattagcgtgctcaatttgggacaacacgcc

SEQ ID NO: 187184 - DNA, 343 bp, Zea Mays
tgcgacaacgtgagtgctgtctacatggcagccaatcccgttcaccaccgccgcaccaaacacatcgagatcgatattcacttcgtccgtgagaaggttgctcttggacaagtacgcgtgcttcatgtcccatcttctcatcagttcgcggacatcatgaccaaaggcttgcctgtacagctcttcaacgagttcaaatccagtctttgcgtccgggaccctcccgctgcgactgcgggcgggtgttagacatatatggacagtacagccatatatggacagcacagccgtgtgcagccatatatggacagcactgccgtatatagactagtatagactgatt

SEQ ID NO: 187185 - DNA, 357 bp, Zea Mays
cgacgaggacctccggttcaagccttctatcgaacacctaacaaacctcgcacggacctcacctacttattcaaacatagcaccaccatcttcctaaatcgctgcaaaggacacgcaccaatcaaccatcatctcgacatcacacacgtcatccacataggcagcaaaacctagatggcctaccttaccaccggacgatcgacgcgaggcgtggtgttgacaactagctgcaagcaacgacaacacatggtttagacatttcatcgagcagctagggcacacaaatagcgagaacagcggggtctcaccaaagatcgacgacatcgtgggacagggctgctgctgttggcgtccatc

SEQ ID NO: 187186 - DNA, 330 bp, Zea Mays
tcgttgttctatttctacggagattgtggtgggcgcagcgcagggacagcggtacgtgcgtgtcctccctctccctccccacgcgcgcccctttcacctttttatactgacacttccgttctgcgatctacctgcacctgcgtacatgcatggcacacggtttgcccggtgatcactcctgcagtactctcgtgccgatccagtcccacggccacggccccgcttcttatgtatcctctgggaattcgtctgcgcacgggtgaaaagcgtggcacgcacactagccgcggtcgaaaccgaggtacagtacagtaggctcgcgcgacacac

SEQ ID NO: 187187 - DNA, 320 bp, Zea Mays
gtggtggctcctgcatctgttgtgaataactgggctgaggagttgattagattctgccctgacctaaagatacttccttactggggcccagagaggatgattcttcgaaagaacatcaaccccaagcgtttgtatcgcaggtaagttgctggctagggcagaaacttatgcgagtgccccttttcttgaaaaggctcataacctgattgcctaatcatctaacctttctctcttaactctgcagagatgctagcttccacattcttattacaaactatcagatacttgtgaatgaagagaagcttttgagacgtgttaag

SEQ ID NO: 187188 - DNA, 383 bp, Zea Mays
ctggaacaaggatagccattcacgtccacattatcatgtacaataatgaccagcgaaacgaaatcaggtggaagacctatctgccttggggatcttgggtgatggtcatctcattcagactgcacgcctcaacaacaactgctgattccacagatttagatactctgaggttgaagtaagccggatgctttggctcaggtagaaccacactctcactatttagcgcagcaactacgtcggacatggtgggccgatcgtccgcattttcttggacgcacattagtgcgatgttaatgtaccgcctagcctctgcttcatgcatctctttcgaaatggatgcttctacaagatcaagccatcttcctatctcccacaggtgccat

SEQ ID NO: 187189 - DNA, 340 bp, Zea Mays
gcaaaatcgaaagacttttccaaaagacctcgtgcacaagtcgcctacgggcgtggccggaacaacgaaggcatgcagcctcatcatacaaattatagttacatacatacagcgagggcatcacacattatattggctcaaccttcgggatgatacccatctccctgtagttgaacaacattatcctcaattcctcaccctcaaaaagatttcgcagctccccctcacctacactcgccccagccggcgaggacaacaattcccgtttgccagtcccgtccacacgaagacgaccaccctccatctcaccacgatgacgcctatcacttcgcgacaactc

SEQ ID NO: 187190 - DNA, 370 bp, Zea Mays
tgacatgccactggagaacttcaaggatgaggtgtccaaggtgttccatgttgacgtcactgacatgtcattgaagtacttccttccgaataattacagaacgctaatcacaatatcatgtgatcgagatttacaaaggatggttgattttactaccagtgccacacaagtggaagttttcttgattagtagagtagaaaacaggtatgtttttttgcaccttattgctttgtgatctaagagtcaatgcattggctgacatggtacatgcttttctcgggctgaatacccaggagtattgttacttactctggagcttctgcaagtaagcctggatctaatgctcctggtgataaaaggaaaaggccac

SEQ ID NO: 187191 - DNA, 498 bp, Zea Mays
aacaagtgcactgctcacacagagtgcatcatggcatctgtgcttgatagaaatagcatggaactgcctacccaggtcaactccagctgccggactagcacaagcatcaatagcactagagattgtaaactcatttggcttcaagccatgcatggtcatcttgatgaatgcatttgtggcaccattgcaatcaccagcttgcgcatagcaagtcaacattgcagaccatgaaacaacatctttctggtcaatcattttgaatatagaaagagcttcttcagtgctgcaaagcttagagtaagagaccataagtgcagttccaacagttggtgtacactcatagtttgtcttgatcacctgggcatgaatttggggaggaaagctggcctctgacactgtcagaattgtcgagtaggttaaatcattcggagcaacaccatcttctctcattctgctaaaaagagcagcagcaagaggtatatcaccgttctgaatgca

SEQ ID NO: 187192 - DNA, 372 bp, Zea Mays
agccgccagtgatatcaaacgccgccgccaatactcgcgaccagcgccgccgtgcggggattccgtccaaccggcgatttggtccttcgatcgggaccggggtggctccgcgacgttgtgggggtggttgtgcgcctcgtttcggttaggattggcgaaccgggagcccgaaattcctcaccgaagctccgtcaccaccaccgtaccgcccttcgtcaacatcgggtcgctacgctctccgattcctcggtaagacctccccattgagttcgcatccgtcttacctacaagtagccaccttcagaatagggattagtgtcttgcaccctcgattggcgtggatccgactccctctctgccgtggctcggcgg

SEQ ID NO: 187193 - DNA, 500 bp, Zea Mays
cggctttgtactctcaaataattttcatgtgttgtcttatgtgtattgtgccattgctaacctcactaaatgagcatgaacatcagaacatggcatacatttctttgtttcatattgttcaaattaaaccttattcctcgacatatctatactactctattaagatgacagtgtcagcgtccacaaggaaatgaccccgcctaccccaatccgcccacaaccgcgaggccccgccccgccgtaattccctcctacgctcgcgccgcggccgcggtcaccataaccctctcccctctccacgtccaccgctgcccccacccaacagccaccgtccagccccctccttgccctccatctgtgaccgcccaatctctaaggaatggatcgcgacaggccaccgctcgccatggggtgctcgtggctgtgaacgaatgccaacttgcagaaccagggctcttcgattcggtccttggcgccggatccaattcttgtcaggtgat

SEQ ID NO: 187194 - DNA, 272 bp, Zea Mays
gtagcaacaatgacacaaatggtattacaaaacaaaatattactgaaattaatgctgtgaagaaaaaatccaggtcagaattgaatttgttaaagacagataggatagctactgattctagaggcacagttggtggagttgatgataggatatctactgataaggagtgtttaagtgagcaacttcaagaaaatacccatttccagcatccgtcactcgtagaaggcaccacaaagagggaaatccgtcatgcacaaacacctatagctgcg

SEQ ID NO: 187195 - DNA, 304 bp, Zea Mays
caatgcttcacacacatagctttggtgctgatcgaaatgcatcttcaccacaatctacagactccgttattgttcttgatgatgaagtagttcgggtatctgcaatgtttgtcaaaccaaaatacaataatggaactggtagttcaaacgatagtgacatgaagcctggtgatactgctatagtatatgcctgtgagttgccagaaattaagggaaagtttgacccatctaaggctgctgcccttggccttaggcctggtcccaagtaccgtgaacttcaacttgggaattctgtgcagtctga

SEQ ID NO: 187196 - DNA, 383 bp, Zea Mays
gacataacaaggccagtgacgtgcacactggttataagatatggtattaacaataatcgcacgaagaaagtaggaataggcattgcgatcccatgacgtaagtttcatggaagcgacataccagatgattattgcagggtagaagtgacgatagtcgtccaaggatctgaggatgacatgctagacatccctgggcccgaaggaatcgagacacttggacaagccatcaaaattttcatcatttggcctcgaagggatgtcgaattggttgatccaccaacgccgtcgtcatctcatccccaaccatctccgcctcctcaaactttagtacctttacatccatcatcgcctccacaatcttcccatgctgctcctcatcatct

SEQ ID NO: 187197 - DNA, 330 bp, Zea Mays
ccgggttaaaacaccaaactttgacaacaaacgaagatagatcttgcttgagcaaagtgtcagggtgcacttcagctatcaagcaggagtcaatcagaatactttttgccgtagaaagtgcccaagcatgcaccgggatccctctgatttccaagtctaccagccctgacattatcgaagatgaggcgtgagagcatctcgtccaccgcttgaatatcaggctgaaacgaggtcctcttagaatcttgccgccattaagcacccttgaagcagtatcttcgtcaggtaaaatcagaagaaaatcctctggcttggtttgatgaatcttca

SEQ ID NO: 187198 - DNA, 508 bp, Zea Mays
caaggatttgccaaccctctccttcaacatacaaggcgagttctgcatcgacttcatcatcgcgcttgcaagctacgaggtcgtactcgggtgcaactggctatgcaccctcggccccatcgagtggaacttcgacctcctctccatggcgttttgggggcacgatcgccgtgtcaagtggacaggcatgggagtagtccctgccccacatgcgctagcactctcctccgacaacctgctgcagctactcctttcagaattcgttgatgtcttcgccgagccgacgggtctcccaccacctcgccccttcgaccactgcatccacctgctaccatcaacaccacctgtcgttgtcaggccatatcagtacccacaactactaaaagacgacattgaaaggcaatgtgctgaaatgttgcagcagggcatcattcgccctagtacatcgcccttctcagcactgatgttgctggtccgcaagaaagacaagacgtggcgattttgcgtc

SEQ ID NO: 187199 - DNA, 279 bp, Zea Mays
tccgcctatgcccaaccatggtcagtttgcggcaacacgggcaactacacggcggccagcacctaccaggacaacctcagccagctcgcggcaagccttcccaagaaagcctcttcgaacacgagtcccctcttcgccacgggtaccgcgggtgcagtgccggacctggtgtacgctcttgcactctgccgtggggacatcaacgcctccgcctgcaaggactgcgtcaccataggcttcgaggacgcgcagcagctctgcgcgttcaacaaggaagcc

SEQ ID NO: 187200 - DNA, 472 bp, Zea Mays
gacacatttgcataggattagctccgggtagcagagggatctggtgatcacagtccctgacaggaggaagactagtaggtaactaaaacactgatgagtacttgtccaataacagttgaagatctgtgggaagctctttgactagttcttgttcagatgcgggcaaggtatccaggctacatagctacaccagagcaccgtgtgtttgtgatgcctgcacgccaaaaagcttaactgaaatgccactagttgatagagatagccacttatctgcccaatgcacgaccataggactatgtgtagacaaccaatccatccccacaatcatatcataggttgggagatccaatatcttgaggtcagaggtgaaatggtatccttgaatagactaatcagctgtgagcacctctgaaacacaagacacactagcaccattcgctacttggatccataaaggagtcgagagtggaac

SEQ ID NO: 187201 - DNA, 398 bp, Zea Mays
tgtcactccagctttgaagagatcttgctgttacccttagcttcaaatccagggtttggaatggacacctgatattgtgtaccgaattccaagcagcctgtaccacttccaggaaaccttccatttttggccagaaagcctcaaaatgaaagtgtttcttcccaggtttgttcccttgaagacccagcaggagcggacaatggtcagaatcatgtgatgccatgctctggaggagaacgtttgggaaacattgctcccaagacacagagcagaacactatctagtttaactaaaacagggtttgcttgctggttggaccatgtgtactttcgcccatgtaatggaatttccttaagagcaatgtcattgattgtttgtcgaaaacgacccatcattgc

SEQ ID NO: 187202 - DNA, 844 bp, Zea Mays
tgaaatgatgtttcccgttgtgcaaattggttcacagttttctaaatggataaaagtccataacccaagcctggagcgtgcagccatgcagctgatagtgaactccgaggagatcattgaccaatgcaaaactgtaactgatgtatgtgaactcacattctcaagcaaatctccagaggttaactcaactgagactagatttggtttctcgttaggtgatgcagcaatcaccgaggcctatgtcgatccttcagagactgctttgcttggtcctattgtcttccgtccctcgaatcactgtatgtggtcaagcatggttttgatcagaaacaacctgtcgggtgtggagatgctgcctctccgggcatatggtgggcgacaatctattgtccttctagaggaatctgagcctgcttggaagctagagttcagccttgggtccaatgttcataataaatcaacgatgaccaaacaagagatcccaagctctttgtgcagtcaacagctaaccaaagagatacatgttaaaaacagcggtgaccttcctctacaagtgacaaaggttaaagtttcaggagctgattgtggtgtggatggatttaccgtggacaactgcaaaggatttagcttagcaccgagtgaatcaataagaatgctcatttcttttcaagctgacttctcttcagctatggttcagagagatcttgagttggtcatgactactggcatctttccgatccctatgactgcaacaattccggtctgcatgcttaaccagtgcagaaaatcttatctcagatctgcccactggaagctgttggtaatcttgtttggagctttagca

SEQ ID NO: 187203 - DNA, 1007 bp, Zea Mays
attcattgttgtttacccaacaagagcaaggttcagatgttaacaatgcagaaatattagacccttttgtcgagaacttgatacttgagcggttagctgttcagagtcccatgagagtgagtcctactctctctctctcatctagcacagtagcaatagtgggcagaaatgtgcactgcaggtcatgcatgtgtcctcgtcttaggggaacaagtggatctcatacttaagctccacatgtttcacacatatttgcatatatgacaatcactgccattgtgctcaaaaggaacctttcactttctagttgatgtcttgatgttcttttgaaatcactttcaactttcaaacaggtgctatttgacgtagtcccaggaataaaatttcaagatgcgatcgagcttgttggtatgcagccacttccttcaacaactgccgcttggaagaggttcataaccatctctgctgtgacattctatttgctactaatgttatattttttcttttttggtttattctttgatcctacaatatcaattagtatgtgtaatgcccctgttgcatatatatcttccatattgtctctgtgctgaatagtcaagctaccatttgtcttgctaatgttttgacgcatgttagaagatttcataatagctaatgtataaagtcaagggtattagtgcaatctcctagactagggtttccctctttgtgttactcatgcacaatcattcaattcagtccctaatatttgtgacacgtaatatattgctatacaggacaaaagaaaaggatcctttatatattgtaacttatgctggacatcatattctaatgattagtttgtttcatgtgacaggatgcatgatattgaactgatgcacatgcgatattctcttcagtcagttgcgcttgctctaggagagatggaaaagtgtacaggtgatgagaatgagtgttattatcataaagcattgtcatatctcagggagatgcaaaattttatg

SEQ ID NO: 187204 - DNA, 368 bp, Zea Mays
aaagcatgtgcatgtactaattaagctttcaagtcaaagcatccgtcttaaacatagaatagaacagaggagatggaggagcaacagataaatagaaaagggggagactagaagactggaagagcaacagaactataacgtcactgaccctggtgggcggcgaccggggaagacaggaagagccaaagaggacaaacggacaggcggcgacggcagaactggtcgactggggaagagggcagccgcagcttccacgagctctttctttcccgtcgtttccctcctctcctacgcaacagctctcgcccagtttcccttctctcacgtgcagtagcagctcccacctcccgcgtgccttttaaactttt

SEQ ID NO: 187205 - DNA, 437 bp, Zea Mays
gtctcctctggctacgtggcggccccggagccgcccacgtggaggggtcgggtgctgttcaccgcgcgactagagataaccgcgcgggcaccgtgtcttcatactgtagcaggggtacccctgattcagggtaccgacagacgcctttcccattccggtggtcgacgagctactcgacgagctccacgacgcgcgcttctttaccaagcttgacttacggtcgggttaccatcaagtgcggatgcgggctgaggatgtgcacaagaccgcgttccgtactcatgatggcctgtacgagttcctggtgatggcgttcggcctctgcaacgccccggccacatcccaggcgctcatgaacgatgttctccggccgttcctccgtcggttcatcctcgtgttctttgatgacattctaatttacagcaagacgttggccg

SEQ ID NO: 187206 - DNA, 380 bp, Zea Mays
attttagaggaaggggaaagtaaaaatgaccacttaatttatcaactagaaagtgctgatggttcaagtcattcagcttctgatcttactgtagaaacacaaaaggcagtgggtgctgttgggcctaccatgaacacaatggagtgtctggacctctcaatgggaaaagatggctgctctttttcacagaattgtgttgaaggcttcacccaaggaacaaagtctgactttttttcttcaatcaatgatgttgagacatcatatccatttgttaagggtagttcttgtcctacactaccgaatatggagcaaaaagatggtgtattggaaaatgcggaacaacctcatcttttggagatggttaatcttgatggtacaag

SEQ ID NO: 187207 - DNA, 575 bp, Zea Mays
gccgaagcgtcagccatcgttccttgataatatctatttccgcttcttatcatctgcgacctcaacgaacaacgtggcaagcgaggcaagcgcggtggtagaacctccgacaacaacagcagcgtcatcattggccctgcaccatcctccaactacaactactacaacccttggatggggccatctacatgtggcctggccaacgtccaccttcggctcctcgtccgcctgctgcatcgcccccaccaccacatgccctcgtcgccggggctcctagccagtgggcagttcttgctgcggcatatgggccgccccttgcctacaccgtcccttcttcgcccgcacctgtctaggatcaacacaccctctgtctaggatcaacacaccctcgccgccaacttccaaatagtcactcttcagcaaccacctcaacaagaatggcattttgatactggtgcctccagtcacatgacatctgatgctggtataatatctcacccctcttcttcccagcatcttcctgcccatattatcgttggtaatggtcatctcattcctgtcacctccactggcac

SEQ ID NO: 187208 - DNA, 345 bp, Zea Mays
gtgctttcactgatgagtctatatatgtgaacttcacgagtctgaccaatcctgtggcatctgtcctgtgcttgttggtccattgcagggttccagtcactgtcatagaagataacagtgtctgcacctacaaggttgattcccacaccaccactacgtgtggacaaaatgaaaaggaaaaactttggatttgtgttgaacctctgcattagagtctgcctctcttctgggggagtagaaccatctaatcgcaaatatgtatacccatataaatttatgaactcttccaagacgtcaagcatcttagtcatctgagtaaatatcaaggccctgtggccttctgat

SEQ ID NO: 187209 - DNA, 503 bp, Zea Mays
gggagaggaggcgccacacccagacgagaggcttcccgagtccaccgccagcacgagtccaccgccggcactttgactcggagccggagattcttgcgaggaactggcagggatctgctgcccatccgcatatcgtaattcatgatctctatctctatgcgttttagattttgactagcattttctgattccgtgttcttttttttttattgcggatacactgatgcgcacatgtccgatgtatcctcccccgatctcaatctagatgctgcaacagtagttcactcgtcggaggaaggcgcatcacacgaactaggtggaaggaaccggacggagcttggagagggcaagcgggcaaggggagtgagtagtggttctcggtgtcttctttaaccactctgtccgatccgctggtgtgtctgcgcgatcctgttgacgaatcaatcgccggtaaactcagcttccttccccacttcatactctctcagacgataggtttcttg

SEQ ID NO: 187210 - DNA, 357 bp, Zea Mays
ttccacccctttttgcccaattccaaattcctgtcaaatccagtaaatccaaatggtggaatgtgttccaatgtgcccattgagtatccctgcaggtttctagctccctttgggagggtttcacaacctaaattgactcaatctcccaaaacctaattcaccgcacgccaagtgttcggtgaaatgcccaaaccagccaaaaatgctccaattgaacccaaatttttcaggcaccttcacaacacttccagtaacatacttgccaaatttcacgccaatccgagattccaggcttaaatttcaccaaattccccgtttcgagcgatcgtttccgagccgagtgcccaaatctctttt

SEQ ID NO: 187211 - DNA, 342 bp, Zea Mays
gagaccaggacgggaggtggagacacgtcagtggtggaaggccagagcgtgtagagaggcctcgagttgtcacagcgggcgaggggggtctcggtggccagatccttcacaaaaaaccagaggggtcaaactcaatggaacaagagttgttgatggtgaaccgacgaatagaaagaagactatgagtgatatgtggggctacgagaacgtcgttgagatagaacggcccagggagaaccaaggcacctactgaggtgatcgacagagtgcaaccgtttcctacaacgatcgaggagggatgtgaggaatggaggggattggagcgagagaacatgtctgttg

SEQ ID NO: 187212 - DNA, 397 bp, Zea Mays
tgtatatatatattttaaaaaccaaacatatatgtatctgtcccgacttcgtttttcagggcacagagatatgcacgcttcttcatgtatccctaatgtgtggcccatcaggcccattaggcgagcggacacaactgccttccgtggcatgttgaggtcttggctaatcgagtaatcgtggggccacgtagtggcggcgcaggggactgcaggagcagaccagccgggagggagctagcaaggagcgtcatggcctattggcctgtgcgcgtgcgtggaggtcgacgcttgctgtcctgtgccggtgtcactcgatttcaaagctggaagccttgaaggattggaaggttgttttgcaatacgtaagattgtctatgatatttaatatcctctatat

SEQ ID NO: 187213 - DNA, 295 bp, Zea Mays
gcaggcttatcaactggactgaaagtcttgaagaaatcaatgcctggacgctgggtgaagcctcgaagaacccaacgcgctttgtaacgctcaagggaaccgtcagcagtgaacttgtgcttgaaaacccatttgctagtgacaatgttggagtgtgaaggacgggggacgaggtcccaagtcttgttatcaaggagcgctgagtactcctgttccatggttgtccgccaattgggatcggcaagaacagcacgataactccgaggcactggtgagagcacagaagcttcaaaca

SEQ ID NO: 187214 - DNA, 520 bp, Zea Mays
ctattctaacttttggtctcactggttatccatactcggagtttgaactgatggctgaggagcttcttatgagtgactcaataattaaggtaatttttccctgtttgtttcttgtgatattcaattattcacctactttgtatctgctttatatgtacaaattattgcgctttaacttgatttctcccccaggtgttcggtgctttgagaatgtctgtaaagatgctcctaatgtggaactccagaatggaaattgatggcggtggagattcgatagttgcaacttctttgttagatgctagcaacctgatagttctgaaggtttcttgttggtccaatattaattactgtttttatctgcttgtctcagtatgcataagtatttctcatatgtttccaggaatcatctgtgatacactctaatgctaatcttggagtccgtggccaaggtgtcctgaatttgtctggggacggagacacaattgaggcacaacgccttattctatcgctgttctacagc

SEQ ID NO: 187215 - DNA, 323 bp, Zea Mays
gacatcgatgatagcgatatgctcgtgaacgaagtggaggtcgatatccacgtgcttcgtgagctgatgttgcgtgagattggtggagaggtagaccgtttgacgttgttgtagtatacgagggtggagcgtgctgtgaagctcatgaagaagctgacggtgccaggaagcctcggccacgccattcgccacaatgcgatactcgacctcagtgttggagctggaaacgacgggctgccgcttcgaggaccaggagacgaggttggtgcttaggaacacaacatatagacagtggttgtcagtagtgaagtgatgaaccgaga

SEQ ID NO: 187216 - DNA, 809 bp, Zea Mays
ttctaattacaatatattttagtcacagacatgtatcattcttttggctcaggtacgagcttctctttttcccaagatatcatcttgattatagctctttactctaccgaaaaccactgcttggaaggccaattgtcatggatgttttccaggattatatattagttacttacagtccatttgatgtacatatcttccatgtgatgatctcaggagaattatcgccttctagcaatccagttttacaggtaatgtccatcgtgaaagaaatttgcaaccccaattcataatgtgtttccaatttttctctgtgaatagttattttattctttgtccggatgaacagctttcaacagtgcgagaactttcaatcatgagtccaaagagtccacctgtttcaatgcgcttcattcctgaacaaaatgacaaagaagtgctgaagcgagatactaatgaatcttatgatcttttgtcccagcaaccatcaaggtactttcgccccataatgttacacaatccttttctcctttgtttttattgttttttttatttatgatatcagatgtttgatcttgcggaccaatggggagctttctgtgcttgacatggacgatggacatgaacacgctcttacaaattcaattgaactcttttgggtcacctgttcccagtttgaagagaagggtagtcttatcaaagaggtttcatggcttgactatggtcatcagggtatgcaggttagattgatcttattattgtgtacataatcacttcaccatagatgcctctttgaggacatagctactttt

SEQ ID NO: 187217 - DNA, 696 bp, Zea Mays
gtaagattgtcctgatgcgggccgtaaactccagtaaaccaccattgcattccagattcctcctgaagctgaatggagactgagaaatcatgcacaatactgctggcggaggaaagagctccatcccgccaggccaccaggatgccccccttgtcccatgagtaggacagaagacaaaattaccatagccaacacccagaatagataggacatcaaaagcagagatggaactcagcttagtttcctgcaaacagactgacaaaggcttggaactaaggacctcagacttcacacagtctcttctaggcctatcattcagacctctaacattccaaattagaaaatttgactgattcatgactaacaatatagaagaatacgaccaaacagcatcaggctgagacctggatctctaccagcacttcccagccgatcaaagctgccatagcctccacatgtgatttggaaaggccattctcgaataatttggcataactagcggcattttccaaggagatttcctcatggtcaccgtagtaccccaaatgtctgcacaccttggcaactgagacgtttccgaggacaggaggaagcttagccacccttctactcctcctaggcatgaagtccttcggcagggtcttcttctttctcaaattgcacctaggtggcgagagcagcccgttaatcggtttg

SEQ ID NO: 187218 - DNA, 408 bp, Zea Mays
taggaggggtgtagtttcagggcccaagccgctacagtgacgctggtactgtagcatacccctcagataggttagataaagataagactagtttggattttggaataagatgataattagagataagattagatctagtgcttaaaggtcaagtaaccatctctatataaggagaaagattgtatcaattgaaggtaagcaagactgcaagagattagaaggaaatctcttctctcttgccggtcgtgggcaaagccctgcaaccggcctcccctgcgtcccatccttactcgttgtgccacatccccggtaggatccgcaatcctatcaacccacctgatcctgatcctaacatcgttttccatcttctccttggtttgttgcctcataatgtcaattgtgaatcat

SEQ ID NO: 187219 - DNA, 1177 bp, Zea Mays
tgtatcggagaattggaacctgctagttggagagatacttgttggctacctgagatctcacatgccaatgtgtccacacttgctagtgaggaaatagataacatgcttttccaggttggtgattttcatccaggagagagtgagcagcttgagctttacatgataacattgatacagtgggatctaggtccagtagaattttacaaatcaaactgtaggtgccctgctgcagaactgatagggtggtgctgattctagtttgttcatacaatctgtttatgttatgctgaaagctagtttcttctttatcatgaggtactacttggcccaacagtcatggaatttctgggatctttagtcaccaagatacaattcatggtcatgcggttgtttggggacaagcaaccatttgtgggggtggaaaggatatatggcaacacaggttaaagtcgtgttttaaaatggaaatgcatgctacagtcctgggtgtcaatgatgtattgcagcatatcagtgcttgttctctattcctgcagcttggtcgcagaaaactatatagggtggtgatgacttctgttctaaggcccagagatttgctgctgaagagctatacaacattcttgaccaagtcgatgaactattgttgcttcctgaccaaaagctcgggagaccatggtgtgacactgatctaatatgtgaaccgattctgtcttggagactcaatggtggcagcccaagcaaatgtttgttgcaactcaagacatacatagtcagacagtgggatccaggaatttctgggatctttagtcatcgagatacaattcaaggtcatgcggttgcttggggacaagcaacattttgtgagggtggaaatgtaacatccatgaatagcaacatgtccagggctttagctgacaagcgggccacccacccatgggacccaggtggaagaccagatgctgggtataagttccaagagtctgtatgggggaaggcaagaaagaaaatacaaaaaaatagtcgtcttcttcctcgtgaaggacggtctaggtgagattgtcctcttgtcgagatcctcacgtcccggtcctcaccacgggtggccacggggtgtgacatgatactaggagatgtaacggagcaaagaattctgagaggagccaaagatgaggataag

SEQ ID NO: 187220 - DNA, 556 bp, Zea Mays
gtctcacagagtcacagtatacaccattagccatcacttgtcagtaagagctctgagcaaccatggcggagatagtcaccggggcgatgggcactctcctgcccaagctggccaacctcatcaaggaggagtataacctacagaagaaagtgaggggtgagatcatgttcctggagactgagctcaagagcatggaggctgctctcatcaaggtctccgaggcacccatcgaccacccacctgacgtccaagtcaagctctggacaagggaggtgagagagctgtcctacgacctcgaggacagcatcgacagattcatggtgcgagttggcgatggcaagccacatagtttcaagggattcattgatagaagcctccacctgctgacaaggggcaggattcaacacagcatcggcatagacatcaaggagatcaggagccgcataaaggatgtgagtgaacggcgtgacaggtacaaggttgatctggttccttccaagcctgttggcagaagcattgacaacctgcggctgtcggctctttacagaaaggcgac

SEQ ID NO: 187221 - DNA, 390 bp, Zea Mays
gtcaccgctctctgtgatgagttgagcaaattaaacatggaagtagtttcctcgggcactctggactacatttcagttgagccgaccttgcaggatcaaatcatcatggcataactcaatgataagggagtacaaatcatcaaggagatgctcacacagaaggtggagaagtataagtgctttcgccaagacagtaagggtgtattatggtttgaggaccgacttgttgttcccaaggatcaggaacttaggaagaaaattttggacgaggctcgtctctccaagttctccatgcaccctggaagcaacaagatgtatcatgaccttagatccttgtattggtggacgaggatgaaaagggagattgctaagtacgtgtctgaatgcgac

SEQ ID NO: 187222 - DNA, 278 bp, Zea Mays
cttaaccatgagcagaagagctaaccgaaccaatagagttatgatgaattgcacaatctatctatctccacctaacatcaaacaaacttttgacctacatcatgtagtctatctcatccatgtctatcttaaccatactcccccaaccctgataatatacactaacgtcgaatcaatgagaccaagactgaagaaggaagagatcaacctcatcaaatcaagggaggataagattcaagccaggtctttaaaggaatcaagatccactatccatgatg

SEQ ID NO: 187223 - DNA, 591 bp, Zea Mays
cttaggaactgttagactttagactccagtactccacaacctaaatagatgataattgatatgaattcaaaacagaggatgtgctatgctactctccagttctccactgtccacacacggcacttccgcacttgtccagaacaccaagtctccagcacttgtccagcaagataacacttggcttggcacacagtagcacactagcacggtagcaccactgcagtctgcaccagcacacttcacaccactctccagcacttggaacacacggacacaccactacacatctacaggctacagcagtgaccagtctacagagggaaacaatctcatctctcatgtagagacacagccataccatacagccgctagtctgccaccaacgaaggagacacagggacagacagacaatcaccaataagccagacatgcaccacagtccacagctcactgttgtgttgcttaagacttggaagtggaagtaacctcagttctttttcctttgccaccatttccaaattcttcaattagctctgcaattaaaggagtggaaccatgcagctatcaattagaaatgattaaacatcaaat

SEQ ID NO: 187224 - DNA, 484 bp, Zea Mays
gtcaaatggctgctacgatgagcttcacgggtatacagagctgcgaaaacaacactcgagagatgcagagccttaccagagtggtccggccatggagcgcggagacttgtgctcgctagtgacagagaaaggggaaaatggcgtcacgacggctctgggtggaattgggaggtgggattggggctacacggtcgtaaggaactatagtttcaccgtgcacacttaatttgggaagaggtggcagaggcagtgcgaattttgggctgcaatcaaactcactggtggagatgtgaacacctcgccgtggaccatggtgctatttatagccacggcggtccagctaacgatcagcgaccgtggaaggctttgttcacgcatggcaaccacgtatagaagaggcacagtaagggaaatcgaggcatgggtgacaccgcggcagaaatgaccgagccacagcgatcgccggtgggatatctccggccac

SEQ ID NO: 187225 - DNA, 341 bp, Zea Mays
gctctcacaacccgacaatggccttgccctatgagaccgaggggcatctgaacacagagatgcccgtcgacagaacaatgacatcgcccgtcttacttgcttagcatctgctgcactgctgtataaaaatatcaactactcccaacaaagttgctccaggccggtgtgcaaggaagtcgtagaaactagaccctcgtcttcgcagcagagcagactccagagggtagagccatggcagacagctccgatcaagttcctcccgctgcaagaaagtaagaaacactgctagttacctcccgtattatcctgtcatagggctagttcggaaacaccatttttta

SEQ ID NO: 187226 - DNA, 411 bp, Zea Mays
gtccaattttacgaggttgtgctggtggccggagggaaacagggatactggtgcatgggatgggtggctttcaccgtggcgcttccttcggcgatcaccggatcccataacacaactaattgcgacgtggtacagagtctggacacgcggcgcacgacagtgatcaaccaatggcagcgagctcttatccgatcgaccgatgatcaagggggtacgacgggcttagccgcaaccgagctcgagtcgatcctatgccaagatttttacttgcccgtgcctatctgctgaccacggtgcatgaatcgcgacgagcaatcaaccatcccagcgacggatcactggcgacgaggaggggggggggtgaaccgcgatctgtttcaatttggggtgcactgtaccatggaatgcttc

SEQ ID NO: 187227 - DNA, 533 bp, Zea Mays
cgaaatcaccggcgccgacgggctcgctctggtcttcttccttgcctacgccgctgtcaacgtcaagcagcacgtgccgatcgacctcagccttgagcgccccaactactccaagtggaaggctttcttcaccgctctctacggcaagtacgggctgctcggccatatcaacggcacggtggctgcgcgccctcaagatcccacgtggtctcagcctgacgcgtgtgttcgtgggtggatgtacaattccgctgccgacgttgtccttcacctcgtcatggagcccgatcaggacgcctgcgccctgtacgtctccattgaggccctattccaggcaaacaaggagtctcgcgccgtcgtcctcgagcaggagttccacaacctgtcccagggcgatctctccatcgacgcctacgcccagcagatgaagcgcaccgctgatgcgctccgggaggtcggccacactgtctcccccgcgcagctcgttctcaatcttctgcgcggtctcaaccctcgcttcgccaacaccgtcg

SEQ ID NO: 187228 - DNA, 438 bp, Zea Mays
cagaactgtcggatgagcagtctacctctcagccttcaggtagcgtgcctccttggtttacacgtgcccatttagccatttggcaggtagtttaatctctgcttgttgatgcttgtttgtgaaggaccaaacaaccaagaagtgcaagcaaagaagggaaagccgagggagaaggtcactacttaacagccttcttgagcatacttgtttctttacataccacacatgagtcatcgttcaagctttggcattaatttttttgcagggtccattgaagctcactaatgccgatggtggcaacaagatatctgctcagaaggaaaagaggagtaggcaacggccgcgagagcggatgaagatcgagaagatcaggccttcgccacctgcaggttcatcaagtgttgataccagtgctagtgaaccagaagtcactccgat

SEQ ID NO: 187229 - DNA, 543 bp, Zea Mays
ggccattagctccctccagaaggccgacgtgaagacggggtcgcggtccgagacgatggactgcgggatgccgtgcagcctcaccacctcggcgcagaatgcttgcgccaccaactccgccgtgtatgggtgcgccagtgggatgaagtggcagtacttgctgaaacggtcgacgacagtgagaatgaccgtcttgccttgcacgcggggcagagcttcgatgaagtctatgccgatgtccgaccacaccccatctgggatcggcaggggctgtaggagaccaaccggacataggtgatctgacttgtatgtttggcacgttccgcacgccctgacgaattcctgcacaatacgacgcatgttgggaaaatgaaagtcgcgccgtagtcgatgcagggtgcggtggacgccttcgtggccgtcatcgtgtacagtggccacgatctcccgtagtaggggtgaagtggctgggatatagaggcgcccctccatggcgaccatcccaccgatgatggaccatggtgctgcgcgcgtgcctgcgcg

SEQ ID NO: 187230 - DNA, 873 bp, Zea Mays
aggaggctgccacacaggctgcgccacggcgtgccatcaggtattcttattgttgagttgaagttttattgtcaagttgaagttttaagtaaatgattttcattgttaaataacaaactttcatttgtaggtttcgtcggtccctcacattgaagccttctaaacccttcgatcagcggagggttattgaaccgaaaggcaccagggcgtggaaggaggttagttgggacgggacagggcatcgcacaccaatcctcacagagttggggatttgtttgcgattcgcctacccggcgatggtgacagagggcggtcaagagatagctgctcattactgggctcattgggatctcaagccgtacgggaacgacgggacacacacaagcaaagtgtgggatttgttttgggtaagtcccttgtgatattcaaattgaattcagattttgcatttgtaagtctctggtgatcttcaaatttgcagggccaatttcgcgtgtgcgacccctataccttggatgattcatatgtgcgtgaggtattcaatggctcaacagatagagctgtaaagggtatgatgtataaagcacgattgagggccgtcacggtgtaccaaaagcgtcaagggaactattgtgacgcgaatatggcaaaggaaattcacctggcggctcagcagtacaaagagagtgatgtggattggttgagccaccattcggatgcttgggcgtggatgtgcgagtattgggcttctgaggagttcttggccatatctaatagaaattgtatgaatcggttgagcaagccaggggtccacttcttcggggcagatggacacgttggcaaggccgcacgtatggtgtgtgtcaaattgcc

SEQ ID NO: 187231 - DNA, 351 bp, Zea Mays
gacgactggatctggcctcgtctagaagtagtaggcaccgatgtggtccctagtcttcccagacttgaccaacacgaagaagtagcggaagagagaagtacaaggggccacacctacgaacatctcgcagaggtggacgaagatggctgcctggaggacggagtggggcgtgaggtgttgaagctgaagcccgaactcctccagcagcagcagaaacgagggcaaagttggcagcgccaacccgcatgagatgtaggaggtgaacagcacgaactccccggcggagagatcgccgaggggggtagcgccagcacagattctcccgacgagccctggcgcgctccacccaag

SEQ ID NO: 187232 - DNA, 685 bp, Zea Mays
ttttcctgaaaatacctgaagcacgcaaacagttgctaatgtctgagctggatagagtggctcaggttcaattctaatttttatgctgacatttatgagttattgtgacccatgagtcctgagtgcaactatcctttcttgtcctttcatgtatgcaattccatataagtttttttaatgaaataacaggactacaagatccatcgcgatgagattcacagtaaacttgtccagatcatgagagagaggctgcttgcaaatcttagaaaattaccccaaattgtggaaggctggaatgccccacaggataatgatgtgcagccgagtcaatttgctaaagctgttacaaaggtactaatgtttatctgattatcaatggcaatttatcttgttttagtttatttacaaattcctacctgtgcttatttgaagttatgaaacatagttgttttaaatgtcatttattttgttgcttggttacgaagttgtagtctttggtctctttaacaagatcattgttagcatcatttatccctcagaactcaagcaagggatatgttttcattagtttaggattttaggtgtttactttcttgagttaattgttctgagatttgtatgcaaataatttgcaggaagttacctatttgcaccgtatcctttctcaaacactgcttgaggttga

SEQ ID NO: 187233 - DNA, 664 bp, Zea Mays
gcccgcctggtgtcgaaggaggcgatccatgtgatgtcacaacgtcggggggtggctggtcatcactcgagtgagatggagtgaccacgggtggcgaggaggaagtcccacctgcaacaacagtagagcaaggcaccgaaaccatatcgtcgtcaaggagaaagtcatgggaggcgtgggaggaggcatctgaggtggctgcaaagggaaaagtgggtctcgtcgaatatgacatggcgagagatgatgatgcgacgtgtcgataggtcgaggcagcggtaacctttgtgcgaggggggatatccgaggaagacgcatgccgtggagcgagggacgagcttatgtttggaggttgcttgcatgttggggtaacagaggcacccaaaaacacgcagatggttataggttggcggttgattatgcagacgagtgtatggaatgtcatgctgaatggaggaggatgggcgcctattatggaggtagcaggtcgtcaggagtccctcggcccaatatgcgaggggtagggaggcatggagaagcatggtgcgaatggaattgttgagtgtgtggatgatgcgttcggctttgccattttggggtgatgtgtagggacaggaggagcggaggtgagtgccttgagcagcgaagaatttggtggtggcag

SEQ ID NO: 187234 - DNA, 496 bp, Zea Mays
ctcctcgaaccggggcaccaaaacgactctgcagagcatcacatcgacgaccagcgtgggggtgggcgcagccgtgcatggaatcagtgtgcagcgtcgttgtccacctaaatatagtatgggaagaatcggtcgcgccaaccacgcatcctggtgacctcctctgacgggggaattggccggagtgccggcaattgctcaccagatttcaagaaattgcctcggaccgcccttcatcgtcggcgtagcggcctgctacttattccacggtgagttacccttagatcgattcgccttgctctcctcttcgcgtgggtccggatagttctgtaggagtgaagaccgtaccgccaggccacctatctcgacgaaagcgccgccgtgacatcaccctccgctgtcgtgcctcggtaccgatggggggaagatagggcttctgtcgtccgttgccagatgtgtggcggggaataggcggggagcatacctcttcggtcac

SEQ ID NO: 187235 - DNA, 381 bp, Zea Mays
aatattaccttgtgattcttgatgatggctctcattacatgtggatttttctgttgcgcttgaagtccgatatgtccccccatgctttctcatttctttgcctgggtgtccactcagttcggtagcacctgccaagccattcagtgtgataactggacagactttgacaacttttctcgtgccatcttcctcaatcgtggcgtccatattcagatgtcatgcccctacacttctccctagaacagcaaggctgagcgcatgattcgcactaccaacaacatcatacgcttcctgctcttacaagtctcgattcatgttcggttctaggctaaggctctctacattgccaactacctgcttaatcgtctgcctattgaggcg

SEQ ID NO: 187236 - DNA, 503 bp, Zea Mays
gttgtcagagtagaccagagtggtgcggcgcagaggagcttgcagttcttggagtaactggcgcaaccaggtggcgtcagcgacggctttcgccacacctcagtattcagcctcggcgctggatggggagaccgtgtttaacgctcaaaggactaggagatgagactgtcacccaagaacacggcgaagcccgaggtagacttgtgtgtatcaggacaacttgcccaatcaacatcgtagtaaacctctagctcggtctgtgtacaaggtcggatcaacaagccgagacgtagagtgtcatgaacgtaacgaacgatgcgcttcagagcagctagatgaggctcacgaggatcatgcatatgaagacagatctgctgaactacataggcgatggcagacctggtgaagatgaggtaatggagagccctgccaggctatggaaatccacagggtcagccactggatcaccaacagtaccaggcaactttggattgacattaacg

SEQ ID NO: 187237 - DNA, 461 bp, Zea Mays
ctttttgcttgtgttatgtgcctcttgtggatcgcgagcgctctaagttgaatgcacagtctactaagtgcatcttccttgggtacagtgttgagcataagggttatgttgttgggattcggttgctcgtcggaagaggatttctcggaatgttgtctttattgagattcgtcctttctatcctagtccgtctacatgtctgatctttggttgatcctctgtcttccctttcctgtctatgaacgactctgctacagcattgtgtctgtctcccacctaccactattgtgccttctcctcaatgtgccctcgtctgttgcgcctcctcctatgcccctctatgacttattcatagacttttgttctgattcctgactacattgtcaaacctcctgcgacaaaggtctatacacgaagacgtccttttgactactccatcggcttcctctggtgtgtcctct

SEQ ID NO: 187238 - DNA, 483 bp, Zea Mays
atcacagatcaaagaagaatcatctttgtaggttttatttagcccagaaacttatcatcgtcgaactaaaaaatcaaggcaaacaattctgctccaaaaaagttaagttgtgtttcgtttgctgttcagttgtgtttccttcatcacttaggagcctttagttagctgctcaaacaaaatctgcaaaatcctaagactctgtagaagtattctaaacatacttccacttaaaaatagtgcatatctaatttgatcccaaaaaagtagcacaccagacattaaaacccagtccgcatgatggcacgatgccaagaaagcacaaactgcaattgataggaagtcatcaaacaaatccacaatgattgtttgccatgggtaggcatcctcaaaaaatgagggtgtgtaacaatgtgagcgcccacccaaaaaccattgtgacaaacacccattggaaaagtccgaggaacaatagaaaagccccat

SEQ ID NO: 187239 - DNA, 489 bp, Zea Mays
caaagcgaaggctgacattgcaccaaacaacaatgtttatacttcaacatattcttttgcctcggagaagcctctgcaacataacaagccaaatgaaaatgttctgcatcaagagaaaccagaggaaatgcctttgcatcaagatagctccgaaaagctgatggagaagccaattgaaaagcatattgacaaacttatggaagaacctgctgaccagataattgaaaaatcaattgaactacctactcaaaagataactgaaacaccaactgatgagccagctgaaaaaataaatgaaacaccaactggagaaccagctgaaaaaataatagaggcggcatctgaaaatacagaagggacaataaaaaatgcaaccgaagagacacatgaaatggcagttgaggaactaattgaagagccagaagaaactatttctgtttcatcaactgggctaaagcagggggaaaacacctcacttgttgaaggaag

SEQ ID NO: 187240 - DNA, 520 bp, Zea Mays
ctcttgggtcagaggattgcagacttggcccctcatgtttttagtttggttcctaaaaggctggtgaagagaaggacagtggctgacgctctgtgtagctcttcatggattggggatttaaggagagtagtaacgtgggaggtcattgttgacttcatcattctggcagatgttgtggctgatgttgatcttcaaccgggagttccagataaacattactggaggttcttttccaatggtatttatccggccaaatctgctcatgagataatgttctgcggctctacctccctggcgggctttgaaagagtgtggaccacctggacgccgcctaagtgtcagtttttcctctggttggtcttacataacaagcgttggacggctatctggctcgctaagaagggacttccccatcctagtacttgccccttatgtgaccagaaaggggagtctattcatcacttgcttgtttcctgtgttttcgcgaggcaattttggtttctccttctccaacatgtcg

SEQ ID NO: 187241 - DNA, 653 bp, Zea Mays
gcatgttcttgcagcggccgcctcttctgtgacttggcatcgtcgtctcggccaccctgggtgtgatgtgatgtccaagctctacagtagtacctctgtttctggttgtaggggatcttttgagcacctctgtcatgcttgtcagttaggtcgccatgttaggctcccattcccccacctcctcttctagggcagtaggcattttttatctgatacactgtgatatatggacatcccctgtaatcagcatttctggctataagtattatttacttattctcgatgacttctcgcactatttgtggacttttcctttacgtcagaagtcagacacttatcccaccctgtctcacttcttcgcttgggtatccactcagttcggtcgcaccatccggagtgtccagtgtgacaacgagcgcgagttctataacaatgtgtccagtgactttttcctctctcgcgacgtccacctctgtatgtcgtgcccctacacgtctcctcggaacggtagggctgagcgcatgatttgcacagcgaacgatgtcatgcgctctctgctctttcaggcttcccttcctactcacttctgggctgaggccctcaccactgccacctacctcctcaattgtcttcccaccaaggtggttgcccac

SEQ ID NO: 187242 - DNA, 926 bp, Zea Mays
aaccgcatcagacttgtttggtcaagtatatggcatgtcttgtctgatttttttgtcaccattggctgctcagaaaatctttcaatcgcaatatttgctatggactccttgcggcagttatctatgaagttcctggagcgtgaggagctcacaaactacaatttccaaaatgaatttatgaagccttttgttgttgtaatgaggaagagccgagctgttgagatcagagaacttatcattaggtgtgtctctcaaatggtattggcccgtgttagtcatgtgaagtcagggtggaagagtatgtttatggtatgacaccttcactcatgtaccataactcttatctaaagacctctgcaacattcttgttttcagtcctgaacatggattgccggtttacatctttcaggtctttgcgacagcgtcatatgatgatcacaaaaatattgtactattggcctttgaaattatagaaaagattttgcgggaatactttccatacattactgagactgagacaacgactttcaacgattgtgtgaattgtcttatcgcgtttactaacagcaggtttaacaaggatataagtcttaatgcaattggatttcttcgattctgcgcagcaaagttggccgaaggtgatattggatcctcaaggttgaaggacaatccttcaaacagtaatccaccctcgcctcatttgactaatgatggaaagcaggaatgcacagttcttgttgacaaggaagaccatatacacttttggtttcctttactagcgggtaattatgtattttttctttttgtttctatggctattttctgctgtatgctgttgaaattattatatttccagagcatgtggtaatgttagcttttatatgaaaactttgcaggactgtctgaacttacctttgacttaagac

SEQ ID NO: 187243 - DNA, 578 bp, Zea Mays
cgaatttttcgggttcgggtttgggtagcccgttctacccagttttagaccactgactcaggttcactgtagtccattccattagcaaacaatgcaatatttaatataaataattaaatatacaacaaaaacatgcatcacaactgtacaataaacatttaggggttcaaaacttttcacatagcaaaagaccaaaagtgtagcacatcagtttctgtatttccgagaaagaccaaacatcacagtctcagactctcatacagtcgtacaaattacaatcatactcattatcagtttaccgtaaagcacaaaggcacaaaccagaatcgacaactagccaagcagcaagcacgcgtccacaatccacacaaagtcacacgcgtcctgtaatcctgtcctccacagtccacaactccacaggcgccagccagtgaggcaacccaacaaggtggcacgtcaggtgaacagcaaggtagcagcacaccacacacggccacacaacaaggcagcacccagcaacacacgatcacatgtccagttctccactcagtccactgtccataccaccaccagcaacc

SEQ ID NO: 187244 - DNA, 489 bp, Zea Mays
tgggccgccactacgcaacaatcctctcagcgaactggcacgccttcccttccgcacgtcagtgggtgactaccaggagaggttttgggacctgctagcctaaacaactcctttgtctcaggagcagaaggtacaactatttattgctggactgtcggagcgtatcaagatcgacgtggaactcatggcaccacgtgatctcaatctcaccctgagtttggcgcgcgcatacgaacgaaggacacaggcgctcgacacccacccgacaccaaactccaacaagcaccagcaacgtccacctcagcatccgtcagtaccagtgccggcaccgcaaccagctataactgcagcactcggcacaatacaacaacgaccattcaagaagctgacacctgccgagatgactgagtgttgttgccaaggactttgttacaattgtgatgaacaatatatccgcagtcatcggtgccctcggctcttttacttaga

SEQ ID NO: 187245 - DNA, 325 bp, Zea Mays
tccatcagtcggcttcctacagcgttgcctgtgtttcttgcttttctttttgctcttccttcttgatggccttgcattatcactcggcttggtaaagctgttgactaagaaatctgaatcagacatgctattggatgttgtgggcttatcttccagtagccttgatgaattatcctgccatcttctgtgagatacatcttgagcattaaggtgcaggaacaaaatcgatggtgaggacgatgtttcagggttctcttctggagatgtaggtcgagatgaaggatcctcacttgcactctcggtgagcgatagtgatttgaagtcg

SEQ ID NO: 187246 - DNA, 402 bp, Zea Mays
gtttccttggacggaggagtcctcggacgaaggcttagattattttgttgcgttagatgtggctgcagcggagccttcgctgcgcgtggtgggttccgaggggctcccaggtgcgagtactatgtataggcggcgaagggcggtggcgaaatggagagtgagtgaatttccgcgaagtggtaggcgtcatcgtagtgagatggagagtggtcgtcttcgcgtggacgggactagtaaacgggaattgttgtcctcgccgattggggcgagtgtaggtgaggggagctacgaaatctttttgagggtgaggaattgaggataatgttgttcaactacagggagatgggtatcatcccgaaggttgagccaatgtaatatatgatgccctcgctgtgtgtatgt

SEQ ID NO: 187247 - DNA, 388 bp, Zea Mays
cagtcccacctctctgatccagcgggtggtgctgacaagggcctccacgacgccatcctccttcacgaggctgctgcgatcatcaacctccactcccaggccgtcgctgtgcaaaacatccggagtctcgttcacgtcgtcctcgacctcgccaacaacagctacacccgctggcgcgatgagttccttctcgtcactggcaaatactccctggacagccgcatcctcgacgacactcccgcgcctcacttccccgactgggcacgcatggactgcgttgtcaagtcctggatctccggctccatctccccggaccttgctgaaatggccatggaacgcggcgccactgcccgcaccacttggctgactctcgagaaccaatttctcg

SEQ ID NO: 187248 - DNA, 295 bp, Zea Mays
gaaaaaggtgccttacaaccttaacctatgtttggacagatctcttatgtaatttggctaaatttcacatggtctttattttattttgagaaacaatgtggcataataaagtgtagtgttttacttgagtggacataaacaccatctatgtatgccttggatagaggggattataggaaacctagtatcacaaaaggtcattagctagcccaatgatgtcttcatccactagttgtactctaatactcactcatgtgaatacaatgcagtcaatatcatagaaacgtcatttgag

SEQ ID NO: 187249 - DNA, 433 bp, Zea Mays
ccggtctctggcttcgcgtcccaaggatgaattacgcccatctctcaggaatgggctagatctcccacccccaaatgcaccaagcccctgagacagtccctgattggcatgtccataggagccattactttgatcaccatcattcacaaaatccaaaggaagaccagactgtgaattggaatcattcggtcggaaggcaatggaaaaactaatagtgattgggtagctcagagccatagtttctccaacattgccctcaacaacctgaacagactcaacaatccacaagtcacgtgaagcaggaatagtagacggatcagtacaccaagcagagcatcgaaagcaggacaaatcttgcagtgccaaggtctcctggtgcacctgatgaatccaagcataggggctaagaatatgttccactgtactagtttcc

SEQ ID NO: 187250 - DNA, 336 bp, Zea Mays
cgaggactcaccctagccatcctcactttgggccttcgctctctatgatgacgtctctgctgcatatgcggtggggaactttgccccctattgaacgatgagcccatgcatctgcctccgtttgcccttggcttgttactctgcatcaaatatctttgttgatcgataagtacaaggggtggtcaagggctggtttcgtcttcaatccaacagtagcccccaagggatgggttcaactacatcagccaatcttgaagtccttttgaggatacgaacaaatgatgcccttgatcacaagttgaaccactcatcagggcatttgaaaagtaaccttgg

SEQ ID NO: 187251 - DNA, 658 bp, Zea Mays
ctcacatttttggtgcgaagcagtgtctaccattgtctgcctcatcaatagacaaccatcatcagaactctcagggaagactcctggtgaagttctttttagaactcctcgctatgaccatcttagagtttttgcatgtacatgctacgtgttgttagcctcttgtcaacggactaaattaactgctcaatctattgagtgtgtttttcttggatatagtccggagcacaaaggctatagatgttatgatccttcagcacgtcgcattcatatttcatgtgatgtgagttttaatgaaaatcgacctttcttttataactcactcacattcatcttcttttttgtacatagtccatctctttcatgtgccttcctcccagccatgctcattcagctgggtcttcatctttcactacaccatcgtctaccacatcctcacctgatgttctcattcccattacaaatccttctacctcaacacccacttcacacttcacttctaaaccaccaattaccaaaacctacattcatcgtcctcgcactcgtcccatggctggtactgatggcgaacctgttgttgatgtttgtactaacaatgatgactctccagttgtttctgatgatctacaaattgttgatgggtcacaatttgctgatt

SEQ ID NO: 187252 - DNA, 287 bp, Zea Mays
ccagtaaggagaaagtattagcagtctagaaataatcattggtaacacaaggaatcaaggatacattcaaatggtcttataagttataataaagacatatcgtgctctttaccactgattgtagttgtttgtcatccccaacaagcaccacatgttttatcccactagttgcaagagggatcaatgattcacattcttttaagtatgctgcctcatcaataaataagatgtggaatttctgattttccaaccaactagacctatagggagtgcaaaacacaagtctt

SEQ ID NO: 187253 - DNA, 591 bp, Zea Mays
ctccctgaccttagggctccagtagccgctttccttcgccatattgagcaacgtggcctccaactggatcgccgcgtcgagacgtgcattggtcgtctccagcaccccgaggatgcccttgttggcgacgtccggtcgaacgtccgtgcacgcccaatattccccccgtcccctgccgtcgactcgtgctaggtgaagcgtgctcggcgaggcggtgatggtcgagcgagcaaggtggtactgcaaggtgctgctctgctccgccgaggtggcattcgtttgatcttggcccccgccaccgtagaaggtgtcggtcaggctaatgcagcagtgtgtgaggctggcgttgacgctgagcatcggcgactgagggtcagcggggtccacgggctggctgacctagatctggatgtgcccgtcgccggaaggcggtgcctcgggtccgtagatctcgagtaaggcagagtacgtttggtctatgatgatcagaaccatgttgtcgaccatattccgtggatgatgctcgtcgccaaacagctcctggacgtgcggacacggcggcgccgtcgttattgtcctcgcgctcggtgc

SEQ ID NO: 187254 - DNA, 935 bp, Zea Mays
caaaatggagttgttcgggaggtttttagaaatttccgaacagctgaattgtgggatctgaaaggaggaagagtactagttgaaactgacaagaatggcattcccaatcagtggtctgaatccattctctcgtcataccttggtgagcttgcacagaattcatcatttgcaccattacacattccgagatgggacaacaaattattcaaaggtccaaaggaacgcatcatcaaagatgttgaggtacatgatacttttcagtctaaatcttgtgtttgtggtgataatttttattctaaatcttgaactgcaaatcattcacctattgatctttcaatgttttcaatagaaaaaatttatctatagtagtgagacaaaatggtctactcgagattggattcttaagacagtgaataaaaggtggagagactacaagtcagacttgaagaaacaatacttcaatccagataagaggtcttttgaccagattgaaaaggatgtccctgatggtgtgaatgaaaatcaatggagttttctgttaggcatatggtgcagtgaagcacatcaggttaggattgccacctacagtattttttttcaatcagcagtgtaaataaatatttttatttgcattaactaatgttgcactcttagaaattatgccggacaaatgcggaatctggaaagaagcagaggcatccacacactagcggtaggaaaagccatgctagacttaagaaggagatggtaatggctctgtctgttatcttgtttccattttggagtcactatgaaaacaaaatgatcctgtcagattgtgttcttttgcacaggaagacaagaagaaaggaagcatcactaaaattgatctttgggacgagtctcataagaagaggaatgggaactatgtcaatcaaaatgtgcaaacacttatg

SEQ ID NO: 187255 - DNA, 445 bp, Zea Mays
gaggaattaagccatttgaaattgtctatgttctccacatgaacagttgccagttgaggaggatgagtaatgaaccacatcttcatggctgcaaaattaagtctatcagtgacaatgtggaacacgtgcttctctggttcattggcatttgccacagttgatttgacaactaccgaggccgcaagcacattatcagaaaatatagcatagtggtagagtgacaaatcctcaagcttttctttatattgtcccgccttcaaagcatcatcgtcaaaatgttccttggtcacataatcacgaaaataataatcagttgtcagctgcatatgtaggcagtgcaagggcatgggtactgtctttgcagcatgctgaaccagaaatgagttttgtttcttcactgcgtcgatatttagttctgtcgactgcaacataacacgcaattttc

SEQ ID NO: 187256 - DNA, 367 bp, Zea Mays
gaacaaggccggggcaacaaggagctggtgaggctggaggagatcgggacagccatgataagcctggaggagtgctgctgggagatgcagctgcagcagcacgaccaccagctggtggctgtccccgtcagggtcaggaaggacggatgggcaagcgatgccatgctttatgtaagcgcgatctttcaactgcattgccggccatttgcagttttagtggcactgctttggattaggataataatagacgtggatggcaaatgtttgatggaaatgacatgtgtaactgatagaattgggtgtggttaactgttcaggtggacgtggagctcgtggacgcgaacacacgcccggacgtcgatagggc

SEQ ID NO: 187257 - DNA, 391 bp, Zea Mays
cctgctcgggagagtctccctgtagacagctgctgctctgccatccaaaagtcacgcgacgacaacaacaacgaaccgccgacgcctacaatgcaggctgcaatttctccccatggcaggtttcgtgcgggctgcgtctaccaaaggcggcgctgctccaacgctggggaacaagcctggtccgacccgtggttgatgagggagacctaggtgacatggcaggcaagagaaagataaaccccgaatgcgcaaagctgatccctgtgaagctggcgtttgataggctccatgcttccctgtcatcaggttttcctaggcaggttgggttgcctgtgttgcaggttgggggcaacaacaagctactgtcttctaccagttttgttactaatgc

SEQ ID NO: 187258 - DNA, 513 bp, Zea Mays
atgagaaggtgcctcagtctactcctatgtcgatcccaagctccctggaagctgtcacagcaacgccaagatcaatcaaggaattgcctaagttgaattctaatgtcaagcaaagtgtaatggcttcaaagctaccaaatgcagggcatgtagctcaaaatttgactaacaatgcacccccgacggactatccggaaacagcttcatcagcaacttcagtgtggctttcccaagcggacgggcttctacatcatagtttccccatgtctaactttaatcagcagcagcagatgttcaaagctgcggctcctgagactgatattcagggtgcagatcccagtaataacacactctttggaataaacggtgatggtcagctgggctttcccatgggagcagatgatttcttatcaaatggaattgatgcttccaagtatcagggtcatatttcaacagatattgatggtaactacaggatctcaaaggatggccagcaagaaatatcgtcatcca

SEQ ID NO: 187259 - DNA, 585 bp, Zea Mays
ggtgcgggtgcagatgtcatttgatccagtatatagggggcaccttgacgtgcttgacaagatagggaaggaggaggaggacctcatggcggagcaacgaaaagatttgattgtattgttccggagcatttgtcgtgtcgcaccagctgccgctcagctgttcataagagggctgattatgacagctctctcgtctgcagaagctagtgtggaggatgttgaggttgctcttaccctgttcttccggcttggagaagctgtgggtgaagaggagattcggagtggggcagggctcctaggagagcttgtgcccatgctcctttcagcgaggttcttgtgtcacacacatcgcttagttgcattggtgtatctggagacagttacccgctacatgaagtttgtacaggagcatgtgcagtatgtaccacacctgcttggtgtgttcttggataaccgtggaatacaccatcagaatgcccacgtgagccgtcgtgcaggatacttattcatgagggcagtcaagtcattgaaggcaaatctagtgccttacctggataccatattgcaggtctttctttatctctc

SEQ ID NO: 187260 - DNA, 317 bp, Zea Mays
tgggtactcggacatgccgatcaggctacattattcattggttgtgttatgacattggctgagcaattggccgcgccctggcaatacgacgcagtatttgtgtcgttcgaacttggctgcgtcatgtgattgctatgtcgcgctctccattaatcggatcgctcccgttgagtcagaccgccatcgctgagtcgcgtattttttgcatgccctgtaggcactgtctatctgccacgagccacaattgcgcctgttgcgcacgttgcgtggatttatcgtgtaccccaattaccgagccataattgtgcctgttgcgc

SEQ ID NO: 187261 - DNA, 282 bp, Zea Mays
caagggcacatggctaggaagaacagagctaaacaatcttagtaagagaaagtcatcaacgagctaatttcattgttcaactttaaaaggtacagtagaaagaatgcccttccccacaccctctacacacacaattttaattgtgttcaaccagtaacagagatcctagatttggagaattaacatgccagcccttgtgttccgcattgtgatgaactcatgaacaaccattagtttgtaccatgagcagaagaagaaattacccaggtagggatgcctccc

SEQ ID NO: 187262 - DNA, 290 bp, Zea Mays
ttggtcctttattacaggcagaactaaaaggatcctggaactctgttaagttgaatgtttcaaaattttgtcttttctcctgttcaaatgttggaggcctcaacaatgccagttttctttgggtgaatcatggtgaaggtgagctttggggttctgttagtgctaagaatgataaaatccctggagaaagtaaagattttcttatagtggcttgcaaggactctgcctgcaggcggggtgatggtgaaggtactaatgtgctgtctattggtgctgctggctgttctgtg

SEQ ID NO: 187263 - DNA, 570 bp, Zea Mays
gcagactacgggcgcccacgtgacagccacccttagttttgcacacaccggacccacgtctgctcgcgcaaaaagttgcctcaatttgacactggcaagagcatttgaccatgattgctttctctgaagaaggaaggcttatatgccggtagaagctatgttggctggccggtatggtcataaaaatgtgcaagccgtgacgacgacataggtcgtgtgggctgtgtttctttggcgcggcccaagtagctgccaggaggccgcacgcttcttaccctgacccagcttggctttagggtcagtctcccttgctttctctgcccagcgagccctcgccctctagctcttcctgctagcgccgtctctgtcccatgctctcctgttcatcgtcgatctccagccatctcaggagcacctgctcactcccagacgcccgcgcaaaggaatcccccatgatctccctccaaactgcccactccctccacgatctccccctctagctcatgatccctccgcccgcccccaccccccgcctgccacgcccacgggcgcaacaagccaacaacccac

SEQ ID NO: 187264 - DNA, 356 bp, Zea Mays
ccggcgatgggtggcggtctagtcaaattaaaggggtcggggagcatcgcagatgtatgagaatgctcaaacaagggagcagaggacgggaactgaccggagttgggctggcgacggtgagctcggtttcacggtggcggaaatcggatttgggggaaactccgaattcgagcacacgagtggatgattgtggccgattagcggtggttagctagctgactacctcacagagctggacacgggctcaatttatagggctcgcaagcggtggtcggtgaatcggacgggacgcgcggcggccagaggaagaagaagaccacggacgcgatgaattcgtgtccacagtcgtggcaatt

SEQ ID NO: 187265 - DNA, 463 bp, Zea Mays
ccgcacttcatcagactttttttaaaaattgcacatgcatcgctataaatgtgtctgatcaagcacacttatttggaaattgcaaatgcatggattgattgttgtgtggtcaagcaaacagcaacaacaaaagatgagccaaagaaaaccttttcaaggacagtctatagaatcacaattacaaacagacaaaaaaatagaagcacaaactgctaatgtacaaaccacctatggatgatcgtcaacttactcatagaggaacacagaactacaagcatatcatgccaaaacaacatacacccaagaatcctggctcgggtctagctacagtagcttgcgtggaccgggtaaatctagtagttgaatttcgctttgaagacatatccctgccacaacataatctccatcgtcctaatttgttttccgcggcagcaagccagcaacccctataaacgagaccctg

SEQ ID NO: 187266 - DNA, 335 bp, Zea Mays
attgttagtacaagtatcagcaacaggatcatcatcaggactggccgtgggagtagagcgaggacgacgaatgtaagtctgagtaacaggtggtttggaagagtaagaaggagatggtgtggaagtggaaggtggtgtgatgggaataagaacatctggagtagaaacattaggtggtgatactgatgaagtttcagaaatgggaggaaggctcatgaatgaggtagactgtggaattaaaagaagaatgggtggaagagttgtaaaagaagggtcggttttcattaaagctcacatctcgagaaatacgcatgcgacgagaagatgaatcataa

SEQ ID NO: 187267 - DNA, 596 bp, Zea Mays
aggattgcaaacctgttggtagcatcaaggacctgaagcatatgtttgttgcttgtgtgttcaagtttgctgcagcaagtcacctactaatacctttagaaatgttccagctacaactcgcagctcgaaatagttgcagcgacttcccattctgtacgttcactcattcataagggacggtacatgaagaacaataaatgtaatgcagggggtgtgcattctctgagttgagcctgattgttccttcaaattgtcatcagatcagatcagagtcaggtttctcctccgaatcctcatcagagtcaggtttctcaaactgaaggataacgtaggacccagatgttgaacctgtcgtgaacactgactttgttgacctttggactgggttctcctgatcctaggtttcacctacaggttttcctgattcaatagcaaggcagtgtcacacctaccagggcacagtatcaagggaaaacagatcacatacttgaagaaatattccaaccagtaagtccacctttcccattcctaccattgagaaatattctaactttatccttcacataacaaataaggcaatccaagactacaaactg

SEQ ID NO: 187268 - DNA, 306 bp, Zea Mays
cagcccaacaacagctctttttctaatcgaatcgtttcggaaaacagcaagccgcaaaagatgaaaagcaatttgcttcaagaagcggtcattctcccttgccattagtgttgcaccatgaacattaaatatattgtagaccacaggaaggaaagccttccaaaaagccaaggattggttcctagataaaagacccattaagattgatgttacacaatctagcttcgcgtaatcagtagtgatgcttcgagcgcctgcagcaactgaaaacttctcagttattcccaacacttcgaggctcacggc

SEQ ID NO: 187269 - DNA, 888 bp, Zea Mays
ctgttagttgctagcactccacaccgaacgttgtcagattgctactgcatctcagctcaggacgactgtgtcacttagtgcttaccactcaaaatgtgaaccattcaccattgtaagagtgtatctgcgaattgatagtggtgataccgataacatgctacttgcaacagtaagccgtcaaggtggtactctgcatatggcttccaactcttgttgttcctcctgaactgttaggatatgtgcttgatggattaaaatgtgccagttttctataattggttcataaatttatttttcattgtcaacctgcaattgcaaacaataatttctcgactgtcatagggtctgacattttgtactctaaattttgaaaatgtatgttttgattgtttttcctctaggatctcttataaaactggtgtacttctcgcgacatgctgagctctccactgaagataagcacaagatatccacaaagagaagacttgggatgtttaatggtggcaggagaagctacccgattcttggagggaggctccacttcgtaaagtttgagactgggaagctaaatgaatgtttggacttcatttcttccaaacaactacatcgtggtggtatgcaaatattagtttttattgtaaacaattagaatgttgtcttcgtcctagttatttccatcaccttgttgacatagtttcacatttgcgtgggaagggcttacctcggtttatcccgtcactatgtgagagcctccagcactggttctgccctgttgacatagttttggtgttccttcaatattgcttctgtgtacctacgaatcatgcttcacctgtattttcttagcattgaatagcagttatatatacgctgcaggaattgattcac

SEQ ID NO: 187270 - DNA, 304 bp, Zea Mays
attgatgctttaggtcacgggcggtgagagctttctcgctcagtcactaagtcttggttctaagccgcctctccgcatttgtgggaaggcttgcctcggtttatcccttcacgagaccccactcatgtggctggcagcctacctacggcagtgggtctgcctttttatgctttatgtcatcatctttgtcctgaacattgaaatggtattgatgatatttcttttatagtttcatattgtattgtatcgtatctgtgatgccatcgttttgtttttgagattagaatgaggtgttttgcttaaa

SEQ ID NO: 187271 - DNA, 353 bp, Zea Mays
actattagctctagtgcattcaaacagggcctaagttatatgttactttatttttctatgttttcctttgttctgaaccctcaactgtgatttgatttgaaatgttctatggtatgaacttatggtgatatgtcacattgcaaattattttttaattgcggctatatgaattttgtttatgattctccaggtggttcaaaggcattaaaagcttctgatgttgctgtttcttgcttggaaaagctggtaacggaataccaatcgcatcatatggaacatgccaaggatatagctacattagtgtttcgtctccttattgttcacccaaaggttgcgtagttatcttccattac

SEQ ID NO: 187272 - DNA, 326 bp, Zea Mays
cctttgagatttagatccatacgcttaagctaagattgtagagctataaaacatagacttttttaaaattatccgcagcagatcatataaaatagagaatttataatataaattacactttatatacagtaaagtttgaaataggatagccgctgaagaatagcagcctgtcgccgatttgtcaaatcctccacgctacacagctgcatattcgatttcagtttaacattcgcacaaacaggatctgaaaggcatatacacattggagccgtcgcttttagctgccggtgaagttcgctgcatcttctcgtctatttcctcgcggc

SEQ ID NO: 187273 - DNA, 590 bp, Zea Mays
gatgcattagcatcactactgcttgccagttttggtctccaaaggaccaaaatcagagcatgtcaggggaggatgagagcaggggaggggagaaggatgagagcagggaggggctgttgcaggcggggccgagtagggtactcggggctgggcgcgagcagggaggcagggctgtcatcatggggtgcaggggactcgggaccatgagtccgtgacacaggaggcggcgagctgacagagcagggcagcgacgagcgcgaacagggaggcagcgtggcaccgccgcgggggagcaagggacttgagcagctacgcaaggaggaggggagggaggcgatgaacttaggcaaggtgtcttaccagcggcgaatcctagcgaggcgatgaaggcatcatgacggctggctcaacgtgcagaggctgtgggcatgacgcaaaagatggagggtgcatgttttcggttagggaaaattatcggcgactgggttagaaggttagaaaagcgccaaaacgcgacctttttacggtctagagcgtttaaactctaaaaggggtgctttagcgcctaaaacggacattttacatttttt

SEQ ID NO: 187274 - DNA, 358 bp, Zea Mays
caaaggggcatggaatgtgataattgacaaagcaaagcatcacattgccatacaacaaaaatcatgagaacaccgatagatactatccactaatcgtttgaaaaattaaacttacttctcgcttgccactacatcactccttaatcacataaccatcatgagcatccttcacacgatcatataataccgatctaagcgtcgtgtcacaatacatacatctttcctcgttgcgagtataaccacatcgcggcatatacccgcacacctcaaacaaacatctcacgccaccactactatatcacaccacggcactcacacacctacgtgcactaattaaatcctcgcatcccacgtattt

SEQ ID NO: 187275 - DNA, 538 bp, Zea Mays
tccaaactagggcctaagttttagtccttatcaaattctgcagcgtatttgggatgtctcatacaagctccagttgctggcaaatgctacgatccatgatgtgtttcatgtggcacttctcaagaagtttcaaggtgatcccccgtcagcgccagtgcctttaccggcagttctccatggcagggtgccccctgttccatcaaaagtgaaggctcgcttgaacagaggtgtctcggagcttctggtacagtggatggggcgcgcgccgtctgatgctacatgggaacaatgtactgaattcaagaggcgttattcagaggtccaactcgagaacgagttgtttgtcggagaggagggaaacattataaatgctattgtgggccgccagttttctaagcgcaagaaagggaagcagagcccgatcagttcctgaatcataggagaagataagtttccttagaggatgggtttcctttcgtattatttcctaaataatagcagaggattagttctacagtatgatgcaccaggacacctg

SEQ ID NO: 187276 - DNA, 708 bp, Zea Mays
ccgccgacatcgtggctggctggatcctgtcgcctcgatcttgtagcacaacaaggacggctgaggaggccggccggtcagtcgcgacgatccgcgtgatcgacgaccttgtggcgatgggatggaattggtggaacgccaacaggcgccttctcctttggtgatgaattcaaatgcaacgaacaaagcttctagccggccgccaccgcgcgctctgaagaagtaactacatggaatgacgtggagcttcttccatggctacgttagtttgatttctttcgatctgatctgcccctagaatgaattaagggaacaacctagccccgaccgacgacccccttgcttgtctcggcaggcacagagacgtggcagtagcagaggaggctgcgatcgatgctagaggggacgggaaaggacgatcgacggacggtacgtacagagctggtccaagacgacgatgggggtgggggaagggaaggggcaacctcaccacactcggtgtccctggctcgtgtccggcgacggagttcgcgagcgcaaaggacacgcgagcgggcgatgggtccttaccaccaatgggaagaaccgaggaagagagggaggcgccggagcctcttatatggatggatcggcgcggccagccggccacgcacggcagcgcgaacttccgcgaagcttagcacacaccaccaccagcctgtccctgac

SEQ ID NO: 187277 - DNA, 795 bp, Zea Mays
cccccgaccaggtcagtcgcatggtgctgggtggttgatataaggcccctgtctcgcatttattgcgagggacgacattgcggtcaaaaggcgtcaatgaagccacgtctgaggccataggcgcaccacgcattatggaatgcatgtggctacaacggctatcaactatgtcagactcaacgatgggaggcgtcactgtagccatgcatgaggccacatgcgtaccccacggctacaacagctaccaactacaccatattcaacaatgtgaacactcagacctgccattgtgagcatgccacactcgccactatggcacactggagttgtgcaccatgtacgacacaacaactacgacaaggcttgagtagttggacttctgctgggtgggacccactgtctagggttgcaactctctcatcctttgtgctataaagggaaagtgtagagcaacatagaaacgggtcacgtggttggggtcggtcactaggatgactgaagttgcaagggttcttgatactgctcccaccagcagtgggctgcatcgcgcaactatggttgctagggctgtgtcaagctgctgccacctgcattcagatcctggcacctgagttcctagtctctaggttctagttccactcgctaggtcagtcattatttgactatataagctccgtccacacttgtatgtaaacatacaccaaggatgtagtgtattacgcttaggcggtccgatcctctctacattgtgcatactatcgtgttaaagctctattgaggtctcaggcctatgcc

SEQ ID NO: 187278 - DNA, 341 bp, Zea Mays
cggacacctcgaccttggagttgtcatgcgctcttgtctcgatgccatcgaggaagcgcccaagcgctcccacctcagaactgttgtatgaggatcatatatctattgcgcctgggccgctgaggtttccctcttttctgcatgctagggggcttgagcaggagaagggatagccatccttaatttctcctatcatgacgaggaccatcgacctatataggatggagcaagtcctattcaatcacttcatcattgttggagtcactgatattctttggctcatcgtcgtcgttgtcatcatccaccgacccccatcggtgggtcttgagaatgaattgctt

SEQ ID NO: 187279 - DNA, 536 bp, Zea Mays
cgctgtagtagcgtcggaacctgacatctccgatactagattcataggatccttgatcctatcttggttgcgaagtgtgtaggaatgcgagattggaggccgcagtcaggaatttctgacttcggaaaggcgccgtggtggcgtgggtgtagaacaacggcacgacagtgagcgagggagagagggaacacggagggtaggcccttgaggcccaacaagatgtttgccttgcttccttcatctggttacatcactcctatatttatagtccctagaggactttgttccaaagcaaactagaggaggaatccttatagatttagactcccctttcctaacacactaattctatttcctaaatgggtactttatgccaggtgtaatttgggcccaacacctgtgtggctcgttctccggcgtgcataggagatactggttgtaacatcatatatcatcaatgactatatgatgcactggtcggttcactgcttgtttttctagaacactgggtagcgtaatggtcaaggtttccgagt

SEQ ID NO: 187280 - DNA, 1406 bp, Zea Mays
gctggactatcttttctcgtaatttattttaagtatttttagtcatgaagtgttttccttttaatttatttaaaacattttcaaacatcaggttcaagacaacagtgaatatatgcattctggaccgccgtttctcatatttcttcatcctgctttaggcccattttgggatatcatacgacaaaaggtatgctattgtatacattgggtaaacatgatatttgtatctttcttctctccgttattagataatttattctacctgagatatgtgagctgtaagcctgtaactggctaagcctgtaactttgcctgtgtagttttgagcaacaagattaacaaggcagtcgcttaccatccctcgtgaacattgagcataacaaaacctattatttgacagttcttgacacatgtcatggtatactatttgatctgcatttagctcacatataccaaggattctgtcaaaactgaacattcaattgtttgggaaagtacgcatcataccacaatagctgaacacagactagacaccttcgctattgcctaatgtgacataatggcatgttcctcatatgttatatgcataaaatgtaacattgagcttgagcatgttgtgcatgaaagctattaactgctgtgaatgtttttagatgggtcacttgcagcacaagaaacttgaaattgaatgaaagactaattgtttgtgtcatgtcaaaaagaaaaaaaggaaatgtggtagaattactattacaaacgttctgtgagatgggaagttggtcctgctccatactgccctgtgtagtgtggaagatcgtctatagactgttatgctcagtttctagtaattggtttcttaaattctaaacagtctatatgtttcgttctattctttgccttgtctacttttggtggtcaccaaaatttctccatgcagttcgtaggtggttctgtttctaaaggttcagagttgcaaatagaggtggctgagtttctatggaaagatgttgaggtaacaatcaagacgataagtttgcatgcactttgcctgtttctgcaaactaagtttattatgttaaattcttataagctggatggaagctttattattctagctgacaacgtcatgggttcaaccaagaatagcaaaaatggtgaacagatactgcactatggttccaggttgtaactcactcttaaacacatggttgctataaatatttatccagtaagtgtggaactctaatgccatgtttgttgaaaggtgtgggagatgcagactgcaaagtgttaaaattgttaatgaagggatcaattggacttctcccaataatgtctattggaagcatgatgtagagagatcagaatctgtaaagattattcttcatggaaacgcagaatttgag

SEQ ID NO: 187281 - DNA, 521 bp, Zea Mays
ccgattcccagatccaaaatcactggtggacgatcttcattccattggttgcaaagcagtctggatgcttgatccaggcatcaagaaggagaagggtttcttcgtttttgatagtggctcaaaaaatgatgtttgggttcaaaaggcagatggcagcccgttcgttggtatgtatcactgacttaaataagattcatcgtcaattttcttaaatgttaggaggatatgtctcatacagtttacattcaggggaggtgtggcctggtgattgtgttttccctgattttacatctgaaaaggcacgagcttggtgggctagtttggtaaaggacttcatctccaatggtgttgatggaatatggaatgatatgaatgaacctgctgtttctaaagtacgcgatctatcatgacacatataattaatattgcattgttcaattttttctacgtaactgaatgtgttggtctaaacttgtagactgtcacaaagacaatgcctgaaagcaatatccataggggag

SEQ ID NO: 187282 - DNA, 601 bp, Zea Mays
tacagttcaatctagtttgtaactgcctcaagacaccctagagtgttcaatggagaatggacctccataatgtctgcctacagtgaaattccatagaaacattccaatatggagcattggagccgttgaatatttcttttaccacacaatcataatgcaaaagcaaaaggatggcagaaaaaataggcataaaacagaaccataatgtcctaattgttctctacaagaatgtcccacagctgtaaatcccactttgataagtaactggctaactgcaattaaaaagtaatagaatattattgttcatggttcattaactaagcttggcaactcaaaaccatataaaagcactatacttggcccctaatagcatgcagttacaaaaccacagtgtgccttggcatctcactaataattactgtccaaatcagacagtggttcaaattcccagccagttattgtttttatcctaatccaacctacaagtgcaaacacgtccaacagccaatacactgaattgtaacttggaatgactgcaacgctaaagccacaatctgctctggcataccccaaaagcagtaataaaccacaaagttttttc

SEQ ID NO: 187283 - DNA, 705 bp, Zea Mays
ccatgctggtggataacttctacagaagcttgttaggaacaagactggatagaactgtcactattaatcttaactacctggggctgccctctcataatttggaggatctggacttacctattacagaaaaagaagcctttgaagccattaaagagctaccgtttgacaaagcccctggacctgatgggttcacaggaagattttacaaagcctgctggtctatcattaaagaaaatgtgatgcaagttttggcagccatttgggataggaagtttggtcactttcacaaattaaattcagctctcatcacccttattccaaaaaaggagggtgctgaccaagtcaaggactttcggcctattagtttagtgcatagcatggccaagctagtcactaaaatcctagctaacagactggggaataagctgcaatttatggtctcccaaaggcagagtgctttcatcaaaggtcgattcatccaagacaattttatgattgtgcaacaaactgccatacttctccatcagcaaagacaagcaagaatccttttgaagctcgacattactaaagcttttgactcagtatcttggcctttcctccttgaagttcttcaaaaactggggtttgggcagatttggatgaatgttctgtgtggactgctatctacttcgtccacacaagtactgcttaatggtgttgctggcg

SEQ ID NO: 187284 - DNA, 276 bp, Zea Mays
agcaactaagatgcctatagagctacaacaagcaactgaagttgtggaacaagcaaaagctaaggctttgatggcccattatgaggtggcaaaagctagggaagatgcagatcaagttaagtcacaattaaatgtcattaaattgagactagaagcggcgtcaagggagatacttgcagtgaatgcatctaaagaaattgcaaccacctcagcaaatgcattgcaagaatacaaagatgaagcacatatagagccccaagatgagcagataagaaa

SEQ ID NO: 187285 - DNA, 288 bp, Zea Mays
gtggcaacataagttcaagaatgtaaacaacaccaccatgcttggcagcagcccaggcaagctctggtgtgctggctaaagaatatagtacagcaagagctccatccctgcaaggaggattgcagtggagtatctgaaatagcaaaatgaggctcatcctttctgcaaccatagcctccaaacaaggagcatgcttagtcaacagagaaagaatacttaaacagatttgtgggatgctgctttcaggagaaacatggagtgcaaggcattcaaaaagaggaaccagac

SEQ ID NO: 187286 - DNA, 372 bp, Zea Mays
cttctggcgatccaggaggaggacgacgacgaggtcggcaacggcaagggagctgcagttgtgccggcagaagagatgaggacatcggaagtggggctcgtcatggaagggtgggatgtcgaggaggagaaggctgtgatgatgggggatgtggaggtggagaagaaagatgagatcttggtagtggggaaggaagaagaggggagagtaagtgtctgcatccccccgaggaatgcactgctgctaatgcgctgccggtcagacccagttcgcatggctgctcttgccacccgcttctgggggtctccagctgcagctaccgtggagcaggtggacaatgaggtggctgggtgcctcaacgacaatgaggaa

SEQ ID NO: 187287 - DNA, 610 bp, Zea Mays
ttgagaggagcggcattggatccatcgaggaacccgagaagcttcgaactgcgaaaatatggcaggagttgtgcacgccaaaggagatagtttgtttttgtgggcttgatggtgatgacttggtggatgggaattggtggagaggagaacgatggcgtggtggtcatggcagaggcagcgagagatagatggagaaggagaggaggcggtggagaaaattgtggagaatgattaggatttcgttggctctgttaccatattaagataatggaaggccctaccttctaggggcgcccaagtctctttatataggaaaggattacatgcatgagattacaaccgaaggcaacaatcgtgccgtgattccagggcgagattaacaatcctgccatccttatcttctattcctaacaataataattagactatcctatataagtggctagatatttccgattatgatgggaattcataatatttttcatgaggattaacataggtgcccttagttcgtaatgtgaatatatgacttcttttttttgcgatgcaattgccagaaaatttgcatataattcacagcattagaacatgtggcctgaatgagaacaac

SEQ ID NO: 187288 - DNA, 287 bp, Zea Mays
aggcaagagattcacccacaaagcaaagaaggcaaacacagcaaatcaggaaagtggctagattggcatcaaattgagggcaattctgggcgcaccattagcaggtgcaaatttagaagcttagtaagagtgatctggagagaattaaggggtgattgggttgcctaatggctatgtatactgtgaggtaccatgagaatatgcaagcaagaattagaaggaaaagccttccctcttgcttggccgtgggcaagaagcttagcaagagcgattgggagaaaattaag

SEQ ID NO: 187289 - DNA, 284 bp, Zea Mays
gtggatgcatgcgctccataactcttccacaatgacattttcttctcctttctggccctctttctagatattacaagacagaaatcattgtcaccagttgtgtcactgcacaagtgggcagcctggtctccaccatatgtaccaacactttttggcgaacaaatgccactatcatagtcaaacttctctatccagttctcatcaaatccactgctagagctgcaaaactctgttgcctcacaaggatcagatccacgttcatttctgaatataaacagggactt

SEQ ID NO: 187290 - DNA, 336 bp, Zea Mays
ttggatgtccagcatatgttgccatgtgatattgcctccttcccctgcaaatatctgggactccctctatcccttcatagattatccaaccaactttggcccctggtggataagattgctgatagattacctaactggaaggcggacttattaaatagggcagggagaagaattctagtgcaacatgttctcactgggatgtgtgtttatactgctatggctattgatttccctatgtgggtcattaaggaaattgacaagataaggaaaggtttcttatggagaggcagaagagaggttaaaggagggcattgcatggtggcttggggaaaagtg

SEQ ID NO: 187291 - DNA, 390 bp, Zea Mays
gcagcatctctccgtcagcgacgccgttcccgcaccggaaggggaacctgtacaacctccagtactactcgtattggttcgagaatggcactgcggcattggagaagcggatgagctgggtcagggggctgtacgaggagatggagccgtatgtgtccaagaacccaagaactggatatgtcaactacagggacctggatcttgggacgaacgagttggaggacaatgtgactagctacgccagggcgaggatctggggggagaagtatttcaaaggcaattttgagaggctggcagctgtgaaggccatggcggatcctaatgacttcttcaggaatgagcagagcatccctcctcttcccgctgcaaaaggatggggctccatttgag

SEQ ID NO: 187292 - DNA, 333 bp, Zea Mays
ctttgcgtgaattttaataagttttccttgagtgcttggcagcaaggaatttgttattctctgctataatgaatgtgtatgttgctttggatttatggtcacacaagaaaggaccaagaactaaccaattgaacccaactgaataaaatcttgagtgcttacgatgatgaggaaagacgggcaattaattcatacttaataggagtatttaattgcgtctgccaggattcgaactcgagaatcgagatatttgaccctggtactgacctattcaaccaaaaagtttaaggtaatggggaaaggcggccatttcacttaacttcaacatatggg

SEQ ID NO: 187293 - DNA, 280 bp, Zea Mays
ctgatatggaatgagattattcagacatttagagaagaggacatcattagtgacaatgaagttgagcttcttgagctaccaccagttgtgtggaaaattcgtgtggtgcggtggccatgcttcctgctaaataatgagctgcttcttgctcttagtcaggcaaaagagctagtagctgatgacaggacacactggtcaaggatacgtaacaatgagtacaggcgttgtgctgtcattgaagcttatgacagcatacgtcacttactgctggagatcattg

SEQ ID NO: 187294 - DNA, 333 bp, Zea Mays
tgagattgtgcgcgtgttttacactaaatttcgtactcatttacgctgttttagctcacgttttacgctgaaatcattcgagtcagaactcgcgcacgatcggctgcaagcgattttcacgccgtaattttgggccccgtttgctgttacaatacaaatataggatttacgataaattctgtactcatttatgctgtttttgttcatgttttacgctaaaatctgtctgagtcagaacccgatcatgatgggacgcgcgagatttttacgtcgtaattttcggaccgcattcgccgtttcgaaacagatctacgatttacgctaaaatccgta

SEQ ID NO: 187295 - DNA, 296 bp, Zea Mays
gcctctaataccatattgttagcaccccactccatggaaaaccgttagagcacagatgacaattggatcattggtaacaggggatccaagcagggacacgatcttgagatgggagattatgagcaagctagcaggaagaggtggaggactaaggaagagaaactctaaccctagaagcagccaaagatgaggaaccaaggaagaggaaggtgatgccgtagggaggaggaagatgatgcattcgttgttcttttctatttgatcccttcctcgtgtgcagtattccttctcttgta

SEQ ID NO: 187296 - DNA, 292 bp, Zea Mays
tagccggtgttctagatcctacaggggcgcgagtggggaaatctgcctttaaaaaggggttcatccctcgagtagcagtcatgtcttgcttctctcccactcgcggtgtcctttcgcctccgagctctctgcacccctttgccttcaaggtctctgcttcgcgttgccgtagtttgccatggccttgtgacttcatcccgagcgcgcctagactgagtgagtgctcgagatggtataccgcctgcttggatggaatgcgtcgtcgcttggcggaaggatttgcgccggcgtc

SEQ ID NO: 187297 - DNA, 674 bp, Zea Mays
gtgaagctatagtttcttacggccgtgtagcctcaatccccacccccaatttcacctagaaccgccgcactgccgtttttccccaattcggtcgactgcgccgccgtaaatcacctgctcgcggccagaggattccaggtccgtcctcgcccacgttgttcgtgtttcagcacccacatatgcttgtgatcgttacctgcccagaccttggagcttgacttcacctaattaaccggaacaccttgatctgagttctgtatccgcggtcaccgtggtcaggcacatcctggcccaaattagtccgattagagcatgttctagggtaaccttgggtcggttatgccttccccgtagctagacatggcgaccatcgccggtcatggccagcccgtgcggtgtctgtgatgaacgacaagcgcaccgtcgccagggacgtttgtggagaagaaatagaagaacgagggtatttctgcaaatgtcagcgactcgccgaaatagtgctctgaccccgctttaagttattctgtttgtcagggccttttctgcaaaacccgcagcgcgggcgcgcgctggcgcgtttctgcgcttgttgggccgacttgggctgatttcggcccgagtctgttcattgtttttctttttctatttctagcgggctttggaaatctgtcata

SEQ ID NO: 187298 - DNA, 375 bp, Zea Mays
ctcgactgttgtttgatagagatcgtgtgaagataatttttaaaatcagtgttcacataaaggtaccattggattcatatttgaaagcacttccatatgctatgagctttgttgtcatgataaacatcataatatatgatatattggtggtcaaagtgtggtgttggcaggtcaaaccgcactttacatttcgaaaaggatggagtaatattttagccttgattttgacatccttttttgcagagcagtggatcaacattattcaaaattttgctcctgacgtctgatatgtggacagttgccattcaagttttactctatcatcaacaggtgaagattcctgatccagaatacttgtgtaagattattaacatg

SEQ ID NO: 187299 - DNA, 313 bp, Zea Mays
cgtgcgttccagttcgccaccagcaggcggcggtagtgcccacgacccaccaccaccgcagtgctcggttcggcacgacatgccagccgtggttttctctaccggcggatacaacaggaacttcttccacgtcatgaccgacgtgatcatcccactctacctgacggcccgagagtacgacggccacgtccaactgcttgccaccgactacgagcccaagtggatcgccaagtacaaggccatcctcgccgcactgtccagctacccagtcatcgacatggacaccgaggacaccgtgcgctgcttccagtcg

SEQ ID NO: 187300 - DNA, 423 bp, Zea Mays
gtctacgccgaccggtggcctgtatgtccggaccggcggttctgagttctggttagggtggtttgacttgcgtaatttgctggtgatgaggcggggaaggctgccttgtctgtctgtacgtgggtgtgcgtgcgtgagaggctggttgatggaggacgccggcatggaaatggcatctgtttccttctcttttctctgcctcgattttcttgtttcccgctaaattagctcggtgtagctgccagtttaacctcctttgcagacgtgtgtaaaaagcgtactgtaatgtaacagcagaccagggacaggtcaaaaactcgaggtcagcgtgcgtgctcaactagtgccgacgaaggtgatgcgatcccatgctgtccagtccagtccttagctcgcatcccgggagtcgttggtgatcatcgc

SEQ ID NO: 187301 - DNA, 1150 bp, Zea Mays
agaagagcaaaggaacgttatactcaaaatctggctgaggaaaacttgaaagcgatacgtgctttctcttctaagcttttggaagtactttgttctatattcttgatgtcttcgaatgatgctattggattattgcaggtatatcaagtaatttcctttgaaaagacttcttgaccatgttgctgtggttgagtcatcgagactcgagagatccattttcctatagctaaggacacgttaagcttttatatttttggtgacttatttgttttggcttctcgagttagtattcgaagagcatatttctctttgctagggttgttgattatagcttcatatcacactcccatcatatcctcaatgatgtcacttgaaattcgacagtgaaactcaatgatttctgtgtgctgattgatgaaactattcctgttggaaacaacttgtcatcaatacaattgttatgaccggcaaggtgtacaatagaaggcccaaggcccagtcggctataggagaaagccatggcgctgagccatagccgccgggttggtagggcgattagggttatctgagagtgaaaataggagaagatttagatagattaagtctaaggtggttgagtcagattagatgatgtattagggtgcctgtgctatataatgcacaggagatgattaataaagatcagaggagaattaatctaagaaaaggattatttccccctctcacctacaccagccagccgccgtgcccagcacggtgccaccagttcgccgccaccgatccaactggccgcgccccctctctcctcacccctagcacctcaggccaaggcgtggtcatcccaacaataaaggaagtttaacattttgtggattgaaattacagttctctttgtgtgggtctattaattgaattgatgattgcaattcagttatgtacttaattagttaattttcatattttccctctttattgtagcctgcgataagtgagatagcttccatatcagacaaaaacgttgttgggaaattcttccttgatgcaataagaaagttgttggatgctacaaaggctgttaatgcagagcctgtggatgatagttcaatggaaattgaagccgattccaacaaaaatagcatgaagaggtttg

SEQ ID NO: 187302 - DNA, 956 bp, Zea Mays
cgaagtcaagatgttgcatgtgttgaggatatactccatatgattatccgcgccctttcacagaactcgcttgtaccatctttcttggagcaagtaaattcacttggtggttgttacattttcatcaatcttcttaagaggtgatttgctttgatttacttacagatactagctaaaagcaagcaaagatttcaatctacattaattctcacgttgatagggtacttttgctcttgtcgttactcattagggtttatcaaattgcagatattatggacctttttttttaaaaaaaactgaactctgtttccgactggcgaaaaatatttttcctttacttcgtgtcatcttttttgtgatacaattcatggcaagatgcaaatgcagtttttatatctgttttctctctgtatcgtactttttagtttatatatgaagatgtgaatttttacatcatttgtttgccagggaatttgagccaatccgcctattgggccttcagcttcttggaaagcttttggttggggttccatctgagaaaagagggccaaaaatttttggcctccctgtaggacgacctagatccattgctgaagatataaggaaaggggcaacagcagcacctcaactgtttttttattcaatatctgatagacttttcaaatttccactttcagatcatttatgtgctagtctttttgatgttcttcttggtggagccagtcctaagcaggtaatcaccaagtttcatactaagtgtaatactatgatatttatcctcttatctttggcttccgatgtcaactaatgccttcaataaagtaactaatgcttatatttttctgtctaggttttacagaaacgttcccaatctgatgctttaaaagataggagcatggctcctttttttgtccctcagattctggtttgcatttttaaatatattcaatcttgtc

SEQ ID NO: 187303 - DNA, 640 bp, Zea Mays
gtctcctggtttgttcaaacagtttgtgatgtggctccaggtgtgtcaggacctggagtgactgggtaagggttgtgatggtattgctctaggagatggatggttctgttaggactccacagggggctttgtgctacataattttgcgaggtcggcttcctgctgctttgctactggtttatcttgacacggctactgtctgctctgctactggtttatcatgatacaacttctgactaccctcctgtattctgcactctaagtgaataattaactaggaagctgagctacctcagttggtcaaggcgtcaagggtgtggatgtatgcccagaccacacaagttcaagtcttcgtcgaggtgtatttgggtgcatattttcttattaataaaatggcacctagttcctcctaggttggtctaggcttttaagtgaataattaacagtgatagttctactttccatctctagaaactttgtgatctcattaagttgttaatttccacttttagtatgtgtgttatagtgtaggcctgagtgcattacaattcgcgggtgcatcttttgaaatgctggctcagtgcaatggtctactgtcatgaaactatggatcataagtttcatgaaaaggcgctaaatc

SEQ ID NO: 187304 - DNA, 329 bp, Zea Mays
tagatgaggcagcccttgatcgcctttcacttgttactgaaatgaccaagcatatccgtgtgagggcaaatggtgggaggtctactgcatctgaacttgcgcagttttcacctattttcatctggctactgagggtaactagttccctgattttgataatgtcgtttttatgtatttgttcaataaattatcaaaagagtttctcccccagtcttaacaaaatatcgttttgttaggatttctatctagatttagtggagaatggtagaaagataactccacgagattacctggaaatcgcactgaggcctcttgaaggcagaggaaag

SEQ ID NO: 187305 - DNA, 435 bp, Zea Mays
gattgttgaacagcaaagcaaaacttcatctccaatctctgaaccaccgtacaaatcctacctccaagttgtcaagggtggtcaccaggacatggccacataccccggcgacccgcgcgcacggccagggcgtgtggactgtgcggtgtcggcaaatggagagattaagcgtgagagggacaacctggttggtaaatcggtggtgtgttctcatgatggcaacaaccatgcctcagagcccaggcatgtcattgaagcactatccgagcaactagggatcagaggaaacaagatgaaggttttgaagcatcacccggagcagtacctcatcatctttgaggagcagcaagatcagagaagggtgctgcaccaaagtcgcctccatcaccgtggctgggttttctgctttgctaagtggaatgaacaacgctacag

SEQ ID NO: 187306 - DNA, 728 bp, Zea Mays
ttggaacgatccttggagaaattagatgatgtgaggaaaaagaagttatcagatatgattggttcttccagtgacagtgttttgagttcaggaacaggttagttttgcttttgtagttttacttgtattcaaatggatcaaatatctctgttttggactaatttatgtacaaactacacttctccagctccaatcacaacatcaggagcagccacatctgctcgcggggtatgtttattgatattcttatttcaatattatacgaagatgtttgcaacctgtcagccttcctctcccaagtgcctatttacagttcttgtgctgtgttggggaattcttgttagaaaatttaccatttgtgattggattttgttagttatggtttaaaaaaacttccgtattgtcacagtaaaaaactagaaaaggggcagttgtttcaaaagctcaatgatcactagttatcaactttgtttgtcagggcaatgtttatttgtgaccagttctgttgatcaaatgtttgacaacccatgtaagattattctgtatcttgcaggttgcagatagcatgtcaatgaagagatctgctgcaagcatgcttagtggaaagaagcctgtccaggcagcggttagttttgttggatgcatatttgatgtgtaagtttctagtatttgaatttgtgcaccatgttcttatgcgggtattggtttccttgtttccaggctgctac

SEQ ID NO: 187307 - DNA, 462 bp, Zea Mays
cacccaaacaaccacagcttgctggcaagcctctgaatccatgcatccttcatcaccttccattctgcacttacagcagcagcagcagccgccgccacagcttgctgcgcttgttgtgcgacctcagctcgctccatggaccccttctgcttcagcttgcaggtcagtcggcatattactgatctctgctctccactgcaagaagaattttgctagaaagaaatgcatagttgttagctcgtttcttactgttctgtttatattttccctccctttgttttctagataagcggatgtatgtcagttgcgtcatcatttatcactgtccaatgtccatagacatcacaacaagcactcgaagatttgggactgttccaacaaggtatgttctggtctttccatggctttgtagcttctataggcgtataccatatattaccatctcagtaaaagacatttcag

SEQ ID NO: 187308 - DNA, 561 bp, Zea Mays
gggcgagaaaagcttggaagaggcggtaacacaacatgttagtggtggtgcgaatctgcactcagcccgtccgttctaagttctgaggggaggtgtgaggacactggacacaacatctgcagttgtatgctgtgggagagaaagaacgtatgagatgtggagttatcaaactcccacccgtcatcacacacactcagaatgatgcgatcgaaccgagtcgacagccacacaaagaagtgagatagattggtgaaggtgtcactgtcagacttatagcagaggggaaaggctcataggtagtgagagaagtcgtcaaggatgattagatagtacttataaccgaagatgctagggattgaggatgtccaaaggtcatagtggacgaggtcgaagggggagtggtgcgagacattgaagaagggaagggtaagcgagtgtgatggccaagctgacaggcatggcaaagcaatgcatcagtgtcgtgggggctggtgatggccgaggtgcctaggagtctagagaggatgttgtgactagggtggccaagacgacggtgccaag

SEQ ID NO: 187309 - DNA, 321 bp, Zea Mays
gggtgtgattgtggtgaggatgagaatggccttacatgggaacttgttgatcaagctgtgggtgcatcaagctcgctgcgaggccaaaatcttccaaggaatgccaacaagcgtgtaagagttttacactcaaggtttgactttgaagaagattttggttcagccaatgaagaagaggaggaccaagatccacatgatgatgttgatgtgactgattctgaagatgcacatgatgatgttggtggagaaaacactgaggctgctccagatgagttcgaagatggatattgactcactaagagttggctgatttcagatttg

SEQ ID NO: 187310 - DNA, 419 bp, Zea Mays
tcatgctcaagatccacaccagccacgacttagctcaaatatctgctttgtccagttattcaaatagagagtagagcagataagggctcattgtccacaaatatccaaccaatccactgaatacagacaggagtagagacagacaaaaactctactgtggtaggctcaaacaggtgcaaaactgatatttttctgcagagggggactgaacctcgagccccatattgcccaccccaagtctatctcagtttgtgcacataagtggaggacagcagggatgtgaagatctttcttcagatttttgtagcaactcccagtacctgttgaactctgatctctccctattcacctccctcaatcccacaatttcccatagtaacatggggagcacacttactaaaactggtcgattaaacaac

SEQ ID NO: 187311 - DNA, 309 bp, Zea Mays
attctggtcgttaaatgcattgttactttcaattgtataattcacaaccagtttcatgttttttagttgatgttagatttgtatgattcacaatcagtttcataattttgaggcaatgttagagtcggttttctatgcgtgcggggggcgcaaccaagtacaacaataaattgtaactgacattgttgaacacattacacatggctggtgcctggtgctgaaccgttgatgcacggttgttagcggtggcagacaaaaggaatttagaagcaactaaaatcttattgctaccttgcttctagaaaatca

SEQ ID NO: 187312 - DNA, 380 bp, Zea Mays
ctgattgcagccccatttagtcatctatcggtccagaacagagtgttggtgccgttcccaacaatagagatcagagaatctgaaaacaaattcttgacatgttgttgtataggaagcttcagtccctgccaaggcctgtttgggtctattttttccagccataaccattttgattgcaaagcccagctcatgaactgccgatttgggattcccaaacctccaagattattaggccttgtaacaatatcccaagaaaccagacagctgcctccattagcctctttcctccccttccaaataaatcctcttctaattttgtcgatagatttaaccatccaattgggaatgttcattgcaatcagaagataaaccaggatagc

SEQ ID NO: 187313 - DNA, 547 bp, Zea Mays
gcacaagcttcctccttcccacatgggcaccgtctcctccttccccaattgcaagctccattcgcgctcctcgtcctccgctgcctccagcctagtcccatctctgctcgattggagaggtttgggccatgcttcctcctcgcgcgccacgttctcgacggaatttctcgtctacacaggagccaaggaacgctagaattagacgcttcccggggtcccttttagttcccctctaacgaatcataggtttgcagtttggtgtggacgtatcctgtgatttgtggatggttttggtgtagagtttagagagatcaagaacttccaacttggggtttcctgtagccttttttagctgttctggggcttttatgggagtgcccgtcgcgcagaagtccgattcttgggtgactgtgcttgcgatgacggacagcggcggcctcggcgttcggcctattaacggaggccgagggagtgccgtggagcagcgtgggctcggactcggagacaacgggcctccagtgtccccaccagagcgtgtttctacgcc

SEQ ID NO: 187314 - DNA, 488 bp, Zea Mays
ggcacccgccattatccggacaggtaggcggatacgtctcgacgcgaccgccaactaactgccgcaccgacctcacttgtatgtactgtttggcgtctggacacgagtcatgactcatgaggtggagctgtgggtactcggagattgttgagctggtttctgcctatgaataagcggtggcctgcaggctgcagtggtgcgcggacagtgcgtacgtcggccaggacaggcaaatatctctccggatacacccgctgtaatgtgcccgcgcccgaaaacgatggatctcgtccccaatatgtgtactcctcctacacgggcagatcaatcatgccggctccggactagaggcactgcgaactgcgatagatgccggcaaccacgtacgtgtgcgtaacgttgcctccctggccagtgaccacccaggcacccaccacttgtatgctgccacctgccatgaatgaaagactagactgggggatccaatc

SEQ ID NO: 187315 - DNA, 548 bp, Zea Mays
ataaaattcaaaagcatggtgacgaaaagggaagcagattgactaccagcacaaccatgtcctcaagtggaagtctaaaagttcagatatccctagcacaggcaagaattgtcctgtgctttccatctgagttttcatgggatttgagccacccatctgtcctggataagttcctggtgatcgaccatacttcatgtctgaacatggtagaaactgcatcacaccctcaaaacgaaatgcaaaatgaggttcatcttagcaagtcgtgtacctcaatacatttggctgtaggggacatagatgtatatttggttaagccagtcaataatgtattggttggtagaatctgttcttcaagtaggcaaactttctctgcaatgaaaattctttctgttactggatccagttataatgactctggcatcacactgatcaggagaaagtatcctgtaactggccctgagattttgaacaatgcttggagtttgccaaagatgcatgatgaaaagatcactaaaaatcaaaacagcaaatgggctggcatttcc

SEQ ID NO: 187316 - DNA, 424 bp, Zea Mays
gccgagagcgtcttcgaagcgctcgatgccggcgtcattgcggatggcgacggtacgggcgccgagggttctctgggtggtagcttcctcatttccgggagcttcattggcacgcagaacggcaaggaggctgctgcgtcaggtgatttcgtgctcgtttcagatggtgctgtgctgaaggatgatgacaagcagggggaggaggttggcaatgacgctgcgtctgagcctttaatgatgcatgttgccggtgtcgatgacctgggcaccgtggatgttttggaggggatgcttgatcgtgaggttgctgaattgcttcctattcccagtgctacagaaggagatggtgctggtgctgaaattcacagcagtgagtccgatgcagaagctagtacaaccaatgttgatgctagtcctgattatg

SEQ ID NO: 187317 - DNA, 430 bp, Zea Mays
cgctggccgtcggatctgagatggaaagctcagattaaaagaacgaactggcaagcgatttgatcccttggatcacaaatatacggccatgatttaatgtacgaagggggtatgcgcccacttaatcttatccgtgcgctgcaatatcaacggtctgtgttgaacctagtcacgatccaatccacatcgctcctgctagatcctacggtccttatgcatcttcttccttagtccgagctgggcgatgccttgtcccaaccgcggtggcggcctgaccgagccccggaccaccgttgccccgatgaccaccgatgtacggaacccaaatgttgtgacggcccgaccactagcctatccacggtcatacaccaggaaacagaaacagtgataacacaggcggaaaagtacttactgacgacgaccctgctac

SEQ ID NO: 187318 - DNA, 572 bp, Zea Mays
ctttgagggagtgggggaagctagcagctattcttcactgagctctcctaccccaacacctagttcaccactagctccagcgattccaccacacctcaatcttttgcattggcgcccacacctacgagatatggcatcgacaacttgggtacacgatgaacaacacacgttggagtttgctacttcacaatccaacgatgaggatcacgttggcacctaccacgacgacgagcctctaccgcacaatggacaacatcctcgacgagtagtccgcctctggactggcgcaacacgacttcgatgtggggttacactggcgcacgatgatgcaaagccctattccttcactgaggcagagggagacgtggtatggcgtaccactatgcaactggagatggacgtcgtcgagcggaactgaatgtgggagctggctgacctttgtgctagccactgtgacatcacccttaagtcggtcttcaagctcaagaaggatgaggccaagacggtgatcaagcacaaggctacatttggtggtgtgcgggttcgttcagcgggaaggatccgacttcgac

SEQ ID NO: 187319 - DNA, 497 bp, Zea Mays
ccggccgccaacacggctcggccaaattgagcaccactgctcgcggacgctataaattgaccgtgcctccagctccgccatgcatccaagcatctactgcacccacctgcatcccaaaccccccaccagagaacttgaatttggaatttcccccaaaccggttgaagaacgccgtgaacctaagctcgtcgtggccagccctccccaggtccgatcgcgccctctctaatctcgttttagcatccttaagcttccctcaaactcaccgacgcatgcaattgaattagaaatcctctggtcgccgggaacgcgaccacctagccgcaatactcacggttgccgtggtcagggcaaattagggcaccattcttcaaattaatttaggggaaacgttcttcaggtagtgaattcggtttatgccaaagctaggcgccggtcacggtccagttcggccggtctgctggctcgccggagcacggccgcgcttgaacggcgtc

SEQ ID NO: 187320 - DNA, 299 bp, Zea Mays
tccagctgttctttcagttttctcctctctgattctctccggctgcatacagtcatggcagctttttggatgcgtaaaagcctagcttgagccttggtcttttcagcttccagcaacctcagtcgtttcttctcagcagcagcgcgcttcagagaaattgcagagcgcacctgctccatgtatttgctctctgattttgccttctgcaccagggacctcgctgtcctctccttcagtgcggcccgcttctgcatatcggcatgcagaaggcgcatgcggttctcctctgcctgtcggac

SEQ ID NO: 187321 - DNA, 308 bp, Zea Mays
ccgccaccgatccccaccgccgaacaaccgacgggtgctgctgctcctgctcctgccgccacctgctacgtagcatacgcggacggacgtaccaccaaacccccaccgaactagctgccggtccatcgcgctacgccgctacctacgacgatcgggcaagcgaagcgcgcgagttcgacgtcgtcgtcctctggcatcatctctatccgccgtcctgtggtatcgtcagcagcaccggtgtcgtcgtcgtcgatcgtttccggttgtgaggagaggcggcgatgaagaggaccacgagcaggagcggc

SEQ ID NO: 187322 - DNA, 356 bp, Zea Mays
cgaacacactcacctgggctggtacaggtctagtcaatccagaatctgtttaattccacaagttaggtcgaaccaagggttcaagtgaaccagaggtcagttagtctataacactcactagaaccaaaaggaacgagagagctatttggtcatctgtgtctcgagcaatatctgagtgtgtaatcttcttcgcctctgtttcaatcaatccatttatcacaaagagtacgtagggtattatggttttgcgtcctgaacctctataaatcatttgtgtgctgctagtcatagcggtaccctggatctattgagtctcctgcctatgctcatcgctttctctctaactctacgatctt

SEQ ID NO: 187323 - DNA, 616 bp, Zea Mays
taaggcgccccttggatcgcactgctgcccatatcctactcctccttcctctcctcctcctcctccccctcggcggcgatcggccgaacgcaagccacgcctctgcaactgcgtgcgtacgtataatctctctcagtttttctctgctccgttttcgctggcagctcagctcagctccgctcgggatgttcgaattttgcgtcgcgccgtgcgcaggctgccgtcccccagcccaatccagctcaccaaatgcgatttctggcagcgccgccggtactagatcgctcctgcttccccagcggcgattggcactcggttgggtttttttctcgagcaggctgtgggcgtgtcaaatggggtttggggagggagagatcctacctcttgcgggcgatcggaacttgtcaagtacaggaagctgtaggtttccttttcagtttggtcaggggagcttgttgttttgtattttggcgttcggaggttggtcccctttgtttcgactttattcacctttcgtgtttgaactcacatctactctcgacttttctctcatcacatacatggtcaacctacttacctttgcgactgtgcttagtaaatcaaaaactgtgtcctt

SEQ ID NO: 187324 - DNA, 278 bp, Zea Mays
gcctagcactcgctcgccctcctcttccctcattcgcacactcgtagcctcagctcttgcctcacaccgtgcgcacgccccggggagttccgccgctaccattgggagctcgccccgtctgttgcctcggtaagctccgccatgtcaaccgcagctcgggacgccctttggttaaccctcgtcctctccagttcaccagttccatgctcaccagttcacaaccgttgatctgccgctgtcgacccgtgccctcaccgtgccccggccaccgttcgtgc

SEQ ID NO: 187325 - DNA, 966 bp, Zea Mays
tgctcagctccagaccggaatgcctcgtcggagagacacctttgtcgttgggcgagggcttagctctgcagcttcgggaacctccttcgatgatggcgtggaattgtggaacggatgttggaattgttagatgtgttgagtggcaaacgtcggtggcaaaagaggtcatgcagtcgacggggtgatcaggtcagcacggcagggtggggtccatcaatgcggtgtccgccgcccccggagagaggggaaagtgcacgagacgacaaacactgaagccacggtcaaggatacggaccacacatccccatgcgaaatgccacttttgccctctggagttctgcctttctcagagcccaccccacccccatggcctcactcgagtattctgcacgaaaaagttaaaaaacaaactgcaccacggcaaagttcaagctcttttcaaccatagctccggcccttgtcacgatcatgatggagatcttaatagcagtatttcacgttctgtttggttttagggactaaaaattaattcattcattttagttttatttagtagctaaattggcaaataggttgcaataaaacagggactaaactattttagtctttagtccttcaaagagtgattaaatgaaactaactcatattaattccatattttgcctctccttcatttgtccatggatcactctggtcttgcatcttacaatctgttggtcagtttatataagattcctaatgttgtatctacatgtgttgcacaatattgatattttttgctatgcactctcatgttccagtccaaactataagtcctttatgtatctaaaaaagctaaaacgacttataattagaaggagggtgtataacactaacattttcttgtttcactatccatatttctttactgtcattttttactgtgtaattggctttaaacagattaccatgacacttatcgttttt

SEQ ID NO: 187326 - DNA, 649 bp, Zea Mays
atttattttctttggtgatggatgaagagatgaaaaccgaaaccaaaaatttttgaccgaccagcaatcgttttcatatagacgatatcgtttccgaccctttccgaccgatcacaaggggcatatgaggggacatcccttggtgtatgctctttgctgatgatgtggtgttagttgatgagagtagggaaggggttaataggaagctagagttgtggaagcacacgttggagtcgaaaggttttagacttagtaggatcaagaccgagtacatgatgtgccttttcagcgtgactagacatgaggatggagatgttacccttgatgggcaactagtggctaggaaggagtcatttcgatatttaggatcaatgatacaaaaggacggtgacattgatgaagatattaggcataaaattcagtaggttggttgaaatggcgtcatgcttctggcgtcctctatgacaagagggtgacacaagcttaaaaggtaagttatataggacagcgattcgaccgacaatgttatacggtgctgaatgttggccgacaaaaaggcgacatgtccaacaactgagtgtagcaaaaatgcgtatgttatagaagagatagagtctgaaacgaagatatccaagatagggtcgaggtg

SEQ ID NO: 187327 - DNA, 345 bp, Zea Mays
gggtcttagagtgcgaccctctcccgaagaagttagtactttggttgcctcgctcggagaaattcctgacgacgagaggcaggttcattttgaggtgcctttgaatccaagtgatgcagagataagtgccctgctggatatgttagctgaggattcttctgatgccgctcctgctgaaacattggtggtggcgcccatccctgaggctgacaaagttttggacgctcagaggtctgtcaatgttcgcccgaaacgttctcgccgagccgatcaagcctcttttcttgctgagggggagaaaaagaagaagagacgtcttcgtcgggtgtccagcttggatcaggg

SEQ ID NO: 187328 - DNA, 350 bp, Zea Mays
aatttaagtaataagtgagcaggcaagtggttcatttagctttcaataaacaatcgttgttggaaagctgagcacctagccaatggagaactccaccgtccagctgcgcttgtcccctttgtgaccaggtggatgaatcaatcttatttatgttgatcacttgaatctttgcatgtaatccttcagagactaggctcaagtgtgtgcaaccagattctcaatctggtggtgtcaggcaatcaaagaaatcaagaagggggctcaaatttctcattgttctaatgtcctaggagatctagaaacatcaaaatggttgtgtattcacaaatatttacaataatgctgcaggc

SEQ ID NO: 187329 - DNA, 427 bp, Zea Mays
tccgcatcaatgtcttaaaatgacactctttgatgaaagggtaatatgcactaagcacaacctttaccaacttcaacaattcattttaatttaatggtgaaacatccacaccagatgaatgtataagaagatcaaacacctcacctcacagcaccacgaaacaattagttctattgaaacaaaactcctaatcttcctaaaccttgttcttgccataatgaaaagataatcatgtaatctaacattctttgcaccccaccgaaagggagaaaatctacagaactaatggagcaataaaaccgacaagaagccaataacattatgcgcggcacagttcatcgaagaaatgccaaaaactccacatagagcactgacagcccaacgacaacacaatacttgcttaacccatgtcactatacttcatcca

SEQ ID NO: 187330 - DNA, 473 bp, Zea Mays
tggaggaagtggcaccaagcatatggcggtctatgtgacaagaggatactgtgagaaagtggactagggaaagtggtgaatgattattgagagcaaggctcgagtacatataggcaaggatggaataggaacagtccaatcagggagatccttgcctaatacaatcaactaaccatacagggaggaggcgttcaaggcaacaagcctgtgctgccatctattacattattgatggaccgaatgatgcgttcagctttaccgttctgggacgaggtgtaggggcaatgttagcagttcctgccgtgtactaggctaggatagcaatctgtgctattatggatagaaactaggctaattatggtaggagagatcctgattggtgtaggggatcaatctggatcaacccacactaggaaggcctgatactgattgatagagggtatcagcccacactaggaaggcctgatactgat

SEQ ID NO: 187331 - DNA, 343 bp, Zea Mays
cgccgacgcgctccgtggaacaacgcggacaccgacggcggtgtaaacgccaccagcgatcccactacctactgccctcgctatcattctctagtcaacgccggagtaatggtggtgccgcaccccgccacgacaagctagcaatcggcttctactatggctatgcaggcttcgctaatgatggtacgccgagcaggtgcgaggtggtttccttaccgaggagctgtccagccgtccctgctaccagtagatccacgtgcgccgcccgtgtctgaagatcgctcgagcaccgcctccgcaattcctcccacagccgagtgcagtccgcagaggaatccctacg

SEQ ID NO: 187332 - DNA, 683 bp, Zea Mays
atgagaacatagatcatgttggtatcagtgggattttgactcaactgaaggccttcgggtaagcaagagatttattctattctgctggcatttcaagttttgctgatggttaactgatgtactccaggtacacggtggaagccctcgagatgttgctactgccaatggctaaggatggagtggaagctcttggttccatgggaaacgatacaccacttgcggtgatgtcaaacagggagaagttgacttttgagtacttcaagcagatgtttgcacaagttacaaaccctccgattgaccctattagagagaaaattgttacatctatggagtgtatgattggcccagaaggtgacttgttggaaacaactgaaaaacaatgcaaccgccttgcacttaaaggtcccttggtttctattgatgaaatggaggctattaaaaagatgaattatcgaggttggcgaagcaaagtgcttgacataacttatccaaaaaagtctggaaggaagggcttggaagagactttgaacagaatttgtgctgaagctcgtaaagccatacgcgagggatacactattttggttctctcagatagaggttataatttatttatgctagtctattctctatttttattccacaccttatataccatatatgattataccaatcacccaatagtc

SEQ ID NO: 187333 - DNA, 488 bp, Zea Mays
gctcatcggtctggtgcaggcagtacgtcattggaggtcgtacttatggggccgtcgttttctggttcgaacagaccatttcgccctcaagttcatgctggaccaacacctctcaactgttccgcaacaccactggattagtaaactgttcgggtttgatttttccgttgaatatcgacccagacgttttaacacagtggcggatgctctctcccgcagggacgctgaagcaatggagtccctagccatatctgtaccatcgttccagctatatgatgaaatacgcagtgatggcagcagcagaccggaatggaaacaactacatgaacaaatcctcaatggcacccaatcggcgccatgacacatccaagagggcctaatactacatgggtccagggtatttgtaccacctacatcacccacaataattcatattctacagctagcacatggcgcgagacatgggggttccaaaagacattacacag

SEQ ID NO: 187334 - DNA, 573 bp, Zea Mays
ggcatgacttgatagattctcagcttcgacgccaggatggatttacttcatggaggtcaccaagcctctgctaatgctgctagtcaagggcgtggaaacaacaaccacaatcgcgcacatggtggcactattggtggttgtggtggctattgagtctatcatcctcttcgagtcttcatctaacaaacgtcgacaagcttgacacagtaacaagatttgtcaagtatgcaacaacgtaaggaatattaccctcgattaccagtaccactagtccactacgatgggaattaacacctctgacacaaggactgcaactgcggacacccatggtgactatggtgtcgacaccaattgctacaccaacacgaagacaacataccacattacatctaaattggacaagctaacggtctaggacaagtacaagaggacatatcaggtcctcagagtgggggaagtatgaatattgataacattggtcatgctattattcatacccctgttagaaccttgtatctcaacaatgtcttacgtgttcctcgtgccacaaagaatctagtctcagttcattgt

SEQ ID NO: 187335 - DNA, 552 bp, Zea Mays
ctcgattggtggggtgccttcgagttctagtaggccttgctcgcctagtgggcctgcatgtaggtcaacttctagcagttccactcctcgcattccacctacgcagcctcagcgtcccgacaacttcctcgacaaccccctctgggcagcgaacagtgacctccccgtaggcccctccgtcgctgcctctgtgttttggcaccatctacgcctagtgatggtctaggtgaccgcaaccaatccgacacctcaacagtttgttgtactctatgcccggtagaagtgaccacacccatgatggtgcactttgtgcctgcacccatggcacccccatcgccatctgttcccgcacccatggcacacgccatggtgccaaccctgatgcccacactgatgacagcaccctccctattggttcgataccagtaacacctgtgacaagtcggcatggcatggtcacacgcaggaaacatggcttctgtcagctgacactattcagggttgtgccactgtctccagtccccaggacataccatgctgctctcaatgatc

SEQ ID NO: 187336 - DNA, 451 bp, Zea Mays
ccaatccactggagtaattggataatcactgatatgtcatcatttgacactgatactgccgttcctcttaaaaaatctgtgtcatactttgagggcttggttaagccactgacaatagaaactaattgcaagaggcattctaatcaattgtcagatccgattcttgctgagtgtacaacttcaggaatgccttttccaagtttttctggcaagcaaagtgaacacagctgtttttcagatgcggtagagtttcctgttcatctaacattttataaagaataagagctatatttgttctctcatagtttattgttctaataatgcactgatttgaagttgtgcttaacaactgtttgaactgtccagatcaacgtggacacacagaacttgttgaggcctggtgctagttgccaagcttctcttcttgatctgaatgtagagccagaagatc

SEQ ID NO: 187337 - DNA, 297 bp, Zea Mays
cgcgtccgcaacgaccactacagcttcaatttcctcctcgaccaactcctagcaaccatccctcaacatcattgggtgggcaagttgttggtattcgacttcgaggtcgagtacaaaccgggcagcaccaacattgtcgccgacgccctctcccgccacgacatggaagcagcttcgacattcacatagcggcacctcggttgtccttcatcgaaaacctgcgccaagcacacataaccaatccaacactggttgccctcagcgacgacatcagtacagggcgccgtgcgaggccat

SEQ ID NO: 187338 - DNA, 366 bp, Zea Mays
gaatatataactgggactggggatattaccgcagcaagcttattttagctggcgatgttgctgatattgtttgtcgatttacctctcactgtttctacatggatccggaaaaaataattgtttggaatgttagaggtcttaattctctatctcgacagaattctgtccgtgagctcctcaattgttatggagcggatataatctgtcttcaagaaactaagatggcacaaccttcttcgcgtgttctcctctctatgttggggtctgattttaccggttctttggccctgccttctaatggttcgaggggtggaatccttattgcttggagacgacacttggggataactggagctaccaggacag

SEQ ID NO: 187339 - DNA, 275 bp, Zea Mays
taataagttacttaactttgtgccaaaggtttggtcatgacttgcacctttgcttaaactctctcctttaaccaaggtgcttaggagatagggttcaacaaaggtctagggttttctccccccttgtccaaagtgataattgcacacaactagggtaatgcttttggtcattcacatctcttggttaaaacctagcttccaaggcccttacactttgctccttaagtttcttccacaagtgatcatagtcatcagtgcataggtgtgccctagcc

SEQ ID NO: 187340 - DNA, 1664 bp, Zea Mays
cagcaatttcctgccaggacaagctcagctcctccaaacttggatgaacaaaaacgtaatcaggtatcttgtcttctcttgtttatctaatattccgatgtatgatattcttatttgttggttcagtgcttgtttatttgactgctagaacttgaaaaaatattgaatgttacatgactaatttgccttgcggagcacacagccagttatttttgcatgtgttgttggtattgatttgatacatgtcctgaatatgccagtgttctaaaagattctattttatgtataccttatccaggtgcttgtggaggaacttaaggttacacctacccctgtgcaaccaactccaaaacagcagctgttgcagcagcatccgcatccgctgcagaagcaacagcatcagctgccgcagctgtcgcatcagccacagcagccacagcagcagtcaacaagaaaggaaactgttggttccagccaacctaactccatcaatccccatactacatcacaactgaaaagagatgtgcacccatctccgtcggtccccaatgttacatctgttagacctaccgttcaacaaatgcctggtgttcagatgccgatccccttccaccaccagccggcacaagtttccttgcagtttggtggccatggtgcacagctgcagccacaagttgtgcccagctcatttcaaatgtcaatgggattgacaggcagtagtacaccgcaagtcccacagcagctgtatgccccgactctgcagcatcatcaattgcaacagcaagcaatgatgcatcctggccagggtatgggttatgttccttcagttgctcaccaattcccacagttgggcagcattcctatgaacattgcatcgcaatatcctcagcaacagccaaacaaacctgctgctgcacgtaaggctattgtaaaaattactcatccagacacacatgaagagttgaagcttgataagaggatggactcttctgggcagagagctgcaccgagtattgcacaacaatctcagcctggtgttaattatgctcctcatttgggcttctttcatcagccaccgaattcctacaaccagtcaggaatgtattactctactacagctagtgtgaaccaggttgctactggatcatcgggtcctagatataattatcctgtcactcagtctgcgcaagcgatgacatatatcagtccatctgcagcgcctccggtatctggtcagtcacaatatacagttaagccgcaccctatggggttgctgtctgaaaaatcaggtactcatgtcacaataagtgctccaccagcaaaatctgatccacctaagttacatgctgctggggatgctgcgtcaagtctgaaaaaggataatgaagttgtttctgggatcactgttttaaataaaccaacccttgagagggagagtaacgatcctttagtcacagtgaagcattccactgtgataagcccgtccttgccaattcatggtgaaaaaccacaaactttggtgacatcgtcgcctgttgctaattcagtctcacctgtgactggagctgatgggaaaagcaaagaacccattcaaaggtctggatcatttaaagatagtaagaaaaatgtcactaaaaaggatgtcaggaattcatatgaaccac

SEQ ID NO: 187341 - DNA, 323 bp, Zea Mays
caaactttaagagcttcctgaagggtttactcaacaaggtcataaactcataactggcatttccccaccagatcacatctaatgacttgatctgttccttttcttttctaatgctgtgtggtatgtaataggtgcctcaaagtagattaacctggccagcattgttggagcacccatttgtcaaagatgattcaatgggatcggcagctgtaagtatctttagttacatgcttaagtaatttatggaatcctagtctttgaagatatcagtgccttgaataccacataaattactcaggagtctcgacccgcgccttttgaag

SEQ ID NO: 187342 - DNA, 389 bp, Zea Mays
gagaaatgaaacgttagatgagcatctgcgagagcttaagtctagaacaactgatatgtctaaagctgtactacaagagaggaatcagttggtcaatgagctgactggactaaccaataccatcggggaggtaatttatggaggtgaaagtatgatgtcaaatttgagaaggatcatgcagaaagttaatgaggaaccttgcaatgacaggcttacctcagaaaaaactaatggtagaagttcttcacctttgatcaggcacaaatcagggcatgtcctagatagaagatcgcctctgaaggagaacaactactagttagtataggtcagatcgtgtactgatattgctgtaacagttgtactcggttttctatgaatctaacatgccg

SEQ ID NO: 187343 - DNA, 426 bp, Zea Mays
agctcatcagagctccgacgcggaccgcgccatggccctcgcggcgtagcggcctacagatccgcaagttttgatcgccgcccgatgtgtgtgtgtgtgcccctggtcaggtcacacatcctaaaacgtggacaggtagtatcagtctcggaaatgaaaaccagagcagatagtcagtaattaagctagtgatgtatagtagagtatatacagaacactagaacagaaaaagaaaagcaaatggtagtgtatgccttacaatataatccagtgtacgtagccttatgactacctgtaatatatatgaatcatccagttaaaaatgcacctcagcacagttttctccctatcgtccatgcgttgcacttgcactagattagattaacactaagagcaaggttttcaactccactagccaaggacaat

SEQ ID NO: 187344 - DNA, 436 bp, Zea Mays
tttatgccttgatccaatgcaccatgcagcaaagaaatttatatgcacaaatacacaaatatgattgataagcttggattgcagcatttgcaccaaggagattttgattgcttaacaaaagcatgtagtcttcattttgccaattgtacaaccaaagcacaagaacaaatttcaaattgcaatattgtggttatatctaggatatagacaaaataattgcattgcaaatacaacttctatgaaagtatggtcactggaaacacaccattcactggaaacacaccattcacacaccattgcaaatacaacttctatgaaagcaaagcacatgttcattatgctaaaaacaattaaacccactacaaaatcatggagtattttcccccgtcaaaacagaaaatctcgaattctgaaggatagataatccaagacttac

SEQ ID NO: 187345 - DNA, 358 bp, Zea Mays
cagtggatatgatagtgcatcgtagcatccatggtatgagcagatgacgtggcttgacctatccttcccatgtaacataacactcttgctgaactggcctcgccgttcgctccccttgatccatacagcggccacctccgaagtgagaggcgtgttatatgtcttctggttcaaagtctggtcaaggttcaatgcgatatgatagtcatcaaggttctcaacatggcccatgctcctaaggtgctcggagtacgggtttccatggagtatgccaactatctgtttaataacctctttgtctttctgaagctgctcttcacgacacttacggtaccgatgctcgagactgggatcgtca

SEQ ID NO: 187346 - DNA, 361 bp, Zea Mays
ggagagaaagttccggctttcccctcaaaagaggttagggccaacacaaattgttacatcacactgttcaatgaagggacagacccctccacacagccacacactaacacactaaaggtttttgaaacttaataaaaccagtgagatgattacaaggcaatcctattagaaaacctccaaccaaaattaacacaaaattgcatggccaccgattccaggcgacgacagacattctttattaaaactccatcagcttcatccttttgtagctgagcccagaatctaagccagtgtgtacctctaaaaagaacctgcagataagtaaaacttgaaacattattaaaaactaagtcattcctac

SEQ ID NO: 187347 - DNA, 678 bp, Zea Mays
atagtcagtttgcctcgtttctgctctctattggatttgttgaagctaagtctgacacctcattatttgtttatcgccacagagatgatatggtgtacctactgctatatgttgatgacattgttctgacagcttccaccgaggttctttgctgcatcatcaccttgtttcagcaggaattctctatgaaggatcttggcaaattttaccatttcttggggatgcaggtccaacacacggcaaccggactatttctatcgcaacgacaatacatgattgacattcatgaccgctagcatggctgagtgcaagccctgctccaccccagtcgatgtcaatcccatgctttctggcactattggtaatccagtgtctgatcctacagatttccgaagccttgcaggggctcttcagtatctcacattcaccaggcctggcatctcttatgtagtccaccagatctgccttcatatgcacgaccccccgcgagcctcatcttgcctctctaaagcgcattgttcgttacgtgcacgacactcttcaccttggtttgttacttcggccttctgcacagactgagctggcggtctactcagatgctgattaggctggttgtcctgatacccgcaggtctacctcaggctttgttgtgtttttgggtgatagtctcatttcttg

SEQ ID NO: 187348 - DNA, 341 bp, Zea Mays
gatcccgaccgagtgacttctgctactatgaacggtccttcccatagaggtgacaacttgtgtcatccttcccccgttagaattcggcggaggacgagatctcctactgtgaaggatcgatgtcgcatggtcttatcgtgatagcgcctcagagtttgttggtaccgtgctgattgaattaccgtgttcagccgttcttcttcgagtacataaacatcctccagcctagtagcctcggcttctgctatgttttcaaagatcaaccttggcgccccaaacttgagatcagcaggtagtactgcttctgaaccgtagaccatgaagaaaggagtatttccatg

SEQ ID NO: 187349 - DNA, 350 bp, Zea Mays
cgaatccaacgctcctagttaattcagccgaaacggcaccacgagctgatcctagccgttaactcccaatctgacggctatccaatcctcgtcaccacccgatacccgagctgtcgcggccgcgacggatggtggcggtcttcccccccttccggcgagcaattgccaacgaaacagaccccaaatttcatcccggcaagacctactcgatgattacggtctagtgaattggggaagacgaagattacctgctaatattcgacgttgagcccaggtcacgatgcgcagcggacatgcggtcagatgcaacaccgacgacaaattccccggaccctagcgactaatccttg

SEQ ID NO: 187350 - DNA, 458 bp, Zea Mays
gaagcccctggctgttaaatcggccattaaattcacggcgaacatacctctgtttgaagtccggtcagtggctgggtccgtacggggggtcctcggcgtgcgtgctcgcctagaaagcgccgcggtgcgaacctgctgactcagccgtgtcgcgtgcgtagagaggaagacgatacggtagccgtcgatctcgtaggtaacggctcagattagatctgggttgtaatggaatctggtcgttggttcttcttaggacggttggattagaatgaggtgtaccctttcacggcatgtaatctctaccatcgatctatctgcgggcggccacgatttcatcgcgccacgctcggttctggaccattggatcgggatccagtgatcctggtttcataccgattcataatagcttcgctctaatcctatccgtctgtgtttgaacggacgactctcatgtcgtg

SEQ ID NO: 187351 - DNA, 378 bp, Zea Mays
ggtgttttacttgagtggacataaacacaatctaggtatcccttgaatagaggggattattggaaaccaggtatcacaaaaggtcattagctagcccaggtatcacaaaaggtcattagctagcccagtggaaaaaggtgccttacaaccttaacatatgtttggatagttctctctctcaatttggctaaattttccatagtctttattttattttgagaaatgatgtggcaaattgatgtgtggtgttttacttgagtggacataaacaccatctaggtatgccttaaatagagggtagtataggaaacctggtatcacaaaaggtcattagctagcccaataacgtcttcatccactagttaaactctaataccc

SEQ ID NO: 187352 - DNA, 307 bp, Zea Mays
gaataccgttacatgggggaagtttcacgcaaggtagacatattcagcttgggtattcttatactagagattgtaactggtcaagacaatagtaccaaagttgactttatcgatcatgtaagaaagtcttacaacatctggaaacttctattttgtatatctatttttgaaaagtttacacatagatctttaattgctccaaaattcaacaggtatgtgaacactgcatggaagggccacaaataaaatttatgtatccctctctggaacctgaattacatgatcaggtagaactgtgcatcaaaat

SEQ ID NO: 187353 - DNA, 786 bp, Zea Mays
caaatcatccaagcccccataataagcaaggagtccatatctttcctagtccaaccggacacgcagcatataaattgtgtcactttgaataggagataagcagtgaataccaaacttccgaaggatgttataccagcacactctagagaagacacatgaaaccaacaagtggttaatggtctctggctcttgatcacagagggcatctaggagggtgattcaagcctattctctccactctgtcagcagtccaacatttatcatgtgccaccaaccataaaaagaatttgcatctgggtggagcccataacttccagattcttttatgatgatcaaaaggaattgaaccagcaaagaggccattgtaagctgagcatgcagaatagttaccatcagaagcagcagaaaaaatatgttgtcctcagtgttaggttgcagcacaataccagaaagagaattccaaagatgaagatagtcagttagtacacccacagtcaaggcccctctaatatcagcaatccaccctctattaggcagagcatcctaaacagttcttttagcagcaattcgctttggaactaaactgaacagccttggggcaatatcagaaactctctttccattaatccacttatcagtccaaaaaagagtattagaaccattcctcacctcagtgaccagaacagcagaaaagaagaacctggccttacttggaacttgaataggaagatcactccaaggtctggtgggatcagtccttttcagccataaccatctcattctgat

SEQ ID NO: 187354 - DNA, 840 bp, Zea Mays
taaaattataatttgcaacaggtattcttgatggtgtttagcacccttagttttgtattttacattatttttaaggttgcctttatgtagatgtttgactcttataattgactgcattaccactctgatatttatttgcagatgccaaatagctgttcatcaagagtgctatggagcatgtgctgtacaagatcttacaacatggctttgtcgagcatgtgaatccccccaacagaaaagagaatgttgtctatgccctgtcaaaggtattgcttgtatttggaatttgtgtcctataatatatatactcttctgtttcattacgttcaccagccattaaagatatttttcttcaaataatctcatcttagtgatgcttgtcagtgacacttgtaccatgataaaactttgttcattgtttaatatacatattctattggtgctttaagtttgtttcaggtgtcctgtctgttattgttgtttgaagctattaacttgttttactgaatttccattaacacagggggcgctctcaagccaacagacattgatggactgtgggttcatgttacatgtgcctggtttcagcctaaagtatcatttccggttgatgagacgatggagccagctatgggaataatgagcatccctgtagaatactttaagaaggttgagattttttattggtattttcacaatttgcatccaaaattttatttattgtgatttccattcaaatttcagctaatatttgcattttcccctattaactgcagacttgcgtcatatgcaagcaaatgcatggtgcctgcacacaatgctacaaatgctctacctatt

SEQ ID NO: 187355 - DNA, 393 bp, Zea Mays
atcattacttggtttggtgaactgcataaatgctgcttacttggccgtatatgataagatccttgattctatcgcagttgcgaagtgcatgtgaatgtgagattggagttcagtgttggatttttttactttggtaaggcgacgtgatggcatgggtgtagagcagcggcgtgataacgagcgagggagagacaacgcgtaggacaagcccttgtggcctagaaagatgtttgtcttgcttccttcgtctggttacatcgcccctgtatttatagttcctagaggacttggttcagaagcaaactagaggaggaattcctaacaaactaattctatttcctaaatgagtattgttcacaccggatgtaattttggcccaacacccgcgtggcc

SEQ ID NO: 187356 - DNA, 410 bp, Zea Mays
acatctgatgtaactgttaactcagagaacgaggaaaccaggaggggctttacatctgctgttatgttgccaaatgatcaaggattgctatgtgttactgctgatcagcagtttttgttctattgtcccaaaagaactgatgatggggactttgaactgtctctatatagacgactaataggttataatgatgagattcttgacttgaagtttatcggggaggaggaacaataccttgccgtggctaccaacttggagcaggtgagctattcataaatgatgtctgcacagttcttgttggttaatgcacttgaaacttatcaaaccgttaccggcatattcaggtccgtgtttacgatgttgcgtcgatgtcatgttcttatgtactcgctggccacactgaaatagtt

SEQ ID NO: 187357 - DNA, 561 bp, Zea Mays
ggaaattgggaatgcacccagcgacccctgcagtttggtggcctaggaattcttaatcttgaacggtttgggtgggccctgcgtagtcgctggttgtggctgcaaaagactgatgcttcccatccttgggctggtctccccatccgcgttccccctaacgcactagcgttgtgcaaggttgctgttgttactacagttgagaacggggaatcaaccaaattttggacagaccgttggctacaaagtaaaacggttgctgaatgcactcctaacttattccttttgatccccaatagggttagaagacaaaggacagtggctcaaggtttgcaaaaccgtagatgggtctccgacatcaggggagcgatgactgttgaagtaattgtagaatacctgcagccctcgaaccttgttgacaacttagtgctccaccaagacacctcagatcagcatacctggcgcctctccaagcatgggggtttactctagtaaatcagcatatgatgccttcttcattgggactgttaaatttggtccctggaaacgcatctggaagacctg

SEQ ID NO: 187358 - DNA, 505 bp, Zea Mays
gtgggctcaggcccatgtataaaaaatttgcacggagcctaatccagtccagtccgttcgacgttggactccggtctgcctctcaaatctcaccgcctgctcttcttcggtcccggctcgggctcctccatatgagcgcgcgctaggttctctctcgtcgtctctcgtggcggctggcgacgactggggaccgccggtaggcgcccaggccttcgtcgcgctggtctttctagggcccttcgccggcgacgatcaccctccgcgaccaggtacgctcatcccctctcttcccttccttcctgttgcgcgaaacccaccctagcttaacctgtttatattcggatctaattaattacagtactacaagtgaattcgtgcattatgtctgctaccttcgatatttttctttcttttgcaaacattagcgtcctttacttggtccgcccctgcctgccatgtattgcgtaattcttctctgtcgattccatcgaatcgtgcatactcc

SEQ ID NO: 187359 - DNA, 464 bp, Zea Mays
tgatgctgctaattctaacatcttctgtagtctgaacatctctagccacaagagatgtttagactagatcgaaactccgaaaacaccttggagatgtcgagacatgaaggacacaaacttcaccgatggtgaccttttcacagacgaaatggaggcccatctccatgtgtttcgtgcgtcgatgctaaacggggttggagagttagacgacgttgatgttgccgcaatagccggtgctacgagatgacacgctgtggagttcgtgaagaaggcgatgcaatcaggaagcttcactaatgtcattagcgacaatgtgatactccgcctcaacgctcgagtgggggacgacgttctgacgcttggaggaccaagacgaggttgtagcctagaaacagaacatagcctaaggtggattggtgtgtcttcggacaacctactcgctcaccattagtgtaggcgacgag

SEQ ID NO: 187360 - DNA, 452 bp, Zea Mays
cagagaccgctgagaggacgtggtcggcgagggcgtaccggcggagggtctgcaagacctgatcgcgccactgggggtactgagtggagtccggcgcaaggacgtctgtgacggttgcccggatgctggtgagagtcgtcgcctgagcatgaagagaagcgcgaagggttgaggctggggcggtcgcgggctcgaaggtgtcggcgctgtggcgagcggatgtgggggagccatccgacacgcccttgccagcgagacggcggtaggtctcggcgtactggcgctcaatagcgtcgacaaccgcctgctcctgctcaagagcacgagcggcgtcctgggcccgctggtgagcagtcgtaacggtcgtccgggtggcagcgagaatggtagcagcatcgtccgaaggagcacgcagggaggaggtgatcacggacggatgactgtagacagta

SEQ ID NO: 187361 - DNA, 423 bp, Zea Mays
gtcagtttctcctcaccattaacccatctgtattttctccgccattaatggctgccgtcgcgattctacttcaccggacgtcccttccccctttctaggctataaataatgtgcccatgacccctgagtccgtgctcgacctccttcttcgctttccccatgccccattcctgctgctagcataatccatgcaccgtcgcttgccaaccatcgttgctgggccaattcgacgccgtcgagcctccctcgctgccagcaacagcttacccagcatctcctcgcctctgttctactcgcctgccgctgctcgctgtcgtcgccgtcattgctgctgcatcgcttgacgtcgccggtgctccccaccgaagagcctcgtcgcattcctacacgttcttctccgcgcctgctgctgccgtcgcgcca

SEQ ID NO: 187362 - DNA, 372 bp, Zea Mays
catgcacaatagccaaaatgtcttcaatagcaatgagaactcttggaagtcaactggaggtaatgttaattcagtccagagacttcagcagaggaagtctgatgtaagcactactaatgaaagttcagatggtaaaagtattagcatgatgagctcaagcatgtcaatgatggcacaggatcattatcagatggtcactagtcggagtggcgagcaaattggcatgaaccgtaatatggcgcatagagctccagaaatctctgaatcaccaagaaaaagcacagaacaaagaccaggtgatttcaaccaggaatatctaaatgcaactcctaacgaaaggcaaacacacactttaaaccatggacaacacat

SEQ ID NO: 187363 - DNA, 312 bp, Zea Mays
ttctgtgttttgatgaagaagacggaggcgcaaatctctggtggccgcttcatcataattaccttcttcatcaaacactgcatcatcgggaagacgtggacgaggaggtggtggcggtgcttgttgttgcgtctccaaaacagcaagtctgtcgacgatctgggacaatcgtcgatccagcctctcgtaagtcttgccaaggttcatgtcaatgaaggcatcatgcactgacttgtggaccgtctcctgcatttgctccttcaggagcttgttgtttgcctcaagatcttagcggttaacacattcatcgaa

SEQ ID NO: 187364 - DNA, 646 bp, Zea Mays
ggaaaaattgaaagaaaaaaagccgacaatgacagaagcactatctcaaacacttcaagcgatgcacaagtctggctgttttacacttattgatgtgattgaaggtttgtaattttctagcaatctttatggcagatgtttgtctgtagcattattttcattgttgtgtttttttttgtctgaatcatattttgatttcctctaaaagactaaaacatattatcgtgtaaccacatttctttcgaaatgcaccgcaggtccctataagtttgtatagtttgttctctggacatgagaattgtgtcatttaagtttccaaaacgtttttgaggcaagattaagtctgaattaattttgaaatatttgatgacatgacttttagatgccgaccttttgtattttataagtgaaatcaagggaaacctaccaaagtttggctagaaaagaagcatttacaatcctttttgaatctcaagacatgaaccttttagttttgatcaaaatctgaacaagaaaatgctgtcttttgataatgcagatgttcgagtggctgtaaaaaacaaggtgccccttgttcgttcctcaacgctgacctgggttgcattttgcattgaaacaagcaataaagcgactgtactaaagttgc

SEQ ID NO: 187365 - DNA, 319 bp, Zea Mays
gcttgcaatgtccaaagttttattaccacgcttggctatacgagagctccagcgcggcacaaagtctgaaggtagctgcttagttcttctcttctgaatgcaagggtagggaagtaagcacgtgactggcttcgttacactggtcacaaactgttgcacaggagtggcacctacatcctgggaaggagcaaaatccacggaaccagccgtcaaacaaggaaggagttggaaagaaaccattagcccgcctccttccatacaccaaataaccatccaccgtcttcctgcacctggcatcgttggtcagcctcgcatgttg

SEQ ID NO: 187366 - DNA, 604 bp, Zea Mays
gccacaagacgagctttatacctctcaatggaaccatctgattttgtcttaactttgaagacccatttacatgtgataggaacagcatgcgagggtaaagaaacaatatcccatgtaccagtgcgttcaagagcagtcaattcatcaatcatagctagctgccactcaagaatcccagaagcttcctgatatgtagtgggttcaacaattgccacaccagcccgtggaaaaccatagcgatctggaggttcaatggtaccacagtcacgaagacggtatccctgattaaaaacatcattaaactcattattgttagtacaagaatcaggtacaggatcagtatcaggaccagccataggaatagagcgggaacgacgaatgtaggtttggatgataggtggtttggaagagtaagaggtggatgacgtggaggtggaaggtagtgttataggaatgagaacatcagatgtggatgtagaagatgatggttcagatgcaggaatggaaggaagacacatgaaagaagtagattctgtgggataataggtggagtgagtagactggttgtgaaagaaggggcgattttcattgaaactcacatctc

SEQ ID NO: 187367 - DNA, 605 bp, Zea Mays
gttgaaaaaggatcacatatttgtgtggacctctgatacccaacaagcttttgataccttgaaggcagctttagtacaagctccggtgttagctatacctgatttcaccaaacagtttgtcattgagacggatgccagtggagtgggcataggagccgtattgcaacaggagggacatccaattgctttcattagtaaggctttgggtccaaagaatttaggcctatcgacatacgagaaggaatgtttggccattttgtttgccgtggagcattggagagcatatttacagcatgatgaatttgtcatcagaacggaccagcagagtctgactcatatggacgaccaaagattaactacaccttggcaacaaaaggccctgaccaagctaatggggttgaatttcaaacttatttacaagaaaggggttgagaatcaggtggccgatgccctatccaggagaccaaatctgaaatgtgatgacacaactgttcagttaaatgtgcttgccagctctgcaattgtgccaagttggttgatagatgttacaaggggttatgagacaaatgaacagaccaagaaattgttgactgcgctgtctactg

SEQ ID NO: 187368 - DNA, 364 bp, Zea Mays
cttcgagcgtcgcccccaacaagacgtccggatctgcgctagccctagctcgcgaggtcgacgccgatggatccaaggacaccagcgtcgcccctctccgagctcccccaatggccgccgcggggatgttctgctggtccacaccaagtgcgccgtccacaccaagctcctcgccaacgacttcctcctcttttccatggccgcgagctccgctagacaccgctgtcttcgaccctgctgcgccaacaaggtccacgcgcccaggccatctttctcgcccccatcctactcacatcctccctgcccccgtcctcgacgctgacgtcacctccgctgcctcactcccactaatccgaccggatca

SEQ ID NO: 187369 - DNA, 614 bp, Zea Mays
cgactcaattaattgtcggcacgggaatctattaaacaaacacgtgtcgtggccccataagaaggctggtcttggactaaagatagagatacatatatcaaggtttcctaacggagactaataactaatctcttttttctactactaaaagaatagtttccactatatcgtcgtacgtcgtgcgtcaacatttttgcaaaacccctcatacttctttgtaatcaccgacgatccaagccaactgttcctcgccttctccgttcctagggctttgctcctccttcccctcaaatcctacacacgacatgcacgatcgatctgctgatcacgaatccctcagccacgagcgtggggatcggccaccgcccgcaatgctgcccacggaccgtgtgatcctgcttctcctcccaatggacaacctctctacgcgccagggctagctaggcccatccggtctggcgcgcggggaaccagttgtggcgtgacacattaccgagttgcacggtggggctcgtcgaccatcggggcacgaaagaaagttagccagtttgcatcctacaatcctgaaaccctggatcgattttaagtataagagataattaagagactgtata

SEQ ID NO: 187370 - DNA, 564 bp, Zea Mays
tctagagttgtaatctttgatatgtcttcttgtatgctgcatagtgatgaaaatctgttctctagctctcctttcaatcgcacgttcctttcaatccaaacttgaagatctgtatttaggtccctcaatttcttttctagtactgctgattctagctttgctacctgataactaccagcaaagccataaatgccctcatcttcctgttcatcagtcattctgtgcatctcagttttcaacatgtcaaaagagatttggaaattccgtatttgatgatataatgtgctaaacctcaaccagaagttcaagttctcccccaacaccctgtcaatttctactctaaatttctcctctgcaaccgaagaagctagcggttcatcaacttgccattgcttaatgtattcctctatctcagcaatttctttgtcttctgtagtaggactggtgcttatcttggatgtttgttctgacttagcaatctctttgtcttctgtagtagtaatggcgcttatcttggatgtttcttctgacttctctaaactctcaataatagaggcactcatc

SEQ ID NO: 187371 - DNA, 577 bp, Zea Mays
gtccgacgctgcaggccagaatggacaggacgtcgcgacgtcgcaggaggctgccagcactgacatcacgactgtggcggtgaggtgtcaagaggagcaggtcggcgcagggcagccgaaggaaaaagcggaggcggagatgtcggatttgcaagaggagaggccgcagagcagcgaggtcgtggagacagaaacgggggcccatgagcgcacggacgatggctcaccggccgtcgttggagaagcagcagcaacacctgagggagaagatgagcttgcaaccagcgcggcagaagagaagatcgtcgaggagatccagcgagcagaggcgactgagaactcgaaggcgaacgcgaaccctgaggaaccagaccaagaaaccggcgtgatctccgaagaacccaaggagggaacgagcgtggtctctgaagaaccaaaaccaaaggaggcagctgatcctaccactgcgcagaagcgcgaggaggcgtccgacgagccaaaaacggctgccggatcgaacgcgtcagctccgacgacgccactgacagaagcggccaactacgacggcaacgacgac

SEQ ID NO: 187372 - DNA, 283 bp, Zea Mays
gccgcatttcttacattacatgtacccgatcgaaaggttcatgggaatcttgaaacgctttgttcgaaataaggcacgcccggagggttctattgcagaaagttatgcaattgagagtgtcatcgatttctgtgtggactacatggatgaggtggcaccgattggccttccactgtcacgccatgagggaagacttaaagggcaagggggacttggattgagcatagagataccagatcaagaattgctccataaagctcatttcttgatccttcaatctgct

SEQ ID NO: 187373 - DNA, 408 bp, Zea Mays
agccagaccgcagagatgtcgcagaggccaggcaggcaccagaggcgggcgtcgcagagcgtgttcgtgctgccggagaacttcgcgctggaggacgtgccggcggccgtggccgagggcggcggcgtcgagcagcggaagcccgcggccgcagacgcccccgagctgcaggcggcgaggcaggcggggcgccaccgccgggccatgtccatggccgtcgcctcccgggacctggagatgatctcggaggacattgggattggggcctacaagtacggtgcgtagaggtcgtgtgtgcttcgccagcttgttggctgctacatgctgctcccgtcctctggaccggcggtgcttctcgggccgtttagctaggagcggaagcgagtggctggctgtactccgatcggg

SEQ ID NO: 187374 - DNA, 369 bp, Zea Mays
ttatgttgtttattgttactgttgattttaattattcccttaatgagaattcagtatgcatcttcctgcttcaaacctcctatgagtggcactaaaactgttgaccccatttacaatcaggacaaatgatgcactcaaagaacattggagaagtcctatgaaaagaaaactggattcatatttggcctcaggattgctcgaacatgttccagacctgcaagatgatgtatcatttccacagacacagaacaatcaatcagatattccaaaggactgcaaagctgcatctgatagaaatagattttcatcacgtttatcaacagaccccaaacttaaacaagagctcacagaactggatgaaaatggtaa

SEQ ID NO: 187375 - DNA, 525 bp, Zea Mays
ctgctccaagcctctcgagagagcggaaccgcctggcgccaagggggaggatgttgacgccaccaggtgtccgcacgtctgcgtccttcagtgccacccgggcccgtgcccgccatgcaaagcatttgctccggatcgaccctgcccctgcgggaagcagatcatcgtgcggcgctgtgcggacaggagcacgcctgtgacctgtggccgcccttgtgaacagatgctgccttgcaaaaggcatcgctgcgagaaggtttgccacactggttcttgcggggattgcgctgttctcatctctgtgcgttgcttctgccggaataagaatgagacattgctatgtggagacttgatggaaaagggggagctgtctgaggaggacggggtgttttcttgcaatgaggtatgtggccgcacgcttgcctgtggcaaccatgcttgcaaggatatgtgccacccagggccttgtggggagtgtgagctcatgccgtggaaggtcagtacatgtcattgcggcaagaccag

SEQ ID NO: 187376 - DNA, 423 bp, Zea Mays
tgaagatattgtcaagttttttcagtatgaagcacggggtgtttcccctagaggtcttttcaattgtggaaacaggtaatatatgttgcttaaagagacagttcacacatacctaattatttctgctgctattgtgtacttttatcgagataaatacttataggtgatgatggtgccttttggcactcgacttgagttgcaaaatagaaaaaatgccaaatggatgtttgcactcactgcagaagtgatgggggaacttaaacaagtagagcagctgaaaggcccctactaaaaacaagagtttacttaacagtggtttatcatgttgcttgactagttattttttttaaattatcacttaattagtctttgtgcatgcacacactacttatgggacaatatgatccgagcctagaacagaaa

SEQ ID NO: 187377 - DNA, 421 bp, Zea Mays
gtcaaggtcgacgctttcctccgcagctagctcctagcgagctacctctacctcctgatggagcaggagactcaagacctgctgcttgctgatctgacaccaccagcagcaagcaacacacagcacagtgctctgctgctgctctggctgctgttgcaatgttgcatgccctgccatctaccgagttgtactagaatcagatgctttcaatgtgtcacacactgctgccgcatagctgctgaagggcagcaagtacgagcagtgctgaatttggggcggtgaaacaagcagatggctaggcagctgactgcgcttctgagcagagagaagtcccttcttcaccttcctcttctgtagcctgtaactaggagaactgaattcggtgcttgcattgcactgcatgaattggattggatccctg

SEQ ID NO: 187378 - DNA, 484 bp, Zea Mays
attgattcctgtcaatcaactgaagaaaacgaatgttctatctggattcctgtaccaccacctggatatttagctctaggatgtgtggtaaatattggaaggttaccaccttcaaaccatgtagtgtattgccttcgttctgatcttgcgacttctgcgacattttcagattgtatacacactctctcacctgctgctgggtatgatatcatttacttttatttgtctgatataccattttgtacagtggttcttttttatgcatgaagtttacaatgaaataccaacaccatgtgaatggttgttcttgttttaattttgttcacagaataatctctgaatttagcatctggcgtgtggacaatgtgattgcttcattctgtgcacataattctatagagcaacccactaaaacagaagctcttaatttgcaccatgttctcctccggaatccaaattgctatattgttaaagatctaagtgc

SEQ ID NO: 187379 - DNA, 450 bp, Zea Mays
cgaccaccgtgactcagtgagctctcgccgcgctgtcacgcatgccgtgatttcctcactgtgcctcctaccaacgtgttatgcatgcgcttgcgatgttatccgtgggcggaggtcggctgttgggtcgccgtggctataaatagcacggtggtccacggcgaggtgttttcctcttcaccagcgaaccgatcgcaatccaaaattcgcgctgacctctccaccttctcccaaatcaattgcgcacggtgaaagcacagcttcttacggccgagtagcctcaatctccaaccccaatttcaaacagagccaccacggcgcctttttcccccaattcggtccgtcgcgccgccaagcgcagctcatccgtggccagaccactctggtaaggctctgcccaaatcaaatgatgtttctgcaactccgttcgcttgtgaagctcatcgtggc

SEQ ID NO: 187380 - DNA, 447 bp, Zea Mays
atgggcagataagggcgcacggtaaaagatcttcgccgacggtgagctggcgatcactccagtgacctccgtggccctctctccccctttgcggctgaacagattaactcgccggtgaccgccgcttcctggctgtgtgccgcgtgtccaagcctatccaccgcgtcgccatgactccctgtacccgtcccatcgtcgacggggaggttgccacggcggtggacacgaattcaccgcgcaagcttcttccccatccccggccgccgcgcgtcctcctcaaaattcacggccaccgttttactctccctataaattgagtccatgactagctccgtaaggtcctaagcttaccagccaccgttaatcagccacaatcatccactcgtgtgctcgaattcggagtttcccccaaatccgatttccgccaccgtgaaaccaagctcaccg

SEQ ID NO: 187381 - DNA, 607 bp, Zea Mays
agagaagactgctggtgcatggactgtggatgttgctgctgccttaccacagacggtgtaggctgctggagtaacgattgcacaggttgttgtaccgaattcagtgcattctgttgaataccactctgtgtagctgactgcatcgccatggattgagtttgtggaatggcaatctgcccaggctgaaggccagatgacatttgcaccatgggctgctgtgaagattgcatctgtgttgactgcaacaaagtttgctgctgctgaatgtgtggttgcatacgtgaattctgctgcaatttctggttcatcaacaatttctgctgttgatacataaactgattatgtgcttgctgttgttgttgctgctgctgcctacctgccatttgtctttgtgcagcatacatatcttgtggagtaccttgtgctaaaccattgttcatggtattttgtggcatgccagacagattctgcagcgtcaatgtctggctgacactcgacaagttctgaccaacactaggaagagaaccttgaacggatgtagaagcatttggctgccgtgtctgttgctgagacatcaacgggatagctgatgactgtgctggattac

SEQ ID NO: 187382 - DNA, 620 bp, Zea Mays
gcaaagcaaggtggcggtgtcgcgggggcaagggatggttgaagtgccgagagtcgagggaggacgtcgtggccagggtggccaagacgacgatgccaagtggaggcagaggcagtggaggccatggcatacggtgtgacaatatgggcggaggaaggtgggtggggacgcgaatgggatatagggggggcagagctatcacatcgagcaaccacaacatgagtggtaagatcccgtatggtgagcccctagatattgaactccatagaacagtggttgtcagtgaagcgacggactaagagaaggttctggatgatgttgggggtaacaaggatgttggtgaggtacaaaggaccaggaaggaccgtgtcacctactaaggtgacatgcatggtcgacccattaccgataatgatggagaaagggaaggtggggctatggggacgaggtaaagagacaattctaggtcgagggtggtgtggaacgtggcaccagagtcggcaacctagtcggtgagaagagggggcgacaaagacatggggtgcgcgaagagagccaaggaaggcaccccatagaaccaccgggacgggggttggggccgggcgtggcgagcatgttga

SEQ ID NO: 187383 - DNA, 280 bp, Zea Mays
ctgtaggtttgggtgacaggtggtttagaggattaagatggagatgatgtggaagtggaaggaggcgtaatgggaataagagcatctggtttggttataggagaagattgtcacacagatgaaggatcttggatgggaggaagacataggaagcatgaggagtgggtggacgagttgtggaagaagggtcgtttttcattaaaactcacatcttgtgaattatgaatgcgacaagatgggttataacacttttttctcgaacgcgcaggaggactacacg

SEQ ID NO: 187384 - DNA, 1571 bp, Zea Mays
ccaacagtttgtgtgccatgtccagagcattacagcggggtggagagccgccaatgcctgtccaacgcaccatgtgtccgtggcgccaaaaagacagggtcaacttctcaaagttgcagatgaagggacccaaagaacgcagccattctaccccaagcaccacatcaaagccatccaggggaagagtgtagcaggttgtggtaaaattctcttcgccgacggtgagtggggtttgagaacagacgcccccactcaacaccttctcaccatttgcaaccttgacaagcagtcctgctgttggagtcacatgcagtcccagtcttggcacaatagcatcgcggatgaatgtatgggtggatcctgaatccacaagagcaatgagagccacaccattgatagagactttcagtttcagtgtgtcggcaatgtcaatcccagtgagagcatgaagtgatatgcccagctcctctgccagtgtatctgttgtcccggtatcttctccatccagttccaacagaaaaactccgcgagcagcacacttgtgatcggctgtatatttttcagagcagtggtagcattcaccgctggcccgtttggcggcaacctcctccggtgagagcctgcgcaaacgtggtctgctggtagccgatgacgagggttttgctgcagttgcacatgccgttggttttgatgtagcatatggcgtccttgatggggccgaggacagatccatacggcgttcataggcgcgtgccaggtgcatggcccgctgcaatgtagtcggagtcagcagttcaacatcagtccgaagcggttcacccaagcctgcggtaaacatctgagcttgctggagctgtgtcatatcctcgcagcgacttagaatggacagaaactgacgttgatagtcttcaacggtgccggtgcgccgaaggtccttgagatcagccataccgttggtccgtagaggtggtccaaaccgcatatgggtgaactcaacgaagcgggaccaagtgaggacaccgcccgtgtcccgctctagagcgtagaaccattctgctaccacaccgtccaaatggagtgatgcctgccacaccttctcatcgggtggagtcctcatgcccctaaagtaagtctcacatttattgatccacgacagggggtcagactcaccatcgtagtggggaaaggagacattgggtcttcgatagccaccatcgtcgacgcggtcacgaagagcagatcctgtgctatgcatgaccccgacaggcgctgcggtacgtgggccggtttctgaagattccggcagctgctcgtcgattgggcgcttctccaaaagcgtgatccgttgtccatgcaggtcgaggcgtgagttgatggtggagagctacgccaatatctgatccaacttggctgagtcggaggaggtcttcgcaggatcgtgaccaacgccggacatgttggtcgatgcgtcggaggagtctgagacggctactgcggcgtggcacaaaatcaagagggagtcgcttggttctcttcgtcatagctgggggaggtagtaggtagcttacttc

SEQ ID NO: 187385 - DNA, 409 bp, Zea Mays
tttagcattgtattgcatattgctaaatgaagattggcatcccactttccctagctggccattttgctttcagcgctggtagaaccttgttaacaagaaaatctcggtaaacatacttggttaccgatgtcatggcctttgttataggggcacctgcgaatgtaaactttttgagtaagtgccaagatgaaagtaggttagttagtaggagtataaaaaatgaagcatgaaaaacctctgtccctatttggactacacctcttttggtggttgcacggccacaaagtgaaaaaaatccctattttactatcaaatgtgcaattaccactttcatcatatctaggtcgagtaatcatcgccagaaacataaccttttctatgttttttggtttttaatagtctgttcagg

SEQ ID NO: 187386 - DNA, 346 bp, Zea Mays
tgtcatgaacaagttgtcaattctattttctgcagtgcctgctttccgtgatgtcattgatgttcctctggtggtcagaagattgcacagatctagaactgaggtctgaacaacattctgtttcagagtggcgtctttgaaatttgacacacttgctttctaagttccataattttcatgtttcaggtgagaaaggaactagggatcgcaaatgatgttaaggtggtcattttcaactttggaggacaggtgagagaacttgcttaattctagtatctgattgatgcctgcccacaacacatttgtgttcaattgatttgcctatttccggactagtacaggtcaa

SEQ ID NO: 187387 - DNA, 318 bp, Zea Mays
aagtgaccttgatcttaattgtttggtgttcatttgttttgcaggtgatcctcgaattcaagcggcaaaagttatctgggttgaatcagatgcagcatcttgggtaaaacacacacggaaggtatcaaagggcgagtcagcattagaaatcattgttgaaaaagatgatgctgtaagcaatggtgatgcctggagaacagcaattgatgcctgcttacctgtacttaacctcattgacacacggaggtctattccatatggcattcaacaagtgagggaacttattggcatctcatgtgccttcgatcaagtggtgca

SEQ ID NO: 187388 - DNA, 275 bp, Zea Mays
atcaaggctccgggcaaggtttccatcgttggcgaagcaccaacctccatccttctccacgctctcctggaagactatcatccatggtttacggagaaatcacgcctccccagacgtccaccaggggctacaccatgaccccgccccctctcccacaccgccggccagcctccatcgtcgatggaagggcgcgatctccgcaatccgcaggccccttcccccacaaatgccgccatggatggcgggtgcagcggatttcgcctccatcccgcttg

SEQ ID NO: 187389 - DNA, 335 bp, Zea Mays
ctgggtgaagggcgtatttgctctggaagatggcggcgccatggggaaacaagaccataagtgagtatgcgacgccgacgtctgttcatcgacaaaatcaatgcttggatatcgtaacaatggtgcaggaagaagaacaaggagggtaccagttagcgtcagatggaattacgcatacagaatcagctactgctgtagacgcaattactccaccagcagctttgagggccccaggggttgatgaacagaccatatttgaggcatcaaggatgacagtaaatcaaggaggacagcaccttaatactatgcgtactattggtgatcatgaacaggac

SEQ ID NO: 187390 - DNA, 379 bp, Zea Mays
ggggtgacaggcttagcagaggtggttttgataagcttgggagtgggtgaaggtttctctgaaggtgtcaaaccactgcactcaccaaccttgccaaagcgagcgacactcccatccttagtagcaaagcctaaccccggtccgccagttcccctcttgaactgactgaccatcatgcccaattggggatcactgcacgacacccaactcaagatagatcgaaggtatgtgttttcttcctcgattcttgtcttgtcgtgtctgcaggactcaagggcagattgcaaaccctcacaaagtgcacactgcgtaggtgcaggggcactcactcagctagccttctcaagcaaagctatcctagcgtctctctctgctagct

SEQ ID NO: 187391 - DNA, 568 bp, Zea Mays
actccgagaacaccagaggggagccccttggtgaacatgtcgacaaattgcgaagtggtcgggacgcagaggacgcaaacatcgtgacgatgactcgctcgtggttgaagtggaggtcgattttcacgtggttcgtgctctggtgctgcacagggttggagaggtataccgcgtatcgttgtcgcagtagacgagtgtggcgcacatgaggggatgctagagcttttggagcagttgatggagccaggatgcctcggctatgctgttggccacaacacgatactcatcctcagagctagagcgggagacgacgggctgccgcttcgaggaccaggagacgaggttggtgcttaggaacacggcccagctagaggtggactggcacgtgttagggtaatcgacccaatcaacatcggtgaagacgaccaactcagaagtcagagagggccgaagaagactgtagtcgagggtcacagaggtagttaataatccccttggtagcgataagatgggactcctgcgagacatgcatgtgaaggcacacttactggaccgcgtaggcaacatc

SEQ ID NO: 187392 - DNA, 459 bp, Zea Mays
cacagcatcctctactattctcctccaacacatcattcaggccttacagctggagtttgctatgaaagatttgggtgatctacatcactttctggggatgcaagttcaacgacgagatggaggcctctttctttcgcaacgtcaatatgtgttggatattctggatcggtctggtatggcagattgcaagccctgttctacacccgttgacacaaacccaaaggtttctgcagctactggtactcctgtttctaatccatcggatttccgcagcttagctggagcactacagtacctcacttttacccgaccagacatagcctatgttgtgcaacagatttgtcttcacatgcatgatcctcgcgagcctcaccttgtcgccttgaagcgcactctacgttatgttcgtggcactctgcatttgggtcttcagttgtgcccttcttctcaggctgagtt

SEQ ID NO: 187393 - DNA, 523 bp, Zea Mays
tatgtgcaacacggagacgcacacacagggttcagaatgtacagggagatggttaaggcacgtgtccagcccaattcagtgactttagtgagtgttctgcaggcttgtgcgctagttgtcgatgctgaggaaggtaagcgacttcaccgtgttgctgtcagcataggttgtgagcttgagctgggtgtagcgacggctttggttgatatgtacatgaagtgctcatgtcatgaggaggcaatgcgcttatttcatcggatgccaaagaaagatgtggttgcttgggctgctgtcattggtggcctcacacaaaatgaactccctggtgaatccctccattcgttcaaatgcatgttgttgaatgatcatgttcctgatgccgtcacgatggtgaaggtacttgctgcatgctcagaatttggaggtaatcgcctagccatttgtctccatggctatttagttagaaatggtttcaataataatgcatttgtagctgctgcccttcttgatttgtattcaaaat

SEQ ID NO: 187394 - DNA, 299 bp, Zea Mays
gcggaagagcgaatctacggcggcggcgcgacttgccatttttgcgtcggtggagagggtgtgagggttgaagggccgctggttcaacaggggtgaggagtcgagggtgcgcctatacttatgcaagggaaaaaccaatctgcggctaggatcacggagcactctccccacacccaaacactttcgctcgccattatcgtgatctgttgcgccagcccgaggagatggagctgacgagctggcctcgcacgccagcgaccgggattaactcacacgcgcggagaactacctgccatcga

SEQ ID NO: 187395 - DNA, 325 bp, Zea Mays
ctcgtagccatcgcctccttttagcgccgccatcccacctcgccggcggccatggcgaccccgtcttatgcggcggtgaagtgcctcaacacgtcctcgtccagccgcaagcgtttctcggtacgcctcttctccgactgctggctgttccgctaacacagaatccagctcgcggaagagttttatggatgctaatgagctatgtgtttctttccgcagtttaagagcttctcgcagcgggtggaggagatcgacatcgatgtgtaccgcagcctccacacactgaaggcggagccatccagcggatcgtccttcttcctcgacg

SEQ ID NO: 187396 - DNA, 565 bp, Zea Mays
tttgaatatgagtgacgatcgaagaagggcgatgtacgatggattcgacagtgtcactcatggtcactctgatgcatgggtgagagttgcagatgaattcgtggcactcgcatttgttggtgatgctcgtttagcgaggtgcccgtgtataaaatgtcagaactcggttcagttgaaaaaagtggagctctcgtatcatgttttcaaacatggctttatgccgaactatctggtatggcatgagcatggagaggtggaccatactattgagtcggatgtggaccaggatgtagaccgaatggaagagatgttggataatattaggaatgagtacccagaactacacaataatcaagcttttccagtggatgtgagagagttctacaagcttcttgaagcctcagaggctaaagtgcatgaaggaaccaatgtgagcgtactgcaggtggtaacacgtctcatggcgatgaagtcaaagtacaccttctccaacaaatgttacaacgatattgtgaaactgattattgatatcagcccaccgaatcataacatgccgaaagacttg

SEQ ID NO: 187397 - DNA, 807 bp, Zea Mays
ggagcggtggtggaggtgcgaataggaaggggtggtgccaaaaaggcgaagaaaggagtggatgactgatcaccttggaggggaggtggttcaggaaataggtggcgatgtggataccctcaacccagtaatgagtaggaaggaggcctggaattggagggtgcgaatgaggttggtgatggcgccaatcatgggctcggccttaccgttctgaggggaggtgtacccgcaattgcacgccgcgcgagagaaagaaggcatgagatgtggagttatcaaacttctgcccgttttcacattgcacaacctggatggtgcaaccgaactgagtcaacacccatgcgaataaatgagatagggcggtgatggtgccagaattacgaaggagggggaaaatccataggtagtgagagaaatcatctaggatgaccagatagtactggtaaccggaaatgctcggtatcggggatctccaaaggtcacaatggacgacatcaatggggtgagcggttcaggacatggaagagaagggtaagcaagtctgacgccaagctgacaagcatggcaacgcagtgttgccatagggtaggggattgtcgagccatagagatgcccgagagtctggataggacgtcgtgaccaaggtggccaagccaatggtgccacgtggaggtataggcagtggctgcgagagcatagggtgtggcaacacaggatgagggaggtggggcagagaaccgaatatgatataggggtccagaactgtcacatcgggcaaccacgacacgagtagtaagatcccatatg

SEQ ID NO: 187398 - DNA, 347 bp, Zea Mays
ttaagtcaggagtccatcgccatggagtccccaacatatacgcctgaggttgtacaccctacaacagatgcaattgaacctaatggatccgctcttaccccctgcgactgggttatccctgatatcgccagtaacccgttcctaccagcttcaacacagaccgaggatgccgattcactgcgtatgtctactagaccactaagacgtaaacaacatgtgccacgtggtgaaagacaagctatcttagcccgtcgaaaccggcaatttgaagcatccatttcaaggaacatggctactgtggctgaggatatcattagtgacgctgaggaaggggatgattggacaca

SEQ ID NO: 187399 - DNA, 331 bp, Zea Mays
cttcgcccgcctgcttccactacaccgacctctgccccgcctattcttgcagccgccgcctcttctgtgacttggcatcgtcgtctcggtcaccccggtcgtgatgtgatgtccaagctctccagcagcacctccgttttcggttgtaggggattttttgagcacctctgtcatgcttgtcagttaggtcgccatgttaggctcccattccccatctcctcttctagagtagcagacatttttgatctgatacattgtgatgtatggacatcccctgtaatcagcatttctggctataagtattatttacttattcttgatgacttctcgc

SEQ ID NO: 187400 - DNA, 386 bp, Zea Mays
gtcgccacaacatcaacgaagattcaaaaacttatgccaagggaagatatgtttgtagcatttccttttgtatggcagaaaccatacggattcttgtcatatgctcaacacactttccattgagtcatagctgtcttcaagaaggatatattctgaatctgaggttcctagtgttaacaccatgacacaacactttggaatcagaaagaagtcactgtagttaagaatattccaaattcgatttggataaccggaataagatcacaagaactttctattgcaccctttttctcttttctagatataccaccaaaaggtcgattgctaaatctgaaacaatgatttgatactgccgtagtgcagggccatgcctcgttcaggaaata

SEQ ID NO: 187401 - DNA, 384 bp, Zea Mays
tgcttgggcacacctgtaggagaacatgaccacataaccctgttggaatagaatttagactgcaatacgccatttaatgaagtaaagctttctatgtggcatatgtatgaatttggatcagacagagggcctgtcaggaacagtgatcatctactatatcatttggtgttgatgatatgatgtaaattgcttcaatcccctgtttggatgatggttagattggataagaataaccatttaatcaaatagatgcatcactgtcttcatctaactatctagtagctagccttttgaactgaaaccaatccatttgtcattagttgcatgacaaaagtggaacaaaggaaggtggacccactgaggaaaaacacaagagcaaaatca

SEQ ID NO: 187402 - DNA, 747 bp, Zea Mays
cttagagaggagtcacttttctattgatgagccaggagaggttgccattcaagctttaaagtggaactgcaattctgagatccttgctgctctggtttcttctggtcagcatgatgttatcaagatatggacctgcaggaacaatcactggtacttgaaacatgaactgcggtacacaaaggaagagggggtgaagttcttttgggatccaacgaaaccaatgcatctgatttgctggacactgagtggccaggtcattattcacaagtttgcttggactacggcagtcagtgagagttcaattgcacttgtgattgatggttctcatgttcttgttactcctcttattttgggcctcatgccacctcccatgtctctgttccaccttgcatttccttgtgcagtgaatgaggtttcttttgtgaccaataactcgaagagccatttggctgcttatctctcaaatggcagcctgtctgttgtggaacttccagcacctgatacctgggaagaatttgaaggcaatgggataagtgttgatccttgctgttctgacttcactttgaataactgtatgcacctcacttggatagatacacgcaccttgatcggtatctgttgctatagtgaacacctctcttcaacaaaaatcaggtccagtgaagccagtaaccttgtagataaacatgattcgctgtttttcatccatgagattgaacttaaatgttcagagagttctgtgccagg

SEQ ID NO: 187403 - DNA, 377 bp, Zea Mays
attaaggggtacgaccaattgcaatcaccaacaatcaatcaacaatcaatatatcgttcattctttaccttttgtcctaggagtagacagtaatgtagctttctccctctaatctttacctccctaactctatgtcgtatagaggcgtattggatggcctgccaattccaagataaacctaggatctctccgcctcgatggggtccctcccaggagcgagatctaggtattgttggtggattttgccgccgatgtgcacacgcggattgtccggccaccaggcacagaccatccggctcgtcggcaggaaccctagcctctaggctagctctctgaccatcttgccctcggctgcagaccgtccgcaccgccacaga

SEQ ID NO: 187404 - DNA, 422 bp, Zea Mays
atttaatgatggagaaaagttgactgatgattggtggagcttttttgacaagatatggacgcttctgtgctatttgaatggcaaaggccaaaccagattaacaccaaagggtttaaatacagctggaccatctattgggcaacgggcccgcggattagtagagtccctcaatatcccagctgcagaaatggctgctgtagttgtaacaggaggcatcagtagcgcattaggtggaaagactaacaaagttgctgacaaagctatgatgctaagaggggagagatttccaagaattatcttccatctcatcattatgtatctctgcaaagctggcttagaaaacgcatccaaatgtgttcagcaatttatatcactgctccctaatattatctctgaagatgatcagtgcaaaaatagactgc

SEQ ID NO: 187405 - DNA, 1051 bp, Zea Mays
aggtttgcccaattttttatcaagccattgatgtccccagatgctacacttagggaaataaaagctgttgactctggtatgtgatatctttttgttttttctgttgctgttactggaatgacactttaattttctaacttccatttttcatttttagaaaatcagaaaaacctcttgtcagatccttggcgaatgagtcaggtacttgcattttccaagctcatgttaaataatcagacaagttaattatagagatctgattttatttgtatctgttctttcttgttttcagcttcagaagcatctttgtgcagagaatcatccttatcataagtttagcactggttgttttctgaacattttttccctttcctttctgttcttacattacatacgattaatgacatttagaatacactgctcatttcctatctaattttatatttctttgaatgacatgacatctctttattttagcattcatactggttgtttacagaaaccttttatttcagtttttgatagtgatagaaataaaattggacacaaggcttgagcttattaaatttcattttgacatgatatctctttgcttcaacaataaatgatgtttcaatgtaataaagagttcttttatgatatatgcttcactgcttgcttgaaatattggaaatctttagaacttattttcactgcttgcttgaaataatggacaatttcttggaactgattctcactgcttgcttgaaatattggacaattccttagaactgatattcagaattcttattgattaggaaattggaacacacttgaagttaaagcaaaggagaaaggattggacacaaggcttgagcttattaaattttatgattcacactactcagctaacttgatgcaactcgttgtgtatggaaaaggttctccatcaaactgttctgtatttccttacaagttatatgctgttaaaacttttttttggttgttttgcttctcatatcttttgtattttgcagatagccttgataacctgcagaaccttgttgaaaat

SEQ ID NO: 187406 - DNA, 290 bp, Zea Mays
cttgatctgtgctttggtcgctacgatagtcctgagcacaaagtcgctgattctcctccagagatgtggccaggaaaggactactacaatcccaggtattttgttgttatcttctacccattcagatgtatggggcaaagtccctaaatgtcacttcatctctgtaaatagggaatctgaacccaattcctgggaggacaccatgaaagatgagctggaccgtgataaatatccccgcatgccttggcatgatgttcagtgtgctctctatggcccaccttgccgtgatg

SEQ ID NO: 187407 - DNA, 428 bp, Zea Mays
agcccctcctcactgacttgccctcccctccaaaatgcaacctcgggctcatctgttcctgaatcatctgacacaatcgaaaggtacaccggaaaccaattcgcaaataatgtcggacatggataaccatcaggccttgagaaacctgcatcgtaacaagcgttcttcaatctctgcagcttcctccatatattcaaccccctgggctcactcggtacaaggtagctggcaagtgccagctgcatactctcacagcaacgcttcatgtctccacggaacaaggtgagtggtgggatcatatcagaggtgctgtccacagatccatggaaagcacttgcaacacctgatctccctgagagcacctcattccttccccggttcagcaacgccagcatgcaaccaaggacggcagtgaccttgtcttccag

SEQ ID NO: 187408 - DNA, 376 bp, Zea Mays
cgaacaacgaaataacatattgtgattagggatttgaggacttaggttttaattctccattgaaatttatatgcactgaatttaatattttctcacacgcctgtacataattgattaatcttatacaggtcaaattgctacatatgtaattgaatgaaaatgaacctgattatcctcagttatcaaccacaacttctcatcatgtagttatgcaagtgaatatttttaactgatgcccaaacaaacctttaaatcatgccttagcaattttgtcaagcaccaattttagttcaacttgaacaccaacagcacagttctattgtcacatcagtttttttccacttatctccaagaatgtctctgtcccctcaccctt

SEQ ID NO: 187409 - DNA, 514 bp, Zea Mays
ggcaaacctcctggacgacatatgcgatgtcgggcctagtgaaggtgagatactagagagcaccggtgaggatgcgataggtggtggggtcacttacggaagcgttgtcgctagagagcttggcatgcgtgtccaccggggtcgcacagggtttagtctagcatgccagcccgcttgaggatgtacatggtgtactgtcgctgttgaggaagagtccatcggagtgatgctcaacgacgatccccagaaattgatgaaggggcccaaatccttcatgtcaaactcatgctgaagggcagtgatgatccggtgcagggagccgaagaggaggcaatgagcatgatgtcatcgacatagaggagcaggtacatggtgtcactgctacgctggaagatgaacatggatgtgttcgacttggcctcaacaaaaccatgggagagcatatatgtggcgaagcggctataccaagcgcaaggtgctttctttaggccatagagggacttgttgagcttgc

SEQ ID NO: 187410 - DNA, 366 bp, Zea Mays
tgttagactcaaagagttgcacatgttggtatgataaactgtcccgtgtgctattcctttctgtaattttcatgtgcggcaagctcatgttactgtctatttttgtgatgatatcagcagtatgttctataatactgctactgtttccaacagctttgttatgagcaacagcagaagtggcaaattcaccatcaaccttggattgactctctgactcaacagccaggagccacaccctagtctcaatttcccgcaaaagatgaagaggatagaccctgcaaaacggaagtgctaatcggcaaggagaagataagattgagcacaatgtgaacataaataaaaagattaagcttacggagaggattt

SEQ ID NO: 187411 - DNA, 599 bp, Zea Mays
cacaaaactgaggaaaggaacttagggtgtgcctttggaatactgtaagggtcaattcttttcctttggaatactgtaagggtcaattccttttctttggaatactgtaggtagatgcccacttcacagcgtctaaacggtcgacagcctgtttagacatcgtttaaatgctacacagtcatatgtagttttcatgtaatcgatcgtttactgtttatcctgtttaaatggctgttatgcctgttaagttggctgtttagctcaggcaatggctaaacgacaagtagccgactgtttaccttttaggataacactacttcacaggaaaccaaacatccactccgatctctggttttcttttcctttttggatgcccaagacagtgggtacgaagaggagaggagagaatgaggaagaccacaagaagctgtctgtccctcctgatcttctcttccactgctgccaccgttccaagaaccatcggaacttggtaatatcaggagtcaggacggagagctgaaagcaagggtcgagattagaatggggaaaagtgcatattatgactttttactgcatagtgaatatataaggactattag

SEQ ID NO: 187412 - DNA, 280 bp, Zea Mays
ccgttggcgctcagttcgaaggtgtctacagaaacgccactgtgcatttcaagttttcaaccagatgagggggaccatttccttttctacggatgaaattaatggcacacgaaaactagccaagagctcagatcatttttccccgcatactccagattggcccacctctgatcaagaattccatgaacagtgaaagaacgatttggtcacccactaaccgacgataaacttgttcctgagtttgaaatcaaatactcctacaacttaaaaccattcgtcg

SEQ ID NO: 187413 - DNA, 549 bp, Zea Mays
cagctgcgttcaatgttgcaaatgatcgagacaacctttaaggaagctattaaaaggagaagtgcaagtatagaattatctgctacagtgtatccaaagaatggagctactgacatgataagggcaaattatcatagagaggttggaagctcaagcagtactccttttaatgatacatctgatagtgtaacagcatattctgattcttttaaagtagagcttgggcgtaatgattttgagaaggcagctatatcaaaaagggcagatatatttttaaaatggatgtggagggaatgctacaatcaggaagagacatgtgccatgagatacggcaagaaaagatgctctgaattgttgcattcttgtaattgctgctatcagatttacctagccgaagaaagacactgttcttcttgccataagactttcaaatccatttacaatttttctgatcatacaacacaatgcgaagagaaatggagaactgacccttactggaagatgcaaatcgctgattattctgttccaataggaatggtattactcaag

SEQ ID NO: 187414 - DNA, 751 bp, Zea Mays
ctgctttagcgaataggaggccaagaacatccataactaggatgaatagcatgggggagagggggtctccctgcctgagccctctcctatgggctaaacgttcccccggggaaccattgagcagcacttgtgtagtggaggaagccaataacccacaaacaatatccctccagatatgaccaaaaccaatctgctgcatgacttcaattaggaagggccaggacactgaatcaaaagccttagtgatatcaagtttgaggagtaggcgaggcaatttttgctagtgaaacagccttgcagtttgttgtaccaacatgaaattatcttggatgaaccttccctttataaatgcgctttgaatcggagagaccagctcatttagccttttggccagccggttagcaagtatcttggtgatcagttttgcaaaactgtgcacaagactaataggcctaaagtctttgacctgctctgccccctctttttttggtatcatggtaataaaggtcgtgttgagcttgtagaaattgttgaaattcctgctccaaactgccctaactgcagccataacttctgctttaatacttccccagcaatctctatagaatcgccctgtgaatccatccggccctggggccttatccaaaggcaagcctttaatggtttccaaaacctcttgttctgaaaaaggggagtctagatcatccagattgtgtctaggcagtccaagggcatccaaatcaatagtcat

SEQ ID NO: 187415 - DNA, 315 bp, Zea Mays
ggaaggtttttccgaattcctgtcaccgtttctgtaagtggagtattctgagtagaaccaagcaaaagctgacccatacatactcagagcatccaaccctaagagatgagcttgagagctgtgtgcttgagactgaaaccatctcgacattcgaaaccacttggatgtcaatcattgatagatatgacttgagaaagaattcatggcttcaagcaatatacaatatccgccaaaaatgggttcctttgtacctgatggatacattctttgcagaaacgttccccacatggaaattggaaaccatgaatgatttct

SEQ ID NO: 187416 - DNA, 370 bp, Zea Mays
cactaatgatgtcctaccagccagactgagcaaacgacccttcaagttgggaagccggtcaacaatcttattaacccacaccataaaatcccttttcctcagccttttatcagagataggcagccccaaatagctgcacggaaaggatctcgaactgcattgcaagatattgcagccagcctgactctccagcccttcacacctaattggtatagcaaaacttttgcgcagatttgttaccagcctcgttgcttcaccaaagcaatccaaaatcaatctaacacaattcagatcatccaccaaaggtttaacaaaaagcaccacatcatcagcgtagatcgaaagcctattctgaaccccagcttcctcc

SEQ ID NO: 187417 - DNA, 488 bp, Zea Mays
gaaattttgcatcagatgtctgaaacattctctcttatcagcttgtgggaaaactagttccacagcagtcatcaaacccttgccggcatcattacaaatagctagtttctccatattccctatggcccttcgaagctatgtcataaaccaaacccaattatccttgctctcagaatccatgaacccaaacacaaccgggtacatccatttgtgtccatctaacgctgttgcagctgttaggtgaccattccatctaccattgagtgcagttgaatccacacttaggtaaggcctacacgcagcacgaaacccttctatacaaggttcaagtgcacagaaaaatatatggaagtacaccttttcatctacaacttgggtgtctatctccaccactctattaggggcttttatcaaaatttctttcttccacctatacaacataatgaaactatcatcccaattgccatacatctcttttaaagcttcct

SEQ ID NO: 187418 - DNA, 447 bp, Zea Mays
ttattgcaataacaggtagcacacttttgaattccagcatatgtgtttttggagtattcaagaatactgtttattccatttagcacacttgtagtttgattaaatatatttgcagggtaagcaagggctcgttaaacacttgtacttgggaatactgtttatttttaatgaaagtgaaagtgagaactgtgggtttttctgtgctcaaagtgggtcatgcgaaaagatacggaagggtctgggaagctctactactgaaaattcggtatgcagatatgggtatctacttgtcaatgaattgaggatgttctttgtgtgactttgctttctatgtatcaggactttccaactcccatgttttctgaacctgcttatgagcaaaatgagcataggaacagtaagtgtttcttgttttcttctgtaatattttctgcatgtaagtacatt

SEQ ID NO: 187419 - DNA, 302 bp, Zea Mays
ggagatggaaaagtattttcctgttgatatttacacttataacatgctgttacgagggttctctatggcaggaaggatggactctgcctgtaggttgtatgaaaggatatgcaggcaagggtatcaaccaaatcgatggacttttgatacaattgtgcatgggttctgcaagaatggtgacataattgaagctcagaggtggatggatgcattgtatcgaagtggtttctatcccacttggtacactatgagggtatacaacaatttgttgttgcgagcacaagacaagaagatcatttctt

SEQ ID NO: 187420 - DNA, 364 bp, Zea Mays
tgagttgtgaacacttttagtcatggaaccaaacatgcagcaactaaactttagttcttggactaaggaaccaaacatgcccttagttggaagtagcaaggtcgaattctttggcttcattatcgaaattataatgatgaaacggtgcttcttgtcatgatggactaaaagaacatactatcctgtatgtatcctagcttctcaaagactaaagaactaagtctagtgtcatttgtctagtatgattcatagttattttcctatgttgatagcttgctctctgaaattcatgaatactcactgctcttgtttttgcatttttctttgcaactggtctctgttctcttggccattctttgtttgc

SEQ ID NO: 187421 - DNA, 345 bp, Zea Mays
gtgatgcggtgaaacgtgcagcacctgaacttggcccaaggcgaccttctcgcagacgaagtacatgtcgagctcaatatgcttattgcgacaatgatgcactaggttgaccggagatgtgaagttcccgtattagttgtcgtaaccagcagtacttgatgatggcatgggcgatgacacggagctctgcctcgacactagagcaggaggcacccgtttgacgttttgagtaccaagagatgagattatcacaaaggtagacacaataaccggaggtagaacaccgggaatcaggacaaccagcctagtccgcatctgtgtaagcagtcaaggtttggacttggc

SEQ ID NO: 187422 - DNA, 1074 bp, Zea Mays
gagtggaaggaaagacaccctgaatcagcatcagataattcagacaagttcttaaacttgagatttgtctcccttgaggttcgtacataataagttccatgttctattctaaatccctaggtgaaattcttacaaagtatccacattcatttctgtggcttcaggttttcatttgttgtttgaagagtgtaggaactttgaatctttaatccaaaagcaattaaatacaaatagtggtggagatagatttgtgttattactttttgtcgtggaagaagattgatttttcagggtctttgtcacaaagccatctatggcctgtatgctcagatgtcatataatgtttacattgaccatattttacatgtatgtaggtcaattcccttaatttggacatgattttcattcacacttgcatcctagttcatattctttccagtatctagcaattttggggtaatcaaaggctatcgatctttgctacaaaatatgtcaattgttggcataaacagcttctgataattatctaattcacttgattcagttggtcagagtttgctctctgtttcaactgaaattgcagtcaatggattgcttgattgaattcctttgtcgtgtgcgttgtaaattcactgatcatggcttatccttccccacatgaatttatgtctggacttgttttgttgcaaacttctgcttatatgtacaaagtgttgggtttatttggtttatcacattttttattaagaaaaaaatcctggccgcagttgaacattgtttttctcccatgaatgtggtaccaattttttgtgtggtggtttatagtgagcatggtatatgcttttaaagaatcacagctctttacatgtatgctaatcaacacttagaatttgtccttttctataactttggtgttctaattttgtattgttatccgattatgttctatttgcggtgcagctccctcagcaggataattcatatgattgtggcttattcttgctccattatgtggaattatttttgacagatgctccaagtaacttcaaccctctgaagattgatgtattttct

SEQ ID NO: 187423 - DNA, 437 bp, Zea Mays
gtggtgatgagtatgatggggccatgtattcacagcttgtacgttgttctggtcctaagaaacattctgtttacactttccagtttcccctggacttctaataccatttttacacattttttgttttctagaatttgattgatctagctggttctgagagctccaagacagagactacagggttaagaagaagggaagggtcatatattaataagagcctcttaactcttggaacagtaagttctcattgccaattacctgtgacaacaacagatttccaggttattaccagcagcattgacttcaactcagcttctgaagaccttgacctcatataattataacttgtatcaaaattgaatctgagcatatgatggaaagtaactggtagaatatgtggagagcttagcctgttatcggatacaagtactcatttg

SEQ ID NO: 187424 - DNA, 333 bp, Zea Mays
ccacagtgcctcagcctaggtcaaggacaaaacctgacaacatagaaggccctttagccccagcaatacaccatagactatactcatccccgggtaaggtcaaggtcttagcgatactaggttgcgacccattgaacacactcattccggtggcgccaaacactccaaactcctaagctcaccaaagaattaaacccctttcgggcatcttcatggatgcgttcagctgagctgctccaccaaccgtccaagttaacctcatcaaaacccggtgtcaaggccgccaggctcaccctctgcagaaaataaaaccagaattgcctcgcgaagaca

SEQ ID NO: 187425 - DNA, 283 bp, Zea Mays
ggaattgcaggggtacagaaagaaacaaggagattgtcgaaccatgaggaagctattgcataacagtgagagatttgaataccatgctagtcctaggatggtaattttgtataatgtattttttccgtaaaattgtttattctgaaatactaatttaactatccacatcaacaggttccacatgtctataaaccagaagttaagtatgttaagttgacaatagacaagtatattcctcacgcaaagaaaatgagggttgccgcaaaagaagcctcgccaattc

SEQ ID NO: 187426 - DNA, 402 bp, Zea Mays
ccctttcactaaaaacactcctaggtttcccaaggtgtcaagaaatgttaagatacgatcctcatgatccaaaggtacgctcctaggatcacgaaggcctatctctaggagaccatagaggaccgtaccttcgtgatcctcaaggtgtgattccctcaaagtcaagaaatgttaagatgacatgtcctcgtgatcatggagtcaattcattgaaaccctcctaggttttgccttcaaaatacgatagtacatccaaatgttatgtcatcatgagtccttgatcctcaaggaaaccaagcttgagtctacatagagaagcaagaaggcagaagaaggaatgcaaccatggaaccaaccaccttgtacgaagcatctactaatgtggatggcacaccaaagacc

SEQ ID NO: 187427 - DNA, 332 bp, Zea Mays
cacagaagtagacacagatattttggtgctgtcgaaggcagttttatgtttatgttactctcttatttatctgttaataataattacatggccaagtggcctagtgccgccgaactagaaggcatgttggagagtaactgactccactacctcccttctcctaaagactagggcaaagccccactaggatagactcgaccagttgcaagttgcatgggcactactctagctctgcctgacgaaactgaacttgggaaaaacacagacatacctctagactcgaaattggaaagcctaccactaacagaaatagatgtggagttatcaatagc

SEQ ID NO: 187428 - DNA, 731 bp, Zea Mays
tctgagttatccccagagacaaatgatggtgataaaaagcagctaacagagtctggcaatataactgctgacgaatcatcaaaaccaatcgatactaaacctgcttctgttaaaccaaagaggggccgacctccagcagcaaagtctcaggagaaaaagcctgttggaaagaaacaggcatcaaacctaaaatctccaaaacttgatcctgtcactgattctgtagggagagctaccaggcaactgaataatgatgttgcaaagtcttcatcaactaaggctgttgatggagaatctgggaagaagcaacataaaaccagtatgaaatttcagaaagaagatgccgcctctgataaagacaccgatgatgatattagtttgaaggtacctttcttgtttattaagcgacgccttaattccatcactaaaatcgttcatcatgttttgaccttttctgtttacactcccccctctctaatgtggtcttccacaatgacttgattttttcatcaattatcataattcaggaaatggtgtccccaacaaggattgataaatcaaaaggccaacaagaagatagagggacgtcatcaaaaaggaaacgtctgctggaagctcaagatgtatacatgcttgacacacagtgaattgtctttgaccttatttctgtttcagtttgtcagaaccttttctgttctgttggcagacccctgtatcgaagaaaaacaaaa

SEQ ID NO: 187429 - DNA, 342 bp, Zea Mays
gaaagagtaagaagaagatgacgtggaggtggaaggtggtgttattggaatgagaacatcagatgtggatgtagaagatgatggtgcagatgcaggaatggaaggaagacacatggaagaagtagattctgtgggataatatgagtgagtagactggttgtgaaagaaggggcgattttcattgaaactcacatatctagaaattcgaatacgacgagtcgaaggatcataacaacgatagcctttgtgttcaggactatatccaaggaatacacattctacagattgagcagtcaatttggtccgctcacgtggtggtaactagacataacatatacatcc

SEQ ID NO: 187430 - DNA, 357 bp, Zea Mays
ataaaaaggcctttataggctgccttggcagagtatttgccatcagttacaggactgaaaatgtgcttgtcatcgcgccccgggatatagggttaactgtaagaagggtttctgaaagatcaaggaaatcagcaagcacccctacagttattgcgccctgatatcagccatccatttgttgtcctcaatagcatcatgaacagtcctacatttcctgatctgcttggggatagcaacaagcagtctaggagcgaagtctgatatcctttttccatgaatccattggtcttgccaaaacagagttgaagatccattcccaatatcagagaaggcggccctagctttttctgctagctg

SEQ ID NO: 187431 - DNA, 399 bp, Zea Mays
caccaagcaacccaagtaaattaatggttacctctgctgactcgaaggttaaaattcttgaaggaaccactgtgactcagaattatagtggtactttccacatgcttagctttcattcttattgatctaagcaatcgatacattttatgtattatgagctcatcattttattcattcaatcaggactccgtactgggtcttgccagtccttggcaacattcactcctgatgggcagcatatagtttgtgcaagcgaagactccaatatttatgtatggaaccatgaaaaccaagacgaggcttcactgaaacatgcgaaaaccatatggtcctcagagcgcttctactccaacaatgcagccatcgcaataccatggaatggcccgaaacccagaaacc

SEQ ID NO: 187432 - DNA, 307 bp, Zea Mays
ttcctaaatacagggtctgaaacctaccctgagctgagcccaacagctcaccactaacttttctgtttatgtgatttatatttttcgattaggtattacacgatttttattctttacaggcaattcatataatgttttaatgtttgattggtctagtattttagggattaggaagagaggtctattagattctgattttatcttttctttcatctcttatcaaggctaaatgttttcccatgcattaatgcttgcttatctatagtatcaccaatagaaattggagttatcaaattgactctaaact

SEQ ID NO: 187433 - DNA, 651 bp, Zea Mays
gccagaatgcttagcattggtaggtgcacttgaacattgtacctatgatcctggattggccggtggtattgttaagagctttcacgtgatcctacaacttgcaactgaacaaactctagcttctttcaagtcaattgatgtgctcactagagtcctgaaggttgcatgccttcaagcacaagaaataaggaagctgtcccaagatgacttaaatcaaaatggttctcaatccagaaatgctcagacgacttattcagatgagagaattaagaacacttgtgcatttgtgaaactggctttcaaccttttcaaggagtatgccacaatatctgacattggaaggattacagttttatgcaatgctaattgcatcgagtgtttatttgatttgttccaagaagaatacctcaggaaacacatattggagcaagtacttgccttatttagggtaagtcgtatccaccctcttttcttatattgttctttatactattgtctggatcttaaacctctcctgttctttcttacaatcagttaccttcgtcatcagcacaacaccacgcagcaaagatgctactatgctccaaatatcttgagactttcactcgtgcaaaagaaaaggaaaaggcttttgcagaattgtcaattgat

SEQ ID NO: 187434 - DNA, 302 bp, Zea Mays
gagctaacatcacttgctgaagagcagaaaagcgctgaagaggatagcgtttctgaagggtatgagtatagcagcaatggcactgatgatgttcctgtgagggatgaggtgtcaagtatcgagcgtctaatggtaggtgacttgactgttgagggcattgagcagcttgaaccatcccgtgaaatatatgatgaagcaagcagcgataagatgtccgttgagcctcagaaagaagctgagcctgattcagacaagttgaagcaagggaagaagcaggaaatggaacgaaaggagttcaccaa

SEQ ID NO: 187435 - DNA, 403 bp, Zea Mays
caagctgttgaataagatactacttttttgcttgggagaagccactgctcttgcaaaacttgttcctgagatcatttatcgaagtgaaaatgtaagtaacaatgatgtgctcctttggggcagcttcaggctgtgcgtacaggttattcaaggttcatttcgtagtaccaacatacaggtatataactacttcacctattaatggtacccacatgtcactctttgctagtggttagttatgaaattgttttaactaatcaggtgcacatgctgggtctgcaagtactgagaagctatgcacagaaggagctaactgaaggttcagaaacaaagttggattcttttatgatgttgcttacggaattgttgggagacttgtttttggtgatggagactacattga

SEQ ID NO: 187436 - DNA, 768 bp, Zea Mays
tagtatgtatatgcagtagcagaaaaaataaagaagacagctcattgggaggttgatgttcaattggagttgtttcacacagatataggcgcaaatcgtctatctggtggtcttttcaagggaaagactctcttgtattcagacttaaagcatgtgctattgagagttactcccaaatatttaccagaagctgaggaaaacttgattctggtttcttctcatattgacactgtttcgacaacgtaaggctcaataccctcttcattaatatgtaggaaagaaattaacaacaattaacttggcattgactattggtgtgagttcaagagtatctaatgagaagacatttacaatatgtttcgaaggaaccatacgaataatgtgtgtgacatgggttgtatgggctactgcccaacttttttcttcttaatataatgatgggcaactctcctgcgcattcgagaaaaaaatattgtatgattgacagtgttatatttttacctggttgttccgtttcactaataatttagatagctatccatatgggcattgtgataagtgataacagtaacacataaaattatttatttttctttgtactagtaggtctaattgtagtgacatccacatgttttgtccattctttttcagatattaaatgtgttcttgaattttcagggaaggagctggagattgcagttcatgtgtgggagtcatgttagagcttgcacggggagtggcccagtgggcacatgggtttaagagtgg

SEQ ID NO: 187437 - DNA, 423 bp, Zea Mays
cgagccccacatccgaacccacgttccaggaataccgggtcaggcccactttccacgcggtcaaccgagcatatgtcctcatcgtccacatcacctatttctctaccctaaccccagtcgctgtcctcttccctcgccgactcgttgtcaacccaccataattcatcgtgcagcgcagcggtgactcctcgttcctccgcccctgcacgcttctcaaccctaaccggtgtcgttctcactctcctcgcggtcaaccggagtatatgcccctgtgctgccgccgccattcgtcgttgagccaccaccgcgcgactccataacaccaggtgcccgcatccctctcccaccaccgttgctgcattactctttcccaatctcaccgcctcattcttctgttccatttcttctccgccgctccgccgc

SEQ ID NO: 187438 - DNA, 305 bp, Zea Mays
ggcggatgttggtggtgaaggtccatttcaaatttggaaccttcgggtgactgggatttggagcttgtaggataggatttcgtcttctcgggttggtggtcctggtttctgttttagtgatgatggtggtgaaggtccagttcaaatttcgcattcggataactgagatgtggagcttgtaggatagggactttgtcctctcgatgttgtgctcctgttttctgctatcgttggtggtccagttcaaattcggtgttcgtaacacctgggtttggagctcgtaggatggggatttcgtcttctag

SEQ ID NO: 187439 - DNA, 2297 bp, Zea Mays
gtgattttggtgtagctgcccagctgacaagaaccatgtcaaagcgcaacacggtattcttaacagtgtttcttttgctacttcaaattccaaagttcaagaaacttcacatcgatgtgacaaacaaaatgaagtgcagatgaaacttgtcaatgccagtttactataagatgccccatttgtgcttgtgcatggttctttaatatgatgatactttgatgagaacttgaaacaagttcgtgttggaaaatgatcgatgtgaagtcctagctatttctgttaagtgttatattgaaaaataggaatgtgtatatttcatatataatatatcttgctcaattcttccttggcattcttctgtttttcgaaacccattcgtgacagcctctagtccccaaatatcccattatgagtttgctcattcccccatttggcttcttccttggccactagcccaccactcaacaattcttctgttcttgatgactgcgaggctcatttcaagctggcacattgctgccctgctggagctattggagaaagtagagggttactgtgacagtagcatatcaaatcaacagttgtggaaatcataatataaagacgtccaaattgggaaatattattcagggtgttatcatcctactggcaggtggcccctgcccaatatgtcatcttcactatggatggtactttcatcttttttcctcactgttagggagttggtgcactgggagtccaaatcagctagggtagttcatagttggctagatctaggaggtacgttgagtcagagtttggaaaatcagggtagagtacaagttcaggttctctaggacgatgatataatgtagtactatactataagtgttgtggtggctgtttttgaggaaggtaatgcttggtgctgggcttaggggcctgctctcaccacacctatagaatagttcttggtcgtcgtccccagtactgctgccagtgttgttctagtggctggggtgtgttttgctagtcatgactgccctgactggccttgtgttggggggggggcatttgttgtccccccccttgttgtattgtttccttcttaatgaaatgacacgtagctctcctgcgtttgctcaaaaaaaaaagaattgactggaatttatcaatatctagaaagaaaccaaaagaaaaaaaaatcaatctactccctttctactgctgttgatacttcttgtttctcttctacacgttctaggcagctacacttctctagtttccaaccatggcaatacataaatgcttgagtaacccataactaatagttctacatccaaccatttcgtagtagtgtgccggaaacatttggtgtcctcttcttgatggtatccaatatccattgcttttctgcaagcacgcacaagcagacacttctaagtacacatactgatttgttgtcaatttgtcattgacatgcagccatgctttgagcccagatccatcatgatcgcacaacacaaatctacatgtatacggtgtcttggatgtttctgttgttggggcgttaatatatacttcaatcaaaatgcaaagataaaactgtcccgattttacagtaaaataactctatcaacagactgtcagcattgctctctaacctcagtctgtatggcttttgccaaataaaaataatgcagtgttttttttgcaaagaacaaaggttttagtggcacactaatttccattatttgatccttcatgttaatgctttcagttcattggtactccacattggatggcaccagaggtcattcaagaaagtcgttatgatggaaaggtagcatgctattctctctgcagtgtatatctatctatggaattgttcatcttagcagcatttatggatgttgccatttcactctatcacttggcccataaatttatgattgggttttttgctgagtgatttctttaatattttgtttgtttgggtgcggactgtggaatgtctttacatatggcaaaacaaaggttacgtgtagctgcaaagtcataaaagccagtaaacaatttaacaattgttatgacttatgaaacccctgcctagtgccaaaacatgttatttcttttccttgtctcttgatagttcctctagtaaaaaaatattacttactacttaacctctaaaacatgcctactggttgcaatgtgagaaaattgtttttgcagttggattctttctttaatttgtcttactaaatcatgtgtacttgttttctgcgccaggtagacgtttgggcattaggtgtatc

SEQ ID NO: 187440 - DNA, 427 bp, Zea Mays
gctgtgcacgcggtgagtgaggtggagcagggccaaggcattgcgggggcagcgcaggatgtggatcccgcggtgtttgaggtgaagaagatggacgtgagcgagggtggcgacgcaagcaagcagaatcagcactctccgtcttgtacggccagcgaggtggatgtggggatcgttcctgtggcagtgcgagatttggatcctgtggggtctgaagtgatgatggaggtggacgacggccatgtcagggaacaagagcgcgcgggagtggctgtggcgggcagcgagtttaagatggaggaagctgatggaagagtggtgcatcaagggtctgctgccacatctgctgggggccttcaggcgcgagccgaggaagtgggagagtgcttggtcggccgttacattggccgcaacgcgccaatgcaag

SEQ ID NO: 187441 - DNA, 622 bp, Zea Mays
ccctgccgcaggccttgctggtgacaaatgagatctcctggttccccatttactaacactcgagtagaggaggaacacaatagcttagcaattaaattacgccagagtagaccaaatcccacatgttcaagaacttcaaggaggaaaggccacgaaactgagttgaaggccttgccaatgtctaacttcaacaatattctaggaattttctgcctgtgaatagcttttgcagtttctcgaaccatcataaaattgtcatgaatacttcttcccttaatgaatgcactctgattgggggagaccaaattagggaggatttcagcaagcctcttggccagaatcttggtgagaatcttggcaaaactgtgaattaaactaatcggtctaaaatcctttacctccacagcctcagccttttttggtaagagagtcacatacgccgagttaaggagataaagcttggaagagtccccctggaaaattactgacagagctgccaagaaatcccctttgacaaccgtccaagcacacttataaaaacgcccagtaaaaccatctgggcccggagctttgtccgaaggaatagacttgatagtattccagacctcttcttcactaaatc

SEQ ID NO: 187442 - DNA, 548 bp, Zea Mays
atcttctataaaccggcttggatttggtgttctaaacaagatagtattggagttccctgaggtattttgggatgataatgtggattactttggtgcaactgcagaagaaacagatttaagaggacaatgctttatgttttggaatctcagaaagacagctggggctccagttctgatagctctacttgttgggaaggctgctatagatggacaaagcatcagttctggtgatcatgttaacaatgctatggtggttctccgaaagctttttaagaatgcttctgtaccagatccagttgcatctgttgtgacaaattggggacttgatccctttagtagaggtgcttactcttatgttgcagttggagcatcagggcgagattatgatattcttggaaggccagttgacaattgcttattctttgcgggtgaagcaacatgcaaagagcatccagatactgttggtggtgccattttgagtggtttgcgagaagctgttcgcatcgttgacttactgaacactggcagtgactatattgccgaggtag

SEQ ID NO: 187443 - DNA, 496 bp, Zea Mays
gcagggttggccgatcctccactccagttcaccatcatgatccatagccatgtggacaacaagaacatgtctggttgggtggcgttgtctccactggaactcgcagcagctccggtcgtaggactggtgagctgccacgtcttgacctttgcagcctggacgaggttgttcccatgggatccaggggggaccaaccttggcatatgttaggatctttattttatttgcaaataaattaaagccgagatgtaaaaggcttccagttagggttgcactttcacgtgcatatcaagttagacagcaaggttgttgccatgcaccccattacagctcgaggacaagctgtctttgaagggtggggggatgtcatggggcggcagcccagagcatggaggccaatagggataggctcaggattaggattagtggataaagattagattagataagattgagttagttacttgggattagattagataagattgagttagtt

SEQ ID NO: 187444 - DNA, 1381 bp, Zea Mays
cttattattttgtcttaatgcatgagtatgctttcagggagttcaagattctcaatctattggaattcaatagcaaaagaaaacgaatgactgtaattctgcaggatgaagatggtcaaattcttcttttgtgcaaaggagcagacaggtaggatttgtaccattttttaattttttttggtgatgctctttgaatttattattggctaagcctgtacatcaggccatctgcactcagattttgatattttttattagcttaaaaatgttaataagcaaattttacacctgattacttggtgctgccaacatgcttggcttgtttgctctatctttttcaatgccactactttctttggcttcaacttgactatccttgaccgttctttgttcccaaccaagcagcatcatatttgatagattggcaaaaaatggaaggatgtatgaagttgatacaactaagcacctgaatgaatatggtgaggcaggcttgcgaacattggcactatcgtacagggtgcttgatgaatcagaatattcttcttggaatgctgagtttcttaaagcaaagacctctattgggcctgatagagagttgcaacttgaacgtgtctctgagttgattgaaagagagctgatccttgttggtgcaactgctgtagaggacaaattacaaaaaggggtaaaacagtgtctgacttttcgtattgttaagatatgaatcttggttcctagtattatgctagtaactattttgagttatgctagtaactattttgagttgttctgactcctaagttatgttttgtgctctatcaggttcctcagtgcatagatcgtttggcgcaagcaggtctcaaaatctgggttctgacaggtgacaagatggaaactgcaattaacatcgggtatgctgtcaagtagaaattcttaatatgtgggaagtaactttttgtaccttgttagcacatcacatccatcaacatcgtgtgatggctctatttcttttgcaggtatgcatgcagtttactgaggcaaggcatgaaacaaatatgtttgtccatacccactggtgagcaggtagcccaggatgcaaagaaggtaccttaacttttttctcttttactatacaagaagtttagatagtaattatcttaatggtaggctttactttcatctttgacaactgagcaggctgcaaaggagagtctcctgtcgcaaatcgccaatgggtcacaaatggtcaaactcgagaaggatccagatgcagcattcgctctagttattgatggaaaagctctagcatttgctttggaggatgacatgaagcatatgttcttgaacctggcaatcgagtgtgcttctgttatatgttgccgtg

SEQ ID NO: 187445 - DNA, 829 bp, Zea Mays
agtcaactggttacaggatatcttcccagtgttattcttcacgttctttcatcttgtgtgccctcaataatgaagttattttcaactatgcaaggatttgtttctgttagtgggattgagcaaagtgcttgcaataagatgcttcggtttacaatatggactgcgttctttgccaatgttctcactggttcagccttagttcaattcgagattttccttaatccaaaggagctaccttcaaaacttgcagttcttgtaccagcgcaggtagcttatgcttttcttgttttatttaatgaacgataatacagcacacattggtccatttttttgcagtgttatttaagaaagttatcacaaattacttctagaacaatgtctcacatggcattgacatttcctttcatctggatatgatacacttccattgatatagatctttgtttcctaagataagaatcttagtagccagcatgcaagcttaaacatggctatgtaattatgtaaatgacatctctgtagacatatttgtattgcgtccttagatgtggaatatacttcattaaaatgatcattagttcgtgagtatggcatttgtctctatatgaactgtgcattaataaactgttgttggctctgtgtttgctgtgtaggcctctttctttattgcatatgtggtcacatcgtggacaagcataacatctgaactcactcaaattactgctcttttctgtcatctgtggggaaagtgtgcgaagtgttgcaagcgggattactccaaagctccatcaatgccttattatagtgaaattccacggattctcttgtt

SEQ ID NO: 187446 - DNA, 547 bp, Zea Mays
cggacgtgcccacggcacagaccaccatgagaatcccgccggtggtgccaaaatcccaagcgcacgcccaaccctgcccctgctaccgataatgaaatcttgatagcttctgtaatgctacagagagggaaaacaaagcttaccaagtttagcgccgacccggccgaccatgactggatatccgcagcaagcgcctagttctgaggttgtaagagcagaccgacgacggagacaccagtgggtcacaccgtgtaccttcagtaccctatcctctcggccttctctcctctctctaggctcacggtaacggcgacctccagcatgcagccgagagatgcatggctatggtgttcctcagatgacaggcagggcggtagcggtggaggttatttatacaccggcacatcgagccatggaacaagatcggacatcagagacgcgaattgcgcggggtttgttaccagcgagaagaaatagctgacaggggtcccacctggcagccgaacagccatggcgtcattgtttacctcagcgtgatgtcatcgaa

SEQ ID NO: 187447 - DNA, 658 bp, Zea Mays
aaccattgcgccaagatacacacattctgtgcgtgtcttggatgagaggttcattaggatcctgaagatattcaagtggggccctgatgctgagaaggcgctggaggttctcatgcttagagttgatcactggttggtacgagaggttatgaaaactgacgttggggtcaatgtgaagatgcagttcttcagatgggctgcaaagcggaggaattatgagcatgacacatccacttacatggcattgatacattgtttggaagtagtggagcagtatggtgagatgtggaagatgatccaagaaatggtacggaatcccatttgtgttgttaccccaacagaactttcagatgtagttcgaatgctggggaatgctaagatggtcagacaggcaattacaatcttctaccagatcaaaacgcggaagtgtcagccaattgcacaggcatataacagcatgataataatgttgatgcatgagggccaatatgagaaagtccatcaactatacaatgagatgagcactgagggtcattgcttcccagacactgtgacatatagtgcattgatttccgccttttgcaaattaggtcgacgtgattcagcaattcagttgttgaatgagatgaaggagatcggtatgcagccaactactaag

SEQ ID NO: 187448 - DNA, 347 bp, Zea Mays
gtgatatgctgtgcacagtgcccattggttcctcccgccgagataaagcgtctgcagcaccattcaatttgcccggatgatattcaacagtcaaatcatagccaaataatttactgacccatgtgtgttggggaatggtggagagccgctggtccaagatgaacttcaaactgtaatgatctgtccggactgtaaatgcacgtccccagagatatgggcgccagttgcggacggccttgaccaaaccgatcaattcccgctcataagcgggcaacttctggtgatgtggcgcaactgcacggctgaagaaggcaattgcaccatcaccttgatggagcacagcgccg

SEQ ID NO: 187449 - DNA, 927 bp, Zea Mays
gcagtggatgctttgttcctcattgttggtcagacatcggcaacattgttagggcaatactactacagtcaaggtggcaacagcaagtggctttcgacattcgtgcagactgctggcttccctatactgttcttcggcctgttctttttcccttcaaagtcgccttccagcgaaactccggtcggaaagattgccactgtatacattgtcttggggcttatcataacagcggacaacacgatgtactcccatgggctgatgtttcttccagtctcaacctttacactcatctgcgctagtcagttggccttcaacgtcttcttctcatacgtcctcaactctcagaagctcaccggtttgatcatgaactccgtggtgctgcttaccttggctgctctactccttggagtcaaccatgaatctcatggacctaccggtgtctcaggagggaagtatgtgctgggtttcctgttgacactgggggcatcaggcacctactcactcatcctttccctcatgcaacttgcgttcgagaatgtgataaaggaacataccttctcaggagttctgaacatgcagatatataccgcacttgtggcaacttttgcttctctcgttgggctatttgcgagtggagaatggaaggatttaaaggaggagatggatggtttccagtcaggacagttctcctacatgatgacactggtgtgggcatccgtgtcttggcagctcgcttctgtcggagttgtgggcttggtttttgaggtatcggcgttgttctcgaatgtggtcagcacgtttgctctaccaattgtccctctttttggtgtgatggcctttcatgacaagatgaatggagtcaaggtcatagctatgctgatatcgatatggggttttggctcgtatctctgtcaaaactatctcgat

SEQ ID NO: 187450 - DNA, 422 bp, Zea Mays
cactgctcagccttgctttgtgcctttccgctcgccgcctagcgcccccgggctcaccttcctcttcgtcgcccatcctccgcatcatcgccagcggcgagcgggcaagtcaatgtggattcagactccatgtaagctctctacatctacctcttcaatttctaggccccgtgttgacctctccaaaacctagatctatgtcttaacctaacctcaaattgttccctacacatcttccaagggctcgtgttgtcattcatggcggggcagcagccgcttgctgcccccgttctttcatccggacaaggtcttcaacgaataattcttatggcaaatactagataacgtcgactctacataggccgcatccattcccaaatcggctatgattctgtccccatgaccagtcggagttcaaagca

SEQ ID NO: 187451 - DNA, 403 bp, Zea Mays
tccaatctagtcgtcccacaccaaatcggacgactagaattctggtcggtctaatcgccttggtgggtctagtcgggttcagtttaatgattagtccgactaatcgtgattagttggatgacttgaaaacactattggaaaaaaatttcttttatgtgagttcttctatagtccaccccttttactaagaaaatatgcttatggatgtcctcttctggttcaaccgcatacatgtccacgtgctagatggccctttatttgcataaacaaacaaaaaactctcctaagctaaccacatgcgtagaagcacatgtagtataagcatacacactgggtcgtgtttattttcctaacatactcagtttggtatgagcccgtaagcaagagaattcccttatccgat

SEQ ID NO: 187452 - DNA, 275 bp, Zea Mays
tgagagctggaggggatagtgccgcccctgcacccgaggaagatgaagttgttgtttacaggagcttcatgaaggcaggtctttggtttccattgagaaaatttttggttgaagtgctgaagacctttgaaattttccttcatcagattacccctgaagccattattaggatgggggtttttgtttgggcggtgaggagcaagggctagatccaagcgcaaagtgcttctgtaacttgcatgagctactgtacgagacgaaggccactggcaagg

SEQ ID NO: 187453 - DNA, 602 bp, Zea Mays
gcagctgcagctgagcacgaaccagctcactggcaccataccgccggagctctccaactgcacgtcgctgacggacatcgaggtcgacaacaacttgctgtccggggcgatcagcatcgacttcccgagactgcgcaacctcaccctgttctacgcgtggaagaaccggctcactggcggcgtgccgacgagcctcgccgaggccccgagcttgcaggcggttgacctgtcatacaacaacctcaccggtcccatccccaaggcgctgttcgggctccagaacttgaccaagctgctgcttctcaacaacgagctgaccgggctcataccgtcggagatcggtaactgcaccaacctgtacagactccggctcaacggcaacaggctgtccggcgcgattcccgccgagatcggcaacctcaagaacctaaacttcctcgacatgagtgagaaccacctcgtcggcccggtgcccgcggccatatcggggtgcgccagcctcgagttcctcgacctgcactccaatgctctgtccggcgcattgccggacacgttgccgcgcagtctccagctcattgacgtctccgacaaccagctcaccg

SEQ ID NO: 187454 - DNA, 373 bp, Zea Mays
gacaagatcaccagcccaaggttctgcacaggattatccgtacaaattgctgaagagcggtttgccctgacttgctatgctctaccactagaaggctttgatgtggtgttgggagtccagtggctacgttccttaggcccaatcctatgggacttcgaacgtctatcaatgacgttctggaaacaaggacgcaaggtgtgctggacagggatgggtagctcaaaaccccgctgttgtgtagtttcggagggcaaggaattattggagaacttgctgcaatcatacggagatctgtttgaagaacctcgtggcctaccaccagtccggcgccatgatcaccacatcagactactacccggcacatcgccaatag

SEQ ID NO: 187455 - DNA, 761 bp, Zea Mays
gagatggatgataccttagctaccataaggatgaaattgaagaagcggaagaaaggcaaggatagtaatgattttgatgcagtggctgaatgtggacccgaggttccggcattggttcaacaggaaggtgaacgggctgttgttgatataggtgatggtgttgctgatgagaagagcaatttgaatgtcgtgaaactggagggtagtgatgtttctgggaattgtgcacagggtttggatgatttggggttgaaagactccttggcagtgctgtttacaagacctggtcggaagtcacggcaggtctcagaggaggcagaaggcatggaagtttcttgtccgcatgatgaggatggtcttaacaagggatctggtttggctccagacacagcttccaagggcattaaaaggagaaggcgacgcacaaaggaagagatgaagaatgcttctgtgcaggatcagaaagcctcattgcctcggaaagcaaagacaaatggtagcaagtctactaaactctataaggtcggtgctggtcctgggcaagctttgggaggattgtcttctgtttctcctcaactggaaaagtctgggaaagagaatgctgtagatgatggatcattttaccaatcattaggtgaagtgcttctacaagatgtggaagccagcaaagtactgaaggatggatcaattacctctttcaatggggtcactgatcactttgaaatctcagcttgggcaagcaatcaccctgggctggaatc

SEQ ID NO: 187456 - DNA, 764 bp, Zea Mays
accaggatcttaaacagcaatatgtcatcgaagaaaaccaacacaaatttgcaaataaagggatgaaaagcacatcattcatcaaagcttgaaaggtcgtgtgttggttagactgaaaggcatcaccaagaactcgaagtggcacctacgcgtttagagcaccatcttgttgacatcgtccggatgcctgcacacttgatgatagccactacagagatctagcttggtaaagaacctcacgctacggagctcatccaagagctcgtgaaccactgagatcgaaaacttgtccttcattgtcttcgtgttcagcttgcgatagtcgatgcagaagcaccacgtgtcatttgtcttcttgataagcaacatcaacaatgagaacgctgaggtgcactcgcggatgatgttgtgttacaacatgtcatcgtattggatttcaatatcacatccttgagctgctccgggtagtggtacggccagacagccattggtgttatgcccgacagtagcctgatgtgatggtcatgacagcaacatggaagcagaccacaaggctcggcgaaaaggttgacaaaggagtccagcagtgccttagagagctcccaagtcgtagacaaggccatgtgccaaggtggcgtcctgcccacctgtccatcaaattgtgcgccattgacaccaaaaggccatggttatatcatcgaaattccataagacgggacccaaagttaccatacgagacgtcggtcacacccacaggagtaatt

SEQ ID NO: 187457 - DNA, 583 bp, Zea Mays
ggaaaaagcacagggagcaggtggaggctatagcggcatcctcggagcctcctccacctccggcaagcccggagtccaagcccaagtcaacaattccagtcgctcccgaaaccctaacctcagcggcggtgagggagtctccccgacctctgggaaacccggaatctaagtccgagtcgccgctactagtcgctcccgaaaccctagcctcggcggtgatggcagcggcggcagtgaggctggttaaggagcgcgagaggaagaatcaggtggtgccaccggcatctccgttaatggaggagcccgtgtggaaggaggaaaagcagcgtaagaaaaggaaacacgtgggcgccgcactggtggttccatcgccgccgactcctgatgcggcccaaaacttgcggatggaagccaagatgatggctgagggggcgacggtgaggaagaagcagaggcggctgaaggcggggcaggagcaatccggcgagccaccattttcaattgatgtccatccacaaggaggggaagaagctactgatgatggtggcgttggcgtcatggtcactcagtgtgtcaagaggag

SEQ ID NO: 187458 - DNA, 543 bp, Zea Mays
gtaagcataccaccaccgaaaagggcacttctcctataaaaaaattgctgctacatatatctacgctgacggacgccgatgggaccttcgcctaaagccctaaacgagccttggtcagttaaacacagtagttaggatttgtccaccaaaaattctatgtgagcagcatttgcccagtatgttcggcgtcgatgcctcccagtaagaacatgctcatagtgctacattcttgttcactatgaaactttggcgctctccctggacgacctttcctcttcggcatgtctcagggtctgctcgaatgcttgcagcgaattggaggtgaagctttctagggcttggacgacacggtgcaagctactctgcaaactgcttgcgtcaagaagatgttcctggtatgtttgcgcgcttggaagccggctgtgccgacctggtatcagggccaacttcctgttcaacacatctgcctccttgttgatctccacagttttcttttccagtattttgttccatttttccctttcccgtgtagcgatcgtctgc

SEQ ID NO: 187459 - DNA, 391 bp, Zea Mays
ctgttaagttcactaaggacatcttttaattagggttggatagaatcaagtgggaagggtgaaagcttgtgcttatgagtttggtggaacttctccctgtatctttctgtaatactccatctgtgaataaaatgatacaataacctgttgttggtcaatatgtttgcattcagtcatcaaactgttgattgaatggattaatttatccgttcagtaaccgatgcacttccttattgcatctgaccctagttctaagtttgttttgctttactttgcagagcctttacgttctaggaactaattctgacagaacactttggagactactcaagatcgatagatcagagccgtcagagcttgtgatagacgagtgttctactgtatatactga

SEQ ID NO: 187460 - DNA, 1298 bp, Zea Mays
gttgataatgaaagatttgatcacttcgtatatgatgggaagggtggaaagttatatttgctggatagtgaggggaaaattctctcaagcccttgtactgagagtttcattcatgtgcttgggtgtaagagattgcaatttcggaatgtcactatagtggtaatattcggcgttttagttttcattttttctcgctttttaataaccacacctatatggctttttggtcttttgacaatgcaataccttgctgcagaatggtgaatatttggattcctgtatctctctcggtgatgatagctgttattcagcatcaaggaatgaccatgtctacttagtaagagaagatgatgggtccttgtcaacccccagcaaggaaattagaggagacagtgttaaaaatgggagtgctgatatatcaaccgaatttattatggaactacaggtattgctttaaacttccagttgttgttgagacatttaattcataactgtgtcaaacacaaaattttcatcttctactgcatcatgataccatattctgtgtaagctaccaatgtgattgattcaaataaaataagctcatgaaagctattaaccttggtgattcatgatagttcaggaatctctccaacttttcattttgaatgtaattgttgaaatatcagcaggtccccccccccctcatcatatgcttaagattttacatggtttggttgactcacttagtgaattcaagtagcctggtgccctggtgcaatattgatagaaaagattgcagcccactctacaacacatcttaggtgtgtggaagctgagacatggcaggggatgtttaagagtctgttgcccaagtgcccaacttttctcataaacttaaacttttggatcaattggccggtgtagtcaaactaacagtagcattcctatgtctgcaatgttttccaaaacttcaccagctgggttcactggtaactagtgcaggttttatccagcaggttacaacttacaaaactgtgaagtcactcccatcatgtaacttttgaaattgctgcacatatgattgtcatttcataattctatggttgaactgtattgtatgattgttttaggctattggaccagagcttactttctatagtacatcaaggaatgctggtgaaaacttagcactgtcaacaaaggttattcatgcccacacagatgcattttgcaggtttggtattctactgtcctttgtctcaatgtacttttatcgattggtgcattactgaaagtgcatgatgcataactctcct

SEQ ID NO: 187461 - DNA, 358 bp, Zea Mays
tttatggaagatctgtgggagcgcattcaagctctttcccgtaatggatggaaagttaaaagcggtatgcaaagacaaccttttgccttaactgtctgtttcaatggcagtttgtatgcaagccgcaaactgatatttggtcattatctcataaatctcaattgtggatagaactcttgctcacatttttttgcaatttaaaatatttatcttattgttaaatgtgaagtcaggtttcattgtatgcaaaatcttgaacatgcttcactttatgtttgtgttcttattatggcaatggactggaatccaattacttccctggcagttccaaaaccccacttgccatttgaagctcagc

SEQ ID NO: 187462 - DNA, 349 bp, Zea Mays
gtccactacgccaggaaaggtacagggaaaaaggttggagtgcctttgctgcatgttgggcagcaaggcaacagctaaacatctgagtcagctagaagatagatttttcaccttctcaagtttatccctagtgatgtggaactagaacaggtgaaaccccctagccccatctcgagtcacagctagctgttacccgtcagatgtcactagaaacaatagtggaggaacatatttccttttagacatttgttcaactctgatcttcttcagcttgacaacaggaccagattcccctcctcttttctcatattttctcaaagggacagacctacctcatttacacattttt

SEQ ID NO: 187463 - DNA, 436 bp, Zea Mays
tgaagatgaaaagaagacaagaataagctctttgaagaaaaaagcaatagatgcatcaacaaagattaggcactcattaaaaaagactagaaggaagagtggtagtagggtcctttctgtgtctattgaggatgtgcgcgatctagaggagctgcaagctgttgaagcatttagacaagcattactcttggatgagctgttgcctgcaaggcatgacgactatcatatgatgctgaggtatatatccagtaaattatgttgtgccttttatttgtcttgacgtattctcattttatttttcaaagcacaagtgaccacctcaaccctaactaagtctgatttgtagatttctgaaggcaaggaaatttgatatcgataaagccaagcaaatgtggattgatatgcttcagtggcggagggagtatggcactgatac

SEQ ID NO: 187464 - DNA, 286 bp, Zea Mays
tggaagcagagctcggcatcagctgcgaccggtatttcgttgaggcgtgggtgatggacgcggaggatgggctgagagatgcgatcggtgttcatcccaaccaccctactcttgttctcggtcgcaagaatgaaggtgtcctcgcaagtgatgtggtacgtataccttgctattcgagctcagttccatccagtcatcggtagataccaccatttttactaacaaaactttcaatttccagtcggacgatactgatgctgattcagccacaagaagaacatgaggg

SEQ ID NO: 187465 - DNA, 609 bp, Zea Mays
accacctttggccagactttatagccaggaaaaccaaatagcagttagagttgtgcgtcacctttagccagctacaatcaaacaaacctccggtgcttcctctagccagggcgtttccagcctgggtttctagccatcctaccaaatagacccataatacactgacatccttttcgagaacctggcatactttaatttctttcaagtttttagaggaaggtaaccctcccctcaattcagaaggcgaatattcacagattatgagattcacattcgagcataaaattgagtgagaagcggtggcaattttgcatgttttgcttcctgtctttgtgtatgtctccggcgaaccatgacgcggcggcggtgctaccgcttctggcctccctttgtcccccacaaaaacatcaggcaaagggaggcattccgaagccggcgctcgggccgcacggcagacggacaaaagagcagcaaaccgagaagatcgagatgggaagagacacccacgcatctgacccttgcgtacgtgttgctgggctcatgggcagccatggccccgtccattactcttttgtacaatttgcctgatcatacgagtcaatggagccc

SEQ ID NO: 187466 - DNA, 284 bp, Zea Mays
ctgcgatgagcagtactcccgcggccacaatcgcacctgtcgccgcctcttctacgttgaaggcattgaactggagatggcagtcgacgccgcgggcgatgctgtcccagcggaggagggccccatctactccctacatgccgtggccggagtgccaaccttcgacacgctacaggtccgagcgttcctcaggaccgccgtgctggtcgccctcctcgacacgggatccacgcacaacttcatcggcgagcgtgcagcgtaccgctccgggatgcacatccaac

SEQ ID NO: 187467 - DNA, 1186 bp, Zea Mays
cccgatctgccgccgtcagccggcgcccgatctgctcctatactgtggcgcggaggcgcggagcagcaggcaagtgcccgtttccctttccccagtaccgcggtagattaggaaaccggtttgctccgctctgggtggatttgttctagaaaggaaggtagtttgtttatccgcggctgccggcttccgggatttcttattttcggcagcacgagttcttcggatcgggtttccatattatgttgttataaatccagccagtcaccactggcatccacgcgtcccctgttgtctcagtgacgactagagtctagttctgtctggtcccctttccttttgacaagggttcggagcggacatcacctcgagttcgagatgcagtttcctttgtggggattttgcgagatcctggaatcagcaattcctcgtctatgtccaccggagtctagatggaatactgacgtggacattcaaatttcgtgcggattttttccttacatggaaattgtttttgtttgattttgcatgaaccagtgcaatccctgtcaaatgctactaacgtctgtagttcatttctgctgctagaaattaaacattgtttatttggaccggaagtcgcagatacggtgaacgatgcaattcgttttatattcatatatgattgcatacaactaattacactcggccgttgttgcattttcgcacatccagtatcttcttccagcaagaattttgtgacaagacttccagttccttattcaattcctgatatctttgctttagattgtaaagctaggaatacaaatacaagatgggcgcgtcaagacccccaagcacccctgcatcgaagggtgagcacacaccgatgtcgactcctggtggcagctcaagggccaaggaggagaagatttttgttacggtgagggtgaggccactaagcaagaaggagctggctgcgaaggatgacgtggcatgggaatgcgctgatacccagacaatcttgtacaagggccccgcgcaggaccgagctgcacccatgtcttacacttttggtagtgtggcttgatcaattcacgagcaatgcaactcaagaaaattatgtttgcaatatgtcttttaattcctttccttccagataaagtgtttgggccagcttgccaaacagacgtcgtctatgaagagggag

SEQ ID NO: 187468 - DNA, 781 bp, Zea Mays
gtggaatcatgctaccgtaaaggccttgtccgtgttctgactgccacttcaactttagctgctggtgttaacttgcctgctagacgggttatattcaggcagcccaagataggtcgtgattttattgatgggactcgctatagacagatggctggtcgtgctggtcgaactggaatagacacaaaaggagaaagtgtaagctacaatatctttgttccactttattctattagagaatggttctgacatttcactagttctgttttaattgtgtttttaactttagcctaccccaactgcttgggagaaaagggctttgttgttgttgtctaataatctgacatttgaaatgcatgcagatacttgtatgcaggcctgaagaggtcaagagagttacaggtattattagaagcaattgccctcccttggagtcctgcctctcagaagataaaaatggaatgactcatgcaattatggaggttgttgctggtgggattgttcaaactgcaaatgatattcatcgttatgtgcggtgtacgctgcttaattccacaagaccttttgatgatgtcgtgaagtcagctcaagactcccttcgttggttatgccataaaagctttcttgagtggaaccatgagaccaagatatactccgctactccccttggtagagctgcttttggaagttcactcaaccctgaggaatcattggtagcatacttgtcttttgctccttcattattttattgcattgagaaagggcctctagctgagttggttag

SEQ ID NO: 187469 - DNA, 338 bp, Zea Mays
cccccctcatcggtgttttttattgttgcatatcaattttgtggctcaaatgcccctttgaaacatatagcaccaaaattatcctaattaattaattggtttctaactggctactctatttgcaacaatggggatatataaccttaccatgtctgtttatcacagtgcatcttagattgcatcgtattgtaattgttttagttccttgacatactgtttgtgcaacaggaactgcttgatgtacttacggttgggtatctgtgtagatgtagctgccaagttgtctaaagaaaagttcctgacctttcacatgctgccacattgccacaataccttaa

SEQ ID NO: 187470 - DNA, 1633 bp, Zea Mays
cccaggccgaaattaccgaagcgcccctcgccatttaaccatctcatctcctcacctcctcgacggcgcgactccctcgacctcgccctcctccccccgccttgacgctgtcgcctggtcctccgcggtcggctgtctcgattcgatcggtaagcgccgatttcgttccgagcgcctccgttcccttgcccagcaggccgcagcccgcgggaggcccgcgcgtgcgctgccctgtcttacccgcggaatttatggggtgatgggtgtactgatgtgattgcggcggcagaggctcgtgatttgtgcctggttttgtttttttttggggggggggggggggggggcttatttctgttggctgggaggctcggactgcagttcttcattgccggggctgttggcctgttggggccacgggatggtctgcacaaaatcacctgttcagtcttgactcgaccaagagctctatttgtcaagcggcgtaattggtgaaattctatctggagtacagagtggacaattgaggtcgataaatagagaggaacatttctggggcaattatctgttggaatggtatggctgttaggtttgtttgtttgcactcctctttgggagcaccggagcagcatagcactgtgaatcattttattgtttccaatgataagagtgagccattgagtttgggtagatcggtagatgtattgatgctgtcataccaaattcacattggttttttagtctgtatgggatttgttggtcgccattttgtggaaaatatgtagatatgtcattctgcttgaccctatgtacctgtgtttctctggcttgcaattgcaattgtagctgggtcaaaccacatctctttactcacattttttcctgcttatattgtttgttctgatcgacatgaatttgtattgaaagagaatgtgacagtgggttagtctgtatgaaacttcagctaatggttgttgctcaatagtttagatgtggtatctcttcagtaatagcagtttacttcgatgagttttactatatccaccatctggtaacaatttagtgatgtttaacttattgaagccattagggtgtgacttgaaccagtctgtgtttcccatactttttctatgtttctaggagctacataatatgattggagagcagagaaatccacccactatttttgttgtgccaaccgcttgtatgtatgatgctggttaaacttagggaagttcagcaaggcgcactgcttcatatcgttttattgctgaggtggtataaggaaatctattaacattgacaattgggtaaatgacttgatttggtgtttcaccttaatcattaagcatagacatgttttttttgtatatcctgctagtatatcaggtggggtttgaaaagctgtgttaaactaccactaattcagtttctgttttaaagggaaaatagtggcatgtggccttgtcatttttctgtttttctgggattatcatcagtttattttcattattaggtatattacaagcaacttgttattctgatcatacgatcaactttatattctgtcactcattgttgtttctgtgttcttcctcatgtagtaatacatcgacaataggattgaatcacttct

SEQ ID NO: 187471 - DNA, 292 bp, Zea Mays
acttatttgatctagtgaaacctagttatctattagtaaaaattaattactgacaagtatacaggtgcatcatgaaaaccaaagattaagtgtgatcaggtagagctagagcaaatttgagggggtgtacttgtcttgcgggtgcatagctttttagtatgaaggtgcagatgaggtgaaaaattgatcataatcactgtttttcatttttgctgtgggtgcgctcgcgccacagttttatacatagtagctccgcccctgaatgagataaataattaaatcttagtttttc

SEQ ID NO: 187472 - DNA, 347 bp, Zea Mays
aaaaacttcttagttctcttctgcagttgcaccgagaagttaggttgtgcatatcacgttccattttatacctcctacccttccctctcaatctctctctgtctaacaatgtctgcaattctattcttgcagcccgaggctagcagcttgtgctgcagatttgtccttcatgtttcctacttttgctataggttttggtgttgtttgtcatcttatcacgtcagcacttgcttgctggccgttgtataattgggcacctggtctgtttcattgccttcttgaaaataccgaggctactaatgcgtccgtaccattgggcccgaaggctgcttttagtctgctttgtc

SEQ ID NO: 187473 - DNA, 475 bp, Zea Mays
cccgtccctgccggcgtccatggcggcgatcgacggcctggaaacctagatccgagcaccttctgcaaagcaaggcgcataaacttcacaacttttgtcgccccacctcgtagcgcctgcccgcaccaaatgcctcgcagtccagtcgatattgtaccccgcgtcgcggagcgaggaaaaagaaggcgaatcgatgtgtggccggatctccgtggcgaagaataccagcaccgatgaccgaaccgggaggaggaaaggaacactgacacaaacaataacttgaacaccacgaacaccgccgcgacggatgggtgggtaaaaggcgacgaagaagaagagggcaaggatagggatgtggaggagagattggggaagccgcaagccaggaacagcaacgggaagggcaactgctcgaactgggacgattattacccacgcgctgcggcgctggggattgggtttggatcgctgctgc

SEQ ID NO: 187474 - DNA, 378 bp, Zea Mays
gttagaaagtcctctatatccttccacaagaatggcgatacgggtgccttccctaggatttcatttctctcctgcacgctatcatcgtttaatggaaattttaaaattttttcaagatggtgctagtgataatagcaattcagatcatgaacacttgtgggatcatgctgactttgaaggatggtcatctcttctcacatggaaggtttacattttttaagtttgtcatgaatgttcaatcattttggaattatgttcttactctaaattattttcgtgacctgctgttagggtgttggaaaccgggaagctgtttggcaacacagatatttgcgtctagtgggtccatttctctatgtatttgaaaatttaatgtct

SEQ ID NO: 187475 - DNA, 419 bp, Zea Mays
agttccgcccacccatgtcagaggttgtccagcaacttgtgcgcttgatgcagagggctagcatcgtgaggcggcaatcaggagaagagctagggttttcatacagagtcccagaacgagaaggagacctgagagacatttccttctgagcaagtgcgtccacgatagaagcgcaaaacagtttggaggcttaatgtgcaaagaaaatatctagagcactcgtatagtcatatcgattggagaactcgagctgaccgcaacaattcaggatcggatgagttttgagaagataatttcgttgcctattgttcaactttgttcattcttctacattcgtctcattttcagtcagtatacttgttgcagctgtatttaaaacgagactcaaattgatggtggtgtatagctgattattggta

SEQ ID NO: 187476 - DNA, 300 bp, Zea Mays
gtaagaatcactctgccattagaagctctgatgaaggattctaatgaggcattcgactctcagcgctacctccgcaacaagaggaaaaggagaagatcgaagaaaggaaaggaacgctctgtcgtcggcaccagtgcgagacatgagtctcccatcccacctgatgatgctgatgccaaccgctctccgaaggtgcaatgctggccgtgggacttccagccgttgccagatgcttcaattgatgcttcatgtgttatggttttttctgatgagatggttcgtgaggaagttcgcttcgcc

SEQ ID NO: 187477 - DNA, 559 bp, Zea Mays
gggaatcattgttggatcaaaagacatctagcaatagcccacctgtaggcagaagtagcactgggacaagcaataccaccccaccattagctacaggctctcgtagtcagagtaggatgtataggtactatcggagtccaagtgtgactcagaacatatgtgatatagatttgcaatgcagtaagatgtcaacacaacctaggatagacattatgctacatgggggtgccaaagagagacttggtaaaacttaggcaaaatggttccatgccaatgatattcctggaagcaaagcagactgtccatattttatagcagcagtaaaactatctcagcagcttggggaaggagtgcctgttccaaggggaagagatatagatgggtcattactaaatatgaactatgaggacctacaaactcgcatggaccgataaaaggaagattgaggttgctttagggtcactattatgtgtgattcatggacagggccaaccatgatgtgcattattaattttatgatttgttgcaatggtcgcatgttttttcataaaaccgtgga

SEQ ID NO: 187478 - DNA, 1845 bp, Zea Mays
ggagtccagcgattccgaggccgacgagttctgcatctccacgcggcagaatgctagtggtgccgcgtcgttgggcaatgctggtgtcagcagccaaggcagtggcgatcggtcggaggagaaacctgtgacttctagtcctgagaagcttccaggggttaagtccagtgatgtagatggttcagacaagaaaacgggagttcagctggagagcagtagttcgcagcctgctgtcaagaggatcagagttgagactgtccatggtgatggcaatggatgcagtggaggcgcatctaagtgtgggactggtggaaaaatgctgcctcgggggctcccagcatggcggtttgagaggccagaagtaaggggagggcgtgttctggatgacaaaggtggggtgagtatgaaagcaagcagtgcttcaaagatgaaggagcaggtatcaagtttgggtgacaagagacaggcagagctgcagaaacatgaaagaaggacaccattgaagactgatcagggcaaagcaatcgattctggccaacaggaggttttaaggttgcaagggaaaaggggtgttttaaggatattgccaaagaatgataaggtgaccagggatactggtgatggtaagattctgtcaaggcaaactgaggtggatgaggagactggtaatggcaggattccaacaaagcgaggtgttttaaagctcctgccgaagaacaatggtgctgtgatggagagtaatgaatgcaagcttctgtccaagaaggttaaggtggatgaggaaactggggatgacaagatgccaatgaagaaaactaaggtggttgataaggagaccagtgatggcaagattcttgcaattacaactaacttggatgcagagtttggtggccataagttgccaatgaagaactgtactgtggacatggaaactgttgctgggaagtttcagcaaaagaacagtaaggcagatggagaaaccaaagggagatataaaggatatgaagagaaaagtggcgcccctgcagaatttcagaagcatgatgcaaatggtgagaagagagttctgggaaagctactctctcccgttgcgctgaggaaaagtgatccaagcgtagtgggagtttctttgggccagagaatgaaacaacaaaattcaaagcaacaactgaagaactattctctgagcttgaaagatgatagcactaaatcaagtgaacagaagaatctgaaaaaaagattgcttgagcataaagggtcatcagagagtttgtcaaagaaggcacaactgaaagctgttgatcagcaagccacatctggccctgtgctcaacaagcttgaaaagaagccaagaggaggacccctcaacaaacataagcaggatctcaggaacaagataaaacatgtgcttttagataatgggtggaaaattgacctaaggcagaggaaaaacaaagattatgaagactcagtctatgtttctcctaccgggactggctattggtcaatcactaaggcttatgcagttttccaagaacagtttcaaaatatgggtcgctcatctaaacttaataatactaaaccaggtgcttcagatgctatatcgaaggatgatctagcattgctaaaaaagaatatagtaaagagaaggactaataaggaaatttgtggtgctgaaaagaaacctggggttagcagaaacagaagctctaaagatatccttgctaatagagattttagaaacaagcatcagaacaaggaggatagggtaaaaattaaagatcggagatgtgggcttcttgtccgtgggagtacccatgatactgaagataacatggatggcta

SEQ ID NO: 187479 - DNA, 290 bp, Zea Mays
ccacattatctttggttctgaaaggagtacttacataagctctcgctttgtttgtgatttccctctgcttcgtgattttctttgcttatacatttcaattccacatgttcccagaaatgtagctatgcacacttgttgcaacaatcaacaaaaaatccactctcaagtctcaaatgaaacatgttttaacatctacattacatatgttcccacaattaaacagttgtctacccttgttgcaacaaaaaacacatattacaatccacacttgcttcatacatggtcttggc
